(19) United States
(12) Patent Application Publication
(10) Pub. No.: US 2024/0301444 A1
(43) Pub. Date: Sep. 12, 2024

(54) GENOME EDITING COMPOSITIONS AND METHODS FOR TREATMENT OF CYSTIC FIBROSIS

(71) Applicant: PRIME MEDICINE, INC., Cambridge, MA (US)

(72) Inventors: Andrew V. ANZALONE, Cambridge, MA (US); Aaron Nakwon CHANG, Lexington, MA (US); Linghe XI, Cambridge, MA (US); Dewi HARJANTO, Brookline, MA (US)

(21) Appl. No.: 18/431,323

(22) Filed: Feb. 2, 2024

Related U.S. Application Data
(63) Continuation of application No. PCT/US2022/074642, filed on Aug. 5, 2022.
(60) Provisional application No. 63/229,827, filed on Aug. 5, 2021.

(51) Int. Cl. C12N 15/90; C12N 9/22; C12N 15/11

(52) U.S. Cl. CPC C12N 15/90; C12N 9/22; C12N 15/11; C12N 2310/20; C12N 2310/531

(57) ABSTRACT

Provided herein are compositions and methods of using prime editing systems comprising prime editors and prime editing guide RNAs for treatment of genetic disorders such as cystic fibrosis.

### CROSS-REFERENCE

[0001] This application is a continuation of International Application No. PCT/US22/74642, filed on Aug. 5, 2022, which claims the benefit of U.S. Provisional Application No. 63/229,827, filed Aug. 5, 2021, each of which applications are incorporated herein by reference in its entirety.

### SEQUENCE LISTING

[0002] The instant application contains a Sequence Listing which has been submitted electronically in XML file format and is hereby incorporated by reference in its entirety. Said XML copy, created on Aug. 4, 2022, is named 59761743601_SL.xml and is 19,326,690 bytes in size.

### BACKGROUND

[0003] Cystic fibrosis (CF) is one of the most common genetic disease, particularly in the Caucasian population. CF is caused by mutations in the cystic fibrosis transmembrane conductance regulator (CFTR/ABCC7) gene. Mutations in the CFTR gene results in defective biosynthesis, trafficking, and/or activity of the CFTR protein, causing severe damage to the lungs, pancreas, liver, intestines, sinuses, and limited ability to breath overtime. While technological advances have increased the life expectancy of certain CF patients, numerous mutations remain non-responsive to currently existing therapies, and there is still no effective cure for the disease.

[0004] This disclosure provides prime editing methods and compositions for correcting mutations in the CFTR gene associated with Cystic fibrosis.

### SUMMARY OF THE DISCLOSURE

[0005] Provided herein, in some embodiments, are methods and compositions for prime editing of alterations in a target sequence in a target gene, for example, a CFTR gene. The target CTFR gene may comprise double stranded DNA. As exemplified in FIG. 1, in some embodiment, the target gene, e.g., a CFTR gene, is edited by prime editing. In some embodiments, the prime editing described herein results in efficient correction of one or more pathogenic mutations in the CFTR gene, thereby treating cystic fibrosis in a subject.

[0006] Without wishing to be bound by any particular theory, the prime editing process may search specific targets and edit endogenous sequences in a target gene, e.g., the CFTR gene. As exemplified in FIG. 1, the spacer sequence of a PEgRNA recognizes and anneals with a search target sequence in a target strand of the target gene. A prime editing complex may generate a nick in the target gene on the edit strand which is the complementary strand of the target strand. The prime editing complex may then use a free 3′ end formed at the nick site of the edit strand to initiate DNA synthesis, where a primer binding site (PBS) of the PEgRNA complexes with the free 3′ end, and a single stranded DNA is synthesized using an editing template of the PEgRNA as a template. The editing template may comprise one or more nucleotide edits compared to the endogenous target CFTR gene sequence. Accordingly, the newly-synthesized single stranded DNA also comprises the nucleotide edit(s) encoded by the editing template. Through removal of an editing target sequence on the edit strand of the target gene and DNA repair, the intended nucleotide edit(s) included in the newly synthesized single stranded DNA are incorporated into the target CFTR gene.

[0007] One embodiment provides a prime editing guide RNA (PEgRNA) comprising: a spacer that is complementary to a search target sequence on a first strand of a CFTR gene, an editing template that comprises a region of complementarity to an editing target sequence on a second strand of the CFTR gene, and a gRNA core that associates with a prime editor comprising a DNA binding domain and a DNA polymerase domain, wherein the first strand and second strand are complementary to each other, and wherein the editing target sequence is in an exon selected from the group consisting of: exon 1, exon 2, exon 3, exon 4, exon 5, exon 6, exon 7, exon 8, exon 9, exon 10, exon 12, exon 13, exon 14, exon 15, exon 16, exon 17, exon 18, exon 19, exon 20, exon 21, exon 22, exon 23, exon 24, exon 25, exon 26, or exon 27 of the CFTR gene.

[0008] One embodiment provides a prime editing guide RNA (PEgRNA) comprising: a spacer that that is complementary to a search target sequence on a first strand of an CFTR gene, an editing template that comprises a region of complementarity to an editing target sequence on a second strand of the CFTR gene, and a gRNA core that associates with a prime editor comprising a DNA binding domain and a DNA polymerase domain, wherein first strand and second strand are complementary to each other, and wherein if the editing target sequence is in exon 11 then the editing target sequence does not comprise a CTT deletion at positions chr7:117559591-117559594 as compared to a wild type CFTR gene.

[0009] One embodiment provides a prime editing guide RNA (PEgRNA) comprising: a spacer that is complementary to a search target sequence on a first strand of an CFTR gene, an editing template that comprises a region of complementarity to an editing target sequence on a second strand of the CFTR gene, and a gRNA core that associates with a prime editor comprising a DNA binding domain and a DNA polymerase domain, wherein first strand and second strand are complementary to each other, and wherein the editing target sequence is between positions 117480095-117548823 and positions 117587739-117665564 of human chromosome 7.

[0010] One embodiment provides a prime editing guide RNA (PEgRNA) comprising: a spacer that is complementary to a search target sequence on a first strand of a CFTR gene, an editing template that comprises a region of complementarity to an editing target sequence on a second strand of the CFTR gene, and a gRNA core that associates with a prime editor comprising a DNA binding domain and a DNA polymerase domain, wherein first strand and second strand are complementary to each other, wherein the editing target sequence comprises a mutation associated with cystic fibrosis, and wherein the mutation is not a CTT deletion at positions chr7:117559591-117559594 as compared to a wild type CFTR gene.

[0011] In some embodiments, the PEgRNA comprises a primer binding site sequence (PBS) at least partially complementary to the spacer. In some embodiments, the gRNA core is between the spacer and the editing template. In some embodiments, the editing template comprises an intended nucleotide edit compared to the CFTR gene. In some embodiments, the PEgRNA guides the prime editor to incorporate the intended nucleotide edit into the CFTR gene when contacted with the CFTR gene. In some embodiments, the prime editor synthesizes a single stranded DNA encoded by the editing template, wherein the single stranded DNA replaces the editing target sequence and results in incorporation of the intended nucleotide edit into a region corresponding to the editing target in the CFTR gene. In some embodiments, the search target sequence is complementary to a protospacer sequence in the CFTR gene, and wherein the protospacer sequence is adjacent to a search target adjacent motif (PAM) in the CFTR gene. In some embodiments, the PEgRNA results in incorporation of the intended nucleotide edit in the PAM when contacted with the CFTR gene. In some embodiments, the PBS is about 2 to 20 base pairs in length. In some embodiments, the PBS is about 8 to 16 base pairs in length. In some embodiments, the editing template is about 4 to 30 base pairs in length. In some embodiments, the editing template is about 10 to 30 base pairs in length. In some embodiments, the PEgRNA results in incorporation of intended nucleotide edit about 0 to 27 base pairs downstream of the 5′ end of the PAM when contacted with the CFTR gene. In some embodiments, the intended nucleotide edit comprises a single nucleotide substitution compared to the region corresponding to the editing target in the CFTR gene. In some embodiments, the intended nucleotide edit comprise an insertion compared to the region corresponding to the editing target in the CFTR gene. In some embodiments, the intended nucleotide edit comprises a deletion compared to the region corresponding to the editing target in the CFTR gene. In some embodiments, the editing target sequence comprises a mutation associated with cystic fibrosis. In some embodiments, the editing template comprises a wild type CFTR gene sequence. In some embodiments, the PEgRNA results in correction of the mutation when contacted with the CFTR gene. In some embodiments, the editing target sequence is between positions 117509034 and 117509142 of human chromosome 7. In some embodiments, the editing target sequence is between positions 117530899 and 117531114 of human chromosome 7. In some embodiments, the editing target sequence is between positions 117540100 and 117540346 of human chromosome 7. In some embodiments, the editing target sequence is between positions 117548641 and 117548823 of human chromosome 7. In some embodiments, the editing target sequence is between positions 117559464 and 117559655 of human chromosome 7. In some embodiments, the editing target sequence is between positions 117587739 and 117587833 of human chromosome 7. In some embodiments, the editing target sequence is between positions 117591934 and 117592657 of human chromosome 7. In some embodiments, the editing target sequence is between positions 117614613 and 117614713 of human chromosome 7. In some embodiments, the editing target sequence is between positions 117627522 and 117627770 of human chromosome 7. In some embodiments, the editing target sequence is between positions 117642438 and 117642593 of human chromosome 7. In some embodiments, the editing target sequence is between positions 117652842 and 117652931 of human chromosome 7. In some embodiments, the editing target sequence comprises a mutation that encodes an amino acid substitution selected from a group consisting of G85E, R117H, R334W, R347P, R347H, A445E, G542*, S549N, G551D, R553*, K684fs, D1152H, R1158*, R1162*, K1177R, W1282*, and N1303K as compared to a wild type CFTR protein as set forth in SEQ ID NO: 19, wherein * refers to a nonsense mutation and fs refers to a frameshift mutation.

[0012] One embodiment provides a PEgRNA system comprising the PEgRNA according to this disclosure and further comprising a nick guide RNA (ngRNA), wherein the ngRNA comprises an ng spacer that is complementary to a second search target sequence in the CFTR gene. In some embodiments, the second search target sequence is on the second strand of the CFTR gene.

[0013] One embodiment provides a prime editing guide RNA (PEgRNA) comprising: a spacer comprising a sequence selected from the group consisting of SEQ Identifiers A330-A334, A343-A361, and A364-A380, an editing template that comprises a region of complementarity to an editing target sequence on an edit strand of a CFTR gene, and a gRNA core that associates with a prime editor comprising a DNA binding domain and a DNA polymerase domain, wherein the first strand and second strand are complementary to each other, and wherein the editing target sequence comprises a CTT deletion at positions chr7:117559591-117559594 as compared to a wild type CFTR gene. In some embodiments, the PEgRNA comprises a primer binding site sequence (PBS) that is at least partially complementary to the spacer. In some embodiments, the PBS comprises a sequence selected from the group consisting of SEQ Identifiers: B1377-B1403, B1413-B1520, and B1530-B1565. In some embodiments, the editing template comprises a sequence selected from the group consisting of SEQ Identifiers: C4592-C4964 and C4976-C5414.

[0014] One embodiment provides a prime editing guide RNA (PEgRNA) comprising: a spacer comprising a sequence selected from the group consisting of SEQ ID NOs. 678-682, 691-709, and 712-728, an editing template that comprises a region of complementarity to an editing target sequence on an edit strand of a CFTR gene, and a gRNA core that associates with a prime editor comprising a DNA binding domain and a DNA polymerase domain, wherein the first strand and second strand are complementary to each other, and wherein the editing target sequence comprises a CTT deletion at positions chr7:117559591-117559594 as compared to a wild type CFTR gene. In some embodiments, the PEgRNA comprises a primer binding site sequence (PBS) that is at least partially complementary to the spacer. In some embodiments, the PBS comprises a sequence selected from the group consisting of SEQ ID NOs: 2284-2304, 2312-2395, and 2403-2430. In some embodiments, the PEgRNA comprises a PBS comprising a sequence selected from the group consisting of sequences ATAATCCA, ATAATCCAG, CATAATCC, CATAATCCA, TGGTGCCA, TGGTGCCAG, TATTTTCT, TATTTTCTT, ATATTTTC, ATATTTTCT, GATATTTT, GATATTTTC, ATGAATAT, ATGAATATA, GCGTCATC, GCGTCATCA, TAATCCAG, TAATCCAGG, GTGTTTCC, GTGTTTCCT, TGAATATA, TGAATATAG, GATGAATA, GATGAATAT, ATGGTGCC, ATGGTGCCA, TGTTTCCT, TGTTTCCTA, TCCAGGAA, TCCAGGAAA, ATGATATT, ATGATATTT, TGATATTT, TGATATTTT, TCAAAGCA, TCAAAGCAT, GATGATAT, and GATGATATT. In some embodiments, the editing template comprises a sequence selected from the group consisting of SEQ ID NOs: 8618-8990 and 9002-9440.

[0015] One embodiment provides a prime editing complex comprising: (i) the PEgRNA of any one of the above embodiments or the PEgRNA system of any one of the above embodiments; and (ii) a prime editor comprising a DNA binding domain and a DNA polymerase domain. In some embodiments, the DNA binding domain is a CRISPR associated (Cas) protein domain. In some embodiments, the Cas protein domain has nickase activity. In some embodiments, the Cas protein domain is a Cas9. In some embodiments, the Cas9 comprises a mutation in an HNH domain. In some embodiments, the Cas9 comprises a H840A mutation in the HNH domain. In some embodiments, the Cas protein domain is a Cas12b. In some embodiments, the Cas protein domain is a Cas12a, Cas12b, Cas12c, Cas12d, Cas12e, Cas14a, Cas14b, Cas14c, Cas14d, Cas14e, Cas14f, Cas14g, Cas14h, Cas14u, or a CasΦ. In some embodiments, the DNA polymerase domain is a reverse transcriptase.

[0016] In some embodiments, the reverse transcriptase is a retrovirus reverse transcriptase. In some embodiments, the reverse transcriptase is a Moloney murine leukemia virus (M-MLV) reverse transcriptase. In some embodiments, the DNA polymerase and the programmable DNA binding domain are fused or linked to form a fusion protein. In some embodiments, the fusion protein comprises the sequence of any one of SEQ ID NOs: 15, 341, 342, or 343.

[0017] One embodiment provides a lipid nanoparticle (LNP) or ribonucleoprotein (RNP) comprising the prime editing complex of any one of the above embodiments, or a component thereof. A polynucleotide encoding the PEgRNA of any one of the above embodiments, the PEgRNA system of any one of the above embodiments, or the fusion protein of any one of the above embodiments. In some embodiments, the polynucleotide is a mRNA. In some embodiments, the polynucleotide is operably linked to a regulatory element. In some embodiments, the regulatory element is an inducible regulatory element.

[0018] One embodiment provides a vector comprising the polynucleotide of any one of the above embodiments. In some embodiments, the vector is an AAV vector. One embodiment provides an isolated cell comprising the PEgRNA of any one of the above embodiments, the PEgRNA system of any one of the above embodiments, the prime editing complex of any one of the above embodiments, the LNP or RNP of the above embodiment, the polynucleotide of any one of the above embodiment or the vector of any one of the above embodiments. In some embodiments, the cell is a human cell. In some embodiments, the cell is a fibroblast, an organoid cell, a basal cell, a club cell, an ionocyte, or an epithelial cell.

[0019] One embodiment provides a pharmaceutical composition comprising (i) the PEgRNA of any one of the above embodiments, the PEgRNA system of any one of the above embodiments, the prime editing complex of any one of the above embodiments, the LNP or RNP of above embodiment, the polynucleotide of any one of the above embodiments, the vector of any one of the above embodiments, or the cell of any one of the above embodiments; and (ii) a pharmaceutically acceptable carrier.

[0020] One embodiment provides a method for editing a CFTR gene, the method comprising contacting the CFTR gene with (i) the PEgRNA of any one of the above embodiments or the PEgRNA system of any one of the above embodiments and (ii) a prime editor comprising a DNA binding domain and a DNA polymerase domain, wherein the PEgRNA directs the prime editor to incorporate the intended nucleotide edit in the CFTR gene, thereby editing the CFTR gene.

One embodiment a method for editing an CFTR gene, the method comprising contacting the CFTR gene with the prime editing complex of any one of the above embodiments, wherein the PEgRNA directs the prime editor to incorporate the intended nucleotide edit in the CFTR gene, thereby editing the CFTR gene.

[0021] In some embodiments, the prime editor synthesizes a single stranded DNA encoded by the editing template, wherein the single stranded DNA replaces the editing target sequence and results in incorporation of the intended nucleotide edit into a region corresponding to the editing target in the CFTR gene. In some embodiments, wherein the CFTR gene is in a cell. In some embodiments, the cell is a mammalian cell. In some embodiments, the cell is a human cell. In some embodiments, the cell is a fibroblast, organoid cell, a basal cell, a club cell, an ionocyte, or an epithelial cell. In some embodiments, the cell is in a subject. In some embodiments, wherein the subject is a human. In some embodiments, the cell is from a subject having cystic fibrosis. In some embodiments, the method further comprises administering the cell to the subject after incorporation of the intended nucleotide edit.

[0022] One embodiment provides a cell generated by the method of any one of the above embodiments. One embodiment provides a population of cells generated by the method of any one of the above embodiments. One embodiment provides a method for treating cystic fibrosis in a subject in need thereof, the method comprising administering to the subject (i) the PEgRNA of any one of the above embodiments or the PEgRNA system of any one of the above embodiments and (ii) a prime editor comprising a DNA binding domain and a DNA polymerase domain, wherein the PEgRNA directs the prime editor to incorporate the intended nucleotide edit in the CFTR gene in the subject, thereby treating cystic fibrosis in the subject.

[0023] One embodiment provides a method for treating cystic fibrosis in a subject in need thereof, the method comprising administering to the subject the prime editing complex of any one of the above embodiments, the LNP or RNP of the above embodiment, or the pharmaceutical composition of claim 64, wherein the PEgRNA directs the prime editor to incorporate the intended nucleotide edit in the CFTR gene in the subject, thereby treating cystic fibrosis in the subject. In some embodiments, the subject is a human.

### INCORPORATION BY REFERENCE

[0024] All publications, patents, and patent applications mentioned in this specification are herein incorporated by reference to the same extent as if each individual publication, patent, or patent application was specifically and individually indicated to be incorporated by reference.

### BRIEF DESCRIPTION OF THE DRAWINGS

[0025] The novel features of the disclosure are set forth with particularity in the appended claims. A better understanding of the features and advantages of the present disclosure will be obtained by reference to the following detailed description that sets forth illustrative embodiments, in which the principles of the disclosure are utilized, and the accompanying drawings of which:

[0026] FIG. 1 depicts a schematic of a prime editing guide RNA (PEgRNA) binding to a double stranded target DNA sequence.

[0027] FIG. 2 depicts a PEgRNA architectural overview in an exemplary schematic of PEgRNA designed for a prime editor.

[0028] FIG. 3 is a schematic showing the spacer and gRNA core part of an exemplary guide RNA, in two separate molecules. The rest of the PEgRNA structure is not shown.

### DETAILED DESCRIPTION OF THE DISCLOSURE

[0029] Provided herein, in some embodiments, are compositions and methods to edit the target gene cystic fibrosis transmembrane conductance regulator (CFTR ABCC7) with prime editing. In certain embodiments, provided herein are compositions and methods for correction of mutations in the CFTR gene associated with cystic fibrosis. Compositions provided herein can comprise prime editors (PEs) that may use engineered guide polynucleotides, e.g., prime editing guide RNAs (PEgRNAs), that can direct PEs to specific DNA targets and can encode DNA edits on the target gene CFTR that serve a variety of functions, including direct correction of disease-causing mutations associated with cystic fibrosis.

[0030] The following description and examples illustrate embodiments of the present disclosure in detail. It is to be understood that this disclosure is not limited to the particular embodiments described herein and as such can vary. Those of skill in the art will recognize that there are numerous variations and modifications of this disclosure, which are encompassed within its scope. Although various features of the present disclosure can be described in the context of a single embodiment, the features can also be provided separately or in any suitable combination. Conversely, although the present disclosure can be described herein in the context of separate embodiments for clarity, the present disclosure can also be implemented in a single embodiment.

### Definitions

[0031] Unless defined otherwise, all technical and scientific terms used herein have the same meaning as is commonly understood by one of ordinary skill in the art.

[0032] The terminology used herein is for the purpose of describing particular embodiments only and is not intended to be limiting. As used herein, the singular forms “a”, “an” and “the” are intended to include the plural forms as well, unless the context clearly indicates otherwise. Furthermore, to the extent that the terms “including”, “includes”, “having”, “has”, “with”, or variants thereof as used herein mean “comprising”.

[0033] Unless otherwise specified, the words “comprising”, “comprise”, “comprises”, “having”, “have”, “has”, “including”, “includes”, “include”, “containing”, “contains” and “contain” are inclusive or open-ended and do not exclude additional, unrecited elements or method steps.

[0034] Reference to “some embodiments”, “an embodiment”, “one embodiment”, or “other embodiments” means that a particular feature or characteristic described in connection with the embodiments is included in at least one or more embodiments, but not necessarily all embodiments, of the present disclosure.

[0035] The term “about” or “approximately” means within an acceptable error range for the particular value as determined by one of ordinary skill in the art, which will depend in part on how the value is measured or determined, i.e., the limitations of the measurement system. For example, “about” can mean within 1 standard deviation, per the practice in the art. Alternatively, “about” can mean a range of up to 20%, up to 10%, up to 5%, or up to 1% of a given value. Alternatively, particularly with respect to biological systems or processes, the term can mean within an order of magnitude, preferably within 5-fold, and more preferably within 2-fold, of a value. Where particular values are described in the application and claims, unless otherwise stated, the term “about” meaning within an acceptable error range for the particular value should be assumed.

[0036] As used herein, a “cell” can generally refer to a biological cell. A cell can be the basic structural, functional and/or biological unit of a living organism. A cell can originate from any organism having one or more cells. Some non-limiting examples include: a prokaryotic cell, eukaryotic cell, a bacterial cell, an archaeal cell, a cell of a single-cell eukaryotic organism, a protozoa cell, a cell from a plant, an animal cell, a cell from an invertebrate animal (e.g. fruit fly, cnidarian, echinoderm, nematode, etc.), a cell from a vertebrate animal (e.g., fish, amphibian, reptile, bird, mammal), a cell from a mammal (e.g., a pig, a cow, a goat, a sheep, a rodent, a rat, a mouse, a non-human primate, a human, etc.), et cetera. Sometimes a cell may not originate from a natural organism (e.g., a cell can be synthetically made, sometimes termed an artificial cell).

[0037] In some embodiments, the cell is a human cell. A cell may be of or derived from different tissues, organs, and/or cell types. In some embodiments, the cell is a primary cell. As used herein, the term primary cell means a cell isolated from an organism, e.g., a mammal, which is grown in tissue culture (i.e., in vitro) for the first time before subdivision and transfer to a subculture. In some non-limiting examples, mammalian primary cells which can be transfected and further passaged include hepatocytes, fibroblasts, keratinocytes, epithelial cells (e.g., mammary epithelial cells, intestinal epithelial cells), endothelial cells, glial cells, neural cells, formed elements of the blood (e.g., lymphocytes, bone marrow cells), muscle cells and precursors of these somatic cell types. In some embodiments, the cell is a primary cell. In some embodiments, the cell is a human primary cell. In some embodiments, the cell is a pluripotent stem cell. In some embodiments, the cell is an induced human pluripotent stem cell (iPSC). In some embodiments, the cell is a lung progenitor cell. In some embodiments, the cell is a basal cell. In some embodiments, the cell is a basal cell from the respiratory epithelium, e.g., from the bronchioles or alveoli of the lung. In some embodiments, the cell is a club cell. In some embodiments, the cell is a ciliated cell. In some embodiments, the cell is an ionocyte. In some embodiments, the cell is a human basal cell. In some embodiments, the cell is a human basal cell from the respiratory epithelium, e.g., from the bronchioles or alveoli of the lung. In some embodiments, the cell is a human club cell. In some embodiments, the cell is a human ciliated cell. In some embodiments, the cell is a human ionocyte. In some embodiments, the cell is a bronchioalveolar stem cell. In some embodiments, the cell is a human bronchioalveolar stem cell. In some embodiments, the cell is a human lung progenitor cell. In some embodiments, the cell is an epithelial cell. In some embodiments, the cell is an airway epithelial cell. In some embodiments, the cell is a human airway epithelial cell. In some embodiments, the cell is a bronchial epithelial cell. In some embodiments, the cell is a human bronchial epithelial cell. In some embodiments, the cell is a human bronchial epithelial cell induced from iPSC. In some embodiments, the cell is a pancreatic epithelial cell. In some embodiments, the cell is a pancreatic ductal epithelia cell. In some embodiments, the cell is a pancreatic acinar cell. In some embodiments, the cell is a human pancreatic epithelial cell. In some embodiments, the cell is a human pancreatic ductal epithelia cell. In some embodiments, the cell is a human pancreatic acinar cell. In some embodiments, the cell is a hepatocyte. In some embodiments, the cell is a human hepatocyte. In some embodiments, the cell is a kidney epithelial cell. In some embodiments, the cell is an intestine epithelial cell. In some embodiments, the cell is a human kidney epithelial cell. In some embodiments, the cell is a human intestine epithelial cell. In some embodiments, the cell is a fibroblast. In some embodiments, the cell is a human fibroblast. In some embodiments, the cell is a lymphocyte. In some embodiments, the cell is a human lymphocyte. In some embodiments, the cell is a tuft cell. In some embodiments, the cell is a neuroendocrine cell. In some embodiments, the cell is a goblet cell. In some embodiments, the cell is a reproductive tissue epithelial cell. In some embodiments, the cell is a sperm canal epithelial cell. In some embodiments, the cell is a human tuft cell. In some embodiments, the cell is a human neuroendocrine cell. In some embodiments, the cell is a human goblet cell. In some embodiments, the cell is a human reproductive tissue epithelial cell. In some embodiments, the cell is a human sperm canal epithelial cell. In some embodiments, the cell is derived from a human subject. In some embodiments, the cell is derived from a human subject having a disease or condition associated with a target gene, e.g., CFTR. In some embodiments, the cell is a part of an organoid, e.g., an intestinal organoid. In some embodiments, the cell is part of a human organoid.

[0038] In some embodiments, the cell comprises a prime editor, a PEgRNA, or a prime editing composition disclosed herein. In some embodiments, the cell further comprises an ngRNA. In some embodiments, the cell is from a human subject. In some embodiments, the human subject has a disease or condition associated with a mutation to be corrected by prime editing, for example, cystic fibrosis. In some embodiments, the cell is from a human subject, and comprises a prime editor, a PEgRNA, or a prime editing composition for correction of the mutation. In some embodiments, the cell is from the human subject and the mutation has been edited or corrected by prime editing.

[0039] The term “substantially” as used herein may refer to a value approaching 100% of a given value. In some embodiments, the term may refer to an amount that may be at least about 70%, 80%, 90%, 91%, 92%, 93%, 94%, 95%, 96%, 97%, 98%, 99%, 99.9%, or 99.99% of a total amount. In some embodiments, the term may refer to an amount that may be about 100% of a total amount.

[0040] The terms “protein” and “polypeptide” can be used interchangeably to refer to a polymer of two or more amino acids joined by covalent bonds (e.g., an amide bond) that can adopt a three-dimensional conformation. In some embodiments, a protein or polypeptide comprises at least 10 amino acids, 15 amino acids, 20 amino acids, 30 amino acids or 50 amino acids joined by covalent bonds (e.g., amide bonds). In some embodiments, a protein comprises at least two amide bonds. In some embodiments, a protein comprises multiple amide bonds. In some embodiments, a protein comprises an enzyme, enzyme precursor proteins, regulatory protein, structural protein, receptor, nucleic acid binding protein, a biomarker, a member of a specific binding pair (e.g., a ligand or aptamer), or an antibody. In some embodiments, a protein may be a full-length protein (e.g., a fully processed protein having certain biological function). In some embodiments, a protein may be a variant or a fragment of a full-length protein. For example, in some embodiments, a Cas9 protein domain comprises an H840A amino acid substitution compared to a naturally occurring S. pyogenes Cas9 protein. A variant of a protein or enzyme, for example a variant reverse transcriptase, comprises a polypeptide having an amino acid sequence that is about 60% identical, about 70% identical, about 80% identical, about 90% identical, about 95% identical, about 96% identical, about 97% identical, about 98% identical, about 99% identical, about 99.5% identical, or about 99.9% identical to the amino acid sequence of a reference protein.

[0041] In some embodiments, a protein comprises one or more protein domains or subdomains. As used herein, the term “polypeptide domain”, “protein domain”, or “domain” when used in the context of a protein or polypeptide, refers to a polypeptide chain that has one or more biological functions, e.g., a catalytic function, a protein-protein binding function, or a protein-DNA function. In some embodiments, a protein comprises multiple protein domains. In some embodiments, a protein comprises multiple protein domains that are naturally occurring. In some embodiments, a protein comprises multiple protein domains from different naturally occurring proteins. For example, in some embodiments, a prime editor may be a fusion protein comprising a Cas9 protein domain of S. pyogenes and a reverse transcriptase protein domain of a Moloney murine leukemia virus (M-MLV). A protein that comprises amino acid sequences from different origins or naturally occurring proteins may be referred to as a fusion, or chimeric protein.

[0042] In some embodiments, a protein comprises a functional variant or functional fragment of a full-length wild type protein. A “functional fragment” or “functional portion”, as used herein, refers to any portion of a reference protein (e.g., a wild type protein) that encompasses less than the entire amino acid sequence of the reference protein while retaining one or more of the functions, e.g., catalytic or binding functions. For example, a functional fragment of a reverse transcriptase may encompass less than the entire amino acid sequence of a wild type reverse transcriptase, but retains the ability under at least one set of conditions to catalyze the polymerization of a polynucleotide. When the reference protein is a fusion of multiple functional domains, a functional fragment thereof may retain one or more of the functions of at least one of the functional domains. For example, a functional fragment of a Cas9 may encompass less than the entire amino acid sequence of a wild type Cas9 but retains its DNA binding ability and lacks its nuclease activity partially or completely.

[0043] A “functional variant” or “functional mutant”, as used herein, refers to any variant or mutant of a reference protein (e.g., a wild type protein) that encompasses one or more alterations to the amino acid sequence of the reference protein while retaining one or more of the functions, e.g., catalytic or binding functions. In some embodiments, the one or more alterations to the amino acid sequence comprises amino acid substitutions, insertions or deletions, or any combination thereof. In some embodiments, the one or more alterations to the amino acid sequence comprises amino acid substitutions. For example, a functional variant of a reverse transcriptase may comprise one or more amino acid substitutions compared to the amino acid sequence of a wild type reverse transcriptase, but retains the ability under at least one set of conditions to catalyze the polymerization of a polynucleotide. When the reference protein is a fusion of multiple functional domains, a functional variant thereof may retain one or more of the functions of at least one of the functional domains. For example, in some embodiments, a functional fragment of a Cas9 may comprise one or more amino acid substitutions in a nuclease domain, e.g., an H840A amino acid substitution, compared to the amino acid sequence of a wild type Cas9, but retains the DNA binding ability and lacks the nuclease activity partially or completely.

[0044] The term “function” and its grammatical equivalents as used herein may refer to a capability of operating, having, or serving an intended purpose. Functional may comprise any percent from baseline to 100% of an intended purpose. For example, functional may comprise or comprise about 5%, 10%, 15%, 20%, 25%, 30%, 35%, 40%, 45%, 50%, 55%, 60%, 65%, 70%, 75%, 80%, 85%, 90%, 95%, or up to about 100% of an intended purpose. In some embodiments, the term functional may mean over or over about 100% of normal function, for example, 125%, 150%, 175%, 200%, 250%, 300%, 400%, 500%, 600%, 700% or up to about 1000% of an intended purpose.

[0045] In some embodiments, a protein or polypeptides includes naturally occurring amino acids (e.g., one of the twenty amino acids commonly found in peptides synthesized in nature, and known by the one letter abbreviations A, R, N, C, D, Q, E, G, H, I, L, K, M, F, P, S, T, W, Y and V). In some embodiments, a protein or polypeptides includes non-naturally occurring amino acids (e.g., amino acids which is not one of the twenty amino acids commonly found in peptides synthesized in nature, including synthetic amino acids, amino acid analogs, and amino acid mimetics). In some embodiments, a protein or polypeptide is modified.

[0046] In some embodiments, a protein comprises an isolated polypeptide. The term “isolated” means free or removed to varying degrees from components which normally accompany it as found in the natural state or environment. For example, a polypeptide naturally present in a living animal is not isolated, and the same polypeptide partially or completely separated from the coexisting materials of its natural state is isolated.

[0047] In some embodiments, a protein is present within a cell, a tissue, an organ, or a virus particle. In some embodiments, a protein is present within a cell or a part of a cell (e.g., a bacteria cell, a plant cell, or an animal cell). In some embodiments, the cell is in a tissue, in a subject, or in a cell culture. In some embodiments, the cell is a microorganism (e.g., a bacterium, fungus, protozoan, or virus). In some embodiments, a protein is present in a mixture of analytes (e.g., a lysate). In some embodiments, the protein is present in a lysate from a plurality of cells or from a lysate of a single cell.

[0048] The terms “homologous,” “homology,” or “percent homology” as used herein refer to the degree of sequence identity between an amino acid and a corresponding reference amino acid sequence or a polynucleotide sequence and a corresponding reference polynucleotide sequence. “Homology” can refer to polymeric sequences, e.g., polypeptide or DNA sequences that are similar. Homology can mean, for example, nucleic acid sequences with at least about: 50%, 55%, 60%, 65%, 70%, 75%, 80%, 81%, 82%, 83%, 84%, 85%, 86%, 87%, 88%, 89%, 90%, 91%, 92%, 93%, 94%, 95%, 96%, 97%, 98%, 99%, or 100% identity. In other embodiments, a “homologous sequence” of nucleic acid sequences may exhibit 93%, 95% or 98% sequence identity to the reference nucleic acid sequence. For example, a “region of homology to a genomic region” can be a region of DNA that has a similar sequence to a given genomic region in the genome. A region of homology can be of any length that is sufficient to promote binding of a spacer, a primer binding site, or protospacer sequence to the genomic region. For example, the region of homology can comprise at least 5, 10, 11, 12, 13, 14, 15, 16, 17, 18, 19, 20, 21, 22, 23, 24, 25, 30, 35, 40, 45, 50, 55, 60, 65, 70, 75, 80, 85, 90, 95, 100, 200, 300, 400, 500, 600, 700, 800, 900, 1000, 1100, 1200, 1300, 1400, 1500, 1600, 1700, 1800, 1900, 2000, 2100, 2200, 2300, 2400, 2500, 2600, 2700, 2800, 2900, 3000, 3100 or more bases in length such that the region of homology has sufficient homology to undergo binding with the corresponding genomic region.

[0049] When a percentage of sequence homology or identity is specified, in the context of two nucleic acid sequences or two polypeptide sequences, the percentage of homology or identity generally refers to the alignment of two or more sequences across a portion of their length when compared and aligned for maximum correspondence. When a position in the compared sequence can be occupied by the same base or amino acid, then the molecules can be homologous at that position. Unless stated otherwise, sequence homology or identity is assessed over the specified length of the nucleic acid, polypeptide or portion thereof. In some embodiments, the homology or identity is assessed over a functional portion or specified portion of the length.

[0050] Alignment of sequences for assessment of sequence homology can be conducted by algorithms known in the art, such as the Basic Local Alignment Search Tool (BLAST) algorithm, which is described in Altschul et al, J. Mol. Biol. 215:403-410, 1990. A publicly available, internet interface, for performing BLAST analyses is accessible through the National Center for Biotechnology Information. Additional known algorithms include those published in: Smith & Waterman, “Comparison of Biosequences”, Adv. Appl. Math. 2:482, 1981; Needleman & Wunsch, “A general method applicable to the search for similarities in the amino acid sequence of two proteins” J. Mol. Biol. 48:443, 1970; Pearson & Lipman “Improved tools for biological sequence comparison”, Proc. Natl. Acad. Sci. USA 85:2444, 1988; or by automated implementation of these or similar algorithms. Global alignment programs may also be used to align similar sequences of roughly equal size. Examples of global alignment programs include NEEDLE (available at www.ebi.ac.uk/Tools/psa/emboss_needle/) which is part of the EMBOSS package (Rice P et al., Trends Genet., 2000; 16: 276-277), and the GGSEARCH program https://fasta.bioch.virginia.edu/fasta_www2/, which is part of the FASTA package (Pearson W and Lipman D, 1988, Proc. Natl. Acad. Sci. USA, 85: 2444-2448). Both of these programs are based on the Needleman-Wunsch algorithm which is used to find the optimum alignment (including gaps) of two sequences along their entire length. A detailed discussion of sequence analysis can also be found in Unit 19.3 of Ausubel et al (“Current Protocols in Molecular Biology” John Wiley & Sons Inc, 1994-1998, Chapter 15, 1998). In some embodiments, alignment between a query sequence and a reference sequence is performed with Needleman-Wunsch alignment with Gap Costs set to Existence: 11 Extension: 1 where percent identity is calculated by dividing the number of identities by the length of the alignment, as further described in Altschul et al. (“Gapped BLAST and PSI-BLAST: a new generation of protein database search programs”, Nucleic Acids Res. 25:3389-3402, 1997) and Altschul et al, (“Protein database searches using compositionally adjusted substitution matrices”, FEBS J. 272:5101-5109, 2005).

[0051] A skilled person understands that amino acid (or nucleotide) positions may be determined in homologous sequences based on alignment, for example, “H840” in a reference Cas9 sequence may correspond to H839, or another position in a Cas9 homolog.

[0052] The term “polynucleotide” or “nucleic acid molecule” can be any polymeric form of nucleotides, including DNA, RNA, a hybridization thereof, or RNA-DNA chimeric molecules. In some embodiments, a polynucleotide comprises cDNA, genomic DNA, mRNA, tRNA, rRNA, or microRNA. In some embodiments, a polynucleotide is double stranded, e.g., a double-stranded DNA in a gene. In some embodiments, a polynucleotide is single-stranded or substantially single-stranded, e.g., single-stranded DNA or an mRNA. In some embodiments, a polynucleotide is a cell-free nucleic acid molecule. In some embodiments, a polynucleotide circulates in blood. In some embodiments, a polynucleotide is a cellular nucleic acid molecule. In some embodiments, a polynucleotide is a cellular nucleic acid molecule in a cell circulating in blood.

[0053] Polynucleotides can have any three-dimensional structure. The following are nonlimiting examples of polynucleotides: a gene or gene fragment (for example, a probe, primer, EST or SAGE tag), an exon, an intron, intergenic DNA (including, without limitation, heterochromatic DNA), messenger RNA (mRNA), transfer RNA (tRNA), ribosomal RNA (rRNA), a ribozyme, cDNA, a recombinant polynucleotide, a branched polynucleotide, a plasmid, a vector, isolated DNA, isolated RNA, sgRNA, guide RNA, a nucleic acid probe, a primer, an snRNA, a long non-coding RNA, a snoRNA, a siRNA, a miRNA, a tRNA-derived small RNA (tsRNA), an antisense RNA, an shRNA, or a small rDNA-derived RNA (srRNA).

[0054] In some embodiments, a polynucleotide comprises deoxyribonucleotides, ribonucleotides or analogs thereof. In some embodiments, a polynucleotide comprises modified nucleotides, such as methylated nucleotides and nucleotide analogs. If present, modifications to the nucleotide structure can be imparted before or after assembly of the polynucleotide. The sequence of nucleotides can be interrupted by non-nucleotide components. A polynucleotide can be further modified after polymerization, such as by conjugation with a labeling component.

[0055] In some embodiments, a polynucleotide is composed of a specific sequence of four nucleotide bases: adenine (A); cytosine (C); guanine (G); thymine (T); and uracil (U) for thymine when the polynucleotide is RNA. In some embodiments, the polynucleotide may comprise one or more other nucleotide bases, such as inosine (I), which is read by the translation machinery as guanine (G).

[0056] In some embodiments, a polynucleotide may be modified. As used herein, the terms “modified” or “modification” refers to chemical modification with respect to the A, C, G, T and U nucleotides. In some embodiments, modifications may be on the nucleoside base and/or sugar portion of the nucleosides that comprise the polynucleotide. In some embodiments, the modification may be on the internucleoside linkage (e.g., phosphate backbone). In some embodiments, multiple modifications are included in the modified nucleic acid molecule. In some embodiments, a single modification is included in the modified nucleic acid molecule.

[0057] The term “complement”, “complementary”, or “complementarity” as used herein, refers to the ability of two polynucleotide molecules to base pair with each other. Complementary polynucleotides may base pair via hydrogen bonding, which may be Watson Crick, Hoogsteen or reversed Hoogsteen hydrogen bonding. For example, an adenine on one polynucleotide molecule will base pair to a thymine or an uracil on a second polynucleotide molecule and a cytosine on one polynucleotide molecule will base pair to a guanine on a second polynucleotide molecule. Two polynucleotide molecules are complementary to each other when a first polynucleotide molecule comprising a first nucleotide sequence can base pair with a second polynucleotide molecule comprising a second nucleotide sequence. For instance, the two DNA molecules 5′-ATGC-3′ and 5′-GCAT-3′ are complementary, and the complement of the DNA molecule 5′-ATGC-3′ is 5′-GCAT-3′. A percentage of complementarity indicates the percentage of nucleotides in a polynucleotide molecule which can base pair with a second polynucleotide molecule (e.g., 5, 6, 7, 8, 9, 10 out of 10 being 50%, 60%, 70%, 80%, 90%, and 100% complementary, respectively). “Perfectly complementary” means that all the contiguous nucleotides of a polynucleotide molecule will base pair with the same number of contiguous nucleotides in a second polynucleotide molecule. “Substantially complementary” as used herein refers to a degree of complementarity that can be 70%, 75%, 80%, 85%, 90%, 95%, 97%, 98%, or 99% over all or a portion of two polynucleotide molecules. In some embodiments, the portion of complementarity may be a region of 10, 15, 20, 25, 30, 35, 40, 45, 50, or more nucleotides. “Substantial complementary” can also refer to a 100% complementarity over a portion or a region of two polynucleotide molecules. In some embodiments, the portion or the region of complementarity between the two polynucleotide molecules is at least 60%, 65%, 70%, 75%, 80%, 85%, 90%, 95%, 97%, 98%, or 99% of the length of at least one of the two polynucleotide molecules or a functional or defined portion thereof.

[0058] As used herein, “expression” refers to the process by which polynucleotides are transcribed into mRNA and/or the process by which polynucleotides, e.g., the transcribed mRNA, translated into peptides, polypeptides, or proteins. If the polynucleotide is derived from genomic DNA, expression may include splicing of the mRNA in a eukaryotic cell. In some embodiments, expression of a polynucleotide, e.g., a gene or a DNA encoding a protein, is determined by the amount of the protein encoded by the gene after transcription and translation of the gene. In some embodiments, expression of a polynucleotide, e.g., a gene or a DNA encoding a protein, is determined by the amount of a functional form of the protein encoded by the gene after transcription and translation of the gene. In some embodiments, expression of a gene is determined by the amount of the mRNA, or transcript, that is encoded by the gene after transcription the gene. In some embodiments, expression of a polynucleotide, e.g., an mRNA, is determined by the amount of the protein encoded by the mRNA after translation of the mRNA. In some embodiments, expression of a polynucleotide, e.g., a mRNA or coding RNA, is determined by the amount of a functional form of the protein encoded by the polypeptide after translation of the polynucleotide.

[0059] The term “sequencing” as used herein, may comprise capillary sequencing, bisulfite-free sequencing, bisulfite sequencing, TET-assisted bisulfite (TAB) sequencing, ACE-sequencing, high-throughput sequencing, Maxam-Gilbert sequencing, massively parallel signature sequencing, Polony sequencing, 454 pyrosequencing, Sanger sequencing, Illumina sequencing, SOLiD sequencing, Ion Torrent semiconductor sequencing, DNA nanoball sequencing, Heliscope single molecule sequencing, single molecule real time (SMRT) sequencing, nanopore sequencing, shot gun sequencing, RNA sequencing, or any combination thereof.

[0060] The terms “equivalent” or “biological equivalent” are used interchangeably when referring to a particular molecule, or biological or cellular material, and means a molecule having minimal homology to another molecule while still maintaining a desired structure or functionality.

[0061] The term “encode” as it is applied to polynucleotides refers to a polynucleotide which is said to “encode” another polynucleotide, a polypeptide, or an amino acid if, in its native state or when manipulated by methods well known to those skilled in the art, it can be used as polynucleotide synthesis template, e.g., transcribed into an RNA, reverse transcribed into a DNA or cDNA, and/or translated to produce an amino acid, or a polypeptide or fragment thereof. In some embodiments, a polynucleotide comprising three contiguous nucleotides form a codon that encodes a specific amino acid. In some embodiments, a polynucleotide comprises one or more codons that encode a polypeptide. In some embodiments, a polynucleotide comprising one or more codons comprises a mutation in a codon compared to a wild-type reference polynucleotide. In some embodiments, the mutation in the codon encodes an amino acid substitution in a polypeptide encoded by the polynucleotide as compared to a wild-type reference polypeptide.

[0062] The term “mutation” as used herein refers to a change and/or alteration in an amino acid sequence of a protein or nucleic acid sequence of a polynucleotide. Such changes and/or alterations may comprise the substitution, insertion, deletion and/or truncation of one or more amino acids, in the case of an amino acid sequence, and/or nucleotides, in the case of nucleic acid sequence, compared to a reference amino acid or a reference nucleic acid sequence. In some embodiments, the reference sequence is a wild-type sequence. In some embodiments, a mutation in a nucleic acid sequence of a polynucleotide encodes a mutation in the amino acid sequence of a polypeptide. In some embodiments, the mutation in the amino acid sequence of the polypeptide or the mutation in the nucleic acid sequence of the polynucleotide is a mutation associated with a disease state.

[0063] The term “subject” and its grammatical equivalents as used herein may refer to a human or a non-human. A subject may be a mammal. A human subject may be male or female. A human subject may be of any age. A subject may be a human embryo. A human subject may be a newborn, an infant, a child, an adolescent, or an adult. A human subject may be in need of treatment for a genetic disease or disorder.

[0064] The terms “treatment” or “treating” and their grammatical equivalents may refer to the medical management of a subject with an intent to cure, ameliorate, or ameliorate a symptom of, a disease, condition, or disorder. Treatment may include active treatment, that is, treatment directed specifically toward the improvement of a disease, condition, or disorder. Treatment may include causal treatment, that is, treatment directed toward removal of the cause of the associated disease, condition, or disorder. In addition, this treatment may include palliative treatment, that is, treatment designed for the relief of symptoms rather than the curing of the disease, condition, or disorder. Treatment may include supportive treatment, that is, treatment employed to supplement another specific therapy directed toward the improvement of the disease, condition, or disorder. In some embodiments, a condition may be pathological. In some embodiments, a treatment may not completely cure or prevent a disease, condition, or disorder. In some embodiments, a treatment ameliorates, but does not completely cure or prevent a disease, condition, or disorder. In some embodiments, a subject may be treated for 12 hours, 24 hours, 2 days, 3 days, 4 days, 5 days, 6 days, 7 days, 2 weeks, 3 weeks, 4 weeks, 2 months, 3 months, 4 months, 5 months, 6 months, 1 year, 2 years, 3 years, 4 years, 5 years, 6 years, indefinitely, or life of the subject.

[0065] The term “ameliorate” and its grammatical equivalents means to decrease, suppress, attenuate, diminish, arrest, or stabilize the development or progression of a disease.

[0066] The terms “prevent” or “preventing” means delaying, forestalling, or avoiding the onset or development of a disease, condition, or disorder for a period of time. Prevent also means reducing risk of developing a disease, disorder, or condition. Prevention includes minimizing or partially or completely inhibiting the development of a disease, condition, or disorder. In some embodiments, a composition, e.g., a pharmaceutical composition, prevents a disorder by delaying the onset of the disorder for 12 hours, 24 hours, 2 days, 3 days, 4 days, 5 days, 6 days, 7 days, 2 weeks, 3 weeks, 4 weeks, 2 months, 3 months, 4 months, 5 months, 6 months, 1 year, 2 years, 3 years, 4 years, 5 years, 6 years, indefinitely, or life of a subject.

[0067] The term “effective amount” or “therapeutically effective amount” refers to a quantity of a composition, for example a prime editing composition comprising a construct, that can be sufficient to result in a desired activity upon introduction into a subject as disclosed herein. An effective amount of the prime editing compositions can be provided to the target gene or cell, whether the cell is ex vivo or in vivo. An effective amount can be the amount to induce, for example, at least about a 2-fold change (increase or decrease) or more in the amount of target nucleic acid modulation (e.g., expression of a target CFTR gene to produce functional CFTR protein) observed relative to a negative control. An effective amount or dose can induce, for example, about 2-fold increase, about 3-fold increase, about 4-fold increase, about 5-fold increase, about 6-fold increase, about 7-fold increase, about 8-fold increase, about 9-fold increase, about 10-fold increase, about 25-fold increase, about 50-fold increase, about 100-fold increase, about 200-fold increase, about 500-fold increase, about 700-fold increase, about 1000-fold increase, about 5000-fold increase, or about 10,000-fold increase in target gene modulation (e.g., expression of a target CFTR gene to produce functional CFTR protein). The amount of target gene modulation may be measured by any suitable method known in the art. In some embodiments, the “effective amount” or “therapeutically effective amount” is the amount of a composition that is required to ameliorate the symptoms of a disease relative to an untreated patient. In some embodiments, an effective amount is the amount of a composition sufficient to introduce an alteration in a gene of interest in a cell (e.g., a cell in vitro or in vivo).

[0068] In some embodiments, an effective amount can be an amount to induce, when administered to a population of cells, a certain percentage of the population of cells to have a correction of a mutation. For example, in some embodiments, an effective amount can be the amount to induce, when administered to or introduced to a population of cells, installation of one or more intended nucleotide edits that correct a mutation in the target CFTR gene, in at least about 1%, 2%, 5%, about 10%, about 15%, about 20%, about 25%, about 30%, about 35%, about 40%, about 45%, about 50%, about 55%, about 60%, about 65%, about 70%, about 75%, about 80%, about 85%, about 90%, about 95%, or about 99% of the population of cells.

[0069] Cystic fibrosis or “CF” refers to a genetic disorder caused by pathogenic mutations or variants in the CFTR gene that decrease expression or function of the CFTR protein. The CFTR protein is a member of the C subfamily of ABC transporters. In some embodiments, the CFTR protein functions in fluid transport and surface hydration across epithelial cells. In some embodiments, CF is associated with a single mutation in the CFTR gene in a subject. In some embodiments, CF is associated with multiple mutations in the CFTR gene in a subject. In some embodiments, CF associates with a different set of one or more mutations in the CFTR gene in a group or a population of subjects. In some embodiments, CF is inherited in a recessive manner. In some embodiments, CF is associated with one or more mutations in both copies of the CFTR gene. In some embodiments, mutations in the CFTR gene result in loss of CFTR expression and/or activity and cause inflammation and infection within the lungs and intestines and other severe symptoms. In some embodiments, the CFTR gene or the CFTR protein is also referred to as the ABCC7 gene or the ABCC7 protein. In the human genome, the CFTR gene is located on q31.2 of chromosome 7 and contains 26 introns and 27 exons (chr7: 117480025-117668665 (GRCh38/hg38)).

### Prime Editing

[0070] The term “prime editing” refers to programmable editing of a target DNA using a prime editor complexed with a PEgRNA to incorporate an intended nucleotide edit (also referred to herein as a nucleotide change) into the target DNA through target-primed DNA synthesis. A target gene of prime editing may comprise a double stranded DNA molecule having two complementary strands: a first strand that may be referred to as a “target strand” or a “non-edit strand”, and a second strand that may be referred to as a “non-target strand,” or an “edit strand.” In some embodiments, in a prime editing guide RNA (PEgRNA), a spacer sequence is complementary or substantially complementary to a specific sequence on the target strand, which may be referred to as a “search target sequence”. In some embodiments, the spacer sequence anneals with the target strand at the search target sequence. The target strand may also be referred to as the “non-Protospacer Adjacent Motif (non-PAM strand).” In some embodiments, the non-target strand may also be referred to as the “PAM strand”. In some embodiments, the PAM strand comprises a protospacer sequence and optionally protospacer adjacent motif (PAM) sequence. In prime editing using a Cas-protein-based prime editor, a PAM sequence refers to a short DNA sequence immediately adjacent to the protospacer sequence on the PAM strand of the target gene. A PAM sequence may be specifically recognized by a programmable DNA binding protein, e.g., a Cas nickase or a Cas nuclease. In some embodiments, a specific PAM is characteristic of a specific programmable DNA binding protein, e.g., a Cas nickase or a Cas nuclease. A protospacer sequence refers to a specific sequence in the PAM strand of the target gene that is complementary to the search target sequence. In a PEgRNA, a spacer sequence may have a substantially identical sequence as the protospacer sequence on the edit strand of a target gene, except that the spacer sequence may comprise Uracil (U) and the protospacer sequence may comprise Thymine (T).

[0071] In some embodiments, the double stranded target DNA comprises a nick site on the PAM strand (or non-target strand). As used herein, a “nick site” refers to a specific position in between two nucleotides or two base pairs of the double stranded target DNA. In some embodiments, the position of a nick site is determined relative to the position of a specific PAM sequence. In some embodiments, the nick site is the particular position where a nick will occur when the double stranded target DNA is contacted with a nickase, for example, a Cas nickase, that recognizes a specific PAM sequence. In some embodiments, the nick site is upstream of a specific PAM sequence on the PAM strand of the double stranded target DNA. In some embodiments, the nick site is downstream of a specific PAM sequence on the PAM strand of the double stranded target DNA. In some embodiments, the nick site is upstream of a PAM sequence recognized by a Cas9 nickase, wherein the Cas9 nickase comprises a nuclease active RuvC domain and a nuclease inactive HNH domain. In some embodiments, the nick site is 3 nucleotides upstream of the PAM sequence, and the PAM sequence is recognized by a Streptococcus pyogenes Cas9 nickase, a P. lavamentivorans Cas9 nickase, a C. diphtheriae Cas9 nickase, a N. cinerea Cas9, a S. aureus Cas9, or a N. lari Cas9 nickase. In some embodiments, the nick site is 3 base pairs upstream of the PAM sequence, and the PAM sequence is recognized by a Cas9 nickase, wherein the Cas9 nickase that comprises a nuclease active RuvC domain and a nuclease inactive HNH domain. In some embodiments, the nick site is 2 nucleotides upstream of the PAM sequence, and the PAM sequence is recognized by a S. thermophilus Cas9 nickase that comprises a nuclease active RuvC domain and a nuclease inactive HNH domain.

[0072] A “primer binding site” (also referred to as PBS or primer binding site sequence) is a single-stranded portion of the PEgRNA that comprises a region of complementarity to the PAM strand (i.e., the non-target strand or the edit strand). The PBS is complementary or substantially complementary to a sequence on the PAM strand of the double stranded target DNA that is immediately upstream of the nick site. In some embodiments, in the process of prime editing, the PEgRNA complexes with and directs a prime editor to bind the search target sequence on the target strand of the double stranded target DNA and generates a nick at the nick site on the non-target strand of the double stranded target DNA. In some embodiments, the PBS is complementary to or substantially complementary to, and can anneal to, a free 3′ end on the non-target strand of the double stranded target DNA at the nick site. In some embodiments, the PBS annealed to the free 3′ end on the non-target strand can initiate target-primed DNA synthesis.

[0073] An “editing template” of a PEgRNA is a single-stranded portion of the PEgRNA that is 5′ of the PBS and comprises a region of complementarity to the PAM strand (i.e., the non-target strand or the edit strand), and comprises one or more intended nucleotide edits compared to the endogenous sequence of the double stranded target DNA. In some embodiments, the editing template and the PBS are immediately adjacent to each other. Accordingly, in some embodiments, a PEgRNA in prime editing comprises a single-stranded portion that comprises the PBS and the editing template immediately adjacent to each other. In some embodiments, the single stranded portion of the PEgRNA comprising both the PBS and the editing template is complementary or substantially complementary to an endogenous sequence on the PAM strand (i.e., the non-target strand or the edit strand) of the double stranded target DNA except for one or more non-complementary nucleotides at the intended nucleotide edit position(s). As used herein, regardless of relative 5′-3′ positioning in other context, the relative positions as between the PBS and the editing template, and the relative positions as among elements of a PEgRNA, are determined by the 5′ to 3′ order of the PEgRNA regardless of the position of sequences in the double stranded target DNA that may have complementarity or identity to elements of the PEgRNA. In some embodiments, the editing template is complementary or substantially complementary to a sequence on the PAM strand that is immediately downstream of the nick site, except for one or more non-complementary nucleotides at the intended nucleotide edit positions. The endogenous, e.g., genomic, sequence that is complementary or substantially complementary to the editing template, except for the one or more non-complementary nucleotides at the position corresponding to the intended nucleotide edit, may be referred to as an “editing target sequence”. In some embodiments, the editing template has identity or substantial identity to a sequence on the target strand that is complementary to, or having the same position in the genome as, the editing target sequence, except for one or more insertions, deletions, or substitutions at the intended nucleotide edit positions. In some embodiments, the editing template encodes a single stranded DNA, wherein the single stranded DNA has identity or substantial identity to the editing target sequence except for one or more insertions, deletions, or substitutions at the positions of the one or more intended nucleotide edits. In some embodiments, the editing template may encode the wild-type or non-disease associated gene sequence (or its complement if the edit strand is the antisense strand of a gene). In some embodiments, the editing template may encode the wild-type or non-disease associated protein, but contain one or more synonymous mutations relative to the wild-type or non-disease associated protein coding region. Such synonymous mutations may include, for example, mutations that decrease the ability of a PEgRNA to rebind to the same target sequence once the desired edit is installed in the genome (e.g., synonymous mutations that silence the endogenous PAM sequence or that edit the endogenous protospacer).

[0074] In some embodiments, a PEgRNA complexes with and directs a prime editor to bind to the search target sequence of the target gene at the nick site. In some embodiments, the bound prime editor generates a nick on the edit strand (PAM strand) of the target gene. In some embodiments, a primer binding site (PBS) of the PEgRNA anneals with a free 3′ end formed at the nick site, and the prime editor initiates DNA synthesis from the nick site, using the free 3′ end as a primer. Subsequently, a single-stranded DNA encoded by the editing template of the PEgRNA is synthesized. In some embodiments, the newly synthesized single-stranded DNA comprises one or more intended nucleotide edits compared to the endogenous target gene sequence. Accordingly, in some embodiments, the editing template of a PEgRNA is complementary to a sequence in the edit strand except for one or more mismatches at the intended nucleotide edit positions in the editing template. The endogenous, e.g., genomic, sequence that is partially complementary to the editing template may be referred to as an “editing target sequence”. Accordingly, in some embodiments, the newly synthesized single stranded DNA has identity or substantial identity to a sequence in the editing target sequence, except for one or more insertions, deletions, or substitutions at the intended nucleotide edit positions. In some embodiments, the editing template comprises at least 4 contiguous nucleotides of complementarity with the edit strand wherein the at least 4 nucleotides contiguous are located upstream of the 5′ most edit in the editing template.

[0075] In some embodiments, the newly synthesized single-stranded DNA equilibrates with the editing target on the edit strand of the target gene for pairing with the target strand of the target gene. In some embodiments, the editing target sequence of the target gene is excised by a flap endonuclease (FEN), for example, FEN1. In some embodiments, the FEN is an endogenous FEN, for example, in a cell comprising the target gene. In some embodiments, the FEN is provided as part of the prime editor, either linked to other components of the prime editor or provided in trans. In some embodiments, the newly synthesized single stranded DNA, which comprises the intended nucleotide edit, replaces the endogenous single stranded editing target sequence on the edit strand of the target gene. In some embodiments, the newly synthesized single stranded DNA and the endogenous DNA on the target strand form a heteroduplex DNA structure at the region corresponding to the editing target sequence of the target gene. In some embodiments, the newly synthesized single-stranded DNA comprising the nucleotide edit is paired in the heteroduplex with the target strand of the target DNA that does not comprise the nucleotide edit, thereby creating a mismatch between the two otherwise complementary strands. In some embodiments, the mismatch is recognized by DNA repair machinery, e.g., an endogenous DNA repair machinery. In some embodiments, through DNA repair, the intended nucleotide edit is incorporated into the target gene.

### Prime Editor

[0076] The term “prime editor (PE)” refers to the polypeptide or polypeptide components involved in prime editing, or any polynucleotide(s) encoding the polypeptide or polypeptide components. In various embodiments, a prime editor includes a polypeptide domain having DNA binding activity and a polypeptide domain having DNA polymerase activity. In some embodiments, the prime editor further comprises a polypeptide domain having nuclease activity. In some embodiments, the polypeptide domain having DNA binding activity comprises a nuclease domain or nuclease activity. In some embodiments, the polypeptide domain having nuclease activity comprises a nickase, or a fully active nuclease. As used herein, the term “nickase” refers to a nuclease capable of cleaving only one strand of a double-stranded DNA target. In some embodiments, the prime editor comprises a polypeptide domain that is an inactive nuclease. In some embodiments, the polypeptide domain having programmable DNA binding activity comprises a nucleic acid guided DNA binding domain, for example, a CRISPR-Cas protein, for example, a Cas9 nickase, a Cpf1 nickase, or another CRISPR-Cas nuclease. In some embodiments, the polypeptide domain having DNA polymerase activity comprises a template-dependent DNA polymerase, for example, a DNA-dependent DNA polymerase or an RNA-dependent DNA polymerase. In some embodiments, the DNA polymerase is a reverse transcriptase. In some embodiments, the prime editor comprises additional polypeptides involved in prime editing, for example, a polypeptide domain having 5′ endonuclease activity, e.g., a 5′ endogenous DNA flap endonucleases (e.g., FEN1), for helping to drive the prime editing process towards the edited product formation. In some embodiments, the prime editor further comprises an RNA-protein recruitment polypeptide, for example, a MS2 coat protein.

[0077] A prime editor may be engineered. In some embodiments, the polypeptide components of a prime editor do not naturally occur in the same organism or cellular environment. In some embodiments, the polypeptide components of a prime editor may be of different origins or from different organisms. In some embodiments, a prime editor comprises a DNA binding domain and a DNA polymerase domain that are derived from different species. In some embodiments, a prime editor comprises a Cas polypeptide (DNA binding domain) and a reverse transcriptase polypeptide (DNA polymerase) that are derived from different species. For example, a prime editor may comprise a S. pyogenes Cas9 polypeptide and a Moloney murine leukemia virus (M-MLV) reverse transcriptase polypeptide.

[0078] In some embodiments, polypeptide domains of a prime editor may be fused or linked by a peptide linker to form a fusion protein. In other embodiments, a prime editor comprises one or more polypeptide domains provided in trans as separate proteins, which are capable of being associated to each other through non-peptide linkages or through aptamers or recruitment sequences. For example, a prime editor may comprise a DNA binding domain and a reverse transcriptase domain associated with each other by an RNA-protein recruitment aptamer, e.g., a MS2 aptamer, which may be linked to a PEgRNA. Prime editor polypeptide components may be encoded by one or more polynucleotides in whole or in part. In some embodiments, a single polynucleotide, construct, or vector encodes the prime editor fusion protein. In some embodiments, multiple polynucleotides, constructs, or vectors each encode a polypeptide domain or portion of a domain of a prime editor, or a portion of a prime editor fusion protein. For example, a prime editor fusion protein may comprise an N-terminal portion fused to an intein-N and a C-terminal portion fused to an intein-C, each of which is individually encoded by an AAV vector.

### Prime Editor Nucleotide Polymerase Domain

[0079] In some embodiments, a prime editor comprises a nucleotide polymerase domain, e.g., a DNA polymerase domain. The DNA polymerase domain may be a wild-type DNA polymerase domain, a full-length DNA polymerase protein domain, or may be a functional mutant, a functional variant, or a functional fragment thereof. In some embodiments, the polymerase domain is a template dependent polymerase domain. For example, the DNA polymerase may rely on a template polynucleotide strand, e.g., the editing template sequence, for new strand DNA synthesis. In some embodiments, the prime editor comprises a DNA-dependent DNA polymerase. For example, a prime editor having a DNA-dependent DNA polymerase can synthesize a new single stranded DNA using a PEgRNA editing template that comprises a DNA sequence as a template. In such cases, the PEgRNA is a chimeric or hybrid PEgRNA, and comprising an extension arm comprising a DNA strand. The chimeric or hybrid PEgRNA may comprise an RNA portion (including the spacer and the gRNA core) and a DNA portion (the extension arm comprising the editing template that includes a strand of DNA).

[0080] In some embodiments, the DNA polymerase is a bacteriophage polymerase, for example, a T4, T7, or phi29 DNA polymerase. In some embodiments, the DNA polymerase is an archaeal polymerase, for example, pol I type archaeal polymerase or a pol II type archaeal polymerase. In some embodiments, the DNA polymerase comprises a thermostable archaeal DNA polymerase. In some embodiments, the DNA polymerase comprises a eubacterial DNA polymerase, for example, Pol I, Pol II, or Pol III polymerase. In some embodiments, the DNA polymerase is a Pol I family DNA polymerase. In some embodiments, the DNA polymerase is a E. coli Pol I DNA polymerase. In some embodiments, the DNA polymerase is a Pol II family DNA polymerase. In some embodiments, the DNA polymerase is a Pyrococcus furiosus (Pfu) Pol II DNA polymerase. In some embodiments, the DNA Polymerase is a Pol IV family DNA polymerase. In some embodiments, the DNA polymerase is a E. coli Pol IV DNA polymerase. In some embodiments, the DNA polymerase comprises a eukaryotic DNA polymerase. In some embodiments, the DNA polymerase is a Pol-beta DNA polymerase, a Pol-lambda DNA polymerase, a Pol-sigma DNA polymerase, or a Pol-mu DNA polymerase. In some embodiments, the DNA polymerase is a Pol-alpha DNA polymerase. In some embodiments, the DNA polymerase is a POLA1 DNA polymerase. In some embodiments, the DNA polymerase is a POLA2 DNA polymerase. In some embodiments, the DNA polymerase is a Pol-delta DNA polymerase. In some embodiments, the DNA polymerase is a POLDI DNA polymerase. In some embodiments, the DNA polymerase is a POLD2 DNA polymerase. In some embodiments, the DNA polymerase is a human POLD1 DNA polymerase. In some embodiments, the DNA polymerase is a human POLD2 DNA polymerase. In some embodiments, the DNA polymerase is a POLD3 DNA polymerase. In some embodiments, the DNA polymerase is a POLD4 DNA polymerase. In some embodiments, the DNA polymerase is a Pol-epsilon DNA polymerase. In some embodiments, the DNA polymerase is a POLE1 DNA polymerase. In some embodiments, the DNA polymerase is a POLE2 DNA polymerase. In some embodiments, the DNA polymerase is a POLE3 DNA polymerase. In some embodiments, the DNA polymerase is a Pol-eta (POLH) DNA polymerase. In some embodiments, the DNA polymerase is a Pol-iota (POLI) DNA polymerase. In some embodiments, the DNA polymerase is a Pol-kappa (POLK) DNA polymerase. In some embodiments, the DNA polymerase is a Rev1 DNA polymerase. In some embodiments, the DNA polymerase is a human Rev1 DNA polymerase. In some embodiments, the DNA polymerase is a viral DNA-dependent DNA polymerase. In some embodiments, the DNA polymerase is a B family DNA polymerases. In some embodiments, the DNA polymerase is a herpes simplex virus (HSV) UL30 DNA polymerase. In some embodiments, the DNA polymerase is a cytomegalovirus (CMV) UL54 DNA polymerase.

[0081] In some embodiments, a prime editor comprises an RNA-dependent DNA polymerase domain, for example, a reverse transcriptase (RT). A RT or an RT domain may be a wild type RT domain, a full-length RT domain, or may be a functional mutant, a functional variant, or a functional fragment thereof. An RT or an RT domain of a prime editor may comprise a wild-type RT, or may be engineered or evolved to contain specific amino acid substitutions, truncations, or variants. An engineered RT may comprise sequences or amino acid changes different from a naturally occurring RT. In some embodiments, the engineered RT may have improved reverse transcription activity over a naturally occurring RT or RT domain. In some embodiments, the engineered RT may have improved features over a naturally occurring RT, for example, improved thermostability, reverse transcription efficiency, or target fidelity. In some embodiments, a prime editor comprising the engineered RT has improved prime editing efficiency over a prime editor having a reference naturally occurring RT.

[0082] In some embodiments, a prime editor comprises a virus RT, for example, a retrovirus RT. Non-limiting examples of virus RT include Moloney murine leukemia virus (M-MLV MMLVRT or M-MLV RT); human T-cell leukemia virus type 1 (HTLV-1) RT; bovine leukemia virus (BLV) RT; Rous Sarcoma Virus (RSV) RT; human immunodeficiency virus (HIV) RT, M-MFV RT, Avian Sarcoma-Leukosis Virus (ASLV) RT, Rous Sarcoma Virus (RSV) RT, Avian Myeloblastosis Virus (AMV) RT, Avian Erythroblastosis Virus (AEV) Helper Virus MCAV RT, Avian Myelocytomatosis Virus MC29 Helper Virus MCAV RT, Avian Reticuloendotheliosis Virus (REV-T) Helper Virus REV-A RT, Avian Sarcoma Virus UR2 Helper Virus (UR2AV) RT, Avian Sarcoma Virus Y73 Helper Virus YAV RT, Rous Associated Virus (RAV) RT, and Myeloblastosis Associated Virus (MAV) RT, all of which may be suitably used in the methods and composition described herein.

[0083] In some embodiments, the prime editor comprises a wild-type M-MLV RT, a functional mutant, a functional variant, or a functional fragment thereof. In some embodiments, the prime editor comprises a reference M-MLV RT, a functional mutant, a functional variant, or a functional fragment thereof. In some embodiments, the RT domain or a RT is a M-MLV RT (e.g., wild-type M-MLV RT, a functional mutant, a functional variant, or a functional fragment thereof). In some embodiments, the RT domain or a RT is a M-MLV RT (e.g., a reference M-MLV RT, a functional mutant, a functional variant, or a functional fragment thereof). In some embodiments, a M-MLV RT, e.g., reference M-MLV RT, comprises an amino acid sequence as set forth in any one of SEQ ID NO: 1.

[0084] In some embodiments, a reference M-MLV RT is a wild-type M-MLV RT. An exemplary amino acid sequence of a reference M-MLV RT is provided in SEQ ID NO: 2.

[0085] In some embodiments, the prime editor comprises a wild type M-MLV RT. An exemplary amino acid sequence of a wild type M-MLV RT is provided in SEQ ID NO: 2.

(SEQ ID NO: 2)
TLNIEDEHRLHETSKEPDVSLGSTWLSDFPQAWAETGGMGLAVRQAPLII
PLKATSTPVSIKQYPMSQEARLGIKPHIQRLLDQGILVPCQSPWNTPLLP
VKKPGTNDYRPVQDLREVNKRVEDIHPTVPNPYNLLSGLPPSHQWYTVLD
LKDAFFCLRLHPTSQPLFAFEWRDPEMGISGQLTWTRLPQGFKNSPTLFD
EALHRDLADFRIQHPDLILLQYVDDLLLAATSELDCQQGTRALLQTLGNL
GYRASAKKAQICQKQVKYLGYLLKEGQRWLTEARKETVMGQPTPKTPRQL
REFLGTAGFCRLWIPGFAEMAAPLYPLTKTGTLFNWGPDQQKAYQEIKQA
LLTAPALGLPDLTKPFELFVDEKQGYAKGVLTQKLGPWRRPVAYLSKKLD
PVAAGWPPCLRMVAAIAVLTKDAGKLTMGQPLVILAPHAVEALVKQPPDR
WLSNARMTHYQALLLDTDRVQFGPVVALNPATLLPLPEEGLQHNCLDILA
EAHGTRPDLTDQPLPDADHTWYTDGSSLLQEGQRKAGAAVTTETEVIWAK
ALPAGTSAQRAELIALTQALKMAEGKKLNVYTDSRYAFATAHIHGEIYRR
RGLLTSEGKEIKNKDEILALLKALFLPKRLSIIHCPGHQKGHSAEARGNR
MADQAARKAAITETPDTSTLLIENSSP.

[0086] In some embodiments, the prime editor comprises a reference M-MLV RT. An exemplary amino acid sequence of a reference M-MLV RT is provided in SEQ ID NO: 1.

[0087] Exemplary wild type Moloney murine leukemia virus reverse transcriptase:

(SEQ ID NO: 1)
TLNIEDEYRLHETSKEPDVSLGSTWLSDFPQAWAETGGMGLAVRQAPLII
PLKATSTPVSIKQYPMSQEARLGIKPHIQRLLDQGILVPCQSPWNTPLLP
VKKPGTNDYRPVQDLREVNKRVEDIHPTVPNPYNLLSGLPPSHQWYTVLD
LKDAFFCLRLHPTSQPLFAFEWRDPEMGISGQLTWTRLPQGFKNSPTLFD
EALHRDLADFRIQHPDLILLQYVDDLLLAATSELDCQQGTRALLQTLGNL
GYRASAKKAQICQKQVKYLGYLLKEGQRWLTEARKETVMGQPTPKTPRQL
REFLGTAGFCRLWIPGFAEMAAPLYPLTKTGTLFNWGPDQQKAYQEIKQA
LLTAPALGLPDLTKPFELFVDEKQGYAKGVLTQKLGPWRRPVAYLSKKLD
PVAAGWPPCLRMVAAIAVLTKDAGKLTMGQPLVILAPHAVEALVKQPPDR
WLSNARMTHYQALLLDTDRVQFGPVVALNPATLLPLPEEGLQHNCLDILA
EAHGTRPDLTDQPLPDADHTWYTDGSSLLQEGQRKAGAAVTTETEVIWAK
ALPAGTSAQRAELIALTQALKMAEGKKLNVYTDSRYAFATAHIHGEIYRR
RGLLTSEGKEIKNKDEILALLKALFLPKRLSIIHCPGHQKGHSAEARGNR
MADQAARKAAITETPDTSTLLIENSSP.

[0088] In some embodiments, the prime editor comprises a M-MLV RT comprising one or more of amino acid substitutions P51X, S67X, E69X, L139X, T197X, D200X, H204X, F209X, E302X, T306X, F309X, W313X, T330X, L345X, L435X, N454X, D524X, E562X, D583X, H594X, L603X, E607X, or D653X as compared to the reference M-MLV RT as set forth in SEQ ID NO: 1, where X is any amino acid other than the wild type amino acid. In some embodiments, the prime editor comprises a M-MLV RT comprising one or more of amino acid substitutions P51L, S67K, E69K, L139P, T197A, D200N, H204R, F209N, E302K, E302R, T306K, F309N, W313F, T330P, L345G, L435G, N454K, D524G, E562Q, D583N, H594Q, L603W, E607K, and D653N as compared to the reference M-MLV RT as set forth in SEQ ID NO: 1. In some embodiments, the prime editor comprises a M-MLV RT comprising one or more amino acid substitutions D200N, T330P, L603W, T306K, and W313F as compared to the reference M-MLV RT as set forth in SEQ ID NO: 1. In some embodiments, the prime editor comprises a M-MLV RT comprising amino acid substitutions D200N, T330P, L603W, T306K, and W313F as compared to the reference M-MMLV RT as set forth in SEQ ID NO: 1. In some embodiments, a prime editor comprising the D200N, T330P, L603W, T306K, and W313F as compared to a reference M-MLV RT as set forth in SEQ ID NO: 1. In some embodiments, the prime editor comprises a M-MLV RT comprising one or more of amino acid substitutions D200N, T330P, L603W, T306K, and W313F as compared to a wild type M-MMLV RT as set forth in SEQ ID NO: 2. In some embodiments, a prime editor may comprise amino acid substitutions D200N, T330P, L603W, T306K, and W313F as compared to a reference M-MLV RT as set forth in SEQ ID NO: 1. In some embodiments, the prime editor comprises a M-MLV RT that comprises an amino acid sequence that is at least 70%, at least 75%, at least 80%, at least 85%, at least 90%, at least 95%, at least 96%, at least 97%, at least 98%, at least 99%, at least 99.5%, or at least 99.9% identical to an amino acid sequence set forth in any one of SEQ ID NOs: 1-3. In some embodiments, the prime editor comprises a M-MLV RT that comprises an amino acid sequence that is selected from the group consisting of SEQ ID NOs: 1, 2 and 3 or a variant or fragment thereof. In some embodiments, the prime editor comprises a M-MLV RT that comprises an amino acid sequence set forth in SEQ ID NO: 3.

(SEQ ID NO: 3)
TLNIEDEYRLHETSKEPDVSLGSTWLSDFPQAWAETGGMGLAVRQAPLII
PLKATSTPVSIKQYPMSQEARLGIKPHIQRLLDQGILVPCQSPWNTPLLP
VKKPGTNDYRPVQDLREVNKRVEDIHPTVPNPYNLLSGLPPSHQWYTVLD
LKDAFFCLRLHPTSQPLFAFEWRDPEMGISGQLTWTRLPQGFKNSPTLFN
EALHRDLADFRIQHPDLILLQYVDDLLLAATSELDCQQGTRALLQTLGNL
GYRASAKKAQICQKQVKYLGYLLKEGQRWLTEARKETVMGQPTPKTPRQL
REFLGKAGFCRLFIPGFAEMAAPLYPLTKPGTLFNWGPDQQKAYQEIKQA
LLTAPALGLPDLTKPFELFVDEKQGYAKGVLTQKLGPWRRPVAYLSKKLD
PVAAGWPPCLRMVAAIAVLTKDAGKLTMGQPLVILAPHAVEALVKQPPDR
WLSNARMTHYQALLLDTDRVQFGPVVALNPATLLPLPEEGLQHNCLDILA
EAHGTRPDLTDQPLPDADHTWYTDGSSLLQEGQRKAGAAVTTETEVIWAK
ALPAGTSAQRAELIALTQALKMAEGKKLNVYTDSRYAFATAHIHGEIYRR
RGWLTSEGKEIKNKDEILALLKALFLPKRLSIIHCPGHQKGHSAEARGNR
MADQAARKAAITETPDTSTLLIENSSP.

[0089] A prime editing system comprising a PEgRNA (or one or more polynucleotide encoding the PEgRNA) and a prime editor protein (or one or more polynucleotides encoding the prime editor), may be referred to as a PE2 prime editing system and the corresponding editing approach referred to as PE2 approach or PE2 strategy. A PE2 system does not contain a ngRNA. A prime editing system comprising a PEgRNA (or one or more polynucleotide encoding the PEgRNA), a prime editor protein (or one or more polynucleotides encoding the prime editor), and a ngRNA (or one or more polynucleotides encoding the ngRNA) may be referred to as a “PE3” prime editing system. In some embodiments, an ngRNA spacer sequence is complementary to a portion of the edit strand that includes the intended nucleotide edit and may hybridize with the edit strand only after the edit has been incorporated on the edit strand. Such ngRNA may be referred to a “PE3b” ngRNA, and the prime editing system a PE3b prime editing system.

[0090] In some embodiments, a prime editor comprises a eukaryotic RT, for example, a yeast, drosophila, rodent, or primate RT. In some embodiments, the prime editor comprises a Group II intron RT, for example, a Geobacillus stearothermophilus Group II Intron (GsI-IIC) RT or a Eubacterium rectale group II intron (Eu.re.I2) RT. In some embodiments, the prime editor comprises a retron RT.

[0091] In some embodiments, the DNA-binding domain of a prime editor is a programmable DNA binding domain. In some embodiments, a prime editor comprises a DNA binding domain that comprises an amino acid sequence that is at least 50%, at least 60%, at least 70%, at least 75%, at least 80%, 85%, at least 86%, at least 87%, at least 88%, at least 89%, at least 90%, at least 91%, at least 92%, at least 93%, at least 94%, at least 95%, at least 96%, at least 97%, at least 98%, at least 99%, or 100% identical to any one of the sequences set forth in SEQ ID NOs: 298-325. In some embodiments, the DNA binding domain comprises an amino acid sequence that has no more than 1, 2, 3, 4, 5, 6, 7, 8, 9, 10, 11, 12, 13, 14, 15, 16, 17, 18, 19, or 20 differences e.g., mutations e.g., deletions, substitutions and/or insertions compared to any one of the amino acid sequences set forth in SEQ ID NOs: 298-325. In some embodiments, the DNA binding domain of a prime editor is a programmable DNA binding domain. A programmable DNA binding domain refers to a protein domain that is designed to bind a specific nucleic acid sequence, e.g., a target DNA or a target RNA. In some embodiments, the DNA-binding domain is a polynucleotide programmable DNA-binding domain that can associate with a guide polynucleotide (e.g., a PEgRNA) that guides the DNA-binding domain to a specific DNA sequence, e.g., a search target sequence in a target gene. In some embodiments, the DNA-binding domain comprises a Clustered Regularly Interspaced Short Palindromic Repeats (CRISPR) Associated (Cas) protein. A Cas protein may comprise any Cas protein described herein or a functional fragment or functional variant thereof. In some embodiments, a DNA-binding domain may also comprise a zinc-finger protein domain. In other cases, a DNA-binding domain comprises a transcription activator-like effector domain (TALE). In some embodiments, the DNA-binding domain comprises a DNA nuclease. For example, the DNA-binding domain of a prime editor may comprise an RNA-guided DNA endonuclease, e.g., a Cas protein. In some embodiments, the DNA-binding domain comprises a zinc finger nuclease (ZFN) or a transcription activator like effector domain nuclease (TALEN), where one or more zinc finger motifs or TALE motifs are associated with one or more nucleases, e.g., a Fok I nuclease domain.

[0092] In some embodiments, the DNA-binding domain comprises a nuclease activity. In some embodiments, the DNA-binding domain of a prime editor comprises an endonuclease domain having single strand DNA cleavage activity. For example, the endonuclease domain may comprise a FokI nuclease domain. In some embodiments, the DNA-binding domain of a prime editor comprises a nuclease having full nuclease activity. In some embodiments, the DNA-binding domain of a prime editor comprises a nuclease having modified or reduced nuclease activity as compared to a wild type endonuclease domain. For example, the endonuclease domain may comprise one or more amino acid substitutions as compared to a wild type endonuclease domain. In some embodiments, the DNA-binding domain of a prime editor has nickase activity. In some embodiments, the DNA-binding domain of a prime editor comprises a Cas protein domain that is a nickase. In some embodiments, compared to a wild type Cas protein, the Cas nickase comprises one or more amino acid substitutions in a nuclease domain that reduces or abolishes its double strand nuclease activity but retains DNA binding activity. In some embodiments, the Cas nickase comprises an amino acid substitution in a HNH domain. In some embodiments, the Cas nickase comprises an amino acid substitution in a RuvC domain.

[0093] In some embodiments, the DNA-binding domain comprises a CRISPR associated protein (Cas protein) domain. A Cas protein may be a Class 1 or a Class 2 Cas protein. A Cas protein can be a type I, type II, type III, type IV, type V Cas protein, or a type VI Cas protein. Non-limiting examples of Cas proteins include Cas9, Cas12a (Cpf1), Cas12e (CasX), Cas12d (CasY), Cas12b1 (C2c1), Cas12b2, Cas12c (C2c3), C2c4, C2c8, C2c5, C2c10, C2c9, Cas14a, Cas14b, Cas14c, Cas14d, Cas14e, Cas14f, Cas14g, Cas14h, Cas14u, Cns2, Cas Φ, and homologs, functional fragments, or modified versions thereof. A Cas protein can be a chimeric Cas protein that is fused to other proteins or polypeptides. A Cas protein can be a chimera of various Cas proteins, for example, comprising domains of Cas proteins from different organisms.

[0094] A Cas protein, e.g., Cas9, can be from any suitable organism. In some aspects, the organism is Streptococcus pyogenes (S. pyogenes). In some aspects, the organism is Staphylococcus aureus (S. aureus). In some aspects, the organism is Streptococcus thermophilus (S. thermophilus). In some embodiments, the organism is Staphylococcus lugdunensis.

[0095] Non-limiting examples of suitable organism include Streptococcus pyogenes, Streptococcus thermophilus, Streptococcus sp., Staphylococcus aureus, Nocardiopsis dassonvillei, Streptomyces pristinae spiralis, Streptomyces viridochromo genes, Streptomyces viridochromogenes, Streptosporangium roseum, Streptosporangium roseum, AlicyclobacHlus acidocaldarius, Bacillus pseudomycoides, Bacillus selenitireducens, Exiguobacterium sibiricum, Lactobacillus delbrueckii, Lactobacillus salivarius, Microscilla marina, Burkholderiales bacterium, Polaromonas naphthalenivorans, Polaromonas sp., Crocosphaera watsonii, Cyanothece sp., Microcystis aeruginosa, Pseudomonas aeruginosa, Synechococcus sp., Acetohalobium arabaticum, Ammonifex degensii, Caldicelulosiruptor becscii, Candidatus Desulforudis, Clostridium botulinum, Clostridium difficile, Finegoldia magna, Natranaerobius thermophilus, Pelotomaculum thermopropionicum, Acidithiobacillus caldus, Acidithiobacillus ferrooxidans, Allochromatium vinosum, Marinobacter sp., Nitrosococcus halophilus, Nitrosococcus watsoni, Pseudoalteromonas haloplanktis, Ktedonobacter racemifer, Methanohalobium evestigatum, Anabaena variabilis, Nodularia spumigena, Nostoc sp., Arthrospira maxima, Arthrospira platensis, Arthrospira sp., Lyngbya sp., Microcoleus chthonoplastes, Oscillatoria sp., Petrotoga mobilis, Thermosipho africanus, Acaryochloris marina, Leptotrichia shahii, and Francisella novicida. In some embodiments, the organism is Streptococcus pyogenes (S. pyogenes). In some embodiments, the organism is Staphylococcus aureus (S. aureus). In some embodiments, the organism is Streptococcus thermophilus (S. thermophilus). In some embodiments, the organism is Staphylococcus lugdunensis (S. lugdunensis).

[0096] In some embodiments, a Cas protein can be derived from a variety of bacterial species including, but not limited to, Veillonella atypical, Fusobacterium nucleatum, Filifactor alocis, Solobacterium moorei, Coprococcus catus, Treponema denticola, Peptoniphilus duerdenii, Catenibacterium mitsuokai, Streptococcus mutans, Listeria innocua, Staphylococcus pseudintermedius, Acidaminococcus intestine, Olsenella uli, Oenococcus kitaharae, Bifidobacterium bifidum, Lactobacillus rhamnosus, Lactobacillus gasseri, Finegoldia magna, Mycoplasma mobile, Mycoplasma gallisepticum, Mycoplasma ovipneumoniae, Mycoplasma canis, Mycoplasma synoviae, Eubacterium rectale, Streptococcus thermophilus, Eubacterium dolichum, Lactobacillus coryniformis subsp. Torquens, Ilyobacter polytropus, Ruminococcus albus, Akkermansia muciniphila, Acidothermus cellulolyticus, Bifidobacterium longum, Bifidobacterium dentium, Corynebacterium diphtheria, Elusimicrobium minutum, Nitratifractor salsuginis, Sphaerochaeta globus, Fibrobacter succinogenes subsp. Succinogenes, Bacteroides fragilis, Capnocytophaga ochracea, Rhodopseudomonas palustris, Prevotella micans, Prevotella ruminicola, Flavobacterium columnare, Aminomonas paucivorans, Rhodospirillum rubrum, Candidatus Puniceispirillum marinum, Verminephrobacter eiseniae, Ralstonia syzygii, Dinoroseobacter shibae, Azospirillum, Nitrobacter hamburgensis, Bradyrhizobium, Wolinella succinogenes, Campylobacter jejuni subsp. Jejuni, Helicobacter mustelae, Bacillus cereus, Acidovorax ebreus, Clostridium perfringens, Parvibaculum lavamentivorans, Roseburia intestinalis, Neisseria meningitidis, Pasteurella multocida subsp. Multocida, Sutterella wadsworthensis, proteobacterium, Legionella pneumophila, Parasutterella excrementihominis, Wolinella succinogenes, and Francisella novicida.

[0097] In some embodiments, a Cas protein, e.g., Cas9, can be a wild type or a modified form of a Cas protein. In some embodiments, a Cas protein, e.g., Cas9, can be a nuclease active variant, nuclease inactive variant, a nickase, or a functional variant or a functional fragment of a wild type Cas protein. In some embodiments, a Cas protein, e.g., Cas9, can be a wild type or a modified form of a Cas protein. A Cas protein, e.g., Cas9, can be a nuclease active variant, nuclease inactive variant, a nickase, or a functional variant or functional fragment of a wild type Cas protein. In some embodiments, a Cas protein, e.g., Cas9, can comprise an amino acid change such as a deletion, insertion, substitution, fusion, chimera, or any combination thereof relative to a corresponding wild-type version of the Cas protein. In some embodiments, a Cas protein can be a polypeptide with at least about 50%, 60%, 70%, 80%, 90%, 91%, 92%, 93%, 94%, 95%, 96%, 97%, 98%, 99%, or 100% sequence identity or sequence similarity to a wild type exemplary Cas protein.

[0098] A Cas protein, e.g., Cas9, may comprise one or more domains. Non-limiting examples of Cas domains include, guide nucleic acid recognition and/or binding domain, nuclease domains (e.g., DNase or RNase domains, RuvC, HNH), DNA binding domain, RNA binding domain, helicase domains, protein-protein interaction domains, and dimerization domains. In various embodiments, a Cas protein comprises a guide nucleic acid recognition and/or binding domain can interact with a guide nucleic acid, and one or more nuclease domains that comprise catalytic activity for nucleic acid cleavage.

[0099] In some embodiments, a Cas protein, e.g., Cas9, comprises one or more nuclease domains. A Cas protein can comprise an amino acid sequence having at least about 50%, 60%, 70%, 80%, 90%, 91%, 92%, 93%, 94%, 95%, 96%, 97%, 98%, 99%, or 100% sequence identity to a nuclease domain (e.g., RuvC domain, HNH domain) of a wild-type Cas protein. In some embodiments, a Cas protein comprises a single nuclease domain. For example, a Cpf1 may comprise a RuvC domain but lacks HNH domain. In some embodiments, a Cas protein comprises two nuclease domains, e.g., a Cas9 protein can comprise an HNH nuclease domain and a RuvC nuclease domain.

[0100] In some embodiments, a prime editor comprises a Cas protein, e.g., Cas9, wherein all nuclease domains of the Cas protein are active. In some embodiments, a prime editor comprises a Cas protein having one or more inactive nuclease domains. One or a plurality of the nuclease domains (e.g., RuvC, HNH) of a Cas protein can be deleted or mutated so that they are no longer functional or comprise reduced nuclease activity. In some embodiments, a Cas protein, e.g., Cas9, comprising mutations in a nuclease domain has reduced (e.g., nickase) or abolished nuclease activity while maintaining its ability to target a nucleic acid locus at a search target sequence when complexed with a guide nucleic acid, e.g., a PEgRNA.

[0101] In some embodiments, a prime editor comprises a Cas nickase that can bind to the target gene in a sequence-specific manner and generate a single-strand break at a protospacer within double-stranded DNA in the target gene, but not a double-strand break. For example, the Cas nickase can cleave the edit strand or the non-edit strand of the target gene but may not cleave both. In some embodiments, a prime editor comprises a Cas nickase comprising two nuclease domains (e.g., Cas9), with one of the two nuclease domains modified to lack catalytic activity or deleted. In some embodiments, the Cas nickase of a prime editor comprises a nuclease inactive RuvC domain and a nuclease active HNH domain. In some embodiments, the Cas nickase of a prime editor comprises a nuclease inactive HNH domain and a nuclease active RuvC domain. In some embodiments, a prime editor comprises a Cas9 nickase having an amino acid substitution in the RuvC domain e.g., an amino acid substitution that reduces or abolishes nuclease activity of the RuvC domain. In some embodiments, the Cas9 nickase comprises a D10X amino acid substitution compared to a wild type S. pyogenes Cas9, wherein X is any amino acid other than D. In some embodiments, a prime editor comprises a Cas9 nickase having an amino acid substitution in the HNH domain e.g., an amino acid substitution that reduces or abolishes nuclease activity of the HNH domain. In some embodiments, the Cas9 nickase comprises a H840X amino acid substitution compared to a wild type S. pyogenes Cas9, wherein X is any amino acid other than H.

[0102] In some embodiments, a prime editor comprises a Cas protein that can bind to the target gene in a sequence-specific manner but lacks or has abolished nuclease activity and may not cleave either strand of a double stranded DNA in a target gene. Abolished activity or lacking activity can refer to an enzymatic activity less than 1%, less than 2%, less than 3%, less than 4%, less than 5%, less than 6%, less than 7%, less than 8%, less than 9%, or less than 10% activity compared to a wild-type exemplary activity (e.g., wild-type Cas9 nuclease activity). In some embodiments, a Cas protein of a prime editor completely lacks nuclease activity. A nuclease, e.g., Cas9, that lacks nuclease activity may be referred to as nuclease inactive or “nuclease dead” (abbreviated by “d”). A nuclease dead Cas protein (e.g., dCas, dCas9) can bind to a target polynucleotide but may not cleave the target polynucleotide. In some embodiments, a dead Cas protein is a dead Cas9 protein. In some embodiments, a prime editor comprises a nuclease dead Cas protein wherein all of the nuclease domains (e.g., both RuvC and HNH nuclease domains in a Cas9 protein; RuvC nuclease domain in a Cpf1 protein) are mutated to lack catalytic activity or are deleted.

[0103] A Cas protein can be modified. A Cas protein, e.g., Cas9, can be modified to increase or decrease nucleic acid binding affinity, nucleic acid binding specificity, and/or enzymatic activity. Cas proteins can also be modified to change any other activity or property of the protein, such as stability. For example, one or more nuclease domains of the Cas protein can be modified, deleted, or inactivated, or a Cas protein can be truncated to remove domains that are not essential for the function of the protein or to optimize (e.g., enhance or reduce) the activity of the Cas protein.

[0104] A Cas protein can be a fusion protein. For example, a Cas protein can be fused to a cleavage domain, an epigenetic modification domain, a transcriptional regulation domain, or a polymerase domain. A Cas protein can also be fused to a heterologous polypeptide providing increased or decreased stability. The fused domain or heterologous polypeptide can be located at the N-terminus, the C-terminus, or internally within the Cas protein.

[0105] In some embodiments, the Cas protein of a prime editor is a Class 2 Cas protein. In some embodiments, the Cas protein is a type II Cas protein. In some embodiments, the Cas protein is a Cas9 protein, a modified version of a Cas9 protein, a Cas9 protein homolog, mutant, variant, or a functional fragment thereof. As used herein, a Cas9, Cas9 protein, Cas9 polypeptide or a Cas9 nuclease refers to an RNA guided nuclease comprising one or more Cas9 nuclease domains and a Cas9 gRNA binding domain having the ability to bind a guide polynucleotide, e.g., a PEgRNA. A Cas9 protein may refer to a wild type Cas9 protein from any organism or a homolog, ortholog, or paralog from any organisms; any functional mutants or functional variants thereof; or any functional fragments or domains thereof. In some embodiments, a prime editor comprises a full-length Cas9 protein. In some embodiments, the Cas9 protein can generally comprises at least about 50%, 60%, 70%, 80%, 90%, 100% sequence identity to a wild type reference Cas9 protein (e.g., Cas9 from S. pyogenes). In some embodiments, the Cas9 comprises an amino acid change such as a deletion, insertion, substitution, fusion, chimera, or any combination thereof as compared to a wild type reference Cas9 protein. Exemplary Cas sequences are provided in Table 9 below.

[0106] In some embodiments, a Cas9 protein comprises an amino acid sequence that is at least 50%, at least 60%, at least 70%, at least 75%, at least 80%, 85%, at least 86%, at least 87%, at least 88%, at least 89%, at least 90%, at least 91%, at least 92%, at least 93%, at least 94%, at least 95%, at least 96%, at least 97%, at least 98%, at least 99%, or 100% identical to any one of the sequences set forth in SEQ ID NOs: 298-325. In some embodiments, a Cas9 protein is a Cas9 nickase that comprises an amino acid sequence that is at least 50%, at least 60%, at least 70%, at least 75%, at least 80%, 85%, at least 86%, at least 87%, at least 88%, at least 89%, at least 90%, at least 91%, at least 92%, at least 93%, at least 94%, at least 95%, at least 96%, at least 97%, at least 98%, at least 99%, or 100% identical to any one of the sequences set forth in SEQ ID NOs: 299, 300, 302, 303, 305, 306, 308, 309, 311, 312, 314, 315, 317, 318, 320, 321, 323, 324, or 325. In some embodiments, a Cas9 protein comprises an amino acid sequence that is selected from the group consisting of SEQ ID NOs: 298-325. In some embodiments, a prime editor comprises a Cas9 protein that comprises an amino acid sequence that lacks a N-terminus methionine relative to an amino acid sequence set forth in any one of SEQ ID NOs: 298, 301, 304, 307, 310, 313, 316, 319, or 322. In some embodiments, the prime editing compositions or prime editing systems disclosed herein comprises a polynucleotide (e.g., a DNA, or an RNA, e.g., an mRNA) that encodes a Cas9 protein that comprises an amino acid sequence that is at least 50%, at least 60%, at least 70%, at least 75%, at least 80%, 85%, at least 86%, at least 87%, at least 88%, at least 89%, at least 90%, at least 91%, at least 92%, at least 93%, at least 94%, at least 95%, at least 96%, at least 97%, at least 98%, at least 99%, or 100% identical to any one of the sequences set forth in SEQ ID NOs: 298-325.

[0107] In some embodiments, a Cas9 protein comprises a Cas9 protein from Streptococcus pyogenes (Sp), e.g., as according to NC_002737.2:854751-858857 or the protein encoded by UniProt Q99ZW2, e.g., as according to SEQ ID NO: 298. In some embodiments, a prime editor comprises a Cas9 protein (e.g., a SpCas9) as according to any one of the sequences set forth in SEQ ID NOs: 298-300, or 325 or a variant thereof. In some embodiments, the Cas9 protein is a SpCas9. In some embodiments, a SpCas9 can be a wild type SpCas9, a SpCas9 variant, or a nickase SpCas9. In some embodiments, the SpCas9 lacks the N-terminus methionine relative to a corresponding SpCas9 (e.g., a wild type SpCas9, a SpCas9 variant or a nickase SpCas9). In some embodiments, a prime editor comprises a Cas9 protein, having an amino acid sequence as according to SEQ ID NO: 298, not including the N-terminus methionine. In some embodiments, a wild type SpCas9 comprises an amino acid sequence set forth in SEQ ID NO: 298. In some embodiments, a prime editor comprises a Cas9 protein comprising one or more mutations (e.g., amino acid substitutions, insertions and/or deletions) relative to a corresponding wild type Cas9 protein (e.g., a wild type SpCas9). In some embodiments, the Cas9 protein comprising one or more mutations relative to a wild type Cas9 (e.g., a wild type SpCas9) protein comprises an amino acid sequence set forth in SEQ ID NO: 299, SEQ ID NO: 300 or SEQ ID NO: 325. Exemplary Streptococcus pyogenes Cas9 (SpCas9) amino acid sequence useful in the prime editors disclosed herein are provided below in SEQ ID NOs: 298-300, and 325.

[0108] In some embodiments, a prime editor comprises a Cas9 protein (e.g., a SluCas9) as according to any one of the SEQ ID NOS: 301-303 or a variant thereof. In some embodiments, a prime editor comprises a Cas9 protein from Staphylococcus lugdunensis (SluCas9) e.g., as according to any one of the SEQ ID NOs: 301-303, or a variant thereof. In some embodiments, the Cas9 protein is a SluCas9. In some embodiments, a SluCas9 can be a wild type SluCas9, a SluCas9 variant, or a nickase SluCas9. In some embodiments, the SluCas9 lacks the N-terminus methionine relative to a corresponding SluCas9 (e.g., a wild type SluCas9, a SluCas9 variant or a nickase SluCas9). In some embodiments, a prime editor comprises a Cas9 protein, having an amino acid sequence as according to SEQ ID NO: 301, not including the N-terminus methionine. In some embodiments, a wild type SluCas9 comprises an amino acid sequence set forth in SEQ ID NO: 301. In some embodiments, a prime editor comprises a Cas9 protein comprising one or more mutations (e.g., amino acid substitutions, insertions and/or deletions) relative to a corresponding wild type Cas9 protein (e.g., a wild type SluCas9). In some embodiments, the Cas9 protein comprising one or mutations relative to a wild type Cas9 protein comprises an amino acid sequence set forth in SEQ ID NO: 302 or SEQ ID NO: 303. Exemplary Staphylococcus lugdunensis Cas9 (SluCas9) amino acid sequence useful in the prime editors disclosed herein are provided below in SEQ ID NOs: 301-303.

[0109] In some embodiments, a prime editor comprises a Cas9 protein from Staphylococcus aureus (SaCas9) e.g., as according to any of the SEQ ID NOS: 304-306, or a variant thereof. In some embodiments, a prime editor comprises a Cas9 protein from Staphylococcus aureus (SaCas9) e.g., as according to any one of the SEQ ID NOS: 304-306, or a variant thereof. In some embodiments, the Cas9 protein is a SaCas9. In some embodiments, a SaCas9 can be a wild type SaCas9, a SaCas9 variant, or a nickase SaCas9. In some embodiments, the SaCas9 lacks the N-terminus methionine relative to a corresponding SaCas9 (e.g., a wild type SaCas9, a SaCas9 variant or a nickase SaCas9). In some embodiments, a prime editor comprises a Cas9 protein, having an amino acid sequence as according to SEQ ID NO: 304, not including the N-terminus methionine. In some embodiments, a wild type SaCas9 comprises an amino acid sequence set forth in SEQ ID NO: 304. In some embodiments, a prime editor comprises a Cas9 protein comprising one or more mutations (e.g., amino acid substitutions, insertions and/or deletions relative to a corresponding wild type Cas9 protein (e.g., a wild type SaCas9). In some embodiments, the Cas9 protein comprising one or more mutations relative to a wild type Cas9 protein comprises an amino acid sequence set forth in SEQ ID NO: 305 or SEQ ID NO: 306. Exemplary Staphylococcus aureus Cas9 (SaCas9) amino acid sequence useful in the prime editors disclosed herein are provided below in SEQ ID NOs: 304-306.

[0110] In some embodiments, a prime editor comprises a Cas protein, e.g., a Cas9 variant, comprising modifications that allow altered PAM recognition. Exemplary Cas9 protein amino acid sequence (e.g., Cas9 variant with altered PAM recognition specificities) that are useful in the Prime editors of the disclosure are provided below in SEQ ID NOs 307-315, 322-324. In some embodiments, a prime editor comprises a Cas9 protein as according to any one of the sequences set forth in SEQ ID NOs: 307-315, 322-324 or a variant thereof. In some embodiments, the Cas9 protein is a Cas9 variant, for example, a SpCas9 variant (e.g., SpCas9-NG, SpCas9-NGA, SpRY, or SpG). In some embodiments, the Cas9 protein lacks the N-terminus methionine relative to a corresponding Cas9 protein (e.g., a Cas9 variant set forth in any one of SEQ ID NOs: 307, 310, 313, or 322). In some embodiments, a prime editor comprises a Cas9 protein (e.g., a Cas9 variant), having an amino acid sequence as according to any one of SEQ ID NOs: 307, 310, 313, or 322 not including the N-terminus methionine. In some embodiments, a prime editor comprises a Cas9 protein comprising one or more mutations (e.g., amino acid substitutions, insertions and/or deletions) relative to a corresponding Cas9 protein (e.g., a Cas9 protein set forth in any one of SEQ ID NOs: 307, 310, 313, or 322). In some embodiments, the Cas9 protein comprising one or mutations relative to a corresponding Cas9 protein comprises an amino acid sequence set forth in any one of SEQ ID NOs: 308, 309, 311, 312, 314, 315, 323, or 324.

[0111] In some embodiments, a Cas9 protein is a chimeric Cas9, e.g., modified Cas9, e.g., synthetic RNA-guided nucleases (sRGNs), e.g., modified by DNA family shuffling, e.g., sRGN3.1, sRGN3.3. In some embodiments, the DNA family shuffling comprises, fragmentation and reassembly of parental Cas9 genes, e.g., one or more of Cas9s from Staphylococcus hyicus (Shy), Staphylococcus lugdunensis (Slu), Staphylococcus microti (Smi), and Staphylococcus pasteuri (Spa). In some embodiments, a modified sluCas9 shows increased editing efficiency and/or specificity relative to a sluCas9 that is not modified. In some embodiments, a modified Cas9, e.g., a sRGN shows at least 10%, at least 20%, at least 30%, at least 40%, at least 50%, at least 60%, at least 70%, at least 80%, at least 90%, at least 100%, at least 150%, at least 200%, at least 300%, at least 400%, at least 500%, at least 600%, at least 700%, at least 800%, at least 900%, or at least 1000% increase in editing efficiency compared to a Cas9 that is not modified. In some embodiments, a Cas9, e.g., a sRGN shows at least 10%, at least 20%, at least 30%, at least 40%, at least 50%, at least 60%, at least 70%, at least 80%, at least 90%, at least 100%, at least 150%, at least 200%, at least 300%, at least 400%, at least 500%, at least 600%, at least 700%, at least 800%, at least 900%, or at least 1000% increase in specificity compared to a Cas9 that is not modified. In some embodiments, a Cas9, e.g., a sRGN shows at least 10%, at least 20%, at least 30%, at least 40%, at least 50%, at least 60%, at least 70%, at least 80%, at least 90%, at least 100%, at least 150%, at least 200%, at least 300%, at least 400%, at least 500%, at least 600%, at least 700%, at least 800%, at least 900%, or at least 1000% increase in cleavage activity compared to a Cas9 that is not modified. In some embodiments, a Cas9, e.g., a sRGN shows ability to cleave a 5′-NNGG-3′ PAM-containing target. In some embodiments, a prime editor comprises a Cas9 protein (e.g., a chimeric Cas9), e.g., as according any one of the sequences set forth in SEQ ID NOs: 316-321, or a variant thereof. Exemplary amino acid sequences of Cas9 protein (e.g., sRGN) useful in the prime editors disclosed herein are provided below in SEQ ID NOs: 316-321. In some embodiments, a prime editor comprises a Cas9 protein, that lacks a N-terminus methionine relative to SEQ ID NO: 316 or SEQ ID NO: 319. In some embodiments, a prime editor comprises a Cas9 protein comprising one or more mutations (e.g., amino acid substitutions, insertions and/or deletions) relative to a corresponding Cas9 protein (e.g., a Cas9 protein set forth in any one of SEQ ID NOs: 316, or 319.). In some embodiments, the Cas9 protein comprising one or mutations relative to a corresponding Cas9 protein comprises an amino acid sequence set forth in any one of SEQ ID NOs: 317, 318, 320, or 321.

TABLE 9
Exemplary Cas protein sequences

| SEQ | | |
|---|---|---|
| ID | Sequence | |
| NO: | description | Amino acid sequence |
| 298 | wild type | MDKKYSIGLDIGTNSVGWAVITDEYKVPSKKFKVLGNTDRHSIKKNLIGALLFDSGE |
| | Streptococcus | TAEATRLKRTARRRYTRRKNRICYLQEIFSNEMAKVDDSFFHRLEESFLVEEDKKHE |
| | Pyogenes Cas9 | RHPIFGNIVDEVAYHEKYPTIYHLRKKLVDSTDKADLRLIYLALAHMIKFRGHFLIEG |
| | (SpCas9) | DLNPDNSDVDKLFIQLVQTYNQLFEENPINASGVDAKAILSARLSKSRRLENLIAQLP |
| | | GEKKNGLFGNLIALSLGLTPNFKSNFDLAEDAKLQLSKDTYDDDLDNLLAQIGDQY |
| | | ADLFLAAKNLSDAILLSDILRVNTEITKAPLSASMIKRYDEHHQDLTLLKALVRQQLP |
| | | EKYKEIFFDQSKNGYAGYIDGGASQEEFYKFIKPILEKMDGTEELLVKLNREDLLRK |
| | | QRTFDNGSIPHQIHLGELHAILRRQEDFYPFLKDNREKIEKILTFRIPYYVGPLARGNS |
| | | RFAWMTRKSEETITPWNFEEVVDKGASAQSFIERMTNFDKNLPNEKVLPKHSLLYE |
| | | YFTVYNELTKVKYVTEGMRKPAFLSGEQKKAIVDLLFKTNRKVTVKQLKEDYFKKI |
| | | ECFDSVEISGVEDRFNASLGTYHDLLKIIKDKDFLDNEENEDILEDIVLTLTLFEDREM |
| | | IEERLKTYAHLFDDKVMKQLKRRRYTGWGRLSRKLINGIRDKQSGKTILDFLKSDGF |
| | | ANRNFMQLIHDDSLTFKEDIQKAQVSGQGDSLHEHIANLAGSPAIKKGILQTVKVVD |
| | | ELVKVMGRHKPENIVIEMARENQTTQKGQKNSRERMKRIEEGIKELGSQILKEHPVE |
| | | NTQLQNEKLYLYYLQNGRDMYVDQELDINRLSDYDVDHIVPQSFLKDDSIDNKVLT |
| | | RSDKNRGKSDNVPSEEVVKKMKNYWRQLLNAKLITQRKFDNLTKAERGGLSELDK |
| | | AGFIKRQLVETRQITKHVAQILDSRMNTKYDENDKLIREVKVITLKSKLVSDFRKDF |
| | | QFYKVREINNYHHAHDAYLNAVVGTALIKKYPKLESEFVYGDYKVYDVRKMIAKS |
| | | EQEIGKATAKYFFYSNIMNFFKTEITLANGEIRKRPLIETNGETGEIVWDKGRDFATV |
| | | RKVLSMPQVNIVKKTEVQTGGFSKESILPKRNSDKLIARKKDWDPKKYGGFDSPTV |
| | | AYSVLVVAKVEKGKSKKLKSVKELLGITIMERSSFEKNPIDFLEAKGYKEVKKDLIIK |
| | | LPKYSLFELENGRKRMLASAGELQKGNELALPSKYVNFLYLASHYEKLKGSPEDNE |
| | | QKQLFVEQHKHYLDEIIEQISEFSKRVILADANLDKVLSAYNKHRDKPIREQAENIIH |
| | | LFTLTNLGAPAAFKYFDTTIDRKRYTSTKEVLDATLIHQSITGLYETRIDLSQLGGD |
| 299 | SpCas9 H840A | MDKKYSIGLDIGTNSVGWAVITDEYKVPSKKFKVLGNTDRHSIKKNLIGALLFDSGE |
| | nickase | TAEATRLKRTARRRYTRRKNRICYLQEIFSNEMAKVDDSFFHRLEESFLVEEDKKHE |
| | | RHPIFGNIVDEVAYHEKYPTIYHLRKKLVDSTDKADLRLIYLALAHMIKFRGHFLIEG |
| | | DLNPDNSDVDKLFIQLVQTYNQLFEENPINASGVDAKAILSARLSKSRRLENLIAQLP |
| | | GEKKNGLFGNLIALSLGLTPNFKSNFDLAEDAKLQLSKDTYDDDLDNLLAQIGDQY |
| | | ADLFLAAKNLSDAILLSDILRVNTEITKAPLSASMIKRYDEHHQDLTLLKALVRQQLP |
| | | EKYKEIFFDQSKNGYAGYIDGGASQEEFYKFIKPILEKMDGTEELLVKLNREDLLRK |
| | | QRTFDNGSIPHQIHLGELHAILRRQEDFYPFLKDNREKIEKILTFRIPYYVGPLARGNS |
| | | RFAWMTRKSEETITPWNFEEVVDKGASAQSFIERMTNFDKNLPNEKVLPKHSLLYE |
| | | YFTVYNELTKVKYVTEGMRKPAFLSGEQKKAIVDLLFKTNRKVTVKQLKEDYFKKI |
| | | ECFDSVEISGVEDRFNASLGTYHDLLKIIKDKDFLDNEENEDILEDIVLTLTLFEDREM |
| | | IEERLKTYAHLFDDKVMKQLKRRRYTGWGRLSRKLINGIRDKQSGKTILDFLKSDGF |
| | | ANRNFMQLIHDDSLTFKEDIQKAQVSGQGDSLHEHIANLAGSPAIKKGILQTVKVVD |
| | | ELVKVMGRHKPENIVIEMARENQTTQKGQKNSRERMKRIEEGIKELGSQILKEHPVE |
| | | NTQLQNEKLYLYYLQNGRDMYVDQELDINRLSDYDVDAIVPQSFLKDDSIDNKVLT |
| | | RSDKNRGKSDNVPSEEVVKKMKNYWRQLLNAKLITQRKFDNLTKAERGGLSELDK |
| | | AGFIKRQLVETRQITKHVAQILDSRMNTKYDENDKLIREVKVITLKSKLVSDFRKDF |
| | | QFYKVREINNYHHAHDAYLNAVVGTALIKKYPKLESEFVYGDYKVYDVRKMIAKS |
| | | EQEIGKATAKYFFYSNIMNFFKTEITLANGEIRKRPLIETNGETGEIVWDKGRDFATV |
| | | RKVLSMPQVNIVKKTEVQTGGFSKESILPKRNSDKLIARKKDWDPKKYGGFDSPTV |
| | | AYSVLVVAKVEKGKSKKLKSVKELLGITIMERSSFEKNPIDFLEAKGYKEVKKDLIIK |
| | | LPKYSLFELENGRKRMLASAGELQKGNELALPSKYVNFLYLASHYEKLKGSPEDNE |
| | | QKQLFVEQHKHYLDEIIEQISEFSKRVILADANLDKVLSAYNKHRDKPIREQAENIIH |
| | | LFTLTNLGAPAAFKYFDTTIDRKRYTSTKEVLDATLIHQSITGLYETRIDLSQLGGD |
| 300 | Met (-) | DKKYSIGLDIGTNSVGWAVITDEYKVPSKKFKVLGNTDRHSIKKNLIGALLFDSGET |
| | SpCas9 | AEATRLKRTARRRYTRRKNRICYLQEIFSNEMAKVDDSFFHRLEESFLVEEDKKHER |
| | H840A nickase | HPIFGNIVDEVAYHEKYPTIYHLRKKLVDSTDKADLRLIYLALAHMIKFRGHFLIEGD |
| | | LNPDNSDVDKLFIQLVQTYNQLFEENPINASGVDAKAILSARLSKSRRLENLIAQLPG |
| | | EKKNGLFGNLIALSLGLTPNFKSNFDLAEDAKLQLSKDTYDDDLDNLLAQIGDQYA |
| | | DLFLAAKNLSDAILLSDILRVNTEITKAPLSASMIKRYDEHHQDLTLLKALVRQQLPE |
| | | KYKEIFFDQSKNGYAGYIDGGASQEEFYKFIKPILEKMDGTEELLVKLNREDLLRKQ |
| | | RTFDNGSIPHQIHLGELHAILRRQEDFYPFLKDNREKIEKILTFRIPYYVGPLARGNSR |
| | | FAWMTRKSEETITPWNFEEVVDKGASAQSFIERMTNFDKNLPNEKVLPKHSLLYEY |
| | | FTVYNELTKVKYVTEGMRKPAFLSGEQKKAIVDLLFKTNRKVTVKQLKEDYFKKIE |
| | | CFDSVEISGVEDRFNASLGTYHDLLKIIKDKDFLDNEENEDILEDIVLTLTLFEDREMI |
| | | EERLKTYAHLFDDKVMKQLKRRRYTGWGRLSRKLINGIRDKQSGKTILDFLKSDGF |
| | | ANRNFMQLIHDDSLTFKEDIQKAQVSGQGDSLHEHIANLAGSPAIKKGILQTVKVVD |
| | | ELVKVMGRHKPENIVIEMARENQTTQKGQKNSRERMKRIEEGIKELGSQILKEHPVE |
| | | NTQLQNEKLYLYYLQNGRDMYVDQELDINRLSDYDVDAIVPQSFLKDDSIDNKVLT |
| | | RSDKNRGKSDNVPSEEVVKKMKNYWRQLLNAKLITQRKFDNLTKAERGGLSELDK |
| | | AGFIKRQLVETRQITKHVAQILDSRMNTKYDENDKLIREVKVITLKSKLVSDFRKDF |
| | | QFYKVREINNYHHAHDAYLNAVVGTALIKKYPKLESEFVYGDYKVYDVRKMIAKS |
| | | EQEIGKATAKYFFYSNIMNFFKTEITLANGEIRKRPLIETNGETGEIVWDKGRDFATV |
| | | RKVLSMPQVNIVKKTEVQTGGFSKESILPKRNSDKLIARKKDWDPKKYGGFDSPTV |
| | | AYSVLVVAKVEKGKSKKLKSVKELLGITIMERSSFEKNPIDFLEAKGYKEVKKDLIIK |
| | | LPKYSLFELENGRKRMLASAGELQKGNELALPSKYVNFLYLASHYEKLKGSPEDNE |
| | | QKQLFVEQHKHYLDEIIEQISEFSKRVILADANLDKVLSAYNKHRDKPIREQAENIIH |
| | | LFTLTNLGAPAAFKYFDTTIDRKRYTSTKEVLDATLIHQSITGLYETRIDLSQLGGD |
| 301 | wild type | MNQKFILGLDIGITSVGYGLIDYETKNIIDAGVRLFPEANVENNEGRRSKRGSRRLKR |
| | Staphylococcus | RRIHRLERVKKLLEDYNLLDQSQIPQSTNPYAIRVKGLSEALSKDELVIALLHIAKRR |
| | lugdunensis | GIHKIDVIDSNDDVGNELSTKEQLNKNSKLLKDKFVCQIQLERMNEGQVRGEKNRF |
| | (Slu)Cas9 | KTADIIKEIIQLLNVQKNFHQLDENFINKYIELVEMRREYFEGPGKGSPYGWEGDPK |
| | | AWYETLMGHCTYFPDELRSVKYAYSADLFNALNDLNNLVIQRDGLSKLEYHEKYH |
| | | IIENVFKQKKKPTLKQIANEINVNPEDIKGYRITKSGKPQFTEFKLYHDLKSVLFDQSI |
| | | LENEDVLDQIAEILTIYQDKDSIKSKLTELDILLNEEDKENIAQLTGYTGTHRLSLKCI |
| | | RLVLEEQWYSSRNQMEIFTHLNIKPKKINLTAANKIPKAMIDEFILSPVVKRTFGQAI |
| | | NLINKIIEKYGVPEDIIIELARENNSKDKQKFINEMQKKNENTRKRINEIIGKYGNQNA |
| | | KRLVEKIRLHDEQEGKCLYSLESIPLEDLLNNPNHYEVDHIIPRSVSFDNSYHNKVLV |
| | | KQSENSKKSNLTPYQYFNSGKSKLSYNQFKQHILNLSKSQDRISKKKKEYLLEERDI |
| | | NKFEVQKEFINRNLVDTRYATRELTNYLKAYFSANNMNVKVKTINGSFTDYLRKV |
| | | WKFKKERNHGYKHHAEDALIIANADFLFKENKKLKAVNSVLEKPEIESKQLDIQVD |
| | | SEDNYSEMFIIPKQVQDIKDFRNFKYSHRVDKKPNRQLINDTLYSTRKKDNSTYIVQ |
| | | TIKDIYAKDNTTLKKQFDKSPEKFLMYQHDPRTFEKLEVIMKQYANEKNPLAKYHE |
| | | ETGEYLTKYSKKNNGPIVKSLKYIGNKLGSHLDVTHQFKSSTKKLVKLSIKPYRFDV |
| | | YLTDKGYKFITISYLDVLKKDNYYYIPEQKYDKLKLGKAIDKNAKFIASFYKNDLIK |
| | | LDGEIYKIIGVNSDTRNMIELDLPDIRYKEYCELNNIKGEPRIKKTIGKKVNSIEKLTT |
| | | DVLGNVFTNTQYTKPQLLFKRGN |
| 302 | SluCas9 | MNQKFILGLDIGITSVGYGLIDYETKNIIDAGVRLFPEANVENNEGRRSKRGSRRLKR |
| | N582A nickase | RRIHRLERVKKLLEDYNLLDQSQIPQSTNPYAIRVKGLSEALSKDELVIALLHIAKRR |
| | | GIHKIDVIDSNDDVGNELSTKEQLNKNSKLLKDKFVCQIQLERMNEGQVRGEKNRF |
| | | KTADIIKEIIQLLNVQKNFHQLDENFINKYIELVEMRREYFEGPGKGSPYGWEGDPK |
| | | AWYETLMGHCTYFPDELRSVKYAYSADLFNALNDLNNLVIQRDGLSKLEYHEKYH |
| | | IIENVFKQKKKPTLKQIANEINVNPEDIKGYRITKSGKPQFTEFKLYHDLKSVLFDQSI |
| | | LENEDVLDQIAEILTIYQDKDSIKSKLTELDILLNEEDKENIAQLTGYTGTHRLSLKCI |
| | | RLVLEEQWYSSRNQMEIFTHLNIKPKKINLTAANKIPKAMIDEFILSPVVKRTFGQAI |
| | | NLINKIIEKYGVPEDIIIELARENNSKDKQKFINEMQKKNENTRKRINEIIGKYGNQNA |
| | | KRLVEKIRLHDEQEGKCLYSLESIPLEDLLNNPNHYEVDHIIPRSVSFDNSYHNKVLV |
| | | KQSEASKKSNLTPYQYFNSGKSKLSYNQFKQHILNLSKSQDRISKKKKEYLLEERDI |
| | | NKFEVQKEFINRNLVDTRYATRELTNYLKAYFSANNMNVKVKTINGSFTDYLRKV |
| | | WKFKKERNHGYKHHAEDALIIANADFLFKENKKLKAVNSVLEKPEIESKQLDIQVD |
| | | SEDNYSEMFIIPKQVQDIKDFRNFKYSHRVDKKPNRQLINDTLYSTRKKDNSTYIVQ |
| | | TIKDIYAKDNTTLKKQFDKSPEKFLMYQHDPRTFEKLEVIMKQYANEKNPLAKYHE |
| | | ETGEYLTKYSKKNNGPIVKSLKYIGNKLGSHLDVTHQFKSSTKKLVKLSIKPYRFDV |
| | | YLTDKGYKFITISYLDVLKKDNYYYIPEQKYDKLKLGKAIDKNAKFIASFYKNDLIK |
| | | LDGEIYKIIGVNSDTRNMIELDLPDIRYKEYCELNNIKGEPRIKKTIGKKVNSIEKLTT |
| | | DVLGNVFTNTQYTKPQLLFKRGN |
| 303 | Met (-) | NQKFILGLDIGITSVGYGLIDYETKNIIDAGVRLFPEANVENNEGRRSKRGSRRLKRR |
| | SluCas9 | RIHRLERVKKLLEDYNLLDQSQIPQSTNPYAIRVKGLSEALSKDELVIALLHIAKRRGI |
| | nickase | HKIDVIDSNDDVGNELSTKEQLNKNSKLLKDKFVCQIQLERMNEGQVRGEKNRFKT |
| | | ADIIKEIIQLLNVQKNFHQLDENFINKYIELVEMRREYFEGPGKGSPYGWEGDPKAW |
| | | YETLMGHCTYFPDELRSVKYAYSADLFNALNDLNNLVIQRDGLSKLEYHEKYHIIE |
| | | NVFKQKKKPTLKQIANEINVNPEDIKGYRITKSGKPQFTEFKLYHDLKSVLFDQSILE |
| | | NEDVLDQIAEILTIYQDKDSIKSKLTELDILLNEEDKENIAQLTGYTGTHRLSLKCIRL |
| | | VLEEQWYSSRNQMEIFTHLNIKPKKINLTAANKIPKAMIDEFILSPVVKRTFGQAINLI |
| | | NKIIEKYGVPEDIIIELARENNSKDKQKFINEMQKKNENTRKRINEIIGKYGNQNAKR |
| | | LVEKIRLHDEQEGKCLYSLESIPLEDLLNNPNHYEVDHIIPRSVSFDNSYHNKVLVKQ |
| | | SEASKKSNLTPYQYFNSGKSKLSYNQFKQHILNLSKSQDRISKKKKEYLLEERDINKF |
| | | EVQKEFINRNLVDTRYATRELTNYLKAYFSANNMNVKVKTINGSFTDYLRKVWKF |
| | | KKERNHGYKHHAEDALIIANADFLFKENKKLKAVNSVLEKPEIESKQLDIQVDSEDN |
| | | YSEMFIIPKQVQDIKDFRNFKYSHRVDKKPNRQLINDTLYSTRKKDNSTYIVQTIKDI |
| | | YAKDNTTLKKQFDKSPEKFLMYQHDPRTFEKLEVIMKQYANEKNPLAKYHEETGE |
| | | YLTKYSKKNNGPIVKSLKYIGNKLGSHLDVTHQFKSSTKKLVKLSIKPYRFDVYLTD |
| | | KGYKFITISYLDVLKKDNYYYIPEQKYDKLKLGKAIDKNAKFIASFYKNDLIKLDGEI |
| | | YKIIGVNSDTRNMIELDLPDIRYKEYCELNNIKGEPRIKKTIGKKVNSIEKLTTDVLGN |
| | | VFTNTQYTKPQLLFKRGN |
| 304 | Staphylococcus | MKRNYILGLDIGITSVGYGIIDYETRDVIDAGVRLFKEANVENNEGRRSKRGARRLK |
| | aureus Cas9 | RRRRHRIQRVKKLLFDYNLLTDHSELSGINPYEARVKGLSQKLSEEEFSAALLHLAK |
| | (SaCas9) | RRGVHNVNEVEEDTGNELSTKEQISRNSKALEEKYVAELQLERLKKDGEVRGSINR |
| | | FKTSDYVKEAKQLLKVQKAYHQLDQSFIDTYIDLLETRRTYYEGPGEGSPFGWKDI |
| | | KEWYEMLMGHCTYFPEELRSVKYAYNADLYNALNDLNNLVITRDENEKLEYYEKF |
| | | QIIENVFKQKKKPTLKQIAKEILVNEEDIKGYRVTSTGKPEFTNLKVYHDIKDITARK |
| | | EIIENAELLDQIAKILTIYQSSEDIQEELTNLNSELTQEEIEQISNLKGYTGTHNLSLKAI |
| | | NLILDELWHTNDNQIAIFNRLKLVPKKVDLSQQKEIPTTLVDDFILSPVVKRSFIQSIK |
| | | VINAIIKKYGLPNDIIIELAREKNSKDAQKMINEMQKRNRQTNERIEEIIRTTGKENAK |
| | | YLIEKIKLHDMQEGKCLYSLEAIPLEDLLNNPFNYEVDHIIPRSVSFDNSFNNKVLVK |
| | | QEENSKKGNRTPFQYLSSSDSKISYETFKKHILNLAKGKGRISKTKKEYLLEERDINR |
| | | FSVQKDFINRNLVDTRYATRGLMNLLRSYFRVNNLDVKVKSINGGFTSFLRRKWKF |
| | | KKERNKGYKHHAEDALIIANADFIFKEWKKLDKAKKVMENQMFEEKQAESMPEIE |
| | | TEQEYKEIFITPHQIKHIKDFKDYKYSHRVDKKPNRELINDTLYSTRKDDKGNTLIVN |
| | | NLNGLYDKDNDKLKKLINKSPEKLLMYHHDPQTYQKLKLIMEQYGDEKNPLYKYY |
| | | EETGNYLTKYSKKDNGPVIKKIKYYGNKLNAHLDITDDYPNSRNKVVKLSLKPYRF |
| | | DVYLDNGVYKFVTVKNLDVIKKENYYEVNSKCYEEAKKLKKISNQAEFIASFYNND |
| | | LIKINGELYRVIGVNNDLLNRIEVNMIDITYREYLENMNDKRPPRIIKTIASKTQSIKK |
| | | YSTDILGNLYEVKSKKHPQIIKKG |
| 305 | SaCas9 N580A | MKRNYILGLDIGITSVGYGIIDYETRDVIDAGVRLFKEANVENNEGRRSKRGARRLK |
| | nickase | RRRRHRIQRVKKLLFDYNLLTDHSELSGINPYEARVKGLSQKLSEEEFSAALLHLAK |
| | | RRGVHNVNEVEEDTGNELSTKEQISRNSKALEEKYVAELQLERLKKDGEVRGSINR |
| | | FKTSDYVKEAKQLLKVQKAYHQLDQSFIDTYIDLLETRRTYYEGPGEGSPFGWKDI |
| | | KEWYEMLMGHCTYFPEELRSVKYAYNADLYNALNDLNNLVITRDENEKLEYYEKF |
| | | QIIENVFKQKKKPTLKQIAKEILVNEEDIKGYRVTSTGKPEFTNLKVYHDIKDITARK |
| | | EIIENAELLDQIAKILTIYQSSEDIQEELTNLNSELTQEEIEQISNLKGYTGTHNLSLKAI |
| | | NLILDELWHTNDNQIAIFNRLKLVPKKVDLSQQKEIPTTLVDDFILSPVVKRSFIQSIK |
| | | VINAIIKKYGLPNDIIIELAREKNSKDAQKMINEMQKRNRQTNERIEEIIRTTGKENAK |
| | | YLIEKIKLHDMQEGKCLYSLEAIPLEDLLNNPFNYEVDHIIPRSVSFDNSFNNKVLVK |
| | | QEEASKKGNRTPFQYLSSSDSKISYETFKKHILNLAKGKGRISKTKKEYLLEERDINR |
| | | FSVQKDFINRNLVDTRYATRGLMNLLRSYFRVNNLDVKVKSINGGFTSFLRRKWKF |
| | | KKERNKGYKHHAEDALIIANADFIFKEWKKLDKAKKVMENQMFEEKQAESMPEIE |
| | | TEQEYKEIFITPHQIKHIKDFKDYKYSHRVDKKPNRELINDTLYSTRKDDKGNTLIVN |
| | | NLNGLYDKDNDKLKKLINKSPEKLLMYHHDPQTYQKLKLIMEQYGDEKNPLYKYY |
| | | EETGNYLTKYSKKDNGPVIKKIKYYGNKLNAHLDITDDYPNSRNKVVKLSLKPYRF |
| | | DVYLDNGVYKFVTVKNLDVIKKENYYEVNSKCYEEAKKLKKISNQAEFIASFYNND |
| | | LIKINGELYRVIGVNNDLLNRIEVNMIDITYREYLENMNDKRPPRIIKTIASKTQSIKK |
| | | YSTDILGNLYEVKSKKHPQIIKKG |
| 306 | Met (-) | KRNYILGLDIGITSVGYGIIDYETRDVIDAGVRLFKEANVENNEGRRSKRGARRLKR |
| | SaCas9 | RRRHRIQRVKKLLFDYNLLTDHSELSGINPYEARVKGLSQKLSEEEFSAALLHLAKR |
| | nickase | RGVHNVNEVEEDTGNELSTKEQISRNSKALEEKYVAELQLERLKKDGEVRGSINRF |
| | | KTSDYVKEAKQLLKVQKAYHQLDQSFIDTYIDLLETRRTYYEGPGEGSPFGWKDIK |
| | | EWYEMLMGHCTYFPEELRSVKYAYNADLYNALNDLNNLVITRDENEKLEYYEKFQ |
| | | IIENVFKQKKKPTLKQIAKEILVNEEDIKGYRVTSTGKPEFTNLKVYHDIKDITARKEI |
| | | IENAELLDQIAKILTIYQSSEDIQEELTNLNSELTQEEIEQISNLKGYTGTHNLSLKAIN |
| | | LILDELWHTNDNQIAIFNRLKLVPKKVDLSQQKEIPTTLVDDFILSPVVKRSFIQSIKVI |
| | | NAIIKKYGLPNDIIIELAREKNSKDAQKMINEMQKRNRQTNERIEEIIRTTGKENAKY |
| | | LIEKIKLHDMQEGKCLYSLEAIPLEDLLNNPFNYEVDHIIPRSVSFDNSFNNKVLVKQ |
| | | EEASKKGNRTPFQYLSSSDSKISYETFKKHILNLAKGKGRISKTKKEYLLEERDINRFS |
| | | VQKDFINRNLVDTRYATRGLMNLLRSYFRVNNLDVKVKSINGGFTSFLRRKWKFK |
| | | KERNKGYKHHAEDALIIANADFIFKEWKKLDKAKKVMENQMFEEKQAESMPEIETE |
| | | QEYKEIFITPHQIKHIKDFKDYKYSHRVDKKPNRELINDTLYSTRKDDKGNTLIVNNL |
| | | NGLYDKDNDKLKKLINKSPEKLLMYHHDPQTYQKLKLIMEQYGDEKNPLYKYYEE |
| | | TGNYLTKYSKKDNGPVIKKIKYYGNKLNAHLDITDDYPNSRNKVVKLSLKPYRFDV |
| | | YLDNGVYKFVTVKNLDVIKKENYYEVNSKCYEEAKKLKKISNQAEFIASFYNNDLI |
| | | KINGELYRVIGVNNDLLNRIEVNMIDITYREYLENMNDKRPPRIIKTIASKTQSIKKYS |
| | | TDILGNLYEVKSKKHPQIIKKG |
| 307 | SpCas9-NG | MDKKYSIGLDIGTNSVGWAVITDEYKVPSKKFKVLGNTDRHSIKKNLIGALLFDSGE |
| | (VRVRFRR) | TAEATRLKRTARRRYTRRKNRICYLQEIFSNEMAKVDDSFFHRLEESFLVEEDKKHE |
| | | RHPIFGNIVDEVAYHEKYPTIYHLRKKLVDSTDKADLRLIYLALAHMIKFRGHFLIEG |
| | | DLNPDNSDVDKLFIQLVQTYNQLFEENPINASGVDAKAILSARLSKSRRLENLIAQLP |
| | | GEKKNGLFGNLIALSLGLTPNFKSNFDLAEDAKLQLSKDTYDDDLDNLLAQIGDQY |
| | | ADLFLAAKNLSDAILLSDILRVNTEITKAPLSASMIKRYDEHHQDLTLLKALVRQQLP |
| | | EKYKEIFFDQSKNGYAGYIDGGASQEEFYKFIKPILEKMDGTEELLVKLNREDLLRK |
| | | QRTFDNGSIPHQIHLGELHAILRRQEDFYPFLKDNREKIEKILTFRIPYYVGPLARGNS |
| | | RFAWMTRKSEETITPWNFEEVVDKGASAQSFIERMTNFDKNLPNEKVLPKHSLLYE |
| | | YFTVYNELTKVKYVTEGMRKPAFLSGEQKKAIVDLLFKTNRKVTVKQLKEDYFKKI |
| | | ECFDSVEISGVEDRFNASLGTYHDLLKIIKDKDFLDNEENEDILEDIVLTLTLFEDREM |
| | | IEERLKTYAHLFDDKVMKQLKRRRYTGWGRLSRKLINGIRDKQSGKTILDFLKSDGF |
| | | ANRNFMQLIHDDSLTFKEDIQKAQVSGQGDSLHEHIANLAGSPAIKKGILQTVKVVD |
| | | ELVKVMGRHKPENIVIEMARENQTTQKGQKNSRERMKRIEEGIKELGSQILKEHPVE |
| | | NTQLQNEKLYLYYLQNGRDMYVDQELDINRLSDYDVDHIVPQSFLKDDSIDNKVLT |
| | | RSDKNRGKSDNVPSEEVVKKMKNYWRQLLNAKLITQRKFDNLTKAERGGLSELDK |
| | | AGFIKRQLVETRQITKHVAQILDSRMNTKYDENDKLIREVKVITLKSKLVSDFRKDF |
| | | QFYKVREINNYHHAHDAYLNAVVGTALIKKYPKLESEFVYGDYKVYDVRKMIAKS |
| | | EQEIGKATAKYFFYSNIMNFFKTEITLANGEIRKRPLIETNGETGEIVWDKGRDFATV |
| | | RKVLSMPQVNIVKKTEVQTGGFSKESIRPKRNSDKLIARKKDWDPKKYGGFVSPTV |
| | | AYSVLVVAKVEKGKSKKLKSVKELLGITIMERSSFEKNPIDFLEAKGYKEVKKDLIIK |
| | | LPKYSLFELENGRKRMLASARFLQKGNELALPSKYVNFLYLASHYEKLKGSPEDNE |
| | | QKQLFVEQHKHYLDEIIEQISEFSKRVILADANLDKVLSAYNKHRDKPIREQAENIIH |
| | | LFTLTNLGAPRAFKYFDTTIDRKVYRSTKEVLDATLIHQSITGLYETRIDLSQLGGD |
| 308 | spCas9-NG | MDKKYSIGLDIGTNSVGWAVITDEYKVPSKKFKVLGNTDRHSIKKNLIGALLFDSGE |
| | (H840A_VRV | TAEATRLKRTARRRYTRRKNRICYLQEIFSNEMAKVDDSFFHRLEESFLVEEDKKHE |
| | RFRR) | RHPIFGNIVDEVAYHEKYPTIYHLRKKLVDSTDKADLRLIYLALAHMIKFRGHFLIEG |
| | Nickase | DLNPDNSDVDKLFIQLVQTYNQLFEENPINASGVDAKAILSARLSKSRRLENLIAQLP |
| | | GEKKNGLFGNLIALSLGLTPNFKSNFDLAEDAKLQLSKDTYDDDLDNLLAQIGDQY |
| | | ADLFLAAKNLSDAILLSDILRVNTEITKAPLSASMIKRYDEHHQDLTLLKALVRQQLP |
| | | EKYKEIFFDQSKNGYAGYIDGGASQEEFYKFIKPILEKMDGTEELLVKLNREDLLRK |
| | | QRTFDNGSIPHQIHLGELHAILRRQEDFYPFLKDNREKIEKILTFRIPYYVGPLARGNS |
| | | RFAWMTRKSEETITPWNFEEVVDKGASAQSFIERMTNFDKNLPNEKVLPKHSLLYE |
| | | YFTVYNELTKVKYVTEGMRKPAFLSGEQKKAIVDLLFKTNRKVTVKQLKEDYFKKI |
| | | ECFDSVEISGVEDRFNASLGTYHDLLKIIKDKDFLDNEENEDILEDIVLTLTLFEDREM |
| | | IEERLKTYAHLFDDKVMKQLKRRRYTGWGRLSRKLINGIRDKQSGKTILDFLKSDGF |
| | | ANRNFMQLIHDDSLTFKEDIQKAQVSGQGDSLHEHIANLAGSPAIKKGILQTVKVVD |
| | | ELVKVMGRHKPENIVIEMARENQTTQKGQKNSRERMKRIEEGIKELGSQILKEHPVE |
| | | NTQLQNEKLYLYYLQNGRDMYVDQELDINRLSDYDVDAIVPQSFLKDDSIDNKVLT |
| | | RSDKNRGKSDNVPSEEVVKKMKNYWRQLLNAKLITQRKFDNLTKAERGGLSELDK |
| | | AGFIKRQLVETRQITKHVAQILDSRMNTKYDENDKLIREVKVITLKSKLVSDFRKDF |
| | | QFYKVREINNYHHAHDAYLNAVVGTALIKKYPKLESEFVYGDYKVYDVRKMIAKS |
| | | EQEIGKATAKYFFYSNIMNFFKTEITLANGEIRKRPLIETNGETGEIVWDKGRDFATV |
| | | RKVLSMPQVNIVKKTEVQTGGFSKESIRPKRNSDKLIARKKDWDPKKYGGFVSPTV |
| | | AYSVLVVAKVEKGKSKKLKSVKELLGITIMERSSFEKNPIDFLEAKGYKEVKKDLIIK |
| | | LPKYSLFELENGRKRMLASARFLQKGNELALPSKYVNFLYLASHYEKLKGSPEDNE |
| | | QKQLFVEQHKHYLDEIIEQISEFSKRVILADANLDKVLSAYNKHRDKPIREQAENIIH |
| | | LFTLTNLGAPRAFKYFDTTIDRKVYRSTKEVLDATLIHQSITGLYETRIDLSQLGGD |
| 309 | Met (-) | DKKYSIGLDIGTNSVGWAVITDEYKVPSKKFKVLGNTDRHSIKKNLIGALLFDSGET |
| | SpCas9-NG | AEATRLKRTARRRYTRRKNRICYLQEIFSNEMAKVDDSFFHRLEESFLVEEDKKHER |
| | Nickase | HPIFGNIVDEVAYHEKYPTIYHLRKKLVDSTDKADLRLIYLALAHMIKFRGHFLIEGD |
| | | LNPDNSDVDKLFIQLVQTYNQLFEENPINASGVDAKAILSARLSKSRRLENLIAQLPG |
| | | EKKNGLFGNLIALSLGLTPNFKSNFDLAEDAKLQLSKDTYDDDLDNLLAQIGDQYA |
| | | DLFLAAKNLSDAILLSDILRVNTEITKAPLSASMIKRYDEHHQDLTLLKALVRQQLPE |
| | | KYKEIFFDQSKNGYAGYIDGGASQEEFYKFIKPILEKMDGTEELLVKLNREDLLRKQ |
| | | RTFDNGSIPHQIHLGELHAILRRQEDFYPFLKDNREKIEKILTFRIPYYVGPLARGNSR |
| | | FAWMTRKSEETITPWNFEEVVDKGASAQSFIERMTNFDKNLPNEKVLPKHSLLYEY |
| | | FTVYNELTKVKYVTEGMRKPAFLSGEQKKAIVDLLFKTNRKVTVKQLKEDYFKKIE |
| | | CFDSVEISGVEDRFNASLGTYHDLLKIIKDKDFLDNEENEDILEDIVLTLTLFEDREMI |
| | | EERLKTYAHLFDDKVMKQLKRRRYTGWGRLSRKLINGIRDKQSGKTILDFLKSDGF |
| | | ANRNFMQLIHDDSLTFKEDIQKAQVSGQGDSLHEHIANLAGSPAIKKGILQTVKVVD |
| | | ELVKVMGRHKPENIVIEMARENQTTQKGQKNSRERMKRIEEGIKELGSQILKEHPVE |
| | | NTQLQNEKLYLYYLQNGRDMYVDQELDINRLSDYDVDAIVPQSFLKDDSIDNKVLT |
| | | RSDKNRGKSDNVPSEEVVKKMKNYWRQLLNAKLITQRKFDNLTKAERGGLSELDK |
| | | AGFIKRQLVETRQITKHVAQILDSRMNTKYDENDKLIREVKVITLKSKLVSDFRKDF |
| | | QFYKVREINNYHHAHDAYLNAVVGTALIKKYPKLESEFVYGDYKVYDVRKMIAKS |
| | | EQEIGKATAKYFFYSNIMNFFKTEITLANGEIRKRPLIETNGETGEIVWDKGRDFATV |
| | | RKVLSMPQVNIVKKTEVQTGGFSKESIRPKRNSDKLIARKKDWDPKKYGGFVSPTV |
| | | AYSVLVVAKVEKGKSKKLKSVKELLGITIMERSSFEKNPIDFLEAKGYKEVKKDLIIK |
| | | LPKYSLFELENGRKRMLASARFLQKGNELALPSKYVNFLYLASHYEKLKGSPEDNE |
| | | QKQLFVEQHKHYLDEIIEQISEFSKRVILADANLDKVLSAYNKHRDKPIREQAENIIH |
| | | LFTLTNLGAPRAFKYFDTTIDRKVYRSTKEVLDATLIHQSITGLYETRIDLSQLGGD |
| 310 | spCas9-NGA | MDKKYSIGLDIGTNSVGWAVITDEYKVPSKKFKVLGNTDRHSIKKNLIGALLFDSGE |
| | (VRQR) | TAEATRLKRTARRRYTRRKNRICYLQEIFSNEMAKVDDSFFHRLEESFLVEEDKKHE |
| | | RHPIFGNIVDEVAYHEKYPTIYHLRKKLVDSTDKADLRLIYLALAHMIKFRGHFLIEG |
| | | DLNPDNSDVDKLFIQLVQTYNQLFEENPINASGVDAKAILSARLSKSRRLENLIAQLP |
| | | GEKKNGLFGNLIALSLGLTPNFKSNFDLAEDAKLQLSKDTYDDDLDNLLAQIGDQY |
| | | ADLFLAAKNLSDAILLSDILRVNTEITKAPLSASMIKRYDEHHQDLTLLKALVRQQLP |
| | | EKYKEIFFDQSKNGYAGYIDGGASQEEFYKFIKPILEKMDGTEELLVKLNREDLLRK |
| | | QRTFDNGSIPHQIHLGELHAILRRQEDFYPFLKDNREKIEKILTFRIPYYVGPLARGNS |
| | | RFAWMTRKSEETITPWNFEEVVDKGASAQSFIERMTNFDKNLPNEKVLPKHSLLYE |
| | | YFTVYNELTKVKYVTEGMRKPAFLSGEQKKAIVDLLFKTNRKVTVKQLKEDYFKKI |
| | | ECFDSVEISGVEDRFNASLGTYHDLLKIIKDKDFLDNEENEDILEDIVLTLTLFEDREM |
| | | IEERLKTYAHLFDDKVMKQLKRRRYTGWGRLSRKLINGIRDKQSGKTILDFLKSDGF |
| | | ANRNFMQLIHDDSLTFKEDIQKAQVSGQGDSLHEHIANLAGSPAIKKGILQTVKVVD |
| | | ELVKVMGRHKPENIVIEMARENQTTQKGQKNSRERMKRIEEGIKELGSQILKEHPVE |
| | | NTQLQNEKLYLYYLQNGRDMYVDQELDINRLSDYDVDHIVPQSFLKDDSIDNKVLT |
| | | RSDKNRGKSDNVPSEEVVKKMKNYWRQLLNAKLITQRKFDNLTKAERGGLSELDK |
| | | AGFIKRQLVETRQITKHVAQILDSRMNTKYDENDKLIREVKVITLKSKLVSDFRKDF |
| | | QFYKVREINNYHHAHDAYLNAVVGTALIKKYPKLESEFVYGDYKVYDVRKMIAKS |
| | | EQEIGKATAKYFFYSNIMNFFKTEITLANGEIRKRPLIETNGETGEIVWDKGRDFATV |
| | | RKVLSMPQVNIVKKTEVQTGGFSKESILPKRNSDKLIARKKDWDPKKYGGFVSPTV |
| | | AYSVLVVAKVEKGKSKKLKSVKELLGITIMERSSFEKNPIDFLEAKGYKEVKKDLIIK |
| | | LPKYSLFELENGRKRMLASARELQKGNELALPSKYVNFLYLASHYEKLKGSPEDNE |
| | | QKQLFVEQHKHYLDEIIEQISEFSKRVILADANLDKVLSAYNKHRDKPIREQAENIIH |
| | | LFTLTNLGAPAAFKYFDTTIDRKQYRSTKEVLDATLIHQSITGLYETRIDLSQLGGD |
| 311 | spCas9-NGA | MDKKYSIGLDIGTNSVGWAVITDEYKVPSKKFKVLGNTDRHSIKKNLIGALLFDSGE |
| | (H840A)_VRQ | TAEATRLKRTARRRYTRRKNRICYLQEIFSNEMAKVDDSFFHRLEESFLVEEDKKHE |
| | R) Nickase | RHPIFGNIVDEVAYHEKYPTIYHLRKKLVDSTDKADLRLIYLALAHMIKFRGHFLIEG |
| | | DLNPDNSDVDKLFIQLVQTYNQLFEENPINASGVDAKAILSARLSKSRRLENLIAQLP |
| | | GEKKNGLFGNLIALSLGLTPNFKSNFDLAEDAKLQLSKDTYDDDLDNLLAQIGDQY |
| | | ADLFLAAKNLSDAILLSDILRVNTEITKAPLSASMIKRYDEHHQDLTLLKALVRQQLP |
| | | EKYKEIFFDQSKNGYAGYIDGGASQEEFYKFIKPILEKMDGTEELLVKLNREDLLRK |
| | | QRTFDNGSIPHQIHLGELHAILRRQEDFYPFLKDNREKIEKILTFRIPYYVGPLARGNS |
| | | RFAWMTRKSEETITPWNFEEVVDKGASAQSFIERMTNFDKNLPNEKVLPKHSLLYE |
| | | YFTVYNELTKVKYVTEGMRKPAFLSGEQKKAIVDLLFKTNRKVTVKQLKEDYFKKI |
| | | ECFDSVEISGVEDRFNASLGTYHDLLKIIKDKDFLDNEENEDILEDIVLTLTLFEDREM |
| | | IEERLKTYAHLFDDKVMKQLKRRRYTGWGRLSRKLINGIRDKQSGKTILDFLKSDGF |
| | | ANRNFMQLIHDDSLTFKEDIQKAQVSGQGDSLHEHIANLAGSPAIKKGILQTVKVVD |
| | | ELVKVMGRHKPENIVIEMARENQTTQKGQKNSRERMKRIEEGIKELGSQILKEHPVE |
| | | NTQLQNEKLYLYYLQNGRDMYVDQELDINRLSDYDVDAIVPQSFLKDDSIDNKVLT |
| | | RSDKNRGKSDNVPSEEVVKKMKNYWRQLLNAKLITQRKFDNLTKAERGGLSELDK |
| | | AGFIKRQLVETRQITKHVAQILDSRMNTKYDENDKLIREVKVITLKSKLVSDFRKDF |
| | | QFYKVREINNYHHAHDAYLNAVVGTALIKKYPKLESEFVYGDYKVYDVRKMIAKS |
| | | EQEIGKATAKYFFYSNIMNFFKTEITLANGEIRKRPLIETNGETGEIVWDKGRDFATV |
| | | RKVLSMPQVNIVKKTEVQTGGFSKESILPKRNSDKLIARKKDWDPKKYGGFVSPTV |
| | | AYSVLVVAKVEKGKSKKLKSVKELLGITIMERSSFEKNPIDFLEAKGYKEVKKDLIIK |
| | | LPKYSLFELENGRKRMLASARELQKGNELALPSKYVNFLYLASHYEKLKGSPEDNE |
| | | QKQLFVEQHKHYLDEIIEQISEFSKRVILADANLDKVLSAYNKHRDKPIREQAENIIH |
| | | LFTLTNLGAPAAFKYFDTTIDRKQYRSTKEVLDATLIHQSITGLYETRIDLSQLGGD |
| 312 | Met(-) | DKKYSIGLDIGTNSVGWAVITDEYKVPSKKFKVLGNTDRHSIKKNLIGALLFDSGET |
| | spCas9- | AEATRLKRTARRRYTRRKNRICYLQEIFSNEMAKVDDSFFHRLEESFLVEEDKKHER |
| | NGA VRQR | HPIFGNIVDEVAYHEKYPTIYHLRKKLVDSTDKADLRLIYLALAHMIKFRGHFLIEGD |
| | Nickase | LNPDNSDVDKLFIQLVQTYNQLFEENPINASGVDAKAILSARLSKSRRLENLIAQLPG |
| | | EKKNGLFGNLIALSLGLTPNFKSNFDLAEDAKLQLSKDTYDDDLDNLLAQIGDQYA |
| | | DLFLAAKNLSDAILLSDILRVNTEITKAPLSASMIKRYDEHHQDLTLLKALVRQQLPE |
| | | KYKEIFFDQSKNGYAGYIDGGASQEEFYKFIKPILEKMDGTEELLVKLNREDLLRKQ |
| | | RTFDNGSIPHQIHLGELHAILRRQEDFYPFLKDNREKIEKILTFRIPYYVGPLARGNSR |
| | | FAWMTRKSEETITPWNFEEVVDKGASAQSFIERMTNFDKNLPNEKVLPKHSLLYEY |
| | | FTVYNELTKVKYVTEGMRKPAFLSGEQKKAIVDLLFKTNRKVTVKQLKEDYFKKIE |
| | | CFDSVEISGVEDRFNASLGTYHDLLKIIKDKDFLDNEENEDILEDIVLTLTLFEDREMI |
| | | EERLKTYAHLFDDKVMKQLKRRRYTGWGRLSRKLINGIRDKQSGKTILDFLKSDGF |
| | | ANRNFMQLIHDDSLTFKEDIQKAQVSGQGDSLHEHIANLAGSPAIKKGILQTVKVVD |
| | | ELVKVMGRHKPENIVIEMARENQTTQKGQKNSRERMKRIEEGIKELGSQILKEHPVE |
| | | NTQLQNEKLYLYYLQNGRDMYVDQELDINRLSDYDVDAIVPQSFLKDDSIDNKVLT |
| | | RSDKNRGKSDNVPSEEVVKKMKNYWRQLLNAKLITQRKFDNLTKAERGGLSELDK |
| | | AGFIKRQLVETRQITKHVAQILDSRMNTKYDENDKLIREVKVITLKSKLVSDFRKDF |
| | | QFYKVREINNYHHAHDAYLNAVVGTALIKKYPKLESEFVYGDYKVYDVRKMIAKS |
| | | EQEIGKATAKYFFYSNIMNFFKTEITLANGEIRKRPLIETNGETGEIVWDKGRDFATV |
| | | RKVLSMPQVNIVKKTEVQTGGFSKESILPKRNSDKLIARKKDWDPKKYGGFVSPTV |
| | | AYSVLVVAKVEKGKSKKLKSVKELLGITIMERSSFEKNPIDFLEAKGYKEVKKDLIIK |
| | | LPKYSLFELENGRKRMLASARELQKGNELALPSKYVNFLYLASHYEKLKGSPEDNE |
| | | QKQLFVEQHKHYLDEIIEQISEFSKRVILADANLDKVLSAYNKHRDKPIREQAENIIH |
| | | LFTLTNLGAPAAFKYFDTTIDRKQYRSTKEVLDATLIHQSITGLYETRIDLSQLGGD |
| 313 | SpRY Cas9 | MDKKYSIGLDIGTNSVGWAVITDEYKVPSKKFKVLGNTDRHSIKKNLIGALLFDSGE |
| | | TAERTRLKRTARRRYTRRKNRICYLQEIFSNEMAKVDDSFFHRLEESFLVEEDKKHE |
| | | RHPIFGNIVDEVAYHEKYPTIYHLRKKLVDSTDKADLRLIYLALAHMIKFRGHFLIEG |
| | | DLNPDNSDVDKLFIQLVQTYNQLFEENPINASGVDAKAILSARLSKSRRLENLIAQLP |
| | | GEKKNGLFGNLIALSLGLTPNFKSNFDLAEDAKLQLSKDTYDDDLDNLLAQIGDQY |
| | | ADLFLAAKNLSDAILLSDILRVNTEITKAPLSASMIKRYDEHHQDLTLLKALVRQQLP |
| | | EKYKEIFFDQSKNGYAGYIDGGASQEEFYKFIKPILEKMDGTEELLVKLNREDLLRK |
| | | QRTFDNGSIPHQIHLGELHAILRRQEDFYPFLKDNREKIEKILTFRIPYYVGPLARGNS |
| | | RFAWMTRKSEETITPWNFEEVVDKGASAQSFIERMTNFDKNLPNEKVLPKHSLLYE |
| | | YFTVYNELTKVKYVTEGMRKPAFLSGEQKKAIVDLLFKTNRKVTVKQLKEDYFKKI |
| | | ECFDSVEISGVEDRFNASLGTYHDLLKIIKDKDFLDNEENEDILEDIVLTLTLFEDREM |
| | | IEERLKTYAHLFDDKVMKQLKRRRYTGWGRLSRKLINGIRDKQSGKTILDFLKSDGF |
| | | ANRNFMQLIHDDSLTFKEDIQKAQVSGQGDSLHEHIANLAGSPAIKKGILQTVKVVD |
| | | ELVKVMGRHKPENIVIEMARENQTTQKGQKNSRERMKRIEEGIKELGSQILKEHPVE |
| | | NTQLQNEKLYLYYLQNGRDMYVDQELDINRLSDYDVDHIVPQSFLKDDSIDNKVLT |
| | | RSDKNRGKSDNVPSEEVVKKMKNYWRQLLNAKLITQRKFDNLTKAERGGLSELDK |
| | | AGFIKRQLVETRQITKHVAQILDSRMNTKYDENDKLIREVKVITLKSKLVSDFRKDF |
| | | QFYKVREINNYHHAHDAYLNAVVGTALIKKYPKLESEFVYGDYKVYDVRKMIAKS |
| | | EQEIGKATAKYFFYSNIMNFFKTEITLANGEIRKRPLIETNGETGEIVWDKGRDFATV |
| | | RKVLSMPQVNIVKKTEVQTGGFSKESIRPKRNSDKLIARKKDWDPKKYGGFLWPTV |
| | | AYSVLVVAKVEKGKSKKLKSVKELLGITIMERSSFEKNPIDFLEAKGYKEVKKDLIIK |
| | | LPKYSLFELENGRKRMLASAKQLQKGNELALPSKYVNFLYLASHYEKLKGSPEDNE |
| | | QKQLFVEQHKHYLDEIIEQISEFSKRVILADANLDKVLSAYNKHRDKPIREQAENIIH |
| | | LFTLTRLGAPRAFKYFDTTIDPKQYRSTKEVLDATLIHQSITGLYETRIDLSQLGGD |
| 314 | SpRY Cas9 | MDKKYSIGLDIGTNSVGWAVITDEYKVPSKKFKVLGNTDRHSIKKNLIGALLFDSGE |
| | (H840A) | TAERTRLKRTARRRYTRRKNRICYLQEIFSNEMAKVDDSFFHRLEESFLVEEDKKHE |
| | Nickase | RHPIFGNIVDEVAYHEKYPTIYHLRKKLVDSTDKADLRLIYLALAHMIKFRGHFLIEG |
| | | DLNPDNSDVDKLFIQLVQTYNQLFEENPINASGVDAKAILSARLSKSRRLENLIAQLP |
| | | GEKKNGLFGNLIALSLGLTPNFKSNFDLAEDAKLQLSKDTYDDDLDNLLAQIGDQY |
| | | ADLFLAAKNLSDAILLSDILRVNTEITKAPLSASMIKRYDEHHQDLTLLKALVRQQLP |
| | | EKYKEIFFDQSKNGYAGYIDGGASQEEFYKFIKPILEKMDGTEELLVKLNREDLLRK |
| | | QRTFDNGSIPHQIHLGELHAILRRQEDFYPFLKDNREKIEKILTFRIPYYVGPLARGNS |
| | | RFAWMTRKSEETITPWNFEEVVDKGASAQSFIERMTNFDKNLPNEKVLPKHSLLYE |
| | | YFTVYNELTKVKYVTEGMRKPAFLSGEQKKAIVDLLFKTNRKVTVKQLKEDYFKKI |
| | | ECFDSVEISGVEDRFNASLGTYHDLLKIIKDKDFLDNEENEDILEDIVLTLTLFEDREM |
| | | IEERLKTYAHLFDDKVMKQLKRRRYTGWGRLSRKLINGIRDKQSGKTILDFLKSDGF |
| | | ANRNFMQLIHDDSLTFKEDIQKAQVSGQGDSLHEHIANLAGSPAIKKGILQTVKVVD |
| | | ELVKVMGRHKPENIVIEMARENQTTQKGQKNSRERMKRIEEGIKELGSQILKEHPVE |
| | | NTQLQNEKLYLYYLQNGRDMYVDQELDINRLSDYDVDAIVPQSFLKDDSIDNKVLT |
| | | RSDKNRGKSDNVPSEEVVKKMKNYWRQLLNAKLITQRKFDNLTKAERGGLSELDK |
| | | AGFIKRQLVETRQITKHVAQILDSRMNTKYDENDKLIREVKVITLKSKLVSDFRKDF |
| | | QFYKVREINNYHHAHDAYLNAVVGTALIKKYPKLESEFVYGDYKVYDVRKMIAKS |
| | | EQEIGKATAKYFFYSNIMNFFKTEITLANGEIRKRPLIETNGETGEIVWDKGRDFATV |
| | | RKVLSMPQVNIVKKTEVQTGGFSKESIRPKRNSDKLIARKKDWDPKKYGGFLWPTV |
| | | AYSVLVVAKVEKGKSKKLKSVKELLGITIMERSSFEKNPIDFLEAKGYKEVKKDLIIK |
| | | LPKYSLFELENGRKRMLASAKQLQKGNELALPSKYVNFLYLASHYEKLKGSPEDNE |
| | | QKQLFVEQHKHYLDEIIEQISEFSKRVILADANLDKVLSAYNKHRDKPIREQAENIIH |
| | | LFTLTRLGAPRAFKYFDTTIDPKQYRSTKEVLDATLIHQSITGLYETRIDLSQLGGD |
| 315 | Met(-) SpRY | DKKYSIGLDIGTNSVGWAVITDEYKVPSKKFKVLGNTDRHSIKKNLIGALLFDSGET |
| | Cas9 Nickase | AERTRLKRTARRRYTRRKNRICYLQEIFSNEMAKVDDSFFHRLEESFLVEEDKKHER |
| | | HPIFGNIVDEVAYHEKYPTIYHLRKKLVDSTDKADLRLIYLALAHMIKFRGHFLIEGD |
| | | LNPDNSDVDKLFIQLVQTYNQLFEENPINASGVDAKAILSARLSKSRRLENLIAQLPG |
| | | EKKNGLFGNLIALSLGLTPNFKSNFDLAEDAKLQLSKDTYDDDLDNLLAQIGDQYA |
| | | DLFLAAKNLSDAILLSDILRVNTEITKAPLSASMIKRYDEHHQDLTLLKALVRQQLPE |
| | | KYKEIFFDQSKNGYAGYIDGGASQEEFYKFIKPILEKMDGTEELLVKLNREDLLRKQ |
| | | RTFDNGSIPHQIHLGELHAILRRQEDFYPFLKDNREKIEKILTFRIPYYVGPLARGNSR |
| | | FAWMTRKSEETITPWNFEEVVDKGASAQSFIERMTNFDKNLPNEKVLPKHSLLYEY |
| | | FTVYNELTKVKYVTEGMRKPAFLSGEQKKAIVDLLFKTNRKVTVKQLKEDYFKKIE |
| | | CFDSVEISGVEDRFNASLGTYHDLLKIIKDKDFLDNEENEDILEDIVLTLTLFEDREMI |
| | | EERLKTYAHLFDDKVMKQLKRRRYTGWGRLSRKLINGIRDKQSGKTILDFLKSDGF |
| | | ANRNFMQLIHDDSLTFKEDIQKAQVSGQGDSLHEHIANLAGSPAIKKGILQTVKVVD |
| | | ELVKVMGRHKPENIVIEMARENQTTQKGQKNSRERMKRIEEGIKELGSQILKEHPVE |
| | | NTQLQNEKLYLYYLQNGRDMYVDQELDINRLSDYDVDAIVPQSFLKDDSIDNKVLT |
| | | RSDKNRGKSDNVPSEEVVKKMKNYWRQLLNAKLITQRKFDNLTKAERGGLSELDK |
| | | AGFIKRQLVETRQITKHVAQILDSRMNTKYDENDKLIREVKVITLKSKLVSDFRKDF |
| | | QFYKVREINNYHHAHDAYLNAVVGTALIKKYPKLESEFVYGDYKVYDVRKMIAKS |
| | | EQEIGKATAKYFFYSNIMNFFKTEITLANGEIRKRPLIETNGETGEIVWDKGRDFATV |
| | | RKVLSMPQVNIVKKTEVQTGGFSKESIRPKRNSDKLIARKKDWDPKKYGGFLWPTV |
| | | AYSVLVVAKVEKGKSKKLKSVKELLGITIMERSSFEKNPIDFLEAKGYKEVKKDLIIK |
| | | LPKYSLFELENGRKRMLASAKQLQKGNELALPSKYVNFLYLASHYEKLKGSPEDNE |
| | | QKQLFVEQHKHYLDEIIEQISEFSKRVILADANLDKVLSAYNKHRDKPIREQAENIIH |
| | | LFTLTRLGAPRAFKYFDTTIDPKQYRSTKEVLDATLIHQSITGLYETRIDLSQLGGD |
| 316 | sRGN3.1 | MNQKFILGLDIGITSVGYGLIDYETKNIIDAGVRLFPEANVENNEGRRSKRGSRRLKR |
| | | RRIHRLERVKLLLTEYDLINKEQIPTSNNPYQIRVKGLSEILSKDELAIALLHLAKRRG |
| | | IHNVDVAADKEETASDSLSTKDQINKNAKFLESRYVCELQKERLENEGHVRGVENR |
| | | FLTKDIVREAKKIIDTQMQYYPEIDETFKEKYISLVETRREYFEGPGQGSPFGWNGDL |
| | | KKWYEMLMGHCTYFPQELRSVKYAYSADLFNALNDLNNLIIQRDNSEKLEYHEKY |
| | | HIIENVFKQKKKPTLKQIAKEIGVNPEDIKGYRITKSGTPEFTSFKLFHDLKKVVKDH |
| | | AILDDIDLLNQIAEILTIYQDKDSIVAELGQLEYLMSEADKQSISELTGYTGTHSLSLK |
| | | CMNMIIDELWHSSMNQMEVFTYLNMRPKKYELKGYQRIPTDMIDDAILSPVVKRTF |
| | | IQSINVINKVIEKYGIPEDIIIELARENNSDDRKKFINNLQKKNEATRKRINEIIGQTGN |
| | | QNAKRIVEKIRLHDQQEGKCLYSLESIPLEDLLNNPNHYEVDHIIPRSVSFDNSYHNK |
| | | VLVKQSENSKKSNLTPYQYFNSGKSKLSYNQFKQHILNLSKSQDRISKKKKEYLLEE |
| | | RDINKFEVQKEFINRNLVDTRYATRELTNYLKAYFSANNMNVKVKTINGSFTDYLR |
| | | KVWKFKKERNHGYKHHAEDALIIANADFLFKENKKLKAVNSVLEKPEIETKQLDIQ |
| | | VDSEDNYSEMFIIPKQVQDIKDFRNFKYSHRVDKKPNRQLINDTLYSTRKKDNSTYI |
| | | VQTIKDIYAKDNTTLKKQFDKSPEKFLMYQHDPRTFEKLEVIMKQYANEKNPLAKY |
| | | HEETGEYLTKYSKKNNGPIVKSLKYIGNKLGSHLDVTHQFKSSTKKLVKLSIKNYRF |
| | | DVYLTEKGYKFVTIAYLNVFKKDNYYYIPKDKYQELKEKKKIKDTDQFIASFYKND |
| | | LIKLNGDLYKIIGVNSDDRNIIELDYYDIKYKDYCEINNIKGEPRIKKTIGKKTESIEKF |
| | | TTDVLGNLYLHSTEKAPQLIFKRGL |
| 317 | sRGN3.1 | MNQKFILGLDIGITSVGYGLIDYETKNIIDAGVRLFPEANVENNEGRRSKRGSRRLKR |
| | (N585A) | RRIHRLERVKLLLTEYDLINKEQIPTSNNPYQIRVKGLSEILSKDELAIALLHLAKRRG |
| | Nickase | IHNVDVAADKEETASDSLSTKDQINKNAKFLESRYVCELQKERLENEGHVRGVENR |
| | | FLTKDIVREAKKIIDTQMQYYPEIDETFKEKYISLVETRREYFEGPGQGSPFGWNGDL |
| | | KKWYEMLMGHCTYFPQELRSVKYAYSADLFNALNDLNNLIIQRDNSEKLEYHEKY |
| | | HIIENVFKQKKKPTLKQIAKEIGVNPEDIKGYRITKSGTPEFTSFKLFHDLKKVVKDH |
| | | AILDDIDLLNQIAEILTIYQDKDSIVAELGQLEYLMSEADKQSISELTGYTGTHSLSLK |
| | | CMNMIIDELWHSSMNQMEVFTYLNMRPKKYELKGYQRIPTDMIDDAILSPVVKRTF |
| | | IQSINVINKVIEKYGIPEDIIIELARENNSDDRKKFINNLQKKNEATRKRINEIIGQTGN |
| | | QNAKRIVEKIRLHDQQEGKCLYSLESIPLEDLLNNPNHYEVDHIIPRSVSFDNSYHNK |
| | | VLVKQSEASKKSNLTPYQYFNSGKSKLSYNQFKQHILNLSKSQDRISKKKKEYLLEE |
| | | RDINKFEVQKEFINRNLVDTRYATRELTNYLKAYFSANNMNVKVKTINGSFTDYLR |
| | | KVWKFKKERNHGYKHHAEDALIIANADFLFKENKKLKAVNSVLEKPEIETKQLDIQ |
| | | VDSEDNYSEMFIIPKQVQDIKDFRNFKYSHRVDKKPNRQLINDTLYSTRKKDNSTYI |
| | | VQTIKDIYAKDNTTLKKQFDKSPEKFLMYQHDPRTFEKLEVIMKQYANEKNPLAKY |
| | | HEETGEYLTKYSKKNNGPIVKSLKYIGNKLGSHLDVTHQFKSSTKKLVKLSIKNYRF |
| | | DVYLTEKGYKFVTIAYLNVFKKDNYYYIPKDKYQELKEKKKIKDTDQFIASFYKND |
| | | LIKLNGDLYKIIGVNSDDRNIIELDYYDIKYKDYCEINNIKGEPRIKKTIGKKTESIEKF |
| | | TTDVLGNLYLHSTEKAPQLIFKRGL |
| 318 | Met(-) | NQKFILGLDIGITSVGYGLIDYETKNIIDAGVRLFPEANVENNEGRRSKRGSRRLKRR |
| | sRGN3.1 | RIHRLERVKLLLTEYDLINKEQIPTSNNPYQIRVKGLSEILSKDELAIALLHLAKRRGI |
| | (N584A) | HNVDVAADKEETASDSLSTKDQINKNAKFLESRYVCELQKERLENEGHVRGVENRF |
| | Nickase | LTKDIVREAKKIIDTQMQYYPEIDETFKEKYISLVETRREYFEGPGQGSPFGWNGDLK |
| | | KWYEMLMGHCTYFPQELRSVKYAYSADLFNALNDLNNLIIQRDNSEKLEYHEKYHI |
| | | IENVFKQKKKPTLKQIAKEIGVNPEDIKGYRITKSGTPEFTSFKLFHDLKKVVKDHAI |
| | | LDDIDLLNQIAEILTIYQDKDSIVAELGQLEYLMSEADKQSISELTGYTGTHSLSLKC |
| | | MNMIIDELWHSSMNQMEVFTYLNMRPKKYELKGYQRIPTDMIDDAILSPVVKRTFI |
| | | QSINVINKVIEKYGIPEDIIIELARENNSDDRKKFINNLQKKNEATRKRINEIIGQTGNQ |
| | | NAKRIVEKIRLHDQQEGKCLYSLESIPLEDLLNNPNHYEVDHIIPRSVSFDNSYHNKV |
| | | LVKQSEASKKSNLTPYQYFNSGKSKLSYNQFKQHILNLSKSQDRISKKKKEYLLEER |
| | | DINKFEVQKEFINRNLVDTRYATRELTNYLKAYFSANNMNVKVKTINGSFTDYLRK |
| | | VWKFKKERNHGYKHHAEDALIIANADFLFKENKKLKAVNSVLEKPEIETKQLDIQV |
| | | DSEDNYSEMFIIPKQVQDIKDFRNFKYSHRVDKKPNRQLINDTLYSTRKKDNSTYIV |
| | | QTIKDIYAKDNTTLKKQFDKSPEKFLMYQHDPRTFEKLEVIMKQYANEKNPLAKYH |
| | | EETGEYLTKYSKKNNGPIVKSLKYIGNKLGSHLDVTHQFKSSTKKLVKLSIKNYRFD |
| | | VYLTEKGYKFVTIAYLNVFKKDNYYYIPKDKYQELKEKKKIKDTDQFIASFYKNDLI |
| | | KLNGDLYKIIGVNSDDRNIIELDYYDIKYKDYCEINNIKGEPRIKKTIGKKTESIEKFTT |
| | | DVLGNLYLHSTEKAPQLIFKRGL |
| 319 | sRGN3.3 | MNQKFILGLDIGITSVGYGLIDYETKNIIDAGVRLFPEANVENNEGRRSKRGSRRLKR |
| | | RRIHRLERVKLLLTEYDLINKEQIPTSNNPYQIRVKGLSEILSKDELAIALLHLAKRRG |
| | | IHNVDVAADKEETASDSLSTKDQINKNAKFLESRYVCELQKERLENEGHVRGVENR |
| | | FLTKDIVREAKKIIDTQMQYYPEIDETFKEKYISLVETRREYFEGPGQGSPFGWNGDL |
| | | KKWYEMLMGHCTYFPQELRSVKYAYSADLFNALNDLNNLIIQRDNSEKLEYHEKY |
| | | HIIENVFKQKKKPTLKQIAKEIGVNPEDIKGYRITKSGTPEFTSFKLFHDLKKVVKDH |
| | | AILDDIDLLNQIAEILTIYQDKDSIVAELGQLEYLMSEADKQSISELTGYTGTHSLSLK |
| | | CMNMIIDELWHSSMNQMEVFTYLNMRPKKYELKGYQRIPTDMIDDAILSPVVKRTF |
| | | IQSINVINKVIEKYGIPEDIIIELARENNSDDRKKFINNLQKKNEATRKRINEIIGQTGN |
| | | QNAKRIVEKIRLHDQQEGKCLYSLESIPLEDLLNNPNHYEVDHIIPRSVSFDNSYHNK |
| | | VLVKQSENSKKSNLTPYQYFNSGKSKLSYNQFKQHILNLSKSQDRISKKKKEYLLEE |
| | | RDINKFEVQKEFINRNLVDTRYATRELTSYLKAYFSANNMDVKVKTINGSFTNHLR |
| | | KVWRFDKYRNHGYKHHAEDALIIANADFLFKENKKLQNTNKILEKPTIENNTKKVT |
| | | VEKEEDYNNVFETPKLVEDIKQYRDYKFSHRVDKKPNRQLINDTLYSTRMKDEHDY |
| | | IVQTITDIYGKDNTNLKKQFNKNPEKFLMYQNDPKTFEKLSIIMKQYSDEKNPLAKY |
| | | YEETGEYLTKYSKKNNGPIVKKIKLLGNKVGNHLDVTNKYENSTKKLVKLSIKNYR |
| | | FDVYLTEKGYKFVTIAYLNVFKKDNYYYIPKDKYQELKEKKKIKDTDQFIASFYKN |
| | | DLIKLNGDLYKIIGVNSDDRNIIELDYYDIKYKDYCEINNIKGEPRIKKTIGKKTESIEK |
| | | FTTDVLGNLYLHSTEKAPQLIFKRGL |
| 320 | sRGN3.3 | MNQKFILGLDIGITSVGYGLIDYETKNIIDAGVRLFPEANVENNEGRRSKRGSRRLKR |
| | (N585A) | RRIHRLERVKLLLTEYDLINKEQIPTSNNPYQIRVKGLSEILSKDELAIALLHLAKRRG |
| | Nickase | IHNVDVAADKEETASDSLSTKDQINKNAKFLESRYVCELQKERLENEGHVRGVENR |
| | | FLTKDIVREAKKIIDTQMQYYPEIDETFKEKYISLVETRREYFEGPGQGSPFGWNGDL |
| | | KKWYEMLMGHCTYFPQELRSVKYAYSADLFNALNDLNNLIIQRDNSEKLEYHEKY |
| | | HIIENVFKQKKKPTLKQIAKEIGVNPEDIKGYRITKSGTPEFTSFKLFHDLKKVVKDH |
| | | AILDDIDLLNQIAEILTIYQDKDSIVAELGQLEYLMSEADKQSISELTGYTGTHSLSLK |
| | | CMNMIIDELWHSSMNQMEVFTYLNMRPKKYELKGYQRIPTDMIDDAILSPVVKRTF |
| | | IQSINVINKVIEKYGIPEDIIIELARENNSDDRKKFINNLQKKNEATRKRINEIIGQTGN |
| | | QNAKRIVEKIRLHDQQEGKCLYSLESIPLEDLLNNPNHYEVDHIIPRSVSFDNSYHNK |
| | | VLVKQSEASKKSNLTPYQYFNSGKSKLSYNQFKQHILNLSKSQDRISKKKKEYLLEE |
| | | RDINKFEVQKEFINRNLVDTRYATRELTSYLKAYFSANNMDVKVKTINGSFTNHLR |
| | | KVWRFDKYRNHGYKHHAEDALIIANADFLFKENKKLQNTNKILEKPTIENNTKKVT |
| | | VEKEEDYNNVFETPKLVEDIKQYRDYKFSHRVDKKPNRQLINDTLYSTRMKDEHDY |
| | | IVQTITDIYGKDNTNLKKQFNKNPEKFLMYQNDPKTFEKLSIIMKQYSDEKNPLAKY |
| | | YEETGEYLTKYSKKNNGPIVKKIKLLGNKVGNHLDVTNKYENSTKKLVKLSIKNYR |
| | | FDVYLTEKGYKFVTIAYLNVFKKDNYYYIPKDKYQELKEKKKIKDTDQFIASFYKN |
| | | DLIKLNGDLYKIIGVNSDDRNIIELDYYDIKYKDYCEINNIKGEPRIKKTIGKKTESIEK |
| | | FTTDVLGNLYLHSTEKAPQLIFKRGL |
| 321 | Met(-) | NQKFILGLDIGITSVGYGLIDYETKNIIDAGVRLFPEANVENNEGRRSKRGSRRLKRR |
| | sRGN3.3 | RIHRLERVKLLLTEYDLINKEQIPTSNNPYQIRVKGLSEILSKDELAIALLHLAKRRGI |
| | (N584A) | HNVDVAADKEETASDSLSTKDQINKNAKFLESRYVCELQKERLENEGHVRGVENRF |
| | Nickase | LTKDIVREAKKIIDTQMQYYPEIDETFKEKYISLVETRREYFEGPGQGSPFGWNGDLK |
| | | KWYEMLMGHCTYFPQELRSVKYAYSADLFNALNDLNNLIIQRDNSEKLEYHEKYHI |
| | | IENVFKQKKKPTLKQIAKEIGVNPEDIKGYRITKSGTPEFTSFKLFHDLKKVVKDHAI |
| | | LDDIDLLNQIAEILTIYQDKDSIVAELGQLEYLMSEADKQSISELTGYTGTHSLSLKC |
| | | MNMIIDELWHSSMNQMEVFTYLNMRPKKYELKGYQRIPTDMIDDAILSPVVKRTFI |
| | | QSINVINKVIEKYGIPEDIIIELARENNSDDRKKFINNLQKKNEATRKRINEIIGQTGNQ |
| | | NAKRIVEKIRLHDQQEGKCLYSLESIPLEDLLNNPNHYEVDHIIPRSVSFDNSYHNKV |
| | | LVKQSEASKKSNLTPYQYFNSGKSKLSYNQFKQHILNLSKSQDRISKKKKEYLLEER |
| | | DINKFEVQKEFINRNLVDTRYATRELTSYLKAYFSANNMDVKVKTINGSFTNHLRK |
| | | VWRFDKYRNHGYKHHAEDALIIANADFLFKENKKLQNTNKILEKPTIENNTKKVTV |
| | | EKEEDYNNVFETPKLVEDIKQYRDYKFSHRVDKKPNRQLINDTLYSTRMKDEHDYI |
| | | VQTITDIYGKDNTNLKKQFNKNPEKFLMYQNDPKTFEKLSIIMKQYSDEKNPLAKY |
| | | YEETGEYLTKYSKKNNGPIVKKIKLLGNKVGNHLDVTNKYENSTKKLVKLSIKNYR |
| | | FDVYLTEKGYKFVTIAYLNVFKKDNYYYIPKDKYQELKEKKKIKDTDQFIASFYKN |
| | | DLIKLNGDLYKIIGVNSDDRNIIELDYYDIKYKDYCEINNIKGEPRIKKTIGKKTESIEK |
| | | FTTDVLGNLYLHSTEKAPQLIFKRGL |
| 322 | SpG | MDKKYSIGLDIGTNSVGWAVITDEYKVPSKKFKVLGNTDRHSIKKNLIGALLFDSGE |
| | | TAEATRLKRTARRRYTRRKNRICYLQEIFSNEMAKVDDSFFHRLEESFLVEEDKKHE |
| | | RHPIFGNIVDEVAYHEKYPTIYHLRKKLVDSTDKADLRLIYLALAHMIKFRGHFLIEG |
| | | DLNPDNSDVDKLFIQLVQTYNQLFEENPINASGVDAKAILSARLSKSRRLENLIAQLP |
| | | GEKKNGLFGNLIALSLGLTPNFKSNFDLAEDAKLQLSKDTYDDDLDNLLAQIGDQY |
| | | ADLFLAAKNLSDAILLSDILRVNTEITKAPLSASMIKRYDEHHQDLTLLKALVRQQLP |
| | | EKYKEIFFDQSKNGYAGYIDGGASQEEFYKFIKPILEKMDGTEELLVKLNREDLLRK |
| | | QRTFDNGSIPHQIHLGELHAILRRQEDFYPFLKDNREKIEKILTFRIPYYVGPLARGNS |
| | | RFAWMTRKSEETITPWNFEEVVDKGASAQSFIERMTNFDKNLPNEKVLPKHSLLYE |
| | | YFTVYNELTKVKYVTEGMRKPAFLSGEQKKAIVDLLFKTNRKVTVKQLKEDYFKKI |
| | | ECFDSVEISGVEDRFNASLGTYHDLLKIIKDKDFLDNEENEDILEDIVLTLTLFEDREM |
| | | IEERLKTYAHLFDDKVMKQLKRRRYTGWGRLSRKLINGIRDKQSGKTILDFLKSDGF |
| | | ANRNFMQLIHDDSLTFKEDIQKAQVSGQGDSLHEHIANLAGSPAIKKGILQTVKVVD |
| | | ELVKVMGRHKPENIVIEMARENQTTQKGQKNSRERMKRIEEGIKELGSQILKEHPVE |
| | | NTQLQNEKLYLYYLQNGRDMYVDQELDINRLSDYDVDHIVPQSFLKDDSIDNKVLT |
| | | RSDKNRGKSDNVPSEEVVKKMKNYWRQLLNAKLITQRKFDNLTKAERGGLSELDK |
| | | AGFIKRQLVETRQITKHVAQILDSRMNTKYDENDKLIREVKVITLKSKLVSDFRKDF |
| | | QFYKVREINNYHHAHDAYLNAVVGTALIKKYPKLESEFVYGDYKVYDVRKMIAKS |
| | | EQEIGKATAKYFFYSNIMNFFKTEITLANGEIRKRPLIETNGETGEIVWDKGRDFATV |
| | | RKVLSMPQVNIVKKTEVQTGGFSKESILPKRNSDKLIARKKDWDPKKYGGFLWPTV |
| | | AYSVLVVAKVEKGKSKKLKSVKELLGITIMERSSFEKNPIDFLEAKGYKEVKKDLIIK |
| | | LPKYSLFELENGRKRMLASAKQLQKGNELALPSKYVNFLYLASHYEKLKGSPEDNE |
| | | QKQLFVEQHKHYLDEIIEQISEFSKRVILADANLDKVLSAYNKHRDKPIREQAENIIH |
| | | LFTLTNLGAPAAFKYFDTTIDRKQYRSTKEVLDATLIHQSITGLYETRIDLSQLGGD |
| 323 | SpG (H840A) | MDKKYSIGLDIGTNSVGWAVITDEYKVPSKKFKVLGNTDRHSIKKNLIGALLFDSGE |
| | Nickase | TAEATRLKRTARRRYTRRKNRICYLQEIFSNEMAKVDDSFFHRLEESFLVEEDKKHE |
| | | RHPIFGNIVDEVAYHEKYPTIYHLRKKLVDSTDKADLRLIYLALAHMIKFRGHFLIEG |
| | | DLNPDNSDVDKLFIQLVQTYNQLFEENPINASGVDAKAILSARLSKSRRLENLIAQLP |
| | | GEKKNGLFGNLIALSLGLTPNFKSNFDLAEDAKLQLSKDTYDDDLDNLLAQIGDQY |
| | | ADLFLAAKNLSDAILLSDILRVNTEITKAPLSASMIKRYDEHHQDLTLLKALVRQQLP |
| | | EKYKEIFFDQSKNGYAGYIDGGASQEEFYKFIKPILEKMDGTEELLVKLNREDLLRK |
| | | QRTFDNGSIPHQIHLGELHAILRRQEDFYPFLKDNREKIEKILTFRIPYYVGPLARGNS |
| | | RFAWMTRKSEETITPWNFEEVVDKGASAQSFIERMTNFDKNLPNEKVLPKHSLLYE |
| | | YFTVYNELTKVKYVTEGMRKPAFLSGEQKKAIVDLLFKTNRKVTVKQLKEDYFKKI |
| | | ECFDSVEISGVEDRFNASLGTYHDLLKIIKDKDFLDNEENEDILEDIVLTLTLFEDREM |
| | | IEERLKTYAHLFDDKVMKQLKRRRYTGWGRLSRKLINGIRDKQSGKTILDFLKSDGF |
| | | ANRNFMQLIHDDSLTFKEDIQKAQVSGQGDSLHEHIANLAGSPAIKKGILQTVKVVD |
| | | ELVKVMGRHKPENIVIEMARENQTTQKGQKNSRERMKRIEEGIKELGSQILKEHPVE |
| | | NTQLQNEKLYLYYLQNGRDMYVDQELDINRLSDYDVDAIVPQSFLKDDSIDNKVLT |
| | | RSDKNRGKSDNVPSEEVVKKMKNYWRQLLNAKLITQRKFDNLTKAERGGLSELDK |
| | | AGFIKRQLVETRQITKHVAQILDSRMNTKYDENDKLIREVKVITLKSKLVSDFRKDF |
| | | QFYKVREINNYHHAHDAYLNAVVGTALIKKYPKLESEFVYGDYKVYDVRKMIAKS |
| | | EQEIGKATAKYFFYSNIMNFFKTEITLANGEIRKRPLIETNGETGEIVWDKGRDFATV |
| | | RKVLSMPQVNIVKKTEVQTGGFSKESILPKRNSDKLIARKKDWDPKKYGGFLWPTV |
| | | AYSVLVVAKVEKGKSKKLKSVKELLGITIMERSSFEKNPIDFLEAKGYKEVKKDLIIK |
| | | LPKYSLFELENGRKRMLASAKQLQKGNELALPSKYVNFLYLASHYEKLKGSPEDNE |
| | | QKQLFVEQHKHYLDEIIEQISEFSKRVILADANLDKVLSAYNKHRDKPIREQAENIIH |
| | | LFTLTNLGAPAAFKYFDTTIDRKQYRSTKEVLDATLIHQSITGLYETRIDLSQLGGD |
| 324 | Met(-) SpG | DKKYSIGLDIGTNSVGWAVITDEYKVPSKKFKVLGNTDRHSIKKNLIGALLFDSGET |
| | (H839A) | AEATRLKRTARRRYTRRKNRICYLQEIFSNEMAKVDDSFFHRLEESFLVEEDKKHER |
| | Nickase | HPIFGNIVDEVAYHEKYPTIYHLRKKLVDSTDKADLRLIYLALAHMIKFRGHFLIEGD |
| | | LNPDNSDVDKLFIQLVQTYNQLFEENPINASGVDAKAILSARLSKSRRLENLIAQLPG |
| | | EKKNGLFGNLIALSLGLTPNFKSNFDLAEDAKLQLSKDTYDDDLDNLLAQIGDQYA |
| | | DLFLAAKNLSDAILLSDILRVNTEITKAPLSASMIKRYDEHHQDLTLLKALVRQQLPE |
| | | KYKEIFFDQSKNGYAGYIDGGASQEEFYKFIKPILEKMDGTEELLVKLNREDLLRKQ |
| | | RTFDNGSIPHQIHLGELHAILRRQEDFYPFLKDNREKIEKILTFRIPYYVGPLARGNSR |
| | | FAWMTRKSEETITPWNFEEVVDKGASAQSFIERMTNFDKNLPNEKVLPKHSLLYEY |
| | | FTVYNELTKVKYVTEGMRKPAFLSGEQKKAIVDLLFKTNRKVTVKQLKEDYFKKIE |
| | | CFDSVEISGVEDRFNASLGTYHDLLKIIKDKDFLDNEENEDILEDIVLTLTLFEDREMI |
| | | EERLKTYAHLFDDKVMKQLKRRRYTGWGRLSRKLINGIRDKQSGKTILDFLKSDGF |
| | | ANRNFMQLIHDDSLTFKEDIQKAQVSGQGDSLHEHIANLAGSPAIKKGILQTVKVVD |
| | | ELVKVMGRHKPENIVIEMARENQTTQKGQKNSRERMKRIEEGIKELGSQILKEHPVE |
| | | NTQLQNEKLYLYYLQNGRDMYVDQELDINRLSDYDVDAIVPQSFLKDDSIDNKVLT |
| | | RSDKNRGKSDNVPSEEVVKKMKNYWRQLLNAKLITQRKFDNLTKAERGGLSELDK |
| | | AGFIKRQLVETRQITKHVAQILDSRMNTKYDENDKLIREVKVITLKSKLVSDFRKDF |
| | | QFYKVREINNYHHAHDAYLNAVVGTALIKKYPKLESEFVYGDYKVYDVRKMIAKS |
| | | EQEIGKATAKYFFYSNIMNFFKTEITLANGEIRKRPLIETNGETGEIVWDKGRDFATV |
| | | RKVLSMPQVNIVKKTEVQTGGFSKESILPKRNSDKLIARKKDWDPKKYGGFLWPTV |
| | | AYSVLVVAKVEKGKSKKLKSVKELLGITIMERSSFEKNPIDFLEAKGYKEVKKDLIIK |
| | | LPKYSLFELENGRKRMLASAKQLQKGNELALPSKYVNFLYLASHYEKLKGSPEDNE |
| | | QKQLFVEQHKHYLDEIIEQISEFSKRVILADANLDKVLSAYNKHRDKPIREQAENIIH |
| | | LFTLTNLGAPAAFKYFDTTIDRKQYRSTKEVLDATLIHQSITGLYETRIDLSQLGGD |

[0112] In some embodiments, a Cas9 protein comprises a variant Cas9 protein containing one or more amino acid substitutions. In some embodiments, a wildtype Cas9 protein comprises a RuvC domain and an HNH domain. In some embodiments, a prime editor comprises a nuclease active Cas9 protein that may cleave both strands of a double stranded target DNA sequence. In some embodiments, the nuclease active Cas9 protein comprises a functional RuvC domain and a functional HNH domain. In some embodiments, a prime editor comprises a Cas9 nickase that can bind to a guide polynucleotide and recognize a target DNA, but can cleave only one strand of a double stranded target DNA. In some embodiments, the Cas9 nickase comprises only one functional RuvC domain or one functional HNH domain. In some embodiments, a prime editor comprises a Cas9 that has a non-functional HNH domain and a functional RuvC domain. In some embodiments, the prime editor can cleave the edit strand (i.e., the PAM strand), but not the non-edit strand of a double stranded target DNA sequence. In some embodiments, a prime editor comprises a Cas9 having a non-functional RuvC domain that can cleave the target strand (i.e., the non-PAM strand), but not the edit strand of a double stranded target DNA sequence. In some embodiments, a prime editor comprises a Cas9 that has neither a functional RuvC domain nor a functional HNH domain, which may not cleave any strand of a double stranded target DNA sequence.

[0113] In some embodiments, a prime editor comprises a Cas9 having a mutation in the RuvC domain that reduces or abolishes the nuclease activity of the RuvC domain. In some embodiments, the Cas9 comprises a mutation at amino acid D10 as compared to a wild type SpCas9 as set forth in SEQ ID NO: 298, or a corresponding mutation thereof. In some embodiments, the Cas9 comprises a D10A mutation as compared to a wild type SpCas9 as set forth in SEQ ID NO: 298, or a corresponding mutation thereof. In some embodiments, the Cas9 polypeptide comprises a mutation at amino acid D10, G12, and/or G17 as compared to a wild type SpCas9 as set forth in SEQ ID NO: 298, or a corresponding mutation thereof. In some embodiments, the Cas9 polypeptide comprises a D10A mutation, a G12A mutation, and/or a G17A mutation as compared to a wild type SpCas9 as set forth in SEQ ID NO: 298, or a corresponding mutation thereof.

[0114] In some embodiments, a prime editor comprises a Cas9 polypeptide having a mutation in the HNH domain that reduces or abolishes the nuclease activity of the HNH domain. In some embodiments, the Cas9 polypeptide comprises a mutation at amino acid H840 as compared to a wild type SpCas9 as set forth in SEQ ID NO: 298, or a corresponding mutation thereof. In some embodiments, the Cas9 polypeptide comprises a H840A mutation as compared to a wild type SpCas9 as set forth in SEQ ID NO: 298, or a corresponding mutation thereof. In some embodiments, the Cas9 polypeptide comprises a mutation at amino acid E762, D839, H840, N854, N856, N863, H982, H983, A984, D986, and/or a A987 as compared to a wild type SpCas9 as set forth in SEQ ID NO: 298, or a corresponding mutation thereof. In some embodiments, the Cas9 polypeptide comprises a E762A, D839A, H840A, N854A, N856A, N863A, H982A, H983A, A984A, and/or a D986A mutation as compared to a wild type SpCas9 as set forth in SEQ ID NO: 298, or a corresponding mutation thereof. In some embodiments, the Cas9 polypeptide comprises a mutation at amino acid residue R221, N394, and/or H840 as compared to a wild type SpCas9 (e.g., SEQ ID NO: 298). In some embodiments, the Cas9 polypeptide comprises a R221K, N394L, and/or H840A mutation as compared to a wild type SpCas9 as set forth in SEQ ID NO: 298, or a corresponding mutation thereof. In some embodiments, the Cas9 polypeptide comprises a mutation at amino acid residue R220, N393, and/or H839 as compared to a wild type SpCas9 (e.g., SEQ ID NO: 298) lacking a N-terminal methionine, or a corresponding mutation thereof. In some embodiments, the Cas9 polypeptide comprises a R220K, N393K, and/or H839A mutation as compared to a wild type SpCas9 (as set forth in SEQ ID NO: 298) lacking a N-terminal methionine, or a corresponding mutation thereof.

[0115] In some embodiments, a prime editor comprises a Cas9 having one or more amino acid substitutions in both the HNH domain and the RuvC domain that reduce or abolish the nuclease activity of both the HNH domain and the RuvC domain. In some embodiments, the prime editor comprises a nuclease inactive Cas9, or a nuclease dead Cas9 (dCas9). In some embodiments, the dCas9 comprises a H840X substitution and a DIOX mutation compared to a wild type SpCas9 as set forth in SEQ ID NO: 298 or corresponding mutations thereof, wherein X is any amino acid other than H for the H840X substitution and any amino acid other than D for the D10X substitution. In some embodiments, the dead Cas9 comprises a H840A and a D10A mutation as compared to a wild type SpCas9 as set forth in SEQ ID NO: 298, or corresponding mutations thereof.

[0116] In some embodiments, the N-terminal methionine is removed from the amino acid sequence of a Cas9 nickase, or from any Cas9 variant, ortholog, or equivalent disclosed or contemplated herein. For example, methionine-minus (Met (−)) Cas9 nickases include any one of the sequences set forth in SEQ ID NOs: 300, 303, 306, 309, 312, 315, 318, 321, 324, 325, or a variant thereof having an amino acid sequence that has at least 80%, at least 85%, at least 90%, at least 95%, or at least 99% sequence identity thereto.

[0117] Besides dead Cas9 and Cas9 nickase variants, the Cas9 proteins used herein may also include other Cas9 variants having at least about 70%, at least about 80%, at least about 90%, at least about 95%, at least about 96%, at least about 97%, at least about 98%, at least about 99%, at least about 99.5%, or at least about 99.9% sequence identity to any reference Cas9 protein, including any wild type Cas9, or mutant Cas9 (e.g., a dead Cas9 or Cas9 nickase), or fragment Cas9, or circular permutant Cas9, or other variant of Cas9 disclosed herein or known in the art. In some embodiments, a Cas9 variant may have 1, 2, 3, 4, 5, 6, 7, 8, 9, 10, 11, 12, 13, 14, 15, 16, 17, 18, 19, 20, 21, 22, 21, 24, 25, 26, 27, 28, 29, 30, 31, 32, 33, 34, 35, 36, 37, 38, 39, 40, 41, 42, 43, 44, 45, 46, 47, 48, 49, 50 or more amino acid changes compared to a reference Cas9, e.g., a wild type Cas9. In some embodiments, the Cas9 variant comprises a fragment of a reference Cas9 (e.g., a gRNA binding domain or a DNA-cleavage domain), such that the fragment is at least about 70% identical, at least about 80% identical, at least about 90% identical, at least about 95% identical, at least about 96% identical, at least about 97% identical, at least about 98% identical, at least about 99% identical, at least about 99.5% identical, or at least about 99.9% identical to the corresponding fragment of a reference Cas9, e.g., a wild type Cas9. In some embodiments, the fragment is at least 30%, at least 35%, at least 40%, at least 45%, at least 50%, at least 55%, at least 60%, at least 65%, at least 70%, at least 75%, at least 80%, at least 85%, at least 90%, at least 95%, at least 96%, at least 97%, at least 98%, at least 99%, or at least 99.5% of the amino acid length of a corresponding wild type Cas9.

[0118] In some embodiments, a Cas9 fragment is a functional fragment that retains one or more Cas9 activities. In some embodiments, the Cas9 fragment is at least 100 amino acids in length. In some embodiments, the fragment is at least 100, 150, 200, 250, 300, 350, 400, 450, 500, 550, 600, 650, 700, 750, 800, 850, 900, 950, 1000, 1050, 1100, 1150, 1200, 1250, or at least 1300 amino acids in length. In some embodiments, a prime editor comprises a Cas protein, e.g., Cas9, containing modifications that allow altered PAM recognition. In prime editing using a Cas-protein-based prime editor, a “protospacer adjacent motif (PAM)”, PAM sequence, or PAM-like motif, may be used to refer to a short DNA sequence immediately following the protospacer sequence on the PAM strand of the target gene. In some embodiments, the PAM is recognized by the Cas nuclease in the prime editor during prime editing. In certain embodiments, the PAM is required for target binding of the Cas protein. The specific PAM sequence required for Cas protein recognition may depend on the specific type of the Cas protein. A PAM can be 1, 2, 3, 4, 5, 6, 7, 8, 9, 10 or more nucleotides in length. In some embodiments, a PAM is between 2-6 nucleotides in length. In some embodiments, the PAM can be a 5′ PAM (i.e., located upstream of the 5′ end of the protospacer). In other embodiments, the PAM can be a 3′ PAM (i.e., located downstream of the 5′ end of the protospacer). In some embodiments, the Cas protein of a prime editor recognizes a canonical PAM, for example, a SpCas9 recognizes 5′-NGG-3′ PAM. In some embodiments, the Cas protein of a prime editor has altered or non-canonical PAM specificities. Exemplary PAM sequences and corresponding Cas variants are described in Table 1 below. It should be appreciated that for each of the variants provided, the Cas protein comprises one or more of the amino acid substitutions as indicated compared to a wild type Cas protein sequence, for example, the Cas9 as set forth in SEQ ID NO: 298. The PAM motifs as shown in Table 1 below are in the order of 5′ to 3′.

[0119] In some embodiments, the Cas proteins of the disclosure can also be used to direct transcriptional control of target sequences, for example silencing transcription by sequence-specific binding to target sequences. In some embodiments, a Cas protein described herein may have one or mutations in a PAM recognition motif. In some embodiments, a Cas protein described herein may have altered PAM specificity.

[0120] As used in PAM sequences in Table 1, “N” refers to any one of nucleotides A, G, C, and T, “R” refers to nucleotide A or G, and “Y” refers to nucleotide C or T.

TABLE 1
Cas protein variants and corresponding PAM sequences

| Variant | PAM |
|---|---|
| spCas9 (wild type) | NGG, NGA, |
| | NAG, NGNGA |
| spCas9-VRVRFRR R1335V/L1111R/ | NG |
| D1135V/G1218R/E1219F/A1322R/T1337R | |
| spCas9-VQR (D1135V/R1335Q/T1337R ) | NGA |
| spCas9-EQR (D1135E/R1335Q/T1337R) | NGA |
| spCas9-VRER (D1135V/G1218R/R1335E/T1337R) | NGCG |
| spCas9-VRQR (D1135V, G1218R, R1335Q, T1337R) | NGA |
| Cas9-NG (L1111R, D1135V, G1218R, E1219F, | NGN |
| A1322R, T1337R, R1335V) | |
| SpG Cas9 (D1135L, S1136W, G1218K, E1219Q, | NGN |
| R1335Q, T1337R) | |
| SyRY Cas9 | NRN |
| (A61R, L1111R, N1317R, A1322R, and R1333P) | |
| xCas9 (E480K, E543D, E1219V, K294R, Q1256K, | NGN |
| A262T, S409I, M694I) | |
| SluCa9 | NNGG |
| sRGN1, sRGN2, sRGN4, sRGN3.1, sRGN3.3 | NNGG |
| saCas9 | NNGRRT, |
| | NNGRRN |
| saCas9-KKH (E782K, N968K, R1015H) | NNNRRT |
| spCas9-MQKSER (D1135M, S1136Q, G1218K, | NGCG/NGCN |
| E1219S, R1335E, T1337R) | |
| spCas9-LRKIQK (D1135L, S1136R, G1218K, | NGTN |
| E1219I, R1335Q, T1337K) | |
| spCas9-LRVSQK (D1135L, S1136R, G1218V, | NGTN |
| E1219S, R1335Q, T1337K) | |
| spCas9-LRVSQL(D1135L, S1136R, G1218V, | NGTN |
| E1219S, R1335Q, T1337L) | |
| Cpf1 | TTTV |
| Spy-Mac | NAA |
| NmCas9 | NNNNGATT |
| StCas9 | NNAGAAW |
| TdCas9 | NAAAAC |

[0121] In some embodiments, a prime editor comprises a Cas9 polypeptide comprising one or mutations selected from the group consisting of: A61R, L111R, D1135V, R221K, A262T, R324L, N394K, S4091, S4091, E427G, E480K, M495V, N497A, Y515N, K526E, F539S, E543D, R654L, R661A, R661L, R691A, N692A, M694A, M6941, Q695A, H698A, R753G, M7631, K848A, K890N, Q926A, K1003A, R1060A, L1111R, R1114G, D1135E, D1135L, D1135N, S1136W, V1139A, D1180G, G1218K, G1218R, G1218S, E1219Q, E1219V, E1219V, Q1221H, P1249S, E1253K, N1317R, A1320V, P1321S, A1322R, 11322V, D1332G, R1332N, A1332R, R1333K, R1333P, R1335L, R1335Q, R1335V, T1337N, T1337R, S1338T, H1349R, and any combinations thereof as compared to a wildtype SpCas9 polypeptide as set forth in SEQ ID NO: 298.

[0122] In some embodiments, a prime editor comprises a SaCas9 polypeptide. In some embodiments, the SaCas9 polypeptide comprises one or more of mutations E782K, N968K, and R1015H as compared to a wild type SaCas9. In some embodiments, a prime editor comprises a FnCas9 polypeptide, for example, a wildtype FnCas9 polypeptide or a FnCas9 polypeptide comprising one or more of mutations E1369R, E1449H, or R1556A as compared to the wild type FnCas9. In some embodiments, a prime editor comprises a Sc Cas9, for example, a wild type ScCas9 or a ScCas9 polypeptide comprises one or more of mutations I367K, G368D, I369K, H371L, T375S, T376G, and T1227K as compared to the wild type ScCas9. In some embodiments, a prime editor comprises a St1 Cas9 polypeptide, a St3 Cas9 polypeptide, or a SluCas9 polypeptide.

[0123] In some embodiments, a prime editor comprises a Cas polypeptide that comprises a circular permutant Cas variant. For example, a Cas9 polypeptide of a prime editor may be engineered such that the N-terminus and the C-terminus of a Cas9 protein (e.g., a wild type Cas9 protein, or a Cas9 nickase) are topically rearranged to retain the ability to bind DNA when complexed with a guide RNA (gRNA). An exemplary circular permutant configuration may be N-terminus-[original C-terminus]-[original N-terminus]-C-terminus. Any of the Cas9 proteins described herein, including any variant, ortholog, or naturally occurring Cas9 or equivalent thereof, may be reconfigured as a circular permutant variant.

[0124] In some embodiments, prime editors described herein may also comprise Cas proteins other than Cas9. For example, in some embodiments, a prime editor as described herein may comprise a Cas12a (Cpf1) polypeptide or functional variants thereof. In some embodiments, the Cas12a polypeptide comprises a mutation that reduces or abolishes the endonuclease domain of the Cas12a polypeptide. In some embodiments, the Cas12a polypeptide is a Cas12a nickase. In some embodiments, the Cas protein comprises an amino acid sequence that comprises at least about 50%, 60%, 70%, 80%, 90%, 91%, 92%, 93%, 94%, 95%, 96%, 97%, 98%, 99%, or 100% sequence identity to a naturally occurring Cas12a polypeptide.

[0125] In some embodiments, a prime editor comprises a Cas protein that is a Cas12b (C2c1) or a Cas12c (C2c3) polypeptide. In some embodiments, the Cas protein comprises an amino acid sequence that comprises at least about 50%, 60%, 70%, 80%, 90%, 91%, 92%, 93%, 94%, 95%, 96%, 97%, 98%, 99%, or 100% sequence identity to a naturally occurring Cas12b (C2c1) or Cas12c (C2c3) protein. In some embodiments, the Cas protein is a Cas12b nickase or a Cas12c nickase. In some embodiments, the Cas protein is a Cas12e, a Cas12d, a Cas13, Cas14a, Cas14b, Cas14c, Cas14d, Cas14e, Cas14f, Cas14g, Cas14h, Cas14u, or a Cas4 polypeptide. In some embodiments, the Cas protein comprises an amino acid sequence that comprises at least about 50%, 60%, 70%, 80%, 90%, 91%, 92%, 93%, 94%, 95%, 96%, 97%, 98%, 99%, or 100% sequence identity to a naturally-occurring Cas12e, Cas12d, Cas13, Cas14a, Cas14b, Cas14c, Cas14d, Cas14e, Cas14f, Cas14g, Cas14h, Cas14u, or Cas Φ protein. In some embodiments, the Cas protein is a Cas12e, Cas12d, Cas13, or Cas Φ nickase.

### Nuclear Localization Sequences

[0126] In some embodiments, a prime editor further comprises one or more nuclear localization sequence (NLS). In some embodiments, the NLS helps promote translocation of a protein into the cell nucleus. In some embodiments, a prime editor comprises a fusion protein, e.g., a fusion protein comprising a DNA binding domain and a DNA polymerase, that comprises one or more NLSs. In some embodiments, one or more polypeptides of the prime editor are fused to or linked to one or more NLSs. In some embodiments, the prime editor comprises a DNA binding domain and a DNA polymerase domain that are provided in trans, wherein the DNA binding domain and/or the DNA polymerase domain is fused or linked to one or more NLSs.

[0127] In certain embodiments, a prime editor or prime editing complex comprises at least one NLS. In some embodiments, a prime editor or prime editing complex comprises at least two NLSs. In embodiments with at least two NLSs, the NLSs can be the same NLS, or they can be different NLSs.

[0128] Any NLSs that are known in the art are also contemplated herein. The NLSs may be any naturally occurring NLS, or any non-naturally occurring NLS (e.g., an NLS with one or more mutations relative to a wild-type NLS). In some embodiments, the one or more NLSs of a prime editor comprise bipartite NLSs. In some embodiments, the one or more NLSs of a prime editor are rich in lysine and arginine residues. In some embodiments, the one or more NLSs of a prime editor comprise proline residues. In some embodiments, a nuclear localization signal (NLS) comprises the sequence MDSLLMNRRKFLYQFKNVRWAKGRRETYLC (SEQ ID NO: 6).

[0129] In some embodiments, a NLS is a monopartite NLS. For example, in some embodiments, a NLS is a SV40 large T antigen NLS comprising the sequence PKKKRKV (SEQ ID NO: 4). In some embodiments, a NLS is a bipartite NLS. In some embodiments, a bipartite NLS comprises two basic domains separated by a spacer sequence comprising a variable number of amino acids. In some embodiments, a NLS is a bipartite NLS. In some embodiments, a bipartite NLS consists of two basic domains separated by a spacer sequence comprising a variable number of amino acids. In some embodiments, a NLS is a noncanonical sequences such as M9 of the hnRNP A1 protein, the influenza virus nucleoprotein NLS, and the yeast Gal4 protein NLS. In some embodiments, a NLS is a noncanonical sequences such as M9 of the hnRNP A1 protein, the influenza virus nucleoprotein NLS, and the yeast Gal4 protein NLS.

[0130] In some embodiments, a bipartite NLS consists of two basic domains separated by a spacer sequence comprising a variable number of amino acids. In some embodiments, a NLS comprises an amino acid sequence that is at least about 50%, 60%, 70%, 80%, 90%, 91%, 92%, 93%, 94%, 95%, 96%, 97%, 98%, 99%, or 100% identical to the amino acid sequence of any one of SEQ ID NOs: 4-14. In some embodiments, a NLS comprises an amino acid sequence selected from the group consisting of 4-14. In some embodiments, a prime editing composition comprises a polynucleotide that encodes a NLS that comprises an amino acid sequence that is at least about 50%, 60%, 70%, 80%, 90%, 91%, 92%, 93%, 94%, 95%, 96%, 97%, 98%, 99%, or 100% identical to the amino acid sequence of any one of SEQ ID NOs: 4-14. In some embodiments, a prime editing composition comprises a polynucleotide that encodes a NLS that comprises an amino acid sequence selected from the group consisting of 4-14.

[0131] Any NLSs that are known in the art are also contemplated herein. The NLSs may be any naturally occurring NLS, or any non-naturally occurring NLS (e.g., an NLS with one or more mutations relative to a wild-type NLS). In some embodiments, the one or more NLSs of a prime editor comprise bipartite NLSs. In some embodiments, the one or more NLSs of a prime editor are rich in lysine and arginine residues. In some embodiments, the one or more NLSs of a prime editor comprise proline residues. Non-limiting examples of NLS sequences are provided in Table 2 below.

TABLE 2
Exemplary nuclear localization sequences

| | | SEQ |
|---|---|---|
| | | ID |
| Description | Sequence | NO: |
| NLS of SV40 | PKKKRKV | 4 |
| Large T-AG | | |
| NLS | MKRTADGSEFESPKKKRKV | 5 |
| NLS | MDSLLMNRRKFLYQFKNVRWAKGRRETYLC | 6 |
| NLS of | AVKRPAATKKAGQAKKKKLD | 7 |
| Nucleoplasmin | | |
| NLS of EGL-13 | MSRRRKANPTKLSENAKKLAKEVEN | 8 |
| NLS of C-Myc | PAAKRVKLD | 9 |
| NLS of Tus- | KLKIKRPVK | 10 |
| protein | | |
| NLS of polyoma | VSRKRPRP | 11 |
| large T-AG | | |
| NLS of | EGAPPAKRAR | 12 |
| Hepatitis D | | |
| virus antigen | | |
| NLS of murine | PPQPKKKPLDGE | 13 |
| p53 | | |
| C terminal | SGGSKRTADGSEFEPKKKRKV | 14 |
| linker and NLS | | |
| of an exemplary | | |
| prime editor | | |
| fusion protein | | |

[0132] In some embodiments, a prime editing complex comprises a fusion protein comprising a DNA binding domain (e.g., Cas9(H840A)) and a reverse transcriptase (e.g., a variant MMLV RT) having the following structure: [NLS]-[Cas9(H840A)]-[linker]-[MMLV_RT(D200N)(T330P)(L603W)(T306K)(W313F)], and a desired PEgRNA. In some embodiments, the prime editing complex comprises a prime editor fusion protein that has the amino acid sequence of SEQ ID NO: 15. In some embodiments, the prime editing complex comprises a prime editor fusion protein that has the amino acid sequence of SEQ ID NO: 341. Sequence of an exemplary prime editor fusion protein comprising a DNA binding domain (e.g., Cas9(H840A)) and a reverse transcriptase (e.g., a variant MMLV RT) having the following structure: [NLS]-[Cas9(H840A)]-[linker]-[MMLV_RT(D200N)(T330P)(L603W)(T306K)(W313F)] and its components are shown in Table 11.

[0133] In some embodiments, a prime editing complex comprises a fusion protein comprising a DNA binding domain (e.g., Cas9((R221K N394K H840A)) and a reverse transcriptase (e.g., a variant MMLV RT) having the following structure: [NLS]-[Cas9((R221K N394K H840A)]-[linker]-[MMLV_RT(D200N)(T330P)(L603W)(T306K)(W313F)], and a desired PEgRNA. In some embodiments, the prime editing complex comprises a prime editor fusion protein that has the amino acid sequence of SEQ ID NO: 342. In some embodiments, the prime editing complex comprises a prime editor fusion protein that has the amino acid sequence of SEQ ID NO: 343. Sequence of an exemplary prime editor fusion protein comprising a DNA binding domain (e.g., Cas9((R221K N394K H840A)) and a reverse transcriptase (e.g., a variant MMLV RT) having the following structure: [NLS]-[Cas9 (R221K N394K H840A)]-[linker]-[MMLV_RT(D200N)(T330P)(L603W)(T306K)(W313F)] and its components are shown in Table 12.

[0134] Polypeptides comprising components of a prime editor may be fused via peptide linkers or may be provided in trans relevant to each other. For example, a reverse transcriptase may be expressed, delivered, or otherwise provided as an individual component rather than as a part of a fusion protein with the DNA binding domain. In such cases, components of the prime editor may be associated through non-peptide linkages or co-localization functions. In some embodiments, a prime editor further comprises additional components capable of interacting with, associating with, or capable of recruiting other components of the prime editor or the prime editing system. For example, a prime editor may comprise an RNA-protein recruitment polypeptide that can associate with an RNA-protein recruitment RNA aptamer. In some embodiments, an RNA-protein recruitment polypeptide can recruit, or be recruited by, a specific RNA sequence. Non limiting examples of RNA-protein recruitment polypeptide and RNA aptamer pairs include a MS2 coat protein and a MS2 RNA hairpin, a PCP polypeptide and a PP7 RNA hairpin, a Com polypeptide and a Com RNA hairpin, a Ku protein and a telomerase Ku binding RNA motif, and a Sm7 protein and a telomerase Sm7 binding RNA motif. In some embodiments, the prime editor comprises a DNA binding domain fused or linked to an RNA-protein recruitment polypeptide. In some embodiments, the prime editor comprises a DNA polymerase domain fused or linked to an RNA-protein recruitment polypeptide. In some embodiments, the DNA binding domain and the DNA polymerase domain fused to the RNA-protein recruitment polypeptide, or the DNA binding domain fused to the RNA-protein recruitment polypeptide and the DNA polymerase domain are co-localized by the corresponding RNA-protein recruitment RNA aptamer of the RNA-protein recruitment polypeptide. In some embodiments, the corresponding RNA-protein recruitment RNA aptamer fused or linked to a portion of the PEgRNA or ngRNA. For example, an MS2 coat protein fused or linked to the DNA polymerase and a MS2 hairpin installed on the PEgRNA for co-localization of the DNA polymerase and the RNA-guided DNA binding domain (e.g., a Cas9 nickase).

[0135] In certain embodiments, components of a prime editor are directly fused to each other. In certain embodiments, components of a prime editor are associated to each other via a linker.

[0136] As used herein, a linker can be any chemical group or a molecule linking two molecules or moieties, e.g., a DNA binding domain and a polymerase domain of a prime editor. In some embodiments, a linker is an organic molecule, group, polymer, or chemical moiety. In some embodiments, the linker comprises a non-peptide moiety. The linker may be as simple as a covalent bond, or it may be a polymeric linker many atoms in length, for example, a polynucleotide sequence. In certain embodiments, the linker is a covalent bond (e.g., a carbon-carbon bond, disulfide bond, carbon-heteroatom bond, etc.).

[0137] In certain embodiments, two or more components of a prime editor are linked to each other by a peptide linker. In some embodiments, a peptide linker is 5-100 amino acids in length, for example, 2, 3, 4, 5, 6, 7, 8, 9, 10, 11, 12, 13, 14, 15, 16, 17, 18, 19, 20, 21, 22, 23, 24, 25, 26, 27, 28, 29, 30, 30-35, 35-40, 40-45, 45-50, 50-60, 60-70, 70-80, 80-90, 90-100, 100-150, or 150-200 amino acids in length. In some embodiments, the peptide linker is 16 amino acids in length, 24 amino acids in length, 64 amino acids in length, or 96 amino acids in length.

[0138] In some embodiments, the linker comprises the amino acid sequence (GGGGS)n (SEQ ID NO: 326), (G)n (SEQ ID NO: 327), (EAAAK)n (SEQ ID NO: 328), (GGS)n (SEQ ID NO: 329), (SGGS)n (SEQ ID NO: 330), (XP)n (SEQ ID NO: 331), or any combination thereof, wherein n is independently an integer between 1 and 30, and wherein X is any amino acid. In some embodiments, the linker comprises the amino acid sequence (GGS)n (SEQ ID NO: 21632), wherein n is 1, 3, or 7. In some embodiments, the linker comprises the amino acid sequence SGSETPGTSESATPES (SEQ ID NO: 332). In some embodiments, the linker comprises the amino acid sequence SGGSSGGSSGSETPGTSESATPESSGGSSGGS (SEQ ID NO: 333). In some embodiments, the linker comprises the amino acid sequence SGGSGGSGGS (SEQ ID NO: 335). In some embodiments, the linker comprises the amino acid sequence SGGS (SEQ ID NO: 336). In other embodiments, the linker comprises the amino acid sequence

(SEQ ID NO: 337)
SGGSSGGSSGSETPGTSESATPESAGSYPYDVPDYAGSAAPAAKKKKLD
GSGSGGSSGGS.

[0139] In certain embodiments, two or more components of a prime editor are linked to each other by a non-peptide linker. In some embodiments, the linker is a carbon-nitrogen bond of an amide linkage. In certain embodiments, the linker is a cyclic or acyclic, substituted or unsubstituted, branched or unbranched aliphatic or heteroaliphatic linker. In certain embodiments, the linker is polymeric (e.g., polyethylene, polyethylene glycol, polyamide, polyester, etc.). In certain embodiments, the linker comprises a monomer, dimer, or polymer of aminoalkanoic acid. In certain embodiments, the linker comprises an aminoalkanoic acid (e.g., glycine, ethanoic acid, alanine, beta-alanine, 3-aminopropanoic acid, 4-aminobutanoic acid, 5-pentanoic acid, etc.). In certain embodiments, the linker comprises a monomer, dimer, or polymer of aminohexanoic acid (Ahx). In certain embodiments, the linker is based on a carbocyclic moiety (e.g., cyclopentane, cyclohexane). In other embodiments, the linker comprises a polyethylene glycol moiety (PEG). In certain embodiments, the linker comprises an aryl or heteroaryl moiety. In certain embodiments, the linker is based on a phenyl ring. The linker may include functionalized moieties to facilitate attachment of a nucleophile (e.g., thiol, amino) from the peptide to the linker. Any electrophile may be used as part of the linker. Exemplary electrophiles include, but are not limited to, activated esters, activated amides, Michael acceptors, alkyl halides, aryl halides, acyl halides, and isothiocyanates.

[0140] Components of a prime editor may be connected to each other in any order. In some embodiments, the DNA binding domain and the DNA polymerase domain of a prime editor may be fused to form a fusion protein, or may be joined by a peptide or protein linker, in any order from the N terminus to the C terminus. In some embodiments, a prime editor comprises a DNA binding domain fused or linked to the C-terminal end of a DNA polymerase domain. In some embodiments, a prime editor comprises a DNA binding domain fused or linked to the N-terminal end of a DNA polymerase domain. In some embodiments, the prime editor comprises a fusion protein comprising the structure NH2-[DNA binding domain]-[polymerase]-COGH; or NH2-[polymerase]-[DNA binding domain]-COGH, wherein each instance of “]-[” indicates the presence of an optional linker sequence. In some embodiments, a prime editor comprises a fusion protein and a DNA polymerase domain provided in trans, wherein the fusion protein comprises the structure NH2-[DNA binding domain]-[RNA-protein recruitment polypeptide]-COGH. In some embodiments, a prime editor comprises a fusion protein and a DNA binding domain provided in trans, wherein the fusion protein comprises the structure NH2-[DNA polymerase domain]-[RNA-protein recruitment polypeptide]-COGH.

[0141] In some embodiments, a prime editor fusion protein, a polypeptide component of a prime editor, or a polynucleotide encoding the prime editor fusion protein or polypeptide component, may be split into an N-terminal half and a C-terminal half or polypeptides that encode the N-terminal half and the C terminal half, and provided to a target DNA in a cell separately. For example, in certain embodiments, a prime editor fusion protein may be split into a N-terminal and a C-terminal half for separate delivery in AAV vectors, and subsequently translated and colocalized in a target cell to reform the complete polypeptide or prime editor protein. In such cases, separate halves of a protein or a fusion protein may each comprise a split-intein to facilitate colocalization and reformation of the complete protein or fusion protein by the mechanism of intein facilitated trans splicing. In some embodiments, a prime editor comprises a N-terminal half fused to an intein-N, and a C-terminal half fused to an intein-C, or polynucleotides or vectors (e.g., AAV vectors) encoding each thereof. When delivered and/or expressed in a target cell, the intein-N and the intein-C can be excised via protein trans-splicing, resulting in a complete prime editor fusion protein in the target cell. In some embodiments, an exemplary protein described herein may lack a methionine residue at the N-terminus.

[0142] In some embodiments, a prime editor fusion protein comprises a Cas9(H840A) nickase and a wild type M-MLV RT. In some embodiments, a prime editor fusion protein comprises a Cas9(H840A) nickase and a M-MLV RT that comprises amino acid substitutions D200N, T330P, T306K, W313F, and L603W compared to a wild type M-MLV RT. In some embodiments, a prime editor fusion protein comprises a Cas9(H840A) nickase and a M-MLV RT that comprises amino acid substitutions D200N, T330P, T306K, W313F, and L603W compared to a wild type M-MLV RT. The amino acid sequence of an exemplary prime editor fusion protein and its individual components is shown in Table 11. In some embodiments, a prime editor fusion protein comprises a Cas9 (R221K N394K H840A) nickase and a M-MLV RT that comprises amino acid substitutions D200N, T330P, T306K, W313F, and L603W compared to a wild type M-MLV RT. The amino acid sequence of an exemplary Prime editor fusion protein and its individual components in shown in Table 12. In some embodiments an exemplary prime editor protein may comprise an amino acid sequence as set forth in any of the SEQ ID NO: 15, 341, 342, or 343.

[0143] In various embodiments, a prime editor fusion protein comprises an amino acid sequence that is at least about 70% identical, at least about 80% identical, at least about 90% identical, at least about 95% identical, at least about 96% identical, at least about 97% identical, at least about 98% identical, at least about 99% identical, at least about 99.5% identical, or at least about 99.9% identical to any of the prime editor fusion sequences described herein or known in the art.

[0144] Table 11 lists exemplary prime editor and its components

| SEQ | | |
|---|---|---|
| ID | | |
| NO. | DESCRIPTION | SEQUENCE |
| 15 | Exemplary Prime Editor | MKRTADGSEFESPKKKRKVDKKYSIGLDIGTNSVGWAVITDEYKV |
| | [NLS]-[Cas9(H840A)]- | PSKKFKVLGNTDRHSIKKNLIGALLFDSGETAEATRLKRTARRR |
| | [linker]- | YTRRKNRICYLQEIFSNEMAKVDDSFFHRLEESFLVEEDKKHER |
| | [MMLV_RT(D200N)(T330 | HPIFGNIVDEVAYHEKYPTIYHLRKKLVDSTDKADLRLIYLALAH |
| | P)(L603W)(T306K)(W313 | MIKFRGHFLIEGDLNPDNSDVDKLFIQLVQTYNQLFEENPINASG |
| | F)]-[NLS] | VDAKAILSARLSKSRRLENLIAQLPGEKKNGLFGNLIALSLGLTP |
| | | NFKSNFDLAEDAKLQLSKDTYDDDLDNLLAQIGDQYADLFLAAK |
| | | NLSDAILLSDILRVNTEITKAPLSASMIKRYDEHHQDLTLLKALV |
| | | RQQLPEKYKEIFFDQSKNGYAGYIDGGASQEEFYKFIKPILEKMD |
| | | GTEELLVKLNREDLLRKQRTFDNGSIPHQIHLGELHAILRRQEDF |
| | | YPFLKDNREKIEKILTFRIPYYVGPLARGNSRFAWMTRKSEETIT |
| | | PWNFEEVVDKGASAQSFIERMTNFDKNLPNEKVLPKHSLLYEYF |
| | | TVYNELTKVKYVTEGMRKPAFLSGEQKKAIVDLLFKTNRKVTV |
| | | KQLKEDYFKKIECFDSVEISGVEDRFNASLGTYHDLLKIIKDKDF |
| | | LDNEENEDILEDIVLTLTLFEDREMIEERLKTYAHLFDDKVMKQ |
| | | LKRRRYTGWGRLSRKLINGIRDKQSGKTILDFLKSDGFANRNFM |
| | | QLIHDDSLTFKEDIQKAQVSGQGDSLHEHIANLAGSPAIKKGILQ |
| | | TVKVVDELVKVMGRHKPENIVIEMARENQTTQKGQKNSRERM |
| | | KRIEEGIKELGSQILKEHPVENTQLQNEKLYLYYLQNGRDMYVD |
| | | QELDINRLSDYDVDAIVPQSFLKDDSIDNKVLTRSDKNRGKSDNV |
| | | PSEEVVKKMKNYWRQLLNAKLITQRKFDNLTKAERGGLSELDK |
| | | AGFIKRQLVETRQITKHVAQILDSRMNTKYDENDKLIREVKVITL |
| | | KSKLVSDFRKDFQFYKVREINNYHHAHDAYLNAVVGTALIKKYP |
| | | KLESEFVYGDYKVYDVRKMIAKSEQEIGKATAKYFFYSNIMNFF |
| | | KTEITLANGEIRKRPLIETNGETGEIVWDKGRDFATVRKVLSMP |
| | | QVNIVKKTEVQTGGFSKESILPKRNSDKLIARKKDWDPKKYGGF |
| | | DSPTVAYSVLVVAKVEKGKSKKLKSVKELLGITIMERSSFEKNPI |
| | | DFLEAKGYKEVKKDLIIKLPKYSLFELENGRKRMLASAGELQKG |
| | | NELALPSKYVNFLYLASHYEKLKGSPEDNEQKQLFVEQHKHYL |
| | | DEIIEQISEFSKRVILADANLDKVLSAYNKHRDKPIREQAENIIHLF |
| | | TLTNLGAPAAFKYFDTTIDRKRYTSTKEVLDATLIHQSITGLYET |
| | | RIDLSQLGGDSGGSSGGSSGSETPGTSESATPESSGGSSGGSSTLNI |
| | | EDEYRLHETSKEPDVSLGSTWLSDFPQAWAETGGMGLAVRQAPLIIPLK |
| | | ATSTPVSIKQYPMSQEARLGIKPHIQRLLDQGILVPCQSPWNTPLLPVKK |
| | | PGTNDYRPVQDLREVNKRVEDIHPTVPNPYNLLSGLPPSHQWYTVLDLK |
| | | DAFFCLRLHPTSQPLFAFEWRDPEMGISGQLTWTRLPQGFKNSPTLFNE |
| | | ALHRDLADFRIQHPDLILLQYVDDLLLAATSELDCQQGTRALLQTLGNL |
| | | GYRASAKKAQICQKQVKYLGYLLKEGQRWLTEARKETVMGQPTPKTPR |
| | | QLREFLGKAGFCRLFIPGFAEMAAPLYPLTKPGTLFNWGPDQQKAYQEI |
| | | KQALLTAPALGLPDLTKPFELFVDEKQGYAKGVLTQKLGPWRRPVAYLS |
| | | KKLDPVAAGWPPCLRMVAAIAVLTKDAGKLTMGQPLVILAPHAVEALVK |
| | | QPPDRWLSNARMTHYQALLLDTDRVQFGPVVALNPATLLPLPEEGLQH |
| | | NCLDILAEAHGTRPDLTDQPLPDADHTWYTDGSSLLQEGQRKAGAAVTT |
| | | ETEVIWAKALPAGTSAQRAELIALTQALKMAEGKKLNVYTDSRYAFATAH |
| | | IHGEIYRRRGWLTSEGKEIKNKDEILALLKALFLPKRLSIIHCPGHQKGHS |
| | | AEARGNRMADQAARKAAITETPDTSTLLIENSSPSGGSKRTADGSEFEPK |
| | | KKRKV |
| | | KEY: |
| | | NUCLEAR LOCALIZATION SEQUENCE (NLS) |
| | | CAS9(H840A) |
| | | 33-AMINO ACID LINKER |
| | | M-MLV REVERSE TRANSCRIPTASE |
| 341 | Met-Exemplary Prime | KRTADGSEFESPKKKRKVDKKYSIGLDIGTNSVGWAVITDEYKVP |
| | Editor [NLS]- | SKKFKVLGNTDRHSIKKNLIGALLFDSGETAEATRLKRTARRRY |
| | [Cas9(H840A)]-[linker]- | TRRKNRICYLQEIFSNEMAKVDDSFFHRLEESFLVEEDKKHERH |
| | [MMLV_RT(D200N)(T330 | PIFGNIVDEVAYHEKYPTIYHLRKKLVDSTDKADLRLIYLALAHM |
| | P)(L603W)(T306K)(W313 | IKFRGHFLIEGDLNPDNSDVDKLFIQLVQTYNQLFEENPINASGV |
| | F)]-[NLS] | DAKAILSARLSKSRRLENLIAQLPGEKKNGLFGNLIALSLGLTPN |
| | | FKSNFDLAEDAKLQLSKDTYDDDLDNLLAQIGDQYADLFLAAKN |
| | | LSDAILLSDILRVNTEITKAPLSASMIKRYDEHHQDLTLLKALVR |
| | | QQLPEKYKEIFFDQSKNGYAGYIDGGASQEEFYKFIKPILEKMD |
| | | GTEELLVKLNREDLLRKQRTFDNGSIPHQIHLGELHAILRRQEDF |
| | | YPFLKDNREKIEKILTFRIPYYVGPLARGNSRFAWMTRKSEETIT |
| | | PWNFEEVVDKGASAQSFIERMTNFDKNLPNEKVLPKHSLLYEYF |
| | | TVYNELTKVKYVTEGMRKPAFLSGEQKKAIVDLLFKTNRKVTV |
| | | KQLKEDYFKKIECFDSVEISGVEDRFNASLGTYHDLLKIIKDKDF |
| | | LDNEENEDILEDIVLTLTLFEDREMIEERLKTYAHLFDDKVMKQ |
| | | LKRRRYTGWGRLSRKLINGIRDKQSGKTILDFLKSDGFANRNFM |
| | | QLIHDDSLTFKEDIQKAQVSGQGDSLHEHIANLAGSPAIKKGILQ |
| | | TVKVVDELVKVMGRHKPENIVIEMARENQTTQKGQKNSRERM |
| | | KRIEEGIKELGSQILKEHPVENTQLQNEKLYLYYLQNGRDMYVD |
| | | QELDINRLSDYDVDAIVPQSFLKDDSIDNKVLTRSDKNRGKSDNV |
| | | PSEEVVKKMKNYWRQLLNAKLITQRKFDNLTKAERGGLSELDK |
| | | AGFIKRQLVETRQITKHVAQILDSRMNTKYDENDKLIREVKVITL |
| | | KSKLVSDFRKDFQFYKVREINNYHHAHDAYLNAVVGTALIKKYP |
| | | KLESEFVYGDYKVYDVRKMIAKSEQEIGKATAKYFFYSNIMNFF |
| | | KTEITLANGEIRKRPLIETNGETGEIVWDKGRDFATVRKVLSMP |
| | | QVNIVKKTEVQTGGFSKESILPKRNSDKLIARKKDWDPKKYGGF |
| | | DSPTVAYSVLVVAKVEKGKSKKLKSVKELLGITIMERSSFEKNPI |
| | | DFLEAKGYKEVKKDLIIKLPKYSLFELENGRKRMLASAGELQKG |
| | | NELALPSKYVNFLYLASHYEKLKGSPEDNEQKQLFVEQHKHYL |
| | | DEIIEQISEFSKRVILADANLDKVLSAYNKHRDKPIREQAENIIHLF |
| | | TLTNLGAPAAFKYFDTTIDRKRYTSTKEVLDATLIHQSITGLYET |
| | | RIDLSQLGGDSGGSSGGSSGSETPGTSESATPESSGGSSGGSSTLNI |
| | | EDEYRLHETSKEPDVSLGSTWLSDFPQAWAETGGMGLAVRQAPLIIPLK |
| | | ATSTPVSIKQYPMSQEARLGIKPHIQRLLDQGILVPCQSPWNTPLLPVKK |
| | | PGTNDYRPVQDLREVNKRVEDIHPTVPNPYNLLSGLPPSHQWYTVLDLK |
| | | DAFFCLRLHPTSQPLFAFEWRDPEMGISGQLTWTRLPQGFKNSPTLFNE |
| | | ALHRDLADFRIQHPDLILLQYVDDLLLAATSELDCQQGTRALLQTLGNL |
| | | GYRASAKKAQICQKQVKYLGYLLKEGQRWLTEARKETVMGQPTPKTPR |
| | | QLREFLGKAGFCRLFIPGFAEMAAPLYPLTKPGTLFNWGPDQQKAYQEI |
| | | KQALLTAPALGLPDLTKPFELFVDEKQGYAKGVLTQKLGPWRRPVAYLS |
| | | KKLDPVAAGWPPCLRMVAAIAVLTKDAGKLTMGQPLVILAPHAVEALVK |
| | | QPPDRWLSNARMTHYQALLLDTDRVQFGPVVALNPATLLPLPEEGLQH |
| | | NCLDILAEAHGTRPDLTDQPLPDADHTWYTDGSSLLQEGQRKAGAAVTT |
| | | ETEVIWAKALPAGTSAQRAELIALTQALKMAEGKKLNVYTDSRYAFATAH |
| | | IHGEIYRRRGWLTSEGKEIKNKDEILALLKALFLPKRLSIIHCPGHQKGHS |
| | | AEARGNRMADQAARKAAITETPDTSTLLIENSSPSGGSKRTADGSEFEPK |
| | | KKRKV |
| 5 | -N-terminal NLS | MKRTADGSEFESPKKKRKV |
| 300 | -CAS9 (H840A) | DKKYSIGLDIGTNSVGWAVITDEYKVPSKKFKVLGNTDRHSIKKNLI |
| | | GALLFDSGETAEATRLKRTARRRYTRRKNRICYLQEIFSNEMAKVD |
| | | DSFFHRLEESFLVEEDKKHERHPIFGNIVDEVAYHEKYPTIYHLRKKL |
| | | VDSTDKADLRLIYLALAHMIKFRGHFLIEGDLNPDNSDVDKLFIQLV |
| | | QTYNQLFEENPINASGVDAKAILSARLSKSRRLENLIAQLPGEKKNG |
| | | LFGNLIALSLGLTPNFKSNFDLAEDAKLQLSKDTYDDDLDNLLAQIG |
| | | DQYADLFLAAKNLSDAILLSDILRVNTEITKAPLSASMIKRYDEHHQ |
| | | DLTLLKALVRQQLPEKYKEIFFDQSKNGYAGYIDGGASQEEFYKFIK |
| | | PILEKMDGTEELLVKLNREDLLRKQRTFDNGSIPHQIHLGELHAILRR |
| | | QEDFYPFLKDNREKIEKILTFRIPYYVGPLARGNSRFAWMTRKSEETI |
| | | TPWNFEEVVDKGASAQSFIERMTNFDKNLPNEKVLPKHSLLYEYFT |
| | | VYNELTKVKYVTEGMRKPAFLSGEQKKAIVDLLFKTNRKVTVKQL |
| | | KEDYFKKIECFDSVEISGVEDRFNASLGTYHDLLKIIKDKDFLDNEEN |
| | | EDILEDIVLTLTLFEDREMIEERLKTYAHLFDDKVMKQLKRRRYTG |
| | | WGRLSRKLINGIRDKQSGKTILDFLKSDGFANRNFMQLIHDDSLTFK |
| | | EDIQKAQVSGQGDSLHEHIANLAGSPAIKKGILQTVKVVDELVKVM |
| | | GRHKPENIVIEMARENQTTQKGQKNSRERMKRIEEGIKELGSQILKE |
| | | HPVENTQLQNEKLYLYYLQNGRDMYVDQELDINRLSDYDVDAIVP |
| | | QSFLKDDSIDNKVLTRSDKNRGKSDNVPSEEVVKKMKNYWRQLLN |
| | | AKLITQRKFDNLTKAERGGLSELDKAGFIKRQLVETRQITKHVAQIL |
| | | DSRMNTKYDENDKLIREVKVITLKSKLVSDFRKDFQFYKVREINNY |
| | | HHAHDAYLNAVVGTALIKKYPKLESEFVYGDYKVYDVRKMIAKSE |
| | | QEIGKATAKYFFYSNIMNFFKTEITLANGEIRKRPLIETNGETGEIVW |
| | | DKGRDFATVRKVLSMPQVNIVKKTEVQTGGFSKESILPKRNSDKLIA |
| | | RKKDWDPKKYGGFDSPTVAYSVLVVAKVEKGKSKKLKSVKELLGI |
| | | TIMERSSFEKNPIDFLEAKGYKEVKKDLIIKLPKYSLFELENGRKRML |
| | | ASAGELQKGNELALPSKYVNFLYLASHYEKLKGSPEDNEQKQLFVE |
| | | QHKHYLDEIIEQISEFSKRVILADANLDKVLSAYNKHRDKPIREQAEN |
| | | IIHLFTLTNLGAPAAFKYFDTTIDRKRYTSTKEVLDATLIHQSITGLYE |
| | | TRIDLSQLGGD |
| 334 | -linker between CAS9 | SGGSSGGSSGSETPGTSESATPESSGGSSGGSS |
| | domain and RT domain | |
| | (33 amino acids) | |
| 3 | -MMLV_RT D200N | TLNIEDEYRLHETSKEPDVSLGSTWLSDFPQAWAETGGMGLAVRQA |
| | T330P L603W T306K | PLIIPLKATSTPVSIKQYPMSQEARLGIKPHIQRLLDQGILVPCQSPWN |
| | W313F | TPLLPVKKPGTNDYRPVQDLREVNKRVEDIHPTVPNPYNLLSGLPPS |
| | | HQWYTVLDLKDAFFCLRLHPTSQPLFAFEWRDPEMGISGQLTWTRL |
| | | PQGFKNSPTLFNEALHRDLADFRIQHPDLILLQYVDDLLLAATSELD |
| | | CQQGTRALLQTLGNLGYRASAKKAQICQKQVKYLGYLLKEGQRWL |
| | | TEARKETVMGQPTPKTPRQLREFLGKAGFCRLFIPGFAEMAAPLYPL |
| | | TKPGTLFNWGPDQQKAYQEIKQALLTAPALGLPDLTKPFELFVDEK |
| | | QGYAKGVLTQKLGPWRRPVAYLSKKLDPVAAGWPPCLRMVAAIA |
| | | VLTKDAGKLTMGQPLVILAPHAVEALVKQPPDRWLSNARMTHYQA |
| | | LLLDTDRVQFGPVVALNPATLLPLPEEGLQHNCLDILAEAHGTRPDL |
| | | TDQPLPDADHTWYTDGSSLLQEGQRKAGAAVTTETEVIWAKALPA |
| | | GTSAQRAELIALTQALKMAEGKKLNVYTDSRYAFATAHIHGEIYRR |
| | | RGWLTSEGKEIKNKDEILALLKALFLPKRLSIIHCPGHQKGHSAEAR |
| | | GNRMADQAARKAAITETPDTSTLLIENSSP |
| 14 | -C-terminal NLS | SGGSKRTADGSEFEPKKKRKV |

| SEQ | | |
|---|---|---|
| ID | | |
| NO. | DESCRIPTION | SEQUENCE |
| 342 | Exemplary prime editor | MKRTADGSEFESPKKKRKVDKKYSIGLDIGTNSVGWAVITDEYKV |
| | [NLS]-[Cas9((R220K) | PSKKFKVLGNTDRHSIKKNLIGALLFDSGETAEATRLKRTARRR |
| | (R393K)(H839A)]- | YTRRKNRICYLQEIFSNEMAKVDDSFFHRLEESFLVEEDKKHER |
| | [linker]- | HPIFGNIVDEVAYHEKYPTIYHLRKKLVDSTDKADLRLIYLALAH |
| | [MMLV_RT(D200N)(T33 | MIKFRGHFLIEGDLNPDNSDVDKLFIQLVQTYNQLFEENPINASG |
| | 0P)(L603W)(T306K)(W3 | VDAKAILSARLSKSRKLENLIAQLPGEKKNGLFGNLIALSLGLTP |
| | 13F)]-[NLS] | NFKSNFDLAEDAKLQLSKDTYDDDLDNLLAQIGDQYADLFLAAK |
| | | NLSDAILLSDILRVNTEITKAPLSASMIKRYDEHHQDLTLLKALV |
| | | RQQLPEKYKEIFFDQSKNGYAGYIDGGASQEEFYKFIKPILEKMD |
| | | GTEELLVKLKREDLLRKQRTFDNGSIPHQIHLGELHAILRRQED |
| | | FYPFLKDNREKIEKILTFRIPYYVGPLARGNSRFAWMTRKSEETI |
| | | TPWNFEEVVDKGASAQSFIERMTNFDKNLPNEKVLPKHSLLYEY |
| | | FTVYNELTKVKYVTEGMRKPAFLSGEQKKAIVDLLFKTNRKVT |
| | | VKQLKEDYFKKIECFDSVEISGVEDRFNASLGTYHDLLKIIKDKD |
| | | FLDNEENEDILEDIVLTLTLFEDREMIEERLKTYAHLFDDKVMK |
| | | QLKRRRYTGWGRLSRKLINGIRDKQSGKTILDFLKSDGFANRNF |
| | | MQLIHDDSLTFKEDIQKAQVSGQGDSLHEHIANLAGSPAIKKGIL |
| | | QTVKVVDELVKVMGRHKPENIVIEMARENQTTQKGQKNSRER |
| | | MKRIEEGIKELGSQILKEHPVENTQLQNEKLYLYYLQNGRDMY |
| | | VDQELDINRLSDYDVDAIVPQSFLKDDSIDNKVLTRSDKNRGKSD |
| | | NVPSEEVVKKMKNYWRQLLNAKLITQRKFDNLTKAERGGLSEL |
| | | DKAGFIKRQLVETRQITKHVAQILDSRMNTKYDENDKLIREVKV |
| | | ITLKSKLVSDFRKDFQFYKVREINNYHHAHDAYLNAVVGTALIK |
| | | KYPKLESEFVYGDYKVYDVRKMIAKSEQEIGKATAKYFFYSNIM |
| | | NFFKTEITLANGEIRKRPLIETNGETGEIVWDKGRDFATVRKVLS |
| | | MPQVNIVKKTEVQTGGFSKESILPKRNSDKLIARKKDWDPKKYG |
| | | GFDSPTVAYSVLVVAKVEKGKSKKLKSVKELLGITIMERSSFEKN |
| | | PIDFLEAKGYKEVKKDLIIKLPKYSLFELENGRKRMLASAGELQ |
| | | KGNELALPSKYVNFLYLASHYEKLKGSPEDNEQKQLFVEQHKH |
| | | YLDEIIEQISEFSKRVILADANLDKVLSAYNKHRDKPIREQAENII |
| | | HLFTLTNLGAPAAFKYFDTTIDRKRYTSTKEVLDATLIHQSITGL |
| | | YETRIDLSQLGGDSGGSSGGSKRTADGSEFESPKKKRKVSGGSSG |
| | | GSTLNIEDEYRLHETSKEPDVSLGSTWLSDFPQAWAETGGMGLAVRQAP |
| | | LIIPLKATSTPVSIKQYPMSQEARLGIKPHIQRLLDQGILVPCQSPWNTPLL |
| | | PVKKPGTNDYRPVQDLREVNKRVEDIHPTVPNPYNLLSGLPPSHQWYTV |
| | | LDLKDAFFCLRLHPTSQPLFAFEWRDPEMGISGQLTWTRLPQGFKNSPT |
| | | LFNEALHRDLADFRIQHPDLILLQYVDDLLLAATSELDCQQGTRALLQTL |
| | | GNLGYRASAKKAQICQKQVKYLGYLLKEGQRWLTEARKETVMGQPTPK |
| | | TPRQLREFLGKAGFCRLFIPGFAEMAAPLYPLTKPGTLFNWGPDQQKAY |
| | | QEIKQALLTAPALGLPDLTKPFELFVDEKQGYAKGVLTQKLGPWRRPVA |
| | | YLSKKLDPVAAGWPPCLRMVAAIAVLTKDAGKLTMGQPLVILAPHAVEA |
| | | LVKQPPDRWLSNARMTHYQALLLDTDRVQFGPVVALNPATLLPLPEEGL |
| | | QHNCLDILAEAHGTRPDLTDQPLPDADHTWYTDGSSLLQEGQRKAGAA |
| | | VTTETEVIWAKALPAGTSAQRAELIALTQALKMAEGKKLNVYTDSRYAFA |
| | | TAHIHGEIYRRRGWLTSEGKEIKNKDEILALLKALFLPKRLSIIHCPGHQK |
| | | GHSAEARGNRMADQAARKAAITETPDTSTLLIENSSPSGGSKRTADGSEF |
| | | ESPKKKRKVGSGPAAKRVKLD |
| | | KEY: |
| | | N-terminal bipartiteSV40NLS |
| | | CAS9(R221K N394K H840A) |
| | | SGGSx2-met-bpSV40NLS-SGGSx2 LINKER |
| | | M-MLV D200N T306K W313F T330P L603W REVERSE |
| | | TRANSCRIPTASE |
| | | C-terminal linker-NLS1 |
| | | C-terminal linker-NLS2 |
| 343 | Met-Exemplary prime | KRTADGSEFESPKKKRKVDKKYSIGLDIGTNSVGWAVITDEYKVPSK |
| | editor [NLS]- | KFKVLGNTDRHSIKKNLIGALLFDSGETAEATRLKRTARRRYTRRKN |
| | [Cas9((R220K)(R393K) | RICYLQEIFSNEMAKVDDSFFHRLEESFLVEEDKKHERHPIFGNIVDE |
| | (H839A)]-[linker]- | VAYHEKYPTIYHLRKKLVDSTDKADLRLIYLALAHMIKFRGHFLIEG |
| | [MMLV_RT(D200N)(T33 | DLNPDNSDVDKLFIQLVQTYNQLFEENPINASGVDAKAILSARLSKS |
| | 0P)(L603W)(T306K)(W3 | RKLENLIAQLPGEKKNGLFGNLIALSLGLTPNFKSNFDLAEDAKLQL |
| | 13F)]-[NLS] | SKDTYDDDLDNLLAQIGDQYADLFLAAKNLSDAILLSDILRVNTEIT |
| | | KAPLSASMIKRYDEHHQDLTLLKALVRQQLPEKYKEIFFDQSKNGY |
| | | AGYIDGGASQEEFYKFIKPILEKMDGTEELLVKLKREDLLRKQRTFD |
| | | NGSIPHQIHLGELHAILRRQEDFYPFLKDNREKIEKILTFRIPYYVGPL |
| | | ARGNSRFAWMTRKSEETITPWNFEEVVDKGASAQSFIERMTNFDKN |
| | | LPNEKVLPKHSLLYEYFTVYNELTKVKYVTEGMRKPAFLSGEQKKA |
| | | IVDLLFKTNRKVTVKQLKEDYFKKIECFDSVEISGVEDRFNASLGTY |
| | | HDLLKIIKDKDFLDNEENEDILEDIVLTLTLFEDREMIEERLKTYAHLF |
| | | DDKVMKQLKRRRYTGWGRLSRKLINGIRDKQSGKTILDFLKSDGFA |
| | | NRNFMQLIHDDSLTFKEDIQKAQVSGQGDSLHEHIANLAGSPAIKKG |
| | | ILQTVKVVDELVKVMGRHKPENIVIEMARENQTTQKGQKNSRERM |
| | | KRIEEGIKELGSQILKEHPVENTQLQNEKLYLYYLQNGRDMYVDQE |
| | | LDINRLSDYDVDAIVPQSFLKDDSIDNKVLTRSDKNRGKSDNVPSEE |
| | | VVKKMKNYWRQLLNAKLITQRKFDNLTKAERGGLSELDKAGFIKR |
| | | QLVETRQITKHVAQILDSRMNTKYDENDKLIREVKVITLKSKLVSDF |
| | | RKDFQFYKVREINNYHHAHDAYLNAVVGTALIKKYPKLESEFVYGD |
| | | YKVYDVRKMIAKSEQEIGKATAKYFFYSNIMNFFKTEITLANGEIRK |
| | | RPLIETNGETGEIVWDKGRDFATVRKVLSMPQVNIVKKTEVQTGGFS |
| | | KESILPKRNSDKLIARKKDWDPKKYGGFDSPTVAYSVLVVAKVEKG |
| | | KSKKLKSVKELLGITIMERSSFEKNPIDFLEAKGYKEVKKDLIIKLPK |
| | | YSLFELENGRKRMLASAGELQKGNELALPSKYVNFLYLASHYEKLK |
| | | GSPEDNEQKQLFVEQHKHYLDEIIEQISEFSKRVILADANLDKVLSAY |
| | | NKHRDKPIREQAENIIHLFTLTNLGAPAAFKYFDTTIDRKRYTSTKEV |
| | | LDATLIHQSITGLYETRIDLSQLGGDSGGSSGGSKRTADGSEFESPKK |
| | | KRKVSGGSSGGSTLNIEDEYRLHETSKEPDVSLGSTWLSDFPQAWAE |
| | | TGGMGLAVRQAPLIIPLKATSTPVSIKQYPMSQEARLGIKPHIQRLLD |
| | | QGILVPCQSPWNTPLLPVKKPGTNDYRPVQDLREVNKRVEDIHPTVP |
| | | NPYNLLSGLPPSHQWYTVLDLKDAFFCLRLHPTSQPLFAFEWRDPE |
| | | MGISGQLTWTRLPQGFKNSPTLFNEALHRDLADFRIQHPDLILLQYV |
| | | DDLLLAATSELDCQQGTRALLQTLGNLGYRASAKKAQICQKQVKY |
| | | LGYLLKEGQRWLTEARKETVMGQPTPKTPRQLREFLGKAGFCRLFIP |
| | | GFAEMAAPLYPLTKPGTLFNWGPDQQKAYQEIKQALLTAPALGLPD |
| | | LTKPFELFVDEKQGYAKGVLTQKLGPWRRPVAYLSKKLDPVAAGW |
| | | PPCLRMVAAIAVLTKDAGKLTMGQPLVILAPHAVEALVKQPPDRWL |
| | | SNARMTHYQALLLDTDRVQFGPVVALNPATLLPLPEEGLQHNCLDI |
| | | LAEAHGTRPDLTDQPLPDADHTWYTDGSSLLQEGQRKAGAAVTTE |
| | | TEVIWAKALPAGTSAQRAELIALTQALKMAEGKKLNVYTDSRYAFA |
| | | TAHIHGEIYRRRGWLTSEGKEIKNKDEILALLKALFLPKRLSIIHCPGH |
| | | QKGHSAEARGNRMADQAARKAAITETPDTSTLLIENSSPSGGSKRTA |
| | | DGSEFESPKKKRKVGSGPAAKRVKLD |
| 5 | -N-terminal bpSV40NLS | MKRTADGSEFESPKKKRKV |
| 325 | -CAS9 (R221K N394K | DKKYSIGLDIGTNSVGWAVITDEYKVPSKKFKVLGNTDRHSIKKNLI |
| | H840A) | GALLFDSGETAEATRLKRTARRRYTRRKNRICYLQEIFSNEMAKVD |
| | | DSFFHRLEESFLVEEDKKHERHPIFGNIVDEVAYHEKYPTIYHLRKKL |
| | | VDSTDKADLRLIYLALAHMIKFRGHFLIEGDLNPDNSDVDKLFIQLV |
| | | QTYNQLFEENPINASGVDAKAILSARLSKSRKLENLIAQLPGEKKNG |
| | | LFGNLIALSLGLTPNFKSNFDLAEDAKLQLSKDTYDDDLDNLLAQIG |
| | | DQYADLFLAAKNLSDAILLSDILRVNTEITKAPLSASMIKRYDEHHQ |
| | | DLTLLKALVRQQLPEKYKEIFFDQSKNGYAGYIDGGASQEEFYKFIK |
| | | PILEKMDGTEELLVKLKREDLLRKQRTFDNGSIPHQIHLGELHAILRR |
| | | QEDFYPFLKDNREKIEKILTFRIPYYVGPLARGNSRFAWMTRKSEETI |
| | | TPWNFEEVVDKGASAQSFIERMTNFDKNLPNEKVLPKHSLLYEYFT |
| | | VYNELTKVKYVTEGMRKPAFLSGEQKKAIVDLLFKTNRKVTVKQL |
| | | KEDYFKKIECFDSVEISGVEDRFNASLGTYHDLLKIIKDKDFLDNEEN |
| | | EDILEDIVLTLTLFEDREMIEERLKTYAHLFDDKVMKQLKRRRYTG |
| | | WGRLSRKLINGIRDKQSGKTILDFLKSDGFANRNFMQLIHDDSLTFK |
| | | EDIQKAQVSGQGDSLHEHIANLAGSPAIKKGILQTVKVVDELVKVM |
| | | GRHKPENIVIEMARENQTTQKGQKNSRERMKRIEEGIKELGSQILKE |
| | | HPVENTQLQNEKLYLYYLQNGRDMYVDQELDINRLSDYDVDAIVP |
| | | QSFLKDDSIDNKVLTRSDKNRGKSDNVPSEEVVKKMKNYWRQLLN |
| | | AKLITQRKFDNLTKAERGGLSELDKAGFIKRQLVETRQITKHVAQIL |
| | | DSRMNTKYDENDKLIREVKVITLKSKLVSDFRKDFQFYKVREINNY |
| | | HHAHDAYLNAVVGTALIKKYPKLESEFVYGDYKVYDVRKMIAKSE |
| | | QEIGKATAKYFFYSNIMNFFKTEITLANGEIRKRPLIETNGETGEIVW |
| | | DKGRDFATVRKVLSMPQVNIVKKTEVQTGGFSKESILPKRNSDKLIA |
| | | RKKDWDPKKYGGFDSPTVAYSVLVVAKVEKGKSKKLKSVKELLGI |
| | | TIMERSSFEKNPIDFLEAKGYKEVKKDLIIKLPKYSLFELENGRKRML |
| | | ASAGELQKGNELALPSKYVNFLYLASHYEKLKGSPEDNEQKQLFVE |
| | | QHKHYLDEIIEQISEFSKRVILADANLDKVLSAYNKHRDKPIREQAEN |
| | | IIHLFTLTNLGAPAAFKYFDTTIDRKRYTSTKEVLDATLIHQSITGLYE |
| | | TRIDLSQLGGD |
| 338 | -SGGSx2-bpSV40NLS- | SGGSSGGSKRTADGSEFESPKKKRKVSGGSSGGS |
| | SGGSx2 linker | |
| 3 | -MMLV_RT D200N | TLNIEDEYRLHETSKEPDVSLGSTWLSDFPQAWAETGGMGLAVRQA |
| | T330P L603W T306K | PLIIPLKATSTPVSIKQYPMSQEARLGIKPHIQRLLDQGILVPCQSPWN |
| | W313F | TPLLPVKKPGTNDYRPVQDLREVNKRVEDIHPTVPNPYNLLSGLPPS |
| | | HQWYTVLDLKDAFFCLRLHPTSQPLFAFEWRDPEMGISGQLTWTRL |
| | | PQGFKNSPTLFNEALHRDLADFRIQHPDLILLQYVDDLLLAATSELD |
| | | CQQGTRALLQTLGNLGYRASAKKAQICQKQVKYLGYLLKEGQRWL |
| | | TEARKETVMGQPTPKTPRQLREFLGKAGFCRLFIPGFAEMAAPLYPL |
| | | TKPGTLFNWGPDQQKAYQEIKQALLTAPALGLPDLTKPFELFVDEK |
| | | QGYAKGVLTQKLGPWRRPVAYLSKKLDPVAAGWPPCLRMVAAIA |
| | | VLTKDAGKLTMGQPLVILAPHAVEALVKQPPDRWLSNARMTHYQA |
| | | LLLDTDRVQFGPVVALNPATLLPLPEEGLQHNCLDILAEAHGTRPDL |
| | | TDQPLPDADHTWYTDGSSLLQEGQRKAGAAVTTETEVIWAKALPA |
| | | GTSAQRAELIALTQALKMAEGKKLNVYTDSRYAFATAHIHGEIYRR |
| | | RGWLTSEGKEIKNKDEILALLKALFLPKRLSIIHCPGHQKGHSAEAR |
| | | GNRMADQAARKAAITETPDTSTLLIENSSP |
| 340 | C-terminal linker-NLS | SGGSKRTADGSEFESPKKKRKV |
| 345 | C-terminal linker-NLS2 | GSGPAAKRVKLD |

### PEgRNA for Editing of CFTR Gene

[0145] The term “prime editing guide RNA”, or “PEgRNA”, refers to a guide polynucleotide that comprises one or more intended nucleotide edits for incorporation into the target DNA. In some embodiments, the PEgRNA associates with and directs a prime editor to incorporate the one or more intended nucleotide edits into the target gene via prime editing. “Nucleotide edit” or “intended nucleotide edit” refers to a specified deletion of one or more nucleotides at one specific position, insertion of one or more nucleotides at one specific position, substitution of a single nucleotide, or other alterations at one specific position to be incorporated into the sequence of the target gene. Intended nucleotide edit may refer to the edit on the editing template as compared to the sequence on the target strand of the target gene, or may refer to the edit encoded by the editing template on the newly synthesized single stranded DNA that replaces the editing target sequence, as compared to the editing target sequence. In some embodiments, a PEgRNA comprises a spacer sequence that is complementary or substantially complementary to a search target sequence on a target strand of the target gene. In some embodiments, the PEgRNA comprises a gRNA core that associates with a DNA binding domain, e.g., a CRISPR-Cas protein domain, of a prime editor. In some embodiments, the PEgRNA further comprises an extended nucleotide sequence comprising one or more intended nucleotide edits compared to the endogenous sequence of the target gene, wherein the extended nucleotide sequence may be referred to as an extension arm.

[0146] In certain embodiments, the extension arm comprises a primer binding site sequence (PBS) that can initiate target-primed DNA synthesis. In some embodiments, the PBS is complementary or substantially complementary to a free 3′ end on the edit strand of the target gene at a nick site generated by the prime editor. In some embodiments, the extension arm further comprises an editing template that comprises one or more intended nucleotide edits to be incorporated in the target gene by prime editing. In some embodiments, the editing template is a template for an RNA-dependent DNA polymerase domain or polypeptide of the prime editor, for example, a reverse transcriptase domain. The reverse transcriptase editing template may also be referred to herein as an RT template, or RTT. In some embodiments, the editing template comprises partial complementarity to an editing target sequence in the target gene, e.g., an CFTR gene. In some embodiments, the editing template comprises substantial or partial complementarity to the editing target sequence except at the position of the intended nucleotide edits to be incorporated into the target gene. An exemplary architecture of a PEgRNA including its components is as demonstrated in FIG. 2.

[0147] In some embodiments, a PEgRNA includes only RNA nucleotides and forms an RNA polynucleotide. In some embodiments, a PEgRNA is a chimeric polynucleotide that includes both RNA and DNA nucleotides. For example, a PEgRNA can include DNA in the spacer sequence, the gRNA core, or the extension arm. In some embodiments, a PEgRNA comprises DNA in the spacer sequence. In some embodiments, the entire spacer sequence of a PEgRNA is a DNA sequence. In some embodiments, the PEgRNA comprises DNA in the gRNA core, for example, in a stem region of the gRNA core. In some embodiments, the PEgRNA comprises DNA in the extension arm, for example, in the editing template. An editing template that comprises a DNA sequence may serve as a DNA synthesis template for a DNA polymerase in a prime editor, for example, a DNA-dependent DNA polymerase. Accordingly, the PEgRNA may be a chimeric polynucleotide that comprises RNA in the spacer, gRNA core, and/or the PBS sequences and DNA in the editing template.

[0148] Components of a PEgRNA may be arranged in a modular fashion. In some embodiments, the spacer and the extension arm comprising a primer binding site sequence (PBS) and an editing template, e.g., a reverse transcriptase template (RTT), can be interchangeably located in the 5′ portion of the PEgRNA, the 3′ portion of the PEgRNA, or in the middle of the gRNA core. In some embodiments, a PEgRNA comprises a PBS and an editing template sequence in 5′ to 3′ order. In some embodiments, the gRNA core of a PEgRNA of this disclosure may be located in between a spacer and an extension arm of the PEgRNA. In some embodiments, the gRNA core of a PEgRNA may be located at the 3′ end of a spacer. In some embodiments, the gRNA core of a PEgRNA may be located at the 5′ end of a spacer. In some embodiments, the gRNA core of a PEgRNA may be located at the 3′ end of an extension arm. In some embodiments, the gRNA core of a PEgRNA may be located at the 5′ end of an extension arm. In some embodiments, the PEgRNA comprises, from 5′ to 3′: a spacer, a gRNA core, and an extension arm. In some embodiments, the PEgRNA comprises, from 5′ to 3′: a spacer, a gRNA core, an editing template, and a PBS. In some embodiments, the PEgRNA comprises, from 5′ to 3′: an extension arm, a spacer, and a gRNA core. In some embodiments, the PEgRNA comprises, from 5′ to 3′: an editing template, a PBS, a spacer, and a gRNA core.

[0149] In some embodiments, a PEgRNA comprises a single polynucleotide molecule that comprises the spacer sequence, the gRNA core, and the extension arm. In some embodiments, a PEgRNA comprises multiple polynucleotide molecules, for example, two polynucleotide molecules. In some embodiments, a PEgRNA comprise a first polynucleotide molecule that comprises the spacer and a portion of the gRNA core, and a second polynucleotide molecule that comprises the rest of the gRNA core and the extension arm. In some embodiments, the gRNA core portion in the first polynucleotide molecule and the gRNA core portion in the second polynucleotide molecule are at least partly complementary to each other. In some embodiments, the PEgRNA may comprise a first polynucleotide comprising the spacer and a first portion of a gRNA core comprising, which may also be referred to as a crRNA. In some embodiments, the PEgRNA comprise a second polynucleotide comprising a second portion of the gRNA core and the extension arm, wherein the second portion of the gRNA core may also be referred to as a trans-activating crRNA, or tracr RNA. In some embodiments, the crRNA portion and the tracr RNA portion of the gRNA core are at least partially complementary to each other. In some embodiments, the partially complementary portions of the crRNA and the tracr RNA form a lower stem, a bulge, and an upper stem, as exemplified in FIG. 3.

[0150] In some embodiments, a spacer sequence comprises a region that has substantial complementarity to a search target sequence on the target strand of a double stranded target DNA, e.g., an CFTR gene. In some embodiments, the spacer sequence of a PEgRNA is identical or substantially identical to a protospacer sequence on the edit strand of the target gene (except that the protospacer sequence comprises thymine and the spacer sequence may comprise uracil). In some embodiments, the spacer sequence is at least about 70%, 75%, 80%, 85%, 90%, 95%, or 100% complementary to a search target sequence in the target gene. In some embodiments, the spacer comprises is substantially complementary to the search target sequence.

[0151] In some embodiments, the length of the spacer varies from about 10 nucleotides to about 100 nucleotides. In some embodiments, the spacer is 16 nucleotides, 17 nucleotides, 18 nucleotides, 19 nucleotides, 20 nucleotides, 21 nucleotides, 22 nucleotides, 23 nucleotides, 24 nucleotides, or 25 nucleotides in length. In some embodiments, the spacer is from 15 nucleotides to 30 nucleotides in length, 15 to 25 nucleotides in length, 18 to 22 nucleotides in length, 10 to 20 nucleotides in length, or 20 to 30 nucleotides in length. In some embodiments, the spacer is 20 nucleotides in length. In some embodiments, the spacer is 17 to 18 nucleotides in length. In some embodiments, the spacer is 20 nucleotides in length.

[0152] As used herein in a PEgRNA or a nick guide RNA sequence, or fragments thereof such as a spacer, PBS, or RTT sequence, unless indicated otherwise, it should be appreciated that the letter “T” or “thymine” indicates a nucleobase in a DNA sequence that encodes the PEgRNA or guide RNA sequence, and is intended to refer to a uracil (U) nucleobase of the PEgRNA or guide RNA or any chemically modified uracil nucleobase known in the art, such as 5-methoxyuracil.

[0153] Exemplary sequences for PEgRNA spacers are provided in Table 3A.

[0154] The extension arm of a PEgRNA may comprise a primer binding site (PBS) and an editing template (e.g., an RTT). The extension arm may be partially complementary to the spacer. In some embodiments, the editing template (e.g., RTT) is partially complementary to the spacer. In some embodiments, the editing template (e.g., RTT) and the primer binding site (PBS) are each partially complementary to the spacer.

[0155] An extension arm of a PEgRNA may comprise a primer binding site sequence (PBS, or PBS sequence) that comprises complementarity to and can hybridize with a free 3′ end of a single stranded DNA in the target gene (e.g., the CFTR gene) generated by nicking with a prime editor at the nick site on the PAM strand. The length of the PBS sequence may vary depending on, e.g., the prime editor components, the search target sequence and other components of the PEgRNA. In some embodiments, the length of the primer binding site (PBS) varies from at least 2 nucleotides to 50 nucleotides. For examples, a primer binding site (PBS) may be at least 2 nucleotides, at least 3 nucleotides, at least 4 nucleotides, at least 5 nucleotides, at least 6 nucleotides, at least 7 nucleotides, at least 8 nucleotides, at least 9 nucleotides, at least 10 nucleotides, at least 11 nucleotides, at least 12 nucleotides, at least 13 nucleotides, at least 14 nucleotides, at least 15 nucleotides, at least 16 nucleotides, at least 17 nucleotides, at least 18 nucleotides, at least 19 nucleotides, at least 20 nucleotides, at least 30 nucleotides, at least 40 nucleotides, or at least 50 nucleotides in length. In some embodiments, the PBS is at least 6 nucleotides in length. In some embodiments, the PBS is about 4 to 16 nucleotides, about 6 to 16 nucleotides, about 6 to 18 nucleotides, about 6 to 20 nucleotides, about 8 to 20 nucleotides, about 10 to 20 nucleotides, about 12 to 20 nucleotides, about 14 to 20 nucleotides, about 16 to 20 nucleotides, or about 18 to 20 nucleotides in length. In some embodiments, the PBS is about 7 to 15 nucleotides in length. In some embodiments, the PBS is 6, 7, 8, 9, 10, 11, 12, 13, 14, 15, 16, 17, 18, 19, or 20 nucleotides in length. In some embodiments, the PBS is 8, 9, 10, 11, 12, 13, or 14 nucleotides in length

[0156] The PBS may be complementary or substantially complementary to a DNA sequence in the edit strand of the target gene. By annealing with the edit strand at a free hydroxy group, e.g., a free 3′ end generated by prime editor nicking, the PBS may initiate synthesis of a new single stranded DNA encoded by the editing template at the nick site. In some embodiments, the PBS is at least about 70%, 75%, 80%, 85%, 90%, 95%, or 100% complementary to a region of the edit strand of the target gene (e.g., the CFTR gene). In some embodiments, the PBS is perfectly complementary, or 100% complementary, to a region of the edit strand of the target gene (e.g., the CFTR gene).

[0157] Exemplary sequences for PBS are provided in Table 3B.

[0158] An extension arm of a PEgRNA may comprise an editing template that serves as a DNA synthesis template for the DNA polymerase in a prime editor during prime editing.

[0159] The length of an editing template may vary depending on, e.g., the prime editor components, the search target sequence and other components of the PEgRNA. In some embodiments, the editing template serves as a DNA synthesis template for a reverse transcriptase, and the editing template is referred to as a reverse transcription editing template (RTT).

[0160] The editing template (e.g., RTT), in some embodiments, is 2, 3, 4, 5, 6, 7, 8, 9, 10, 11, 12, 13, 14, 15, 16, 17, 18, 19, 20, 21, 22, 23, 24, or 25 nucleotides in length. In some embodiments, the RTT is 12, 13, 14, 15, 16, 17, 18, 19, 20, 21, 22, 23, 24, or 25 nucleotides in length. In some embodiments, the RTT is 16, 17, 18, 19, 20, 21, 22, 23, 24, 25, 26, 27, 28, 29, 30, 31, 32, 33, 34, 35, 36, 37, 38, 39, or 40 nucleotides in length.

[0161] Exemplary sequences for RTT are provided in Table 3C.

[0162] In some embodiments, the editing template (e.g., RTT) sequence is about 70%, 75%, 80%, 85%, 90%, 95%, or 99% complementary to the editing target sequence on the edit strand of the target gene. In some embodiments, the editing template sequence (e.g., RTT) is substantially complementary to the editing target sequence. In some embodiments, the editing template sequence (e.g., RTT) is complementary to the editing target sequence except at positions of the intended nucleotide edits to be incorporated int the target gene. In some embodiments, the editing template comprises a nucleotide sequence comprising about 85% to about 95% complementarity to an editing target sequence in the edit strand in the target gene (e.g., the CFTR gene). In some embodiments, the editing template comprises about 86%, about 87%, about 88%, about 89%, about 90%, about 91%, about 92%, about 93%, about 94%, about 95%, about 96%, about 97%, about 98%, or about 99% complementarity to an editing target sequence in the edit strand of the target gene (e.g., the CFTR gene).

[0163] An intended nucleotide edit in an editing template of a PEgRNA may comprise various types of alterations as compared to the target gene sequence. In some embodiments, the nucleotide edit is a single nucleotide substitution as compared to the target gene sequence. In some embodiments, the nucleotide edit is a deletion as compared to the target gene sequence. In some embodiments, the nucleotide edit is an insertion as compared to the target gene sequence. In some embodiments, the editing template comprises one to ten intended nucleotide edits as compared to the target gene sequence. In some embodiments, the editing template comprises one or more intended nucleotide edits as compared to the target gene sequence. In some embodiments, the editing template comprises two or more intended nucleotide edits as compared to the target gene sequence. In some embodiments, the editing template comprises three or more intended nucleotide edits as compared to the target gene sequence. In some embodiments, the editing template comprises four or more, five or more, or six or more intended nucleotide edits as compared to the target gene sequence. In some embodiments, the editing template comprises two single nucleotide substitutions, insertions, deletions, or any combination thereof, as compared to the target gene sequence. In some embodiments, the editing template comprises three single nucleotide substitutions, insertions, deletions, or any combination thereof, as compared to the target gene sequence. In some embodiments, the editing template comprises four, five, or six single nucleotide substitutions, insertions, deletions, or any combination thereof, as compared to the target gene sequence. In some embodiments, a nucleotide substitution comprises an adenine (A)-to-thymine (T) substitution. In some embodiments, a nucleotide substitution comprises an A-to-guanine (G) substitution. In some embodiments, a nucleotide substitution comprises an A-to-cytosine (C) substitution. In some embodiments, a nucleotide substitution comprises a T-A substitution. In some embodiments, a nucleotide substitution comprises a T-G substitution. In some embodiments, a nucleotide substitution comprises a T-C substitution. In some embodiments, a nucleotide substitution comprises a G-to-A substitution. In some embodiments, a nucleotide substitution comprises a G-to-T substitution. In some embodiments, a nucleotide substitution comprises a G-to-C substitution. In some embodiments, a nucleotide substitution comprises a C-to-A substitution. In some embodiments, a nucleotide substitution comprises a C-to-T substitution. In some embodiments, a nucleotide substitution comprises a C-to-G substitution.

[0164] In some embodiments, a nucleotide insertion is at least 1, at least 2, at least 3, at least 4, at least 5 nucleotides, at least 6 nucleotides, at least 7 nucleotides, at least 8 nucleotides, at least 9 nucleotides, at least 10 nucleotides, at least 11 nucleotides, at least 12 nucleotides, at least 13 nucleotides, at least 14 nucleotides, at least 15 nucleotides, at least 16 nucleotides, at least 17 nucleotides, at least 18 nucleotides, at least 19 nucleotides, or at least 20 nucleotides in length. In some embodiments, a nucleotide insertion is from 1 to 2 nucleotides, from 1 to 3 nucleotides, from 1 to 4 nucleotides, from 1 to 5 nucleotides, form 2 to 5 nucleotides, from 3 to 5 nucleotides, from 3 to 6 nucleotides, from 3 to 8 nucleotides, from 4 to 9 nucleotides, from 5 to 10 nucleotides, from 6 to 11 nucleotides, from 7 to 12 nucleotides, from 8 to 13 nucleotides, from 9 to 14 nucleotides, from 10 to 15 nucleotides, from 11 to 16 nucleotides, from 12 to 17 nucleotides, from 13 to 18 nucleotides, from 14 to 19 nucleotides, from 15 to 20 nucleotides in length. In some embodiments, a nucleotide insertion is a single nucleotide insertion. In some embodiments, a nucleotide insertion comprises insertion of two nucleotides.

[0165] The editing template of a PEgRNA may comprise one or more intended nucleotide edits, compared to the CFTR gene to be edited. Position of the intended nucleotide edit(s) relevant to other components of the PEgRNA, or to particular nucleotides (e.g., mutations) in the CFTR target gene may vary. In some embodiments, the nucleotide edit is in a region of the PEgRNA corresponding to or homologous to the protospacer sequence. In some embodiments, the nucleotide edit is in a region of the PEgRNA corresponding to a region of the CFTR gene outside of the protospacer sequence.

[0166] In some embodiments, the position of a nucleotide edit incorporation in the target gene may be determined based on position of the protospacer adjacent motif (PAM). For instance, the intended nucleotide edit may be installed in a sequence corresponding to the protospacer adjacent motif (PAM) sequence. In some embodiments, a nucleotide edit in the editing template is at a position corresponding to the 5′ most nucleotide of the PAM sequence. In some embodiments, a nucleotide edit in the editing template is at a position corresponding to the 3′ most nucleotide of the PAM sequence. In some embodiments, position of an intended nucleotide edit in the editing template may be referred to by aligning the editing template with the partially complementary edit strand of the target gene and referring to nucleotide positions on the editing strand where the intended nucleotide edit is incorporated. In some embodiments, a nucleotide edit is incorporated at a position corresponding to about 0, 1, 2, 3, 4, 5, 6, 7, 8, 9, 10, 11, 12, 13, 14, 15, 16, 17, 18, 19, 20, 21, 22, 23, 24, 25, 26, 27, 28, 29, 30, 31, 32, 33, 34, 35, 36, 37, 38, 39, or 40 nucleotides upstream of the 5′ most nucleotide of the PAM sequence in the edit strand of the target gene. By 0 nucleotide upstream or downstream of a reference position, it is meant that the intended nucleotide is immediately upstream or downstream of the reference position.

[0167] In some embodiments, a nucleotide edit is incorporated at a position corresponding to about 0 to 2 nucleotides, 0 to 4 nucleotides, 0 to 6 nucleotides, 0 to 8 nucleotides, 0 to 10 nucleotides, 2 to 4 nucleotides, 2 to 6 nucleotides, 2 to 8 nucleotides, 2 to 10 nucleotides, 2 to 12 nucleotides, 4 to 6 nucleotides, 4 to 8 nucleotides, 4 to 10 nucleotides, 4 to 12 nucleotides, 4 to 14 nucleotides, 6 to 8 nucleotides, 6 to 10 nucleotides, 6 to 12 nucleotides, 6 to 14 nucleotides, 6 to 16 nucleotides, 8 to 10 nucleotides, 8 to 12 nucleotides, 8 to 14 nucleotides, 8 to 16 nucleotides, 8 to 18 nucleotides, 10 to 12 nucleotides, 10 to 14 nucleotides, 10 to 16 nucleotides, 10 to 18 nucleotides, 10 to 20 nucleotides, 12 to 14 nucleotides, 12 to 16 nucleotides, 12 to 18 nucleotides, 12 to 20 nucleotides, 12 to 22 nucleotides, 14 to 16 nucleotides, 14 to 18 nucleotides, 14 to 20 nucleotides, 14 to 22 nucleotides, 14 to 24 nucleotides, 16 to 18 nucleotides, 16 to 20 nucleotides, 16 to 22 nucleotides, 16 to 24 nucleotides, 16 to 26 nucleotides, 18 to 20 nucleotides, 18 to 22 nucleotides, 18 to 24 nucleotides, 18 to 26 nucleotides, 18 to 28 nucleotides, 20 to 22 nucleotides, 20 to 24 nucleotides, 20 to 26 nucleotides, 20 to 28 nucleotides, or 20 to 30 nucleotides upstream of the 5′ most nucleotide of the PAM sequence. In some embodiments, the nucleotide edit is incorporated at a position corresponding to 3 nucleotides upstream of the 5′ most nucleotide of the PAM sequence. In some embodiments, the nucleotide edit in is incorporated at a position corresponding to 4 nucleotides upstream of the 5′ most nucleotide of the PAM sequence. In some embodiments, the nucleotide edit is incorporated at a position corresponding to 5 nucleotides upstream of the 5′ most nucleotide of the PAM sequence. In some embodiments, the nucleotide edit in the editing template is at a position corresponding to 6 nucleotides upstream of the 5′ most nucleotide of the PAM sequence.

[0168] In some embodiments, an intended nucleotide edit is incorporated at a position corresponding to about 0, 1, 2, 3, 4, 5, 6, 7, 8, 9, 10, 11, 12, 13, 14, 15, 16, 17, 18, 19, 20, 21, 22, 23, 24, 25, 26, 27, 28, 29, 30, 31, 32, 33, 34, 35, 36, 37, 38, 39, or 40 nucleotides downstream of the 5′ most nucleotide of the PAM sequence in the edit strand of the target gene. In some embodiments, a nucleotide edit is incorporated at a position corresponding to about 0 to 2 nucleotides, 0 to 4 nucleotides, 0 to 6 nucleotides, 0 to 8 nucleotides, 0 to 10 nucleotides, 2 to 4 nucleotides, 2 to 6 nucleotides, 2 to 8 nucleotides, 2 to 10 nucleotides, 2 to 12 nucleotides, 4 to 6 nucleotides, 4 to 8 nucleotides, 4 to 10 nucleotides, 4 to 12 nucleotides, 4 to 14 nucleotides, 6 to 8 nucleotides, 6 to 10 nucleotides, 6 to 12 nucleotides, 6 to 14 nucleotides, 6 to 16 nucleotides, 8 to 10 nucleotides, 8 to 12 nucleotides, 8 to 14 nucleotides, 8 to 16 nucleotides, 8 to 18 nucleotides, 10 to 12 nucleotides, 10 to 14 nucleotides, 10 to 16 nucleotides, 10 to 18 nucleotides, 10 to 20 nucleotides, 12 to 14 nucleotides, 12 to 16 nucleotides, 12 to 18 nucleotides, 12 to 20 nucleotides, 12 to 22 nucleotides, 14 to 16 nucleotides, 14 to 18 nucleotides, 14 to 20 nucleotides, 14 to 22 nucleotides, 14 to 24 nucleotides, 16 to 18 nucleotides, 16 to 20 nucleotides, 16 to 22 nucleotides, 16 to 24 nucleotides, 16 to 26 nucleotides, 18 to 20 nucleotides, 18 to 22 nucleotides, 18 to 24 nucleotides, 18 to 26 nucleotides, 18 to 28 nucleotides, 20 to 22 nucleotides, 20 to 24 nucleotides, 20 to 26 nucleotides, 20 to 28 nucleotides, or 20 to 30 nucleotides downstream of the 5′ most nucleotide of the PAM sequence. In some embodiments, a nucleotide edit is incorporated at a position corresponding to 3 nucleotides downstream of the 5′ most nucleotide of the PAM sequence. In some embodiments, a nucleotide edit is incorporated at a position corresponding to 4 nucleotides downstream of the 5′ most nucleotide of the PAM sequence. In some embodiments, a nucleotide edit is incorporated at a position corresponding to 5 nucleotides downstream of the 5′ most nucleotide of the PAM sequence. In some embodiments, a nucleotide edit is incorporated at a position corresponding to 6 nucleotides downstream of the 5′ most nucleotide of the PAM sequence. By “upstream” and “downstream” it is intended to define relevant positions at least two regions or sequences in a nucleic acid molecule orientated in a 5′-to-3′ direction. For example, a first sequence is upstream of a second sequence in a DNA molecule where the first sequence is positioned 5′ to the second sequence. Accordingly, the second sequence is downstream of the first sequence.

[0169] When referred to within the PEgRNA, positions of the one or more intended nucleotide edits may be referred to relevant to components of the PEgRNA. For example, an intended nucleotide edit may be 5′ or 3′ to the PBS. In some embodiments, a PEgRNA comprises the structure, from 5′ to 3′: a spacer, a gRNA core, an editing template, and a PBS. In some embodiments, the intended nucleotide edit is 0, 1, 2, 3, 4, 5, 6, 7, 8, 9, 10, 11, 12, 13, 14, 15, 16, 17, 18, 19, 20, 21, 22, 23, 24, 25, 26, 27, 28, 29, 30, 31, 32, 33, 34, 35, 36, 37, 38, 39, or 40 nucleotides upstream to the 5′ most nucleotide of the PBS. In some embodiments, the intended nucleotide edit is 0 to 2 nucleotides, 0 to 4 nucleotides, 0 to 6 nucleotides, 0 to 8 nucleotides, 0 to 10 nucleotides, 2 to 4 nucleotides, 2 to 6 nucleotides, 2 to 8 nucleotides, 2 to 10 nucleotides, 2 to 12 nucleotides, 4 to 6 nucleotides, 4 to 8 nucleotides, 4 to 10 nucleotides, 4 to 12 nucleotides, 4 to 14 nucleotides, 6 to 8 nucleotides, 6 to 10 nucleotides, 6 to 12 nucleotides, 6 to 14 nucleotides, 6 to 16 nucleotides, 8 to 10 nucleotides, 8 to 12 nucleotides, 8 to 14 nucleotides, 8 to 16 nucleotides, 8 to 18 nucleotides, 10 to 12 nucleotides, 10 to 14 nucleotides, 10 to 16 nucleotides, 10 to 18 nucleotides, 10 to 20 nucleotides, 12 to 14 nucleotides, 12 to 16 nucleotides, 12 to 18 nucleotides, 12 to 20 nucleotides, 12 to 22 nucleotides, 14 to 16 nucleotides, 14 to 18 nucleotides, 14 to 20 nucleotides, 14 to 22 nucleotides, 14 to 24 nucleotides, 16 to 18 nucleotides, 16 to 20 nucleotides, 16 to 22 nucleotides, 16 to 24 nucleotides, 16 to 26 nucleotides, 18 to 20 nucleotides, 18 to 22 nucleotides, 18 to 24 nucleotides, 18 to 26 nucleotides, 18 to 28 nucleotides, 20 to 22 nucleotides, 20 to 24 nucleotides, 20 to 26 nucleotides, 20 to 28 nucleotides, or 20 to 30 nucleotides upstream to the 5′ most nucleotide of the PBS.

[0170] The corresponding positions of the intended nucleotide edit incorporated in the target gene may also be referred to based on the nicking position generated by a prime editor based on sequence homology and complementarity. For example, in embodiments, the distance between the nucleotide edit to be incorporated into the target CFTR gene and the nick site (also referred to as the “nick to edit distance”) may be determined by the position of the nick site and the position of the nucleotide(s) corresponding to the intended nucleotide edit(s), for example, by identifying sequence complementarity between the spacer and the search target sequence and sequence complementarity between the editing template and the editing target sequence. In certain embodiments, the position of the nucleotide edit can be in any position downstream of the nick site on the edit strand (or the PAM strand) generated by the prime editor, such that the distance between the nick site and the intended nucleotide edit is 0, 1, 2, 3, 4, 5, 6, 7, 8, 9, 10, 11, 12, 13, 14, 15, 16, 17, 18, 19, 20, 21, 22, 23, 24, 25, 26, 27, 28, 29, or 30 nucleotides in length. In some embodiments, the position of the nucleotide edit is 0, 1, 2, 3, 4, 5, 6, 7, 8, 9, 10, 11, 12, 13, 14, 15, 16, 17, 18, 19, 20, 21, 22, 23, 24, 25, 26, 27, 28, 29, or 30 nucleotides upstream of the nick site on the edit strand. In some embodiments, the position of the nucleotide edit is 0, 1, 2, 3, 4, 5, 6, 7, 8, 9, 10, 11, 12, 13, 14, 15, 16, 17, 18, 19, 20, 21, 22, 23, 24, 25, 26, 27, 28, 29, or 30 nucleotides downstream of the nick site on the edit strand. In some embodiments, the position of the nucleotide edit is 0 base pair from the nick site on the edit strand, that is, the editing position is at the same position as the nick site. As used herein, the distance between the nick site and the nucleotide edit, for example, where the nucleotide edit comprises an insertion or deletion, refers to the 5′ most position of the nucleotide edit for a nick that creates a 3′ free end on the edit strand (i.e., the “near position” of the nucleotide edit to the nick site). Similarly, as used herein, the distance between the nick site and a PAM position edit, for example, where the nucleotide edit comprises an insertion, deletion, or substitution of two or more contiguous nucleotides, refers to the 5′ most position of the nucleotide edit and the 5′ most position of the PAM sequence. In some embodiments, the editing template extends beyond a nucleotide edit to be incorporated to the target CFTR gene sequence. For example, in some embodiments, the editing template comprises at least 1, 2, 3, 4, 5, 6, 7, 8, 9, 10, 11, 12, 13, 14, 15, 16, 17, 18, 19, 20, 21, 22, 23, 24, 25, 26, 27, 28, 29, or 30 base pairs 3′ to the nucleotide edit to be incorporated to the target CFTR gene sequence. In some embodiments, the editing template comprises 1 to 80 nucleotides 3′ to the nucleotide edit to be incorporated to the target CFTR gene sequence.

[0171] In some embodiments, the editing template comprises at least 4 to 30 base pairs 3′ to the nucleotide edit to be incorporated to the target CFTR gene sequence. In some embodiments, the editing template comprises at least 4 to 25 base pairs 3′ to the nucleotide edit to be incorporated to the target CFTR gene sequence. In some embodiments, the editing template comprises at least 4 to 20 base pairs 3′ to the nucleotide edit to be incorporated to the target CFTR gene sequence. In some embodiments, the editing template comprises at least 4 to 30 base pairs 5′ to the nucleotide edit to be incorporated to the target CFTR gene sequence. In some embodiments, the editing template comprises at least 4 to 25 base pairs 5′ to the nucleotide edit to be incorporated to the target CFTR gene sequence. In some embodiments, the editing template comprises at least 4 to 20 base pairs 5′ to the nucleotide edit to be incorporated to the target CFTR gene sequence.

[0172] In some embodiments, the editing template comprises an adenine at the first nucleobase position (e.g., for a PEgRNA following 5′-spacer-gRNA core-RTT-PBS-3′ orientation, the 5′ most nucleobase is the “first base”). In some embodiments, the editing template comprises a guanine at the first nucleobase position (e.g., for a PEgRNA following 5′-spacer-gRNA core-RTT-PBS-3′ orientation, the 5′ most nucleobase is the “first base”). In some embodiments, the editing template comprises an uracil at the first nucleobase position (e.g., for a PEgRNA following 5′-spacer-gRNA core-RTT-PBS-3′ orientation, the 5′ most nucleobase is the “first base”). In some embodiments, the editing template comprises a cytosine at the first nucleobase position (e.g., for a PEgRNA following 5′-spacer-gRNA core-RTT-PBS-3′ orientation, the 5′ most nucleobase is the “first base”). In some embodiments, the editing template does not comprise a cytosine at the first nucleobase position (e.g., for a PEgRNA following 5′-spacer-gRNA core-RTT-PBS-3′ orientation, the 5′ most nucleobase is the “first base”).

[0173] The editing template of a PEgRNA may encode a new single stranded DNA (e.g., by reverse transcription) to replace an editing target sequence in the target gene. In some embodiments, the editing target sequence in the edit strand of the target gene is replaced by the newly synthesized strand, and the nucleotide edit(s) are incorporated in the region of the target gene. In some embodiments, the target gene is an CFTR gene. In some embodiments, the editing template of the PEgRNA encodes a newly synthesized single stranded DNA that comprises a wild type CFTR gene sequence. In some embodiments, the newly synthesized DNA strand replaces the editing target sequence in the target CFTR gene, wherein the editing target sequence (or the endogenous sequence complementary to the editing target sequence on the target strand of the CFTR gene) comprises a mutation or a nucleotide alteration compared to a wild type CFTR gene. In some embodiments, the mutation is associated with cystic fibrosis.

[0174] In some embodiments, the newly synthesized single stranded DNA encoded by the editing template replaces the editing target sequence and corrects the mutation in the editing target sequence of the target CFTR gene.

[0175] In some embodiments, the editing target sequence comprises a mutation in a sequence of the CFTR gene that encodes a MSD1 domain of the CFTR protein. In some embodiments, the editing target sequence comprises a mutation in a sequence of the CFTR gene that encodes a NBD1 domain of the CFTR protein. In some embodiments, the editing target sequence comprises a mutation in a sequence of the CFTR gene that encodes a R domain of the CFTR protein. In some embodiments, the editing target sequence comprises a mutation in a sequence of the CFTR gene that encodes a NBD2 domain of the CFTR protein. In some embodiments, the editing target sequence comprises a mutation in a sequence of the CFTR gene that encodes an interdomain interface region of the CFTR protein.

[0176] In some embodiments, the editing target sequence comprises a mutation as compared to a wild type CFTR gene, wherein the mutation is in exon 1, exon 2, exon 3, exon 4, exon 5, exon 6, exon 7, exon 8, exon 9, exon 10, exon 11, exon 12, exon 13, exon 14, exon 15, exon 16, exon 17, exon 18, exon 19, exon 20, exon 21, exon 22, exon 23, exon 24, exon 25, exon 26, or exon 27 of the CFTR gene. In some embodiments, the editing target sequence comprises a mutation as compared to a wild type CFTR gene, wherein the mutation is in exon 1, exon 2, exon 3, exon 4, exon 5, exon 6, exon 7, exon 8, exon 9, exon 10, exon 12, exon 13, exon 14, exon 15, exon 16, exon 17, exon 18, exon 19, exon 20, exon 21, exon 22, exon 23, exon 24, exon 25, exon 26, or exon 27 of the CFTR gene. Accordingly, in some embodiments, the editing template comprises one or more intended nucleotide edits compared to the target CFTR gene, wherein incorporation of the one or more intended nucleotide edits corrects the mutation in exon 1, exon 2, exon 3, exon 4, exon 5, exon 6, exon 7, exon 8, exon 9, exon 10, exon 11, exon 12, exon 13, exon 14, exon 15, exon 16, exon 17, exon 18, exon 19, exon 20, exon 21, exon 22, exon 23, exon 24, exon 25, exon 26, or exon 27 of the CFTR gene compared to a wild type CFTR gene. In some embodiments, the editing template comprises a sequence of a wild type CFTR gene. In some embodiments, the editing target sequence is in exon 1, exon 2, exon 3, exon 4, exon 5, exon 6, exon 7, exon 8, exon 9, exon 10, exon 11, exon 12, exon 13, exon 14, exon 15, exon 16, exon 17, exon 18, exon 19, exon 20, exon 21, exon 22, exon 23, exon 24, exon 25, exon 26, or exon 27 of the CFTR gene.

[0177] In some embodiments, the editing target sequence comprises a mutation as compared to a wild type CFTR gene, wherein the mutation is a nucleotide insertion, a nucleotide deletion, a nucleotide substitution, two or more nucleotide substitutions, or any combination thereof. In some embodiments, the mutation results in a premature stop codon in a mRNA encoded by the CFTR gene. In some embodiments, the mutation results in an amino acid alteration in the CFTR protein encoded by the CFTR gene. In some embodiments, the mutation results in an amino acid substitution in the CFTR protein encoded by the CFTR gene. In some embodiments, the mutation results in a truncated CFTR polypeptide encoded by the CFTR gene as compared to a wild type CFTR polypeptide. In some embodiments, the mutation results in an aberrant CFTR polypeptide encoded by the CFTR gene. In some embodiments, the mutation results in a CFTR polypeptide encoded by the CFTR gene that has reduced biological activity as compared to a wild type CFTR polypeptide. In some embodiments, the mutation results in a CFTR polypeptide encoded by the CFTR gene that has abolished biological activity as compared to a wild type CFTR polypeptide. In some embodiments, the editing template of a PEgRNA comprises one or more intended nucleotide edits compared to the sequence on the target strand of the target CFTR gene. In some embodiments, the editing template encodes a single stranded DNA that comprises one or more intended nucleotide edits compared to the editing target sequence. In some embodiments, the single stranded DNA replaces the editing target sequence by prime editing, thereby incorporating the one or more intended nucleotide edits. In some embodiments, incorporation of the one or more intended nucleotide edits corrects the mutation in the editing target sequence to wild type nucleotides at corresponding positions in the target CFTR gene. As used herein, “correcting” a mutation means restoring a wild type sequence at the place of the mutation in the double stranded target DNA e.g. target gene, by prime editing. In some embodiments, incorporation of the one or more intended nucleotide edits results in expression of a functional CFTR protein. For example, in some embodiments, incorporation of the one or more intended nucleotide edits results in a nucleotide substitution, insertion, or deletion that results in a codon that encodes a wild type amino acid as compared to a wild type CFTR polypeptide, while the codon is not the same as the wild type nucleotide at the corresponding position.

[0178] A guide RNA core (also referred to herein as the gRNA core, gRNA scaffold, or gRNA backbone sequence) of a PEgRNA may contain a polynucleotide sequence that binds to a DNA binding domain (e.g., Cas9) of a prime editor. The gRNA core may interact with a prime editor as described herein, for example, by association with a DNA binding domain, such as a DNA nickase of the prime editor.

[0179] One of skill in the art will recognize that different prime editors having different DNA binding domains from different DNA binding proteins may require different gRNA core sequences specific to the DNA binding protein. In some embodiments, the gRNA core is capable of binding to a Cas9-based prime editor. In some embodiments, the gRNA core is capable of binding to a Cpf1-based prime editor. In some embodiments, the gRNA core is capable of binding to a Cas12b-based prime editor.

[0180] In some embodiments, the gRNA core comprises regions and secondary structures involved in binding with specific CRISPR Cas proteins. For example, in a Cas9 based prime editing system, the gRNA core of a PEgRNA may comprise one or more regions of a base paired “lower stem” adjacent to the spacer sequence and a base paired “upper stem” following the lower stem, where the lower stem and upper stem may be connected by a “bulge” comprising unpaired RNAs. The gRNA core may further comprise a “nexus” distal from the spacer sequence, followed by a hairpin structure, e.g., at the 3′ end, as exemplified in FIG. 3. In some embodiments, the gRNA core comprises modified nucleotides as compared to a wild type gRNA core in the lower stem, upper stem, and/or the hairpin. For example, nucleotides in the lower stem, upper stem, an/or the hairpin regions may be modified, deleted, or replaced. In some embodiments, RNA nucleotides in the lower stem, upper stem, an/or the hairpin regions may be replaced with one or more DNA sequences. In some embodiments, the gRNA core comprises unmodified or wild type RNA sequences in the nexus and/or the bulge regions. In some embodiments, the gRNA core does not include long stretches of A-T pairs, for example, a GUUUU-AAAAC pairing element. In some embodiments, a prime editing system comprises a prime editor and a PEgRNA, wherein the prime editor comprises a SpCas9 nickase variant thereof, and the gRNA core of the PEgRNA comprises the sequence: GUUUUAGAGCUAGAAAUAGCAAGUUAAAAUAAGGCUAGUCCGUUAUCAACUUGAAAAAG UGGCACCGAGUCGGUGC (SEQ ID NO: 16) GUUUGAGAGCUAGAAAUAGCAAGUUUAAAUAAGGCUAGUCCGUUAUCAACUUGAAAAAG UGGGACCGAGUCGGUCC (SEQ ID NO: 17), or GUUUAAGAGCUAUGCUGGAAACAGCAUAGCAAGUUUAAAUAAGGCUAGUCCGUUAUCAA CUUGAAAAAGUGGCACCGAGUCGGUGC (SEQ ID NO: 18). In some embodiments, the gRNA core comprises the sequence of SEQ ID NO: 16. Any gRNA core sequences known in the art are also contemplated in the prime editing compositions described herein.

[0181] A PEgRNA may also comprise optional modifiers, e.g., 3′ end modifier region and/or an 5′ end modifier region. In some embodiments, a PEgRNA comprises at least one nucleotide that is not part of a spacer, a gRNA core, or an extension arm. The optional sequence modifiers could be positioned within or between any of the other regions shown, and not limited to being located at the 3′ and 5′ ends. In certain embodiments, the PEgRNA comprises secondary RNA structure, such as, but not limited to, aptamers, hairpins, stem/loops, toeloops, and/or RNA-binding protein recruitment domains (e.g., the MS2 aptamer which recruits and binds to the MS2cp protein). In some embodiments, a PEgRNA comprises a short stretch of uracil at the 5′ end or the 3′ end. For example, in some embodiments, a PEgRNA comprising a 3′ extension arm comprises a “UUU” sequence at the 3′ end of the extension arm. In some embodiments, a PEgRNA comprises a toeloop sequence at the 3′ end. In some embodiments, the PEgRNA comprises a 3′ extension arm and a toeloop sequence at the 3′ end of the extension arm. In some embodiments, the PEgRNA comprises a 5′ extension arm and a toeloop sequence at the 5′ end of the extension arm. In some embodiments, the PEgRNA comprises a toeloop element having the sequence 5′-GAAANNNNN-3′, wherein N is any nucleobase. In some embodiments, the secondary RNA structure is positioned within the spacer. In some embodiments, the secondary structure is positioned within the extension arm. In some embodiments, the secondary structure is positioned within the gRNA core. In some embodiments, the secondary structure is positioned between the spacer and the gRNA core, between the gRNA core and the extension arm, or between the spacer and the extension arm. In some embodiments, the secondary structure is positioned between the PBS and the editing template. In some embodiments the secondary structure is positioned at the 3′ end or at the 5′ end of the PEgRNA. In some embodiments, the PEgRNA comprises a transcriptional termination signal at the 3′ end of the PEgRNA. In addition to secondary RNA structures, the PEgRNA may comprise a chemical linker or a poly(N) linker or tail, where “N” can be any nucleobase. In some embodiments, the chemical linker may function to prevent reverse transcription of the gRNA core.

[0182] In some embodiments, a prime editing system or composition further comprises a nick guide polynucleotide, such as a nick guide RNA (ngRNA). In some embodiments, a ngRNA comprises a spacer (referred to as a ngRNA spacer or ng spacer) and a gRNA core, wherein the spacer of the ngRNA comprises a region of complementarity to the edit strand, and wherein the gRNA core can interact with a Cas, e.g., Cas9, of a prime editor. Without wishing to be bound by any particular theory, an ngRNA may bind to the edit strand and direct Cas nickase to generate a nick on the non-edit strand (or target strand). In some embodiments, the nick on the non-edit strand directs endogenous DNA repair machinery to use the edit strand as a template for repair of the non-edit strand, which may increase efficiency of prime editing. In some embodiments, the non-edit strand is nicked by a prime editor localized to the non-edit strand by the ngRNA. Accordingly, also provided herein are PEgRNA systems comprising at least one PEgRNA and at least one ngRNA.

[0183] A prime editing system comprising a PEgRNA (or one or more polynucleotide encoding the PEgRNA) and a prime editor protein (or one or more polynucleotides encoding the prime editor), may be referred to as a PE2 prime editing system and the corresponding editing approach referred to as PE2 approach or PE2 strategy. A PE2 system does not contain a ngRNA. A prime editing system comprising a PEgRNA (or one or more polynucleotide encoding the PEgRNA), a prime editor protein (or one or more polynucleotides encoding the prime editor), and a ngRNA (or one or more polynucleotides encoding the ngRNA) may be referred to as a “PE3” prime editing system. In some embodiments, an ngRNA spacer sequence is complementary to a portion of the edit strand that includes the intended nucleotide edit and may hybridize with the edit strand only after the edit has been incorporated on the edit strand. Such ngRNA may be referred to a “PE3b” ngRNA, and the prime editing system a PE3b prime editing system.

[0184] In some embodiments, the ng search target sequence is located on the non-target strand, within 10 base pairs to 100 base pairs of an intended nucleotide edit incorporated by the PEgRNA on the edit strand. In some embodiments, the ng target search target sequence is within 10 bp, 20 bp, 30 bp, 40 bp, 50 bp, 60 bp, 70 bp, 80 bp, 90 bp, 91 bp, 92 bp, 93 bp, 94 bp, 95 bp, 96 bp, 97 bp, 98 bp, 99 bp, or 100 bp of an intended nucleotide edit incorporated by the PEgRNA on the edit strand. In some embodiments, the 5′ ends of the ng search target sequence and the PEgRNA search target sequence are within 1, 2, 3, 4, 5, 6, 7, 8, 9, or 10 bp apart from each other. In some embodiments, the 5′ ends of the ng search target sequence and the PEgRNA search target sequence are within 10 bp, 20 bp, 30 bp, 40 bp, 50 bp, 60 bp, 70 bp, 80 bp, 90 bp, 91 bp, 92 bp, 93 bp, 94 bp, 95 bp, 96 bp, 97 bp, 98 bp, 99 bp, or 100 bp apart from each other.

[0185] In some embodiments, an ng spacer sequence is complementary to, and may hybridize with the second search target sequence only after an intended nucleotide edit has been incorporated on the edit strand, by the editing template of a PEgRNA. In some embodiments, such a prime editing system maybe referred to as a “PE3b” prime editing system or composition. In some embodiments, the ngRNA comprises a spacer sequence that matches only the edit strand after incorporation of the nucleotide edits, but not the endogenous target gene sequence on the edit strand. Accordingly, in some embodiments, an intended nucleotide edit is incorporated within the ng search target sequence. In some embodiments, the intended nucleotide edit is incorporated within about 1-10 nucleotides of the position corresponding to the PAM of the ng search target sequence.

[0186] The gRNA core of a PEgRNA or ngRNA can be any gRNA scaffold sequence that is capable of interacting with a Cas protein that recognizes the corresponding PAM of the PEgRNA or ngRNA. In some embodiments, gRNA core of a PEgRNA or a ngRNA comprises a sequence selected from SEQ ID Nos: 16-18.

[0187] Exemplary sequences for ngRNA spacer sequences are provided in Table 3D.

[0188] In some embodiments, the editing target sequence is in exon 3 of the CFTR gene. In some embodiments, the editing target sequence comprises a mutation as compared to a wild type CFTR gene.

[0189] In some embodiments, the editing target sequence or the complementary sequence on the CFTR gene thereof comprises a mutation that encodes an amino acid substitution G85E, a G85V, a F87I, a L88*, and/or a Y84* relative to a wild type CFTR polypeptide set forth in SEQ ID NO: 19, wherein * refers to a non-sense mutation, and wherein the editing template encodes an intended nucleotide edit that corrects the mutation. In some embodiments, the editing target sequence or the complementary sequence on the CFTR gene thereof comprises a G→→A mutation (c.254G>A) at position 117,509,123, a duplication of a T (c.248dupT) at position 117,509,117, a T→→A mutation (c.252T>A) at position 117,509,121, a G→→T mutation (c.254G>T) at position 117,509,123, a T→→A mutation (c.259T>A) at position 117,509,128, a deletion of nucleotides TT (c.262_263delTT) at position 117,509,131, a T→→G mutation (c.263T>G) at position 117,509,132, a T→→A mutation (c.263T>A) at position 117,509,132, and/or a deletion of ATATT (c.264_268delATATT) at position 117,509,133 of human chromosome 7 compared to a wild type CFTR gene. In some embodiments, the editing template comprises an intended nucleotide edit compared to the target CFTR gene, wherein incorporation of the intended nucleotide edit encoded by the editing template corrects the mutation. In some embodiments, incorporation of the one or more intended nucleotide edits results in a CFTR gene that encodes a functional CFTR polypeptide. In some embodiments, the editing template comprises a wild type CFTR gene sequence. Accordingly, in some embodiments, the newly synthesized single stranded DNA encoded by the editing template is capable of correcting the c.254G>A mutation, the c.248dupT mutation, the c.252T>A mutation, the c.254G>T mutation, the c.259T>A mutation, the c.262_263delTT mutation, the c.263T>G mutation, the c.263T>A mutation, and/or the c.264_268delATATT mutation in the target CFTR gene. In some embodiments, the newly synthesized single stranded DNA encoded by the editing template is capable of correcting all of the c.254G>A mutation, the c.248dupT mutation, the c.252T>A mutation, the c.254G>T mutation, the c.259T>A mutation, the c.262_263delTT mutation, the c.263T>G mutation, the c.263T>A mutation, and the c.264_268delATATT mutation in the target CFTR gene. In some embodiments, two or more of the c.254G>A mutation, the c.248dupT mutation, the c.252T>A mutation, the c.254G>T mutation, the c.259T>A mutation, the c.262_263delTT mutation, the c.263T>G mutation, the c.263T>A mutation, and the c.264_268delATATT mutation are located on the same CFTR gene. In some embodiments, the newly synthesized single stranded DNA encoded by the editing template is capable of correcting the c.254G>A mutation, the c.248dupT mutation, the c.252T>A mutation, the c.254G>T mutation, the c.259T>A mutation, the c.262_263delTT mutation, the c.263T>G mutation, the c.263T>A mutation, and the c.264_268delATATT mutation that are located on different CFTR genes. For example, in some embodiments, a subject may comprise two copies of CFTR genes, each comprising a different mutation selected from the group consisting of the c.254G>A mutation, the c.248dupT mutation, the c.252T>A mutation, the c.254G>T mutation, the c.259T>A mutation, the c.262_263delTT mutation, the c.263T>G mutation, the c.263T>A mutation, and the c.264_268delATATT mutation, all of which may be corrected by an editing template of a single PEgRNA. In some embodiments, the editing template is capable of correcting one or more, or all of the c.254G>A mutation, the c.248dupT mutation, the c.252T>A mutation, the c.254G>T mutation, the c.259T>A mutation, the c.262_263delTT mutation, the c.263T>G mutation, the c.263T>A mutation, and the c.264_268delATATT mutation that are in different subjects, wherein each subject may have one or more of the mutations.

[0190] In some embodiments, the PEgRNA comprises a spacer comprising a sequence selected from the any of the sequences disclosed in Table 3A. In some embodiments, the PEgRNA comprises a PBS comprising a sequence selected from any of the sequences disclosed in Table 3B. In some embodiments, the PEgRNA comprises an editing template comprising a sequence selected from any of the sequences disclosed in Table 3C. In some embodiments, the prime editing composition further comprises a ngRNA that comprises a spacer comprising a sequence selected from any of the sequences disclosed in Table 3D.

[0191] In some embodiments, the PEgRNA comprises a spacer comprising a sequence selected from the group consisting of SEQ ID Nos: A1-A864 in Table 3A. In some embodiments, the PEgRNA comprises a PBS comprising a sequence selected from the group consisting of SEQ ID Nos: B1-B3617 in Table 3B. In some embodiments, the PEgRNA comprises an editing template comprising a sequence selected from the group consisting of SEQ ID Nos: C1-C15607 in Table 3C. In some embodiments, the prime editing composition further comprises a ngRNA that comprises a spacer comprising a sequence selected from the group consisting of ngRNA SEQ ID Nos: D1-D1998 in Table 3D.

[0192] In some embodiments, the PEgRNA comprises a spacer comprising a sequence selected from the group consisting of SEQ ID NOs. 349-1212 of Table 3A. In some embodiments, the PEgRNA comprises a PBS comprising a sequence selected from the group consisting of SEQ ID Nos: 1213-4026 of Table 3B. In some embodiments, the PEgRNA comprises an editing template comprising a sequence selected from the group consisting of SEQ ID Nos: 4027-19633 of Table 3C. In some embodiments, the prime editing composition further comprises a ngRNA that comprises a spacer comprising a sequence selected from the group consisting of SEQ ID Nos: 19634-21631 of Table 3D.

[0193] In some embodiments, the PEgRNA comprises a spacer comprising a sequence selected from the group consisting of SEQ Identifiers: A1-A2 in Table 3A. In some embodiments, the PEgRNA comprises a spacer comprising a sequence selected from the group consisting of SEQ ID Nos: 349-350 in Table 3A. In some embodiments, the PEgRNA comprises a PBS comprising a sequence selected from the group consisting of SEQ Identifiers: B1-B9 in Table 3B. In some embodiments, the PEgRNA comprises a PBS comprising a sequence selected from the group consisting of SEQ ID Nos: 1213-1219 in Table 3B. In some embodiments, the PEgRNA comprises a PBS comprising a sequence selected from the group consisting of sequences TGTACATT and TGTACATTC. In some embodiments, the PEgRNA comprises an editing template comprising a sequence selected from the group consisting of SEQ Identifiers: C1-C12 in Table 3C. In some embodiments, the PEgRNA comprises an editing template comprising a sequence selected from the group consisting of SEQ ID Nos: 4027-4038 in Table 3C. In some embodiments, the prime editing composition further comprises a ngRNA that comprises a spacer comprising a sequence selected from the group consisting of ngRNA SEQ ID Identifiers: D1-D8 in Table 3D. In some embodiments, the prime editing composition further comprises a ngRNA that comprises a spacer comprising a sequence selected from the group consisting of ngRNA SEQ ID Nos: 19634-19641 in Table 3D.

[0194] In some embodiments, the PEgRNA comprises a spacer comprising a sequence selected from the group consisting of SEQ Identifiers: A1-A2 in Table 3A. In some embodiments, the PEgRNA comprises a spacer comprising a sequence selected from the group consisting of SEQ ID Nos: 349-350 in Table 3A. In some embodiments, the PEgRNA comprises a PBS comprising a sequence selected from the group consisting of SEQ Identifiers: B1-B9 in Table 3B. In some embodiments, the PEgRNA comprises a PBS comprising a sequence selected from the group consisting of SEQ ID Nos: 1213-1219 in Table 3B. In some embodiments, the PEgRNA comprises a PBS comprising a sequence selected from the group consisting of sequences TGTACATT and TGTACATTC. In some embodiments, the PEgRNA comprises an editing template comprising a sequence selected from the group consisting of SEQ Identifiers: C1-C12 in Table 3C. In some embodiments, the PEgRNA comprises an editing template comprising a sequence selected from the group consisting of SEQ ID Nos: 4027-4038 in Table 3C. In some embodiments, the prime editing composition further comprises a ngRNA that comprises a spacer comprising a sequence selected from the group consisting of ngRNA SEQ ID Identifiers: D1-D8 in Table 3D. In some embodiments, the prime editing composition further comprises a ngRNA that comprises a spacer comprising a sequence selected from the group consisting of ngRNA SEQ ID Nos: 19634-19641 in Table 3D.

[0195] In some embodiments, the PEgRNA comprises a spacer comprising a sequence selected from the group consisting of SEQ Identifiers: A3-A4 in Table 3A. In some embodiments, the PEgRNA comprises a spacer comprising a sequence selected from the group consisting of SEQ ID Nos: 351-352 in Table 3A. In some embodiments, the PEgRNA comprises a PBS comprising a sequence selected from the group consisting of SEQ Identifiers: B10-B18 in Table 3B. In some embodiments, the PEgRNA comprises a PBS comprising a sequence selected from the group consisting of SEQ ID Nos: 1220-1226 in Table 3B. In some embodiments, the PEgRNA comprises a PBS comprising a sequence selected from the group consisting of sequences AAGGGCAT and AAGGGCATT. In some embodiments, the PEgRNA comprises an editing template comprising a sequence selected from the group consisting of SEQ ID Identifiers: C13-C17 in Table 3C. In some embodiments, the PEgRNA comprises an editing template comprising a sequence selected from the group consisting of SEQ ID Nos: 4039-4043 in Table 3C. In some embodiments, the prime editing composition further comprises a ngRNA that comprises a spacer comprising a sequence selected from the group consisting of SEQ Identifiers: D9-D32 in Table 3D. In some embodiments, the prime editing composition further comprises a ngRNA that comprises a spacer comprising a sequence selected from the group consisting of SEQ ID Nos: 19642-19665 in Table 3D.

[0196] In some embodiments, the PEgRNA comprises a spacer comprising the sequence of SEQ ID Identifiers: A5 in Table 3A. In some embodiments, the PEgRNA comprises a spacer comprising the sequence of SEQ ID Nos: 353 in Table 3A. In some embodiments, the PEgRNA comprises a PBS comprising a sequence selected from the group consisting of SEQ Identifiers: B19-B27 in Table 3B. In some embodiments, the PEgRNA comprises a PBS comprising a sequence selected from the group consisting of SEQ ID Nos: 1227-1233 in Table 3B. In some embodiments, the PEgRNA comprises a PBS comprising a sequence selected from sequences ATCTCCAG and ATCTCCAGA. In some embodiments, the PEgRNA comprises an editing template comprising a sequence selected from the group consisting of SEQ Identifiers: C18-C44 in Table 3C. In some embodiments, the PEgRNA comprises an editing template comprising a sequence selected from the group consisting of SEQ ID Nos: 4044-4070 in Table 3C. In some embodiments, the prime editing composition further comprises a ngRNA that comprises a spacer comprising a sequence selected from the group consisting of SEQ Identifiers: D11-D27 and D33-D38 in Table 3D. In some embodiments, the prime editing composition further comprises a ngRNA that comprises a spacer comprising a sequence selected from the group consisting of SEQ ID Nos: 19644-19660 and 19666-19671 in Table 3D.

[0197] In some embodiments, the PEgRNA comprises a spacer comprising a sequence selected from the group consisting of SEQ Identifiers: A6-A7 in Table 3A. In some embodiments, the PEgRNA comprises a spacer comprising a sequence selected from the group consisting of SEQ ID Nos: 354-355 in Table 3A. In some embodiments, the PEgRNA comprises a PBS comprising a sequence selected from the group consisting of SEQ Identifiers: B28-B36 in Table 3B. In some embodiments, the PEgRNA comprises a PBS comprising a sequence selected from the group consisting of SEQ ID Nos: 1234-1240 in Table 3B. In some embodiments, the PEgRNA comprises a PBS comprising a sequence selected from the group consisting of sequences TTGTACAT and TTGTACATT. In some embodiments, the PEgRNA comprises an editing template comprising a sequence selected from the group consisting of SEQ Identifiers: C45-C51 in Table 3C. In some embodiments, the PEgRNA comprises an editing template comprising a sequence selected from the group consisting of SEQ ID Nos: 4071-4077 in Table 3C. In some embodiments, the prime editing composition further comprises a ngRNA that comprises a spacer comprising a sequence selected from the group consisting of SEQ Identifiers: D39-D62 in Table 3D. In some embodiments, the prime editing composition further comprises a ngRNA that comprises a spacer comprising a sequence selected from the group consisting of SEQ ID Nos: 19672-19695 in Table 3D.

[0198] In some embodiments, the PEgRNA comprises a spacer comprising a sequence selected from the group consisting of SEQ Identifiers: A8-A10 in Table 3A. In some embodiments, the PEgRNA comprises a spacer comprising a sequence selected from the group consisting of SEQ ID Nos: 356-358 in Table 3A. In some embodiments, the PEgRNA comprises a PBS comprising a sequence selected from the group consisting of SEQ Identifiers: B37-B45 in Table 3B. In some embodiments, the PEgRNA comprises a PBS comprising a sequence selected from the group consisting of SEQ ID Nos: 1241-1247 in Table 3B. In some embodiments, the PEgRNA comprises a PBS comprising a sequence selected from the group consisting of sequences GCATTAAT and GCATTAATG. In some embodiments, the PEgRNA comprises an editing template comprising the sequence of SEQ Identifiers: C52 in Table 3C. In some embodiments, the PEgRNA comprises an editing template comprising the sequence of SEQ ID Nos: 4078 in Table 3C. In some embodiments, the prime editing composition further comprises a ngRNA that comprises a spacer comprising a sequence selected from the group consisting of SEQ Identifiers: D17 and D63-D70 in Table 3D. In some embodiments, the prime editing composition further comprises a ngRNA that comprises a spacer comprising a sequence selected from the group consisting of SEQ ID Nos: 19650 and 19696-19703 in Table 3D.

[0199] In some embodiments, the PEgRNA comprises a spacer comprising a sequence selected from the group consisting of SEQ Identifiers: A11-A12 in Table 3A. In some embodiments, the PEgRNA comprises a spacer comprising a sequence selected from the group consisting of SEQ ID Nos: 359-360 in Table 3A. In some embodiments, the PEgRNA comprises a PBS comprising a sequence selected from the group consisting of SEQ Identifiers: B46-B54 in Table 3B. In some embodiments, the PEgRNA comprises a PBS comprising a sequence selected from the group consisting of SEQ ID Nos: 1248-1254 in Table 3B. In some embodiments, the PEgRNA comprises a PBS comprising a sequence selected from the group consisting of sequences ATATTTAG and ATATTTAGG. In some embodiments, the PEgRNA comprises an editing template comprising a sequence selected from the group consisting of SEQ Identifiers: C53-C112 in Table 3C. In some embodiments, the PEgRNA comprises an editing template comprising a sequence selected from the group consisting of SEQ ID Nos: 4079-4138 in Table 3C. In some embodiments, the prime editing composition further comprises a ngRNA that comprises a spacer comprising a sequence selected from the group consisting of SEQ Identifiers: D1-D7 and D71-D78 in Table 3D. In some embodiments, the prime editing composition further comprises a ngRNA that comprises a spacer comprising a sequence selected from the group consisting of SEQ ID Nos: 19634-19640 and 19704-19711 in Table 3D.

[0200] In some embodiments, the PEgRNA comprises a spacer comprising a sequence selected from the group consisting of SEQ Identifiers: A13-A14 in Table 3A. In some embodiments, the PEgRNA comprises a spacer comprising a sequence selected from the group consisting of SEQ ID Nos: A13-A14 in Table 3A. In some embodiments, the PEgRNA comprises a PBS comprising a sequence selected from the group consisting of SEQ Identifiers: B55-B63 in Table 3B. In some embodiments, the PEgRNA comprises a PBS comprising a sequence selected from the group consisting of SEQ ID Nos: 1255-1261 in Table 3B. In some embodiments, the PEgRNA comprises a PBS comprising a sequence selected from the group consisting of sequences: AAAACATC and AAAACATCG. In some embodiments, the PEgRNA comprises an editing template comprising a sequence selected from the group consisting of SEQ Identifiers: C113-C129 in Table 3C. In some embodiments, the PEgRNA comprises an editing template comprising a sequence selected from the group consisting of SEQ ID Nos: 4139-4155 in Table 3C. In some embodiments, the prime editing composition further comprises a ngRNA that comprises a spacer comprising a sequence selected from the group consisting of SEQ Identifiers: D9-D27, D33-D37, and D79-D83 in Table 3D. In some embodiments, the prime editing composition further comprises a ngRNA that comprises a spacer comprising a sequence selected from the group consisting of SEQ ID Nos: 19642-19660, 19666-19670, and 19712-19716 in Table 3D.

[0201] In some embodiments, the PEgRNA comprises a spacer comprising a sequence selected from the group consisting of SEQ Identifiers: A15-A16 in Table 3A. In some embodiments, the PEgRNA comprises a spacer comprising a sequence selected from the group consisting of SEQ ID Nos: 363-364 in Table 3A. In some embodiments, the PEgRNA comprises a PBS comprising a sequence selected from the group consisting of SEQ Identifiers: B64-B72 in Table 3B. In some embodiments, the PEgRNA comprises a PBS comprising a sequence selected from the group consisting of SEQ ID Nos: 1262-1268 in Table 3B. In some embodiments, the PEgRNA comprises a PBS comprising a sequence selected from the group consisting of sequences: TATATTTA and TATATTTAG. In some embodiments, the PEgRNA comprises an editing template comprising a sequence selected from the group consisting of SEQ ID Nos: C130-C160 in Table 3C. In some embodiments, the PEgRNA comprises an editing template comprising a sequence selected from the group consisting of SEQ ID Nos: 4156-4186 in Table 3C. In some embodiments, the prime editing composition further comprises a ngRNA that comprises a spacer comprising a sequence selected from the group consisting of SEQ ID Nos: D39-D61, and D84-D91 in Table 3D. In some embodiments, the prime editing composition further comprises a ngRNA that comprises a spacer comprising a sequence selected from the group consisting of SEQ ID Nos: 19672-19695, and 19717-19724 in Table 3D.

[0202] In some embodiments, the PEgRNA comprises a spacer comprising a sequence selected from the group consisting of SEQ Identifiers: A17-A18 in Table 3A. In some embodiments, the PEgRNA comprises a spacer comprising a sequence selected from the group consisting of SEQ ID Nos: 365-366 in Table 3A. In some embodiments, the PEgRNA comprises a PBS comprising a sequence selected from the group consisting of SEQ Identifiers: B73-B81 in Table 3B. In some embodiments, the PEgRNA comprises a PBS comprising a sequence selected from the group consisting of SEQ ID Nos: 1269-1275 in Table 3B. In some embodiments, the PEgRNA comprises a PBS comprising a sequence selected from the group consisting of sequences: AAAAACAT and AAAAACATC. In some embodiments, the PEgRNA comprises an editing template comprising a sequence selected from the group consisting of SEQ ID Nos: C161-C178 in Table 3C. In some embodiments, the PEgRNA comprises an editing template comprising a sequence selected from the group consisting of SEQ ID Nos: 4187-4204 in Table 3C. In some embodiments, the prime editing composition further comprises a ngRNA that comprises a spacer comprising a sequence selected from the group consisting of SEQ ID Nos: D9-D37 and D92 in Table 3D. In some embodiments, the prime editing composition further comprises a ngRNA that comprises a spacer comprising a sequence selected from the group consisting of SEQ ID Nos: 19642-19670 and 19725 in Table 3D.

[0203] In some embodiments, the PEgRNA comprises a spacer comprising a sequence selected from the group consisting of SEQ Identifiers: A19-A21 in Table 3A. In some embodiments, the PEgRNA comprises a spacer comprising a sequence selected from the group consisting of SEQ ID Nos: 367-369 in Table 3A. In some embodiments, the PEgRNA comprises a PBS comprising a sequence selected from the group consisting of SEQ Identifiers: B82-B90 in Table 3B. In some embodiments, the PEgRNA comprises a PBS comprising a sequence selected from the group consisting of SEQ ID Nos: 1276-1282 in Table 3B. In some embodiments, the PEgRNA comprises a PBS comprising a sequence selected from the group consisting of sequences: AAACATCG and AAACATCGC. In some embodiments, the PEgRNA comprises an editing template comprising a sequence selected from the group consisting of SEQ ID Nos: C179-C194 in Table 3C. In some embodiments, the PEgRNA comprises an editing template comprising a sequence selected from the group consisting of SEQ ID Nos: 4205-4220 in Table 3C. In some embodiments, the prime editing composition further comprises a ngRNA that comprises a spacer comprising a sequence selected from the group consisting of SEQ ID Nos: D17, D35, D63-D70 and D93-D97 in Table 3D. In some embodiments, the prime editing composition further comprises a ngRNA that comprises a spacer comprising a sequence selected from the group consisting of SEQ ID Nos: 19650, 19668, 19696-19703 and 19726-19730 in Table 3D.

[0204] In some embodiments, the PEgRNA comprises a spacer comprising a sequence selected from the group consisting of SEQ Identifiers: A22-A23 in Table 3A. In some embodiments, the PEgRNA comprises a spacer comprising a sequence selected from the group consisting of SEQ ID Nos: 370-371 in Table 3A. In some embodiments, the PEgRNA comprises a PBS comprising a sequence selected from the group consisting of SEQ Identifiers: B91-B99 in Table 3B. In some embodiments, the PEgRNA comprises a PBS comprising a sequence selected from the group consisting of SEQ ID Nos: 1283-1289 in Table 3B. In some embodiments, the PEgRNA comprises a PBS comprising a sequence selected from the group consisting of sequences: GGCATTAA and GGCATTAAT. In some embodiments, the PEgRNA comprises an editing template comprising a sequence selected from the group consisting of SEQ ID Nos: C195-C198 in Table 3C. In some embodiments, the PEgRNA comprises an editing template comprising a sequence selected from the group consisting of SEQ ID Nos: 4221-4224 in Table 3C. In some embodiments, the prime editing composition further comprises a ngRNA that comprises a spacer comprising a sequence selected from the group consisting of SEQ ID Nos: D9-D27, D79-D81 and D98-D99 in Table 3D. In some embodiments, the prime editing composition further comprises a ngRNA that comprises a spacer comprising a sequence selected from the group consisting of SEQ ID Nos: 19642-19660, 19712-19714 and 19731-19732 in Table 3D.

[0205] In some embodiments, the PEgRNA comprises a spacer comprising the sequence of SEQ Identifiers: A24 in Table 3A. In some embodiments, the PEgRNA comprises a spacer comprising the sequence of SEQ ID Nos: 372 in Table 3A. In some embodiments, the PEgRNA comprises a PBS comprising a sequence selected from the group consisting of SEQ Identifiers: B100-B108 in Table 3B. In some embodiments, the PEgRNA comprises a PBS comprising a sequence selected from the group consisting of SEQ ID Nos: 1290-1296 in Table 3B. In some embodiments, the PEgRNA comprises a PBS comprising a sequence selected from the group consisting of sequences: GGGCATTA and GGGCATTAA. In some embodiments, the PEgRNA comprises an editing template comprising a sequence selected from the group consisting of SEQ identifiers: C199-C201 in Table 3C. In some embodiments, the PEgRNA comprises an editing template comprising a sequence selected from the group consisting of SEQ ID Nos: 4225-4227 in Table 3C. In some embodiments, the prime editing composition further comprises a ngRNA that comprises a spacer comprising a sequence selected from the group consisting of SEQ identifiers: D9-D27 in Table 3D. In some embodiments, the prime editing composition further comprises a ngRNA that comprises a spacer comprising a sequence selected from the group consisting of SEQ ID Nos: 19642-19660 in Table 3D.

[0206] In some embodiments, the PEgRNA comprises a spacer comprising a sequence selected from the group consisting of SEQ Identifiers: A25-A26 in Table 3A. In some embodiments, the PEgRNA comprises a spacer comprising a sequence selected from the group consisting of SEQ ID Nos: 373-374 in Table 3A. In some embodiments, the PEgRNA comprises a PBS comprising a sequence selected from the group consisting of SEQ identifiers: B109-B117 in Table 3B. In some embodiments, the PEgRNA comprises a PBS comprising a sequence selected from the group consisting of SEQ ID Nos: 1297-1303 in Table 3B. In some embodiments, the PEgRNA comprises a PBS comprising a sequence selected from the group consisting of sequences: AATCTTTT and AATCTTTTT. In some embodiments, the PEgRNA comprises an editing template comprising a sequence selected from the group consisting of SEQ identifiers: C202-C263 in Table 3C. In some embodiments, the PEgRNA comprises an editing template comprising a sequence selected from the group consisting of SEQ ID Nos: 4228-4289 in Table 3C. In some embodiments, the prime editing composition further comprises a ngRNA that comprises a spacer comprising a sequence selected from the group consisting of SEQ identifiers: D1-D7, D73-D74, D77-D78, and D100 in Table 3D. In some embodiments, the prime editing composition further comprises a ngRNA that comprises a spacer comprising a sequence selected from the group consisting of SEQ ID Nos: 19634-19640, 19706-19707, 19710-19711, and 19733 in Table 3D.

[0207] In some embodiments, the PEgRNA comprises a spacer comprising a sequence selected from the group consisting of SEQ Identifiers: A27-A28 in Table 3A. In some embodiments, the PEgRNA comprises a spacer comprising a sequence selected from the group consisting of SEQ ID Nos: 375-376 in Table 3A. In some embodiments, the PEgRNA comprises a PBS comprising a sequence selected from the group consisting of SEQ identifiers: B118-B126 in Table 3B. In some embodiments, the PEgRNA comprises a PBS comprising a sequence selected from the group consisting of SEQ ID Nos: 1304-B126 in Table 3B. In some embodiments, the PEgRNA comprises a PBS comprising a sequence selected from the group consisting of sequences: GTACATTC and GTACATTCA. In some embodiments, the PEgRNA comprises an editing template comprising a sequence selected from the group consisting of SEQ identifiers: C264-C268 in Table 3C. In some embodiments, the PEgRNA comprises an editing template comprising a sequence selected from the group consisting of SEQ ID Nos: 4290-4294 in Table 3C. In some embodiments, the prime editing composition further comprises a ngRNA that comprises a spacer comprising a sequence selected from the group consisting of SEQ identifiers: D39-D62 in Table 3D. In some embodiments, the prime editing composition further comprises a ngRNA that comprises a spacer comprising a sequence selected from the group consisting of SEQ ID Nos: 19672-19695 in Table 3D.

[0208] In some embodiments, the PEgRNA comprises a spacer comprising the sequence of SEQ Identifiers: A29 in Table 3A. In some embodiments, the PEgRNA comprises a spacer comprising the sequence of SEQ ID Nos: 377 in Table 3A. In some embodiments, the PEgRNA comprises a PBS comprising a sequence selected from the group consisting of SEQ identifiers: B127-B135 in Table 3B. In some embodiments, the PEgRNA comprises a PBS comprising a sequence selected from the group consisting of SEQ ID Nos: 1311-1317 in Table 3B. In some embodiments, the PEgRNA comprises a PBS comprising a sequence selected from the group consisting of sequences: CCGAAGGG and CCGAAGGGC. In some embodiments, the PEgRNA comprises an editing template comprising a sequence selected from the group consisting of SEQ identifiers: C269-C276 in Table 3C. In some embodiments, the PEgRNA comprises an editing template comprising a sequence selected from the group consisting of SEQ ID Nos: 4295-4302 in Table 3C. In some embodiments, the prime editing composition further comprises a ngRNA that comprises a spacer comprising a sequence selected from the group consisting of SEQ identifiers: D9-D27 and D33-D35 in Table 3D. In some embodiments, the prime editing composition further comprises a ngRNA that comprises a spacer comprising a sequence selected from the group consisting of SEQ ID Nos: 19642-19660 and 19666-19668 in Table 3D.

[0209] In some embodiments, the PEgRNA comprises a spacer comprising a sequence selected from the group consisting of SEQ Identifiers: A30-A31 in Table 3A. In some embodiments, the PEgRNA comprises a spacer comprising a sequence selected from the group consisting of SEQ ID Nos: 378-379 in Table 3A. In some embodiments, the PEgRNA comprises a PBS comprising a sequence selected from the group consisting of SEQ identifiers: B136-B144 in Table 3B. In some embodiments, the PEgRNA comprises a PBS comprising a sequence selected from the group consisting of SEQ ID Nos: 1318-1324 in Table 3B. In some embodiments, the PEgRNA comprises a PBS comprising a sequence selected from the group consisting of sequences: GAAAAAAC and GAAAAAACA. In some embodiments, the PEgRNA comprises an editing template comprising a sequence selected from the group consisting of SEQ identifiers: C277-C296 in Table 3C. In some embodiments, the PEgRNA comprises an editing template comprising a sequence selected from the group consisting of SEQ ID Nos: 4303-4322 in Table 3C. In some embodiments, the prime editing composition further comprises a ngRNA that comprises a spacer comprising a sequence selected from the group consisting of SEQ identifiers: D9-D37, and D92 in Table 3D. In some embodiments, the prime editing composition further comprises a ngRNA that comprises a spacer comprising a sequence selected from the group consisting of SEQ ID Nos: 19642-19670 and 19725 in Table 3D.

[0210] In some embodiments, the PEgRNA comprises a spacer comprising a sequence selected from the group consisting of SEQ Identifiers: A32-A33 in Table 3A. In some embodiments, the PEgRNA comprises a spacer comprising a sequence selected from the group consisting of SEQ ID Nos: 380-381 in Table 3A. In some embodiments, the PEgRNA comprises a PBS comprising a sequence selected from the group consisting of SEQ identifiers: B145-B153 in Table 3B. In some embodiments, the PEgRNA comprises a PBS comprising a sequence selected from the group consisting of SEQ ID Nos: 1325-1331 in Table 3B. In some embodiments, the PEgRNA comprises a PBS comprising a sequence selected from the group consisting of sequences: AACATAAA and AACATAAAT. In some embodiments, the PEgRNA comprises an editing template comprising a sequence selected from the group consisting of SEQ identifiers: C297-C327 in Table 3C. In some embodiments, the PEgRNA comprises an editing template comprising a sequence selected from the group consisting of SEQ ID Nos: 4323-4353 in Table 3C. In some embodiments, the prime editing composition further comprises a ngRNA that comprises a spacer comprising a sequence selected from the group consisting of SEQ identifiers: D11-D38, D92, and D101 in Table 3D. In some embodiments, the prime editing composition further comprises a ngRNA that comprises a spacer comprising a sequence selected from the group consisting of SEQ ID Nos: 19644-19671, 19725, and 19734 in Table 3D.

[0211] In some embodiments, the PEgRNA comprises a spacer comprising a sequence selected from the group consisting of SEQ Identifiers: A34-A35 in Table 3A. In some embodiments, the PEgRNA comprises a spacer comprising a sequence selected from the group consisting of SEQ ID Nos: 382-383 in Table 3A. In some embodiments, the PEgRNA comprises a PBS comprising a sequence selected from the group consisting of SEQ identifiers: B154-B162 in Table 3B. In some embodiments, the PEgRNA comprises a PBS comprising a sequence selected from the group consisting of SEQ ID Nos: 1332-1336 in Table 3B. In some embodiments, the PEgRNA comprises a PBS comprising a sequence selected from the group consisting of sequences: AAAAAACA and AAAAAACAT. In some embodiments, the PEgRNA comprises an editing template comprising a sequence selected from the group consisting of SEQ identifiers: C328-C365 in Table 3C. In some embodiments, the PEgRNA comprises an editing template comprising a sequence selected from the group consisting of SEQ ID Nos: 4354-4391 in Table 3C. In some embodiments, the prime editing composition further comprises a ngRNA that comprises a spacer comprising a sequence selected from the group consisting of SEQ identifiers: D67, D95, D102-D119 in Table 3D. In some embodiments, the prime editing composition further comprises a ngRNA that comprises a spacer comprising a sequence selected from the group consisting of SEQ ID Nos: 19700, 19728, 19735-19752 in Table 3D.

[0212] In some embodiments, the PEgRNA comprises a spacer comprising a sequence selected from the group consisting of SEQ Identifiers: A1-A2 in Table 3A. In some embodiments, the PEgRNA comprises a spacer comprising a sequence selected from the group consisting of SEQ ID Nos: 349-350 in Table 3A. In some embodiments, the PEgRNA comprises a PBS comprising a sequence selected from the group consisting of SEQ identifiers: B1-B9 in Table 3B. In some embodiments, the PEgRNA comprises a PBS comprising a sequence selected from the group consisting of SEQ ID Nos: 1213-1219 in Table 3B. In some embodiments, the PEgRNA comprises a PBS comprising a sequence selected from the group consisting of sequences: TGTACATT and TGTACATTC. In some embodiments, the PEgRNA comprises an editing template comprising a sequence selected from the group consisting of SEQ identifiers: C366-C393 in Table 3C. In some embodiments, the PEgRNA comprises an editing template comprising a sequence selected from the group consisting of SEQ ID Nos: 4392-4419 in Table 3C. In some embodiments, the prime editing composition further comprises a ngRNA that comprises a spacer comprising a sequence selected from the group consisting of SEQ identifiers: D1-D8 in Table 3D. In some embodiments, the prime editing composition further comprises a ngRNA that comprises a spacer comprising a sequence selected from the group consisting of SEQ ID Nos: 19634-19641 in Table 3D.

[0213] In some embodiments, the PEgRNA comprises a spacer comprising a sequence selected from the group consisting of SEQ Identifiers: A36-A37 in Table 3A. In some embodiments, the PEgRNA comprises a spacer comprising a sequence selected from the group consisting of SEQ ID Nos: 384-385 in Table 3A. In some embodiments, the PEgRNA comprises a PBS comprising a sequence selected from the group consisting of SEQ identifiers: B163-B171 in Table 3B. In some embodiments, the PEgRNA comprises a PBS comprising a sequence selected from the group consisting of SEQ ID Nos: 1339-1345 in Table 3B. In some embodiments, the PEgRNA comprises a PBS comprising a sequence selected from the group consisting of sequences: TGTATCAC and TGTATCACA. In some embodiments, the PEgRNA comprises an editing template comprising the sequence of SEQ identifier: C394. In some embodiments, the PEgRNA comprises an editing template comprising the sequence of SEQ ID No: 4420. In some embodiments, the prime editing composition further comprises a ngRNA that comprises a spacer comprising a sequence selected from the group consisting of SEQ ID Nos: D40-D62 in Table 3D. In some embodiments, the prime editing composition further comprises a ngRNA that comprises a spacer comprising a sequence selected from the group consisting of SEQ ID Nos: 19673-19695 in Table 3D.

[0214] In some embodiments, the PEgRNA comprises a spacer comprising a sequence selected from the group consisting of SEQ identifiers: A38-A39 in Table 3A. In some embodiments, the PEgRNA comprises a spacer comprising a sequence selected from the group consisting of SEQ ID Nos: 386-387 in Table 3A. In some embodiments, the PEgRNA comprises a PBS comprising a sequence selected from the group consisting of SEQ identifiers: B172-B180 in Table 3B. In some embodiments, the PEgRNA comprises a PBS comprising a sequence selected from the group consisting of SEQ ID Nos: 1346-1352 in Table 3B. In some embodiments, the PEgRNA comprises a PBS comprising a sequence selected from the group consisting of sequences: ATTTAGGG and ATTTAGGGG. In some embodiments, the PEgRNA comprises an editing template comprising a sequence selected from the group consisting of SEQ identifiers: C395-C425 in Table 3C. In some embodiments, the PEgRNA comprises an editing template comprising a sequence selected from the group consisting of SEQ ID Nos: 4421-4451 in Table 3C. In some embodiments, the prime editing composition further comprises a ngRNA that comprises a spacer comprising a sequence selected from the group consisting of SEQ identifiers: D1-D7 and D120-D121 in Table 3D. In some embodiments, the prime editing composition further comprises a ngRNA that comprises a spacer comprising a sequence selected from the group consisting of SEQ ID Nos: 19634-19640 and 19753-19754 in Table 3D.

[0215] In some embodiments, the PEgRNA comprises a spacer comprising the sequence of SEQ identifier: A5 in Table 3A. In some embodiments, the PEgRNA comprises a spacer comprising the sequence of SEQ ID No: 353 in Table 3A. In some embodiments, the PEgRNA comprises a PBS comprising a sequence selected from the group consisting of SEQ identifiers: B19-B27 in Table 3B. In some embodiments, the PEgRNA comprises a PBS comprising a sequence selected from the group consisting of SEQ ID Nos: 1227-1233 in Table 3B. In some embodiments, the PEgRNA comprises a PBS comprising a sequence selected from the group consisting of sequences ATCTCCAG and ATCTCCAGA. In some embodiments, the PEgRNA comprises an editing template comprising a sequence selected from the group consisting of SEQ identifiers: C426-C443 in Table 3C. In some embodiments, the prime editing composition further comprises a ngRNA that comprises a spacer comprising a sequence selected from the group consisting of SEQ identifiers: D11-D27, D33-D37, and D122 in Table 3D. In some embodiments, the PEgRNA comprises an editing template comprising a sequence selected from the group consisting of SEQ ID Nos: 4452-4469 in Table 3C. In some embodiments, the prime editing composition further comprises a ngRNA that comprises a spacer comprising a sequence selected from the group consisting of SEQ ID Nos: 19644-19660, 19666-19670, and 19755 in Table 3D.

[0216] In some embodiments, the PEgRNA comprises a spacer comprising a sequence selected from the group consisting of SEQ identifiers: A6-A7 in Table 3A. In some embodiments, the PEgRNA comprises a spacer comprising a sequence selected from the group consisting of SEQ ID Nos: 354-355 in Table 3A. In some embodiments, the PEgRNA comprises a PBS comprising a sequence selected from the group consisting of SEQ identifiers: B28-B36 in Table 3B. In some embodiments, the PEgRNA comprises a PBS comprising a sequence selected from the group consisting of SEQ ID Nos: 1234-1240 in Table 3B. In some embodiments, the PEgRNA comprises a PBS comprising a sequence selected from the group consisting of sequences: TTGTACAT and TTGTACATT. In some embodiments, the PEgRNA comprises an editing template comprising a sequence selected from the group consisting of SEQ identifiers: C444-C458 in Table 3C. In some embodiments, the prime editing composition further comprises a ngRNA that comprises a spacer comprising a sequence selected from the group consisting of SEQ identifiers: D39-D62 in Table 3D. In some embodiments, the PEgRNA comprises an editing template comprising a sequence selected from the group consisting of SEQ ID Nos: 4470-4484 in Table 3C. In some embodiments, the prime editing composition further comprises a ngRNA that comprises a spacer comprising a sequence selected from the group consisting of SEQ ID Nos: 19672-19695 in Table 3D.

[0217] In some embodiments, the PEgRNA comprises a spacer comprising a sequence selected from the group consisting of SEQ identifiers: A13-A14 in Table 3A. In some embodiments, the PEgRNA comprises a spacer comprising a sequence selected from the group consisting of SEQ ID Nos: 361-362 in Table 3A. In some embodiments, the PEgRNA comprises a PBS comprising a sequence selected from the group consisting of SEQ identifiers: B55-B63 in Table 3B. In some embodiments, the PEgRNA comprises a PBS comprising a sequence selected from the group consisting of SEQ ID Nos: 1255-1261 in Table 3B. In some embodiments, the PEgRNA comprises a PBS comprising a sequence selected from the group consisting of sequences: AAAACATC and AAAACATCG. In some embodiments, the PEgRNA comprises an editing template comprising a sequence selected from the group consisting of SEQ identifiers: C459-C466 in Table 3C. In some embodiments, the prime editing composition further comprises a ngRNA that comprises a spacer comprising a sequence selected from the group consisting of SEQ identifiers: D10-D27, D33-D37, and D79-D83 in Table 3D. In some embodiments, the PEgRNA comprises an editing template comprising a sequence selected from the group consisting of SEQ ID Nos: 4485-4492 in Table 3C. In some embodiments, the prime editing composition further comprises a ngRNA that comprises a spacer comprising a sequence selected from the group consisting of SEQ ID Nos: 19643-19660, 19666-19670, and 19712-19716 in Table 3D.

[0218] In some embodiments, the PEgRNA comprises a spacer comprising a sequence selected from the group consisting of SEQ identifiers: A40-A41 in Table 3A. In some embodiments, the PEgRNA comprises a spacer comprising a sequence selected from the group consisting of SEQ ID Nos: 388-389 in Table 3A. In some embodiments, the PEgRNA comprises a PBS comprising a sequence selected from the group consisting of SEQ identifiers: B181-B189 in Table 3B. In some embodiments, the PEgRNA comprises a PBS comprising a sequence selected from the group consisting of SEQ ID Nos: 1353-1359 in Table 3B. In some embodiments, the PEgRNA comprises a PBS comprising a sequence selected from the group consisting of GAACATAA and GAACATAAA. In some embodiments, the PEgRNA comprises an editing template comprising a sequence selected from the group consisting of SEQ identifiers: C467-C492 in Table 3C. In some embodiments, the prime editing composition further comprises a ngRNA that comprises a spacer comprising a sequence selected from the group consisting of SEQ identifiers: D11-D37, D92, and D122-D123 in Table 3D. In some embodiments, the PEgRNA comprises an editing template comprising a sequence selected from the group consisting of SEQ ID Nos: 4493-4518 in Table 3C. In some embodiments, the prime editing composition further comprises a ngRNA that comprises a spacer comprising a sequence selected from the group consisting of SEQ ID Nos: 19644-19670, 19725, and 19755-19756 in Table 3D.

[0219] In some embodiments, the PEgRNA comprises a spacer comprising a sequence selected from the group consisting of SEQ identifiers: A17-A18 in Table 3A. In some embodiments, the PEgRNA comprises a spacer comprising a sequence selected from the group consisting of SEQ ID Nos: 365-366 in Table 3A. In some embodiments, the PEgRNA comprises a PBS comprising a sequence selected from the group consisting of SEQ identifiers: B73-B81 in Table 3B. In some embodiments, the PEgRNA comprises a PBS comprising a sequence selected from the group consisting of SEQ ID Nos: 1269-1275 in Table 3B. In some embodiments, the PEgRNA comprises a PBS comprising a sequence selected from the group consisting of sequences: AAAAACAT and AAAAACATC. In some embodiments, the PEgRNA comprises an editing template comprising a sequence selected from the group consisting of SEQ identifiers: C493-C501 in Table 3C. In some embodiments, the prime editing composition further comprises a ngRNA that comprises a spacer comprising a sequence selected from the group consisting of SEQ identifiers: D10-D37, and D92 in Table 3D. In some embodiments, the PEgRNA comprises an editing template comprising a sequence selected from the group consisting of SEQ ID Nos: 4519-4527 in Table 3C. In some embodiments, the prime editing composition further comprises a ngRNA that comprises a spacer comprising a sequence selected from the group consisting of SEQ ID Nos: 19643-19670, and 19725 in Table 3D.

[0220] In some embodiments, the PEgRNA comprises a spacer comprising a sequence selected from the group consisting of SEQ identifiers: A19-A21 in Table 3A. In some embodiments, the PEgRNA comprises a spacer comprising a sequence selected from the group consisting of SEQ ID Nos: 367-369 in Table 3A. In some embodiments, the PEgRNA comprises a PBS comprising a sequence selected from the group consisting of SEQ identifiers: B82-B90 in Table 3B. In some embodiments, the PEgRNA comprises a PBS comprising a sequence selected from the group consisting of SEQ ID Nos: 1276-1282 in Table 3B. In some embodiments, the PEgRNA comprises a PBS comprising a sequence selected from the group consisting of sequences: AAACATCG and AAACATCGC. In some embodiments, the PEgRNA comprises an editing template comprising a sequence selected from the group consisting of SEQ identifiers: C502-C508 in Table 3C. In some embodiments, the prime editing composition further comprises a ngRNA that comprises a spacer comprising a sequence selected from the group consisting of SEQ identifiers: D17, D35, D63-D70, and D93-D97 in Table 3D. In some embodiments, the PEgRNA comprises an editing template comprising a sequence selected from the group consisting of SEQ ID Nos: 4528-4534 in Table 3C. In some embodiments, the prime editing composition further comprises a ngRNA that comprises a spacer comprising a sequence selected from the group consisting of SEQ ID Nos: 19650, 19668, 19696-19703, and 19726-19730 in Table 3D.

[0221] In some embodiments, the PEgRNA comprises a spacer comprising the sequence of SEQ identifier: A42 in Table 3A. In some embodiments, the PEgRNA comprises a spacer comprising the sequence of SEQ ID No: 390 in Table 3A. In some embodiments, the PEgRNA comprises a PBS comprising a sequence selected from the group consisting of SEQ identifiers: B190-B198 in Table 3B. In some embodiments, the PEgRNA comprises a PBS comprising a sequence selected from the group consisting of SEQ ID Nos: 1360-1366 in Table 3B. In some embodiments, the PEgRNA comprises a PBS comprising a sequence selected from the group consisting of sequences: ATTATGTA and ATTATGTAT. In some embodiments, the PEgRNA comprises an editing template comprising a sequence selected from the group consisting of SEQ identifiers: C509-C513 in Table 3C. In some embodiments, the prime editing composition further comprises a ngRNA that comprises a spacer comprising a sequence selected from the group consisting of SEQ identifiers: D39-D54 in Table 3D. In some embodiments, the PEgRNA comprises an editing template comprising a sequence selected from the group consisting of SEQ ID Nos: 4535-4539 in Table 3C. In some embodiments, the prime editing composition further comprises a ngRNA that comprises a spacer comprising a sequence selected from the group consisting of SEQ ID Nos: 19672-19687 in Table 3D.

[0222] In some embodiments, the PEgRNA comprises a spacer comprising a sequence selected from the group consisting of SEQ identifiers: A27-A28 in Table 3A. In some embodiments, the PEgRNA comprises a spacer comprising a sequence selected from the group consisting of SEQ ID Nos: 375-376 in Table 3A. In some embodiments, the PEgRNA comprises a PBS comprising a sequence selected from the group consisting of SEQ identifiers: B118-B126 in Table 3B. In some embodiments, the PEgRNA comprises a PBS comprising a sequence selected from the group consisting of SEQ ID Nos: 1304-1310 in Table 3B. In some embodiments, the PEgRNA comprises a PBS comprising a sequence selected from the group consisting of sequences: GTACATTC and GTACATTCA. In some embodiments, the PEgRNA comprises an editing template comprising a sequence selected from the group consisting of identifiers: C514-C526 in Table 3C. In some embodiments, the prime editing composition further comprises a ngRNA that comprises a spacer comprising a sequence selected from the group consisting of SEQ identifiers: D39-D62 in Table 3D. In some embodiments, the PEgRNA comprises an editing template comprising a sequence selected from the group consisting of SEQ ID Nos: 4540-4552 in Table 3C. In some embodiments, the prime editing composition further comprises a ngRNA that comprises a spacer comprising a sequence selected from the group consisting of SEQ ID Nos: 19672-19695 in Table 3D.

[0223] In some embodiments, the PEgRNA comprises a spacer comprising a sequence selected from the group consisting of SEQ identifiers: A43-A44 in Table 3A. In some embodiments, the PEgRNA comprises a spacer comprising a sequence selected from the group consisting of SEQ ID Nos: 391-392 in Table 3A. In some embodiments, the PEgRNA comprises a PBS comprising a sequence selected from the group consisting of SEQ identifiers: B199-B207 in Table 3B. In some embodiments, the PEgRNA comprises a PBS comprising a sequence selected from the group consisting of SEQ ID Nos: 1367-1373 in Table 3B. In some embodiments, the PEgRNA comprises a PBS comprising a sequence selected from the group consisting of sequences: TATTTAGG and TATTTAGGG. In some embodiments, the PEgRNA comprises an editing template comprising a sequence selected from the group consisting of SEQ identifiers: C527-C557 in Table 3C. In some embodiments, the prime editing composition further comprises a ngRNA that comprises a spacer comprising a sequence selected from the group consisting of SEQ identifiers: D39-D61, D90, D124-D130 in Table 3D. In some embodiments, the PEgRNA comprises an editing template comprising a sequence selected from the group consisting of SEQ ID Nos: 4553-4583 in Table 3C. In some embodiments, the prime editing composition further comprises a ngRNA that comprises a spacer comprising a sequence selected from the group consisting of SEQ ID Nos: 19672-19694, 19723, 19757-19763 in Table 3D.

[0224] In some embodiments, the PEgRNA comprises a spacer comprising a sequence selected from the group consisting of SEQ identifiers: A30-A31 in Table 3A. In some embodiments, the PEgRNA comprises a spacer comprising a sequence selected from the group consisting of SEQ ID Nos: 378-379 in Table 3A. In some embodiments, the PEgRNA comprises a PBS comprising a sequence selected from the group consisting of SEQ identifiers: B136-B144 in Table 3B. In some embodiments, the PEgRNA comprises a PBS comprising a sequence selected from the group consisting of SEQ ID Nos: 1318-1324 in Table 3B. In some embodiments, the PEgRNA comprises a PBS comprising a sequence selected from the group consisting of sequences: GAAAAAAC and GAAAAAACA. In some embodiments, the PEgRNA comprises an editing template comprising a sequence selected from the group consisting of SEQ identifiers: C558-C568 in Table 3C. In some embodiments, the prime editing composition further comprises a ngRNA that comprises a spacer comprising a sequence selected from the group consisting of SEQ identifiers: D10-D37, and D92 in Table 3D. In some embodiments, the PEgRNA comprises an editing template comprising a sequence selected from the group consisting of SEQ ID Nos: 4584-4594 in Table 3C. In some embodiments, the prime editing composition further comprises a ngRNA that comprises a spacer comprising a sequence selected from the group consisting of SEQ ID Nos: 19643-19670, and 19725 in Table 3D.

[0225] In some embodiments, the PEgRNA comprises a spacer comprising a sequence selected from the group consisting of SEQ identifiers: 380, 381, 393, and 394 in Table 3A. In some embodiments, the PEgRNA comprises a spacer comprising a sequence selected from the group consisting of SEQ ID Nos: A32, A33, A45, and A46 in Table 3A. In some embodiments, the PEgRNA comprises a PBS comprising a sequence selected from the group consisting of SEQ identifiers: B145-B153 in Table 3B. In some embodiments, the PEgRNA comprises a PBS comprising a sequence selected from the group consisting of SEQ ID Nos: 1325-1331 in Table 3B. In some embodiments, the PEgRNA comprises a PBS comprising a sequence selected from the group consisting of sequences: AACATAAA and AACATAAAT. In some embodiments, the PEgRNA comprises an editing template comprising a sequence selected from the group consisting of SEQ identifiers: C569-C593 in Table 3C. In some embodiments, the prime editing composition further comprises a ngRNA that comprises a spacer comprising a sequence selected from the group consisting of SEQ identifiers: D11-D27, D33-D37, D65, D67, D70, D79-D83, D105, D122, and D131-D135 in Table 3D. In some embodiments, the PEgRNA comprises an editing template comprising a sequence selected from the group consisting of SEQ ID Nos: 4595-4619 in Table 3C. In some embodiments, the prime editing composition further comprises a ngRNA that comprises a spacer comprising a sequence selected from the group consisting of SEQ ID Nos: 19644-19660, 19666-19670, 19698, 19700, 19703, 19712-19716, 19738, 19755, and 19764-19768 in Table 3D.

[0226] In some embodiments, the PEgRNA comprises a spacer comprising a sequence selected from the group consisting of SEQ identifiers: A34-A35 in Table 3A. In some embodiments, the PEgRNA comprises a spacer comprising a sequence selected from the group consisting of SEQ ID Nos: 382-383 in Table 3A. In some embodiments, the PEgRNA comprises a PBS comprising a sequence selected from the group consisting of SEQ identifiers: B154-B162 in Table 3B. In some embodiments, the PEgRNA comprises a PBS comprising a sequence selected from the group consisting of SEQ ID Nos: 1332-1338 in Table 3B. In some embodiments, the PEgRNA comprises a PBS comprising a sequence selected from the group consisting of sequences: AAAAAACA and AAAAAACAT. In some embodiments, the PEgRNA comprises an editing template comprising a sequence selected from the group consisting of SEQ identifiers: C594-C613 in Table 3C. In some embodiments, the prime editing composition further comprises a ngRNA that comprises a spacer comprising a sequence selected from the group consisting of SEQ identifiers: D67, D95, D102-D119 in Table 3D. In some embodiments, the PEgRNA comprises an editing template comprising a sequence selected from the group consisting of SEQ ID Nos: 4620-4639 in Table 3C. In some embodiments, the prime editing composition further comprises a ngRNA that comprises a spacer comprising a sequence selected from the group consisting of SEQ ID Nos: 19700, 19728, 19735-19752 in Table 3D.

[0227] In some embodiments, the PEgRNA comprises a spacer comprising a sequence selected from the group consisting of SEQ identifiers: A47-A49 in Table 3A. In some embodiments, the PEgRNA comprises a spacer comprising a sequence selected from the group consisting of SEQ ID Nos: 395-397 in Table 3A. In some embodiments, the PEgRNA comprises a PBS comprising a sequence selected from the group consisting of SEQ identifiers: B208-B216 in Table 3B. In some embodiments, the PEgRNA comprises a PBS comprising a sequence selected from the group consisting of SEQ ID Nos: 1374-1380 in Table 3B. In some embodiments, the PEgRNA comprises a PBS comprising a sequence selected from the group consisting of sequences: ACATAAAT and ACATAAATC. In some embodiments, the PEgRNA comprises an editing template comprising a sequence selected from the group consisting of SEQ identifiers: C614-C637 in Table 3C. In some embodiments, the prime editing composition further comprises a ngRNA that comprises a spacer comprising a sequence selected from the group consisting of SEQ identifiers: D17, D35, D63-D70 and D93-D97 in Table 3D. In some embodiments, the PEgRNA comprises an editing template comprising a sequence selected from the group consisting of SEQ ID Nos: 4640-4663 in Table 3C. In some embodiments, the prime editing composition further comprises a ngRNA that comprises a spacer comprising a sequence selected from the group consisting of SEQ ID Nos: 19650, 19668, 19696-19703 and 19726-19730 in Table 3D.

[0228] In some embodiments, the editing target sequence is in exon 4 of the CFTR gene.

[0229] In some embodiments, the editing target sequence or the complementary sequence on the CFTR gene thereof comprises a mutation that encodes an amino acid substitution R117P, R117H, R117L, R117G, E116Q, K114*, E115*, E116*, and/or A120P, relative to a wild type CFTR polypeptide set forth in SEQ ID NO: 19, wherein * refers to a non-sense mutation, and wherein the editing template encodes an intended nucleotide edit that corrects the mutation. In some embodiments, the editing target sequence or the complementary sequence on the CFTR gene thereof comprises a G→→C mutation (c.350G>C) at position 117,530,975, a G→→C mutation (c.350G>A) at position 117,530,975, a G→→C mutation (c.350G>T) at position 117,530,975 a A→→T mutation (c.340A>T) at position 117,530,965, a deletion of AAG (c.340_342delAAG) at position 117,530,965, a deletion of 13 nucleotides AAGGAGGAACGCT (SEQ ID NO: 347)(c.341_353del13) at position 117,530,966, a G→→T mutation (c.343G>T) at position 117,530,968, a deletion of GGA (c.345_347delGGA) at position 117,530,970, a G→→C mutation (c.346G>C) at position 117,530,971, a G→→T mutation (c.346G>T) at position 117,530,971, a C→→G mutation (c.349C>G) at position 117,530,974, a deletion of C (c.357delC) at position 117,530,982, and/or a G→→C mutation (c.358G>C) at position 117,530,983 of human chromosome 7 compared to a wild type CFTR gene. In some embodiments, the editing template comprises an intended nucleotide edit compared to the target CFTR gene, wherein incorporation of the intended nucleotide edit encoded by the editing template corrects the mutation. In some embodiments, incorporation of the one or more intended nucleotide edits results in a CFTR gene that encodes a functional CFTR polypeptide. In some embodiments, the editing template comprises a wild type CFTR gene sequence. Accordingly, in some embodiments, the newly synthesized single stranded DNA encoded by the editing template is capable of correcting the c.350G>C mutation, the c.350G>A mutation, the c.350G>T mutation, the c.340A>T mutation, the c.340_342delAAG mutation, the c.341_353del13 mutation, the c.343G>T mutation, the c.345_347delGGA mutation, the c.346G>C mutation, the c.346G>T mutation, the c.349C>G mutation, the c.357delC mutation, and/or the c.358G>C mutation in the target CFTR gene. In some embodiments, the newly synthesized single stranded DNA encoded by the editing template is capable of correcting all of the c.350G>C mutation, the c.350G>A mutation, the c.350G>T mutation, the c.340A>T mutation, the c.340_342delAAG mutation, the c.341_353del13 mutation, the c.343G>T mutation, the c.345_347delGGA mutation, the c.346G>C mutation, the c.346G>T mutation, the c.349C>G mutation, the c.357delC mutation, and the c.358G>C mutation in the target CFTR gene. In some embodiments, two or more of the c.350G>C mutation, the c.350G>A mutation, the c.350G>T mutation, the c.340A>T mutation, the c.340_342delAAG mutation, the c.341_353del13 mutation, the c.343G>T mutation, the c.345_347delGGA mutation, the c.346G>C mutation, the c.346G>T mutation, the c.349C>G mutation, the c.357delC mutation, and the c.358G>C mutation are located on the same CFTR gene. In some embodiments, the newly synthesized single stranded DNA encoded by the editing template is capable of correcting the c.350G>C mutation, the c.350G>A mutation, the c.350G>T mutation, the c.340A>T mutation, the c.340_342delAAG mutation, the c.341_353del13 mutation, the c.343G>T mutation, the c.345_347delGGA mutation, the c.346G>C mutation, the c.346G>T mutation, the c.349C>G mutation, the c.357delC mutation, and the c.358G>C mutation that are located on different CFTR genes. For example, in some embodiments, a subject may comprise two copies of CFTR genes, each comprising a different mutation selected from the group consisting of the c.350G>C mutation, the c.350G>A mutation, the c.350G>T mutation, the c.340A>T mutation, the c.340_342delAAG mutation, the c.341_353del13 mutation, the c.343G>T mutation, the c.345_347delGGA mutation, the c.346G>C mutation, the c.346G>T mutation, the c.349C>G mutation, the c.357delC mutation, and the c.358G>C mutation, all of which may be corrected by an editing template of a single PEgRNA. In some embodiments, the editing template is capable of correcting one or more, or all of the c.350G>C mutation, the c.350G>A mutation, the c.350G>T mutation, the c.340A>T mutation, the c.340_342delAAG mutation, the c.341_353del13 mutation, the c.343G>T mutation, the c.345_347delGGA mutation, the c.346G>C mutation, the c.346G>T mutation, the c.349C>G mutation, the c.357delC mutation, and the c.358G>C mutation that are in different subjects, wherein each subject may have one or more of the mutations.

[0230] In some embodiments, the PEgRNA comprises a spacer comprising the sequence of SEQ identifier: A50 in Table 3A. In some embodiments, the PEgRNA comprises a spacer comprising the sequence of SEQ ID No: 398 in Table 3A. In some embodiments, the PEgRNA comprises a PBS comprising a sequence selected from the group consisting of SEQ identifiers: B217-B225 in Table 3B. In some embodiments, the PEgRNA comprises a PBS comprising a sequence selected from the group consisting of SEQ ID Nos: 1381-1387 in Table 3B. In some embodiments, the PEgRNA comprises a PBS comprising a sequence selected from the group consisting of sequences: GCTTATGC and GCTTATGCC. In some embodiments, the PEgRNA comprises an editing template comprising a sequence selected from the group consisting of SEQ identifiers: C638-C650 in Table 3C. In some embodiments, the prime editing composition further comprises a ngRNA that comprises a spacer comprising a sequence selected from the group consisting of SEQ identifiers: D136-D157 in Table 3D. In some embodiments, the PEgRNA comprises an editing template comprising a sequence selected from the group consisting of SEQ ID Nos: 4394-4676 in Table 3C. In some embodiments, the prime editing composition further comprises a ngRNA that comprises a spacer comprising a sequence selected from the group consisting of SEQ ID Nos: 19769-19790 in Table 3D.

[0231] In some embodiments, the PEgRNA comprises a spacer comprising the sequence of SEQ identifiers: A51 in Table 3A. In some embodiments, the PEgRNA comprises a spacer comprising the sequence of SEQ ID No: 399 in Table 3A. In some embodiments, the PEgRNA comprises a PBS comprising a sequence selected from the group consisting of SEQ identifiers: B226-B234 in Table 3B. In some embodiments, the PEgRNA comprises a PBS comprising a sequence selected from the group consisting of SEQ ID Nos: 1388-1394 in Table 3B. In some embodiments, the PEgRNA comprises a PBS comprising a sequence selected from the group consisting of sequences: TATCTAGG and TATCTAGGC. In some embodiments, the PEgRNA comprises an editing template comprising a sequence selected from the group consisting of SEQ identifiers: C651-C676 in Table 3C. In some embodiments, the prime editing composition further comprises a ngRNA that comprises a spacer comprising a sequence selected from the group consisting of SEQ identifiers: D136-D155, and D158-D161 in Table 3D. In some embodiments, the PEgRNA comprises an editing template comprising a sequence selected from the group consisting of SEQ ID Nos: 4677-4702 in Table 3C. In some embodiments, the prime editing composition further comprises a ngRNA that comprises a spacer comprising a sequence selected from the group consisting of SEQ ID Nos: 19769-19788, and 19791-19794 in Table 3D.

[0232] In some embodiments, the PEgRNA comprises a spacer comprising a sequence selected from the group consisting of SEQ identifiers: A52-A53 in Table 3A. In some embodiments, the PEgRNA comprises a spacer comprising a sequence selected from the group consisting of SEQ ID Nos: 400-401 in Table 3A. In some embodiments, the PEgRNA comprises a PBS comprising a sequence selected from the group consisting of SEQ identifiers: B235-B243 in Table 3B. In some embodiments, the PEgRNA comprises a PBS comprising a sequence selected from the group consisting of SEQ ID Nos: 1395-1401 in Table 3B. In some embodiments, the PEgRNA comprises a PBS comprising a sequence selected from the group consisting of sequences: CATAGGCT and CATAGGCTT. In some embodiments, the PEgRNA comprises an editing template comprising a sequence selected from the group consisting of SEQ identifiers: C677-C694 in Table 3C. In some embodiments, the prime editing composition further comprises a ngRNA that comprises a spacer comprising a sequence selected from the group consisting of SEQ identifiers: D136-D157, and D161-D169 in Table 3D. In some embodiments, the PEgRNA comprises an editing template comprising a sequence selected from the group consisting of SEQ ID Nos: 4703-4720 in Table 3C. In some embodiments, the prime editing composition further comprises a ngRNA that comprises a spacer comprising a sequence selected from the group consisting of SEQ ID Nos: 19769-19790, and 19794-19802 in Table 3D.

[0233] In some embodiments, the PEgRNA comprises a spacer comprising a sequence selected from the group consisting of SEQ identifiers: A54-A55 in Table 3A. In some embodiments, the PEgRNA comprises a spacer comprising a sequence selected from the group consisting of SEQ ID Nos: 402-403 in Table 3A. In some embodiments, the PEgRNA comprises a PBS comprising a sequence selected from the group consisting of SEQ identifiers: B244-B252 in Table 3B. In some embodiments, the PEgRNA comprises a PBS comprising a sequence selected from the group consisting of SEQ ID Nos: 1402-1408 in Table 3B. In some embodiments, the PEgRNA comprises a PBS comprising a sequence selected from the group consisting of sequences: CATAGGAA and CATAGGAAG. In some embodiments, the PEgRNA comprises an editing template comprising a sequence selected from the group consisting of SEQ identifiers: C695-C730 in Table 3C. In some embodiments, the prime editing composition further comprises a ngRNA that comprises a spacer comprising a sequence selected from the group consisting of SEQ identifiers: D170-D195 in Table 3D. In some embodiments, the PEgRNA comprises an editing template comprising a sequence selected from the group consisting of SEQ ID Nos: 4721-4756 in Table 3C. In some embodiments, the prime editing composition further comprises a ngRNA that comprises a spacer comprising a sequence selected from the group consisting of SEQ ID Nos: 19803-19828 in Table 3D.

[0234] In some embodiments, the PEgRNA comprises a spacer comprising a sequence selected from the group consisting of SEQ identifiers: A56-A57 in Table 3A. In some embodiments, the PEgRNA comprises a spacer comprising a sequence selected from the group consisting of SEQ ID Nos: 404-405 in Table 3A. In some embodiments, the PEgRNA comprises a PBS comprising a sequence selected from the group consisting of SEQ identifiers: B253-B261 in Table 3B. In some embodiments, the PEgRNA comprises a PBS comprising a sequence selected from the group consisting of SEQ ID Nos: 1409-1415 in Table 3B. In some embodiments, the PEgRNA comprises a PBS comprising a sequence selected from the group consisting of sequences: TTGTTATC and TTGTTATCC. In some embodiments, the PEgRNA comprises an editing template comprising a sequence selected from the group consisting of SEQ identifiers: C731-C761 in Table 3C. In some embodiments, the prime editing composition further comprises a ngRNA that comprises a spacer comprising a sequence selected from the group consisting of SEQ identifiers: D172-D190, and D196-D207 in Table 3D. In some embodiments, the PEgRNA comprises an editing template comprising a sequence selected from the group consisting of SEQ ID Nos: 4757-4787 in Table 3C. In some embodiments, the prime editing composition further comprises a ngRNA that comprises a spacer comprising a sequence selected from the group consisting of SEQ ID Nos: 19805-19823, and 19829-19840 in Table 3D.

[0235] In some embodiments, the PEgRNA comprises a spacer comprising a sequence selected from the group consisting of SEQ identifiers: A58-A59 in Table 3A. In some embodiments, the PEgRNA comprises a spacer comprising a sequence selected from the group consisting of SEQ ID Nos: 406-407 in Table 3A. In some embodiments, the PEgRNA comprises a PBS comprising a sequence selected from the group consisting of SEQ identifiers: B262-B270 in Table 3B. In some embodiments, the PEgRNA comprises a PBS comprising a sequence selected from the group consisting of SEQ ID Nos: 1416-1422 in Table 3B. In some embodiments, the PEgRNA comprises a PBS comprising a sequence selected from the group consisting of sequences: CGATTTAT and CGATTTATC. In some embodiments, the PEgRNA comprises an editing template comprising a sequence selected from the group consisting of SEQ identifiers: C762-C823 in Table 3C. In some embodiments, the prime editing composition further comprises a ngRNA that comprises a spacer comprising a sequence selected from the group consisting of SEQ identifiers: D208-D226 in Table 3D. In some embodiments, the PEgRNA comprises an editing template comprising a sequence selected from the group consisting of SEQ ID Nos: 4788-4849 in Table 3C. In some embodiments, the prime editing composition further comprises a ngRNA that comprises a spacer comprising a sequence selected from the group consisting of SEQ ID Nos: 19841-19859 in Table 3D.

[0236] In some embodiments, the PEgRNA comprises a spacer comprising a sequence selected from the group consisting of SEQ identifiers: A60-A61 in Table 3A. In some embodiments, the PEgRNA comprises a spacer comprising a sequence selected from the group consisting of SEQ ID Nos: 408-409 in Table 3A. In some embodiments, the PEgRNA comprises a PBS comprising a sequence selected from the group consisting of SEQ identifiers: B271-B279 in Table 3B. In some embodiments, the PEgRNA comprises a PBS comprising a sequence selected from the group consisting of SEQ ID Nos: 1423-1429 in Table 3B. In some embodiments, the PEgRNA comprises a PBS comprising a sequence selected from the group consisting of sequences: CCTTCTCT and CCTTCTCTT. In some embodiments, the PEgRNA comprises an editing template comprising a sequence selected from the group consisting of SEQ identifiers: C824-C835 in Table 3C. In some embodiments, the prime editing composition further comprises a ngRNA that comprises a spacer comprising a sequence selected from the group consisting of SEQ identifiers: D210-D215, D219-D224, and D227-D230 in Table 3D. In some embodiments, the PEgRNA comprises an editing template comprising a sequence selected from the group consisting of SEQ ID Nos: 4850-4861 in Table 3C. In some embodiments, the prime editing composition further comprises a ngRNA that comprises a spacer comprising a sequence selected from the group consisting of SEQ ID Nos: 19843-19848, 19852-19857, and 19860-19863 in Table 3D.

[0237] In some embodiments, the PEgRNA comprises a spacer comprising the sequence of SEQ identifier A62 in Table 3A. In some embodiments, the PEgRNA comprises a spacer comprising the sequence of SEQ ID No 410 in Table 3A. In some embodiments, the PEgRNA comprises a PBS comprising a sequence selected from the group consisting of SEQ identifiers: B280-B288 in Table 3B. In some embodiments, the PEgRNA comprises a PBS comprising a sequence selected from the group consisting of SEQ ID Nos: 1430-1436 in Table 3B. In some embodiments, the PEgRNA comprises a PBS comprising a sequence selected from the group consisting of sequences: GCCTTCTC and GCCTTCTCT. In some embodiments, the PEgRNA comprises an editing template comprising a sequence selected from the group consisting of SEQ identifiers: C836-C842 in Table 3C. In some embodiments, the prime editing composition further comprises a ngRNA that comprises a spacer comprising a sequence selected from the group consisting of SEQ identifiers: D137-D157 in Table 3D. In some embodiments, the PEgRNA comprises an editing template comprising a sequence selected from the group consisting of SEQ ID Nos: 4862-4868 in Table 3C. In some embodiments, the prime editing composition further comprises a ngRNA that comprises a spacer comprising a sequence selected from the group consisting of SEQ ID Nos: 19770-19790 in Table 3D.

[0238] In some embodiments, the PEgRNA comprises a spacer comprising a sequence selected from the group consisting of SEQ ID identifiers: A63-A66 in Table 3A. In some embodiments, the PEgRNA comprises a spacer comprising a sequence selected from the group consisting of SEQ ID Nos: 411-414 in Table 3A. In some embodiments, the PEgRNA comprises a PBS comprising a sequence selected from the group consisting of SEQ identifiers: B289-B297 in Table 3B. In some embodiments, the PEgRNA comprises a PBS comprising a sequence selected from the group consisting of SEQ ID Nos: 1437-1443 in Table 3B. In some embodiments, the PEgRNA comprises a PBS comprising a sequence selected from the group consisting of sequences: TCGCGATT and TCGCGATTT. In some embodiments, the PEgRNA comprises an editing template comprising a sequence selected from the group consisting of SEQ identifiers: C843-C873 in Table 3C. In some embodiments, the prime editing composition further comprises a ngRNA that comprises a spacer comprising a sequence selected from the group consisting of SEQ identifiers: D136-D154, D158-D161, D219, D225, D226, and D231-D247 in Table 3D. In some embodiments, the PEgRNA comprises an editing template comprising a sequence selected from the group consisting of SEQ ID Nos: 4869-4899 in Table 3C. In some embodiments, the prime editing composition further comprises a ngRNA that comprises a spacer comprising a sequence selected from the group consisting of SEQ ID Nos: 19769-19787, 19791-19794, 19852, 19858, 19859, and 19864-19880 in Table 3D.

[0239] In some embodiments, the PEgRNA comprises a spacer comprising a sequence selected from the group consisting of SEQ ID identifiers: A67-A68 in Table 3A. In some embodiments, the PEgRNA comprises a spacer comprising a sequence selected from the group consisting of SEQ ID Nos: 415-416 in Table 3A. In some embodiments, the PEgRNA comprises a PBS comprising a sequence selected from the group consisting of SEQ identifiers: B298-B306 in Table 3B. In some embodiments, the PEgRNA comprises a PBS comprising a sequence selected from the group consisting of SEQ ID Nos: 1444-1450 in Table 3B. In some embodiments, the PEgRNA comprises a PBS comprising a sequence selected from the group consisting of sequences: TTATCCGG and TTATCCGGG. In some embodiments, the PEgRNA comprises an editing template comprising a sequence selected from the group consisting of SEQ identifiers: C874-C901 in Table 3C. In some embodiments, the prime editing composition further comprises a ngRNA that comprises a spacer comprising a sequence selected from the group consisting of SEQ identifiers: D170-D190, D196-D207, and 248-D249 of Table 3D. In some embodiments, the PEgRNA comprises an editing template comprising a sequence selected from the group consisting of SEQ ID Nos: 4900-4927 in Table 3C. In some embodiments, the prime editing composition further comprises a ngRNA that comprises a spacer comprising a sequence selected from the group consisting of SEQ ID Nos: 19803-19823, 19829-19840, and 19881-19882 of Table 3D.

[0240] In some embodiments, the PEgRNA comprises a spacer comprising a sequence selected from the group consisting of SEQ ID identifiers: A69-A70 of Table 3A. In some embodiments, the PEgRNA comprises a spacer comprising a sequence selected from the group consisting of SEQ ID Nos: 417-418 of Table 3A. In some embodiments, the PEgRNA comprises a PBS comprising a sequence selected from the group consisting of SEQ identifiers: B307-B315 of Table 3B. In some embodiments, the PEgRNA comprises a PBS comprising a sequence selected from the group consisting of SEQ ID Nos: 1451-1457 of Table 3B. In some embodiments, the PEgRNA comprises a PBS comprising a sequence selected from the group consisting of sequences: TTTATCTA and TTTATCTAG. In some embodiments, the PEgRNA comprises an editing template comprising a sequence selected from the group consisting of SEQ identifiers: C902-C929 of Table 3C. In some embodiments, the prime editing composition further comprises a ngRNA that comprises a spacer comprising a sequence selected from the group consisting of SEQ identifiers: D136-D155, D158-D169 of Table 3D. In some embodiments, the PEgRNA comprises an editing template comprising a sequence selected from the group consisting of SEQ ID Nos: 4928-4955 of Table 3C. In some embodiments, the prime editing composition further comprises a ngRNA that comprises a spacer comprising a sequence selected from the group consisting of SEQ ID Nos: 19769-19788, 19791-19802 of Table 3D.

[0241] In some embodiments, the PEgRNA comprises a spacer comprising a sequence selected from the group consisting of SEQ ID identifiers: A71-A72 of Table 3A. In some embodiments, the PEgRNA comprises a spacer comprising a sequence selected from the group consisting of SEQ ID Nos: 419-420 of Table 3A. In some embodiments, the PEgRNA comprises a PBS comprising a sequence selected from the group consisting of SEQ identifiers: B316-B324 of Table 3B. In some embodiments, the PEgRNA comprises a PBS comprising a sequence selected from the group consisting of SEQ ID Nos: 1458-1464 of Table 3B. In some embodiments, the PEgRNA comprises a PBS comprising a sequence selected from the group consisting of sequences: ATCGCGAT and ATCGCGATT. In some embodiments, the PEgRNA comprises an editing template comprising a sequence selected from the group consisting of SEQ identifiers: C930-C960 of Table 3C. In some embodiments, the prime editing composition further comprises a ngRNA that comprises a spacer comprising a sequence selected from the group consisting of SEQ identifiers: D136-D154, D158-D161, D236-D240, and D250 of Table 3D. In some embodiments, the PEgRNA comprises an editing template comprising a sequence selected from the group consisting of SEQ ID Nos: 4956-4986 of Table 3C. In some embodiments, the prime editing composition further comprises a ngRNA that comprises a spacer comprising a sequence selected from the group consisting of SEQ ID Nos: 19769-19787, 19791-19794, 19869-19873, and 19883 of Table 3D.

[0242] In some embodiments, the PEgRNA comprises a spacer comprising the sequence of SEQ identifier: A73 of Table 3A. In some embodiments, the PEgRNA comprises a spacer comprising the sequence of SEQ ID No: 421 of Table 3A. In some embodiments, the PEgRNA comprises a PBS comprising a sequence selected from the group consisting of SEQ identifiers: B325-B333 of Table 3B. In some embodiments, the PEgRNA comprises a PBS comprising a sequence selected from the group consisting of SEQ ID Nos: 1465-1471 of Table 3B. In some embodiments, the PEgRNA comprises a PBS comprising a sequence selected from the group consisting of sequences: TATCGCGA and TATCGCGAT. In some embodiments, the PEgRNA comprises an editing template comprising a sequence selected from the group consisting of SEQ identifiers: C961-C991 of Table 3C. In some embodiments, the prime editing composition further comprises a ngRNA that comprises a spacer comprising a sequence selected from the group consisting of SEQ identifiers: D136-D154, D158-D161, and D250 of Table 3D. In some embodiments, the PEgRNA comprises an editing template comprising a sequence selected from the group consisting of SEQ ID Nos: 4987-5017 of Table 3C. In some embodiments, the prime editing composition further comprises a ngRNA that comprises a spacer comprising a sequence selected from the group consisting of SEQ ID Nos: 19769-19787, 19791-19794, and 19883 of Table 3D.

[0243] In some embodiments, the PEgRNA comprises a spacer comprising a sequence selected from the group consisting of SEQ identifiers: A74-A77 of Table 3A. In some embodiments, the PEgRNA comprises a spacer comprising a sequence selected from the group consisting of SEQ ID Nos: 422-425 of Table 3A. In some embodiments, the PEgRNA comprises a PBS comprising a sequence selected from the group consisting of SEQ identifiers: B334-B342 of Table 3B. In some embodiments, the PEgRNA comprises a PBS comprising a sequence selected from the group consisting of SEQ ID Nos: 1472-1478 of Table 3B. In some embodiments, the PEgRNA comprises a PBS comprising a sequence selected from the group consisting of sequences: GTTATCCG and GTTATCCGG. In some embodiments, the PEgRNA comprises an editing template comprising a sequence selected from the group consisting of SEQ identifiers: C992-C1049 of Table 3C. In some embodiments, the prime editing composition further comprises a ngRNA that comprises a spacer comprising a sequence selected from the group consisting of SEQ identifiers: D176, D177, D207, and D251-D290 of Table 3D. In some embodiments, the PEgRNA comprises an editing template comprising a sequence selected from the group consisting of SEQ ID Nos: 5018-5075 of Table 3C. In some embodiments, the prime editing composition further comprises a ngRNA that comprises a spacer comprising a sequence selected from the group consisting of SEQ ID Nos: 19809, 19810, 19840, and 19884-19923 of Table 3D.

[0244] In some embodiments, the PEgRNA comprises a spacer comprising a sequence selected from the group consisting of SEQ identifiers: A78-A79 of Table 3AB. In some embodiments, the PEgRNA comprises a spacer comprising a sequence selected from the group consisting of SEQ ID Nos: 426-427 of Table 3AB. In some embodiments, the PEgRNA comprises a PBS comprising a sequence selected from the group consisting of SEQ identifiers: B343-B351 of Table 3B. In some embodiments, the PEgRNA comprises a PBS comprising a sequence selected from the group consisting of SEQ ID Nos: 1479-1485 of Table 3B. In some embodiments, the PEgRNA comprises a PBS comprising a sequence selected from the group consisting of sequences: TTCTTCCC and TTCTTCCCA. In some embodiments, the PEgRNA comprises an editing template comprising a sequence selected from the group consisting of SEQ identifiers: C1050-C1055 of Table 3C. In some embodiments, the prime editing composition further comprises a ngRNA that comprises a spacer comprising a sequence selected from the group consisting of SEQ identifiers: D251-D 271, and D291-D298 of Table 3D. In some embodiments, the PEgRNA comprises an editing template comprising a sequence selected from the group consisting of SEQ ID Nos: 5076-5081 of Table 3C. In some embodiments, the prime editing composition further comprises a ngRNA that comprises a spacer comprising a sequence selected from the group consisting of SEQ ID Nos: 19884-19904, and 19924-19931 of Table 3D.

[0245] In some embodiments, the PEgRNA comprises a spacer comprising the sequence of SEQ identifier: A80 of Table 3A. In some embodiments, the PEgRNA comprises a spacer comprising the sequence of SEQ ID No: 428 of Table 3A. In some embodiments, the PEgRNA comprises a PBS comprising a sequence selected from the group consisting of SEQ identifiers: B352-B360 of Table 3B. In some embodiments, the PEgRNA comprises a PBS comprising a sequence selected from the group consisting of SEQ ID Nos: 1486-1492 of Table 3B. In some embodiments, the PEgRNA comprises a PBS comprising a sequence selected from the group consisting of sequences: ATTCTTCC and ATTCTTCCC. In some embodiments, the PEgRNA comprises an editing template comprising a sequence selected from the group consisting of SEQ identifiers: C1056-C1059 of Table 3C. In some embodiments, the prime editing composition further comprises a ngRNA that comprises a spacer comprising a sequence selected from the group consisting of SEQ identifiers: D170-D187 of Table 3D. In some embodiments, the PEgRNA comprises an editing template comprising a sequence selected from the group consisting of SEQ ID Nos: 5082-5085 of Table 3C. In some embodiments, the prime editing composition further comprises a ngRNA that comprises a spacer comprising a sequence selected from the group consisting of SEQ ID Nos: 19803-19820 of Table 3D.

[0246] In some embodiments, the PEgRNA comprises a spacer comprising a sequence selected from the group consisting of SEQ identifiers: A81-A82 of Table 3A. In some embodiments, the PEgRNA comprises a spacer comprising a sequence selected from the group consisting of SEQ ID Nos: 429-430 of Table 3A. In some embodiments, the PEgRNA comprises a PBS comprising a sequence selected from the group consisting of SEQ identifiers: B361-B369 of Table 3B. In some embodiments, the PEgRNA comprises a PBS comprising a sequence selected from the group consisting of SEQ ID Nos: 1493-1499 of Table 3B. In some embodiments, the PEgRNA comprises a PBS comprising a sequence selected from the group consisting of sequences: GAAGCTAT and GAAGCTATG. In some embodiments, the PEgRNA comprises an editing template comprising a sequence selected from the group consisting of SEQ identifiers: C1060-C1072 of Table 3C. In some embodiments, the prime editing composition further comprises a ngRNA that comprises a spacer comprising a sequence selected from the group consisting of SEQ identifiers: D170-D188, D196-D202, D248, and D249 of Table 3D. In some embodiments, the PEgRNA comprises an editing template comprising a sequence selected from the group consisting of SEQ ID Nos: 5086-5098 of Table 3C. In some embodiments, the prime editing composition further comprises a ngRNA that comprises a spacer comprising a sequence selected from the group consisting of SEQ ID Nos: 19803-19821, 19829-19835, 19881, and 19882 of Table 3D.

[0247] In some embodiments, the PEgRNA comprises a spacer comprising a sequence selected from the group consisting of SEQ identifiers: A83-A84 of Table 3A. In some embodiments, the PEgRNA comprises a spacer comprising a sequence selected from the group consisting of SEQ ID Nos: 431-432 of Table 3A. In some embodiments, the PEgRNA comprises a PBS comprising a sequence selected from the group consisting of SEQ identifiers: B370-B378 of Table 3B. In some embodiments, the PEgRNA comprises a PBS comprising a sequence selected from the group consisting of SEQ ID Nos: 1500-1506 of Table 3B. In some embodiments, the PEgRNA comprises a PBS comprising a sequence selected from the group consisting of sequences: ATAGGCTT and ATAGGCTTA. In some embodiments, the PEgRNA comprises an editing template comprising a sequence selected from the group consisting of SEQ identifiers: C1073-C1106 of Table 3C. In some embodiments, the prime editing composition further comprises a ngRNA that comprises a spacer comprising a sequence selected from the group consisting of SEQ identifiers: D210-D215, D219, D224, and D227-D230 of Table 3D. In some embodiments, the PEgRNA comprises an editing template comprising a sequence selected from the group consisting of SEQ ID Nos: 5099-5132 of Table 3C. In some embodiments, the prime editing composition further comprises a ngRNA that comprises a spacer comprising a sequence selected from the group consisting of SEQ ID Nos: 19843-19848, 19852, 19857, and 19860-19863 of Table 3D.

[0248] In some embodiments, the PEgRNA comprises a spacer comprising a sequence selected from the group consisting of SEQ identifiers: A85-A87 of Table 3A. In some embodiments, the PEgRNA comprises a spacer comprising a sequence selected from the group consisting of SEQ ID Nos: 433-435 of Table 3A. In some embodiments, the PEgRNA comprises a PBS comprising a sequence selected from the group consisting of SEQ identifiers: B379-B387 of Table 3B. In some embodiments, the PEgRNA comprises a PBS comprising a sequence selected from the group consisting of SEQ ID Nos: 1507-1513 of Table 3B. In some embodiments, the PEgRNA comprises a PBS comprising a sequence selected from the group consisting of sequences: ATAGGAAG and ATAGGAAGC. In some embodiments, the PEgRNA comprises an editing template comprising a sequence selected from the group consisting of SEQ identifiers: C1107-C1123 of Table 3C. In some embodiments, the prime editing composition further comprises a ngRNA that comprises a spacer comprising a sequence selected from the group consisting of SEQ identifiers: D176, D177, D251, D254, D255, D262, D275-D279, D283-D287, D299, and D300 of Table 3D. In some embodiments, the PEgRNA comprises an editing template comprising a sequence selected from the group consisting of SEQ ID Nos: 5133-5149 of Table 3C. In some embodiments, the prime editing composition further comprises a ngRNA that comprises a spacer comprising a sequence selected from the group consisting of SEQ ID Nos: 19809, 19810, 19884, 19887, 19888, 19895, 19908-19912, 19916-19920, 19932, and 19933 of Table 3D.

[0249] In some embodiments, the PEgRNA comprises a spacer comprising a sequence selected from the group consisting of SEQ identifiers: A88-A91 of Table 3A. In some embodiments, the PEgRNA comprises a spacer comprising a sequence selected from the group consisting of SEQ ID Nos: 436-439 of Table 3A. In some embodiments, the PEgRNA comprises a PBS comprising a sequence selected from the group consisting of SEQ identifiers: B388-B396 of Table 3B. In some embodiments, the PEgRNA comprises a PBS comprising a sequence selected from the group consisting of SEQ ID Nos: 1514-1520 of Table 3B. In some embodiments, the PEgRNA comprises a PBS comprising a sequence selected from the group consisting of sequences: CGCGATTT and CGCGATTTA. In some embodiments, the PEgRNA comprises an editing template comprising a sequence selected from the group consisting of SEQ identifiers: C1124-C1185 of Table 3C. In some embodiments, the prime editing composition further comprises a ngRNA that comprises a spacer comprising a sequence selected from the group consisting of SEQ identifiers: D145, D209-D219, D220-D226, D231-D235, D241-D247, and D301-D306 of Table 3D. In some embodiments, the PEgRNA comprises an editing template comprising a sequence selected from the group consisting of SEQ ID Nos: 5150-5211 of Table 3C. In some embodiments, the prime editing composition further comprises a ngRNA that comprises a spacer comprising a sequence selected from the group consisting of SEQ ID Nos: 19778, 19842-19852, 19853-19859, 19864-19868, 19874-19880, and 19934-19939 of Table 3D.

[0250] In some embodiments, the PEgRNA comprises a spacer comprising a sequence selected from the group consisting of SEQ identifiers: A92-A93 of Table 3A. In some embodiments, the PEgRNA comprises a spacer comprising a sequence selected from the group consisting of SEQ ID Nos: 440-441 of Table 3A. In some embodiments, the PEgRNA comprises a PBS comprising a sequence selected from the group consisting of SEQ identifiers: B397-B405 of Table 3B. In some embodiments, the PEgRNA comprises a PBS comprising a sequence selected from the group consisting of SEQ ID Nos: 1521-1527 of Table 3B. In some embodiments, the PEgRNA comprises a PBS comprising a sequence selected from the group consisting of sequences: TGTTATCC and TGTTATCCG. In some embodiments, the PEgRNA comprises an editing template comprising a sequence selected from the group consisting of SEQ identifiers: C1186-C1245 of Table 3C. In some embodiments, the prime editing composition further comprises a ngRNA that comprises a spacer comprising a sequence selected from the group consisting of SEQ identifiers: D171-D195, D204-D207, and D307-D315 of Table 3D. In some embodiments, the PEgRNA comprises an editing template comprising a sequence selected from the group consisting of SEQ ID Nos: 5212-5271 of Table 3C. In some embodiments, the prime editing composition further comprises a ngRNA that comprises a spacer comprising a sequence selected from the group consisting of SEQ ID Nos: 19804-19828, 19837-19840, and 19940-19948 of Table 3D.

[0251] In some embodiments, the PEgRNA comprises a spacer comprising a sequence selected from the group consisting of SEQ identifiers: A94-A95 of Table 3A. In some embodiments, the PEgRNA comprises a spacer comprising a sequence selected from the group consisting of SEQ ID Nos: 442-443 of Table 3A. In some embodiments, the PEgRNA comprises a PBS comprising a sequence selected from the group consisting of SEQ identifiers: B406-B414 of Table 3B. In some embodiments, the PEgRNA comprises a PBS comprising a sequence selected from the group consisting of SEQ ID Nos: 1528-1534 of Table 3B. In some embodiments, the PEgRNA comprises a PBS comprising a sequence selected from the group consisting of sequences: TCATAGGA and TCATAGGAA. In some embodiments, the PEgRNA comprises an editing template comprising a sequence selected from the group consisting of identifiers: C1246-C1264 of Table 3C. In some embodiments, the prime editing composition further comprises a ngRNA that comprises a spacer comprising a sequence selected from the group consisting of SEQ identifiers: D170-D190, D196-D204, D248, and D249 of Table 3D. In some embodiments, the PEgRNA comprises an editing template comprising a sequence selected from the group consisting of SEQ ID Nos: 5272-5290 of Table 3C. In some embodiments, the prime editing composition further comprises a ngRNA that comprises a spacer comprising a sequence selected from the group consisting of SEQ ID Nos: 19803-19823, 19829-19837, 19881, and 19882 of Table 3D.

[0252] In some embodiments, the PEgRNA comprises a spacer comprising a sequence selected from the group consisting of SEQ identifiers: A96-A97 of Table 3A. In some embodiments, the PEgRNA comprises a spacer comprising a sequence selected from the group consisting of SEQ ID Nos: 444-445 of Table 3A. In some embodiments, the PEgRNA comprises a PBS comprising a sequence selected from the group consisting of SEQ identifiers: B415-B423 of Table 3B. In some embodiments, the PEgRNA comprises a PBS comprising a sequence selected from the group consisting of SEQ ID Nos: 1535-1541 of Table 3B. In some embodiments, the PEgRNA comprises a PBS comprising a sequence selected from the group consisting of sequences: TATCCGGG and TATCCGGGT. In some embodiments, the PEgRNA comprises an editing template comprising a sequence selected from the group consisting of SEQ identifiers: C1265-C1318 of Table 3C. In some embodiments, the prime editing composition further comprises a ngRNA that comprises a spacer comprising a sequence selected from the group consisting of SEQ identifiers: D170-D195, D204-D207, and D313 of Table 3D. In some embodiments, the PEgRNA comprises an editing template comprising a sequence selected from the group consisting of SEQ ID Nos: 5291-5344 of Table 3C. In some embodiments, the prime editing composition further comprises a ngRNA that comprises a spacer comprising a sequence selected from the group consisting of SEQ ID Nos: 19803-19828, 19837-19840, and 19946 of Table 3D.

[0253] In some embodiments, the PEgRNA comprises a spacer comprising a sequence selected from the group consisting of SEQ identifiers: A98-A99 of Table 3A. In some embodiments, the PEgRNA comprises a spacer comprising a sequence selected from the group consisting of SEQ ID Nos: 446-447 of Table 3A. In some embodiments, the PEgRNA comprises a PBS comprising a sequence selected from the group consisting of identifiers: B424-B432 of Table 3B. In some embodiments, the PEgRNA comprises a PBS comprising a sequence selected from the group consisting of SEQ ID Nos: 1542-1548 of Table 3B. In some embodiments, the PEgRNA comprises a PBS comprising a sequence selected from the group consisting of sequences: GCGATTTA and GCGATTTAT. In some embodiments, the PEgRNA comprises an editing template comprising a sequence selected from the group consisting of SEQ identifiers: C1319-C1349 of Table 3C. In some embodiments, the prime editing composition further comprises a ngRNA that comprises a spacer comprising a sequence selected from the group consisting of SEQ identifiers: D136-D154, and D158-D168 of Table 3D. In some embodiments, the PEgRNA comprises an editing template comprising a sequence selected from the group consisting of SEQ ID Nos: 5345-5375 of Table 3C. In some embodiments, the prime editing composition further comprises a ngRNA that comprises a spacer comprising a sequence selected from the group consisting of SEQ ID Nos: 19769-19787, and 19791-19801 of Table 3D.

[0254] In some embodiments, the PEgRNA comprises a spacer comprising the sequence of SEQ identifier: A100 of table 3A. In some embodiments, the PEgRNA comprises a spacer comprising the sequence of SEQ ID No: 448 of table 3A. In some embodiments, the PEgRNA comprises a PBS comprising a sequence selected from the group consisting of SEQ identifiers: B433-B441 of Table 3B. In some embodiments, the PEgRNA comprises a PBS comprising a sequence selected from the group consisting of SEQ ID Nos: 1549-1555 of Table 3B. In some embodiments, the PEgRNA comprises a PBS comprising a sequence selected from the group consisting of sequences: TCTTTATT and TCTTTATTG. In some embodiments, the PEgRNA comprises an editing template comprising the sequence selected of identifier: C1350 of table 3C. In some embodiments, the prime editing composition further comprises a ngRNA that comprises a spacer comprising a sequence selected from the group consisting of SEQ identifiers: D137-D157 of Table 3D. In some embodiments, the PEgRNA comprises an editing template comprising the sequence selected of SEQ ID No: 5376 of table 3C. In some embodiments, the prime editing composition further comprises a ngRNA that comprises a spacer comprising a sequence selected from the group consisting of SEQ ID Nos: 19770-19790 of Table 3D.

[0255] In some embodiments, the PEgRNA comprises a spacer comprising a sequence selected from the group consisting of SEQ identifiers: A101-A104 of Table 3A. In some embodiments, the PEgRNA comprises a spacer comprising a sequence selected from the group consisting of SEQ ID Nos: 449-452 of Table 3A. In some embodiments, the PEgRNA comprises a PBS comprising a sequence selected from the group consisting of SEQ identifiers: B442-B450 of Table 3B. In some embodiments, the PEgRNA comprises a PBS comprising a sequence selected from the group consisting of SEQ ID Nos: 1556-1562 of Table 3B. In some embodiments, the PEgRNA comprises a PBS comprising a sequence selected from the group consisting of sequences: ATCCGGGT and ATCCGGGTC. In some embodiments, the PEgRNA comprises an editing template comprising a sequence selected from the group consisting of SEQ identifiers: C1351-C1402 of Table 3C. In some embodiments, the prime editing composition further comprises a ngRNA that comprises a spacer comprising a sequence selected from the group consisting of SEQ identifiers: D176, D177, D251-D259, D261, D262, D264-D272, D274-D280, D283-D288, and D322-D325 of Table 3D. In some embodiments, the PEgRNA comprises an editing template comprising a sequence selected from the group consisting of SEQ ID Nos: 5377-5428 of Table 3C. In some embodiments, the prime editing composition further comprises a ngRNA that comprises a spacer comprising a sequence selected from the group consisting of SEQ ID Nos: 19809, 19810, 19884-19892, 19894, 19895, 19897-19905, 19907-19913, 19916-19921, and 19955-19958 of Table 3D.

[0256] In some embodiments, the PEgRNA comprises a spacer comprising the sequence of SEQ identifier: A50 of Table 3A. In some embodiments, the PEgRNA comprises a spacer comprising the sequence of SEQ ID No: 398 of Table 3A. In some embodiments, the PEgRNA comprises a PBS comprising a sequence selected from the group consisting of SEQ identifiers: B217-B225 of Table 3B. In some embodiments, the PEgRNA comprises a PBS comprising a sequence selected from the group consisting of SEQ ID Nos: 1381-1387 of Table 3B. In some embodiments, the PEgRNA comprises a PBS comprising a sequence selected from the group consisting of sequences: GCTTATGC and GCTTATGCC. In some embodiments, the PEgRNA comprises an editing template comprising a sequence selected from the group consisting of SEQ identifiers: C638-C650 of Table 3C. In some embodiments, the prime editing composition further comprises a ngRNA that comprises a spacer comprising a sequence selected from the group consisting of SEQ identifiers: D136-D157 of Table 3D. In some embodiments, the PEgRNA comprises an editing template comprising a sequence selected from the group consisting of SEQ ID Nos: 4664-4676 of Table 3C. In some embodiments, the prime editing composition further comprises a ngRNA that comprises a spacer comprising a sequence selected from the group consisting of SEQ ID Nos: 19769-19790 of Table 3D.

[0257] In some embodiments, the PEgRNA comprises a spacer comprising the of SEQ identifier: A51 of Table 3A. In some embodiments, the PEgRNA comprises a spacer comprising the of SEQ ID No: 399 of Table 3A. In some embodiments, the PEgRNA comprises a PBS comprising a sequence selected from the group consisting of SEQ identifiers: B226-B234 of Table 3B. In some embodiments, the PEgRNA comprises a PBS comprising a sequence selected from the group consisting of SEQ ID Nos: 1388-1394 of Table 3B. In some embodiments, the PEgRNA comprises a PBS comprising a sequence selected from the group consisting of sequences: TATCTAGG and TATCTAGGC. In some embodiments, the PEgRNA comprises an editing template comprising a sequence selected from the group consisting of SEQ identifiers: C651-C676 of Table 3C. In some embodiments, the prime editing composition further comprises a ngRNA that comprises a spacer comprising a sequence selected from the group consisting of SEQ identifiers: D136-D155, and D158-D 161 of Table 3D. In some embodiments, the PEgRNA comprises an editing template comprising a sequence selected from the group consisting of SEQ ID Nos: 4677-4702 of Table 3C. In some embodiments, the prime editing composition further comprises a ngRNA that comprises a spacer comprising a sequence selected from the group consisting of SEQ ID Nos: 19769-19788, and 19791-19794 of Table 3D.

[0258] In some embodiments, the PEgRNA comprises a spacer comprising a sequence selected from the group consisting of SEQ identifiers: A52-A53 of Table 3A. In some embodiments, the PEgRNA comprises a spacer comprising a sequence selected from the group consisting of SEQ ID Nos: 400-401 of Table 3A. In some embodiments, the PEgRNA comprises a PBS comprising a sequence selected from the group consisting of SEQ identifiers: B235-B243 of Table 3B. In some embodiments, the PEgRNA comprises a PBS comprising a sequence selected from the group consisting of SEQ ID Nos: 1395-1401 of Table 3B. In some embodiments, the PEgRNA comprises a PBS comprising a sequence selected from the group consisting of sequences: CATAGGCT and CATAGGCTT. In some embodiments, the PEgRNA comprises an editing template comprising a sequence selected from the group consisting of SEQ identifiers: C677-C694 of Table 3C. In some embodiments, the prime editing composition further comprises a ngRNA that comprises a spacer comprising a sequence selected from the group consisting of SEQ identifiers: D136-D157, and D161-D169 of Table 3D. In some embodiments, the PEgRNA comprises an editing template comprising a sequence selected from the group consisting of SEQ ID Nos: 4703-4720 of Table 3C. In some embodiments, the prime editing composition further comprises a ngRNA that comprises a spacer comprising a sequence selected from the group consisting of SEQ ID Nos: 19769-19790, and 19794-19802 of Table 3D.

[0259] In some embodiments, the PEgRNA comprises a spacer comprising a sequence selected from the group consisting of SEQ identifiers: A54-A55 of Table 3A. In some embodiments, the PEgRNA comprises a spacer comprising a sequence selected from the group consisting of SEQ ID Nos: 402-403 of Table 3A. In some embodiments, the PEgRNA comprises a PBS comprising a sequence selected from the group consisting of SEQ identifiers: B244-B252 of Table 3B. In some embodiments, the PEgRNA comprises a PBS comprising a sequence selected from the group consisting of SEQ ID Nos: 1402-1408 of Table 3B. In some embodiments, the PEgRNA comprises a PBS comprising a sequence selected from the group consisting of sequences: CATAGGAA and CATAGGAAG. In some embodiments, the PEgRNA comprises an editing template comprising a sequence selected from the group consisting of SEQ identifiers: C695-C730 of Table 3C. In some embodiments, the prime editing composition further comprises a ngRNA that comprises a spacer comprising a sequence selected from the group consisting of SEQ identifiers: D170-D195 of Table 3D. In some embodiments, the PEgRNA comprises an editing template comprising a sequence selected from the group consisting of SEQ ID Nos: 4721-4756 of Table 3C. In some embodiments, the prime editing composition further comprises a ngRNA that comprises a spacer comprising a sequence selected from the group consisting of SEQ ID Nos: 19803-19828 of Table 3D.

[0260] In some embodiments, the PEgRNA comprises a spacer comprising a sequence selected from the group consisting of SEQ identifiers: A56-A57 of Table 3A. In some embodiments, the PEgRNA comprises a spacer comprising a sequence selected from the group consisting of SEQ ID Nos: 404-405 of Table 3A. In some embodiments, the PEgRNA comprises a PBS comprising a sequence selected from the group consisting of SEQ identifiers: B253-B261 of Table 3B. In some embodiments, the PEgRNA comprises a PBS comprising a sequence selected from the group consisting of SEQ ID Nos: 1409-1415 of Table 3B. In some embodiments, the PEgRNA comprises a PBS comprising a sequence selected from the group consisting of sequences: TTGTTATC and TTGTTATCC. In some embodiments, the PEgRNA comprises an editing template comprising a sequence selected from the group consisting of SEQ identifiers: C731-C761 of Table 3C. In some embodiments, the prime editing composition further comprises a ngRNA that comprises a spacer comprising a sequence selected from the group consisting of SEQ identifiers: D172-D190, and D196-D207 of Table 3D. In some embodiments, the PEgRNA comprises an editing template comprising a sequence selected from the group consisting of SEQ ID Nos: 4757-4787 of Table 3C. In some embodiments, the prime editing composition further comprises a ngRNA that comprises a spacer comprising a sequence selected from the group consisting of SEQ ID Nos: 19805-19824, and 19829-19840 of Table 3D.

[0261] In some embodiments, the PEgRNA comprises a spacer comprising a sequence selected from the group consisting of SEQ identifiers: A58, A59, A105, and A106 of Table 3A. In some embodiments, the PEgRNA comprises a spacer comprising a sequence selected from the group consisting of SEQ identifiers: 406, 407, 453, and 454 of Table 3A. In some embodiments, the PEgRNA comprises a PBS comprising a sequence selected from the group consisting of SEQ identifiers: B262-B270 of Table 3B. In some embodiments, the PEgRNA comprises a PBS comprising a sequence selected from the group consisting of SEQ ID Nos: 1416-1422 of Table 3B. In some embodiments, the PEgRNA comprises a PBS comprising a sequence selected from the group consisting of sequences: CGATTTAT and CGATTTATC. In some embodiments, the PEgRNA comprises an editing template comprising a sequence selected from the group consisting of SEQ identifiers: C762-C823 of Table 3C. In some embodiments, the prime editing composition further comprises a ngRNA that comprises a spacer comprising a sequence selected from the group consisting of SEQ identifiers: D145, D208-D226, D301, D302, D304, and D305 of Table 3D. In some embodiments, the PEgRNA comprises an editing template comprising a sequence selected from the group consisting of SEQ ID Nos: 4788-4849 of Table 3C. In some embodiments, the prime editing composition further comprises a ngRNA that comprises a spacer comprising a sequence selected from the group consisting of SEQ ID Nos: 19778, 19841-19859, 19934, 19935, 19937, and 19938 of Table 3D.

[0262] In some embodiments, the PEgRNA comprises a spacer comprising a sequence selected from the group consisting of SEQ identifiers: A60-A61 of Table 3A. In some embodiments, the PEgRNA comprises a spacer comprising a sequence selected from the group consisting of SEQ ID Nos: 408-409 of Table 3A. In some embodiments, the PEgRNA comprises a PBS comprising a sequence selected from the group consisting of SEQ identifiers: B271-B279 of Table 3B. In some embodiments, the PEgRNA comprises a PBS comprising a sequence selected from the group consisting of SEQ ID Nos: 1423-1429 of Table 3B. In some embodiments, the PEgRNA comprises a PBS comprising a sequence selected from the group consisting of sequences: CCTTCTCT and CCTTCTCTT. In some embodiments, the PEgRNA comprises an editing template comprising a sequence selected from the group consisting of SEQ identifiers: C824-C835 of Table 3C. In some embodiments, the prime editing composition further comprises a ngRNA that comprises a spacer comprising a sequence selected from the group consisting of SEQ identifiers: D210-D215, D219-D224, and D227-D230 of Table 3D. In some embodiments, the PEgRNA comprises an editing template comprising a sequence selected from the group consisting of SEQ ID Nos: 4850-4861 of Table 3C. In some embodiments, the prime editing composition further comprises a ngRNA that comprises a spacer comprising a sequence selected from the group consisting of SEQ ID Nos: 19843-19848, 19852-19857, and 19860-19863 of Table 3D.

[0263] In some embodiments, the PEgRNA comprises a spacer comprising the sequence of SEQ identifier: A62 of Table 3A. In some embodiments, the PEgRNA comprises a spacer comprising the sequence of SEQ ID No: 410 of Table 3A. In some embodiments, the PEgRNA comprises a PBS comprising a sequence selected from the group consisting of SEQ identifiers: B280-B288 of Table 3B. In some embodiments, the PEgRNA comprises a PBS comprising a sequence selected from the group consisting of SEQ ID Nos: 1430-1436 of Table 3B. In some embodiments, the PEgRNA comprises a PBS comprising a sequence selected from the group consisting of sequences: GCCTTCTC and GCCTTCTCT. In some embodiments, the PEgRNA comprises an editing template comprising a sequence selected from the group consisting of SEQ identifiers: C836-C842 of Table 3C. In some embodiments, the prime editing composition further comprises a ngRNA that comprises a spacer comprising a sequence selected from the group consisting of SEQ identifiers: D137-D157 of Table 3D. In some embodiments, the PEgRNA comprises an editing template comprising a sequence selected from the group consisting of SEQ ID Nos: 4862-4868 of Table 3C. In some embodiments, the prime editing composition further comprises a ngRNA that comprises a spacer comprising a sequence selected from the group consisting of SEQ ID Nos: 19770-19790 of Table 3D.

[0264] In some embodiments, the PEgRNA comprises a spacer comprising a sequence selected from the group consisting of SEQ identifiers: A67-A68 of Table 3A. In some embodiments, the PEgRNA comprises a spacer comprising a sequence selected from the group consisting of SEQ ID Nos: 415-416 of Table 3A. In some embodiments, the PEgRNA comprises a PBS comprising a sequence selected from the group consisting of SEQ identifiers: B298-B306 of Table 3B. In some embodiments, the PEgRNA comprises a PBS comprising a sequence selected from the group consisting of SEQ ID Nos: 1444-1450 of Table 3B. In some embodiments, the PEgRNA comprises a PBS comprising a sequence selected from the group consisting of sequences: TTATCCGG and TTATCCGGG. In some embodiments, the PEgRNA comprises an editing template comprising a sequence selected from the group consisting of SEQ identifiers: C874-C901 of Table 3C. In some embodiments, the prime editing composition further comprises a ngRNA that comprises a spacer comprising a sequence selected from the group consisting of SEQ identifiers: D170-D190, D196-D207, D248, and D249 of Table 3D. In some embodiments, the PEgRNA comprises an editing template comprising a sequence selected from the group consisting of SEQ ID Nos: 4900-4927 of Table 3C. In some embodiments, the prime editing composition further comprises a ngRNA that comprises a spacer comprising a sequence selected from the group consisting of SEQ ID Nos: 19803-19823, 19829-19840, 19881, and 19882 of Table 3D.

[0265] In some embodiments, the PEgRNA comprises a spacer comprising a sequence selected from the group consisting of SEQ identifiers: A69-A70 of Table 3A. In some embodiments, the PEgRNA comprises a spacer comprising a sequence selected from the group consisting of SEQ ID Nos: 417-418 of Table 3A. In some embodiments, the PEgRNA comprises a PBS comprising a sequence selected from the group consisting of SEQ identifiers: B307-B315 of Table 3B. In some embodiments, the PEgRNA comprises a PBS comprising a sequence selected from the group consisting of SEQ ID Nos: 1451-1457 of Table 3B. In some embodiments, the PEgRNA comprises a PBS comprising a sequence selected from the group consisting of sequences: TTTATCTA and TTTATCTAG. In some embodiments, the PEgRNA comprises an editing template comprising a sequence selected from the group consisting of SEQ identifiers: C902-C929 of Table 3C. In some embodiments, the prime editing composition further comprises a ngRNA that comprises a spacer comprising a sequence selected from the group consisting of SEQ identifiers: D136-D155, and D158-D169 of Table 3D. In some embodiments, the PEgRNA comprises an editing template comprising a sequence selected from the group consisting of SEQ ID Nos: 4928-4955 of Table 3C. In some embodiments, the prime editing composition further comprises a ngRNA that comprises a spacer comprising a sequence selected from the group consisting of SEQ ID Nos: 19769-19788, and 19791-19802 of Table 3D.

[0266] In some embodiments, the PEgRNA comprises a spacer comprising the sequence of SEQ identifier: A73 of Table 3A. In some embodiments, the PEgRNA comprises a spacer comprising the sequence of SEQ ID No: 421 of Table 3A. In some embodiments, the PEgRNA comprises a PBS comprising a sequence selected from the group consisting of SEQ identifiers: B325-B333 of Table 3B. In some embodiments, the PEgRNA comprises a PBS comprising a sequence selected from the group consisting of SEQ ID Nos: 1465-1471 of Table 3B. In some embodiments, the PEgRNA comprises a PBS comprising a sequence selected from the group consisting of sequences: TATCGCGA and TATCGCGA. In some embodiments, the PEgRNA comprises an editing template comprising a sequence selected from the group consisting of SEQ identifiers: C961-C991 of Table 3C. In some embodiments, the prime editing composition further comprises a ngRNA that comprises a spacer comprising a sequence selected from the group consisting of SEQ identifiers: D136-D154, D158-D161 and D250 of Table 3D. In some embodiments, the PEgRNA comprises an editing template comprising a sequence selected from the group consisting of SEQ ID Nos: 4987-5017 of Table 3C. In some embodiments, the prime editing composition further comprises a ngRNA that comprises a spacer comprising a sequence selected from the group consisting of SEQ ID Nos: 19769-19787, 19791-19794 and 19883 of Table 3D.

[0267] In some embodiments, the PEgRNA comprises a spacer comprising a sequence selected from the group consisting of SEQ identifiers: A74-A77 of Table 3A. In some embodiments, the PEgRNA comprises a spacer comprising a sequence selected from the group consisting of SEQ ID Nos: 422-425 of Table 3A. In some embodiments, the PEgRNA comprises a PBS comprising a sequence selected from the group consisting of SEQ identifiers: B334-B342 of Table 3B. In some embodiments, the PEgRNA comprises a PBS comprising a sequence selected from the group consisting of SEQ ID Nos: 1472-1478 of Table 3B. In some embodiments, the PEgRNA comprises a PBS comprising a sequence selected from the group consisting of sequences: GTTATCCG and GTTATCCGG. In some embodiments, the PEgRNA comprises an editing template comprising a sequence selected from the group consisting of SEQ identifiers: C992-C1049 of Table 3C. In some embodiments, the prime editing composition further comprises a ngRNA that comprises a spacer comprising a sequence selected from the group consisting of SEQ identifiers: D176, D177, D207, and D251-D290 of Table 3D. In some embodiments, the PEgRNA comprises an editing template comprising a sequence selected from the group consisting of SEQ ID Nos: 5018-5075 of Table 3C. In some embodiments, the prime editing composition further comprises a ngRNA that comprises a spacer comprising a sequence selected from the group consisting of SEQ ID Nos: 19809, 19810, 19840, and 19884-19923 of Table 3D.

[0268] In some embodiments, the PEgRNA comprises a spacer comprising a sequence selected from the group consisting of SEQ identifiers: A78-A79 of Table 3A. In some embodiments, the PEgRNA comprises a spacer comprising a sequence selected from the group consisting of SEQ ID Nos: 426-427 of Table 3A. In some embodiments, the PEgRNA comprises a PBS comprising a sequence selected from the group consisting of SEQ identifiers: B343-B351 of Table 3B. In some embodiments, the PEgRNA comprises a PBS comprising a sequence selected from the group consisting of SEQ ID Nos: 1479-1485 of Table 3B. In some embodiments, the PEgRNA comprises a PBS comprising a sequence selected from the group consisting of sequences: TTCTTCCC and TTCTTCCCA. In some embodiments, the PEgRNA comprises an editing template comprising a sequence selected from the group consisting of SEQ identifiers: C1050-C1055 of Table 3C. In some embodiments, the prime editing composition further comprises a ngRNA that comprises a spacer comprising a sequence selected from the group consisting of SEQ identifiers: D251-D258, D264-D271, and D291-D298 of Table 3D. In some embodiments, the PEgRNA comprises an editing template comprising a sequence selected from the group consisting of SEQ ID Nos: 5076-5081 of Table 3C. In some embodiments, the prime editing composition further comprises a ngRNA that comprises a spacer comprising a sequence selected from the group consisting of SEQ ID Nos: 19884-19891, 19897-19904, and 19924-19931 of Table 3D.

[0269] In some embodiments, the PEgRNA comprises a spacer comprising the sequence of SEQ identifiers: A80 of Table 3A. In some embodiments, the PEgRNA comprises a spacer comprising the sequence of SEQ ID Nos: 428 of Table 3A. In some embodiments, the PEgRNA comprises a PBS comprising a sequence selected from the group consisting of SEQ identifiers: B352-B360 of Table 3B. In some embodiments, the PEgRNA comprises a PBS comprising a sequence selected from the group consisting of SEQ ID Nos: 1486-1492 of Table 3B. In some embodiments, the PEgRNA comprises a PBS comprising a sequence selected from the group consisting of sequences: ATTCTTCC and ATTCTTCCC. In some embodiments, the PEgRNA comprises an editing template comprising a sequence selected from the group consisting of SEQ identifiers: C1056-C1059 of Table 3C. In some embodiments, the prime editing composition further comprises a ngRNA that comprises a spacer comprising a sequence selected from the group consisting of SEQ identifiers: D170-D187 of Table 3D. In some embodiments, the PEgRNA comprises an editing template comprising a sequence selected from the group consisting of SEQ ID Nos: 5082-5085 of Table 3C. In some embodiments, the prime editing composition further comprises a ngRNA that comprises a spacer comprising a sequence selected from the group consisting of SEQ ID Nos: 19803-19820 of Table 3D.

[0270] In some embodiments, the PEgRNA comprises a spacer comprising a sequence selected from the group consisting of SEQ identifiers: A81-A82 of Table 3A. In some embodiments, the PEgRNA comprises a spacer comprising a sequence selected from the group consisting of SEQ ID Nos: 429-430 of Table 3A. In some embodiments, the PEgRNA comprises a PBS comprising a sequence selected from the group consisting of SEQ identifiers: B361-B369 of Table 3B. In some embodiments, the PEgRNA comprises a PBS comprising a sequence selected from the group consisting of SEQ ID Nos: 1493-1499 of Table 3B. In some embodiments, the PEgRNA comprises a PBS comprising a sequence selected from the group consisting of sequences: GAAGCTAT and GAAGCTATG. In some embodiments, the PEgRNA comprises an editing template comprising a sequence selected from the group consisting of SEQ identifiers: C1060-C1072 of Table 3. In some embodiments, the prime editing composition further comprises a ngRNA that comprises a spacer comprising a sequence selected from the group consisting of SEQ identifiers: D170-D188, D196-D202, D248, and D249 of Table 3D. In some embodiments, the PEgRNA comprises an editing template comprising a sequence selected from the group consisting of SEQ ID Nos: 5086-5098 of Table 3. In some embodiments, the prime editing composition further comprises a ngRNA that comprises a spacer comprising a sequence selected from the group consisting of SEQ ID Nos: 19803-19821, 19829-19835, 19881, and 19882 of Table 3D.

[0271] In some embodiments, the PEgRNA comprises a spacer comprising a sequence selected from the group consisting of SEQ identifiers: A83-A84 of Table 3A. In some embodiments, the PEgRNA comprises a spacer comprising a sequence selected from the group consisting of SEQ ID Nos: 431-432 of Table 3A. In some embodiments, the PEgRNA comprises a PBS comprising a sequence selected from the group consisting of SEQ identifiers: B370-B378 of Table 3B. In some embodiments, the PEgRNA comprises a PBS comprising a sequence selected from the group consisting of SEQ ID Nos: 1500-1506 of Table 3B. In some embodiments, the PEgRNA comprises a PBS comprising a sequence selected from the group consisting of sequences: ATAGGCTT and ATAGGCTTA. In some embodiments, the PEgRNA comprises an editing template comprising a sequence selected from the group consisting of SEQ identifiers: C1073-C1106 of Table 3C. In some embodiments, the prime editing composition further comprises a ngRNA that comprises a spacer comprising a sequence selected from the group consisting of SEQ identifiers: D210-D215, D219-D224, and D227-D230 of Table 3D. In some embodiments, the PEgRNA comprises an editing template comprising a sequence selected from the group consisting of SEQ ID Nos: 5099-5132 of Table 3C. In some embodiments, the prime editing composition further comprises a ngRNA that comprises a spacer comprising a sequence selected from the group consisting of SEQ ID Nos: 19843-19848, 19852-19857, and 19860-19863 of Table 3D.

[0272] In some embodiments, the PEgRNA comprises a spacer comprising a sequence selected from the group consisting of SEQ identifiers: A85-A87 of Table 3A. In some embodiments, the PEgRNA comprises a spacer comprising a sequence selected from the group consisting of SEQ ID Nos: 433-435 of Table 3A. In some embodiments, the PEgRNA comprises a PBS comprising a sequence selected from the group consisting of SEQ identifiers: B379-B387 of Table 3B. In some embodiments, the PEgRNA comprises a PBS comprising a sequence selected from the group consisting of SEQ ID Nos: 1507-1513 of Table 3B. In some embodiments, the PEgRNA comprises a PBS comprising a sequence selected from the group consisting of sequences: ATAGGAAG and ATAGGAAGC. In some embodiments, the PEgRNA comprises an editing template comprising a sequence selected from the group consisting of SEQ identifiers: C1107-C1123 of Table 3C. In some embodiments, the prime editing composition further comprises a ngRNA that comprises a spacer comprising a sequence selected from the group consisting of SEQ identifiers: D176, D177, D251, D254, D255, D262, D275-D279, and D283-D300 of Table 3D. In some embodiments, the PEgRNA comprises an editing template comprising a sequence selected from the group consisting of SEQ ID Nos: 5133-5149 of Table 3C. In some embodiments, the prime editing composition further comprises a ngRNA that comprises a spacer comprising a sequence selected from the group consisting of SEQ ID Nos: 19809, 19810, 19884, 19887, 19888, D262, 19908-19912, and 19916-19933 of Table 3D.

[0273] In some embodiments, the PEgRNA comprises a spacer comprising a sequence selected from the group consisting of SEQ identifiers: A88-A89 of Table 3A. In some embodiments, the PEgRNA comprises a spacer comprising a sequence selected from the group consisting of SEQ ID Nos: 436-437 of Table 3A. In some embodiments, the PEgRNA comprises a PBS comprising a sequence selected from the group consisting of SEQ identifiers: B388-B396 of Table 3B. In some embodiments, the PEgRNA comprises a PBS comprising a sequence selected from the group consisting of SEQ ID Nos: 1514-1520 of Table 3B. In some embodiments, the PEgRNA comprises a PBS comprising a sequence selected from the group consisting of sequences: CGCGATTT and CGCGATTTA. In some embodiments, the PEgRNA comprises an editing template comprising a sequence selected from the group consisting of SEQ identifiers: C1124-C1185 of Table 3C. In some embodiments, the prime editing composition further comprises a ngRNA that comprises a spacer comprising a sequence selected from the group consisting of SEQ identifiers: D209-D216, D219-D226, D303 and D306 of Table 3D. In some embodiments, the PEgRNA comprises an editing template comprising a sequence selected from the group consisting of SEQ ID Nos: 5150-5211 of Table 3C. In some embodiments, the prime editing composition further comprises a ngRNA that comprises a spacer comprising a sequence selected from the group consisting of SEQ ID Nos: 19842-19849, 19852-19859, 19936 and 19939 of Table 3D.

[0274] In some embodiments, the PEgRNA comprises a spacer comprising the sequence of SEQ identifier: A64 of Table 3A. In some embodiments, the PEgRNA comprises a spacer comprising the sequence of SEQ ID No: 412 of Table 3A. In some embodiments, the PEgRNA comprises a PBS comprising a sequence selected from the group consisting of SEQ identifiers: B289-B297 of Table 3B. In some embodiments, the PEgRNA comprises a PBS comprising a sequence selected from the group consisting of SEQ ID Nos: 1437-1443 of Table 3B. In some embodiments, the PEgRNA comprises a PBS comprising a sequence selected from the group consisting of sequences: TCGCGATT and TCGCGATTT. In some embodiments, the PEgRNA comprises an editing template comprising a sequence selected from the group consisting of SEQ identifiers: C843-C873 of Table 3C. In some embodiments, the prime editing composition further comprises a ngRNA that comprises a spacer comprising a sequence selected from the group consisting of SEQ identifiers: D136-D154, and D158-D161 of Table 3D. In some embodiments, the PEgRNA comprises an editing template comprising a sequence selected from the group consisting of SEQ ID Nos: 4869-4899 of Table 3C. In some embodiments, the prime editing composition further comprises a ngRNA that comprises a spacer comprising a sequence selected from the group consisting of SEQ ID Nos: 19769-19787, and 19791-19794 of Table 3D.

[0275] In some embodiments, the PEgRNA comprises a spacer comprising a sequence selected from the group consisting of SEQ identifiers: A92-A93 of Table 3A. In some embodiments, the PEgRNA comprises a spacer comprising a sequence selected from the group consisting of SEQ ID Nos: 440-441 of Table 3A. In some embodiments, the PEgRNA comprises a PBS comprising a sequence selected from the group consisting of SEQ identifiers: B397-B405 of Table 3B. In some embodiments, the PEgRNA comprises a PBS comprising a sequence selected from the group consisting of SEQ ID Nos: 1521-1527 of Table 3B. In some embodiments, the PEgRNA comprises a PBS comprising a sequence selected from the group consisting of sequences: TGTTATCC and TGTTATCCG. In some embodiments, the PEgRNA comprises an editing template comprising a sequence selected from the group consisting of SEQ identifiers: C1186-C1245 of Table 3C. In some embodiments, the prime editing composition further comprises a ngRNA that comprises a spacer comprising a sequence selected from the group consisting of SEQ identifiers: D171-D195, D204-D207, and D307-D315 of Table 3D. In some embodiments, the PEgRNA comprises an editing template comprising a sequence selected from the group consisting of SEQ ID Nos: 5212-5271 of Table 3C. In some embodiments, the prime editing composition further comprises a ngRNA that comprises a spacer comprising a sequence selected from the group consisting of SEQ ID Nos: 19804-19828, 19837-19840, and 19940-19948 of Table 3D.

[0276] In some embodiments, the PEgRNA comprises a spacer comprising a sequence selected from the group consisting of SEQ identifiers: A94-A95 of Table 3A. In some embodiments, the PEgRNA comprises a spacer comprising a sequence selected from the group consisting of SEQ ID Nos: 442-443 of Table 3A. In some embodiments, the PEgRNA comprises a PBS comprising a sequence selected from the group consisting of SEQ identifiers: B406-B414 of Table 3B. In some embodiments, the PEgRNA comprises a PBS comprising a sequence selected from the group consisting of SEQ ID Nos: 1528-1534 of Table 3B. In some embodiments, the PEgRNA comprises a PBS comprising a sequence selected from the group consisting of sequences: TCATAGGA and TCATAGGAA. In some embodiments, the PEgRNA comprises an editing template comprising a sequence selected from the group consisting of SEQ identifiers: C1246-C1264 of Table 3C. In some embodiments, the prime editing composition further comprises a ngRNA that comprises a spacer comprising a sequence selected from the group consisting of SEQ identifiers: D170-D190, D196-D204, D248, and D249 of Table 3D. In some embodiments, the PEgRNA comprises an editing template comprising a sequence selected from the group consisting of SEQ ID Nos: 5272-5290 of Table 3C. In some embodiments, the prime editing composition further comprises a ngRNA that comprises a spacer comprising a sequence selected from the group consisting of SEQ ID Nos: 19803-19823, 19829-19837, 19881, and 19882 of Table 3D.

[0277] In some embodiments, the PEgRNA comprises a spacer comprising a sequence selected from the group consisting of SEQ identifiers: A96-A97 of Table 3A. In some embodiments, the PEgRNA comprises a spacer comprising a sequence selected from the group consisting of SEQ ID Nos: 444-445 of Table 3A. In some embodiments, the PEgRNA comprises a PBS comprising a sequence selected from the group consisting of SEQ identifiers: B415-B423 of Table 3B. In some embodiments, the PEgRNA comprises a PBS comprising a sequence selected from the group consisting of SEQ ID Nos: 1535-1541 of Table 3B. In some embodiments, the PEgRNA comprises a PBS comprising a sequence selected from the group consisting of sequences: TATCCGGG and TATCCGGGT. In some embodiments, the PEgRNA comprises an editing template comprising a sequence selected from the group consisting of SEQ identifiers: C1265-C1318 of Table 3C. In some embodiments, the prime editing composition further comprises a ngRNA that comprises a spacer comprising a sequence selected from the group consisting of SEQ identifiers: D170-D195, D204-D207, and D313-D321 of Table 3D. In some embodiments, the PEgRNA comprises an editing template comprising a sequence selected from the group consisting of SEQ ID Nos: 5291-5344 of Table 3C. In some embodiments, the prime editing composition further comprises a ngRNA that comprises a spacer comprising a sequence selected from the group consisting of SEQ ID Nos: 19803-19828, 19837-19840, and 19946-19954 of Table 3D.

[0278] In some embodiments, the PEgRNA comprises a spacer comprising a sequence selected from the group consisting of SEQ identifiers: A98-A99 of Table 3A. In some embodiments, the PEgRNA comprises a spacer comprising a sequence selected from the group consisting of SEQ ID Nos: 446-447 of Table 3A. In some embodiments, the PEgRNA comprises a PBS comprising a sequence selected from the group consisting of SEQ identifiers: B424-B432 of Table 3B. In some embodiments, the PEgRNA comprises a PBS comprising a sequence selected from the group consisting of SEQ ID Nos: 1542-1548 of Table 3B. In some embodiments, the PEgRNA comprises a PBS comprising a sequence selected from the group consisting of sequences: GCGATTTA and GCGATTTAT. In some embodiments, the PEgRNA comprises an editing template comprising a sequence selected from the group consisting of SEQ identifiers: C1319-C1349 of Table 3C. In some embodiments, the prime editing composition further comprises a ngRNA that comprises a spacer comprising a sequence selected from the group consisting of SEQ identifiers: D136-D154 and D158-D168 of Table 3D. In some embodiments, the PEgRNA comprises an editing template comprising a sequence selected from the group consisting of SEQ ID Nos: 5345-C 5375 of Table 3C. In some embodiments, the prime editing composition further comprises a ngRNA that comprises a spacer comprising a sequence selected from the group consisting of SEQ ID Nos: 19769-19787 and 19791-19801 of Table 3D.

[0279] In some embodiments, the PEgRNA comprises a spacer comprising the sequence of SEQ identifier: A100 of Table 3A. In some embodiments, the PEgRNA comprises a spacer comprising the sequence of SEQ ID No: 448 of Table 3A. In some embodiments, the PEgRNA comprises a PBS comprising a sequence selected from the group consisting of SEQ identifiers: B433-B441 of Table 3B. In some embodiments, the PEgRNA comprises a PBS comprising a sequence selected from the group consisting of SEQ ID Nos: 1549-1555 of Table 3B. In some embodiments, the PEgRNA comprises a PBS comprising a sequence selected from the group consisting of sequences: TCTTTATT and TCTTTATTG. In some embodiments, the PEgRNA comprises an editing template comprising the sequence of SEQ identifier: C1350 of Table 3C. In some embodiments, the prime editing composition further comprises a ngRNA that comprises a spacer comprising a sequence selected from the group consisting of SEQ identifiers: D137-D157 of Table 3D. In some embodiments, the PEgRNA comprises an editing template comprising the sequence of SEQ ID No: 5376 of Table 3C. In some embodiments, the prime editing composition further comprises a ngRNA that comprises a spacer comprising a sequence selected from the group consisting of SEQ ID Nos: 19770-19790 of Table 3D.

[0280] In some embodiments, the PEgRNA comprises a spacer comprising a sequence selected from the group consisting of SEQ identifiers: A101-A104 of Table 3A. In some embodiments, the PEgRNA comprises a spacer comprising a sequence selected from the group consisting of SEQ ID Nos: 449-452 of Table 3A. In some embodiments, the PEgRNA comprises a PBS comprising a sequence selected from the group consisting of SEQ identifiers: B442-B450 of Table 3B. In some embodiments, the PEgRNA comprises a PBS comprising a sequence selected from the group consisting of SEQ ID Nos: 1556-1562 of Table 3B. In some embodiments, the PEgRNA comprises a PBS comprising a sequence selected from the group consisting of sequences: ATCCGGGT and ATCCGGGTC. In some embodiments, the PEgRNA comprises an editing template comprising a sequence selected from the group consisting of SEQ identifiers: C1351-C1402 of Table 3C. In some embodiments, the prime editing composition further comprises a ngRNA that comprises a spacer comprising a sequence selected from the group consisting of SEQ identifiers: D176, D177, D251-D259, D261-D262, D264-D280, D283-D288, and D322-D325 of Table 3D. In some embodiments, the PEgRNA comprises an editing template comprising a sequence selected from the group consisting of SEQ ID Nos: 5377-5428 of Table 3C. In some embodiments, the prime editing composition further comprises a ngRNA that comprises a spacer comprising a sequence selected from the group consisting of SEQ ID Nos: 19809, D177, 19884-19892, 19894-19895, 19897-19913, 19916-19921, and 19955-19958 of Table 3D.

[0281] In some embodiments, the PEgRNA comprises a spacer comprising the sequence of SEQ identifier: A50 of Table 3A. In some embodiments, the PEgRNA comprises a spacer comprising the sequence of SEQ ID No: 398 of Table 3A. In some embodiments, the PEgRNA comprises a PBS comprising a sequence selected from the group consisting of SEQ identifiers: B217-B225 of Table 3B. In some embodiments, the PEgRNA comprises a PBS comprising a sequence selected from the group consisting of SEQ ID Nos: 1381-1387 of Table 3B. In some embodiments, the PEgRNA comprises a PBS comprising a sequence selected from the group consisting of sequences: GCTTATGC and GCTTATGCC. In some embodiments, the PEgRNA comprises an editing template comprising a sequence selected from the group consisting of SEQ identifiers: C638-C650 of Table 3C. In some embodiments, the prime editing composition further comprises a ngRNA that comprises a spacer comprising a sequence selected from the group consisting of SEQ identifiers: D136-D157 of Table 3D. In some embodiments, the PEgRNA comprises an editing template comprising a sequence selected from the group consisting of SEQ ID Nos: 4664-4676 of Table 3C. In some embodiments, the prime editing composition further comprises a ngRNA that comprises a spacer comprising a sequence selected from the group consisting of SEQ ID Nos: 19769-19790 of Table 3D.

[0282] In some embodiments, the PEgRNA comprises a spacer comprising the of SEQ identifier: A51 of Table 3A. In some embodiments, the PEgRNA comprises a spacer comprising the of SEQ ID No: 399 of Table 3A. In some embodiments, the PEgRNA comprises a PBS comprising a sequence selected from the group consisting of SEQ identifiers: B226-B234 of Table 3B. In some embodiments, the PEgRNA comprises a PBS comprising a sequence selected from the group consisting of SEQ ID Nos: 1388-1394 of Table 3B. In some embodiments, the PEgRNA comprises a PBS comprising a sequence selected from the group consisting of sequence: TATCTAGG and TATCTAGGC. In some embodiments, the PEgRNA comprises an editing template comprising a sequence selected from the group consisting of SEQ identifiers: C651-C676 of Table 3C. In some embodiments, the prime editing composition further comprises a ngRNA that comprises a spacer comprising a sequence selected from the group consisting of SEQ identifiers: D136-D155 and D158-D161 of Table 3D. In some embodiments, the PEgRNA comprises an editing template comprising a sequence selected from the group consisting of SEQ ID Nos: 4677-4702 of Table 3C. In some embodiments, the prime editing composition further comprises a ngRNA that comprises a spacer comprising a sequence selected from the group consisting of SEQ ID Nos: D136-D155 and D158-D161 of Table 3D.

[0283] In some embodiments, the PEgRNA comprises a spacer comprising a sequence selected from the group consisting of SEQ identifiers: A52-A53 of Table 3A. In some embodiments, the PEgRNA comprises a spacer comprising a sequence selected from the group consisting of SEQ ID Nos: 400-401 of Table 3A. In some embodiments, the PEgRNA comprises a PBS comprising a sequence selected from the group consisting of SEQ identifiers: B235-B243 of Table 3B. In some embodiments, the PEgRNA comprises a PBS comprising a sequence selected from the group consisting of SEQ ID Nos: 1395-1401 of Table 3B. In some embodiments, the PEgRNA comprises a PBS comprising a sequence selected from the group consisting of sequences: CATAGGCT and CATAGGCTT. In some embodiments, the PEgRNA comprises an editing template comprising a sequence selected from the group consisting of SEQ identifiers: C677-C694 of Table 3C. In some embodiments, the prime editing composition further comprises a ngRNA that comprises a spacer comprising a sequence selected from the group consisting of SEQ identifiers: D136-D157, and D161-D169 of Table 3D. In some embodiments, the PEgRNA comprises an editing template comprising a sequence selected from the group consisting of SEQ ID Nos: 4703-4720 of Table 3C. In some embodiments, the prime editing composition further comprises a ngRNA that comprises a spacer comprising a sequence selected from the group consisting of SEQ ID Nos: 19769-19790, and 19794-19802 of Table 3D.

[0284] In some embodiments, the PEgRNA comprises a spacer comprising a sequence selected from the group consisting of SEQ identifiers: A54-A55 of Table 3A. In some embodiments, the PEgRNA comprises a spacer comprising a sequence selected from the group consisting of SEQ ID Nos: 402-403 of Table 3A. In some embodiments, the PEgRNA comprises a PBS comprising a sequence selected from the group consisting of SEQ identifiers: B244-B252 of Table 3B. In some embodiments, the PEgRNA comprises a PBS comprising a sequence selected from the group consisting of SEQ ID Nos: 1402-1408 of Table 3B. In some embodiments, the PEgRNA comprises a PBS comprising a sequence selected from the group consisting of sequences: CATAGGAA and CATAGGAAG. In some embodiments, the PEgRNA comprises an editing template comprising a sequence selected from the group consisting of SEQ identifiers: C695-C730 of Table 3C. In some embodiments, the prime editing composition further comprises a ngRNA that comprises a spacer comprising a sequence selected from the group consisting of SEQ identifiers: D170-D195 of Table 3D. In some embodiments, the PEgRNA comprises an editing template comprising a sequence selected from the group consisting of SEQ ID Nos: 4721-4756 of Table 3C. In some embodiments, the prime editing composition further comprises a ngRNA that comprises a spacer comprising a sequence selected from the group consisting of SEQ ID Nos: 19803-19828 of Table 3D.

[0285] In some embodiments, the PEgRNA comprises a spacer comprising a sequence selected from the group consisting of SEQ identifiers: A56-A57 of Table 3A. In some embodiments, the PEgRNA comprises a spacer comprising a sequence selected from the group consisting of SEQ ID Nos: 404-405 of Table 3A. In some embodiments, the PEgRNA comprises a PBS comprising a sequence selected from the group consisting of SEQ identifiers: B253-B261 of Table 3B. In some embodiments, the PEgRNA comprises a PBS comprising a sequence selected from the group consisting of SEQ ID Nos: 1409-1415 of Table 3B. In some embodiments, the PEgRNA comprises a PBS comprising a sequence selected from the group consisting of sequences: TTGTTATC and TTGTTATCC. In some embodiments, the PEgRNA comprises an editing template comprising a sequence selected from the group consisting of SEQ identifiers: C731-C761 of Table 3C. In some embodiments, the prime editing composition further comprises a ngRNA that comprises a spacer comprising a sequence selected from the group consisting of SEQ identifiers: D172-D190, and D196-D207 of Table 3D. In some embodiments, the PEgRNA comprises an editing template comprising a sequence selected from the group consisting of SEQ ID Nos: 4757-4787 of Table 3C. In some embodiments, the prime editing composition further comprises a ngRNA that comprises a spacer comprising a sequence selected from the group consisting of SEQ ID Nos: 19805-19823, and 19829-19840 of Table 3D.

[0286] In some embodiments, the PEgRNA comprises a spacer comprising a sequence selected from the group consisting of SEQ identifiers: A58-A59 of Table 3A. In some embodiments, the PEgRNA comprises a spacer comprising a sequence selected from the group consisting of SEQ ID Nos: 406-407 of Table 3A. In some embodiments, the PEgRNA comprises a PBS comprising a sequence selected from the group consisting of SEQ identifiers: B262-B270 of Table 3B. In some embodiments, the PEgRNA comprises a PBS comprising a sequence selected from the group consisting of SEQ ID Nos: 1417-1422 of Table 3B. In some embodiments, the PEgRNA comprises a PBS comprising a sequence selected from the group consisting of sequences: CGATTTAT and CGATTTATC. In some embodiments, the PEgRNA comprises an editing template comprising a sequence selected from the group consisting of SEQ identifiers: C762-C823 of Table 3. In some embodiments, the prime editing composition further comprises a ngRNA that comprises a spacer comprising a sequence selected from the group consisting of SEQ identifiers: D208-D226 of Table 3D. In some embodiments, the PEgRNA comprises an editing template comprising a sequence selected from the group consisting of SEQ ID Nos: 4788-4849 of Table 3. In some embodiments, the prime editing composition further comprises a ngRNA that comprises a spacer comprising a sequence selected from the group consisting of SEQ ID Nos: 19841-19859 of Table 3D.

[0287] In some embodiments, the PEgRNA comprises a spacer comprising a sequence selected from the group consisting of SEQ identifiers: A60-A61 of Table 3A. In some embodiments, the PEgRNA comprises a spacer comprising a sequence selected from the group consisting of SEQ ID Nos: 408-409 of Table 3A. In some embodiments, the PEgRNA comprises a PBS comprising a sequence selected from the group consisting of SEQ identifiers: B271-B279 of Table 3B. In some embodiments, the PEgRNA comprises a PBS comprising a sequence selected from the group consisting of SEQ ID Nos: 1423-1429 of Table 3B. In some embodiments, the PEgRNA comprises a PBS comprising a sequence selected from the group consisting of sequences: CCTTCTCT and CCTTCTCTT. In some embodiments, the PEgRNA comprises an editing template comprising a sequence selected from the group consisting of SEQ identifiers: C824-C835 of Table 3C. In some embodiments, the prime editing composition further comprises a ngRNA that comprises a spacer comprising a sequence selected from the group consisting of SEQ identifiers: D210-D215, D219-D224, and D227-D230 of Table 3D. In some embodiments, the PEgRNA comprises an editing template comprising a sequence selected from the group consisting of SEQ ID Nos: 4850-4861 of Table 3C. In some embodiments, the prime editing composition further comprises a ngRNA that comprises a spacer comprising a sequence selected from the group consisting of SEQ ID Nos: 19843-19848, 19852-19857, and 19860-19863 of Table 3D.

[0288] In some embodiments, the PEgRNA comprises a spacer comprising the sequence of SEQ identifier: A62 of Table 3A. In some embodiments, the PEgRNA comprises a spacer comprising the sequence of SEQ ID No: 410 of Table 3A. In some embodiments, the PEgRNA comprises a PBS comprising a sequence selected from the group consisting of SEQ identifiers: B280-B288 of Table 3B. In some embodiments, the PEgRNA comprises a PBS comprising a sequence selected from the group consisting of SEQ ID Nos: 1430-1436 of Table 3B. In some embodiments, the PEgRNA comprises a PBS comprising a sequence selected from the group consisting of sequences: GCCTTCTC and GCCTTCTCT. In some embodiments, the PEgRNA comprises an editing template comprising a sequence selected from the group consisting of SEQ identifiers: C836-C842 of Table 3C. In some embodiments, the prime editing composition further comprises a ngRNA that comprises a spacer comprising a sequence selected from the group consisting of SEQ identifiers: D137-D157 of Table 3D. In some embodiments, the PEgRNA comprises an editing template comprising a sequence selected from the group consisting of SEQ ID Nos: 4862-4868 of Table 3C. In some embodiments, the prime editing composition further comprises a ngRNA that comprises a spacer comprising a sequence selected from the group consisting of SEQ ID Nos: 19770-19790 of Table 3D.

[0289] In some embodiments, the PEgRNA comprises a spacer comprising a sequence selected from the group consisting of SEQ identifiers: A63-A64 of Table 3A. In some embodiments, the PEgRNA comprises a spacer comprising a sequence selected from the group consisting of SEQ ID Nos: 411-412 of Table 3A. In some embodiments, the PEgRNA comprises a PBS comprising a sequence selected from the group consisting of SEQ identifiers: B289-B297 of Table 3B. In some embodiments, the PEgRNA comprises a PBS comprising a sequence selected from the group consisting of SEQ ID Nos: 1437-1443 of Table 3B. In some embodiments, the PEgRNA comprises a PBS comprising a sequence selected from the group consisting of SEQ ID Nos: TCGCGATT and TCGCGATTT. In some embodiments, the PEgRNA comprises an editing template comprising a sequence selected from the group consisting of SEQ identifiers: C843-C873 of Table 3C. In some embodiments, the prime editing composition further comprises a ngRNA that comprises a spacer comprising a sequence selected from the group consisting of SEQ identifiers: D136-D154, and D158-D168 of Table 3D. In some embodiments, the PEgRNA comprises an editing template comprising a sequence selected from the group consisting of SEQ ID Nos: 4869-4899 of Table 3C. In some embodiments, the prime editing composition further comprises a ngRNA that comprises a spacer comprising a sequence selected from the group consisting of SEQ ID Nos: 19769-19787, and 19791-19801 of Table 3D.

[0290] In some embodiments, the PEgRNA comprises a spacer comprising a sequence selected from the group consisting of SEQ identifiers: A67-A68 of Table 3A. In some embodiments, the PEgRNA comprises a spacer comprising a sequence selected from the group consisting of SEQ ID Nos: 415-416 of Table 3A. In some embodiments, the PEgRNA comprises a PBS comprising a sequence selected from the group consisting of SEQ identifiers: B298-B306 of Table 3B. In some embodiments, the PEgRNA comprises a PBS comprising a sequence selected from the group consisting of SEQ ID Nos: 1444-1450 of Table 3B. In some embodiments, the PEgRNA comprises a PBS comprising a sequence selected from the group consisting of sequences: TTATCCGG and TTATCCGGG. In some embodiments, the PEgRNA comprises an editing template comprising a sequence selected from the group consisting of SEQ identifiers: C874-C901 of Table 3C. In some embodiments, the prime editing composition further comprises a ngRNA that comprises a spacer comprising a sequence selected from the group consisting of SEQ identifiers: D170-D190, D196-D207, D248, and D249 of Table 3D. In some embodiments, the PEgRNA comprises an editing template comprising a sequence selected from the group consisting of SEQ ID Nos: 4900-4927 of Table 3C. In some embodiments, the prime editing composition further comprises a ngRNA that comprises a spacer comprising a sequence selected from the group consisting of SEQ ID Nos: 19803-19823, 19829-19840, 19881, and 19882 of Table 3D.

[0291] In some embodiments, the PEgRNA comprises a spacer comprising a sequence selected from the group consisting of SEQ identifiers: A69-A70 of Table 3A. In some embodiments, the PEgRNA comprises a spacer comprising a sequence selected from the group consisting of SEQ ID Nos: 417-418 of Table 3A. In some embodiments, the PEgRNA comprises a PBS comprising a sequence selected from the group consisting of SEQ identifers: B307-B315 of Table 3B. In some embodiments, the PEgRNA comprises a PBS comprising a sequence selected from the group consisting of SEQ ID Nos: 1451-1457 of Table 3B. In some embodiments, the PEgRNA comprises a PBS comprising a sequence selected from the group consisting of sequences: TTTATCTA and TTTATCTAG. In some embodiments, the PEgRNA comprises an editing template comprising a sequence selected from the group consisting of SEQ identifiers: C902-C929 of Table 3C. In some embodiments, the prime editing composition further comprises a ngRNA that comprises a spacer comprising a sequence selected from the group consisting of SEQ identifiers: D136-D155, and D158-D169 of Table 3D. In some embodiments, the PEgRNA comprises an editing template comprising a sequence selected from the group consisting of SEQ ID Nos: 4928-4955 of Table 3C. In some embodiments, the prime editing composition further comprises a ngRNA that comprises a spacer comprising a sequence selected from the group consisting of SEQ ID Nos: 19769-19788, and 19791-19802 of Table 3D.

[0292] In some embodiments, the PEgRNA comprises a spacer comprising a sequence selected from the group consisting of SEQ ID Nos: A71-A72 of Table 3A. In some embodiments, the PEgRNA comprises a spacer comprising a sequence selected from the group consisting of SEQ ID Nos: 419-420 of Table 3A. In some embodiments, the PEgRNA comprises a PBS comprising a sequence selected from the group consisting of SEQ identifers: B316-B324 of Table 3B. In some embodiments, the PEgRNA comprises a PBS comprising a sequence selected from the group consisting of SEQ ID Nos: 1458-1464 of Table 3B. In some embodiments, the PEgRNA comprises a PBS comprising a sequence selected from the group consisting of sequences: ATCGCGAT and ATCGCGATT. In some embodiments, the PEgRNA comprises an editing template comprising a sequence selected from the group consisting of SEQ identifiers: C930-C960 of Table 3C. In some embodiments, the prime editing composition further comprises a ngRNA that comprises a spacer comprising a sequence selected from the group consisting of SEQ identifiers: D209-D216, and D219-D226 of Table 3D. In some embodiments, the PEgRNA comprises an editing template comprising a sequence selected from the group consisting of SEQ ID Nos: 4956-4986 of Table 3C. In some embodiments, the prime editing composition further comprises a ngRNA that comprises a spacer comprising a sequence selected from the group consisting of SEQ ID Nos: 19842-19849, and 19852-19859 of Table 3D.

[0293] In some embodiments, the PEgRNA comprises a spacer comprising the sequence of SEQ ID No: A73 of Table 3A. In some embodiments, the PEgRNA comprises a spacer comprising the sequence of SEQ ID No: 421 of Table 3A. In some embodiments, the PEgRNA comprises a PBS comprising a sequence selected from the group consisting of SEQ identifiers: B325-B333 of Table 3B. In some embodiments, the PEgRNA comprises a PBS comprising a sequence selected from the group consisting of SEQ ID Nos: 1465-1471 of Table 3B. In some embodiments, the PEgRNA comprises a PBS comprising a sequence selected from the group consisting of sequences: TATCGCGA and TATCGCGA. In some embodiments, the PEgRNA comprises an editing template comprising a sequence selected from the group consisting of SEQ identifiers: C961-C991 of Table 3C. In some embodiments, the prime editing composition further comprises a ngRNA that comprises a spacer comprising a sequence selected from the group consisting of SEQ identifiers: D136-D154, D158-D161, and D250 of Table 3D. In some embodiments, the PEgRNA comprises an editing template comprising a sequence selected from the group consisting of SEQ ID Nos: 4987-5017 of Table 3C. In some embodiments, the prime editing composition further comprises a ngRNA that comprises a spacer comprising a sequence selected from the group consisting of SEQ ID Nos: 19769-19787, 19791-19794, and 19883 of Table 3D.

[0294] In some embodiments, the PEgRNA comprises a spacer comprising a sequence selected from the group consisting of SEQ ID Nos: A74-A77 of Table 3A. In some embodiments, the PEgRNA comprises a spacer comprising a sequence selected from the group consisting of SEQ ID Nos: 422-425 of Table 3A. In some embodiments, the PEgRNA comprises a PBS comprising a sequence selected from the group consisting of SEQ identifiers: B334-B342 of Table 3B. In some embodiments, the PEgRNA comprises a PBS comprising a sequence selected from the group consisting of SEQ ID Nos: 1472-1478 of Table 3B. In some embodiments, the PEgRNA comprises a PBS comprising a sequence selected from the group consisting of sequences: GTTATCCG and GTTATCCGG. In some embodiments, the PEgRNA comprises an editing template comprising a sequence selected from the group consisting of SEQ identifiers: C992-C1049 of Table 3C. In some embodiments, the prime editing composition further comprises a ngRNA that comprises a spacer comprising a sequence selected from the group consisting of SEQ identifiers: D176, D177, D207, D251-D290 of Table 3D. In some embodiments, the PEgRNA comprises an editing template comprising a sequence selected from the group consisting of SEQ ID Nos: 5018-5075 of Table 3C. In some embodiments, the prime editing composition further comprises a ngRNA that comprises a spacer comprising a sequence selected from the group consisting of SEQ ID Nos: 19809, 19810, 19840, 19884-19923 of Table 3D.

[0295] In some embodiments, the PEgRNA comprises a spacer comprising a sequence selected from the group consisting of SEQ ID Nos: A78-A79 of Table 3A. In some embodiments, the PEgRNA comprises a spacer comprising a sequence selected from the group consisting of SEQ ID Nos: 426-427 of Table 3A. In some embodiments, the PEgRNA comprises a PBS comprising a sequence selected from the group consisting of SEQ identifiers: B343-B351 of Table 3B. In some embodiments, the PEgRNA comprises a PBS comprising a sequence selected from the group consisting of SEQ ID Nos: 1479-1485 of Table 3B. In some embodiments, the PEgRNA comprises a PBS comprising a sequence selected from the group consisting of SEQ ID Nos: B343-B351 of Table 3B. In some embodiments, the PEgRNA comprises an editing template comprising a sequence selected from the group consisting of SEQ identifiers: C1050-C1055 of Table 3C. In some embodiments, the prime editing composition further comprises a ngRNA that comprises a spacer comprising a sequence selected from the group consisting of SEQ identifiers: D251-D258, D264-D271, and D291-D298 of Table 3D. In some embodiments, the PEgRNA comprises an editing template comprising a sequence selected from the group consisting of SEQ ID Nos: 5076-5081 of Table 3C. In some embodiments, the prime editing composition further comprises a ngRNA that comprises a spacer comprising a sequence selected from the group consisting of SEQ ID Nos: 19884-19891, 19897-19904, and 19924-19931 of Table 3D.

[0296] In some embodiments, the PEgRNA comprises a spacer comprising the sequence of SEQ ID No: A80 of Table 3A. In some embodiments, the PEgRNA comprises a spacer comprising the sequence of SEQ ID No: 428 of Table 3A. In some embodiments, the PEgRNA comprises a PBS comprising a sequence selected from the group consisting of SEQ identifiers: B352-B360 of Table 3B. In some embodiments, the PEgRNA comprises a PBS comprising a sequence selected from the group consisting of SEQ ID Nos: 1486-1492 of Table 3B. In some embodiments, the PEgRNA comprises a PBS comprising a sequence selected from the group consisting of sequences: ATTCTTCC and ATTCTTCCC. In some embodiments, the PEgRNA comprises an editing template comprising a sequence selected from the group consisting of SEQ identifiers: C1056-C1059 of Table 3C. In some embodiments, the prime editing composition further comprises a ngRNA that comprises a spacer comprising a sequence selected from the group consisting of SEQ identifiers: D170-D187 of Table 3D. In some embodiments, the PEgRNA comprises an editing template comprising a sequence selected from the group consisting of SEQ ID Nos: 5082-5085 of Table 3C. In some embodiments, the prime editing composition further comprises a ngRNA that comprises a spacer comprising a sequence selected from the group consisting of SEQ ID Nos: 19803-19820 of Table 3D.

[0297] In some embodiments, the PEgRNA comprises a spacer comprising a sequence selected from the group consisting of SEQ ID Nos: A81-A82 of Table 3A. In some embodiments, the PEgRNA comprises a spacer comprising a sequence selected from the group consisting of SEQ ID Nos: 429-430 of Table 3A. In some embodiments, the PEgRNA comprises a PBS comprising a sequence selected from the group consisting of SEQ identifiers: B361-B369 of Table 3B. In some embodiments, the PEgRNA comprises a PBS comprising a sequence selected from the group consisting of SEQ ID Nos: 1493-1499 of Table 3B. In some embodiments, the PEgRNA comprises a PBS comprising a sequence selected from the group consisting of sequences: GAAGCTAT and GAAGCTATG. In some embodiments, the PEgRNA comprises an editing template comprising a sequence selected from the group consisting of SEQ identifiers: C1060-C1072 of Table 3C. In some embodiments, the prime editing composition further comprises a ngRNA that comprises a spacer comprising a sequence selected from the group consisting of SEQ identifiers: D170-D188, D196-D202, D248, and D249 of Table 3D. In some embodiments, the PEgRNA comprises an editing template comprising a sequence selected from the group consisting of SEQ ID Nos: 5086-5098 of Table 3C. In some embodiments, the prime editing composition further comprises a ngRNA that comprises a spacer comprising a sequence selected from the group consisting of SEQ ID Nos: 19803-19821, 19829-19835, 19881, and 19882 of Table 3D.

[0298] In some embodiments, the PEgRNA comprises a spacer comprising a sequence selected from the group consisting of SEQ ID Nos: A83-A84 of Table 3A. In some embodiments, the PEgRNA comprises a spacer comprising a sequence selected from the group consisting of SEQ ID Nos: 431-432 of Table 3A. In some embodiments, the PEgRNA comprises a PBS comprising a sequence selected from the group consisting of SEQ identifiers: B370-B378 of Table 3B. In some embodiments, the PEgRNA comprises a PBS comprising a sequence selected from the group consisting of SEQ ID Nos: 1500-1506 of Table 3B. In some embodiments, the PEgRNA comprises a PBS comprising a sequence selected from the group consisting of sequences: ATAGGCTT and ATAGGCTTA. In some embodiments, the PEgRNA comprises an editing template comprising a sequence selected from the group consisting of SEQ identifiers: C1073-C1106 of Table 3C. In some embodiments, the prime editing composition further comprises a ngRNA that comprises a spacer comprising a sequence selected from the group consisting of SEQ identifiers: D210-D215, D219-D224, and D227-D230 of Table 3D. In some embodiments, the PEgRNA comprises an editing template comprising a sequence selected from the group consisting of SEQ ID Nos: 5099-5132 of Table 3C. In some embodiments, the prime editing composition further comprises a ngRNA that comprises a spacer comprising a sequence selected from the group consisting of SEQ ID Nos: 19843-19848, 19852-19857, and 19860-19863 of Table 3D.

[0299] In some embodiments, the PEgRNA comprises a spacer comprising a sequence selected from the group consisting of SEQ ID Nos: A85-A87 of Table 3A. In some embodiments, the PEgRNA comprises a spacer comprising a sequence selected from the group consisting of SEQ ID Nos: 433-435 of Table 3A. In some embodiments, the PEgRNA comprises a PBS comprising a sequence selected from the group consisting of SEQ identifiers: B379-B387 of Table 3B. In some embodiments, the PEgRNA comprises a PBS comprising a sequence selected from the group consisting of SEQ ID Nos: 1507-1513 of Table 3B. In some embodiments, the PEgRNA comprises a PBS comprising a sequence selected from the group consisting of sequences: ATAGGAAG and ATAGGAAGC. In some embodiments, the PEgRNA comprises an editing template comprising a sequence selected from the group consisting of SEQ identifiers: C1107-C1123 of Table 3C. In some embodiments, the prime editing composition further comprises a ngRNA that comprises a spacer comprising a sequence selected from the group consisting of SEQ identifiers: D176, D177, D251, D254, D255, D262, D275-D279, D283-D287, D299, and D300 of Table 3D. In some embodiments, the PEgRNA comprises an editing template comprising a sequence selected from the group consisting of SEQ ID Nos: 5133-5149 of Table 3C. In some embodiments, the prime editing composition further comprises a ngRNA that comprises a spacer comprising a sequence selected from the group consisting of SEQ ID Nos: 19809, 19810, 19884, 19887, 19888, 19895, 19908-19912, 19916-19920, 19932, and 19933 of Table 3D.

[0300] In some embodiments, the PEgRNA comprises a spacer comprising a sequence selected from the group consisting of SEQ ID Nos: A88-A91 of Table 3A. In some embodiments, the PEgRNA comprises a spacer comprising a sequence selected from the group consisting of SEQ ID Nos: 436-439 of Table 3A. In some embodiments, the PEgRNA comprises a PBS comprising a sequence selected from the group consisting of SEQ identifiers: B388-B396 of Table 3B. In some embodiments, the PEgRNA comprises a PBS comprising a sequence selected from the group consisting of SEQ ID Nos: 1514-1520 of Table 3B. In some embodiments, the PEgRNA comprises a PBS comprising a sequence selected from the group consisting of sequences: CGCGATTT and CGCGATTTA. In some embodiments, the PEgRNA comprises an editing template comprising a sequence selected from the group consisting of SEQ identifiers: C1124-C1185 of Table 3C. In some embodiments, the prime editing composition further comprises a ngRNA that comprises a spacer comprising a sequence selected from the group consisting of SEQ identifiers: D145, D209-D216, D219-D226, and D301-D306 of Table 3D. In some embodiments, the PEgRNA comprises an editing template comprising a sequence selected from the group consisting of SEQ ID Nos: 5150-5211 of Table 3C. In some embodiments, the prime editing composition further comprises a ngRNA that comprises a spacer comprising a sequence selected from the group consisting of SEQ ID Nos: 19778, 19842-19849, 19852-19859, and 19934-19939 of Table 3D.

[0301] In some embodiments, the PEgRNA comprises a spacer comprising a sequence selected from the group consisting of SEQ ID Nos: A92-A93 of Table 3A. In some embodiments, the PEgRNA comprises a spacer comprising a sequence selected from the group consisting of SEQ ID Nos: 440-441 of Table 3A. In some embodiments, the PEgRNA comprises a PBS comprising a sequence selected from the group consisting of SEQ identifiers: B397-B405 of Table 3B. In some embodiments, the PEgRNA comprises a PBS comprising a sequence selected from the group consisting of SEQ ID Nos: 1521-1527 of Table 3B. In some embodiments, the PEgRNA comprises a PBS comprising a sequence selected from the group consisting of sequences: TGTTATCC and TGTTATCCG. In some embodiments, the PEgRNA comprises an editing template comprising a sequence selected from the group consisting of SEQ identifiers: C1186-C1245 of Table 3C. In some embodiments, the prime editing composition further comprises a ngRNA that comprises a spacer comprising a sequence selected from the group consisting of SEQ identifiers: D171-D195, D204-D207, and D307-D315 of Table 3D. In some embodiments, the PEgRNA comprises an editing template comprising a sequence selected from the group consisting of SEQ ID Nos: 5212-5271 of Table 3C. In some embodiments, the prime editing composition further comprises a ngRNA that comprises a spacer comprising a sequence selected from the group consisting of SEQ ID Nos: 19804-19828, 19837-19840, and 19940-19948 of Table 3D.

[0302] In some embodiments, the PEgRNA comprises a spacer comprising a sequence selected from the group consisting of SEQ ID Nos: A94-A95 of Table 3A. In some embodiments, the PEgRNA comprises a spacer comprising a sequence selected from the group consisting of SEQ ID Nos: 442-443 of Table 3A. In some embodiments, the PEgRNA comprises a PBS comprising a sequence selected from the group consisting of SEQ identifiers: B406-B414 of Table 3B. In some embodiments, the PEgRNA comprises a PBS comprising a sequence selected from the group consisting of SEQ ID Nos: 1528-1534 of Table 3B. In some embodiments, the PEgRNA comprises a PBS comprising a sequence selected from the group consisting of SEQ ID Nos: TCATAGGA and TCATAGGAA. In some embodiments, the PEgRNA comprises an editing template comprising a sequence selected from the group consisting of SEQ identifiers: C1246-C1264 of Table 3C. In some embodiments, the prime editing composition further comprises a ngRNA that comprises a spacer comprising a sequence selected from the group consisting of SEQ identifiers: D170-D190, D196-D204, D248, and D249 of Table 3D. In some embodiments, the PEgRNA comprises an editing template comprising a sequence selected from the group consisting of SEQ ID Nos: 5272-5290 of Table 3C. In some embodiments, the prime editing composition further comprises a ngRNA that comprises a spacer comprising a sequence selected from the group consisting of SEQ ID Nos: 19803-19823, 19829-19837, 19881, and 19882 of Table 3D.

[0303] In some embodiments, the PEgRNA comprises a spacer comprising a sequence selected from the group consisting of SEQ ID Nos: A96-A97 of Table 3A. In some embodiments, the PEgRNA comprises a spacer comprising a sequence selected from the group consisting of SEQ ID Nos: 444-445 of Table 3A. In some embodiments, the PEgRNA comprises a PBS comprising a sequence selected from the group consisting of SEQ identifiers: B415-B423 of Table 3B. In some embodiments, the PEgRNA comprises a PBS comprising a sequence selected from the group consisting of SEQ ID Nos: 1535-1541 of Table 3B. In some embodiments, the PEgRNA comprises a PBS comprising a sequence selected from the group consisting of sequences: TATCCGGG and TATCCGGGT. In some embodiments, the PEgRNA comprises an editing template comprising a sequence selected from the group consisting of SEQ identifiers: C1265-C1318 of Table 3C. In some embodiments, the prime editing composition further comprises a ngRNA that comprises a spacer comprising a sequence selected from the group consisting of SEQ identifiers: D170-D195, D205-D207, and D313-D321 of Table 3D. In some embodiments, the PEgRNA comprises an editing template comprising a sequence selected from the group consisting of SEQ ID Nos: 5291-5344 of Table 3C. In some embodiments, the prime editing composition further comprises a ngRNA that comprises a spacer comprising a sequence selected from the group consisting of SEQ ID Nos: 19803-19828, 19838-19840, and 19946-19954 of Table 3D.

[0304] In some embodiments, the PEgRNA comprises a spacer comprising a sequence selected from the group consisting of SEQ ID Nos: A98-A99 of Table 3A. In some embodiments, the PEgRNA comprises a spacer comprising a sequence selected from the group consisting of SEQ ID Nos: 446-447 of Table 3A. In some embodiments, the PEgRNA comprises a PBS comprising a sequence selected from the group consisting of SEQ identifiers: B424-B432 of Table 3B. In some embodiments, the PEgRNA comprises a PBS comprising a sequence selected from the group consisting of SEQ ID Nos: 1542-1548 of Table 3B. In some embodiments, the PEgRNA comprises a PBS comprising a sequence selected from the group consisting of sequences: GCGATTTA and GCGATTTAT. In some embodiments, the PEgRNA comprises an editing template comprising a sequence selected from the group consisting of SEQ identifiers: C1319-C1349 of Table 3C. In some embodiments, the prime editing composition further comprises a ngRNA that comprises a spacer comprising a sequence selected from the group consisting of SEQ identifiers: D136-D154, and D158-D168 of Table 3D. In some embodiments, the PEgRNA comprises an editing template comprising a sequence selected from the group consisting of SEQ ID Nos: 5345-5375 of Table 3C. In some embodiments, the prime editing composition further comprises a ngRNA that comprises a spacer comprising a sequence selected from the group consisting of SEQ ID Nos: 19769-19787, and 19791-19801 of Table 3D.

[0305] In some embodiments, the PEgRNA comprises a spacer comprising the sequence of SEQ ID No: A100 of Table 3A. In some embodiments, the PEgRNA comprises a spacer comprising the sequence of SEQ ID No: 448 of Table 3A. In some embodiments, the PEgRNA comprises a PBS comprising a sequence selected from the group consisting of SEQ identifiers: B433-B441 of Table 3B. In some embodiments, the PEgRNA comprises a PBS comprising a sequence selected from the group consisting of SEQ ID Nos: 1549-1555 of Table 3B. In some embodiments, the PEgRNA comprises a PBS comprising a sequence selected from the group consisting of sequences: TCTTTATT and TCTTTATTG. In some embodiments, the PEgRNA comprises an editing template comprising the sequence of SEQ identifier: C1350. In some embodiments, the prime editing composition further comprises a ngRNA that comprises a spacer comprising a sequence selected from the group consisting of SEQ identifiers: D137-D157 of Table 3D. In some embodiments, the PEgRNA comprises an editing template comprising the sequence of SEQ ID No: 5376. In some embodiments, the prime editing composition further comprises a ngRNA that comprises a spacer comprising a sequence selected from the group consisting of SEQ ID Nos: 19770-19790 of Table 3D.

[0306] In some embodiments, the PEgRNA comprises a spacer comprising a sequence selected from the group consisting of SEQ ID Nos: A101-A104 of Table 3A. In some embodiments, the PEgRNA comprises a spacer comprising a sequence selected from the group consisting of SEQ ID Nos: 449-452 of Table 3A. In some embodiments, the PEgRNA comprises a PBS comprising a sequence selected from the group consisting of SEQ identifiers: B442-B450 of Table 3B. In some embodiments, the PEgRNA comprises a PBS comprising a sequence selected from the group consisting of SEQ ID Nos: 1556-1562 of Table 3B. In some embodiments, the PEgRNA comprises a PBS comprising a sequence selected from the group consisting of sequences: ATCCGGGT and ATCCGGGTC. In some embodiments, the PEgRNA comprises an editing template comprising a sequence selected from the group consisting of SEQ identifiers: C1351-C1402 of Table 3C. In some embodiments, the prime editing composition further comprises a ngRNA that comprises a spacer comprising a sequence selected from the group consisting of SEQ identifiers: D176, D177, D251-D272, D274-D280, D283-D288, and D322-D325 of Table 3D. In some embodiments, the PEgRNA comprises an editing template comprising a sequence selected from the group consisting of SEQ ID Nos: 5377-5428 of Table 3C. In some embodiments, the prime editing composition further comprises a ngRNA that comprises a spacer comprising a sequence selected from the group consisting of SEQ ID Nos: 19809, 19810, 19884-19905, 19907-19913, 19916-19921, and 19955-19958 of Table 3D.

[0307] In some embodiments, the editing target sequence is in exon 8 of the CFTR gene.

[0308] In some embodiments, the editing target sequence or the complementary sequence on the CFTR gene thereof comprises a mutation that encodes an amino acid substitution S313*, G314R, G314V, F319V, and/or L320V relative to a wild type CFTR polypeptide set forth in SEQ ID NO: 19, wherein * refers to a non-sense mutation, and wherein the editing template encodes an intended nucleotide edit that corrects the mutation. In some embodiments, the editing target sequence or the complementary sequence on the CFTR gene thereof comprises a C→→A mutation (c.938C>A) at position 117,540,168, a T deletion mutation (c.948delT) at position 117,540,178, a G→→C mutation (c.940G>C) at position 117,540,170, a G→→T mutation (c.941G>T) at position 117,540,171, a T→→G mutation (c.955T>G) at position 117,540,185, and/or a T→→G mutation (c.958T>G) at position 117,540,188 of human chromosome 7 compared to a wild type CFTR gene. In some embodiments, the editing template comprises an intended nucleotide edit compared to the target CFTR gene, wherein incorporation of the intended nucleotide edit encoded by the editing template corrects the mutation. In some embodiments, incorporation of the one or more intended nucleotide edits results in a CFTR gene that encodes a functional CFTR polypeptide. In some embodiments, the editing template comprises a wild type CFTR gene sequence. Accordingly, in some embodiments, the newly synthesized single stranded DNA encoded by the editing template is capable of correcting the c.948delT mutation, the c.938C>A mutation, the c.940G>C mutation, the c.941G>T mutation, the c.955T>G mutation, and/or the c.958T>G mutation in the target CFTR gene. In some embodiments, the newly synthesized single stranded DNA encoded by the editing template is capable of correcting all of the c.948delT mutation, the c.938C>A mutation, the c.940G>C mutation, the c.941G>T mutation, the c.955T>G mutation, and the c.958T>G mutation in the target CFTR gene. In some embodiments, two or more of the c.948delT mutation, the c.938C>A mutation, the c.940G>C mutation, the c.941G>T mutation, the c.955T>G mutation, and the c.958T>G mutation are located on the same CFTR gene. In some embodiments, the newly synthesized single stranded DNA encoded by the editing template is capable of correcting the c.948delT mutation, the c.938C>A mutation, the c.940G>C mutation, the c.941G>T mutation, the c.955T>G mutation, and the c.958T>G mutation that are located on different CFTR genes. For example, in some embodiments, a subject may comprise two copies of CFTR genes, each comprising a different mutation selected from the group consisting of the c.948delT mutation, the c.938C>A mutation, the c.940G>C mutation, the c.941G>T mutation, the c.955T>G mutation, and the c.958T>G mutation, all of which may be corrected by an editing template of a single PEgRNA. In some embodiments, the editing template is capable of correcting one or more, or all of the c.948delT mutation, the c.938C>A mutation, the c.940G>C mutation, the c.941G>T mutation, the c.955T>G mutation, and the c.958T>G mutation that are in different subjects, wherein each subject may have one or more of the mutations.

[0309] In some embodiments, the PEgRNA comprises a spacer comprising a sequence selected from the group consisting of SEQ Identifiers: A107-A110 of Table 3A. In some embodiments, the PEgRNA comprises a PBS comprising a sequence selected from the group consisting of SEQ Identifiers: B451-B459 of Table 3B. In some embodiments, the PEgRNA comprises an editing template comprising a sequence selected from the group consisting of SEQ Identifiers: C1403-C1454 of Table 3C. In some embodiments, the prime editing composition further comprises a ngRNA that comprises a spacer comprising a sequence selected from the group consisting of SEQ Identifiers: D326-D361 of Table 3D.

[0310] In some embodiments, the PEgRNA comprises a spacer comprising the sequence of SEQ Identifier: A111 of Table 3A. In some embodiments, the PEgRNA comprises a PBS comprising a sequence selected from the group consisting of SEQ Identifiers: B460-B468 of Table 3B. In some embodiments, the PEgRNA comprises an editing template comprising a sequence selected from the group consisting of SEQ Identifiers: C1455-C1460 of Table 3C. In some embodiments, the prime editing composition further comprises a ngRNA that comprises a spacer comprising a sequence selected from the group consisting of SEQ Identifiers: D362-D384 of Table 3D.

[0311] In some embodiments, the PEgRNA comprises a spacer comprising a sequence selected from the group consisting of SEQ Identifiers: A112-A113 of Table 3A. In some embodiments, the PEgRNA comprises a PBS comprising a sequence selected from the group consisting of SEQ Identifiers: B469-B477 of Table 3B. In some embodiments, the PEgRNA comprises an editing template comprising a sequence selected from the group consisting of SEQ Identifiers: C1461-C1500 of Table 3C. In some embodiments, the prime editing composition further comprises a ngRNA that comprises a spacer comprising a sequence selected from the group consisting of SEQ Identifiers: D385-D386 of Table 3D.

[0312] In some embodiments, the PEgRNA comprises a spacer comprising a sequence selected from the group consisting of SEQ Identifiers: A114-A117 of Table 3A. In some embodiments, the PEgRNA comprises a PBS comprising a sequence selected from the group consisting of SEQ Identifiers: B478-B486 of Table 3B. In some embodiments, the PEgRNA comprises an editing template comprising a sequence selected from the group consisting of SEQ Identifiers: C1501-C1522 of Table 3C. In some embodiments, the prime editing composition further comprises a ngRNA that comprises a spacer comprising a sequence selected from the group consisting of SEQ Identifiers: D362-D384, and D386-D422 of Table 3D.

[0313] In some embodiments, the PEgRNA comprises a spacer comprising a sequence selected from the group consisting of SEQ Identifiers: A118-A119 of Table 3A. In some embodiments, the PEgRNA comprises a PBS comprising a sequence selected from the group consisting of SEQ Identifiers: B487-B495 of Table 3B. In some embodiments, the PEgRNA comprises an editing template comprising a sequence selected from the group consisting of SEQ Identifiers: C1523-C1553 of Table 3C. In some embodiments, the prime editing composition further comprises a ngRNA that comprises a spacer comprising a sequence selected from the group consisting of SEQ Identifiers: D362-D379 and D423-D427 of Table 3D.

[0314] In some embodiments, the PEgRNA comprises a spacer comprising a sequence selected from the group consisting of SEQ Identifiers: A120-A121 of Table 3A. In some embodiments, the PEgRNA comprises a PBS comprising a sequence selected from the group consisting of SEQ Identifiers: B496-B504 of Table 3B. In some embodiments, the PEgRNA comprises an editing template comprising a sequence selected from the group consisting of SEQ Identifiers: C1554-C1565 of Table 3C. In some embodiments, the prime editing composition further comprises a ngRNA that comprises a spacer comprising a sequence selected from the group consisting of SEQ Identifiers: D332-D337, D349-D354, D428, and D429 of Table 3D.

[0315] In some embodiments, the PEgRNA comprises a spacer comprising the of SEQ Identifiers: A122 of Table 3A. In some embodiments, the PEgRNA comprises a PBS comprising a sequence selected from the group consisting of SEQ Identifiers: B505-B513 of Table 3B. In some embodiments, the PEgRNA comprises an editing template comprising a sequence selected from the group consisting of SEQ Identifiers: C1566-C1572 of Table 3C. In some embodiments, the prime editing composition further comprises a ngRNA that comprises a spacer comprising a sequence selected from the group consisting of SEQ Identifiers: D360, and D430-D446 of Table 3D.

[0316] In some embodiments, the PEgRNA comprises a spacer comprising a sequence selected from the group consisting of SEQ Identifiers: A123-A124 of Table 3A. In some embodiments, the PEgRNA comprises a PBS comprising a sequence selected from the group consisting of SEQ Identifiers: B514-B522 of Table 3B. In some embodiments, the PEgRNA comprises an editing template comprising a sequence selected from the group consisting of SEQ Identifiers: C1573-C1628 of Table 3C. In some embodiments, the prime editing composition further comprises a ngRNA that comprises a spacer comprising a sequence selected from the group consisting of SEQ Identifiers: D360, and D434-460 of Table 3D.

[0317] In some embodiments, the PEgRNA comprises a spacer comprising the sequence of SEQ Identifier: A125 of Table 3A. In some embodiments, the PEgRNA comprises a PBS comprising a sequence selected from the group consisting of SEQ Identifiers: B451, B523-B530 of Table 3B. In some embodiments, the PEgRNA comprises an editing template comprising a sequence selected from the group consisting of SEQ Identifiers: C1629-C1657 of Table 3C. In some embodiments, the prime editing composition further comprises a ngRNA that comprises a spacer comprising a sequence selected from the group consisting of SEQ Identifiers: D360, and D435-D446, D454-D459 of Table 3D.

[0318] In some embodiments, the PEgRNA comprises a spacer comprising a sequence selected from the group consisting of SEQ Identifiers: A126-A127 of Table 3A. In some embodiments, the PEgRNA comprises a PBS comprising a sequence selected from the group consisting of SEQ Identifiers: B531B-539 of Table 3B. In some embodiments, the PEgRNA comprises an editing template comprising a sequence selected from the group consisting of SEQ Identifiers: C1658-C1688 of Table 3C. In some embodiments, the prime editing composition further comprises a ngRNA that comprises a spacer comprising a sequence selected from the group consisting of SEQ Identifiers: D436-D446, D449, D450, D452-D459, and D462-D463 of Table 3D.

[0319] In some embodiments, the PEgRNA comprises a spacer comprising the sequence of SEQ Identifier: A128 of Table 3A. In some embodiments, the PEgRNA comprises a PBS comprising a sequence selected from the group consisting of SEQ Identifiers: B540-B548 of Table 3B. In some embodiments, the PEgRNA comprises an editing template comprising a sequence selected from the group consisting of SEQ Identifiers: C1689-C1719 of Table 3C. In some embodiments, the prime editing composition further comprises a ngRNA that comprises a spacer comprising a sequence selected from the group consisting of SEQ Identifiers: D436-D446, D453-D459, and D461-D 463 of Table 3D.

[0320] In some embodiments, the PEgRNA comprises a spacer comprising the sequence of SEQ Identifiers: A129 of Table 3A. In some embodiments, the PEgRNA comprises a PBS comprising a sequence selected from the group consisting of SEQ Identifiers: B549-B557 of Table 3B. In some embodiments, the PEgRNA comprises an editing template comprising a sequence selected from the group consisting of SEQ Identifiers: C1720-C1750 of Table 3C. In some embodiments, the prime editing composition further comprises a ngRNA that comprises a spacer comprising a sequence selected from the group consisting of SEQ Identifiers: D436-D446, D453-D459, and D461-D463 of Table 3D.

[0321] In some embodiments, the PEgRNA comprises a spacer comprising a sequence selected from the group consisting of SEQ Identifiers: A130-A131 of Table 3A. In some embodiments, the PEgRNA comprises a PBS comprising a sequence selected from the group consisting of SEQ Identifiers: B558-B566 of Table 3B. In some embodiments, the PEgRNA comprises an editing template comprising a sequence selected from the group consisting of SEQ Identifiers: C1751-C1780 of Table 3C.

[0322] In some embodiments, the prime editing composition further comprises a ngRNA that comprises a spacer comprising a sequence selected from the group consisting of SEQ Identifiers: D385, D386, D464, and D465 of Table 3D.

[0323] In some embodiments, the PEgRNA comprises a spacer comprising the sequence of SEQ Identifier: A132 of Table 3A. In some embodiments, the PEgRNA comprises a PBS comprising a sequence selected from the group consisting of SEQ Identifiers: B567-B575 of Table 3 of Table 3B. In some embodiments, the PEgRNA comprises an editing template comprising a sequence selected from the group consisting of SEQ Identifiers: C1781-C1796 of Table 3C. In some embodiments, the prime editing composition further comprises a ngRNA that comprises a spacer comprising a sequence selected from the group consisting of SEQ Identifiers: D362-D383 of Table 3D.

[0324] In some embodiments, the PEgRNA comprises a spacer comprising a sequence selected from the group consisting of SEQ Identifiers: A133-A136 of Table 3A. In some embodiments, the PEgRNA comprises a PBS comprising a sequence selected from the group consisting of SEQ Identifiers: B576-B584 of Table 3B. In some embodiments, the PEgRNA comprises an editing template comprising a sequence selected from the group consisting of SEQ Identifiers: C1797-C1816 of Table 3C. In some embodiments, the prime editing composition further comprises a ngRNA that comprises a spacer comprising a sequence selected from the group consisting of SEQ Identifiers: D376, D385-D395, D406-D412, D414-D422, D466, and D467 of Table 3D.

[0325] In some embodiments, the PEgRNA comprises a spacer comprising a sequence selected from the group consisting of SEQ Identifiers: A137-A138 of Table 3A. In some embodiments, the PEgRNA comprises a PBS comprising a sequence selected from the group consisting of SEQ Identifiers: B585-B593 of Table 3B. In some embodiments, the PEgRNA comprises an editing template comprising a sequence selected from the group consisting of SEQ Identifiers: C1817-C1847 of Table 3C. In some embodiments, the prime editing composition further comprises a ngRNA that comprises a spacer comprising a sequence selected from the group consisting of SEQ Identifiers: D385-D386 of Table 3D.

[0326] In some embodiments, the PEgRNA comprises a spacer comprising a sequence selected from the group consisting of SEQ Identifiers: A139-A142 of Table 3A. In some embodiments, the PEgRNA comprises a PBS comprising a sequence selected from the group consisting of SEQ Identifiers: B594-B602 of Table 3B. In some embodiments, the PEgRNA comprises an editing template comprising a sequence selected from the group consisting of SEQ Identifiers: C1848-C1874 of Table 3C. In some embodiments, the prime editing composition further comprises a ngRNA that comprises a spacer comprising a sequence selected from the group consisting of SEQ Identifiers: D326-D330, D343-d347, D349, D350, D354, D359, D360, D434-D450, and 452-D459 of Table 3D.

[0327] In some embodiments, the PEgRNA comprises a spacer comprising a sequence selected from the group consisting of SEQ Identifiers: A143-A144 of Table 3A. In some embodiments, the PEgRNA comprises a PBS comprising a sequence selected from the group consisting of SEQ Identifiers: B603-B611 of Table 3B. In some embodiments, the PEgRNA comprises an editing template comprising a sequence selected from the group consisting of SEQ Identifiers: C1875-C1880 of Table 3C. In some embodiments, the PEgRNA comprises a spacer comprising the sequence of SEQ Identifier: A145 of Table 3A. In some embodiments, the PEgRNA comprises a PBS comprising a sequence selected from the group consisting of SEQ Identifiers: B612-B620 of Table 3B. In some embodiments, the PEgRNA comprises an editing template comprising a sequence selected from the group consisting of SEQ Identifiers: C1881-C1884 of Table 3C. In some embodiments, the prime editing composition further comprises a ngRNA that comprises a spacer comprising a sequence selected from the group consisting of SEQ Identifiers: D363-D384 of Table 3D.

[0328] In some embodiments, the PEgRNA comprises a spacer comprising a sequence selected from the group consisting of SEQ Identifiers: A146-A147 of Table 3A. In some embodiments, the PEgRNA comprises a PBS comprising a sequence selected from the group consisting of SEQ Identifiers: B621-B629 of Table 3B. In some embodiments, the PEgRNA comprises an editing template comprising a sequence selected from the group consisting of SEQ Identifiers: C1885-C1906 of Table 3C. In some embodiments, the prime editing composition further comprises a ngRNA that comprises a spacer comprising a sequence selected from the group consisting of SEQ Identifiers: D332-D338, D349-D355, and D468-D470 of Table 3D.

[0329] In some embodiments, the PEgRNA comprises a spacer comprising the sequence of SEQ Identifier: A148 of Table 3A. In some embodiments, the PEgRNA comprises a PBS comprising a sequence selected from the group consisting of SEQ Identifiers: B630-B638 of Table 3B. In some embodiments, the PEgRNA comprises an editing template comprising a sequence selected from the group consisting of SEQ Identifiers: C1907-C1918 of Table 3C. In some embodiments, the prime editing composition further comprises a ngRNA that comprises a spacer comprising a sequence selected from the group consisting of SEQ Identifiers: D360, D430-D446, D453, and D454 of Table 3D.

[0330] In some embodiments, the PEgRNA comprises a spacer comprising a sequence selected from the group consisting of SEQ Identifiers: A149-A150 of Table 3A. In some embodiments, the PEgRNA comprises a PBS comprising a sequence selected from the group consisting of SEQ Identifiers: B639-B647 of Table 3B. In some embodiments, the PEgRNA comprises an editing template comprising a sequence selected from the group consisting of SEQ Identifiers: C1919-C1931 of Table 3C. In some embodiments, the prime editing composition further comprises a ngRNA that comprises a spacer comprising a sequence selected from the group consisting of SEQ Identifiers: D362-D384, D423, D424, D471, and D472 of Table 3D.

[0331] In some embodiments, the PEgRNA comprises a spacer comprising a sequence selected from the group consisting of SEQ Identifiers: A151-A152 of Table 3A. In some embodiments, the PEgRNA comprises a PBS comprising a sequence selected from the group consisting of SEQ Identifiers: B648-B656 of Table 3B. In some embodiments, the PEgRNA comprises an editing template comprising a sequence selected from the group consisting of SEQ Identifiers: C1932-C1952 of Table 3C. In some embodiments, the prime editing composition further comprises a ngRNA that comprises a spacer comprising a sequence selected from the group consisting of SEQ Identifiers: D362-D382, D423, D424, D427, and D471 of Table 3D.

[0332] In some embodiments, the PEgRNA comprises a spacer comprising a sequence selected from the group consisting of SEQ Identifiers: A153-A154 of Table 3A. In some embodiments, the PEgRNA comprises a PBS comprising a sequence selected from the group consisting of SEQ Identifiers: B657-B665 of Table 3B. In some embodiments, the PEgRNA comprises an editing template comprising a sequence selected from the group consisting of SEQ Identifiers: C1953-C1964 of Table 3C. In some embodiments, the prime editing composition further comprises a ngRNA that comprises a spacer comprising a sequence selected from the group consisting of SEQ Identifiers: D362-D384, and D397-D405 of Table 3D.

[0333] In some embodiments, the PEgRNA comprises a spacer comprising a sequence selected from the group consisting of SEQ Identifiers: A155-A157 of Table 3A. In some embodiments, the PEgRNA comprises a PBS comprising a sequence selected from the group consisting of SEQ Identifiers: B666-B674 of Table 3B. In some embodiments, the PEgRNA comprises an editing template comprising a sequence selected from the group consisting of SEQ Identifiers: C1965-C1995 of Table 3C. In some embodiments, the prime editing composition further comprises a ngRNA that comprises a spacer comprising a sequence selected from the group consisting of SEQ Identifiers: D328, D329, D330, D345, D346, D347, D350, D354, and D359 of Table 3D.

[0334] In some embodiments, the editing target sequence or the complementary sequence on the CFTR gene thereof comprises a mutation that encodes an amino acid substitution R334W, R334L, and/or I336K relative to a wild type CFTR polypeptide set forth in SEQ IDENTIFIER: 19, and wherein the editing template encodes an intended nucleotide edit that corrects the mutation. In some embodiments, the editing target sequence or the complementary sequence on the CFTR gene thereof comprises a C→→T mutation (c.1000C>T) at position 117,540,230, a G→→T mutation (c.1001G>T) at position 117,540,231, an insertion of G (c.1006_1007insG) at position 117,540,236, and/or a T→→A mutation (c.1007T>A) at position 117,540,237 of human chromosome 7 compared to a wild type CFTR gene. In some embodiments, the editing template comprises an intended nucleotide edit compared to the target CFTR gene, wherein incorporation of the intended nucleotide edit encoded by the editing template corrects the mutation. In some embodiments, incorporation of the one or more intended nucleotide edits results in a CFTR gene that encodes a functional CFTR polypeptide. In some embodiments, the editing template comprises a wild type CFTR gene sequence. Accordingly, in some embodiments, the newly synthesized single stranded DNA encoded by the editing template is capable of correcting the c.1000C>T mutation, the c.1001G>T mutation, the c.1006_1007insG mutation, and/or the c.1007T>A mutation in the target CFTR gene. In some embodiments, the newly synthesized single stranded DNA encoded by the editing template is capable of correcting all of the c.1000C>T mutation, the c.1001G>T mutation, the c.1006_1007insG mutation, and the c.1007T>A mutation in the target CFTR gene. In some embodiments, two or more of the c.1000C>T mutation, the c.1001G>T mutation, the c.1006_1007insG mutation, and the c.1007T>A mutation are located on the same CFTR gene. In some embodiments, the newly synthesized single stranded DNA encoded by the editing template is capable of correcting the c.1000C>T mutation, the c.1001G>T mutation, the c.1006_1007insG mutation, and the c.1007T>A mutation that are located on different CFTR genes. For example, in some embodiments, a subject may comprise two copies of CFTR genes, each comprising a different mutation selected from the group consisting of the c.1000C>T mutation, the c.1001G>T mutation, the c.1006_1007insG mutation, and the c.1007T>A mutation, all of which may be corrected by an editing template of a single PEgRNA. In some embodiments, the editing template is capable of correcting one or more, or all of the c.1000C>T mutation, the c.1001G>T mutation, the c.1006_1007insG mutation, and the c.1007T>A mutation that are in different subjects, wherein each subject may have one or more of the mutations.

[0335] In some embodiments, the PEgRNA comprises a spacer comprising a sequence selected from the group consisting of SEQ Identifiers: A158-A159 of Table 3A. In some embodiments, the PEgRNA comprises a PBS comprising a sequence selected from the group consisting of SEQ Identifiers: B675-B683 of Table 3B. In some embodiments, the PEgRNA comprises an editing template comprising a sequence selected from the group consisting of SEQ Identifiers: C1996-C2057 of Table 3.

[0336] In some embodiments, the prime editing composition further comprises a ngRNA that comprises a spacer comprising a sequence selected from the group consisting of SEQ Identifiers: D439-D446, D450, D452-D457, and D473-D488 of Table 3D. In some embodiments, the PEgRNA comprises a spacer comprising a sequence selected from the group consisting of SEQ Identifiers: A160-A161 of Table 3A. In some embodiments, the PEgRNA comprises a PBS comprising a sequence selected from the group consisting of SEQ Identifiers: B684-B692 of Table 3B. In some embodiments, the PEgRNA comprises an editing template comprising a sequence selected from the group consisting of SEQ Identifiers: C2058-C2099 of Table 3C. In some embodiments, the prime editing composition further comprises a ngRNA that comprises a spacer comprising a sequence selected from the group consisting of SEQ Identifiers: D366-D384, D367-D384, D398-D404, and D489-D495 of Table 3D. In some embodiments, the PEgRNA comprises a spacer comprising the sequence of SEQ Identifiers: A162 of Table 3A. In some embodiments, the PEgRNA comprises a PBS comprising a sequence selected from the group consisting of SEQ Identifiers: B693-B701 of Table 3B. In some embodiments, the PEgRNA comprises an editing template comprising a sequence selected from the group consisting of SEQ Identifiers: C2100-C2121 of Table 3C. In some embodiments, the prime editing composition further comprises a ngRNA that comprises a spacer comprising a sequence selected from the group consisting of SEQ Identifiers: D366-D384, and D 489-D494 of Table 3D.

[0337] In some embodiments, the PEgRNA comprises a spacer comprising a sequence selected from the group consisting of SEQ Identifiers: A163-A164 of Table 3A. In some embodiments, the PEgRNA comprises a PBS comprising a sequence selected from the group consisting of SEQ Identifiers: B702-B710 of Table 3B. In some embodiments, the PEgRNA comprises an editing template comprising a sequence selected from the group consisting of SEQ Identifiers: C2122-C2157 of Table 3C. In some embodiments, the prime editing composition further comprises a ngRNA that comprises a spacer comprising a sequence selected from the group consisting of SEQ Identifiers: D366-D384, D398-D404, and D489-D495 of Table 3D.

[0338] In some embodiments, the PEgRNA comprises a spacer comprising the sequence of SEQ Identifier: A165 of Table 3A. In some embodiments, the PEgRNA comprises a PBS comprising a sequence selected from the group consisting of SEQ Identifiers: B711-B719 of Table 3B. In some embodiments, the PEgRNA comprises an editing template comprising a sequence selected from the group consisting of SEQ Identifiers: C2158-C2176 of Table 3C. In some embodiments, the prime editing composition further comprises a ngRNA that comprises a spacer comprising a sequence selected from the group consisting of SEQ Identifiers: D366-DD384, and D489-D494 of Table 3D.

[0339] In some embodiments, the PEgRNA comprises a spacer comprising a sequence selected from the group consisting of SEQ Identifiers: A166-A167 of Table 3A. In some embodiments, the PEgRNA comprises a PBS comprising a sequence selected from the group consisting of SEQ Identifiers: B720-B728 of Table 3B. In some embodiments, the PEgRNA comprises an editing template comprising a sequence selected from the group consisting of SEQ Identifiers: C2177-C2207 of Table 3C. In some embodiments, the prime editing composition further comprises a ngRNA that comprises a spacer comprising a sequence selected from the group consisting of SEQ Identifiers: D440-D446, D453-D457, D475-D488, and D496-D506 of Table 3D.

[0340] In some embodiments, the PEgRNA comprises a spacer comprising a sequence selected from the group consisting of SEQ Identifiers: A168-A169 of Table 3A. In some embodiments, the PEgRNA comprises a PBS comprising a sequence selected from the group consisting of SEQ Identifiers: B729-B737 of Table 3B. In some embodiments, the PEgRNA comprises an editing template comprising a sequence selected from the group consisting of SEQ Identifiers: C2208-C2231 of Table 3C. In some embodiments, the prime editing composition further comprises a ngRNA that comprises a spacer comprising a sequence selected from the group consisting of SEQ Identifiers: D366-d384, D471, D472, and D489-D494 of Table 3D.

[0341] In some embodiments, the PEgRNA comprises a spacer comprising a sequence selected from the group consisting of SEQ Identifiers: A170-A171 of Table 3A. In some embodiments, the PEgRNA comprises a PBS comprising a sequence selected from the group consisting of SEQ Identifiers: B738-B746 of Table 3B. In some embodiments, the PEgRNA comprises an editing template comprising a sequence selected from the group consisting of SEQ Identifiers: C2232-C2262 of Table 3C. In some embodiments, the prime editing composition further comprises a ngRNA that comprises a spacer comprising a sequence selected from the group consisting of SEQ Identifiers: D366-D384, D471, D472, and D489-D492 of Table 3D.

[0342] In some embodiments, the PEgRNA comprises a spacer comprising a sequence selected from the group consisting of SEQ Identifiers: A172-A174 of Table 3A. In some embodiments, the PEgRNA comprises a PBS comprising a sequence selected from the group consisting of SEQ Identifiers: B747-B755 of Table 3B. In some embodiments, the PEgRNA comprises an editing template comprising a sequence selected from the group consisting of SEQ Identifiers: C2263-C2285 of Table 3C. In some embodiments, the PEgRNA comprises a spacer comprising a sequence selected from the group consisting of SEQ Identifiers: A175-A176 of Table 3A. In some embodiments, the PEgRNA comprises a PBS comprising a sequence selected from the group consisting of SEQ Identifiers: B756-B764 of Table 3B. In some embodiments, the PEgRNA comprises an editing template comprising a sequence selected from the group consisting of SEQ Identifiers: C2286-C2300 of Table 3C. In some embodiments, the prime editing composition further comprises a ngRNA that comprises a spacer comprising a sequence selected from the group consisting of SEQ Identifiers: D367-D384, D471, D472, D489-D494, D507, and D508 of Table 3D.

[0343] In some embodiments, the PEgRNA comprises a spacer comprising a sequence selected from the group consisting of SEQ Identifiers: A177-A180 of Table 3A. In some embodiments, the PEgRNA comprises a PBS comprising a sequence selected from the group consisting of SEQ Identifiers: B765-B773 of Table 3B. In some embodiments, the PEgRNA comprises an editing template comprising a sequence selected from the group consisting of SEQ Identifiers: C2301-C2316 of Table 3C. In some embodiments, the prime editing composition further comprises a ngRNA that comprises a spacer comprising a sequence selected from the group consisting of SEQ Identifiers: D509-D512 of Table 3D.

[0344] In some embodiments, the PEgRNA comprises a spacer comprising a sequence selected from the group consisting of SEQ Identifiers: A181-A183 of Table 3A. In some embodiments, the PEgRNA comprises a PBS comprising a sequence selected from the group consisting of SEQ Identifiers: B774-B782 of Table 3B. In some embodiments, the PEgRNA comprises an editing template comprising a sequence selected from the group consisting of SEQ Identifiers: C2317-C2347 of Table 3C. In some embodiments, the prime editing composition further comprises a ngRNA that comprises a spacer comprising a sequence selected from the group consisting of SEQ Identifiers: D329, D346, D354, D485, and D513-D 520 of Table 3D.

[0345] In some embodiments, the PEgRNA comprises a spacer comprising a sequence selected from the group consisting of SEQ Identifiers: A184-A187 of Table 3A. In some embodiments, the PEgRNA comprises a PBS comprising a sequence selected from the group consisting of SEQ Identifiers: B783-B791 of Table 3B. In some embodiments, the PEgRNA comprises an editing template comprising a sequence selected from the group consisting of SEQ Identifiers: C2348-C2391 of Table 3C. In some embodiments, the prime editing composition further comprises a ngRNA that comprises a spacer comprising a sequence selected from the group consisting of SEQ Identifiers: D329, D334-D338, D341, D346, D351-D355, D358, D485, and D513-D538 of Table 3D.

[0346] In some embodiments, the PEgRNA comprises a spacer comprising the sequence of SEQ Identifiers: A188 of Table 3A. In some embodiments, the PEgRNA comprises a PBS comprising a sequence selected from the group consisting of SEQ Identifiers: B792-B800 of Table 3B. In some embodiments, the PEgRNA comprises an editing template comprising the sequence of SEQ Identifiers: c2392 of Table 3C. In some embodiments, the prime editing composition further comprises a ngRNA that comprises a spacer comprising a sequence selected from the group consisting of SEQ Identifiers: D439-D446, D453-D457, and D475-D480 of Table 3D.

[0347] In some embodiments, the PEgRNA comprises a spacer comprising a sequence selected from the group consisting of SEQ Identifiers: A189-A191 of Table 3A. In some embodiments, the PEgRNA comprises a PBS comprising a sequence selected from the group consisting of SEQ Identifiers: B801-B809 of Table 3B. In some embodiments, the PEgRNA comprises an editing template comprising a sequence selected from the group consisting of SEQ Identifiers: C2393-C2412 of Table 3C. In some embodiments, the prime editing composition further comprises a ngRNA that comprises a spacer comprising a sequence selected from the group consisting of SEQ Identifiers: D376, D389-D395, D407-D412, D416-D422, D510, D539, and D540 of Table 3D.

[0348] In some embodiments, the PEgRNA comprises a spacer comprising a sequence selected from the group consisting of SEQ Identifiers: A192 of Table 3A. In some embodiments, the PEgRNA comprises a PBS comprising a sequence selected from the group consisting of SEQ Identifiers: B810-B818 of Table 3B. In some embodiments, the PEgRNA comprises an editing template comprising a sequence selected from the group consisting of SEQ Identifiers: C2413-C2418 of Table 3C. In some embodiments, the prime editing composition further comprises a ngRNA that comprises a spacer comprising a sequence selected from the group consisting of SEQ Identifiers: D369-D384, D489-D494, and D508 of Table 3D.

[0349] In some embodiments, the PEgRNA comprises a spacer comprising a sequence selected from the group consisting of SEQ Identifiers: A193-A194 of Table 3A. In some embodiments, the PEgRNA comprises a PBS comprising a sequence selected from the group consisting of SEQ Identifiers: B819-B827 of Table 3B. In some embodiments, the PEgRNA comprises an editing template comprising a sequence selected from the group consisting of SEQ Identifiers: C2419-C2449 of Table 3C. In some embodiments, the prime editing composition further comprises a ngRNA that comprises a spacer comprising a sequence selected from the group consisting of SEQ Identifiers: D509-D512 of Table 3D.

[0350] In some embodiments, the PEgRNA comprises a spacer comprising a sequence selected from the group consisting of SEQ Identifiers: A195-A197 of Table 3A. In some embodiments, the PEgRNA comprises a PBS comprising a sequence selected from the group consisting of SEQ Identifiers: B828-B836 of Table 3B. In some embodiments, the PEgRNA comprises an editing template comprising a sequence selected from the group consisting of SEQ Identifiers: C2450-C2466 of Table 3C. In some embodiments, the prime editing composition further comprises a ngRNA that comprises a spacer comprising a sequence selected from the group consisting of SEQ Identifiers: D376, D389-D395, D407-D412, D416-D422, D510, D539, and D540 of Table 3D.

[0351] In some embodiments, the PEgRNA comprises a spacer comprising a sequence selected from the group consisting of SEQ Identifiers: A198-A199 of Table 3A. In some embodiments, the PEgRNA comprises a PBS comprising a sequence selected from the group consisting of SEQ Identifiers: B837-B845 of Table 3B. In some embodiments, the PEgRNA comprises an editing template comprising a sequence selected from the group consisting of SEQ Identifiers: C2467-C2475 of Table 3C. In some embodiments, the prime editing composition further comprises a ngRNA that comprises a spacer comprising a sequence selected from the group consisting of SEQ Identifiers: D368-DD384, D471, D472, D489-D494, D507, and D508 of Table 3D.

[0352] In some embodiments, the PEgRNA comprises a spacer comprising a sequence selected from the group consisting of SEQ Identifiers: A200-A201 of Table 3A. In some embodiments, the PEgRNA comprises a PBS comprising a sequence selected from the group consisting of SEQ Identifiers: B846-B854 of Table 3B. In some embodiments, the PEgRNA comprises an editing template comprising a sequence selected from the group consisting of SEQ Identifiers: C2476-C2503 of Table 3C. In some embodiments, the prime editing composition further comprises a ngRNA that comprises a spacer comprising a sequence selected from the group consisting of SEQ Identifiers: D509-D512 of Table 3D.

[0353] In some embodiments, the PEgRNA comprises a spacer comprising a sequence selected from the group consisting of SEQ Identifiers: A202-A203 of Table 3A. In some embodiments, the PEgRNA comprises a PBS comprising a sequence selected from the group consisting of SEQ Identifiers: B855-B863 of Table 3B. In some embodiments, the PEgRNA comprises an editing template comprising a sequence selected from the group consisting of SEQ Identifiers: C2504-C2565 of Table 3C. In some embodiments, the prime editing composition further comprises a ngRNA that comprises a spacer comprising a sequence selected from the group consisting of SEQ Identifiers: D366-D384, D398-D404, D489D492, and D495 of Table 3D.

[0354] In some embodiments, the PEgRNA comprises a spacer comprising a sequence selected from the group consisting of SEQ Identifiers: A204-A205 of Table 3A. In some embodiments, the PEgRNA comprises a PBS comprising a sequence selected from the group consisting of SEQ Identifiers: B864-B872 of Table 3B. In some embodiments, the PEgRNA comprises an editing template comprising a sequence selected from the group consisting of SEQ Identifiers: C2566-C2596 of Table 3C. In some embodiments, the prime editing composition further comprises a ngRNA that comprises a spacer comprising a sequence selected from the group consisting of SEQ Identifiers: D366-D384, D471, D472, and D489-D492 of Table 3D.

[0355] In some embodiments, the PEgRNA comprises a spacer comprising a sequence selected from the group consisting of SEQ Identifiers: A206-A207 of Table 3A. In some embodiments, the PEgRNA comprises a PBS comprising a sequence selected from the group consisting of SEQ Identifiers: B873-B881 of Table 3B. In some embodiments, the PEgRNA comprises an editing template comprising a sequence selected from the group consisting of SEQ Identifiers: C2597-C2620 of Table 3C. In some embodiments, the prime editing composition further comprises a ngRNA that comprises a spacer comprising a sequence selected from the group consisting of SEQ Identifiers: D439-D446, D453-D457, D475-D487, and D496D505 of Table 3D.

[0356] In some embodiments, the PEgRNA comprises a spacer comprising a sequence selected from the group consisting of SEQ Identifiers: A208-A209 of Table 3A. In some embodiments, the PEgRNA comprises a PBS comprising a sequence selected from the group consisting of SEQ Identifiers: B882-B890 of Table 3B. In some embodiments, the PEgRNA comprises an editing template comprising a sequence selected from the group consisting of SEQ Identifiers: C2621-C2633 of Table 3C. In some embodiments, the prime editing composition further comprises a ngRNA that comprises a spacer comprising a sequence selected from the group consisting of SEQ Identifiers: D367-D384, D471, D472, D489-D494, D507, and D508 of Table 3D.

[0357] In some embodiments, the PEgRNA comprises a spacer comprising a sequence selected from the group consisting of SEQ Identifiers: A210-A213 of Table 3A. In some embodiments, the PEgRNA comprises a PBS comprising a sequence selected from the group consisting of SEQ Identifiers: B891-B899 of Table 3B. In some embodiments, the PEgRNA comprises an editing template comprising a sequence selected from the group consisting of SEQ Identifiers: C2634-C2695 of Table 3C. In some embodiments, the prime editing composition further comprises a ngRNA that comprises a spacer comprising a sequence selected from the group consisting of SEQ Identifiers: D376, D389-D395, D407-D412, D416-D422, D509-D512, D539, and D540 of Table 3D.

[0358] In some embodiments, the PEgRNA comprises a spacer comprising a sequence selected from the group consisting of SEQ Identifiers: A214-A217 of Table 3A. In some embodiments, the PEgRNA comprises a PBS comprising a sequence selected from the group consisting of SEQ Identifiers: B900-B908 of Table 3B. In some embodiments, the PEgRNA comprises an editing template comprising a sequence selected from the group consisting of SEQ Identifiers: C2696-C2718 of Table 3C. In some embodiments, the prime editing composition further comprises a ngRNA that comprises a spacer comprising a sequence selected from the group consisting of SEQ Identifiers: D331, D348, D361, D439-D446, D450, D452-D457, and D473-D486 of Table 3D.

[0359] In some embodiments, the PEgRNA comprises a spacer comprising the sequence of SEQ Identifier: A218 of Table 3A. In some embodiments, the PEgRNA comprises a PBS comprising a sequence selected from the group consisting of SEQ Identifiers: B909-B917 of Table 3B. In some embodiments, the PEgRNA comprises an editing template comprising a sequence selected from the group consisting of SEQ Identifiers: C2719-C2729 of Table 3C. In some embodiments, the prime editing composition further comprises a ngRNA that comprises a spacer comprising a sequence selected from the group consisting of SEQ Identifiers: D439-D457, and D475-D481 of Table 3D.

[0360] In some embodiments, the editing target sequence or the complementary sequence on the CFTR gene thereof comprises a mutation that encodes an amino acid substitution R347H or R347P relative to a wild type CFTR polypeptide set forth in SEQ IDENTIFIER: 19, and wherein the editing template encodes an intended nucleotide edit that corrects the mutation. In some embodiments, the editing target sequence or the complementary sequence on the CFTR gene thereof comprises a G→→A mutation (c.1040G>A) at position 117,540,270, a G→A mutation (c.1040G>C) at position 117,540,270, a G→→T mutation (c.1040G>T) at position 117,540,270, and/or a T→→A mutation (c.1043T>A) at position 117,540,273 of human chromosome 7 compared to a wild type CFTR gene. In some embodiments, the editing template comprises an intended nucleotide edit compared to the target CFTR gene, wherein incorporation of the intended nucleotide edit encoded by the editing template corrects the mutation. In some embodiments, incorporation of the one or more intended nucleotide edits results in a CFTR gene that encodes a functional CFTR polypeptide. In some embodiments, the editing template comprises a wild type CFTR gene sequence. Accordingly, in some embodiments, the newly synthesized single stranded DNA encoded by the editing template is capable of correcting the c.1040G>A mutation, the c.1040G>C mutation, the c.1040G>T mutation, and/or the c.1043T>A mutation in the target CFTR gene. In some embodiments, the newly synthesized single stranded DNA encoded by the editing template is capable of correcting all of the c.1040G>A mutation, the c.1040G>C mutation, the c.1040G>T mutation, and the c.1043T>A mutation in the target CFTR gene. In some embodiments, two or more of the c.1040G>A mutation, the c.1040G>C mutation, the c.1040G>T mutation, and the c.1043T>A mutation are located on the same CFTR gene. In some embodiments, the newly synthesized single stranded DNA encoded by the editing template is capable of correcting the c.1040G>A mutation, the c.1040G>C mutation, the c.1040G>T mutation, and the c.1043T>A mutation that are located on different CFTR genes. For example, in some embodiments, a subject may comprise two copies of CFTR genes, each comprising a different mutation selected from the group consisting of the c.1040G>A mutation, the c.1040G>C mutation, the c.1040G>T mutation, and the c.1043T>A mutation, all of which may be corrected by an editing template of a single PEgRNA. In some embodiments, the editing template is capable of correcting one or more, or all of the c.1040G>A mutation, the c.1040G>C mutation, the c.1040G>T mutation, and the c.1043T>A mutation that are in different subjects, wherein each subject may have one or more of the mutations.

[0361] In some embodiments, the PEgRNA comprises a spacer comprising a sequence selected from the group consisting of SEQ Identifiers: A219-A222 of Table 3A. In some embodiments, the PEgRNA comprises a PBS comprising a sequence selected from the group consisting of SEQ Identifiers: B918-B926 of Table 3B. In some embodiments, the PEgRNA comprises an editing template comprising a sequence selected from the group consisting of SEQ Identifiers: C2730-C2760 of Table 3C. In some embodiments, the prime editing composition further comprises a ngRNA that comprises a spacer comprising a sequence selected from the group consisting of SEQ Identifiers: D376-D384, D392-D395, D401D404, D410-D412, D419-D422, D489-D495, D508, D510, and D539-D 548 of Table 3D.

[0362] In some embodiments, the PEgRNA comprises a spacer comprising a sequence selected from the group consisting of SEQ Identifiers: A223-A224 of Table 3A. In some embodiments, the PEgRNA comprises a PBS comprising a sequence selected from the group consisting of SEQ Identifiers: B927-B935 of Table 3B. In some embodiments, the PEgRNA comprises an editing template comprising a sequence selected from the group consisting of SEQ Identifiers: C2761-C2804 of Table 3C. In some embodiments, the prime editing composition further comprises a ngRNA that comprises a spacer comprising a sequence selected from the group consisting of SEQ Identifiers: D509-D512, D549-D554 of Table 3D.

[0363] In some embodiments, the PEgRNA comprises a spacer comprising the sequence of SEQ Identifier: A225 of Table 3A. In some embodiments, the PEgRNA comprises a PBS comprising a sequence selected from the group consisting of SEQ Identifiers: B936-B944 of Table 3B. In some embodiments, the PEgRNA comprises an editing template comprising a sequence selected from the group consisting of SEQ Identifiers: C2805-C2827 of Table 3C. In some embodiments, the prime editing composition further comprises a ngRNA that comprises a spacer comprising a sequence selected from the group consisting of SEQ Identifiers: D376-D384, D489-D494, D508, D544, D545, and D555 of Table 3D.

[0364] In some embodiments, the PEgRNA comprises a spacer comprising the sequence of SEQ Identifiers: A226 of Table 3A. In some embodiments, the PEgRNA comprises a PBS comprising a sequence selected from the group consisting of SEQ Identifiers: B945-B953 of Table 3B. In some embodiments, the PEgRNA comprises an editing template comprising a sequence selected from the group consisting of SEQ Identifiers: C2828-C2855 of Table 3.

[0365] In some embodiments, the prime editing composition further comprises a ngRNA that comprises a spacer comprising a sequence selected from the group consisting of SEQ Identifiers: D453-D457, D475-D486, and D556-D569 of Table 3D.

[0366] In some embodiments, the PEgRNA comprises a spacer comprising a sequence selected from the group consisting of SEQ Identifiers: A227-A228 of Table 3A. In some embodiments, the PEgRNA comprises a PBS comprising a sequence selected from the group consisting of SEQ Identifiers: B954-B962 of Table 3B. In some embodiments, the PEgRNA comprises an editing template comprising a sequence selected from the group consisting of SEQ Identifiers: C2856-C2866 of Table 3C. In some embodiments, the prime editing composition further comprises a ngRNA that comprises a spacer comprising a sequence selected from the group consisting of SEQ Identifiers: D380-D384, D403, D404, D489-D 495, D508, D544, D545, D555, D570, and D571 of Table 3D.

[0367] In some embodiments, the PEgRNA comprises a spacer comprising a sequence selected from the group consisting of SEQ Identifiers: A229-A232 of Table 3A. In some embodiments, the PEgRNA comprises a PBS comprising a sequence selected from the group consisting of SEQ Identifiers: B963-B971 of Table 3B. In some embodiments, the PEgRNA comprises an editing template comprising a sequence selected from the group consisting of SEQ Identifiers: C2867-C2884 of Table 3C. In some embodiments, the prime editing composition further comprises a ngRNA that comprises a spacer comprising a sequence selected from the group consisting of SEQ Identifiers: D394, D395, D411, D412, D421, D422, D509-D512, and D539, D540, D549-D554 of Table 3D.

[0368] In some embodiments, the PEgRNA comprises a spacer comprising a sequence selected from the group consisting of SEQ Identifiers: A233-A234 of Table 3A. In some embodiments, the PEgRNA comprises a PBS comprising a sequence selected from the group consisting of SEQ Identifiers: B972-B980 of Table 3B. In some embodiments, the PEgRNA comprises an editing template comprising a sequence selected from the group consisting of SEQ Identifiers: C2885-C2915 of Table 3C. In some embodiments, the prime editing composition further comprises a ngRNA that comprises a spacer comprising a sequence selected from the group consisting of SEQ Identifiers: D376-D384, D401-D404, D489-D495, D508, D542, D543, D544, and D546 of Table 3D.

[0369] In some embodiments, the PEgRNA comprises a spacer comprising the sequence of SEQ Identifier: A235 of Table 3A. In some embodiments, the PEgRNA comprises a PBS comprising a sequence selected from the group consisting of SEQ Identifiers: B981-B989 of Table 3B. In some embodiments, the PEgRNA comprises an editing template comprising a sequence selected from the group consisting of SEQ Identifiers: C2916-C2946 of Table 3C. In some embodiments, the prime editing composition further comprises a ngRNA that comprises a spacer comprising a sequence selected from the group consisting of SEQ Identifiers: D376-D384, D489-d494, D508, D542, D543, and D544 of Table 3D.

[0370] In some embodiments, the PEgRNA comprises a spacer comprising the sequence of SEQ Identifier: A236 of Table 3A. In some embodiments, the PEgRNA comprises a PBS comprising a sequence selected from the group consisting of SEQ Identifiers: B990-B998 of Table 3B. In some embodiments, the PEgRNA comprises an editing template comprising a sequence selected from the group consisting of SEQ Identifiers: C2947-C2975 of Table 3C. In some embodiments, the prime editing composition further comprises a ngRNA that comprises a spacer comprising a sequence selected from the group consisting of SEQ Identifiers: D376-D384, D489-D494, D508, D543, D544, D545, and D555 of Table 3D.

[0371] In some embodiments, the PEgRNA comprises a spacer comprising the sequence of SEQ Identifiers: A237 of Table 3A. In some embodiments, the PEgRNA comprises a PBS comprising a sequence selected from the group consisting of SEQ Identifiers: B999-B1007 of Table 3B. In some embodiments, the PEgRNA comprises an editing template comprising a sequence selected from the group consisting of SEQ Identifiers: C2976-C3006 of Table 3C. In some embodiments, the prime editing composition further comprises a ngRNA that comprises a spacer comprising a sequence selected from the group consisting of SEQ Identifiers: D453-D457, D475-D486, D556-D569, and D572 of Table 3D.

[0372] In some embodiments, the PEgRNA comprises a spacer comprising a sequence selected from the group consisting of SEQ Identifiers: A238-A240 of Table 3A. In some embodiments, the PEgRNA comprises a PBS comprising a sequence selected from the group consisting of SEQ Identifiers: B1008-B1016 of Table 3B. In some embodiments, the PEgRNA comprises an editing template comprising a sequence selected from the group consisting of SEQ Identifiers: C3007-C3037 of Table 3C. In some embodiments, the prime editing composition further comprises a ngRNA that comprises a spacer comprising a sequence selected from the group consisting of SEQ Identifiers: D485, D513-D520, and D573-D584 of Table 3D.

[0373] In some embodiments, the PEgRNA comprises a spacer comprising a sequence selected from the group consisting of SEQ Identifiers: A241-A242 of Table 3A. In some embodiments, the PEgRNA comprises a PBS comprising a sequence selected from the group consisting of SEQ Identifiers: B1017-B1025 of Table 3B. In some embodiments, the PEgRNA comprises an editing template comprising a sequence selected from the group consisting of SEQ Identifiers: C3038-C3049 of Table 3C. In some embodiments, the prime editing composition further comprises a ngRNA that comprises a spacer comprising a sequence selected from the group consisting of SEQ Identifiers: D380-D384, D471D472, D489-D494, D507, D508, D544, D545, D555, D570, D571, D585, and D586 of Table 3D.

[0374] In some embodiments, the PEgRNA comprises a spacer comprising a sequence selected from the group consisting of SEQ Identifiers: A243-A244 of Table 3A. In some embodiments, the PEgRNA comprises a PBS comprising a sequence selected from the group consisting of SEQ Identifiers: B1026-B1034 of Table 3B. In some embodiments, the PEgRNA comprises an editing template comprising a sequence selected from the group consisting of SEQ Identifiers: C3050-C3080 of Table 3C. In some embodiments, the prime editing composition further comprises a ngRNA that comprises a spacer comprising a sequence selected from the group consisting of SEQ Identifiers: D376-D384, D471D472, D489-D494, D507, D508, D542, D543, D544, D587, and D588 of Table 3D.

[0375] In some embodiments, the PEgRNA comprises a spacer comprising a sequence selected from the group consisting of SEQ Identifiers: A245-A247 of Table 3A. In some embodiments, the PEgRNA comprises a PBS comprising a sequence selected from the group consisting of SEQ Identifiers: B1035-B1043 of Table 3B. In some embodiments, the PEgRNA comprises an editing template comprising a sequence selected from the group consisting of SEQ Identifiers: C3081-C3111 of Table 3C. In some embodiments, the prime editing composition further comprises a ngRNA that comprises a spacer comprising a sequence selected from the group consisting of SEQ Identifiers: D376, D392-D395, D410D412, D419, D422, D510, D539, D540, D541, D547, and D548 of Table 3D.

[0376] In some embodiments, the PEgRNA comprises a spacer comprising a sequence selected from the group consisting of SEQ Identifiers: A248-A249 of Table 3A. In some embodiments, the PEgRNA comprises a PBS comprising a sequence selected from the group consisting of SEQ Identifiers: B1044-B1052 of Table 3B. In some embodiments, the PEgRNA comprises an editing template comprising a sequence selected from the group consisting of SEQ Identifiers: C3112-C3119 of Table 3C. In some embodiments, the prime editing composition further comprises a ngRNA that comprises a spacer comprising a sequence selected from the group consisting of SEQ Identifiers: D509D512, and D549-D554 of Table 3D.

[0377] In some embodiments, the PEgRNA comprises a spacer comprising the sequence of SEQ Identifier: A250 of Table 3A. In some embodiments, the PEgRNA comprises a PBS comprising a sequence selected from the group consisting of SEQ Identifiers: B1053-B1061 of Table 3B. In some embodiments, the PEgRNA comprises an editing template comprising a sequence selected from the group consisting of SEQ Identifiers: C3120-C3124 of Table 3C. In some embodiments, the prime editing composition further comprises a ngRNA that comprises a spacer comprising a sequence selected from the group consisting of SEQ Identifiers: D380-D384, D489-D494, D508, D544, D545, D555, D570, and D571 of Table 3D.

[0378] In some embodiments, the PEgRNA comprises a spacer comprising a sequence selected from the group consisting of SEQ Identifiers: A251-A252 of Table 3A. In some embodiments, the PEgRNA comprises a PBS comprising a sequence selected from the group consisting of SEQ Identifiers: B1062-B1070 of Table 3B. In some embodiments, the PEgRNA comprises an editing template comprising a sequence selected from the group consisting of SEQ Identifiers: C3125-C3149 of Table 3C. In some embodiments, the prime editing composition further comprises a ngRNA that comprises a spacer comprising a sequence selected from the group consisting of SEQ Identifiers: D376-D384, D471, D472, D489-D494, D507, D508, D544, D545, D555, and D585 of Table 3D.

[0379] In some embodiments, the PEgRNA comprises a spacer comprising a sequence selected from the group consisting of SEQ Identifiers: A253-A254 of Table 3A. In some embodiments, the PEgRNA comprises a PBS comprising a sequence selected from the group consisting of SEQ Identifiers: B1071-B1079 of Table 3B. In some embodiments, the PEgRNA comprises an editing template comprising a sequence selected from the group consisting of SEQ Identifiers: C3150-C3211 of Table 3C. In some embodiments, the prime editing composition further comprises a ngRNA that comprises a spacer comprising a sequence selected from the group consisting of SEQ Identifiers: D509-D512, D549, and D552 of Table 3D.

[0380] In some embodiments, the PEgRNA comprises a spacer comprising a sequence selected from the group consisting of SEQ Identifiers: A255-A256 of Table 3A. In some embodiments, the PEgRNA comprises a PBS comprising a sequence selected from the group consisting of SEQ Identifiers: B1080-B1088 of Table 3B. In some embodiments, the PEgRNA comprises an editing template comprising a sequence selected from the group consisting of SEQ Identifiers: C3212-C3232 of Table 3C. In some embodiments, the prime editing composition further comprises a ngRNA that comprises a spacer comprising a sequence selected from the group consisting of SEQ Identifiers: D376-D384, D471, D472, D489-D494, D507, D508, D544, D545, D555, D570, D585, and D586 of Table 3.

[0381] In some embodiments, the PEgRNA comprises a spacer comprising a sequence selected from the group consisting of SEQ Identifiers: A257-A260 of Table 3A. In some embodiments, the PEgRNA comprises a PBS comprising a sequence selected from the group consisting of SEQ Identifiers: B1089-B1097 of Table 3B. In some embodiments, the PEgRNA comprises an editing template comprising a sequence selected from the group consisting of SEQ Identifiers: C3233-C3252 of Table 3C. In some embodiments, the prime editing composition further comprises a ngRNA that comprises a spacer comprising a sequence selected from the group consisting of SEQ Identifiers: D380-D384, D394, D395, D403, D404, D411, D412, D421, D422, D489-D495, D508, D510, D539, D540, D544, D545, D555, D570, D571, D589, and D590 of Table 3D.

[0382] In some embodiments, the PEgRNA comprises a spacer comprising the sequence of SEQ Identifier: A261 of Table 3A. In some embodiments, the PEgRNA comprises a PBS comprising a sequence selected from the group consisting of SEQ Identifiers: B1098-B1106 of Table 3B. In some embodiments, the PEgRNA comprises an editing template comprising a sequence selected from the group consisting of SEQ Identifiers: C3253-C3275 of Table 3C. In some embodiments, the prime editing composition further comprises a ngRNA that comprises a spacer comprising a sequence selected from the group consisting of SEQ Identifiers: D445, D446, D453-D457, D475-D486, and D556-D 567 of Table 3D.

[0383] In some embodiments, the PEgRNA comprises a spacer comprising a sequence selected from the group consisting of SEQ Identifiers: A262-A264 of Table 3A. In some embodiments, the PEgRNA comprises a PBS comprising a sequence selected from the group consisting of SEQ Identifiers: B1107-B1115 of Table 3B. In some embodiments, the PEgRNA comprises an editing template comprising a sequence selected from the group consisting of SEQ Identifiers: C3276-C3295 of Table 3C. In some embodiments, the PEgRNA comprises a spacer comprising a sequence selected from the group consisting of SEQ Identifiers: A265-A266 of Table 3A. In some embodiments, the PEgRNA comprises a PBS comprising a sequence selected from the group consisting of SEQ Identifiers: B1116-B1124 of Table 3B. In some embodiments, the PEgRNA comprises an editing template comprising a sequence selected from the group consisting of SEQ Identifiers: C3296-C3326 of Table 3C. In some embodiments, the prime editing composition further comprises a ngRNA that comprises a spacer comprising a sequence selected from the group consisting of SEQ Identifiers: D452, D454-D457, D473-D486, D556-D569, D572, and D591-D 595 of Table 3D.

[0384] In some embodiments, the PEgRNA comprises a spacer comprising the sequence of SEQ Identifier: A267 of Table 3A. In some embodiments, the PEgRNA comprises a PBS comprising a sequence selected from the group consisting of SEQ Identifiers: B1125-B1133 of Table 3B. In some embodiments, the PEgRNA comprises an editing template comprising a sequence selected from the group consisting of SEQ Identifiers: C3327-C3344 of Table 3C. In some embodiments, the prime editing composition further comprises a ngRNA that comprises a spacer comprising a sequence selected from the group consisting of SEQ Identifiers: D376-D384, D489-D494, D508, D544, D545, D555, and D570 of Table 3D.

[0385] In some embodiments, the PEgRNA comprises a spacer comprising the sequence of SEQ Identifier: A220 of Table 3A. In some embodiments, the PEgRNA comprises a PBS comprising a sequence selected from the group consisting of SEQ Identifiers: B918-B926 of Table 3B. In some embodiments, the PEgRNA comprises an editing template comprising a sequence selected from the group consisting of SEQ Identifiers: C2730-C2760 of Table 3C. In some embodiments, the prime editing composition further comprises a ngRNA that comprises a spacer comprising a sequence selected from the group consisting of SEQ Identifiers: D376-D384, D489-d494, D508, D542, D543, D544, and D545 of Table 3D.

[0386] In some embodiments, the PEgRNA comprises a spacer comprising a sequence selected from the group consisting of SEQ Identifiers: A223-A224 of Table 3A. In some embodiments, the PEgRNA comprises a PBS comprising a sequence selected from the group consisting of SEQ Identifiers: B927-B935 of Table 3B. In some embodiments, the PEgRNA comprises an editing template comprising a sequence selected from the group consisting of SEQ Identifiers: C2761-C2804 of Table 3C. In some embodiments, the prime editing composition further comprises a ngRNA that comprises a spacer comprising a sequence selected from the group consisting of SEQ Identifiers: D509-D512, and D549-D 554 of Table 3D.

[0387] In some embodiments, the PEgRNA comprises a spacer comprising the sequence of SEQ Identifier: A225 of Table 3A. In some embodiments, the PEgRNA comprises a PBS comprising a sequence selected from the group consisting of SEQ Identifiers: B936-B944 of Table 3B. In some embodiments, the PEgRNA comprises an editing template comprising a sequence selected from the group consisting of SEQ Identifiers: C2805-C2827 of Table 3C. In some embodiments, the prime editing composition further comprises a ngRNA that comprises a spacer comprising a sequence selected from the group consisting of SEQ Identifiers: D376-D384, D489-D494, D508, D544, D545, and D555 of Table 3D.

[0388] In some embodiments, the PEgRNA comprises a spacer comprising the sequence of SEQ Identifier: A226 of Table 3A. In some embodiments, the PEgRNA comprises a PBS comprising a sequence selected from the group consisting of SEQ Identifiers: B945-B953 of Table 3B. In some embodiments, the PEgRNA comprises an editing template comprising a sequence selected from the group consisting of SEQ Identifiers: C2828-C2855 of Table 3C. In some embodiments, the prime editing composition further comprises a ngRNA that comprises a spacer comprising a sequence selected from the group consisting of SEQ Identifiers: D453-D457, D475-D486, and D556-D 569 of Table 3D.

[0389] In some embodiments, the PEgRNA comprises a spacer comprising a sequence selected from the group consisting of SEQ Identifiers: A227-A228 of Table 3A. In some embodiments, the PEgRNA comprises a PBS comprising a sequence selected from the group consisting of SEQ Identifiers: B954-B962 of Table 3B. In some embodiments, the PEgRNA comprises an editing template comprising a sequence selected from the group consisting of SEQ Identifiers: C2856-C2866 of Table 3C. In some embodiments, the prime editing composition further comprises a ngRNA that comprises a spacer comprising a sequence selected from the group consisting of SEQ Identifiers: D380-D384, D403, D404, D489-D495, D508, D544, D545, D555, D570, and D571 of Table 3D.

[0390] In some embodiments, the PEgRNA comprises a spacer comprising a sequence selected from the group consisting of SEQ Identifiers: A229-A232 of Table 3A. In some embodiments, the PEgRNA comprises a PBS comprising a sequence selected from the group consisting of SEQ Identifiers: B963-B971 of Table 3B. In some embodiments, the PEgRNA comprises an editing template comprising a sequence selected from the group consisting of SEQ Identifiers: C2867-C2884 of Table 3C. In some embodiments, the prime editing composition further comprises a ngRNA that comprises a spacer comprising a sequence selected from the group consisting of SEQ Identifiers: D394, D395, D411, D412, D421, D422, D509, D510, D511, D512, D539, D540, and D549-D 554 of Table 3D.

[0391] In some embodiments, the PEgRNA comprises a spacer comprising the sequence of SEQ Identifier: A235 of Table 3A. In some embodiments, the PEgRNA comprises a PBS comprising a sequence selected from the group consisting of SEQ Identifiers: B981-B989 of Table 3B. In some embodiments, the PEgRNA comprises an editing template comprising a sequence selected from the group consisting of SEQ Identifiers: C2916-C2946 of Table 3C. In some embodiments, the prime editing composition further comprises a ngRNA that comprises a spacer comprising a sequence selected from the group consisting of SEQ Identifiers: D376-D384, D489-D494, D508, D542, D543, and D544 of Table 3D.

[0392] In some embodiments, the PEgRNA comprises a spacer comprising the sequence of SEQ Identifier: A236 of Table 3A. In some embodiments, the PEgRNA comprises a PBS comprising a sequence selected from the group consisting of SEQ Identifiers: B990-B998 of Table 3B. In some embodiments, the PEgRNA comprises an editing template comprising a sequence selected from the group consisting of SEQ Identifiers: C2947-C2975 of Table 3C. In some embodiments, the prime editing composition further comprises a ngRNA that comprises a spacer comprising a sequence selected from the group consisting of SEQ Identifiers: D376-D384, D489-D494, D508, D543, D544, D545, and D555 of Table 3D.

[0393] In some embodiments, the PEgRNA comprises a spacer comprising the sequence of SEQ Identifier: A237 of Table 3A. In some embodiments, the PEgRNA comprises a PBS comprising a sequence selected from the group consisting of SEQ Identifiers: B999-B1007 of Table 3B. In some embodiments, the PEgRNA comprises an editing template comprising a sequence selected from the group consisting of SEQ Identifiers: C2976-C3006 of Table 3C. In some embodiments, the prime editing composition further comprises a ngRNA that comprises a spacer comprising a sequence selected from the group consisting of SEQ Identifiers: D453-D457, D475-D486, D556-D569, and D572 of Table 3D.

[0394] In some embodiments, the PEgRNA comprises a spacer comprising a sequence selected from the group consisting of SEQ Identifiers: A268-A270 of Table 3A. In some embodiments, the PEgRNA comprises a PBS comprising a sequence selected from the group consisting of SEQ Identifiers: B1008-B1016 of Table 3B. In some embodiments, the PEgRNA comprises an editing template comprising a sequence selected from the group consisting of SEQ Identifiers: C3007-C3037 of Table 3C. In some embodiments, the prime editing composition further comprises a ngRNA that comprises a spacer comprising a sequence selected from the group consisting of SEQ Identifiers: D485, D513-D520, and D573-D584 of Table 3D.

[0395] In some embodiments, the PEgRNA comprises a spacer comprising a sequence selected from the group consisting of SEQ Identifiers: A241-A242 of Table 3A. In some embodiments, the PEgRNA comprises a PBS comprising a sequence selected from the group consisting of SEQ Identifiers: B1017-B1025 of Table 3B. In some embodiments, the PEgRNA comprises an editing template comprising a sequence selected from the group consisting of SEQ Identifiers: C3038-C3049 of Table 3C. In some embodiments, the prime editing composition further comprises a ngRNA that comprises a spacer comprising a sequence selected from the group consisting of SEQ Identifiers: D380-D384, D471, D472, D489-D494, D507, D508, D544, D545, D555, D570, D571, D585, and D586 of Table 3D.

[0396] In some embodiments, the PEgRNA comprises a spacer comprising a sequence selected from the group consisting of SEQ Identifiers: A271-A272 of Table 3A. In some embodiments, the PEgRNA comprises a PBS comprising a sequence selected from the group consisting of SEQ Identifiers: B1026-B1034 of Table 3B. In some embodiments, the PEgRNA comprises an editing template comprising a sequence selected from the group consisting of SEQ Identifiers: C3050-C3080 of Table 3C. In some embodiments, the prime editing composition further comprises a ngRNA that comprises a spacer comprising a sequence selected from the group consisting of SEQ Identifiers: D376-D 384, D471, D472, D489-D494, D507, D508, D542, D543, D544, D587, and D588 of Table 3D.

[0397] In some embodiments, the PEgRNA comprises a spacer comprising a sequence selected from the group consisting of SEQ Identifiers: A248-A249 of Table 3A. In some embodiments, the PEgRNA comprises a PBS comprising a sequence selected from the group consisting of SEQ Identifiers: B1044-B1052 of Table 3B. In some embodiments, the PEgRNA comprises an editing template comprising a sequence selected from the group consisting of SEQ Identifiers: C3112-C3119 of Table 3C. In some embodiments, the prime editing composition further comprises a ngRNA that comprises a spacer comprising a sequence selected from the group consisting of SEQ Identifiers: D509-D512, and D549-D554 of Table 3D.

[0398] In some embodiments, the PEgRNA comprises a spacer comprising the of SEQ Identifiers: A250 of Table 3A. In some embodiments, the PEgRNA comprises a PBS comprising a sequence selected from the group consisting of SEQ Identifiers: B1053-B1061 of Table 3B. In some embodiments, the PEgRNA comprises an editing template comprising a sequence selected from the group consisting of SEQ Identifiers: C3120-C3124 of Table 3C. In some embodiments, the prime editing composition further comprises a ngRNA that comprises a spacer comprising a sequence selected from the group consisting of SEQ Identifiers: D380-D384, D489-D494, D508, D544, D545, D555, D570, and D571 of Table 3D.

[0399] In some embodiments, the PEgRNA comprises a spacer comprising a sequence selected from the group consisting of SEQ Identifiers: A251-A252 of Table 3A. In some embodiments, the PEgRNA comprises a PBS comprising a sequence selected from the group consisting of SEQ Identifiers: B1062-B1070 of Table 3B. In some embodiments, the PEgRNA comprises an editing template comprising a sequence selected from the group consisting of SEQ Identifiers: C3125-C3149 of Table 3C. In some embodiments, the prime editing composition further comprises a ngRNA that comprises a spacer comprising a sequence selected from the group consisting of SEQ Identifiers: D376-D384, D471, D472, D489-D494, D507, D508, D544, D545, D555, and D585 of Table 3D.

[0400] In some embodiments, the PEgRNA comprises a spacer comprising a sequence selected from the group consisting of SEQ Identifiers: A273-A274 of Table 3A. In some embodiments, the PEgRNA comprises a PBS comprising a sequence selected from the group consisting of SEQ Identifiers: B1071-B1079 of Table 3B. In some embodiments, the PEgRNA comprises an editing template comprising a sequence selected from the group consisting of SEQ Identifiers: C3150-C3211 of Table 3C. In some embodiments, the prime editing composition further comprises a ngRNA that comprises a spacer comprising a sequence selected from the group consisting of SEQ Identifiers: D509, D510, D511, D512, D549, and D552 of Table 3D.

[0401] In some embodiments, the PEgRNA comprises a spacer comprising a sequence selected from the group consisting of SEQ Identifiers: A255-A256 of Table 3A. In some embodiments, the PEgRNA comprises a PBS comprising a sequence selected from the group consisting of SEQ Identifiers: B1080-B1088 of Table 3B. In some embodiments, the PEgRNA comprises an editing template comprising a sequence selected from the group consisting of SEQ Identifiers: C3212-C3232 of Table 3C. In some embodiments, the prime editing composition further comprises a ngRNA that comprises a spacer comprising a sequence selected from the group consisting of SEQ Identifiers: D376-D384, D471, D472, D489-D494, D507, D508, D544, D545, D555, D570, D585, and D586 of Table 3D.

[0402] In some embodiments, the PEgRNA comprises a spacer comprising a sequence selected from the group consisting of SEQ Identifiers: A257-A260 of Table 3A. In some embodiments, the PEgRNA comprises a PBS comprising a sequence selected from the group consisting of SEQ Identifiers: B1089-B1097 of Table 3B. In some embodiments, the PEgRNA comprises an editing template comprising a sequence selected from the group consisting of SEQ Identifiers: C3233-C3252 of Table 3C. In some embodiments, the prime editing composition further comprises a ngRNA that comprises a spacer comprising a sequence selected from the group consisting of SEQ Identifiers: D380-D384, D394, D395, D403, D404, D411, D412, D421, D422, D489-D495, D508, D510, D539, D540, D544, D545, D555, D570, D571, D589, and D590 of Table 3D.

[0403] In some embodiments, the PEgRNA comprises a spacer comprising the sequence of SEQ Identifier: A261 of Table 3A. In some embodiments, the PEgRNA comprises a PBS comprising a sequence selected from the group consisting of SEQ Identifiers: B1098-B1106 of Table 3B. In some embodiments, the PEgRNA comprises an editing template comprising a sequence selected from the group consisting of SEQ Identifiers: C3253-C3275 of Table 3C. In some embodiments, the prime editing composition further comprises a ngRNA that comprises a spacer comprising a sequence selected from the group consisting of SEQ Identifiers: D445, D446, D453-D457, D475-D486, and D556-D 567 of Table 3D.

[0404] In some embodiments, the PEgRNA comprises a spacer comprising a sequence selected from the group consisting of SEQ Identifiers: A262-A264 of Table 3A. In some embodiments, the PEgRNA comprises a PBS comprising a sequence selected from the group consisting of SEQ Identifiers: B1107-B1115 of Table 3B. In some embodiments, the PEgRNA comprises an editing template comprising a sequence selected from the group consisting of SEQ Identifiers: C3276-C3295 of Table 3C. In some embodiments, the PEgRNA comprises a spacer comprising a sequence selected from the group consisting of SEQ Identifiers: A275-A276 of Table 3A. In some embodiments, the PEgRNA comprises a PBS comprising a sequence selected from the group consisting of SEQ Identifiers: B1116-B1124 of Table 3B. In some embodiments, the PEgRNA comprises an editing template comprising a sequence selected from the group consisting of SEQ Identifiers: C3296-C3326 of Table 3C. In some embodiments, the prime editing composition further comprises a ngRNA that comprises a spacer comprising a sequence selected from the group consisting of SEQ Identifiers: D452, D454-D457, D473-D486, D556-D569, D572, and D591-D 595 of Table 3D.

[0405] In some embodiments, the PEgRNA comprises a spacer comprising the sequence of SEQ Identifier: A267 of Table 3A. In some embodiments, the PEgRNA comprises a PBS comprising a sequence selected from the group consisting of SEQ Identifiers: B1125-B1133 of Table 3B. In some embodiments, the PEgRNA comprises an editing template comprising a sequence selected from the group consisting of SEQ Identifiers: C3327-C3344 of Table 3C. In some embodiments, the prime editing composition further comprises a ngRNA that comprises a spacer comprising a sequence selected from the group consisting of SEQ Identifiers: D376-D384, D489-D494, D508, D544, D545, D555, and D570 of Table 3D.

[0406] In some embodiments, the editing target sequence is in exon 10 of the CFTR gene.

[0407] In some embodiments, the editing target sequence or the complementary sequence on the CFTR gene thereof comprises a mutation that encodes an amino acid substitution A455E relative to a wild type CFTR polypeptide set forth in SEQ IDENTIFIER: 19, and wherein the editing template encodes an intended nucleotide edit that corrects the mutation. In some embodiments, the editing target sequence or the complementary sequence on the CFTR gene thereof comprises a C→→A mutation (c.1364C>A) at position 117,548,795, a A→→C mutation (c.1355A>C) at position 117,548,786, a deletion of T (c.1358delT) at position 117,548,789, a deletion of TTG (c.1360_1362delTTG) at position 117,548,791 a deletion of GG (c.1365_1366delGG) at position 117,548,796, a G→→T mutation (c.1366G>T) at position 117,548,797, a deletion of G (c.1366delG) at position 117,548,797, a G→C mutation (c.1369G>C) at position 117,548,800, a deletion of G (c.1373delG) at position 117,548,804, and/or a G→→T mutation (c.1373G>T) at position 117,548,804 of human chromosome 7 compared to a wild type CFTR gene. In some embodiments, the editing template comprises an intended nucleotide edit compared to the target CFTR gene, wherein incorporation of the intended nucleotide edit encoded by the editing template corrects the mutation. In some embodiments, the editing template comprises a wild type CFTR gene sequence. Accordingly, in some embodiments, the newly synthesized single stranded DNA encoded by the editing template is capable of correcting the c.1364C>A mutation, the c.1355A>C mutation, the c.1358delT mutation, the c.1360_1362delTTG mutation, the c.1365_1366delGG mutation, the c.1366G>T mutation, the c.1366delG mutation, the c.1369G>C mutation, the c.1373delG mutation, and/or the c.1373G>T mutation in the target CFTR gene. In some embodiments, the newly synthesized single stranded DNA encoded by the editing template is capable of correcting all of the c.1364C>A mutation, the c.1355A>C mutation, the c.1358delT mutation, the c.1360_1362delTTG mutation, the c.1365_1366delGG mutation, the c.1366G>T mutation, the c.1366delG mutation, the c.1369G>C mutation, the c.1373delG mutation, and the c.1373G>T mutation in the target CFTR gene. In some embodiments, two or more of the c.1364C>A mutation, the c.1355A>C mutation, the c.1358delT mutation, the c.1360_1362delTTG mutation, the c.1365_1366delGG mutation, the c.1366G>T mutation, the c.1366delG mutation, the c.1369G>C mutation, the c.1373delG mutation, and the c.1373G>T mutation are located on the same CFTR gene. In some embodiments, the newly synthesized single stranded DNA encoded by the editing template is capable of correcting the c.1364C>A mutation, the c.1355A>C mutation, the c.1358delT mutation, the c.1360_1362delTTG mutation, the c.1365_1366delGG mutation, the c.1366G>T mutation, the c.1366delG mutation, the c.1369G>C mutation, the c.1373delG mutation, and the c.1373G>T mutation that are located on different CFTR genes. For example, in some embodiments, a subject may comprise two copies of CFTR genes, each comprising a different mutation selected from the group consisting of the c.1364C>A mutation, the c.1355A>C mutation, the c.1358delT mutation, the c.1360_1362delTTG mutation, the c.1365_1366delGG mutation, the c.1366G>T mutation, the c.1366delG mutation, the c.1369G>C mutation, the c.1373delG mutation, and the c.1373G>T mutation, all of which may be corrected by an editing template of a single PEgRNA. In some embodiments, the editing template is capable of correcting one or more, or all of the c.1364C>A mutation, the c.1355A>C mutation, the c.1358delT mutation, the c.1360_1362delTTG mutation, the c.1365_1366delGG mutation, the c.1366G>T mutation, the c.1366delG mutation, the c.1369G>C mutation, the c.1373delG mutation, and the c.1373G>T mutation that are in different subjects, wherein each subject may have one or more of the mutations.

[0408] In some embodiments, the PEgRNA comprises a spacer comprising a sequence selected from the group consisting of SEQ Identifiers: A277-A278 of Table 3A. In some embodiments, the PEgRNA comprises a PBS comprising a sequence selected from the group consisting of SEQ Identifiers: B1134-B1142 of Table 3B. In some embodiments, the PEgRNA comprises an editing template comprising a sequence selected from the group consisting of SEQ Identifiers: C3345-C3374 of Table 3C. In some embodiments, the prime editing composition further comprises a ngRNA that comprises a spacer comprising a sequence selected from the group consisting of SEQ Identifiers: D596-D619 of Table 3D.

[0409] In some embodiments, the PEgRNA comprises a spacer comprising the sequence of SEQ Identifiers: A279 of Table 3A. In some embodiments, the PEgRNA comprises a PBS comprising a sequence selected from the group consisting of SEQ Identifiers: B1143-B1151 of Table 3B. In some embodiments, the PEgRNA comprises an editing template comprising a sequence selected from the group consisting of SEQ Identifiers: C3375-C3388 of Table 3C. In some embodiments, the prime editing composition further comprises a ngRNA that comprises a spacer comprising a sequence selected from the group consisting of SEQ Identifiers: D620-D643 of Table 3D.

[0410] In some embodiments, the PEgRNA comprises a spacer comprising a sequence selected from the group consisting of SEQ Identifiers: A280-A281 of Table 3A. In some embodiments, the PEgRNA comprises a PBS comprising a sequence selected from the group consisting of SEQ Identifiers: B1152-B1160 of Table 3B. In some embodiments, the PEgRNA comprises an editing template comprising a sequence selected from the group consisting of SEQ Identifiers: C3389-C3404 of Table 3C. In some embodiments, the prime editing composition further comprises a ngRNA that comprises a spacer comprising a sequence selected from the group consisting of SEQ Identifiers: D644-D673 of Table 3D.

[0411] In some embodiments, the PEgRNA comprises a spacer comprising a sequence selected from the group consisting of SEQ Identifiers: A282-A283 of Table 3A. In some embodiments, the PEgRNA comprises a PBS comprising a sequence selected from the group consisting of SEQ Identifiers: B1161-B1169 of Table 3B. In some embodiments, the PEgRNA comprises an editing template comprising a sequence selected from the group consisting of SEQ Identifiers: C3405-C3448 of Table 3C. In some embodiments, the prime editing composition further comprises a ngRNA that comprises a spacer comprising a sequence selected from the group consisting of SEQ Identifiers: D620-D641, and D674-D 688 of Table 3D.

[0412] In some embodiments, the PEgRNA comprises a spacer comprising a sequence selected from the group consisting of SEQ Identifiers: A284-A287 of Table 3A. In some embodiments, the PEgRNA comprises a PBS comprising a sequence selected from the group consisting of SEQ Identifiers: B1170-B1178 of Table 3B. In some embodiments, the PEgRNA comprises an editing template comprising a sequence selected from the group consisting of SEQ Identifiers: C3449-C3479 of Table 3C. In some embodiments, the prime editing composition further comprises a ngRNA that comprises a spacer comprising a sequence selected from the group consisting of SEQ Identifiers: D596-D619, and D689-D694 of Table 3D.

[0413] In some embodiments, the PEgRNA comprises a spacer comprising a sequence selected from the group consisting of SEQ Identifiers: A288-A289 of Table 3A. In some embodiments, the PEgRNA comprises a PBS comprising a sequence selected from the group consisting of SEQ Identifiers: B1179-B1187 of Table 3B. In some embodiments, the PEgRNA comprises an editing template comprising a sequence selected from the group consisting of SEQ Identifiers: C3480-C3517 of Table 3C. In some embodiments, the prime editing composition further comprises a ngRNA that comprises a spacer comprising a sequence selected from the group consisting of SEQ Identifiers: D695-D718 of Table 3D.

[0414] In some embodiments, the PEgRNA comprises a spacer comprising a sequence selected from the group consisting of SEQ ID Nos: A288-A289 of Table 3A. In some embodiments, the PEgRNA comprises a PBS comprising a sequence selected from the group consisting of SEQ ID Nos: B1179-B1187 of Table 3B. In some embodiments, the PEgRNA comprises an editing template comprising a sequence selected from the group consisting of SEQ ID Nos: C3480-C3517 of Table 3C. In some embodiments, the prime editing composition further comprises a ngRNA that comprises a spacer comprising a sequence selected from the group consisting of SEQ ID Nos: D695-D718 of Table 3D.

[0415] In some embodiments, the PEgRNA comprises a spacer comprising the sequence of SEQ Identifiers: A290 of Table 3A. In some embodiments, the PEgRNA comprises a spacer comprising a sequence as set forth in SEQ ID NO. 638 of Table 3A. In some embodiments, the PEgRNA comprises a PBS comprising a sequence selected from the group consisting of SEQ Identifiers: B1188-B1196 of Table 3B. In some embodiments, the PEgRNA comprises a PBS comprising a sequence selected from the group consisting of SEQ ID Nos: 2137-2143 of Table 3B. In some embodiments, the PEgRNA comprises a PBS comprising a sequence selected from the group consisting of sequences GCAGGCAA and GCAGGCAAG as disclosed in Table 3B. In some embodiments, the PEgRNA comprises an editing template comprising a sequence selected from the group consisting of SEQ Identifiers: C3518-C3537 of Table 3C. In some embodiments, the PEgRNA comprises an editing template comprising a sequence selected from the group consisting of SEQ ID Nos: 7544-7563 of Table 3C. In some embodiments, the prime editing composition further comprises a ngRNA that comprises a spacer comprising a sequence selected from the group consisting of SEQ Identifiers: D620-D642, D676, and D677 of Table 3D. In some embodiments, the prime editing composition further comprises a ngRNA that comprises a spacer comprising a sequence selected from the group consisting of SEQ ID Nos: 20253-20275 and 20309-20310 of Table 3D.

[0416] In some embodiments, the PEgRNA comprises a spacer comprising a sequence selected from the group consisting of SEQ Identifiers: A291-A293 of Table 3A. In some embodiments, the PEgRNA comprises a spacer comprising a sequence as set forth in SEQ ID NOs. 639-641 of Table 3A. In some embodiments, the PEgRNA comprises a PBS comprising a sequence selected from the group consisting of SEQ Identifiers: B1197-B1205 of Table 3B. In some embodiments, the PEgRNA comprises a PBS comprising a sequence selected from the group consisting of SEQ ID Nos: 2144-2150 of Table 3B. In some embodiments, the PEgRNA comprises a PBS comprising a sequence selected from the group consisting of sequences CTGTCCTC and CTGTCCTCT as disclosed in Table 3B. In some embodiments, the PEgRNA comprises an editing template comprising a sequence selected from the group consisting of SEQ Identifiers: C3538-C3568 of Table 3C. In some embodiments, the PEgRNA comprises an editing template comprising a sequence selected from the group consisting of SEQ ID Nos: 7564-7594 of Table 3C. In some embodiments, the prime editing composition further comprises a ngRNA that comprises a spacer comprising a sequence selected from the group consisting of SEQ Identifiers: D610, D617, D619, and D689-D 694 of Table 3D. In some embodiments, the prime editing composition further comprises a ngRNA that comprises a spacer comprising a sequence selected from the group consisting of SEQ ID Nos: 20243, 20250, 20252 and 20322-20327 of Table 3D.

[0417] In some embodiments, the PEgRNA comprises a spacer comprising a sequence selected from the group consisting of SEQ Identifiers: A294-A295 of Table 3A. In some embodiments, the PEgRNA comprises a spacer comprising a sequence as set forth in SEQ ID NOs. 642-643 of Table 3A. In some embodiments, the PEgRNA comprises a PBS comprising a sequence selected from the group consisting of SEQ Identifiers: B1206-B1214 of Table 3B. In some embodiments, the PEgRNA comprises a PBS comprising a sequence selected from the group consisting of SEQ ID Nos: 2151-2157 of Table 3B. In some embodiments, the PEgRNA comprises a PBS comprising a sequence selected from the group consisting of sequences ACTGTCCT and ACTGTCCTC as disclosed in Table 3B. In some embodiments, the PEgRNA comprises an editing template comprising a sequence selected from the group consisting of SEQ Identifiers: C3569-C3630 of Table 3C. In some embodiments, the PEgRNA comprises an editing template comprising a sequence selected from the group consisting of SEQ ID Nos: 7595-7656 of Table 3C. In some embodiments, the prime editing composition further comprises a ngRNA that comprises a spacer comprising a sequence selected from the group consisting of SEQ Identifiers: D644-D664, and D719-D722 of Table 3D. In some embodiments, the prime editing composition further comprises a ngRNA that comprises a spacer comprising a sequence selected from the group consisting of SEQ ID Nos: 20555 and 20654-20658 of Table 3D.

[0418] In some embodiments, the PEgRNA comprises a spacer comprising a sequence selected from the group consisting of SEQ ID Nos: A296-A297 of Table 3A. In some embodiments, the PEgRNA comprises a spacer comprising a sequence as set forth in SEQ ID NOs. 644-645 of Table 3A. In some embodiments, the PEgRNA comprises a PBS comprising a sequence selected from the group consisting of SEQ Identifiers: B1215-B1223 of Table 3B. In some embodiments, the PEgRNA comprises a PBS comprising a sequence selected from the group consisting of SEQ ID Nos: 2158-2164 of Table 3B. In some embodiments, the PEgRNA comprises a PBS comprising a sequence selected from the group consisting of sequences ATCTTGAA and ATCTTGAAA as disclosed in Table 3B. In some embodiments, the PEgRNA comprises an editing template comprising a sequence selected from the group consisting of SEQ Identifiers: C3631-C3668 of Table 3C. In some embodiments, the PEgRNA comprises an editing template comprising a sequence selected from the group consisting of SEQ ID Nos: 7657-7714 of Table 3C. In some embodiments, the prime editing composition further comprises a ngRNA that comprises a spacer comprising a sequence selected from the group consisting of SEQ Identifiers: D596-D617, and D619 of Table 3D. In some embodiments, the prime editing composition further comprises a ngRNA that comprises a spacer comprising a sequence selected from the group consisting of SEQ ID Nos: 20229-20250 and 20252 of Table 3D.

[0419] In some embodiments, the PEgRNA comprises a spacer comprising a sequence selected from the group consisting of SEQ Identifiers: A298-A301 of Table 3A. In some embodiments, the PEgRNA comprises a spacer comprising a sequence as set forth in SEQ ID NOs. 646-649 of Table 3A. In some embodiments, the PEgRNA comprises a PBS comprising a sequence selected from the group consisting of SEQ Identifiers: B1224-B1232 of Table 3B. In some embodiments, the PEgRNA comprises a PBS comprising a sequence selected from the group consisting of SEQ ID Nos: 2165-2171 of Table 3B. In some embodiments, the PEgRNA comprises a PBS comprising a sequence selected from the group consisting of sequences CTATCTTG and CTATCTTGA as disclosed in Table 3B. In some embodiments, the PEgRNA comprises an editing template comprising a sequence selected from the group consisting of SEQ Identifiers: C3669-C3710 of Table 3C. In some embodiments, the PEgRNA comprises an editing template comprising a sequence selected from the group consisting of SEQ ID Nos: 7695-7736 of Table 3C. In some embodiments, the prime editing composition further comprises a ngRNA that comprises a spacer comprising a sequence selected from the group consisting of SEQ Identifiers: D596-D619, and D689-D694 of Table 3D. In some embodiments, the prime editing composition further comprises a ngRNA that comprises a spacer comprising a sequence selected from the group consisting of SEQ ID Nos: 20229-20252 and 20322-20327 of Table 3D.

[0420] In some embodiments, the PEgRNA comprises a spacer comprising the sequence of SEQ Identifiers: A302 of Table 3A. In some embodiments, the PEgRNA comprises a spacer comprising a sequence as set forth in SEQ ID NO. 650 of Table 3A. In some embodiments, the PEgRNA comprises a PBS comprising a sequence selected from the group consisting of SEQ Identifiers: B1233-B1241 of Table 3B. In some embodiments, the PEgRNA comprises a PBS comprising a sequence selected from the group consisting of SEQ ID Nos: 2172-2178 of Table 3B. In some embodiments, the PEgRNA comprises a PBS comprising a sequence selected from the group consisting of sequences GTCCTCTT and GTCCTCTTT as disclosed in Table 3B. In some embodiments, the PEgRNA comprises an editing template comprising a sequence selected from the group consisting of SEQ Identifiers: C3711-C3740 of Table 3C. In some embodiments, the PEgRNA comprises an editing template comprising a sequence selected from the group consisting of SEQ ID Nos: 7737-7766 of Table 3C. In some embodiments, the prime editing composition further comprises a ngRNA that comprises a spacer comprising a sequence selected from the group consisting of SEQ Identifiers: D644-D664, and D722 of Table 3D. In some embodiments, the prime editing composition further comprises a ngRNA that comprises a spacer comprising a sequence selected from the group consisting of SEQ ID Nos: 20277-20297 and 20405 of Table 3D.

[0421] In some embodiments, the PEgRNA comprises a spacer comprising a sequence selected from the group consisting of SEQ Identifiers: A303-A304 of Table 3A. In some embodiments, the PEgRNA comprises a spacer comprising a sequence as set forth in SEQ ID NOs. 651-652 of Table 3A. In some embodiments, the PEgRNA comprises a PBS comprising a sequence selected from the group consisting of SEQ Identifiers: B1242-B1250 of Table 3B. In some embodiments, the PEgRNA comprises a PBS comprising a sequence selected from the group consisting of SEQ ID Nos: 2179-2185 of Table 3B. In some embodiments, the PEgRNA comprises a PBS comprising a sequence selected from the group consisting of sequences ATTAATAT and ATTAATATC as disclosed in Table 3B. In some embodiments, the PEgRNA comprises an editing template comprising a sequence selected from the group consisting of SEQ Identifiers: C3741-C3762 of Table 3C. In some embodiments, the PEgRNA comprises an editing template comprising a sequence selected from the group consisting of SEQ ID Nos: 7767-7788 of Table 3C. In some embodiments, the prime editing composition further comprises a ngRNA that comprises a spacer comprising a sequence selected from the group consisting of SEQ Identifiers: D596-D619, D723, and D724 of Table 3D. In some embodiments, the prime editing composition further comprises a ngRNA that comprises a spacer comprising a sequence selected from the group consisting of SEQ ID Nos: 20229-20252, and 20356-20357 of Table 3D.

[0422] In some embodiments, the PEgRNA comprises a spacer comprising a sequence selected from the group consisting of SEQ Identifiers: A305-A306 of Table 3A. In some embodiments, the PEgRNA comprises a spacer comprising a sequence as set forth in SEQ ID NOs. 653-654 of Table 3A. In some embodiments, the PEgRNA comprises a PBS comprising a sequence selected from the group consisting of SEQ Identifiers: B1251-B1259 of Table 3B. In some embodiments, the PEgRNA comprises a PBS comprising a sequence selected from the group consisting of SEQ ID Nos: 2186-2189 of Table 3B. In some embodiments, the PEgRNA comprises a PBS comprising a sequence selected from the group consisting of sequences GGAGCAGG and GGAGCAGGC as disclosed in Table 3B. In some embodiments, the PEgRNA comprises an editing template comprising a sequence selected from the group consisting of SEQ Identifiers: C3763-C3785 of Table 3C. In some embodiments, the PEgRNA comprises an editing template comprising a sequence selected from the group consisting of SEQ ID Nos: 7789-7811 of Table 3C. In some embodiments, the prime editing composition further comprises a ngRNA that comprises a spacer comprising a sequence selected from the group consisting of SEQ Identifiers: D620-D640, D674-D677, and D725-D729 of Table 3D. In some embodiments, the prime editing composition further comprises a ngRNA that comprises a spacer comprising a sequence selected from the group consisting of SEQ ID Nos: 20253-20273, 20307-20310, and 20358-20362 of Table 3D.

[0423] In some embodiments, the PEgRNA comprises a spacer comprising a sequence selected from the group consisting of SEQ Identifiers: A307-A308 of Table 3A. In some embodiments, the PEgRNA comprises a spacer comprising a sequence as set forth in SEQ ID NOs. 655-656 of Table 3A. In some embodiments, the PEgRNA comprises a PBS comprising a sequence selected from the group consisting of SEQ Identifiers: B1260-B1268 of Table 3B. In some embodiments, the PEgRNA comprises a PBS comprising a sequence selected from the group consisting of SEQ ID Nos: 2193-2199 of Table 3B. In some embodiments, the PEgRNA comprises a PBS comprising a sequence selected from the group consisting of sequences AATTAATA and AATTAATAT as disclosed in Table 3B. In some embodiments, the PEgRNA comprises an editing template comprising a sequence selected from the group consisting of SEQ Identifiers: C3786-C3797 of Table 3C. In some embodiments, the PEgRNA comprises an editing template comprising a sequence selected from the group consisting of SEQ ID Nos: 7812-7823 of Table 3C. In some embodiments, the prime editing composition further comprises a ngRNA that comprises a spacer comprising a sequence selected from the group consisting of SEQ Identifiers: D644-D673 of Table 3D. In some embodiments, the prime editing composition further comprises a ngRNA that comprises a spacer comprising a sequence selected from the group consisting of SEQ ID Nos: 20277-20306 of Table 3D.

[0424] In some embodiments, the PEgRNA comprises a spacer comprising a sequence selected from the group consisting of SEQ Identifiers: A309-A310 of Table 3A. In some embodiments, the PEgRNA comprises a spacer comprising a sequence as set forth in SEQ ID NOs. 657-658 of Table 3A. In some embodiments, the PEgRNA comprises a PBS comprising a sequence selected from the group consisting of SEQ Identifiers: B1269-B1277 of Table 3B. In some embodiments, the PEgRNA comprises a PBS comprising a sequence selected from the group consisting of SEQ ID Nos: of Table 3B. In some embodiments, the PEgRNA comprises a PBS comprising a sequence selected from the group consisting of sequences as disclosed in Table 3B. In some embodiments, the PEgRNA comprises an editing template comprising a sequence selected from the group consisting of SEQ Identifiers: C3798-C3859 of Table 3C. In some embodiments, the PEgRNA comprises an editing template comprising a sequence selected from the group consisting of SEQ ID Nos: of Table 3C. In some embodiments, the prime editing composition further comprises a ngRNA that comprises a spacer comprising a sequence selected from the group consisting of SEQ Identifiers: D645-D664, D719-D722, and D730 of Table 3D. In some embodiments, the prime editing composition further comprises a ngRNA that comprises a spacer comprising a sequence selected from the group consisting of SEQ ID Nos: 20278-20297, 20352-20355, and 20363 of Table 3D.

[0425] In some embodiments, the PEgRNA comprises a spacer comprising the sequence of SEQ Identifiers: A311 of Table 3A. In some embodiments, the PEgRNA comprises a spacer comprising a sequence as set forth in SEQ ID NO. 659 of Table 3A. In some embodiments, the PEgRNA comprises a PBS comprising a sequence selected from the group consisting of SEQ Identifiers: B1278-B1286 of Table 3B. In some embodiments, the PEgRNA comprises a PBS comprising a sequence selected from the group consisting of SEQ ID Nos: of Table 3B. In some embodiments, the PEgRNA comprises a PBS comprising a sequence selected from the group consisting of sequences as disclosed in Table 3B. In some embodiments, the PEgRNA comprises an editing template comprising a sequence selected from the group consisting of SEQ Identifiers: C3860-C3890 of Table 3C. In some embodiments, the PEgRNA comprises an editing template comprising a sequence selected from the group consisting of SEQ ID Nos: of Table 3C. In some embodiments, the prime editing composition further comprises a ngRNA that comprises a spacer comprising a sequence selected from the group consisting of SEQ Identifiers: D645-D664, D722, and D730 of Table 3D. In some embodiments, the prime editing composition further comprises a ngRNA that comprises a spacer comprising a sequence selected from the group consisting of SEQ ID Nos: 20278-20297, 20355, and 20363 of Table 3D.

[0426] In some embodiments, the PEgRNA comprises a spacer comprising a sequence selected from the group consisting of SEQ Identifiers: A312-A314 of Table 3A. In some embodiments, the PEgRNA comprises a spacer comprising a sequence as set forth in SEQ ID NOs. 660-662 of Table 3A. In some embodiments, the PEgRNA comprises a PBS comprising a sequence selected from the group consisting of SEQ Identifiers: B1287-B1295 of Table 3B. In some embodiments, the PEgRNA comprises a PBS comprising a sequence selected from the group consisting of SEQ ID Nos: of Table 3B. In some embodiments, the PEgRNA comprises a PBS comprising a sequence selected from the group consisting of sequences as disclosed in Table 3B. In some embodiments, the PEgRNA comprises an editing template comprising a sequence selected from the group consisting of SEQ Identifiers: C3891-C3911 of Table 3C. In some embodiments, the PEgRNA comprises an editing template comprising a sequence selected from the group consisting of SEQ ID Nos: of Table 3C. In some embodiments, the prime editing composition further comprises a ngRNA that comprises a spacer comprising a sequence selected from the group consisting of SEQ Identifiers: D700, D703, D704, D705, and D731-D747 of Table 3D. In some embodiments, the prime editing composition further comprises a ngRNA that comprises a spacer comprising a sequence selected from the group consisting of SEQ ID Nos: 20333, 20336-20338, and 20364-20380 of Table 3D.

[0427] In some embodiments, the PEgRNA comprises a spacer comprising the sequence of SEQ Identifiers: A315 of Table 3A. In some embodiments, the PEgRNA comprises a spacer comprising a sequence as set forth in SEQ ID NO. 663 of Table 3A. In some embodiments, the PEgRNA comprises a PBS comprising a sequence selected from the group consisting of SEQ Identifiers: B1296-B1304 of Table 3B. In some embodiments, the PEgRNA comprises a PBS comprising a sequence selected from the group consisting of SEQ ID Nos: of Table 3B. In some embodiments, the PEgRNA comprises a PBS comprising a sequence selected from the group consisting of sequences as disclosed in Table 3B. In some embodiments, the PEgRNA comprises an editing template comprising a sequence selected from the group consisting of SEQ Identifiers: C3912-C3921 of Table 3C. In some embodiments, the PEgRNA comprises an editing template comprising a sequence selected from the group consisting of SEQ ID Nos: of Table 3C. In some embodiments, the prime editing composition further comprises a ngRNA that comprises a spacer comprising a sequence selected from the group consisting of SEQ Identifiers: D621-D643 of Table 3D. In some embodiments, the prime editing composition further comprises a ngRNA that comprises a spacer comprising a sequence selected from the group consisting of SEQ ID Nos: 20254-20276 of Table 3D.

[0428] In some embodiments, the PEgRNA comprises a spacer comprising a sequence selected from the group consisting of SEQ Identifiers: A316-A317 of Table 3A. In some embodiments, the PEgRNA comprises a spacer comprising a sequence as set forth in SEQ ID NOs. 664-665 of Table 3A. In some embodiments, the PEgRNA comprises a PBS comprising a sequence selected from the group consisting of SEQ Identifiers: B1305-B1313 of Table 3B. In some embodiments, the PEgRNA comprises a PBS comprising a sequence selected from the group consisting of SEQ ID Nos: of Table 3B. In some embodiments, the PEgRNA comprises a PBS comprising a sequence selected from the group consisting of sequences as disclosed in Table 3B. In some embodiments, the PEgRNA comprises an editing template comprising a sequence selected from the group consisting of SEQ Identifiers: C3922-C3944 of Table 3C. In some embodiments, the PEgRNA comprises an editing template comprising a sequence selected from the group consisting of SEQ ID Nos: of Table 3C. In some embodiments, the prime editing composition further comprises a ngRNA that comprises a spacer comprising a sequence selected from the group consisting of SEQ Identifiers: D644-D722, and D748 of Table 3D. In some embodiments, the prime editing composition further comprises a ngRNA that comprises a spacer comprising a sequence selected from the group consisting of SEQ ID Nos: 20277-20355 and 20381 of Table 3D.

[0429] In some embodiments, the PEgRNA comprises a spacer comprising a sequence selected from the group consisting of SEQ Identifiers: A318-A319 of Table 3A. In some embodiments, the PEgRNA comprises a spacer comprising a sequence as set forth in SEQ ID NOs. 666-667 of Table 3A. In some embodiments, the PEgRNA comprises a PBS comprising a sequence selected from the group consisting of SEQ Identifiers: B1314-B1322 of Table 3B. In some embodiments, the PEgRNA comprises a PBS comprising a sequence selected from the group consisting of SEQ ID Nos: of Table 3B. In some embodiments, the PEgRNA comprises a PBS comprising a sequence selected from the group consisting of sequences as disclosed in Table 3B. In some embodiments, the PEgRNA comprises an editing template comprising a sequence selected from the group consisting of SEQ Identifiers: C3945-C3975 of Table 3C. In some embodiments, the PEgRNA comprises an editing template comprising a sequence selected from the group consisting of SEQ ID Nos: of Table 3C. In some embodiments, the prime editing composition further comprises a ngRNA that comprises a spacer comprising a sequence selected from the group consisting of SEQ Identifiers: D644-D673, D722, and D748 of Table 3D. In some embodiments, the prime editing composition further comprises a ngRNA that comprises a spacer comprising a sequence selected from the group consisting of SEQ ID Nos: 20272-20306, 20355 and 20381 of Table 3D.

[0430] In some embodiments, the PEgRNA comprises a spacer comprising a sequence selected from the group consisting of SEQ Identifiers: A320-A321 of Table 3A. In some embodiments, the PEgRNA comprises a spacer comprising a sequence as set forth in SEQ ID NOs. 668-669 of Table 3A. In some embodiments, the PEgRNA comprises a PBS comprising a sequence selected from the group consisting of SEQ Identifiers: B1323-B1331 of Table 3B. In some embodiments, the PEgRNA comprises a PBS comprising a sequence selected from the group consisting of SEQ ID Nos: of Table 3B. In some embodiments, the PEgRNA comprises a PBS comprising a sequence selected from the group consisting of sequences as disclosed in Table 3B. In some embodiments, the PEgRNA comprises an editing template comprising a sequence selected from the group consisting of SEQ Identifiers: C3976-C3995 of Table 3C. In some embodiments, the PEgRNA comprises an editing template comprising a sequence selected from the group consisting of SEQ ID Nos: of Table 3C. In some embodiments, the prime editing composition further comprises a ngRNA that comprises a spacer comprising a sequence selected from the group consisting of SEQ Identifiers: D644-D673, D722, and D748 of Table 3D. In some embodiments, the prime editing composition further comprises a ngRNA that comprises a spacer comprising a sequence selected from the group consisting of SEQ ID Nos: 20277-20306, 20355, and 20381 of Table 3D.

[0431] In some embodiments, the PEgRNA comprises a spacer comprising a sequence selected from the group consisting of SEQ Identifiers: A322-A323 of Table 3A. In some embodiments, the PEgRNA comprises a spacer comprising a sequence as set forth in SEQ ID NOs. 670-671 of Table 3A. In some embodiments, the PEgRNA comprises a PBS comprising a sequence selected from the group consisting of SEQ Identifiers: B1332-B1340 of Table 3B. In some embodiments, the PEgRNA comprises a PBS comprising a sequence selected from the group consisting of SEQ ID Nos: of Table 3B. In some embodiments, the PEgRNA comprises a PBS comprising a sequence selected from the group consisting of sequences as disclosed in Table 3B. In some embodiments, the PEgRNA comprises an editing template comprising a sequence selected from the group consisting of SEQ Identifiers: C3996-C4017 of Table 3C. In some embodiments, the PEgRNA comprises an editing template comprising a sequence selected from the group consisting of SEQ ID Nos: of Table 3C. In some embodiments, the prime editing composition further comprises a ngRNA that comprises a spacer comprising a sequence selected from the group consisting of SEQ Identifiers: D644-D664, and D719-D722 of Table 3D. In some embodiments, the prime editing composition further comprises a ngRNA that comprises a spacer comprising a sequence selected from the group consisting of SEQ ID Nos: 20277-20297 and 20352-20355 of Table 3D.

[0432] In some embodiments, the PEgRNA comprises a spacer comprising a sequence selected from the group consisting of SEQ Identifiers: A324-A325 of Table 3A. In some embodiments, the PEgRNA comprises a spacer comprising a sequence as set forth in SEQ ID NOs. 672-673 of Table 3A. In some embodiments, the PEgRNA comprises a PBS comprising a sequence selected from the group consisting of SEQ Identifiers: B1341-B1349 of Table 3B. In some embodiments, the PEgRNA comprises a PBS comprising a sequence selected from the group consisting of SEQ ID Nos: of Table 3B. In some embodiments, the PEgRNA comprises a PBS comprising a sequence selected from the group consisting of sequences as disclosed in Table 3B. In some embodiments, the PEgRNA comprises an editing template comprising a sequence selected from the group consisting of SEQ Identifiers: C4018-C4073 of Table 3C. In some embodiments, the PEgRNA comprises an editing template comprising a sequence selected from the group consisting of SEQ ID Nos: of Table 3C. In some embodiments, the prime editing composition further comprises a ngRNA that comprises a spacer comprising a sequence selected from the group consisting of SEQ Identifiers: D697-D702, D705, D706, D709-D718, and D749-D758 of Table 3D. In some embodiments, the prime editing composition further comprises a ngRNA that comprises a spacer comprising a sequence selected from the group consisting of SEQ ID Nos: 20330-20335, 20338-20339, and 20382-20391 of Table 3D.

[0433] In some embodiments, the PEgRNA comprises a spacer comprising the sequence of SEQ Identifiers: A326 of Table 3A. In some embodiments, the PEgRNA comprises a spacer comprising a sequence as set forth in SEQ ID NO. 674 of Table 3A. In some embodiments, the PEgRNA comprises a PBS comprising a sequence selected from the group consisting of SEQ Identifiers: B1350-B1358 of Table 3B. In some embodiments, the PEgRNA comprises a PBS comprising a sequence selected from the group consisting of SEQ ID Nos: of Table 3B. In some embodiments, the PEgRNA comprises a PBS comprising a sequence selected from the group consisting of sequences as disclosed in Table 3B. In some embodiments, the PEgRNA comprises an editing template comprising a sequence selected from the group consisting of SEQ Identifiers: C4074-C4102 of Table 3C. In some embodiments, the PEgRNA comprises an editing template comprising a sequence selected from the group consisting of SEQ ID Nos: of Table 3C. In some embodiments, the prime editing composition further comprises a ngRNA that comprises a spacer comprising a sequence selected from the group consisting of SEQ Identifiers: D620-D639, D674-D677, D759, D760, and D761 of Table 3D. In some embodiments, the prime editing composition further comprises a ngRNA that comprises a spacer comprising a sequence selected from the group consisting of SEQ ID Nos: 20253-20272, 20307-20310, and 20392-20394 of Table 3D.

[0434] In some embodiments, the PEgRNA comprises a spacer comprising a sequence selected from the group consisting of SEQ Identifiers: A327-A328 of Table 3A. In some embodiments, the PEgRNA comprises a spacer comprising a sequence as set forth in SEQ ID NOs. 675-676 of Table 3A. In some embodiments, the PEgRNA comprises a PBS comprising a sequence selected from the group consisting of SEQ Identifiers: B1359-B1367 of Table 3B. In some embodiments, the PEgRNA comprises a PBS comprising a sequence selected from the group consisting of SEQ ID Nos: of Table 3B. In some embodiments, the PEgRNA comprises a PBS comprising a sequence selected from the group consisting of sequences as disclosed in Table 3B. In some embodiments, the PEgRNA comprises an editing template comprising a sequence selected from the group consisting of SEQ Identifiers: C4103-C4154 of Table 3C. In some embodiments, the PEgRNA comprises an editing template comprising a sequence selected from the group consisting of SEQ ID Nos: of Table 3C. In some embodiments, the prime editing composition further comprises a ngRNA that comprises a spacer comprising a sequence selected from the group consisting of SEQ Identifiers: D596-D617, and D619 of Table 3D. In some embodiments, the prime editing composition further comprises a ngRNA that comprises a spacer comprising a sequence selected from the group consisting of SEQ ID Nos: 20229-20250 and 20252 of Table 3D.

[0435] In some embodiments, the PEgRNA comprises a spacer comprising the sequence of SEQ Identifiers: A329 of Table 3A. In some embodiments, the PEgRNA comprises a spacer comprising a sequence as set forth in SEQ ID NO. 677 of Table 3A. In some embodiments, the PEgRNA comprises a PBS comprising a sequence selected from the group consisting of SEQ Identifiers: B1368-B1376 of Table 3B. In some embodiments, the PEgRNA comprises a PBS comprising a sequence selected from the group consisting of SEQ ID Nos: of Table 3B. In some embodiments, the PEgRNA comprises a PBS comprising a sequence selected from the group consisting of sequences as disclosed in Table 3B. In some embodiments, the PEgRNA comprises an editing template comprising a sequence selected from the group consisting of SEQ Identifiers: C4155-C4181 of Table 3C. In some embodiments, the PEgRNA comprises an editing template comprising a sequence selected from the group consisting of SEQ ID Nos: of Table 3C. In some embodiments, the prime editing composition further comprises a ngRNA that comprises a spacer comprising a sequence selected from the group consisting of SEQ Identifiers: D644-D664 and D722 of Table 3D. In some embodiments, the prime editing composition further comprises a ngRNA that comprises a spacer comprising a sequence selected from the group consisting of SEQ ID Nos: 20277-20297 and 20355 of Table 3D.

[0436] In some embodiments, the editing target sequence is in exon 11 of the CFTR gene.

[0437] In some embodiments, the editing target sequence or the complementary sequence on the CFTR gene thereof comprises a mutation that encodes an amino acid substitution E504Q, E504*, F508C, N505H, I506L, I506S, I506M, I507N, F508I, G509R, deletion of 1507, and/or deletion of 1508 relative to a wild type CFTR polypeptide set forth in SEQ ID NO: 19, and wherein the editing template encodes an intended nucleotide edit that corrects the mutation. In some embodiments, the editing target sequence or the complementary sequence on the CFTR gene thereof comprises a deletion of nucleotides ATC (c.1519_1521delATC) at position 117,559,590, a deletion of nucleotides AG and an insertion of T (c.1509_1510delAGinsT) at position 117,559,580, a G→→C mutation (c.1510G>C) at position 117,559,581, a G→→T mutation (c.1510G>T) at position 117,559,581, a deletion of nucleotides CTT (c.1521_1523delCTT) at position 117,559,592, a T→→G mutation (c.1523T>G) at position 117,559,594, a A→→C mutation (c.1513A>C) at position 117,559,584, a deletion of A (c.1514delA) at position 117,559,585, a A→→C mutation (c.1516A>C) at position 117,559,587, a T→→G mutation (c.1517T>G) at position 117,559,588, a C→→G mutation (c.1518C>G) at position 117,559,589, a duplication of nucleotides ATCAT (c.1516_1520dupATCAT) at position 117,559,591, a T→A mutation (c.1520T>A) at position 117,559,591, a T-A mutation (c.1522T>A) at position 117,559,593, a G→C mutation (c.1526G>C) at position 117,559,597, a deletion of G (c.1528delG) at position 117,559,599, and/or a deletion of TT (c.1530_1531delTT) at position 117,559,601 of human chromosome 7 compared to a wild type CFTR gene. In some embodiments, the editing template comprises an intended nucleotide edit compared to the target CFTR gene, wherein incorporation of the intended nucleotide edit encoded by the editing template corrects the mutation. In some embodiments, incorporation of the one or more intended nucleotide edits results in a CFTR gene that encodes a functional CFTR polypeptide. In some embodiments, the editing template comprises a wild type CFTR gene sequence. Accordingly, in some embodiments, the newly synthesized single stranded DNA encoded by the editing template is capable of correcting the c.1519_1521delATC mutation, the c.1509_1510delAGinsT mutation, the c.1510G>C mutation, the c.1510G>T mutation, c.1521_1523delCTT mutation, the c.1523T>G mutation, the c.1513A>C mutation, the c.1514delA mutation, the c.1516A>C mutation, the c.1517T>G mutation, the c.1518C>G mutation, the c.1516_1520dupATCAT mutation, the c.1520T>A mutation, the c.1522T>A mutation, the c.1525G>C mutation, the c.1526G>C mutation, the c.1528delG mutation, and/or the c.1530_1531delTT mutation in the target CFTR gene. In some embodiments, the newly synthesized single stranded DNA encoded by the editing template is capable of correcting all of the c.1519_1521delATC mutation, the c.1509_1510delAGinsT mutation, the c.1510G>C mutation, the c.1510G>T mutation, c.1521_1523delCTT mutation, the c.1523T>G mutation, the c.1513A>C mutation, the c.1514delA mutation, the c.1516A>C mutation, the c.1517T>G mutation, the c.1518C>G mutation, the c.1516_1520dupATCAT mutation, the c.1520T>A mutation, the c.1522T>A mutation, the c.1525G>C mutation, the c.1526G>C mutation, the c.1528delG mutation, and the c.1530_1531delTT mutation in the target CFTR gene. In some embodiments, two or more of the c.1519_1521delATC mutation, the c.1509_1510delAGinsT mutation, the c.1510G>C mutation, the c.1510G>T mutation, c.1521_1523delCTT mutation, the c.1523T>G mutation, the c.1513A>C mutation, the c.1514delA mutation, the c.1516A>C mutation, the c.1517T>G mutation, the c.1518C>G mutation, the c.1516_1520dupATCAT mutation, the c.1520T>A mutation, the c.1522T>A mutation, the c.1525G>C mutation, the c.1526G>C mutation, the c.1528delG mutation, and the c.1530_1531delTT mutation are located on the same CFTR gene. In some embodiments, the newly synthesized single stranded DNA encoded by the editing template is capable of correcting the c.1519_1521delATC mutation, the c.1509_1510delAGinsT mutation, the c.1510G>C mutation, the c.1510G>T mutation, c.1521_1523delCTT mutation, the c.1523T>G mutation, the c.1513A>C mutation, the c.1514delA mutation, the c.1516A>C mutation, the c.1517T>G mutation, the c.1518C>G mutation, the c.1516_1520dupATCAT mutation, the c.1520T>A mutation, the c.1522T>A mutation, the c.1525G>C mutation, the c.1526G>C mutation, the c.1528delG mutation, and/or the c.1530_1531delTT mutation that are located on different CFTR genes. For example, in some embodiments, a subject may comprise two copies of CFTR genes, each comprising a different mutation selected from the group consisting of the c.1519_1521delATC mutation, the c.1509_1510delAGinsT mutation, the c.1510G>C mutation, the c.1510G>T mutation, c.1521_1523delCTT mutation, the c.1523T>G mutation, the c.1513A>C mutation, the c.1514delA mutation, the c.1516A>C mutation, the c.1517T>G mutation, the c.1518C>G mutation, the c.1516_1520dupATCAT mutation, the c.1520T>A mutation, the c.1522T>A mutation, the c.1525G>C mutation, the c.1526G>C mutation, the c.1528delG mutation, and the c.1530_1531delTT mutation, all of which may be corrected by an editing template of a single PEgRNA. In some embodiments, the editing template is capable of correcting one or more, or all of the c.1519_1521delATC mutation, the c.1509_1510delAGinsT mutation, the c.1510G>C mutation, the c.1510G>T mutation, c.1521_1523delCTT mutation, the c.1523T>G mutation, the c.1513A>C mutation, the c.1514delA mutation, the c.1516A>C mutation, the c.1517T>G mutation, the c.1518C>G mutation, the c.1516_1520dupATCAT mutation, the c.1520T>A mutation, the c.1522T>A mutation, the c.1525G>C mutation, the c.1526G>C mutation, the c.1528delG mutation, and the c.1530_1531delTT mutation that are in different subjects, wherein each subject may have one or more of the mutations.

[0438] In some embodiments, the PEgRNA comprises a spacer comprising a sequence selected from the group consisting of SEQ Identifiers: A330-A331 of Table 3A. In some embodiments, the PEgRNA comprises a spacer comprising a sequence as set forth in SEQ ID NOs. 678-679 of Table 3A. In some embodiments, the PEgRNA comprises a PBS comprising a sequence selected from the group consisting of SEQ Identifiers: B1377-B1385 of Table 3B. In some embodiments, the PEgRNA comprises a PBS comprising a sequence selected from the group consisting of SEQ ID Nos: of Table 3B. In some embodiments, the PEgRNA comprises a PBS comprising a sequence selected from the group consisting of sequences as disclosed in Table 3B. In some embodiments, the PEgRNA comprises an editing template comprising a sequence selected from the group consisting of SEQ Identifiers: C4592-C4601 of Table 3C. In some embodiments, the PEgRNA comprises an editing template comprising a sequence selected from the group consisting of SEQ ID Nos: of Table 3C. In some embodiments, the prime editing composition further comprises a ngRNA that comprises a spacer comprising a sequence selected from the group consisting of SEQ Identifiers: D762-D782 of Table 3D. In some embodiments, the prime editing composition further comprises a ngRNA that comprises a spacer comprising a sequence selected from the group consisting of SEQ ID Nos: 20395-20415 of Table 3D.

[0439] In some embodiments, the PEgRNA comprises a spacer comprising the sequence of SEQ Identifiers: A332 of Table 3A. In some embodiments, the PEgRNA comprises a spacer comprising a sequence as set forth in SEQ ID NO. 680 of Table 3A. In some embodiments, the PEgRNA comprises a PBS comprising a sequence selected from the group consisting of SEQ Identifiers: B1386-B1394 of Table 3B. In some embodiments, the PEgRNA comprises a PBS comprising a sequence selected from the group consisting of SEQ ID Nos: of Table 3B. In some embodiments, the PEgRNA comprises a PBS comprising a sequence selected from the group consisting of sequences as disclosed in Table 3B. In some embodiments, the PEgRNA comprises an editing template comprising a sequence selected from the group consisting of SEQ Identifiers: C4602-C4612 of Table 3C. In some embodiments, the PEgRNA comprises an editing template comprising a sequence selected from the group consisting of SEQ ID Nos: of Table 3C. In some embodiments, the prime editing composition further comprises a ngRNA that comprises a spacer comprising a sequence selected from the group consisting of SEQ Identifiers: D765-D782 of Table 3D. In some embodiments, the prime editing composition further comprises a ngRNA that comprises a spacer comprising a sequence selected from the group consisting of SEQ ID Nos: 20398-20715 of Table 3D.

[0440] In some embodiments, the PEgRNA comprises a spacer comprising the sequence of SEQ Identifiers: A364 of Table 3A. In some embodiments, the PEgRNA comprises a spacer comprising a sequence as set forth in SEQ ID NO. 712 of Table 3A. In some embodiments, the PEgRNA comprises a PBS comprising a sequence selected from the group consisting of SEQ Identifiers: B1530-B1538. In some embodiments, the PEgRNA comprises a PBS comprising a sequence selected from the group consisting of SEQ ID Nos: of Table 3B. In some embodiments, the PEgRNA comprises a PBS comprising a sequence selected from the group consisting of sequences as disclosed in Table 3B. In some embodiments, the PEgRNA comprises an editing template comprising a sequence selected from the group consisting of SEQ Identifiers: C4613-C4643. In some embodiments, the prime editing composition further comprises a ngRNA that comprises a spacer comprising a sequence selected from the group consisting of SEQ Identifiers: D768-D782, D813, D814, D890, D891, and D892 of Table 3D. In some embodiments, the prime editing composition further comprises a ngRNA that comprises a spacer comprising a sequence selected from the group consisting of SEQ ID Nos: 20401-20415, 20446-20447, and 20523-20525 of Table 3D.

[0441] In some embodiments, the PEgRNA comprises a spacer comprising a sequence selected from the group consisting of SEQ Identifiers: A333-A334 of Table 3A. In some embodiments, the PEgRNA comprises a spacer comprising a sequence as set forth in SEQ ID NOs. 681-682 of Table 3A. In some embodiments, the PEgRNA comprises a PBS comprising a sequence selected from the group consisting of SEQ Identifiers: B1395-B1403 of Table 3B. In some embodiments, the PEgRNA comprises a PBS comprising a sequence selected from the group consisting of SEQ ID Nos: of Table 3B. In some embodiments, the PEgRNA comprises a PBS comprising a sequence selected from the group consisting of sequences as disclosed in Table 3B. In some embodiments, the PEgRNA comprises an editing template comprising a sequence selected from the group consisting of SEQ Identifiers: C4644-C4685 of Table 3C. In some embodiments, the PEgRNA comprises an editing template comprising a sequence selected from the group consisting of SEQ ID Nos: of Table 3C. In some embodiments, the prime editing composition further comprises a ngRNA that comprises a spacer comprising a sequence selected from the group consisting of SEQ Identifiers: D783-D803 of Table 3D. In some embodiments, the prime editing composition further comprises a ngRNA that comprises a spacer comprising a sequence selected from the group consisting of SEQ ID Nos: 20555 and 20654-20658 of Table 3D.

[0442] In some embodiments, the PEgRNA comprises a spacer comprising a sequence selected from the group consisting of SEQ Identifiers: A365-A367 of Table 3A. In some embodiments, the PEgRNA comprises a spacer comprising a sequence as set forth in SEQ ID NOs. 713-715 of Table 3A. In some embodiments, the PEgRNA comprises a PBS comprising a sequence selected from the group consisting of SEQ Identifiers: B1413-B1421 of Table 3B. In some embodiments, the PEgRNA comprises a PBS comprising a sequence selected from the group consisting of SEQ ID Nos: of Table 3B. In some embodiments, the PEgRNA comprises a PBS comprising a sequence selected from the group consisting of sequences as disclosed in Table 3B. In some embodiments, the PEgRNA comprises an editing template comprising a sequence selected from the group consisting of SEQ Identifiers: C4686-C4716 of Table 3C. In some embodiments, the PEgRNA comprises an editing template comprising a sequence selected from the group consisting of SEQ ID Nos: of Table 3C. In some embodiments, the prime editing composition further comprises a ngRNA that comprises a spacer comprising a sequence selected from the group consisting of SEQ Identifiers: D797, D802, D803, D805, D806, D809, D810, and D893-D897 of Table 3D. In some embodiments, the prime editing composition further comprises a ngRNA that comprises a spacer comprising a sequence selected from the group consisting of SEQ ID Nos: 20430, 20435-20436, 20438-20439, 20442-20443, and 20526-20530 of Table 3D.

[0443] In some embodiments, the PEgRNA comprises a spacer comprising a sequence selected from the group consisting of SEQ Identifiers: A368-A369 of Table 3A. In some embodiments, the PEgRNA comprises a spacer comprising a sequence as set forth in SEQ ID NOs. 716-717 of Table 3A. In some embodiments, the PEgRNA comprises a PBS comprising a sequence selected from the group consisting of SEQ Identifiers: B1422-B1430 of Table 3B. In some embodiments, the PEgRNA comprises a PBS comprising a sequence selected from the group consisting of SEQ ID Nos: of Table 3B. In some embodiments, the PEgRNA comprises a PBS comprising a sequence selected from the group consisting of sequences as disclosed in Table 3B. In some embodiments, the PEgRNA comprises an editing template comprising a sequence selected from the group consisting of SEQ Identifiers: C4717-C4747 of Table 3C. In some embodiments, the PEgRNA comprises an editing template comprising a sequence selected from the group consisting of SEQ ID Nos: of Table 3C. In some embodiments, the prime editing composition further comprises a ngRNA that comprises a spacer comprising a sequence selected from the group consisting of SEQ Identifiers: D763, D764, D767-D782, D813, D814, D818, D890, D891, D892, and D898 of Table 3D. In some embodiments, the prime editing composition further comprises a ngRNA that comprises a spacer comprising a sequence selected from the group consisting of SEQ ID Nos: 20396-20397, 20400-20415, 20446-20447, 20451, 20523-20525, and 20531 of Table 3D.

[0444] In some embodiments, the PEgRNA comprises a spacer comprising the sequence of SEQ Identifiers: A370 of Table 3A. In some embodiments, the PEgRNA comprises a spacer comprising a sequence as set forth in SEQ ID NO. 718 of Table 3A. In some embodiments, the PEgRNA comprises a PBS comprising a sequence selected from the group consisting of SEQ v: B1431-B1439 of Table 3B. In some embodiments, the PEgRNA comprises a PBS comprising a sequence selected from the group consisting of SEQ ID Nos: of Table 3B. In some embodiments, the PEgRNA comprises a PBS comprising a sequence selected from the group consisting of sequences as disclosed in Table 3B. In some embodiments, the PEgRNA comprises an editing template comprising a sequence selected from the group consisting of SEQ Identifiers: C4748-C4778 of Table 3C. In some embodiments, the PEgRNA comprises an editing template comprising a sequence selected from the group consisting of SEQ ID Nos: of Table 3C. In some embodiments, the prime editing composition further comprises a ngRNA that comprises a spacer comprising a sequence selected from the group consisting of SEQ Identifiers: D767-D782, D813, 814, D890, D891, and D892 of Table 3D. In some embodiments, the prime editing composition further comprises a ngRNA that comprises a spacer comprising a sequence selected from the group consisting of SEQ ID Nos: 20400-20415, 20446-20447 and 20523-20525 of Table 3D.

[0445] In some embodiments, the PEgRNA comprises a spacer comprising a sequence selected from the group consisting of SEQ Identifiers: A343-A344 of Table 3A. In some embodiments, the PEgRNA comprises a spacer comprising a sequence as set forth in SEQ ID NOs. 691-692 of Table 3A. In some embodiments, the PEgRNA comprises a PBS comprising a sequence selected from the group consisting of SEQ Identifiers: B1440-B1448 of Table 3B. In some embodiments, the PEgRNA comprises a PBS comprising a sequence selected from the group consisting of SEQ ID Nos: of Table 3B. In some embodiments, the PEgRNA comprises a PBS comprising a sequence selected from the group consisting of sequences as disclosed in Table 3B. In some embodiments, the PEgRNA comprises an editing template comprising a sequence selected from the group consisting of SEQ Identifiers: C4779-C4824 of Table 3C. In some embodiments, the PEgRNA comprises an editing template comprising a sequence selected from the group consisting of SEQ ID Nos: of Table 3C. In some embodiments, the prime editing composition further comprises a ngRNA that comprises a spacer comprising a sequence selected from the group consisting of SEQ Identifiers: D820-D839 of Table 3D. In some embodiments, the prime editing composition further comprises a ngRNA that comprises a spacer comprising a sequence selected from the group consisting of SEQ ID Nos: 20453-20472 of Table 3D.

[0446] In some embodiments, the PEgRNA comprises a spacer comprising the sequence of SEQ Identifiers: A345 of Table 3A. In some embodiments, the PEgRNA comprises a spacer comprising a sequence as set forth in SEQ ID NO. 693 of Table 3A. In some embodiments, the PEgRNA comprises a PBS comprising a sequence selected from the group consisting of SEQ Identifiers: B1449-B1457 of Table 3B. In some embodiments, the PEgRNA comprises a PBS comprising a sequence selected from the group consisting of SEQ ID Nos: of Table 3B. In some embodiments, the PEgRNA comprises a PBS comprising a sequence selected from the group consisting of sequences as disclosed in Table 3B. In some embodiments, the PEgRNA comprises an editing template comprising a sequence selected from the group consisting of SEQ Identifiers: C4825-C4829 of Table 3C. In some embodiments, the PEgRNA comprises an editing template comprising a sequence selected from the group consisting of SEQ ID Nos: of Table 3C. In some embodiments, the prime editing composition further comprises a ngRNA that comprises a spacer comprising a sequence selected from the group consisting of SEQ Identifiers: D826-D840, and D899 of Table 3D. In some embodiments, the prime editing composition further comprises a ngRNA that comprises a spacer comprising a sequence selected from the group consisting of SEQ ID Nos: 20459-20473 and 20532 of Table 3D.

[0447] In some embodiments, the PEgRNA comprises a spacer comprising a sequence selected from the group consisting of SEQ Identifiers: A346-A348 of Table 3A. In some embodiments, the PEgRNA comprises a spacer comprising a sequence as set forth in SEQ ID NOs. 694-696 of Table 3A. In some embodiments, the PEgRNA comprises a PBS comprising a sequence selected from the group consisting of SEQ Identifiers: B1458-B1466 of Table 3B. In some embodiments, the PEgRNA comprises a PBS comprising a sequence selected from the group consisting of SEQ ID Nos: of Table 3B. In some embodiments, the PEgRNA comprises a PBS comprising a sequence selected from the group consisting of sequences as disclosed in Table 3B. In some embodiments, the PEgRNA comprises an editing template comprising a sequence selected from the group consisting of SEQ Identifiers: C4830-C4838 of Table 3C. In some embodiments, the PEgRNA comprises an editing template comprising a sequence selected from the group consisting of SEQ ID Nos: of Table 3C. In some embodiments, the prime editing composition further comprises a ngRNA that comprises a spacer comprising a sequence selected from the group consisting of SEQ Identifiers: D797, D802, D805, D806, D809, D810, D841, D842, and D843 of Table 3D. In some embodiments, the prime editing composition further comprises a ngRNA that comprises a spacer comprising a sequence selected from the group consisting of SEQ ID Nos: 20430, 20435-20436, 20438-20439, 20442-20443, and 20474-20476 of Table 3D.

[0448] In some embodiments, the PEgRNA comprises a spacer comprising a sequence selected from the group consisting of SEQ Identifiers: A349-A350 of Table 3A. In some embodiments, the PEgRNA comprises a spacer comprising a sequence as set forth in SEQ ID NOs. 697-698 of Table 3A. In some embodiments, the PEgRNA comprises a spacer comprising a sequence as set forth in SEQ ID NO. of Table 3A. In some embodiments, the PEgRNA comprises a PBS comprising a sequence selected from the group consisting of SEQ Identifiers: B1467-B1475 of Table 3B. In some embodiments, the PEgRNA comprises a PBS comprising a sequence selected from the group consisting of SEQ ID Nos: of Table 3B. In some embodiments, the PEgRNA comprises a PBS comprising a sequence selected from the group consisting of sequences as disclosed in Table 3B. In some embodiments, the PEgRNA comprises an editing template comprising a sequence selected from the group consisting of SEQ Identifiers: C4839-C4869 of Table 3C. In some embodiments, the PEgRNA comprises an editing template comprising a sequence selected from the group consisting of SEQ ID Nos: of Table 3C. In some embodiments, the prime editing composition further comprises a ngRNA that comprises a spacer comprising a sequence selected from the group consisting of SEQ Identifiers: D822-D837, D846-D853, and D900-D903 of Table 3D. In some embodiments, the prime editing composition further comprises a ngRNA that comprises a spacer comprising a sequence selected from the group consisting of SEQ ID Nos: 20455-20470, 20479-20486 and 20533-20536 of Table 3D.

[0449] In some embodiments, the PEgRNA comprises a spacer comprising a sequence selected from the group consisting of SEQ Identifiers: A351-A354 of Table 3A. In some embodiments, the PEgRNA comprises a spacer comprising a sequence as set forth in SEQ ID NOs. 699-702 of Table 3A. In some embodiments, the PEgRNA comprises a PBS comprising a sequence selected from the group consisting of SEQ Identifiers: B1476-B1484 of Table 3B. In some embodiments, the PEgRNA comprises an editing template comprising a sequence selected from the group consisting of SEQ Identifiers: C4870-C4913 of Table 3C. In some embodiments, the PEgRNA comprises an editing template comprising a sequence selected from the group consisting of SEQ ID Nos: of Table 3C. In some embodiments, the prime editing composition further comprises a ngRNA that comprises a spacer comprising a sequence selected from the group consisting of SEQ Identifiers: D856-D880 of Table 3D. In some embodiments, the prime editing composition further comprises a ngRNA that comprises a spacer comprising a sequence selected from the group consisting of SEQ ID Nos: 20489-20513 of Table 3D.

[0450] In some embodiments, the PEgRNA comprises a spacer comprising a sequence selected from the group consisting of SEQ Identifiers: A355-A356 of Table 3A. In some embodiments, the PEgRNA comprises a spacer comprising a sequence as set forth in SEQ ID NOs. 703-704 of Table 3A. In some embodiments, the PEgRNA comprises a PBS comprising a sequence selected from the group consisting of SEQ Identifiers: B1485-B1493 of Table 3B. In some embodiments, the PEgRNA comprises a PBS comprising a sequence selected from the group consisting of SEQ ID Nos: of Table 3B. In some embodiments, the PEgRNA comprises a PBS comprising a sequence selected from the group consisting of sequences as disclosed in Table 3B. In some embodiments, the PEgRNA comprises an editing template comprising a sequence selected from the group consisting of SEQ Identifiers: C4914-C4937 of Table 3C. In some embodiments, the PEgRNA comprises an editing template comprising a sequence selected from the group consisting of SEQ ID Nos: of Table 3C. In some embodiments, the prime editing composition further comprises a ngRNA that comprises a spacer comprising a sequence selected from the group consisting of SEQ Identifiers: D822-D839, and D846-D853 of Table 3D. In some embodiments, the prime editing composition further comprises a ngRNA that comprises a spacer comprising a sequence selected from the group consisting of SEQ ID Nos: 20455-20472 and 20479-20486 of Table 3D.

[0451] In some embodiments, the PEgRNA comprises a spacer comprising a sequence selected from the group consisting of SEQ Identifiers: A357-A358 of Table 3A. In some embodiments, the PEgRNA comprises a spacer comprising a sequence as set forth in SEQ ID NOs. 705-706 of Table 3A. In some embodiments, the PEgRNA comprises a PBS comprising a sequence selected from the group consisting of SEQ Identifiers: B1494-B1502 of Table 3B. In some embodiments, the PEgRNA comprises a PBS comprising a sequence selected from the group consisting of SEQ ID Nos: of Table 3B. In some embodiments, the PEgRNA comprises a PBS comprising a sequence selected from the group consisting of sequences as disclosed in Table 3B. In some embodiments, the PEgRNA comprises an editing template comprising a sequence selected from the group consisting of SEQ Identifiers: C4938-C4959 of Table 3C. In some embodiments, the PEgRNA comprises an editing template comprising a sequence selected from the group consisting of SEQ ID Nos: of Table 3C. In some embodiments, the prime editing composition further comprises a ngRNA that comprises a spacer comprising a sequence selected from the group consisting of SEQ Identifiers: D765-D782, D813, D814, and D881-D890 of Table 3D. In some embodiments, the prime editing composition further comprises a ngRNA that comprises a spacer comprising a sequence selected from the group consisting of SEQ ID Nos: 20398-20415, 20446-20447, and 20514-20523 of Table 3D.

[0452] In some embodiments, the PEgRNA comprises a spacer comprising the sequence of SEQ Identifier: A361 of Table 3A. In some embodiments, the PEgRNA comprises a spacer comprising a sequence as set forth in SEQ ID NO.709 of Table 3A. In some embodiments, the PEgRNA comprises a PBS comprising a sequence selected from the group consisting of SEQ Identifiers: B1512-B1520 of Table 3B. In some embodiments, the PEgRNA comprises a PBS comprising a sequence selected from the group consisting of SEQ ID Nos: of Table 3B. In some embodiments, the PEgRNA comprises a PBS comprising a sequence selected from the group consisting of sequences as disclosed in Table 3B. In some embodiments, the PEgRNA comprises an editing template comprising a sequence selected from the group consisting of SEQ Identifiers: C4960-C4965 of Table 3C. In some embodiments, the PEgRNA comprises an editing template comprising a sequence selected from the group consisting of SEQ ID Nos: of Table 3C. In some embodiments, the prime editing composition further comprises a ngRNA that comprises a spacer comprising a sequence selected from the group consisting of SEQ Identifiers: D765-D781 of Table 3D. In some embodiments, the prime editing composition further comprises a ngRNA that comprises a spacer comprising a sequence selected from the group consisting of SEQ ID Nos: 20398-20414 of Table 3D.

[0453] In some embodiments, the PEgRNA comprises a spacer comprising a sequence selected from the group consisting of SEQ Identifiers: A330-A331 of Table 3A. In some embodiments, the PEgRNA comprises a spacer comprising a sequence as set forth in SEQ ID NOs. 678-679 of Table 3A. In some embodiments, the PEgRNA comprises a PBS comprising a sequence selected from the group consisting of SEQ Identifiers: B1377-B1385 of Table 3B. In some embodiments, the PEgRNA comprises a PBS comprising a sequence selected from the group consisting of SEQ ID Nos: of Table 3B. In some embodiments, the PEgRNA comprises a PBS comprising a sequence selected from the group consisting of sequences as disclosed in Table 3B. In some embodiments, the PEgRNA comprises an editing template comprising a sequence selected from the group consisting of SEQ Identifiers: C4966-C4975 of Table 3C. In some embodiments, the PEgRNA comprises an editing template comprising a sequence selected from the group consisting of SEQ ID Nos: of Table 3C. In some embodiments, the prime editing composition further comprises a ngRNA that comprises a spacer comprising a sequence selected from the group consisting of SEQ Identifiers: D762-D782 of Table 3D. In some embodiments, the prime editing composition further comprises a ngRNA that comprises a spacer comprising a sequence selected from the group consisting of SEQ ID Nos: 20395-20415 of Table 3D.

[0454] In some embodiments, the PEgRNA comprises a spacer comprising the sequence of SEQ Identifier: A332 of Table 3A. In some embodiments, the PEgRNA comprises a spacer comprising a sequence as set forth in SEQ ID NO. 680 of Table 3A. In some embodiments, the PEgRNA comprises a PBS comprising a sequence selected from the group consisting of SEQ Identifiers: B1386-B1394 of Table 3B. In some embodiments, the PEgRNA comprises a PBS comprising a sequence selected from the group consisting of SEQ ID Nos: of Table 3B. In some embodiments, the PEgRNA comprises a PBS comprising a sequence selected from the group consisting of sequences as disclosed in Table 3B. In some embodiments, the PEgRNA comprises an editing template comprising a sequence selected from the group consisting of SEQ Identifiers: C4976-C4986 of Table 3C. In some embodiments, the PEgRNA comprises an editing template comprising a sequence selected from the group consisting of SEQ ID Nos: of Table 3C. In some embodiments, the prime editing composition further comprises a ngRNA that comprises a spacer comprising a sequence selected from the group consisting of SEQ Identifiers: D765-D782 of Table 3D. In some embodiments, the prime editing composition further comprises a ngRNA that comprises a spacer comprising a sequence selected from the group consisting of SEQ ID Nos: 20398-20415 of Table 3D.

[0455] In some embodiments, the PEgRNA comprises a spacer comprising a sequence selected from the group consisting of SEQ Identifiers: A333-A334 of Table 3A. In some embodiments, the PEgRNA comprises a spacer comprising a sequence as set forth in SEQ ID NOs. 681-682 of Table 3A. In some embodiments, the PEgRNA comprises a PBS comprising a sequence selected from the group consisting of SEQ Identifiers: B1395-B1403 of Table 3B. In some embodiments, the PEgRNA comprises a PBS comprising a sequence selected from the group consisting of SEQ ID Nos: of Table 3B. In some embodiments, the PEgRNA comprises a PBS comprising a sequence selected from the group consisting of sequences as disclosed in Table 3B. In some embodiments, the PEgRNA comprises an editing template comprising a sequence selected from the group consisting of SEQ Identifiers: C4987-C5028 of Table 3C. In some embodiments, the PEgRNA comprises an editing template comprising a sequence selected from the group consisting of SEQ ID Nos: of Table 3C. In some embodiments, the prime editing composition further comprises a ngRNA that comprises a spacer comprising a sequence selected from the group consisting of SEQ Identifiers: D783-D803 of Table 3D. In some embodiments, the prime editing composition further comprises a ngRNA that comprises a spacer comprising a sequence selected from the group consisting of SEQ ID Nos: 20416-20436 of Table 3D.

[0456] In some embodiments, the PEgRNA comprises a spacer comprising a sequence selected from the group consisting of SEQ Identifiers: A371-A373 of Table 3A. In some embodiments, the PEgRNA comprises a spacer comprising a sequence as set forth in SEQ ID NOs. 719-721 of Table 3A. In some embodiments, the PEgRNA comprises a PBS comprising a sequence selected from the group consisting of SEQ Identifiers: B1539-B1547. In some embodiments, the PEgRNA comprises a PBS comprising a sequence selected from the group consisting of SEQ ID Nos: of Table 3B. In some embodiments, the PEgRNA comprises a PBS comprising a sequence selected from the group consisting of sequences as disclosed in Table 3B. In some embodiments, the PEgRNA comprises an editing template comprising a sequence selected from the group consisting of SEQ Identifiers: C5029-C5059 of Table 3C. In some embodiments, the PEgRNA comprises an editing template comprising a sequence selected from the group consisting of SEQ ID Nos: of Table 3C. In some embodiments, the prime editing composition further comprises a ngRNA that comprises a spacer comprising a sequence selected from the group consisting of SEQ Identifiers: D797, D802, D803, D805, D806, D809, D810, D894, D896, D904, D905, and D906 of Table 3D. In some embodiments, the prime editing composition further comprises a ngRNA that comprises a spacer comprising a sequence selected from the group consisting of SEQ ID Nos: 20430, 20435-20436, 20438-20439, 20442-20443, 20527, 20529, and 20537-20539 of Table 3D.

[0457] In some embodiments, the PEgRNA comprises a spacer comprising the sequence of SEQ Identifier: A374 of Table 3A. In some embodiments, the PEgRNA comprises a spacer comprising a sequence as set forth in SEQ ID NO. 722 of Table 3A. In some embodiments, the PEgRNA comprises a PBS comprising a sequence selected from the group consisting of SEQ Identifier: B1431-B1439 of Table 3B. In some embodiments, the PEgRNA comprises a PBS comprising a sequence selected from the group consisting of SEQ ID Nos: of Table 3B. In some embodiments, the PEgRNA comprises a PBS comprising a sequence selected from the group consisting of sequences as disclosed in Table 3B. In some embodiments, the PEgRNA comprises an editing template comprising a sequence selected from the group consisting of SEQ Identifiers: C5060-C5090 of Table 3C. In some embodiments, the PEgRNA comprises an editing template comprising a sequence selected from the group consisting of SEQ ID Nos: of Table 3C. In some embodiments, the prime editing composition further comprises a ngRNA that comprises a spacer comprising a sequence selected from the group consisting of SEQ Identifiers: D767-D782, D813, D814, D907, D908, and D909 of Table 3D. In some embodiments, the prime editing composition further comprises a ngRNA that comprises a spacer comprising a sequence selected from the group consisting of SEQ ID Nos: 20400-20415, 20446-20447, and 20540-20542 of Table 3D.

[0458] In some embodiments, the PEgRNA comprises a spacer comprising a sequence selected from the group consisting of SEQ Identifiers: A343-A344 of Table 3A. In some embodiments, the PEgRNA comprises a spacer comprising a sequence as set forth in SEQ ID NOs. 691-692 of Table 3A. In some embodiments, the PEgRNA comprises a PBS comprising a sequence selected from the group consisting of SEQ Identifiers: B1440-B1448 of Table 3B. In some embodiments, the PEgRNA comprises a PBS comprising a sequence selected from the group consisting of SEQ ID Nos: of Table 3B. In some embodiments, the PEgRNA comprises a PBS comprising a sequence selected from the group consisting of sequences as disclosed in Table 3B. In some embodiments, the PEgRNA comprises an editing template comprising a sequence selected from the group consisting of SEQ Identifiers: C5091-C5140 of Table 3C. In some embodiments, the PEgRNA comprises an editing template comprising a sequence selected from the group consisting of SEQ ID Nos: of Table 3C. In some embodiments, the prime editing composition further comprises a ngRNA that comprises a spacer comprising a sequence selected from the group consisting of SEQ Identifiers: D820-D839 of Table 3D. In some embodiments, the prime editing composition further comprises a ngRNA that comprises a spacer comprising a sequence selected from the group consisting of SEQ ID Nos: 20453-20472 of Table 3D.

[0459] In some embodiments, the PEgRNA comprises a spacer comprising the sequence of SEQ Identifier: A345 of Table 3A. In some embodiments, the PEgRNA comprises a spacer comprising a sequence as set forth in SEQ ID NO. 693 of Table 3A. In some embodiments, the PEgRNA comprises a PBS comprising a sequence selected from the group consisting of SEQ Identifiers: B1449-B1457 of Table 3B. In some embodiments, the PEgRNA comprises a PBS comprising a sequence selected from the group consisting of SEQ ID Nos: of Table 3B. In some embodiments, the PEgRNA comprises a PBS comprising a sequence selected from the group consisting of sequences as disclosed in Table 3B. In some embodiments, the PEgRNA comprises an editing template comprising a sequence selected from the group consisting of SEQ Identifiers: C5141-C5147 of Table 3C. In some embodiments, the PEgRNA comprises an editing template comprising a sequence selected from the group consisting of SEQ ID Nos: of Table 3C. In some embodiments, the prime editing composition further comprises a ngRNA that comprises a spacer comprising a sequence selected from the group consisting of SEQ Identifiers: D826-D840 and D899 of Table 3D. In some embodiments, the prime editing composition further comprises a ngRNA that comprises a spacer comprising a sequence selected from the group consisting of SEQ ID Nos: 20459-20473 and 20532 of Table 3D.

[0460] In some embodiments, the PEgRNA comprises a spacer comprising the sequence of SEQ Identifier: A375 of Table 3A. In some embodiments, the PEgRNA comprises a spacer comprising a sequence as set forth in SEQ ID NO. 723 of Table 3A. In some embodiments, the PEgRNA comprises a PBS comprising a sequence selected from the group consisting of SEQ Identifiers: B1548-B1556 of Table 3B. In some embodiments, the PEgRNA comprises a PBS comprising a sequence selected from the group consisting of SEQ ID Nos: of Table 3B. In some embodiments, the PEgRNA comprises a PBS comprising a sequence selected from the group consisting of sequences as disclosed in Table 3B. In some embodiments, the PEgRNA comprises an editing template comprising the sequence of SEQ Identifier: C5148 of Table 3C. In some embodiments, the PEgRNA comprises an editing template comprising a sequence selected from the group consisting of SEQ ID Nos: of Table 3C. In some embodiments, the prime editing composition further comprises a ngRNA that comprises a spacer comprising a sequence selected from the group consisting of SEQ Identifiers: D826-D840 and D899 of Table 3D. In some embodiments, the prime editing composition further comprises a ngRNA that comprises a spacer comprising a sequence selected from the group consisting of SEQ ID Nos: 20459-20473 and 20532 of Table 3D.

[0461] In some embodiments, the PEgRNA comprises a spacer comprising a sequence selected from the group consisting of SEQ Identifiers: A346-A348 of Table 3A. In some embodiments, the PEgRNA comprises a spacer comprising a sequence as set forth in SEQ ID NOs. 694-696 of Table 3A. In some embodiments, the PEgRNA comprises a PBS comprising a sequence selected from the group consisting of SEQ Identifiers: B1458-B1466 of Table 3B. In some embodiments, the PEgRNA comprises a PBS comprising a sequence selected from the group consisting of SEQ ID Nos: of Table 3B. In some embodiments, the PEgRNA comprises a PBS comprising a sequence selected from the group consisting of sequences as disclosed in Table 3B. In some embodiments, the PEgRNA comprises an editing template comprising a sequence selected from the group consisting of SEQ Identifiers: C5149-C5157 of Table 3C. In some embodiments, the PEgRNA comprises an editing template comprising a sequence selected from the group consisting of SEQ ID Nos: of Table 3C. In some embodiments, the prime editing composition further comprises a ngRNA that comprises a spacer comprising a sequence selected from the group consisting of SEQ Identifiers: D797, D802, D805, D806, D809, D810, D841, D842, and D843 of Table 3D. In some embodiments, the prime editing composition further comprises a ngRNA that comprises a spacer comprising a sequence selected from the group consisting of SEQ ID Nos: 20430, 20435-20436, 20438-20439, 20442-20443, and 20474-20476 of Table 3D.

[0462] In some embodiments, the PEgRNA comprises a spacer comprising a sequence selected from the group consisting of SEQ Identifiers: A376-A377 of Table 3A. In some embodiments, the PEgRNA comprises a spacer comprising a sequence as set forth in SEQ ID NOs. 724-725 of Table 3A. In some embodiments, the PEgRNA comprises a PBS comprising a sequence selected from the group consisting of SEQ Identifiers: B1467-B1475 of Table 3B. In some embodiments, the PEgRNA comprises a PBS comprising a sequence selected from the group consisting of SEQ ID Nos: of Table 3B. In some embodiments, the PEgRNA comprises a PBS comprising a sequence selected from the group consisting of sequences as disclosed in Table 3B. In some embodiments, the PEgRNA comprises an editing template comprising a sequence selected from the group consisting of SEQ Identifiers: C5158-C5188 of Table 3C. In some embodiments, the PEgRNA comprises an editing template comprising a sequence selected from the group consisting of SEQ ID Nos: of Table 3C. In some embodiments, the prime editing composition further comprises a ngRNA that comprises a spacer comprising a sequence selected from the group consisting of SEQ Identifiers: D822-D837, D846-D853, and D910-D913 of Table 3D. In some embodiments, the prime editing composition further comprises a ngRNA that comprises a spacer comprising a sequence selected from the group consisting of SEQ ID Nos: 20455-20470, 20479-20486, and 20543-20546 of Table 3D.

[0463] In some embodiments, the PEgRNA comprises a spacer comprising a sequence selected from the group consisting of SEQ Identifiers: A351-A354 of Table 3A. In some embodiments, the PEgRNA comprises a spacer comprising a sequence as set forth in SEQ ID NOs. 699-702 of Table 3A. In some embodiments, the PEgRNA comprises a PBS comprising a sequence selected from the group consisting of SEQ Identifiers: B1476-B1484 of Table 3B. In some embodiments, the PEgRNA comprises a PBS comprising a sequence selected from the group consisting of SEQ ID Nos: of Table 3B. In some embodiments, the PEgRNA comprises a PBS comprising a sequence selected from the group consisting of sequences as disclosed in Table 3B. In some embodiments, the PEgRNA comprises an editing template comprising a sequence selected from the group consisting of SEQ Identifiers: C5189-C5236 of Table 3C. In some embodiments, the PEgRNA comprises an editing template comprising a sequence selected from the group consisting of SEQ ID Nos: of Table 3C. In some embodiments, the prime editing composition further comprises a ngRNA that comprises a spacer comprising a sequence selected from the group consisting of SEQ Identifiers: D856-D880 of Table 3D. In some embodiments, the prime editing composition further comprises a ngRNA that comprises a spacer comprising a sequence selected from the group consisting of SEQ ID Nos: 20489-20513 of Table 3D.

[0464] In some embodiments, the PEgRNA comprises a spacer comprising a sequence selected from the group consisting of SEQ Identifiers: A355-A356 of Table 3A. In some embodiments, the PEgRNA comprises a spacer comprising a sequence as set forth in SEQ ID NOs. 703-704 of Table 3A. In some embodiments, the PEgRNA comprises a PBS comprising a sequence selected from the group consisting of SEQ Identifiers: B1485-B1493 of Table 3B. In some embodiments, the PEgRNA comprises a PBS comprising a sequence selected from the group consisting of SEQ ID Nos: of Table 3B. In some embodiments, the PEgRNA comprises a PBS comprising a sequence selected from the group consisting of sequences as disclosed in Table 3B. In some embodiments, the PEgRNA comprises an editing template comprising a sequence selected from the group consisting of SEQ Identifiers: C5237-C5262 of Table 3C. In some embodiments, the PEgRNA comprises an editing template comprising a sequence selected from the group consisting of SEQ ID Nos: of Table 3C. In some embodiments, the prime editing composition further comprises a ngRNA that comprises a spacer comprising a sequence selected from the group consisting of SEQ Identifiers: D822-D839, and D846-D853 of Table 3D. In some embodiments, the prime editing composition further comprises a ngRNA that comprises a spacer comprising a sequence selected from the group consisting of SEQ ID Nos: 20455-20472 and 20479-20486 of Table 3D.

[0465] In some embodiments, the PEgRNA comprises a spacer comprising a sequence selected from the group consisting of SEQ Identifiers: A378-A379 of Table 3A. In some embodiments, the PEgRNA comprises a spacer comprising a sequence as set forth in SEQ ID NOs. 726-727 of Table 3A. In some embodiments, the PEgRNA comprises a PBS comprising a sequence selected from the group consisting of SEQ Identifiers: B1530-B1538 of Table 3B. In some embodiments, the PEgRNA comprises a PBS comprising a sequence selected from the group consisting of SEQ ID Nos: of Table 3B. In some embodiments, the PEgRNA comprises a PBS comprising a sequence selected from the group consisting of sequences as disclosed in Table 3B. In some embodiments, the PEgRNA comprises an editing template comprising a sequence selected from the group consisting of SEQ Identifiers: C5263-C5293 of Table 3C. In some embodiments, the PEgRNA comprises an editing template comprising a sequence selected from the group consisting of SEQ ID Nos: of Table 3C. In some embodiments, the prime editing composition further comprises a ngRNA that comprises a spacer comprising a sequence selected from the group consisting of SEQ Identifiers: D763, D764, D768-D782, D813, D814, D818, D907, D908, D909, and D914 of Table 3D. In some embodiments, the prime editing composition further comprises a ngRNA that comprises a spacer comprising a sequence selected from the group consisting of SEQ ID Nos. 20396-20397, 20401-20415, 20446-20447, 20451, and 20540-20542 of Table 3D.

[0466] In some embodiments, the PEgRNA comprises a spacer comprising the sequence of SEQ Identifier: A380 of Table 3A. In some embodiments, the PEgRNA comprises a spacer comprising a sequence as set forth in SEQ ID NO. 728 of Table 3A. In some embodiments, the PEgRNA comprises a PBS comprising a sequence selected from the group consisting of SEQ Identifiers: B1557-B1565 of Table 3B. In some embodiments, the PEgRNA comprises a PBS comprising a sequence selected from the group consisting of SEQ ID Nos: of Table 3B. In some embodiments, the PEgRNA comprises a PBS comprising a sequence selected from the group consisting of sequences as disclosed in Table 3B. In some embodiments, the PEgRNA comprises an editing template comprising a sequence selected from the group consisting of SEQ Identifiers: C5294-C5324 of Table 3C. In some embodiments, the PEgRNA comprises an editing template comprising a sequence selected from the group consisting of SEQ ID Nos: of Table 3C. In some embodiments, the prime editing composition further comprises a ngRNA that comprises a spacer comprising a sequence selected from the group consisting of SEQ Identifiers: D768-D782, D813, D814, D907, D908, and D909 of Table 3D. In some embodiments, the prime editing composition further comprises a ngRNA that comprises a spacer comprising a sequence selected from the group consisting of SEQ ID Nos: 20401-20415, 20446-20447, and 20540-20542 of Table 3D.

[0467] In some embodiments, the PEgRNA comprises a spacer comprising a sequence selected from the group consisting of SEQ Identifiers: A357-A358 of Table 3A. In some embodiments, the PEgRNA comprises a spacer comprising a sequence as set forth in SEQ ID NOs. 705-706 of Table 3A. In some embodiments, the PEgRNA comprises a PBS comprising a sequence selected from the group consisting of SEQ Identifiers: B1494-B1502 of Table 3B. In some embodiments, the PEgRNA comprises a PBS comprising a sequence selected from the group consisting of SEQ ID Nos: of Table 3B. In some embodiments, the PEgRNA comprises a PBS comprising a sequence selected from the group consisting of sequences as disclosed in Table 3B. In some embodiments, the PEgRNA comprises an editing template comprising a sequence selected from the group consisting of SEQ Identifiers: C5325-C5346 of Table 3C. In some embodiments, the PEgRNA comprises an editing template comprising a sequence selected from the group consisting of SEQ ID Nos: of Table 3C. In some embodiments, the prime editing composition further comprises a ngRNA that comprises a spacer comprising a sequence selected from the group consisting of SEQ Identifiers: D765-D782, D813, D814, D881-D889, and D907 of Table 3D. In some embodiments, the prime editing composition further comprises a ngRNA that comprises a spacer comprising a sequence selected from the group consisting of SEQ ID Nos: 20398-20415, 20446-20447, 20514-20522, and 20539 of Table 3D.

[0468] In some embodiments, the PEgRNA comprises a spacer comprising a sequence selected from the group consisting of SEQ Identifiers: A359-A360 of Table 3A. In some embodiments, the PEgRNA comprises a spacer comprising a sequence as set forth in SEQ ID NO. 707-708 of Table 3A. In some embodiments, the PEgRNA comprises a PBS comprising a sequence selected from the group consisting of SEQ Identifiers: B1503-B1511 of Table 3B. In some embodiments, the PEgRNA comprises a PBS comprising a sequence selected from the group consisting of SEQ ID Nos: of Table 3B. In some embodiments, the PEgRNA comprises a PBS comprising a sequence selected from the group consisting of sequences as disclosed in Table 3B. In some embodiments, the PEgRNA comprises an editing template comprising a sequence selected from the group consisting of SEQ Identifiers: C5347-5408C of Table 3C. In some embodiments, the PEgRNA comprises an editing template comprising a sequence selected from the group consisting of SEQ ID Nos: of Table 3C. In some embodiments, the prime editing composition further comprises a ngRNA that comprises a spacer comprising a sequence selected from the group consisting of SEQ Identifiers: D862-D868, and D872-D879 of Table 3D. In some embodiments, the prime editing composition further comprises a ngRNA that comprises a spacer comprising a sequence selected from the group consisting of SEQ ID Nos: 20495-20501 and 20505-20512 of Table 3D.

[0469] In some embodiments, the PEgRNA comprises a spacer comprising the sequence of SEQ Identifier: A361 of Table 3A. In some embodiments, the PEgRNA comprises a spacer comprising a sequence as set forth in SEQ ID NO. 709 of Table 3A. In some embodiments, the PEgRNA comprises a PBS comprising a sequence selected from the group consisting of SEQ Identifiers: B1512-B1520 of Table 3B. In some embodiments, the PEgRNA comprises a PBS comprising a sequence selected from the group consisting of SEQ ID Nos: of Table 3B. In some embodiments, the PEgRNA comprises a PBS comprising a sequence selected from the group consisting of sequences as disclosed in Table 3B. In some embodiments, the PEgRNA comprises an editing template comprising a sequence selected from the group consisting of SEQ Identifiers: C5409-C5414 of Table 3C. In some embodiments, the PEgRNA comprises an editing template comprising a sequence selected from the group consisting of SEQ ID Nos: of Table 3C. In some embodiments, the prime editing composition further comprises a ngRNA that comprises a spacer comprising a sequence selected from the group consisting of SEQ Identifiers: D765-D781 of Table 3D. In some embodiments, the prime editing composition further comprises a ngRNA that comprises a spacer comprising a sequence selected from the group consisting of SEQ ID Nos: 20398-20414 of Table 3D.

[0470] In some embodiments, the editing target sequence is in exon 12 of the CFTR gene.

[0471] In some embodiments, the editing target sequence or the complementary sequence on the CFTR gene thereof comprises a mutation that encodes an amino acid substitution G542*, E543A, G544C, G544V, and/or G545V relative to a wild type CFTR polypeptide set forth in SEQ ID NO: 19, wherein * refers to a non-sense mutation and wherein the editing template encodes an intended nucleotide edit that corrects the mutation. In some embodiments, the editing target sequence or the complementary sequence on the CFTR gene thereof comprises a G→→T mutation (c.1624G>T) at position 117,587,778, a duplication of nucleotides TA (c.1616_1617dupTA) at position 117,587,771, a A→→C mutation (c.1628A>C) at position 117,587,782, a G→→T mutation (c.1630G>T) at position 117,587,784, a G→→T mutation (c.1631G>T) at position 117,587,785, and/or a G→→T mutation (c.1634G>T) at position 117,587,788 of human chromosome 7 compared to a wild type CFTR gene. In some embodiments, the editing template comprises an intended nucleotide edit compared to the target CFTR gene, wherein incorporation of the intended nucleotide edit encoded by the editing template corrects the mutation. In some embodiments, incorporation of the one or more intended nucleotide edits results in a CFTR gene that encodes a functional CFTR polypeptide. In some embodiments, the editing template comprises a wild type CFTR gene sequence. Accordingly, in some embodiments, the newly synthesized single stranded DNA encoded by the editing template is capable of correcting the c.1624G>T mutation, the c.1616_1617dupTA mutation, the c.1628A>C mutation, the c.1630G>T mutation, the c.1631G>T mutation, and/or the c.1634G>T mutation in the target CFTR gene. In some embodiments, the newly synthesized single stranded DNA encoded by the editing template is capable of correcting all of the c.1624G>T mutation, the c.1616_1617dupTA mutation, the c.1628A>C mutation, the c.1630G>T mutation, the c.1631G>T mutation, and the c.1634G>T mutation in the target CFTR gene. In some embodiments, two or more of the c.1624G>T mutation, the c.1616_1617dupTA mutation, the c.1628A>C mutation, the c.1630G>T mutation, the c.1631G>T mutation, and the c.1634G>T mutation are located on the same CFTR gene. In some embodiments, the newly synthesized single stranded DNA encoded by the editing template is capable of correcting the c.1624G>T mutation, the c.1616_1617dupTA mutation, the c.1628A>C mutation, the c.1630G>T mutation, the c.1631G>T mutation, and the c.1634G>T mutation that are located on different CFTR genes. For example, in some embodiments, a subject may comprise two copies of CFTR genes, each comprising a different mutation selected from the group consisting of the c.1624G>T mutation, the c.1616_1617dupTA mutation, the c.1628A>C mutation, the c.1630G>T mutation, the c.1631G>T mutation, and the c.1634G>T mutation, all of which may be corrected by an editing template of a single PEgRNA. In some embodiments, the editing template is capable of correcting one or more, or all of the c.1624G>T mutation, the c.1616_1617dupTA mutation, the c.1628A>C mutation, the c.1630G>T mutation, the c.1631G>T mutation, and the c.1634G>T mutation that are in different subjects, wherein each subject may have one or more of the mutations.

[0472] In some embodiments, the PEgRNA comprises a spacer comprising a sequence selected from the group consisting of SEQ Identifiers: A381-A382 of Table 3A. In some embodiments, the PEgRNA comprises a spacer comprising a sequence as set forth in SEQ ID NOs. 729-730 of Table 3A. In some embodiments, the PEgRNA comprises a PBS comprising a sequence selected from the group consisting of SEQ Identifiers: B1566-B1574 of Table 3B. In some embodiments, the PEgRNA comprises a PBS comprising a sequence selected from the group consisting of SEQ ID Nos: of Table 3B. In some embodiments, the PEgRNA comprises a PBS comprising a sequence selected from the group consisting of sequences as disclosed in Table 3B. In some embodiments, the PEgRNA comprises an editing template comprising a sequence selected from the group consisting of SEQ Identifiers: C5415-C5476 of Table 3C. In some embodiments, the PEgRNA comprises an editing template comprising a sequence selected from the group consisting of SEQ ID Nos: of Table 3C. In some embodiments, the prime editing composition further comprises a ngRNA that comprises a spacer comprising a sequence selected from the group consisting of SEQ Identifiers: D915-D928 of Table 3D. In some embodiments, the prime editing composition further comprises a ngRNA that comprises a spacer comprising a sequence selected from the group consisting of SEQ ID Nos: 20548-20561 of Table 3D.

[0473] In some embodiments, the PEgRNA comprises a spacer comprising a sequence selected from the group consisting of SEQ Identifiers: A383-A384 of Table 3A. In some embodiments, the PEgRNA comprises a spacer comprising a sequence as set forth in SEQ ID NOs. 731-732 of Table 3A. In some embodiments, the PEgRNA comprises a PBS comprising a sequence selected from the group consisting of SEQ Identifiers: B1575-B1583 of Table 3B. In some embodiments, the PEgRNA comprises a PBS comprising a sequence selected from the group consisting of SEQ ID Nos: of Table 3B. In some embodiments, the PEgRNA comprises a PBS comprising a sequence selected from the group consisting of sequences as disclosed in Table 3B. In some embodiments, the PEgRNA comprises an editing template comprising a sequence selected from the group consisting of SEQ Identifiers: C5477-C5507 of Table 3C. In some embodiments, the PEgRNA comprises an editing template comprising a sequence selected from the group consisting of SEQ ID Nos: of Table 3C. In some embodiments, the prime editing composition further comprises a ngRNA that comprises a spacer comprising a sequence selected from the group consisting of SEQ Identifiers: D929-D952 of Table 3D. In some embodiments, the prime editing composition further comprises a ngRNA that comprises a spacer comprising a sequence selected from the group consisting of SEQ ID Nos: 20562-20585 of Table 3D.

[0474] In some embodiments, the PEgRNA comprises a spacer comprising a sequence selected from the group consisting of SEQ Identifiers: A385-A386 of Table 3A. In some embodiments, the PEgRNA comprises a spacer comprising a sequence as set forth in SEQ ID NOs. 733-734 of Table 3A. In some embodiments, the PEgRNA comprises a PBS comprising a sequence selected from the group consisting of SEQ Identifiers: B1584-B1592 of Table 3B. In some embodiments, the PEgRNA comprises a PBS comprising a sequence selected from the group consisting of SEQ ID Nos: of Table 3B. In some embodiments, the PEgRNA comprises a PBS comprising a sequence selected from the group consisting of sequences as disclosed in Table 3B. In some embodiments, the PEgRNA comprises an editing template comprising a sequence selected from the group consisting of SEQ Identifiers: C5508-C5521 of Table 3C. In some embodiments, the PEgRNA comprises an editing template comprising a sequence selected from the group consisting of SEQ ID Nos: of Table 3C. In some embodiments, the prime editing composition further comprises a ngRNA that comprises a spacer comprising a sequence selected from the group consisting of SEQ Identifiers: D929-D943, and D946-D953 of Table 3D. In some embodiments, the prime editing composition further comprises a ngRNA that comprises a spacer comprising a sequence selected from the group consisting of SEQ ID Nos: 20562-20576 and 20579-20586 of Table 3D.

[0475] In some embodiments, the PEgRNA comprises a spacer comprising a sequence selected from the group consisting of SEQ Identifiers: A387-A388 of Table 3A. In some embodiments, the PEgRNA comprises a spacer comprising a sequence as set forth in SEQ ID NOs. 735-736 of Table 3A. In some embodiments, the PEgRNA comprises a PBS comprising a sequence selected from the group consisting of SEQ Identifiers: B1593-B1601 of Table 3B. In some embodiments, the PEgRNA comprises a PBS comprising a sequence selected from the group consisting of SEQ ID Nos: of Table 3B. In some embodiments, the PEgRNA comprises a PBS comprising a sequence selected from the group consisting of sequences as disclosed in Table 3B. In some embodiments, the PEgRNA comprises an editing template comprising a sequence selected from the group consisting of SEQ Identifiers: C5522-C5559 of Table 3C. In some embodiments, the PEgRNA comprises an editing template comprising a sequence selected from the group consisting of SEQ ID Nos: of Table 3C. In some embodiments, the prime editing composition further comprises a ngRNA that comprises a spacer comprising a sequence selected from the group consisting of SEQ Identifiers: D915-D928, D954, and D955 of Table 3D. In some embodiments, the prime editing composition further comprises a ngRNA that comprises a spacer comprising a sequence selected from the group consisting of SEQ ID Nos: 20548-20561 and 20587-20588 of Table 3D.

[0476] In some embodiments, the PEgRNA comprises a spacer comprising a sequence selected from the group consisting of SEQ Identifiers: A389-A390 of Table 3A. In some embodiments, the PEgRNA comprises a spacer comprising a sequence as set forth in SEQ ID NOs. 737-738 of Table 3A. In some embodiments, the PEgRNA comprises a PBS comprising a sequence selected from the group consisting of SEQ Identifiers: B1602-B1610 of Table 3B. In some embodiments, the PEgRNA comprises a PBS comprising a sequence selected from the group consisting of SEQ ID Nos: of Table 3B. In some embodiments, the PEgRNA comprises a PBS comprising a sequence selected from the group consisting of sequences as disclosed in Table 3B. In some embodiments, the PEgRNA comprises an editing template comprising a sequence selected from the group consisting of SEQ Identifiers: C5560-C5580 of Table 3C. In some embodiments, the PEgRNA comprises an editing template comprising a sequence selected from the group consisting of SEQ ID Nos: of Table 3C. In some embodiments, the prime editing composition further comprises a ngRNA that comprises a spacer comprising a sequence selected from the group consisting of SEQ Identifiers: D956-D981 of Table 3D. In some embodiments, the prime editing composition further comprises a ngRNA that comprises a spacer comprising a sequence selected from the group consisting of SEQ ID Nos: 2058920614 of Table 3D.

[0477] In some embodiments, the PEgRNA comprises a spacer comprising a sequence selected from the group consisting of SEQ Identifiers: A391-A392 of Table 3A. In some embodiments, the PEgRNA comprises a spacer comprising a sequence as set forth in SEQ ID NOs. 739-740 of Table 3A. In some embodiments, the PEgRNA comprises a PBS comprising a sequence selected from the group consisting of SEQ Identifiers: B1611-B1619 of Table 3B. In some embodiments, the PEgRNA comprises a PBS comprising a sequence selected from the group consisting of SEQ ID Nos: of Table 3B. In some embodiments, the PEgRNA comprises a PBS comprising a sequence selected from the group consisting of sequences as disclosed in Table 3B. In some embodiments, the PEgRNA comprises an editing template comprising a sequence selected from the group consisting of SEQ Identifiers: C5581-C5611 of Table 3C. In some embodiments, the PEgRNA comprises an editing template comprising a sequence selected from the group consisting of SEQ ID Nos: of Table 3C. In some embodiments, the prime editing composition further comprises a ngRNA that comprises a spacer comprising a sequence selected from the group consisting of SEQ Identifiers: D929-D952 of Table 3D. In some embodiments, the prime editing composition further comprises a ngRNA that comprises a spacer comprising a sequence selected from the group consisting of SEQ ID Nos: 20562-20585 of Table 3D.

[0478] In some embodiments, the PEgRNA comprises a spacer comprising a sequence selected from the group consisting of SEQ Identifiers: A393-A394 of Table 3A. In some embodiments, the PEgRNA comprises a spacer comprising a sequence as set forth in SEQ ID NOs. 741-742 of Table 3A. In some embodiments, the PEgRNA comprises a PBS comprising a sequence selected from the group consisting of SEQ Identifiers: B1620-B1628 of Table 3B. In some embodiments, the PEgRNA comprises a PBS comprising a sequence selected from the group consisting of SEQ ID Nos: of Table 3B. In some embodiments, the PEgRNA comprises a PBS comprising a sequence selected from the group consisting of sequences as disclosed in Table 3B. In some embodiments, the PEgRNA comprises an editing template comprising a sequence selected from the group consisting of SEQ Identifiers: C5612-C5627 of Table 3C. In some embodiments, the PEgRNA comprises an editing template comprising a sequence selected from the group consisting of SEQ ID Nos: of Table 3C. In some embodiments, the prime editing composition further comprises a ngRNA that comprises a spacer comprising a sequence selected from the group consisting of SEQ Identifiers: D929-D943 and D946-D953 of Table 3D. In some embodiments, the prime editing composition further comprises a ngRNA that comprises a spacer comprising a sequence selected from the group consisting of SEQ ID Nos: 20562-20576 and 20579-20586 of Table 3D.

[0479] In some embodiments, the PEgRNA comprises a spacer comprising the sequence of SEQ Identifier: A395 of Table 3A. In some embodiments, the PEgRNA comprises a spacer comprising a sequence as set forth in SEQ ID NO. 743 of Table 3A. In some embodiments, the PEgRNA comprises a PBS comprising a sequence selected from the group consisting of SEQ Identifiers: B1629-B1637 of Table 3B. In some embodiments, the PEgRNA comprises a PBS comprising a sequence selected from the group consisting of SEQ ID Nos: of Table 3B. In some embodiments, the PEgRNA comprises a PBS comprising a sequence selected from the group consisting of sequences as disclosed in Table 3B. In some embodiments, the PEgRNA comprises an editing template comprising a sequence selected from the group consisting of SEQ Identifiers: C5628-C5646 of Table 3C. In some embodiments, the PEgRNA comprises an editing template comprising a sequence selected from the group consisting of SEQ ID Nos: of Table 3C. In some embodiments, the prime editing composition further comprises a ngRNA that comprises a spacer comprising a sequence selected from the group consisting of SEQ Identifiers: D963-D981 of Table 3D. In some embodiments, the prime editing composition further comprises a ngRNA that comprises a spacer comprising a sequence selected from the group consisting of SEQ ID Nos: 20596-20614 of Table 3D.

[0480] In some embodiments, the PEgRNA comprises a spacer comprising a sequence selected from the group consisting of SEQ Identifiers: A396-A397 of Table 3A. In some embodiments, the PEgRNA comprises a spacer comprising a sequence as set forth in SEQ ID NOs. 744-745 of Table 3A. In some embodiments, the PEgRNA comprises a PBS comprising a sequence selected from the group consisting of SEQ Identifiers: B1638-B1646 of Table 3B. In some embodiments, the PEgRNA comprises a PBS comprising a sequence selected from the group consisting of SEQ ID Nos: of Table 3B. In some embodiments, the PEgRNA comprises a PBS comprising a sequence selected from the group consisting of sequences as disclosed in Table 3B. In some embodiments, the PEgRNA comprises an editing template comprising a sequence selected from the group consisting of SEQ Identifiers: C5647-C5676 of Table 3C. In some embodiments, the PEgRNA comprises an editing template comprising a sequence selected from the group consisting of SEQ ID Nos: of Table 3C. In some embodiments, the prime editing composition further comprises a ngRNA that comprises a spacer comprising a sequence selected from the group consisting of SEQ Identifiers: D915-D928, D982, and D983 of Table 3D. In some embodiments, the prime editing composition further comprises a ngRNA that comprises a spacer comprising a sequence selected from the group consisting of SEQ ID Nos: 20548-20561 and 20615-20616 of Table 3D.

[0481] In some embodiments, the PEgRNA comprises a spacer comprising a sequence selected from the group consisting of SEQ Identifiers: A398-A399 of Table 3A. In some embodiments, the PEgRNA comprises a spacer comprising a sequence as set forth in SEQ ID NOs. 746-747 of Table 3A. In some embodiments, the PEgRNA comprises a PBS comprising a sequence selected from the group consisting of SEQ Identifiers: B1647-B1655 of Table 3B. In some embodiments, the PEgRNA comprises a PBS comprising a sequence selected from the group consisting of SEQ ID Nos: of Table 3B. In some embodiments, the PEgRNA comprises a PBS comprising a sequence selected from the group consisting of sequences as disclosed in Table 3B. In some embodiments, the PEgRNA comprises an editing template comprising a sequence selected from the group consisting of SEQ Identifiers: C5677-C5738 of Table 3C. In some embodiments, the PEgRNA comprises an editing template comprising a sequence selected from the group consisting of SEQ ID Nos: of Table 3C. In some embodiments, the prime editing composition further comprises a ngRNA that comprises a spacer comprising a sequence selected from the group consisting of SEQ Identifiers: D984-D1001 of Table 3D. In some embodiments, the prime editing composition further comprises a ngRNA that comprises a spacer comprising a sequence selected from the group consisting of SEQ ID Nos: 20617-20634 of Table 3D.

[0482] In some embodiments, the PEgRNA comprises a spacer comprising a sequence selected from the group consisting of SEQ Identifiers: A400-A401 of Table 3A. In some embodiments, the PEgRNA comprises a spacer comprising a sequence as set forth in SEQ ID NOs. 748-749 of Table 3A. In some embodiments, the PEgRNA comprises a PBS comprising a sequence selected from the group consisting of SEQ Identifiers: B1656-B1664 of Table 3B. In some embodiments, the PEgRNA comprises a PBS comprising a sequence selected from the group consisting of SEQ ID Nos: of Table 3B. In some embodiments, the PEgRNA comprises a PBS comprising a sequence selected from the group consisting of sequences as disclosed in Table 3B. In some embodiments, the PEgRNA comprises an editing template comprising a sequence selected from the group consisting of SEQ Identifiers: C5739-C5743 of Table 3C. In some embodiments, the PEgRNA comprises an editing template comprising a sequence selected from the group consisting of SEQ ID Nos: of Table 3C. In some embodiments, the prime editing composition further comprises a ngRNA that comprises a spacer comprising a sequence selected from the group consisting of SEQ Identifiers: D958, D959, D960, D967-D981 and D1002 of Table 3D. In some embodiments, the prime editing composition further comprises a ngRNA that comprises a spacer comprising a sequence selected from the group consisting of SEQ ID Nos 20591-20593, 20600-20614, and 20635 of Table 3D.

[0483] In some embodiments, the PEgRNA comprises a spacer comprising the sequence of SEQ Identifiers: A402 of Table 3A. In some embodiments, the PEgRNA comprises a spacer comprising a sequence as set forth in SEQ ID NO. 750 of Table 3A. In some embodiments, the PEgRNA comprises a PBS comprising a sequence selected from the group consisting of SEQ Identifiers: B1665-B1673 of Table 3B. In some embodiments, the PEgRNA comprises a PBS comprising a sequence selected from the group consisting of SEQ ID Nos: of Table 3B. In some embodiments, the PEgRNA comprises a PBS comprising a sequence selected from the group consisting of sequences as disclosed in Table 3B. In some embodiments, the PEgRNA comprises an editing template comprising a sequence selected from the group consisting of SEQ Identifiers: C5744-C5754 of Table 3C. In some embodiments, the PEgRNA comprises an editing template comprising a sequence selected from the group consisting of SEQ ID Nos: of Table 3C. In some embodiments, the prime editing composition further comprises a ngRNA that comprises a spacer comprising a sequence selected from the group consisting of SEQ Identifiers: D929-D941 and D953 of Table 3D. In some embodiments, the prime editing composition further comprises a ngRNA that comprises a spacer comprising a sequence selected from the group consisting of SEQ ID Nos: 20562-20574 and 20654-20658 of Table 3D.

[0484] In some embodiments, the PEgRNA comprises a spacer comprising a sequence selected from the group consisting of SEQ Identifiers: A403-A404 of Table 3A. In some embodiments, the PEgRNA comprises a spacer comprising a sequence as set forth in SEQ ID NOs. 751-752 of Table 3A. In some embodiments, the PEgRNA comprises a PBS comprising a sequence selected from the group consisting of SEQ Identifiers: B1674-B1682 of Table 3B. In some embodiments, the PEgRNA comprises a PBS comprising a sequence selected from the group consisting of SEQ ID Nos: of Table 3B. In some embodiments, the PEgRNA comprises a PBS comprising a sequence selected from the group consisting of sequences as disclosed in Table 3B. In some embodiments, the PEgRNA comprises an editing template comprising a sequence selected from the group consisting of SEQ Identifiers: C5755-C5780 of Table 3C. In some embodiments, the PEgRNA comprises an editing template comprising a sequence selected from the group consisting of SEQ ID Nos: of Table 3C. In some embodiments, the prime editing composition further comprises a ngRNA that comprises a spacer comprising a sequence selected from the group consisting of SEQ Identifiers: D915-D928, D1003, and D1004 of Table 3D. In some embodiments, the prime editing composition further comprises a ngRNA that comprises a spacer comprising a sequence selected from the group consisting of SEQ ID Nos: 20548-20561 and 20636-20637 of Table 3D.

[0485] In some embodiments, the PEgRNA comprises a spacer comprising a sequence selected from the group consisting of SEQ Identifiers: A405-A406 of Table 3A. In some embodiments, the PEgRNA comprises a spacer comprising a sequence as set forth in SEQ ID NOs. 753-754 of Table 3A. In some embodiments, the PEgRNA comprises a PBS comprising a sequence selected from the group consisting of SEQ Identifiers: B1683-B1691 of Table 3B. In some embodiments, the PEgRNA comprises a PBS comprising a sequence selected from the group consisting of SEQ ID Nos: of Table 3B. In some embodiments, the PEgRNA comprises a PBS comprising a sequence selected from the group consisting of sequences as disclosed in Table 3B. In some embodiments, the PEgRNA comprises an editing template comprising a sequence selected from the group consisting of SEQ Identifiers: C5781-C5800 of Table 3C. In some embodiments, the PEgRNA comprises an editing template comprising a sequence selected from the group consisting of SEQ ID Nos: of Table 3C. In some embodiments, the prime editing composition further comprises a ngRNA that comprises a spacer comprising a sequence selected from the group consisting of SEQ Identifiers: D929-D943, and D946-D953 of Table 3D. In some embodiments, the prime editing composition further comprises a ngRNA that comprises a spacer comprising a sequence selected from the group consisting of SEQ ID Nos: 20562-20576 and 20579-20586 of Table 3D.

[0486] In some embodiments, the PEgRNA comprises a spacer comprising a sequence selected from the group consisting of SEQ Identifiers: A407-A408 of Table 3A. In some embodiments, the PEgRNA comprises a spacer comprising a sequence as set forth in SEQ ID NOs. 755-756 of Table 3A. In some embodiments, the PEgRNA comprises a PBS comprising a sequence selected from the group consisting of SEQ Identifiers: B1692-B1700 of Table 3B. In some embodiments, the PEgRNA comprises a PBS comprising a sequence selected from the group consisting of SEQ ID Nos: of Table 3B. In some embodiments, the PEgRNA comprises a PBS comprising a sequence selected from the group consisting of sequences as disclosed in Table 3B. In some embodiments, the PEgRNA comprises an editing template comprising a sequence selected from the group consisting of SEQ Identifiers: C5801-C5831 of Table 3C. In some embodiments, the PEgRNA comprises an editing template comprising a sequence selected from the group consisting of SEQ ID Nos: of Table 3C. In some embodiments, the prime editing composition further comprises a ngRNA that comprises a spacer comprising a sequence selected from the group consisting of SEQ Identifiers: D956-D980, and D1005-D1011 of Table 3D. In some embodiments, the prime editing composition further comprises a ngRNA that comprises a spacer comprising a sequence selected from the group consisting of SEQ ID Nos: 20589-20613 and 20638-20644 of Table 3D.

[0487] In some embodiments, the PEgRNA comprises a spacer comprising the sequence of SEQ Identifier: A409 of Table 3A. In some embodiments, the PEgRNA comprises a spacer comprising a sequence as set forth in SEQ ID NO. 757 of Table 3A. In some embodiments, the PEgRNA comprises a PBS comprising a sequence selected from the group consisting of SEQ Identifiers: B1701-B1709 of Table 3B. In some embodiments, the PEgRNA comprises a PBS comprising a sequence selected from the group consisting of SEQ ID Nos: of Table 3B. In some embodiments, the PEgRNA comprises a PBS comprising a sequence selected from the group consisting of sequences as disclosed in Table 3B. In some embodiments, the PEgRNA comprises an editing template comprising a sequence selected from the group consisting of SEQ Identifiers: C5832-C5833 of Table 3C. In some embodiments, the PEgRNA comprises an editing template comprising a sequence selected from the group consisting of SEQ ID Nos: of Table 3C. In some embodiments, the prime editing composition further comprises a ngRNA that comprises a spacer comprising a sequence selected from the group consisting of SEQ Identifiers: D968-D981, and D1002 of Table 3D. In some embodiments, the prime editing composition further comprises a ngRNA that comprises a spacer comprising a sequence selected from the group consisting of SEQ ID Nos 20601-20614 and 20635 of Table 3D.

[0488] In some embodiments, the PEgRNA comprises a spacer comprising a sequence selected from the group consisting of SEQ Identifiers: A410-A411 of Table 3A. In some embodiments, the PEgRNA comprises a spacer comprising a sequence as set forth in SEQ ID NOs. 758-759 of Table 3A. In some embodiments, the PEgRNA comprises a PBS comprising a sequence selected from the group consisting of SEQ Identifiers: B1710-B1718 of Table 3B. In some embodiments, the PEgRNA comprises a PBS comprising a sequence selected from the group consisting of SEQ ID Nos: of Table 3B. In some embodiments, the PEgRNA comprises a PBS comprising a sequence selected from the group consisting of sequences as disclosed in Table 3B. In some embodiments, the PEgRNA comprises an editing template comprising a sequence selected from the group consisting of SEQ Identifiers: C5834-C5865 of Table 3C. In some embodiments, the PEgRNA comprises an editing template comprising a sequence selected from the group consisting of SEQ ID Nos: of Table 3C. In some embodiments, the prime editing composition further comprises a ngRNA that comprises a spacer comprising a sequence selected from the group consisting of SEQ Identifiers: D986-D992, D995-D1001, and D1012-D1015 of Table 3D. In some embodiments, the prime editing composition further comprises a ngRNA that comprises a spacer comprising a sequence selected from the group consisting of SEQ ID Nos: 20619-20625, 20628-20634, and 20645-20648 of Table 3D.

[0489] In some embodiments, the PEgRNA comprises a spacer comprising the sequence of SEQ Identifiers: A412 of Table 3A. In some embodiments, the PEgRNA comprises a spacer comprising a sequence as set forth in SEQ ID NO. 760 of Table 3A. In some embodiments, the PEgRNA comprises a PBS comprising a sequence selected from the group consisting of SEQ Identifiers: B1719-B1727 of Table 3B. In some embodiments, the PEgRNA comprises a PBS comprising a sequence selected from the group consisting of SEQ ID Nos: of Table 3B. In some embodiments, the PEgRNA comprises a PBS comprising a sequence selected from the group consisting of sequences as disclosed in Table 3B. In some embodiments, the PEgRNA comprises an editing template comprising a sequence selected from the group consisting of SEQ Identifiers: C5866-C5882 of Table 3C. In some embodiments, the PEgRNA comprises an editing template comprising a sequence selected from the group consisting of SEQ ID Nos: of Table 3C. In some embodiments, the prime editing composition further comprises a ngRNA that comprises a spacer comprising a sequence selected from the group consisting of SEQ Identifiers: D964-D981 and D1002 of Table 3D. In some embodiments, the prime editing composition further comprises a ngRNA that comprises a spacer comprising a sequence selected from the group consisting of SEQ ID Nos: 20597-20614 and 20635 of Table 3D.

[0490] In some embodiments, the PEgRNA comprises a spacer comprising a sequence selected from the group consisting of SEQ Identifiers: A413-A414 of Table 3A. In some embodiments, the PEgRNA comprises a spacer comprising a sequence as set forth in SEQ ID NOs. 761-762 of Table 3A. In some embodiments, the PEgRNA comprises a PBS comprising a sequence selected from the group consisting of SEQ Identifiers: B1728-B1736 of Table 3B. In some embodiments, the PEgRNA comprises a PBS comprising a sequence selected from the group consisting of SEQ ID Nos: of Table 3B. In some embodiments, the PEgRNA comprises a PBS comprising a sequence selected from the group consisting of sequences as disclosed in Table 3B. In some embodiments, the PEgRNA comprises an editing template comprising a sequence selected from the group consisting of SEQ Identifiers: C5883-C5894 of Table 3C. In some embodiments, the PEgRNA comprises an editing template comprising a sequence selected from the group consisting of SEQ ID Nos: of Table 3C. In some embodiments, the prime editing composition further comprises a ngRNA that comprises a spacer comprising a sequence selected from the group consisting of SEQ Identifiers: D915-D920, and D922-D927 of Table 3D. In some embodiments, the prime editing composition further comprises a ngRNA that comprises a spacer comprising a sequence selected from the group consisting of SEQ ID Nos: 20548-20553 and 20555-20560 of Table 3D.

[0491] In some embodiments, the PEgRNA comprises a spacer comprising the sequence of SEQ Identifier: A415 of Table 3A. In some embodiments, the PEgRNA comprises a spacer comprising a sequence as set forth in SEQ ID NO. 763 of Table 3A. In some embodiments, the PEgRNA comprises a PBS comprising a sequence selected from the group consisting of SEQ Identifiers: B1737-B1745 of Table 3B. In some embodiments, the PEgRNA comprises a PBS comprising a sequence selected from the group consisting of SEQ ID Nos: of Table 3B. In some embodiments, the PEgRNA comprises a PBS comprising a sequence selected from the group consisting of sequences as disclosed in Table 3B. In some embodiments, the PEgRNA comprises an editing template comprising a sequence selected from the group consisting of SEQ Identifiers: C5895-C5901 of Table 3C. In some embodiments, the PEgRNA comprises an editing template comprising a sequence selected from the group consisting of SEQ ID Nos: of Table 3C. In some embodiments, the prime editing composition further comprises a ngRNA that comprises a spacer comprising a sequence selected from the group consisting of SEQ Identifiers: D929-D939 and D953 of Table 3D. In some embodiments, the prime editing composition further comprises a ngRNA that comprises a spacer comprising a sequence selected from the group consisting of SEQ ID Nos: 20562-20572 and 20586 of Table 3D.

[0492] In some embodiments, the PEgRNA comprises a spacer comprising a sequence selected from the group consisting of SEQ Identifiers: A416-A417 of Table 3A. In some embodiments, the PEgRNA comprises a spacer comprising a sequence as set forth in SEQ ID NO. 764-765 of Table 3A. In some embodiments, the PEgRNA comprises a PBS comprising a sequence selected from the group consisting of SEQ Identifiers: B1746-B1754 of Table 3B. In some embodiments, the PEgRNA comprises a PBS comprising a sequence selected from the group consisting of SEQ ID Nos: of Table 3B. In some embodiments, the PEgRNA comprises a PBS comprising a sequence selected from the group consisting of sequences as disclosed in Table 3B. In some embodiments, the PEgRNA comprises an editing template comprising a sequence selected from the group consisting of SEQ Identifiers: C5902-C5957 of Table 3C. In some embodiments, the PEgRNA comprises an editing template comprising a sequence selected from the group consisting of SEQ ID Nos: of Table 3C. In some embodiments, the prime editing composition further comprises a ngRNA that comprises a spacer comprising a sequence selected from the group consisting of SEQ Identifiers: D915-D928 of Table 3D. In some embodiments, the prime editing composition further comprises a ngRNA that comprises a spacer comprising a sequence selected from the group consisting of SEQ ID Nos. 20548-20561 of Table 3D.

[0493] In some embodiments, the PEgRNA comprises a spacer comprising the sequence of SEQ Identifier: A418 of Table 3A. In some embodiments, the PEgRNA comprises a spacer comprising a sequence as set forth in SEQ ID NO. 766 of Table 3A. In some embodiments, the PEgRNA comprises a PBS comprising a sequence selected from the group consisting of SEQ Identifiers: B1755-B1763 of Table 3B. In some embodiments, the PEgRNA comprises a PBS comprising a sequence selected from the group consisting of SEQ ID Nos: of Table 3B. In some embodiments, the PEgRNA comprises a PBS comprising a sequence selected from the group consisting of sequences as disclosed in Table 3B. In some embodiments, the PEgRNA comprises an editing template comprising a sequence selected from the group consisting of SEQ Identifiers: C5958-C5986 of Table 3C. In some embodiments, the PEgRNA comprises an editing template comprising a sequence selected from the group consisting of SEQ ID Nos: of Table 3C. In some embodiments, the prime editing composition further comprises a ngRNA that comprises a spacer comprising a sequence selected from the group consisting of SEQ Identifiers: D929-D944 of Table 3D. In some embodiments, the prime editing composition further comprises a ngRNA that comprises a spacer comprising a sequence selected from the group consisting of SEQ ID Nos: 20562-20577 of Table 3D.

[0494] In some embodiments, the editing target sequence or the complementary sequence on the CFTR gene thereof comprises a mutation that encodes an amino acid substitution L548Q, S549I, S549R, G550*, G551A, G551S, G551D, Q552K, R553G, R553*, and/or A554E relative to a wild type CFTR polypeptide set forth in SEQ ID NO: 19, wherein * refers to a non-sense mutation, and wherein the editing template encodes an intended nucleotide edit that corrects the mutation. In some embodiments, the editing target sequence or the complementary sequence on the CFTR gene thereof comprises a A→→C mutation (c.1645A>C) at position 117,587,799, a deletion of nucleotides ATCACA (c.1636_1641delATCACA) at position 117,587,790, a deletion of nucleotides CT (c.1642_1643delCT) at position 117,587,796, a T→→A mutation (c.1643T>A) at position 117,587,797, a G→→T mutation (c.1646G>T) at position 117,587,800, a T→→G mutation (c.1647T>G) at position 117,587,801, a G→→T mutation (c.1648G>T) at position 117,587,802, a deletion of A (c.1650delA) at position 117,587,804, a G→→A mutation (c.1651G>A) at position 117,587,805, a G→→C mutation (c.1652G>C) at position 117,587,806, G→→A mutation (c.1652G>A) at position 117,587,806, a deletion of G (c.1652delG) at position 117,587,806, a C→→A mutation (c.1654C>A) at position 117,587,808, a deletion of A (c.1656delA) at position 117,587,810, a C→→G mutation (c.1657C>G) at position 117,587,811, a C→→A mutation (c.1661C>A) at position 117,587,815, a C→→G mutation (c.1657C>G) at position 117,587,811, a C→→A mutation (c.1654C>A) at position 117,587,808, a deletion of A (c.1656delA) at position 117,587,810, a C→→G mutation (c.1657C>G) at position 117,587,811, a C→→T mutation (c.1657C>T) at position 117,587,811, an insertion of A (c.1660_1661insA) at position 117,587,814, and/or a C→→A mutation (c.1661C>A) at position 117,587,815 of human chromosome 7 compared to a wild type CFTR gene. In some embodiments, the editing template comprises an intended nucleotide edit compared to the target CFTR gene, wherein incorporation of the intended nucleotide edit encoded by the editing template corrects the mutation. In some embodiments, the editing template comprises a wild type CFTR gene sequence. Accordingly, in some embodiments, the newly synthesized single stranded DNA encoded by the editing template is capable of correcting the c.1645A>C mutation, the c.1636_1641delATCACA mutation, the c.1642_1643delCT mutation, the c.1643T>A mutation, the c.1646G>T mutation, the c.1647T>G mutation, the c.1648G>T mutation, the c.1650delA mutation, the c.1652G>C mutation, the c.1651G>A mutation, the c.1652G>A mutation, the c.1652delG mutation, the c.1656delA mutation, the c.1657C>G mutation, the c.1661C>A mutation, the c.1657C>G mutation, the c.1654C>A mutation, the c.1657C>T mutation, the c.1660_1661insA mutation, and/or the c.1654C>A mutation in the target CFTR gene. In some embodiments, the newly synthesized single stranded DNA encoded by the editing template is capable of correcting all of the c.1645A>C mutation, the c.1636_1641delATCACA mutation, the c.1642_1643delCT mutation, the c.1643T>A mutation, the c.1646G>T mutation, the c.1647T>G mutation, the c.1648G>T mutation, the c.1650delA mutation, the c.1652G>C mutation, the c.1652delG mutation, the c.1652G>A mutation, the c.1656delA mutation, the c.1651G>A mutation, the c.1656delA mutation, the c.1657C>G mutation, the c.1661C>A mutation, the c.1657C>G mutation, the c.1654C>A mutation, the c.1657C>T mutation, the c.1660_1661insA mutation, and the c.1654C>A mutation in the target CFTR gene. In some embodiments, two or more of the c.1645A>C mutation, the c.1636_1641delATCACA mutation, the c.1642_1643delCT mutation, the c.1643T>A mutation, the c.1646G>T mutation, the c.1647T>G mutation, the c.1648G>T mutation, the c.1650delA mutation, the c.1652G>C mutation, the c.1652delG mutation, the c.1652G>A mutation, the c.1651G>A mutation, the c.1656delA mutation, the c.1656delA mutation, the c.1657C>G mutation, the c.1661C>A mutation, the c.1657C>G mutation, the c.1654C>A mutation, the c.1657C>T mutation, the c.1660_1661insA mutation, and the c.1654C>A mutation are located on the same CFTR gene. In some embodiments, the newly synthesized single stranded DNA encoded by the editing template is capable of correcting the c.1645A>C mutation, the c.1636_1641delATCACA mutation, the c.1642_1643delCT mutation, the c.1643T>A mutation, the c.1646G>T mutation, the c.1647T>G mutation, the c.1648G>T mutation, the c.1650delA mutation, the c.1652G>C mutation, the c.1652delG mutation, the c.1651G>A mutation, the c.1652G>A mutation, the c.1656delA mutation, and the c.1654C>A mutation that are located on different CFTR genes. For example, in some embodiments, a subject may comprise two copies of CFTR genes, each comprising a different mutation selected from the group consisting of the c.1645A>C mutation, the c.1636_1641delATCACA mutation, the c.1642_1643delCT mutation, the c.1643T>A mutation, the c.1646G>T mutation, the c.1647T>G mutation, the c.1648G>T mutation, the c.1650delA mutation, the c.1652G>A mutation, the c.1652G>C mutation, the c.1652delG mutation, the c.1651G>A mutation, the c.1656delA mutation, the c.1656delA mutation, the c.1657C>G mutation, the c.1661C>A mutation, the c.1657C>G mutation, the c.1654C>A mutation, the c.1657C>T mutation, the c.1660_1661insA mutation, and the c.1654C>A mutation, all of which may be corrected by an editing template of a single PEgRNA. In some embodiments, the editing template is capable of correcting one or more, or all of the c.1645A>C mutation, the c.1636_1641delATCACA mutation, the c.1642_1643delCT mutation, the c.1643T>A mutation, the c.1646G>T mutation, the c.1647T>G mutation, the c.1648G>T mutation, the c.1650delA mutation, the c.1652G>C mutation, the c.1652delG mutation, the c.1651G>A mutation, the c.1652G>A mutation, the c.1656delA mutation, the c.1656delA mutation, the c.1657C>G mutation, the c.1661C>A mutation, the c.1657C>G mutation, the c.1654C>A mutation, the c.1657C>T mutation, the c.1660_1661insA mutation, and the c.1654C>A mutation that are in different subjects, wherein each subject may have one or more of the mutations.

[0495] In some embodiments, the PEgRNA comprises a spacer comprising a sequence selected from the group consisting of SEQ Identifiers: A419-A420 of Table 3A. In some embodiments, the PEgRNA comprises a spacer comprising a sequence as set forth in SEQ ID NOs. 767-768 of Table 3A. In some embodiments, the PEgRNA comprises a PBS comprising a sequence selected from the group consisting of SEQ Identifiers: B1566-B1574 of Table 3B. In some embodiments, the PEgRNA comprises a PBS comprising a sequence selected from the group consisting of SEQ ID Nos: 2431-2437 of Table 3B. In some embodiments, the PEgRNA comprises a PBS comprising a sequence selected from the group consisting of sequences GAACTATA and GAACTATAT as disclosed in Table 3B. In some embodiments, the PEgRNA comprises an editing template comprising a sequence selected from the group consisting of SEQ Identifiers: C6627-C6656 of Table 3C. In some embodiments, the PEgRNA comprises an editing template comprising a sequence selected from the group consisting of SEQ ID Nos: 10653-10682 of Table 3C. In some embodiments, the prime editing composition further comprises a ngRNA that comprises a spacer comprising a sequence selected from the group consisting of SEQ Identifiers: D915-D928 of Table 3D. In some embodiments, the prime editing composition further comprises a ngRNA that comprises a spacer comprising a sequence selected from the group consisting of SEQ ID Nos: 20548-20561 of Table 3D.

[0496] In some embodiments, the PEgRNA comprises a spacer comprising a sequence selected from the group consisting of SEQ Identifiers: A421-A422 of Table 3A. In some embodiments, the PEgRNA comprises a spacer comprising a sequence as set forth in SEQ ID NOs. 469-470 of Table 3A. In some embodiments, the PEgRNA comprises a PBS comprising a sequence selected from the group consisting of SEQ Identifiers: B1575-B1583 of Table 3B. In some embodiments, the PEgRNA comprises a PBS comprising a sequence selected from the group consisting of SEQ ID Nos: 2438-2444 of Table 3B. In some embodiments, the PEgRNA comprises a PBS comprising a sequence selected from the group consisting of sequences AGAACTAT and AGAACTATA as disclosed in Table 3B. In some embodiments, the PEgRNA comprises an editing template comprising a sequence selected from the group consisting of SEQ Identifiers: C6657-C6672 of Table 3C. In some embodiments, the PEgRNA comprises an editing template comprising a sequence selected from the group consisting of SEQ ID Nos: 10683-10698 of Table 3C. In some embodiments, the prime editing composition further comprises a ngRNA that comprises a spacer comprising a sequence selected from the group consisting of SEQ Identifiers: D929-D944, D946-D952, and D1016 of Table 3D. In some embodiments, the prime editing composition further comprises a ngRNA that comprises a spacer comprising a sequence selected from the group consisting of SEQ ID Nos: 20552-20577, 20579-20585, and 20649 of Table 3D.

[0497] In some embodiments, the PEgRNA comprises a spacer comprising a sequence selected from the group consisting of SEQ Identifiers: A463-A464 of Table 3A. In some embodiments, the PEgRNA comprises a spacer comprising a sequence as set forth in SEQ ID NOs. 811-812 of Table 3A. In some embodiments, the PEgRNA comprises a PBS comprising a sequence selected from the group consisting of SEQ Identifiers: B1764-B1772 of Table 3B. In some embodiments, the PEgRNA comprises a PBS comprising a sequence selected from the group consisting of SEQ ID Nos: 2585-2591 of Table 3B. In some embodiments, the PEgRNA comprises a PBS comprising a sequence selected from the group consisting of sequences AGTGTGAT and AGTGTGATT as disclosed in Table 3B. In some embodiments, the PEgRNA comprises an editing template comprising a sequence selected from the group consisting of SEQ Identifiers: C6673-C6703 of Table 3C. In some embodiments, the PEgRNA comprises an editing template comprising a sequence selected from the group consisting of SEQ ID Nos: 10699-10729 of Table 3C. In some embodiments, the prime editing composition further comprises a ngRNA that comprises a spacer comprising a sequence selected from the group consisting of SEQ Identifiers: D930-D944, D1016-D1019, and D1053 of Table 3D. In some embodiments, the prime editing composition further comprises a ngRNA that comprises a spacer comprising a sequence selected from the group consisting of SEQ ID Nos: 20553-20577, 20649-20652, and 20686 of Table 3D.

[0498] In some embodiments, the PEgRNA comprises a spacer comprising a sequence selected from the group consisting of SEQ Identifiers: A425-A426 of Table 3A. In some embodiments, the PEgRNA comprises a spacer comprising a sequence as set forth in SEQ ID NOs. 773-774 of Table 3A. In some embodiments, the PEgRNA comprises a PBS comprising a sequence selected from the group consisting of SEQ Identifiers: B1773-B1781 of Table 3B. In some embodiments, the PEgRNA comprises a PBS comprising a sequence selected from the group consisting of SEQ ID Nos: 2592-2598 of Table 3B. In some embodiments, the PEgRNA comprises a PBS comprising a sequence selected from the group consisting of sequences CCAAGAAC and CCAAGAACT as disclosed in Table 3B. In some embodiments, the PEgRNA comprises an editing template comprising a sequence selected from the group consisting of SEQ Identifiers: C6704-C6722 of Table 3C. In some embodiments, the PEgRNA comprises an editing template comprising a sequence selected from the group consisting of SEQ ID Nos: 10730-10748 of Table 3C. In some embodiments, the prime editing composition further comprises a ngRNA that comprises a spacer comprising a sequence selected from the group consisting of SEQ Identifiers: D929-D944, and D1016-D1018 of Table 3D. In some embodiments, the prime editing composition further comprises a ngRNA that comprises a spacer comprising a sequence selected from the group consisting of SEQ ID Nos: 20562-20577 and 20649-20651 of Table 3D.

[0499] In some embodiments, the PEgRNA comprises a spacer comprising the sequence of SEQ Identifier: A427 of Table 3A. In some embodiments, the PEgRNA comprises a spacer comprising a sequence as set forth in SEQ ID NO. 775 of Table 3A. In some embodiments, the PEgRNA comprises a PBS comprising a sequence selected from the group consisting of SEQ Identifiers: B1782-B1790 of Table 3B. In some embodiments, the PEgRNA comprises a PBS comprising a sequence selected from the group consisting of SEQ ID Nos: 2599-2605 of Table 3B. In some embodiments, the PEgRNA comprises a PBS comprising a sequence selected from the group consisting of sequences TCCAAGAA and TCCAAGAAC as disclosed in Table 3B. In some embodiments, the PEgRNA comprises an editing template comprising a sequence selected from the group consisting of SEQ Identifiers: C6723-C6742 of Table 3C. In some embodiments, the PEgRNA comprises an editing template comprising a sequence selected from the group consisting of SEQ ID Nos: 10749-10768 of Table 3C. In some embodiments, the prime editing composition further comprises a ngRNA that comprises a spacer comprising a sequence selected from the group consisting of SEQ Identifiers: D929-D944, D1016, and D1019 of Table 3D. In some embodiments, the prime editing composition further comprises a ngRNA that comprises a spacer comprising a sequence selected from the group consisting of SEQ ID Nos: 20562-20577, 20649 and 20652 of Table 3D.

[0500] In some embodiments, the PEgRNA comprises a spacer comprising a sequence selected from the group consisting of SEQ Identifiers: A428-A429 of Table 3A. In some embodiments, the PEgRNA comprises a spacer comprising a sequence as set forth in SEQ ID NOs. 776-779 of Table 3A. In some embodiments, the PEgRNA comprises a PBS comprising a sequence selected from the group consisting of SEQ Identifiers: B1791-B1799 of Table 3B. In some embodiments, the PEgRNA comprises a PBS comprising a sequence selected from the group consisting of SEQ ID Nos: 2606-2612 of Table 3B. In some embodiments, the PEgRNA comprises a PBS comprising a sequence selected from the group consisting of sequences ACTATATT and ACTATATTG as disclosed in Table 3B. In some embodiments, the PEgRNA comprises an editing template comprising a sequence selected from the group consisting of SEQ Identifiers: C6743-C6755 of Table 3C. In some embodiments, the PEgRNA comprises an editing template comprising a sequence selected from the group consisting of SEQ ID Nos: 10769-10781 of Table 3C. In some embodiments, the prime editing composition further comprises a ngRNA that comprises a spacer comprising a sequence selected from the group consisting of SEQ Identifiers: D929-D944 and D1016-D1018 of Table 3D. In some embodiments, the prime editing composition further comprises a ngRNA that comprises a spacer comprising a sequence selected from the group consisting of SEQ ID Nos: 20562-20577 and 20649-20651 of Table 3D.

[0501] In some embodiments, the PEgRNA comprises a spacer comprising a sequence selected from the group consisting of SEQ Identifiers: A465-A467 of Table 3A. In some embodiments, the PEgRNA comprises a spacer comprising a sequence as set forth in SEQ ID NOs. 813-815 of Table 3A. In some embodiments, the PEgRNA comprises a PBS comprising a sequence selected from the group consisting of SEQ Identifiers: B1800-B1808 of Table 3B. In some embodiments, the PEgRNA comprises a PBS comprising a sequence selected from the group consisting of SEQ ID Nos: 2613-2619 of Table 3B. In some embodiments, the PEgRNA comprises a PBS comprising a sequence selected from the group consisting of sequences GTGTGATT and GTGTGATTC as disclosed in Table 3B. In some embodiments, the PEgRNA comprises an editing template comprising a sequence selected from the group consisting of SEQ Identifiers: C6756-C6786 of Table 3C. In some embodiments, the PEgRNA comprises an editing template comprising a sequence selected from the group consisting of SEQ ID Nos: 10782-10812 of Table 3C. In some embodiments, the prime editing composition further comprises a ngRNA that comprises a spacer comprising a sequence selected from the group consisting of SEQ Identifiers: D922, D1021, D1022, D1023, D1024, and D1025 of Table 3D. In some embodiments, the prime editing composition further comprises a ngRNA that comprises a spacer comprising a sequence selected from the group consisting of SEQ ID Nos: 20555 and 20654-20658 of Table 3D.

[0502] In some embodiments, the PEgRNA comprises a spacer comprising a sequence selected from the group consisting of SEQ Identifiers: A433-A435 of Table 3A. In some embodiments, the PEgRNA comprises a spacer comprising a sequence as set forth in SEQ ID NOs. 781-783 of Table 3A. In some embodiments, the PEgRNA comprises a PBS comprising a sequence selected from the group consisting of SEQ Identifiers: B1809-B1817 of Table 3B. In some embodiments, the PEgRNA comprises a PBS comprising a sequence selected from the group consisting of SEQ ID Nos: 2620-2626 of Table 3B. In some embodiments, the PEgRNA comprises a PBS comprising a sequence selected from the group consisting of sequences CTATATTG and CTATATTGT as disclosed in Table 3B. In some embodiments, the PEgRNA comprises an editing template comprising a sequence selected from the group consisting of SEQ Identifiers: C6787-C6798 of Table 3C. In some embodiments, the PEgRNA comprises an editing template comprising a sequence selected from the group consisting of SEQ ID Nos: 10813-10824 of Table 3C. In some embodiments, the prime editing composition further comprises a ngRNA that comprises a spacer comprising a sequence selected from the group consisting of SEQ Identifiers: D922, D1021, D1022, D1023, D1024, and D1025 of Table 3D. In some embodiments, the prime editing composition further comprises a ngRNA that comprises a spacer comprising a sequence selected from the group consisting of SEQ ID Nos: 20555 and 20654-20658 of Table 3D.

[0503] In some embodiments, the PEgRNA comprises a spacer comprising a sequence selected from the group consisting of SEQ Identifiers: A468-A469 of Table 3A. In some embodiments, the PEgRNA comprises a spacer comprising a sequence as set forth in SEQ ID NOs. 816-817 of Table 3A. In some embodiments, the PEgRNA comprises a PBS comprising a sequence selected from the group consisting of SEQ Identifiers: B1818-B1826 of Table 3B. In some embodiments, the PEgRNA comprises a PBS comprising a sequence selected from the group consisting of SEQ ID Nos: 2627-2633 of Table 3B. In some embodiments, the PEgRNA comprises a PBS comprising a sequence selected from the group consisting of sequences CAGTGTGA and CAGTGTGAT as disclosed in Table 3B. In some embodiments, the PEgRNA comprises an editing template comprising a sequence selected from the group consisting of SEQ Identifiers: C6799-C6829 of Table 3C. In some embodiments, the PEgRNA comprises an editing template comprising a sequence selected from the group consisting of SEQ ID Nos: 10825-10855 of Table 3C. In some embodiments, the prime editing composition further comprises a ngRNA that comprises a spacer comprising a sequence selected from the group consisting of SEQ Identifiers: D930-D944, D946-D952, D1016, D1019, D1026, D1053, and D1054 of Table 3D. In some embodiments, the prime editing composition further comprises a ngRNA that comprises a spacer comprising a sequence selected from the group consisting of SEQ ID Nos: 20563-20577, 20579-20585, 20649, 20652, 20659, and 20686-20687 of Table 3D.

[0504] In some embodiments, the PEgRNA comprises a spacer comprising a sequence selected from the group consisting of SEQ Identifiers: A438-A441 of Table 3A. In some embodiments, the PEgRNA comprises a spacer comprising a sequence as set forth in SEQ ID NOs. 786-789 of Table 3A. In some embodiments, the PEgRNA comprises a PBS comprising a sequence selected from the group consisting of SEQ Identifiers: B1827-B1835 of Table 3B. In some embodiments, the PEgRNA comprises a PBS comprising a sequence selected from the group consisting of SEQ ID Nos: 2634-2640 of Table 3B. In some embodiments, the PEgRNA comprises a PBS comprising a sequence selected from the group consisting of sequences TCTCCAAG and TCTCCAAGA as disclosed in Table 3B. In some embodiments, the PEgRNA comprises an editing template comprising a sequence selected from the group consisting of SEQ Identifiers: C6830-C6851 of Table 3C. In some embodiments, the PEgRNA comprises an editing template comprising a sequence selected from the group consisting of SEQ ID Nos: 10856-10877 of Table 3C. In some embodiments, the prime editing composition further comprises a ngRNA that comprises a spacer comprising a sequence selected from the group consisting of SEQ Identifiers: D925, D929-D944, D1016-D1019, and D1028-D1032 of Table 3D. In some embodiments, the prime editing composition further comprises a ngRNA that comprises a spacer comprising a sequence selected from the group consisting of SEQ ID Nos: 20558, 20562-20577, 20649-20652, and 20661-20665 of Table 3D.

[0505] In some embodiments, the PEgRNA comprises a spacer comprising the sequence of SEQ Identifier: A442 of Table 3A. In some embodiments, the PEgRNA comprises a spacer comprising a sequence as set forth in SEQ ID NO. 790 of Table 3A. In some embodiments, the PEgRNA comprises a PBS comprising a sequence selected from the group consisting of SEQ Identifiers: B1836-B1844 of Table 3B. In some embodiments, the PEgRNA comprises a PBS comprising a sequence selected from the group consisting of SEQ ID Nos: 2641-2647 of Table 3B. In some embodiments, the PEgRNA comprises a PBS comprising a sequence selected from the group consisting of sequences TGAATAAC and TGAATAACT as disclosed in Table 3B. In some embodiments, the PEgRNA comprises an editing template comprising a sequence selected from the group consisting of SEQ Identifiers: C6852-C6856 of Table 3C. In some embodiments, the PEgRNA comprises an editing template comprising a sequence selected from the group consisting of SEQ ID Nos: 10878-10882 of Table 3C. In some embodiments, the prime editing composition further comprises a ngRNA that comprises a spacer comprising a sequence selected from the group consisting of SEQ Identifiers: D972-D981, D1002, D1033-D1037 and D1055 of Table 3D. In some embodiments, the prime editing composition further comprises a ngRNA that comprises a spacer comprising a sequence selected from the group consisting of SEQ ID Nos: 20605-20614, 20635, 20666-20670 and 20688 of Table 3D.

[0506] In some embodiments, the PEgRNA comprises a spacer comprising a sequence selected from the group consisting of SEQ Identifiers: A443-A445 of Table 3A. In some embodiments, the PEgRNA comprises a spacer comprising a sequence selected from the group consisting of SEQ ID NOs. 791-793 of Table 3A. In some embodiments, the PEgRNA comprises a PBS comprising a sequence selected from the group consisting of SEQ Identifiers: B1845-B1853 of Table 3B. In some embodiments, the PEgRNA comprises a PBS comprising a sequence selected from the group consisting of SEQ ID Nos: 2648-2654 of Table 3B. In some embodiments, the PEgRNA comprises a PBS comprising a sequence selected from the group consisting of sequences CTCCAAGA and CTCCAAGAA as disclosed in Table 3B. In some embodiments, the PEgRNA comprises an editing template comprising a sequence selected from the group consisting of SEQ Identifiers: C6857-C6877 of Table 3C. In some embodiments, the PEgRNA comprises an editing template comprising a sequence selected from the group consisting of SEQ ID Nos: 10883-10903 of Table 3C. In some embodiments, the prime editing composition further comprises a ngRNA that comprises a spacer comprising a sequence selected from the group consisting of SEQ Identifiers: D922 and D1021-D1025 of Table 3D. In some embodiments, the prime editing composition further comprises a ngRNA that comprises a spacer comprising a sequence selected from the group consisting of SEQ ID Nos: 20555 and 20654-20658 of Table 3D.

[0507] In some embodiments, the PEgRNA comprises a spacer comprising the sequence of SEQ Identifiers: A446 of Table 3A. In some embodiments, the PEgRNA comprises a spacer comprising a sequence as set forth in SEQ ID NO: 791. In some embodiments, the PEgRNA comprises a PBS comprising a sequence selected from the group consisting of SEQ Identifiers: B1854-B1862 of Table 3B. In some embodiments, the PEgRNA comprises a PBS comprising a sequence selected from the group consisting of SEQ ID NOs. 2655-2661 of Table 3B. In some embodiments, the PEgRNA comprises a PBS comprising a sequence selected from the group consisting of sequences ATTTCTTT and ATTTCTTTA, as disclosed in Table 3B. In some embodiments, the PEgRNA comprises an editing template comprising a sequence selected from the group consisting of SEQ Identifiers: C6878-C6897 of Table 3C. In some embodiments, the PEgRNA comprises an editing template comprising a sequence selected from the group consisting of SEQ ID NOs: 10904-10923 of Table 3C. In some embodiments, the prime editing composition further comprises a ngRNA that comprises a spacer comprising a sequence selected from the group consisting of SEQ Identifiers: D968-D981, D1002, D1033, D1034, and D1035 of Table 3D. In some embodiments, the prime editing composition further comprises a ngRNA that comprises a spacer comprising a sequence selected from the group consisting of SEQ ID NOs. 20601-20614, 20635, 20666, 20667, and 20668 of Table 3D.

[0508] In some embodiments, the PEgRNA comprises a spacer comprising a sequence selected from the group consisting of SEQ Identifiers: A391-A392 of Table 3A. In some embodiments, the PEgRNA comprises a spacer comprising a sequence as set forth in SEQ ID NOs. 739 and 740 of Table 3A. In some embodiments, the PEgRNA comprises a PBS comprising a sequence selected from the group consisting of SEQ Identifiers: B1611-B1619 of Table 3B. In some embodiments, the PEgRNA comprises a PBS comprising a sequence selected from the group consisting of SEQ ID NOs. 2466-2472 of Table 3B. In some embodiments, the PEgRNA comprises a PBS comprising a sequence selected from the group consisting of sequences AACTATAT and AACTATATT as disclosed in Table 3B. In some embodiments, the PEgRNA comprises an editing template comprising a sequence selected from the group consisting of SEQ Identifiers: C6898-C6911 of Table 3C. In some embodiments, the PEgRNA comprises an editing template comprising a sequence selected from the group consisting of SEQ ID NOs: 10924-10937 of Table 3C. In some embodiments, the prime editing composition further comprises a ngRNA that comprises a spacer comprising a sequence selected from the group consisting of SEQ Identifiers: D929-D944, D946-D952, and D1016 of Table 3D. In some embodiments, the prime editing composition further comprises a ngRNA that comprises a spacer comprising a sequence selected from the group consisting of SEQ ID NOs. 20562-20577, 20579-20585, and 20649 of Table 3D.

[0509] In some embodiments, the PEgRNA comprises a spacer comprising a sequence selected from the group consisting of SEQ Identifiers: A447-A450 of Table 3A. In some embodiments, the PEgRNA comprises a spacer comprising a sequence as set forth in SEQ ID NOs. 795-798 of Table 3A. In some embodiments, the PEgRNA comprises a PBS comprising a sequence selected from the group consisting of SEQ Identifiers: B1863-B1871 of Table 3B. In some embodiments, the PEgRNA comprises a PBS comprising a sequence selected from the group consisting of SEQ ID NOs. 2662-2668 of Table 3B. In some embodiments, the PEgRNA comprises a PBS comprising a sequence selected from the group consisting of sequences CAAGAACT and CAAGAACTA as disclosed in Table 3B. In some embodiments, the PEgRNA comprises an editing template comprising a sequence selected from the group consisting of SEQ Identifiers: C6912-C6947 of Table 3C. In some embodiments, the PEgRNA comprises an editing template comprising a sequence selected from the group consisting of SEQ ID NOs: 10938-10973 of Table 3C. In some embodiments, the prime editing composition further comprises a ngRNA that comprises a spacer comprising a sequence selected from the group consisting of SEQ Identifiers: D915-D928, and D1021-D 1025 of Table 3D. In some embodiments, the prime editing composition further comprises a ngRNA that comprises a spacer comprising a sequence selected from the group consisting of SEQ ID NOs. 20548-20561, and 20654-20658 of Table 3D.

[0510] In some embodiments, the PEgRNA comprises a spacer comprising a sequence selected from the group consisting of SEQ Identifiers: A456 and A470 of Table 3A. In some embodiments, the PEgRNA comprises a spacer comprising a sequence as set forth in SEQ ID NOs. 804 and 818 of Table 3A. In some embodiments, the PEgRNA comprises a PBS comprising a sequence selected from the group consisting of SEQ Identifiers: B1899-B1907 of Table 3B. In some embodiments, the PEgRNA comprises a PBS comprising a sequence selected from the group consisting of SEQ ID NOs. 2690-2696 of Table 3B. In some embodiments, the PEgRNA comprises a PBS comprising a sequence selected from the group consisting of sequences TGATTCCA and TGATTCCAC as disclosed in Table 3B. In some embodiments, the PEgRNA comprises an editing template comprising a sequence selected from the group consisting of SEQ Identifiers: C6948-C6978 of Table 3C. In some embodiments, the PEgRNA comprises an editing template comprising a sequence selected from the group consisting of SEQ ID NOs: 10974-11004 of Table 3C. In some embodiments, the prime editing composition further comprises a ngRNA that comprises a spacer comprising a sequence selected from the group consisting of SEQ Identifiers: D930-D944, D946-D952, D1016, D1019, and D1026 of Table 3D. In some embodiments, the prime editing composition further comprises a ngRNA that comprises a spacer comprising a sequence selected from the group consisting of SEQ ID NOs. 20563-20577, 20579-20585, 20649, 20652, and 20659 of Table 3D.

[0511] In some embodiments, the PEgRNA comprises a spacer comprising a sequence selected from the group consisting of SEQ Identifiers: A471-A474 of Table 3A. In some embodiments, the PEgRNA comprises a spacer comprising a sequence as set forth in SEQ ID NOs. 819-822 of Table 3A In some embodiments, the PEgRNA comprises a PBS comprising a sequence selected from the group consisting of SEQ Identifiers: B1926-B1934 of Table 3B. In some embodiments, the PEgRNA comprises a PBS comprising a sequence selected from the group consisting of SEQ ID NOs. 2711-2717 of Table 3B. In some embodiments, the PEgRNA comprises a PBS comprising a sequence selected from the group consisting of sequences TCAGTGTG and TCAGTGTGA as disclosed in Table 3B. In some embodiments, the PEgRNA comprises an editing template comprising a sequence selected from the group consisting of SEQ Identifiers: C6979-C7040 of Table 3C. In some embodiments, the PEgRNA comprises an editing template comprising a sequence selected from the group consisting of SEQ ID NOs: 11005-11066 of Table 3C. In some embodiments, the prime editing composition further comprises a ngRNA that comprises a spacer comprising a sequence selected from the group consisting of SEQ Identifiers: D915-D928, D1021-D1025, D1056, and D1057 of Table 3D. In some embodiments, the prime editing composition further comprises a ngRNA that comprises a spacer comprising a sequence selected from the group consisting of SEQ ID NOs. 20548-20561, 20654-20658, 20689, and 20690 of Table 3D.

[0512] In some embodiments, the PEgRNA comprises a spacer comprising a sequence selected from the group consisting of SEQ Identifiers: A400-A401 of Table 3A. In some embodiments, the PEgRNA comprises a spacer comprising a sequence as set forth in SEQ ID NOs. 748-749 of Table 3A In some embodiments, the PEgRNA comprises a PBS comprising a sequence selected from the group consisting of SEQ Identifiers: B1656-B1664 of Table 3B. In some embodiments, the PEgRNA comprises a PBS comprising a sequence selected from the group consisting of SEQ ID NOs. 2501-2507 of Table 3B. In some embodiments, the PEgRNA comprises a PBS comprising a sequence selected from the group consisting of sequences AGCAAGAA and AGCAAGAAT as disclosed in Table 3B. In some embodiments, the PEgRNA comprises an editing template comprising a sequence selected from the group consisting of SEQ Identifiers: C7041-C7067 of Table 3C. In some embodiments, the PEgRNA comprises an editing template comprising a sequence selected from the group consisting of SEQ ID NOs: 11067-11093 of Table 3C. In some embodiments, the prime editing composition further comprises a ngRNA that comprises a spacer comprising a sequence selected from the group consisting of SEQ Identifiers: D959, D960, D968-D981, D1002, D1033, D1034, D1035, D1040, D1041, D1058, and D1059 of Table 3D. In some embodiments, the prime editing composition further comprises a ngRNA that comprises a spacer comprising a sequence selected from the group consisting of SEQ ID NOs. 20592, 20593, 20601-20614, 20635, 20666, 20667, 20668, 20673, 20674, 20691, and 20692 of Table 3D.

[0513] In some embodiments, the PEgRNA comprises a spacer comprising a sequence selected from the group consisting of SEQ Identifiers: A452-A453 of Table 3A. In some embodiments, the PEgRNA comprises a spacer comprising a sequence as set forth in SEQ ID NOs. 800-801 of Table 3A In some embodiments, the PEgRNA comprises a PBS comprising a sequence selected from the group consisting of SEQ Identifiers: B1881-B1889 of Table 3B. In some embodiments, the PEgRNA comprises a PBS comprising a sequence selected from the group consisting of SEQ ID NOs. 2676-2682 of Table 3B. In some embodiments, the PEgRNA comprises a PBS comprising a sequence selected from the group consisting of sequences GCAAGGTG and GCAAGGTGA as disclosed in Table 3B. In some embodiments, the PEgRNA comprises an editing template comprising a sequence selected from the group consisting of SEQ Identifiers: C7068-C7078 of Table 3C. In some embodiments, the PEgRNA comprises an editing template comprising a sequence selected from the group consisting of SEQ ID NOs: 11094-11104 of Table 3C. In some embodiments, the prime editing composition further comprises a ngRNA that comprises a spacer comprising a sequence selected from the group consisting of SEQ Identifiers: D959, D960, D970-D981, D1002, D1033-D1037, D1040, D1041, and D1055 of Table 3D. In some embodiments, the prime editing composition further comprises a ngRNA that comprises a spacer comprising a sequence selected from the group consisting of SEQ ID NOs. 20592, 20593, 20603-20614, 20635, 20666-20670, 20673, 20674, and 20688 of Table 3D.

[0514] In some embodiments, the PEgRNA comprises a spacer comprising a sequence selected from the group consisting of SEQ Identifiers: A454-A455 of Table 3A. In some embodiments, the PEgRNA comprises a spacer comprising a sequence as set forth in SEQ ID NOs. 802-804 of Table 3A In some embodiments, the PEgRNA comprises a PBS comprising a sequence selected from the group consisting of SEQ Identifiers: B1890-B1898 of Table 3B. In some embodiments, the PEgRNA comprises a PBS comprising a sequence selected from the group consisting of SEQ ID NOs. 2682-2689 of Table 3B. In some embodiments, the PEgRNA comprises a PBS comprising a sequence selected from the group consisting of sequences TTCTCCAA and TTCTCCAAG as disclosed in Table 3B. In some embodiments, the PEgRNA comprises an editing template comprising a sequence selected from the group consisting of SEQ Identifiers: C7079-C7101 of Table 3C. In some embodiments, the PEgRNA comprises an editing template comprising a sequence selected from the group consisting of SEQ ID NOs: 11105-11127 of Table 3C. In some embodiments, the prime editing composition further comprises a ngRNA that comprises a spacer comprising a sequence selected from the group consisting of SEQ Identifiers: D929-D944, D946-D952, D1016, D1019, and D1026 of Table 3D. In some embodiments, the prime editing composition further comprises a ngRNA that comprises a spacer comprising a sequence selected from the group consisting of SEQ ID NOs. 20562-20577, 20579-20585, 20649, 20652, and 20659 of Table 3D.

[0515] In some embodiments, the PEgRNA comprises a spacer comprising a sequence selected from the group consisting of SEQ Identifiers: A457-A458 of Table 3A. In some embodiments, the PEgRNA comprises a spacer comprising a sequence as set forth in SEQ ID NOs. 805-806 of Table 3A In some embodiments, the PEgRNA comprises a PBS comprising a sequence selected from the group consisting of SEQ Identifiers: B1908-B1916 of Table 3B. In some embodiments, the PEgRNA comprises a PBS comprising a sequence selected from the group consisting of SEQ ID NOs. 2697-2703 of Table 3B. In some embodiments, the PEgRNA comprises a PBS comprising a sequence selected from the group consisting of sequences CAAGGTGA and CAAGGTGAA as disclosed in Table 3B. In some embodiments, the PEgRNA comprises an editing template comprising a sequence selected from the group consisting of SEQ Identifiers: C7102-C7121 of Table 3C. In some embodiments, the PEgRNA comprises an editing template comprising a sequence selected from the group consisting of SEQ ID NOs: 11128-11147 of Table 3C. In some embodiments, the prime editing composition further comprises a ngRNA that comprises a spacer comprising a sequence selected from the group consisting of SEQ Identifiers: D990-D1001 of Table 3D. In some embodiments, the prime editing composition further comprises a ngRNA that comprises a spacer comprising a sequence selected from the group consisting of SEQ ID NOs. 20623-20634 of Table 3D.

[0516] In some embodiments, the PEgRNA comprises a spacer comprising the sequence of SEQ Identifier: A409 of Table 3A. In some embodiments, the PEgRNA comprises a spacer comprising a sequence as set forth in SEQ ID NO. 757 of Table 3A In some embodiments, the PEgRNA comprises a PBS comprising a sequence selected from the group consisting of SEQ Identifiers: B1701-B1709 of Table 3B. In some embodiments, the PEgRNA comprises a PBS comprising a sequence selected from the group consisting of SEQ ID NOs. 2536-2542 of Table 3B. In some embodiments, the PEgRNA comprises a PBS comprising a sequence selected from the group consisting of sequences AAGAATTT and AAGAATTTC as disclosed in Table 3B. In some embodiments, the PEgRNA comprises an editing template comprising a sequence selected from the group consisting of SEQ Identifiers: C7122-C7145 of Table 3C. In some embodiments, the PEgRNA comprises an editing template comprising a sequence selected from the group consisting of SEQ ID NOs: 11148-11171 of Table 3C. In some embodiments, the prime editing composition further comprises a ngRNA that comprises a spacer comprising a sequence selected from the group consisting of SEQ Identifiers: D968-D981, D1002, D1033, D1034, and D1035 of Table 3D. In some embodiments, the prime editing composition further comprises a ngRNA that comprises a spacer comprising a sequence selected from the group consisting of SEQ ID NOs. 20601-20614, 20635, 20666, 20667, and 20668 of Table 3D.

[0517] In some embodiments, the PEgRNA comprises a spacer comprising a sequence selected from the group consisting of SEQ Identifiers: A475-A476 of Table 3A. In some embodiments, the PEgRNA comprises a spacer comprising a sequence as set forth in SEQ ID NOs. 823-824 of Table 3A In some embodiments, the PEgRNA comprises a PBS comprising a sequence selected from the group consisting of SEQ Identifiers: B1710-B1718 of Table 3B. In some embodiments, the PEgRNA comprises a PBS comprising a sequence selected from the group consisting of SEQ ID NOs. 2543-2549 of Table 3B. In some embodiments, the PEgRNA comprises a PBS comprising a sequence selected from the group consisting of sequences GGAGGTCA and GGAGGTCAA as disclosed in Table 3B. In some embodiments, the PEgRNA comprises an editing template comprising a sequence selected from the group consisting of SEQ Identifiers: C7146-C7207 of Table 3C. In some embodiments, the PEgRNA comprises an editing template comprising a sequence selected from the group consisting of SEQ ID NOs: 11172-11233 of Table 3C. In some embodiments, the prime editing composition further comprises a ngRNA that comprises a spacer comprising a sequence selected from the group consisting of SEQ Identifiers: D988-D992, D997-D1001, and D1060-D1067 of Table 3D. In some embodiments, the prime editing composition further comprises a ngRNA that comprises a spacer comprising a sequence selected from the group consisting of SEQ ID NOs. 20621-20625, 20630-20634, and 20693-20700 of Table 3D.

[0518] In some embodiments, the PEgRNA comprises a spacer comprising the sequence of SEQ Identifier: A477 of Table 3A. In some embodiments, the PEgRNA comprises a spacer comprising a sequence as set forth in SEQ ID NO. 825 of Table 3A In some embodiments, the PEgRNA comprises a PBS comprising a sequence selected from the group consisting of SEQ Identifiers: B1719-B1727 of Table 3B. In some embodiments, the PEgRNA comprises a PBS comprising a sequence selected from the group consisting of SEQ ID NOs. 2550-2556 of Table 3B. In some embodiments, the PEgRNA comprises a PBS comprising a sequence selected from the group consisting of sequences TGGAGGTC and TGGAGGTCA as disclosed in Table 3B. In some embodiments, the PEgRNA comprises an editing template comprising a sequence selected from the group consisting of SEQ Identifiers: C7208-C7238 of Table 3C. In some embodiments, the PEgRNA comprises an editing template comprising a sequence selected from the group consisting of SEQ ID NOs: 11234-11264 of Table 3C. In some embodiments, the prime editing composition further comprises a ngRNA that comprises a spacer comprising a sequence selected from the group consisting of SEQ Identifiers: D968-D981, D1002, D1058, D1068, D1069, and D1070 of Table 3D. In some embodiments, the prime editing composition further comprises a ngRNA that comprises a spacer comprising a sequence selected from the group consisting of SEQ ID NOs. 20601-20614, 20635, 21591, 21601, 21602, and 21603 of Table 3D.

[0519] In some embodiments, the PEgRNA comprises a spacer comprising a sequence selected from the group consisting of SEQ Identifiers: A478-A480 of Table 3A. In some embodiments, the PEgRNA comprises a spacer comprising a sequence as set forth in SEQ ID NOs. 826-827 of Table 3A In some embodiments, the PEgRNA comprises a PBS comprising a sequence selected from the group consisting of SEQ Identifiers: B1935-B1943 of Table 3B. In some embodiments, the PEgRNA comprises a PBS comprising a sequence selected from the group consisting of SEQ ID NOs. 2718-2724 of Table 3B. In some embodiments, the PEgRNA comprises a PBS comprising a sequence selected from the group consisting of sequences GATTCCAC and GATTCCACC as disclosed in Table 3B. In some embodiments, the PEgRNA comprises an editing template comprising a sequence selected from the group consisting of SEQ Identifiers: C7239-C7269 of Table 3C. In some embodiments, the PEgRNA comprises an editing template comprising a sequence selected from the group consisting of SEQ ID NOs: 11265-11295 of Table 3C. In some embodiments, the prime editing composition further comprises a ngRNA that comprises a spacer comprising a sequence selected from the group consisting of SEQ Identifiers: D925, and D1028-D1032 of Table 3D. In some embodiments, the prime editing composition further comprises a ngRNA that comprises a spacer comprising a sequence selected from the group consisting of SEQ ID NOs. 20558, and 20661-20665 of Table 3D.

[0520] In some embodiments, the PEgRNA comprises a spacer comprising a sequence selected from the group consisting of SEQ Identifiers: A416-A417 of Table 3A. In some embodiments, the PEgRNA comprises a spacer comprising a sequence as set forth in SEQ ID NOs. 764-765 of Table 3A In some embodiments, the PEgRNA comprises a PBS comprising a sequence selected from the group consisting of SEQ Identifiers: B1746-B1754 of Table 3B. In some embodiments, the PEgRNA comprises a PBS comprising a sequence selected from the group consisting of SEQ ID NOs. 2571-2577 of Table 3B. In some embodiments, the PEgRNA comprises a PBS comprising a sequence selected from the group consisting of sequences TGTCTTTC and TGTCTTTCT as disclosed in Table 3B. In some embodiments, the PEgRNA comprises an editing template comprising a sequence selected from the group consisting of SEQ Identifiers: C7270-C7281 of Table 3C. In some embodiments, the PEgRNA comprises an editing template comprising a sequence selected from the group consisting of SEQ ID NOs: 11296-11307 of Table 3C. In some embodiments, the prime editing composition further comprises a ngRNA that comprises a spacer comprising a sequence selected from the group consisting of SEQ Identifiers: D915-D928 of Table 3D. In some embodiments, the prime editing composition further comprises a ngRNA that comprises a spacer comprising a sequence selected from the group consisting of SEQ ID NOs. 20548-20561 of Table 3D.

[0521] In some embodiments, the PEgRNA comprises a spacer comprising the sequence of SEQ Identifier: A418 of Table 3A. In some embodiments, the PEgRNA comprises a spacer comprising a sequence as set forth in SEQ ID NO. 766 of Table 3A In some embodiments, the PEgRNA comprises a PBS comprising a sequence selected from the group consisting of SEQ Identifiers: B1755-B1763 of Table 3B. In some embodiments, the PEgRNA comprises a PBS comprising a sequence selected from the group consisting of SEQ ID NOs. 2578-2584 of Table 3B. In some embodiments, the PEgRNA comprises a PBS comprising a sequence selected from the group consisting of sequences TTGTCTTT and TTGTCTTTC as disclosed in Table 3B. In some embodiments, the PEgRNA comprises an editing template comprising a sequence selected from the group consisting of SEQ Identifiers: C7282-C7288 of Table 3C. In some embodiments, the PEgRNA comprises an editing template comprising a sequence selected from the group consisting of SEQ ID NOs: 11308-11314 of Table 3C. In some embodiments, the prime editing composition further comprises a ngRNA that comprises a spacer comprising a sequence selected from the group consisting of SEQ Identifiers: D929-D944 of Table 3D. In some embodiments, the prime editing composition further comprises a ngRNA that comprises a spacer comprising a sequence selected from the group consisting of SEQ ID NOs. 20562-20577 of Table 3D.

[0522] In some embodiments, the PEgRNA comprises a spacer comprising a sequence selected from the group consisting of SEQ Identifiers: A419-A420 of Table 3A. In some embodiments, the PEgRNA comprises a spacer comprising a sequence as set forth in SEQ ID NOs. 767-768 of Table 3A In some embodiments, the PEgRNA comprises a PBS comprising a sequence selected from the group consisting of Identifiers: B1566-B1574 of Table 3B. In some embodiments, the PEgRNA comprises a PBS comprising a sequence selected from the group consisting of SEQ ID NOs. 2431-2437 of Table 3B. In some embodiments, the PEgRNA comprises a PBS comprising a sequence selected from the group consisting of sequences GAACTATA and GAACTATAT as disclosed in Table 3B. In some embodiments, the PEgRNA comprises an editing template comprising a sequence selected from the group consisting of SEQ Identifiers: C7289-C7316 of Table 3C. In some embodiments, the PEgRNA comprises an editing template comprising a sequence selected from the group consisting of SEQ ID NOs: 11315-11342 of Table 3C. In some embodiments, the prime editing composition further comprises a ngRNA that comprises a spacer comprising a sequence selected from the group consisting of SEQ Identifiers: D915-D928 of Table 3D. In some embodiments, the prime editing composition further comprises a ngRNA that comprises a spacer comprising a sequence selected from the group consisting of SEQ ID NOs. 20548-20561 of Table 3D.

[0523] In some embodiments, the PEgRNA comprises a spacer comprising a sequence selected from the group consisting of SEQ Identifiers: A421-A422 of Table 3A. In some embodiments, the PEgRNA comprises a spacer comprising a sequence as set forth in SEQ ID NOs. 769-770 of Table 3A In some embodiments, the PEgRNA comprises a PBS comprising a sequence selected from the group consisting of SEQ Identifiers: B1575-B1583 of Table 3B. In some embodiments, the PEgRNA comprises a PBS comprising a sequence selected from the group consisting of SEQ ID NOs. 2438-2444 of Table 3B. In some embodiments, the PEgRNA comprises a PBS comprising a sequence selected from the group consisting of sequences AGAACTAT and AGAACTATA as disclosed in Table 3B. In some embodiments, the PEgRNA comprises an editing template comprising a sequence selected from the group consisting of SEQ Identifiers: C7317-C7331 of Table 3C. In some embodiments, the PEgRNA comprises an editing template comprising a sequence selected from the group consisting of SEQ ID NOs: 11343-11357 of Table 3C. In some embodiments, the prime editing composition further comprises a ngRNA that comprises a spacer comprising a sequence selected from the group consisting of SEQ Identifiers: D929-D944, D946-D952, and D1016 of Table 3D. In some embodiments, the prime editing composition further comprises a ngRNA that comprises a spacer comprising a sequence selected from the group consisting of SEQ ID NOs. 20562-20577, 20579-20585, and 20649 of Table 3D.

[0524] In some embodiments, the PEgRNA comprises a spacer comprising a sequence selected from the group consisting of SEQ Identifiers: A481-A482 of Table 3A. In some embodiments, the PEgRNA comprises a spacer comprising a sequence as set forth in SEQ ID NOs. 829-830 of Table 3A In some embodiments, the PEgRNA comprises a PBS comprising a sequence selected from the group consisting of SEQ Identifiers: B1764-B1772 of Table 3B. In some embodiments, the PEgRNA comprises a PBS comprising a sequence selected from the group consisting of SEQ ID NOs. 2585-2591 of Table 3B. In some embodiments, the PEgRNA comprises a PBS comprising a sequence selected from the group consisting of sequences AGTGTGAT and AGTGTGATT as disclosed in Table 3B. In some embodiments, the PEgRNA comprises an editing template comprising a sequence selected from the group consisting of SEQ Identifiers: C7332-C7362 of Table 3C. In some embodiments, the PEgRNA comprises an editing template comprising a sequence selected from the group consisting of SEQ ID NOs: 11358-11388 of Table 3C. In some embodiments, the prime editing composition further comprises a ngRNA that comprises a spacer comprising a sequence selected from the group consisting of SEQ Identifiers: D930-D944, D1016-D1019, and D1071 of Table 3D. In some embodiments, the prime editing composition further comprises a ngRNA that comprises a spacer comprising a sequence selected from the group consisting of SEQ ID NOs. 20563-20577, 20649-20652, and 20704 of Table 3D.

[0525] In some embodiments, the PEgRNA comprises a spacer comprising a sequence selected from the group consisting of SEQ Identifiers: A425-A426 of Table 3A. In some embodiments, the PEgRNA comprises a spacer comprising a sequence as set forth in SEQ ID NOs. 773-774 of Table 3A. In some embodiments, the PEgRNA comprises a PBS comprising a sequence selected from the group consisting of SEQ Identifiers: B1773-B1781 of Table 3B. In some embodiments, the PEgRNA comprises a PBS comprising a sequence selected from the group consisting of SEQ ID NOs. 2952-2958 of Table 3B. In some embodiments, the PEgRNA comprises a PBS comprising a sequence selected from the group consisting of sequences CCAAGAAC and CCAAGAACT as disclosed in Table 3B. In some embodiments, the PEgRNA comprises an editing template comprising a sequence selected from the group consisting of SEQ Identifiers: C7363-C7380 of Table 3C. In some embodiments, the PEgRNA comprises an editing template comprising a sequence selected from the group consisting of SEQ ID NOs: 11389-11406 of Table 3C. In some embodiments, the prime editing composition further comprises a ngRNA that comprises a spacer comprising a sequence selected from the group consisting of SEQ Identifiers: D929-D944, and D1016-D1018 of Table 3D. In some embodiments, the prime editing composition further comprises a ngRNA that comprises a spacer comprising a sequence selected from the group consisting of SEQ ID NOs. 20562-20577, and 20649-20651 of Table 3D.

[0526] In some embodiments, the PEgRNA comprises a spacer comprising the sequence of SEQ Identifier: A427 of Table 3A. In some embodiments, the PEgRNA comprises a spacer comprising a sequence as set forth in SEQ ID NO.775 of Table 3A. In some embodiments, the PEgRNA comprises a PBS comprising a sequence selected from the group consisting of SEQ Identifiers: B1782-B1790 of Table 3B. In some embodiments, the PEgRNA comprises a PBS comprising a sequence selected from the group consisting of SEQ ID NOs. 2599-2605 of Table 3B. In some embodiments, the PEgRNA comprises a PBS comprising a sequence selected from the group consisting of sequences TCCAAGAA and TCCAAGAAC as disclosed in Table 3B. In some embodiments, the PEgRNA comprises an editing template comprising a sequence selected from the group consisting of SEQ Identifiers: C7381-C7399 of Table 3C. In some embodiments, the PEgRNA comprises an editing template comprising a sequence selected from the group consisting of SEQ ID NOs: 11407-11425 of Table 3C. In some embodiments, the prime editing composition further comprises a ngRNA that comprises a spacer comprising a sequence selected from the group consisting of SEQ Identifiers: D929-D944, D1016, and D1019 of Table 3D. In some embodiments, the prime editing composition further comprises a ngRNA that comprises a spacer comprising a sequence selected from the group consisting of SEQ ID NOs. 0.20562-20577, 20649, and 20652 of Table 3D.

[0527] In some embodiments, the PEgRNA comprises a spacer comprising a sequence selected from the group consisting of SEQ Identifier: A428-A429 of Table 3A. In some embodiments, the PEgRNA comprises a spacer comprising a sequence as set forth in SEQ ID NOs. 776-777 of Table 3A. In some embodiments, the PEgRNA comprises a PBS comprising a sequence selected from the group consisting of SEQ Identifiers: B1791-B1799 of Table 3B. In some embodiments, the PEgRNA comprises a PBS comprising a sequence selected from the group consisting of SEQ ID NOs. 2606-2612 of Table 3B. In some embodiments, the PEgRNA comprises a PBS comprising a sequence selected from the group consisting of sequences ACTATATT and ACTATATTG as disclosed in Table 3B. In some embodiments, the PEgRNA comprises an editing template comprising a sequence selected from the group consisting of SEQ Identifiers: C7400-C7411 of Table 3C. In some embodiments, the PEgRNA comprises an editing template comprising a sequence selected from the group consisting of SEQ ID NOs: 11426-11437 of Table 3C. In some embodiments, the prime editing composition further comprises a ngRNA that comprises a spacer comprising a sequence selected from the group consisting of SEQ Identifiers: D929-D944, and D1016-D1018 of Table 3D. In some embodiments, the prime editing composition further comprises a ngRNA that comprises a spacer comprising a sequence selected from the group consisting of SEQ ID NOs. 20562-20577, and 20649-20651 of Table 3D.

[0528] In some embodiments, the PEgRNA comprises a spacer comprising a sequence selected from the group consisting of SEQ Identifiers: A451, A483, A484, and A485 of Table 3A. In some embodiments, the PEgRNA comprises a spacer comprising a sequence as set forth in SEQ ID NOs. 799 and 831-833 of Table 3A. In some embodiments, the PEgRNA comprises a PBS comprising a sequence selected from the group consisting of SEQ Identifiers: B1872-B1880 of Table 3B. In some embodiments, the PEgRNA comprises a PBS comprising a sequence selected from the group consisting of SEQ ID NOs. 2669-2675 of Table 3B. In some embodiments, the PEgRNA comprises a PBS comprising a sequence selected from the group consisting of sequences TGTGATTC and TGTGATTCC as disclosed in Table 3B. In some embodiments, the PEgRNA comprises an editing template comprising a sequence selected from the group consisting of SEQ Identifiers: C7412-C7442 of Table 3C. In some embodiments, the PEgRNA comprises an editing template comprising a sequence selected from the group consisting of SEQ ID NOs: 11438-11468 of Table 3C. In some embodiments, the prime editing composition further comprises a ngRNA that comprises a spacer comprising a sequence selected from the group consisting of SEQ Identifiers: D922, D930-D944, D1016-1019, and D1022-D1025 of Table 3D. In some embodiments, the prime editing composition further comprises a ngRNA that comprises a spacer comprising a sequence selected from the group consisting of SEQ ID NOs. 20555, 20563-20577, 20649-20652, and 20655-20658 of Table 3D.

[0529] In some embodiments, the PEgRNA comprises a spacer comprising a sequence selected from the group consisting of SEQ Identifiers: A433-A435 of Table 3A. In some embodiments, the PEgRNA comprises a spacer comprising a sequence as set forth in SEQ ID NOs. 781-782 of Table 3A. In some embodiments, the PEgRNA comprises a PBS comprising a sequence selected from the group consisting of SEQ Identifiers: B1809-B1817 of Table 3B. In some embodiments, the PEgRNA comprises a PBS comprising a sequence selected from the group consisting of SEQ ID NOs. 2620-2626 of Table 3B. In some embodiments, the PEgRNA comprises a PBS comprising a sequence selected from the group consisting of sequences CTATATTG and CTATATTGT as disclosed in Table 3B. In some embodiments, the PEgRNA comprises an editing template comprising a sequence selected from the group consisting of SEQ Identifiers: C7443-C7453 of Table 3C. In some embodiments, the PEgRNA comprises an editing template comprising a sequence selected from the group consisting of SEQ ID NOs: 11469-11479 of Table 3C. In some embodiments, the prime editing composition further comprises a ngRNA that comprises a spacer comprising a sequence selected from the group consisting of SEQ Identifiers: D922, and D1021-D1025 of Table 3D. In some embodiments, the prime editing composition further comprises a ngRNA that comprises a spacer comprising a sequence selected from the group consisting of SEQ ID NOs. 20555, and 20654-20658 of Table 3D.

[0530] In some embodiments, the PEgRNA comprises a spacer comprising a sequence selected from the group consisting of SEQ Identifiers: A486-A487 of Table 3A. In some embodiments, the PEgRNA comprises a spacer comprising a sequence as set forth in SEQ ID NOs. 834-835 of Table 3A. In some embodiments, the PEgRNA comprises a PBS comprising a sequence selected from the group consisting of SEQ Identifiers: B1818-B1826 of Table 3B. In some embodiments, the PEgRNA comprises a PBS comprising a sequence selected from the group consisting of SEQ ID NOs. 2627-2633 of Table 3B. In some embodiments, the PEgRNA comprises a PBS comprising a sequence selected from the group consisting of sequences CAGTGTGA and CAGTGTGAT as disclosed in Table 3B. In some embodiments, the PEgRNA comprises an editing template comprising a sequence selected from the group consisting of SEQ Identifiers: C7454-C7484 of Table 3C. In some embodiments, the PEgRNA comprises an editing template comprising a sequence selected from the group consisting of SEQ ID NOs: 11480-11510 of Table 3C. In some embodiments, the prime editing composition further comprises a ngRNA that comprises a spacer comprising a sequence selected from the group consisting of SEQ Identifiers: D930-D944, D946-D952, D1016, D1019, D1026, D1071, and D1072 of Table 3D. In some embodiments, the prime editing composition further comprises a ngRNA that comprises a spacer comprising a sequence selected from the group consisting of SEQ ID NOs. 20563-20577, 20579-20585, 20649, 20652, 20659, 20704, and 20705 of Table 3D.

[0531] In some embodiments, the PEgRNA comprises a spacer comprising a sequence selected from the group consisting of SEQ Identifiers: A438-A441 of Table 3A. In some embodiments, the PEgRNA comprises a spacer comprising a sequence as set forth in SEQ ID NOs. 786-789 of Table 3A. In some embodiments, the PEgRNA comprises a PBS comprising a sequence selected from the group consisting of SEQ Identifiers: B1827-B1835 of Table 3B. In some embodiments, the PEgRNA comprises a PBS comprising a sequence selected from the group consisting of SEQ ID NOs. 2634-2640 of Table 3B. In some embodiments, the PEgRNA comprises a PBS comprising a sequence selected from the group consisting of sequences TCTCCAAG and TCTCCAAGA as disclosed in Table 3B. In some embodiments, the PEgRNA comprises an editing template comprising a sequence selected from the group consisting of SEQ Identifiers: C7485-C7505 of Table 3C. In some embodiments, the PEgRNA comprises an editing template comprising a sequence selected from the group consisting of SEQ ID NOs: 11511-11531 of Table 3C. In some embodiments, the prime editing composition further comprises a ngRNA that comprises a spacer comprising a sequence selected from the group consisting of SEQ Identifiers: D925, D929-D944, D1016-D1019, and D1028-D1032 of Table 3D. In some embodiments, the prime editing composition further comprises a ngRNA that comprises a spacer comprising a sequence selected from the group consisting of SEQ ID NOs. 20558, 20562-20577, 20649-20652, and 20661-20665 of Table 3D.

[0532] In some embodiments, the PEgRNA comprises a spacer comprising the sequence of SEQ Identifier: A442 of Table 3A. In some embodiments, the PEgRNA comprises a spacer comprising a sequence as set forth in SEQ ID NO. 790 of Table 3A. In some embodiments, the PEgRNA comprises a PBS comprising a sequence selected from the group consisting of SEQ Identifiers: B1836-B1844 of Table 3B. In some embodiments, the PEgRNA comprises a PBS comprising a sequence selected from the group consisting of SEQ ID NOs. 2641-2647 of Table 3B. In some embodiments, the PEgRNA comprises a PBS comprising a sequence selected from the group consisting of sequences TGAATAA and TGAATAACT as disclosed in Table 3B. In some embodiments, the PEgRNA comprises an editing template comprising a sequence selected from the group consisting of SEQ Identifiers: C7506-C7511 of Table 3C. In some embodiments, the PEgRNA comprises an editing template comprising a sequence selected from the group consisting of SEQ ID NOs: 11532-11537 of Table 3C. In some embodiments, the prime editing composition further comprises a ngRNA that comprises a spacer comprising a sequence selected from the group consisting of SEQ Identifiers: D972-D981, D1002, D1033-D1037, D1055, and D1073 of Table 3D. In some embodiments, the prime editing composition further comprises a ngRNA that comprises a spacer comprising a sequence selected from the group consisting of SEQ ID NOs. 20605-20614, 20635, 20666-20670, 20688, and 20706 of Table 3D.

[0533] In some embodiments, the PEgRNA comprises a spacer comprising a sequence selected from the group consisting of SEQ Identifiers: A443-A445 of Table 3A. In some embodiments, the PEgRNA comprises a spacer comprising a sequence as set forth in SEQ ID NOs. 791-793 of Table 3A. In some embodiments, the PEgRNA comprises a PBS comprising a sequence selected from the group consisting of SEQ Identifiers: B1845-B1853 of Table 3B. In some embodiments, the PEgRNA comprises a PBS comprising a sequence selected from the group consisting of SEQ ID NOs. 2648-2654 of Table 3B. In some embodiments, the PEgRNA comprises a PBS comprising a sequence selected from the group consisting of sequences CTCCAAGA and CTCCAAGAA as disclosed in Table 3B. In some embodiments, the PEgRNA comprises an editing template comprising a sequence selected from the group consisting of SEQ Identifiers: C7512-C7531 of Table 3C In some embodiments, the PEgRNA comprises an editing template comprising a sequence selected from the group consisting of SEQ ID NOs: 11538-11557 of Table 3C. In some embodiments, the prime editing composition further comprises a ngRNA that comprises a spacer comprising a sequence selected from the group consisting of SEQ Identifiers: D922, and D1021-D1025 of Table 3D. In some embodiments, the prime editing composition further comprises a ngRNA that comprises a spacer comprising a sequence selected from the group consisting of SEQ ID NOs. 20555, and 20654-20658 of Table 3D.

[0534] In some embodiments, the PEgRNA comprises a spacer comprising the sequence of SEQ Identifier: A446 of Table 3A. In some embodiments, the PEgRNA comprises a spacer comprising a sequence as set forth in SEQ ID NO. 794 of Table 3A. In some embodiments, the PEgRNA comprises a PBS comprising a sequence selected from the group consisting of SEQ Identifiers: B1854-B1862 of Table 3B. In some embodiments, the PEgRNA comprises a PBS comprising a sequence selected from the group consisting of SEQ ID NOs. 2655-2661 of Table 3B. In some embodiments, the PEgRNA comprises a PBS comprising a sequence selected from the group consisting of sequences ATTTCTTT and ATTTCTTTA as disclosed in Table 3B. In some embodiments, the PEgRNA comprises an editing template comprising a sequence selected from the group consisting of SEQ Identifiers: C7532-C7552 of Table 3C. In some embodiments, the PEgRNA comprises an editing template comprising a sequence selected from the group consisting of SEQ ID NOs: 11558-11578 of Table 3C. In some embodiments, the prime editing composition further comprises a ngRNA that comprises a spacer comprising a sequence selected from the group consisting of SEQ Identifiers: D968-D981, D1002, D1033, D1034, and D1035 of Table 3D. In some embodiments, the prime editing composition further comprises a ngRNA that comprises a spacer comprising a sequence selected from the group consisting of SEQ ID NOs. 20601-20614, 20635, 20666, 20667, and 20668 of Table 3D.

[0535] In some embodiments, the PEgRNA comprises a spacer comprising a sequence selected from the group consisting of SEQ Identifiers: A391-A392 of Table 3A. In some embodiments, the PEgRNA comprises a spacer comprising a sequence as set forth in SEQ ID NOs. 739-740 of Table 3A. In some embodiments, the PEgRNA comprises a PBS comprising a sequence selected from the group consisting of SEQ Identifiers: B1611-B1619 of Table 3B. In some embodiments, the PEgRNA comprises a PBS comprising a sequence selected from the group consisting of SEQ ID NOs. 2466-2472 of Table 3B. In some embodiments, the PEgRNA comprises a PBS comprising a sequence selected from the group consisting of sequences AACTATAT and AACTATATT as disclosed in Table 3B. In some embodiments, the PEgRNA comprises an editing template comprising a sequence selected from the group consisting of SEQ Identifiers: C7553-C7565 of Table 3C. In some embodiments, the PEgRNA comprises an editing template comprising a sequence selected from the group consisting of SEQ ID NOs: 11579-11591 of Table 3C. In some embodiments, the prime editing composition further comprises a ngRNA that comprises a spacer comprising a sequence selected from the group consisting of SEQ Identifiers: D929-D944, D946-D952, and D1016 of Table 3D. In some embodiments, the prime editing composition further comprises a ngRNA that comprises a spacer comprising a sequence selected from the group consisting of SEQ ID NOs. 20562-20577, 20579-20585, and 20649 of Table 3D.

[0536] In some embodiments, the PEgRNA comprises a spacer comprising a sequence selected from the group consisting of SEQ Identifier: A465, A466, A467, and A488 of Table 3A. In some embodiments, the PEgRNA comprises a spacer comprising a sequence as set forth in SEQ ID NOs. 813-816 and 836 of Table 3A. In some embodiments, the PEgRNA comprises a PBS comprising a sequence selected from the group consisting of SEQ Identifiers: B1800-B1808 of Table 3B. In some embodiments, the PEgRNA comprises a PBS comprising a sequence selected from the group consisting of SEQ ID NOs. 2613-2619 of Table 3B. In some embodiments, the PEgRNA comprises a PBS comprising a sequence selected from the group consisting of sequences GTGTGATT and GTGTGATTC as disclosed in Table 3B. In some embodiments, the PEgRNA comprises an editing template comprising a sequence selected from the group consisting of SEQ Identifiers: C7566-C7596 of Table 3C. In some embodiments, the PEgRNA comprises an editing template comprising a sequence selected from the group consisting of SEQ ID NOs: 11592-11622 of Table 3C. In some embodiments, the prime editing composition further comprises a ngRNA that comprises a spacer comprising a sequence selected from the group consisting of SEQ Identifiers: D922, D930-D944, D1016-D1019, and D1021-D1025 of Table 3D. In some embodiments, the prime editing composition further comprises a ngRNA that comprises a spacer comprising a sequence selected from the group consisting of SEQ ID NOs. 20555, 20563-20577, 20649-20652, and 20654-20658 of Table 3D.

[0537] In some embodiments, the PEgRNA comprises a spacer comprising a sequence selected from the group consisting of SEQ Identifiers: A447-A450 of Table 3A. In some embodiments, the PEgRNA comprises a spacer comprising a sequence as set forth in SEQ ID NOs. 795-798 of Table 3A. In some embodiments, the PEgRNA comprises a PBS comprising a sequence selected from the group consisting of SEQ Identifiers: B1863-B1871 of Table 3B. In some embodiments, the PEgRNA comprises a PBS comprising a sequence selected from the group consisting of SEQ ID NOs. 2662-2668 of Table 3B. In some embodiments, the PEgRNA comprises a PBS comprising a sequence selected from the group consisting of sequences CAAGAACT and CAAGAACTA asdisclosed in Table 3B. In some embodiments, the PEgRNA comprises an editing template comprising a sequence selected from the group consisting of SEQ Identifiers: C7597-C7630 of Table 3C. In some embodiments, the PEgRNA comprises an editing template comprising a sequence selected from the group consisting of SEQ ID NOs: 11623-11656 of Table 3C. In some embodiments, the prime editing composition further comprises a ngRNA that comprises a spacer comprising a sequence selected from the group consisting of SEQ Identifiers: D915-D928, D1021-D1025 of Table 3D. In some embodiments, the prime editing composition further comprises a ngRNA that comprises a spacer comprising a sequence selected from the group consisting of SEQ ID NOs. 20548-20561, 20654-20658 of Table 3D.

[0538] In some embodiments, the PEgRNA comprises a spacer comprising a sequence selected from the group consisting of SEQ Identifiers: A489-A492 of Table 3A. In some embodiments, the PEgRNA comprises a spacer comprising a sequence as set forth in SEQ ID NOs. 837-840 of Table 3A. In some embodiments, the PEgRNA comprises a PBS comprising a sequence selected from the group consisting of SEQ Identifiers: B1944-B1952 of Table 3B. In some embodiments, the PEgRNA comprises a PBS comprising a sequence selected from the group consisting of SEQ ID NOs. 2725-2731 of Table 3B. In some embodiments, the PEgRNA comprises a PBS comprising a sequence selected from the group consisting of sequences GTGATTCC and GTGATTCCA as disclosed in Table 3B. In some embodiments, the PEgRNA comprises an editing template comprising a sequence selected from the group consisting of SEQ Identifiers: C7631-C7692 of Table 3C. In some embodiments, the PEgRNA comprises an editing template comprising a sequence selected from the group consisting of SEQ ID NOs: 11657-11718 of Table 3C. In some embodiments, the prime editing composition further comprises a ngRNA that comprises a spacer comprising a sequence selected from the group consisting of SEQ Identifiers: D915-D928, D1021-D1025, D1056, and D1057 of Table 3D. In some embodiments, the prime editing composition further comprises a ngRNA that comprises a spacer comprising a sequence selected from the group consisting of SEQ ID NOs. 20548-20561, 20654-20658, 20689, and 20690 of Table 3D.

[0539] In some embodiments, the PEgRNA comprises a spacer comprising a sequence selected from the group consisting of SEQ Identifiers: A456 and A470 of Table 3A. In some embodiments, the PEgRNA comprises a spacer comprising a sequence as set forth in SEQ ID NOs. 804 and 818 of Table 3A. In some embodiments, the PEgRNA comprises a PBS comprising a sequence selected from the group consisting of SEQ Identifiers: B1899-B1907 of Table 3B. In some embodiments, the PEgRNA comprises a PBS comprising a sequence selected from the group consisting of SEQ ID NOs. 2690-2696 of Table 3B. In some embodiments, the PEgRNA comprises a PBS comprising a sequence selected from the group consisting of sequences TGATTCCA and TGATTCCAC as disclosed in Table 3B. In some embodiments, the PEgRNA comprises an editing template comprising a sequence selected from the group consisting of SEQ Identifiers: C7693-C7723 of Table 3C. In some embodiments, the PEgRNA comprises an editing template comprising a sequence selected from the group consisting of SEQ ID NOs: 11719-11749 of Table 3C. In some embodiments, the prime editing composition further comprises a ngRNA that comprises a spacer comprising a sequence selected from the group consisting of SEQ Identifiers: D930-D944, D946-D952, D1016, D1019, and D1026 of Table 3D. In some embodiments, the prime editing composition further comprises a ngRNA that comprises a spacer comprising a sequence selected from the group consisting of SEQ ID NOs. 20563-20577, 20579-20585, 20649, 20652, and 20659 of Table 3D.

[0540] In some embodiments, the PEgRNA comprises a spacer comprising a sequence selected from the group consisting of SEQ Identifiers: A493-A496 of Table 3A. In some embodiments, the PEgRNA comprises a spacer comprising a sequence as set forth in SEQ ID NOs. 841-844 of Table 3A. In some embodiments, the PEgRNA comprises a PBS comprising a sequence selected from the group consisting of SEQ Identifiers: B1926-B1934 of Table 3B. In some embodiments, the PEgRNA comprises a PBS comprising a sequence selected from the group consisting of SEQ ID NOs. 2711-2717 of Table 3B. In some embodiments, the PEgRNA comprises a PBS comprising a sequence selected from the group consisting of sequences TCAGTGTG and TCAGTGTGA as disclosed in Table 3B. In some embodiments, the PEgRNA comprises an editing template comprising a sequence selected from the group consisting of SEQ Identifiers: C7724-C7785 of Table 3C. In some embodiments, the PEgRNA comprises an editing template comprising a sequence selected from the group consisting of SEQ ID NOs: 11750-11811 of Table 3C. In some embodiments, the prime editing composition further comprises a ngRNA that comprises a spacer comprising a sequence selected from the group consisting of SEQ Identifiers: D915-D928, D1021-D1025, D1056, and D1057 of Table 3D. In some embodiments, the prime editing composition further comprises a ngRNA that comprises a spacer comprising a sequence selected from the group consisting of SEQ ID NOs. 20548-20561, 20654-20658, 20689, and 20690 of Table 3D.

[0541] In some embodiments, the PEgRNA comprises a spacer comprising a sequence selected from the group consisting of SEQ Identifiers: A497-A498 of Table 3A. In some embodiments, the PEgRNA comprises a spacer comprising a sequence as set forth in SEQ ID NOs. 845-846 of Table 3A. In some embodiments, the PEgRNA comprises a PBS comprising a sequence selected from the group consisting of SEQ Identifiers: B1953-B1961 of Table 3B. In some embodiments, the PEgRNA comprises a PBS comprising a sequence selected from the group consisting of SEQ ID NOs. 2732-2738 of Table 3B. In some embodiments, the PEgRNA comprises a PBS comprising a sequence selected from the group consisting of sequences CTCAGTGT and CTCAGTGTG as disclosed in Table 3B. In some embodiments, the PEgRNA comprises an editing template comprising a sequence selected from the group consisting of SEQ Identifiers: C7786-C7816 of Table 3C. In some embodiments, the PEgRNA comprises an editing template comprising a sequence selected from the group consisting of SEQ ID NOs: 11812-11842 of Table 3C. In some embodiments, the prime editing composition further comprises a ngRNA that comprises a spacer comprising a sequence selected from the group consisting of SEQ Identifiers: D930-D944, D1016-D1019, D1071, and D1074 of Table 3D. In some embodiments, the prime editing composition further comprises a ngRNA that comprises a spacer comprising a sequence selected from the group consisting of SEQ ID NOs. 20563-20577, 20649, -20652, 20704, and 20707 of Table 3D.

[0542] In some embodiments, the PEgRNA comprises a spacer comprising a sequence selected from the group consisting of SEQ Identifiers: A400-A401 of Table 3A. In some embodiments, the PEgRNA comprises a spacer comprising a sequence as set forth in SEQ ID NOs. 748-749 of Table 3A. In some embodiments, the PEgRNA comprises a PBS comprising a sequence selected from the group consisting of SEQ Identifiers: B1656-B1664 of Table 3B. In some embodiments, the PEgRNA comprises a PBS comprising a sequence selected from the group consisting of SEQ ID NOs. 2501-2507 of Table 3B. In some embodiments, the PEgRNA comprises a PBS comprising a sequence selected from the group consisting of sequences AGCAAGAA and AGCAAGAAT as disclosed in Table 3B. In some embodiments, the PEgRNA comprises an editing template comprising a sequence selected from the group consisting of SEQ Identifiers: C7817-C7844 of Table 3C. In some embodiments, the PEgRNA comprises an editing template comprising a sequence selected from the group consisting of SEQ ID NOs: 11843-11870 of Table 3C. In some embodiments, the prime editing composition further comprises a ngRNA that comprises a spacer comprising a sequence selected from the group consisting of SEQ Identifiers: D959, D960, D968-D981, D1002, D1033, D1034, D1035, D1040, D1041, D1075, and D1076 of Table 3D. In some embodiments, the prime editing composition further comprises a ngRNA that comprises a spacer comprising a sequence selected from the group consisting of SEQ ID NOs. 20592, 20593, 20601-20614, 20635, 20666, 20667, 20668, 20673, 20674, 20708, and 20709 of Table 3D.

[0543] In some embodiments, the PEgRNA comprises a spacer comprising a sequence selected from the group consisting of SEQ Identifiers: A452-A453 of Table 3A. In some embodiments, the PEgRNA comprises a spacer comprising a sequence as set forth in SEQ ID NOs. 800-801 of Table 3A. In some embodiments, the PEgRNA comprises a PBS comprising a sequence selected from the group consisting of SEQ Identifiers: B1881-B1889 of Table 3B. In some embodiments, the PEgRNA comprises a PBS comprising a sequence selected from the group consisting of SEQ ID NOs. 2676-2682 of Table 3B. In some embodiments, the PEgRNA comprises a PBS comprising a sequence selected from the group consisting of sequences GCAAGGTG and GCAAGGTGA as disclosed in Table 3B. In some embodiments, the PEgRNA comprises an editing template comprising a sequence selected from the group consisting of SEQ Identifiers: C7845-C7856 of Table 3C. In some embodiments, the PEgRNA comprises an editing template comprising a sequence selected from the group consisting of SEQ ID NOs: 11871-11882 of Table 3C. In some embodiments, the prime editing composition further comprises a ngRNA that comprises a spacer comprising a sequence selected from the group consisting of SEQ Identifiers: D959-D960, D970-D981, D1002, D1033, D1034, D1035, D1036, D1037, D1040, D1041, D1055, and D1073 of Table 3D. In some embodiments, the prime editing composition further comprises a ngRNA that comprises a spacer comprising a sequence selected from the group consisting of SEQ ID NOs. 20592-20593, 20603-20614, 20635, 20666, 20667, 20668, 20673, 20674, 20688, and 20706 of Table 3D.

[0544] In some embodiments, the PEgRNA comprises a spacer comprising a sequence selected from the group consisting of SEQ Identifiers: A454-A455 of Table 3A. In some embodiments, the PEgRNA comprises a spacer comprising a sequence as set forth in SEQ ID NOs. 802-803 of Table 3A. In some embodiments, the PEgRNA comprises a PBS comprising a sequence selected from the group consisting of SEQ Identifiers: B1890-B1898 of Table 3B. In some embodiments, the PEgRNA comprises a PBS comprising a sequence selected from the group consisting of SEQ ID NOs. 2683-2689 of Table 3B. In some embodiments, the PEgRNA comprises a PBS comprising a sequence selected from the group consisting of sequences TTCTCCAA and TTCTCCAAG as disclosed in Table 3B. In some embodiments, the PEgRNA comprises an editing template comprising a sequence selected from the group consisting of SEQ Identifiers: C7857-C7878 of Table 3C. In some embodiments, the PEgRNA comprises an editing template comprising a sequence selected from the group consisting of SEQ ID NOs: 11883-11894 of Table 3C. In some embodiments, the prime editing composition further comprises a ngRNA that comprises a spacer comprising a sequence selected from the group consisting of SEQ Identifiers: D929-D944, D946-D952, D1016, D1019, and D1026 of Table 3D. In some embodiments, the prime editing composition further comprises a ngRNA that comprises a spacer comprising a sequence selected from the group consisting of SEQ ID NOs. 20562-20577, 20579-20583, 20649, 20652, and 20659 of Table 3D.

[0545] In some embodiments, the PEgRNA comprises a spacer comprising a sequence selected from the group consisting of SEQ Identifiers: A457-A458 of Table 3A. In some embodiments, the PEgRNA comprises a spacer comprising a sequence as set forth in SEQ ID NOs. 805-806 of Table 3A. In some embodiments, the PEgRNA comprises a PBS comprising a sequence selected from the group consisting of SEQ Identifiers: B1908-B1916 of Table 3B. In some embodiments, the PEgRNA comprises a PBS comprising a sequence selected from the group consisting of SEQ ID NOs. 2697-2703 of Table 3B. In some embodiments, the PEgRNA comprises a PBS comprising a sequence selected from the group consisting of sequences CAAGGTGA and CAAGGTGAA as disclosed in Table 3B. In some embodiments, the PEgRNA comprises an editing template comprising a sequence selected from the group consisting of SEQ Identifiers: C7879-C7900 of Table 3C. In some embodiments, the PEgRNA comprises an editing template comprising a sequence selected from the group consisting of SEQ ID NOs: 11905-11926 of Table 3C. In some embodiments, the prime editing composition further comprises a ngRNA that comprises a spacer comprising a sequence selected from the group consisting of SEQ Identifiers: D990, D991, D992, D999, D1000, and D1001. In some embodiments, the prime editing composition further comprises a ngRNA that comprises a spacer comprising a sequence selected from the group consisting of SEQ ID NOs. 20623, 20624, 20625, 20632, 20633, and 20634 of Table 3D.

[0546] In some embodiments, the PEgRNA comprises a spacer comprising the sequence of SEQ Identifier: A409 of Table 3A. In some embodiments, the PEgRNA comprises a spacer comprising a sequence as set forth in SEQ ID NO. 757 of Table 3A. In some embodiments, the PEgRNA comprises a PBS comprising a sequence selected from the group consisting of SEQ Identifiers: B1701-B1709 of Table 3B. In some embodiments, the PEgRNA comprises a PBS comprising a sequence selected from the group consisting of SEQ ID NOs. 2536-2542 of Table 3B. In some embodiments, the PEgRNA comprises a PBS comprising a sequence selected from the group consisting of sequences AAGAATTT and AAGAATTTC as disclosed in Table 3B. In some embodiments, the PEgRNA comprises an editing template comprising a sequence selected from the group consisting of SEQ Identifiers: C7901-C7925 of Table 3C. In some embodiments, the PEgRNA comprises an editing template comprising a sequence selected from the group consisting of SEQ ID NOs: 11927-11951 of Table 3C. In some embodiments, the prime editing composition further comprises a ngRNA that comprises a spacer comprising a sequence selected from the group consisting of SEQ Identifiers: D968-D981, D1002, D1033, D1034, and D1035 of Table 3D. In some embodiments, the prime editing composition further comprises a ngRNA that comprises a spacer comprising a sequence selected from the group consisting of SEQ ID NOs. 20601-20614, 20636, 20666, 20667, and 20668 of Table 3D.

[0547] In some embodiments, the PEgRNA comprises a spacer comprising a sequence selected from the group consisting of SEQ Identifiers: A499-A500 of Table 3A. In some embodiments, the PEgRNA comprises a spacer comprising a sequence as set forth in SEQ ID NOs. 847-848 of Table 3A. In some embodiments, the PEgRNA comprises a PBS comprising a sequence selected from the group consisting of SEQ Identifiers: B1710-B1718 of Table 3B. In some embodiments, the PEgRNA comprises a PBS comprising a sequence selected from the group consisting of SEQ ID NOs. 2543-2549 of Table 3B. In some embodiments, the PEgRNA comprises a PBS comprising a sequence selected from the group consisting of sequences GGAGGTCA and GGAGGTCAA as disclosed in Table 3B. In some embodiments, the PEgRNA comprises an editing template comprising a sequence selected from the group consisting of SEQ Identifiers: C7926-C7987 of Table 3C. In some embodiments, the PEgRNA comprises an editing template comprising a sequence selected from the group consisting of SEQ ID NOs: 11952-12013 of Table 3C. In some embodiments, the prime editing composition further comprises a ngRNA that comprises a spacer comprising a sequence selected from the group consisting of SEQ Identifiers: D988-D992, D997-D1001, and D1077-D1084 of Table 3D. In some embodiments, the prime editing composition further comprises a ngRNA that comprises a spacer comprising a sequence selected from the group consisting of SEQ ID NOs. 20621-20625, 20630-20634, and 20710-20717 of Table 3D.

[0548] In some embodiments, the PEgRNA comprises a spacer comprising a sequence selected from the group consisting of SEQ Identifiers: A416-A417 of Table 3A. In some embodiments, the PEgRNA comprises a spacer comprising a sequence as set forth in SEQ ID NOs. 464-465 of Table 3A. In some embodiments, the PEgRNA comprises a PBS comprising a sequence selected from the group consisting of SEQ Identifiers: B1746-B1754 of Table 3B. In some embodiments, the PEgRNA comprises a PBS comprising a sequence selected from the group consisting of SEQ ID NOs. 2571-2577 of Table 3B. In some embodiments, the PEgRNA comprises a PBS comprising a sequence selected from the group consisting of sequences TGTCTTTC and TGTCTTTCT as disclosed in Table 3B. In some embodiments, the PEgRNA comprises an editing template comprising a sequence selected from the group consisting of SEQ Identifiers: C7988-C7997 of Table 3C. In some embodiments, the PEgRNA comprises an editing template comprising a sequence selected from the group consisting of SEQ ID NOs: 12014-12023 of Table 3C. In some embodiments, the prime editing composition further comprises a ngRNA that comprises a spacer comprising a sequence selected from the group consisting of SEQ Identifiers: D915-D928 of Table 3D. In some embodiments, the prime editing composition further comprises a ngRNA that comprises a spacer comprising a sequence selected from the group consisting of SEQ ID NOs. 20548-20561 of Table 3D.

[0549] In some embodiments, the PEgRNA comprises a spacer comprising the sequence of SEQ Identifier: A418 of Table 3A. In some embodiments, the PEgRNA comprises a spacer comprising a sequence as set forth in SEQ ID NO. 766 of Table 3A. In some embodiments, the PEgRNA comprises a PBS comprising a sequence selected from the group consisting of SEQ Identifiers: B1755-B1763 of Table 3B. In some embodiments, the PEgRNA comprises a PBS comprising a sequence selected from the group consisting of SEQ ID NOs. 2578-2584 of Table 3B. In some embodiments, the PEgRNA comprises a PBS comprising a sequence selected from the group consisting of sequences TTGTCTTT and TTGTCTTTC as disclosed in Table 3B. In some embodiments, the PEgRNA comprises an editing template comprising a sequence selected from the group consisting of SEQ Identifiers: C7998-C8003 of Table 3C. In some embodiments, the PEgRNA comprises an editing template comprising a sequence selected from the group consisting of SEQ ID NOs: 12024-12029 of Table 3C. In some embodiments, the prime editing composition further comprises a ngRNA that comprises a spacer comprising a sequence selected from the group consisting of SEQ Identifiers: D929-D944 of Table 3D. In some embodiments, the prime editing composition further comprises a ngRNA that comprises a spacer comprising a sequence selected from the group consisting of SEQ ID NOs. 20562-20577 of Table 3D.

[0550] In some embodiments, the PEgRNA comprises a spacer comprising a sequence selected from the group consisting of SEQ Identifiers: A419-A420 of Table 3A. In some embodiments, the PEgRNA comprises a spacer comprising a sequence as set forth in SEQ ID NOs. 767-768 of Table 3A. In some embodiments, the PEgRNA comprises a PBS comprising a sequence selected from the group consisting of SEQ Identifiers: B1566-B1574 of Table 3B. In some embodiments, the PEgRNA comprises a PBS comprising a sequence selected from the group consisting of SEQ ID NOs. 2431-2437 of Table 3B. In some embodiments, the PEgRNA comprises a PBS comprising a sequence selected from the group consisting of sequences GAACTATA and GAACTATAT as disclosed in Table 3B. In some embodiments, the PEgRNA comprises an editing template comprising a sequence selected from the group consisting of SEQ Identifiers: C9227-C9234 of Table 3C. In some embodiments, the PEgRNA comprises an editing template comprising a sequence selected from the group consisting of SEQ ID NOs: 13253-13260 of Table 3C. In some embodiments, the prime editing composition further comprises a ngRNA that comprises a spacer comprising a sequence selected from the group consisting of SEQ Identifiers: D915-D928 of Table 3D. In some embodiments, the prime editing composition further comprises a ngRNA that comprises a spacer comprising a sequence selected from the group consisting of SEQ ID NOs. 20548-20561 of Table 3D.

[0551] In some embodiments, the PEgRNA comprises a spacer comprising a sequence selected from the group consisting of SEQ Identifiers: A421-A422 of Table 3A. In some embodiments, the PEgRNA comprises a spacer comprising a sequence as set forth in SEQ ID NOs. 769-770 of Table 3A. In some embodiments, the PEgRNA comprises a PBS comprising a sequence selected from the group consisting of SEQ Identifiers: B1575-B1583 of Table 3B. In some embodiments, the PEgRNA comprises a PBS comprising a sequence selected from the group consisting of SEQ ID NOs. 2438-2444 of Table 3B. In some embodiments, the PEgRNA comprises a PBS comprising a sequence selected from the group consisting of sequences AGAACTAT and AGAACTATA as disclosed in Table 3B. In some embodiments, the PEgRNA comprises an editing template comprising a sequence selected from the group consisting of SEQ Identifiers: C9235-C9239 of Table 3C. In some embodiments, the PEgRNA comprises an editing template comprising a sequence selected from the group consisting of SEQ ID NOs: 13261-13265 of Table 3C. In some embodiments, the prime editing composition further comprises a ngRNA that comprises a spacer comprising a sequence selected from the group consisting of SEQ Identifiers: D930-D944, D946-D952, D1016 of Table 3D. In some embodiments, the prime editing composition further comprises a ngRNA that comprises a spacer comprising a sequence selected from the group consisting of SEQ ID NOs. 20563-20577, 20579-20585, 20649 of Table 3D.

[0552] In some embodiments, the PEgRNA comprises a spacer comprising a sequence selected from the group consisting of SEQ Identifiers: A481-A482 of Table 3A. In some embodiments, the PEgRNA comprises a spacer comprising a sequence as set forth in SEQ ID NOs. 829-830 of Table 3A. In some embodiments, the PEgRNA comprises a PBS comprising a sequence selected from the group consisting of SEQ Identifiers: B1764-B1772 of Table 3B. In some embodiments, the PEgRNA comprises a PBS comprising a sequence selected from the group consisting of SEQ ID NOs. 2583-2591 of Table 3B. In some embodiments, the PEgRNA comprises a PBS comprising a sequence selected from the group consisting of sequences AGTGTGAT and AGTGTGATT as disclosed in Table 3B. In some embodiments, the PEgRNA comprises an editing template comprising a sequence selected from the group consisting of SEQ Identifiers: C9240-C9265 of Table 3C. In some embodiments, the PEgRNA comprises an editing template comprising a sequence selected from the group consisting of SEQ ID NOs: 13266-13291 of Table 3C. In some embodiments, the prime editing composition further comprises a ngRNA that comprises a spacer comprising a sequence selected from the group consisting of SEQ Identifiers: D930-D944, D1016-D1019 and D1096 of Table 3D. In some embodiments, the prime editing composition further comprises a ngRNA that comprises a spacer comprising a sequence selected from the group consisting of SEQ ID NOs. 0.20563-20577, 20649-20652, and 20729 of Table 3D.

[0553] In some embodiments, the PEgRNA comprises a spacer comprising a sequence selected from the group consisting of SEQ Identifiers: A425-A426 of Table 3A. In some embodiments, the PEgRNA comprises a spacer comprising a sequence as set forth in SEQ ID NOs. 773-774 of Table 3A. In some embodiments, the PEgRNA comprises a PBS comprising a sequence selected from the group consisting of SEQ Identifiers: B1773-B1781 of Table 3B. In some embodiments, the PEgRNA comprises a PBS comprising a sequence selected from the group consisting of SEQ ID NOs. 2592-2598 of Table 3B. In some embodiments, the PEgRNA comprises a PBS comprising a sequence selected from the group consisting of sequences CCAAGAAC and CCAAGAACT as disclosed in Table 3B. In some embodiments, the PEgRNA comprises an editing template comprising a sequence selected from the group consisting of SEQ Identifiers: C9266-C9273 of Table 3C. In some embodiments, the PEgRNA comprises an editing template comprising a sequence selected from the group consisting of SEQ ID NOs: 13292-13299 of Table 3C. In some embodiments, the prime editing composition further comprises a ngRNA that comprises a spacer comprising a sequence selected from the group consisting of SEQ Identifiers: D930-D944, and D1016-D1018 of Table 3D. In some embodiments, the prime editing composition further comprises a ngRNA that comprises a spacer comprising a sequence selected from the group consisting of SEQ ID NOs. 20563-20577, and 20649-20651 of Table 3D.

[0554] In some embodiments, the PEgRNA comprises a spacer comprising the sequence of SEQ Identifier: A427 of Table 3A. In some embodiments, the PEgRNA comprises a spacer comprising a sequence as set forth in SEQ ID NO. 775 of Table 3A. In some embodiments, the PEgRNA comprises a PBS comprising a sequence selected from the group consisting of SEQ Identifiers: B1782-B1790 of Table 3B. In some embodiments, the PEgRNA comprises a PBS comprising a sequence selected from the group consisting of SEQ ID NOs. 2599-2605 of Table 3B. In some embodiments, the PEgRNA comprises a PBS comprising a sequence selected from the group consisting of sequences TCCAAGAA and TCCAAGAAC as disclosed in Table 3B. In some embodiments, the PEgRNA comprises an editing template comprising a sequence selected from the group consisting of SEQ Identifiers: C9274-C9282 of Table 3C. In some embodiments, the PEgRNA comprises an editing template comprising a sequence selected from the group consisting of SEQ ID NOs: 13300-13308 of Table 3C. In some embodiments, the prime editing composition further comprises a ngRNA that comprises a spacer comprising a sequence selected from the group consisting of SEQ Identifiers: D930-D944, D1016, and D1019 of Table 3D. In some embodiments, the prime editing composition further comprises a ngRNA that comprises a spacer comprising a sequence selected from the group consisting of SEQ ID NOs. 20563-20577, 20649, and 20652 of Table 3D.

[0555] In some embodiments, the PEgRNA comprises a spacer comprising a sequence selected from the group consisting of SEQ Identifiers: A508-A509 of Table 3A. In some embodiments, the PEgRNA comprises a spacer comprising a sequence as set forth in SEQ ID NOs. 856-857 of Table 3A. In some embodiments, the PEgRNA comprises a PBS comprising a sequence selected from the group consisting of SEQ Identifiers: B1971-B1979 of Table 3B. In some embodiments, the PEgRNA comprises a PBS comprising a sequence selected from the group consisting of SEQ ID NOs. 2746-2752 of Table 3B. In some embodiments, the PEgRNA comprises a PBS comprising a sequence selected from the group consisting of sequences GACCTCCA and GACCTCCAC as disclosed in Table 3B. In some embodiments, the PEgRNA comprises an editing template comprising a sequence selected from the group consisting of SEQ Identifiers: C9283-C9344 of Table 3C. In some embodiments, the PEgRNA comprises an editing template comprising a sequence selected from the group consisting of SEQ ID NOs: 13309-13370 of Table 3C. In some embodiments, the prime editing composition further comprises a ngRNA that comprises a spacer comprising a sequence selected from the group consisting of SEQ Identifiers: D916-D928, D1056-D1057, and D1097-D1100 of Table 3D. In some embodiments, the prime editing composition further comprises a ngRNA that comprises a spacer comprising a sequence selected from the group consisting of SEQ ID NOs. 20549-20561, 20689-20690, and 20730-20743 of Table 3D.

[0556] In some embodiments, the PEgRNA comprises a spacer comprising the sequence of SEQ Identifier: A510 of Table 3A. In some embodiments, the PEgRNA comprises a spacer comprising a sequence as set forth in SEQ ID NO. 858 of Table 3A. In some embodiments, the PEgRNA comprises a PBS comprising a sequence selected from the group consisting of SEQ Identifiers: B1980-B1988 of Table 3B. In some embodiments, the PEgRNA comprises a PBS comprising a sequence selected from the group consisting of SEQ ID NOs. 2753-2759 of Table 3B. In some embodiments, the PEgRNA comprises a PBS comprising a sequence selected from the group consisting of sequences TGACCTCC and TGACCTCCA as disclosed in Table 3B. In some embodiments, the PEgRNA comprises an editing template comprising a sequence selected from the group consisting of SEQ Identifiers: C9345-C9375 of Table 3C. In some embodiments, the PEgRNA comprises an editing template comprising a sequence selected from the group consisting of SEQ ID NOs: 13371-13401 of Table 3C. In some embodiments, the prime editing composition further comprises a ngRNA that comprises a spacer comprising a sequence selected from the group consisting of SEQ Identifiers: D933-D944, D1016, D1019, D1096, D1101, and D1102 of Table 3D. In some embodiments, the prime editing composition further comprises a ngRNA that comprises a spacer comprising a sequence selected from the group consisting of SEQ ID NOs. 20566-20577, 20649, 20652, 20729, 20744, and 20745 of Table 3D.

[0557] In some embodiments, the PEgRNA comprises a spacer comprising a sequence selected from the group consisting of SEQ Identifiers: A428-A429 of Table 3A. In some embodiments, the PEgRNA comprises a spacer comprising a sequence as set forth in SEQ ID NOs. 776-777 of Table 3A. In some embodiments, the PEgRNA comprises a PBS comprising a sequence selected from the group consisting of SEQ Identifiers: B1791-B1799 of Table 3B. In some embodiments, the PEgRNA comprises a PBS comprising a sequence selected from the group consisting of SEQ ID NOs. 2606-2612 of Table 3B. In some embodiments, the PEgRNA comprises a PBS comprising a sequence selected from the group consisting of sequences ACTATATT and ACTATATTG as disclosed in Table 3B. In some embodiments, the PEgRNA comprises an editing template comprising a sequence selected from the group consisting of SEQ Identifiers: C9376-C9377 of Table 3C. In some embodiments, the PEgRNA comprises an editing template comprising a sequence selected from the group consisting of SEQ ID NOs: 13402-13403 of Table 3C. In some embodiments, the prime editing composition further comprises a ngRNA that comprises a spacer comprising a sequence selected from the group consisting of SEQ Identifiers: D930-D944, D1016, D1017, and D1018 of Table 3D. In some embodiments, the prime editing composition further comprises a ngRNA that comprises a spacer comprising a sequence selected from the group consisting of SEQ ID NOs. 20563-20577, 20649, 20650, and 20651 of Table 3D.

[0558] In some embodiments, the PEgRNA comprises a spacer comprising a sequence selected from the group consisting of SEQ Identifiers: A465-A467 of Table 3A. In some embodiments, the PEgRNA comprises a spacer comprising a sequence as set forth in SEQ ID NOs. 813-815 of Table 3A. In some embodiments, the PEgRNA comprises a PBS comprising a sequence selected from the group consisting of SEQ Identifiers: B1800-B1808 of Table 3B. In some embodiments, the PEgRNA comprises a PBS comprising a sequence selected from the group consisting of SEQ ID NOs. 2613-2619 of Table 3B. In some embodiments, the PEgRNA comprises a PBS comprising a sequence selected from the group consisting of sequences GTGTGATT and GTGTGATTC as disclosed in Table 3B. In some embodiments, the PEgRNA comprises an editing template comprising a sequence selected from the group consisting of SEQ Identifiers: C9378-C9402 of Table 3C. In some embodiments, the PEgRNA comprises an editing template comprising a sequence selected from the group consisting of SEQ ID NOs: 13404-13428 of Table 3C. In some embodiments, the prime editing composition further comprises a ngRNA that comprises a spacer comprising a sequence selected from the group consisting of SEQ Identifiers: D922, and D1021-D1025 of Table 3D. In some embodiments, the prime editing composition further comprises a ngRNA that comprises a spacer comprising a sequence selected from the group consisting of SEQ ID NOs. 20555, and 20654-20658 of Table 3D.

[0559] In some embodiments, the PEgRNA comprises a spacer comprising a sequence selected from the group consisting of SEQ Identifiers: A433-A435 of Table 3A. In some embodiments, the PEgRNA comprises a spacer comprising a sequence as set forth in SEQ ID NOs. 781-783 of Table 3A. In some embodiments, the PEgRNA comprises a PBS comprising a sequence selected from the group consisting of SEQ Identifiers: B1809-B1817 of Table 3B. In some embodiments, the PEgRNA comprises a PBS comprising a sequence selected from the group consisting of SEQ ID NOs. 2620-2626 of Table 3B. In some embodiments, the PEgRNA comprises a PBS comprising a sequence selected from the group consisting of sequences CTATATTG and CTATATTGT as disclosed in Table 3B. In some embodiments, the PEgRNA comprises an editing template comprising the sequence of SEQ Identifier: C9403 of Table 3C. In some embodiments, the PEgRNA comprises an editing template comprising a sequence selected from the group consisting of SEQ ID NOs: 13429 of Table 3C. In some embodiments, the prime editing composition further comprises a ngRNA that comprises a spacer comprising a sequence selected from the group consisting of SEQ Identifiers: D922, and D1021-D1025 of Table 3D. In some embodiments, the prime editing composition further comprises a ngRNA that comprises a spacer comprising a sequence selected from the group consisting of SEQ ID NOs. 20555, and 20654-20658 of Table 3D.

[0560] In some embodiments, the PEgRNA comprises a spacer comprising a sequence selected from the group consisting of SEQ Identifiers: A501-A502 of Table 3A. In some embodiments, the PEgRNA comprises a spacer comprising a sequence as set forth in SEQ ID NOs. 849-850 of Table 3A. In some embodiments, the PEgRNA comprises a PBS comprising a sequence selected from the group consisting of SEQ Identifiers: B1818-B1826 of Table 3B. In some embodiments, the PEgRNA comprises a PBS comprising a sequence selected from the group consisting of SEQ ID NOs. 2627-2633 of Table 3B. In some embodiments, the PEgRNA comprises a PBS comprising a sequence selected from the group consisting of sequences CAGTGTGA and CAGTGTGAT as disclosed in Table 3B. In some embodiments, the PEgRNA comprises an editing template comprising a sequence selected from the group consisting of SEQ Identifiers: C9404-C9430 of Table 3C. In some embodiments, the PEgRNA comprises an editing template comprising a sequence selected from the group consisting of SEQ ID NOs: 13430-13456 of Table 3C. In some embodiments, the prime editing composition further comprises a ngRNA that comprises a spacer comprising a sequence selected from the group consisting of SEQ Identifiers: D930-D944, D946-D952, D1016, D1019, D1026, D1096, and D1103 of Table 3D. In some embodiments, the prime editing composition further comprises a ngRNA that comprises a spacer comprising a sequence selected from the group consisting of SEQ ID NOs. 20579-20585, 20649, 20652, 20659, and 20736 of Table 3D.

[0561] In some embodiments, the PEgRNA comprises a spacer comprising a sequence selected from the group consisting of SEQ Identifiers: A438-A441 of Table 3A. In some embodiments, the PEgRNA comprises a spacer comprising a sequence as set forth in SEQ ID NOs. 786-789 of Table 3A. In some embodiments, the PEgRNA comprises a PBS comprising a sequence selected from the group consisting of SEQ Identifiers: B1827-B1835 of Table 3B. In some embodiments, the PEgRNA comprises a PBS comprising a sequence selected from the group consisting of SEQ ID NOs. 2634-2640 of Table 3B. In some embodiments, the PEgRNA comprises a PBS comprising a sequence selected from the group consisting of sequences TCTCCAAG and TCTCCAAGA as disclosed in Table 3B. In some embodiments, the PEgRNA comprises an editing template comprising a sequence selected from the group consisting of SEQ Identifiers: C9431-C9441 of Table 3C. In some embodiments, the PEgRNA comprises an editing template comprising a sequence selected from the group consisting of SEQ ID NOs: 13457-13467 of Table 3C. In some embodiments, the prime editing composition further comprises a ngRNA that comprises a spacer comprising a sequence selected from the group consisting of SEQ Identifiers: D925, D930-D944, D1016-D1019, and D1028-D1032 of Table 3D. In some embodiments, the prime editing composition further comprises a ngRNA that comprises a spacer comprising a sequence selected from the group consisting of SEQ ID NOs. 20558, 20563-20577, 20649-20652, and 20661-20665 of Table 3D.

[0562] In some embodiments, the PEgRNA comprises a spacer comprising the sequence of SEQ Identifier: A442 of Table 3A. In some embodiments, the PEgRNA comprises a spacer comprising a sequence as set forth in SEQ ID NO. 790 of Table 3A. In some embodiments, the PEgRNA comprises a PBS comprising a sequence selected from the group consisting of SEQ Identifiers: B1836-B1844 of Table 3B. In some embodiments, the PEgRNA comprises a PBS comprising a sequence selected from the group consisting of SEQ ID NOs. 2641-2647 of Table 3B. In some embodiments, the PEgRNA comprises a PBS comprising a sequence selected from the group consisting of sequences TGAATAAC and TGAATAACT as disclosed in Table 3B. In some embodiments, the PEgRNA comprises an editing template comprising a sequence selected from the group consisting of SEQ Identifiers: C9442-C9457 of Table 3C. In some embodiments, the PEgRNA comprises an editing template comprising a sequence selected from the group consisting of SEQ ID NOs: 13468-13483 of Table 3C. In some embodiments, the prime editing composition further comprises a ngRNA that comprises a spacer comprising a sequence selected from the group consisting of SEQ Identifiers: D972-D981, D1002, D1033, D1034, D1035, D1036, D1037, D1055, D1073, D1104, and D1105 of Table 3D. In some embodiments, the prime editing composition further comprises a ngRNA that comprises a spacer comprising a sequence selected from the group consisting of SEQ ID NOs. 20605-20614, 20635, 20666, 20667, 20668, 20669, 20670, 20688, 20706, 20737, and 20738 of Table 3D.

[0563] In some embodiments, the PEgRNA comprises a spacer comprising a sequence selected from the group consisting of SEQ Identifiers: A443-A445 of Table 3A. In some embodiments, the PEgRNA comprises a spacer comprising a sequence as set forth in SEQ ID NOs. 791-793 of Table 3A. In some embodiments, the PEgRNA comprises a PBS comprising a sequence selected from the group consisting of SEQ Identifiers: B1845-B1853 of Table 3B. In some embodiments, the PEgRNA comprises a PBS comprising a sequence selected from the group consisting of SEQ ID NOs. 2648-2654 of Table 3B. In some embodiments, the PEgRNA comprises a PBS comprising a sequence selected from the group consisting of sequences CTCCAAGA and CTCCAAGAA as disclosed in Table 3B. In some embodiments, the PEgRNA comprises an editing template comprising a sequence selected from the group consisting of SEQ Identifiers: C9458-C9467 of Table 3C. In some embodiments, the PEgRNA comprises an editing template comprising a sequence selected from the group consisting of SEQ ID NOs: 13484-13493 of Table 3C. In some embodiments, the prime editing composition further comprises a ngRNA that comprises a spacer comprising a sequence selected from the group consisting of SEQ Identifiers: D922, and D1021-D1025 of Table 3D. In some embodiments, the prime editing composition further comprises a ngRNA that comprises a spacer comprising a sequence selected from the group consisting of SEQ ID NOs. 20555, and 20654-20658 of Table 3D.

[0564] In some embodiments, the PEgRNA comprises a spacer comprising a sequence selected from the group consisting of SEQ Identifiers: A511-A512 of Table 3A. In some embodiments, the PEgRNA comprises a spacer comprising a sequence as set forth in SEQ ID NOs. 859-860 of Table 3A. In some embodiments, the PEgRNA comprises a PBS comprising a sequence selected from the group consisting of SEQ Identifiers: B1989-B1997 of Table 3B. In some embodiments, the PEgRNA comprises a PBS comprising a sequence selected from the group consisting of SEQ ID NOs. 2760-2766 of Table 3B. In some embodiments, the PEgRNA comprises a PBS comprising a sequence selected from the group consisting of sequences ACCTCCAC and ACCTCCACT as disclosed in Table 3B. In some embodiments, the PEgRNA comprises an editing template comprising a sequence selected from the group consisting of SEQ Identifiers: C9468-C9498 of Table 3C. In some embodiments, the PEgRNA comprises an editing template comprising a sequence selected from the group consisting of SEQ ID NOs: 13494-13524 of Table 3C. In some embodiments, the prime editing composition further comprises a ngRNA that comprises a spacer comprising a sequence selected from the group consisting of SEQ Identifiers: D933-D944, D947-D952, D1016, D1019, D1026, D1096, D1101, D1102, and D1103 of Table 3D. In some embodiments, the prime editing composition further comprises a ngRNA that comprises a spacer comprising a sequence selected from the group consisting of SEQ ID NOs. 20566-20577, 20580-20585, 20649, 20652, 20659, 20729, 20734, 20735, and 20736 of Table 3D.

[0565] In some embodiments, the PEgRNA comprises a spacer comprising the sequence of SEQ Identifier: A446 of Table 3A. In some embodiments, the PEgRNA comprises a spacer comprising a sequence as set forth in SEQ ID NO. 794 of Table 3A. In some embodiments, the PEgRNA comprises a PBS comprising a sequence selected from the group consisting of SEQ Identifiers: B1854-B1862 of Table 3B. In some embodiments, the PEgRNA comprises a PBS comprising a sequence selected from the group consisting of SEQ ID NOs. 2655-2661 of Table 3B. In some embodiments, the PEgRNA comprises a PBS comprising a sequence selected from the group consisting of sequences ATTTCTTT and ATTTCTTTA as disclosed in Table 3B. In some embodiments, the PEgRNA comprises an editing template comprising a sequence selected from the group consisting of SEQ Identifiers: C9499-C9529 of Table 3C. In some embodiments, the PEgRNA comprises an editing template comprising a sequence selected from the group consisting of SEQ ID NOs: 13525-13555 of Table 3C. In some embodiments, the prime editing composition further comprises a ngRNA that comprises a spacer comprising a sequence selected from the group consisting of SEQ Identifiers: D969-D981, D1002, D1033, D1034, D1035, and D1106 of Table 3D. In some embodiments, the prime editing composition further comprises a ngRNA that comprises a spacer comprising a sequence selected from the group consisting of SEQ ID NOs. 20602-20614, 20635, 20666, 20667, 20668, and 20739 of Table 3D.

[0566] In some embodiments, the PEgRNA comprises a spacer comprising a sequence selected from the group consisting of SEQ Identifiers: A391-A392 of Table 3A. In some embodiments, the PEgRNA comprises a spacer comprising a sequence as set forth in SEQ ID NOs. 739-740 of Table 3A. In some embodiments, the PEgRNA comprises a PBS comprising a sequence selected from the group consisting of SEQ Identifiers: B1611-B1619 of Table 3B. In some embodiments, the PEgRNA comprises a PBS comprising a sequence selected from the group consisting of SEQ ID NOs. 2466-2472 of Table 3B. In some embodiments, the PEgRNA comprises a PBS comprising a sequence selected from the group consisting of sequences AACTATAT and AACTATATT as disclosed in Table 3B. In some embodiments, the PEgRNA comprises an editing template comprising a sequence selected from the group consisting of SEQ Identifiers: C9530-C9532 of Table 3C. In some embodiments, the PEgRNA comprises an editing template comprising a sequence selected from the group consisting of SEQ ID NOs: 13556-13558 of Table 3C. In some embodiments, the prime editing composition further comprises a ngRNA that comprises a spacer comprising a sequence selected from the group consisting of SEQ Identifiers: D930-D944, D946-D952, and D1016 of Table 3D. In some embodiments, the prime editing composition further comprises a ngRNA that comprises a spacer comprising a sequence selected from the group consisting of SEQ ID NOs. 20563-20577, 20579-20585, and 20649 of Table 3D.

[0567] In some embodiments, the PEgRNA comprises a spacer comprising a sequence selected from the group consisting of SEQ Identifiers: A447-A450 of Table 3A. In some embodiments, the PEgRNA comprises a spacer comprising a sequence as set forth in SEQ ID NOs. 795-798 of Table 3A. In some embodiments, the PEgRNA comprises a PBS comprising a sequence selected from the group consisting of SEQ Identifiers: B1863-B1871 of Table 3B. In some embodiments, the PEgRNA comprises a PBS comprising a sequence selected from the group consisting of SEQ ID NOs. 2662-2668 of Table 3B. In some embodiments, the PEgRNA comprises a PBS comprising a sequence selected from the group consisting of sequences CAAGAACT and CAAGAACTA as disclosed in Table 3B. In some embodiments, the PEgRNA comprises an editing template comprising a sequence selected from the group consisting of SEQ Identifiers: C9533-C9546 of Table 3C. In some embodiments, the PEgRNA comprises an editing template comprising a sequence selected from the group consisting of SEQ ID NOs: 13559-13572 of Table 3C. In some embodiments, the prime editing composition further comprises a ngRNA that comprises a spacer comprising a sequence selected from the group consisting of SEQ Identifiers: D915-D928, and D1021-D1025 of Table 3D. In some embodiments, the prime editing composition further comprises a ngRNA that comprises a spacer comprising a sequence selected from the group consisting of SEQ ID NOs. 20558-20671, and 20654-20658 of Table 3D.

[0568] In some embodiments, the PEgRNA comprises a spacer comprising a sequence selected from the group consisting of SEQ Identifiers: A489-A490 of Table 3A. In some embodiments, the PEgRNA comprises a spacer comprising a sequence as set forth in SEQ ID NOs. 837-838 of Table 3A. In some embodiments, the PEgRNA comprises a PBS comprising a sequence selected from the group consisting of SEQ Identifiers: B1944-B1952 of Table 3B. In some embodiments, the PEgRNA comprises a PBS comprising a sequence selected from the group consisting of SEQ ID NOs. 2725-2731 of Table 3B. In some embodiments, the PEgRNA comprises a PBS comprising a sequence selected from the group consisting of sequences GTGATTCC and GTGATTCCA as disclosed in Table 3B. In some embodiments, the PEgRNA comprises an editing template comprising a sequence selected from the group consisting of SEQ Identifiers: C9547-C9592 of Table 3C. In some embodiments, the PEgRNA comprises an editing template comprising a sequence selected from the group consisting of SEQ ID NOs: 13573-13618 of Table 3C. In some embodiments, the prime editing composition further comprises a ngRNA that comprises a spacer comprising a sequence selected from the group consisting of SEQ Identifiers: D915-D928, D1056, and D1057 of Table 3D. In some embodiments, the prime editing composition further comprises a ngRNA that comprises a spacer comprising a sequence selected from the group consisting of SEQ ID NOs. 20558-20671, 20689, and 20690 of Table 3D.

[0569] In some embodiments, the PEgRNA comprises a spacer comprising the sequence of SEQ Identifier: A451 of Table 3A. In some embodiments, the PEgRNA comprises a spacer comprising a sequence as set forth in SEQ ID NO. 799 of Table 3A. In some embodiments, the PEgRNA comprises a PBS comprising a sequence selected from the group consisting of SEQ Identifiers: B1872-B1880 of Table 3B. In some embodiments, the PEgRNA comprises a PBS comprising a sequence selected from the group consisting of SEQ ID NOs. 2669-2675 of Table 3B. In some embodiments, the PEgRNA comprises a PBS comprising a sequence selected from the group consisting of sequences TGTGATTC and TGTGATTCC as disclosed in Table 3B. In some embodiments, the PEgRNA comprises an editing template comprising a sequence selected from the group consisting of SEQ Identifiers: C9593-C9616 of Table 3C. In some embodiments, the PEgRNA comprises an editing template comprising a sequence selected from the group consisting of SEQ ID NOs: 13619-13642 of Table 3C. In some embodiments, the prime editing composition further comprises a ngRNA that comprises a spacer comprising a sequence selected from the group consisting of SEQ Identifiers: D930-D944, D1016, and D1019 of Table 3D. In some embodiments, the prime editing composition further comprises a ngRNA that comprises a spacer comprising a sequence selected from the group consisting of SEQ ID NOs. 20563-20577, 20649, and 20652 of Table 3D.

[0570] In some embodiments, the PEgRNA comprises a spacer comprising a sequence selected from the group consisting of SEQ Identifiers: A456 and A470 of Table 3A. In some embodiments, the PEgRNA comprises a spacer comprising a sequence as set forth in SEQ ID NOs. 804 and 818 of Table 3A. In some embodiments, the PEgRNA comprises a PBS comprising a sequence selected from the group consisting of SEQ Identifiers: B1899-B1907 of Table 3B. In some embodiments, the PEgRNA comprises a PBS comprising a sequence selected from the group consisting of SEQ ID NOs. 2690-2696 of Table 3B. In some embodiments, the PEgRNA comprises a PBS comprising a sequence selected from the group consisting of sequences TGATTCCA and TGATTCCAC as disclosed in Table 3B. In some embodiments, the PEgRNA comprises an editing template comprising a sequence selected from the group consisting of SEQ Identifiers: C9617-C9638 of Table 3C. In some embodiments, the PEgRNA comprises an editing template comprising a sequence selected from the group consisting of SEQ ID NOs: 13643-13664 of Table 3C. In some embodiments, the prime editing composition further comprises a ngRNA that comprises a spacer comprising a sequence selected from the group consisting of SEQ Identifiers: D930-D952 D1016, D1019, and D1026 of Table 3D. In some embodiments, the prime editing composition further comprises a ngRNA that comprises a spacer comprising a sequence selected from the group consisting of SEQ ID NOs. 20563-20585, 20649, 20652, and 20659 of Table 3D.

[0571] In some embodiments, the PEgRNA comprises a spacer comprising a sequence selected from the group consisting of SEQ Identifiers: A506, A507, A513, and A514 of Table 3A. In some embodiments, the PEgRNA comprises a spacer comprising a sequence as set forth in SEQ ID NOs. 854-855 and 861-862 of Table 3A. In some embodiments, the PEgRNA comprises a PBS comprising a sequence selected from the group consisting of SEQ Identifiers: B1926-B1934 of Table 3B. In some embodiments, the PEgRNA comprises a PBS comprising a sequence selected from the group consisting of SEQ ID NOs. 2711-2717 of Table 3B. In some embodiments, the PEgRNA comprises a PBS comprising a sequence selected from the group consisting of sequences TCAGTGTG and TCAGTGTGA as disclosed in Table 3B. In some embodiments, the PEgRNA comprises an editing template comprising a sequence selected from the group consisting of SEQ Identifiers: C9639-C9694 of Table 3C. In some embodiments, the PEgRNA comprises an editing template comprising a sequence selected from the group consisting of SEQ ID NOs: 13665-13720 of Table 3C. In some embodiments, the prime editing composition further comprises a ngRNA that comprises a spacer comprising a sequence selected from the group consisting of SEQ Identifiers: D915-D928, D1021-D1025, D1056, and D1057 of Table 3D. In some embodiments, the prime editing composition further comprises a ngRNA that comprises a spacer comprising a sequence selected from the group consisting of SEQ ID NOs. 20558-20671, 20654-20658, 20689, and 20690 of Table 3D.

[0572] In some embodiments, the PEgRNA comprises a spacer comprising a sequence selected from the group consisting of SEQ Identifiers: A503-A504 of Table 3A. In some embodiments, the PEgRNA comprises a spacer comprising a sequence as set forth in SEQ ID NOs. 851-852 of Table 3A. In some embodiments, the PEgRNA comprises a PBS comprising a sequence selected from the group consisting of SEQ Identifiers: B1953-B1961 of Table 3B. In some embodiments, the PEgRNA comprises a PBS comprising a sequence selected from the group consisting of SEQ ID NOs. 2732-2738 of Table 3B. In some embodiments, the PEgRNA comprises a PBS comprising a sequence selected from the group consisting of sequences CTCAGTGT amd CTCAGTGTG as disclosed in Table 3B. In some embodiments, the PEgRNA comprises an editing template comprising a sequence selected from the group consisting of SEQ Identifiers: C9695-C9723 of Table 3C. In some embodiments, the PEgRNA comprises an editing template comprising a sequence selected from the group consisting of SEQ ID NOs: 13721-13749 of Table 3C. In some embodiments, the prime editing composition further comprises a ngRNA that comprises a spacer comprising a sequence selected from the group consisting of SEQ Identifiers: D930-D944, D1016-D1019, D1096, and D1101 of Table 3D. In some embodiments, the prime editing composition further comprises a ngRNA that comprises a spacer comprising a sequence selected from the group consisting of SEQ ID NOs. 20563-20577, 20649-20652, 20729, and 20734 of Table 3D.

[0573] In some embodiments, the PEgRNA comprises a spacer comprising the sequence of SEQ Identifier: A505 of Table 3A. In some embodiments, the PEgRNA comprises a spacer comprising a sequence as set forth in SEQ ID NO. 853 of Table 3A. In some embodiments, the PEgRNA comprises a PBS comprising a sequence selected from the group consisting of SEQ Identifiers: B1962-B1970 of Table 3B. In some embodiments, the PEgRNA comprises a PBS comprising a sequence selected from the group consisting of SEQ ID NOs. 2739-2745 of Table 3B. In some embodiments, the PEgRNA comprises a PBS comprising a sequence selected from the group consisting of sequences ACTCAGTG and ACTCAGTGT as disclosed in Table 3B. In some embodiments, the PEgRNA comprises an editing template comprising a sequence selected from the group consisting of SEQ Identifiers: C9724-C9753 of Table 3C. In some embodiments, the PEgRNA comprises an editing template comprising a sequence selected from the group consisting of SEQ ID NOs: 13750-13779 of Table 3C. In some embodiments, the prime editing composition further comprises a ngRNA that comprises a spacer comprising a sequence selected from the group consisting of SEQ Identifiers: D930-D944, D1016, D1019, D1096, D1101, and D1102 of Table 3D. In some embodiments, the prime editing composition further comprises a ngRNA that comprises a spacer comprising a sequence selected from the group consisting of SEQ ID NOs. 20563-20577, 20649, 20652, 20729, 20734, 20735, and 20736 of Table 3D.

[0574] In some embodiments, the PEgRNA comprises a spacer comprising a sequence selected from the group consisting of SEQ Identifiers: A515-A516 of Table 3A. In some embodiments, the PEgRNA comprises a spacer comprising a sequence as set forth in SEQ ID NOs. 863-864 of Table 3A. In some embodiments, the PEgRNA comprises a PBS comprising a sequence selected from the group consisting of SEQ Identifiers: B1656-B1664 of Table 3B. In some embodiments, the PEgRNA comprises a PBS comprising a sequence selected from the group consisting of SEQ ID NOs. 3173-3179 of Table 3B. In some embodiments, the PEgRNA comprises a PBS comprising a sequence selected from the group consisting of sequences AGCAAGAA and AGCAAGAAT as disclosed in Table 3B. In some embodiments, the PEgRNA comprises an editing template comprising a sequence selected from the group consisting of SEQ Identifiers: C9754-C9784 of Table 3C. In some embodiments, the PEgRNA comprises an editing template comprising a sequence selected from the group consisting of SEQ ID NOs: 13780-13810 of Table 3C. In some embodiments, the prime editing composition further comprises a ngRNA that comprises a spacer comprising a sequence selected from the group consisting of SEQ Identifiers: D959-D981, D1002, D1033, D1034, D1035, D1040, D1041, D1106, D1107, and D1108 of Table 3D. In some embodiments, the prime editing composition further comprises a ngRNA that comprises a spacer comprising a sequence selected from the group consisting of SEQ ID NOs. 20592-20614, 20635, 20666, 20667, 20668, 20673, 20674, 20739, 20740, and 20741 of Table 3D.

[0575] In some embodiments, the PEgRNA comprises a spacer comprising a sequence selected from the group consisting of SEQ Identifiers: A452-A453 of Table 3A. In some embodiments, the PEgRNA comprises a spacer comprising a sequence as set forth in SEQ ID NOs. 800-801 of Table 3A. In some embodiments, the PEgRNA comprises a PBS comprising a sequence selected from the group consisting of SEQ Identifiers: B1881-B1889 of Table 3B. In some embodiments, the PEgRNA comprises a PBS comprising a sequence selected from the group consisting of SEQ ID NOs. 2676-2682 of Table 3B. In some embodiments, the PEgRNA comprises a PBS comprising a sequence selected from the group consisting of sequences GCAAGGTG and GCAAGGTGA as disclosed in Table 3B. In some embodiments, the PEgRNA comprises an editing template comprising a sequence selected from the group consisting of SEQ Identifiers: C9785-C9806 of Table 3C. In some embodiments, the PEgRNA comprises an editing template comprising a sequence selected from the group consisting of SEQ ID NOs: 13811-13832 of Table 3C. In some embodiments, the prime editing composition further comprises a ngRNA that comprises a spacer comprising a sequence selected from the group consisting of SEQ Identifiers: D959-D981, D1002, D1033-D1037, D1040, D1041, D1055, and D1073 of Table 3D. In some embodiments, the prime editing composition further comprises a ngRNA that comprises a spacer comprising a sequence selected from the group consisting of SEQ ID NOs. 20592-20614, 20635, 20666-20670, 20673, 20674, 20688, and 20706 of Table 3D.

[0576] In some embodiments, the PEgRNA comprises a spacer comprising a sequence selected from the group consisting of SEQ Identifiers: A454-A455 of Table 3A. In some embodiments, the PEgRNA comprises a spacer comprising a sequence as set forth in SEQ ID NOs. 802-803 of Table 3A. In some embodiments, the PEgRNA comprises a PBS comprising a sequence selected from the group consisting of SEQ Identifiers: B1890-B1898 of Table 3B. In some embodiments, the PEgRNA comprises a PBS comprising a sequence selected from the group consisting of SEQ ID NOs. 2682-2689 of Table 3B. In some embodiments, the PEgRNA comprises a PBS comprising a sequence selected from the group consisting of sequences TTCTCCAA and TTCTCCAAG as disclosed in Table 3B. In some embodiments, the PEgRNA comprises an editing template comprising a sequence selected from the group consisting of SEQ Identifiers: C9807-C9818 of Table 3C. In some embodiments, the PEgRNA comprises an editing template comprising a sequence selected from the group consisting of SEQ ID NOs: 13833-13844 of Table 3C. In some embodiments, the prime editing composition further comprises a ngRNA that comprises a spacer comprising a sequence selected from the group consisting of SEQ Identifiers: D930-D944, D946-D952, D1016, D1019, and D1026 of Table 3D. In some embodiments, the prime editing composition further comprises a ngRNA that comprises a spacer comprising a sequence selected from the group consisting of SEQ ID NOs. 20563-20577, 20579-20585, 20649, 20652, and 20659 of Table 3D.

[0577] In some embodiments, the PEgRNA comprises a spacer comprising a sequence selected from the group consisting of SEQ Identifiers: A517-A518 of Table 3A. In some embodiments, the PEgRNA comprises a spacer comprising a sequence as set forth in SEQ ID NOs. 865-866 of Table 3A. In some embodiments, the PEgRNA comprises a PBS comprising a sequence selected from the group consisting of SEQ Identifiers: B1998-B2006 of Table 3B. In some embodiments, the PEgRNA comprises a PBS comprising a sequence selected from the group consisting of SEQ ID NOs. 2767-2773 of Table 3B. In some embodiments, the PEgRNA comprises a PBS comprising a sequence selected from the group consisting of sequences ATTGGTCT and ATTGGTCTA as disclosed in Table 3B. In some embodiments, the PEgRNA comprises an editing template comprising a sequence selected from the group consisting of SEQ Identifiers: C9819-C9824 of Table 3C. In some embodiments, the PEgRNA comprises an editing template comprising a sequence selected from the group consisting of SEQ ID NOs: 13845-13850 of Table 3C. In some embodiments, the prime editing composition further comprises a ngRNA that comprises a spacer comprising a sequence selected from the group consisting of SEQ Identifiers: D990-D992, D1000, D1001, and D1109-D1112 of Table 3D. In some embodiments, the prime editing composition further comprises a ngRNA that comprises a spacer comprising a sequence selected from the group consisting of SEQ ID NOs. 20623-20625, 20633, 20634, 20642-20645 of Table 3D.

[0578] In some embodiments, the PEgRNA comprises a spacer comprising the sequence of SEQ Identifier: A519 of Table 3A. In some embodiments, the PEgRNA comprises a spacer comprising a sequence as set forth in SEQ ID NO. 867 of Table 3A. In some embodiments, the PEgRNA comprises a PBS comprising a sequence selected from the group consisting of SEQ Identifiers: B2007-B2015 of Table 3B. In some embodiments, the PEgRNA comprises a PBS comprising a sequence selected from the group consisting of SEQ ID NOs. 2774-2780 of Table 3B. In some embodiments, the PEgRNA comprises a PBS comprising a sequence selected from the group consisting of sequences TATTGGTC and TATTGGTCT as disclosed in Table 3B. In some embodiments, the PEgRNA comprises an editing template comprising a sequence selected from the group consisting of SEQ Identifiers: C9825-C9828 of Table 3C. In some embodiments, the PEgRNA comprises an editing template comprising a sequence selected from the group consisting of SEQ ID NOs: 13851-13854 of Table 3C. In some embodiments, the prime editing composition further comprises a ngRNA that comprises a spacer comprising a sequence selected from the group consisting of SEQ Identifiers: D973-D981, D1002, D1033-D1037, D1055, D1073, D1104, and D1105 of Table 3D. In some embodiments, the prime editing composition further comprises a ngRNA that comprises a spacer comprising a sequence selected from the group consisting of SEQ ID NOs. 20606-20614, 20635, 20666-20670, 20688, 20706, 20737, and 20738 of Table 3D.

[0579] In some embodiments, the PEgRNA comprises a spacer comprising a sequence selected from the group consisting of SEQ Identifiers: A457-A458 of Table 3A. In some embodiments, the PEgRNA comprises a spacer comprising a sequence as set forth in SEQ ID NOs. 805-806 of Table 3A. In some embodiments, the PEgRNA comprises a PBS comprising a sequence selected from the group consisting of SEQ Identifiers: B1908-B1916 of Table 3B. In some embodiments, the PEgRNA comprises a PBS comprising a sequence selected from the group consisting of SEQ ID NOs. 2697-2703 of Table 3B. In some embodiments, the PEgRNA comprises a PBS comprising a sequence selected from the group consisting of sequences CAAGGTGA and CAAGGTGAA as disclosed in Table 3B. In some embodiments, the PEgRNA comprises an editing template comprising a sequence selected from the group consisting of SEQ Identifiers: C9829-C9870 of Table 3C. In some embodiments, the PEgRNA comprises an editing template comprising a sequence selected from the group consisting of SEQ ID NOs: 13855-13896 of Table 3C. In some embodiments, the prime editing composition further comprises a ngRNA that comprises a spacer comprising a sequence selected from the group consisting of SEQ Identifiers: D990-D992 and D999-D1001 of Table 3D. In some embodiments, the prime editing composition further comprises a ngRNA that comprises a spacer comprising a sequence selected from the group consisting of SEQ ID NOs. 20623-20625, and 20632-20634 of Table 3D.

[0580] In some embodiments, the PEgRNA comprises a spacer comprising a sequence selected from the group consisting of SEQ Identifiers: A478-A480 of Table 3A. In some embodiments, the PEgRNA comprises a spacer comprising a sequence as set forth in SEQ ID NOs. 826-828 of Table 3A. In some embodiments, the PEgRNA comprises a PBS comprising a sequence selected from the group consisting of SEQ Identifiers: B1935-B1943 of Table 3B. In some embodiments, the PEgRNA comprises a PBS comprising a sequence selected from the group consisting of SEQ ID NOs. 2718-2724 of Table 3B. In some embodiments, the PEgRNA comprises a PBS comprising a sequence selected from the group consisting of sequences GATTCCAC and GATTCCACC as disclosed in Table 3B. In some embodiments, the PEgRNA comprises an editing template comprising a sequence selected from the group consisting of SEQ Identifiers: C9871-C9891 of Table 3C. In some embodiments, the PEgRNA comprises an editing template comprising a sequence selected from the group consisting of SEQ ID NOs: 13897-13917 of Table 3C. In some embodiments, the prime editing composition further comprises a ngRNA that comprises a spacer comprising a sequence selected from the group consisting of SEQ Identifiers: D925, and D1028-D1032 of Table 3D. In some embodiments, the prime editing composition further comprises a ngRNA that comprises a spacer comprising a sequence selected from the group consisting of SEQ ID NOs. 20558, and 20661-20665 of Table 3D.

[0581] In some embodiments, the editing target sequence or the complementary sequence on the CFTR gene thereof comprises a mutation that encodes an amino acid substitution R560T, S557T, A559P, and/or A559E relative to a wild type CFTR polypeptide set forth in SEQ ID NO: 19, and wherein the editing template encodes an intended nucleotide edit that corrects the mutation. In some embodiments, the editing target sequence or the complementary sequence on the CFTR gene thereof comprises a G→→C mutation (c.1679G>C) at position 117,587,833, a T→→A mutation (c.1669T>A) at position 117,587,823, a deletion of C (c.1670delC) at position 117,587,824, a deletion of A (c.1674delA) at position 117,587,828, a G→→C mutation (c.1675G>C) at position 117,587,829, and/or a C→→A mutation (c.1676C>A) at position 117,587,830 of human chromosome 7 compared to a wild type CFTR gene. In some embodiments, the editing template comprises an intended nucleotide edit compared to the target CFTR gene, wherein incorporation of the intended nucleotide edit encoded by the editing template corrects the mutation. In some embodiments, the editing template comprises a wild type CFTR gene sequence. Accordingly, in some embodiments, the newly synthesized single stranded DNA encoded by the editing template is capable of correcting the c.1679G>C mutation, the c.1669T>A mutation, the c.1670delC mutation, the c.1674delA mutation, the c.1675G>C mutation, and/or the c.1676C>A mutation, in the target CFTR gene. In some embodiments, the newly synthesized single stranded DNA encoded by the editing template is capable of correcting all of the c.1679G>C mutation, the c.1669T>A mutation, the c.1670delC mutation, the c.1674delA mutation, the c.1675G>C mutation, and the c.1676C>A mutation in the target CFTR gene. In some embodiments, two or more of the c.1679G>C mutation, the c.1669T>A mutation, the c.1670delC mutation, the c.1674delA mutation, the c.1675G>C mutation, and the c.1676C>A mutation, are located on the same CFTR gene. In some embodiments, the newly synthesized single stranded DNA encoded by the editing template is capable of correcting the c.1679G>C mutation, the c.1669T>A mutation, the c.1670delC mutation, the c.1674delA mutation, the c.1675G>C mutation, and the c.1676C>A mutation that are located on different CFTR genes. For example, in some embodiments, a subject may comprise two copies of CFTR genes, each comprising a different mutation selected from the group consisting of the c.1679G>C mutation, the c.1669T>A mutation, the c.1670delC mutation, the c.1674delA mutation, the c.1675G>C mutation, and the c.1676C>A mutation the c.1679+5A>G mutation, all of which may be corrected by an editing template of a single PEgRNA. In some embodiments, the editing template is capable of correcting one or more, or all of the c.1679G>C mutation, the c.1669T>A mutation, the c.1670delC mutation, the c.1674delA mutation, the c.1675G>C mutation, the c.1676C>A mutation, the c.1679+1G>T mutation that are in different subjects, wherein each subject may have one or more of the mutations.

[0582] In some embodiments, the PEgRNA comprises a spacer comprising a sequence selected from the group consisting of SEQ Identifiers: A520-A521 of Table 3A. In some embodiments, the PEgRNA comprises a spacer comprising a sequence as set forth in SEQ ID NOs. 868-869 of Table 3A. In some embodiments, the PEgRNA comprises a PBS comprising a sequence selected from the group consisting of SEQ Identifiers: B2016-B2024 of Table 3B. In some embodiments, the PEgRNA comprises a PBS comprising a sequence selected from the group consisting of SEQ ID NOs. 2781-2787 of Table 3B. In some embodiments, the PEgRNA comprises a PBS comprising a sequence selected from the group consisting of sequences TGCTAAAG and TGCTAAAGA as disclosed in Table 3B. In some embodiments, the PEgRNA comprises an editing template comprising a sequence selected from the group consisting of SEQ Identifiers: C9892-C9922 of Table 3C. In some embodiments, the PEgRNA comprises an editing template comprising a sequence selected from the group consisting of SEQ ID NOs: 13918-13948 of Table 3C. In some embodiments, the prime editing composition further comprises a ngRNA that comprises a spacer comprising a sequence selected from the group consisting of SEQ Identifiers: D936-D952, D1016, D1019, D1026, and D1113-D1122 of Table 3D. In some embodiments, the prime editing composition further comprises a ngRNA that comprises a spacer comprising a sequence selected from the group consisting of SEQ ID NOs. 20569-20585, 20649, 20652, 20659, and 20746-20755 of Table 3D.

[0583] In some embodiments, the PEgRNA comprises a spacer comprising a sequence selected from the group consisting of SEQ Identifiers: A481-A482 of Table 3A. In some embodiments, the PEgRNA comprises a spacer comprising a sequence as set forth in SEQ ID NOs. 829-830 of Table 3A. In some embodiments, the PEgRNA comprises a PBS comprising a sequence selected from the group consisting of SEQ Identifiers: B1764-B1772 of Table 3B. In some embodiments, the PEgRNA comprises a PBS comprising a sequence selected from the group consisting of SEQ ID NOs. 2585-2591 of Table 3B. In some embodiments, the PEgRNA comprises a PBS comprising a sequence selected from the group consisting of sequences AGTGTGAT and AGTGTGATT as disclosed in Table 3B. In some embodiments, the PEgRNA comprises an editing template comprising a sequence selected from the group consisting of SEQ Identifiers: C9923-C9926 of Table 3C. In some embodiments, the PEgRNA comprises an editing template comprising a sequence selected from the group consisting of SEQ ID NOs: 13949-13952 of Table 3C. In some embodiments, the prime editing composition further comprises a ngRNA that comprises a spacer comprising a sequence selected from the group consisting of SEQ Identifiers: D933-D944, D1016, D1018, D1019, and D1116 of Table 3D. In some embodiments, the prime editing composition further comprises a ngRNA that comprises a spacer comprising a sequence selected from the group consisting of SEQ ID NOs. 20566-20577, 20649, 20651, 20652, and 20749 of Table 3D.

[0584] In some embodiments, the PEgRNA comprises a spacer comprising a sequence selected from the group consisting of SEQ Identifiers: A522-A523 of Table 3A. In some embodiments, the PEgRNA comprises a spacer comprising a sequence as set forth in SEQ ID NOs. 870-871 of Table 3A. In some embodiments, the PEgRNA comprises a PBS comprising a sequence selected from the group consisting of SEQ Identifiers: B1971-B1979 of Table 3B. In some embodiments, the PEgRNA comprises a PBS comprising a sequence selected from the group consisting of SEQ ID NOs. 2746-2752 of Table 3B. In some embodiments, the PEgRNA comprises a PBS comprising a sequence selected from the group consisting of sequences GACCTCCA and GACCTCCAC as disclosed in Table 3B. In some embodiments, the PEgRNA comprises an editing template comprising a sequence selected from the group consisting of SEQ Identifiers: C9927-C9956 of Table 3C. In some embodiments, the PEgRNA comprises an editing template comprising a sequence selected from the group consisting of SEQ ID NOs: 13953-13982 of Table 3C. In some embodiments, the prime editing composition further comprises a ngRNA that comprises a spacer comprising a sequence selected from the group consisting of SEQ Identifiers: D916-D928, D1056, D1057, D1097, D1099, D1123, and D1124 of Table 3D. In some embodiments, the prime editing composition further comprises a ngRNA that comprises a spacer comprising a sequence selected from the group consisting of SEQ ID NOs. 20549-20561, 20689, 20690, 20730, 20732, 20756, and 20757 of Table 3D.

[0585] In some embodiments, the PEgRNA comprises a spacer comprising the sequence of SEQ Identifier: A524 of Table 3A. In some embodiments, the PEgRNA comprises a spacer comprising a sequence as set forth in SEQ ID NO. 872 of Table 3A. In some embodiments, the PEgRNA comprises a PBS comprising a sequence selected from the group consisting of SEQ Identifiers: B1980-B1988 of Table 3B. In some embodiments, the PEgRNA comprises a PBS comprising a sequence selected from the group consisting of SEQ ID NOs. 2753-2759 of Table 3B. In some embodiments, the PEgRNA comprises a PBS comprising a sequence selected from the group consisting of sequences TGACCTCC and TGACCTCCA as disclosed in Table 3B. In some embodiments, the PEgRNA comprises an editing template comprising a sequence selected from the group consisting of SEQ Identifiers: C9957-C9972 of Table 3C. In some embodiments, the PEgRNA comprises an editing template comprising a sequence selected from the group consisting of SEQ ID NOs: 13983-13998 of Table 3C. In some embodiments, the prime editing composition further comprises a ngRNA that comprises a spacer comprising a sequence selected from the group consisting of SEQ Identifiers: D933-D944, D1016, D1019, D1116, D1117, and D1118 of Table 3D. In some embodiments, the prime editing composition further comprises a ngRNA that comprises a spacer comprising a sequence selected from the group consisting of SEQ ID NOs. 20566-20577, 20649, 20652, 20749, 20750, and 20751 of Table 3D.

[0586] In some embodiments, the PEgRNA comprises a spacer comprising a sequence selected from the group consisting of SEQ Identifier: A465-A467 of Table 3A. In some embodiments, the PEgRNA comprises a spacer comprising a sequence as set forth in SEQ ID NOs. 813-814 of Table 3A. In some embodiments, the PEgRNA comprises a PBS comprising a sequence selected from the group consisting of SEQ Identifiers: B1800-B1808 of Table 3B. In some embodiments, the PEgRNA comprises a PBS comprising a sequence selected from the group consisting of SEQ ID NOs. 2613-2619 of Table 3B. In some embodiments, the PEgRNA comprises a PBS comprising a sequence selected from the group consisting of sequences GTGTGATT and GTGTGATTC as disclosed in Table 3B. In some embodiments, the PEgRNA comprises an editing template comprising a sequence selected from the group consisting of SEQ Identifiers: C9973-C9975 of Table 3C. In some embodiments, the PEgRNA comprises an editing template comprising a sequence selected from the group consisting of SEQ ID NOs: 13999-14001 of Table 3C. In some embodiments, the prime editing composition further comprises a ngRNA that comprises a spacer comprising a sequence selected from the group consisting of SEQ Identifiers: D1021, D1023, and D1025 of Table 3D. In some embodiments, the prime editing composition further comprises a ngRNA that comprises a spacer comprising a sequence selected from the group consisting of SEQ ID NOs. 20654. 20656, and 20658 of Table 3D.

[0587] In some embodiments, the PEgRNA comprises a spacer comprising the sequence of SEQ Identifier: A525 of Table 3A. In some embodiments, the PEgRNA comprises a spacer comprising a sequence as set forth in SEQ ID NO. 873 of Table 3A. In some embodiments, the PEgRNA comprises a PBS comprising a sequence selected from the group consisting of SEQ Identifiers: B2025-B2033 of Table 3B. In some embodiments, the PEgRNA comprises a PBS comprising a sequence selected from the group consisting of SEQ ID NOs. 2788-2794 of Table 3B. In some embodiments, the PEgRNA comprises a PBS comprising a sequence selected from the group consisting of sequences CTAAAGAA and CTAAAGAAA as disclosed in Table 3B. In some embodiments, the PEgRNA comprises an editing template comprising a sequence selected from the group consisting of SEQ Identifiers: C9976-C10006 of Table 3C. In some embodiments, the PEgRNA comprises an editing template comprising a sequence selected from the group consisting of SEQ ID NOs: 14002-14032 of Table 3C. In some embodiments, the prime editing composition further comprises a ngRNA that comprises a spacer comprising a sequence selected from the group consisting of SEQ Identifiers: D930-D944, D1016, D1019, and D1116-D1122 of Table 3D. In some embodiments, the prime editing composition further comprises a ngRNA that comprises a spacer comprising a sequence selected from the group consisting of SEQ ID NOs. 20563-20577, 20649, 20652, and 20749-20755 of Table 3D.

[0588] In some embodiments, the PEgRNA comprises a spacer comprising a sequence selected from the group consisting of SEQ Identifiers: A501-A502. of Table 3A. In some embodiments, the PEgRNA comprises a spacer comprising a sequence as set forth in SEQ ID NOs. 849-850 of Table 3A. In some embodiments, the PEgRNA comprises a PBS comprising a sequence selected from the group consisting of SEQ Identifiers: B1818-B1826 of Table 3B. In some embodiments, the PEgRNA comprises a PBS comprising a sequence selected from the group consisting of SEQ ID NOs. 2627-2633 of Table 3B. In some embodiments, the PEgRNA comprises a PBS comprising a sequence selected from the group consisting of sequences CAGTGTGA and CAGTGTGAT as disclosed in Table 3B. In some embodiments, the PEgRNA comprises an editing template comprising a sequence selected from the group consisting of SEQ Identifiers: C10007-C10011 of Table 3C. In some embodiments, the PEgRNA comprises an editing template comprising a sequence selected from the group consisting of SEQ ID NOs: 14033-14037 of Table 3C. In some embodiments, the prime editing composition further comprises a ngRNA that comprises a spacer comprising a sequence selected from the group consisting of SEQ Identifiers: D933-D944, D947-D952, D1016, D1019, D1026, D1113, and D1116 of Table 3D. In some embodiments, the prime editing composition further comprises a ngRNA that comprises a spacer comprising a sequence selected from the group consisting of SEQ ID NOs. 20566-20577, 20580-20585, 20649, 20652, 20659, 20746 and 20749 of Table 3D.

[0589] In some embodiments, the PEgRNA comprises a spacer comprising a sequence selected from the group consisting of SEQ Identifiers: A526-A527 of Table 3A. In some embodiments, the PEgRNA comprises a spacer comprising a sequence as set forth in SEQ ID NOs. 874-875 of Table 3A. In some embodiments, the PEgRNA comprises a PBS comprising a sequence selected from the group consisting of SEQ Identifiers: B2034-B2042 of Table 3B. In some embodiments, the PEgRNA comprises a PBS comprising a sequence selected from the group consisting of SEQ ID NOs. 2795-2801 of Table 3B. In some embodiments, the PEgRNA comprises a PBS comprising a sequence selected from the group consisting of sequences AGCATTTG and AGCATTTGC as disclosed in Table 3B. In some embodiments, the PEgRNA comprises an editing template comprising a sequence selected from the group consisting of SEQ Identifiers: C10012-C10037 of Table 3C. In some embodiments, the PEgRNA comprises an editing template comprising a sequence selected from the group consisting of SEQ ID NOs: 14038-14063 of Table 3C. In some embodiments, the prime editing composition further comprises a ngRNA that comprises a spacer comprising a sequence selected from the group consisting of SEQ Identifiers: D992, D1001, and D1125-D1128 of Table 3D. In some embodiments, the prime editing composition further comprises a ngRNA that comprises a spacer comprising a sequence selected from the group consisting of SEQ ID NOs. 20625, 20634, and 20658-20661 of Table 3D.

[0590] In some embodiments, the PEgRNA comprises a spacer comprising a sequence selected from the group consisting of SEQ Identifiers: A528-A529 of Table 3A. In some embodiments, the PEgRNA comprises a spacer comprising a sequence as set forth in SEQ ID NOs. 876-877 of Table 3A. In some embodiments, the PEgRNA comprises a PBS comprising a sequence selected from the group consisting of SEQ Identifiers: B2043-B2051 of Table 3B. In some embodiments, the PEgRNA comprises a PBS comprising a sequence selected from the group consisting of SEQ ID NOs. 2802-2808 of Table 3B. In some embodiments, the PEgRNA comprises a PBS comprising a sequence selected from the group consisting of sequences AAATTCTT and AAATTCTTG as disclosed in Table 3B. In some embodiments, the PEgRNA comprises an editing template comprising a sequence selected from the group consisting of SEQ Identifiers: C10038-C10097 of Table 3C. In some embodiments, the PEgRNA comprises an editing template comprising a sequence selected from the group consisting of SEQ ID NOs: 14064-14123 of Table 3C. In some embodiments, the prime editing composition further comprises a ngRNA that comprises a spacer comprising a sequence selected from the group consisting of SEQ Identifiers: D916-D928, D1056, D1057, D1123, and D1124 of Table 3D. In some embodiments, the prime editing composition further comprises a ngRNA that comprises a spacer comprising a sequence selected from the group consisting of SEQ ID NOs. 20549-20561, 20689, 20690, 20756, and 20757 of Table 3D.

[0591] In some embodiments, the PEgRNA comprises a spacer comprising the of SEQ Identifier: A530 of Table 3A. In some embodiments, the PEgRNA comprises a spacer comprising a sequence as set forth in SEQ ID NO. 878 of Table 3A. In some embodiments, the PEgRNA comprises a PBS comprising a sequence selected from the group consisting of SEQ Identifiers: B2052-B2060 of Table 3B. In some embodiments, the PEgRNA comprises a PBS comprising a sequence selected from the group consisting of SEQ ID NOs. 2809-2815 of Table 3B. In some embodiments, the PEgRNA comprises a PBS comprising a sequence selected from the group consisting of sequences GAAATTCT and GAAATTCTT as disclosed in Table 3B. In some embodiments, the PEgRNA comprises an editing template comprising a sequence selected from the group consisting of SEQ Identifiers: C10098-C10128 of Table 3C. In some embodiments, the PEgRNA comprises an editing template comprising a sequence selected from the group consisting of SEQ ID NOs: 14124-14154 of Table 3C. In some embodiments, the prime editing composition further comprises a ngRNA that comprises a spacer comprising a sequence selected from the group consisting of SEQ Identifiers: D935-D944, and D1016, D1019, D1116-D1121 of Table 3D. In some embodiments, the prime editing composition further comprises a ngRNA that comprises a spacer comprising a sequence selected from the group consisting of SEQ ID NOs. 20568-20577, 20649, 20652, and 20749-20754, of Table 3D.

[0592] In some embodiments, the PEgRNA comprises a spacer comprising the sequence of SEQ Identifier: A531 of Table 3A. In some embodiments, the PEgRNA comprises a spacer comprising a sequence as set forth in SEQ ID NO. 879 of Table 3A. In some embodiments, the PEgRNA comprises a PBS comprising a sequence selected from the group consisting of SEQ Identifiers: B1836-B1844 of Table 3B. In some embodiments, the PEgRNA comprises a PBS comprising a sequence selected from the group consisting of SEQ ID NOs. 2641-2647 of Table 3B. In some embodiments, the PEgRNA comprises a PBS comprising a sequence selected from the group consisting of sequences TGAATAAC and TGAATAACT as disclosed in Table 3B. In some embodiments, the PEgRNA comprises an editing template comprising a sequence selected from the group consisting of SEQ Identifiers: C10129-C10159 of Table 3C. In some embodiments, the PEgRNA comprises an editing template comprising a sequence selected from the group consisting of SEQ ID NOs: 14155-14185 of Table 3C. In some embodiments, the prime editing composition further comprises a ngRNA that comprises a spacer comprising a sequence selected from the group consisting of SEQ Identifiers: D974-D981, D1002, D1033, D1034, D1035, D1036, D1037, D1055, D1073, D1104, D1105, D1129, and D1130 of Table 3D. In some embodiments, the prime editing composition further comprises a ngRNA that comprises a spacer comprising a sequence selected from the group consisting of SEQ ID NOs. 20607-20614, 20635, 20666, 20667, 20668, 20669, 20670, 20688, 20706, 20737, 20738, 20762, and 20763 of Table 3D.

[0593] In some embodiments, the PEgRNA comprises a spacer comprising a sequence selected from the group consisting of SEQ Identifiers: A511-A512 of Table 3A. In some embodiments, the PEgRNA comprises a spacer comprising a sequence as set forth in SEQ ID NO. 859 of Table 3A. In some embodiments, the PEgRNA comprises a PBS comprising a sequence selected from the group consisting of SEQ Identifiers: B1989-B1997 of Table 3B. In some embodiments, the PEgRNA comprises a PBS comprising a sequence selected from the group consisting of SEQ ID NOs. 2760-2766 of Table 3B. In some embodiments, the PEgRNA comprises a PBS comprising a sequence selected from the group consisting of sequences ACCTCCAC and ACCTCCACT as disclosed in Table 3B. In some embodiments, the PEgRNA comprises an editing template comprising a sequence selected from the group consisting of SEQ Identifiers: C10160-C10173 of Table 3C. In some embodiments, the PEgRNA comprises an editing template comprising a sequence selected from the group consisting of SEQ ID NOs: 14186-14199 of Table 3C. In some embodiments, the prime editing composition further comprises a ngRNA that comprises a spacer comprising a sequence selected from the group consisting of SEQ Identifiers: D933-D944, D947-D952, D1016, D1019, D1026, D1113, D1116, D1117, and D1118 of Table 3D. In some embodiments, the prime editing composition further comprises a ngRNA that comprises a spacer comprising a sequence selected from the group consisting of SEQ ID NOs. 20566-20577, 20580-20585, 20649, 20652, 20659, 20746, 20749, 20750, and 20751 of Table 3D.

[0594] In some embodiments, the PEgRNA comprises a spacer comprising the sequence of SEQ Identifier: A532 of Table 3A. In some embodiments, the PEgRNA comprises a spacer comprising a sequence as set forth in SEQ ID NO. 880 of Table 3A. In some embodiments, the PEgRNA comprises a PBS comprising a sequence selected from the group consisting of SEQ Identifiers: B2061-B2069 of Table 3B. In some embodiments, the PEgRNA comprises a PBS comprising a sequence selected from the group consisting of SEQ ID NOs. 2816-2822 of Table 3B. In some embodiments, the PEgRNA comprises a PBS comprising a sequence selected from the group consisting of sequences ATAACTAA and ATAACTAAT as disclosed in Table 3B. In some embodiments, the PEgRNA comprises an editing template comprising a sequence selected from the group consisting of SEQ Identifiers: C10174-C10204 of Table 3C. In some embodiments, the PEgRNA comprises an editing template comprising a sequence selected from the group consisting of SEQ ID NOs: 14200-14230 of Table 3C. In some embodiments, the prime editing composition further comprises a ngRNA that comprises a spacer comprising a sequence selected from the group consisting of SEQ Identifiers: D974-D981, D1002, D1033-D1037 D1055, D1073, D1104, D1105, D1129, and D1130 of Table 3D. In some embodiments, the prime editing composition further comprises a ngRNA that comprises a spacer comprising a sequence selected from the group consisting of SEQ ID NOs. 20607-20614, 20635, 20666-20670, 20688, 20706, 20737, 20738, 20762, and 20763 of Table 3D.

[0595] In some embodiments, the PEgRNA comprises a spacer comprising a sequence selected from the group consisting of SEQ Identifiers: A489-A490 of Table 3A. In some embodiments, the PEgRNA comprises a spacer comprising a sequence as set forth in SEQ ID NOs. 837-838 of Table 3A. In some embodiments, the PEgRNA comprises a PBS comprising a sequence selected from the group consisting of SEQ Identifiers: B1944-B1952 of Table 3B. In some embodiments, the PEgRNA comprises a PBS comprising a sequence selected from the group consisting of SEQ ID NOs. 2725-2731 of Table 3B. In some embodiments, the PEgRNA comprises a PBS comprising a sequence selected from the group consisting of sequences GTGATTCC and GTGATTCCA as disclosed in Table 3B. In some embodiments, the PEgRNA comprises an editing template comprising a sequence selected from the group consisting of SEQ Identifiers: C10205-C10206 of Table 3C. In some embodiments, the PEgRNA comprises an editing template comprising a sequence selected from the group consisting of SEQ ID NOs: 14231-14232 of Table 3C. In some embodiments, the prime editing composition further comprises a ngRNA that comprises a spacer comprising a sequence selected from the group consisting of SEQ Identifiers: D916-D928 D1056, and D1057 of Table 3D. In some embodiments, the prime editing composition further comprises a ngRNA that comprises a spacer comprising a sequence selected from the group consisting of SEQ ID NOs. 20549-20561, 20689, and 20690 of Table 3D.

[0596] In some embodiments, the PEgRNA comprises a spacer comprising the sequence of SEQ Identifier: A451 of Table 3A. In some embodiments, the PEgRNA comprises a spacer comprising a sequence as set forth in SEQ ID NO. 799 of Table 3A. In some embodiments, the PEgRNA comprises a PBS comprising a sequence selected from the group consisting of SEQ Identifiers: B1872-B1880 of Table 3B. In some embodiments, the PEgRNA comprises a PBS comprising a sequence selected from the group consisting of SEQ ID NOs. 2669-2675 of Table 3B. In some embodiments, the PEgRNA comprises a PBS comprising a sequence selected from the group consisting of sequences TGTGATTC and TGTGATTCC as disclosed in Table 3B. In some embodiments, the PEgRNA comprises an editing template comprising a sequence selected from the group consisting of SEQ Identifiers: C10207-C10208 of Table 3C. In some embodiments, the PEgRNA comprises an editing template comprising a sequence selected from the group consisting of SEQ ID NOs: 14233-14234 of Table 3C. In some embodiments, the prime editing composition further comprises a ngRNA that comprises a spacer comprising a sequence selected from the group consisting of SEQ Identifiers: 20566-20577, 20649, and 20652 of Table 3D. In some embodiments, the prime editing composition further comprises a ngRNA that comprises a spacer comprising a sequence selected from the group consisting of SEQ ID NOs. 20566-20577, 20649, and 20652 of Table 3D.

[0597] In some embodiments, the PEgRNA comprises a spacer comprising a sequence selected from the group consisting of SEQ Identifiers: A533-A534 of Table 3A. In some embodiments, the PEgRNA comprises a spacer comprising a sequence as set forth in SEQ ID NOs. 881-882 of Table 3A. In some embodiments, the PEgRNA comprises a PBS comprising a sequence selected from the group consisting of SEQ Identifiers: B2070-B2078 of Table 3B. In some embodiments, the PEgRNA comprises a PBS comprising a sequence selected from the group consisting of SEQ ID NOs. 2823-2829 of Table 3B. In some embodiments, the PEgRNA comprises a PBS comprising a sequence selected from the group consisting of sequences TCGTTGAC and TCGTTGACC as disclosed in Table 3B. In some embodiments, the PEgRNA comprises an editing template comprising a sequence selected from the group consisting of SEQ Identifiers: C10209-C10228 of Table 3C. In some embodiments, the PEgRNA comprises an editing template comprising a sequence selected from the group consisting of SEQ ID NOs: 14235-14254 of Table 3C. In some embodiments, the prime editing composition further comprises a ngRNA that comprises a spacer comprising a sequence selected from the group consisting of SEQ Identifiers: D934-D944, D948-D952, 20649, 20652, D1026, D1113, D1114, and 20749-D1119 of Table 3D. In some embodiments, the prime editing composition further comprises a ngRNA that comprises a spacer comprising a sequence selected from the group consisting of SEQ ID NOs. 20567-20577, 20581-20585, 20649, 20652, 20659, 20746, 20747, and 20749-20752 of Table 3D.

[0598] In some embodiments, the PEgRNA comprises a spacer comprising a sequence selected from the group consisting of SEQ Identifiers: A535-A537 of Table 3A. In some embodiments, the PEgRNA comprises a spacer comprising a sequence as set forth in SEQ ID NOs. 883-885 of Table 3A. In some embodiments, the PEgRNA comprises a PBS comprising a sequence selected from the group consisting of SEQ Identifiers: B2079-B2087 of Table 3B. In some embodiments, the PEgRNA comprises a PBS comprising a sequence selected from the group consisting of SEQ ID NOs. 2830-2836 of Table 3B. In some embodiments, the PEgRNA comprises a PBS comprising a sequence selected from the group consisting of sequences GCTAAAGA and GCTAAAGAA as disclosed in Table 3B. In some embodiments, the PEgRNA comprises an editing template comprising a sequence selected from the group consisting of SEQ Identifiers: C10229-C10259 of Table 3C. In some embodiments, the PEgRNA comprises an editing template comprising a sequence selected from the group consisting of SEQ ID NOs: 14255-14285 of Table 3C. In some embodiments, the prime editing composition further comprises a ngRNA that comprises a spacer comprising a sequence selected from the group consisting of SEQ Identifiers: D925, D1030, and D1032 of Table 3D. In some embodiments, the prime editing composition further comprises a ngRNA that comprises a spacer comprising a sequence selected from the group consisting of SEQ ID NOs. 20558, 20663, and 20665 of Table 3D.

[0599] In some embodiments, the PEgRNA comprises a spacer comprising a sequence selected from the group consisting of SEQ Identifiers: A506, A507, A513, and A514 of Table 3A. In some embodiments, the PEgRNA comprises a spacer comprising a sequence as set forth in SEQ ID NOs. 854, 855, 861, and 862 of Table 3A. In some embodiments, the PEgRNA comprises a PBS comprising a sequence selected from the group consisting of SEQ Identifiers: B1926-B1934 of Table 3B. In some embodiments, the PEgRNA comprises a PBS comprising a sequence selected from the group consisting of SEQ ID NOs. 2711-2717 of Table 3B. In some embodiments, the PEgRNA comprises a PBS comprising a sequence selected from the group consisting of sequences TCAGTGTG and TCAGTGTGA as disclosed in Table 3B. In some embodiments, the PEgRNA comprises an editing template comprising a sequence selected from the group consisting of SEQ Identifiers: C10260-C10271 of Table 3C. In some embodiments, the PEgRNA comprises an editing template comprising a sequence selected from the group consisting of SEQ ID NOs: 14286-14297 of Table 3C. In some embodiments, the prime editing composition further comprises a ngRNA that comprises a spacer comprising a sequence selected from the group consisting of SEQ Identifiers: D916-D928, D1021, D1023, D1025, D1056, and D1057 of Table 3D. In some embodiments, the prime editing composition further comprises a ngRNA that comprises a spacer comprising a sequence selected from the group consisting of SEQ ID NOs. 20549-20561, 20654, 20656, 20658, 20689, 20690 of Table 3D.

[0600] In some embodiments, the PEgRNA comprises a spacer comprising a sequence selected from the group consisting of SEQ Identifiers: A503-A504 of Table 3A. In some embodiments, the PEgRNA comprises a spacer comprising a sequence as set forth in SEQ ID NOs. 851-852 of Table 3A. In some embodiments, the PEgRNA comprises a PBS comprising a sequence selected from the group consisting of SEQ Identifiers: B1953-B1961 of Table 3B. In some embodiments, the PEgRNA comprises a PBS comprising a sequence selected from the group consisting of SEQ ID NOs. 2732-2738 of Table 3B. In some embodiments, the PEgRNA comprises a PBS comprising a sequence selected from the group consisting of sequences CTCAGTGT and CTCAGTGTG as disclosed in Table 3B. In some embodiments, the PEgRNA comprises an editing template comprising a sequence selected from the group consisting of SEQ Identifiers: C10272-C10278 of Table 3C. In some embodiments, the PEgRNA comprises an editing template comprising a sequence selected from the group consisting of SEQ ID NOs: 14298-14304 of Table 3C. In some embodiments, the prime editing composition further comprises a ngRNA that comprises a spacer comprising a sequence selected from the group consisting of SEQ Identifiers: D933-D944, D1016, D1018, D1019, D1116, and D1117 of Table 3D. In some embodiments, the prime editing composition further comprises a ngRNA that comprises a spacer comprising a sequence selected from the group consisting of SEQ ID NOs. 20566-20577, 20649, 20651, 20652, 20749, 20750 of Table 3D.

[0601] In some embodiments, the PEgRNA comprises a spacer comprising the sequence of SEQ Identifier: A505 of Table 3A. In some embodiments, the PEgRNA comprises a spacer comprising a sequence as set forth in SEQ ID NO. 853 of Table 3A. In some embodiments, the PEgRNA comprises a PBS comprising a sequence selected from the group consisting of SEQ Identifiers: B1962-B1970 of Table 3B. In some embodiments, the PEgRNA comprises a PBS comprising a sequence selected from the group consisting of SEQ ID NOs. 2739-2745 of Table 3B. In some embodiments, the PEgRNA comprises a PBS comprising a sequence selected from the group consisting of sequences ACTCAGTG and ACTCAGTGT as disclosed in Table 3B. In some embodiments, the PEgRNA comprises an editing template comprising a sequence selected from the group consisting of SEQ Identifiers: C10279-C10286 of Table 3C. In some embodiments, the PEgRNA comprises an editing template comprising a sequence selected from the group consisting of SEQ ID NOs: 14305-14312 of Table 3C. In some embodiments, the prime editing composition further comprises a ngRNA that comprises a spacer comprising a sequence selected from the group consisting of SEQ Identifiers: D933-D944, D1016, D1019, D1116, D1117, and D1118 of Table 3D. In some embodiments, the prime editing composition further comprises a ngRNA that comprises a spacer comprising a sequence selected from the group consisting of SEQ ID NOs. 20566-20577, 20649, 20652, 20749, 20750, and 20751 of Table 3D.

[0602] In some embodiments, the PEgRNA comprises a spacer comprising the sequence of SEQ Identifier: A538 of Table 3A. In some embodiments, the PEgRNA comprises a spacer comprising a sequence as set forth in SEQ ID NO. 886 of Table 3A. In some embodiments, the PEgRNA comprises a PBS comprising a sequence selected from the group consisting of SEQ Identifiers: B2088-B2096 of Table 3B. In some embodiments, the PEgRNA comprises a PBS comprising a sequence selected from the group consisting of SEQ ID NOs. 2837-2843 of Table 3B. In some embodiments, the PEgRNA comprises a PBS comprising a sequence selected from the group consisting of sequences GCTGTAAA and GCTGTAAAT as disclosed in Table 3B. In some embodiments, the PEgRNA comprises an editing template comprising a sequence selected from the group consisting of SEQ Identifiers: C10287-C10292 of Table 3C. In some embodiments, the PEgRNA comprises an editing template comprising a sequence selected from the group consisting of SEQ ID NOs:14313-14318 of Table 3C. In some embodiments, the prime editing composition further comprises a ngRNA that comprises a spacer comprising a sequence selected from the group consisting of SEQ Identifiers: D978-D981, D1002, D1033-D1037, D1055, D1073, D1104, D1105, and D1131-D1135 of Table 3D. In some embodiments, the prime editing composition further comprises a ngRNA that comprises a spacer comprising a sequence selected from the group consisting of SEQ ID NOs. 20611-20614, 20635, 20666-20670, 20688, 20706, 20737, 20738, 20764-20768 of Table 3D.

[0603] In some embodiments, the PEgRNA comprises a spacer comprising the sequence of SEQ Identifier: A539 of Table 3A. In some embodiments, the PEgRNA comprises a spacer comprising a sequence as set forth in SEQ ID NO. 887 of Table 3A. In some embodiments, the PEgRNA comprises a PBS comprising a sequence selected from the group consisting of SEQ Identifiers: B2097-B2105 of Table 3B. In some embodiments, the PEgRNA comprises a PBS comprising a sequence selected from the group consisting of SEQ ID NOs. 2844-2850 of Table 3B. In some embodiments, the PEgRNA comprises a PBS comprising a sequence selected from the group consisting of sequences ATTTGCTG and ATTTGCTGT as disclosed in Table 3B. In some embodiments, the PEgRNA comprises an editing template comprising a sequence selected from the group consisting of SEQ Identifiers: C10293-C10302 of Table 3C. In some embodiments, the PEgRNA comprises an editing template comprising a sequence selected from the group consisting of SEQ ID NOs: 14319-14328 of Table 3C. In some embodiments, the prime editing composition further comprises a ngRNA that comprises a spacer comprising a sequence selected from the group consisting of SEQ Identifiers: D977-D981, D1002, D1033-D1037, D1055, D1073, D1104, 1105, and D1131-D1135 of Table 3D. In some embodiments, the prime editing composition further comprises a ngRNA that comprises a spacer comprising a sequence selected from the group consisting of SEQ ID NOs. 20610-20614, 20635, 20666-20670, 20688, 20706, 20737, 20738, and 20764-20768 of Table 3D.

[0604] In some embodiments, the PEgRNA comprises a spacer comprising a sequence selected from the group consisting of SEQ Identifiers: A540-A543 of Table 3A. In some embodiments, the PEgRNA comprises a spacer comprising a sequence as set forth in SEQ ID NOs. 888-891 of Table 3A. In some embodiments, the PEgRNA comprises a PBS comprising a sequence selected from the group consisting of SEQ Identifiers: B2106-B2114 of Table 3B. In some embodiments, the PEgRNA comprises a PBS comprising a sequence selected from the group consisting of SEQ ID NOs. 2851-2857 of Table 3B. In some embodiments, the PEgRNA comprises a PBS comprising a sequence selected from the group consisting of sequences CGTTGACC and CGTTGACCT as disclosed in Table 3B. In some embodiments, the PEgRNA comprises an editing template comprising a sequence selected from the group consisting of SEQ Identifiers: C10303-C10340 of Table 3C. In some embodiments, the PEgRNA comprises an editing template comprising a sequence selected from the group consisting of SEQ ID NOs:14329-14366 of Table 3C. In some embodiments, the prime editing composition further comprises a ngRNA that comprises a spacer comprising a sequence selected from the group consisting of SEQ Identifiers: D916-D928, D1028-D1032, D1056, D1057, D1123, D1124, D1136, and D1137 of Table 3D. In some embodiments, the prime editing composition further comprises a ngRNA that comprises a spacer comprising a sequence selected from the group consisting of SEQ ID NOs. 20549-20561, 20661-20665, 20689, 20690, 20756, 20757, 20769, and 20770 of Table 3D.

[0605] In some embodiments, the PEgRNA comprises a spacer comprising a sequence selected from the group consisting of SEQ Identifiers: A517-A518 of Table 3A. In some embodiments, the PEgRNA comprises a spacer comprising a sequence as set forth in SEQ ID NOs. 865-866 of Table 3A. In some embodiments, the PEgRNA comprises a PBS comprising a sequence selected from the group consisting of SEQ Identifiers: B1998-B2006 of Table 3B. In some embodiments, the PEgRNA comprises a PBS comprising a sequence selected from the group consisting of SEQ ID NOs. 2767-2773 of Table 3B. In some embodiments, the PEgRNA comprises a PBS comprising a sequence selected from the group consisting of sequences ATTGGTCT and ATTGGTCTA as disclosed in Table 3B. In some embodiments, the PEgRNA comprises an editing template comprising a sequence selected from the group consisting of SEQ Identifiers: C10341-C10390 of Table 3C. In some embodiments, the PEgRNA comprises an editing template comprising a sequence selected from the group consisting of SEQ ID NOs: 14367-14416 of Table 3C. In some embodiments, the prime editing composition further comprises a ngRNA that comprises a spacer comprising a sequence selected from the group consisting of SEQ Identifiers: D990-D992, D999-D1001, D1109-D1112, and D1125-D1128 of Table 3D. In some embodiments, the prime editing composition further comprises a ngRNA that comprises a spacer comprising a sequence selected from the group consisting of SEQ ID NOs. 20623-20625, 20632-20634, 20742-20745, and 20758-20761 of Table 3D.

[0606] In some embodiments, the PEgRNA comprises a spacer comprising the sequence of SEQ Identifier: A519 of Table 3A. In some embodiments, the PEgRNA comprises a spacer comprising a sequence as set forth in SEQ ID NO.867 of Table 3A. In some embodiments, the PEgRNA comprises a PBS comprising a sequence selected from the group consisting of SEQ Identifiers: B2007-B2015 of Table 3B. In some embodiments, the PEgRNA comprises a PBS comprising a sequence selected from the group consisting of SEQ ID NOs. 2774-2780 of Table 3B. In some embodiments, the PEgRNA comprises a PBS comprising a sequence selected from the group consisting of sequences TATTGGTC and TATTGGTCT as disclosed in Table 3B. In some embodiments, the PEgRNA comprises an editing template comprising a sequence selected from the group consisting of SEQ Identifiers: C10391-C10416 of Table 3C. In some embodiments, the PEgRNA comprises an editing template comprising a sequence selected from the group consisting of SEQ ID NOs:14417-14442 of Table 3C. In some embodiments, the prime editing composition further comprises a ngRNA that comprises a spacer comprising a sequence selected from the group consisting of SEQ Identifiers: D974-D981, D1002, D1033-D1037, D1055, D1073, D1104, D1105, D1130-D1134 of Table 3D. In some embodiments, the prime editing composition further comprises a ngRNA that comprises a spacer comprising a sequence selected from the group consisting of SEQ ID NOs. 20607-20614, 20635, 20666-20670, 20688, 20706, 20737, 20738, and 20763-20767 of Table 3D.

[0607] In some embodiments, the PEgRNA comprises a spacer comprising a sequence selected from the group consisting of SEQ Identifiers: A544-A545 of Table 3A. In some embodiments, the PEgRNA comprises a spacer comprising a sequence as set forth in SEQ ID NOs. 892-893 of Table 3A. In some embodiments, the PEgRNA comprises a PBS comprising a sequence selected from the group consisting of SEQ Identifiers: B2115-B2123 of Table 3B. In some embodiments, the PEgRNA comprises a PBS comprising a sequence selected from the group consisting of SEQ ID NOs. 2858-2864 of Table 3B. In some embodiments, the PEgRNA comprises a PBS comprising a sequence selected from the group consisting of sequences AAGCATTT and AAGCATTTG as disclosed in Table 3B. In some embodiments, the PEgRNA comprises an editing template comprising a sequence selected from the group consisting of SEQ Identifiers: C10417-C10430 of Table 3C. In some embodiments, the PEgRNA comprises an editing template comprising a sequence selected from the group consisting of SEQ ID NOs:14443-14456 of Table 3C. In some embodiments, the prime editing composition further comprises a ngRNA that comprises a spacer comprising a sequence selected from the group consisting of SEQ Identifiers: D960, D976-D981, D1002, D1033-D1037, D1040, D1041, D1055, D1073, D1104, D1105, D1131-D1135 and D1138 of Table 3D. In some embodiments, the prime editing composition further comprises a ngRNA that comprises a spacer comprising a sequence selected from the group consisting of SEQ ID NOs. 20593, 20609-20614, 20635, 20666-20670, 20673, 20674, 20688, 20706, 20737, 20738, 20764-20768, and 20771 of Table 3D.

[0608] In some embodiments, the editing target sequence is in exon 14 of the CFTR gene.

[0609] In some embodiments, the editing target sequence or the complementary sequence on the CFTR gene thereof comprises a mutation that encodes an amino acid substitution S684Y and/or E681V relative to a wild type CFTR polypeptide set forth in SEQ ID NO: 19, and wherein the editing template encodes an intended nucleotide edit that corrects the mutation. In some embodiments, the editing target sequence or the complementary sequence on the CFTR gene thereof comprises a deletion of nucleotides AA and insertion of nucleotide G (c.2051_2052delAAinsG) at position 117,592,218, a A→T mutation (c.2042A>T) at position 117,592,209, a deletion of A (c.2044delA) at position 117,592,211, a duplication of a C (c.2045dupC) at position 117,592,212, a deletion of AA (c.2051_2052delAA) at position 117,592,218, a duplication of a nucleotide A (c.2052dupA) at position 117,592,219, a deletion of A (c.2052delA) at position 117,592,219, a duplication of a C (c.2053dupC) at position 117,592,220, a C→A mutation (c.2057C>A) at position 117,592,224, a duplication of nucleotides TTTT (c.2058_2061dupTTTT) at position 117,592,228, and/or a deletion of nucleotide T (c.2061delT) at position 117,592,228 of human chromosome 7 compared to a wild type CFTR gene. In some embodiments, the editing template comprises an intended nucleotide edit compared to the target CFTR gene, wherein incorporation of the intended nucleotide edit encoded by the editing template corrects the mutation. In some embodiments, incorporation of the one or more intended nucleotide edits results in a CFTR gene that encodes a functional CFTR polypeptide. In some embodiments, the editing template comprises a wild type CFTR gene sequence. In some embodiments, the editing template comprises one or more intended nucleotide edits compared to the target CFTR gene sequence in exon 14 of the target CFTR gene. Accordingly, in some embodiments, the newly synthesized single stranded DNA comprises one or more intended nucleotide edits compared to the target CFTR gene sequence. In some embodiments, the newly synthesized single stranded DNA encoded by the editing template is capable of correcting the c.2051_2052delAAinsG mutation, the c.2042A>T mutation, the c.2044delA mutation, the c.2045dupC mutation, the c.2051_2052delAA mutation, the c.2052dupA mutation, the c.2052delA mutation, the c.2053dupC mutation, the c.2057C>A mutation, the c.2058_2061dupTTTT mutation, and/or the c.2061delT mutation in the target CFTR gene. In some embodiments, the newly synthesized single stranded DNA encoded by the editing template is capable of correcting all of the c.2051_2052delAAinsG mutation, the c.2042A>T mutation, the c.2044delA mutation, the c.2045dupC mutation, the c.2051_2052delAA mutation, the c.2052dupA mutation, the c.2052delA mutation, the c.2053dupC mutation, the c.2057C>A mutation, the c.2058_2061dupTTTT mutation, and the c.2061delT mutation in the target CFTR gene. In some embodiments, two or more of the c.2051_2052delAAinsG mutation, the c.2042A>T mutation, the c.2044delA mutation, the c.2045dupC mutation, the c.2051_2052delAA mutation, the c.2052dupA mutation, the c.2052delA mutation, the c.2053dupC mutation, the c.2057C>A mutation, the c.2058_2061dupTTTT mutation, and the c.2061delT mutation are located on the same CFTR gene. In some embodiments, the newly synthesized single stranded DNA encoded by the editing template is capable of correcting the c.2051_2052delAAinsG mutation, the c.2042A>T mutation, the c.2044delA mutation, the c.2045dupC mutation, the c.2051_2052delAA mutation, the c.2052dupA mutation, the c.2052delA mutation, the c.2053dupC mutation, the c.2057C>A mutation, the c.2058_2061dupTTTT mutation, and the c.2061delT mutation that are located on different CFTR genes. For example, in some embodiments, a subject may comprise two copies of CFTR genes, each comprising a different mutation selected from the group consisting of the c.2051_2052delAAinsG mutation, the c.2042A>T mutation, the c.2044delA mutation, the c.2045dupC mutation, the c.2051_2052delAA mutation, the c.2052dupA mutation, the c.2052delA mutation, the c.2053dupC mutation, the c.2057C>A mutation, the c.2058_2061dupTTTT mutation, and the c.2061delT mutation, all of which may be corrected by an editing template of a single PEgRNA. In some embodiments, the editing template is capable of correcting one or more, or all of the c.2051_2052delAAinsG mutation, the c.2042A>T mutation, the c.2044delA mutation, the c.2045dupC mutation, the c.2051_2052delAA mutation, the c.2052dupA mutation, the c.2052delA mutation, the c.2053dupC mutation, the c.2057C>A mutation, the c.2058_2061dupTTTT mutation, and the c.2061delT mutation that are in different subjects, wherein each subject may have one or more of the mutations.

[0610] In some embodiments, the PEgRNA comprises a spacer comprising a sequence selected from the group consisting of SEQ Identifiers: A546-A547 of Table 3A. In some embodiments, the PEgRNA comprises a spacer comprising a sequence as set forth in SEQ ID NOs. 894-895 of Table 3A. In some embodiments, the PEgRNA comprises a PBS comprising a sequence selected from the group consisting of SEQ Identifiers: B2124-B2132 of Table 3B. In some embodiments, the PEgRNA comprises a PBS comprising a sequence selected from the group consisting of SEQ ID NOs. 2865-2871 of Table 3B. In some embodiments, the PEgRNA comprises a PBS comprising a sequence selected from the group consisting of sequences AACAGACT and AACAGACTG as disclosed in Table 3B. In some embodiments, the PEgRNA comprises an editing template comprising a sequence selected from the group consisting of SEQ Identifiers: C10431-C10486 of Table 3C. In some embodiments, the PEgRNA comprises an editing template comprising a sequence selected from the group consisting of SEQ ID NOs:14457-14512 of Table 3C. In some embodiments, the prime editing composition further comprises a ngRNA that comprises a spacer comprising a sequence selected from the group consisting of SEQ Identifiers: D1139-D1156 of Table 3D. In some embodiments, the prime editing composition further comprises a ngRNA that comprises a spacer comprising a sequence selected from the group consisting of SEQ ID NOs. 20772-20789 of Table 3D.

[0611] In some embodiments, the PEgRNA comprises a spacer comprising a sequence selected from the group consisting of SEQ Identifiers: A548-A549 of Table 3A. In some embodiments, the PEgRNA comprises a spacer comprising a sequence as set forth in SEQ ID NOs. 896-897 of Table 3A. In some embodiments, the PEgRNA comprises a PBS comprising a sequence selected from the group consisting of SEQ Identifiers: B2133-B2141 of Table 3B. In some embodiments, the PEgRNA comprises a PBS comprising a sequence selected from the group consisting of SEQ ID NOs. 2872-2878 of Table 3B. In some embodiments, the PEgRNA comprises a PBS comprising a sequence selected from the group consisting of sequences TAATGAGA and TAATGAGAA as disclosed in Table 3B. In some embodiments, the PEgRNA comprises an editing template comprising the sequence of SEQ Identifier: C10487 of Table 3C. In some embodiments, the PEgRNA comprises an editing template comprising a sequence selected from the group consisting of SEQ ID NOs:14513 of Table 3C. In some embodiments, the prime editing composition further comprises a ngRNA that comprises a spacer comprising a sequence selected from the group consisting of SEQ Identifiers: D1157-D1188 of Table 3D. In some embodiments, the prime editing composition further comprises a ngRNA that comprises a spacer comprising a sequence selected from the group consisting of SEQ ID NOs. 20790-20821 of Table 3D.

[0612] In some embodiments, the PEgRNA comprises a spacer comprising a sequence selected from the group consisting of SEQ Identifiers: A550-A551 of Table 3A. In some embodiments, the PEgRNA comprises a spacer comprising a sequence as set forth in SEQ ID NOs. 898-899 of Table 3A. In some embodiments, the PEgRNA comprises a PBS comprising a sequence selected from the group consisting of SEQ Identifiers: B2142-B2150 of Table 3B. In some embodiments, the PEgRNA comprises a PBS comprising a sequence selected from the group consisting of SEQ ID NOs. 2879-2885 of Table 3B. In some embodiments, the PEgRNA comprises a PBS comprising a sequence selected from the group consisting of sequences TCTAATGA and TCTAATGAG as disclosed in Table 3B. In some embodiments, the PEgRNA comprises an editing template comprising a sequence selected from the group consisting of SEQ Identifiers: C10488-C10490 of Table 3C. In some embodiments, the PEgRNA comprises an editing template comprising a sequence selected from the group consisting of SEQ ID NOs:14514-14516 of Table 3C. In some embodiments, the prime editing composition further comprises a ngRNA that comprises a spacer comprising a sequence selected from the group consisting of SEQ Identifiers: D1157-D1190 of Table 3D. In some embodiments, the prime editing composition further comprises a ngRNA that comprises a spacer comprising a sequence selected from the group consisting of SEQ ID NOs. 20790-20823 of Table 3D.

[0613] In some embodiments, the PEgRNA comprises a spacer comprising a sequence selected from the group consisting of SEQ Identifiers: A552-A553 of Table 3A. In some embodiments, the PEgRNA comprises a spacer comprising a sequence as set forth in SEQ ID NOs. 900-901 of Table 3A. In some embodiments, the PEgRNA comprises a PBS comprising a sequence selected from the group consisting of SEQ Identifiers: B2151-B2159 of Table 3B. In some embodiments, the PEgRNA comprises a PBS comprising a sequence selected from the group consisting of SEQ ID NOs. 2886-2892 of Table 3B. In some embodiments, the PEgRNA comprises a PBS comprising a sequence selected from the group consisting of sequences AAACAGAC and AAACAGACT as disclosed in Table 3B. In some embodiments, the PEgRNA comprises an editing template comprising a sequence selected from the group consisting of SEQ Identifiers: C10491-C10519 of Table 3C. In some embodiments, the PEgRNA comprises an editing template comprising a sequence selected from the group consisting of SEQ ID NOs:14517-14545 of Table 3C. In some embodiments, the prime editing composition further comprises a ngRNA that comprises a spacer comprising a sequence selected from the group consisting of SEQ Identifiers: D1191-D1227 of Table 3D. In some embodiments, the prime editing composition further comprises a ngRNA that comprises a spacer comprising a sequence selected from the group consisting of SEQ ID NOs. 20824-20860 of Table 3D.

[0614] In some embodiments, the PEgRNA comprises a spacer comprising a sequence selected from the group consisting of SEQ Identifiers: A554-A555 of Table 3A. In some embodiments, the PEgRNA comprises a spacer comprising a sequence as set forth in SEQ ID NOs. 902-903 of Table 3A. In some embodiments, the PEgRNA comprises a PBS comprising a sequence selected from the group consisting of SEQ Identifiers: B2160-B2168 of Table 3B. In some embodiments, the PEgRNA comprises a PBS comprising a sequence selected from the group consisting of SEQ ID NOs. 2893-2899 of Table 3B. In some embodiments, the PEgRNA comprises a PBS comprising a sequence selected from the group consisting of sequences GACAGGAG and GACAGGAGC as disclosed in Table 3B. In some embodiments, the PEgRNA comprises an editing template comprising a sequence selected from the group consisting of SEQ Identifiers: C10520-C10538 of Table 3C. In some embodiments, the PEgRNA comprises an editing template comprising a sequence selected from the group consisting of SEQ ID NOs:14546-14564 of Table 3C. In some embodiments, the prime editing composition further comprises a ngRNA that comprises a spacer comprising a sequence selected from the group consisting of SEQ Identifiers: D1166-D1190, and D1228-D1234 of Table 3D. In some embodiments, the prime editing composition further comprises a ngRNA that comprises a spacer comprising a sequence selected from the group consisting of SEQ ID NOs. 20799-20823, and 20861-20867 of Table 3D.

[0615] In some embodiments, the PEgRNA comprises a spacer comprising a sequence selected from the group consisting of SEQ Identifiers: A556-A557 of Table 3A. In some embodiments, the PEgRNA comprises a spacer comprising a sequence as set forth in SEQ ID NOs. 904-905 of Table 3A. In some embodiments, the PEgRNA comprises a PBS comprising a sequence selected from the group consisting of SEQ Identifiers: B2169-B2177 of Table 3B. In some embodiments, the PEgRNA comprises a PBS comprising a sequence selected from the group consisting of SEQ ID NOs. 2900-2906 of Table 3B. In some embodiments, the PEgRNA comprises a PBS comprising a sequence selected from the group consisting of sequences CAGGAGAC and CAGGAGACA as disclosed in Table 3B. In some embodiments, the PEgRNA comprises an editing template comprising a sequence selected from the group consisting of SEQ Identifiers: C10539-C10562 of Table 3C. In some embodiments, the PEgRNA comprises an editing template comprising a sequence selected from the group consisting of SEQ ID NOs:14565-14588 of Table 3C. In some embodiments, the prime editing composition further comprises a ngRNA that comprises a spacer comprising a sequence selected from the group consisting of SEQ Identifiers: D1158-D1190, D1228, D1229, D1235, D1236, D1237, and D1238 of Table 3D. In some embodiments, the prime editing composition further comprises a ngRNA that comprises a spacer comprising a sequence selected from the group consisting of SEQ ID NOs. 20791-20823, 20861, 20862, 20868, 20869, 20870, and 20871 of Table 3D.

[0616] In some embodiments, the PEgRNA comprises a spacer comprising a sequence selected from the group consisting of SEQ Identifiers: A558-A559 of Table 3A. In some embodiments, the PEgRNA comprises a spacer comprising a sequence as set forth in SEQ ID NOs. 906-907 of Table 3A. In some embodiments, the PEgRNA comprises a PBS comprising a sequence selected from the group consisting of SEQ Identifiers: B2178-B2186 of Table 3B. In some embodiments, the PEgRNA comprises a PBS comprising a sequence selected from the group consisting of SEQ ID NOs. 2907-2913 of Table 3B. In some embodiments, the PEgRNA comprises a PBS comprising a sequence selected from the group consisting of sequences CTAATGAG and CTAATGAGA as disclosed in Table 3B. In some embodiments, the PEgRNA comprises an editing template comprising a sequence selected from the group consisting of SEQ Identifiers: C10563-C10566 of Table 3C. In some embodiments, the PEgRNA comprises an editing template comprising a sequence selected from the group consisting of SEQ ID NOs:14589-14592 of Table 3C. In some embodiments, the prime editing composition further comprises a ngRNA that comprises a spacer comprising a sequence selected from the group consisting of SEQ Identifiers: D1239-D1259 of Table 3D. In some embodiments, the prime editing composition further comprises a ngRNA that comprises a spacer comprising a sequence selected from the group consisting of SEQ ID NOs. 20872-20892 of Table 3D.

[0617] In some embodiments, the PEgRNA comprises a spacer comprising the sequence of SEQ Identifier: A560 of Table 3A. In some embodiments, the PEgRNA comprises a spacer comprising a sequence as set forth in SEQ ID NO. 908 of Table 3A In some embodiments, the PEgRNA comprises a PBS comprising a sequence selected from the group consisting of SEQ Identifiers: B2187-B2195 of Table 3B. In some embodiments, the PEgRNA comprises a PBS comprising a sequence selected from the group consisting of SEQ ID NOs. 2914-2920 of Table 3B. In some embodiments, the PEgRNA comprises a PBS comprising a sequence selected from the group consisting of sequences CCTTCTAA and CCTTCTAAT as disclosed in Table 3B. In some embodiments, the PEgRNA comprises an editing template comprising a sequence selected from the group consisting of SEQ Identifiers: C10567-C10572 of Table 3C. In some embodiments, the PEgRNA comprises an editing template comprising a sequence selected from the group consisting of SEQ ID NOs:14593-14598 of Table 3C. In some embodiments, the prime editing composition further comprises a ngRNA that comprises a spacer comprising a sequence selected from the group consisting of SEQ Identifiers: D1165-D1188, and D1190 of Table 3D. In some embodiments, the prime editing composition further comprises a ngRNA that comprises a spacer comprising a sequence selected from the group consisting of SEQ ID NOs. 20798-20821, and 20823 of Table 3D.

[0618] In some embodiments, the PEgRNA comprises a spacer comprising the sequence of SEQ Identifier: A561 of Table 3A. In some embodiments, the PEgRNA comprises a spacer comprising a sequence as set forth in SEQ ID NO. 909 of Table 3A. In some embodiments, the PEgRNA comprises a PBS comprising a sequence selected from the group consisting of SEQ Identifiers: B2196-B2204 of Table 3B. In some embodiments, the PEgRNA comprises a PBS comprising a sequence selected from the group consisting of SEQ ID NOs. 2921-2927 of Table 3B. In some embodiments, the PEgRNA comprises a PBS comprising a sequence selected from the group consisting of sequences TTTTAAAC and TTTTAAACA as disclosed in Table 3B. In some embodiments, the PEgRNA comprises an editing template comprising a sequence selected from the group consisting of SEQ Identifiers: C10573-C10603 of Table 3C. In some embodiments, the PEgRNA comprises an editing template comprising a sequence selected from the group consisting of SEQ ID NOs:14599-14629 of Table 3C. In some embodiments, the prime editing composition further comprises a ngRNA that comprises a spacer comprising a sequence selected from the group consisting of SEQ Identifiers: D1191-D1213 of Table 3D. In some embodiments, the prime editing composition further comprises a ngRNA that comprises a spacer comprising a sequence selected from the group consisting of SEQ ID NOs. 20824-20846 of Table 3D.

[0619] In some embodiments, the PEgRNA comprises a spacer comprising a sequence selected from the group consisting of SEQ Identifiers: A562-A563 of Table 3A. In some embodiments, the PEgRNA comprises a spacer comprising a sequence as set forth in SEQ ID NOs. 910-911 of Table 3A. In some embodiments, the PEgRNA comprises a PBS comprising a sequence selected from the group consisting of SEQ Identifiers: B2205-B2213 of Table 3B. In some embodiments, the PEgRNA comprises a PBS comprising a sequence selected from the group consisting of SEQ ID NOs. 2928-2934 of Table 3B. In some embodiments, the PEgRNA comprises a PBS comprising a sequence selected from the group consisting of sequences AGTTTGGG and AGTTTGGGG as disclosed in Table 3B. In some embodiments, the PEgRNA comprises an editing template comprising a sequence selected from the group consisting of SEQ Identifiers: C10604-C10635 of Table 3C. In some embodiments, the PEgRNA comprises an editing template comprising a sequence selected from the group consisting of SEQ ID NOs:14630-14661 of Table 3C. In some embodiments, the prime editing composition further comprises a ngRNA that comprises a spacer comprising a sequence selected from the group consisting of SEQ Identifiers: D1141-D1145, D1150-D1154, and D1260-D1267 of Table 3D. In some embodiments, the prime editing composition further comprises a ngRNA that comprises a spacer comprising a sequence selected from the group consisting of SEQ ID NOs. 20774-20778, 20783-20788, and 20893, 20900 of Table 3D.

[0620] In some embodiments, the PEgRNA comprises a spacer comprising the sequence of SEQ Identifier: A564 of Table 3A. In some embodiments, the PEgRNA comprises a spacer comprising a sequence as set forth in SEQ ID NO. 912 of Table 3A. In some embodiments, the PEgRNA comprises a PBS comprising a sequence selected from the group consisting of SEQ Identifiers: B2214-B2222 of Table 3B. In some embodiments, the PEgRNA comprises a PBS comprising a sequence selected from the group consisting of SEQ ID NOs. 2935-2941 of Table 3B. In some embodiments, the PEgRNA comprises a PBS comprising a sequence selected from the group consisting of sequences GAGTTTGG and GAGTTTGGG as disclosed in Table 3B. In some embodiments, the PEgRNA comprises an editing template comprising a sequence selected from the group consisting of SEQ Identifiers: C10636-C10652 of Table 3C. In some embodiments, the PEgRNA comprises an editing template comprising a sequence selected from the group consisting of SEQ ID NOs:14662-14678 of Table 3C. In some embodiments, the prime editing composition further comprises a ngRNA that comprises a spacer comprising a sequence selected from the group consisting of SEQ Identifiers: D1196-D1214, and D1268-D1270 of Table 3D. In some embodiments, the prime editing composition further comprises a ngRNA that comprises a spacer comprising a sequence selected from the group consisting of SEQ ID NOs. 20829-20847, and 20901-20903 of Table 3D.

[0621] In some embodiments, the PEgRNA comprises a spacer comprising a sequence selected from the group consisting of SEQ Identifiers: A565-A567 of Table 3A. In some embodiments, the PEgRNA comprises a spacer comprising a sequence as set forth in SEQ ID NOs. 913-915 of Table 3A. In some embodiments, the PEgRNA comprises a PBS comprising a sequence selected from the group consisting of SEQ Identifiers: B2223-B2231 of Table 3B. In some embodiments, the PEgRNA comprises a PBS comprising a sequence selected from the group consisting of SEQ ID NOs. 2942-2948 of Table 3B. In some embodiments, the PEgRNA comprises a PBS comprising a sequence selected from the group consisting of sequences ACAGGAGC and ACAGGAGCA as disclosed in Table 3B. In some embodiments, the PEgRNA comprises an editing template comprising a sequence selected from the group consisting of SEQ Identifiers: C10653-C10670 of Table 3C. In some embodiments, the PEgRNA comprises an editing template comprising a sequence selected from the group consisting of SEQ ID NOs:14679-14696 of Table 3C. In some embodiments, the prime editing composition further comprises a ngRNA that comprises a spacer comprising a sequence selected from the group consisting of SEQ Identifiers: D1244, D1248, and D1271-D1283 of Table 3D. In some embodiments, the prime editing composition further comprises a ngRNA that comprises a spacer comprising a sequence selected from the group consisting of SEQ ID NOs. 20877-20881, and 20904-20916 of Table 3D.

[0622] In some embodiments, the PEgRNA comprises a spacer comprising a sequence selected from the group consisting of SEQ Identifiers: A568-A569 of Table 3A. In some embodiments, the PEgRNA comprises a spacer comprising a sequence as set forth in SEQ ID NOs. 916-917 of Table 3A. In some embodiments, the PEgRNA comprises a PBS comprising a sequence selected from the group consisting of SEQ Identifiers: B2232-B2240 of Table 3B. In some embodiments, the PEgRNA comprises a PBS comprising a sequence selected from the group consisting of SEQ ID NOs. 2949-2955 of Table 3B. In some embodiments, the PEgRNA comprises a PBS comprising a sequence selected from the group consisting of sequences AGGAGACA and AGGAGACAG as disclosed in Table 3B. In some embodiments, the PEgRNA comprises an editing template comprising a sequence selected from the group consisting of SEQ Identifiers: C10671-C10716 of Table 3C. In some embodiments, the PEgRNA comprises an editing template comprising a sequence selected from the group consisting of SEQ ID NOs:14697-14742 of Table 3C. In some embodiments, the prime editing composition further comprises a ngRNA that comprises a spacer comprising a sequence selected from the group consisting of SEQ Identifiers: D1240-D1245, D1248-D1249, D1251-D1257, D1259, and D1284-1291 of Table 3D. In some embodiments, the prime editing composition further comprises a ngRNA that comprises a spacer comprising a sequence selected from the group consisting of SEQ ID NOs. 20873-20878, 20881-20882, 20884-20890, 20892, and 20917-20924 of Table 3D.

[0623] In some embodiments, the PEgRNA comprises a spacer comprising a sequence selected from the group consisting of SEQ Identifiers: A570-A571 of Table 3A. In some embodiments, the PEgRNA comprises a spacer comprising a sequence as set forth in SEQ ID NOs. 918-919 of Table 3A. In some embodiments, the PEgRNA comprises a PBS comprising a sequence selected from the group consisting of SEQ Identifiers: B2241-B2249 of Table 3B. In some embodiments, the PEgRNA comprises a PBS comprising a sequence selected from the group consisting of SEQ ID NOs. 2956-2962 of Table 3B. In some embodiments, the PEgRNA comprises a PBS comprising a sequence selected from the group consisting of sequences AGACAGGA and AGACAGGAG as disclosed in Table 3B. In some embodiments, the PEgRNA comprises an editing template comprising a sequence selected from the group consisting of SEQ Identifiers: C10717-C10736 of Table 3C. In some embodiments, the PEgRNA comprises an editing template comprising a sequence selected from the group consisting of SEQ ID NOs:14743-14762 of Table 3C. In some embodiments, the prime editing composition further comprises a ngRNA that comprises a spacer comprising a sequence selected from the group consisting of SEQ Identifiers: D1158-D1164, D1166-D1190, D1228, D1229, D1235, and D1237 of Table 3D. In some embodiments, the prime editing composition further comprises a ngRNA that comprises a spacer comprising a sequence selected from the group consisting of SEQ ID NOs. 20791-20797, 20799-20823, 20861, 20862, 20868, and 20870 of Table 3D.

[0624] In some embodiments, the PEgRNA comprises a spacer comprising the sequence of SEQ Identifier: A572 of Table 3A. In some embodiments, the PEgRNA comprises a spacer comprising a sequence as set forth in SEQ ID NO. 920 of Table 3A. In some embodiments, the PEgRNA comprises a PBS comprising a sequence selected from the group consisting of SEQ Identifiers: B2250-B2258 of Table 3B. In some embodiments, the PEgRNA comprises a PBS comprising a sequence selected from the group consisting of SEQ ID NOs. 2963-2969 of Table 3B. In some embodiments, the PEgRNA comprises a PBS comprising a sequence selected from the group consisting of sequences GCATCTCC and GCATCTCCT as disclosed in Table 3B. In some embodiments, the PEgRNA comprises an editing template comprising a sequence selected from the group consisting of SEQ Identifiers: C10737-C10748 of Table 3C. In some embodiments, the PEgRNA comprises an editing template comprising a sequence selected from the group consisting of SEQ ID NOs:14763-14774 of Table 3C. In some embodiments, the prime editing composition further comprises a ngRNA that comprises a spacer comprising a sequence selected from the group consisting of SEQ Identifiers: D1165-D1188, and D1190 of Table 3D. In some embodiments, the prime editing composition further comprises a ngRNA that comprises a spacer comprising a sequence selected from the group consisting of SEQ ID NOs. 20798-20821, and 20823 of Table 3D.

[0625] In some embodiments, the PEgRNA comprises a spacer comprising a sequence selected from the group consisting of SEQ Identifiers: A573-A574 of Table 3A. In some embodiments, the PEgRNA comprises a spacer comprising a sequence as set forth in SEQ ID NOs. 921-922 of Table 3A. In some embodiments, the PEgRNA comprises a PBS comprising a sequence selected from the group consisting of SEQ Identifiers: B2259-B2267 of Table 3B. In some embodiments, the PEgRNA comprises a PBS comprising a sequence selected from the group consisting of SEQ ID NOs. 2070-2076 of Table 3B. In some embodiments, the PEgRNA comprises a PBS comprising a sequence selected from the group consisting of sequences GTTTCTGT and GTTTCTGTC as disclosed in Table 3B. In some embodiments, the PEgRNA comprises an editing template comprising a sequence selected from the group consisting of SEQ Identifiers: C10749-C10779 of Table 3C. In some embodiments, the PEgRNA comprises an editing template comprising a sequence selected from the group consisting of SEQ ID NOs:14775-14805 of Table 3C. In some embodiments, the prime editing composition further comprises a ngRNA that comprises a spacer comprising a sequence selected from the group consisting of SEQ Identifiers: D1241-D1245, D1248, D1249, D1252-D1259, D1286, D1287, D1290, D1291, D1292, D1293, D1294, and D1295 of Table 3D. In some embodiments, the prime editing composition further comprises a ngRNA that comprises a spacer comprising a sequence selected from the group consisting of SEQ ID NOs. 20874-20878, 20881, 20882, 20885-20892, 20919, 20920, 20923, 20924, 20925, 20926, 20927, and 20928 of Table 3D.

[0626] In some embodiments, the PEgRNA comprises a spacer comprising the sequence of Identifier: A575 of Table 3A. In some embodiments, the PEgRNA comprises a spacer comprising a sequence as set forth in SEQ ID NO. 923 of Table 3A. In some embodiments, the PEgRNA comprises a PBS comprising a sequence selected from the group consisting of SEQ Identifiers: B2268-B2276 of Table 3B. In some embodiments, the PEgRNA comprises a PBS comprising a sequence selected from the group consisting of SEQ ID NOs. 2977-2983 of Table 3B. In some embodiments, the PEgRNA comprises a PBS comprising a sequence selected from the group consisting of sequences TGTTTCTG and TGTTTCTGT as disclosed in Table 3B. In some embodiments, the PEgRNA comprises an editing template comprising a sequence selected from the group consisting of SEQ Identifiers: C10780-C10810 of Table 3C. In some embodiments, the PEgRNA comprises an editing template comprising a sequence selected from the group consisting of SEQ ID NOs:14806-14836 of Table 3C. In some embodiments, the prime editing composition further comprises a ngRNA that comprises a spacer comprising a sequence selected from the group consisting of SEQ Identifiers: D1170-D1190, D1228, D1229, D1237, D1238, D1296, D1297, and D1298 of Table 3D. In some embodiments, the prime editing composition further comprises a ngRNA that comprises a spacer comprising a sequence selected from the group consisting of SEQ ID NOs. 20803-20823, 20861, 20862, 20870, 20871, and 20929-20931 of Table 3D.

[0627] In some embodiments, the PEgRNA comprises a spacer comprising the sequence of SEQ Identifier: A576 of Table 3A. In some embodiments, the PEgRNA comprises a spacer comprising a sequence as set forth in SEQ ID NO. 924 of Table 3A. In some embodiments, the PEgRNA comprises a PBS comprising a sequence selected from the group consisting of SEQ Identifiers: B2277-B2285 of Table 3B. In some embodiments, the PEgRNA comprises a PBS comprising a sequence selected from the group consisting of SEQ ID NOs. 2984-2990 of Table 3B. In some embodiments, the PEgRNA comprises a PBS comprising a sequence selected from the group consisting of sequences TGGAGAGT and TGGAGAGTT as disclosed in Table 3B. In some embodiments, the PEgRNA comprises an editing template comprising a sequence selected from the group consisting of SEQ Identifiers: C10811-C10831 of Table 3C. In some embodiments, the PEgRNA comprises an editing template comprising a sequence selected from the group consisting of SEQ ID NOs:14837-14857 of Table 3C. In some embodiments, the prime editing composition further comprises a ngRNA that comprises a spacer comprising a sequence selected from the group consisting of SEQ Identifiers: D1195-D1214, D1268, and D1269 of Table 3D. In some embodiments, the prime editing composition further comprises a ngRNA that comprises a spacer comprising a sequence selected from the group consisting of SEQ ID NOs. 20828-20847, 20901, and 20902 of Table 3D.

[0628] In some embodiments, the PEgRNA comprises a spacer comprising a sequence selected from the group consisting of SEQ Identifiers: A546-A547 of Table 3A. In some embodiments, the PEgRNA comprises a spacer comprising a sequence as set forth in SEQ ID NOs. 894-895 of Table 3A. In some embodiments, the PEgRNA comprises a PBS comprising a sequence selected from the group consisting of SEQ Identifiers: B2124-B2132 of Table 3B. In some embodiments, the PEgRNA comprises a PBS comprising a sequence selected from the group consisting of SEQ ID NOs. 2865-2871 of Table 3B. In some embodiments, the PEgRNA comprises a PBS comprising a sequence selected from the group consisting of sequences AACAGACT and AACAGACTG as disclosed in Table 3B. In some embodiments, the PEgRNA comprises an editing template comprising a sequence selected from the group consisting of SEQ Identifiers: C10832-C10889 of Table 3C. In some embodiments, the PEgRNA comprises an editing template comprising a sequence selected from the group consisting of SEQ ID NOs:14858-14915 of Table 3C. In some embodiments, the prime editing composition further comprises a ngRNA that comprises a spacer comprising a sequence selected from the group consisting of SEQ Identifiers: D1139-D1156 of Table 3D. In some embodiments, the prime editing composition further comprises a ngRNA that comprises a spacer comprising a sequence selected from the group consisting of SEQ ID NOs. 20772-20789 of Table 3D.

[0629] In some embodiments, the PEgRNA comprises a spacer comprising a sequence selected from the group consisting of SEQ Identifiers: A548-A549 of Table 3A. In some embodiments, the PEgRNA comprises a spacer comprising a sequence as set forth in SEQ ID NOs. 896-897 of Table 3A. In some embodiments, the PEgRNA comprises a PBS comprising a sequence selected from the group consisting of SEQ Identifiers: B2133-B2141 of Table 3B. In some embodiments, the PEgRNA comprises a PBS comprising a sequence selected from the group consisting of SEQ ID NOs. 2872-2878 of Table 3B. In some embodiments, the PEgRNA comprises a PBS comprising a sequence selected from the group consisting of sequences TAATGAGA and TAATGAGAA as disclosed in Table 3B. In some embodiments, the PEgRNA comprises an editing template comprising the sequence of SEQ Identifier: C10890 of Table 3C. In some embodiments, the PEgRNA comprises an editing template comprising a sequence selected from the group consisting of SEQ ID NOs:14916- of Table 3C. In some embodiments, the prime editing composition further comprises a ngRNA that comprises a spacer comprising a sequence selected from the group consisting of SEQ Identifiers: D1157-D1188 of Table 3D. In some embodiments, the prime editing composition further comprises a ngRNA that comprises a spacer comprising a sequence selected from the group consisting of SEQ ID NOs. 20790-20821 of Table 3D.

[0630] In some embodiments, the PEgRNA comprises a spacer comprising a sequence selected from the group consisting of SEQ Identifiers: A550-A551 of Table 3A. In some embodiments, the PEgRNA comprises a spacer comprising a sequence as set forth in SEQ ID NOs. 898-899 of Table 3A. In some embodiments, the PEgRNA comprises a PBS comprising a sequence selected from the group consisting of SEQ Identifiers: B2142-B2150 of Table 3B. In some embodiments, the PEgRNA comprises a PBS comprising a sequence selected from the group consisting of SEQ ID NOs. 2879-2885 of Table 3B. In some embodiments, the PEgRNA comprises a PBS comprising a sequence selected from the group consisting of sequences TCTAATGA and TCTAATGAG as disclosed in Table 3B. In some embodiments, the PEgRNA comprises an editing template comprising a sequence selected from the group consisting of SEQ Identifiers: C10891-C10893 of Table 3C. In some embodiments, the PEgRNA comprises an editing template comprising a sequence selected from the group consisting of SEQ ID NOs:14917-14919 of Table 3C. In some embodiments, the prime editing composition further comprises a ngRNA that comprises a spacer comprising a sequence selected from the group consisting of SEQ Identifiers: D1157-D1190 of Table 3D. In some embodiments, the prime editing composition further comprises a ngRNA that comprises a spacer comprising a sequence selected from the group consisting of SEQ ID NOs. 20790-20823 of Table 3D.

[0631] In some embodiments, the PEgRNA comprises a spacer comprising a sequence selected from the group consisting of SEQ Identifiers: A552-A553 of Table 3A. In some embodiments, the PEgRNA comprises a spacer comprising a sequence as set forth in SEQ ID NOs. 900-901 of Table 3A. In some embodiments, the PEgRNA comprises a PBS comprising a sequence selected from the group consisting of SEQ Identifiers: B2151-B2159 of Table 3B. In some embodiments, the PEgRNA comprises a PBS comprising a sequence selected from the group consisting of SEQ ID NOs. 2886-2892 of Table 3B. In some embodiments, the PEgRNA comprises a PBS comprising a sequence selected from the group consisting of sequences AAACAGAC and AAACAGACT as disclosed in Table 3B. In some embodiments, the PEgRNA comprises an editing template comprising a sequence selected from the group consisting of SEQ Identifiers: C10894-C10923 of Table 3C. In some embodiments, the PEgRNA comprises an editing template comprising a sequence selected from the group consisting of SEQ ID NOs:14920-14949 of Table 3C. In some embodiments, the prime editing composition further comprises a ngRNA that comprises a spacer comprising a sequence selected from the group consisting of SEQ Identifiers: D1194-D1215, D1216-D1227, D1299, D1300, D1301, and D1302 of Table 3D. In some embodiments, the prime editing composition further comprises a ngRNA that comprises a spacer comprising a sequence selected from the group consisting of SEQ ID NOs. 20827-20848, 20849-20860, 20932, 20933, 20934, and 20935 of Table 3D.

[0632] In some embodiments, the PEgRNA comprises a spacer comprising a sequence selected from the group consisting of SEQ Identifiers: A554-A555 of Table 3A. In some embodiments, the PEgRNA comprises a spacer comprising a sequence as set forth in SEQ ID NOs. 902-903 of Table 3A. In some embodiments, the PEgRNA comprises a PBS comprising a sequence selected from the group consisting of SEQ Identifiers: B2160-B2168 of Table 3B. In some embodiments, the PEgRNA comprises a PBS comprising a sequence selected from the group consisting of SEQ ID NOs. 2893-2899 of Table 3B. In some embodiments, the PEgRNA comprises a PBS comprising a sequence selected from the group consisting of sequences GACAGGAG and GACAGGAGC as disclosed in Table 3B. In some embodiments, the PEgRNA comprises an editing template comprising a sequence selected from the group consisting of SEQ Identifiers: C10924-C10942 of Table 3C. In some embodiments, the PEgRNA comprises an editing template comprising a sequence selected from the group consisting of SEQ ID NOs:14950-14968 of Table 3C. In some embodiments, the prime editing composition further comprises a ngRNA that comprises a spacer comprising a sequence selected from the group consisting of SEQ Identifiers: D1166-D1190, and D1228-D1234 of Table 3D. In some embodiments, the prime editing composition further comprises a ngRNA that comprises a spacer comprising a sequence selected from the group consisting of SEQ ID NOs. 20799-20823, and 20861-20867 of Table 3D.

[0633] In some embodiments, the PEgRNA comprises a spacer comprising a sequence selected from the group consisting of SEQ Identifiers: A556-A557 of Table 3A. In some embodiments, the PEgRNA comprises a spacer comprising a sequence as set forth in SEQ ID NOs. 904-905 of Table 3A. In some embodiments, the PEgRNA comprises a PBS comprising a sequence selected from the group consisting of SEQ Identifiers: B2169-B2177 of Table 3B. In some embodiments, the PEgRNA comprises a PBS comprising a sequence selected from the group consisting of SEQ ID NOs. 2900-2906 of Table 3B. In some embodiments, the PEgRNA comprises a PBS comprising a sequence selected from the group consisting of sequences CAGGAGAC and CAGGAGACA as disclosed in Table 3B. In some embodiments, the PEgRNA comprises an editing template comprising a sequence selected from the group consisting of SEQ Identifiers: C10943-C10966 of Table 3C. In some embodiments, the PEgRNA comprises an editing template comprising a sequence selected from the group consisting of SEQ ID NOs:14969-14992 of Table 3C. In some embodiments, the prime editing composition further comprises a ngRNA that comprises a spacer comprising a sequence selected from the group consisting of SEQ Identifiers: D1158-D1164, D1167-D1190, D1228, D1229, D1235, D1237, D1303, and D1304 of Table 3D. In some embodiments, the prime editing composition further comprises a ngRNA that comprises a spacer comprising a sequence selected from the group consisting of SEQ ID NOs. 20791-20797, 20800-20823, 20861, 20862, 20868, 20870, 20936, and 20937 of Table 3D.

[0634] In some embodiments, the PEgRNA comprises a spacer comprising a sequence selected from the group consisting of SEQ Identifiers: A558-A559 of Table 3A. In some embodiments, the PEgRNA comprises a spacer comprising a sequence as set forth in SEQ ID NOs. 906-907 of Table 3A. In some embodiments, the PEgRNA comprises a PBS comprising a sequence selected from the group consisting of SEQ Identifiers: B2178-B2186 of Table 3B. In some embodiments, the PEgRNA comprises a PBS comprising a sequence selected from the group consisting of SEQ ID NOs. 2907-2913 of Table 3B. In some embodiments, the PEgRNA comprises a PBS comprising a sequence selected from the group consisting of sequences CTAATGAG and CTAATGAGA as disclosed in Table 3B. In some embodiments, the PEgRNA comprises an editing template comprising a sequence selected from the group consisting of SEQ Identifiers: C10967-C10970 of Table 3C. In some embodiments, the PEgRNA comprises an editing template comprising a sequence selected from the group consisting of SEQ ID NOs:14993-14996 of Table 3C. In some embodiments, the prime editing composition further comprises a ngRNA that comprises a spacer comprising a sequence selected from the group consisting of SEQ Identifiers: D1239-D1259 of Table 3D. In some embodiments, the prime editing composition further comprises a ngRNA that comprises a spacer comprising a sequence selected from the group consisting of SEQ ID NOs. 20872-20892 of Table 3D.

[0635] In some embodiments, the PEgRNA comprises a spacer comprising the sequence of SEQ Identifier: A560 of Table 3A. In some embodiments, the PEgRNA comprises a spacer comprising a sequence as set forth in SEQ ID NO. 908 of Table 3A. In some embodiments, the PEgRNA comprises a PBS comprising a sequence selected from the group consisting of SEQ Identifiers: B2187-B2195 of Table 3B. In some embodiments, the PEgRNA comprises a PBS comprising a sequence selected from the group consisting of SEQ ID NOs. 2914-2920 of Table 3B. In some embodiments, the PEgRNA comprises a PBS comprising a sequence selected from the group consisting of sequences CCTTCTAA and CCTTCTAAT as disclosed in Table 3B. In some embodiments, the PEgRNA comprises an editing template comprising a sequence selected from the group consisting of SEQ Identifiers: C10971-C10976 of Table 3C. In some embodiments, the PEgRNA comprises an editing template comprising a sequence selected from the group consisting of SEQ ID NOs:14997-15002 of Table 3C. In some embodiments, the prime editing composition further comprises a ngRNA that comprises a spacer comprising a sequence selected from the group consisting of SEQ Identifiers: D1165-D1188, and D1190 of Table 3D. In some embodiments, the prime editing composition further comprises a ngRNA that comprises a spacer comprising a sequence selected from the group consisting of SEQ ID NOs. 20798-20821, and 20823 of Table 3D.

[0636] In some embodiments, the PEgRNA comprises a spacer comprising the sequence of SEQ Identifier: A561 of Table 3A. In some embodiments, the PEgRNA comprises a spacer comprising a sequence as set forth in SEQ ID NO. 909 of Table 3A. In some embodiments, the PEgRNA comprises a PBS comprising a sequence selected from the group consisting of SEQ Identifiers: B2196-B2204 of Table 3B. In some embodiments, the PEgRNA comprises a PBS comprising a sequence selected from the group consisting of SEQ ID NOs. 2921-2927 of Table 3B. In some embodiments, the PEgRNA comprises a PBS comprising a sequence selected from the group consisting of sequences TTTTAAAC and TTTTAAACA as disclosed in Table 3B. In some embodiments, the PEgRNA comprises an editing template comprising a sequence selected from the group consisting of SEQ Identifiers: C10977-C11007 of Table 3C. In some embodiments, the PEgRNA comprises an editing template comprising a sequence selected from the group consisting of SEQ ID NOs:15003-15033 of Table 3C. In some embodiments, the prime editing composition further comprises a ngRNA that comprises a spacer comprising a sequence selected from the group consisting of SEQ Identifiers: D1194-D1213, D1299, D1300, and D1301 of Table 3D. In some embodiments, the prime editing composition further comprises a ngRNA that comprises a spacer comprising a sequence selected from the group consisting of SEQ ID NOs. 20827-20846, 20932, 20933, and 20934 of Table 3D.

[0637] In some embodiments, the PEgRNA comprises a spacer comprising a sequence selected from the group consisting of SEQ Identifier: A562-A563 of Table 3A. In some embodiments, the PEgRNA comprises a spacer comprising a sequence as set forth in SEQ ID NOs. 910-911 of Table 3A. In some embodiments, the PEgRNA comprises a PBS comprising a sequence selected from the group consisting of SEQ Identifiers: B2205-B2213 of Table 3B. In some embodiments, the PEgRNA comprises a PBS comprising a sequence selected from the group consisting of SEQ ID NOs. 2928-2934 of Table 3B. In some embodiments, the PEgRNA comprises a PBS comprising a sequence selected from the group consisting of sequences AGTTTGGG and AGTTTGGGG as disclosed in Table 3B. In some embodiments, the PEgRNA comprises an editing template comprising a sequence selected from the group consisting of SEQ Identifiers: C11008-C11041 of Table 3C. In some embodiments, the PEgRNA comprises an editing template comprising a sequence selected from the group consisting of SEQ ID NOs:15034-15067 of Table 3C. In some embodiments, the prime editing composition further comprises a ngRNA that comprises a spacer comprising a sequence selected from the group consisting of SEQ Identifiers: D1141-D1145, D1150-D1154, and D1260-D1267 of Table 3D. In some embodiments, the prime editing composition further comprises a ngRNA that comprises a spacer comprising a sequence selected from the group consisting of SEQ ID NOs. 20774-20778, 20783-20788, and 20893-20900 of Table 3D.

[0638] In some embodiments, the PEgRNA comprises a spacer comprising the sequence of SEQ Identifier: A564 of Table 3A. In some embodiments, the PEgRNA comprises a spacer comprising a sequence as set forth in SEQ ID NO. 912 of Table 3A. In some embodiments, the PEgRNA comprises a PBS comprising a sequence selected from the group consisting of SEQ Identifiers: B2214-B2222 of Table 3B. In some embodiments, the PEgRNA comprises a PBS comprising a sequence selected from the group consisting of SEQ ID NOs. 2935-2941 of Table 3B. In some embodiments, the PEgRNA comprises a PBS comprising a sequence selected from the group consisting of sequences GAGTTTGG and GAGTTTGGG as disclosed in Table 3B. In some embodiments, the PEgRNA comprises an editing template comprising a sequence selected from the group consisting of SEQ Identifiers: C11042-C11059 of Table 3C. In some embodiments, the PEgRNA comprises an editing template comprising a sequence selected from the group consisting of SEQ ID NOs:15068-15085 of Table 3C. In some embodiments, the prime editing composition further comprises a ngRNA that comprises a spacer comprising a sequence selected from the group consisting of SEQ Identifiers: D1196-D1214, and D1268-D1270 of Table 3D. In some embodiments, the prime editing composition further comprises a ngRNA that comprises a spacer comprising a sequence selected from the group consisting of SEQ ID NOs. 20829-20847, and 20901-20903 of Table 3D.

[0639] In some embodiments, the PEgRNA comprises a spacer comprising a sequence selected from the group consisting of SEQ Identifier: A565-A567 of Table 3A. In some embodiments, the PEgRNA comprises a spacer comprising a sequence as set forth in SEQ ID NOs. 913-915 of Table 3A. In some embodiments, the PEgRNA comprises a PBS comprising a sequence selected from the group consisting of SEQ Identifiers: B2223-B2231 of Table 3B. In some embodiments, the PEgRNA comprises a PBS comprising a sequence selected from the group consisting of SEQ ID NOs. 2942-2948 of Table 3B. In some embodiments, the PEgRNA comprises a PBS comprising a sequence selected from the group consisting of sequences ACAGGAGC and ACAGGAGCA as disclosed in Table 3B. In some embodiments, the PEgRNA comprises an editing template comprising a sequence selected from the group consisting of SEQ Identifiers: C11060-C11077 of Table 3C. In some embodiments, the PEgRNA comprises an editing template comprising a sequence selected from the group consisting of SEQ ID NOs:15086-15103 of Table 3C. In some embodiments, the prime editing composition further comprises a ngRNA that comprises a spacer comprising a sequence selected from the group consisting of SEQ Identifiers: D1244, D1248, and D1271-D1283 of Table 3D. In some embodiments, the prime editing composition further comprises a ngRNA that comprises a spacer comprising a sequence selected from the group consisting of SEQ ID NOs. 20877, 20881, and 20904-20916 of Table 3D.

[0640] In some embodiments, the PEgRNA comprises a spacer comprising a sequence selected from the group consisting of SEQ Identifiers: A568-A569 of Table 3A. In some embodiments, the PEgRNA comprises a spacer comprising a sequence as set forth in SEQ ID NOs. 916-917 of Table 3A. In some embodiments, the PEgRNA comprises a PBS comprising a sequence selected from the group consisting of SEQ Identifiers: B2232-B2240 of Table 3B. In some embodiments, the PEgRNA comprises a PBS comprising a sequence selected from the group consisting of SEQ ID NOs. 2949-2955 of Table 3B. In some embodiments, the PEgRNA comprises a PBS comprising a sequence selected from the group consisting of sequences AGGAGACA and AGGAGACAG as disclosed in Table 3B. In some embodiments, the PEgRNA comprises an editing template comprising a sequence selected from the group consisting of SEQ Identifiers: C11078-C11123 of Table 3C. In some embodiments, the PEgRNA comprises an editing template comprising a sequence selected from the group consisting of SEQ ID NOs:15104-15149 of Table 3C. In some embodiments, the prime editing composition further comprises a ngRNA that comprises a spacer comprising a sequence selected from the group consisting of SEQ Identifiers: D1240-D1245, D1248-D1257, D1259, and D1284-D1291 of Table 3D. In some embodiments, the prime editing composition further comprises a ngRNA that comprises a spacer comprising a sequence selected from the group consisting of SEQ ID NOs. 20873-20878, 20881-20890, 20892, and 20917-20924 of Table 3D.

[0641] In some embodiments, the PEgRNA comprises a spacer comprising a sequence selected from the group consisting of SEQ Identifiers: A570-A571 of Table 3A. In some embodiments, the PEgRNA comprises a spacer comprising a sequence as set forth in SEQ ID NOs. 918-919 of Table 3A. In some embodiments, the PEgRNA comprises a PBS comprising a sequence selected from the group consisting of SEQ Identifiers: B2241-B2249 of Table 3B. In some embodiments, the PEgRNA comprises a PBS comprising a sequence selected from the group consisting of SEQ ID NOs. 2956-2962 of Table 3B. In some embodiments, the PEgRNA comprises a PBS comprising a sequence selected from the group consisting of sequences AGACAGGA and AGACAGGAG as disclosed in Table 3B. In some embodiments, the PEgRNA comprises an editing template comprising a sequence selected from the group consisting of SEQ Identifiers: C11124-C11143 of Table 3C. In some embodiments, the PEgRNA comprises an editing template comprising a sequence selected from the group consisting of SEQ ID NOs:15150-15169 of Table 3C. In some embodiments, the prime editing composition further comprises a ngRNA that comprises a spacer comprising a sequence selected from the group consisting of SEQ Identifiers: D1158-D1164, D1166-D1190, D1228, D1229, D1235, and D1237 of Table 3D. In some embodiments, the prime editing composition further comprises a ngRNA that comprises a spacer comprising a sequence selected from the group consisting of SEQ ID NOs. 20791-20797, 20799-20823, 20861, 20862, 20868, and 20870 of Table 3D.

[0642] In some embodiments, the PEgRNA comprises a spacer comprising the sequence of SEQ Identifier: A572 of Table 3A. In some embodiments, the PEgRNA comprises a spacer comprising a sequence as set forth in SEQ ID NO. 920 of Table 3A. In some embodiments, the PEgRNA comprises a PBS comprising a sequence selected from the group consisting of SEQ Identifiers: B2250-B2258 of Table 3B. In some embodiments, the PEgRNA comprises a PBS comprising a sequence selected from the group consisting of SEQ ID NOs. 2963-2969 of Table 3B. In some embodiments, the PEgRNA comprises a PBS comprising a sequence selected from the group consisting of sequences GCATCTCC and GCATCTCCT as disclosed in Table 3B. In some embodiments, the PEgRNA comprises an editing template comprising a sequence selected from the group consisting of SEQ Identifiers: C11144-C11155 of Table 3C. In some embodiments, the PEgRNA comprises an editing template comprising a sequence selected from the group consisting of SEQ ID NOs:15170-15181 of Table 3C. In some embodiments, the prime editing composition further comprises a ngRNA that comprises a spacer comprising a sequence selected from the group consisting of SEQ Identifiers: D1165-D1188, D1190 of Table 3D. In some embodiments, the prime editing composition further comprises a ngRNA that comprises a spacer comprising a sequence selected from the group consisting of SEQ ID NOs. 20798-20821, and 20823 of Table 3D.

[0643] In some embodiments, the PEgRNA comprises a spacer comprising the sequence of SEQ Identifier: A576 of Table 3A. In some embodiments, the PEgRNA comprises a spacer comprising a sequence as set forth in SEQ ID NO. 924 of Table 3A. In some embodiments, the PEgRNA comprises a PBS comprising a sequence selected from the group consisting of SEQ Identifiers: B2277-B2285 of Table 3B. In some embodiments, the PEgRNA comprises a PBS comprising a sequence selected from the group consisting of SEQ ID NOs. 2984-2990 of Table 3B. In some embodiments, the PEgRNA comprises a PBS comprising a sequence selected from the group consisting of sequences TGGAGAGT and TGGAGAGTT as disclosed in Table 3B. In some embodiments, the PEgRNA comprises an editing template comprising a sequence selected from the group consisting of SEQ Identifiers: C11156-C11177 of Table 3C. In some embodiments, the PEgRNA comprises an editing template comprising a sequence selected from the group consisting of SEQ ID NOs:15182-15203 of Table 3C. In some embodiments, the prime editing composition further comprises a ngRNA that comprises a spacer comprising a sequence selected from the group consisting of SEQ Identifiers: D1195-D1214, D1268, and D1269 of Table 3D. In some embodiments, the prime editing composition further comprises a ngRNA that comprises a spacer comprising a sequence selected from the group consisting of SEQ ID NOs. 20828-20847, 20910, and 20911 of Table 3D.

[0644] In some embodiments, the editing target sequence is in exon 21 of the CFTR gene.

[0645] In some embodiments, the editing target sequence or the complementary sequence on the CFTR gene thereof comprises a mutation that encodes an amino acid substitution D1152H, N1148K, V1153E and/or D 1154Y relative to a wild type CFTR polypeptide set forth in SEQ ID NO: 19, and wherein the editing template encodes an intended nucleotide edit that corrects the mutation. In some embodiments, the editing target sequence or the complementary sequence on the CFTR gene thereof comprises a G→C mutation (c.3454G>C) at position 117,614,699 a C→A mutation (c.3444C>A) at position 117,614,689, a deletion of C (c.3444delC) at position 117,614,689, a deletion of T (c.3445delT) at position 117,614,690, a T→A mutation (c.3458T>A) at position 117,614,703, and/or a G→T mutation (c.3460G>T) at position 117,614,705 of human chromosome 7 compared to a wild type CFTR gene. In some embodiments, the editing template comprises an intended nucleotide edit compared to the target CFTR gene, wherein incorporation of the intended nucleotide edit encoded by the editing template corrects the mutation. In some embodiments, incorporation of the one or more intended nucleotide edits results in a CFTR gene that encodes a functional CFTR polypeptide.

[0646] In some embodiments, the editing template comprises a wild type CFTR gene sequence. Accordingly, in some embodiments, the newly synthesized single stranded DNA encoded by the editing template is capable of correcting the c.3454G>C mutation, the c.3444C>A mutation, the c.3444delC mutation, the c.3445delT mutation, the c.3458T>A mutation, and/or the c.3460G>T mutation in the target CFTR gene. In some embodiments, the newly synthesized single stranded DNA encoded by the editing template is capable of correcting all of the c.3454G>C mutation, the c.3444C>A mutation, the c.3444delC mutation, the c.3445delT mutation, the c.3458T>A mutation, and the c.3460G>T mutation in the target CFTR gene. In some embodiments, two or more of the c.3454G>C mutation, the c.3444C>A mutation, the c.3444delC mutation, the c.3445delT mutation, the c.3458T>A mutation, and the c.3460G>T mutation are located on the same CFTR gene. In some embodiments, the newly synthesized single stranded DNA encoded by the editing template is capable of correcting the c.3454G>C mutation, the c.3444C>A mutation, the c.3444delC mutation, the c.3445delT mutation, the c.3458T>A mutation, and the c.3460G>T mutation that are located on different CFTR genes. For example, in some embodiments, a subject may comprise two copies of CFTR genes, each comprising a different mutation selected from the group consisting of the c.3454G>C mutation, the c.3444C>A mutation, the c.3444delC mutation, the c.3445delT mutation, the c.3458T>A mutation, and the c.3460G>T mutation, all of which may be corrected by an editing template of a single PEgRNA. In some embodiments, the editing template is capable of correcting one or more, or all of the c.3454G>C mutation, the c.3444C>A mutation, the c.3444delC mutation, the c.3445delT mutation, the c.3458T>A mutation, and the c.3460G>T mutation that are in different subjects, wherein each subject may have one or more of the mutations.

[0647] In some embodiments, the PEgRNA comprises a spacer comprising a sequence selected from the group consisting of SEQ Identifiers: A577-A578 of Table 3A. In some embodiments, the PEgRNA comprises a spacer comprising a sequence as set forth in SEQ ID NOs. 925-926 of Table 3A. In some embodiments, the PEgRNA comprises a PBS comprising a sequence selected from the group consisting of SEQ Identifiers: B2286-B2294 of Table 3B. In some embodiments, the PEgRNA comprises a PBS comprising a sequence selected from the group consisting of SEQ ID NOs. 2991-2997 of Table 3B. In some embodiments, the PEgRNA comprises a PBS comprising a sequence selected from the group consisting of sequences CATCTTTT and CATCTTTTT as disclosed in Table 3B. In some embodiments, the PEgRNA comprises an editing template comprising a sequence selected from the group consisting of SEQ Identifiers: C11178-C11191 of Table 3C. In some embodiments, the PEgRNA comprises an editing template comprising a sequence selected from the group consisting of SEQ ID NOs:15204-15217 of Table 3C. In some embodiments, the prime editing composition further comprises a ngRNA that comprises a spacer comprising a sequence selected from the group consisting of SEQ Identifiers: D1305-D1334 of Table 3D. In some embodiments, the prime editing composition further comprises a ngRNA that comprises a spacer comprising a sequence selected from the group consisting of SEQ ID NOs. 20938-20967 of Table 3D.

[0648] In some embodiments, the PEgRNA comprises a spacer comprising a sequence selected from the group consisting of SEQ Identifiers: A579-A580 of Table 3A. In some embodiments, the PEgRNA comprises a spacer comprising a sequence as set forth in SEQ ID NOs. 927-928 of Table 3A. In some embodiments, the PEgRNA comprises a PBS comprising a sequence selected from the group consisting of SEQ Identifiers: B2295-B2303 of Table 3B. In some embodiments, the PEgRNA comprises a PBS comprising a sequence selected from the group consisting of SEQ ID NOs. 2998-3004 of Table 3B. In some embodiments, the PEgRNA comprises a PBS comprising a sequence selected from the group consisting of sequences AAGTCTTA and AAGTCTTAT as disclosed in Table 3B. In some embodiments, the PEgRNA comprises an editing template comprising a sequence selected from the group consisting of SEQ Identifiers: C11192-C11237 of Table 3C. In some embodiments, the PEgRNA comprises an editing template comprising a sequence selected from the group consisting of SEQ ID NOs:15218-15263 of Table 3C. In some embodiments, the prime editing composition further comprises a ngRNA that comprises a spacer comprising a sequence selected from the group consisting of SEQ Identifiers: D1335-D1354 of Table 3D. In some embodiments, the prime editing composition further comprises a ngRNA that comprises a spacer comprising a sequence selected from the group consisting of SEQ ID NOs. 20968-20987 of Table 3D.

[0649] In some embodiments, the PEgRNA comprises a spacer comprising the sequence of SEQ Identifier: A581 of Table 3A. In some embodiments, the PEgRNA comprises a spacer comprising a sequence as set forth in SEQ ID NO. 929 of Table 3A. In some embodiments, the PEgRNA comprises a PBS comprising a sequence selected from the group consisting of SEQ Identifiers: B2304-B2312 of Table 3B. In some embodiments, the PEgRNA comprises a PBS comprising a sequence selected from the group consisting of SEQ ID NOs. of Table 3B. In some embodiments, the PEgRNA comprises a PBS comprising a sequence selected from the group consisting of sequences as disclosed in Table 3B. In some embodiments, the PEgRNA comprises an editing template comprising a sequence selected from the group consisting of SEQ Identifiers: C11238-C11261 of Table 3C. In some embodiments, the PEgRNA comprises an editing template comprising a sequence selected from the group consisting of SEQ ID NOs:15264-15287 of Table 3C. In some embodiments, the prime editing composition further comprises a ngRNA that comprises a spacer comprising a sequence selected from the group consisting of SEQ Identifiers: D1315-D1330 of Table 3D. In some embodiments, the prime editing composition further comprises a ngRNA that comprises a spacer comprising a sequence selected from the group consisting of SEQ ID NOs. 20948-20963 of Table 3D.

[0650] In some embodiments, the PEgRNA comprises a spacer comprising a sequence selected from the group consisting of SEQ Identifier: A582-A584 of Table 3A. In some embodiments, the PEgRNA comprises a spacer comprising a sequence as set forth in SEQ ID NOs. 930-932 of Table 3A. In some embodiments, the PEgRNA comprises a PBS comprising a sequence selected from the group consisting of SEQ Identifiers: B2313-B2321 of Table 3B. In some embodiments, the PEgRNA comprises a PBS comprising a sequence selected from the group consisting of SEQ ID NOs. 3012-3018 of Table 3B. In some embodiments, the PEgRNA comprises a PBS comprising a sequence selected from the group consisting of sequences AATGTACT and AATGTACTC as disclosed in Table 3B. In some embodiments, the PEgRNA comprises an editing template comprising a sequence selected from the group consisting of SEQ Identifiers: C11262-C11275 of Table 3C. In some embodiments, the PEgRNA comprises an editing template comprising a sequence selected from the group consisting of SEQ ID NOs:15288-15301 of Table 3C. In some embodiments, the prime editing composition further comprises a ngRNA that comprises a spacer comprising a sequence selected from the group consisting of SEQ Identifiers: D1355-D1360 of Table 3D. In some embodiments, the prime editing composition further comprises a ngRNA that comprises a spacer comprising a sequence selected from the group consisting of SEQ ID NOs. 20988-20993 of Table 3D.

[0651] In some embodiments, the PEgRNA comprises a spacer comprising a sequence selected from the group consisting of SEQ Identifiers: A585-A586 of Table 3A. In some embodiments, the PEgRNA comprises a spacer comprising a sequence as set forth in SEQ ID NOs. 933-934 of Table 3A. In some embodiments, the PEgRNA comprises a PBS comprising a sequence selected from the group consisting of SEQ Identifiers: B2322-B2330 of Table 3B. In some embodiments, the PEgRNA comprises a PBS comprising a sequence selected from the group consisting of SEQ ID NOs. 3019-3025 of Table 3B. In some embodiments, the PEgRNA comprises a PBS comprising a sequence selected from the group consisting of sequences TATTCATG and TATTCATGG as disclosed in Table 3B. In some embodiments, the PEgRNA comprises an editing template comprising the sequence of SEQ Identifier: C11276 of Table 3C. In some embodiments, the PEgRNA comprises an editing template comprising a sequence selected from the group consisting of SEQ ID NOs:15302 of Table 3C. In some embodiments, the prime editing composition further comprises a ngRNA that comprises a spacer comprising a sequence selected from the group consisting of SEQ Identifiers: D1361-D1380 of Table 3D. In some embodiments, the prime editing composition further comprises a ngRNA that comprises a spacer comprising a sequence selected from the group consisting of SEQ ID NOs. 20994-21013 of Table 3D.

[0652] In some embodiments, the PEgRNA comprises a spacer comprising a sequence selected from the group consisting of SEQ Identifiers: A587-A588 of Table 3A. In some embodiments, the PEgRNA comprises a spacer comprising a sequence as set forth in SEQ ID NOs. 935-936 of Table 3A. In some embodiments, the PEgRNA comprises a PBS comprising a sequence selected from the group consisting of SEQ Identifiers: B2331-B2339 of Table 3B. In some embodiments, the PEgRNA comprises a PBS comprising a sequence selected from the group consisting of SEQ ID NOs. 3026-3032 of Table 3B. In some embodiments, the PEgRNA comprises a PBS comprising a sequence selected from the group consisting of sequences GCAATGTA and GCAATGTAC as disclosed in Table 3B. In some embodiments, the PEgRNA comprises an editing template comprising a sequence selected from the group consisting of SEQ Identifiers: C11277-C11292 of Table 3C. In some embodiments, the PEgRNA comprises an editing template comprising a sequence selected from the group consisting of SEQ ID NOs:15303-15318 of Table 3C. In some embodiments, the prime editing composition further comprises a ngRNA that comprises a spacer comprising a sequence selected from the group consisting of SEQ Identifiers: D1367-D1384 of Table 3D. In some embodiments, the prime editing composition further comprises a ngRNA that comprises a spacer comprising a sequence selected from the group consisting of SEQ ID NOs. 21000-21017 of Table 3D.

[0653] In some embodiments, the PEgRNA comprises a spacer comprising the sequence of SEQ Identifier: A589 of Table 3A. In some embodiments, the PEgRNA comprises a spacer comprising a sequence as set forth in SEQ ID NO. 937 of Table 3A. In some embodiments, the PEgRNA comprises a PBS comprising a sequence selected from the group consisting of SEQ Identifiers: B2340-B2348 of Table 3B. In some embodiments, the PEgRNA comprises a PBS comprising a sequence selected from the group consisting of SEQ ID NOs. 3033-3039 of Table 3B. In some embodiments, the PEgRNA comprises a PBS comprising a sequence selected from the group consisting of sequences TGCAATGT and TGCAATGTA as disclosed in Table 3B. In some embodiments, the PEgRNA comprises an editing template comprising a sequence selected from the group consisting of SEQ Identifiers: C11293-C11309 of Table 3C. In some embodiments, the PEgRNA comprises an editing template comprising a sequence selected from the group consisting of SEQ ID NOs:15319-15335 of Table 3C. In some embodiments, the prime editing composition further comprises a ngRNA that comprises a spacer comprising a sequence selected from the group consisting of SEQ Identifiers: D1367-D1380, D1383, and D1384 of Table 3D. In some embodiments, the prime editing composition further comprises a ngRNA that comprises a spacer comprising a sequence selected from the group consisting of SEQ ID NOs. 21000-21013, 21016, and 21017 of Table 3D.

[0654] In some embodiments, the PEgRNA comprises a spacer comprising the sequence of SEQ Identifier: A590 of Table 3A. In some embodiments, the PEgRNA comprises a spacer comprising a sequence as set forth in SEQ ID NO. 938 of Table 3A. In some embodiments, the PEgRNA comprises a PBS comprising a sequence selected from the group consisting of SEQ Identifiers: B2349-B2357 of Table 3B. In some embodiments, the PEgRNA comprises a PBS comprising a sequence selected from the group consisting of SEQ ID NOs. 3040-3046 of Table 3B. In some embodiments, the PEgRNA comprises a PBS comprising a sequence selected from the group consisting of sequences CACTGCAA and CACTGCAAT as disclosed in Table 3B. In some embodiments, the PEgRNA comprises an editing template comprising a sequence selected from the group consisting of SEQ Identifiers: C11310-Cl1329 of Table 3C. In some embodiments, the PEgRNA comprises an editing template comprising a sequence selected from the group consisting of SEQ ID NOs:15336-15355 of Table 3C. In some embodiments, the prime editing composition further comprises a ngRNA that comprises a spacer comprising a sequence selected from the group consisting of SEQ Identifiers D1367-D1380, D1383, and D1384 of Table 3D. In some embodiments, the prime editing composition further comprises a ngRNA that comprises a spacer comprising a sequence selected from the group consisting of SEQ ID NOs. 21000-21013, 21016, and 21017 of Table 3D.

[0655] In some embodiments, the PEgRNA comprises a spacer comprising the sequence of SEQ ID Identifier: A591 of Table 3A. In some embodiments, the PEgRNA comprises a spacer comprising a sequence as set forth in SEQ ID NO. 939 of Table 3A. In some embodiments, the PEgRNA comprises a PBS comprising a sequence selected from the group consisting of SEQ Identifiers: B2358-B2366 of Table 3B. In some embodiments, the PEgRNA comprises a PBS comprising a sequence selected from the group consisting of SEQ ID NOs. 3047-3053 of Table 3B. In some embodiments, the PEgRNA comprises a PBS comprising a sequence selected from the group consisting of sequences TACTCATG and TACTCATGA as disclosed in Table 3B. In some embodiments, the PEgRNA comprises an editing template comprising a sequence selected from the group consisting of SEQ Identifiers: C11330-C11339 of Table 3C. In some embodiments, the PEgRNA comprises an editing template comprising a sequence selected from the group consisting of SEQ ID NOs:15356-15365 of Table 3C. In some embodiments, the prime editing composition further comprises a ngRNA that comprises a spacer comprising a sequence selected from the group consisting of SEQ Identifiers: D1367-D1380and D1383 of Table 3D. In some embodiments, the prime editing composition further comprises a ngRNA that comprises a spacer comprising a sequence selected from the group consisting of SEQ ID NOs. 21000-21013, and 21016 of Table 3D.

[0656] In some embodiments, the PEgRNA comprises a spacer comprising a sequence selected from the group consisting of SEQ Identifiers: A592-A594 of Table 3A. In some embodiments, the PEgRNA comprises a spacer comprising a sequence as set forth in SEQ ID NOs. 940-942 of Table 3A. In some embodiments, the PEgRNA comprises a PBS comprising a sequence selected from the group consisting of SEQ Identifiers: B2367-B2375 of Table 3B. In some embodiments, the PEgRNA comprises a PBS comprising a sequence selected from the group consisting of SEQ ID NOs. 3054-3060 of Table 3B. In some embodiments, the PEgRNA comprises a PBS comprising a sequence selected from the group consisting of sequences TATGCTGG and TATGCTGGA as disclosed in Table 3B. In some embodiments, the PEgRNA comprises an editing template comprising a sequence selected from the group consisting of SEQ Identifiers: C11340-C11370 of Table 3C. In some embodiments, the PEgRNA comprises an editing template comprising a sequence selected from the group consisting of SEQ ID NOs:15366-15396 of Table 3C. In some embodiments, the prime editing composition further comprises a ngRNA that comprises a spacer comprising a sequence selected from the group consisting of SEQ Identifiers: D1355-D1360, and D1385-D1390 of Table 3D. In some embodiments, the prime editing composition further comprises a ngRNA that comprises a spacer comprising a sequence selected from the group consisting of SEQ ID NOs. 20988-20993, and 21018-21023 of Table 3D.

[0657] In some embodiments, the PEgRNA comprises a spacer comprising a sequence selected from the group consisting of SEQ Identifiers: A595-A596 of Table 3A. In some embodiments, the PEgRNA comprises a spacer comprising a sequence as set forth in SEQ ID NO. 943-944 of Table 3A. In some embodiments, the PEgRNA comprises a PBS comprising a sequence selected from the group consisting of SEQ Identifiers: B2376-B2384 of Table 3B. In some embodiments, the PEgRNA comprises a PBS comprising a sequence selected from the group consisting of SEQ ID NOs. 3061-3067 of Table 3B. In some embodiments, the PEgRNA comprises a PBS comprising a sequence selected from the group consisting of sequences ATATTCAT and ATATTCATG as disclosed in Table 3B. In some embodiments, the PEgRNA comprises an editing template comprising a sequence selected from the group consisting of SEQ Identifiers: C11371-Cl1374 of Table 3C. In some embodiments, the PEgRNA comprises an editing template comprising a sequence selected from the group consisting of SEQ ID NOs:15397-15400 of Table 3C. In some embodiments, the prime editing composition further comprises a ngRNA that comprises a spacer comprising a sequence selected from the group consisting of SEQ Identifiers: D1355, and D1391-D1399 of Table 3D. In some embodiments, the prime editing composition further comprises a ngRNA that comprises a spacer comprising a sequence selected from the group consisting of SEQ ID NOs. 20988, and 21024-21032 of Table 3D.

[0658] In some embodiments, the PEgRNA comprises a spacer comprising the of SEQ Identifier: A597 of Table 3A. In some embodiments, the PEgRNA comprises a spacer comprising a sequence as set forth in SEQ ID NO. 945 of Table 3A. In some embodiments, the PEgRNA comprises a PBS comprising a sequence selected from the group consisting of SEQ Identifiers: B2385-B2393 of Table 3B. In some embodiments, the PEgRNA comprises a PBS comprising a sequence selected from the group consisting of SEQ ID NOs. 3068-3074 of Table 3B. In some embodiments, the PEgRNA comprises a PBS comprising a sequence selected from the group consisting of sequences GATATTCA and GATATTCAT as disclosed in Table 3B. In some embodiments, the PEgRNA comprises an editing template comprising a sequence selected from the group consisting of SEQ Identifiers: C11375-C11377 of Table 3C. In some embodiments, the PEgRNA comprises an editing template comprising a sequence selected from the group consisting of SEQ ID NOs:15401-15403 of Table 3C. In some embodiments, the prime editing composition further comprises a ngRNA that comprises a spacer comprising a sequence selected from the group consisting of SEQ Identifiers: D1367-D1380 of Table 3D. In some embodiments, the prime editing composition further comprises a ngRNA that comprises a spacer comprising a sequence selected from the group consisting of SEQ ID NOs. 21000-21013 of Table 3D.

[0659] In some embodiments, the PEgRNA comprises a spacer comprising a sequence selected from the group consisting of SEQ Identifier: A598-A599 of Table 3A. In some embodiments, the PEgRNA comprises a spacer comprising a sequence as set forth in SEQ ID NOs. 946-947 of Table 3A. In some embodiments, the PEgRNA comprises a PBS comprising a sequence selected from the group consisting of SEQ Identifiers: B2394-B2402 of Table 3B. In some embodiments, the PEgRNA comprises a PBS comprising a sequence selected from the group consisting of SEQ ID NOs. 3075-3081 of Table 3B. In some embodiments, the PEgRNA comprises a PBS comprising a sequence selected from the group consisting of sequences TGTACTCA and TGTACTCAT as disclosed in Table 3B. In some embodiments, the PEgRNA comprises an editing template comprising a sequence selected from the group consisting of SEQ Identifiers: C11378-C11401 of Table 3C. In some embodiments, the PEgRNA comprises an editing template comprising a sequence selected from the group consisting of SEQ ID NOs:15404-15427 of Table 3C. In some embodiments, the prime editing composition further comprises a ngRNA that comprises a spacer comprising a sequence selected from the group consisting of SEQ Identifiers: D1355, and D1391-D1399 of Table 3D. In some embodiments, the prime editing composition further comprises a ngRNA that comprises a spacer comprising a sequence selected from the group consisting of SEQ ID NOs. 20988, and 21024-21032 of Table 3D.

[0660] In some embodiments, the PEgRNA comprises a spacer comprising the sequence of SEQ Identifier: A600 of Table 3A. In some embodiments, the PEgRNA comprises a spacer comprising a sequence as set forth in SEQ ID NO. 948 of Table 3A. In some embodiments, the PEgRNA comprises a PBS comprising a sequence selected from the group consisting of SEQ Identifiers: B2403-B2411 of Table 3B. In some embodiments, the PEgRNA comprises a PBS comprising a sequence selected from the group consisting of SEQ ID NOs. 3082-3088 of Table 3B. In some embodiments, the PEgRNA comprises a PBS comprising a sequence selected from the group consisting of sequences ATGTACTC and ATGTACTCA as disclosed in Table 3B. In some embodiments, the PEgRNA comprises an editing template comprising a sequence selected from the group consisting of SEQ Identifiers: C11402-C11414 of Table 3C. In some embodiments, the PEgRNA comprises an editing template comprising a sequence selected from the group consisting of SEQ ID NOs:15428-15440 of Table 3C. In some embodiments, the prime editing composition further comprises a ngRNA that comprises a spacer comprising a sequence selected from the group consisting of SEQ Identifiers: D1367-D1380and D1383 of Table 3D. In some embodiments, the prime editing composition further comprises a ngRNA that comprises a spacer comprising a sequence selected from the group consisting of SEQ ID NOs. 21000-21013, and 21016 of Table 3D.

[0661] In some embodiments, the PEgRNA comprises a spacer comprising the sequence of SEQ Identifier: A601 of Table 3A. In some embodiments, the PEgRNA comprises a spacer comprising a sequence as set forth in SEQ ID NO. 949 of Table 3A. In some embodiments, the PEgRNA comprises a PBS comprising a sequence selected from the group consisting of SEQ Identifiers: B2412-B2420 of Table 3B. In some embodiments, the PEgRNA comprises a PBS comprising a sequence selected from the group consisting of SEQ ID NOs. 3089-3095 of Table 3B. In some embodiments, the PEgRNA comprises a PBS comprising a sequence selected from the group consisting of sequences GGATAGCT and GGATAGCTT as disclosed in Table 3B. In some embodiments, the PEgRNA comprises an editing template comprising a sequence selected from the group consisting of SEQ Identifiers: C11415-C11445 of Table 3C. In some embodiments, the PEgRNA comprises an editing template comprising a sequence selected from the group consisting of SEQ ID NOs:15441-15471 of Table 3C. In some embodiments, the prime editing composition further comprises a ngRNA that comprises a spacer comprising a sequence selected from the group consisting of SEQ Identifiers: D1315-D1329. and D1400-D1403 of Table 3D. In some embodiments, the prime editing composition further comprises a ngRNA that comprises a spacer comprising a sequence selected from the group consisting of SEQ ID NOs. 20948-20962, and 21033-21036 of Table 3D.

[0662] In some embodiments, the PEgRNA comprises a spacer comprising the of SEQ Identifier: A602 of Table 3A. In some embodiments, the PEgRNA comprises a spacer comprising a sequence as set forth in SEQ ID NO. 950 of Table 3A. In some embodiments, the PEgRNA comprises a PBS comprising a sequence selected from the group consisting of SEQ Identifiers: B2421-B2429 of Table 3B. In some embodiments, the PEgRNA comprises a PBS comprising a sequence selected from the group consisting of SEQ ID NOs. 3096-3102 of Table 3B. In some embodiments, the PEgRNA comprises a PBS comprising a sequence selected from the group consisting of sequences ATGCTGGA and ATGCTGGAG as disclosed in Table 3B. In some embodiments, the PEgRNA comprises an editing template comprising a sequence selected from the group consisting of SEQ Identifiers: C11446-C11476 of Table 3C. In some embodiments, the PEgRNA comprises an editing template comprising a sequence selected from the group consisting of SEQ ID NOs:15472-15502 of Table 3C. In some embodiments, the prime editing composition further comprises a ngRNA that comprises a spacer comprising a sequence selected from the group consisting of SEQ Identifiers: D1370-D1380, D1384, D1386, D1404, D1405, D1406, and D1407 of Table 3D. In some embodiments, the prime editing composition further comprises a ngRNA that comprises a spacer comprising a sequence selected from the group consisting of SEQ ID NOs. 21003-21013, 21017, 21019, 21037, 21038, 21039, and 21040 of Table 3D.

[0663] In some embodiments, the PEgRNA comprises a spacer comprising a sequence selected from the group consisting of SEQ Identifiers: A603-A604 of Table 3A. In some embodiments, the PEgRNA comprises a spacer comprising a sequence as set forth in SEQ ID NOs. 951-952 of Table 3A. In some embodiments, the PEgRNA comprises a PBS comprising a sequence selected from the group consisting of SEQ Identifiers: B2430-B2438 of Table 3B. In some embodiments, the PEgRNA comprises a PBS comprising a sequence selected from the group consisting of SEQ ID NOs. 3103-3109 of Table 3B. In some embodiments, the PEgRNA comprises a PBS comprising a sequence selected from the group consisting of sequences ATCTTTTT and ATCTTTTTA as disclosed in Table 3B. In some embodiments, the PEgRNA comprises an editing template comprising a sequence selected from the group consisting of SEQ Identifiers: C11477-C11502 of Table 3C. In some embodiments, the PEgRNA comprises an editing template comprising a sequence selected from the group consisting of SEQ ID NOs:15503-15528 of Table 3C. In some embodiments, the prime editing composition further comprises a ngRNA that comprises a spacer comprising a sequence selected from the group consisting of SEQ Identifiers: D1335-D1354, D1408, and D1409 of Table 3D. In some embodiments, the prime editing composition further comprises a ngRNA that comprises a spacer comprising a sequence selected from the group consisting of SEQ ID NOs. 20968-20987, 21041, and 21042 of Table 3D.

[0664] In some embodiments, the PEgRNA comprises a spacer comprising the sequence of SEQ Identifier: A605 of Table 3A. In some embodiments, the PEgRNA comprises a spacer comprising a sequence as set forth in SEQ ID NO. 953 of Table 3A. In some embodiments, the PEgRNA comprises a PBS comprising a sequence selected from the group consisting of SEQ Identifiers: B2439-B2447 of Table 3B. In some embodiments, the PEgRNA comprises a PBS comprising a sequence selected from the group consisting of SEQ ID NOs. 3110-3116 of Table 3B. In some embodiments, the PEgRNA comprises a PBS comprising a sequence selected from the group consisting of sequences ATGTGGAT and ATGTGGATA as disclosed in Table 3B. In some embodiments, the PEgRNA comprises an editing template comprising a sequence selected from the group consisting of SEQ Identifiers: C11503-Cl1533 of Table 3C. In some embodiments, the PEgRNA comprises an editing template comprising a sequence selected from the group consisting of SEQ ID NOs:15529-15559 of Table 3C. In some embodiments, the prime editing composition further comprises a ngRNA that comprises a spacer comprising a sequence selected from the group consisting of SEQ Identifiers: D1315-D1329, D1400-D1403, and D1410 of Table 3D. In some embodiments, the prime editing composition further comprises a ngRNA that comprises a spacer comprising a sequence selected from the group consisting of SEQ ID NOs. 20948-20962, 21033-21036, and 21043 of Table 3D.

[0665] In some embodiments, the PEgRNA comprises a spacer comprising a sequence selected from the group consisting of SEQ Identifiers: A606-A609 of Table 3A. In some embodiments, the PEgRNA comprises a spacer comprising a sequence as set forth in SEQ ID NOs. 954-957 of Table 3A. In some embodiments, the PEgRNA comprises a PBS comprising a sequence selected from the group consisting of SEQ Identifiers: B2448-B2456 of Table 3B. In some embodiments, the PEgRNA comprises a PBS comprising a sequence selected from the group consisting of SEQ ID NOs. 3117-3123 of Table 3B. In some embodiments, the PEgRNA comprises a PBS comprising a sequence selected from the group consisting of sequences CAATGTAC and CAATGTACT as disclosed in Table 3B. In some embodiments, the PEgRNA comprises an editing template comprising a sequence selected from the group consisting of SEQ Identifiers: C11534-C11548 of Table 3C. In some embodiments, the PEgRNA comprises an editing template comprising a sequence selected from the group consisting of SEQ ID NOs:15560-15574 of Table 3C. In some embodiments, the prime editing composition further comprises a ngRNA that comprises a spacer comprising a sequence selected from the group consisting of SEQ Identifiers: D1355-D1360, Dand 1367-D1383 of Table 3D. In some embodiments, the prime editing composition further comprises a ngRNA that comprises a spacer comprising a sequence selected from the group consisting of SEQ ID NOs. 20988-20993, and 21000-21016 of Table 3D.

[0666] In some embodiments, the PEgRNA comprises a spacer comprising a sequence selected from the group consisting of SEQ Identifiers: A610-A611 of Table 3A. In some embodiments, the PEgRNA comprises a spacer comprising a sequence as set forth in SEQ ID NOs. 958-959 of Table 3A. In some embodiments, the PEgRNA comprises a PBS comprising a sequence selected from the group consisting of SEQ Identifiers: B2457-B2465 of Table 3B. In some embodiments, the PEgRNA comprises a PBS comprising a sequence selected from the group consisting of SEQ ID NOs. 3124-3130 of Table 3B. In some embodiments, the PEgRNA comprises a PBS comprising a sequence selected from the group consisting of sequences TTTACAGC and TTTACAGCC as disclosed in Table 3B. In some embodiments, the PEgRNA comprises an editing template comprising a sequence selected from the group consisting of SEQ Identifiers: C11549-C11606 of Table 3C. In some embodiments, the PEgRNA comprises an editing template comprising a sequence selected from the group consisting of SEQ ID NOs:15575-15632 of Table 3C. In some embodiments, the prime editing composition further comprises a ngRNA that comprises a spacer comprising a sequence selected from the group consisting of SEQ Identifiers: D1355, D1391, D1392, D1394-D1397, D1399, and D1411-D1414 of Table 3D. In some embodiments, the prime editing composition further comprises a ngRNA that comprises a spacer comprising a sequence selected from the group consisting of SEQ ID NOs. 20988, 21024, 21025, 21027-21030, 21032, and 21044-21047 of Table 3D.

[0667] In some embodiments, the PEgRNA comprises a spacer comprising the sequence of SEQ Identifier: A612 of Table 3A. In some embodiments, the PEgRNA comprises a spacer comprising a sequence as set forth in SEQ ID NO. 960 of Table 3A. In some embodiments, the PEgRNA comprises a PBS comprising a sequence selected from the group consisting of SEQ Identifiers: B2466-B2474 of Table 3B. In some embodiments, the PEgRNA comprises a PBS comprising a sequence selected from the group consisting of SEQ ID NOs. 3131-3137 of Table 3B. In some embodiments, the PEgRNA comprises a PBS comprising a sequence selected from the group consisting of sequences GTTTACAG and GTTTACAGC as disclosed in Table 3B. In some embodiments, the PEgRNA comprises an editing template comprising a sequence selected from the group consisting of SEQ Identifiers: C11607-C11636 of Table 3C. In some embodiments, the PEgRNA comprises an editing template comprising a sequence selected from the group consisting of SEQ ID NOs:15633-15662 of Table 3C. In some embodiments, the prime editing composition further comprises a ngRNA that comprises a spacer comprising a sequence selected from the group consisting of SEQ Identifiers: D1370-D1380, D1383, D1384, D1404, and D1405 of Table 3D. In some embodiments, the prime editing composition further comprises a ngRNA that comprises a spacer comprising a sequence selected from the group consisting of SEQ ID NOs. 21003-21013, 21016, 21017, 21037, and 21038 of Table 3D.

[0668] In some embodiments, the PEgRNA comprises a spacer comprising a sequence selected from the group consisting of SEQ Identifiers: A613-A614 of Table 3A. In some embodiments, the PEgRNA comprises a spacer comprising a sequence as set forth in SEQ ID NOs. 961-962 of Table 3A. In some embodiments, the PEgRNA comprises a PBS comprising a sequence selected from the group consisting of SEQ Identifiers: B2475-B2483 of Table 3B. In some embodiments, the PEgRNA comprises a PBS comprising a sequence selected from the group consisting of SEQ ID NOs. 3138-3144 of Table 3B. In some embodiments, the PEgRNA comprises a PBS comprising a sequence selected from the group consisting of sequences TTTTAACT and TTTTAACTT as disclosed in Table 3B. In some embodiments, the PEgRNA comprises an editing template comprising a sequence selected from the group consisting of SEQ Identifiers: C11637-C11645 of Table 3C. In some embodiments, the PEgRNA comprises an editing template comprising a sequence selected from the group consisting of SEQ ID NOs:15663-15671 of Table 3C. In some embodiments, the prime editing composition further comprises a ngRNA that comprises a spacer comprising a sequence selected from the group consisting of SEQ Identifiers: D1305-D1334 of Table 3D. In some embodiments, the prime editing composition further comprises a ngRNA that comprises a spacer comprising a sequence selected from the group consisting of SEQ ID NOs. 20938-20967 of Table 3D.

[0669] In some embodiments, the PEgRNA comprises a spacer comprising a sequence selected from the group consisting of SEQ Identifiers: A615-A616 of Table 3A. In some embodiments, the PEgRNA comprises a spacer comprising a sequence as set forth in SEQ ID NOs. 963-964 of Table 3A. In some embodiments, the PEgRNA comprises a PBS comprising a sequence selected from the group consisting of SEQ Identifiers: B2484-B2492 of Table 3B. In some embodiments, the PEgRNA comprises a PBS comprising a sequence selected from the group consisting of SEQ ID NOs. 3145-3151 of Table 3B. In some embodiments, the PEgRNA comprises a PBS comprising a sequence selected from the group consisting of sequences TAACTTTT and TAACTTTTA as disclosed in Table 3B. In some embodiments, the PEgRNA comprises an editing template comprising a sequence selected from the group consisting of SEQ Identifiers: C11646-C11651 of Table 3C. In some embodiments, the PEgRNA comprises an editing template comprising a sequence selected from the group consisting of SEQ ID NOs:15672-15677 of Table 3C. In some embodiments, the prime editing composition further comprises a ngRNA that comprises a spacer comprising a sequence selected from the group consisting of SEQ Identifiers: D1305-D1334 of Table 3D. In some embodiments, the prime editing composition further comprises a ngRNA that comprises a spacer comprising a sequence selected from the group consisting of SEQ ID NOs. 20938-20967 of Table 3D.

[0670] In some embodiments, the PEgRNA comprises a spacer comprising a sequence selected from the group consisting of SEQ Identifiers: A617-A618 of Table 3A. In some embodiments, the PEgRNA comprises a spacer comprising a sequence as set forth in SEQ Identifiers. 965-966 of Table 3A. In some embodiments, the PEgRNA comprises a PBS comprising a sequence selected from the group consisting of SEQ Identifiers: B2493-B2501 of Table 3B. In some embodiments, the PEgRNA comprises a PBS comprising a sequence selected from the group consisting of SEQ ID NOs. 3152-3158 of Table 3B. In some embodiments, the PEgRNA comprises a PBS comprising a sequence selected from the group consisting of sequences AACTTTTA and AACTTTTAT as disclosed in Table 3B. In some embodiments, the PEgRNA comprises an editing template comprising a sequence selected from the group consisting of SEQ Identifiers: C11652-C11661 of Table 3C. In some embodiments, the PEgRNA comprises an editing template comprising a sequence selected from the group consisting of SEQ ID NOs:15678-15687 of Table 3C. In some embodiments, the prime editing composition further comprises a ngRNA that comprises a spacer comprising a sequence selected from the group consisting of SEQ Identifiers: D1335-D1354, D1408, and D1409 of Table 3D. In some embodiments, the prime editing composition further comprises a ngRNA that comprises a spacer comprising a sequence selected from the group consisting of SEQ ID NOs. 20968-20987, 21041, and 21042 of Table 3D.

[0671] In some embodiments, the editing target sequence is in exon 22 of the CFTR gene.

[0672] In some embodiments, the editing target sequence or the complementary sequence on the CFTR gene thereof comprises a mutation that encodes an amino acid substitution R1158*, R1162*, Ri 162L, 51161R, R1162L, and/or K1165T relative to a wild type CFTR polypeptide set forth in SEQ ID NO: 19, and wherein the editing template encodes an intended nucleotide edit that corrects the mutation. In some embodiments, the editing target sequence or the complementary sequence on the CFTR gene thereof comprises a C→T mutation (c.3472C>T) at position 117,627,525, a C→G mutation (c.3483C>G) at position 117,627,536, a G→T mutation (c.3485G>T) at position 117,627,538, a deletion of nucleotides AG (c.3486_3487delAG) at position 117,627,539, a duplication of a nucleotide T (c.3492dupT) at position 117,627,545, a A→C mutation (c.3494A>C) at position 117,627,547, a deletion of G (c.3495delG) at position 117,627,548, a C→A mutation (c.3469-3C>A) at position 117,627,519, an A→G mutation (c.3469-2A>G) at position 117,627,520, and/or a deletion of nucleotide T (c.3477delT) at position 117,627,530 of human chromosome 7 compared to a wild type CFTR gene. In some embodiments, the editing template comprises an intended nucleotide edit compared to the target CFTR gene, wherein incorporation of the intended nucleotide edit encoded by the editing template corrects the mutation.

[0673] In some embodiments, the editing template comprises a wild type CFTR gene sequence. In some embodiments, the editing template comprises one or more intended nucleotide edits compared to the target CFTR gene sequence in exon 22 of the target CFTR gene. Accordingly, in some embodiments, the newly synthesized single stranded DNA comprises one or more intended nucleotide edits compared to the target CFTR gene sequence. In some embodiments, the newly synthesized single stranded DNA encoded by the editing template is capable of correcting the c.3472C>T mutation, the c.3483C>G mutation, the c.3485G>T mutation, the c.3486_3487delAG mutation, the c.3492dupT mutation, the c.3494A>C mutation, the c.3495delG mutation the c.3469-3C>A mutation, the c.3469-2A>G mutation, and/or the c.3477delT mutation in the target CFTR gene. In some embodiments, the newly synthesized single stranded DNA encoded by the editing template is capable of correcting all of the c.3472C>T mutation, the c.3469-3C>A mutation, the c.3469-2A>G mutation, and/or the c.3477delT mutation in the target CFTR gene. In some embodiments, two or more of the c.3472C>T mutation, the c.3469-3C>A mutation, the c.3469-2A>G mutation, and the c.3477delT mutation are located on the same CFTR gene. In some embodiments, the newly synthesized single stranded DNA encoded by the editing template is capable of correcting the c.3472C>T mutation, the c.3483C>G mutation, the c.3485G>T mutation, the c.3486_3487delAG mutation, the c.3492dupT mutation, the c.3494A>C mutation, the c.3495delG mutation, the c.3469-3C>A mutation, the c.3469-2A>G mutation, and the c.3477delT mutation that are located on different CFTR genes. For example, in some embodiments, a subject may comprise two copies of CFTR genes, each comprising a different mutation selected from the group consisting of the c.3472C>T mutation, the c.3469-3C>A mutation, the c.3469-2A>G mutation, the c.3483C>G mutation, the c.3485G>T mutation, the c.3486_3487delAG mutation, the c.3492dupT mutation, the c.3494A>C mutation, the c.3495delG mutation, and the c.3477delT mutation, all of which may be corrected by an editing template of a single PEgRNA. In some embodiments, the editing template is capable of correcting one or more, or all of the c.3472C>T mutation, the c.3469-3C>A mutation, the c.3469-2A>G mutation, the c.3483C>G mutation, the c.3485G>T mutation, the c.3486_3487delAG mutation, the c.3492dupT mutation, the c.3494A>C mutation, the c.3495delG mutation, and the c.3477delT mutation that are in different subjects, wherein each subject may have one or more of the mutations.

[0674] In some embodiments, the PEgRNA comprises a spacer comprising a sequence selected from the group consisting of SEQ Identifiers: A619-A620 of Table 3A. In some embodiments, the PEgRNA comprises a spacer comprising a sequence as set forth in SEQ ID NOs. 967-968 of Table 3A. In some embodiments, the PEgRNA comprises a PBS comprising a sequence selected from the group consisting of SEQ Identifiers: B2502-B2510 of Table 3B. In some embodiments, the PEgRNA comprises a PBS comprising a sequence selected from the group consisting of SEQ ID NOs. 3159-3165 of Table 3B. In some embodiments, the PEgRNA comprises a PBS comprising a sequence selected from the group consisting of sequences GCCGAGTC and GCCGAGTCT as disclosed in Table 3B. In some embodiments, the PEgRNA comprises an editing template comprising a sequence selected from the group consisting of SEQ Identifiers: C11662-C11721 of Table 3C. In some embodiments, the PEgRNA comprises an editing template comprising a sequence selected from the group consisting of SEQ ID NOs: 15688-15747 of Table 3C. In some embodiments, the prime editing composition further comprises a ngRNA that comprises a spacer comprising a sequence selected from the group consisting of SEQ Identifiers: D1415-D1434 of Table 3D. In some embodiments, the prime editing composition further comprises a ngRNA that comprises a spacer comprising a sequence selected from the group consisting of SEQ ID NOs. 21048-21067 of Table 3D.

[0675] In some embodiments, the PEgRNA comprises a spacer comprising a sequence selected from the group consisting of SEQ Identifiers: A621-A622 of Table 3A. In some embodiments, the PEgRNA comprises a spacer comprising a sequence as set forth in SEQ ID NOs. 969-970 of Table 3A. In some embodiments, the PEgRNA comprises a PBS comprising a sequence selected from the group consisting of SEQ Identifiers: B2511-B2519 of Table 3B. In some embodiments, the PEgRNA comprises a PBS comprising a sequence selected from the group consisting of SEQ ID NOs. 3166-3172 of Table 3B. In some embodiments, the PEgRNA comprises a PBS comprising a sequence selected from the group consisting of sequences TAAAAATA and TAAAAATAA as disclosed in Table 3B. In some embodiments, the PEgRNA comprises an editing template comprising a sequence selected from the group consisting of SEQ Identifiers: C11722-C11781 of Table 3C. In some embodiments, the PEgRNA comprises an editing template comprising a sequence selected from the group consisting of SEQ ID NOs:15748-15807 of Table 3C. In some embodiments, the prime editing composition further comprises a ngRNA that comprises a spacer comprising a sequence selected from the group consisting of SEQ Identifiers: D1435-D1440 of Table 3D. In some embodiments, the prime editing composition further comprises a ngRNA that comprises a spacer comprising a sequence selected from the group consisting of SEQ ID NOs. 21068-21073 of Table 3D.

[0676] In some embodiments, the PEgRNA comprises a spacer comprising a sequence selected from the group consisting of SEQ Identifiers: A623-A624 of Table 3A. In some embodiments, the PEgRNA comprises a spacer comprising a sequence as set forth in SEQ ID NOs. 971-972 of Table 3A. In some embodiments, the PEgRNA comprises a PBS comprising a sequence selected from the group consisting of SEQ Identifiers: B2520-B2528 of Table 3B. In some embodiments, the PEgRNA comprises a PBS comprising a sequence selected from the group consisting of SEQ ID NOs. 3173-3179 of Table 3B. In some embodiments, the PEgRNA comprises a PBS comprising a sequence selected from the group consisting of sequences AGCCGAGT and AGCCGAGTC as disclosed in Table 3B. In some embodiments, the PEgRNA comprises an editing template comprising a sequence selected from the group consisting of SEQ Identifiers: C11782-C11812 of Table 3C. In some embodiments, the PEgRNA comprises an editing template comprising a sequence selected from the group consisting of SEQ ID NOs:15808-15838 of Table 3C. In some embodiments, the prime editing composition further comprises a ngRNA that comprises a spacer comprising a sequence selected from the group consisting of SEQ Identifiers: D1441-D1472 of Table 3D. In some embodiments, the prime editing composition further comprises a ngRNA that comprises a spacer comprising a sequence selected from the group consisting of SEQ ID NOs. 21074-21105 of Table 3D.

[0677] In some embodiments, the PEgRNA comprises a spacer comprising the sequence of SEQ Identifier: A625 of Table 3A. In some embodiments, the PEgRNA comprises a spacer comprising a sequence as set forth in SEQ ID NO. 973 of Table 3A. In some embodiments, the PEgRNA comprises a PBS comprising a sequence selected from the group consisting of SEQ Identifiers: B2529-B2537 of Table 3B. In some embodiments, the PEgRNA comprises a PBS comprising a sequence selected from the group consisting of SEQ ID NOs. 3180-3186 of Table 3B. In some embodiments, the PEgRNA comprises a PBS comprising a sequence selected from the group consisting of sequences CAACAGAA and CAACAGAAG as disclosed in Table 3B. In some embodiments, the PEgRNA comprises an editing template comprising a sequence selected from the group consisting of SEQ Identifiers: C11813-C11815 of Table 3C. In some embodiments, the PEgRNA comprises an editing template comprising a sequence selected from the group consisting of SEQ ID NOs:15839-15841 of Table 3C. In some embodiments, the prime editing composition further comprises a ngRNA that comprises a spacer comprising a sequence selected from the group consisting of SEQ Identifiers: D1445-D1461, and D1473-D1478 of Table 3D. In some embodiments, the prime editing composition further comprises a ngRNA that comprises a spacer comprising a sequence selected from the group consisting of SEQ ID NOs. 21078-21094, and 21106-21111 of Table 3D.

[0678] In some embodiments, the PEgRNA comprises a spacer comprising a sequence selected from the group consisting of SEQ Identifiers: A626-A628 of Table 3A. In some embodiments, the PEgRNA comprises a spacer comprising a sequence as set forth in SEQ ID NOs. 974-976 of Table 3A. In some embodiments, the PEgRNA comprises a PBS comprising a sequence selected from the group consisting of SEQ Identifiers: B2538-B2546 of Table 3B. In some embodiments, the PEgRNA comprises a PBS comprising a sequence selected from the group consisting of SEQ ID NOs. 3187-3193 of Table 3B. In some embodiments, the PEgRNA comprises a PBS comprising a sequence selected from the group consisting of sequences TTTAAGTT and TTTAAGTTC as disclosed in Table 3B. In some embodiments, the PEgRNA comprises an editing template comprising a sequence selected from the group consisting of SEQ Identifiers: C11816-C11837 of Table 3C. In some embodiments, the PEgRNA comprises an editing template comprising a sequence selected from the group consisting of SEQ ID NOs:15842-15863 of Table 3C. In some embodiments, the prime editing composition further comprises a ngRNA that comprises a spacer comprising a sequence selected from the group consisting of SEQ Identifiers: D1427, and D1479-D1486 of Table 3D. In some embodiments, the prime editing composition further comprises a ngRNA that comprises a spacer comprising a sequence selected from the group consisting of SEQ ID NOs. 21060, and 21112-21119 of Table 3D.

[0679] In some embodiments, the PEgRNA comprises a spacer comprising a sequence selected from the group consisting of SEQ Identifiers: A629-A630 of Table 3A. In some embodiments, the PEgRNA comprises a spacer comprising a sequence as set forth in SEQ ID NOs. 977-978 of Table 3A. In some embodiments, the PEgRNA comprises a PBS comprising a sequence selected from the group consisting of SEQ Identifiers: B2547-B2555 of Table 3B. In some embodiments, the PEgRNA comprises a PBS comprising a sequence selected from the group consisting of SEQ ID NOs. 3194-3200 of Table 3B. In some embodiments, the PEgRNA comprises a PBS comprising a sequence selected from the group consisting of sequences ATAAAAAT and ATAAAAATA as disclosed in Table 3B. In some embodiments, the PEgRNA comprises an editing template comprising a sequence selected from the group consisting of SEQ Identifiers: C11838-C11868 of Table 3C. In some embodiments, the PEgRNA comprises an editing template comprising a sequence selected from the group consisting of SEQ ID NOs:15864-15894 of Table 3C. In some embodiments, the prime editing composition further comprises a ngRNA that comprises a spacer comprising a sequence selected from the group consisting of SEQ Identifiers: D1487-D1507 of Table 3D. In some embodiments, the prime editing composition further comprises a ngRNA that comprises a spacer comprising a sequence selected from the group consisting of SEQ ID NOs. 21120-21140 of Table 3D.

[0680] In some embodiments, the PEgRNA comprises a spacer comprising the sequence of SEQ Identifier: A631 of Table 3A. In some embodiments, the PEgRNA comprises a spacer comprising a sequence as set forth in SEQ ID NO. 979 of Table 3A. In some embodiments, the PEgRNA comprises a PBS comprising a sequence selected from the group consisting of SEQ Identifiers: B2556-B2564 of Table 3B. In some embodiments, the PEgRNA comprises a PBS comprising a sequence selected from the group consisting of SEQ ID NOs. 3201-3207 of Table 3B. In some embodiments, the PEgRNA comprises a PBS comprising a sequence selected from the group consisting of sequences TTTTTGTT and TTTTTGTTT as disclosed in Table 3B. In some embodiments, the PEgRNA comprises an editing template comprising a sequence selected from the group consisting of SEQ Identifiers: C11869-C11884 of Table 3C. In some embodiments, the PEgRNA comprises an editing template comprising a sequence selected from the group consisting of SEQ ID NOs:15895-15910 of Table 3C. In some embodiments, the prime editing composition further comprises a ngRNA that comprises a spacer comprising a sequence selected from the group consisting of SEQ Identifiers: D1487-D1504 and D1508 of Table 3D. In some embodiments, the prime editing composition further comprises a ngRNA that comprises a spacer comprising a sequence selected from the group consisting of SEQ ID NOs. 21120-21137, and 21141 of Table 3D.

[0681] In some embodiments, the PEgRNA comprises a spacer comprising a sequence selected from the group consisting of SEQ Identifiers: A632-A633 of Table 3A. In some embodiments, the PEgRNA comprises a spacer comprising a sequence as set forth in SEQ ID NOs. 980-981 of Table 3A. In some embodiments, the PEgRNA comprises a PBS comprising a sequence selected from the group consisting of SEQ Identifiers: B2565-B2573 of Table 3B. In some embodiments, the PEgRNA comprises a PBS comprising a sequence selected from the group consisting of SEQ ID NOs. 3208-3214 of Table 3B. In some embodiments, the PEgRNA comprises a PBS comprising a sequence selected from the group consisting of sequences ACATGCCA and ACATGCCAA as disclosed in Table 3B. In some embodiments, the PEgRNA comprises an editing template comprising a sequence selected from the group consisting of SEQ Identifiers: C11885-C11893 of Table 3C. In some embodiments, the PEgRNA comprises an editing template comprising a sequence selected from the group consisting of SEQ ID NOs:15911-15919 of Table 3C. In some embodiments, the prime editing composition further comprises a ngRNA that comprises a spacer comprising a sequence selected from the group consisting of SEQ Identifiers: D1445-D1461, and D1463-D1478 of Table 3D. In some embodiments, the prime editing composition further comprises a ngRNA that comprises a spacer comprising a sequence selected from the group consisting of SEQ ID NOs. 21078-21094, and 21096-21111 of Table 3D.

[0682] In some embodiments, the PEgRNA comprises a spacer comprising the sequence of SEQ Identifier: A634 of Table 3A. In some embodiments, the PEgRNA comprises a spacer comprising a sequence as set forth in SEQ ID NO. 982 of Table 3A. In some embodiments, the PEgRNA comprises a PBS comprising a sequence selected from the group consisting of SEQ Identifiers: B2574-B2582 of Table 3B. In some embodiments, the PEgRNA comprises a PBS comprising a sequence selected from the group consisting of SEQ ID NOs. 3215-3221 of Table 3B. In some embodiments, the PEgRNA comprises a PBS comprising a sequence selected from the group consisting of sequences TTGTTTTT and TTGTTTTTA as disclosed in Table 3B. In some embodiments, the PEgRNA comprises an editing template comprising a sequence selected from the group consisting of SEQ Identifiers: C11894-C11906 of Table 3C. In some embodiments, the PEgRNA comprises an editing template comprising a sequence selected from the group consisting of SEQ ID NOs:15920-15932 of Table 3C. In some embodiments, the prime editing composition further comprises a ngRNA that comprises a spacer comprising a sequence selected from the group consisting of SEQ Identifiers: D1487-D1503 D1508, D1509, and D1510 of Table 3D. In some embodiments, the prime editing composition further comprises a ngRNA that comprises a spacer comprising a sequence selected from the group consisting of SEQ ID NOs. 21120-21136, 21141, 21142, and 21143 of Table 3D.

[0683] In some embodiments, the PEgRNA comprises a spacer comprising a sequence selected from the group consisting of SEQ Identifiers: A635-A636 of Table 3A. In some embodiments, the PEgRNA comprises a spacer comprising a sequence as set forth in SEQ ID NOs. 983-984 of Table 3A. In some embodiments, the PEgRNA comprises a PBS comprising a sequence selected from the group consisting of SEQ Identifiers: B2583-B2591 of Table 3B. In some embodiments, the PEgRNA comprises a PBS comprising a sequence selected from the group consisting of SEQ ID NOs. 3222-3228 of Table 3B. In some embodiments, the PEgRNA comprises a PBS comprising a sequence selected from the group consisting of sequences AGTTCATT and AGTTCATTG as disclosed in Table 3B. In some embodiments, the PEgRNA comprises an editing template comprising a sequence selected from the group consisting of SEQ Identifiers: C11907-C11924 of Table 3C. In some embodiments, the PEgRNA comprises an editing template comprising a sequence selected from the group consisting of SEQ ID NOs:15933-15950 of Table 3C. In some embodiments, the prime editing composition further comprises a ngRNA that comprises a spacer comprising a sequence selected from the group consisting of SEQ Identifiers: D1443-D1474 of Table 3D. In some embodiments, the prime editing composition further comprises a ngRNA that comprises a spacer comprising a sequence selected from the group consisting of SEQ ID NOs. 21076-21107 of Table 3D.

[0684] In some embodiments, the PEgRNA comprises a spacer comprising a sequence selected from the group consisting of SEQ Identifiers: A637-A638 of Table 3A. In some embodiments, the PEgRNA comprises a spacer comprising a sequence as set forth in SEQ ID NOs. 985-986 of Table 3A. In some embodiments, the PEgRNA comprises a PBS comprising a sequence selected from the group consisting of SEQ Identifiers: B2592-B2600 of Table 3B. In some embodiments, the PEgRNA comprises a PBS comprising a sequence selected from the group consisting of SEQ ID NOs. 3229-3235 of Table 3B. In some embodiments, the PEgRNA comprises a PBS comprising a sequence selected from the group consisting of sequences CTTTAAGT and CTTTAAGTT as disclosed in Table 3B. In some embodiments, the PEgRNA comprises an editing template comprising a sequence selected from the group consisting of SEQ Identifiers: C11925-C11970 of Table 3C. In some embodiments, the PEgRNA comprises an editing template comprising a sequence selected from the group consisting of SEQ ID NOs:15951-15996 of Table 3C. In some embodiments, the prime editing composition further comprises a ngRNA that comprises a spacer comprising a sequence selected from the group consisting of SEQ Identifiers: D1442-D1461, D1473, D1474, D1511, D1512, and D1513 of Table 3D. In some embodiments, the prime editing composition further comprises a ngRNA that comprises a spacer comprising a sequence selected from the group consisting of SEQ ID NOs. 21075-21094, 21106, 21107, 21144, 21145, and 21146 of Table 3D.

[0685] In some embodiments, the PEgRNA comprises a spacer comprising the sequence of SEQ Identifier: A639 of Table 3A. In some embodiments, the PEgRNA comprises a spacer comprising a sequence as set forth in SEQ ID NO. 987 of Table 3A. In some embodiments, the PEgRNA comprises a PBS comprising a sequence selected from the group consisting of SEQ Identifiers: B2601-B2609 of Table 3B. In some embodiments, the PEgRNA comprises a PBS comprising a sequence selected from the group consisting of SEQ ID NOs. 3236-3242 of Table 3B. In some embodiments, the PEgRNA comprises a PBS comprising a sequence selected from the group consisting of sequences TCTTTAAG and TCTTTAAGT as disclosed in Table 3B. In some embodiments, the PEgRNA comprises an editing template comprising a sequence selected from the group consisting of SEQ Identifiers: C11971-C11994 of Table 3C. In some embodiments, the PEgRNA comprises an editing template comprising a sequence selected from the group consisting of SEQ ID NOs:15997-16020 of Table 3C. In some embodiments, the prime editing composition further comprises a ngRNA that comprises a spacer comprising a sequence selected from the group consisting of SEQ Identifiers: D1442-D1461. D1473, and D1474 of Table 3D. In some embodiments, the prime editing composition further comprises a ngRNA that comprises a spacer comprising a sequence selected from the group consisting of SEQ ID NOs. 21075-21094, 21106, and 21107 of Table 3D.

[0686] In some embodiments, the PEgRNA comprises a spacer comprising a sequence selected from the group consisting of SEQ Identifiers: A640-A641 of Table 3A. In some embodiments, the PEgRNA comprises a spacer comprising a sequence as set forth in SEQ ID NOs. 988-989 of Table 3A. In some embodiments, the PEgRNA comprises a PBS comprising a sequence selected from the group consisting of SEQ Identifiers: B2610-B2618 of Table 3B. In some embodiments, the PEgRNA comprises a PBS comprising a sequence selected from the group consisting of SEQ ID NOs. 3243-3249 of Table 3B. In some embodiments, the PEgRNA comprises a PBS comprising a sequence selected from the group consisting of sequences CTGAAATA and CTGAAATAA as disclosed in Table 3B. In some embodiments, the PEgRNA comprises an editing template comprising a sequence selected from the group consisting of SEQ Identifiers: C11995-C12025 of Table 3C. In some embodiments, the PEgRNA comprises an editing template comprising a sequence selected from the group consisting of SEQ ID NOs:16021-16051 of Table 3C. In some embodiments, the prime editing composition further comprises a ngRNA that comprises a spacer comprising a sequence selected from the group consisting of SEQ Identifiers: D1489-D1507 of Table 3D. In some embodiments, the prime editing composition further comprises a ngRNA that comprises a spacer comprising a sequence selected from the group consisting of SEQ ID NOs. 21122-21140 of Table 3D.

[0687] In some embodiments, the PEgRNA comprises a spacer comprising the sequence of SEQ Identifier: A642 of Table 3A. In some embodiments, the PEgRNA comprises a spacer comprising a sequence as set forth in SEQ ID NO. 990 of Table 3A. In some embodiments, the PEgRNA comprises a PBS comprising a sequence selected from the group consisting of SEQ Identifiers: B2619-B2627 of Table 3B. In some embodiments, the PEgRNA comprises a PBS comprising a sequence selected from the group consisting of SEQ ID NOs. 3250-3256 of Table 3B. In some embodiments, the PEgRNA comprises a PBS comprising a sequence selected from the group consisting of sequences GAAATAAA and GAAATAAAA as disclosed in Table 3B. In some embodiments, the PEgRNA comprises an editing template comprising a sequence selected from the group consisting of SEQ Identifiers: C12026-C12056 of Table 3C. In some embodiments, the PEgRNA comprises an editing template comprising a sequence selected from the group consisting of SEQ ID NOs:16052-16082 of Table 3C. In some embodiments, the prime editing composition further comprises a ngRNA that comprises a spacer comprising a sequence selected from the group consisting of SEQ Identifiers: D1487-D1504 of Table 3D. In some embodiments, the prime editing composition further comprises a ngRNA that comprises a spacer comprising a sequence selected from the group consisting of SEQ ID NOs. 21120-21137 of Table 3D.

[0688] In some embodiments, the PEgRNA comprises a spacer comprising a sequence selected from the group consisting of SEQ Identifiers: A643-A644 of Table 3A. In some embodiments, the PEgRNA comprises a spacer comprising a sequence as set forth in SEQ ID NOs. 991-992 of Table 3A. In some embodiments, the PEgRNA comprises a PBS comprising a sequence selected from the group consisting of SEQ Identifiers: B2628-B2636 of Table 3B. In some embodiments, the PEgRNA comprises a PBS comprising a sequence selected from the group consisting of SEQ ID NOs. 3257-3263 of Table 3B. In some embodiments, the PEgRNA comprises a PBS comprising a sequence selected from the group consisting of sequences GTTCATTG and GTTCATTGA as disclosed in Table 3B. In some embodiments, the PEgRNA comprises an editing template comprising a sequence selected from the group consisting of SEQ Identifiers: C12057-C12090 of Table 3C. In some embodiments, the PEgRNA comprises an editing template comprising a sequence selected from the group consisting of SEQ ID NOs:16083-16116 of Table 3C. In some embodiments, the prime editing composition further comprises a ngRNA that comprises a spacer comprising a sequence selected from the group consisting of SEQ Identifiers: D1416-D1423, D1426-D1433, D1514, and D1515 of Table 3D. In some embodiments, the prime editing composition further comprises a ngRNA that comprises a spacer comprising a sequence selected from the group consisting of SEQ ID NOs. 21049-21056, 21059-21066, 21147, and 21148 of Table 3D.

[0689] In some embodiments, the PEgRNA comprises a spacer comprising a sequence selected from the group consisting of SEQ Identifiers: A621-A622 of Table 3A. In some embodiments, the PEgRNA comprises a spacer comprising a sequence as set forth in SEQ ID NOs. 969-970 of Table 3A. In some embodiments, the PEgRNA comprises a PBS comprising a sequence selected from the group consisting of SEQ Identifiers: B2511-B2519 of Table 3B. In some embodiments, the PEgRNA comprises a PBS comprising a sequence selected from the group consisting of SEQ ID NOs. 3166-3172 of Table 3B. In some embodiments, the PEgRNA comprises a PBS comprising a sequence selected from the group consisting of sequences TAAAAATA and TAAAAATAA as disclosed in Table 3B. In some embodiments, the PEgRNA comprises an editing template comprising a sequence selected from the group consisting of SEQ Identifiers: C12091-C12126 of Table 3C. In some embodiments, the PEgRNA comprises an editing template comprising a sequence selected from the group consisting of SEQ ID NOs:16117-16152 of Table 3C. In some embodiments, the prime editing composition further comprises a ngRNA that comprises a spacer comprising a sequence selected from the group consisting of SEQ Identifiers: D1435-D1440 of Table 3D. In some embodiments, the prime editing composition further comprises a ngRNA that comprises a spacer comprising a sequence selected from the group consisting of SEQ ID NOs. 21068-21073 of Table 3D.

[0690] In some embodiments, the PEgRNA comprises a spacer comprising the sequence of SEQ Identifier: A625 of Table 3A. In some embodiments, the PEgRNA comprises a spacer comprising a sequence as set forth in SEQ ID NO. 973 of Table 3A. In some embodiments, the PEgRNA comprises a PBS comprising a sequence selected from the group consisting of SEQ Identifiers: B2529-B2537 of Table 3B. In some embodiments, the PEgRNA comprises a PBS comprising a sequence selected from the group consisting of SEQ ID NOs. 3180-3186 of Table 3B. In some embodiments, the PEgRNA comprises a PBS comprising a sequence selected from the group consisting of sequences CAACAGAA and CAACAGAAG as disclosed in Table 3B. In some embodiments, the PEgRNA comprises an editing template comprising a sequence selected from the group consisting of SEQ Identifiers: C12127-C12141 of Table 3C. In some embodiments, the PEgRNA comprises an editing template comprising a sequence selected from the group consisting of SEQ ID NOs. 16153-16167 of Table 3C. In some embodiments, the prime editing composition further comprises a ngRNA that comprises a spacer comprising a sequence selected from the group consisting of SEQ Identifiers: D1445-D1461, D1473-D1478, D1516, and D1517 of Table 3D. In some embodiments, the prime editing composition further comprises a ngRNA that comprises a spacer comprising a sequence selected from the group consisting of SEQ ID NOs. 21078-21094, 21106-21111, 21149, and 21150 of Table 3D.

[0691] In some embodiments, the PEgRNA comprises a spacer comprising a sequence selected from the group consisting of SEQ Identifiers: A629-A630 of Table 3A. In some embodiments, the PEgRNA comprises a spacer comprising a sequence as set forth in SEQ ID NOs. 977-978 of Table 3A. In some embodiments, the PEgRNA comprises a PBS comprising a sequence selected from the group consisting of SEQ Identifiers: B2547-B2555 of Table 3B. In some embodiments, the PEgRNA comprises a PBS comprising a sequence selected from the group consisting of SEQ ID NOs. 3194-3200 of Table 3B. In some embodiments, the PEgRNA comprises a PBS comprising a sequence selected from the group consisting of sequences ATAAAAAT and ATAAAAATA as disclosed in Table 3B. In some embodiments, the PEgRNA comprises an editing template comprising a sequence selected from the group consisting of SEQ Identifiers: C12142-C12160 of Table 3C. In some embodiments, the PEgRNA comprises an editing template comprising a sequence selected from the group consisting of SEQ ID NOs. 16168-16186 of Table 3C. In some embodiments, the prime editing composition further comprises a ngRNA that comprises a spacer comprising a sequence selected from the group consisting of SEQ Identifiers: D1487-D1507 of Table 3D. In some embodiments, the prime editing composition further comprises a ngRNA that comprises a spacer comprising a sequence selected from the group consisting of SEQ ID NOs. 21120-21140 of Table 3D.

[0692] In some embodiments, the PEgRNA comprises a spacer comprising the sequence of SEQ Identifier A631 of Table 3A. In some embodiments, the PEgRNA comprises a spacer comprising a sequence as set forth in SEQ ID NO. 979 of Table 3A. In some embodiments, the PEgRNA comprises a PBS comprising a sequence selected from the group consisting of SEQ Identifiers: B2556-B2564 of Table 3B. In some embodiments, the PEgRNA comprises a PBS comprising a sequence selected from the group consisting of SEQ ID NOs. 3201-3207 of Table 3B. In some embodiments, the PEgRNA comprises a PBS comprising a sequence selected from the group consisting of sequences TTTTTGTT and TTTTTGTTT as disclosed in Table 3B. In some embodiments, the PEgRNA comprises an editing template comprising a sequence selected from the group consisting of SEQ Identifiers: C12161-C12164 of Table 3C. In some embodiments, the PEgRNA comprises an editing template comprising a sequence selected from the group consisting of SEQ ID NOs. 16187-16190 of Table 3C. In some embodiments, the prime editing composition further comprises a ngRNA that comprises a spacer comprising a sequence selected from the group consisting of SEQ Identifiers: D1487-D1504 of Table 3D. In some embodiments, the prime editing composition further comprises a ngRNA that comprises a spacer comprising a sequence selected from the group consisting of SEQ ID NOs. 21120-21137 of Table 3D.

[0693] In some embodiments, the PEgRNA comprises a spacer comprising a sequence selected from the group consisting of SEQ Identifiers: A645-A646 of Table 3A. In some embodiments, the PEgRNA comprises a spacer comprising a sequence as set forth in SEQ ID NOs. 993-994 of Table 3A. In some embodiments, the PEgRNA comprises a PBS comprising a sequence selected from the group consisting of SEQ Identifiers: B2637-B2645 of Table 3B. In some embodiments, the PEgRNA comprises a PBS comprising a sequence selected from the group consisting of SEQ ID NOs. 3264-3270 of Table 3B. In some embodiments, the PEgRNA comprises a PBS comprising a sequence selected from the group consisting of sequences TCACAGAT and TCACAGATC as disclosed in Table 3B. In some embodiments, the PEgRNA comprises an editing template comprising a sequence selected from the group consisting of SEQ Identifiers: C12165-C12226 of Table 3C. In some embodiments, the PEgRNA comprises an editing template comprising a sequence selected from the group consisting of SEQ ID NOs. 16191-16252 of Table 3C. In some embodiments, the prime editing composition further comprises a ngRNA that comprises a spacer comprising a sequence selected from the group consisting of SEQ Identifiers: D1435-D1440 of Table 3D. In some embodiments, the prime editing composition further comprises a ngRNA that comprises a spacer comprising a sequence selected from the group consisting of SEQ ID NOs. 21068-21073 of Table 3D.

[0694] In some embodiments, the PEgRNA comprises a spacer comprising the sequence selected from the group consisting of SEQ Identifier: A647 of Table 3A. In some embodiments, the PEgRNA comprises a spacer comprising a sequence as set forth in SEQ ID NO. 995 of Table 3A. In some embodiments, the PEgRNA comprises a PBS comprising a sequence selected from the group consisting of SEQ Identifiers: B2646-B2654 of Table 3B. In some embodiments, the PEgRNA comprises a PBS comprising a sequence selected from the group consisting of SEQ ID NOs. 3271-3277 of Table 3B. In some embodiments, the PEgRNA comprises a PBS comprising a sequence selected from the group consisting of sequences CTCACAGA and CTCACAGAT as disclosed in Table 3B. In some embodiments, the PEgRNA comprises an editing template comprising a sequence selected from the group consisting of SEQ Identifiers: C12227-C12257 of Table 3C. In some embodiments, the PEgRNA comprises an editing template comprising a sequence selected from the group consisting of SEQ ID NOs. 16253-16283 of Table 3C. In some embodiments, the prime editing composition further comprises a ngRNA that comprises a spacer comprising a sequence selected from the group consisting of SEQ Identifiers: D1493-D1504, and D1518-D1520 of Table 3D. In some embodiments, the prime editing composition further comprises a ngRNA that comprises a spacer comprising a sequence selected from the group consisting of SEQ ID NOs. 21126-21137, and 21151-21153 of Table 3D.

[0695] In some embodiments, the PEgRNA comprises a spacer comprising a sequence selected from the group consisting of SEQ Identifier: A632-A633 of Table 3A. In some embodiments, the PEgRNA comprises a spacer comprising a sequence as set forth in SEQ ID NOs. 980-981 of Table 3A. In some embodiments, the PEgRNA comprises a PBS comprising a sequence selected from the group consisting of SEQ Identifiers: B2565-B2573 of Table 3B. In some embodiments, the PEgRNA comprises a PBS comprising a sequence selected from the group consisting of SEQ ID NOs. 3208-3214 of Table 3B. In some embodiments, the PEgRNA comprises a PBS comprising a sequence selected from the group consisting of sequences ACATGCCA and ACATGCCAA as disclosed in Table 3B. In some embodiments, the PEgRNA comprises an editing template comprising a sequence selected from the group consisting of SEQ Identifiers: C12258-C12278 of Table 3C. In some embodiments, the PEgRNA comprises an editing template comprising a sequence selected from the group consisting of SEQ ID NOs. 16284-16304 of Table 3C. In some embodiments, the prime editing composition further comprises a ngRNA that comprises a spacer comprising a sequence selected from the group consisting of SEQ Identifiers: D1445-D1461, D1463-D1478, and D1516 of Table 3D. In some embodiments, the prime editing composition further comprises a ngRNA that comprises a spacer comprising a sequence selected from the group consisting of SEQ ID NOs. 21078-21094, 21096-21111, and 21149 of Table 3D.

[0696] In some embodiments, the PEgRNA comprises a spacer comprising a sequence selected from the group consisting of SEQ Identifier: A648-A650 of Table 3A. In some embodiments, the PEgRNA comprises a spacer comprising a sequence as set forth in SEQ ID NOs. 996-998 of Table 3A. In some embodiments, the PEgRNA comprises a PBS comprising a sequence selected from the group consisting of SEQ Identifiers: B2655-B2663 of Table 3B. In some embodiments, the PEgRNA comprises a PBS comprising a sequence selected from the group consisting of SEQ ID NOs. 3278-3284 of Table 3B. In some embodiments, the PEgRNA comprises a PBS comprising a sequence selected from the group consisting of sequences AAGGTAAA and AAGGTAAAC as disclosed in Table 3B. In some embodiments, the PEgRNA comprises an editing template comprising a sequence selected from the group consisting of SEQ Identifiers: C12279-C12287 of Table 3C. In some embodiments, the PEgRNA comprises an editing template comprising a sequence selected from the group consisting of SEQ ID NOs. 16305-16313 of Table 3C. In some embodiments, the prime editing composition further comprises a ngRNA that comprises a spacer comprising a sequence selected from the group consisting of SEQ Identifiers: D1475, D1476, D1477, D1479, D1480, D1482, D1483, D1485, D1486, D1515, and D1521-D1528 of Table 3D. In some embodiments, the prime editing composition further comprises a ngRNA that comprises a spacer comprising a sequence selected from the group consisting of SEQ ID NOs. 21108, 21109, 21110, 21112, 21113, 21115, 21116, 21118, 21119, 21148, and 21154-21161 of Table 3D.

[0697] In some embodiments, the PEgRNA comprises a spacer comprising the sequence of SEQ Identifier: A651 of Table 3A. In some embodiments, the PEgRNA comprises a spacer comprising a sequence as set forth in SEQ ID NO. 999 of Table 3A. In some embodiments, the PEgRNA comprises a PBS comprising a sequence selected from the group consisting of SEQ Identifiers: B2664-B2672 of Table 3B. In some embodiments, the PEgRNA comprises a PBS comprising a sequence selected from the group consisting of SEQ ID NOs. 3285-3291 of Table 3B. In some embodiments, the PEgRNA comprises a PBS comprising a sequence selected from the group consisting of sequences GGTAAACC and GGTAAACCT as disclosed in Table 3B. In some embodiments, the PEgRNA comprises an editing template comprising a sequence selected from the group consisting of SEQ Identifiers: C12288-C12294 of Table 3C. In some embodiments, the PEgRNA comprises an editing template comprising a sequence selected from the group consisting of SEQ ID NOs. 16314-16320 of Table 3C. In some embodiments, the prime editing composition further comprises a ngRNA that comprises a spacer comprising a sequence selected from the group consisting of SEQ Identifiers: D1448-D1461, D1473-D1478, D1516, D1517, and D1529 of Table 3D. In some embodiments, the prime editing composition further comprises a ngRNA that comprises a spacer comprising a sequence selected from the group consisting of SEQ ID NOs. 21081-21094, 21106-21111, 21149, 21150, and 21162 of Table 3D.

[0698] In some embodiments, the PEgRNA comprises a spacer comprising the sequence of SEQ Identifier: A634 of Table 3A. In some embodiments, the PEgRNA comprises a spacer comprising a sequence as set forth in SEQ ID NO. 982 of Table 3A. In some embodiments, the PEgRNA comprises a PBS comprising a sequence selected from the group consisting of SEQ Identifiers: B2574-B2582 of Table 3B. In some embodiments, the PEgRNA comprises a PBS comprising a sequence selected from the group consisting of SEQ ID NOs. 3215-3221 of Table 3B. In some embodiments, the PEgRNA comprises a PBS comprising a sequence selected from the group consisting of sequences TTGTTTTT and TTGTTTTTA as disclosed in Table 3B. In some embodiments, the PEgRNA comprises an editing template comprising the sequence of SEQ Identifier: C12295 of Table 3C. In some embodiments, the PEgRNA comprises an editing template comprising a sequence selected from the group consisting of SEQ ID NO. 16321 of Table 3C. In some embodiments, the prime editing composition further comprises a ngRNA that comprises a spacer comprising a sequence selected from the group consisting of SEQ Identifiers: D1487-D1503 of Table 3D. In some embodiments, the prime editing composition further comprises a ngRNA that comprises a spacer comprising a sequence selected from the group consisting of SEQ ID NOs. 21120-21136 of Table 3D.

[0699] In some embodiments, the PEgRNA comprises a spacer comprising a sequence selected from the group consisting of SEQ Identifiers: A635-A636 of Table 3A. In some embodiments, the PEgRNA comprises a spacer comprising a sequence as set forth in SEQ ID NOs. 983-984 of Table 3A. In some embodiments, the PEgRNA comprises a PBS comprising a sequence selected from the group consisting of SEQ Identifiers: B2583-B2591 of Table 3B. In some embodiments, the PEgRNA comprises a PBS comprising a sequence selected from the group consisting of SEQ ID NOs. 3222-3228 of Table 3B. In some embodiments, the PEgRNA comprises a PBS comprising a sequence selected from the group consisting of sequences AGTTCATT and AGTTCATTG as disclosed in Table 3B. In some embodiments, the PEgRNA comprises an editing template comprising a sequence selected from the group consisting of SEQ Identifiers: C12296-C12325 of Table 3C. In some embodiments, the PEgRNA comprises an editing template comprising a sequence selected from the group consisting of SEQ ID NOs. 16322-16351 of Table 3C. In some embodiments, the prime editing composition further comprises a ngRNA that comprises a spacer comprising a sequence selected from the group consisting of SEQ Identifiers: D1444-D1461, D1463-D1474, D1530, and D1531 of Table 3D. In some embodiments, the prime editing composition further comprises a ngRNA that comprises a spacer comprising a sequence selected from the group consisting of SEQ ID NOs. 21077-21094, 21096-21107, 21163, and 21164 of Table 3D.

[0700] In some embodiments, the PEgRNA comprises a spacer comprising a sequence selected from the group consisting of SEQ Identifiers: A637-A638 of Table 3A. In some embodiments, the PEgRNA comprises a spacer comprising a sequence as set forth in SEQ ID NOs. 985-986 of Table 3A. In some embodiments, the PEgRNA comprises a PBS comprising a sequence selected from the group consisting of SEQ Identifiers: B2592-B2600 of Table 3B. In some embodiments, the PEgRNA comprises a PBS comprising a sequence selected from the group consisting of SEQ ID NOs. 3229-3235 of Table 3B. In some embodiments, the PEgRNA comprises a PBS comprising a sequence selected from the group consisting of sequences CTTTAAGT and CTTTAAGTT as disclosed in Table 3B. In some embodiments, the PEgRNA comprises an editing template comprising a sequence selected from the group consisting of SEQ Identifiers: C12326-C12356 of Table 3C. In some embodiments, the PEgRNA comprises an editing template comprising a sequence selected from the group consisting of SEQ ID NOs. 16352-16382 of Table 3C. In some embodiments, the prime editing composition further comprises a ngRNA that comprises a spacer comprising a sequence selected from the group consisting of SEQ Identifiers: D1416-D1423, D1426-1433, D1532, and D1533 of Table 3D. In some embodiments, the prime editing composition further comprises a ngRNA that comprises a spacer comprising a sequence selected from the group consisting of SEQ ID NOs. 21049-21056, 21059-21066, 21165, and 21166 of Table 3D.

[0701] In some embodiments, the PEgRNA comprises a spacer comprising the sequence of SEQ Identifier: A639 of Table 3A. In some embodiments, the PEgRNA comprises a spacer comprising a sequence as set forth in SEQ ID NO. 987 of Table 3A. In some embodiments, the PEgRNA comprises a PBS comprising a sequence selected from the group consisting of SEQ Identifiers: B2601-B2609 of Table 3B. In some embodiments, the PEgRNA comprises a PBS comprising a sequence selected from the group consisting of SEQ ID NOs. 3236-3242 of Table 3B. In some embodiments, the PEgRNA comprises a PBS comprising a sequence selected from the group consisting of sequences TCTTTAAG and TCTTTAAGT as disclosed in Table 3B. In some embodiments, the PEgRNA comprises an editing template comprising a sequence selected from the group consisting of SEQ Identifiers: C12357-C12387 of Table 3C. In some embodiments, the PEgRNA comprises an editing template comprising a sequence selected from the group consisting of SEQ ID NOs. 16383-16413 of Table 3C. In some embodiments, the prime editing composition further comprises a ngRNA that comprises a spacer comprising a sequence selected from the group consisting of SEQ Identifiers: D1444-D1461, D1473, D1474, D1531, and D1534 of Table 3D. In some embodiments, the prime editing composition further comprises a ngRNA that comprises a spacer comprising a sequence selected from the group consisting of SEQ ID NOs. 21077-21094, 21106, 21107, 21164, and 21167 of Table 3D.

[0702] In some embodiments, the PEgRNA comprises a spacer comprising a sequence selected from the group consisting of SEQ Identifiers: A640-A641 of Table 3A. In some embodiments, the PEgRNA comprises a spacer comprising a sequence as set forth in SEQ ID NOs. 988-989 of Table 3A. In some embodiments, the PEgRNA comprises a PBS comprising a sequence selected from the group consisting of SEQ Identifiers: B2610-B2618 of Table 3B. In some embodiments, the PEgRNA comprises a PBS comprising a sequence selected from the group consisting of SEQ ID NOs. 3243-3249 of Table 3B. In some embodiments, the PEgRNA comprises a PBS comprising a sequence selected from the group consisting of sequences CTGAAATA and CTGAAATAA as disclosed in Table 3B. In some embodiments, the PEgRNA comprises an editing template comprising a sequence selected from the group consisting of SEQ Identifiers: C12388-C12411 of Table 3C. In some embodiments, the PEgRNA comprises an editing template comprising a sequence selected from the group consisting of SEQ ID NOs. 16414-16437 of Table 3C. In some embodiments, the prime editing composition further comprises a ngRNA that comprises a spacer comprising a sequence selected from the group consisting of SEQ Identifiers: D1489-D1507 of Table 3D. In some embodiments, the prime editing composition further comprises a ngRNA that comprises a spacer comprising a sequence selected from the group consisting of SEQ ID NOs. 21122-21140 of Table 3D.

[0703] In some embodiments, the PEgRNA comprises a spacer comprising the of SEQ Identifier: A642 of Table 3A. In some embodiments, the PEgRNA comprises a spacer comprising a sequence as set forth in SEQ ID NO. 990 of Table 3A. In some embodiments, the PEgRNA comprises a PBS comprising a sequence selected from the group consisting of SEQ Identifiers: B2619-B2627 of Table 3B. In some embodiments, the PEgRNA comprises a PBS comprising a sequence selected from the group consisting of SEQ ID NOs. 3250-3256 of Table 3B. In some embodiments, the PEgRNA comprises a PBS comprising a sequence selected from the group consisting of sequences GAAATAAA and GAAATAAAA as disclosed in Table 3B. In some embodiments, the PEgRNA comprises an editing template comprising a sequence selected from the group consisting of SEQ Identifiers: C12412-C12433 of Table 3C. In some embodiments, the PEgRNA comprises an editing template comprising a sequence selected from the group consisting of SEQ ID NOs. 16438-16459 of Table 3C. In some embodiments, the prime editing composition further comprises a ngRNA that comprises a spacer comprising a sequence selected from the group consisting of SEQ Identifiers: D1487-D1504 of Table 3D. In some embodiments, the prime editing composition further comprises a ngRNA that comprises a spacer comprising a sequence selected from the group consisting of SEQ ID NOs. 21120-21137 of Table 3D.

[0704] In some embodiments, the PEgRNA comprises a spacer comprising a sequence selected from the group consisting of SEQ Identifiers: A652-A653 of Table 3A. In some embodiments, the PEgRNA comprises a spacer comprising a sequence as set forth in SEQ ID NOs. 1000-1001 of Table 3A. In some embodiments, the PEgRNA comprises a PBS comprising a sequence selected from the group consisting of SEQ Identifiers: B2673-B2681 of Table 3B. In some embodiments, the PEgRNA comprises a PBS comprising a sequence selected from the group consisting of SEQ ID NOs. 3292-3298 of Table 3B. In some embodiments, the PEgRNA comprises a PBS comprising a sequence selected from the group consisting of sequences GATCGCAT and GATCGCATC as disclosed in Table 3B. In some embodiments, the PEgRNA comprises an editing template comprising a sequence selected from the group consisting of SEQ Identifiers: C12434-C12495 of Table 3C. In some embodiments, the PEgRNA comprises an editing template comprising a sequence selected from the group consisting of SEQ ID NOs. 16460-16521 of Table 3C. In some embodiments, the prime editing composition further comprises a ngRNA that comprises a spacer comprising a sequence selected from the group consisting of SEQ Identifiers: D1435-D1440 of Table 3D. In some embodiments, the prime editing composition further comprises a ngRNA that comprises a spacer comprising a sequence selected from the group consisting of SEQ ID NOs. 21068-21073 of Table 3D.

[0705] In some embodiments, the PEgRNA comprises a spacer comprising the sequence of SEQ Identifier: A654 of Table 3A. In some embodiments, the PEgRNA comprises a spacer comprising a sequence as set forth in SEQ ID NO. 1002 of Table 3A. In some embodiments, the PEgRNA comprises a PBS comprising a sequence selected from the group consisting of SEQ Identifiers: B2682-B2690 of Table 3B. In some embodiments, the PEgRNA comprises a PBS comprising a sequence selected from the group consisting of SEQ ID NOs. 3299-3305 of Table 3B. In some embodiments, the PEgRNA comprises a PBS comprising a sequence selected from the group consisting of sequences AGATCGCA and AGATCGCAT as disclosed in Table 3B. In some embodiments, the PEgRNA comprises an editing template comprising a sequence selected from the group consisting of SEQ Identifiers: C12496-C12526 of Table 3C. In some embodiments, the PEgRNA comprises an editing template comprising a sequence selected from the group consisting of SEQ ID NOs. 16522-16552 of Table 3C. In some embodiments, the prime editing composition further comprises a ngRNA that comprises a spacer comprising a sequence selected from the group consisting of SEQ Identifiers: D1491-D1504, D1518, and D1519 of Table 3D. In some embodiments, the prime editing composition further comprises a ngRNA that comprises a spacer comprising a sequence selected from the group consisting of SEQ ID NOs. 21124-21137, 21151, and 21152 of Table 3D.

[0706] In some embodiments, the PEgRNA comprises a spacer comprising a sequence selected from the group consisting of SEQ Identifiers: A655-A656 of Table 3A. In some embodiments, the PEgRNA comprises a spacer comprising a sequence as set forth in SEQ ID NOs. 1003-1004 of Table 3A. In some embodiments, the PEgRNA comprises a PBS comprising a sequence selected from the group consisting of SEQ Identifiers: B2691-B2699 of Table 3B. In some embodiments, the PEgRNA comprises a PBS comprising a sequence selected from the group consisting of SEQ ID NOs. 3306-3312 of Table 3B. In some embodiments, the PEgRNA comprises a PBS comprising a sequence selected from the group consisting of sequences CACAGATC and CACAGATCG as disclosed in Table 3B. In some embodiments, the PEgRNA comprises an editing template comprising a sequence selected from the group consisting of SEQ Identifiers: C12527-C12557 of Table 3C. In some embodiments, the PEgRNA comprises an editing template comprising a sequence selected from the group consisting of SEQ ID NOs. 16553-16583 of Table 3C. In some embodiments, the prime editing composition further comprises a ngRNA that comprises a spacer comprising a sequence selected from the group consisting of SEQ Identifiers: D1493-D1507, D1518, D1519, and D1535 of Table 3D. In some embodiments, the prime editing composition further comprises a ngRNA that comprises a spacer comprising a sequence selected from the group consisting of SEQ ID NOs. 21126-21140, 21151, 21152, and 21168 of Table 3D.

[0707] In some embodiments, the PEgRNA comprises a spacer comprising a sequence selected from the group consisting of SEQ Identifiers: A643-A644 of Table 3A. In some embodiments, the PEgRNA comprises a spacer comprising a sequence as set forth in SEQ ID NOs. 991-992 of Table 3A. In some embodiments, the PEgRNA comprises a PBS comprising a sequence selected from the group consisting of SEQ Identifiers: B2628-B2636 of Table 3B. In some embodiments, the PEgRNA comprises a PBS comprising a sequence selected from the group consisting of SEQ ID NOs. 3257-3263 of Table 3B. In some embodiments, the PEgRNA comprises a PBS comprising a sequence selected from the group consisting of sequences GTTCATTG and GTTCATTGA as disclosed in Table 3B. In some embodiments, the PEgRNA comprises an editing template comprising a sequence selected from the group consisting of SEQ Identifiers: C12558-C12615 of Table 3C. In some embodiments, the PEgRNA comprises an editing template comprising a sequence selected from the group consisting of SEQ ID NOs: of Table 3C. In some embodiments, the prime editing composition further comprises a ngRNA that comprises a spacer comprising a sequence selected from the group consisting of SEQ Identifiers: D1416-D1423, D1427-D1433, D1514, and D1515 of Table 3D. In some embodiments, the prime editing composition further comprises a ngRNA that comprises a spacer comprising a sequence selected from the group consisting of SEQ ID NOs. 21049-21056, 21060-21066, 21147, and 21148 of Table 3D.

[0708] In some embodiments, the PEgRNA comprises a spacer comprising a sequence selected from the group consisting of SEQ Identifiers: A657-A658 of Table 3A. In some embodiments, the PEgRNA comprises a spacer comprising a sequence as set forth in SEQ ID NOs. 1005-1006 of Table 3A. In some embodiments, the PEgRNA comprises a PBS comprising a sequence selected from the group consisting of SEQ Identifiers: B2700-B2708 of Table 3B. In some embodiments, the PEgRNA comprises a PBS comprising a sequence selected from the group consisting of SEQ ID NOs. 3313-3319 of Table 3B. In some embodiments, the PEgRNA comprises a PBS comprising a sequence selected from the group consisting of sequences GAAGGTAA and GAAGGTAAA as disclosed in Table 3B. In some embodiments, the PEgRNA comprises an editing template comprising a sequence selected from the group consisting of SEQ Identifiers: C12616-C12625 of Table 3C. In some embodiments, the PEgRNA comprises an editing template comprising a sequence selected from the group consisting of SEQ ID NOs: of Table 3C. In some embodiments, the prime editing composition further comprises a ngRNA that comprises a spacer comprising a sequence selected from the group consisting of SEQ Identifiers: D1448-D1461, D1473-D1478, D1512-D1513, D1516, D1517, D1529, and D1536-D1539 of Table 3D. In some embodiments, the prime editing composition further comprises a ngRNA that comprises a spacer comprising a sequence selected from the group consisting of SEQ ID NOs. 21081-21094, 21106-21111, 21145-21146, 21149, 21150, 21162 of Table 3D.

[0709] In some embodiments, the PEgRNA comprises a spacer comprising the of SEQ Identifier: A659 of Table 3A. In some embodiments, the PEgRNA comprises a spacer comprising a sequence as set forth in SEQ ID NO. 1007 of Table 3A. In some embodiments, the PEgRNA comprises a PBS comprising a sequence selected from the group consisting of SEQ Identifiers: B2709-B2717 of Table 3B. In some embodiments, the PEgRNA comprises a PBS comprising a sequence selected from the group consisting of SEQ ID NOs. 3320-3326 of Table 3B. In some embodiments, the PEgRNA comprises a PBS comprising a sequence selected from the group consisting of sequences AGAAGGTA and AGAAGGTAA as disclosed in Table 3B. In some embodiments, the PEgRNA comprises an editing template comprising a sequence selected from the group consisting of SEQ Identifiers: C12626-C12636 of Table 3C. In some embodiments, the PEgRNA comprises an editing template comprising a sequence selected from the group consisting of SEQ ID NOs. 16652-16662 of Table 3C. In some embodiments, the prime editing composition further comprises a ngRNA that comprises a spacer comprising a sequence selected from the group consisting of SEQ Identifiers: D1447-D1461, D1473-D1478, D1516, D1517, and D1529 of Table 3D. In some embodiments, the prime editing composition further comprises a ngRNA that comprises a spacer comprising a sequence selected from the group consisting of SEQ ID NOs. 21080-21094, 21106-21111, 21149, 21150, and 21162 of Table 3D.

[0710] In some embodiments, the PEgRNA comprises a spacer comprising a sequence selected from the group consisting of SEQ Identifiers: A660-A661 of Table 3A. In some embodiments, the PEgRNA comprises a spacer comprising a sequence as set forth in SEQ ID NOs. 1008-1009 of Table 3A. In some embodiments, the PEgRNA comprises a PBS comprising a sequence selected from the group consisting of SEQ Identifiers: B2718-B2726 of Table 3B. In some embodiments, the PEgRNA comprises a PBS comprising a sequence selected from the group consisting of SEQ ID NOs. 3327-3333 of Table 3B. In some embodiments, the PEgRNA comprises a PBS comprising a sequence selected from the group consisting of sequences ATCGCATC and ATCGCATCT as disclosed in Table 3B. In some embodiments, the PEgRNA comprises an editing template comprising a sequence selected from the group consisting of SEQ Identifiers: C12637-C12667 of Table 3C. In some embodiments, the PEgRNA comprises an editing template comprising a sequence selected from the group consisting of SEQ ID NOs. 16663-16693 of Table 3C. In some embodiments, the prime editing composition further comprises a ngRNA that comprises a spacer comprising a sequence selected from the group consisting of SEQ Identifiers: D1491-D1507, D1518, and D1535 of Table 3D. In some embodiments, the prime editing composition further comprises a ngRNA that comprises a spacer comprising a sequence selected from the group consisting of SEQ ID NOs. 21124-21140, 21151, and 21168 of Table 3D.

[0711] In some embodiments, the PEgRNA comprises a spacer comprising a sequence selected from the group consisting of SEQ Identifiers: A662-A664 of Table 3A. In some embodiments, the PEgRNA comprises a spacer comprising a sequence as set forth in SEQ ID NOs. 1010-1012 of Table 3A. In some embodiments, the PEgRNA comprises a PBS comprising a sequence selected from the group consisting of SEQ Identifiers: B2727-B2735 of Table 3B. In some embodiments, the PEgRNA comprises a PBS comprising a sequence selected from the group consisting of SEQ ID NOs. 3334-3340 of Table 3B. In some embodiments, the PEgRNA comprises a PBS comprising a sequence selected from the group consisting of sequences ACAGATCG and ACAGATCGC as disclosed in Table 3B. In some embodiments, the PEgRNA comprises an editing template comprising a sequence selected from the group consisting of SEQ Identifiers: C12668-C12698 of Table 3C. In some embodiments, the PEgRNA comprises an editing template comprising a sequence selected from the group consisting of SEQ ID NOs: 16694-16724 of Table 3C. In some embodiments, the prime editing composition further comprises a ngRNA that comprises a spacer comprising a sequence selected from the group consisting of SEQ Identifiers: D1437, D1540, and D1541 of Table 3D. In some embodiments, the prime editing composition further comprises a ngRNA that comprises a spacer comprising a sequence selected from the group consisting of SEQ ID NOs. 21070, 21173, and 21174 of Table 3D.

[0712] In some embodiments, the PEgRNA comprises a spacer comprising the of SEQ Identifier: A665 of Table 3A. In some embodiments, the PEgRNA comprises a spacer comprising a sequence as set forth in SEQ ID NO. 1013 of Table 3A. In some embodiments, the PEgRNA comprises a PBS comprising a sequence selected from the group consisting of SEQ Identifiers: B2736-B2744 of Table 3B. In some embodiments, the PEgRNA comprises a PBS comprising a sequence selected from the group consisting of SEQ ID NOs. 3341-3347 of Table 3B. In some embodiments, the PEgRNA comprises a PBS comprising a sequence selected from the group consisting of sequences CGCATCTG and CGCATCTGA as disclosed in Table 3B. In some embodiments, the PEgRNA comprises an editing template comprising a sequence selected from the group consisting of SEQ Identifiers: C12699-C12727 of Table 3C. In some embodiments, the PEgRNA comprises an editing template comprising a sequence selected from the group consisting of SEQ ID NOs. 16725-16753 of Table 3C. In some embodiments, the prime editing composition further comprises a ngRNA that comprises a spacer comprising a sequence selected from the group consisting of SEQ Identifiers: D1491-D1504 and D1518 of Table 3D. In some embodiments, the prime editing composition further comprises a ngRNA that comprises a spacer comprising a sequence selected from the group consisting of SEQ ID NOs. 21124-21137 and 21151 of Table 3D.

[0713] In some embodiments, the PEgRNA comprises a spacer comprising a sequence selected from the group consisting of SEQ Identifiers: A621-A622 of Table 3A. In some embodiments, the PEgRNA comprises a spacer comprising a sequence as set forth in SEQ ID NOs. 969-970 of Table 3A. In some embodiments, the PEgRNA comprises a PBS comprising a sequence selected from the group consisting of SEQ Identifiers: B2511-B2519 of Table 3B. In some embodiments, the PEgRNA comprises a PBS comprising a sequence selected from the group consisting of SEQ ID NOs. 3166-3172 of Table 3B. In some embodiments, the PEgRNA comprises a PBS comprising a sequence selected from the group consisting of sequences TAAAAATA and TAAAAATAA as disclosed in Table 3B. In some embodiments, the PEgRNA comprises an editing template comprising a sequence selected from the group consisting of SEQ Identifiers: C12728-C12761 of Table 3C. In some embodiments, the PEgRNA comprises an editing template comprising a sequence selected from the group consisting of SEQ ID NOs. 16754-16787 of Table 3C. In some embodiments, the prime editing composition further comprises a ngRNA that comprises a spacer comprising a sequence selected from the group consisting of SEQ Identifiers: D1435-D1440 of Table 3D. In some embodiments, the prime editing composition further comprises a ngRNA that comprises a spacer comprising a sequence selected from the group consisting of SEQ ID NOs. 21068-21073 of Table 3D.

[0714] In some embodiments, the PEgRNA comprises a spacer comprising the sequence of SEQ Identifier: A625 of Table 3A. In some embodiments, the PEgRNA comprises a spacer comprising a sequence as set forth in SEQ ID NO. 973 of Table 3A. In some embodiments, the PEgRNA comprises a PBS comprising a sequence selected from the group consisting of SEQ Identifiers: B2529-B2537 of Table 3B. In some embodiments, the PEgRNA comprises a PBS comprising a sequence selected from the group consisting of SEQ ID NOs. 3180-3186 of Table 3B. In some embodiments, the PEgRNA comprises a PBS comprising a sequence selected from the group consisting of sequences CAACAGAA and CAACAGAAG as disclosed in Table 3B. In some embodiments, the PEgRNA comprises an editing template comprising a sequence selected from the group consisting of SEQ Identifiers: C12762-C12777 of Table 3C. In some embodiments, the PEgRNA comprises an editing template comprising a sequence selected from the group consisting of SEQ ID NOs. 16788-16803 of Table 3C. In some embodiments, the prime editing composition further comprises a ngRNA that comprises a spacer comprising a sequence selected from the group consisting of SEQ Identifiers: D1445-D1461, D1473-D1478, D1516, and D1517 of Table 3D. In some embodiments, the prime editing composition further comprises a ngRNA that comprises a spacer comprising a sequence selected from the group consisting of SEQ ID NOs. 21078-21094, 21106-21111, 21149, and 21150 of Table 3D.

[0715] In some embodiments, the PEgRNA comprises a spacer comprising a sequence selected from the group consisting of SEQ Identifiers: A629-A630 of Table 3A. In some embodiments, the PEgRNA comprises a spacer comprising a sequence as set forth in SEQ ID NOs. 977-978 of Table 3A. In some embodiments, the PEgRNA comprises a PBS comprising a sequence selected from the group consisting of SEQ Identifiers: B2547-B2555 of Table 3B. In some embodiments, the PEgRNA comprises a PBS comprising a sequence selected from the group consisting of SEQ ID NOs. 3194-3200 of Table 3B. In some embodiments, the PEgRNA comprises a PBS comprising a sequence selected from the group consisting of sequences ATAAAAAT and ATAAAAATA as disclosed in Table 3B. In some embodiments, the PEgRNA comprises an editing template comprising a sequence selected from the group consisting of SEQ Identifiers: C12778-C12795 of Table 3C. In some embodiments, the PEgRNA comprises an editing template comprising a sequence selected from the group consisting of SEQ ID NOs. 16804-16821 of Table 3C. In some embodiments, the prime editing composition further comprises a ngRNA that comprises a spacer comprising a sequence selected from the group consisting of SEQ Identifiers: D1487-D1507 of Table 3D. In some embodiments, the prime editing composition further comprises a ngRNA that comprises a spacer comprising a sequence selected from the group consisting of SEQ ID NOs. 21120-21140 of Table 3D.

[0716] In some embodiments, the PEgRNA comprises a spacer comprising the of SEQ Identifier: A631 of Table 3A. In some embodiments, the PEgRNA comprises a spacer comprising a sequence as set forth in SEQ ID NO.979 of Table 3A. In some embodiments, the PEgRNA comprises a PBS comprising a sequence selected from the group consisting of SEQ Identifiers: B2556-B2564 of Table 3B. In some embodiments, the PEgRNA comprises a PBS comprising a sequence selected from the group consisting of SEQ ID NOs. 3201-3207 of Table 3B. In some embodiments, the PEgRNA comprises a PBS comprising a sequence selected from the group consisting of sequences TTTTTGTT and TTTTTGTTT as disclosed in Table 3B. In some embodiments, the PEgRNA comprises an editing template comprising a sequence selected from the group consisting of SEQ Identifiers: C12796-C12798 of Table 3C. In some embodiments, the PEgRNA comprises an editing template comprising a sequence selected from the group consisting of SEQ ID NOs. 16822-16824 of Table 3C. In some embodiments, the prime editing composition further comprises a ngRNA that comprises a spacer comprising a sequence selected from the group consisting of SEQ Identifiers: D1487-D1504 of Table 3D. In some embodiments, the prime editing composition further comprises a ngRNA that comprises a spacer comprising a sequence selected from the group consisting of SEQ ID NOs. 21120-21137 of Table 3D.

[0717] In some embodiments, the PEgRNA comprises a spacer comprising a sequence selected from the group consisting of SEQ Identifiers: A666-A667 of Table 3A. In some embodiments, the PEgRNA comprises a spacer comprising a sequence as set forth in SEQ ID NOs. 1014-1015 of Table 3A. In some embodiments, the PEgRNA comprises a PBS comprising a sequence selected from the group consisting of SEQ Identifiers: B2637-B2645 of Table 3B. In some embodiments, the PEgRNA comprises a PBS comprising a sequence selected from the group consisting of SEQ ID NOs. 3264-3270 of Table 3B. In some embodiments, the PEgRNA comprises a PBS comprising a sequence selected from the group consisting of sequences TCACAGAT and TCACAGATC as disclosed in Table 3B. In some embodiments, the PEgRNA comprises an editing template comprising a sequence selected from the group consisting of SEQ Identifiers: C12165, C12167, C12170, C12172, C12173, C12175, C12177, C12180, C12181, C12184, C12186, C12188, C12189, C12192, C12193, C12195, C12198, C12200, C12201, C12203, C12206, C12208, C12210, C12212, C12214, C12215, C12218, C12219, C12222, C12224, C12226, C12799, C12800, C12801, C12802, C12803, C12804, C12805, C12806, C12807, C12808, C12809, C12810, C12811, C12812, C12813, C12814, C12815, C12816, C12817, C12818, C12819, C12820, C12821, C12822, C12823, C12824, C12825, C12826, C12827, C12828, and C12829 of Table 3C. In some embodiments, the PEgRNA comprises an editing template comprising a sequence selected from the group consisting of SEQ ID NOs. 16191, 16193, 16196, 16198, 16194, 16201, 16203, 16206, 16207, 16210, 16212, 16214, 16215, 16218, 16219, 16220, 16224, 16226, 16227, 16230, 16232, 16234, 16236, 16238, 16240, 16241, 16244, 16245, 16248, 16250, 16252, and 16825-16855 of Table 3C. In some embodiments, the prime editing composition further comprises a ngRNA that comprises a spacer comprising a sequence selected from the group consisting of SEQ Identifiers: D1435-D1440 of Table 3D. In some embodiments, the prime editing composition further comprises a ngRNA that comprises a spacer comprising a sequence selected from the group consisting of SEQ ID NOs. 21068-21073 of Table 3D.

[0718] In some embodiments, the PEgRNA comprises a spacer comprising the sequence of SEQ Identifier: A668 of Table 3A. In some embodiments, the PEgRNA comprises a spacer comprising a sequence as set forth in SEQ ID NO. 1016 of Table 3A. In some embodiments, the PEgRNA comprises a PBS comprising a sequence selected from the group consisting of SEQ Identifiers: B2646-B2654 of Table 3B. In some embodiments, the PEgRNA comprises a PBS comprising a sequence selected from the group consisting of SEQ ID NOs. 3271-3277 of Table 3B. In some embodiments, the PEgRNA comprises a PBS comprising a sequence selected from the group consisting of sequences CTCACAGA and CTCACAGAT as disclosed in Table 3B. In some embodiments, the PEgRNA comprises an editing template comprising a sequence selected from the group consisting of SEQ Identifiers: C12830-C12860 of Table 3C. In some embodiments, the PEgRNA comprises an editing template comprising a sequence selected from the group consisting of SEQ ID NOs. 16856-16886 of Table 3C. In some embodiments, the prime editing composition further comprises a ngRNA that comprises a spacer comprising a sequence selected from the group consisting of SEQ Identifiers: D1493-D1504, D1542, D1543, and D1544 of Table 3D. In some embodiments, the prime editing composition further comprises a ngRNA that comprises a spacer comprising a sequence selected from the group consisting of SEQ ID NOs. 21126-21137, 21175, 21176, and 21177 of Table 3D.

[0719] In some embodiments, the PEgRNA comprises a spacer comprising a sequence selected from the group consisting of SEQ Identifiers: A632-A633 of Table 3A. In some embodiments, the PEgRNA comprises a spacer comprising a sequence as set forth in SEQ ID NOs. 980-981 of Table 3A. In some embodiments, the PEgRNA comprises a PBS comprising a sequence selected from the group consisting of SEQ Identifiers: B2565-B2573 of Table 3B. In some embodiments, the PEgRNA comprises a PBS comprising a sequence selected from the group consisting of SEQ ID NOs. 3208-3214 of Table 3B. In some embodiments, the PEgRNA comprises a PBS comprising a sequence selected from the group consisting of sequences ACATGCCA and ACATGCCAA as disclosed in Table 3B. In some embodiments, the PEgRNA comprises an editing template comprising a sequence selected from the group consisting of SEQ Identifiers: C12861-C12882 of Table 3C. In some embodiments, the PEgRNA comprises an editing template comprising a sequence selected from the group consisting of SEQ ID NOs. 16887-16908 of Table 3C. In some embodiments, the prime editing composition further comprises a ngRNA that comprises a spacer comprising a sequence selected from the group consisting of SEQ Identifiers: D1445-D1461, D1463-1478, and D1516 of Table 3D. In some embodiments, the prime editing composition further comprises a ngRNA that comprises a spacer comprising a sequence selected from the group consisting of SEQ ID NOs. 21078-21094, 21096-21111, and 21149 of Table 3D.

[0720] In some embodiments, the PEgRNA comprises a spacer comprising a sequence selected from the group consisting of SEQ Identifiers: A648-A650 of Table 3A. In some embodiments, the PEgRNA comprises a spacer comprising a sequence as set forth in SEQ ID NOs. 996-998 of Table 3A. In some embodiments, the PEgRNA comprises a PBS comprising a sequence selected from the group consisting of SEQ Identifiers B2655-B2663 of Table 3B. In some embodiments, the PEgRNA comprises a PBS comprising a sequence selected from the group consisting of SEQ ID NOs. 3278-3284 of Table 3B. In some embodiments, the PEgRNA comprises a PBS comprising a sequence selected from the group consisting of sequences AAGGTAAA and AAGGTAAAC as disclosed in Table 3B. In some embodiments, the PEgRNA comprises an editing template comprising a sequence selected from the group consisting of SEQ Identifiers: C12883-C12892 of Table 3C. In some embodiments, the PEgRNA comprises an editing template comprising a sequence selected from the group consisting of SEQ ID NOs. 16909-16918 of Table 3C. In some embodiments, the prime editing composition further comprises a ngRNA that comprises a spacer comprising a sequence selected from the group consisting of SEQ Identifiers: D1475, D1476, D1477, D1479, D1480, D1482, D1483, D1485, D1486, D1515, and D1521-D1528 of Table 3D. In some embodiments, the prime editing composition further comprises a ngRNA that comprises a spacer comprising a sequence selected from the group consisting of SEQ ID NOs. 21108, 21109, 21110, 21112, 21113, 21115, 21116, 21118, 21119, 21148, 21154-21161 of Table 3D.

[0721] In some embodiments, the PEgRNA comprises a spacer comprising the of SEQ Identifier: A651 of Table 3A. In some embodiments, the PEgRNA comprises a spacer comprising a sequence as set forth in SEQ ID NO. 999 of Table 3A. In some embodiments, the PEgRNA comprises a PBS comprising a sequence selected from the group consisting of SEQ Identifiers: B2664-B2672 of Table 3B. In some embodiments, the PEgRNA comprises a PBS comprising a sequence selected from the group consisting of SEQ ID NOs. 3285-3291 of Table 3B. In some embodiments, the PEgRNA comprises a PBS comprising a sequence selected from the group consisting of sequences GGTAAACC and GGTAAACCT as disclosed in Table 3B. In some embodiments, the PEgRNA comprises an editing template comprising a sequence selected from the group consisting of SEQ Identifiers: C12893-C12900 of Table 3C. In some embodiments, the PEgRNA comprises an editing template comprising a sequence selected from the group consisting of SEQ ID NOs. 16919-16926 of Table 3C. In some embodiments, the prime editing composition further comprises a ngRNA that comprises a spacer comprising a sequence selected from the group consisting of SEQ Identifiers: D1448-D1461, D1473-D1478, D1516, D1517, and D1529 of Table 3D. In some embodiments, the prime editing composition further comprises a ngRNA that comprises a spacer comprising a sequence selected from the group consisting of SEQ ID NOs. 21081-21094, 21106-21111, 21149, 21150, and 21162 of Table 3D.

[0722] In some embodiments, the PEgRNA comprises a spacer comprising a sequence selected from the group consisting of SEQ Identifiers: A635-A636 of Table 3A. In some embodiments, the PEgRNA comprises a spacer comprising a sequence as set forth in SEQ Identifiers. 983-984 of Table 3A. In some embodiments, the PEgRNA comprises a PBS comprising a sequence selected from the group consisting of SEQ ID Nos: B2583-B2591 of Table 3B. In some embodiments, the PEgRNA comprises a PBS comprising a sequence selected from the group consisting of SEQ ID NOs. 3222-3227 of Table 3B. In some embodiments, the PEgRNA comprises a PBS comprising a sequence selected from the group consisting of sequences AGTTCATT and AGTTCATTG as disclosed in Table 3B. In some embodiments, the PEgRNA comprises an editing template comprising a sequence selected from the group consisting of SEQ Identifiers: C12901-C12931 of Table 3C. In some embodiments, the PEgRNA comprises an editing template comprising a sequence selected from the group consisting of SEQ ID NOs. 16927-16957 of Table 3C. In some embodiments, the prime editing composition further comprises a ngRNA that comprises a spacer comprising a sequence selected from the group consisting of SEQ Identifiers: D1444-D1461, D1463-D1474, D1545, and D1546 of Table 3D. In some embodiments, the prime editing composition further comprises a ngRNA that comprises a spacer comprising a sequence selected from the group consisting of SEQ ID NOs. 21077-21094, 21096-21107, 21178, and 21179 of Table 3D.

[0723] In some embodiments, the PEgRNA comprises a spacer comprising a sequence selected from the group consisting of SEQ Identifiers: A637-A638 of Table 3A. In some embodiments, the PEgRNA comprises a spacer comprising a sequence as set forth in SEQ ID NOs. 985-986 of Table 3A. In some embodiments, the PEgRNA comprises a PBS comprising a sequence selected from the group consisting of SEQ Identifiers: B2592-B2600 of Table 3B. In some embodiments, the PEgRNA comprises a PBS comprising a sequence selected from the group consisting of SEQ ID NOs. 3229-3235 of Table 3B. In some embodiments, the PEgRNA comprises a PBS comprising a sequence selected from the group consisting of sequences CTTTAAGT and CTTTAAGTT as disclosed in Table 3B. In some embodiments, the PEgRNA comprises an editing template comprising a sequence selected from the group consisting of SEQ Identifiers: C12932-C12993 of Table 3C. In some embodiments, the PEgRNA comprises an editing template comprising a sequence selected from the group consisting of SEQ ID NOs. 16958-17019 of Table 3C. In some embodiments, the prime editing composition further comprises a ngRNA that comprises a spacer comprising a sequence selected from the group consisting of SEQ Identifiers: D1444-D1461, D1473, D1474, D1511, D1512, D1513, D1546, and D1547 of Table 3D. In some embodiments, the prime editing composition further comprises a ngRNA that comprises a spacer comprising a sequence selected from the group consisting of SEQ ID NOs. 21077-21094, 21106, 21107, 21144, 21145, 21146, 21179, and 21180 of Table 3D.

[0724] In some embodiments, the PEgRNA comprises a spacer comprising the sequence of SEQ Identifier: A669 of Table 3A. In some embodiments, the PEgRNA comprises a spacer comprising a sequence as set forth in SEQ ID NO. 1017 of Table 3A. In some embodiments, the PEgRNA comprises a PBS comprising a sequence selected from the group consisting of SEQ Identifiers: B2601-B2609 of Table 3B. In some embodiments, the PEgRNA comprises a PBS comprising a sequence selected from the group consisting of SEQ ID NOs. 3236-3242 of Table 3B. In some embodiments, the PEgRNA comprises a PBS comprising a sequence selected from the group consisting of sequences TCTTTAAG and TCTTTAAGT as disclosed in Table 3B. In some embodiments, the PEgRNA comprises an editing template comprising a sequence selected from the group consisting of SEQ Identifiers: C12994-C13024 of Table 3C. In some embodiments, the PEgRNA comprises an editing template comprising a sequence selected from the group consisting of SEQ ID NOs. 17020-17050 of Table 3C. In some embodiments, the prime editing composition further comprises a ngRNA that comprises a spacer comprising a sequence selected from the group consisting of SEQ Identifiers: D1444-D1461, D1473-D1474, D1546, and D1547 of Table 3D. In some embodiments, the prime editing composition further comprises a ngRNA that comprises a spacer comprising a sequence selected from the group consisting of SEQ ID NOs. 21077-21094, 21106-21107, 21179, and 21180 of Table 3D.

[0725] In some embodiments, the PEgRNA comprises a spacer comprising a sequence selected from the group consisting of SEQ Identifiers: A640-A641 of Table 3A. In some embodiments, the PEgRNA comprises a spacer comprising a sequence as set forth in SEQ ID NOs. 988-989 of Table 3A. In some embodiments, the PEgRNA comprises a PBS comprising a sequence selected from the group consisting of SEQ Identifiers: B2610-B2618 of Table 3B. In some embodiments, the PEgRNA comprises a PBS comprising a sequence selected from the group consisting of SEQ ID NOs. 3243-3249 of Table 3B. In some embodiments, the PEgRNA comprises a PBS comprising a sequence selected from the group consisting of sequences CTGAAATA and CTGAAATAA as disclosed in Table 3B. In some embodiments, the PEgRNA comprises an editing template comprising a sequence selected from the group consisting of SEQ Identifiers: C13025-C13047 of Table 3C. In some embodiments, the PEgRNA comprises an editing template comprising a sequence selected from the group consisting of SEQ ID NOs. 17051-17073 of Table 3C. In some embodiments, the prime editing composition further comprises a ngRNA that comprises a spacer comprising a sequence selected from the group consisting of SEQ Identifiers: D1489-D1507 of Table 3D. In some embodiments, the prime editing composition further comprises a ngRNA that comprises a spacer comprising a sequence selected from the group consisting of SEQ ID NOs. 21122-21140 of Table 3D.

[0726] In some embodiments, the PEgRNA comprises a spacer comprising the of SEQ Identifier: A642 of Table 3A. In some embodiments, the PEgRNA comprises a spacer comprising a sequence as set forth in SEQ ID NO. 990 of Table 3A. In some embodiments, the PEgRNA comprises a PBS comprising a sequence selected from the group consisting of SEQ Identifiers: B2619-B2627 of Table 3B. In some embodiments, the PEgRNA comprises a PBS comprising a sequence selected from the group consisting of SEQ ID NOs. 3250-3256 of Table 3B. In some embodiments, the PEgRNA comprises a PBS comprising a sequence selected from the group consisting of sequences GAAATAAA and GAAATAAAA as disclosed in Table 3B. In some embodiments, the PEgRNA comprises an editing template comprising a sequence selected from the group consisting of SEQ Identifiers: C13048-C13068 of Table 3C. In some embodiments, the PEgRNA comprises an editing template comprising a sequence selected from the group consisting of SEQ ID NOs. 17074-17094 of Table 3C. In some embodiments, the prime editing composition further comprises a ngRNA that comprises a spacer comprising a sequence selected from the group consisting of SEQ Identifiers: D1487-D1504 of Table 3D. In some embodiments, the prime editing composition further comprises a ngRNA that comprises a spacer comprising a sequence selected from the group consisting of SEQ ID NOs. 21120-21137 of Table 3D.

[0727] In some embodiments, the PEgRNA comprises a spacer comprising a sequence selected from the group consisting of SEQ Identifiers: A652-A653 of Table 3A. In some embodiments, the PEgRNA comprises a spacer comprising a sequence as set forth in SEQ ID NOs. 1000-1001 of Table 3A. In some embodiments, the PEgRNA comprises a PBS comprising a sequence selected from the group consisting of SEQ Identifiers: B2673-B2681 of Table 3B. In some embodiments, the PEgRNA comprises a PBS comprising a sequence selected from the group consisting of SEQ ID NOs. 3292-3298 of Table 3B. In some embodiments, the PEgRNA comprises a PBS comprising a sequence selected from the group consisting of sequences GATCGCAT and GATCGCATC as disclosed in Table 3B. In some embodiments, the PEgRNA comprises an editing template comprising a sequence selected from the group consisting of SEQ Identifiers: C13069-C13130 of Table 3C. In some embodiments, the PEgRNA comprises an editing template comprising a sequence selected from the group consisting of SEQ ID NOs. 17095-17156 of Table 3C. In some embodiments, the prime editing composition further comprises a ngRNA that comprises a spacer comprising a sequence selected from the group consisting of SEQ Identifiers: D1435-D1440 of Table 3D. In some embodiments, the prime editing composition further comprises a ngRNA that comprises a spacer comprising a sequence selected from the group consisting of SEQ ID NOs. 21068-21073 of Table 3D.

[0728] In some embodiments, the PEgRNA comprises a spacer comprising the sequence of SEQ Identifier: A654 of Table 3A. In some embodiments, the PEgRNA comprises a spacer comprising a sequence as set forth in SEQ ID NO. 1002 of Table 3A. In some embodiments, the PEgRNA comprises a PBS comprising a sequence selected from the group consisting of SEQ Identifiers: B2682-B2690 of Table 3B. In some embodiments, the PEgRNA comprises a PBS comprising a sequence selected from the group consisting of SEQ ID NOs. 3299-3305 of Table 3B. In some embodiments, the PEgRNA comprises a PBS comprising a sequence selected from the group consisting of sequences AGATCGCA and AGATCGCAT as disclosed in Table 3B. In some embodiments, the PEgRNA comprises an editing template comprising a sequence selected from the group consisting of SEQ Identifiers: C13131-C13161 of Table 3C. In some embodiments, the PEgRNA comprises an editing template comprising a sequence selected from the group consisting of SEQ ID NOs. 17157-17187 of Table 3C. In some embodiments, the prime editing composition further comprises a ngRNA that comprises a spacer comprising a sequence selected from the group consisting of SEQ Identifiers: D1491-D1504, D1542, and D1543 of Table 3D. In some embodiments, the prime editing composition further comprises a ngRNA that comprises a spacer comprising a sequence selected from the group consisting of SEQ ID NOs. 21124-21137, 21175, and 21176 of Table 3D.

[0729] In some embodiments, the PEgRNA comprises a spacer comprising a sequence selected from the group consisting of SEQ Identifiers: A643-A644 of Table 3A. In some embodiments, the PEgRNA comprises a spacer comprising a sequence as set forth in SEQ ID NOs. 991-992 of Table 3A. In some embodiments, the PEgRNA comprises a PBS comprising a sequence selected from the group consisting of SEQ Identifiers: B2628-B2636 of Table 3B. In some embodiments, the PEgRNA comprises a PBS comprising a sequence selected from the group consisting of SEQ ID NOs. 3257-3263 of Table 3B. In some embodiments, the PEgRNA comprises a PBS comprising a sequence selected from the group consisting of sequences GTTCATTG and GTTCATTGA as disclosed in Table 3B. In some embodiments, the PEgRNA comprises an editing template comprising a sequence selected from the group consisting of SEQ Identifiers: C13162-C13221 of Table 3C. In some embodiments, the PEgRNA comprises an editing template comprising a sequence selected from the group consisting of SEQ ID NOs. 17188-17247 of Table 3C. In some embodiments, the prime editing composition further comprises a ngRNA that comprises a spacer comprising a sequence selected from the group consisting of SEQ Identifiers: D1416-D1423, D1426-D1433, D1514, and D1515 of Table 3D. In some embodiments, the prime editing composition further comprises a ngRNA that comprises a spacer comprising a sequence selected from the group consisting of SEQ ID NOs. 21049-21056, 21059-21066, 21147, and 21148 of Table 3D.

[0730] In some embodiments, the PEgRNA comprises a spacer comprising a sequence selected from the group consisting of SEQ Identifiers: A657-A658 of Table 3A. In some embodiments, the PEgRNA comprises a spacer comprising a sequence as set forth in SEQ ID NOs. 1005-1006 of Table 3A. In some embodiments, the PEgRNA comprises a PBS comprising a sequence selected from the group consisting of SEQ Identifiers: B2700-B2708 of Table 3B. In some embodiments, the PEgRNA comprises a PBS comprising a sequence selected from the group consisting of SEQ ID NOs. 3313-3319 of Table 3B. In some embodiments, the PEgRNA comprises a PBS comprising a sequence selected from the group consisting of sequences GAAGGTAA and GAAGGTAAA as disclosed in Table 3B. In some embodiments, the PEgRNA comprises an editing template comprising a sequence selected from the group consisting of SEQ Identifiers: C13222-C13232 of Table 3C. In some embodiments, the PEgRNA comprises an editing template comprising a sequence selected from the group consisting of SEQ ID NOs: 17248-17258 of Table 3C. In some embodiments, the prime editing composition further comprises a ngRNA that comprises a spacer comprising a sequence selected from the group consisting of SEQ Identifiers: D1448-D1461, D1474-D1478, D1512, D1513, D1516, D1517, D1529, and D1536-D1539 of Table 3D. In some embodiments, the prime editing composition further comprises a ngRNA that comprises a spacer comprising a sequence selected from the group consisting of SEQ ID NOs. 21081-21094, 21107-21111, 21145, 21146, 21149, 21150, 21162, and 21169-21172 of Table 3D.

[0731] In some embodiments, the PEgRNA comprises a spacer comprising the sequence of SEQ Identifier A659 of Table 3A. In some embodiments, the PEgRNA comprises a spacer comprising a sequence as set forth in SEQ ID NO. 1007 of Table 3A. In some embodiments, the PEgRNA comprises a PBS comprising a sequence selected from the group consisting of SEQ Identifiers: B2709-B2717 of Table 3B. In some embodiments, the PEgRNA comprises a PBS comprising a sequence selected from the group consisting of SEQ ID NOs. 3320-3326 of Table 3B. In some embodiments, the PEgRNA comprises a PBS comprising a sequence selected from the group consisting of sequences AGAAGGTA and AGAAGGTAA as disclosed in Table 3B. In some embodiments, the PEgRNA comprises an editing template comprising a sequence selected from the group consisting of SEQ Identifiers: C13233-C13244 of Table 3C. In some embodiments, the PEgRNA comprises an editing template comprising a sequence selected from the group consisting of SEQ ID NOs. 17259-17270 of Table 3C. In some embodiments, the prime editing composition further comprises a ngRNA that comprises a spacer comprising a sequence selected from the group consisting of SEQ Identifiers: D1447-D1461, D1473-D1478, D1516, D1517, and D1529 of Table 3D. In some embodiments, the prime editing composition further comprises a ngRNA that comprises a spacer comprising a sequence selected from the group consisting of SEQ ID NOs. 21080-21094, 21106-21111, 21149, 21150, and 21162 of Table 3D.

[0732] In some embodiments, the PEgRNA comprises a spacer comprising a sequence selected from the group consisting of SEQ Identifiers: A626, A627, A628, and A670 of Table 3A. In some embodiments, the PEgRNA comprises a spacer comprising a sequence as set forth in SEQ ID NOs. 974-976 and 1018 of Table 3A. In some embodiments, the PEgRNA comprises a PBS comprising a sequence selected from the group consisting of SEQ Identifiers: B2538-B2546 of Table 3B. In some embodiments, the PEgRNA comprises a PBS comprising a sequence selected from the group consisting of SEQ ID NOs. 3187-3193 of Table 3B. In some embodiments, the PEgRNA comprises a PBS comprising a sequence selected from the group consisting of sequences TTTAAGTT and TTTAAGTTC as disclosed in Table 3B. In some embodiments, the PEgRNA comprises an editing template comprising a sequence selected from the group consisting of SEQ Identifiers: C13245-C13275 of Table 3C. In some embodiments, the PEgRNA comprises an editing template comprising a sequence selected from the group consisting of SEQ ID NOs. 17271-17301 of Table 3C. In some embodiments, the prime editing composition further comprises a ngRNA that comprises a spacer comprising a sequence selected from the group consisting of SEQ Identifiers: D1416-D1423, D1426-D1433, and D1479-D1485 of Table 3D. In some embodiments, the prime editing composition further comprises a ngRNA that comprises a spacer comprising a sequence selected from the group consisting of SEQ ID NOs. 21049-21056, 21059-21066, and 21112-21118 of Table 3D.

[0733] In some embodiments, the PEgRNA comprises a spacer comprising a sequence selected from the group consisting of SEQ Identifiers: A660-A661 of Table 3A. In some embodiments, the PEgRNA comprises a spacer comprising a sequence as set forth in SEQ ID NOs. 1008-1009 of Table 3A. In some embodiments, the PEgRNA comprises a PBS comprising a sequence selected from the group consisting of SEQ Identifiers: B2718-B2726 of Table 3B. In some embodiments, the PEgRNA comprises a PBS comprising a sequence selected from the group consisting of SEQ ID NOs. 3327-3333 of Table 3B. In some embodiments, the PEgRNA comprises a PBS comprising a sequence selected from the group consisting of sequences ATCGCATC and ATCGCATCT as disclosed in Table 3B. In some embodiments, the PEgRNA comprises an editing template comprising a sequence selected from the group consisting of SEQ Identifiers: C13276-C13305 of Table 3C. In some embodiments, the PEgRNA comprises an editing template comprising a sequence selected from the group consisting of SEQ ID NOs: 17302-17331 of Table 3C. In some embodiments, the prime editing composition further comprises a ngRNA that comprises a spacer comprising a sequence selected from the group consisting of SEQ Identifiers: D1491-D1507, D1542, and D1548 of Table 3D. In some embodiments, the prime editing composition further comprises a ngRNA that comprises a spacer comprising a sequence selected from the group consisting of SEQ ID NOs. 21124-21140, 21175, and 21181 of Table 3D.

[0734] In some embodiments, the PEgRNA comprises a spacer comprising the sequence of SEQ Identifier: A665 of Table 3A. In some embodiments, the PEgRNA comprises a spacer comprising a sequence as set forth in SEQ ID NO. 1013 of Table 3A. In some embodiments, the PEgRNA comprises a PBS comprising a sequence selected from the group consisting of SEQ Identifiers: B2736-B2744 of Table 3B. In some embodiments, the PEgRNA comprises a PBS comprising a sequence selected from the group consisting of SEQ ID NOs. 3341-3344 of Table 3B. In some embodiments, the PEgRNA comprises a PBS comprising a sequence selected from the group consisting of sequences CGCATCTG and CGCATCTGA as disclosed in Table 3B. In some embodiments, the PEgRNA comprises an editing template comprising a sequence selected from the group consisting of SEQ Identifiers: C13306-C13333 of Table 3C. In some embodiments, the PEgRNA comprises an editing template comprising a sequence selected from the group consisting of SEQ ID NOs: 17332-17359 of Table 3C. In some embodiments, the prime editing composition further comprises a ngRNA that comprises a spacer comprising a sequence selected from the group consisting of SEQ Identifiers: D1491-D1504 and D1542 of Table 3D. In some embodiments, the prime editing composition further comprises a ngRNA that comprises a spacer comprising a sequence selected from the group consisting of SEQ ID NOs. 21124-21137 and 21175 of Table 3D.

[0735] In some embodiments, the editing target sequence comprises a mutation as compared to a wild type CFTR gene.

[0736] In some embodiments, the editing target sequence or the complementary sequence on the CFTR gene thereof comprises a mutation that encodes an amino acid substitution K1177fs relative to a wild type CFTR polypeptide set forth in SEQ ID NO: 19, and wherein the editing template encodes an intended nucleotide edit that corrects the mutation. In some embodiments, the editing target sequence or the complementary sequence on the CFTR gene thereof comprises a C deletion mutation (c.3528delC) at position 117,627,581 of human chromosome 7 compared to a wild type CFTR gene. In some embodiments, the editing template comprises an intended nucleotide edit compared to the target CFTR gene, wherein incorporation of the intended nucleotide edit encoded by the editing template corrects the mutation.

[0737] In some embodiments, the editing target sequence or the complementary sequence on the CFTR gene thereof comprises a mutation that encodes an amino acid substitution relative to a wild type CFTR polypeptide set forth in SEQ ID NO: 19, and wherein the editing template encodes an intended nucleotide edit that corrects the mutation. In some embodiments, the editing target sequence or the complementary sequence on the CFTR gene thereof comprises a A-*T mutation (c.3529A>T) at position 117,627,582, a deletion of A (c.3530delA) at position 117,627,583, a duplication of a TCAA (c.3532_3535dupTCAA) at position 117,627,588, and/or a deletion of CCAA (c.3536_3539delCCAA) at position 117,627,589, of human chromosome 7 compared to a wild type CFTR gene. In some embodiments, the editing template comprises an intended nucleotide edit compared to the target CFTR gene, wherein incorporation of the intended nucleotide edit encoded by the editing template corrects the mutation. In some embodiments, incorporation of the one or more intended nucleotide edits results in a CFTR gene that encodes a functional CFTR polypeptide. In some embodiments, the editing template comprises a wild type CFTR gene sequence. Accordingly, in some embodiments, the newly synthesized single stranded DNA encoded by the editing template is capable of correcting the c.3528delC mutation, the c.3529A>T mutation, the c.3530delA mutation, the c.3532_3535dupTCAA mutation, and/or the c.3536_3539delCCAA mutation in the target CFTR gene. In some embodiments, the newly synthesized single stranded DNA encoded by the editing template is capable of correcting all of the c.3528delC mutation, the c.3529A>T mutation, the c.3530delA mutation, the c.3532_3535dupTCAA mutation, and the c.3536_3539delCCAA mutation in the target CFTR gene. In some embodiments, two or more of the c.3528delC mutation, the c.3529A>T mutation, the c.3530delA mutation, the c.3532_3535dupTCAA mutation, and the c.3536_3539delCCAA mutation are located on the same CFTR gene. In some embodiments, the newly synthesized single stranded DNA encoded by the editing template is capable of correcting the c.3528delC mutation, the c.3529A>T mutation, the c.3530delA mutation, the c.3532_3535dupTCAA mutation, and the c.3536_3539delCCAA mutation that are located on different CFTR genes. For example, in some embodiments, a subject may comprise two copies of CFTR genes, each comprising a different mutation selected from the group consisting of the c.3528delC mutation, the c.3529A>T mutation, the c.3530delA mutation, the c.3532_3535dupTCAA mutation, and the c.3536_3539delCCAA mutation, all of which may be corrected by an editing template of a single PEgRNA. In some embodiments, the editing template is capable of correcting one or more, or all of the c.3528delC mutation, the c.3529A>T mutation, the c.3530delA mutation, the c.3532_3535dupTCAA mutation, and the c.3536_3539delCCAA mutation that are in different subjects, wherein each subject may have one or more of the mutations.

[0738] In some embodiments, the PEgRNA comprises a spacer comprising a sequence selected from the group consisting of SEQ Identifiers: A671-A672 of Table 3A. In some embodiments, the PEgRNA comprises a spacer comprising a sequence as set forth in SEQ ID NOs. 1019-1020 of Table 3A. In some embodiments, the PEgRNA comprises a PBS comprising a sequence selected from the group consisting of SEQ Identifiers: B2745-B2753 of Table 3B. In some embodiments, the PEgRNA comprises a PBS comprising a sequence selected from the group consisting of SEQ ID NOs. 3348-3354 of Table 3B. In some embodiments, the PEgRNA comprises a PBS comprising a sequence selected from the group consisting of sequences GCATGTCA and GCATGTCAA as disclosed in Table 3B. In some embodiments, the PEgRNA comprises an editing template comprising a sequence selected from the group consisting of SEQ Identifiers: C13334-C13373 of Table 3C. In some embodiments, the PEgRNA comprises an editing template comprising a sequence selected from the group consisting of SEQ ID NOs: 17360-17399 of Table 3C. In some embodiments, the prime editing composition further comprises a ngRNA that comprises a spacer comprising a sequence selected from the group consisting of SEQ Identifiers: D1435-D1440, and D1549-D1553 of Table 3D. In some embodiments, the prime editing composition further comprises a ngRNA that comprises a spacer comprising a sequence selected from the group consisting of SEQ ID NOs. 21068-21073, and 21182-21186 of Table 3D.

[0739] In some embodiments, the PEgRNA comprises a spacer comprising a sequence selected from the group consisting of SEQ Identifiers: A673-A674 of Table 3A. In some embodiments, the PEgRNA comprises a spacer comprising a sequence as set forth in SEQ ID NOs. 1021-1022 of Table 3A. In some embodiments, the PEgRNA comprises a PBS comprising a sequence selected from the group consisting of SEQ Identifiers: B2754-B2762 of Table 3B. In some embodiments, the PEgRNA comprises a PBS comprising a sequence selected from the group consisting of SEQ ID NOs. 3355-3361 of Table 3B. In some embodiments, the PEgRNA comprises a PBS comprising a sequence selected from the group consisting of sequences CTCGAAAG and CTCGAAAGT as disclosed in Table 3B. In some embodiments, the PEgRNA comprises an editing template comprising a sequence selected from the group consisting of SEQ Identifiers: C13374-C13387 of Table 3C. In some embodiments, the PEgRNA comprises an editing template comprising a sequence selected from the group consisting of SEQ ID NOs: 17400-17413 of Table 3C. In some embodiments, the prime editing composition further comprises a ngRNA that comprises a spacer comprising a sequence selected from the group consisting of SEQ Identifiers: D1453-D1461, D1473-D1478, D1513, D1516, D1517, D1529, and D1536-D1539, D1554-D1563 of Table 3D. In some embodiments, the prime editing composition further comprises a ngRNA that comprises a spacer comprising a sequence selected from the group consisting of SEQ ID NOs. 21086-21094, 21106-21111, 21146, 21149, 21150, 21162, and 21169-21172 of Table 3D.

[0740] In some embodiments, the PEgRNA comprises a spacer comprising the sequence of SEQ ID Identifier: A675 of Table 3A. In some embodiments, the PEgRNA comprises a spacer comprising a sequence as set forth in SEQ ID NO. 1023 of Table 3A. In some embodiments, the PEgRNA comprises a PBS comprising a sequence selected from the group consisting of SEQ Identifiers: B2763-B2771 of Table 3B. In some embodiments, the PEgRNA comprises a PBS comprising a sequence selected from the group consisting of SEQ ID NOs. 3362-3368 of Table 3B. In some embodiments, the PEgRNA comprises a PBS comprising a sequence selected from the group consisting of sequences TCTCGAAA and TCTCGAAAG as disclosed in Table 3B. In some embodiments, the PEgRNA comprises an editing template comprising a sequence selected from the group consisting of SEQ Identifiers: C13388-C13395 of Table 3C. In some embodiments, the PEgRNA comprises an editing template comprising a sequence selected from the group consisting of SEQ ID NOs: 17414-17421 of Table 3C. In some embodiments, the prime editing composition further comprises a ngRNA that comprises a spacer comprising a sequence selected from the group consisting of SEQ Identifiers: D1453-D1461, D1473-D1478, D1516, D1517, D1529, D1556, and D1557-D1563 of Table 3D. In some embodiments, the prime editing composition further comprises a ngRNA that comprises a spacer comprising a sequence selected from the group consisting of SEQ ID NOs. 21086-21094, 21106-21111, 21149, 21150, 21162, 21189, and 21190-21196 of Table 3D.

[0741] In some embodiments, the PEgRNA comprises a spacer comprising a sequence selected from the group consisting of SEQ Identifiers: A676-A677 of Table 3A. In some embodiments, the PEgRNA comprises a spacer comprising a sequence as set forth in SEQ ID NOs. 1024-1025 of Table 3A. In some embodiments, the PEgRNA comprises a PBS comprising a sequence selected from the group consisting of SEQ Identifiers: B2772-B2780 of Table 3B. In some embodiments, the PEgRNA comprises a PBS comprising a sequence selected from the group consisting of SEQ ID NOs. 3369-3375 of Table 3B. In some embodiments, the PEgRNA comprises a PBS comprising a sequence selected from the group consisting of sequences AAGAATGG and AAGAATGGC as disclosed in Table 3B. In some embodiments, the PEgRNA comprises an editing template comprising a sequence selected from the group consisting of SEQ Identifiers: C13396-C13416 of Table 3C. In some embodiments, the PEgRNA comprises an editing template comprising a sequence selected from the group consisting of SEQ ID NOs: 17422-17442 of Table 3C. In some embodiments, the prime editing composition further comprises a ngRNA that comprises a spacer comprising a sequence selected from the group consisting of SEQ Identifiers: D1450-D1461, D1473-D1478, D1512, D1513, D1516, D1517, D1529, D1536, D1537, D1538, D1539, and D1554-D1562 of Table 3D. In some embodiments, the prime editing composition further comprises a ngRNA that comprises a spacer comprising a sequence selected from the group consisting of SEQ ID NOs. 21083-21094, 21106-21111, 21145, 21146, 21149, 21150, 21162, 21169, 21170, 21171, 21172, and 21187-21195 of Table 3D.

[0742] In some embodiments, the PEgRNA comprises a spacer comprising the sequence of SEQ Identifier: A678 of Table 3A. In some embodiments, the PEgRNA comprises a spacer comprising a sequence as set forth in SEQ ID NO. 1026 of Table 3A. In some embodiments, the PEgRNA comprises a PBS comprising a sequence selected from the group consisting of SEQ Identifiers: B2781-B2789 of Table 3B. In some embodiments, the PEgRNA comprises a PBS comprising a sequence selected from the group consisting of SEQ ID NOs. 3376-3382 of Table 3B. In some embodiments, the PEgRNA comprises a PBS comprising a sequence selected from the group consisting of sequences CAAGAATG and CAAGAATGG as disclosed in Table 3B. In some embodiments, the PEgRNA comprises an editing template comprising a sequence selected from the group consisting of SEQ Identifiers: C13417-C13438 of Table 3C. In some embodiments, the PEgRNA comprises an editing template comprising a sequence selected from the group consisting of SEQ ID NOs: 17443-17464 of Table 3C. In some embodiments, the prime editing composition further comprises a ngRNA that comprises a spacer comprising a sequence selected from the group consisting of SEQ Identifiers: D1450-D1461, D1473-D1478, D1516, D1517, D1529, D1556, D1557, D1558, D1559, D1560, D1561, and D1562 of Table 3D. In some embodiments, the prime editing composition further comprises a ngRNA that comprises a spacer comprising a sequence selected from the group consisting of SEQ ID NOs. 21083-21094, 21106-21111, 21149, 21150, 21162, 21189, 21190, 21191, 21192, 21193, 21194, and 21195 of Table 3D.

[0743] In some embodiments, the PEgRNA comprises a spacer comprising the sequence of SEQ Identifier: A679 of Table 3A. In some embodiments, the PEgRNA comprises a spacer comprising a sequence as set forth in SEQ ID NO. 1027 of Table 3A. In some embodiments, the PEgRNA comprises a PBS comprising a sequence selected from the group consisting of SEQ Identifiers: B2790-B2798 of Table 3B. In some embodiments, the PEgRNA comprises a PBS comprising a sequence selected from the group consisting of SEQ ID NOs. 3383-3389 of Table 3B. In some embodiments, the PEgRNA comprises a PBS comprising a sequence selected from the group consisting of sequences CAATGAAC and CAATGAACT as disclosed in Table 3B. In some embodiments, the PEgRNA comprises an editing template comprising a sequence selected from the group consisting of SEQ Identifiers: C13439-C13452 of Table 3C. In some embodiments, the PEgRNA comprises an editing template comprising a sequence selected from the group consisting of SEQ ID NOs: 17465-17478 of Table 3C. In some embodiments, the prime editing composition further comprises a ngRNA that comprises a spacer comprising a sequence selected from the group consisting of SEQ Identifiers: D1496-D1504, and D1564-D1569 of Table 3D. In some embodiments, the prime editing composition further comprises a ngRNA that comprises a spacer comprising a sequence selected from the group consisting of SEQ ID NOs. 21129-21137, and 21197-21202 of Table 3D.

[0744] In some embodiments, the PEgRNA comprises a spacer comprising a sequence selected from the group consisting of SEQ Identifier: A680-A681 of Table 3A. In some embodiments, the PEgRNA comprises a spacer comprising a sequence as set forth in SEQ ID NOs. 1028-1029 of Table 3A. In some embodiments, the PEgRNA comprises a PBS comprising a sequence selected from the group consisting of SEQ Identifiers: B2799-B2807 of Table 3B. In some embodiments, the PEgRNA comprises a PBS comprising a sequence selected from the group consisting of SEQ ID NOs. 3390-3396 of Table 3B. In some embodiments, the PEgRNA comprises a PBS comprising a sequence selected from the group consisting of sequences GGCATGTC and GGCATGTCA as disclosed in Table 3B. In some embodiments, the PEgRNA comprises an editing template comprising a sequence selected from the group consisting of SEQ Identifiers: C13453-C13473 of Table 3C. In some embodiments, the PEgRNA comprises an editing template comprising a sequence selected from the group consisting of SEQ ID NOs: 17479-17499 of Table 3C. In some embodiments, the prime editing composition further comprises a ngRNA that comprises a spacer comprising a sequence selected from the group consisting of SEQ Identifiers: D1496-D1507, and D1564-D1575 of Table 3D. In some embodiments, the prime editing composition further comprises a ngRNA that comprises a spacer comprising a sequence selected from the group consisting of SEQ ID NOs. 21129-21140, and 21197-21208 of Table 3D.

[0745] In some embodiments, the PEgRNA comprises a spacer comprising a sequence selected from the group consisting of SEQ Identifier: A682-A684 of Table 3A. In some embodiments, the PEgRNA comprises a spacer comprising a sequence as set forth in SEQ ID NOs. 1030-1032 of Table 3A. In some embodiments, the PEgRNA comprises a PBS comprising a sequence selected from the group consisting of SEQ Identifiers: B2808-B2816 of Table 3B. In some embodiments, the PEgRNA comprises a PBS comprising a sequence selected from the group consisting of SEQ ID NOs. 3397-3403 of Table 3B. In some embodiments, the PEgRNA comprises a PBS comprising a sequence selected from the group consisting of sequences TCGAAAGT and TCGAAAGTT as disclosed in Table 3B. In some embodiments, the PEgRNA comprises an editing template comprising a sequence selected from the group consisting of SEQ Identifiers: C13474-C13479 of Table 3C. In some embodiments, the PEgRNA comprises an editing template comprising a sequence selected from the group consisting of SEQ ID NOs: 17500-17505 of Table 3C. In some embodiments, the prime editing composition further comprises a ngRNA that comprises a spacer comprising a sequence selected from the group consisting of SEQ Identifiers: D1475, D1476, D1477, D1480, D1483, D1486, D1515, D1521-D1528, and D1576-D1581 of Table 3D. In some embodiments, the prime editing composition further comprises a ngRNA that comprises a spacer comprising a sequence selected from the group consisting of SEQ ID NOs. 21108, 21109, 21110, 21113, 21116, 21119, 21148, 21154-21161, and 21209-21214 of Table 3D.

[0746] In some embodiments, the PEgRNA comprises a spacer comprising a sequence selected from the group consisting of SEQ Identifier: A685-A686 of Table 3A. In some embodiments, the PEgRNA comprises a spacer comprising a sequence as set forth in SEQ ID NOs. 1033-1034 of Table 3A. In some embodiments, the PEgRNA comprises a PBS comprising a sequence selected from the group consisting of SEQ Identifiers: B2817-B2825 of Table 3B. In some embodiments, the PEgRNA comprises a PBS comprising a sequence selected from the group consisting of SEQ ID NOs. 3404-3410 of Table 3B. In some embodiments, the PEgRNA comprises a PBS comprising a sequence selected from the group consisting of sequences GACTCGGC and GACTCGGCT as disclosed in Table 3B. In some embodiments, the PEgRNA comprises an editing template comprising a sequence selected from the group consisting of SEQ Identifiers: C13480-C13481 of Table 3C. In some embodiments, the PEgRNA comprises an editing template comprising a sequence selected from the group consisting of SEQ ID NOs: 17506-17507 of Table 3C. In some embodiments, the prime editing composition further comprises a ngRNA that comprises a spacer comprising a sequence selected from the group consisting of SEQ Identifiers: D1435-D1440, D1549, D1551, D1582, and D1583 of Table 3D. In some embodiments, the prime editing composition further comprises a ngRNA that comprises a spacer comprising a sequence selected from the group consisting of SEQ ID NOs 21068-21073, 21182, 21184, 21215, and 21216. of Table 3D.

[0747] In some embodiments, the PEgRNA comprises a spacer comprising the sequence of SEQ Identifier: A687 of Table 3A. In some embodiments, the PEgRNA comprises a spacer comprising a sequence as set forth in SEQ ID NO. 1035 of Table 3A. In some embodiments, the PEgRNA comprises a PBS comprising a sequence selected from the group consisting of SEQ Identifiers: B2826-B2834 of Table 3B. In some embodiments, the PEgRNA comprises a PBS comprising a sequence selected from the group consisting of SEQ ID NOs. 3411-3417 of Table 3B. In some embodiments, the PEgRNA comprises a PBS comprising a sequence selected from the group consisting of sequences AGACTCGG and AGACTCGGC as disclosed in Table 3B. In some embodiments, the PEgRNA comprises an editing template comprising a sequence selected from the group consisting of SEQ Identifiers: C13482-C13483 of Table 3C. In some embodiments, the PEgRNA comprises an editing template comprising a sequence selected from the group consisting of SEQ ID NOs: 17508-17509 of Table 3C. In some embodiments, the prime editing composition further comprises a ngRNA that comprises a spacer comprising a sequence selected from the group consisting of SEQ Identifiers: D1496-D1504, and D1564-D1568 of Table 3D. In some embodiments, the prime editing composition further comprises a ngRNA that comprises a spacer comprising a sequence selected from the group consisting of SEQ ID NOs. 21129-21137, and 21197-21201 of Table 3D.

[0748] In some embodiments, the PEgRNA comprises a spacer comprising a sequence selected from the group consisting of SEQ Identifiers: A688-A689 of Table 3A. In some embodiments, the PEgRNA comprises a spacer comprising a sequence as set forth in SEQ ID NOs. 1036-1037 of Table 3A. In some embodiments, the PEgRNA comprises a PBS comprising a sequence selected from the group consisting of SEQ Identifiers: B2835-B2843 of Table 3B. In some embodiments, the PEgRNA comprises a PBS comprising a sequence selected from the group consisting of SEQ ID NOs. 3418-3424 of Table 3B. In some embodiments, the PEgRNA comprises a PBS comprising a sequence selected from the group consisting of sequences GGTTTACC and GGTTTACCT as disclosed in Table 3B. In some embodiments, the PEgRNA comprises an editing template comprising a sequence selected from the group consisting of SEQ Identifiers: C13484-C13514 of Table 3C. In some embodiments, the PEgRNA comprises an editing template comprising a sequence selected from the group consisting of SEQ ID NOs: 17510-17540 of Table 3C. In some embodiments, the prime editing composition further comprises a ngRNA that comprises a spacer comprising a sequence selected from the group consisting of SEQ Identifiers: D1435-D1440, and D1549-D1553 of Table 3D. In some embodiments, the prime editing composition further comprises a ngRNA that comprises a spacer comprising a sequence selected from the group consisting of SEQ ID NOs. 21068-21073, and 21182-21186 of Table 3D.

[0749] In some embodiments, the PEgRNA comprises a spacer comprising the sequence of SEQ Identifier: A690 of Table 3A. In some embodiments, the PEgRNA comprises a spacer comprising a sequence as set forth in SEQ ID NO. 1038 of Table 3A. In some embodiments, the PEgRNA comprises a PBS comprising a sequence selected from the group consisting of SEQ Identifiers: B2844-B2852 of Table 3B. In some embodiments, the PEgRNA comprises a PBS comprising a sequence selected from the group consisting of SEQ ID NOs. 3425-3431 of Table 3B. In some embodiments, the PEgRNA comprises a PBS comprising a sequence selected from the group consisting of sequences AGGTTTAC and AGGTTTACC as disclosed in Table 3B. In some embodiments, the PEgRNA comprises an editing template comprising a sequence selected from the group consisting of SEQ Identifiers: C13515-C13545 of Table 3C. In some embodiments, the PEgRNA comprises an editing template comprising a sequence selected from the group consisting of SEQ ID NOs: 17541-17571 of Table 3C. In some embodiments, the prime editing composition further comprises a ngRNA that comprises a spacer comprising a sequence selected from the group consisting of SEQ Identifiers: D1497-D1504, D1564-D1571, D1584, D1585, and D1586 of Table 3D. In some embodiments, the prime editing composition further comprises a ngRNA that comprises a spacer comprising a sequence selected from the group consisting of SEQ ID NOs. 21130-21137, 21197-21204, 21217, 21218, and 21219 of Table 3D.

[0750] In some embodiments, the PEgRNA comprises a spacer comprising a sequence selected from the group consisting of SEQ Identifiers: A691-A692 of Table 3A. In some embodiments, the PEgRNA comprises a spacer comprising a sequence as set forth in SEQ ID NOs. 1039-1040 of Table 3A. In some embodiments, the PEgRNA comprises a PBS comprising a sequence selected from the group consisting of SEQ Identifiers: B2853-B2861 of Table 3B. In some embodiments, the PEgRNA comprises a PBS comprising a sequence selected from the group consisting of SEQ ID NOs. 3432-3438 of Table 3B. In some embodiments, the PEgRNA comprises a PBS comprising a sequence selected from the group consisting of sequences AAAGTTAT and AAAGTTATG as disclosed in Table 3B. In some embodiments, the PEgRNA comprises an editing template comprising a sequence selected from the group consisting of SEQ Identifiers: C13546-C13551 of Table 3C. In some embodiments, the PEgRNA comprises an editing template comprising a sequence selected from the group consisting of SEQ ID NOs: 17572-17577 of Table 3C. In some embodiments, the prime editing composition further comprises a ngRNA that comprises a spacer comprising a sequence selected from the group consisting of SEQ Identifiers: D1421, D1422, D1423, D1431, D1432, D1433, D1514, D1515, D1578, D1587, and D1588-D1595 of Table 3D. In some embodiments, the prime editing composition further comprises a ngRNA that comprises a spacer comprising a sequence selected from the group consisting of SEQ ID NOs. 21054, 21055, 21056, 21064, 21065, 21066, 21147, 21148, 21211, 21220, and 21221-21228 of Table 3D.

[0751] In some embodiments, the PEgRNA comprises a spacer comprising the sequence of SEQ Identifier: A693 of Table 3A. In some embodiments, the PEgRNA comprises a spacer comprising a sequence as set forth in SEQ ID NO. 1041 of Table 3A. In some embodiments, the PEgRNA comprises a PBS comprising a sequence selected from the group consisting of SEQ Identifiers: B2862-B2870 of Table 3B. In some embodiments, the PEgRNA comprises a PBS comprising a sequence selected from the group consisting of SEQ ID NOs. 3439-3445 of Table 3B. In some embodiments, the PEgRNA comprises a PBS comprising a sequence selected from the group consisting of sequences GAAAGTTA and GAAAGTTAT as disclosed in Table 3B. In some embodiments, the PEgRNA comprises an editing template comprising a sequence selected from the group consisting of SEQ Identifiers: C13552-C13555 of Table 3C. In some embodiments, the PEgRNA comprises an editing template comprising a sequence selected from the group consisting of SEQ ID NOs: 17578-17581 of Table 3C. In some embodiments, the prime editing composition further comprises a ngRNA that comprises a spacer comprising a sequence selected from the group consisting of SEQ Identifiers: D1454-D1461, D1473-D1478, D1516, D1517, D1529, and D1556-D1563 of Table 3D. In some embodiments, the prime editing composition further comprises a ngRNA that comprises a spacer comprising a sequence selected from the group consisting of SEQ ID NOs. 21087-21094, 21106-21111, 21149, 21150, 21162, and 21189-21196 of Table 3D.

[0752] In some embodiments, the PEgRNA comprises a spacer comprising a sequence selected from the group consisting of SEQ Identifiers: A694-A695 of Table 3A. In some embodiments, the PEgRNA comprises a spacer comprising a sequence as set forth in SEQ ID NOs. 1042-1043 of Table 3A. In some embodiments, the PEgRNA comprises a PBS comprising a sequence selected from the group consisting of SEQ Identifiers: B2871-B2879 of Table 3B. In some embodiments, the PEgRNA comprises a PBS comprising a sequence selected from the group consisting of SEQ ID NOs. 3446-3452 of Table 3B. In some embodiments, the PEgRNA comprises a PBS comprising a sequence selected from the group consisting of sequences AAACCATA and AAACCATAC as disclosed in Table 3B. In some embodiments, the PEgRNA comprises an editing template comprising a sequence selected from the group consisting of SEQ Identifiers: C13556-C13585 of Table 3C. In some embodiments, the PEgRNA comprises an editing template comprising a sequence selected from the group consisting of SEQ ID NOs: 17582-17611 of Table 3C. In some embodiments, the prime editing composition further comprises a ngRNA that comprises a spacer comprising a sequence selected from the group consisting of SEQ Identifiers: D1450-D1478, D1516, D1517, D1529, D1556, D1557, D1558, D1596, D1597, D1598, and D1599 of Table 3D. In some embodiments, the prime editing composition further comprises a ngRNA that comprises a spacer comprising a sequence selected from the group consisting of SEQ ID NOs. 21083-21111, 21149, 21150, 21162, 21189, 21190, 21191, 21229, 21230, 21231, and 21232 of Table 3D.

[0753] In some embodiments, the PEgRNA comprises a spacer comprising a sequence selected from the group consisting of SEQ Identifier: A696-A698 of Table 3A. In some embodiments, the PEgRNA comprises a spacer comprising a sequence as set forth in SEQ ID NOs. 1044-1046 of Table 3A. In some embodiments, the PEgRNA comprises a PBS comprising a sequence selected from the group consisting of SEQ Identifiers: B2880-B2888 of Table 3B. In some embodiments, the PEgRNA comprises a PBS comprising a sequence selected from the group consisting of SEQ ID NOs. 3453-3459 of Table 3B. In some embodiments, the PEgRNA comprises a PBS comprising a sequence selected from the group consisting of sequences AGAATGGC and AGAATGGCC as disclosed in Table 3B. In some embodiments, the PEgRNA comprises an editing template comprising a sequence selected from the group consisting of SEQ Identifiers: C13586-C13605 of Table 3C. In some embodiments, the PEgRNA comprises an editing template comprising a sequence selected from the group consisting of SEQ ID NOs: 17612-17631 of Table 3C. In some embodiments, the prime editing composition further comprises a ngRNA that comprises a spacer comprising a sequence selected from the group consisting of SEQ Identifiers: D1475, D1476, D1477, D1480, D1483, D1486, D1515, D1521, D1522-D1528, and D1576-D1581 of Table 3D. In some embodiments, the prime editing composition further comprises a ngRNA that comprises a spacer comprising a sequence selected from the group consisting of SEQ ID NOs. 21108, 21109, 21110, 21113, 21119, 21148, 21154, 21155-21161, and 21209-21214 of Table 3D.

[0754] In some embodiments, the PEgRNA comprises a spacer comprising a sequence selected from the group consisting of SEQ Identifiers: A699-A702 of Table 3A. In some embodiments, the PEgRNA comprises a spacer comprising a sequence as set forth in SEQ ID NOs. 1047-1050 of Table 3A. In some embodiments, the PEgRNA comprises a PBS comprising a sequence selected from the group consisting of SEQ Identifiers: B2889-B2897 of Table 3B. In some embodiments, the PEgRNA comprises a PBS comprising a sequence selected from the group consisting of SEQ ID NOs. 3460-3466 of Table 3B. In some embodiments, the PEgRNA comprises a PBS comprising a sequence selected from the group consisting of sequences AGTTATGA and AGTTATGAT as disclosed in Table 3B. In some embodiments, the PEgRNA comprises an editing template comprising a sequence selected from the group consisting of SEQ Identifiers: C13606-C13607 of Table 3C. In some embodiments, the PEgRNA comprises an editing template comprising a sequence selected from the group consisting of SEQ ID NOs: 17632-17633 of Table 3C. In some embodiments, the prime editing composition further comprises a ngRNA that comprises a spacer comprising a sequence selected from the group consisting of SEQ Identifiers: D1421, D1422, D1423, D1431, D1432, D1433, D1514, D1515, D1578, D1587-D1595, D1600, and D1601 of Table 3D. In some embodiments, the prime editing composition further comprises a ngRNA that comprises a spacer comprising a sequence selected from the group consisting of SEQ ID NOs. 21054, 21055, 21056, 21064, 21065, 21066, 21147, 21148, 21211, 21220-21228, 21233, and 21234 of Table 3D.

[0755] In some embodiments, the PEgRNA comprises a spacer comprising the sequence of SEQ Identifier: A703 of Table 3A. In some embodiments, the PEgRNA comprises a spacer comprising a sequence as set forth in SEQ ID NO. 1051 of Table 3A. In some embodiments, the PEgRNA comprises a PBS comprising a sequence selected from the group consisting of SEQ Identifiers: B2898-B2906 of Table 3B. In some embodiments, the PEgRNA comprises a PBS comprising a sequence selected from the group consisting of SEQ ID NOs. 3467-3473 of Table 3B. In some embodiments, the PEgRNA comprises a PBS comprising a sequence selected from the group consisting of sequences CAACCAAA and CAACCAAAC as disclosed in Table 3B. In some embodiments, the PEgRNA comprises an editing template comprising a sequence selected from the group consisting of SEQ Identifiers: C13608-C13638 of Table 3C. In some embodiments, the PEgRNA comprises an editing template comprising a sequence selected from the group consisting of SEQ ID NOs: 17634-17664 of Table 3C. In some embodiments, the prime editing composition further comprises a ngRNA that comprises a spacer comprising a sequence selected from the group consisting of SEQ Identifiers: D1450-D1461, D1473-D1478, D1516, D1517, D1529, D1556, D1557, and D1599 of Table 3D. In some embodiments, the prime editing composition further comprises a ngRNA that comprises a spacer comprising a sequence selected from the group consisting of SEQ ID NOs. 21083-21094, 21106-21111, 21149, 21150, 21162, 21189, 21190, and 21232 of Table 3D.

[0756] In some embodiments, the PEgRNA comprises a spacer comprising a sequence selected from the group consisting of SEQ Identifiers: A704-A705 of Table 3A. In some embodiments, the PEgRNA comprises a spacer comprising a sequence as set forth in SEQ ID NOs. 1052-1053 of Table 3A. In some embodiments, the PEgRNA comprises a PBS comprising a sequence selected from the group consisting of SEQ Identifiers: B2907-B2915 of Table 3B. In some embodiments, the PEgRNA comprises a PBS comprising a sequence selected from the group consisting of SEQ ID NOs. 3474-3480 of Table 3B. In some embodiments, the PEgRNA comprises a PBS comprising a sequence selected from the group consisting of sequences AACTTAAA and AACTTAAAG as disclosed in Table 3B. In some embodiments, the PEgRNA comprises an editing template comprising a sequence selected from the group consisting of SEQ Identifiers: C13639-C13647 of Table 3C. In some embodiments, the PEgRNA comprises an editing template comprising a sequence selected from the group consisting of SEQ ID NOs: 17665-17673 of Table 3C. In some embodiments, the prime editing composition further comprises a ngRNA that comprises a spacer comprising a sequence selected from the group consisting of SEQ Identifiers: D1496-D1507, D1564-D1569, and D1572-D1574. In some embodiments, the prime editing composition further comprises a ngRNA that comprises a spacer comprising a sequence selected from the group consisting of SEQ ID NOs. 21129-21140, 21197-21202, and 21205-21207 of Table 3D.

[0757] In some embodiments, the PEgRNA comprises a spacer comprising a sequence selected from the group consisting of SEQ Identifier: A706-A709 of Table 3A. In some embodiments, the PEgRNA comprises a spacer comprising a sequence as set forth in SEQ ID NOs. 1054-1057 of Table 3A. In some embodiments, the PEgRNA comprises a PBS comprising a sequence selected from the group consisting of SEQ Identifiers: B2916-B2924 of Table 3B. In some embodiments, the PEgRNA comprises a PBS comprising a sequence selected from the group consisting of SEQ ID NOs. 3481-3487 of Table 3B. In some embodiments, the PEgRNA comprises a PBS comprising a sequence selected from the group consisting of sequences GTCAACCA and GTCAACCAA as disclosed in Table 3B. In some embodiments, the PEgRNA comprises an editing template comprising a sequence selected from the group consisting of SEQ Identifiers: C13648-C13678 of Table 3C. In some embodiments, the PEgRNA comprises an editing template comprising a sequence selected from the group consisting of SEQ ID NOs: 17674-17704 of Table 3C. In some embodiments, the prime editing composition further comprises a ngRNA that comprises a spacer comprising a sequence selected from the group consisting of SEQ Identifiers: D1420, D1421, D1422, D1423, D1430, D1431, D1432, D1433, D1475, D1476, D1477, D1479, D1480, D1482, D1483, D1485, D1486, D1514, D1515, D1521, D1522, D1523, D1524, D1525, D1526, D1527, D1528, D1588, D1589, D1593, D1594, D1602, and D1603 of Table 3D. In some embodiments, the prime editing composition further comprises a ngRNA that comprises a spacer comprising a sequence selected from the group consisting of SEQ ID NOs. 21053-21056, 21063-21066, 21108-21110, 21112-21116, 21118, 21119, 21147, 21148, 21154-21161, 21221, 21222, 21235 and 21236 of Table 3D.

[0758] In some embodiments, the PEgRNA comprises a spacer comprising a sequence selected from the group consisting of SEQ Identifiers: A710-A712 of Table 3A. In some embodiments, the PEgRNA comprises a spacer comprising a sequence as set forth in SEQ ID NOs. 1058-1060 of Table 3A. In some embodiments, the PEgRNA comprises a PBS comprising a sequence selected from the group consisting of SEQ Identifiers: B2925-B2933 of Table 3B. In some embodiments, the PEgRNA comprises a PBS comprising a sequence selected from the group consisting of SEQ ID NOs. 3488-3494 of Table 3B. In some embodiments, the PEgRNA comprises a PBS comprising a sequence selected from the group consisting of sequences ATACAAGA and ATACAAGAA as disclosed in Table 3B. In some embodiments, the PEgRNA comprises an editing template comprising a sequence selected from the group consisting of SEQ Identifiers: C13679-C13703 of Table 3C. In some embodiments, the PEgRNA comprises an editing template comprising a sequence selected from the group consisting of SEQ ID NOs: 17705-17729 of Table 3C. In some embodiments, the prime editing composition further comprises a ngRNA that comprises a spacer comprising a sequence selected from the group consisting of SEQ Identifiers: D1475, D1476, D1477, D1479, D1480, D1482, D1483, D1485, D1486, D1515, D1521, D1522, D1523, D1524, D1525, D1526, D1527, D1528, D1576, D1577, D1578, D1579, D1580, and D1581 of Table 3D. In some embodiments, the prime editing composition further comprises a ngRNA that comprises a spacer comprising a sequence selected from the group consisting of SEQ ID NOs. 21108, 21109, 21110, 21112, 21113, 21115, 21116, 21118, 21119, 21148, 21154-21161, and 21209-21214 of Table 3D.

[0759] In some embodiments, the PEgRNA comprises a spacer comprising a sequence selected from the group consisting of SEQ Identifier: A713-A714 of Table 3A. In some embodiments, the PEgRNA comprises a spacer comprising a sequence as set forth in SEQ ID NOs. 1061-1062 of Table 3A. In some embodiments, the PEgRNA comprises a PBS comprising a sequence selected from the group consisting of SEQ Identifiers: B2934-B2942 of Table 3B. In some embodiments, the PEgRNA comprises a PBS comprising a sequence selected from the group consisting of SEQ ID NOs.=3495-3501 of Table 3B. In some embodiments, the PEgRNA comprises a PBS comprising a sequence selected from the group consisting of sequences AGTCAACC and AGTCAACCA as disclosed in Table 3B. In some embodiments, the PEgRNA comprises an editing template comprising a sequence selected from the group consisting of SEQ Identifiers: C13704-C13734 of Table 3C. In some embodiments, the PEgRNA comprises an editing template comprising a sequence selected from the group consisting of SEQ ID NOs: 17730-17760 of Table 3C. In some embodiments, the prime editing composition further comprises a ngRNA that comprises a spacer comprising a sequence selected from the group consisting of SEQ Identifiers: D1450-D1461, D1473-D1478, D1512, D1513, D1516, D1517, D1529, D1536, D1537, D1538, D1539, D1556, D1557, and D1599 of Table 3D. In some embodiments, the prime editing composition further comprises a ngRNA that comprises a spacer comprising a sequence selected from the group consisting of SEQ ID NOs. 21083-21094, 21106-21111, 21145, 21146, 21149, 21150, 21162, 21169, 21170, 21171, 21172, 21189, 21190, and 21232 of Table 3D.

[0760] In some embodiments, the PEgRNA comprises a spacer comprising the sequence of SEQ Identifier: A715 of Table 3A. In some embodiments, the PEgRNA comprises a spacer comprising a sequence as set forth in SEQ ID NO. 1063 of Table 3A. In some embodiments, the PEgRNA comprises a PBS comprising a sequence selected from the group consisting of SEQ Identifiers: B2943-B2951 of Table 3B. In some embodiments, the PEgRNA comprises a PBS comprising a sequence selected from the group consisting of SEQ ID NOs. 3502-3508 of Table 3B. In some embodiments, the PEgRNA comprises a PBS comprising a sequence selected from the group consisting of sequences AAGTCAAC and AAGTCAACC as disclosed in Table 3B. In some embodiments, the PEgRNA comprises an editing template comprising a sequence selected from the group consisting of SEQ Identifiers: C13735-C13765 of Table 3C. In some embodiments, the PEgRNA comprises an editing template comprising a sequence selected from the group consisting of SEQ ID NOs: 17761-17791 of Table 3C. In some embodiments, the prime editing composition further comprises a ngRNA that comprises a spacer comprising a sequence selected from the group consisting of SEQ Identifiers: D1450-D1461, D1473-D1478, D1516, D1517, D1529, D1556, D1557, and D1599 of Table 3D. In some embodiments, the prime editing composition further comprises a ngRNA that comprises a spacer comprising a sequence selected from the group consisting of SEQ ID NOs. 21083-21094, 21106-21111, 21149, 21150, 21162, 21189, 21190, and 21232 of Table 3D.

[0761] In some embodiments, the PEgRNA comprises a spacer comprising a sequence selected from the group consisting of SEQ Identifier: A716-A717 of Table 3A. In some embodiments, the PEgRNA comprises a spacer comprising a sequence as set forth in SEQ ID NOs. 1064-1065 of Table 3A. In some embodiments, the PEgRNA comprises a PBS comprising a sequence selected from the group consisting of SEQ Identifiers: B2952-B2960 of Table 3B. In some embodiments, the PEgRNA comprises a PBS comprising a sequence selected from the group consisting of SEQ ID NOs. 3509-3515 of Table 3B. In some embodiments, the PEgRNA comprises a PBS comprising a sequence selected from the group consisting of sequences AAGTTATG and AAGTTATGA as disclosed in Table 3B. In some embodiments, the PEgRNA comprises an editing template comprising a sequence selected from the group consisting of SEQ Identifiers: C13766-C13767 of Table 3C. In some embodiments, the PEgRNA comprises an editing template comprising a sequence selected from the group consisting of SEQ ID NOs: 17792-17793 of Table 3C. In some embodiments, the prime editing composition further comprises a ngRNA that comprises a spacer comprising a sequence selected from the group consisting of SEQ Identifiers: D1454-D1461, D1466-D1478, D1516, D1517, D1529, D1556-D1563, D1596, D1597, D1598, and D1604 of Table 3D. In some embodiments, the prime editing composition further comprises a ngRNA that comprises a spacer comprising a sequence selected from the group consisting of SEQ ID NOs. 21087-21094, 21099-21111, 21149, 21189-21196, 21229, 21230, 21231, and 21237 of Table 3D.

[0762] In some embodiments, the PEgRNA comprises a spacer comprising a sequence selected from the group consisting of SEQ Identifiers: A718-A719 of Table 3A. In some embodiments, the PEgRNA comprises a spacer comprising a sequence as set forth in SEQ ID NOs. 1066-1067 of Table 3A. In some embodiments, the PEgRNA comprises a PBS comprising a sequence selected from the group consisting of SEQ Identifiers: B2961-B2969 of Table 3B. In some embodiments, the PEgRNA comprises a PBS comprising a sequence selected from the group consisting of SEQ ID NOs. 3516-3522 of Table 3B. In some embodiments, the PEgRNA comprises a PBS comprising a sequence selected from the group consisting of sequences GTTGGCAT and GTTGGCATG as disclosed in Table 3B. In some embodiments, the PEgRNA comprises an editing template comprising a sequence selected from the group consisting of SEQ Identifiers: C13768-C13791 of Table 3C. In some embodiments, the PEgRNA comprises an editing template comprising a sequence selected from the group consisting of SEQ ID NOs: 17794-17817 of Table 3C. In some embodiments, the prime editing composition further comprises a ngRNA that comprises a spacer comprising a sequence selected from the group consisting of SEQ Identifiers: D1497-D1504, D1564-D1571, D1605, and D1606 of Table 3D. In some embodiments, the prime editing composition further comprises a ngRNA that comprises a spacer comprising a sequence selected from the group consisting of SEQ ID NOs. 21130-21137, 21197-21204, 21238, and 21239 of Table 3D.

[0763] In some embodiments, the PEgRNA comprises a spacer comprising the sequence of SEQ Identifier A720 of Table 3A. In some embodiments, the PEgRNA comprises a spacer comprising a sequence as set forth in SEQ ID NO. 1068 of Table 3A. In some embodiments, the PEgRNA comprises a PBS comprising a sequence selected from the group consisting of SEQ Identifiers: B2970-B2978 of Table 3B. In some embodiments, the PEgRNA comprises a PBS comprising a sequence selected from the group consisting of SEQ ID NOs. 3523-3529 of Table 3B. In some embodiments, the PEgRNA comprises a PBS comprising a sequence selected from the group consisting of sequences TGTTGGCA and TGTTGGCAT as disclosed in Table 3B. In some embodiments, the PEgRNA comprises an editing template comprising a sequence selected from the group consisting of SEQ Identifiers: C13792-C13816 of Table 3C. In some embodiments, the PEgRNA comprises an editing template comprising a sequence selected from the group consisting of SEQ ID NOs: 17818-17842 of Table 3C. In some embodiments, the prime editing composition further comprises a ngRNA that comprises a spacer comprising a sequence selected from the group consisting of SEQ Identifiers: D1497-D1504, D1564-D1571, and D1584 of Table 3D. In some embodiments, the prime editing composition further comprises a ngRNA that comprises a spacer comprising a sequence selected from the group consisting of SEQ ID NOs. 21130-21137, 21197-21204, and 21217 of Table 3D.

[0764] In some embodiments, the PEgRNA comprises a spacer comprising a sequence selected from the group consisting of SEQ Identifier: A721-A722 of Table 3A. In some embodiments, the PEgRNA comprises a spacer comprising a sequence as set forth in SEQ ID NOs. 1069-1070 of Table 3A. In some embodiments, the PEgRNA comprises a PBS comprising a sequence selected from the group consisting of SEQ Identifiers: B2979-B2987 of Table 3B. In some embodiments, the PEgRNA comprises a PBS comprising a sequence selected from the group consisting of SEQ ID NOs. 3530-3536 of Table 3B. In some embodiments, the PEgRNA comprises a PBS comprising a sequence selected from the group consisting of sequences CATACAAG and CATACAAGA as disclosed in Table 3B. In some embodiments, the PEgRNA comprises an editing template comprising a sequence selected from the group consisting of SEQ Identifiers: C13817-C13868 of Table 3C. In some embodiments, the PEgRNA comprises an editing template comprising a sequence selected from the group consisting of SEQ ID NOs: 17843-17894 of Table 3C. In some embodiments, the prime editing composition further comprises a ngRNA that comprises a spacer comprising a sequence selected from the group consisting of SEQ Identifiers: D1450-D1461, D1473-D1478, D1512, D1513, D1516, D1517, D1529, D1536-D1539, D1554, D1556, D1557, D1558, D1559, D1560, D1599, D1607, and D1608 of Table 3D. In some embodiments, the prime editing composition further comprises a ngRNA that comprises a spacer comprising a sequence selected from the group consisting of SEQ ID NOs. 21083-21094, 21106-21111, 21145, 21146, 21149, 21150, 21162, 21169-21172, 21187, 21189-21193, 21232, 21240, and 21241 of Table 3D.

[0765] In some embodiments, the PEgRNA comprises a spacer comprising the sequence of SEQ Identifier: A723 of Table 3A. In some embodiments, the PEgRNA comprises a spacer comprising a sequence as set forth in SEQ ID NO. 1071 of Table 3A. In some embodiments, the PEgRNA comprises a PBS comprising a sequence selected from the group consisting of SEQ Identifiers: B2988-B2996 of Table 3B. In some embodiments, the PEgRNA comprises a PBS comprising a sequence selected from the group consisting of SEQ ID NOs. 3537-3543 of Table 3B. In some embodiments, the PEgRNA comprises a PBS comprising a sequence selected from the group consisting of sequences CCATACAA and CCATACAAG as disclosed in Table 3B. In some embodiments, the PEgRNA comprises an editing template comprising a sequence selected from the group consisting of SEQ Identifiers: C13869-C13895 of Table 3C. In some embodiments, the PEgRNA comprises an editing template comprising a sequence selected from the group consisting of SEQ ID NOs: 17895-17921 of Table 3C. In some embodiments, the prime editing composition further comprises a ngRNA that comprises a spacer comprising a sequence selected from the group consisting of SEQ Identifiers: D1450-D1461, D1473-D1478, D1516, D1517, D1529, D1556-D1560, and D1599. In some embodiments, the prime editing composition further comprises a ngRNA that comprises a spacer comprising a sequence selected from the group consisting of SEQ ID NOs. 21083-21094, 21106-21111, 21149, 21150, 21162, 21189-21193, and 21232 of Table 3D.

[0766] In some embodiments, the PEgRNA comprises a spacer comprising a sequence selected from the group consisting of SEQ Identifier: A724-A727 of Table 3A. In some embodiments, the PEgRNA comprises a spacer comprising a sequence as set forth in SEQ ID NOs. 1072-1075 of Table 3A. In some embodiments, the PEgRNA comprises a PBS comprising a sequence selected from the group consisting of SEQ Identifiers: B2997-B3005 of Table 3B. In some embodiments, the PEgRNA comprises a PBS comprising a sequence selected from the group consisting of SEQ ID NOs. 3544-3550 of Table 3B. In some embodiments, the PEgRNA comprises a PBS comprising a sequence selected from the group consisting of sequences TTGGCATG and TTGGCATGT as disclosed in Table 3B. In some embodiments, the PEgRNA comprises an editing template comprising a sequence selected from the group consisting of SEQ Identifiers: C13896-C13941 of Table 3C. In some embodiments, the PEgRNA comprises an editing template comprising a sequence selected from the group consisting of SEQ ID NOs: 17922-17967 of Table 3C. In some embodiments, the prime editing composition further comprises a ngRNA that comprises a spacer comprising a sequence selected from the group consisting of SEQ Identifiers: D1435-D1440, D1549-D1553, and D1609-D1614 of Table 3D. In some embodiments, the prime editing composition further comprises a ngRNA that comprises a spacer comprising a sequence selected from the group consisting of SEQ ID NOs. 21068-21073, 21182-21186, and 21242-21247 of Table 3D.

[0767] In some embodiments, the PEgRNA comprises a spacer comprising the sequence of SEQ Identifier: A728 of Table 3A. In some embodiments, the PEgRNA comprises a spacer comprising a sequence as set forth in SEQ ID NO. 1076 of Table 3A. In some embodiments, the PEgRNA comprises a PBS comprising a sequence selected from the group consisting of SEQ Identifiers: B3006-B3014 of Table 3B. In some embodiments, the PEgRNA comprises a PBS comprising a sequence selected from the group consisting of SEQ ID NOs. 3551-3557 of Table 3B. In some embodiments, the PEgRNA comprises a PBS comprising a sequence selected from the group consisting of sequences ATGGCCAA and ATGGCCAAC as disclosed in Table 3B. In some embodiments, the PEgRNA comprises an editing template comprising a sequence selected from the group consisting of SEQ Identifiers: C13942-C13958 of Table 3C. In some embodiments, the PEgRNA comprises an editing template comprising a sequence selected from the group consisting of SEQ ID NOs: 17968-17984 of Table 3C. In some embodiments, the prime editing composition further comprises a ngRNA that comprises a spacer comprising a sequence selected from the group consisting of SEQ Identifiers: D1452-D1461, D1473-D1478, D1516, D1517, D1529, and D1556-D1563 of Table 3D. In some embodiments, the prime editing composition further comprises a ngRNA that comprises a spacer comprising a sequence selected from the group consisting of SEQ ID NOs. 21085-21094, 21106-21111, 21149, 21150, 21162, and 21189-21196 of Table 3D.

[0768] In some embodiments, the editing target sequence is in exon 23 of the CFTR gene.

[0769] In some embodiments, the editing target sequence or the complementary sequence on the CFTR gene thereof comprises a mutation that encodes an amino acid substitution S1255*, F1257L, R1259*, and/or L1260R relative to a wild type CFTR polypeptide set forth in SEQ ID NO: 19, wherein * refers to a non-sense mutation, and wherein the editing template encodes an intended nucleotide edit that corrects the mutation. In some embodiments, the editing target sequence or the complementary sequence on the CFTR gene thereof comprises a T duplication mutation (c.3773dupT) at position 117,642,493, a C→A mutation (c.3764C>A) at position 117,642,484, a duplication of a C (c.3767dupC) at position 117,642,487, a T→G mutation (c.3771T>G) at position 117,642,491, f a G (c.3774dupG) at position 117,642,494, a A→T mutation (c.3775A>T) at position 117,642,495, a T→G mutation (c.3779T>G) at position 117,642,499, and/or a deletion of ACT (c.3780_3782delACT) at position 117,642,500 of human chromosome 7 compared to a wild type CFTR gene. In some embodiments, the editing template comprises an intended nucleotide edit compared to the target CFTR gene, wherein incorporation of the intended nucleotide edit encoded by the editing template corrects the mutation. In some embodiments, incorporation of the one or more intended nucleotide edits results in a CFTR gene that encodes a functional CFTR polypeptide.

[0770] In some embodiments, the editing template comprises a wild type CFTR gene sequence. In some embodiments, the editing template comprises one or more intended nucleotide edits compared to the target CFTR gene sequence in exon 23 of the target CFTR gene. Accordingly, in some embodiments, the newly synthesized single stranded DNA comprises one or more intended nucleotide edits compared to the target CFTR gene sequence. In some embodiments, the newly synthesized single stranded DNA encoded by the editing template is capable of correcting the c.3773dupT mutation, the c.3764C>A mutation, the c.3767dupC mutation, the c.3771T>G mutation, the c.3774dupG mutation, the c.3775A>T mutation, the c.3779T>G mutation, and/or the c.3780_3782delACT mutation in the target CFTR gene. In some embodiments, the newly synthesized single stranded DNA encoded by the editing template is capable of correcting all of the c.3773dupT mutation, the c.3764C>A mutation, the c.3767dupC mutation, the c.3771T>G mutation, the c.3774dupG mutation, the c.3775A>T mutation, the c.3779T>G mutation, and the c.3780_3782delACT mutation in the target CFTR gene. In some embodiments, two or more of the c.3773dupT mutation, the c.3764C>A mutation, the c.3767dupC mutation, the c.3771T>G mutation, the c.3774dupG mutation, the c.3775A>T mutation, the c.3779T>G mutation, and the c.3780_3782delACT mutation are located on the same CFTR gene. In some embodiments, the newly synthesized single stranded DNA encoded by the editing template is capable of correcting the c.3773dupT mutation, the c.3764C>A mutation, the c.3767dupC mutation, the c.3771T>G mutation, the c.3774dupG mutation, the c.3775A>T mutation, the c.3779T>G mutation, and the c.3780_3782delACT mutation that are located on different CFTR genes. For example, in some embodiments, a subject may comprise two copies of CFTR genes, each comprising a different mutation selected from the group consisting of the c.3773dupT mutation, the c.3764C>A mutation, the c.3767dupC mutation, the c.3771T>G mutation, the c.3774dupG mutation, the c.3775A>T mutation, the c.3779T>G mutation, and the c.3780_3782delACT mutation, all of which may be corrected by an editing template of a single PEgRNA. In some embodiments, the editing template is capable of correcting one or more, or all of the c.3773dupT mutation, the c.3764C>A mutation, the c.3767dupC mutation, the c.3771T>G mutation, the c.3774dupG mutation, the c.3775A>T mutation, the c.3779T>G mutation, and the c.3780_3782delACT mutation that are in different subjects, wherein each subject may have one or more of the mutations.

[0771] In some embodiments, the PEgRNA comprises a spacer comprising a sequence selected from the group consisting of SEQ Identifiers: A729-A730 of Table 3A. In some embodiments, the PEgRNA comprises a spacer comprising a sequence as set forth in SEQ ID NOs. 1077-1078 of Table 3A. In some embodiments, the PEgRNA comprises a PBS comprising a sequence selected from the group consisting of SEQ Identifiers: B3015-B3023 of Table 3B. In some embodiments, the PEgRNA comprises a PBS comprising a sequence selected from the group consisting of SEQ ID NOs. 3558-3564 of Table 3B. In some embodiments, the PEgRNA comprises a PBS comprising a sequence selected from the group consisting of sequences TCGATGGT and TCGATGGTG as disclosed in Table 3B. In some embodiments, the PEgRNA comprises an editing template comprising a sequence selected from the group consisting of SEQ Identifiers: C13959-C13966 of Table 3C. In some embodiments, the PEgRNA comprises an editing template comprising a sequence selected from the group consisting of SEQ ID NOs: 17985-17992 of Table 3C. In some embodiments, the prime editing composition further comprises a ngRNA that comprises a spacer comprising a sequence selected from the group consisting of SEQ Identifiers: D1615-D1650 of Table 3D. In some embodiments, the prime editing composition further comprises a ngRNA that comprises a spacer comprising a sequence selected from the group consisting of SEQ ID NOs. 21248-21283 of Table 3D.

[0772] In some embodiments, the PEgRNA comprises a spacer comprising a sequence selected from the group consisting of SEQ Identifiers: A731-A732 of Table 3A. In some embodiments, the PEgRNA comprises a spacer comprising a sequence as set forth in SEQ ID NOs. 1079-1080 of Table 3A. In some embodiments, the PEgRNA comprises a PBS comprising a sequence selected from the group consisting of SEQ Identifiers: B3024-B3032 of Table 3B. In some embodiments, the PEgRNA comprises a PBS comprising a sequence selected from the group consisting of SEQ ID NOs. 3565-3571 of Table 3B. In some embodiments, the PEgRNA comprises a PBS comprising a sequence selected from the group consisting of sequences CGATGGTG and CGATGGTGT as disclosed in Table 3B. In some embodiments, the PEgRNA comprises an editing template comprising a sequence selected from the group consisting of SEQ Identifiers: C13967-C13980 of Table 3C. In some embodiments, the PEgRNA comprises an editing template comprising a sequence selected from the group consisting of SEQ ID NOs: 17993-18006 of Table 3C. In some embodiments, the prime editing composition further comprises a ngRNA that comprises a spacer comprising a sequence selected from the group consisting of SEQ Identifiers: D1624-D1661 of Table 3D. In some embodiments, the prime editing composition further comprises a ngRNA that comprises a spacer comprising a sequence selected from the group consisting of SEQ ID NOs. 21257-21294 of Table 3D.

[0773] In some embodiments, the PEgRNA comprises a spacer comprising a sequence selected from the group consisting of SEQ Identifiers: A733-A736 of Table 3A. In some embodiments, the PEgRNA comprises a spacer comprising a sequence as set forth in SEQ ID NOs. 1081-1084 of Table 3A. In some embodiments, the PEgRNA comprises a PBS comprising a sequence selected from the group consisting of SEQ Identifiers: B3033-B3041 of Table 3B. In some embodiments, the PEgRNA comprises a PBS comprising a sequence selected from the group consisting of SEQ ID NOs. 3572-3578 of Table 3B. In some embodiments, the PEgRNA comprises a PBS comprising a sequence selected from the group consisting of sequences CAGTTCTT and CAGTTCTTC as disclosed in Table 3B. In some embodiments, the PEgRNA comprises an editing template comprising a sequence selected from the group consisting of SEQ Identifiers: C13981-C13992 of Table 3C. In some embodiments, the PEgRNA comprises an editing template comprising a sequence selected from the group consisting of SEQ ID NOs: 18007-18018 of Table 3C. In some embodiments, the prime editing composition further comprises a ngRNA that comprises a spacer comprising a sequence selected from the group consisting of SEQ Identifiers: D1662-D1692 of Table 3D. In some embodiments, the prime editing composition further comprises a ngRNA that comprises a spacer comprising a sequence selected from the group consisting of SEQ ID NOs. 21295-21325 of Table 3D.

[0774] In some embodiments, the PEgRNA comprises a spacer comprising a sequence selected from the group consisting of SEQ Identifiers: A737-A738 of Table 3A. In some embodiments, the PEgRNA comprises a spacer comprising a sequence as set forth in SEQ ID NOs. 1085-1086 of Table 3A. In some embodiments, the PEgRNA comprises a PBS comprising a sequence selected from the group consisting of SEQ Identifiers: B3042-B3050 of Table 3B. In some embodiments, the PEgRNA comprises a PBS comprising a sequence selected from the group consisting of SEQ ID NOs. 3579-3585 of Table 3B. In some embodiments, the PEgRNA comprises a PBS comprising a sequence selected from the group consisting of sequences TCCAGTTC and TCCAGTTCT as disclosed in Table 3B. In some embodiments, the PEgRNA comprises an editing template comprising a sequence selected from the group consisting of SEQ Identifiers: C13993-C14008 of Table 3C. In some embodiments, the PEgRNA comprises an editing template comprising a sequence selected from the group consisting of SEQ ID NOs: 18019-18034 of Table 3C. In some embodiments, the prime editing composition further comprises a ngRNA that comprises a spacer comprising a sequence selected from the group consisting of SEQ Identifiers: D1671, D1693, D1694, D1695, D1696, D1697, D1698, D1699, D1700, D1701, D1702, D1703, D1704, D1705, D1706, D1707, D1708, D1709, D1710, D1711, D1712, D1713, D1714, D1715, and D1716 of Table 3D. In some embodiments, the prime editing composition further comprises a ngRNA that comprises a spacer comprising a sequence selected from the group consisting of SEQ ID NOs. 21304, and 21326-21349 of Table 3D.

[0775] In some embodiments, the PEgRNA comprises a spacer comprising a sequence selected from the group consisting of SEQ Identifiers: A739-A740 of Table 3A. In some embodiments, the PEgRNA comprises a spacer comprising a sequence as set forth in SEQ ID NOs. 1087-1088 of Table 3A. In some embodiments, the PEgRNA comprises a PBS comprising a sequence selected from the group consisting of SEQ Identifiers: B3051-B3059 of Table 3B. In some embodiments, the PEgRNA comprises a PBS comprising a sequence selected from the group consisting of SEQ ID NOs. 3586-3592 of Table 3B. In some embodiments, the PEgRNA comprises a PBS comprising a sequence selected from the group consisting of sequences AAAGCTGA and AAAGCTGAT as disclosed in Table 3B. In some embodiments, the PEgRNA comprises an editing template comprising a sequence selected from the group consisting of SEQ Identifiers: C14009-C14039 of Table 3C. In some embodiments, the PEgRNA comprises an editing template comprising a sequence selected from the group consisting of SEQ ID NOs: 18035-18065 of Table 3C. In some embodiments, the prime editing composition further comprises a ngRNA that comprises a spacer comprising a sequence selected from the group consisting of SEQ Identifiers: D1671, D1701, D1702, D1703, D1704, D1705, D1706, D1707, D1708, D1709, D1710, D1711, D1712, D1713, D1714, D1715, D1716, D1718, D1719, D1720, D1721, D1722, D1723, D1724, D1725, and D1726 of Table 3D. In some embodiments, the prime editing composition further comprises a ngRNA that comprises a spacer comprising a sequence selected from the group consisting of SEQ ID NOs. 21304, 21334-21349, and 21351-21359 of Table 3D.

[0776] In some embodiments, the PEgRNA comprises a spacer comprising a sequence selected from the group consisting of SEQ Identifiers: A741-A742 of Table 3A. In some embodiments, the PEgRNA comprises a spacer comprising a sequence as set forth in SEQ ID NOs. 1089-1090 of Table 3A. In some embodiments, the PEgRNA comprises a PBS comprising a sequence selected from the group consisting of SEQ Identifiers: B3060-B3068 of Table 3B. In some embodiments, the PEgRNA comprises a PBS comprising a sequence selected from the group consisting of SEQ ID NOs. 3593-3599 of Table 3B. In some embodiments, the PEgRNA comprises a PBS comprising a sequence selected from the group consisting of sequences CCTGATCC and CCTGATCCA as disclosed in Table 3B. In some embodiments, the PEgRNA comprises an editing template comprising a sequence selected from the group consisting of SEQ Identifiers: C14040-C14065 of Table 3C. In some embodiments, the PEgRNA comprises an editing template comprising a sequence selected from the group consisting of SEQ ID NOs: 18066-18091 of Table 3C. In some embodiments, the prime editing composition further comprises a ngRNA that comprises a spacer comprising a sequence selected from the group consisting of SEQ Identifiers: D1662-D1665, D1668, D1669, D1673-D1680, and D1728-D1731 of Table 3D. In some embodiments, the prime editing composition further comprises a ngRNA that comprises a spacer comprising a sequence selected from the group consisting of SEQ ID NOs. 21295-21298, 21301, 21302, 21306-21313, and 21361-21364 of Table 3D.

[0777] In some embodiments, the PEgRNA comprises a spacer comprising the sequence of SEQ Identifier: A743 of Table 3A. In some embodiments, the PEgRNA comprises a spacer comprising a sequence as set forth in SEQ ID NO. 1091 of Table 3A. In some embodiments, the PEgRNA comprises a PBS comprising a sequence selected from the group consisting of SEQ Identifiers: B3069-B3077 of Table 3B. In some embodiments, the PEgRNA comprises a PBS comprising a sequence selected from the group consisting of SEQ ID NOs. 3600-3606 of Table 3B. In some embodiments, the PEgRNA comprises a PBS comprising a sequence selected from the group consisting of sequences CCCTGATC and CCCTGATCC as disclosed in Table 3B. In some embodiments, the PEgRNA comprises an editing template comprising a sequence selected from the group consisting of SEQ Identifiers: C14066-C14079 of Table 3C. In some embodiments, the PEgRNA comprises an editing template comprising a sequence selected from the group consisting of SEQ ID NOs: 18092-18105 of Table 3C. In some embodiments, the prime editing composition further comprises a ngRNA that comprises a spacer comprising a sequence selected from the group consisting of SEQ Identifiers D1671, D1699, D1700, D1701, D1702, D1703, D1704, D1705, D1706, D1707, D1708, D1709, D1710, D1711, D1712, D1713, D1714, D1715, D1716, and D1718 of Table 3D. In some embodiments, the prime editing composition further comprises a ngRNA that comprises a spacer comprising a sequence selected from the group consisting of SEQ ID NOs. 21304, 21332-21349, and 21351 of Table 3D.

[0778] In some embodiments, the PEgRNA comprises a spacer comprising a sequence selected from the group consisting of SEQ Identifiers: A744-A745 of Table 3A. In some embodiments, the PEgRNA comprises a spacer comprising a sequence as set forth in SEQ ID NOs. 1092-1093 of Table 3A. In some embodiments, the PEgRNA comprises a PBS comprising a sequence selected from the group consisting of SEQ Identifiers: B3078-B3086 of Table 3B. In some embodiments, the PEgRNA comprises a PBS comprising a sequence selected from the group consisting of SEQ ID NOs. 3607-3613 of Table 3B. In some embodiments, the PEgRNA comprises a PBS comprising a sequence selected from the group consisting of sequences GTGTGTCT and GTGTGTCTT as disclosed in Table 3B. In some embodiments, the PEgRNA comprises an editing template comprising a sequence selected from the group consisting of SEQ Identifiers: C14080-C14081 of Table 3C. In some embodiments, the PEgRNA comprises an editing template comprising a sequence selected from the group consisting of SEQ ID NOs: 18106-18107 of Table 3C. In some embodiments, the prime editing composition further comprises a ngRNA that comprises a spacer comprising a sequence selected from the group consisting of SEQ Identifiers: D1615-D1622, and D1627-D1650 of Table 3D. In some embodiments, the prime editing composition further comprises a ngRNA that comprises a spacer comprising a sequence selected from the group consisting of SEQ ID NOs. 21248-21255, and 21260-21283 of Table 3D.

[0779] In some embodiments, the PEgRNA comprises a spacer comprising the sequence of SEQ Identifier: A746 of Table 3A. In some embodiments, the PEgRNA comprises a spacer comprising a sequence as set forth in SEQ ID NO. 1094 of Table 3A. In some embodiments, the PEgRNA comprises a PBS comprising a sequence selected from the group consisting of SEQ Identifiers: B3087-B3095 of Table 3B. In some embodiments, the PEgRNA comprises a PBS comprising a sequence selected from the group consisting of SEQ ID NOs. 3614-3620 of Table 3B. In some embodiments, the PEgRNA comprises a PBS comprising a sequence selected from the group consisting of sequences AAGGAGAA and AAGGAGAAA as disclosed in Table 3B. In some embodiments, the PEgRNA comprises an editing template comprising a sequence selected from the group consisting of SEQ Identifiers: C14082-C14104 of Table 3C. In some embodiments, the PEgRNA comprises an editing template comprising a sequence selected from the group consisting of SEQ ID NOs: 18108-18130 of Table 3C. In some embodiments, the prime editing composition further comprises a ngRNA that comprises a spacer comprising a sequence selected from the group consisting of SEQ Identifiers: D1623-D1650 and D1732-D1734 of Table 3D. In some embodiments, the prime editing composition further comprises a ngRNA that comprises a spacer comprising a sequence selected from the group consisting of SEQ ID NOs. 21256-21283, and 21365-21367 of Table 3D.

[0780] In some embodiments, the PEgRNA comprises a spacer comprising a sequence selected from the group consisting of SEQ Identifiers: A747-A748 of Table 3A. In some embodiments, the PEgRNA comprises a spacer comprising a sequence as set forth in SEQ ID NOs. 1095-1096 of Table 3A. In some embodiments, the PEgRNA comprises a PBS comprising a sequence selected from the group consisting of SEQ Identifiers: B3096-B3104 of Table 3B. In some embodiments, the PEgRNA comprises a PBS comprising a sequence selected from the group consisting of SEQ ID NOs. 3621-3627 of Table 3B. In some embodiments, the PEgRNA comprises a PBS comprising a sequence selected from the group consisting of sequences CTGATCCA and CTGATCCAG as disclosed in Table 3B. In some embodiments, the PEgRNA comprises an editing template comprising a sequence selected from the group consisting of SEQ Identifiers: C14105-C14116 of Table 3C. In some embodiments, the PEgRNA comprises an editing template comprising a sequence selected from the group consisting of SEQ ID NOs: 18131-18142 of Table 3C. In some embodiments, the prime editing composition further comprises a ngRNA that comprises a spacer comprising a sequence selected from the group consisting of SEQ Identifiers: D1671, D1699, D1700, D1701, D1702, D1703, D1704, D1705, D1706, D1707, D1708, D1709, D1710, D1711, D1712, D1713, D1714, D1715, D1716, D1718, D1722, D1723, D1724, D1725, and D1733 of Table 3D. In some embodiments, the prime editing composition further comprises a ngRNA that comprises a spacer comprising a sequence selected from the group consisting of SEQ ID NOs. 21304, 21332-21351, 21355-21358, and 21366 of Table 3D.

[0781] In some embodiments, the PEgRNA comprises a spacer comprising a sequence selected from the group consisting of SEQ Identifiers: A749-A750 of Table 3A. In some embodiments, the PEgRNA comprises a spacer comprising a sequence as set forth in SEQ ID NOs. 1097-1098 of Table 3A. In some embodiments, the PEgRNA comprises a PBS comprising a sequence selected from the group consisting of SEQ Identifiers: B3105-B3113 of Table 3B. In some embodiments, the PEgRNA comprises a PBS comprising a sequence selected from the group consisting of SEQ ID NOs. 3628-3634 of Table 3B. In some embodiments, the PEgRNA comprises a PBS comprising a sequence selected from the group consisting of sequences ACTGAAGG and ACTGAAGGA as disclosed in Table 3B. In some embodiments, the PEgRNA comprises an editing template comprising a sequence selected from the group consisting of SEQ Identifiers: C14117-C14170 of Table 3C. In some embodiments, the PEgRNA comprises an editing template comprising a sequence selected from the group consisting of SEQ ID NOs: 18143-18196 of Table 3C. In some embodiments, the prime editing composition further comprises a ngRNA that comprises a spacer comprising a sequence selected from the group consisting of SEQ Identifiers: D1736-D1767 of Table 3D. In some embodiments, the prime editing composition further comprises a ngRNA that comprises a spacer comprising a sequence selected from the group consisting of SEQ ID NOs. 21369-21400 of Table 3D.

[0782] In some embodiments, the PEgRNA comprises a spacer comprising the sequence of SEQ Identifier: A751 of Table 3A. In some embodiments, the PEgRNA comprises a spacer comprising a sequence as set forth in SEQ ID NO.1099 of Table 3A. In some embodiments, the PEgRNA comprises a PBS comprising a sequence selected from the group consisting of SEQ Identifiers: B3114-B3122 of Table 3B. In some embodiments, the PEgRNA comprises a PBS comprising a sequence selected from the group consisting of SEQ ID NOs. 3635-3641 of Table 3B. In some embodiments, the PEgRNA comprises a PBS comprising a sequence selected from the group consisting of sequences CACTGAAG and CACTGAAGG as disclosed in Table 3B. In some embodiments, the PEgRNA comprises an editing template comprising a sequence selected from the group consisting of SEQ Identifiers: C14171-C14198 of Table 3C. In some embodiments, the PEgRNA comprises an editing template comprising a sequence selected from the group consisting of SEQ ID NOs: 18197-18224 of Table 3C. In some embodiments, the prime editing composition further comprises a ngRNA that comprises a spacer comprising a sequence selected from the group consisting of SEQ Identifiers: D1623-D1650, D1732-D1734, D1768, and D1769 of Table 3D. In some embodiments, the prime editing composition further comprises a ngRNA that comprises a spacer comprising a sequence selected from the group consisting of SEQ ID NOs. 21256-21283, 21365-21367, 21401, and 21402 of Table 3D.

[0783] In some embodiments, the PEgRNA comprises a spacer comprising a sequence selected from the group consisting of SEQ Identifiers: A752-A755 of Table 3A. In some embodiments, the PEgRNA comprises a spacer comprising a sequence as set forth in SEQ ID NOs. 1100-1103 of Table 3A. In some embodiments, the PEgRNA comprises a PBS comprising a sequence selected from the group consisting of SEQ Identifiers: B3123-B3131 of Table 3B. In some embodiments, the PEgRNA comprises a PBS comprising a sequence selected from the group consisting of SEQ ID NOs. 3642-3648 of Table 3B. In some embodiments, the PEgRNA comprises a PBS comprising a sequence selected from the group consisting of sequences TGATCCAG and TGATCCAGT as disclosed in Table 3B. In some embodiments, the PEgRNA comprises an editing template comprising a sequence selected from the group consisting of SEQ Identifiers: C14199-C14220 of Table 3C. In some embodiments, the PEgRNA comprises an editing template comprising a sequence selected from the group consisting of SEQ ID NOs: 18225-18246 of Table 3C. In some embodiments, the prime editing composition further comprises a ngRNA that comprises a spacer comprising a sequence selected from the group consisting of SEQ Identifiers: D1662-D1665, D1668, D1669, D1671, D1673-D1676, D1679, D1680, D1683, D1689, D1729, D1731, D1770, D1771, and D1772 of Table 3D. In some embodiments, the prime editing composition further comprises a ngRNA that comprises a spacer comprising a sequence selected from the group consisting of SEQ ID NOs. 21295-21298, 21301, 21302, 21304, 21306-21309, 21312, 21313, 21316, 21322, 21362, 21364, 21403, 21404, and 21405 of Table 3D.

[0784] In some embodiments, the PEgRNA comprises a spacer comprising a sequence selected from the group consisting of SEQ Identifier: A756-A757 of Table 3A. In some embodiments, the PEgRNA comprises a spacer comprising a sequence as set forth in SEQ ID NOs. 1104-1105 of Table 3A. In some embodiments, the PEgRNA comprises a PBS comprising a sequence selected from the group consisting of SEQ Identifiers: B3132-B3140 of Table 3B. In some embodiments, the PEgRNA comprises a PBS comprising a sequence selected from the group consisting of SEQ ID NOs. 3649-3655 of Table 3B. In some embodiments, the PEgRNA comprises a PBS comprising a sequence selected from the group consisting of sequences ACAAAGTA and ACAAAGTAC as disclosed in Table 3B. In some embodiments, the PEgRNA comprises an editing template comprising a sequence selected from the group consisting of SEQ Identifiers: C14221-C14274 of Table 3C. In some embodiments, the PEgRNA comprises an editing template comprising a sequence selected from the group consisting of SEQ ID NOs: 18247-18300 of Table 3C. In some embodiments, the prime editing composition further comprises a ngRNA that comprises a spacer comprising a sequence selected from the group consisting of SEQ Identifiers: D1662-D1665, D1668, D1669, D1673-D1676, D1679, D1680, D1729, and D1731 of Table 3D. In some embodiments, the prime editing composition further comprises a ngRNA that comprises a spacer comprising a sequence selected from the group consisting of SEQ ID NOs. 21295-21298, 21301, 21302, 21306-21309, 21312, 21313, 21362, and 21364 of Table 3D.

[0785] In some embodiments, the PEgRNA comprises a spacer comprising the sequence of SEQ Identifier: A758 of Table 3A. In some embodiments, the PEgRNA comprises a spacer comprising a sequence as set forth in SEQ ID NO. 1106 of Table 3A. In some embodiments, the PEgRNA comprises a PBS comprising a sequence selected from the group consisting of SEQ Identifiers: B3141-B3149 of Table 3B. In some embodiments, the PEgRNA comprises a PBS comprising a sequence selected from the group consisting of SEQ ID NOs. 3656-3662 of Table 3B. In some embodiments, the PEgRNA comprises a PBS comprising a sequence selected from the group consisting of sequences AACAAAGT and AACAAAGTA as disclosed in Table 3B. In some embodiments, the PEgRNA comprises an editing template comprising a sequence selected from the group consisting of SEQ Identifiers: C14275-C14302 of Table 3C. In some embodiments, the PEgRNA comprises an editing template comprising a sequence selected from the group consisting of SEQ ID NOs: 18301-18328 of Table 3C. In some embodiments, the prime editing composition further comprises a ngRNA that comprises a spacer comprising a sequence selected from the group consisting of SEQ Identifiers: D1671, and D1701-D1720 of Table 3D. In some embodiments, the prime editing composition further comprises a ngRNA that comprises a spacer comprising a sequence selected from the group consisting of SEQ ID NOs. 21304, and 21334-21353 of Table 3D.

[0786] In some embodiments, the PEgRNA comprises a spacer comprising a sequence selected from the group consisting of SEQ Identifiers: A759-A760 of Table 3A. In some embodiments, the PEgRNA comprises a spacer comprising a sequence as set forth in SEQ ID NOs. 1107-1108 of Table 3A. In some embodiments, the PEgRNA comprises a PBS comprising a sequence selected from the group consisting of SEQ Identifiers: B3150-B3158 of Table 3B. In some embodiments, the PEgRNA comprises a PBS comprising a sequence selected from the group consisting of SEQ ID NOs. 3663-3669 of Table 3B. In some embodiments, the PEgRNA comprises a PBS comprising a sequence selected from the group consisting of sequences TCTTCCCA and TCTTCCCAA as disclosed in Table 3B. In some embodiments, the PEgRNA comprises an editing template comprising a sequence selected from the group consisting of SEQ Identifiers: C14303-C14304 of Table 3C. In some embodiments, the PEgRNA comprises an editing template comprising a sequence selected from the group consisting of SEQ ID NOs: 18329-18330 of Table 3C. In some embodiments, the prime editing composition further comprises a ngRNA that comprises a spacer comprising a sequence selected from the group consisting of SEQ Identifiers: D1671, D1699-D1716, D1722-D1725, and D1735 of Table 3D. In some embodiments, the prime editing composition further comprises a ngRNA that comprises a spacer comprising a sequence selected from the group consisting of SEQ ID NOs. 21304, 21332-21349, 21355-21358, and 21368 of Table 3D.

[0787] In some embodiments, the PEgRNA comprises a spacer comprising a sequence selected from the group consisting of SEQ Identifiers: A761-A763 of Table 3A. In some embodiments, the PEgRNA comprises a spacer comprising a sequence as set forth in SEQ ID NOs. 1109-1113 of Table 3A. In some embodiments, the PEgRNA comprises a PBS comprising a sequence selected from the group consisting of SEQ Identifiers: B3159-B3167 of Table 3B. In some embodiments, the PEgRNA comprises a PBS comprising a sequence selected from the group consisting of SEQ ID NOs. 3670-3676 of Table 3B. In some embodiments, the PEgRNA comprises a PBS comprising a sequence selected from the group consisting of sequences GATGGTGT and GATGGTGTG as disclosed in Table 3B. In some embodiments, the PEgRNA comprises an editing template comprising a sequence selected from the group consisting of SEQ Identifiers: C14305-C14310 of Table 3C. In some embodiments, the PEgRNA comprises an editing template comprising a sequence selected from the group consisting of SEQ ID NOs: 18331-18336 of Table 3C. In some embodiments, the prime editing composition further comprises a ngRNA that comprises a spacer comprising a sequence selected from the group consisting of SEQ Identifiers: D1627, D1637, D1756, D1759, D1761, D1764, and D1773-D1793 of Table 3D. In some embodiments, the prime editing composition further comprises a ngRNA that comprises a spacer comprising a sequence selected from the group consisting of SEQ ID NOs. 21260, 21270, 21389, 21392, 21394, 21397, and 21406-21426 of Table 3D.

[0788] In some embodiments, the PEgRNA comprises a spacer comprising a sequence selected from the group consisting of SEQ Identifiers: A764-A765 of Table 3A. In some embodiments, the PEgRNA comprises a spacer comprising a sequence as set forth in SEQ ID NOs. 1112-1113 of Table 3A. In some embodiments, the PEgRNA comprises a PBS comprising a sequence selected from the group consisting of SEQ Identifiers: B3168-B3176 of Table 3B. In some embodiments, the PEgRNA comprises a PBS comprising a sequence selected from the group consisting of SEQ ID NOs. 3677-3683 of Table 3B. In some embodiments, the PEgRNA comprises a PBS comprising a sequence selected from the group consisting of sequences GAGAAATC and GAGAAATCC as disclosed in Table 3B. In some embodiments, the PEgRNA comprises an editing template comprising a sequence selected from the group consisting of SEQ Identifiers: C14311-C14350 of Table 3C. In some embodiments, the PEgRNA comprises an editing template comprising a sequence selected from the group consisting of SEQ ID NOs: 18337-18376 of Table 3C. In some embodiments, the prime editing composition further comprises a ngRNA that comprises a spacer comprising a sequence selected from the group consisting of SEQ Identifiers: D1739-D1748, D1751, D1755-D1764, D1767, D1794, and D1795 of Table 3D. In some embodiments, the prime editing composition further comprises a ngRNA that comprises a spacer comprising a sequence selected from the group consisting of SEQ ID NOs. 21372-21381, 21384, 21388-21397, 21400, 21427, and 21428 of Table 3D.

[0789] In some embodiments, the PEgRNA comprises a spacer comprising the sequence of SEQ Identifier: A766 of Table 3A. In some embodiments, the PEgRNA comprises a spacer comprising a sequence as set forth in SEQ ID NO. 1114 of Table 3A. In some embodiments, the PEgRNA comprises a PBS comprising a sequence selected from the group consisting of SEQ Identifiers: B3177-B3185 of Table 3B. In some embodiments, the PEgRNA comprises a PBS comprising a sequence selected from the group consisting of SEQ ID NOs. 3684-3690 of Table 3B. In some embodiments, the PEgRNA comprises a PBS comprising a sequence selected from the group consisting of sequences GGAGAAAT and GGAGAAATC as disclosed in Table 3B. In some embodiments, the PEgRNA comprises an editing template comprising a sequence selected from the group consisting of SEQ Identifiers: C14351-C14371 of Table 3C. In some embodiments, the PEgRNA comprises an editing template comprising a sequence selected from the group consisting of SEQ ID NOs: 18377-18397 of Table 3C. In some embodiments, the prime editing composition further comprises a ngRNA that comprises a spacer comprising a sequence selected from the group consisting of SEQ Identifiers: D1623-D1650, D1733, and D1734 of Table 3D. In some embodiments, the prime editing composition further comprises a ngRNA that comprises a spacer comprising a sequence selected from the group consisting of SEQ ID NOs. 21256-21283, 21366, and 21367 of Table 3D.

[0790] In some embodiments, the PEgRNA comprises a spacer comprising a sequence selected from the group consisting of SEQ Identifiers: A767-A770 of Table 3A. In some embodiments, the PEgRNA comprises a spacer comprising a sequence as set forth in SEQ ID NOs. 1115-1118 of Table 3A. In some embodiments, the PEgRNA comprises a PBS comprising a sequence selected from the group consisting of SEQ Identifiers: B3186-B3194 of Table 3B. In some embodiments, the PEgRNA comprises a PBS comprising a sequence selected from the group consisting of SEQ ID NOs. 3691-3697 of Table 3B. In some embodiments, the PEgRNA comprises a PBS comprising a sequence selected from the group consisting of sequences CCAGTTCT and CCAGTTCTT as disclosed in Table 3B. In some embodiments, the PEgRNA comprises an editing template comprising a sequence selected from the group consisting of SEQ Identifiers: C14372-C14378 of Table 3C. In some embodiments, the PEgRNA comprises an editing template comprising a sequence selected from the group consisting of SEQ ID NOs: 18398-18404 of Table 3C. In some embodiments, the prime editing composition further comprises a ngRNA that comprises a spacer comprising a sequence selected from the group consisting of SEQ Identifiers: D1663, D1665, D1668, D1670, D1671, D1672, and D1681-D1716 of Table 3D. In some embodiments, the prime editing composition further comprises a ngRNA that comprises a spacer comprising a sequence selected from the group consisting of SEQ ID NOs. 21296, 21298, 21301, 21303-21305, and 21314-21349 of Table 3D.

[0791] In some embodiments, the PEgRNA comprises a spacer comprising the sequence of SEQ Identifier: A771 of Table 3A. In some embodiments, the PEgRNA comprises a spacer comprising a sequence as set forth in SEQ ID NO. 1119 of Table 3A. In some embodiments, the PEgRNA comprises a PBS comprising a sequence selected from the group consisting of SEQ Identifiers: B3195-B3203 of Table 3B. In some embodiments, the PEgRNA comprises a PBS comprising a sequence selected from the group consisting of SEQ ID NOs. 3698-3704 of Table 3B. In some embodiments, the PEgRNA comprises a PBS comprising a sequence selected from the group consisting of sequences TACTCTTC and TACTCTTCC as disclosed in Table 3B. In some embodiments, the PEgRNA comprises an editing template comprising a sequence selected from the group consisting of SEQ Identifiers: C14379-C14399 of Table 3C. In some embodiments, the PEgRNA comprises an editing template comprising a sequence selected from the group consisting of SEQ ID NOs: 18405-18425 of Table 3C. In some embodiments, the prime editing composition further comprises a ngRNA that comprises a spacer comprising a sequence selected from the group consisting of SEQ Identifiers: D1671, and D1701-D1719 of Table 3D. In some embodiments, the prime editing composition further comprises a ngRNA that comprises a spacer comprising a sequence selected from the group consisting of SEQ ID NOs. 21304, and 21334-21352 of Table 3D.

[0792] In some embodiments, the PEgRNA comprises a spacer comprising a sequence selected from the group consisting of SEQ Identifiers: A772-A773 of Table 3A. In some embodiments, the PEgRNA comprises a spacer comprising a sequence as set forth in SEQ ID NOs. 1120-1121 of Table 3A. In some embodiments, the PEgRNA comprises a PBS comprising a sequence selected from the group consisting of SEQ Identifiers: B3204-B3212 of Table 3B. In some embodiments, the PEgRNA comprises a PBS comprising a sequence selected from the group consisting of SEQ ID NOs. 3705-3711 of Table 3B. In some embodiments, the PEgRNA comprises a PBS comprising a sequence selected from the group consisting of sequences CTTCCCAA and CTTCCCAAG as disclosed in Table 3B. In some embodiments, the PEgRNA comprises an editing template comprising the sequence of SEQ Identifier: C14400 of Table 3C. In some embodiments, the PEgRNA comprises an editing template comprising a sequence selected from the group consisting of SEQ ID NOs: 18426 of Table 3C. In some embodiments, the prime editing composition further comprises a ngRNA that comprises a spacer comprising a sequence selected from the group consisting of SEQ Identifiers: D1671, and D1693-D1716 of Table 3D. In some embodiments, the prime editing composition further comprises a ngRNA that comprises a spacer comprising a sequence selected from the group consisting of SEQ ID NOs. 21304, and 21326-21349 of Table 3D.

[0793] In some embodiments, the PEgRNA comprises a spacer comprising a sequence selected from the group consisting of SEQ Identifiers: A774-A775 of Table 3A. In some embodiments, the PEgRNA comprises a spacer comprising a sequence as set forth in SEQ ID NOs. 1122-1123 of Table 3A. In some embodiments, the PEgRNA comprises a PBS comprising a sequence selected from the group consisting of SEQ Identifiers: B3213-B3221 of Table 3B. In some embodiments, the PEgRNA comprises a PBS comprising a sequence selected from the group consisting of SEQ ID NOs. 3712-3718 of Table 3B. In some embodiments, the PEgRNA comprises a PBS comprising a sequence selected from the group consisting of sequences ATCCAGTT and ATCCAGTTC as disclosed in Table 3B. In some embodiments, the PEgRNA comprises an editing template comprising a sequence selected from the group consisting of SEQ Identifiers: C14401-C14409 of Table 3C. In some embodiments, the PEgRNA comprises an editing template comprising a sequence selected from the group consisting of SEQ ID NOs: 18427-18435 of Table 3C. In some embodiments, the prime editing composition further comprises a ngRNA that comprises a spacer comprising a sequence selected from the group consisting of SEQ Identifiers: D1671, D1699-D1718, D1722-D1725, and D1735 of Table 3D. In some embodiments, the prime editing composition further comprises a ngRNA that comprises a spacer comprising a sequence selected from the group consisting of SEQ ID NOs. 21304, 21332-21351, 21355-21358, and 21368 of Table 3D.

[0794] In some embodiments, the PEgRNA comprises a spacer comprising a sequence selected from the group consisting of SEQ Identifiers: A776-A777 of Table 3A. In some embodiments, the PEgRNA comprises a spacer comprising a sequence as set forth in SEQ ID NOs. 1124-1125 of Table 3A. In some embodiments, the PEgRNA comprises a PBS comprising a sequence selected from the group consisting of SEQ Identifiers: B3222-B3230 of Table 3B. In some embodiments, the PEgRNA comprises a PBS comprising a sequence selected from the group consisting of SEQ ID NOs. 3719-3725 of Table 3B. In some embodiments, the PEgRNA comprises a PBS comprising a sequence selected from the group consisting of sequences AAAAAGCT and AAAAAGCTG as disclosed in Table 3B. In some embodiments, the PEgRNA comprises an editing template comprising a sequence selected from the group consisting of SEQ Identifiers: C14410-C14440 of Table 3C. In some embodiments, the PEgRNA comprises an editing template comprising a sequence selected from the group consisting of SEQ ID NOs: 18436-18466 of Table 3C. In some embodiments, the prime editing composition further comprises a ngRNA that comprises a spacer comprising a sequence selected from the group consisting of SEQ Identifiers: D1671, D1702-D1727, and D1796 of Table 3D. In some embodiments, the prime editing composition further comprises a ngRNA that comprises a spacer comprising a sequence selected from the group consisting of SEQ ID NOs. 21304, 21335-21360, 21429 of Table 3D.

[0795] In some embodiments, the PEgRNA comprises a spacer comprising a sequence selected from the group consisting of SEQ Identifiers: A778-A779 of Table 3A. In some embodiments, the PEgRNA comprises a spacer comprising a sequence as set forth in SEQ ID NO. 1126-1127 of Table 3A. In some embodiments, the PEgRNA comprises a PBS comprising a sequence selected from the group consisting of SEQ Identifiers: B3231-B3239 of Table 3B. In some embodiments, the PEgRNA comprises a PBS comprising a sequence selected from the group consisting of SEQ ID NOs. 3726-3732 of Table 3B. In some embodiments, the PEgRNA comprises a PBS comprising a sequence selected from the group consisting of sequences AACACTGA and AACACTGAA as disclosed in Table 3B. In some embodiments, the PEgRNA comprises an editing template comprising a sequence selected from the group consisting of SEQ Identifiers: C14441-C14500 of Table 3C. In some embodiments, the PEgRNA comprises an editing template comprising a sequence selected from the group consisting of SEQ ID NOs: 18467-18526 of Table 3C. In some embodiments, the prime editing composition further comprises a ngRNA that comprises a spacer comprising a sequence selected from the group consisting of SEQ Identifiers: D1739-D1751, D1755-D1767, and D1797-D1800 of Table 3D. In some embodiments, the prime editing composition further comprises a ngRNA that comprises a spacer comprising a sequence selected from the group consisting of SEQ ID NOs. 21372-21384, 21388-21400, and 21430-21433 of Table 3D.

[0796] In some embodiments, the PEgRNA comprises a spacer comprising the sequence of SEQ ID No: A780 of Table 3A. In some embodiments, the PEgRNA comprises a spacer comprising a sequence as set forth in SEQ ID NO. 1128 of Table 3A. In some embodiments, the PEgRNA comprises a PBS comprising a sequence selected from the group consisting of SEQ Identifiers: B3240-B3248 of Table 3B. In some embodiments, the PEgRNA comprises a PBS comprising a sequence selected from the group consisting of SEQ ID NOs. 3733-3739 of Table 3B. In some embodiments, the PEgRNA comprises a PBS comprising a sequence selected from the group consisting of sequences GAACACTG and GAACACTGA as disclosed in Table 3B. In some embodiments, the PEgRNA comprises an editing template comprising a sequence selected from the group consisting of SEQ Identifiers: C14501-C14531 of Table 3C. In some embodiments, the PEgRNA comprises an editing template comprising a sequence selected from the group consisting of SEQ ID NOs: 18527-18557 of Table 3C. In some embodiments, the prime editing composition further comprises a ngRNA that comprises a spacer comprising a sequence selected from the group consisting of SEQ Identifiers: D1623-D1650, D1732-D1734, D1768, D1769, and D1801 of Table 3D. In some embodiments, the prime editing composition further comprises a ngRNA that comprises a spacer comprising a sequence selected from the group consisting of SEQ ID NOs. 21256-21283, 21365-21368, 21401, 21402, and 21434 of Table 3D.

[0797] In some embodiments, the PEgRNA comprises a spacer comprising a sequence selected from the group consisting of SEQ Identifiers: A781-A782 of Table 3A. In some embodiments, the PEgRNA comprises a spacer comprising a sequence as set forth in SEQ ID NOs. 1129-1130 of Table 3A. In some embodiments, the PEgRNA comprises a PBS comprising a sequence selected from the group consisting of SEQ Identifiers: B3249-B3257 of Table 3B. In some embodiments, the PEgRNA comprises a PBS comprising a sequence selected from the group consisting of SEQ ID NOs. 3740-3746 of Table 3B. In some embodiments, the PEgRNA comprises a PBS comprising a sequence selected from the group consisting of sequences AAAAGCTG and AAAAGCTGA as disclosed in Table 3B. In some embodiments, the PEgRNA comprises an editing template comprising a sequence selected from the group consisting of SEQ Identifiers: C14532-C14562 of Table 3C. In some embodiments, the PEgRNA comprises an editing template comprising a sequence selected from the group consisting of SEQ ID NOs: 18558-18588 of Table 3C. In some embodiments, the prime editing composition further comprises a ngRNA that comprises a spacer comprising a sequence selected from the group consisting of SEQ Identifiers: D1662-D1665, D1668, D1669, D1673-D1676, D1679, D1680, D1729, D1731, D1802, and D1803 of Table 3D. In some embodiments, the prime editing composition further comprises a ngRNA that comprises a spacer comprising a sequence selected from the group consisting of SEQ ID NOs. 21295-21298, 21301, 21302, 21306-21309, 21312, 21313, 21362, 21364, 21435, and 21436 of Table 3D.

[0798] In some embodiments, the editing target sequence or the complementary sequence on the CFTR gene thereof comprises a mutation that encodes an amino acid substitution W1282*, W1282G, W1282C, and/or R1283M relative to a wild type CFTR polypeptide set forth in SEQ ID NO: 19, and wherein the editing template encodes an intended nucleotide edit that corrects the mutation. In some embodiments, the editing target sequence or the complementary sequence on the CFTR gene thereof comprises a G→A mutation (c.3846G>A) at position 117,642,566, a T→G mutation (c.3844T>G) at position 117,642,564, a G→T mutation (c.3846G>T) at position 117,642,566, a G→T mutation (c.3848G>T) at position 117,642,568, and/or a deletion of C (c.3855delC) at position 117,642,575 of human chromosome 7 compared to a wild type CFTR gene. In some embodiments, the editing template comprises an intended nucleotide edit compared to the target CFTR gene, wherein incorporation of the intended nucleotide edit encoded by the editing template corrects the mutation. In some embodiments, incorporation of the one or more intended nucleotide edits results in a CFTR gene that encodes a functional CFTR polypeptide. In some embodiments, the editing template comprises a wild type CFTR gene sequence. Accordingly, in some embodiments, the newly synthesized single stranded DNA encoded by the editing template is capable of correcting the c.3846G>A mutation, the c.3844T>G mutation, the c.3846G>T mutation, the c.3848G>T mutation, and/or the c.3855delC mutation in the target CFTR gene. In some embodiments, the newly synthesized single stranded DNA encoded by the editing template is capable of correcting all of the c.3846G>A mutation, the c.3844T>G mutation, the c.3846G>T mutation, the c.3848G>T mutation, and the c.3855delC mutation in the target CFTR gene. In some embodiments, two or more of the c.3846G>A mutation, the c.3844T>G mutation, the c.3846G>T mutation, the c.3848G>T mutation, and the c.3855delC mutation are located on the same CFTR gene. In some embodiments, the newly synthesized single stranded DNA encoded by the editing template is capable of correcting the c.3846G>A mutation, the c.3844T>G mutation, the c.3846G>T mutation, the c.3848G>T mutation, and the c.3855delC mutation that are located on different CFTR genes. For example, in some embodiments, a subject may comprise two copies of CFTR genes, each comprising a different mutation selected from the group consisting of the c.3846G>A mutation, the c.3844T>G mutation, the c.3846G>T mutation, the c.3848G>T mutation, and the c.3855delC mutation, all of which may be corrected by an editing template of a single PEgRNA. In some embodiments, the editing template is capable of correcting one or more, or all of the c.3846G>A mutation, the c.3844T>G mutation, the c.3846G>T mutation, the c.3848G>T mutation, and the c.3855delC mutation that are in different subjects, wherein each subject may have one or more of the mutations.

[0799] In some embodiments, the PEgRNA comprises a spacer comprising the sequence of SEQ Identifier: A783 of Table 3A. In some embodiments, the PEgRNA comprises a spacer comprising a sequence as set forth in SEQ ID NO. 1131 of Table 3A. In some embodiments, the PEgRNA comprises a PBS comprising a sequence selected from the group consisting of SEQ Identifiers: B3258-B3266 of Table 3B. In some embodiments, the PEgRNA comprises a PBS comprising a sequence selected from the group consisting of SEQ ID NOs. 3747-3753 of Table 3B. In some embodiments, the PEgRNA comprises a PBS comprising a sequence selected from the group consisting of sequences GATCTGGA and GATCTGGAT as disclosed in Table 3B. In some embodiments, the PEgRNA comprises an editing template comprising the sequence of SEQ Identifiers: C14563 of Table 3C. In some embodiments, the PEgRNA comprises an editing template comprising a sequence selected from the group consisting of SEQ ID NOs: 18589 of Table 3C. In some embodiments, the prime editing composition further comprises a ngRNA that comprises a spacer comprising a sequence selected from the group consisting of SEQ Identifiers: D1671, D1708-D1721, D1796, D1804-D1809 of Table 3D. In some embodiments, the prime editing composition further comprises a ngRNA that comprises a spacer comprising a sequence selected from the group consisting of SEQ ID NOs. 21304, 21341-21354, 21429, 21437-21442 of Table 3D.

[0800] In some embodiments, the PEgRNA comprises a spacer comprising a sequence selected from the group consisting of SEQ Identifiers: A784-A785 of Table 3A. In some embodiments, the PEgRNA comprises a spacer comprising a sequence as set forth in SEQ ID NOs. 1132-1133 of Table 3A. In some embodiments, the PEgRNA comprises a PBS comprising a sequence selected from the group consisting of SEQ Identifiers: B3267-B3275 of Table 3B. In some embodiments, the PEgRNA comprises a PBS comprising a sequence selected from the group consisting of SEQ ID NOs. 3754-3760 of Table 3B. In some embodiments, the PEgRNA comprises a PBS comprising a sequence selected from the group consisting of sequences GTGAGCAA and GTGAGCAAA as disclosed in Table 3B. In some embodiments, the PEgRNA comprises an editing template comprising a sequence selected from the group consisting of SEQ Identifiers: C14564-C14575 of Table 3C. In some embodiments, the PEgRNA comprises an editing template comprising a sequence selected from the group consisting of SEQ ID NOs: 18590-18601 of Table 3C. In some embodiments, the prime editing composition further comprises a ngRNA that comprises a spacer comprising a sequence selected from the group consisting of SEQ Identifiers: D1645-D1650, D1657, D1658, and D1810-D1818 of Table 3D. In some embodiments, the prime editing composition further comprises a ngRNA that comprises a spacer comprising a sequence selected from the group consisting of SEQ ID NOs. 21278-21283, 21290, 21291, and 21443-21451 of Table 3D.

[0801] In some embodiments, the PEgRNA comprises a spacer comprising the sequence of SEQ Identifier: A786 of Table 3A. In some embodiments, the PEgRNA comprises a spacer comprising a sequence as set forth in SEQ ID NO. 1134 of Table 3A. In some embodiments, the PEgRNA comprises a PBS comprising a sequence selected from the group consisting of SEQ Identifiers: B3276-B3284 of Table 3B. In some embodiments, the PEgRNA comprises a PBS comprising a sequence selected from the group consisting of SEQ ID NOs. 3761-3767 of Table 3B. In some embodiments, the PEgRNA comprises a PBS comprising a sequence selected from the group consisting of sequences GGTGAGCA and GGTGAGCAA as disclosed in Table 3B. In some embodiments, the PEgRNA comprises an editing template comprising a sequence selected from the group consisting of SEQ Identifiers: C14576-C14588 of Table 3C. In some embodiments, the PEgRNA comprises an editing template comprising a sequence selected from the group consisting of SEQ ID NOs: 18602-18614 of Table 3C. In some embodiments, the prime editing composition further comprises a ngRNA that comprises a spacer comprising a sequence selected from the group consisting of SEQ Identifiers: D1644-D1650, and D1810-D1818 of Table 3D. In some embodiments, the prime editing composition further comprises a ngRNA that comprises a spacer comprising a sequence selected from the group consisting of SEQ ID NOs. 21277-21283, and 21443-21451 of Table 3D.

[0802] In some embodiments, the PEgRNA comprises a spacer comprising the sequence of SEQ Identifiers: A787-A788 of Table 3A. In some embodiments, the PEgRNA comprises a spacer comprising a sequence as set forth in SEQ ID NOs. 1135-1136 of Table 3A. In some embodiments, the PEgRNA comprises a PBS comprising a sequence selected from the group consisting of SEQ Identifiers: B3285-B3293 of Table 3B. In some embodiments, the PEgRNA comprises a PBS comprising a sequence selected from the group consisting of SEQ ID NOs. 3768-3774 of Table 3B. In some embodiments, the PEgRNA comprises a PBS comprising a sequence selected from the group consisting of sequences CTGTTGCA and CTGTTGCAA as disclosed in Table 3B. In some embodiments, the PEgRNA comprises an editing template comprising a sequence selected from the group consisting of SEQ Identifiers: C14589-C14650 of Table 3C. In some embodiments, the PEgRNA comprises an editing template comprising a sequence selected from the group consisting of SEQ ID NOs: 18615-18676 of Table 3C. In some embodiments, the prime editing composition further comprises a ngRNA that comprises a spacer comprising a sequence selected from the group consisting of SEQ Identifiers: D1698, D1714-D1716, D1718-D1721, D1796, D1804-D1809, and D1819-D1824 of Table 3D. In some embodiments, the prime editing composition further comprises a ngRNA that comprises a spacer comprising a sequence selected from the group consisting of SEQ ID NOs. 21331, 21347-21349, 21351-21354, 21429, 21437-21442, and 21452-21457 of Table 3D.

[0803] In some embodiments, the PEgRNA comprises a spacer comprising a sequence selected from the group consisting of SEQ Identifiers: A789-A790 of Table 3A. In some embodiments, the PEgRNA comprises a spacer comprising a sequence as set forth in SEQ ID NOs. 1137-1138 of Table 3A. In some embodiments, the PEgRNA comprises a PBS comprising a sequence selected from the group consisting of SEQ Identifiers: B3294-B3302 of Table 3B. In some embodiments, the PEgRNA comprises a PBS comprising a sequence selected from the group consisting of SEQ ID NOs. 3775-3781 of Table 3B. In some embodiments, the PEgRNA comprises a PBS comprising a sequence selected from the group consisting of sequences GAGTGATA and GAGTGATAC as disclosed in Table 3B. In some embodiments, the PEgRNA comprises an editing template comprising a sequence selected from the group consisting of SEQ Identifiers: C14651-C14702 of Table 3C. In some embodiments, the PEgRNA comprises an editing template comprising a sequence selected from the group consisting of SEQ ID NOs: 18677-18728 of Table 3C. In some embodiments, the prime editing composition further comprises a ngRNA that comprises a spacer comprising a sequence selected from the group consisting of SEQ Identifiers: D1641-D1650, D1656-D1658, D1810-D1816, D1825, and D1826 of Table 3D. In some embodiments, the prime editing composition further comprises a ngRNA that comprises a spacer comprising a sequence selected from the group consisting of SEQ ID NOs. 21274-21283, 21289-21291, 21443-21449, 21458, and 21459 of Table 3D.

[0804] In some embodiments, the PEgRNA comprises a spacer comprising the sequence of SEQ Identifier: A791 of Table 3A. In some embodiments, the PEgRNA comprises a spacer comprising a sequence as set forth in SEQ ID NO. 1139 of Table 3A. In some embodiments, the PEgRNA comprises a PBS comprising a sequence selected from the group consisting of SEQ Identifiers: B3303-B3311 of Table 3B. In some embodiments, the PEgRNA comprises a PBS comprising a sequence selected from the group consisting of SEQ ID NOs. 3782-3788 of Table 3B. In some embodiments, the PEgRNA comprises a PBS comprising a sequence selected from the group consisting of sequences GGAGTGAT and GGAGTGATA as disclosed in Table 3B. In some embodiments, the PEgRNA comprises an editing template comprising a sequence selected from the group consisting of SEQ Identifiers: C14703-C14729 of Table 3C. In some embodiments, the PEgRNA comprises an editing template comprising a sequence selected from the group consisting of SEQ ID NOs: 18729-18755 of Table 3C. In some embodiments, the prime editing composition further comprises a ngRNA that comprises a spacer comprising a sequence selected from the group consisting of SEQ Identifiers: D1641-D1650, D1810-1816, and D1827 of Table 3D. In some embodiments, the prime editing composition further comprises a ngRNA that comprises a spacer comprising a sequence selected from the group consisting of SEQ ID NOs. of Table 3D.

[0805] In some embodiments, the PEgRNA comprises a spacer comprising the sequence of SEQ Identifier: A792 of Table 3A. In some embodiments, the PEgRNA comprises a spacer comprising a sequence as set forth in SEQ ID NO. 1140 of Table 3A. In some embodiments, the PEgRNA comprises a PBS comprising a sequence selected from the group consisting of SEQ Identifiers: B3312-B3320 of Table 3B. In some embodiments, the PEgRNA comprises a PBS comprising a sequence selected from the group consisting of SEQ ID NOs. 3789-3795 of Table 3B. In some embodiments, the PEgRNA comprises a PBS comprising a sequence selected from the group consisting of sequences CATCGATC and CATCGATCT as disclosed in Table 3B. In some embodiments, the PEgRNA comprises an editing template comprising a sequence selected from the group consisting of SEQ Identifiers: C14730-C14734 of Table 3C. In some embodiments, the PEgRNA comprises an editing template comprising a sequence selected from the group consisting of SEQ ID NOs: 18756-18760 of Table 3C. In some embodiments, the prime editing composition further comprises a ngRNA that comprises a spacer comprising a sequence selected from the group consisting of SEQ Identifiers: D1671, D1708-D1721, D1796, and D1804-D1809 of Table 3D. In some embodiments, the prime editing composition further comprises a ngRNA that comprises a spacer comprising a sequence selected from the group consisting of SEQ ID NOs. 21304, 21341-21354, 21429, and 21437-21442 of Table 3D.

[0806] In some embodiments, the PEgRNA comprises a spacer comprising a sequence selected from the group consisting of SEQ Identifiers: A793-A794 of Table 3A. In some embodiments, the PEgRNA comprises a spacer comprising a sequence as set forth in SEQ ID NOs. 1141-1142 of Table 3A. In some embodiments, the PEgRNA comprises a PBS comprising a sequence selected from the group consisting of SEQ Identifiers: B3321-B3329 of Table 3B. In some embodiments, the PEgRNA comprises a PBS comprising a sequence selected from the group consisting of SEQ ID NOs. 3796-3802 of Table 3B. In some embodiments, the PEgRNA comprises a PBS comprising a sequence selected from the group consisting of sequences GACACACC and GACACACCA as disclosed in Table 3B. In some embodiments, the PEgRNA comprises an editing template comprising a sequence selected from the group consisting of SEQ Identifiers: C14735-C14746 of Table 3C. In some embodiments, the PEgRNA comprises an editing template comprising a sequence selected from the group consisting of SEQ ID NOs: 18761-18772 of Table 3C. In some embodiments, the prime editing composition further comprises a ngRNA that comprises a spacer comprising a sequence selected from the group consisting of SEQ Identifiers: D1671, D1708-D1721, D1724-D1727, D1796, D1804-D1809, D1820, D1828, and D1829 of Table 3D. In some embodiments, the prime editing composition further comprises a ngRNA that comprises a spacer comprising a sequence selected from the group consisting of SEQ ID NOs. 21304, 21341-21354, 21357-21360, 21429, 21437-21442, 21453, 21461, and 21462 of Table 3D.

[0807] In some embodiments, the PEgRNA comprises a spacer comprising a sequence selected from the group consisting of SEQ Identifiers: A795-A796 of Table 3A. In some embodiments, the PEgRNA comprises a spacer comprising a sequence as set forth in SEQ ID NOs. 1143-1144 of Table 3A. In some embodiments, the PEgRNA comprises a PBS comprising a sequence selected from the group consisting of SEQ Identifiers: B3330-B3338 of Table 3B. In some embodiments, the PEgRNA comprises a PBS comprising a sequence selected from the group consisting of SEQ ID NOs. 3803-3809 of Table 3B. In some embodiments, the PEgRNA comprises a PBS comprising a sequence selected from the group consisting of sequences ACTGTTGC and ACTGTTGCA as disclosed in Table 3B. In some embodiments, the PEgRNA comprises an editing template comprising a sequence selected from the group consisting of SEQ Identifiers: C14747-C14777 of Table 3C. In some embodiments, the PEgRNA comprises an editing template comprising a sequence selected from the group consisting of SEQ ID NOs: 18773-18803 of Table 3C. In some embodiments, the prime editing composition further comprises a ngRNA that comprises a spacer comprising a sequence selected from the group consisting of SEQ Identifiers: D1714-D1716, D1718-D1721, D1725, D1726, D1727, D1796, D1804-D1809, 1820, D1821-D1824, and D1828-D1831 of Table 3D. In some embodiments, the prime editing composition further comprises a ngRNA that comprises a spacer comprising a sequence selected from the group consisting of SEQ ID NOs. 21347-21349, 21351-21354, 21358, 21359, 21360, 21429, 21437-21442, 21453, 21454-21457, and 21461-21464 of Table 3D.

[0808] In some embodiments, the PEgRNA comprises a spacer comprising a sequence selected from the group consisting of SEQ Identifiers: A797-A799 of Table 3A. In some embodiments, the PEgRNA comprises a spacer comprising a sequence as set forth in SEQ ID NOs. 1145-1147 of Table 3A. In some embodiments, the PEgRNA comprises a PBS comprising a sequence selected from the group consisting of SEQ Identifiers: B3339-B3347 of Table 3B. In some embodiments, the PEgRNA comprises a PBS comprising a sequence selected from the group consisting of SEQ ID NOs. 3810-3816 of Table 3B. In some embodiments, the PEgRNA comprises a PBS comprising a sequence selected from the group consisting of sequences ACACCATC and ACACCATCG as disclosed in Table 3B. In some embodiments, the PEgRNA comprises an editing template comprising a sequence selected from the group consisting of SEQ Identifiers: C14778-C14786 of Table 3C. In some embodiments, the PEgRNA comprises an editing template comprising a sequence selected from the group consisting of SEQ ID NOs: 18804-18812 of Table 3C. In some embodiments, the prime editing composition further comprises a ngRNA that comprises a spacer comprising a sequence selected from the group consisting of SEQ Identifiers: D1665, D1668, D1671, D1672, D1683-D1686, D1689-D1692, D1832, D1833, and D1834 of Table 3D. In some embodiments, the prime editing composition further comprises a ngRNA that comprises a spacer comprising a sequence selected from the group consisting of SEQ ID NOs. 21298, 21301, 21304, 21305, 21316-21319, 21322-21325, and 21465-21467 of Table 3D.

[0809] In some embodiments, the PEgRNA comprises a spacer comprising a sequence selected from the group consisting of SEQ Identifiers: A800-A803 of Table 3A. In some embodiments, the PEgRNA comprises a spacer comprising a sequence as set forth in SEQ ID NOs. 1148-1151 of Table 3A. In some embodiments, the PEgRNA comprises a PBS comprising a sequence selected from the group consisting of SEQ Identifiers: B3348-B3356 of Table 3B. In some embodiments, the PEgRNA comprises a PBS comprising a sequence selected from the group consisting of SEQ ID NOs. 3817-3823 of Table 3B. In some embodiments, the PEgRNA comprises a PBS comprising a sequence selected from the group consisting of sequences TGTTGCAA and TGTTGCAAA as disclosed in Table 3B. In some embodiments, the PEgRNA comprises an editing template comprising a sequence selected from the group consisting of SEQ Identifiers: C14787-C14848 of Table 3C. In some embodiments, the PEgRNA comprises an editing template comprising a sequence selected from the group consisting of SEQ ID NOs: 18813-18874 of Table 3C. In some embodiments, the prime editing composition further comprises a ngRNA that comprises a spacer comprising a sequence selected from the group consisting of SEQ Identifiers: D1668, D1669, D1679, D1680, D1686, D1692, D1729, D1731, D1802, D1803, and D1832-D1848 of Table 3D. In some embodiments, the prime editing composition further comprises a ngRNA that comprises a spacer comprising a sequence selected from the group consisting of SEQ ID NOs. 21301, 21302, 21312, 21313, 21319, 21325, 21362, 21364, 21435, 21436, and 21465-21481 of Table 3D

[0810] In some embodiments, the PEgRNA comprises a spacer comprising a sequence selected from the group consisting of SEQ Identifiers: A804-A807 of Table 3A. In some embodiments, the PEgRNA comprises a spacer comprising a sequence as set forth in SEQ ID NOs. 1152-1155 of Table 3A. In some embodiments, the PEgRNA comprises a PBS comprising a sequence selected from the group consisting of SEQ Identifiers: B3357-B3365 of Table 3B. In some embodiments, the PEgRNA comprises a PBS comprising a sequence selected from the group consisting of SEQ ID NOs. 3824-3830 of Table 3B. In some embodiments, the PEgRNA comprises a PBS comprising a sequence selected from the group consisting of sequences AGTGATAC and AGTGATACC as disclosed in Table 3B. In some embodiments, the PEgRNA comprises an editing template comprising a sequence selected from the group consisting of SEQ Identifiers: C14849-C14898 of Table 3C. In some embodiments, the PEgRNA comprises an editing template comprising a sequence selected from the group consisting of SEQ ID NOs: 18875-18924 of Table 3C. In some embodiments, the prime editing composition further comprises a ngRNA that comprises a spacer comprising a sequence selected from the group consisting of SEQ Identifiers: D1743-D1748, D1759-D1764, D1778-D1780, D1787-D1789, and D1849-D1852 of Table 3D. In some embodiments, the prime editing composition further comprises a ngRNA that comprises a spacer comprising a sequence selected from the group consisting of SEQ ID NOs. 21376-21381, 21392-21397, 21411, 21413, 21420-21422, and 21482-21485 of Table 3D.

[0811] In some embodiments, the PEgRNA comprises a spacer comprising a sequence selected from the group consisting of SEQ Identifiers: A808-A809 of Table 3A. In some embodiments, the PEgRNA comprises a spacer comprising a sequence as set forth in SEQ ID NOs. 1156-1157 of Table 3A. In some embodiments, the PEgRNA comprises a PBS comprising a sequence selected from the group consisting of SEQ Identifiers: B3366-B3374 of Table 3B. In some embodiments, the PEgRNA comprises a PBS comprising a sequence selected from the group consisting of SEQ ID NOs. 3831-3837 of Table 3B. In some embodiments, the PEgRNA comprises a PBS comprising a sequence selected from the group consisting of sequences ACACACCA and ACACACCAT as disclosed in Table 3B. In some embodiments, the PEgRNA comprises an editing template comprising a sequence selected from the group consisting of SEQ Identifiers: C14899-C14909 of Table 3C. In some embodiments, the PEgRNA comprises an editing template comprising a sequence selected from the group consisting of SEQ ID NOs: 18925-18935 of Table 3C. In some embodiments, the prime editing composition further comprises a ngRNA that comprises a spacer comprising a sequence selected from the group consisting of SEQ Identifiers: D1671, D1695-D1698, D1708-D1721, D1796, D1804-D1809, D1819, and D1820 of Table 3D. In some embodiments, the prime editing composition further comprises a ngRNA that comprises a spacer comprising a sequence selected from the group consisting of SEQ ID NOs. 21304, 21328-21331, 21341-21354, 21429, 21437-21442, 21452, and 21453 of Table 3D.

[0812] In some embodiments, the PEgRNA comprises a spacer comprising a sequence selected from the group consisting of SEQ Identifiers: A810-A813 of Table 3A. In some embodiments, the PEgRNA comprises a spacer comprising a sequence as set forth in SEQ ID NOs. 1158-1161 of Table 3A. In some embodiments, the PEgRNA comprises a PBS comprising a sequence selected from the group consisting of SEQ Identifiers: B3375-B3383 of Table 3B. In some embodiments, the PEgRNA comprises a PBS comprising a sequence selected from the group consisting of SEQ ID NOs. 3838-3844 of Table 3B. In some embodiments, the PEgRNA comprises a PBS comprising a sequence selected from the group consisting of sequences CACACCAT and CACACCATC as disclosed in Table 3B. In some embodiments, the PEgRNA comprises an editing template comprising a sequence selected from the group consisting of SEQ Identifiers: C14910-C14919 of Table 3C. In some embodiments, the PEgRNA comprises an editing template comprising a sequence selected from the group consisting of SEQ ID NOs: 18936-18945 of Table 3C. In some embodiments, the prime editing composition further comprises a ngRNA that comprises a spacer comprising a sequence selected from the group consisting of SEQ Identifiers: D1665, D1668, D1671, D1672, D1683, D1684, D1685, D1686, D1689, D1690, D1691, D1692, D1695, D1696, D1697, D1698, D1708, D1709, D1710, D1711, D1712, D1713, D1714, D1715, D1716, D1718, D1719, D1720, D1721, D1796, D1804, D1805, D1806, D1807, D1808, D1809, D1819, D1820, D1832, D1833, and D1834 of Table 3D. In some embodiments, the prime editing composition further comprises a ngRNA that comprises a spacer comprising a sequence selected from the group consisting of SEQ ID NOs. 21298, 21301, 21304, 21305, 21316-21319, 21322-21325, 21328, 21329, 21330, 21331, 21341-21349, 21351-21354, 21429, 21437-21442, 21452, 21453, 21464, 21465, 21466, 21467 of Table 3D.

[0813] In some embodiments, the PEgRNA comprises a spacer comprising a sequence selected from the group consisting of SEQ Identifiers: A814-A816 of Table 3A. In some embodiments, the PEgRNA comprises a spacer comprising a sequence as set forth in SEQ ID NOs. 1162-1164 of Table 3A. In some embodiments, the PEgRNA comprises a PBS comprising a sequence selected from the group consisting of SEQ Identifiers: B3384-B3392 of Table 3B. In some embodiments, the PEgRNA comprises a PBS comprising a sequence selected from the group consisting of SEQ ID NOs. 3845-3851 of Table 3B. In some embodiments, the PEgRNA comprises a PBS comprising a sequence selected from the group consisting of sequences TGAGCAAA and TGAGCAAAA as disclosed in Table 3B. In some embodiments, the PEgRNA comprises an editing template comprising a sequence selected from the group consisting of SEQ Identifiers: C14920-C14930 of Table 3C. In some embodiments, the PEgRNA comprises an editing template comprising a sequence selected from the group consisting of SEQ ID NOs: 18946-18956 of Table 3C. In some embodiments, the prime editing composition further comprises a ngRNA that comprises a spacer comprising a sequence selected from the group consisting of SEQ Identifiers: D1761, D1764, D1779, D1780, D1788, and D1789 of Table 3D. In some embodiments, the prime editing composition further comprises a ngRNA that comprises a spacer comprising a sequence selected from the group consisting of SEQ ID NOs. 21394, 21397, 21412, 21413, 21421, and 21422 of Table 3D.

[0814] In some embodiments, the PEgRNA comprises a spacer comprising the sequence of SEQ Identifier: A817 of Table 3A. In some embodiments, the PEgRNA comprises a spacer comprising a sequence as set forth in SEQ ID NO. 1165 of Table 3A. In some embodiments, the PEgRNA comprises a PBS comprising a sequence selected from the group consisting of SEQ Identifiers: B3393-B3401 of Table 3B. In some embodiments, the PEgRNA comprises a PBS comprising a sequence selected from the group consisting of SEQ ID NOs. 3852-3858 of Table 3B. In some embodiments, the PEgRNA comprises a PBS comprising a sequence selected from the group consisting of sequences GAGCAAAA and GAGCAAAAG as disclosed in Table 3B. In some embodiments, the PEgRNA comprises an editing template comprising a sequence selected from the group consisting of SEQ Identifiers: C14931-C14940 of Table 3C. In some embodiments, the PEgRNA comprises an editing template comprising a sequence selected from the group consisting of SEQ ID NOs: 18957-18966 of Table 3C. In some embodiments, the prime editing composition further comprises a ngRNA that comprises a spacer comprising a sequence selected from the group consisting of SEQ Identifiers: D1645-D1650, and D1810-D1818 of Table 3D. In some embodiments, the prime editing composition further comprises a ngRNA that comprises a spacer comprising a sequence selected from the group consisting of SEQ ID NOs. 21278-21283 and 21443-21451 of Table 3D.

[0815] In some embodiments, the PEgRNA comprises a spacer comprising the sequence of SEQ Identifier: A818 of Table 3A. In some embodiments, the PEgRNA comprises a spacer comprising a sequence as set forth in SEQ ID NO. 1166 of Table 3A. In some embodiments, the PEgRNA comprises a PBS comprising a sequence selected from the group consisting of SEQ Identifiers: B3402-B3410 of Table 3B. In some embodiments, the PEgRNA comprises a PBS comprising a sequence selected from the group consisting of SEQ ID NOs. 3859-3865 of Table 3B. In some embodiments, the PEgRNA comprises a PBS comprising a sequence selected from the group consisting of sequences TCGATCTG and TCGATCTGG as disclosed in Table 3B. In some embodiments, the PEgRNA comprises an editing template comprising a sequence selected from the group consisting of SEQ Identifiers: C14941-C14943 of Table 3C. In some embodiments, the PEgRNA comprises an editing template comprising a sequence selected from the group consisting of SEQ ID NOs: 18967-18969 of Table 3C. In some embodiments, the prime editing composition further comprises a ngRNA that comprises a spacer comprising a sequence selected from the group consisting of SEQ Identifiers: D1671, D1708-D1721, D1796, and D1804-1809 of Table 3D. In some embodiments, the prime editing composition further comprises a ngRNA that comprises a spacer comprising a sequence selected from the group consisting of SEQ ID NOs. 21304, 21341-21354, 21429, and 21437-21442 of Table 3D.

[0816] In some embodiments, the PEgRNA comprises a spacer comprising a sequence selected from the group consisting of SEQ Identifiers: A819-A820 of Table 3A. In some embodiments, the PEgRNA comprises a spacer comprising a sequence as set forth in SEQ ID NOs. 1167-1168 of Table 3A. In some embodiments, the PEgRNA comprises a PBS comprising a sequence selected from the group consisting of SEQ Identifiers: B3411-B3419 of Table 3B. In some embodiments, the PEgRNA comprises a PBS comprising a sequence selected from the group consisting of SEQ ID NOs. 3866-3872 of Table 3B. In some embodiments, the PEgRNA comprises a PBS comprising a sequence selected from the group consisting of sequences CAAAGTTA and CAAAGTTAT as disclosed in Table 3B. In some embodiments, the PEgRNA comprises an editing template comprising a sequence selected from the group consisting of SEQ Identifiers: C14944-C15005 of Table 3C. In some embodiments, the PEgRNA comprises an editing template comprising a sequence selected from the group consisting of SEQ ID NOs: 18970-19031 of Table 3C. In some embodiments, the prime editing composition further comprises a ngRNA that comprises a spacer comprising a sequence selected from the group consisting of SEQ Identifiers: D1668, D1669, D1679, D1680, D1729, D1731, D1802, D1803, D1835-D1839, and D1842-D1846 of Table 3D. In some embodiments, the prime editing composition further comprises a ngRNA that comprises a spacer comprising a sequence selected from the group consisting of SEQ ID NOs. 21301, 21302, 21312, 21313, 21362, 21364, 21435, 21436, 21468-21472, and 21475-21479 of Table 3D.

[0817] In some embodiments, the PEgRNA comprises a spacer comprising the sequence of SEQ Identifier A821 of Table 3A. In some embodiments, the PEgRNA comprises a spacer comprising a sequence as set forth in SEQ ID NO. 1169 of Table 3A. In some embodiments, the PEgRNA comprises a PBS comprising a sequence selected from the group consisting of SEQ Identifiers: B3420-B3428 of Table 3B. In some embodiments, the PEgRNA comprises a PBS comprising a sequence selected from the group consisting of SEQ ID NOs. 3873-3879 of Table 3B. In some embodiments, the PEgRNA comprises a PBS comprising a sequence selected from the group consisting of sequences GCAAAGTT and GCAAAGTTA as disclosed in Table 3B. In some embodiments, the PEgRNA comprises an editing template comprising a sequence selected from the group consisting of SEQ Identifiers: C15006-C15036 of Table 3C. In some embodiments, the PEgRNA comprises an editing template comprising a sequence selected from the group consisting of SEQ ID NOs: 19032-19062 of Table 3C. In some embodiments, the prime editing composition further comprises a ngRNA that comprises a spacer comprising a sequence selected from the group consisting of SEQ Identifiers: D1714-D1721, D1796, D1804-D1809, and D1820-D1823 of Table 3D. In some embodiments, the prime editing composition further comprises a ngRNA that comprises a spacer comprising a sequence selected from the group consisting of SEQ ID NOs. 21347-21354, 21429, 21437-21442, and 21453-21456 of Table 3D.

[0818] In some embodiments, the PEgRNA comprises a spacer comprising the sequence of SEQ Identifier A822 of Table 3A. In some embodiments, the PEgRNA comprises a spacer comprising a sequence as set forth in SEQ ID NO. 1170 of Table 3A. In some embodiments, the PEgRNA comprises a PBS comprising a sequence selected from the group consisting of SEQ Identifiers: B3429-B3437 of Table 3B. In some embodiments, the PEgRNA comprises a PBS comprising a sequence selected from the group consisting of SEQ ID NOs. 3880-3886 of Table 3B. In some embodiments, the PEgRNA comprises a PBS comprising a sequence selected from the group consisting of sequences TTATTGAA and TTATTGAAT as disclosed in Table 3B. In some embodiments, the PEgRNA comprises an editing template comprising a sequence selected from the group consisting of SEQ Identifiers: C15037-C15062 of Table 3C. In some embodiments, the PEgRNA comprises an editing template comprising a sequence selected from the group consisting of SEQ ID NOs: 19063-19088 of Table 3C. In some embodiments, the prime editing composition further comprises a ngRNA that comprises a spacer comprising a sequence selected from the group consisting of SEQ Identifiers: D1712-D1721, D1796, D1804-D1809, D1820, D1821, and D1822 of Table 3D. In some embodiments, the prime editing composition further comprises a ngRNA that comprises a spacer comprising a sequence selected from the group consisting of SEQ ID NOs. 21345-21354, 21429, 21437-21442, and 21453-21455 of Table 3D.

[0819] In some embodiments, the PEgRNA comprises a spacer comprising a sequence selected from the group consisting of SEQ Identifiers: A823-A824 of Table 3A. In some embodiments, the PEgRNA comprises a spacer comprising a sequence as set forth in SEQ ID NOs. 1171-1172 of Table 3A. In some embodiments, the PEgRNA comprises a PBS comprising a sequence selected from the group consisting of SEQ Identifiers: B3438-B3446 of Table 3B. In some embodiments, the PEgRNA comprises a PBS comprising a sequence selected from the group consisting of SEQ ID NOs. 3887-3893 of Table 3B. In some embodiments, the PEgRNA comprises a PBS comprising a sequence selected from the group consisting of sequences TTGCAAAG and TTGCAAAGT as disclosed in Table 3B. In some embodiments, the PEgRNA comprises an editing template comprising a sequence selected from the group consisting of SEQ Identifiers: C15063-C15093 of Table 3C. In some embodiments, the PEgRNA comprises an editing template comprising a sequence selected from the group consisting of SEQ ID NOs: 19089-19119 of Table 3C. In some embodiments, the prime editing composition further comprises a ngRNA that comprises a spacer comprising a sequence selected from the group consisting of SEQ Identifiers: D1714-D1721, D1725, D1726, D1727, D1796, D1804-D1809, D1820-D1823, and D1828-D1831 of Table 3D. In some embodiments, the prime editing composition further comprises a ngRNA that comprises a spacer comprising a sequence selected from the group consisting of SEQ ID NOs. 21347-21354, 21358-21360, 21429, 21437-21442, 21453-21456, and 21461-21464 of Table 3D.

[0820] In some embodiments, the PEgRNA comprises a spacer comprising the sequence of SEQ Identifier: A825 of Table 3A. In some embodiments, the PEgRNA comprises a spacer comprising a sequence as set forth in SEQ ID NO. 1173 of Table 3A. In some embodiments, the PEgRNA comprises a PBS comprising a sequence selected from the group consisting of SEQ Identifiers: B3447-B3455 of Table 3B. In some embodiments, the PEgRNA comprises a PBS comprising a sequence selected from the group consisting of SEQ ID NOs. 3894-3900 of Table 3B. In some embodiments, the PEgRNA comprises a PBS comprising a sequence selected from the group consisting of sequences GGACTTAG and GGACTTAGC as disclosed in Table 3B. In some embodiments, the PEgRNA comprises an editing template comprising a sequence selected from the group consisting of SEQ Identifiers: C15094-C15095 of Table 3C. In some embodiments, the PEgRNA comprises an editing template comprising a sequence selected from the group consisting of SEQ ID NOs: 19120-19121 of Table 3C. In some embodiments, the prime editing composition further comprises a ngRNA that comprises a spacer comprising a sequence selected from the group consisting of SEQ Identifiers: D1647-D1650, and D1810-D1818 of Table 3D. In some embodiments, the prime editing composition further comprises a ngRNA that comprises a spacer comprising a sequence selected from the group consisting of SEQ ID NOs. 21280-21283 and 21443-21451 of Table 3D.

[0821] In some embodiments, the editing target sequence is in exon 24 of the CFTR gene.

[0822] In some embodiments, the editing target sequence comprises a mutation as compared to a wild type CFTR gene.

[0823] In some embodiments, the editing target sequence or the complementary sequence on the CFTR gene thereof comprises a mutation that encodes an amino acid substitution N1303K. K1302*, N1303H, D1305E, and/or N1303I relative to a wild type CFTR polypeptide set forth in SEQ ID NO: 19, wherein * refers to a non-sense mutation, and wherein the editing template encodes an intended nucleotide edit that corrects the mutation. In some embodiments, the editing target sequence or the complementary sequence on the CFTR gene thereof comprises a C→G mutation (c.3909C>G) at position 117,652,877, a A→T mutation (c.3904A>T) at position 117,652,872, a A→C mutation (c.3907A>C) at position 117,652,875, a duplication of a A (c.3908dupA) at position 117,652,876, a A→T mutation (c.3908A>T) at position 117,652,876, and/or a deletion of A (c.3908delA) at position 117,652,876, a deletion of CTTGGA and an insertion of TGT (c.3909_3914delCTTGGAinsTGT) at position 117,652,877, a T→A mutation (c.3915T>A) at position 117,652,883, and/or a duplication of a CC (c.3917_3918dupCC) at position 117,652,886 of human chromosome 7 compared to a wild type CFTR gene. In some embodiments, the editing template comprises an intended nucleotide edit compared to the target CFTR gene, wherein incorporation of the intended nucleotide edit encoded by the editing template corrects the mutation. In some embodiments, incorporation of the one or more intended nucleotide edits results in a CFTR gene that encodes a functional CFTR polypeptide.

[0824] In some embodiments, the editing template comprises a wild type CFTR gene sequence. Accordingly, in some embodiments, the newly synthesized single stranded DNA encoded by the editing template is capable of correcting the c.3909C>G mutation, the c.3904A>T mutation, the c.3907A>C mutation, the c.3908dupA mutation, the c.3908A>T mutation, the c.3908delA mutation, the c.3909_3914delCTTGGAinsTGT mutation, the c.3915T>A mutation, and/or the c.3917_3918dupCC mutation in the target CFTR gene. In some embodiments, the newly synthesized single stranded DNA encoded by the editing template is capable of correcting all of the c.3909C>G mutation, the c.3904A>T mutation, the c.3907A>C mutation, the c.3908dupA mutation, the c.3908A>T mutation, the c.3908delA mutation, the c.3909_3914delCTTGGAinsTGT mutation, the c.3915T>A mutation, and the c.3917_3918dupCC mutation in the target CFTR gene. In some embodiments, two or more of the c.3909C>G mutation, the c.3904A>T mutation, the c.3907A>C mutation, the c.3908dupA mutation, the c.3908A>T mutation, the c.3908delA mutation, the c.3909_3914delCTTGGAinsTGT mutation, the c.3915T>A mutation, and the c.3917_3918dupCC mutation are located on the same CFTR gene. In some embodiments, the newly synthesized single stranded DNA encoded by the editing template is capable of correcting the c.3909C>G mutation, the c.3904A>T mutation, the c.3907A>C mutation, the c.3908dupA mutation, the c.3908A>T mutation, the c.3908delA mutation, the c.3909_3914delCTTGGAinsTGT mutation, the c.3915T>A mutation, and the c.3917_3918dupCC mutation that are located on different CFTR genes. For example, in some embodiments, a subject may comprise two copies of CFTR genes, each comprising a different mutation selected from the group consisting of the c.3909C>G mutation, the c.3904A>T mutation, the c.3907A>C mutation, the c.3908dupA mutation, the c.3908A>T mutation, the c.3908delA mutation, the c.3909_3914delCTTGGAinsTGT mutation, the c.3915T>A mutation, and the c.3917_3918dupCC mutation, all of which may be corrected by an editing template of a single PEgRNA. In some embodiments, the editing template is capable of correcting one or more, or all of the c.3909C>G mutation, the c.3904A>T mutation, the c.3907A>C mutation, the c.3908dupA mutation, the c.3908A>T mutation, the c.3908delA mutation, the c.3909_3914delCTTGGAinsTGT mutation, the c.3915T>A mutation, and the c.3917_3918dupCC mutation that are in different subjects, wherein each subject may have one or more of the mutations.

[0825] In some embodiments, the PEgRNA comprises a spacer comprising a sequence selected from the group consisting of SEQ Identifiers: A826-A827 of Table 3A. In some embodiments, the PEgRNA comprises a spacer comprising a sequence as set forth in SEQ ID NOs. 1174-1175 of Table 3A. In some embodiments, the PEgRNA comprises a PBS comprising a sequence selected from the group consisting of SEQ Identifiers: B3456-B3464 of Table 3B. In some embodiments, the PEgRNA comprises a PBS comprising a sequence selected from the group consisting of SEQ ID NOs. 3901-3907 of Table 3B. In some embodiments, the PEgRNA comprises a PBS comprising a sequence selected from the group consisting of sequences AAAATAAA and AAAATAAAT as disclosed in Table 3B. In some embodiments, the PEgRNA comprises an editing template comprising a sequence selected from the group consisting of SEQ Identifiers: C15096-C15113 of Table 3C. In some embodiments, the PEgRNA comprises an editing template comprising a sequence selected from the group consisting of SEQ ID NOs: 19122-19139 of Table 3C. In some embodiments, the prime editing composition further comprises a ngRNA that comprises a spacer comprising a sequence selected from the group consisting of SEQ Identifiers: D1853-D1864 of Table 3D. In some embodiments, the prime editing composition further comprises a ngRNA that comprises a spacer comprising a sequence selected from the group consisting of SEQ ID NOs. 21486-21497 of Table 3D.

[0826] In some embodiments, the PEgRNA comprises a spacer comprising a sequence selected from the group consisting of SEQ Identifiers: A828-A830 of Table 3A. In some embodiments, the PEgRNA comprises a spacer comprising a sequence as set forth in SEQ ID NOs. 1176-1178 of Table 3A. In some embodiments, the PEgRNA comprises a PBS comprising a sequence selected from the group consisting of SEQ Identifiers: B3465-B3473 of Table 3B. In some embodiments, the PEgRNA comprises a PBS comprising a sequence selected from the group consisting of SEQ ID NOs. 3908-3914 of Table 3B. In some embodiments, the PEgRNA comprises a PBS comprising a sequence selected from the group consisting of sequences AAATAAAT and AAATAAATA as disclosed in Table 3B. In some embodiments, the PEgRNA comprises an editing template comprising a sequence selected from the group consisting of SEQ Identifiers: C15114-C15130 of Table 3C. In some embodiments, the PEgRNA comprises an editing template comprising a sequence selected from the group consisting of SEQ ID NOs: 19140-19156 of Table 3C. In some embodiments, the prime editing composition further comprises a ngRNA that comprises a spacer comprising a sequence selected from the group consisting of SEQ Identifiers: D1865-D1890 of Table 3D. In some embodiments, the prime editing composition further comprises a ngRNA that comprises a spacer comprising a sequence selected from the group consisting of SEQ ID NOs. 21498-21523 of Table 3D.

[0827] In some embodiments, the PEgRNA comprises a spacer comprising the sequence of SEQ Identifier A831 of Table 3A. In some embodiments, the PEgRNA comprises a spacer comprising a sequence as set forth in SEQ ID NO. 1179 of Table 3A. In some embodiments, the PEgRNA comprises a PBS comprising a sequence selected from the group consisting of SEQ Identifiers: B3474-B3482 of Table 3B. In some embodiments, the PEgRNA comprises a PBS comprising a sequence selected from the group consisting of SEQ ID NOs. 3915-3921 of Table 3B. In some embodiments, the PEgRNA comprises a PBS comprising a sequence selected from the group consisting of sequences GAGTGATC and GAGTGATCA as disclosed in Table 3B. In some embodiments, the PEgRNA comprises an editing template comprising a sequence selected from the group consisting of SEQ Identifiers: C15131-C15149 of Table 3C. In some embodiments, the PEgRNA comprises an editing template comprising a sequence selected from the group consisting of SEQ ID NOs: 19157-19175 of Table 3C. In some embodiments, the prime editing composition further comprises a ngRNA that comprises a spacer comprising a sequence selected from the group consisting of SEQ Identifiers: D1865-D1890 of Table 3D. In some embodiments, the prime editing composition further comprises a ngRNA that comprises a spacer comprising a sequence selected from the group consisting of SEQ ID NOs. 21498-21523 of Table 3D.

[0828] In some embodiments, the PEgRNA comprises a spacer comprising a sequence selected from the group consisting of SEQ Identifiers: A832-A833 of Table 3A. In some embodiments, the PEgRNA comprises a spacer comprising a sequence as set forth in SEQ ID NOs. 1180-1181 of Table 3A. In some embodiments, the PEgRNA comprises a PBS comprising a sequence selected from the group consisting of SEQ Identifiers: B3483-B3491 of Table 3B. In some embodiments, the PEgRNA comprises a PBS comprising a sequence selected from the group consisting of SEQ ID NOs. 3922-3928 of Table 3B. In some embodiments, the PEgRNA comprises a PBS comprising a sequence selected from the group consisting of sequences TGAACAGT and TGAACAGTG as disclosed in Table 3B. In some embodiments, the PEgRNA comprises an editing template comprising a sequence selected from the group consisting of SEQ Identifiers: C15150-C15177 of Table 3C. In some embodiments, the PEgRNA comprises an editing template comprising a sequence selected from the group consisting of SEQ ID NOs: 19176-19203 of Table 3C. In some embodiments, the prime editing composition further comprises a ngRNA that comprises a spacer comprising a sequence selected from the group consisting of SEQ Identifiers: D1865-D1888, and D1891-D1906 of Table 3D. In some embodiments, the prime editing composition further comprises a ngRNA that comprises a spacer comprising a sequence selected from the group consisting of SEQ ID NOs. 21498-21521, and 21524-21539 of Table 3D.

[0829] In some embodiments, the PEgRNA comprises a spacer comprising a sequence selected from the group consisting of SEQ Identifiers: A834-A836 of Table 3A. In some embodiments, the PEgRNA comprises a spacer comprising a sequence as set forth in SEQ ID NOs. 1182-1184 of Table 3A. In some embodiments, the PEgRNA comprises a PBS comprising a sequence selected from the group consisting of SEQ Identifiers: B3492-B3500 of Table 3B. In some embodiments, the PEgRNA comprises a PBS comprising a sequence selected from the group consisting of SEQ ID NOs. 3929-3935 of Table 3B. In some embodiments, the PEgRNA comprises a PBS comprising a sequence selected from the group consisting of sequences TTTTCTAA and TTTTCTAAA as disclosed in Table 3B. In some embodiments, the PEgRNA comprises an editing template comprising a sequence selected from the group consisting of SEQ Identifiers: C15178-C15208 of Table 3C. In some embodiments, the PEgRNA comprises an editing template comprising a sequence selected from the group consisting of SEQ ID NOs: 19204-19234 of Table 3C. In some embodiments, the prime editing composition further comprises a ngRNA that comprises a spacer comprising a sequence selected from the group consisting of SEQ Identifiers: D1907-D1909 of Table 3D. In some embodiments, the prime editing composition further comprises a ngRNA that comprises a spacer comprising a sequence selected from the group consisting of SEQ ID NOs. 21540-21542 of Table 3D.

[0830] In some embodiments, the PEgRNA comprises a spacer comprising a sequence selected from the group consisting of SEQ Identifiers: A837-A838 of Table 3A. In some embodiments, the PEgRNA comprises a spacer comprising a sequence as set forth in SEQ ID NOs. 1185-1186 of Table 3A. In some embodiments, the PEgRNA comprises a PBS comprising a sequence selected from the group consisting of SEQ Identifiers: B3501-B3509 of Table 3B. In some embodiments, the PEgRNA comprises a PBS comprising a sequence selected from the group consisting of SEQ ID NOs. 3936-3942 of Table 3B. In some embodiments, the PEgRNA comprises a PBS comprising a sequence selected from the group consisting of sequences AAAAATAA and AAAAATAAA as disclosed in Table 3B. In some embodiments, the PEgRNA comprises an editing template comprising a sequence selected from the group consisting of SEQ Identifiers: C15209-C15227 of Table 3C. In some embodiments, the PEgRNA comprises an editing template comprising a sequence selected from the group consisting of SEQ ID NOs: 19235-19253 of Table 3C. In some embodiments, the prime editing composition further comprises a ngRNA that comprises a spacer comprising a sequence selected from the group consisting of SEQ Identifiers: D1853-D1864, and D1910-D1916 of Table 3D. In some embodiments, the prime editing composition further comprises a ngRNA that comprises a spacer comprising a sequence selected from the group consisting of SEQ ID NOs. 21486-21497 and 21543-21549 of Table 3D.

[0831] In some embodiments, the PEgRNA comprises a spacer comprising a sequence selected from the group consisting of SEQ Identifiers: A839-A840 of Table 3A. In some embodiments, the PEgRNA comprises a spacer comprising a sequence as set forth in SEQ ID NOs. 1187-1188 of Table 3A. In some embodiments, the PEgRNA comprises a PBS comprising a sequence selected from the group consisting of SEQ Identifiers: B3510-B3518 of Table 3B. In some embodiments, the PEgRNA comprises a PBS comprising a sequence selected from the group consisting of SEQ ID NOs. 3943-3949 of Table 3B. In some embodiments, the PEgRNA comprises a PBS comprising a sequence selected from the group consisting of sequences TTTTTTCT and TTTTTTCTA as disclosed in Table 3B. In some embodiments, the PEgRNA comprises an editing template comprising a sequence selected from the group consisting of SEQ Identifiers: C15228-C15258 of Table 3C. In some embodiments, the PEgRNA comprises an editing template comprising a sequence selected from the group consisting of SEQ ID NOs: 19254-19284 of Table 3C. In some embodiments, the PEgRNA comprises an editing template comprising a sequence selected from the group consisting of SEQ ID NOs: of Table 3C. In some embodiments, the prime editing composition further comprises a ngRNA that comprises a spacer comprising a sequence selected from the group consisting of SEQ Identifiers: D1854-D1864, and D1911-D1919 of Table 3D. In some embodiments, the prime editing composition further comprises a ngRNA that comprises a spacer comprising a sequence selected from the group consisting of SEQ ID NOs. 21487-21497 and 21544-21552 of Table 3D.

[0832] In some embodiments, the PEgRNA comprises a spacer comprising a sequence selected from the group consisting of SEQ Identifiers: A841-A842 of Table 3A. In some embodiments, the PEgRNA comprises a spacer comprising a sequence as set forth in SEQ ID NOs. 1189-1190 of Table 3A. In some embodiments, the PEgRNA comprises a PBS comprising a sequence selected from the group consisting of SEQ Identifiers: B3519-B3527 of Table 3B. In some embodiments, the PEgRNA comprises a PBS comprising a sequence selected from the group consisting of SEQ ID NOs. 3950-3956 of Table 3B. In some embodiments, the PEgRNA comprises a PBS comprising a sequence selected from the group consisting of sequences GAACAGTG and GAACAGTGG as disclosed in Table 3B. In some embodiments, the PEgRNA comprises an editing template comprising a sequence selected from the group consisting of SEQ Identifiers: C15259-C15285 of Table 3C. In some embodiments, the PEgRNA comprises an editing template comprising a sequence selected from the group consisting of SEQ ID NOs: 19285-19311 of Table 3C. In some embodiments, the prime editing composition further comprises a ngRNA that comprises a spacer comprising a sequence selected from the group consisting of SEQ Identifiers: D1865-D1888, D1902-D1906, and D1920-D1927 of Table 3D. In some embodiments, the prime editing composition further comprises a ngRNA that comprises a spacer comprising a sequence selected from the group consisting of SEQ ID NOs. 21498-21521, 21535-21539, and 21553-21560 of Table 3D.

[0833] In some embodiments, the PEgRNA comprises a spacer comprising a sequence selected from the group consisting of SEQ Identifiers: A843-A844 of Table 3A. In some embodiments, the PEgRNA comprises a spacer comprising a sequence as set forth in SEQ ID NOs. 1191-1192 of Table 3A. In some embodiments, the PEgRNA comprises a PBS comprising a sequence selected from the group consisting of SEQ Identifiers: B3528-B3536 of Table 3B. In some embodiments, the PEgRNA comprises a PBS comprising a sequence selected from the group consisting of SEQ ID NOs. 3957-3963 of Table 3B. In some embodiments, the PEgRNA comprises a PBS comprising a sequence selected from the group consisting of sequences TTTTTCTA and TTTTTCTAA as disclosed in Table 3B. In some embodiments, the PEgRNA comprises an editing template comprising a sequence selected from the group consisting of SEQ Identifiers: C15286-C15347 of Table 3C. In some embodiments, the PEgRNA comprises an editing template comprising a sequence selected from the group consisting of SEQ ID NOs: 19312-19373 of Table 3C. In some embodiments, the prime editing composition further comprises a ngRNA that comprises a spacer comprising a sequence selected from the group consisting of SEQ Identifiers: D1854-D1864, D1918, and D1919 of Table 3D. In some embodiments, the prime editing composition further comprises a ngRNA that comprises a spacer comprising a sequence selected from the group consisting of SEQ ID NOs. 21487-21497, 21551, and 21552 of Table 3D.

[0834] In some embodiments, the PEgRNA comprises a spacer comprising a sequence selected from the group consisting of SEQ Identifiers: A845-A846 of Table 3A. In some embodiments, the PEgRNA comprises a spacer comprising a sequence as set forth in SEQ ID NOs. 1193-1194 of Table 3A. In some embodiments, the PEgRNA comprises a PBS comprising a sequence selected from the group consisting of SEQ Identifiers: B3537-B3545 of Table 3B. In some embodiments, the PEgRNA comprises a PBS comprising a sequence selected from the group consisting of SEQ ID NOs. 3964-3970 of Table 3B. In some embodiments, the PEgRNA comprises a PBS comprising a sequence selected from the group consisting of sequences TGTTCCAG and TGTTCCAGA as disclosed in Table 3B. In some embodiments, the PEgRNA comprises an editing template comprising a sequence selected from the group consisting of SEQ Identifiers: C15348-C15375 of Table 3C. In some embodiments, the PEgRNA comprises an editing template comprising a sequence selected from the group consisting of SEQ ID NOs: 19374-19401 of Table 3C. In some embodiments, the prime editing composition further comprises a ngRNA that comprises a spacer comprising a sequence selected from the group consisting of SEQ Identifiers: D1854-D1864, and D1911-D1918 of Table 3D. In some embodiments, the prime editing composition further comprises a ngRNA that comprises a spacer comprising a sequence selected from the group consisting of SEQ ID NOs. 21487-21497, 21544-21551 of Table 3D.

[0835] In some embodiments, the PEgRNA comprises a spacer comprising a sequence selected from the group consisting of SEQ Identifiers: A847-A850 of Table 3A. In some embodiments, the PEgRNA comprises a spacer comprising a sequence as set forth in SEQ ID NOs. 1195-1198 of Table 3A. In some embodiments, the PEgRNA comprises a PBS comprising a sequence selected from the group consisting of SEQ Identifiers: B3546-B3554 of Table 3B. In some embodiments, the PEgRNA comprises a PBS comprising a sequence selected from the group consisting of SEQ ID NOs. 3971-3977 of Table 3B. In some embodiments, the PEgRNA comprises a PBS comprising a sequence selected from the group consisting of sequences AACAGTGG and AACAGTGGA as disclosed in Table 3B. In some embodiments, the PEgRNA comprises an editing template comprising a sequence selected from the group consisting of SEQ Identifiers: C15376-C15427 of Table 3C. In some embodiments, the PEgRNA comprises an editing template comprising a sequence selected from the group consisting of SEQ ID NOs: 19402-19453 of Table 3C. In some embodiments, the prime editing composition further comprises a ngRNA that comprises a spacer comprising a sequence selected from the group consisting of SEQ Identifiers: D1865-D1888, D1903-D1906, and D1920-D1953 of Table 3D. In some embodiments, the prime editing composition further comprises a ngRNA that comprises a spacer comprising a sequence selected from the group consisting of SEQ ID NOs. 21498-21521, 21536-21539, 21553-21586 of Table 3D.

[0836] In some embodiments, the PEgRNA comprises a spacer comprising a sequence selected from the group consisting of SEQ Identifiers: A851-A852 of Table 3A. In some embodiments, the PEgRNA comprises a spacer comprising a sequence as set forth in SEQ ID NOs. 1199-1200 of Table 3A. In some embodiments, the PEgRNA comprises a PBS comprising a sequence selected from the group consisting of SEQ Identifiers: B3555-B3563 of Table 3B. In some embodiments, the PEgRNA comprises a PBS comprising a sequence selected from the group consisting of SEQ ID NOs. 3978-3984 of Table 3B. In some embodiments, the PEgRNA comprises a PBS comprising a sequence selected from the group consisting of sequences AATATGGA and AATATGGAA as disclosed in Table 3B. In some embodiments, the PEgRNA comprises an editing template comprising a sequence selected from the group consisting of SEQ Identifiers: C15428-C15434 of Table 3C. In some embodiments, the PEgRNA comprises an editing template comprising a sequence selected from the group consisting of SEQ ID NOs: 19454-19460 of Table 3C. In some embodiments, the prime editing composition further comprises a ngRNA that comprises a spacer comprising a sequence selected from the group consisting of SEQ Identifiers: D1866-D1890, D1894-D1901, D1954, and D1955 of Table 3D. In some embodiments, the prime editing composition further comprises a ngRNA that comprises a spacer comprising a sequence selected from the group consisting of SEQ ID NOs. 21499-21523, 21527-21534, 21587, and 21588 of Table 3D.

[0837] In some embodiments, the PEgRNA comprises a spacer comprising a sequence selected from the group consisting of SEQ Identifiers: A853-A854 of Table 3A. In some embodiments, the PEgRNA comprises a spacer comprising a sequence as set forth in SEQ ID NOs. 1201-1202 of Table 3A. In some embodiments, the PEgRNA comprises a PBS comprising a sequence selected from the group consisting of SEQ Identifiers: B3564-B3572 of Table 3B. In some embodiments, the PEgRNA comprises a PBS comprising a sequence selected from the group consisting of SEQ ID NOs. 3985-3991 of Table 3B. In some embodiments, the PEgRNA comprises a PBS comprising a sequence selected from the group consisting of sequences GTTCCAGA and GTTCCAGAA as disclosed in Table 3B. In some embodiments, the PEgRNA comprises an editing template comprising a sequence selected from the group consisting of SEQ Identifiers: C15435-C15488 of Table 3C. In some embodiments, the PEgRNA comprises an editing template comprising a sequence selected from the group consisting of SEQ ID NOs: 19461-19514 of Table 3C. In some embodiments, the prime editing composition further comprises a ngRNA that comprises a spacer comprising a sequence selected from the group consisting of SEQ Identifiers: D1956-D1975 of Table 3D. In some embodiments, the prime editing composition further comprises a ngRNA that comprises a spacer comprising a sequence selected from the group consisting of SEQ ID NOs. 21589-21608 of Table 3D.

[0838] In some embodiments, the PEgRNA comprises a spacer comprising a sequence selected from the group consisting of SEQ Identifiers: A855-A856 of Table 3A. In some embodiments, the PEgRNA comprises a spacer comprising a sequence as set forth in SEQ ID NOs. 1203-1204 of Table 3A. In some embodiments, the PEgRNA comprises a PBS comprising a sequence selected from the group consisting of SEQ Identifiers: B3573-B3581 of Table 3B. In some embodiments, the PEgRNA comprises a PBS comprising a sequence selected from the group consisting of SEQ ID NOs. 3992-3998 of Table 3B. In some embodiments, the PEgRNA comprises a PBS comprising a sequence selected from the group consisting of sequences TCTAAATG and TCTAAATGT as disclosed in Table 3B. In some embodiments, the PEgRNA comprises an editing template comprising a sequence selected from the group consisting of SEQ Identifiers: C15489-C15519 of Table 3C. In some embodiments, the PEgRNA comprises an editing template comprising a sequence selected from the group consisting of SEQ ID NOs: 19515-19545 of Table 3C. In some embodiments, the prime editing composition further comprises a ngRNA that comprises a spacer comprising a sequence selected from the group consisting of SEQ Identifiers: D1956-D1963, D1965-D1973, and D1975 of Table 3D. In some embodiments, the prime editing composition further comprises a ngRNA that comprises a spacer comprising a sequence selected from the group consisting of SEQ ID NOs. 21589-21596, 21598-21606, and 21608 of Table 3D.

[0839] In some embodiments, the PEgRNA comprises a spacer comprising the sequence of SEQ Identifier: A857 of Table 3A. In some embodiments, the PEgRNA comprises a spacer comprising a sequence as set forth in SEQ ID NO. 1257 of Table 3A. In some embodiments, the PEgRNA comprises a PBS comprising a sequence selected from the group consisting of SEQ Identifiers: B3582-B3590 of Table 3B. In some embodiments, the PEgRNA comprises a PBS comprising a sequence selected from the group consisting of SEQ ID NOs. 3999-4005 of Table 3B. In some embodiments, the PEgRNA comprises a PBS comprising a sequence selected from the group consisting of sequences TTCTAAAT and TTCTAAATG as disclosed in Table 3B. In some embodiments, the PEgRNA comprises an editing template comprising a sequence selected from the group consisting of SEQ Identifiers: C15520-C15550 of Table 3C. In some embodiments, the PEgRNA comprises an editing template comprising a sequence selected from the group consisting of SEQ ID NOs: 19546-19576 of Table 3C. In some embodiments, the prime editing composition further comprises a ngRNA that comprises a spacer comprising a sequence selected from the group consisting of SEQ Identifiers: D1854-D1864, D1918, and D1919 of Table 3D. In some embodiments, the prime editing composition further comprises a ngRNA that comprises a spacer comprising a sequence selected from the group consisting of SEQ ID NOs. 21487-21497, 21551, and 21552 of Table 3D.

[0840] In some embodiments, the PEgRNA comprises a spacer comprising a sequence selected from the group consisting of SEQ Identifiers: A858-A861 of Table 3A. In some embodiments, the PEgRNA comprises a spacer comprising a sequence as set forth in SEQ ID NOs. 1206-1209 of Table 3A. In some embodiments, the PEgRNA comprises a PBS comprising a sequence selected from the group consisting of SEQ Identifiers: B3591-B3599 of Table 3B. In some embodiments, the PEgRNA comprises a PBS comprising a sequence selected from the group consisting of SEQ ID NOs. 4006-4012 of Table 3B. In some embodiments, the PEgRNA comprises a PBS comprising a sequence selected from the group consisting of sequences ACAGTGGA and ACAGTGGAG as disclosed in Table 3B. In some embodiments, the PEgRNA comprises an editing template comprising a sequence selected from the group consisting of SEQ Identifiers: C15551-C15600 of Table 3C. In some embodiments, the PEgRNA comprises an editing template comprising a sequence selected from the group consisting of SEQ ID NOs: 19577-19626 of Table 3C. In some embodiments, the prime editing composition further comprises a ngRNA that comprises a spacer comprising a sequence selected from the group consisting of SEQ Identifiers: D1880, D1881, D1929-D1935, D1938-D1944, D1948-D1952, and D1976-D1991 of Table 3D. In some embodiments, the prime editing composition further comprises a ngRNA that comprises a spacer comprising a sequence selected from the group consisting of SEQ ID NOs. 21513, 21514, 21562-21568, 21571-21577, 21581-21585, and 21609-21624 of Table 3D.

[0841] In some embodiments, the PEgRNA comprises a spacer comprising a sequence selected from the group consisting of SEQ Identifiers: A862-A863 of Table 3A. In some embodiments, the PEgRNA comprises a spacer comprising a sequence as set forth in SEQ ID NOs. 1210-1211 of Table 3A. In some embodiments, the PEgRNA comprises a PBS comprising a sequence selected from the group consisting of SEQ Identifiers: B3600-B3608 of Table 3B. In some embodiments, the PEgRNA comprises a PBS comprising a sequence selected from the group consisting of SEQ ID NOs. 4013-4019 of Table 3B. In some embodiments, the PEgRNA comprises a PBS comprising a sequence selected from the group consisting of sequences ATAGCAAA and ATAGCAAAA as disclosed in Table 3B. In some embodiments, the PEgRNA comprises an editing template comprising a sequence selected from the group consisting of SEQ Identifiers: C15601-C15604 of Table 3C. In some embodiments, the PEgRNA comprises an editing template comprising a sequence selected from the group consisting of SEQ ID NOs: 19627-19630 of Table 3C. In some embodiments, the prime editing composition further comprises a ngRNA that comprises a spacer comprising a sequence selected from the group consisting of SEQ Identifiers: D1956-D1962, D1966-D1972, D1992-D1998 of Table 3D. In some embodiments, the prime editing composition further comprises a ngRNA that comprises a spacer comprising a sequence selected from the group consisting of SEQ ID NOs. 21589-21595, 21599-21605, 21625-21631 of Table 3D.

[0842] In some embodiments, the PEgRNA comprises a spacer comprising the sequence of SEQ Identifier A864 of Table 3A. In some embodiments, the PEgRNA comprises a spacer comprising a sequence as set forth in SEQ ID NO. 1212 of Table 3A. In some embodiments, the PEgRNA comprises a PBS comprising a sequence selected from the group consisting of SEQ Identifiers: B3609-B3617 of Table 3B. In some embodiments, the PEgRNA comprises a PBS comprising a sequence selected from the group consisting of SEQ ID NOs. 4020-4026 of Table 3B. In some embodiments, the PEgRNA comprises a PBS comprising a sequence selected from the group consisting of sequences TATAGCAA and TATAGCAAA as disclosed in Table 3B. In some embodiments, the PEgRNA comprises an editing template comprising a sequence selected from the group consisting of SEQ Identifiers: C15605-C15607 of Table 3C. In some embodiments, the PEgRNA comprises an editing template comprising a sequence selected from the group consisting of SEQ ID NOs: 19631-19633 of Table 3C. In some embodiments, the prime editing composition further comprises a ngRNA that comprises a spacer comprising a sequence selected from the group consisting of SEQ Identifiers: D1853-D1863 of Table 3D. In some embodiments, the prime editing composition further comprises a ngRNA that comprises a spacer comprising a sequence selected from the group consisting of SEQ ID NOs. 21486-21496 of Table 3D.

[0843] In some embodiments, a PEgRNA (or ngRNA) comprises an additional secondary structure at the 5′ end. In some embodiments, a PEgRNA (or ngRNA) comprises an additional secondary structure at the 3′ end. In some embodiments, the secondary structure comprises a pseudoknot. In some embodiments, the secondary structure comprises a pseudoknot derived from a virus. In some embodiments, the secondary structure comprises a pseudoknot of a Moloney murine leukemia virus (M-MLV) genome (a mpknot). In some embodiments, the secondary structure comprises a quadruplex. In some embodiments, the secondary structure comprises a G-quadruplex. In some embodiments, the secondary structure comprises a P4-P6 domain of a Group I intron. In some embodiments, the secondary structure comprises a riboswitch aptamer. In some embodiments, the secondary structure comprises a riboswitch aptamer derived from a prequeosine-1 riboswitch aptamer. In some embodiments, the secondary structure comprises a modified prequeosine-1 riboswitch aptamer. In some embodiments, the secondary structure is linked to one or more other component of a PEgRNA via a linker. For example, in some embodiments, the secondary structure is at the 3′ end of the PEgRNA and is linked to the 3′ end of a PBS via a linker. In some embodiments, the secondary structure is at the 5′ end of the PEgRNA and is linked to the 5′ end of a spacer via a linker. In some embodiments, the linker is a nucleotide linker that is 1, 2, 3, 4, 5, 6, 7, 8, 9, 10, 11, 12, 13, 14, 15, 16, 17, 18, 19, 20, 21, 22, 23, 24, 25, 26, 27, 28, 29, 30, 31, 32, 33, 34, 35, 36, 37, 38, 39, 40, 41, 42, 43, 44, 45, 46, 47, 48, 49, or 50 nucleotides in length. In some embodiments, the linker is 5 to 10 nucleotides in length. In some embodiments, the linker is 10 to 20 nucleotides in length. In some embodiments, the linker is 15 to 25 nucleotides in length. In some embodiments, the linker is 8 nucleotides in length.

[0844] In some embodiments, the linker is designed to minimize base pairing between the linker and another component of the PEgRNA. In some embodiments, the linker is designed to minimize base pairing between the linker and the spacer. In some embodiments, the linker is designed to minimize base pairing between the linker and the PBS. In some embodiments, the linker is designed to minimize base pairing between the linker and the editing template. In some embodiments, the linker is designed to minimize base pairing between the linker and the sequence of the RNA secondary structure. In some embodiments, the linker is optimized to minimize base pairing between the linker and another component of the PEgRNA, in order of the following priority: spacer, PBS, editing template and then scaffold. In some embodiments, base paring probability is calculated using ViennaRNA 2.0 as described in Lorenz, R. et al. ViennaRNA package 2.0. Algorithms Mol. Biol. 6, incorporated by reference in its entirety herein, under standard parameters (37° C., 1 M NaCl, 0.05 M MgCl2). In some embodiments, the PEgRNA comprises a RNA secondary structure and/or a linker disclosed in Nelson et al. Engineered pegRNAs improve prime editing efficiency. Nat Biotechnol. (2021), the entirety of which is incorporated herein by reference.

[0845] In some embodiments, a PEgRNA is transcribed from a nucleotide encoding the PEgRNA, for example, a DNA plasmid encoding the PEgRNA. In some embodiments, the PEgRNA comprises a self-cleaving element. In some embodiments, the self-cleaving element improves transcription and/or processing of the PEgRNA when transcribed form the nucleotide encoding the PEgRNA. In some embodiments, the PEgRNA comprises a hairpin or an RNA quadruplex. In some embodiments, the PEgRNA comprises a self-cleaving ribozyme element, for example, a hammerhead, a pistol, a hatchet, a hairpin, a VS, a twister, or a twister sister ribozyme. In some embodiments, the PEgRNA comprises a HDV ribozyme. In some embodiments, the PEgRNA comprises a hairpin recognized by Csy4. In some embodiments, the PEgRNA comprises an ENE motif. In some embodiments, the PEgRNA comprises an element for nuclear expression (ENE) from MALATI Inc RNA. In some embodiments, the PEgRNA comprises an ENE element from Kaposi's sarcoma-associated herpesvirus (KSHV). In some embodiments, the PEgRNA comprises a 3′ box of a U1 snRNA. In some embodiments, the PEgRNA forms a circular RNA.

[0846] In some embodiments, the PEgRNA comprises a RNA secondary structure or a motif that improves binding to the DNA-RNA duple or enhances PEgRNA activity. In some embodiments, the PEgRNA comprises a sequence derived from a native nucleotide element involved in reverse transcription, e.g., initiation of retroviral transcription. In some embodiments, the PEgRNA comprises a sequence of, or derived from, a primer binding site of a substrate of a reverse transcriptase, a polypurine tract (PPT), or a kissing loop. In some embodiments, the PEgRNA comprises a dimerization motif, a kissing loop, or a GNRA tetraloop—tetraloop receptor pair that results in circularization of the PEgRNA. In some embodiments, the PEgRNA comprises a RNA secondary structure of a motif that results in physical separation of the spacer and the PBS of the PEgRNA, thereby prevents occlusion of the spacer and improves PEgRNA activity. In some embodiments, the PEgRNA comprises a secondary structure or motif, e.g., a 5′ or 3′ extension in the spacer region that form a toehold or hairpin, wherein the secondary structure or motif competes favorably against annealing between the spacer and the PBS of the PEgRNA, thereby prevents occlusion of the spacer and improves PEgRNA activity.

[0847] In some embodiments, a PEgRNA comprises a gRNA core that comprises a modified direct repeat compared to the sequence of a naturally occurring CRISPR-Cas guide RNA scaffold, for example, a Cas9 gRNA scaffold. In some embodiments, the PEgRNA comprises a “flip and extension (F+E)” gRNA core, wherein one or more base pairs in a direct repeat is modified. In some embodiments, the PEgRNA comprises a first direct repeat (the first paring element or the lower stem), wherein a Uracil is changed to a Adenine (such that in the stem region, a U-A base pair is changed to a A-U base pair). In some embodiments, the PEgRNA comprises a first direct repeat wherein the fourth U-A base pair in the stem is changed to a A-U base pair. In some embodiments, the PEgRNA comprises a first direct repeat wherein one or more U-A base pair is changed to a G-C or C-G base pair. In some embodiments, the PEgRNA comprises an extended first direct repeat.

[0848] A PEgRNA and/or an ngRNA of this disclosure, in some embodiments, may include modified nucleotides, e.g., chemically modified DNA or RNA nucleobases, and may include one or more nucleobase analogs (e.g., modifications which might add functionality, such as temperature resilience). In some embodiments, PEgRNAs and/or ngRNAs as described herein may be chemically modified. The phrase “chemical modifications,” as used herein, can include modifications which introduce chemistries which differ from those seen in naturally occurring DNA or RNAs, for example, covalent modifications such as the introduction of modified nucleotides, (e.g., nucleotide analogs, or the inclusion of pendant groups which are not naturally found in DNA or RNA molecules).

[0849] In some embodiments, the PEgRNAs provided in the disclosure may further comprise nucleotides added to the 5′ of the PEgRNAs. In some embodiments, the PEgRNA further comprises 1, 2, or 3 additional nucleotides added to the 5′ end. The additional nucleotides can be guanine, cytosine, adenine, or uracil. In some embodiments, the additional nucleotide at the 5′ end of the PEgRNA is a guanine or cytosine. In some embodiments, the additional nucleotides can be chemically or biologically modified.

[0850] In some embodiments, the PEgRNAs provided in the disclosure may further comprise nucleotides to the 3′ of the PEgRNAs. In some embodiments, the PEgRNA further comprises 1, 2, or 3 additional nucleotides to the 3′ end. The additional nucleotides can be guanine, cytosine, adenine, or uracil. In some embodiments, the additional nucleotides at the 3′ end of the PEgRNA is a polynucleotide comprising at least 1 uracil. In some embodiments, the additional nucleotides can be chemically or biologically modified.

[0851] In some embodiments, a PEgRNA or ngRNA is produced by transcription from a template nucleotide, for example, a template plasmid. In some embodiments, a polynucleotide encoding the PEgRNA or ngRNA is appended with one or more additional nucleotides that improves PEgRNA or ngRNA function or expression, e.g., expression from a plasmid that encodes the PEgRNA or ngRNA. In some embodiments, a polynucleotide encoding a PEgRNA or ngRNA is appended with one or more additional nucleotides at the 5′ end or at the 3′ end. In some embodiments, the polynucleotide encoding the PEgRNA or ngRNA is appended with a guanine at the 5′ end, for example, if the first nucleotide at the 5′ end of the spacer is not a guanine. In some embodiments, a polynucleotide encoding the PEgRNA or ngRNA is appended with nucleotide sequence CACC at the 5′ end. In some embodiments, the polynucleotide encoding the PEgRNA or ngRNA is appended with an additional nucleotide adenine at the 3′ end, for example, if the last nucleotide at the 3′ end of the PBS is a Thymine. In some embodiments, the polynucleotide encoding the PEgRNA or ngRNA is appended with additional nucleotide sequence TTTTTT, TTTTTTT, TTTTT, or TTTT at the 3′ end. In some embodiments, the PEgRNA or ngRNA comprises the appended nucleotides from the transcription template. In some embodiments, the PEgRNA or ngRNA further comprises one or more nucleotides at the 5′ end or the 3′ end in addition to spacer, PBS, and RTT sequences. in some embodiments, the PEgRNA or ngRNA further comprises a guanine at the 5′ end, for example, when the first nucleotide at the 5′ end of the spacer is not a guanine. In some embodiments, the PEgRNA or ngRNA further comprises nucleotide sequence CACC at the 5′ end. In some embodiments, the PEgRNA or ngRNA further comprises an adenine at the 3′ end, for example, if the last nucleotide at the 3′ end of the PBS is a thymine. In some embodiments, the PEgRNA or ngRNA further comprises nucleotide sequence UUUUUUU, UUUUUU, UUUUU, or UUUU at the 3′ end.

[0852] In some embodiments, the PEgRNAs and/or ngRNAs provided in this disclosure may have undergone a chemical or biological modifications. Modifications may be made at any position within a PEgRNA or ngRNA and may include modification to a nucleobase or to a phosphate backbone of the PEgRNA or ngRNA. In some embodiments, chemical modifications can be a structure guided modifications. In some embodiments, a chemical modification is at the 5′ end and/or the 3′ end of a PEgRNA. In some embodiments, a chemical modification is at the 5′ end and/or the 3′ end of a ngRNA. In some embodiments, a chemical modification may be within the spacer sequence, the extension arm, the editing template sequence, or the primer binding site of a PEgRNA. In some embodiments, a chemical modification may be within the spacer sequence or the gRNA core of a PEgRNA or a ngRNA comprises 1, 2, 3, 4, 5, 6, 7, 8, 9, 10 or more chemically modified nucleotides at the 3′ end. In some embodiments, a PEgRNA or ngRNA comprises 3 contiguous chemically modified nucleotides at the 3′ end. In some embodiments, a chemical modification may be within the 3′ most nucleotides of a PEgRNA or ngRNA. In some embodiments, a chemical modification may be within the 3′ most end of a PEgRNA or ngRNA. In some embodiments, a chemical modification may be within the 5′ most end of a PEgRNA or ngRNA. In some embodiments, a chemical modification may be within the 3′ most nucleotides of a PEgRNA or ngRNA. In some embodiments, a chemical modification may be within the 3′ most end of a PEgRNA or ngRNA. In some embodiments, a PEgRNA or ngRNA comprises 1, 2, 3, 4, 5, 6, 7, 8, 9, 10 or more chemically modified nucleotides at the 3′ end. In some embodiments, a PEgRNA or ngRNA comprises 1, 2, 3, 4, 5, 6, 7, 8, 9, 10 or more chemically modified nucleotides at the 5′ end. In some embodiments, a PEgRNA or ngRNA comprises 1, 2, 3, 4, or 5 or more chemically modified nucleotides at the 3′ end. In some embodiments, a PEgRNA or ngRNA comprises 1, 2, 3, 4, or 5 more chemically modified nucleotides at the 5′ end. In some embodiments, a PEgRNA or ngRNA comprises 1, 2, or 3 or more chemically modified nucleotides at the 3′ end. In some embodiments, a PEgRNA or ngRNA comprises 1, 2, or 3 more chemically modified nucleotides at the 5′ end. In some embodiments, a PEgRNA or ngRNA comprises 1, 2, 3, 4, 5, 6, 7, 8, 9, 10 or more contiguous chemically modified nucleotides at the 3′ end. In some embodiments, a PEgRNA or ngRNA comprises 1, 2, 3, 4, 5, 6, 7, 8, 9, 10 or more contiguous chemically modified nucleotides at the 5′ end. In some embodiments, a PEgRNA or ngRNA comprises 1, 2, 3, 4, or 5 contiguous chemically modified nucleotides at the 3′ end. In some embodiments, a PEgRNA or ngRNA comprises 1, 2, 3, 4, or 5 contiguous chemically modified nucleotides at the 5′ end. In some embodiments, a PEgRNA or ngRNA comprises 1, 2, or 3 contiguous chemically modified nucleotides at the 3′ end. In some embodiments, a PEgRNA or ngRNA comprises 1, 2, or 3 contiguous chemically modified nucleotides at the 5′ end. In some embodiments, a PEgRNA or ngRNA comprises 3 contiguous chemically modified nucleotides at the 3′ end. In some embodiments, a PEgRNA or ngRNA comprises 1, 2, 3, 4, 5, or more chemically modified nucleotides near the 3′ end. In some embodiments, a PEgRNA or ngRNA comprises 3 contiguous chemically modified nucleotides at the 3′ end. In some embodiments, a PEgRNA or ngRNA comprises 3 contiguous chemically modified nucleotides at the 5′ end. In some embodiments, a PEgRNA or ngRNA comprises 1, 2, 3, 4, 5, or more chemically modified nucleotides near the 3′ end. In some embodiments, a PEgRNA or ngRNA comprises 1, 2, 3, 4, 5, or more contiguous chemically modified nucleotides near the 3′ end. In some embodiments, a PEgRNA or ngRNA comprises 1, 2, 3, 4, 5, or more chemically modified nucleotides near the 3′ end, where the 3′ most nucleotide is not modified, and the 1, 2, 3, 4, 5, or more chemically modified nucleotides precede the 3′ most nucleotide in a 5′-to-3′ order. In some embodiments, a PEgRNA or ngRNA comprises 1, 2, 3, 4, 5, 6, 7, 8, 9, 10, 11, 12, 13, 14, 15, 16, 17, 18, 19, 20, 21, 22, 23, 24, 25, 26, 27, 28, 29, 30, 31, 32, 33, 34, 35 or more chemically modified nucleotides near the 3′ end, where the 3′ most nucleotide is not modified, and the 1, 2, 3, 4, 5, 6, 7, 8, 9, 10, 11, 12, 13, 14, 15, 16, 17, 18, 19, 20, 21, 22, 23, 24, 25, 26, 27, 28, 29, 30, 31, 32, 33, 34, 35 or more chemically modified nucleotides precede the 3′ most nucleotide in a 5′-to-3′ order.

[0853] In some embodiments, a PEgRNA or ngRNA comprises one or more chemical modified nucleotides in the gRNA core. As exemplified in FIG. 3, the gRNA core of a PEgRNA may comprise one or more regions of a base paired lower stem, a base paired upper stem, where the lower stem and upper stem may be connected by a bulge comprising unpaired RNAs. The gRNA core may further comprise a nexus distal from the spacer sequence. In some embodiments, the gRNA core comprises one or more chemically modified nucleotides in the lower stem, upper stem, and/or the hairpin regions. In some embodiments, all of the nucleotides in the lower stem, upper stem, and/or the hairpin regions are chemically modified.

[0854] A chemical modification to a PEgRNA or ngRNA can comprise a 2′-O-thionocarbamate-protected nucleoside phosphoramidite, a 2′-O-methyl (M), a 2′-O-methyl 3′phosphorothioate (MS), or a 2′-O-methyl 3′thioPACE (MSP), or any combination thereof. In some embodiments, a chemically modified PEgRNA and/or ngRNA can comprise a ′-O-methyl (M) RNA, a 2′-O-methyl 3′phosphorothioate (MS) RNA, a 2′-O-methyl 3′thioPACE (MSP) RNA, a 2′-F RNA, a phosphorothioate bond modification, any other chemical modifications known in the art, or any combination thereof. A chemical modification may also include, for example, the incorporation of non-nucleotide linkages or modified nucleotides into the PEgRNA and/or ngRNA (e.g., modifications to one or both of the 3′ and 5′ ends of a guide RNA molecule). Such modifications can include the addition of bases to an RNA sequence, complexing the RNA with an agent (e.g., a protein or a complementary nucleic acid molecule), and inclusion of elements which change the structure of an RNA molecule (e.g., which form secondary structures).

### Prime Editing Compositions

[0855] Disclosed herein, in some embodiments, are compositions, systems, and methods using a prime editing composition. The term “prime editing composition” or “prime editing system” refers to compositions involved in the method of prime editing as described herein. A prime editing composition may include a prime editor, e.g., a prime editor fusion protein, and a PEgRNA. A prime editing composition may further comprise additional elements, such as second strand nicking ngRNAs. Components of a prime editing composition may be combined to form a complex for prime editing, or may be kept separately, e.g., for administration purposes. In some embodiments, a prime editing composition comprises a prime editor fusion protein complexed with a PEgRNA and optionally complexed with a ngRNA. In some embodiments, the prime editing composition comprises a prime editor comprising a DNA binding domain and a DNA polymerase domain associated with each other through a PEgRNA. For example, the prime editing composition may comprise a prime editor comprising a DNA binding domain and a DNA polymerase domain linked to each other by an RNA-protein recruitment aptamer RNA sequence, which is linked to a PEgRNA. In some embodiments, a prime editing composition comprises a PEgRNA and a polynucleotide, a polynucleotide construct, or a vector that encodes a prime editor fusion protein. In some embodiments, a prime editing composition comprises a PEgRNA, a ngRNA, and a polynucleotide, a polynucleotide construct, or a vector that encodes a prime editor fusion protein. In some embodiments, a prime editing composition comprises multiple polynucleotides, polynucleotide constructs, or vectors, each of which encodes one or more prime editing composition components. In some embodiments, the PEgRNA of a prime editing composition is associated with the DNA binding domain, e.g., a Cas9 nickase, of the prime editor. In some embodiments, the PEgRNA of a prime editing composition complexes with the DNA binding domain of a prime editor and directs the prime editor to the target DNA.

[0856] In some embodiments, a prime editing composition comprises one or more polynucleotides that encode prime editor components and/or PEgRNA or ngRNAs. In some embodiments, a prime editing composition comprises a polynucleotide encoding a fusion protein comprising a DNA binding domain and a DNA polymerase domain. In some embodiments, a prime editing composition comprises (i) a polynucleotide encoding a fusion protein comprising a DNA binding domain and a DNA polymerase domain, and (ii) a PEgRNA or a polynucleotide encoding the PEgRNA. In some embodiments, a prime editing composition comprises (i) a polynucleotide encoding a fusion protein comprising a DNA binding domain and a DNA polymerase domain, (ii) a PEgRNA or a polynucleotide encoding the PEgRNA, and (iii) an ngRNA or a polynucleotide encoding the ngRNA. In some embodiments, a prime editing composition comprises (i) a polynucleotide encoding a DNA binding domain of a prime editor, e.g., a Cas9 nickase, (ii) a polynucleotide encoding a DNA polymerase domain of a prime editor, e.g., a reverse transcriptase, and (iii) a PEgRNA or a polynucleotide encoding the PEgRNA. In some embodiments, a prime editing composition comprises (i) a polynucleotide encoding a DNA binding domain of a prime editor, e.g., a Cas9 nickase, (ii) a polynucleotide encoding a DNA polymerase domain of a prime editor, e.g., a reverse transcriptase, (iii) a PEgRNA or a polynucleotide encoding the PEgRNA, and (iv) an ngRNA or a polynucleotide encoding the ngRNA. In some embodiments, the polynucleotide encoding the DNA biding domain or the polynucleotide encoding the DNA polymerase domain further encodes an additional polypeptide domain, e.g., an RNA-protein recruitment domain, such as a MS2 coat protein domain. In some embodiments, a prime editing composition comprises (i) a polynucleotide encoding a N-terminal half of a prime editor fusion protein and an intein-N and (ii) a polynucleotide encoding a C-terminal half of a prime editor fusion protein and an intein-C. In some embodiments, a prime editing composition comprises (i) a polynucleotide encoding a N-terminal half of a prime editor fusion protein and an intein-N(ii) a polynucleotide encoding a C-terminal half of a prime editor fusion protein and an intein-C, (iii) a PEgRNA or a polynucleotide encoding the PEgRNA, and/or (iv) an ngRNA or a polynucleotide encoding the ngRNA. In some embodiments, a prime editing composition comprises (i) a polynucleotide encoding a N-terminal portion of a DNA binding domain and an intein-N, (ii) a polynucleotide encoding a C-terminal portion of the DNA binding domain, an intein-C, and a DNA polymerase domain. In some embodiments, the DNA binding domain is a Cas protein domain, e.g., a Cas9 nickase. In some embodiments, the prime editing composition comprises (i) a polynucleotide encoding a N-terminal portion of a DNA binding domain and an intein-N, (ii) a polynucleotide encoding a C-terminal portion of the DNA binding domain, an intein-C, and a DNA polymerase domain, (iii) a PEgRNA or a polynucleotide encoding the PEgRNA, and/or (iv) a ngRNA or a polynucleotide encoding the ngRNA.

[0857] In some embodiments, a prime editing system comprises one or more polynucleotides encoding one or more prime editor polypeptides, wherein activity of the prime editing system can be temporally regulated by controlling the timing in which the vectors are delivered. For example, in some embodiments, a polynucleotide encoding the prime editor and a polynucleotide encoding a PEgRNA can be delivered simultaneously. For example, in some embodiments, a polynucleotide encoding the prime editor and a polynucleotide encoding a PEgRNA can be delivered sequentially.

[0858] In some embodiments, a polynucleotide encoding a component of a prime editing system can further comprise an element that is capable of modifying the intracellular half-life of the polynucleotide and/or modulating translational control. In some embodiments, the polynucleotide is a RNA, for example, an mRNA. In some embodiments, the half-life of the polynucleotide, e.g., the RNA may be increased. In some embodiments, the half-life of the polynucleotide, e.g., the RNA may be decreased. In some embodiments, the element may be capable of increasing the stability of the polynucleotide, e.g., the RNA. In some embodiments, the element may be capable of decreasing the stability of the polynucleotide, e.g., the RNA. In some embodiments, the element may be within the 3′ UTR of the RNA. In some embodiments, the element may include a polyadenylation signal (PA). In some embodiments, the element may include a cap, e.g., an upstream mRNA or PEgRNA end. In some embodiments, the RNA may comprise no PA such that it is subject to quicker degradation in the cell after transcription.

[0859] In some embodiments, the element may include at least one AU-rich element (ARE). The AREs may be bound by ARE binding proteins (ARE-BPs) in a manner that is dependent upon tissue type, cell type, timing, cellular localization, and environment. In some embodiments the destabilizing element may promote RNA decay, affect RNA stability, or activate translation. In some embodiments, the ARE may comprise 50 to 150 nucleotides in length. In some embodiments, the ARE may comprise at least one copy of the sequence AUUUA. In some embodiments, at least one ARE may be added to the 3′ UTR of the RNA. In some embodiments, the element may be a Woodchuck Hepatitis Virus Posttranscriptional Regulatory Element (WPRE). In further embodiments, the element is a modified and/or truncated WPRE sequence that is capable of enhancing expression from the transcript. In some embodiments, the WPRE or equivalent may be added to the 3′ UTR of the RNA. In some embodiments, the element may be selected from other RNA sequence motifs that are enriched in either fast- or slow-decaying transcripts. In some embodiments, the polynucleotide, e.g., a vector, encoding the PE or the PEgRNA may be self-destroyed via cleavage of a target sequence present on the polynucleotide, e.g., a vector. The cleavage may prevent continued transcription of a PE or a PEgRNA.

[0860] Polynucleotides encoding prime editing composition components can be DNA, RNA, or any combination thereof. In some embodiments, a polynucleotide encoding a prime editing composition component is an expression construct. In some embodiments, a polynucleotide encoding a prime editing composition component is a vector. In some embodiments, the vector is a DNA vector. In some embodiments, the vector is a plasmid. In some embodiments, the vector is a virus vector, e.g., a retroviral vector, adenoviral vector, lentiviral vector, herpesvirus vector, or an adeno-associated virus vector (AAV).

[0861] In some embodiments, polynucleotides encoding polypeptide components of a prime editing composition are codon optimized by replacing at least one codon (e.g., about or more than about 1, 2, 3, 4, 5, 10, 15, 20, 25, 50, or more codons) of the native sequence with codons that are more frequently or most frequently used in the genes of that host cell while maintaining the native amino acid sequence. In some embodiments, a polynucleotide encoding a polypeptide component of a prime editing composition are operably linked to one or more expression regulatory elements, for example, a promoter, a 3′ UTR, a 5′ UTR, or any combination thereof. In some embodiments, a polynucleotide encoding a prime editing composition component is a messenger RNA (mRNA). In some embodiments, the mRNA comprises a Cap at the 5′ end and/or a poly A tail at the 3′ end.

### Pharmaceutical Compositions

[0862] Disclosed herein are pharmaceutical compositions comprising any of the prime editing composition components, for example, prime editors, fusion proteins, polynucleotides encoding prime editor polypeptides, PEgRNAs, ngRNAs, and/or prime editing complexes described herein.

[0863] The term “pharmaceutical composition”, as used herein, refers to a composition formulated for pharmaceutical use. In some embodiments, the pharmaceutical composition further comprises a pharmaceutically acceptable carrier. In some embodiments, the pharmaceutical composition comprises additional agents, e.g., for specific delivery, increasing half-life, or other therapeutic compounds.

[0864] In some embodiments, a pharmaceutically-acceptable carrier comprises any vehicle, such as a liquid or solid filler, diluent, excipient, manufacturing aid (e.g., lubricant, tale magnesium, calcium or zinc stearate, or steric acid), or solvent encapsulating material, involved in carrying or transporting the compound from one site (e.g., the delivery site) of the body, to another site (e.g., organ, tissue or portion of the body). A pharmaceutically acceptable carrier is “acceptable” in the sense of being compatible with the other ingredients of the formulation and not injurious to the tissue of the subject (e.g., physiologically compatible, sterile, physiologic pH, etc.)

[0865] Formulations of the pharmaceutical compositions described herein can be prepared by any method known or hereafter developed in the art of pharmacology. In general, such preparatory methods include the step of bringing the active ingredient(s) into association with an excipient and/or one or more other accessory ingredients, and then, if necessary and/or desirable, shaping and/or packaging the product into a desired single- or multi-dose unit. Pharmaceutical formulations can additionally comprise a pharmaceutically acceptable excipient, which, as used herein, includes any and all solvents, dispersion media, diluents, or other liquid vehicles, dispersion or suspension aids, surface active agents, isotonic agents, thickening or emulsifying agents, preservatives, solid binders, lubricants and the like, as suited to the particular dosage form desired.

### Methods of Editing

[0866] The methods and compositions disclosed herein can be used to edit a target gene of interest by prime editing.

[0867] In some embodiments, the prime editing method comprises contacting a target gene, e.g., a CFTR gene, with a PEgRNA and a prime editor (PE) polypeptide described herein. In some embodiments, the target gene is double stranded, and comprises two strands of DNA complementary to each other. In some embodiments, the contacting with a PEgRNA and the contacting with a prime editor are performed sequentially. In some embodiments, the contacting with a prime editor is performed after the contacting with a PEgRNA. In some embodiments, the contacting with a PEgRNA is performed after the contacting with a prime editor. In some embodiments, the contacting with a PEgRNA, and the contacting with a prime editor are performed simultaneously. In some embodiments, the PEgRNA and the prime editor are associated in a complex prior to contacting a target gene.

[0868] In some embodiments, contacting the target gene with the prime editing composition results in binding of the PEgRNA to a target strand of the target gene, e.g., a CFTR gene. In some embodiments, contacting the target gene with the prime editing composition results in binding of the PEgRNA to a search target sequence on the target strand of the target gene upon contacting with the PEgRNA. In some embodiments, contacting the target gene with the prime editing composition results in binding of a spacer sequence of the PEgRNA to a search target sequence with the search target sequence on the target strand of the target gene upon said contacting of the PEgRNA.

[0869] In some embodiments, contacting the target gene with the prime editing composition results in binding of the prime editor to the target gene, e.g. the target CFTR gene, upon the contacting of the PE composition with the target gene. In some embodiments, the DNA binding domain of the PE associates with the PEgRNA. In some embodiments, the PE binds the target gene, e.g. a CFTR gene, directed by the PEgRNA. Accordingly, in some embodiments, the contacting of the target gene result in binding of a DNA binding domain of a prime editor of the target CFTR gene directed by the PEgRNA.

[0870] In some embodiments, contacting the target gene with the prime editing composition results in a nick in an edit strand of the target gene, e.g., a CFTR gene by the prime editor upon contacting with the target gene, thereby generating a nicked on the edit strand of the target gene. In some embodiments, contacting the target gene with the prime editing composition results in a single-stranded DNA comprising a free 3′ end at the nick site of the edit strand of the target gene. In some embodiments, contacting the target gene with the prime editing composition results in a nick in the edit strand of the target gene by a DNA binding domain of the prime editor, thereby generating a single-stranded DNA comprising a free 3′ end at the nick site. In some embodiments, the DNA binding domain of the prime editor is a Cas domain. In some embodiments, the DNA binding domain of the prime editor is a Cas9. In some embodiments, the DNA binding domain of the prime editor is a Cas9 nickase.

[0871] In some embodiments, contacting the target gene with the prime editing composition results in hybridization of the PEgRNA with the 3′ end of the nicked single-stranded DNA, thereby priming DNA polymerization by a DNA polymerase domain of the prime editor. In some embodiments, the free 3′ end of the single-stranded DNA generated at the nick site hybridizes to a primer binding site sequence (PBS) of the contacted PEgRNA, thereby priming DNA polymerization. In some embodiments, the DNA polymerization is reverse transcription catalyzed by a reverse transcriptase domain of the prime editor. In some embodiments, the method comprises contacting the target gene with a DNA polymerase, e.g., a reverse transcriptase, as a part of a prime editor fusion protein or prime editing complex (in cis), or as a separate protein (in trans).

[0872] In some embodiments, contacting the target gene with the prime editing composition generates an edited single stranded DNA that is coded by the editing template of the PEgRNA by DNA polymerase mediated polymerization from the 3′ free end of the single-stranded DNA at the nick site. In some embodiments, the editing template of the PEgRNA comprises one or more intended nucleotide edits compared to endogenous sequence of the target gene, e.g., a CFTR gene. In some embodiments, the intended nucleotide edits are incorporated in the target gene, by excision of the 5′ single stranded DNA of the edit strand of the target gene generated at the nick site and DNA repair. In some embodiments, the intended nucleotide edits are incorporated in the target gene by excision of the editing target sequence and DNA repair. In some embodiments, excision of the 5′ single stranded DNA of the edit strand generated at the nick site is by a flap endonuclease. In some embodiments, the flap nuclease is FENi. In some embodiments, the method further comprises contacting the target gene with a flap endonuclease. In some embodiments, the flap endonuclease is provided as a part of a prime editor fusion protein. In some embodiments, the flap endonuclease is provided in trans.

[0873] In some embodiments, contacting the target gene with the prime editing composition generates a mismatched heteroduplex comprising the edit strand of the target gene that comprises the edited single stranded DNA, and the unedited target strand of the target gene. Without being bound by theory, the endogenous DNA repair and replication may resolve the mismatched edited DNA to incorporate the nucleotide change(s) to form the desired edited target gene.

[0874] In some embodiments, the method further comprises contacting the target gene, e.g., a CFTR gene, with a nick guide (ngRNA) disclosed herein. In some embodiments, the ngRNA comprises a spacer that binds a second search target sequence on the edit strand of the target gene. In some embodiments, the contacted ngRNA directs the PE to introduce a nick in the target strand of the target gene. In some embodiments, the nick on the target strand (non-edit strand) results in endogenous DNA repair machinery to use the edit strand to repair the non-edit strand, thereby incorporating the intended nucleotide edit in both strand of the target gene and modifying the target gene. In some embodiments, the ngRNA comprises a spacer sequence that is complementary to, and may hybridize with, the second search target sequence on the edit strand only after the intended nucleotide edit(s) are incorporated in the edit strand of the target gene.

[0875] In some embodiments, the target gene is contacted by the ngRNA, the PEgRNA, and the PE simultaneously. In some embodiments, the ngRNA, the PEgRNA, and the PE form a complex when they contact the target gene. In some embodiments, the target gene is contacted with the ngRNA, the PEgRNA, and the prime editor sequentially. In some embodiments, the target gene is contacted with the ngRNA and/or the PEgRNA after contacting the target gene with the PE. In some embodiments, the target gene is contacted with the ngRNA and/or the PEgRNA before contacting the target gene with the prime editor.

[0876] In some embodiments, the target gene, e.g., a CFTR gene, is in a cell. Accordingly, also provided herein are methods of modifying a cell.

[0877] In some embodiments, the prime editing method comprises introducing a PEgRNA, a prime editor, and/or a ngRNA into the cell that has the target gene. In some embodiments, the prime editing method comprises introducing into the cell that has the target gene with a prime editing composition comprising a PEgRNA, a prime editor polypeptide, and/or a ngRNA. In some embodiments, the PEgRNA, the prime editor polypeptide, and/or the ngRNA form a complex prior to the introduction into the cell. In some embodiments, the PEgRNA, the prime editor polypeptide, and/or the ngRNA form a complex after the introduction into the cell. The prime editors, PEgRNA and/or ngRNAs, and prime editing complexes may be introduced into the cell by any delivery approaches described herein or any delivery approach known in the art, including ribonucleoprotein (RNPs), lipid nanoparticles (LNPs), viral vectors, non-viral vectors, mRNA delivery, and physical techniques such as cell membrane disruption by a microfluidics device. The prime editors, PEgRNA and/or ngRNAs, and prime editing complexes may be introduced into the cell simultaneously or sequentially.

[0878] In some embodiments, the prime editing method comprises introducing into the cell a PEgRNA or a polynucleotide encoding the PEgRNA, a prime editor polynucleotide encoding a prime editor polypeptide, and optionally an ngRNA or a polynucleotide encoding the ngRNA. In some embodiments, the method comprises introducing the PEgRNA or the polynucleotide encoding the PEgRNA, the polynucleotide encoding the prime editor polypeptide, and/or the ngRNA or the polynucleotide encoding the ngRNA into the cell simultaneously. In some embodiments, the method comprises introducing the PEgRNA or the polynucleotide encoding the PEgRNA, the polynucleotide encoding the prime editor polypeptide, and/or the ngRNA or the polynucleotide encoding the ngRNA into the cell sequentially. In some embodiments, the method comprises introducing the polynucleotide encoding the prime editor polypeptide into the cell before introduction of the PEgRNA or the polynucleotide encoding the PEgRNA and/or the ngRNA or the polynucleotide encoding the ngRNA. In some embodiments, the polynucleotide encoding the prime editor polypeptide is introduced into and expressed in the cell before introduction of the PEgRNA or the polynucleotide encoding the PEgRNA and/or the ngRNA or the polynucleotide encoding the ngRNA into the cell. In some embodiments, the polynucleotide encoding the prime editor polypeptide is introduced into the cell after the PEgRNA or the polynucleotide encoding the PEgRNA and/or the ngRNA or the polynucleotide encoding the ngRNA are introduced into the cell. The polynucleotide encoding the prime editor polypeptide, the PEgRNA or the polynucleotide encoding the PEgRNA, and/or the ngRNA or the polynucleotide encoding the ngRNA, may be introduced into the cell by any delivery approaches described herein or any delivery approach known in the art, for example, by RNPs, LNPs, viral vectors, non-viral vectors, mRNA delivery, and physical.

[0879] In some embodiments, the polynucleotide encoding the prime editor polypeptide, the polynucleotide encoding the PEgRNA, and/or the polynucleotide encoding the ngRNA integrate into the genome of the cell after being introduced into the cell. In some embodiments, the polynucleotide encoding the prime editor polypeptide, the polynucleotide encoding the PEgRNA, and/or the polynucleotide encoding the ngRNA are introduced into the cell for transient expression. Accordingly, also provided herein are cells modified by prime editing.

[0880] In some embodiments, the cell is a human cell. A cell may be of or derived from different tissues, organs, and/or cell types. In some embodiments, the cell is a primary cell. As used herein, the term primary cell means a cell isolated from an organism, e.g., a mammal, which is grown in tissue culture (i.e., in vitro) for the first time before subdivision and transfer to a subculture. In some non-limiting examples, mammalian primary cells which can be transfected and further passaged include hepatocytes, fibroblasts, keratinocytes, epithelial cells (e.g., mammary epithelial cells, intestinal epithelial cells), endothelial cells, glial cells, neural cells, formed elements of the blood (e.g., lymphocytes, bone marrow cells), muscle cells and precursors of these somatic cell types. In some embodiments, the cell is a primary cell. In some embodiments, the cell is a human primary cell. In some embodiments, the cell is a pluripotent stem cell. In some embodiments, the cell is an induced human pluripotent stem cell (iPSC). In some embodiments, the cell is a lung progenitor cell. In some embodiments, the cell is a basal cell. In some embodiments, the cell is a basal cell from the respiratory epithelium, e.g., from the bronchioles or alveoli of the lung. In some embodiments, the cell is a club cell. In some embodiments, the cell is a ciliated cell. In some embodiments, the cell is an ionocyte, e.g., pulmonary human ionocyte. In some embodiments, the cell is a human basal cell. In some embodiments, the cell is a human basal cell from the respiratory epithelium, e.g., from the bronchioles or alveoli of the lung. In some embodiments, the cell is a human club cell. In some embodiments, the cell is a human ciliated cell. In some embodiments, the cell is a human ionocyte, e.g., pulmonary human ionocyte. In some embodiments, the cell is a bronchioalveolar stem cell. In some embodiments, the cell is a human bronchioalveolar stem cell. In some embodiments, the cell is a human lung progenitor cell. In some embodiments, the cell is an epithelial cell. In some embodiments, the cell is an airway epithelial cell. In some embodiments, the cell is a human airway epithelial cell. In some embodiments, the cell is a bronchial epithelial cell. In some embodiments, the cell is a human bronchial epithelial cell. In some embodiments, the cell is a human bronchial epithelial cell induced from iPSC. In some embodiments, the cell is a pancreatic epithelial cell. In some embodiments, the cell is a pancreatic ductal epithelia cell. In some embodiments, the cell is a pancreatic acinar cell. In some embodiments, the cell is a human pancreatic epithelial cell. In some embodiments, the cell is a human pancreatic ductal epithelia cell. In some embodiments, the cell is a human pancreatic acinar cell. In some embodiments, the cell is a hepatocyte. In some embodiments, the cell is a human hepatocyte. In some embodiments, the cell is a kidney epithelial cell. In some embodiments, the cell is an intestine epithelial cell. In some embodiments, the cell is a human kidney epithelial cell. In some embodiments, the cell is a human intestine epithelial cell. In some embodiments, the cell is a fibroblast. In some embodiments, the cell is a human fibroblast. In some embodiments, the cell is a lymphocyte. In some embodiments, the cell is a human lymphocyte. In some embodiments, the cell is a tuft cell. In some embodiments, the cell is a neuroendocrine cell. In some embodiments, the cell is a goblet cell. In some embodiments, the cell is a reproductive tissue epithelial cell. In some embodiments, the cell is a sperm canal epithelial cell. In some embodiments, the cell is a human tuft cell. In some embodiments, the cell is a human neuroendocrine cell. In some embodiments, the cell is a human goblet cell. In some embodiments, the cell is a human reproductive tissue epithelial cell. In some embodiments, the cell is a human sperm canal epithelial cell. In some embodiments, the cell is derived from a human subject. In some embodiments, the cell is derived from a human subject having a disease or condition associated with a target gene, e.g., CFTR. In some embodiments, the cell is a part of an organoid, e.g., an intestinal organoid. In some embodiments, the cell is part of a human organoid. In some embodiments, the cell is in a subject, e.g., a human subject.

[0881] In some embodiments, the target gene edited by prime editing is in a chromosome of the cell. In some embodiments, the intended nucleotide edits incorporate in the chromosome of the cell and are inheritable by progeny cells. In some embodiments, the intended nucleotide edits introduced to the cell by the prime editing compositions and methods are such that the cell and progeny of the cell also include the intended nucleotide edits. In some embodiments, the cell is autologous, allogeneic, or xenogeneic to a subject. In some embodiments, the cell is from or derived from a subject. In some embodiments, the cell is from or derived from a human subject. In some embodiments, the cell is introduced back into the subject, e.g., a human subject, after incorporation of the intended nucleotide edits by prime editing.

[0882] In some embodiments, the method provided herein comprises introducing the prime editor polypeptide or the polynucleotide encoding the prime editor polypeptide, the PEgRNA or the polynucleotide encoding the PEgRNA, and/or the ngRNA or the polynucleotide encoding the ngRNA into a plurality or a population of cells that comprise the target gene. In some embodiments, the population of cells is of the same cell type. In some embodiments, the population of cells is of the same tissue or organ. In some embodiments, the population of cells is heterogeneous. In some embodiments, the population of cells is homogeneous. In some embodiments, the population of cells is from a single tissue or organ, and the cells are heterogeneous. In some embodiments, the introduction into the population of cells is ex vivo. In some embodiments, the introduction into the population of cells is in vivo, e.g., into a human subject.

[0883] In some embodiments, the target gene is in a genome of each cell of the population. In some embodiments, introduction of the prime editor polypeptide or the polynucleotide encoding the prime editor polypeptide, the PEgRNA or the polynucleotide encoding the PEgRNA, and/or the ngRNA or the polynucleotide encoding the ngRNA results in incorporation of one or more intended nucleotide edits in the target gene in at least one of the cells in the population of cells. In some embodiments, introduction of the prime editor polypeptide or the polynucleotide encoding the prime editor polypeptide, the PEgRNA or the polynucleotide encoding the PEgRNA, and/or the ngRNA or the polynucleotide encoding the ngRNA results in incorporation of the one or more intended nucleotide edits in the target gene in a plurality of the population of cells.

[0884] In some embodiments, the population of cells are a part of an organoid. In some embodiments, the population of cells are organoid cells. In some embodiments, the population of cells are part of an intestinal organoid. Methods of generating and examining tissue-specific organoids, e.g., intestinal organoids, are known in the art.

[0885] In some embodiments, introduction of the prime editor polypeptide or the polynucleotide encoding the prime editor polypeptide, the PEgRNA or the polynucleotide encoding the PEgRNA, and/or the ngRNA or the polynucleotide encoding the ngRNA results in incorporation of the one or more intended nucleotide edits in the target gene in each cell of the population of cells. In some embodiments, introduction of the prime editor polypeptide or the polynucleotide encoding the prime editor polypeptide, the PEgRNA or the polynucleotide encoding the PEgRNA, and/or the ngRNA or the polynucleotide encoding the ngRNA results in incorporation of the one or more intended nucleotide edits in the target gene in sufficient number of cells such that the disease or disorder is treated, prevented or ameliorated.

[0886] In some embodiments, editing efficiency of the prime editing compositions and method described herein can be measured by calculating the percentage of edited target genes in a population of cells introduced with the prime editing composition. In some embodiments, the editing efficiency is determined after 1 hour, 2 hours, 6 hours, 12 hours, 24 hours, 36 hours, 48 hours, 3 days, 4 days, 5 days, 7 days, 10 days, or 14 days of exposing a target gene (e.g., a CFTR gene within the genome of a cell) to a prime editing composition. In some embodiments, the population of cells introduced with the prime editing composition is ex vivo. In some embodiments, the population of cells introduced with the prime editing composition is in vitro. In some embodiments, the population of cells introduced with the prime editing composition is in vivo. In some embodiments, the prime editing methods disclosed herein have an editing efficiency of at least about 1%, at least about 5%, at least about 10%, at least about 20%, at least about 30%, at least about 40%, at least about 50%, at least about 60%, at least about 70%, at least about 80%, at least about 90%, at least about 95%, or at least about 99% relative to a suitable control. In some embodiments, the prime editing methods disclosed herein have an editing efficiency of at least 25% relative to a suitable control. In some embodiments, the prime editing methods disclosed herein have an editing efficiency of at least 35% relative to a suitable control.

[0887] In some embodiments, the methods disclosed herein have an editing efficiency of at least about 1%, at least about 5%, at least about 7.5%, at least about 10%, at least about 15%, at least about 20%, at least about 30%, at least about 40%, at least about 50%, at least about 60%, at least about 70%, at least about 80%, at least about 90%, or at least about 95% of editing a primary cell (as measured in a population of primary cells) relative to a suitable control.

[0888] In some embodiments, the methods disclosed herein have an editing efficiency of at least about 5%, at least about 7.5%, at least about 10%, at least about 15%, at least about 20%, at least about 30%, at least about 40%, at least about 50%, at least about 60%, at least about 70%, at least about 80%, at least about 90%, or at least about 95% of editing an airway epithelial cell, bronchial epithelial cell, a basal cell, a club cell, a ciliated cell, an ionocyte, an iPSC, a fibroblast, a lymphoblast, a reproductive tissue epithelial cell, or a sperm canal epithelial cell, relative to a corresponding control airway epithelial cell, bronchial epithelial cell, basal cell, club cell, ciliated cell, ionocyte, iPSC, fibroblast, alymphoblast, reproductive tissue epithelial cell, or sperm canal epithelial cell. In some embodiments, the bronchial epithelial cell is a human bronchial epithelial cell. In some embodiments, the cell is a fibroblast. In some embodiments, the cell is a human fibroblast. In some embodiments, the cell is a lymphocyte. In some embodiments, the cell is a human lymphocyte. In some embodiments, the cell is a basal cell. In some embodiments, the cell is a club cell. In some embodiments, the cell is a ciliated cell. In some embodiments, the cell is an ionocyte e.g., pulmonary human ionocyte. In some embodiments, the cell is a human basal cell. In some embodiments, the cell is a human basal cell from the respiratory epithelium, e.g., from the bronchioles or alveoli of the lung. In some embodiments, the cell is a human club cell. In some embodiments, the cell is a human ciliated cell. In some embodiments, the cell is a human ionocyte e.g., pulmonary human ionocyte. In some embodiments, the cell is a tuft cell. In some embodiments, the cell is a neuroendocrine cell. In some embodiments, the cell is a goblet cell. In some embodiments, the cell is a reproductive tissue epithelial cell. In some embodiments, the cell is a sperm canal epithelial cell. In some embodiments, the cell is a human tuft cell. In some embodiments, the cell is a human neuroendocrine cell. In some embodiments, the cell is a human goblet cell. In some embodiments, the cell is a human reproductive tissue epithelial cell. In some embodiments, the cell is a human sperm canal epithelial cell. In some embodiments, the cell is derived from a human subject. In some embodiments, the cell is derived from a human subject having a disease or condition associated with a target gene, e.g., CFTR. In some embodiments, the cell is a part of an organoid, e.g., an intestinal organoid. In some embodiments, the cell is part of a human organoid. In some embodiments, the cell is in a subject, e.g., a human subject.

[0889] In some embodiments, the prime editing compositions provided herein are capable of incorporating one or more intended nucleotide edits without generating a significant proportion of indels. The term “indel(s)”, as used herein, refers to the insertion or deletion of a nucleotide base within a polynucleotide, for example, a target gene. Such insertions or deletions can lead to frame shift mutations within a coding region of a gene. Indel frequency of editing can be calculated by methods known in the art. In some embodiments, indel frequency can be calculated based on sequence alignment such as the CRISPResso 2 algorithm as described in Clement et al., Nat. Biotechnol. 37(3): 224-226 (2019), which is incorporated herein in its entirety. In some embodiments, the prime editing methods disclosed herein can have an indel frequency of less than 20%, less than 10%, less than 9%, less than 8%, less than 7%, less than 6%, less than 5%, less than 4%, less than 3%, less than 2%, less than 1.5%, or less than 1%. In some embodiments, any number of indels is determined after at least 1 hour, at least 2 hours, at least 6 hours, at least 12 hours, at least 24 hours, at least 36 hours, at least 48 hours, at least 3 days, at least 4 days, at least 5 days, at least 7 days, at least 10 days, or at least 14 days of exposing a target gene (e.g., a CFTR gene within the genome of a cell) to a prime editing composition.

[0890] In some embodiments, the prime editing compositions provided herein are capable of incorporating one or more intended nucleotide edits efficiently without generating a significant proportion of indels. In some embodiments, the prime editing methods disclosed herein have an editing efficiency of at least about 1% and an indel frequency of less than 1% in a target cell, e.g., an iPSC, a human iPSC, a lung progenitor cell, a human lung progenitor cell, a basal cell, a human basal cell, a human basal cell from the respiratory epithelium, a club cell, a human club cell, an ionocyte, a human ionocyte e.g., pulmonary human ionocyte, a bronchial epithelial cell, an airway epithelial cell, a human bronchial epithelial cell, a human airway epithelial cell, a fibroblast, a lymphoblast, a human fibroblast, a human lymphoblast, a lymphocyte, a human lymphocyte, a tuft cell, a neuroendocrine cell, a goblet cell, a reproductive tissue epithelial cell, a sperm canal epithelial cell, a human tuft cell, a human neuroendocrine cell, a human goblet cell, a human reproductive tissue epithelial cell, or a human sperm canal epithelial cell. In some embodiments, the cell is derived from a human subject. In some embodiments, the cell is derived from a human subject having a disease or condition associated with a target gene, e.g., CFTR. In some embodiments, the cell is a part of an organoid, e.g., an intestinal organoid.

[0891] In some embodiments, the prime editing methods disclosed herein have an editing efficiency of at least about 1% and an indel frequency of less than 10% in a target cell, e.g., an iPSC, a human iPSC, a lung progenitor cell, a human lung progenitor cell, a basal cell, a human basal cell, a human basal cell from the respiratory epithelium, a club cell, a human club cell, an ionocyte, a human ionocyte, a bronchial epithelial cell, an airway epithelial cell, a human bronchial epithelial cell, a human airway epithelial cell, a fibroblast, a lymphoblast, a human fibroblast, a human lymphoblast, a lymphocyte, a human lymphocyte, a tuft cell, a neuroendocrine cell, a goblet cell, a reproductive tissue epithelial cell, a sperm canal epithelial cell, a human tuft cell, a human neuroendocrine cell, a human goblet cell, a human reproductive tissue epithelial cell, a human sperm canal epithelial cell, an intestinal organoid cell, or a human intestinal organoid cell. In some embodiments, the prime editing methods disclosed herein have an editing efficiency of at least about 1% and an indel frequency of less than 7.5% in a target cell, e.g., an iPSC, a human iPSC, a lung progenitor cell, a human lung progenitor cell, a basal cell, a human basal cell, a club cell, a human club cell, an ionocyte, a human ionocyte, a bronchial epithelial cell, an airway epithelial cell, a human bronchial epithelial cell, a human airway epithelial cell, a fibroblast, a lymphoblast, a human fibroblast, a human lymphoblast, a lymphocyte, a human lymphocyte, a tuft cell, a neuroendocrine cell, a goblet cell, a reproductive tissue epithelial cell, a sperm canal epithelial cell, a human tuft cell, a human neuroendocrine cell, a human goblet cell, a human reproductive tissue epithelial cell, a human sperm canal epithelial cell, a intestinal organoid cell, or a human intestinal organoid cell. In some embodiments, the prime editing methods disclosed herein have an editing efficiency of at least about 1% and an indel frequency of less than 5% in a target cell, e.g., e.g., an iPSC, a human iPSC, a lung progenitor cell, a human lung progenitor cell, a basal cell, a human basal cell, a human basal cell from the respiratory epithelium, a club cell, a human club cell, an ionocyte, a human ionocyte, a bronchial epithelial cell, an airway epithelial cell, a human bronchial epithelial cell, a human airway epithelial cell, a fibroblast, a lymphoblast, a human fibroblast, a human lymphoblast, a lymphocyte, a human lymphocyte, a tuft cell, a neuroendocrine cell, a goblet cell, a reproductive tissue epithelial cell, a sperm canal epithelial cell, a human tuft cell, a human neuroendocrine cell, a human goblet cell, a human reproductive tissue epithelial cell, a human sperm canal epithelial cell, a intestinal organoid cell, or a human intestinal organoid cell. In some embodiments, the prime editing methods disclosed herein have an editing efficiency of at least about 1% and an indel frequency of less than 1% in a target cell, e.g., e.g., an iPSC, a human iPSC, a lung progenitor cell, a human lung progenitor cell, a basal cell, a human basal cell, a human basal cell from the respiratory epithelium, a club cell, a human club cell, an ionocyte, a human ionocyte, a bronchial epithelial cell, an airway epithelial cell, a human bronchial epithelial cell, a human airway epithelial cell, a fibroblast, a lymphoblast, a human fibroblast, a human lymphoblast, a lymphocyte, a human lymphocyte, a tuft cell, a neuroendocrine cell, a goblet cell, a reproductive tissue epithelial cell, a sperm canal epithelial cell, a human tuft cell, a human neuroendocrine cell, a human goblet cell, a human reproductive tissue epithelial cell, a human sperm canal epithelial cell, a intestinal organoid cell, or a human intestinal organoid cell. In some embodiments, the prime editing methods disclosed herein have an editing efficiency of at least about 1% and an indel frequency of less than 0.5% in a target cell, e.g., an iPSC, a human iPSC, a lung progenitor cell, a human lung progenitor cell, a basal cell, a human basal cell, a human basal cell from the respiratory epithelium, a club cell, a human club cell, an ionocyte, a human ionocyte, a bronchial epithelial cell, an airway epithelial cell, a human bronchial epithelial cell, a human airway epithelial cell, a fibroblast, a lymphoblast, a human fibroblast, a human lymphoblast, a lymphocyte, a human lymphocyte, a tuft cell, a neuroendocrine cell, a goblet cell, a reproductive tissue epithelial cell, a sperm canal epithelial cell, a human tuft cell, a human neuroendocrine cell, a human goblet cell, a human reproductive tissue epithelial cell, a human sperm canal epithelial cell, an intestinal organoid cell, or a human intestinal organoid cell. In some embodiments, the prime editing methods disclosed herein have an editing efficiency of at least about 1% and an indel frequency of less than 0.1% in a target cell, e.g., an iPSC, a human iPSC, a lung progenitor cell, a human lung progenitor cell, a basal cell, a human basal cell, a human basal cell from the respiratory epithelium, a club cell, a human club cell, an ionocyte, a human ionocyte, a bronchial epithelial cell, an airway epithelial cell, a human bronchial epithelial cell, a human airway epithelial cell, a fibroblast, a lymphoblast, a human fibroblast, a human lymphoblast, a lymphocyte, a human lymphocyte, a tuft cell, a neuroendocrine cell, a goblet cell, a reproductive tissue epithelial cell, a sperm canal epithelial cell, a human tuft cell, a human neuroendocrine cell, a human goblet cell, a human reproductive tissue epithelial cell, a human sperm canal epithelial cell, an intestinal organoid cell, or a human intestinal organoid cell.

[0892] In some embodiments, the prime editing methods disclosed herein have an editing efficiency of at least about 5% and an indel frequency of less than 10% in a target cell, e.g., an iPSC, a human iPSC, a lung progenitor cell, a human lung progenitor cell, a basal cell, a human basal cell, a human basal cell from the respiratory epithelium, a club cell, a human club cell, an ionocyte, a human ionocyte, a bronchial epithelial cell, an airway epithelial cell, a human bronchial epithelial cell, a human airway epithelial cell, a fibroblast, a lymphoblast, a human fibroblast, a human lymphoblast, a lymphocyte, a human lymphocyte, a tuft cell, a neuroendocrine cell, a goblet cell, a reproductive tissue epithelial cell, a sperm canal epithelial cell, a human tuft cell, a human neuroendocrine cell, a human goblet cell, a human reproductive tissue epithelial cell, a human sperm canal epithelial cell, an intestinal organoid cell, or a human intestinal organoid cell. In some embodiments, the prime editing methods disclosed herein have an editing efficiency of at least about 5% and an indel frequency of less than 7.5% in a target cell, e.g., an iPSC, a human iPSC, a lung progenitor cell, a human lung progenitor cell, a basal cell, a human basal cell, a human basal cell from the respiratory epithelium, a club cell, a human club cell, an ionocyte, a human ionocyte, a bronchial epithelial cell, an airway epithelial cell, a human bronchial epithelial cell, a human airway epithelial cell, a fibroblast, a lymphoblast, a human fibroblast, a human lymphoblast, a lymphocyte, a human lymphocyte, a tuft cell, a neuroendocrine cell, a goblet cell, a reproductive tissue epithelial cell, a sperm canal epithelial cell, a human tuft cell, a human neuroendocrine cell, a human goblet cell, a human reproductive tissue epithelial cell, a human sperm canal epithelial cell, an intestinal organoid cell, or a human intestinal organoid cell. In some embodiments, the prime editing methods disclosed herein have an editing efficiency of at least about 5% and an indel frequency of less than 5% in a target cell, e.g., an iPSC, a human iPSC, a lung progenitor cell, a human lung progenitor cell, a basal cell, a human basal cell, a human basal cell from the respiratory epithelium, a club cell, a human club cell, an ionocyte, a human ionocyte, a bronchial epithelial cell, an airway epithelial cell, a human bronchial epithelial cell, a human airway epithelial cell, a fibroblast, a lymphoblast, a human fibroblast, a human lymphoblast, a lymphocyte, a human lymphocyte, a tuft cell, a neuroendocrine cell, a goblet cell, a reproductive tissue epithelial cell, a sperm canal epithelial cell, a human tuft cell, a human neuroendocrine cell, a human goblet cell, a human reproductive tissue epithelial cell, a human sperm canal epithelial cell, an intestinal organoid cell, or a human intestinal organoid cell. In some embodiments, the prime editing methods disclosed herein have an editing efficiency of at least about 5% and an indel frequency of less than 1% in a target cell, e.g., an iPSC, a human iPSC, a lung progenitor cell, a human lung progenitor cell, a basal cell, a human basal cell, a human basal cell from the respiratory epithelium, a club cell, a human club cell, an ionocyte, a human ionocyte, a bronchial epithelial cell, an airway epithelial cell, a human bronchial epithelial cell, a human airway epithelial cell, a fibroblast, a lymphoblast, a human fibroblast, a human lymphoblast, a lymphocyte, a human lymphocyte, a tuft cell, a neuroendocrine cell, a goblet cell, a reproductive tissue epithelial cell, a sperm canal epithelial cell, a human tuft cell, a human neuroendocrine cell, a human goblet cell, a human reproductive tissue epithelial cell, a human sperm canal epithelial cell, an intestinal organoid cell, or a human intestinal organoid cell. In some embodiments, the prime editing methods disclosed herein have an editing efficiency of at least about 5% and an indel frequency of less than 0.5% in a target cell, e.g., an iPSC, a human iPSC, a lung progenitor cell, a human lung progenitor cell, a basal cell, a human basal cell, a human basal cell from the respiratory epithelium, a club cell, a human club cell, an ionocyte, a human ionocyte, a bronchial epithelial cell, an airway epithelial cell, a human bronchial epithelial cell, a human airway epithelial cell, a fibroblast, a lymphoblast, a human fibroblast, a human lymphoblast, a lymphocyte, a human lymphocyte, a tuft cell, a neuroendocrine cell, a goblet cell, a reproductive tissue epithelial cell, a sperm canal epithelial cell, a human tuft cell, a human neuroendocrine cell, a human goblet cell, a human reproductive tissue epithelial cell, a human sperm canal epithelial cell, an intestinal organoid cell, or a human intestinal organoid cell. In some embodiments, the prime editing methods disclosed herein have an editing efficiency of at least about 5% and an indel frequency of less than 0.1% in a target cell, e.g., an iPSC, a human iPSC, a lung progenitor cell, a human lung progenitor cell, a basal cell, a human basal cell, a human basal cell from the respiratory epithelium, a club cell, a human club cell, an ionocyte, a human ionocyte, a bronchial epithelial cell, an airway epithelial cell, a human bronchial epithelial cell, a human airway epithelial cell, a fibroblast, a lymphoblast, a human fibroblast, a human lymphoblast, a lymphocyte, a human lymphocyte, a tuft cell, a neuroendocrine cell, a goblet cell, a reproductive tissue epithelial cell, a sperm canal epithelial cell, a human tuft cell, a human neuroendocrine cell, a human goblet cell, a human reproductive tissue epithelial cell, a human sperm canal epithelial cell, an intestinal organoid cell, or a human intestinal organoid cell.

[0893] In some embodiments, the prime editing methods disclosed herein have an editing efficiency of at least about 7.5% and an indel frequency of less than 10% in a target cell, e.g., an iPSC, a human iPSC, a lung progenitor cell, a human lung progenitor cell, a basal cell, a human basal cell, a human basal cell from the respiratory epithelium, a club cell, a human club cell, an ionocyte, a human ionocyte, a bronchial epithelial cell, an airway epithelial cell, a human bronchial epithelial cell, a human airway epithelial cell, a fibroblast, a lymphoblast, a human fibroblast, a human lymphoblast, a lymphocyte, a human lymphocyte, a tuft cell, a neuroendocrine cell, a goblet cell, a reproductive tissue epithelial cell, a sperm canal epithelial cell, a human tuft cell, a human neuroendocrine cell, a human goblet cell, a human reproductive tissue epithelial cell, a human sperm canal epithelial cell, a intestinal organoid cell, or a human intestinal organoid cell. In some embodiments, the prime editing methods disclosed herein have an editing efficiency of at least about 7.5% and an indel frequency of less than 7.5% in a target cell, e.g., an iPSC, a human iPSC, a lung progenitor cell, a human lung progenitor cell, a basal cell, a human basal cell, a human basal cell from the respiratory epithelium, a club cell, a human club cell, an ionocyte, a human ionocyte, a bronchial epithelial cell, an airway epithelial cell, a human bronchial epithelial cell, a human airway epithelial cell, a fibroblast, a lymphoblast, a human fibroblast, a human lymphoblast, a lymphocyte, a human lymphocyte, a tuft cell, a neuroendocrine cell, a goblet cell, a reproductive tissue epithelial cell, a sperm canal epithelial cell, a human tuft cell, a human neuroendocrine cell, a human goblet cell, a human reproductive tissue epithelial cell, a human sperm canal epithelial cell, a intestinal organoid cell, or a human intestinal organoid cell. In some embodiments, the prime editing methods disclosed herein have an editing efficiency of at least about 7.5% and an indel frequency of less than 5% in a target cell, e.g., an iPSC, a human iPSC, a lung progenitor cell, a human lung progenitor cell, a basal cell, a human basal cell, a human basal cell from the respiratory epithelium, a club cell, a human club cell, an ionocyte, a human ionocyte, a bronchial epithelial cell, an airway epithelial cell, a human bronchial epithelial cell, a human airway epithelial cell, a fibroblast, a lymphoblast, a human fibroblast, a human lymphoblast, a lymphocyte, a human lymphocyte, a tuft cell, a neuroendocrine cell, a goblet cell, a reproductive tissue epithelial cell, a sperm canal epithelial cell, a human tuft cell, a human neuroendocrine cell, a human goblet cell, a human reproductive tissue epithelial cell, a human sperm canal epithelial cell, an intestinal organoid cell, or a human intestinal organoid cell. In some embodiments, the prime editing methods disclosed herein have an editing efficiency of at least about 7.5% and an indel frequency of less than 7.5% in a target cell, e.g., an iPSC, a human iPSC, a lung progenitor cell, a human lung progenitor cell, a basal cell, a human basal cell, a human basal cell from the respiratory epithelium, a club cell, a human club cell, an ionocyte, a human ionocyte, a bronchial epithelial cell, an airway epithelial cell, a human bronchial epithelial cell, a human airway epithelial cell, a fibroblast, a lymphoblast, a human fibroblast, a human lymphoblast, a lymphocyte, a human lymphocyte, a tuft cell, a neuroendocrine cell, a goblet cell, a reproductive tissue epithelial cell, a sperm canal epithelial cell, a human tuft cell, a human neuroendocrine cell, a human goblet cell, a human reproductive tissue epithelial cell, a human sperm canal epithelial cell, an intestinal organoid cell, or a human intestinal organoid cell. In some embodiments, the prime editing methods disclosed herein have an editing efficiency of at least about 7.5% and an indel frequency of less than 1% in a target cell, e.g., an iPSC, a human iPSC, a lung progenitor cell, a human lung progenitor cell, a basal cell, a human basal cell, a human basal cell from the respiratory epithelium, a club cell, a human club cell, an ionocyte, a human ionocyte, a bronchial epithelial cell, an airway epithelial cell, a human bronchial epithelial cell, a human airway epithelial cell, a fibroblast, a lymphoblast, a human fibroblast, a human lymphoblast, a lymphocyte, a human lymphocyte, a tuft cell, a neuroendocrine cell, a goblet cell, a reproductive tissue epithelial cell, a sperm canal epithelial cell, a human tuft cell, a human neuroendocrine cell, a human goblet cell, a human reproductive tissue epithelial cell, a human sperm canal epithelial cell, a intestinal organoid cell, or a human intestinal organoid cell. In some embodiments, the prime editing methods disclosed herein have an editing efficiency of at least about 7.5% and an indel frequency of less than 0.5% in a target cell, e.g., an iPSC, a human iPSC, a lung progenitor cell, a human lung progenitor cell, a basal cell, a human basal cell, a human basal cell from the respiratory epithelium, a club cell, a human club cell, an ionocyte, a human ionocyte, a bronchial epithelial cell, an airway epithelial cell, a human bronchial epithelial cell, a human airway epithelial cell, a fibroblast, a lymphoblast, a human fibroblast, a human lymphoblast, a lymphocyte, a human lymphocyte, a tuft cell, a neuroendocrine cell, a goblet cell, a reproductive tissue epithelial cell, a sperm canal epithelial cell, a human tuft cell, a human neuroendocrine cell, a human goblet cell, a human reproductive tissue epithelial cell, a human sperm canal epithelial cell, an intestinal organoid cell, or a human intestinal organoid cell. In some embodiments, the prime editing methods disclosed herein have an editing efficiency of at least about 7.5% and an indel frequency of less than 0.1% in a target cell, e.g., an iPSC, a human iPSC, a lung progenitor cell, a human lung progenitor cell, a basal cell, a human basal cell, a human basal cell from the respiratory epithelium, a club cell, a human club cell, an ionocyte, a human ionocyte, a bronchial epithelial cell, an airway epithelial cell, a human bronchial epithelial cell, a human airway epithelial cell, a fibroblast, a lymphoblast, a human fibroblast, a human lymphoblast, a lymphocyte, a human lymphocyte, a tuft cell, a neuroendocrine cell, a goblet cell, a reproductive tissue epithelial cell, a sperm canal epithelial cell, a human tuft cell, a human neuroendocrine cell, a human goblet cell, a human reproductive tissue epithelial cell, a human sperm canal epithelial cell, a intestinal organoid cell, or a human intestinal organoid cell.

[0894] In some embodiments, the prime editing methods disclosed herein have an editing efficiency of at least about 10% and an indel frequency of less than 10% in a target cell, e.g., an iPSC, a human iPSC, a lung progenitor cell, a human lung progenitor cell, a basal cell, a human basal cell, a human basal cell from the respiratory epithelium, a club cell, a human club cell, an ionocyte, a human ionocyte, a bronchial epithelial cell, an airway epithelial cell, a human bronchial epithelial cell, a human airway epithelial cell, a fibroblast, a lymphoblast, a human fibroblast, a human lymphoblast, a lymphocyte, a human lymphocyte, a tuft cell, a neuroendocrine cell, a goblet cell, a reproductive tissue epithelial cell, a sperm canal epithelial cell, a human tuft cell, a human neuroendocrine cell, a human goblet cell, a human reproductive tissue epithelial cell, a human sperm canal epithelial cell, an intestinal organoid cell, or a human intestinal organoid cell. In some embodiments, the prime editing methods disclosed herein have an editing efficiency of at least about 10% and an indel frequency of less than 7.5% in a target cell, e.g., an iPSC, a human iPSC, a lung progenitor cell, a human lung progenitor cell, a basal cell, a human basal cell, a human basal cell from the respiratory epithelium, a club cell, a human club cell, an ionocyte, a human ionocyte, a bronchial epithelial cell, an airway epithelial cell, a human bronchial epithelial cell, a human airway epithelial cell, a fibroblast, a lymphoblast, a human fibroblast, a human lymphoblast, a lymphocyte, a human lymphocyte, a tuft cell, a neuroendocrine cell, a goblet cell, a reproductive tissue epithelial cell, a sperm canal epithelial cell, a human tuft cell, a human neuroendocrine cell, a human goblet cell, a human reproductive tissue epithelial cell, a human sperm canal epithelial cell, an intestinal organoid cell, or a human intestinal organoid cell. In some embodiments, the prime editing methods disclosed herein have an editing efficiency of at least about 10% and an indel frequency of less than 5% in a target cell, e.g., an iPSC, a human iPSC, a lung progenitor cell, a human lung progenitor cell, a basal cell, a human basal cell, a human basal cell from the respiratory epithelium, a club cell, a human club cell, an ionocyte, a human ionocyte, a bronchial epithelial cell, an airway epithelial cell, a human bronchial epithelial cell, a human airway epithelial cell, a fibroblast, a lymphoblast, a human fibroblast, a human lymphoblast, a lymphocyte, a human lymphocyte, a tuft cell, a neuroendocrine cell, a goblet cell, a reproductive tissue epithelial cell, a sperm canal epithelial cell, a human tuft cell, a human neuroendocrine cell, a human goblet cell, a human reproductive tissue epithelial cell, a human sperm canal epithelial cell, an intestinal organoid cell, or a human intestinal organoid cell. In some embodiments, the prime editing methods disclosed herein have an editing efficiency of at least about 10% and an indel frequency of less than 10% in a target cell, e.g., an iPSC, a human iPSC, a lung progenitor cell, a human lung progenitor cell, a basal cell, a human basal cell, a human basal cell from the respiratory epithelium, a club cell, a human club cell, an ionocyte, a human ionocyte, a bronchial epithelial cell, an airway epithelial cell, a human bronchial epithelial cell, a human airway epithelial cell, a fibroblast, a lymphoblast, a human fibroblast, a human lymphoblast, a lymphocyte, a human lymphocyte, a tuft cell, a neuroendocrine cell, a goblet cell, a reproductive tissue epithelial cell, a sperm canal epithelial cell, a human tuft cell, a human neuroendocrine cell, a human goblet cell, a human reproductive tissue epithelial cell, a human sperm canal epithelial cell, an intestinal organoid cell, or a human intestinal organoid cell. In some embodiments, the prime editing methods disclosed herein have an editing efficiency of at least about 10% and an indel frequency of less than 1% in a target cell, e.g., an iPSC, a human iPSC, a lung progenitor cell, a human lung progenitor cell, a basal cell, a human basal cell, a human basal cell from the respiratory epithelium, a club cell, a human club cell, an ionocyte, a human ionocyte, a bronchial epithelial cell, an airway epithelial cell, a human bronchial epithelial cell, a human airway epithelial cell, a fibroblast, a lymphoblast, a human fibroblast, a human lymphoblast, a lymphocyte, a human lymphocyte, a tuft cell, a neuroendocrine cell, a goblet cell, a reproductive tissue epithelial cell, a sperm canal epithelial cell, a human tuft cell, a human neuroendocrine cell, a human goblet cell, a human reproductive tissue epithelial cell, a human sperm canal epithelial cell, a intestinal organoid cell, or a human intestinal organoid cell. In some embodiments, the prime editing methods disclosed herein have an editing efficiency of at least about 10% and an indel frequency of less than 0.5% in a target cell, e.g., an iPSC, a human iPSC, a lung progenitor cell, a human lung progenitor cell, a basal cell, a human basal cell, a human basal cell from the respiratory epithelium, a club cell, a human club cell, an ionocyte, a human ionocyte, a bronchial epithelial cell, an airway epithelial cell, a human bronchial epithelial cell, a human airway epithelial cell, a fibroblast, a lymphoblast, a human fibroblast, a human lymphoblast, a lymphocyte, a human lymphocyte, a tuft cell, a neuroendocrine cell, a goblet cell, a reproductive tissue epithelial cell, a sperm canal epithelial cell, a human tuft cell, a human neuroendocrine cell, a human goblet cell, a human reproductive tissue epithelial cell, a human sperm canal epithelial cell, an intestinal organoid cell, or a human intestinal organoid cell. In some embodiments, the prime editing methods disclosed herein have an editing efficiency of at least about 10% and an indel frequency of less than 0.1% in a target cell, e.g., an iPSC, a human iPSC, a lung progenitor cell, a human lung progenitor cell, a basal cell, a human basal cell, a human basal cell from the respiratory epithelium, a club cell, a human club cell, an ionocyte, a human ionocyte, a bronchial epithelial cell, an airway epithelial cell, a human bronchial epithelial cell, a human airway epithelial cell, a fibroblast, a lymphoblast, a human fibroblast, a human lymphoblast, a lymphocyte, a human lymphocyte, a tuft cell, a neuroendocrine cell, a goblet cell, a reproductive tissue epithelial cell, a sperm canal epithelial cell, a human tuft cell, a human neuroendocrine cell, a human goblet cell, a human reproductive tissue epithelial cell, a human sperm canal epithelial cell, a intestinal organoid cell, or a human intestinal organoid cell. In some embodiments, the prime editing methods disclosed herein have an editing efficiency of at least about 15% and an indel frequency of less than 10% in a target cell, e.g., an iPSC, a human iPSC, a lung progenitor cell, a human lung progenitor cell, a basal cell, a human basal cell, a human basal cell from the respiratory epithelium, a club cell, a human club cell, an ionocyte, a human ionocyte, a bronchial epithelial cell, an airway epithelial cell, a human bronchial epithelial cell, a human airway epithelial cell, a fibroblast, a lymphoblast, a human fibroblast, a human lymphoblast, a lymphocyte, a human lymphocyte, a tuft cell, a neuroendocrine cell, a goblet cell, a reproductive tissue epithelial cell, a sperm canal epithelial cell, a human tuft cell, a human neuroendocrine cell, a human goblet cell, a human reproductive tissue epithelial cell, a human sperm canal epithelial cell, an intestinal organoid cell, or a human intestinal organoid cell. In some embodiments, the prime editing methods disclosed herein have an editing efficiency of at least about 15% and an indel frequency of less than 7.5% in a target cell, e.g., an iPSC, a human iPSC, a lung progenitor cell, a human lung progenitor cell, a basal cell, a human basal cell, a human basal cell from the respiratory epithelium, a club cell, a human club cell, an ionocyte, a human ionocyte, a bronchial epithelial cell, an airway epithelial cell, a human bronchial epithelial cell, a human airway epithelial cell, a fibroblast, a lymphoblast, a human fibroblast, a human lymphoblast, a lymphocyte, a human lymphocyte, a tuft cell, a neuroendocrine cell, a goblet cell, a reproductive tissue epithelial cell, a sperm canal epithelial cell, a human tuft cell, a human neuroendocrine cell, a human goblet cell, a human reproductive tissue epithelial cell, a human sperm canal epithelial cell, an intestinal organoid cell, or a human intestinal organoid cell. In some embodiments, the prime editing methods disclosed herein have an editing efficiency of at least about 15% and an indel frequency of less than 5% in a target cell, e.g., an iPSC, a human iPSC, a lung progenitor cell, a human lung progenitor cell, a basal cell, a human basal cell, a human basal cell from the respiratory epithelium, a club cell, a human club cell, an ionocyte, a human ionocyte, a bronchial epithelial cell, an airway epithelial cell, a human bronchial epithelial cell, a human airway epithelial cell, a fibroblast, a lymphoblast, a human fibroblast, a human lymphoblast, a lymphocyte, a human lymphocyte, a tuft cell, a neuroendocrine cell, a goblet cell, a reproductive tissue epithelial cell, a sperm canal epithelial cell, a human tuft cell, a human neuroendocrine cell, a human goblet cell, a human reproductive tissue epithelial cell, a human sperm canal epithelial cell, an intestinal organoid cell, or a human intestinal organoid cell. In some embodiments, the prime editing methods disclosed herein have an editing efficiency of at least about 15% and an indel frequency of less than 15% in a target cell, e.g., an iPSC, a human iPSC, a lung progenitor cell, a human lung progenitor cell, a basal cell, a human basal cell, a human basal cell from the respiratory epithelium, a club cell, a human club cell, an ionocyte, a human ionocyte, a bronchial epithelial cell, an airway epithelial cell, a human bronchial epithelial cell, a human airway epithelial cell, a fibroblast, a lymphoblast, a human fibroblast, a human lymphoblast, a lymphocyte, a human lymphocyte, a tuft cell, a neuroendocrine cell, a goblet cell, a reproductive tissue epithelial cell, a sperm canal epithelial cell, a human tuft cell, a human neuroendocrine cell, a human goblet cell, a human reproductive tissue epithelial cell, a human sperm canal epithelial cell, a intestinal organoid cell, or a human intestinal organoid cell. In some embodiments, the prime editing methods disclosed herein have an editing efficiency of at least about 15% and an indel frequency of less than 1% in a target cell, e.g., an iPSC, a human iPSC, a lung progenitor cell, a human lung progenitor cell, a basal cell, a human basal cell, a human basal cell from the respiratory epithelium, a club cell, a human club cell, an ionocyte, a human ionocyte, a bronchial epithelial cell, an airway epithelial cell, a human bronchial epithelial cell, a human airway epithelial cell, a fibroblast, a lymphoblast, a human fibroblast, a human lymphoblast, a lymphocyte, a human lymphocyte, a tuft cell, a neuroendocrine cell, a goblet cell, a reproductive tissue epithelial cell, a sperm canal epithelial cell, a human tuft cell, a human neuroendocrine cell, a human goblet cell, a human reproductive tissue epithelial cell, a human sperm canal epithelial cell, an intestinal organoid cell, or a human intestinal organoid cell. In some embodiments, the prime editing methods disclosed herein have an editing efficiency of at least about 15% and an indel frequency of less than 0.5% in a target cell, e.g., an iPSC, a human iPSC, a lung progenitor cell, a human lung progenitor cell, a basal cell, a human basal cell, a human basal cell from the respiratory epithelium, a club cell, a human club cell, an ionocyte, a human ionocyte, a bronchial epithelial cell, an airway epithelial cell, a human bronchial epithelial cell, a human airway epithelial cell, a fibroblast, a lymphoblast, a human fibroblast, a human lymphoblast, a lymphocyte, a human lymphocyte, a tuft cell, a neuroendocrine cell, a goblet cell, a reproductive tissue epithelial cell, a sperm canal epithelial cell, a human tuft cell, a human neuroendocrine cell, a human goblet cell, a human reproductive tissue epithelial cell, a human sperm canal epithelial cell, an intestinal organoid cell, or a human intestinal organoid cell. In some embodiments, the prime editing methods disclosed herein have an editing efficiency of at least about 15% and an indel frequency of less than 0.1% in a target cell, e.g., an iPSC, a human iPSC, a lung progenitor cell, a human lung progenitor cell, a basal cell, a human basal cell, a human basal cell from the respiratory epithelium, a club cell, a human club cell, an ionocyte, a human ionocyte, a bronchial epithelial cell, an airway epithelial cell, a human bronchial epithelial cell, a human airway epithelial cell, a fibroblast, a lymphoblast, a human fibroblast, a human lymphoblast, a lymphocyte, a human lymphocyte, a tuft cell, a neuroendocrine cell, a goblet cell, a reproductive tissue epithelial cell, a sperm canal epithelial cell, a human tuft cell, a human neuroendocrine cell, a human goblet cell, a human reproductive tissue epithelial cell, a human sperm canal epithelial cell, an intestinal organoid cell, or a human intestinal organoid cell.

[0895] In some embodiments, the prime editing methods disclosed herein have an editing efficiency of at least about 20% and an indel frequency of less than 10% in a target cell, e.g., an iPSC, a human iPSC, a lung progenitor cell, a human lung progenitor cell, a basal cell, a human basal cell, a human basal cell from the respiratory epithelium, a club cell, a human club cell, an ionocyte, a human ionocyte, a bronchial epithelial cell, an airway epithelial cell, a human bronchial epithelial cell, a human airway epithelial cell, a fibroblast, a lymphoblast, a human fibroblast, a human lymphoblast, a lymphocyte, a human lymphocyte, a tuft cell, a neuroendocrine cell, a goblet cell, a reproductive tissue epithelial cell, a sperm canal epithelial cell, a human tuft cell, a human neuroendocrine cell, a human goblet cell, a human reproductive tissue epithelial cell, a human sperm canal epithelial cell, a intestinal organoid cell, or a human intestinal organoid cell. In some embodiments, the prime editing methods disclosed herein have an editing efficiency of at least about 20% and an indel frequency of less than 7.5% in a target cell, e.g., an iPSC, a human iPSC, a lung progenitor cell, a human lung progenitor cell, a basal cell, a human basal cell, a human basal cell from the respiratory epithelium, a club cell, a human club cell, an ionocyte, a human ionocyte, a bronchial epithelial cell, an airway epithelial cell, a human bronchial epithelial cell, a human airway epithelial cell, a fibroblast, a lymphoblast, a human fibroblast, a human lymphoblast, a lymphocyte, a human lymphocyte, a tuft cell, a neuroendocrine cell, a goblet cell, a reproductive tissue epithelial cell, a sperm canal epithelial cell, a human tuft cell, a human neuroendocrine cell, a human goblet cell, a human reproductive tissue epithelial cell, a human sperm canal epithelial cell, an intestinal organoid cell, or a human intestinal organoid cell. In some embodiments, the prime editing methods disclosed herein have an editing efficiency of at least about 20% and an indel frequency of less than 5% in a target cell, e.g., an iPSC, a human iPSC, a lung progenitor cell, a human lung progenitor cell, a basal cell, a human basal cell, a human basal cell from the respiratory epithelium, a club cell, a human club cell, an ionocyte, a human ionocyte, a bronchial epithelial cell, an airway epithelial cell, a human bronchial epithelial cell, a human airway epithelial cell, a fibroblast, a lymphoblast, a human fibroblast, a human lymphoblast, a lymphocyte, a human lymphocyte, a tuft cell, a neuroendocrine cell, a goblet cell, a reproductive tissue epithelial cell, a sperm canal epithelial cell, a human tuft cell, a human neuroendocrine cell, a human goblet cell, a human reproductive tissue epithelial cell, a human sperm canal epithelial cell, an intestinal organoid cell, or a human intestinal organoid cell. In some embodiments, the prime editing methods disclosed herein have an editing efficiency of at least about 20% and an indel frequency of less than 20% in a target cell, e.g., an iPSC, a human iPSC, a lung progenitor cell, a human lung progenitor cell, a basal cell, a human basal cell, a human basal cell from the respiratory epithelium, a club cell, a human club cell, an ionocyte, a human ionocyte, a bronchial epithelial cell, an airway epithelial cell, a human bronchial epithelial cell, a human airway epithelial cell, a fibroblast, a lymphoblast, a human fibroblast, a human lymphoblast, a lymphocyte, a human lymphocyte, a tuft cell, a neuroendocrine cell, a goblet cell, a reproductive tissue epithelial cell, a sperm canal epithelial cell, a human tuft cell, a human neuroendocrine cell, a human goblet cell, a human reproductive tissue epithelial cell, a human sperm canal epithelial cell, an intestinal organoid cell, or a human intestinal organoid cell. In some embodiments, the prime editing methods disclosed herein have an editing efficiency of at least about 20% and an indel frequency of less than 1% in a target cell, e.g., an iPSC, a human iPSC, a lung progenitor cell, a human lung progenitor cell, a basal cell, a human basal cell, a human basal cell from the respiratory epithelium, a club cell, a human club cell, an ionocyte, a human ionocyte, a bronchial epithelial cell, an airway epithelial cell, a human bronchial epithelial cell, a human airway epithelial cell, a fibroblast, a lymphoblast, a human fibroblast, a human lymphoblast, a lymphocyte, a human lymphocyte, a tuft cell, a neuroendocrine cell, a goblet cell, a reproductive tissue epithelial cell, a sperm canal epithelial cell, a human tuft cell, a human neuroendocrine cell, a human goblet cell, a human reproductive tissue epithelial cell, a human sperm canal epithelial cell, an intestinal organoid cell, or a human intestinal organoid cell. In some embodiments, the prime editing methods disclosed herein have an editing efficiency of at least about 20% and an indel frequency of less than 0.5% in a target cell, e.g., human iPSC, lung progenitor cell, bronchial epithelial cell, airway epithelial cell, a fibroblast, a lymphoblast. In some embodiments, the prime editing methods disclosed herein have an editing efficiency of at least about 20% and an indel frequency of less than 0.1% in a target cell, e.g., an iPSC, a human iPSC, a lung progenitor cell, a human lung progenitor cell, a basal cell, a human basal cell, a human basal cell from the respiratory epithelium, a club cell, a human club cell, an ionocyte, a human ionocyte, a bronchial epithelial cell, an airway epithelial cell, a human bronchial epithelial cell, a human airway epithelial cell, a fibroblast, a lymphoblast, a human fibroblast, a human lymphoblast, a lymphocyte, a human lymphocyte, a tuft cell, a neuroendocrine cell, a goblet cell, a reproductive tissue epithelial cell, a sperm canal epithelial cell, a human tuft cell, a human neuroendocrine cell, a human goblet cell, a human reproductive tissue epithelial cell, a human sperm canal epithelial cell, a intestinal organoid cell, or a human intestinal organoid cell.

[0896] In some embodiments, the prime editing methods disclosed herein have an editing efficiency of at least about 30% and an indel frequency of less than 10% in a target cell, e.g., an iPSC, a human iPSC, a lung progenitor cell, a human lung progenitor cell, a basal cell, a human basal cell, a human basal cell from the respiratory epithelium, a club cell, a human club cell, an ionocyte, a human ionocyte, a bronchial epithelial cell, an airway epithelial cell, a human bronchial epithelial cell, a human airway epithelial cell, a fibroblast, a lymphoblast, a human fibroblast, a human lymphoblast, a lymphocyte, a human lymphocyte, a tuft cell, a neuroendocrine cell, a goblet cell, a reproductive tissue epithelial cell, a sperm canal epithelial cell, a human tuft cell, a human neuroendocrine cell, a human goblet cell, a human reproductive tissue epithelial cell, a human sperm canal epithelial cell, an intestinal organoid cell, or a human intestinal organoid cell. In some embodiments, the prime editing methods disclosed herein have an editing efficiency of at least about 30% and an indel frequency of less than 7.5% in a target cell, e.g., an iPSC, a human iPSC, a lung progenitor cell, a human lung progenitor cell, a basal cell, a human basal cell, a human basal cell from the respiratory epithelium, a club cell, a human club cell, an ionocyte, a human ionocyte, a bronchial epithelial cell, an airway epithelial cell, a human bronchial epithelial cell, a human airway epithelial cell, a fibroblast, a lymphoblast, a human fibroblast, a human lymphoblast, a lymphocyte, a human lymphocyte, a tuft cell, a neuroendocrine cell, a goblet cell, a reproductive tissue epithelial cell, a sperm canal epithelial cell, a human tuft cell, a human neuroendocrine cell, a human goblet cell, a human reproductive tissue epithelial cell, a human sperm canal epithelial cell, an intestinal organoid cell, or a human intestinal organoid cell. In some embodiments, the prime editing methods disclosed herein have an editing efficiency of at least about 30% and an indel frequency of less than 5% in a target cell, e.g., an iPSC, a human iPSC, a lung progenitor cell, a human lung progenitor cell, a basal cell, a human basal cell, a human basal cell from the respiratory epithelium, a club cell, a human club cell, an ionocyte, a human ionocyte, a bronchial epithelial cell, an airway epithelial cell, a human bronchial epithelial cell, a human airway epithelial cell, a fibroblast, a lymphoblast, a human fibroblast, a human lymphoblast, a lymphocyte, a human lymphocyte, a tuft cell, a neuroendocrine cell, a goblet cell, a reproductive tissue epithelial cell, a sperm canal epithelial cell, a human tuft cell, a human neuroendocrine cell, a human goblet cell, a human reproductive tissue epithelial cell, a human sperm canal epithelial cell, a intestinal organoid cell, or a human intestinal organoid cell. In some embodiments, the prime editing methods disclosed herein have an editing efficiency of at least about 30% and an indel frequency of less than 30% in a target cell, e.g., an iPSC, a human iPSC, a lung progenitor cell, a human lung progenitor cell, a basal cell, a human basal cell, a human basal cell from the respiratory epithelium, a club cell, a human club cell, an ionocyte, a human ionocyte, a bronchial epithelial cell, an airway epithelial cell, a human bronchial epithelial cell, a human airway epithelial cell, a fibroblast, a lymphoblast, a human fibroblast, a human lymphoblast, a lymphocyte, a human lymphocyte, a tuft cell, a neuroendocrine cell, a goblet cell, a reproductive tissue epithelial cell, a sperm canal epithelial cell, a human tuft cell, a human neuroendocrine cell, a human goblet cell, a human reproductive tissue epithelial cell, a human sperm canal epithelial cell, an intestinal organoid cell, or a human intestinal organoid cell. In some embodiments, the prime editing methods disclosed herein have an editing efficiency of at least about 30% and an indel frequency of less than 1% in a target cell, e.g., an iPSC, a human iPSC, a lung progenitor cell, a human lung progenitor cell, a basal cell, a human basal cell, a human basal cell from the respiratory epithelium, a club cell, a human club cell, an ionocyte, a human ionocyte, a bronchial epithelial cell, an airway epithelial cell, a human bronchial epithelial cell, a human airway epithelial cell, a fibroblast, a lymphoblast, a human fibroblast, a human lymphoblast, a lymphocyte, a human lymphocyte, a tuft cell, a neuroendocrine cell, a goblet cell, a reproductive tissue epithelial cell, a sperm canal epithelial cell, a human tuft cell, a human neuroendocrine cell, a human goblet cell, a human reproductive tissue epithelial cell, a human sperm canal epithelial cell, an intestinal organoid cell, or a human intestinal organoid cell. In some embodiments, the prime editing methods disclosed herein have an editing efficiency of at least about 30% and an indel frequency of less than 0.5% in a target cell, e.g., an iPSC, a human iPSC, a lung progenitor cell, a human lung progenitor cell, a basal cell, a human basal cell, a human basal cell from the respiratory epithelium, a club cell, a human club cell, an ionocyte, a human ionocyte, a bronchial epithelial cell, an airway epithelial cell, a human bronchial epithelial cell, a human airway epithelial cell, a fibroblast, a lymphoblast, a human fibroblast, a human lymphoblast, a lymphocyte, a human lymphocyte, a tuft cell, a neuroendocrine cell, a goblet cell, a reproductive tissue epithelial cell, a sperm canal epithelial cell, a human tuft cell, a human neuroendocrine cell, a human goblet cell, a human reproductive tissue epithelial cell, a human sperm canal epithelial cell, an intestinal organoid cell, or a human intestinal organoid cell. In some embodiments, the prime editing methods disclosed herein have an editing efficiency of at least about 30% and an indel frequency of less than 0.1% in a target cell, e.g., an iPSC, a human iPSC, a lung progenitor cell, a human lung progenitor cell, a basal cell, a human basal cell, a human basal cell from the respiratory epithelium, a club cell, a human club cell, an ionocyte, a human ionocyte, a bronchial epithelial cell, an airway epithelial cell, a human bronchial epithelial cell, a human airway epithelial cell, a fibroblast, a lymphoblast, a human fibroblast, a human lymphoblast, a lymphocyte, a human lymphocyte, a tuft cell, a neuroendocrine cell, a goblet cell, a reproductive tissue epithelial cell, a sperm canal epithelial cell, a human tuft cell, a human neuroendocrine cell, a human goblet cell, a human reproductive tissue epithelial cell, a human sperm canal epithelial cell, a intestinal organoid cell, or a human intestinal organoid cell.

[0897] In some embodiments, the prime editing methods disclosed herein have an editing efficiency of at least about 40% and an indel frequency of less than 10% in a target cell, e.g., an iPSC, a human iPSC, a lung progenitor cell, a human lung progenitor cell, a basal cell, a human basal cell, a human basal cell from the respiratory epithelium, a club cell, a human club cell, an ionocyte, a human ionocyte, a bronchial epithelial cell, an airway epithelial cell, a human bronchial epithelial cell, a human airway epithelial cell, a fibroblast, a lymphoblast, a human fibroblast, a human lymphoblast, a lymphocyte, a human lymphocyte, a tuft cell, a neuroendocrine cell, a goblet cell, a reproductive tissue epithelial cell, a sperm canal epithelial cell, a human tuft cell, a human neuroendocrine cell, a human goblet cell, a human reproductive tissue epithelial cell, a human sperm canal epithelial cell, an intestinal organoid cell, or a human intestinal organoid cell. In some embodiments, the prime editing methods disclosed herein have an editing efficiency of at least about 40% and an indel frequency of less than 7.5% in a target cell, e.g., an iPSC, a human iPSC, a lung progenitor cell, a human lung progenitor cell, a basal cell, a human basal cell, a human basal cell from the respiratory epithelium, a club cell, a human club cell, an ionocyte, a human ionocyte, a bronchial epithelial cell, an airway epithelial cell, a human bronchial epithelial cell, a human airway epithelial cell, a fibroblast, a lymphoblast, a human fibroblast, a human lymphoblast, a lymphocyte, a human lymphocyte, a tuft cell, a neuroendocrine cell, a goblet cell, a reproductive tissue epithelial cell, a sperm canal epithelial cell, a human tuft cell, a human neuroendocrine cell, a human goblet cell, a human reproductive tissue epithelial cell, a human sperm canal epithelial cell, an intestinal organoid cell, or a human intestinal organoid cell. In some embodiments, the prime editing methods disclosed herein have an editing efficiency of at least about 40% and an indel frequency of less than 5% in a target cell, e.g., an iPSC, a human iPSC, a lung progenitor cell, a human lung progenitor cell, a basal cell, a human basal cell, a human basal cell from the respiratory epithelium, a club cell, a human club cell, an ionocyte, a human ionocyte, a bronchial epithelial cell, an airway epithelial cell, a human bronchial epithelial cell, a human airway epithelial cell, a fibroblast, a lymphoblast, a human fibroblast, a human lymphoblast, a lymphocyte, a human lymphocyte, a tuft cell, a neuroendocrine cell, a goblet cell, a reproductive tissue epithelial cell, a sperm canal epithelial cell, a human tuft cell, a human neuroendocrine cell, a human goblet cell, a human reproductive tissue epithelial cell, a human sperm canal epithelial cell, an intestinal organoid cell, or a human intestinal organoid cell. In some embodiments, the prime editing methods disclosed herein have an editing efficiency of at least about 40% and an indel frequency of less than 40% in a target cell, e.g., an iPSC, a human iPSC, a lung progenitor cell, a human lung progenitor cell, a basal cell, a human basal cell, a human basal cell from the respiratory epithelium, a club cell, a human club cell, an ionocyte, a human ionocyte, a bronchial epithelial cell, an airway epithelial cell, a human bronchial epithelial cell, a human airway epithelial cell, a fibroblast, a lymphoblast, a human fibroblast, a human lymphoblast, a lymphocyte, a human lymphocyte, a tuft cell, a neuroendocrine cell, a goblet cell, a reproductive tissue epithelial cell, a sperm canal epithelial cell, a human tuft cell, a human neuroendocrine cell, a human goblet cell, a human reproductive tissue epithelial cell, a human sperm canal epithelial cell, an intestinal organoid cell, or a human intestinal organoid cell. In some embodiments, the prime editing methods disclosed herein have an editing efficiency of at least about 40% and an indel frequency of less than 1% in a target cell, e.g., an iPSC, a human iPSC, a lung progenitor cell, a human lung progenitor cell, a basal cell, a human basal cell, a human basal cell from the respiratory epithelium, a club cell, a human club cell, an ionocyte, a human ionocyte, a bronchial epithelial cell, an airway epithelial cell, a human bronchial epithelial cell, a human airway epithelial cell, a fibroblast, a lymphoblast, a human fibroblast, a human lymphoblast, a lymphocyte, a human lymphocyte, a tuft cell, a neuroendocrine cell, a goblet cell, a reproductive tissue epithelial cell, a sperm canal epithelial cell, a human tuft cell, a human neuroendocrine cell, a human goblet cell, a human reproductive tissue epithelial cell, a human sperm canal epithelial cell, an intestinal organoid cell, or a human intestinal organoid cell. In some embodiments, the prime editing methods disclosed herein have an editing efficiency of at least about 40% and an indel frequency of less than 0.5% in a target cell, e.g., an iPSC, a human iPSC, a lung progenitor cell, a human lung progenitor cell, a basal cell, a human basal cell, a human basal cell from the respiratory epithelium, a club cell, a human club cell, an ionocyte, a human ionocyte, a bronchial epithelial cell, an airway epithelial cell, a human bronchial epithelial cell, a human airway epithelial cell, a fibroblast, a lymphoblast, a human fibroblast, a human lymphoblast, a lymphocyte, a human lymphocyte, a tuft cell, a neuroendocrine cell, a goblet cell, a reproductive tissue epithelial cell, a sperm canal epithelial cell, a human tuft cell, a human neuroendocrine cell, a human goblet cell, a human reproductive tissue epithelial cell, a human sperm canal epithelial cell, a intestinal organoid cell, or a human intestinal organoid cell. In some embodiments, the prime editing methods disclosed herein have an editing efficiency of at least about 40% and an indel frequency of less than 0.1% in a target cell, e.g., an iPSC, a human iPSC, a lung progenitor cell, a human lung progenitor cell, a basal cell, a human basal cell, a human basal cell from the respiratory epithelium, a club cell, a human club cell, an ionocyte, a human ionocyte, a bronchial epithelial cell, an airway epithelial cell, a human bronchial epithelial cell, a human airway epithelial cell, a fibroblast, a lymphoblast, a human fibroblast, a human lymphoblast, a lymphocyte, a human lymphocyte, a tuft cell, a neuroendocrine cell, a goblet cell, a reproductive tissue epithelial cell, a sperm canal epithelial cell, a human tuft cell, a human neuroendocrine cell, a human goblet cell, a human reproductive tissue epithelial cell, a human sperm canal epithelial cell, a intestinal organoid cell, or a human intestinal organoid cell.

[0898] In some embodiments, the prime editing methods disclosed herein have an editing efficiency of at least about 50% and an indel frequency of less than 10% in a target cell, e.g., an iPSC, a human iPSC, a lung progenitor cell, a human lung progenitor cell, a basal cell, a human basal cell, a human basal cell from the respiratory epithelium, a club cell, a human club cell, an ionocyte, a human ionocyte, a bronchial epithelial cell, an airway epithelial cell, a human bronchial epithelial cell, a human airway epithelial cell, a fibroblast, a lymphoblast, a human fibroblast, a human lymphoblast, a lymphocyte, a human lymphocyte, a tuft cell, a neuroendocrine cell, a goblet cell, a reproductive tissue epithelial cell, a sperm canal epithelial cell, a human tuft cell, a human neuroendocrine cell, a human goblet cell, a human reproductive tissue epithelial cell, a human sperm canal epithelial cell, an intestinal organoid cell, or a human intestinal organoid cell. In some embodiments, the prime editing methods disclosed herein have an editing efficiency of at least about 50% and an indel frequency of less than 7.5% in a target cell, e.g., an iPSC, a human iPSC, a lung progenitor cell, a human lung progenitor cell, a basal cell, a human basal cell, a human basal cell from the respiratory epithelium, a club cell, a human club cell, an ionocyte, a human ionocyte, a bronchial epithelial cell, an airway epithelial cell, a human bronchial epithelial cell, a human airway epithelial cell, a fibroblast, a lymphoblast, a human fibroblast, a human lymphoblast, a lymphocyte, a human lymphocyte, a tuft cell, a neuroendocrine cell, a goblet cell, a reproductive tissue epithelial cell, a sperm canal epithelial cell, a human tuft cell, a human neuroendocrine cell, a human goblet cell, a human reproductive tissue epithelial cell, a human sperm canal epithelial cell, an intestinal organoid cell, or a human intestinal organoid cell. In some embodiments, the prime editing methods disclosed herein have an editing efficiency of at least about 50% and an indel frequency of less than 5% in a target cell, e.g., an iPSC, a human iPSC, a lung progenitor cell, a human lung progenitor cell, a basal cell, a human basal cell, a human basal cell from the respiratory epithelium, a club cell, a human club cell, an ionocyte, a human ionocyte, a bronchial epithelial cell, an airway epithelial cell, a human bronchial epithelial cell, a human airway epithelial cell, a fibroblast, a lymphoblast, a human fibroblast, a human lymphoblast, a lymphocyte, a human lymphocyte, a tuft cell, a neuroendocrine cell, a goblet cell, a reproductive tissue epithelial cell, a sperm canal epithelial cell, a human tuft cell, a human neuroendocrine cell, a human goblet cell, a human reproductive tissue epithelial cell, a human sperm canal epithelial cell, a intestinal organoid cell, or a human intestinal organoid cell. In some embodiments, the prime editing methods disclosed herein have an editing efficiency of at least about 50% and an indel frequency of less than 50% in a target cell, e.g., an iPSC, a human iPSC, a lung progenitor cell, a human lung progenitor cell, a basal cell, a human basal cell, a human basal cell from the respiratory epithelium, a club cell, a human club cell, an ionocyte, a human ionocyte, a bronchial epithelial cell, an airway epithelial cell, a human bronchial epithelial cell, a human airway epithelial cell, a fibroblast, a lymphoblast, a human fibroblast, a human lymphoblast, a lymphocyte, a human lymphocyte, a tuft cell, a neuroendocrine cell, a goblet cell, a reproductive tissue epithelial cell, a sperm canal epithelial cell, a human tuft cell, a human neuroendocrine cell, a human goblet cell, a human reproductive tissue epithelial cell, a human sperm canal epithelial cell, an intestinal organoid cell, or a human intestinal organoid cell. In some embodiments, the prime editing methods disclosed herein have an editing efficiency of at least about 50% and an indel frequency of less than 1% in a target cell, e.g., an iPSC, a human iPSC, a lung progenitor cell, a human lung progenitor cell, a basal cell, a human basal cell, a human basal cell from the respiratory epithelium, a club cell, a human club cell, an ionocyte, a human ionocyte, a bronchial epithelial cell, an airway epithelial cell, a human bronchial epithelial cell, a human airway epithelial cell, a fibroblast, a lymphoblast, a human fibroblast, a human lymphoblast, a lymphocyte, a human lymphocyte, a tuft cell, a neuroendocrine cell, a goblet cell, a reproductive tissue epithelial cell, a sperm canal epithelial cell, a human tuft cell, a human neuroendocrine cell, a human goblet cell, a human reproductive tissue epithelial cell, a human sperm canal epithelial cell, a intestinal organoid cell, or a human intestinal organoid cell. In some embodiments, the prime editing methods disclosed herein have an editing efficiency of at least about 50% and an indel frequency of less than 0.5% in a target cell, e.g., an iPSC, a human iPSC, a lung progenitor cell, a human lung progenitor cell, a basal cell, a human basal cell, a human basal cell from the respiratory epithelium, a club cell, a human club cell, an ionocyte, a human ionocyte, a bronchial epithelial cell, an airway epithelial cell, a human bronchial epithelial cell, a human airway epithelial cell, a fibroblast, a lymphoblast, a human fibroblast, a human lymphoblast, a lymphocyte, a human lymphocyte, a tuft cell, a neuroendocrine cell, a goblet cell, a reproductive tissue epithelial cell, a sperm canal epithelial cell, a human tuft cell, a human neuroendocrine cell, a human goblet cell, a human reproductive tissue epithelial cell, a human sperm canal epithelial cell, an intestinal organoid cell, or a human intestinal organoid cell. In some embodiments, the prime editing methods disclosed herein have an editing efficiency of at least about 50% and an indel frequency of less than 0.1% in a target cell, e.g., an iPSC, a human iPSC, a lung progenitor cell, a human lung progenitor cell, a basal cell, a human basal cell, a human basal cell from the respiratory epithelium, a club cell, a human club cell, an ionocyte, a human ionocyte, a bronchial epithelial cell, an airway epithelial cell, a human bronchial epithelial cell, a human airway epithelial cell, a fibroblast, a lymphoblast, a human fibroblast, a human lymphoblast, a lymphocyte, a human lymphocyte, a tuft cell, a neuroendocrine cell, a goblet cell, a reproductive tissue epithelial cell, a sperm canal epithelial cell, a human tuft cell, a human neuroendocrine cell, a human goblet cell, a human reproductive tissue epithelial cell, a human sperm canal epithelial cell, an intestinal organoid cell, or a human intestinal organoid cell.

[0899] In some embodiments, the prime editing methods disclosed herein have an editing efficiency of at least about 60% and an indel frequency of less than 10% in a target cell, e.g., an iPSC, a human iPSC, a lung progenitor cell, a human lung progenitor cell, a basal cell, a human basal cell, a human basal cell from the respiratory epithelium, a club cell, a human club cell, an ionocyte, a human ionocyte, a bronchial epithelial cell, an airway epithelial cell, a human bronchial epithelial cell, a human airway epithelial cell, a fibroblast, a lymphoblast, a human fibroblast, a human lymphoblast, a lymphocyte, a human lymphocyte, a tuft cell, a neuroendocrine cell, a goblet cell, a reproductive tissue epithelial cell, a sperm canal epithelial cell, a human tuft cell, a human neuroendocrine cell, a human goblet cell, a human reproductive tissue epithelial cell, a human sperm canal epithelial cell, an intestinal organoid cell, or a human intestinal organoid cell. In some embodiments, the prime editing methods disclosed herein have an editing efficiency of at least about 60% and an indel frequency of less than 7.5% in a target cell, e.g., an iPSC, a human iPSC, a lung progenitor cell, a human lung progenitor cell, a basal cell, a human basal cell, a human basal cell from the respiratory epithelium, a club cell, a human club cell, an ionocyte, a human ionocyte, a bronchial epithelial cell, an airway epithelial cell, a human bronchial epithelial cell, a human airway epithelial cell, a fibroblast, a lymphoblast, a human fibroblast, a human lymphoblast, a lymphocyte, a human lymphocyte, a tuft cell, a neuroendocrine cell, a goblet cell, a reproductive tissue epithelial cell, a sperm canal epithelial cell, a human tuft cell, a human neuroendocrine cell, a human goblet cell, a human reproductive tissue epithelial cell, a human sperm canal epithelial cell, an intestinal organoid cell, or a human intestinal organoid cell. In some embodiments, the prime editing methods disclosed herein have an editing efficiency of at least about 60% and an indel frequency of less than 5% in a target cell, e.g., an iPSC, a human iPSC, a lung progenitor cell, a human lung progenitor cell, a basal cell, a human basal cell, a human basal cell from the respiratory epithelium, a club cell, a human club cell, an ionocyte, a human ionocyte, a bronchial epithelial cell, an airway epithelial cell, a human bronchial epithelial cell, a human airway epithelial cell, a fibroblast, a lymphoblast, a human fibroblast, a human lymphoblast, a lymphocyte, a human lymphocyte, a tuft cell, a neuroendocrine cell, a goblet cell, a reproductive tissue epithelial cell, a sperm canal epithelial cell, a human tuft cell, a human neuroendocrine cell, a human goblet cell, a human reproductive tissue epithelial cell, a human sperm canal epithelial cell, an intestinal organoid cell, or a human intestinal organoid cell. In some embodiments, the prime editing methods disclosed herein have an editing efficiency of at least about 60% and an indel frequency of less than 60% in a target cell, e.g., an iPSC, a human iPSC, a lung progenitor cell, a human lung progenitor cell, a basal cell, a human basal cell, a human basal cell from the respiratory epithelium, a club cell, a human club cell, an ionocyte, a human ionocyte, a bronchial epithelial cell, an airway epithelial cell, a human bronchial epithelial cell, a human airway epithelial cell, a fibroblast, a lymphoblast, a human fibroblast, a human lymphoblast, a lymphocyte, a human lymphocyte, a tuft cell, a neuroendocrine cell, a goblet cell, a reproductive tissue epithelial cell, a sperm canal epithelial cell, a human tuft cell, a human neuroendocrine cell, a human goblet cell, a human reproductive tissue epithelial cell, a human sperm canal epithelial cell, a intestinal organoid cell, or a human intestinal organoid cell. In some embodiments, the prime editing methods disclosed herein have an editing efficiency of at least about 60% and an indel frequency of less than 1% in a target cell, e.g., an iPSC, a human iPSC, a lung progenitor cell, a human lung progenitor cell, a basal cell, a human basal cell, a human basal cell from the respiratory epithelium, a club cell, a human club cell, an ionocyte, a human ionocyte, a bronchial epithelial cell, an airway epithelial cell, a human bronchial epithelial cell, a human airway epithelial cell, a fibroblast, a lymphoblast, a human fibroblast, a human lymphoblast, a lymphocyte, a human lymphocyte, a tuft cell, a neuroendocrine cell, a goblet cell, a reproductive tissue epithelial cell, a sperm canal epithelial cell, a human tuft cell, a human neuroendocrine cell, a human goblet cell, a human reproductive tissue epithelial cell, a human sperm canal epithelial cell, a intestinal organoid cell, or a human intestinal organoid cell. In some embodiments, the prime editing methods disclosed herein have an editing efficiency of at least about 60% and an indel frequency of less than 0.5% in a target cell, e.g., an iPSC, a human iPSC, a lung progenitor cell, a human lung progenitor cell, a basal cell, a human basal cell, a human basal cell from the respiratory epithelium, a club cell, a human club cell, an ionocyte, a human ionocyte, a bronchial epithelial cell, an airway epithelial cell, a human bronchial epithelial cell, a human airway epithelial cell, a fibroblast, a lymphoblast, a human fibroblast, a human lymphoblast, a lymphocyte, a human lymphocyte, a tuft cell, a neuroendocrine cell, a goblet cell, a reproductive tissue epithelial cell, a sperm canal epithelial cell, a human tuft cell, a human neuroendocrine cell, a human goblet cell, a human reproductive tissue epithelial cell, a human sperm canal epithelial cell, an intestinal organoid cell, or a human intestinal organoid cell. In some embodiments, the prime editing methods disclosed herein have an editing efficiency of at least about 60% and an indel frequency of less than 0.1% in a target cell, e.g., an iPSC, a human iPSC, a lung progenitor cell, a human lung progenitor cell, a basal cell, a human basal cell, a human basal cell from the respiratory epithelium, a club cell, a human club cell, an ionocyte, a human ionocyte, a bronchial epithelial cell, an airway epithelial cell, a human bronchial epithelial cell, a human airway epithelial cell, a fibroblast, a lymphoblast, a human fibroblast, a human lymphoblast, a lymphocyte, a human lymphocyte, a tuft cell, a neuroendocrine cell, a goblet cell, a reproductive tissue epithelial cell, a sperm canal epithelial cell, a human tuft cell, a human neuroendocrine cell, a human goblet cell, a human reproductive tissue epithelial cell, a human sperm canal epithelial cell, a intestinal organoid cell, or a human intestinal organoid cell.

[0900] In some embodiments, the prime editing methods disclosed herein have an editing efficiency of at least about 70% and an indel frequency of less than 10% in a target cell, e.g., an iPSC, a human iPSC, a lung progenitor cell, a human lung progenitor cell, a basal cell, a human basal cell, a human basal cell from the respiratory epithelium, a club cell, a human club cell, an ionocyte, a human ionocyte, a bronchial epithelial cell, an airway epithelial cell, a human bronchial epithelial cell, a human airway epithelial cell, a fibroblast, a lymphoblast, a human fibroblast, a human lymphoblast, a lymphocyte, a human lymphocyte, a tuft cell, a neuroendocrine cell, a goblet cell, a reproductive tissue epithelial cell, a sperm canal epithelial cell, a human tuft cell, a human neuroendocrine cell, a human goblet cell, a human reproductive tissue epithelial cell, a human sperm canal epithelial cell, an intestinal organoid cell, or a human intestinal organoid cell. In some embodiments, the prime editing methods disclosed herein have an editing efficiency of at least about 70% and an indel frequency of less than 7.5% in a target cell, e.g., an iPSC, a human iPSC, a lung progenitor cell, a human lung progenitor cell, a basal cell, a human basal cell, a human basal cell from the respiratory epithelium, a club cell, a human club cell, an ionocyte, a human ionocyte, a bronchial epithelial cell, an airway epithelial cell, a human bronchial epithelial cell, a human airway epithelial cell, a fibroblast, a lymphoblast, a human fibroblast, a human lymphoblast, a lymphocyte, a human lymphocyte, a tuft cell, a neuroendocrine cell, a goblet cell, a reproductive tissue epithelial cell, a sperm canal epithelial cell, a human tuft cell, a human neuroendocrine cell, a human goblet cell, a human reproductive tissue epithelial cell, a human sperm canal epithelial cell, a intestinal organoid cell, or a human intestinal organoid cell. In some embodiments, the prime editing methods disclosed herein have an editing efficiency of at least about 70% and an indel frequency of less than 5% in a target cell, e.g., an iPSC, a human iPSC, a lung progenitor cell, a human lung progenitor cell, a basal cell, a human basal cell, a human basal cell from the respiratory epithelium, a club cell, a human club cell, an ionocyte, a human ionocyte, a bronchial epithelial cell, an airway epithelial cell, a human bronchial epithelial cell, a human airway epithelial cell, a fibroblast, a lymphoblast, a human fibroblast, a human lymphoblast, a lymphocyte, a human lymphocyte, a tuft cell, a neuroendocrine cell, a goblet cell, a reproductive tissue epithelial cell, a sperm canal epithelial cell, a human tuft cell, a human neuroendocrine cell, a human goblet cell, a human reproductive tissue epithelial cell, a human sperm canal epithelial cell, a intestinal organoid cell, or a human intestinal organoid cell. In some embodiments, the prime editing methods disclosed herein have an editing efficiency of at least about 70% and an indel frequency of less than 70% in a target cell, e.g., an iPSC, a human iPSC, a lung progenitor cell, a human lung progenitor cell, a basal cell, a human basal cell, a human basal cell from the respiratory epithelium, a club cell, a human club cell, an ionocyte, a human ionocyte, a bronchial epithelial cell, an airway epithelial cell, a human bronchial epithelial cell, a human airway epithelial cell, a fibroblast, a lymphoblast, a human fibroblast, a human lymphoblast, a lymphocyte, a human lymphocyte, a tuft cell, a neuroendocrine cell, a goblet cell, a reproductive tissue epithelial cell, a sperm canal epithelial cell, a human tuft cell, a human neuroendocrine cell, a human goblet cell, a human reproductive tissue epithelial cell, a human sperm canal epithelial cell, a intestinal organoid cell, or a human intestinal organoid cell. In some embodiments, the prime editing methods disclosed herein have an editing efficiency of at least about 70% and an indel frequency of less than 1% in a target cell, e.g., an iPSC, a human iPSC, a lung progenitor cell, a human lung progenitor cell, a basal cell, a human basal cell, a human basal cell from the respiratory epithelium, a club cell, a human club cell, an ionocyte, a human ionocyte, a bronchial epithelial cell, an airway epithelial cell, a human bronchial epithelial cell, a human airway epithelial cell, a fibroblast, a lymphoblast, a human fibroblast, a human lymphoblast, a lymphocyte, a human lymphocyte, a tuft cell, a neuroendocrine cell, a goblet cell, a reproductive tissue epithelial cell, a sperm canal epithelial cell, a human tuft cell, a human neuroendocrine cell, a human goblet cell, a human reproductive tissue epithelial cell, a human sperm canal epithelial cell, a intestinal organoid cell, or a human intestinal organoid cell. In some embodiments, the prime editing methods disclosed herein have an editing efficiency of at least about 70% and an indel frequency of less than 0.5% in a target cell, e.g., an iPSC, a human iPSC, a lung progenitor cell, a human lung progenitor cell, a basal cell, a human basal cell, a human basal cell from the respiratory epithelium, a club cell, a human club cell, an ionocyte, a human ionocyte, a bronchial epithelial cell, an airway epithelial cell, a human bronchial epithelial cell, a human airway epithelial cell, a fibroblast, a lymphoblast, a human fibroblast, a human lymphoblast, a lymphocyte, a human lymphocyte, a tuft cell, a neuroendocrine cell, a goblet cell, a reproductive tissue epithelial cell, a sperm canal epithelial cell, a human tuft cell, a human neuroendocrine cell, a human goblet cell, a human reproductive tissue epithelial cell, a human sperm canal epithelial cell, a intestinal organoid cell, or a human intestinal organoid cell. In some embodiments, the prime editing methods disclosed herein have an editing efficiency of at least about 70% and an indel frequency of less than 0.1% in a target cell, e.g., an iPSC, a human iPSC, a lung progenitor cell, a human lung progenitor cell, a basal cell, a human basal cell, a human basal cell from the respiratory epithelium, a club cell, a human club cell, an ionocyte, a human ionocyte, a bronchial epithelial cell, an airway epithelial cell, a human bronchial epithelial cell, a human airway epithelial cell, a fibroblast, a lymphoblast, a human fibroblast, a human lymphoblast, a lymphocyte, a human lymphocyte, a tuft cell, a neuroendocrine cell, a goblet cell, a reproductive tissue epithelial cell, a sperm canal epithelial cell, a human tuft cell, a human neuroendocrine cell, a human goblet cell, a human reproductive tissue epithelial cell, a human sperm canal epithelial cell, a intestinal organoid cell, or a human intestinal organoid cell.

[0901] In some embodiments, the prime editing methods disclosed herein have an editing efficiency of at least about 80% and an indel frequency of less than 10% in a target cell, e.g., an iPSC, a human iPSC, a lung progenitor cell, a human lung progenitor cell, a basal cell, a human basal cell, a human basal cell from the respiratory epithelium, a club cell, a human club cell, an ionocyte, a human ionocyte, a bronchial epithelial cell, an airway epithelial cell, a human bronchial epithelial cell, a human airway epithelial cell, a fibroblast, a lymphoblast, a human fibroblast, a human lymphoblast, a lymphocyte, a human lymphocyte, a tuft cell, a neuroendocrine cell, a goblet cell, a reproductive tissue epithelial cell, a sperm canal epithelial cell, a human tuft cell, a human neuroendocrine cell, a human goblet cell, a human reproductive tissue epithelial cell, a human sperm canal epithelial cell, a intestinal organoid cell, or a human intestinal organoid cell. In some embodiments, the prime editing methods disclosed herein have an editing efficiency of at least about 80% and an indel frequency of less than 7.5% in a target cell, e.g., an iPSC, a human iPSC, a lung progenitor cell, a human lung progenitor cell, a basal cell, a human basal cell, a human basal cell from the respiratory epithelium, a club cell, a human club cell, an ionocyte, a human ionocyte, a bronchial epithelial cell, an airway epithelial cell, a human bronchial epithelial cell, a human airway epithelial cell, a fibroblast, a lymphoblast, a human fibroblast, a human lymphoblast, a lymphocyte, a human lymphocyte, a tuft cell, a neuroendocrine cell, a goblet cell, a reproductive tissue epithelial cell, a sperm canal epithelial cell, a human tuft cell, a human neuroendocrine cell, a human goblet cell, a human reproductive tissue epithelial cell, a human sperm canal epithelial cell, a intestinal organoid cell, or a human intestinal organoid cell. In some embodiments, the prime editing methods disclosed herein have an editing efficiency of at least about 80% and an indel frequency of less than 5% in a target cell, e.g., an iPSC, a human iPSC, a lung progenitor cell, a human lung progenitor cell, a basal cell, a human basal cell, a human basal cell from the respiratory epithelium, a club cell, a human club cell, an ionocyte, a human ionocyte, a bronchial epithelial cell, an airway epithelial cell, a human bronchial epithelial cell, a human airway epithelial cell, a fibroblast, a lymphoblast, a human fibroblast, a human lymphoblast, a lymphocyte, a human lymphocyte, a tuft cell, a neuroendocrine cell, a goblet cell, a reproductive tissue epithelial cell, a sperm canal epithelial cell, a human tuft cell, a human neuroendocrine cell, a human goblet cell, a human reproductive tissue epithelial cell, a human sperm canal epithelial cell, a intestinal organoid cell, or a human intestinal organoid cell. In some embodiments, the prime editing methods disclosed herein have an editing efficiency of at least about 80% and an indel frequency of less than 80% in a target cell, e.g., an iPSC, a human iPSC, a lung progenitor cell, a human lung progenitor cell, a basal cell, a human basal cell, a human basal cell from the respiratory epithelium, a club cell, a human club cell, an ionocyte, a human ionocyte, a bronchial epithelial cell, an airway epithelial cell, a human bronchial epithelial cell, a human airway epithelial cell, a fibroblast, a lymphoblast, a human fibroblast, a human lymphoblast, a lymphocyte, a human lymphocyte, a tuft cell, a neuroendocrine cell, a goblet cell, a reproductive tissue epithelial cell, a sperm canal epithelial cell, a human tuft cell, a human neuroendocrine cell, a human goblet cell, a human reproductive tissue epithelial cell, a human sperm canal epithelial cell, a intestinal organoid cell, or a human intestinal organoid cell. In some embodiments, the prime editing methods disclosed herein have an editing efficiency of at least about 80% and an indel frequency of less than 1% in a target cell, e.g., an iPSC, a human iPSC, a lung progenitor cell, a human lung progenitor cell, a basal cell, a human basal cell, a human basal cell from the respiratory epithelium, a club cell, a human club cell, an ionocyte, a human ionocyte, a bronchial epithelial cell, an airway epithelial cell, a human bronchial epithelial cell, a human airway epithelial cell, a fibroblast, a lymphoblast, a human fibroblast, a human lymphoblast, a lymphocyte, a human lymphocyte, a tuft cell, a neuroendocrine cell, a goblet cell, a reproductive tissue epithelial cell, a sperm canal epithelial cell, a human tuft cell, a human neuroendocrine cell, a human goblet cell, a human reproductive tissue epithelial cell, a human sperm canal epithelial cell, a intestinal organoid cell, or a human intestinal organoid cell. In some embodiments, the prime editing methods disclosed herein have an editing efficiency of at least about 80% and an indel frequency of less than 0.5% in a target cell, e.g., an iPSC, a human iPSC, a lung progenitor cell, a human lung progenitor cell, a basal cell, a human basal cell, a human basal cell from the respiratory epithelium, a club cell, a human club cell, an ionocyte, a human ionocyte, a bronchial epithelial cell, an airway epithelial cell, a human bronchial epithelial cell, a human airway epithelial cell, a fibroblast, a lymphoblast, a human fibroblast, a human lymphoblast, a lymphocyte, a human lymphocyte, a tuft cell, a neuroendocrine cell, a goblet cell, a reproductive tissue epithelial cell, a sperm canal epithelial cell, a human tuft cell, a human neuroendocrine cell, a human goblet cell, a human reproductive tissue epithelial cell, a human sperm canal epithelial cell, a intestinal organoid cell, or a human intestinal organoid cell. In some embodiments, the prime editing methods disclosed herein have an editing efficiency of at least about 80% and an indel frequency of less than 0.1% in a target cell, e.g., an iPSC, a human iPSC, a lung progenitor cell, a human lung progenitor cell, a basal cell, a human basal cell, a human basal cell from the respiratory epithelium, a club cell, a human club cell, an ionocyte, a human ionocyte, a bronchial epithelial cell, an airway epithelial cell, a human bronchial epithelial cell, a human airway epithelial cell, a fibroblast, a lymphoblast, a human fibroblast, a human lymphoblast, a lymphocyte, a human lymphocyte, a tuft cell, a neuroendocrine cell, a goblet cell, a reproductive tissue epithelial cell, a sperm canal epithelial cell, a human tuft cell, a human neuroendocrine cell, a human goblet cell, a human reproductive tissue epithelial cell, a human sperm canal epithelial cell, a intestinal organoid cell, or a human intestinal organoid cell.

[0902] In some embodiments, the prime editing methods disclosed herein have an editing efficiency of at least about 90% and an indel frequency of less than 10% in a target cell, e.g., an iPSC, a human iPSC, a lung progenitor cell, a human lung progenitor cell, a basal cell, a human basal cell, a human basal cell from the respiratory epithelium, a club cell, a human club cell, an ionocyte, a human ionocyte, a bronchial epithelial cell, an airway epithelial cell, a human bronchial epithelial cell, a human airway epithelial cell, a fibroblast, a lymphoblast, a human fibroblast, a human lymphoblast, a lymphocyte, a human lymphocyte, a tuft cell, a neuroendocrine cell, a goblet cell, a reproductive tissue epithelial cell, a sperm canal epithelial cell, a human tuft cell, a human neuroendocrine cell, a human goblet cell, a human reproductive tissue epithelial cell, a human sperm canal epithelial cell, a intestinal organoid cell, or a human intestinal organoid cell. In some embodiments, the prime editing methods disclosed herein have an editing efficiency of at least about 90% and an indel frequency of less than 7.5% in a target cell, e.g., an iPSC, a human iPSC, a lung progenitor cell, a human lung progenitor cell, a basal cell, a human basal cell, a human basal cell from the respiratory epithelium, a club cell, a human club cell, an ionocyte, a human ionocyte, a bronchial epithelial cell, an airway epithelial cell, a human bronchial epithelial cell, a human airway epithelial cell, a fibroblast, a lymphoblast, a human fibroblast, a human lymphoblast, a lymphocyte, a human lymphocyte, a tuft cell, a neuroendocrine cell, a goblet cell, a reproductive tissue epithelial cell, a sperm canal epithelial cell, a human tuft cell, a human neuroendocrine cell, a human goblet cell, a human reproductive tissue epithelial cell, a human sperm canal epithelial cell, a intestinal organoid cell, or a human intestinal organoid cell. In some embodiments, the prime editing methods disclosed herein have an editing efficiency of at least about 90% and an indel frequency of less than 5% in a target cell, e.g., an iPSC, a human iPSC, a lung progenitor cell, a human lung progenitor cell, a basal cell, a human basal cell, a human basal cell from the respiratory epithelium, a club cell, a human club cell, an ionocyte, a human ionocyte, a bronchial epithelial cell, an airway epithelial cell, a human bronchial epithelial cell, a human airway epithelial cell, a fibroblast, a lymphoblast, a human fibroblast, a human lymphoblast, a lymphocyte, a human lymphocyte, a tuft cell, a neuroendocrine cell, a goblet cell, a reproductive tissue epithelial cell, a sperm canal epithelial cell, a human tuft cell, a human neuroendocrine cell, a human goblet cell, a human reproductive tissue epithelial cell, a human sperm canal epithelial cell, a intestinal organoid cell, or a human intestinal organoid cell. In some embodiments, the prime editing methods disclosed herein have an editing efficiency of at least about 90% and an indel frequency of less than 90% in a target cell, e.g., an iPSC, a human iPSC, a lung progenitor cell, a human lung progenitor cell, a basal cell, a human basal cell, a human basal cell from the respiratory epithelium, a club cell, a human club cell, an ionocyte, a human ionocyte, a bronchial epithelial cell, an airway epithelial cell, a human bronchial epithelial cell, a human airway epithelial cell, a fibroblast, a lymphoblast, a human fibroblast, a human lymphoblast, a lymphocyte, a human lymphocyte, a tuft cell, a neuroendocrine cell, a goblet cell, a reproductive tissue epithelial cell, a sperm canal epithelial cell, a human tuft cell, a human neuroendocrine cell, a human goblet cell, a human reproductive tissue epithelial cell, a human sperm canal epithelial cell, a intestinal organoid cell, or a human intestinal organoid cell. In some embodiments, the prime editing methods disclosed herein have an editing efficiency of at least about 90% and an indel frequency of less than 1% in a target cell, e.g., an iPSC, a human iPSC, a lung progenitor cell, a human lung progenitor cell, a basal cell, a human basal cell, a human basal cell from the respiratory epithelium, a club cell, a human club cell, an ionocyte, a human ionocyte, a bronchial epithelial cell, an airway epithelial cell, a human bronchial epithelial cell, a human airway epithelial cell, a fibroblast, a lymphoblast, a human fibroblast, a human lymphoblast, a lymphocyte, a human lymphocyte, a tuft cell, a neuroendocrine cell, a goblet cell, a reproductive tissue epithelial cell, a sperm canal epithelial cell, a human tuft cell, a human neuroendocrine cell, a human goblet cell, a human reproductive tissue epithelial cell, a human sperm canal epithelial cell, a intestinal organoid cell, or a human intestinal organoid cell. In some embodiments, the prime editing methods disclosed herein have an editing efficiency of at least about 90% and an indel frequency of less than 0.5% in a target cell, e.g., an iPSC, a human iPSC, a lung progenitor cell, a human lung progenitor cell, a basal cell, a human basal cell, a human basal cell from the respiratory epithelium, a club cell, a human club cell, an ionocyte, a human ionocyte, a bronchial epithelial cell, an airway epithelial cell, a human bronchial epithelial cell, a human airway epithelial cell, a fibroblast, a lymphoblast, a human fibroblast, a human lymphoblast, a lymphocyte, a human lymphocyte, a tuft cell, a neuroendocrine cell, a goblet cell, a reproductive tissue epithelial cell, a sperm canal epithelial cell, a human tuft cell, a human neuroendocrine cell, a human goblet cell, a human reproductive tissue epithelial cell, a human sperm canal epithelial cell, a intestinal organoid cell, or a human intestinal organoid cell. In some embodiments, the prime editing methods disclosed herein have an editing efficiency of at least about 90% and an indel frequency of less than 0.1% in a target cell, e.g., an iPSC, a human iPSC, a lung progenitor cell, a human lung progenitor cell, a basal cell, a human basal cell, a human basal cell from the respiratory epithelium, a club cell, a human club cell, an ionocyte, a human ionocyte, a bronchial epithelial cell, an airway epithelial cell, a human bronchial epithelial cell, a human airway epithelial cell, a fibroblast, a lymphoblast, a human fibroblast, a human lymphoblast, a lymphocyte, a human lymphocyte, a tuft cell, a neuroendocrine cell, a goblet cell, a reproductive tissue epithelial cell, a sperm canal epithelial cell, a human tuft cell, a human neuroendocrine cell, a human goblet cell, a human reproductive tissue epithelial cell, a human sperm canal epithelial cell, a intestinal organoid cell, or a human intestinal organoid cell.

[0903] In some embodiments, the prime editing methods disclosed herein have an editing efficiency of at least about 95% and an indel frequency of less than 10% in a target cell, e.g., an iPSC, a human iPSC, a lung progenitor cell, a human lung progenitor cell, a basal cell, a human basal cell, a human basal cell from the respiratory epithelium, a club cell, a human club cell, an ionocyte, a human ionocyte, a bronchial epithelial cell, an airway epithelial cell, a human bronchial epithelial cell, a human airway epithelial cell, a fibroblast, a lymphoblast, a human fibroblast, a human lymphoblast, a lymphocyte, a human lymphocyte, a tuft cell, a neuroendocrine cell, a goblet cell, a reproductive tissue epithelial cell, a sperm canal epithelial cell, a human tuft cell, a human neuroendocrine cell, a human goblet cell, a human reproductive tissue epithelial cell, a human sperm canal epithelial cell, a intestinal organoid cell, or a human intestinal organoid cell. In some embodiments, the prime editing methods disclosed herein have an editing efficiency of at least about 95% and an indel frequency of less than 7.5% in a target cell, e.g., an iPSC, a human iPSC, a lung progenitor cell, a human lung progenitor cell, a basal cell, a human basal cell, a human basal cell from the respiratory epithelium, a club cell, a human club cell, an ionocyte, a human ionocyte, a bronchial epithelial cell, an airway epithelial cell, a human bronchial epithelial cell, a human airway epithelial cell, a fibroblast, a lymphoblast, a human fibroblast, a human lymphoblast, a lymphocyte, a human lymphocyte, a tuft cell, a neuroendocrine cell, a goblet cell, a reproductive tissue epithelial cell, a sperm canal epithelial cell, a human tuft cell, a human neuroendocrine cell, a human goblet cell, a human reproductive tissue epithelial cell, a human sperm canal epithelial cell, a intestinal organoid cell, or a human intestinal organoid cell. In some embodiments, the prime editing methods disclosed herein have an editing efficiency of at least about 95% and an indel frequency of less than 5% in a target cell, e.g., an iPSC, a human iPSC, a lung progenitor cell, a human lung progenitor cell, a basal cell, a human basal cell, a human basal cell from the respiratory epithelium, a club cell, a human club cell, an ionocyte, a human ionocyte, a bronchial epithelial cell, an airway epithelial cell, a human bronchial epithelial cell, a human airway epithelial cell, a fibroblast, a lymphoblast, a human fibroblast, a human lymphoblast, a lymphocyte, a human lymphocyte, a tuft cell, a neuroendocrine cell, a goblet cell, a reproductive tissue epithelial cell, a sperm canal epithelial cell, a human tuft cell, a human neuroendocrine cell, a human goblet cell, a human reproductive tissue epithelial cell, a human sperm canal epithelial cell, a intestinal organoid cell, or a human intestinal organoid cell. In some embodiments, the prime editing methods disclosed herein have an editing efficiency of at least about 95% and an indel frequency of less than 95% in a target cell, e.g., an iPSC, a human iPSC, a lung progenitor cell, a human lung progenitor cell, a basal cell, a human basal cell, a human basal cell from the respiratory epithelium, a club cell, a human club cell, an ionocyte, a human ionocyte, a bronchial epithelial cell, an airway epithelial cell, a human bronchial epithelial cell, a human airway epithelial cell, a fibroblast, a lymphoblast, a human fibroblast, a human lymphoblast, a lymphocyte, a human lymphocyte, a tuft cell, a neuroendocrine cell, a goblet cell, a reproductive tissue epithelial cell, a sperm canal epithelial cell, a human tuft cell, a human neuroendocrine cell, a human goblet cell, a human reproductive tissue epithelial cell, a human sperm canal epithelial cell, a intestinal organoid cell, or a human intestinal organoid cell. In some embodiments, the prime editing methods disclosed herein have an editing efficiency of at least about 95% and an indel frequency of less than 1% in a target cell, e.g., an iPSC, a human iPSC, a lung progenitor cell, a human lung progenitor cell, a basal cell, a human basal cell, a human basal cell from the respiratory epithelium, a club cell, a human club cell, an ionocyte, a human ionocyte, a bronchial epithelial cell, an airway epithelial cell, a human bronchial epithelial cell, a human airway epithelial cell, a fibroblast, a lymphoblast, a human fibroblast, a human lymphoblast, a lymphocyte, a human lymphocyte, a tuft cell, a neuroendocrine cell, a goblet cell, a reproductive tissue epithelial cell, a sperm canal epithelial cell, a human tuft cell, a human neuroendocrine cell, a human goblet cell, a human reproductive tissue epithelial cell, a human sperm canal epithelial cell, a intestinal organoid cell, or a human intestinal organoid cell. In some embodiments, the prime editing methods disclosed herein have an editing efficiency of at least about 95% and an indel frequency of less than 0.5% in a target cell, e.g., an iPSC, a human iPSC, a lung progenitor cell, a human lung progenitor cell, a basal cell, a human basal cell, a human basal cell from the respiratory epithelium, a club cell, a human club cell, an ionocyte, a human ionocyte, a bronchial epithelial cell, an airway epithelial cell, a human bronchial epithelial cell, a human airway epithelial cell, a fibroblast, a lymphoblast, a human fibroblast, a human lymphoblast, a lymphocyte, a human lymphocyte, a tuft cell, a neuroendocrine cell, a goblet cell, a reproductive tissue epithelial cell, a sperm canal epithelial cell, a human tuft cell, a human neuroendocrine cell, a human goblet cell, a human reproductive tissue epithelial cell, a human sperm canal epithelial cell, a intestinal organoid cell, or a human intestinal organoid cell. In some embodiments, the prime editing methods disclosed herein have an editing efficiency of at least about 95% and an indel frequency of less than 0.1% in a target cell, e.g., an iPSC, a human iPSC, a lung progenitor cell, a human lung progenitor cell, a basal cell, a human basal cell, a human basal cell from the respiratory epithelium, a club cell, a human club cell, an ionocyte, a human ionocyte, a bronchial epithelial cell, an airway epithelial cell, a human bronchial epithelial cell, a human airway epithelial cell, a fibroblast, a lymphoblast, a human fibroblast, a human lymphoblast, a lymphocyte, a human lymphocyte, a tuft cell, a neuroendocrine cell, a goblet cell, a reproductive tissue epithelial cell, a sperm canal epithelial cell, a human tuft cell, a human neuroendocrine cell, a human goblet cell, a human reproductive tissue epithelial cell, a human sperm canal epithelial cell, a intestinal organoid cell, or a human intestinal organoid cell. In some embodiments, any number of indels is determined after at least 1 hour, at least 2 hours, at least 6 hours, at least 12 hours, at least 24 hours, at least 36 hours, at least 48 hours, at least 3 days, at least 4 days, at least 5 days, at least 7 days, at least 10 days, or at least 14 days of exposing a target gene (e.g., a CFTR gene within the genome of a cell) to a prime editing composition. In some embodiments, the editing efficiency is determined after 1 hour, 2 hours, 6 hours, 12 hours, 24 hours, 36 hours, 48 hours, 3 days, 4 days, 5 days, 7 days, 10 days, or 14 days of exposing a target gene (e.g., a CFTR gene within the genome of a cell) to a prime editing composition.

[0904] In some embodiments, the prime editing composition described herein result in less than 50%, less than 40%, less than 30%, less than 20%, less than 19%, less than 18%, less than 17%, less than 16%, less than 15%, less than 14%, less than 13%, less than 12%, less than 11%, less than 10%, less than 9%, less than 8%, less than 7%, less than 6%, less than 5%, less than 4%, less than 3%, less than 2%, less than 1%, less than 0.9%, less than 0.8%, less than 0.7%, less than 0.6%, less than 0.5%, less than 0.4%, less than 0.3%, less than 0.2%, less than 0.1%, less than 0.09%, less than 0.08%, less than 0.07%, less than 0.06%, less than 0.05%, less than 0.04%, less than 0.03%, less than 0.02%, or less than 0.01% off-target editing in a chromosome that includes the target gene. In some embodiments, off-target editing is determined after at least 1 hour, at least 2 hours, at least 6 hours, at least 12 hours, at least 24 hours, at least 36 hours, at least 48 hours, at least 3 days, at least 4 days, at least 5 days, at least 7 days, at least 10 days, or at least 14 days of exposing a target gene (e.g., a nucleic acid within the genome of a cell) to a prime editing composition.

[0905] In some embodiments, the prime editing compositions (e.g., PEgRNAs and prime editors as described herein) and prime editing methods disclosed herein can be used to edit a target CFTR gene. In some embodiments, the target CFTR gene comprises a mutation compared to a wild type CFTR gene. In some embodiments, the mutation is associated with cystic fibrosis. In some embodiments, the target CFTR gene comprises an editing target sequence that contains the mutation associated with cystic fibrosis. In some embodiments, the mutation is in a coding region of the target CFTR gene. In some embodiments, the mutation is in an exon of the target CFTR gene. In some embodiments, the mutation is in exon 1, exon 2, exon 3, exon 4, exon 5, exon 6, exon 7, exon 8, exon 9, exon 10, exon 11, exon 12, exon 13, exon 14, exon 15, exon 16, exon 17, exon 18, exon 19, exon 20, exon 21, exon 22, exon 23, exon 24, exon 25, exon 26, or exon 27 of the target CFTR gene as compared to a wild type CFTR gene. In some embodiments, the mutation is in exonI1 of the CFTR gene as compared to a wild type CFTR gene. In some embodiments, the mutation is in exon 12 of the CFTR gene as compared to a wild type CFTR gene. In some embodiments, the mutation is in exon 22 of the CFTR gene as compared to a wild type CFTR gene. In some embodiments, the mutation is in exon 24 of the CFTR gene as compared to a wild type CFTR gene.

[0906] In some embodiments, the mutation is in exon 3 of the CFTR gene as compared to a wild type CFTR gene. In some embodiments, the mutation is in exon 4 of the CFTR gene as compared to a wild type CFTR gene. In some embodiments, the mutation is in exon 8 of the CFTR gene as compared to a wild type CFTR gene. In some embodiments, the mutation is in exon 10 of the CFTR gene as compared to a wild type CFTR gene. In some embodiments, the mutation is in exon 12 of the CFTR gene as compared to a wild type CFTR gene. In some embodiments, the mutation is in exon 13 of the CFTR gene as compared to a wild type CFTR gene. In some embodiments, the mutation is in exon 14 of the CFTR gene as compared to a wild type CFTR gene. In some embodiments, the mutation is in exon 20 of the CFTR gene as compared to a wild type CFTR gene. In some embodiments, the mutation is in exon 22 of the CFTR gene as compared to a wild type CFTR gene. In some embodiments, the mutation is in exon 23 of the CFTR gene as compared to a wild type CFTR gene. In some embodiments, the mutation is in exon 24 of the CFTR gene as compared to a wild type CFTR gene.

[0907] In some embodiments, the prime editing method comprises contacting a target CFTR gene with a prime editing composition comprising a prime editor, a PEgRNA, and/or a ngRNA as described herein. In some embodiments, contacting the target CFTR gene with the prime editing composition results in incorporation of one or more intended nucleotide edits in the target CFTR gene as set forth in any prime editing composition or PEgRNAs as described herein. In some embodiments, the incorporation is in a region of the target CFTR gene that corresponds to an editing target sequence in the CFTR gene. In some embodiments, the one or more intended nucleotide edits comprises a single nucleotide substitution, an insertion, a deletion, or any combination thereof, compared to the endogenous sequence of the target CFTR gene. In some embodiments, incorporation of the one or more intended nucleotide edits results in replacement of one or more mutations with the corresponding sequence that encodes a wild type CFTR polypeptide set forth in SEQ ID NO: 19. In some embodiments, incorporation of the one or more intended nucleotide edits results in replacement of the one or more mutations with the corresponding sequence in a wild type CFTR gene. In some embodiments, incorporation of the one more intended nucleotide edits results in correction of a mutation in the target CFTR gene. In some embodiments, the target CFTR gene comprises an editing template sequence that contains the mutation. In some embodiments, contacting the target CFTR gene with the prime editing composition results in incorporation of one or more intended nucleotide edits in the target CFTR gene, which corrects the mutation in the editing target sequence (or a double stranded region comprising the editing target sequence and the complementary sequence to the editing target sequence on a target strand) in the target CFTR gene.

[0908] Exemplary wild type CFTR protein:

(SEQ ID NO: 19)
MQRSPLEKASVVSKLFFSWTRPILRKGYRQRLELSDIYQIPSVDSADNLS
EKLEREWDRELASKKNPKLINALRRCFFWRFMFYGIFLYLGEVTKAVQPL
LLGRIIASYDPDNKEERSIAIYLGIGLCLLFIVRTLLLHPAIFGLHHIGM
QMRIAMFSLIYKKTLKLSSRVLDKISIGQLVSLLSNNLNKFDEGLALAHF
VWIAPLQVALLMGLIWELLQASAFCGLGFLIVLALFQAGLGRMMMKYRDQ
RAGKISERLVITSEMIENIQSVKAYCWEEAMEKMIENLRQTELKLTRKAA
YVRYFNSSAFFFSGFFVVFLSVLPYALIKGIILRKIFTTISFCIVLRMAV
TRQFPWAVQTWYDSLGAINKIQDFLQKQEYKTLEYNLTTTEVVMENVTAF
WEEGFGELFEKAKQNNNNRKTSNGDDSLFFSNFSLLGTPVLKDINFKIER
GQLLAVAGSTGAGKTSLLMVIMGELEPSEGKIKHSGRISFCSQFSWIMPG
TIKENIIFGVSYDEYRYRSVIKACQLEEDISKFAEKDNIVLGEGGITLSG
GQRARISLARAVYKDADLYLLDSPFGYLDVLTEKEIFESCVCKLMANKTR
ILVTSKMEHLKKADKILILHEGSSYFYGTFSELQNLQPDFSSKLMGCDSF
DQFSAERRNSILTETLHRFSLEGDAPVSWTETKKQSFKQTGEFGEKRKNS
ILNPINSIRKFSIVQKTPLQMNGIEEDSDEPLERRLSLVPDSEQGEAILP
RISVISTGPTLQARRRQSVLNLMTHSVNQGQNIHRKTTASTRKVSLAPQA
NLTELDIYSRRLSQETGLEISEEINEEDLKECFFDDMESIPAVTTWNTYL
RYITVHKSLIFVLIWCLVIFLAEVAASLVVLWLLGNTPLQDKGNSTHSRN
NSYAVIITSTSSYYVFYIYVGVADTLLAMGFFRGLPLVHTLITVSKILHH
KMLHSVLQAPMSTLNTLKAGGILNRFSKDIAILDDLLPLTIFDFIQLLLI
VIGAIAVVAVLQPYIFVATVPVIVAFIMLRAYFLQTSQQLKQLESEGRSP
IFTHLVTSLKGLWTLRAFGRQPYFETLFHKALNLHTANWFLYLSTLRWFQ
MRIEMIFVIFFIAVTFISILTTGEGEGRVGIILTLAMNIMSTLQWAVNSS
IDVDSLMRSVSRVFKFIDMPTEGKPTKSTKPYKNGQLSKVMIIENSHVKK
DDIWPSGGQMTVKDLTAKYTEGGNAILENISFSISPGQRVGLLGRTGSGK
STLLSAFLRLLNTEGEIQIDGVSWDSITLQQWRKAFGVIPQKVFIFSGTF
RKNLDPYEQWSDQEIWKVADEVGLRSVIEQFPGKLDFVLVDGGCVLSHGH
KQLMCLARSVLSKAKILLLDEPSAHLDPVTYQIIRRTLKQAFADCTVILC
EHRIEAMLECQQFLVIEENKVRQYDSIQKLLNERSLFRQAISPSDRVKLF
PHRNSSKCKSKPQIAALKEETEEEVQDTRL

[0909] In some embodiments, the target CFTR gene is in a target cell. Accordingly, in one aspect provided herein is a method of editing a target cell comprising a target CFTR gene that encodes a polypeptide that comprises one or more mutations relative to a wild type CFTR gene. In some embodiments, the methods of the present disclosure comprise introducing a prime editing composition comprising a PEgRNA, a prime editor polypeptide, and/or a ngRNA into the target cell that has the target CFTR gene to edit the target CFTR gene, thereby generating an edited cell.

[0910] In some embodiments, the target cell is a mammalian cell. In some embodiments, the target cell is a human cell. In some embodiments, the target cell is a primary cell. In some embodiments, the target cell is a human primary cell. In some embodiments, the target cell is a progenitor cell. In some embodiments, the target cell is a human progenitor cell. In some embodiments, the target cell is a stem cell. In some embodiments, the target cell is a human stem cell. In some embodiments, the target cell is a primary cell. In some embodiments, the target cell is a human primary cell. In some embodiments, the target cell is a pluripotent stem cell. In some embodiments, the target cell is an induced human pluripotent stem cell (iPSC). In some embodiments, the target cell is a lung progenitor cell. In some embodiments, the cell is a basal cell. In some embodiments, the cell is a club cell. In some embodiments, the cell is a ciliated cell. In some embodiments, the cell is an ionocyte, e.g., human ionocyte, e.g., pulmonary human ionocyte. In some embodiments, the cell is a human basal cell. In some embodiments, the cell is a human basal cell from the respiratory epithelium. In some embodiments, the cell is a human club cell. In some embodiments, the cell is a human ciliated cell. In some embodiments, the cell is a human ionocyte, e.g., pulmonary human ionocyte. In some embodiments, the target cell is a bronchioalveolar stem cell. In some embodiments, the target cell is a human bronchioalveolar stem cell. In some embodiments, the target cell is a human lung progenitor cell. In some embodiments, the target cell is an epithelial cell. In some embodiments, the target cell is an airway epithelial cell. In some embodiments, the target cell is a human airway epithelial cell. In some embodiments, the target cell is a bronchial epithelial cell. In some embodiments, the target cell is a human bronchial epithelial cell. In some embodiments, the target cell is a human bronchial epithelial cell induced from iPSC. In some embodiments, the target cell is a pancreatic epithelial cell. In some embodiments, the target cell is a pancreatic ductal epithelia cell. In some embodiments, the target cell is a pancreatic acinar cell. In some embodiments, the target cell is a human pancreatic epithelial cell. In some embodiments, the target cell is a human pancreatic ductal epithelia cell. In some embodiments, the target cell is a human pancreatic acinar cell. In some embodiments, the target cell is a hepatocyte. In some embodiments, the target cell is a human hepatocyte. In some embodiments, the target cell is a kidney epithelial cell. In some embodiments, the target cell is an intestine epithelial cell. In some embodiments, the target cell is a human kidney epithelial cell. In some embodiments, the target cell is a human intestine epithelial cell. In some embodiments, the cell is a tuft cell. In some embodiments, the cell is a neuroendocrine cell. In some embodiments, the cell is a goblet cell. In some embodiments, the cell is a reproductive tissue epithelial cell. In some embodiments, the cell is a sperm canal epithelial cell. In some embodiments, the cell is a human tuft cell. In some embodiments, the cell is a human neuroendocrine cell. In some embodiments, the cell is a human goblet cell. In some embodiments, the cell is a human reproductive tissue epithelial cell. In some embodiments, the cell is a human sperm canal epithelial cell.

[0911] In some embodiments, components of a prime editing composition described herein are provided to a target cell in vitro. In some embodiments, components of a prime editing composition described herein are provided to a target cell ex vivo. In some embodiments, components of a prime editing composition described herein are provided to a target cell in vivo.

[0912] In some embodiments, incorporation of the one or more intended nucleotide edits in the target CFTR gene that comprises one or more mutations restores wild type expression and function of the CFTR protein encoded by the CFTR gene. In some embodiments, the target CFTR gene encodes a M1V, A46D, E56K, P67L, R74W, G85E, E92K, P99L, D110H, D110E, R117C, R117H, R170G, G178R, E193K, P205S, L206W, V232D, R334W, R334W, 1336K, T3381, S341P, R347P, R347H, R352Q, L467P, S492F, D507, F508, V520F, G542X, S549R, S549N, G551S, G551N, G551D, A455E, S549N, R553X, A559T, R560T, R560S, R560K, A561E, Y569D, D579G, D614G, R668C, L927P, S945L, S977F, L997F, F1052V, H1054D, K1060T, L1065P, R1066C, R1066M, R1066H, A1067T, R1070Q, R1070W, F1074L, H1085R, M1101K, D1270N, D1152H, L1077P, S1235R, G1244E, S1251N, S1255P, W1282X, N1303K, G1349D, Q1411X amino acid substitution as compared to the wild type CFTR protein prior to incorporation of the one or more intended nucleotide edits, wherein X is any amino acid other than the wild type amino acid. In some embodiments, the target CFTR gene encodes a G85X, R334X, G542X, S549X, G551X, R553X, R1158X, R1162X, W1282X, N1303X amino acid substitution as compared to the wild type CFTR protein prior to incorporation of the one or more intended nucleotide edits, wherein X is any amino acid other than the wild type amino acid. In some embodiments, the target CFTR gene encodes a [G85E, R334W, G542*, S549R, S549N, G551S, G551N, G551D, R553*, D1152H, R1158*, R1162*, W1282*, or N1303K amino acid substitution as compared to the wild type CFTR protein prior to incorporation of the one or more intended nucleotide edits, wherein * refers to a non-sense mutation. In some embodiments, the target CFTR gene encodes a F508 deletion as compared to the wild type CFTR protein prior to incorporation of the one or more intended nucleotide edits. In some embodiments, expression and/or function of the CFTR protein may be measured when expressed in a target cell. In some embodiments, incorporation of the one or more intended nucleotide edits in the target CFTR gene comprising one or more mutations lead to a fold change in a level of CFTR gene expression, CFTR protein expression, or a combination thereof. In some embodiments, a change in the level of CFTR expression level can comprise a fold change of, e.g., 2-fold, 3-fold, 4-fold, 5-fold, 6-fold, 7-fold, 8-fold, 9-fold, 10-fold, 15-fold, 20-fold, 25-fold, 30-fold, 40-fold, 50-fold, 60-fold, 70-fold, 80-fold, 90-fold, 100-fold or greater as compared to expression in a suitable control cell not introduced with a prime editing composition described herein. In some embodiments, incorporation of the one or more intended nucleotide edits in the target CFTR gene that comprises one or more mutations restores wild type expression of the CFTR protein by at least 10%, 20%, 30%, 40%, 50%, 60%, 70%, 80%, 90%, 95%, or 99% or more as compared to wild type expression of the CFTR protein in a suitable control cell that comprises a wild type CFTR gene.

[0913] In some embodiments, incorporation of the one or more intended nucleotide edits in the target CFTR gene that comprises one or more mutations alters folding and/or assembly of the CFTR protein encoded by the target CFTR gene. In some embodiments, incorporation of the one or more intended nucleotide edits in the target CFTR gene that comprises one or more mutations restores the biological function of the CFTR protein encoded by the target CFTR gene as compared to a wild type CFTR protein. In some embodiments, the biological function of the CFTR protein is partially or completely restored as compared to a wild type CFTR protein.

[0914] In some embodiments, a CFTR protein expression and/or biological function can be measured by a functional assay. In some embodiments, the functional assay can comprise a copper sensitivity assay, a cell viability assay, or a combination thereof. In some embodiments, protein expression can be measured using a protein assay. In some embodiments, protein expression can be measured using antibody testing. In some embodiments, an antibody can comprise anti-CFTR. In some embodiments, protein expression can be measured using ELISA, mass spectrometry, Western blot, sodium dodecyl sulfate polyacrylamide gel electrophoresis (SDS-PAGE), high performance liquid chromatography (HPLC), electrophoresis, or any combination thereof. In some embodiments, a protein assay can comprise SDS-PAGE and densitometric analysis of a Coomassie Blue-stained gel. In some embodiments, biological activity of a CFTR protein can be measured by any assay known in the art, for example, a chloride efflux assay.

### Methods of Treating Cystic Fibrosis

[0915] Cystic Fibrosis (CF) is caused by mutations in the cystic fibrosis transmembrane conductance regulator (CFTR ABCC7) gene. The CFTR protein encoded by the CFTR gene is a chloride channel comprised of five structural domains: spanning domain 1 (MSD1), nucleotide-binding domain 1 (NBD1), a regulatory (R) domain, MSD2, and NBD2. The functional domains may facilitate fluid transport and surface hydration across epithelial cells of the body's tubular organs (e.g. lungs and intestines). Mutations in the CFTR gene may cause loss of function in of the CFTR protein, resulting in disease phenotype such as inflammation and infection within the lungs and intestines.

[0916] Various disease-causing mutations in the CFTR gene have been reported, most of which are rare. The most common, F508del, is present in approximately 70% of the worldwide CF population (estimated to be 100,000). To this day, no effective cure for cystic fibrosis is available. In addition, a large number of mutations besides F508del are not responsive to existing therapies.

[0917] In some embodiments, provided herein are methods for treatment of a subject diagnosed with a disease associated with or caused by one or more pathogenic mutations. In some embodiments, provided herein are methods for treatment of a subject diagnosed with a disease associated with or caused by one or more pathogenic mutations that can be corrected by prime editing. In some embodiments, methods of treatment provided herein comprises editing one or more genes other than the gene that harbors the one or more pathogenic mutations. In some embodiments, provided herein are methods for treating Cystic Fibrosis that comprise administering to a subject a therapeutically effective amount of a prime editing composition, or a pharmaceutical composition comprising a prime editing composition as described herein. In some embodiments, administration of the prime editing composition results in incorporation of one or more intended nucleotide edits in the target gene in the subject. In some embodiments, administration of the prime editing composition results in correction of one or more pathogenic mutations, e.g., point mutations, insertions, or deletions, associated with Cystic Fibrosis in the subject. In some embodiments, administration of the prime editing composition results in correction of one or more pathogenic mutations, e.g., point mutations, insertions, or deletions in the target CFTR gene associated with cystic fibrosis in the subject. In some embodiments, the target gene comprise an editing target sequence that contains the pathogenic mutation. In some embodiments, administration of the prime editing composition results in incorporation of one or more intended nucleotide edits in the target gene that corrects the pathogenic mutation in the editing target sequence (or a double stranded region comprising the editing target sequence and the complementary sequence to the editing target sequence on a target strand) of the target gene in the subject.

[0918] In some embodiments, the method provided herein comprises administering to a subject an effective amount of a prime editing composition, for example, a PEgRNA, a prime editor, and/or a ngRNA. In some embodiments, the method comprises administering to the subject an effective amount of a prime editing composition described herein, for example, polynucleotides, vectors, or constructs that encode prime editing composition components, or RNPs, LNPs, and/or polypeptides comprising prime editing composition components. Prime editing compositions can be administered to target the CFTR gene in a subject, e.g., a human subject, suffering from, having, susceptible to, or at risk for Cystic Fibrosis. Identifying a subject in need of such treatment can be in the judgment of a subject or a health care professional and can be subjective (e.g., opinion) or objective (e.g., measurable by a test or diagnostic method). In some embodiments, the subject has Cystic Fibrosis.

[0919] In some embodiments, a population of patients each having one or more mutations in the target CFTR gene may be treated with a prime editing composition (e.g., a PEgRNA, a prime editor, and optionally an ngRNA as described herein) disclosed herein. In some embodiments, a population of patients with different mutations in the target gene can be treated with the same prime editing composition comprising a single PEgRNA, a prime editor, and optionally an ngRNA. In some embodiments, a single prime editing composition comprising a single PEgRNA and a prime editor can be used to correct one or more, or two or more, mutations in the target gene in a populations of patients, wherein one or more patients in the population have different mutations from one another. In some embodiments, the prime editing composition comprising a single pair of PEgRNA, a prime editor, and optionally an ngRNA can be used to correct 2, 3, 4, 5, 6, 7, 8, 9, 10, 15, 20, 25 or more mutations in the target gene in a population of patients, wherein one or more patients in the population have different mutations from one another. In some embodiments, the PEgRNA comprises an editing template comprising a wild type sequence of the gene.

[0920] In some embodiments, a patient with multiple mutations in the target CFTR gene can be treated with a prime editing composition (e.g., a PEgRNAs, a prime editor, and optionally an ngRNA as described herein). For example, in some embodiments, a subject may comprise two copies of the gene, each comprising one or more different mutations. In some embodiments, a patient with one or more different mutations in the target gene can be treated with a single prime editing composition comprising a PEgRNAs, a prime editor, and optionally an ngRNA.

[0921] In some embodiments, the subject has been diagnosed with Cystic Fibrosis by sequencing of a CFTR gene in the subject. In some embodiments, the subject comprises at least a copy of the CFTR gene that comprises one or more mutations compared to a wild type CFTR gene. In some embodiments, the one or more mutations result in a truncated, aberrant, or non-functional CFTR protein encoded by the CFTR gene. In some embodiments, administration of the prime editing composition described herein results in incorporation of one or more intended nucleotide edits in the CFTR gene, thereby editing the CFTR gene and treating CF. In some embodiments, incorporation of the one or more intended nucleotide edits corrects the one or more mutations to wild type nucleotides at corresponding positions in the CFTR gene. In some embodiments, incorporation of the one or more intended nucleotide edits does not correct the one or more mutations to wild type nucleotides, but allows for expression of a functional CFTR protein encoded by the CFTR gene. For example, in some embodiments, incorporation of the one or more intended nucleotide edits results in one or more codons (tri-nucleotides) that are different from a wild type codon but encode one or more amino acids same as the wild type CFTR protein. In some embodiments, incorporation of the one or more intended nucleotide edits results in one or more codons that encode one or more amino acids different from the wild type CFTR protein, but allows for expression of a functional CFTR protein.

[0922] In some embodiments, the subject comprises at least a copy of the CFTR gene that comprises two or more mutations compared to a wild type CFTR gene. In some embodiments, the two or more mutations result in a truncated, aberrant, or non-functional CFTR protein encoded by the CFTR gene. In some embodiments, administration of the prime editing composition described herein results in incorporation of one or more intended nucleotide edits in the CFTR gene, thereby correcting the two or more mutations compared to a wild type CFTR gene. In some embodiments, the two or more mutations may be edited by administering a prime editing composition comprising a single PEgRNA that results in expression of a functional CFTR protein. In some embodiments, the prime editing composition comprises at least two PEgRNAs. In some embodiments, the prime editing composition comprises a single PEgRNA.

[0923] In some embodiments, the subject comprises two copies of CTR gene, each of which comprising one or more mutations compared to a wild type CFTR gene. In some embodiments, the subject comprises same mutation(s) on both copies of the CFTR gene compared to a wild type CFTR gene. In some embodiments, the subject comprises two copies of CFTR genes, each of which comprising a different mutation compared to a wild type CFTR gene. In some embodiments, the subject comprise two copies of CFTR genes, each of which comprising two or more mutations compared to a wild type CFTR gene. In some embodiments, the subject comprises two copies of CFTR genes, each of which comprising two or more different mutations compared to a wild type CFTR gene. In some embodiments, the one or more or the two or more mutations are in a coding region of the CFTR gene. In some embodiments, the one or more or the two or more mutations result in a truncated, aberrant, or non-functional CFTR protein encoded by the CFTR gene. In some embodiments, administration of the prime editing composition described herein results in incorporation of one or more intended nucleotide edits in the CFTR gene, thereby correcting the one or more or two or more mutations on at least one copy of the CFTR gene. In some embodiments, administration of the prime editing composition described herein results in incorporation of one or more intended nucleotide edits in the CFTR gene, thereby correcting the one or more or two or more mutations on both copies of the CFTR gene. In some embodiments, incorporation of one or more intended nucleotide edits in the CFTR gene, thereby correcting the one or more or two or more mutations on at least one copy of the CFTR gene. In some embodiments, administration of the prime editing composition described herein results in incorporation of one or more intended nucleotide edits in the CFTR gene, thereby correcting the one or more or two or more mutations on both copies of the CFTR gene. In some embodiments, incorporation of the one or more intended nucleotide edits results in one or more codons that encode one or more amino acids different from the wild type CFTR protein, but allows for expression of a functional CFTR protein. In some embodiments, the prime editing composition comprises at least two PEgRNAs. In some embodiments, the prime editing composition comprises a single PEgRNA.

[0924] In some embodiments, the subject comprises at least a copy of CFTR gene that comprises a mutation in exon 1, exon 2, exon 3, exon 4, exon 5, exon 6, exon 7, exon 8, exon 9, exon 10, exon 11, exon 12, exon 13, exon 14, exon 15, exon 16, exon 17, exon 18, exon 19, exon 20, exon 21, exon 22, exon 23, exon 24, exon 25, exon 26, or exon 27 as compared to a wild type CFTR gene, wherein in administering a prime editing composition corrects the mutation compared to a wild type CFTR gene sequence. In some embodiments, the subject comprises two copies of CFTR gene, each of which comprises a mutation in exon 1, exon 2, exon 3, exon 4, exon 5, exon 6, exon 7, exon 8, exon 9, exon 10, exon 11, exon 12, exon 13, exon 14, exon 15, exon 16, exon 17, exon 18, exon 19, exon 20, exon 21, exon 22, exon 23, exon 24, exon 25, exon 26, or exon 27 as compared to a wild type CFTR gene, wherein in administering a prime editing composition corrects the mutation compared to a wild type CFTR gene sequence. In some embodiments, the prime editing composition comprises at least two PEgRNAs. In some embodiments, the prime editing composition comprises a single PEgRNA.

[0925] In some embodiments, the subject comprises at least a copy of CFTR gene that comprises one or more mutations that encode one or more of a G85E mutation, a G85V mutation, a R117L mutation, a R117H mutation, a R117P mutation, a R334W mutation, a R347C mutation, a R347P mutation, a R347L mutation, a R347H mutation, a A455V mutation, a A455E mutation, a F508 deletion, a F5081 mutation, a F508S mutation, a F508C mutation, a G542* mutation, a S549R mutation, a S549I mutation, a S549N mutation, a S549R mutation, a G551S mutation, a G551A mutation, a G551D mutation, a R553G mutation, a R553* mutation, a R553Q mutation, a K684 frameshift mutation, a D1152H mutation, a R1158* mutation, a R1162* mutation, a R1162L mutation, a R1162Q mutation, a K1177R mutation, a W1282R mutation, a W1282G mutation, a W1282* mutation, a W1282C mutation, a N1303H mutation, a N1303I mutation, and a N1303K mutation as compared to a wild type CFTR protein as set forth in SEQ ID NO: 19, wherein in administering a prime editing composition corrects the one or more mutations. In some embodiments, the subject comprises two copies of CFTR gene, wherein each copy of the CFTR gene comprises one or more mutations that encode one or more of a G85E mutation, a G85V mutation, a R117L mutation, a R117H mutation, a R117P mutation, a R334W mutation, a R347C mutation, a R347P mutation, a R347L mutation, a R347H mutation, a A455V mutation, a A455E mutation, a F508 deletion, a F508I mutation, a F508S mutation, a F508C mutation, a G542* mutation, a S549R mutation, a S549I mutation, a S549N mutation, a S549R mutation, a G551S mutation, a G551A mutation, a G551D mutation, a R553G mutation, a R553* mutation, a R553Q mutation, a K684 frameshift mutation, a D1152H mutation, a R1158* mutation, a R1162* mutation, a R1162L mutation, a R1162Q mutation, a K1177R mutation, a W1282R mutation, a W1282G mutation, a W1282* mutation, a W1282C mutation, a N1303H mutation, a N1303I mutation, and a N1303K mutation as compared to a wild type CFTR protein as set forth in SEQ ID NO: 19, wherein in administering a prime editing composition corrects the one or more mutations on both copies of the CFTR gene. In some embodiments, the prime editing composition comprises at least two PEgRNAs. In some embodiments, the prime editing composition comprises a single PEgRNA.

[0926] In some embodiments, the subject comprises at least a copy of CFTR gene that comprises two or more of a c.254G>T mutation, a c.254G>A mutation, a c.248 TT duplication, a c.252T>A-mutation, a c.259T>A mutation, a c.262_263 TT deletion, a c.263T>G mutation, a c.263T>A mutation, and a c.264_268 ATATT deletion compared to a wild type CFTR gene, wherein administration of a prime editing composition corrects the two or more mutations and/or results in expression of a functional CFTR protein. In some embodiments, the subject comprises two copies of CFTR gene, wherein each copy of the CFTR gene comprises a one or more different mutations selected from a c.254G>T mutation, a c.254G>T mutation, a c.248 TT duplication, a c.252T>A-mutation, a c.259T>A mutation, a c.262_263 TT deletion, a c.263T>G mutation, a c.263T>A mutation, and a c.264_268 ATATT deletion compared to a wild type CFTR gene, wherein administration of a prime editing composition corrects the two or more mutations and/or results in expression of a functional CFTR protein. In some embodiments, the prime editing composition comprises two or more PEgRNAs. In some embodiments, the prime editing composition comprises a single PEgRNA.

[0927] In some embodiments, the subject comprises at least a copy of CFTR gene that comprises two or more of a c.340A>T mutation; a c.340_342 AAG deletion; a c.341_353 AGGAGGAACGCTC (SEQ ID NO: 348) deletion del; a c.343G>T mutation; a c.345_347 GGA deletion; a c.346G>C mutation; a c.346G>T mutation; a c.349C>G mutation; a c.350G>C mutation; a c.350G>T mutation; a c.350G>A mutation; a c.357 deletion of nucleotide C; and a c.358G>C mutation compared to a wild type CFTR gene, wherein administration of a prime editing composition corrects the two or more mutations and/or results in expression of a functional CFTR protein. In some embodiments, the subject comprises two copies of CFTR gene, wherein each copy of the CFTR gene comprises a one or more different mutations selected from a c.340A>T mutation; a c.340_342 AAG deletion; a c.341_353 AGGAGGAACGCTC (SEQ ID NO: 348) deletion del; a c.343G>T mutation; a c.345_347 GGA deletion; a c.346G>C mutation; a c.346G>T mutation; a c.349C>G mutation; a c.350G>C mutation; a c.350G>T mutation; a c.357 deletion of nucleotide C; and a c.358G>C mutation compared to a wild type CFTR gene, wherein administration of a prime editing composition corrects the two or more mutations and/or results in expression of a functional CFTR protein. In some embodiments, the prime editing composition comprises two or more PEgRNAs. In some embodiments, the prime editing composition comprises a single PEgRNA.

[0928] In some embodiments, the subject comprises at least a copy of CFTR gene that comprises two or more of a c.1000C→T mutation, a c.1001G→T mutation, a c.1006_1007 insertion of nucleotide G, and a c.1007T→A mutation compared to a wild type CFTR gene, wherein administration of a prime editing composition corrects the two or more mutations and/or results in expression of a functional CFTR protein. In some embodiments, the subject comprises two copies of CFTR gene, wherein each copy of the CFTR gene comprises a one or more different mutations selected from c.1000C→T mutation, a c.1001G→T mutation, a c.1006_1007 insertion of nucleotide G, and a c.1007T→A mutation compared to a wild type CFTR gene, wherein administration of a prime editing composition corrects the two or more mutations and/or results in expression of a functional CFTR protein. In some embodiments, the prime editing composition comprises two or more PEgRNAs. In some embodiments, the prime editing composition comprises a single PEgRNA.

[0929] In some embodiments, the subject comprises at least a copy of CFTR gene that comprises two or more of a c.1039C→T mutation, a c.1029_1030 insertion of nucleotide G, a c.1029 deletion of nucleotide C, a c.1040G→C mutation, a c.1040G→T mutation, and a c.1043T→A mutation compared to a wild type CFTR gene, wherein administration of a prime editing composition corrects the two or more mutations and/or results in expression of a functional CFTR protein. In some embodiments, the subject comprises two copies of CFTR gene, wherein each copy of the CFTR gene comprises a one or more different mutations selected from c.1039C→T mutation, a c.1029_1030 insertion of nucleotide G, a c.1029 deletion of nucleotide C, a c.1040G→C mutation, a c.1040G→T mutation, and a c.1043T→A mutation compared to a wild type CFTR gene, wherein administration of a prime editing composition corrects the two or more mutations and/or results in expression of a functional CFTR protein. In some embodiments, the prime editing composition comprises two or more PEgRNAs. In some embodiments, the prime editing composition comprises a single PEgRNA.

[0930] In some embodiments, the subject comprises at least a copy of CFTR gene that comprises two or more of a c.1364C→T mutation, a c.1355A→C mutation, a c.1358 deletion of nucleotide T, a c.1360_1362 TTG deletion, a c.1364C→A mutation, a c.1365_1366 GG deletion, a c.1366G→T mutation, a c.1366 deletion of nucleotide G, a c.1369G→C mutation, a c.1373 deletion of nucleotide G, and a c.1373G→T mutation compared to a wild type CFTR gene, wherein administration of a prime editing composition corrects the two or more mutations and/or results in expression of a functional CFTR protein. In some embodiments, the subject comprises two copies of CFTR gene, wherein each copy of the CFTR gene comprises a one or more different mutations selected from c.1364C→T mutation, a c.1355A→C mutation, a c.1358 deletion of nucleotide T, a c.1360_1362 TTG deletion, a c.1364C→A mutation, a c.1365_1366 GG deletion, a c.1366G→T mutation, a c.1366 deletion of nucleotide G, a c.1369G→C mutation, a c.1373 deletion of nucleotide G, and a c.1373G→T mutation compared to a wild type CFTR gene, wherein administration of a prime editing composition corrects the two or more mutations and/or results in expression of a functional CFTR protein. In some embodiments, the prime editing composition comprises two or more PEgRNAs. In some embodiments, the prime editing composition comprises a single PEgRNA.

[0931] In some embodiments, the subject comprises at least a copy of CFTR gene that comprises two or more of a c.1521_1523 T→C mutation, a c.1513A→C mutation, a c.1514 deletion of nucleotide A, a c.1516A→C mutation, a c.1517T-G mutation, a c.1518C-G mutation, a c.1519_1521 ATC deletion, a c.1516_1520 ATCAT duplication, a c.1520T-A mutation, a c.1521_1523 CTT deletion, a c.1522T→A mutation, a c.1523T-G mutation, a c.1525G→C mutation, a c.1526G→C mutation, and a c.1528 deletion of nucleotide G, and a c.1530_1531 TT deletion compared to a wild type CFTR gene, wherein administration of a prime editing composition corrects the two or more mutations and/or results in expression of a functional CFTR protein. In some embodiments, the subject comprises two copies of CFTR gene, wherein each copy of the CFTR gene comprises a one or more different mutations selected from c.1521_1523 T→C mutation, a c.1513A→C mutation, a c.1514 deletion of nucleotide A, a c.1516A→C mutation, a c.1517T-G mutation, a c.1518C-G mutation, a c.1519_1521 ATC deletion, a c.1516_1520 ATCAT duplication, a c.1520T-A mutation, a c.1521_1523 CTT deletion, a c.1522T→A mutation, a c.1523T-G mutation, a c.1525G→C mutation, a c.1526G→C mutation, a c.1528 deletion of nucleotide G, and a c.1530_1531 TT deletion compared to a wild type CFTR gene, wherein administration of a prime editing composition corrects the two or more mutations and/or results in expression of a functional CFTR protein. In some embodiments, the prime editing composition comprises two or more PEgRNAs. In some embodiments, the prime editing composition comprises a single PEgRNA.

[0932] In some embodiments, the subject comprises at least a copy of CFTR gene that comprises two or more of a c.1616_1617 TA duplication, a c.1624G→T mutation, a c.1628A→C mutation, a c.1630G→T mutation, a c.1631G→T mutation, and a c.1634G→T mutation compared to a wild type CFTR gene, wherein administration of a prime editing composition corrects the two or more mutations and/or results in expression of a functional CFTR protein. In some embodiments, the subject comprises two copies of CFTR gene, wherein each copy of the CFTR gene comprises a one or more different mutations selected from a c.1616_1617 TA duplication, a c.1624G→T mutation, a c.1628A→C mutation, a c.1630G→T mutation, a c.1631G→T mutation, and a c.1634G→T mutation compared to a wild type CFTR gene, wherein administration of a prime editing composition corrects the two or more mutations and/or results in expression of a functional CFTR protein. In some embodiments, the prime editing composition comprises two or more PEgRNAs. In some embodiments, the prime editing composition comprises a single PEgRNA.

[0933] In some embodiments, the subject comprises at least a copy of CFTR gene that comprises two or more of a c.1645A→C mutation, a c.1636_1641 ATCACA deletion, a c.1642_1643 CT deletion, a c.1643T→A mutation, a c.1646G→T mutation, a c.1646G→A mutation, a c.1647T→G mutation, a c.1648G→T mutation, a c.1650 deletion of nucleotide A, a c.1652G→C mutation, a c.1652 deletion of nucleotide G, a c.1654C→A mutation, c.1656 deletion of nucleotide A, chr7:a c.1657C→G mutation, c.1651G→A mutation, a c.1660_1661 insertion of nucleotide A, a c.1661C→A mutation, a c.1652G→A mutation, a c.1657C→T mutation, and a c.1658G→A mutation compared to a wild type CFTR gene, wherein administration of a prime editing composition corrects the two or more mutations and/or results in expression of a functional CFTR protein. In some embodiments, the subject comprises two copies of CFTR gene, wherein each copy of the CFTR gene comprises a one or more different mutations selected from a c.1645A→C mutation, a c.1636_1641 ATCACA deletion, a c.1642_1643 CT deletion, a c.1643T→A mutation, a c.1646G→T mutation, a c.1646G→A mutation, a c.1647T→G mutation, a c.1648G→T mutation, a c.1650 deletion of nucleotide A, a c.1652G→C mutation, a c.1652 deletion of nucleotide G, a c.1654C→A mutation, c.1656 deletion of nucleotide A, chr7:a c.1657C→G mutation, c.1651G→A mutation, a c.1660_1661 insertion of nucleotide A, a c.1661C→A mutation, a c.1652G→A mutation, a c.1657C→T mutation, and a c.1658G→A mutation compared to a wild type CFTR gene, wherein administration of a prime editing composition corrects the two or more mutations and/or results in expression of a functional CFTR protein. In some embodiments, the prime editing composition comprises two or more PEgRNAs. In some embodiments, the prime editing composition comprises a single PEgRNA.

[0934] In some embodiments, the subject comprises at least a copy of CFTR gene that comprises two or more of a c.2052 deletion of nucleotide A, a c.2042A→T mutation, a c.2044 deletion of nucleotide A, a c.2045 duplication of nucleotide C, a c.2051_2052 deletion of nucleotides AA and insertion of nucleotide G, a c.2051_2052 AA deletion, a c.2052 duplication of nucleotide A, a c.2052 deletion of nucleotide A, a c.2053 duplication of nucleotide C, a c.2057C→A mutation, a c.2058_2061 TTTT duplication, a c.2061deletion of nucleotide T, and a c.2062A→T mutation compared to a wild type CFTR gene, wherein administration of a prime editing composition corrects the two or more mutations and/or results in expression of a functional CFTR protein. In some embodiments, the subject comprises two copies of CFTR gene, wherein each copy of the CFTR gene comprises a one or more different mutations selected from c.2052 deletion of nucleotide A, a c.2042A→T mutation, a c.2044 deletion of nucleotide A, a c.2045 duplication of nucleotide C, a c.2051_2052 deletion of nucleotides AA and insertion of nucleotide G, a c.2051_2052 AA deletion, a c.2052 duplication of nucleotide A, a c.2052 deletion of nucleotide A, a c.2053 duplication of nucleotide C, a c.2057C→A mutation, a c.2058_2061 TTTT duplication, a c.2061deletion of nucleotide T, and a c.2062A→T mutation compared to a wild type CFTR gene, wherein administration of a prime editing composition corrects the two or more mutations and/or results in expression of a functional CFTR protein. In some embodiments, the prime editing composition comprises two or more PEgRNAs. In some embodiments, the prime editing composition comprises a single PEgRNA.

[0935] In some embodiments, the subject comprises at least a copy of CFTR gene that comprises two or more of a c.3454G→C mutation, a c.3444C→A mutation, a c.3444 deletion of nucleotide C, a c.3445 deletion of nucleotide T, a c.3458T→A mutation, and a c.3460G→T mutation compared to a wild type CFTR gene, wherein administration of a prime editing composition corrects the two or more mutations and/or results in expression of a functional CFTR protein. In some embodiments, the subject comprises two copies of CFTR gene, wherein each copy of the CFTR gene comprises a one or more different mutations selected from c.3454G→C mutation, a c.3444C→A mutation, a c.3444 deletion of nucleotide C, a c.3445 deletion of nucleotide T, a c.3458T→A mutation, and a c.3460G→T mutation compared to a wild type CFTR gene, wherein administration of a prime editing composition corrects the two or more mutations and/or results in expression of a functional CFTR protein. In some embodiments, the prime editing composition comprises two or more PEgRNAs. In some embodiments, the prime editing composition comprises a single PEgRNA.

[0936] In some embodiments, the subject comprises at least a copy of CFTR gene that comprises two or more of a c.3472C→T mutation, a c.3477 deletion of nucleotide T, c.3484C→T mutation, a c.3483C→G mutation, a c.3485G→T mutation, a c.3486_3487 AG deletion, a c.3492 duplication of nucleotide T, a c.3494A→C mutation, and a c.3495 deletion of nucleotide G compared to a wild type CFTR gene, wherein administration of a prime editing composition corrects the two or more mutations and/or results in expression of a functional CFTR protein. In some embodiments, the subject comprises two copies of CFTR gene, wherein each copy of the CFTR gene comprises a one or more different mutations selected from c.3472C→T mutation, a c.3477 deletion of nucleotide T, c.3484C→T mutation, a c.3483C→G mutation, a c.3485G→T mutation, a c.3486_3487 AG deletion, a c.3492 duplication of nucleotide T, a c.3494A→C mutation, and a c.3495 deletion of nucleotide G compared to a wild type CFTR gene, wherein administration of a prime editing composition corrects the two or more mutations and/or results in expression of a functional CFTR protein. In some embodiments, the prime editing composition comprises two or more PEgRNAs. In some embodiments, the prime editing composition comprises a single PEgRNA.

[0937] In some embodiments, the subject comprises at least a copy of CFTR gene that comprises two or more of a c.3530A-G mutation, a c.3528 deletion of nucleotide C, a c.3529A→T mutation, a c.3530 deletion of nucleotide A, a c.3532_3535 TCAA duplication, a c.3536_3539 CCAA deletion, and a c.3540 deletion of nucleotide A compared to a wild type CFTR gene, wherein administration of a prime editing composition corrects the two or more mutations and/or results in expression of a functional CFTR protein. In some embodiments, the subject comprises two copies of CFTR gene, wherein each copy of the CFTR gene comprises a one or more different mutations selected from c.3530A→G mutation, a c.3528 deletion of nucleotide C, a c.3529A→T mutation, a c.3530 deletion of nucleotide A, a c.3532_3535 TCAA duplication, a c.3536_3539 CCAA deletion, and a c.3540 deletion of nucleotide A compared to a wild type CFTR gene, wherein administration of a prime editing composition corrects the two or more mutations and/or results in expression of a functional CFTR protein. In some embodiments, the prime editing composition comprises two or more PEgRNAs. In some embodiments, the prime editing composition comprises a single PEgRNA.

[0938] In some embodiments, the subject comprises at least a copy of CFTR gene that comprises two or more of a c.3844T→C mutation, a c.3844T→G mutation, a c.3846G→T mutation, a c.3848G→T mutation, c.3846G→A mutation, and a c.3855 deletion of nucleotide C compared to a wild type CFTR gene, wherein administration of a prime editing composition corrects the two or more mutations and/or results in expression of a functional CFTR protein. In some embodiments, the subject comprises two copies of CFTR gene, wherein each copy of the CFTR gene comprises a one or more different mutations selected from c.3844T→C mutation, a c.3844T-G mutation, a c.3846G→T mutation, a c.3848G→T mutation, c.3846G→A mutation, and a c.3855 deletion of nucleotide compared to a wild type CFTR gene, wherein administration of a prime editing composition corrects the two or more mutations and/or results in expression of a functional CFTR protein. In some embodiments, the prime editing composition comprises two or more PEgRNAs. In some embodiments, the prime editing composition comprises a single PEgRNA.

[0939] In some embodiments, the subject comprises at least a copy of CFTR gene that comprises two or more of a c.3907A→C mutation, a c.3904A→T mutation, a c.3908 duplication of nucleotide A, a c.3908A→T mutation, a c.3908 deletion of nucleotide A, a c.3909C→G mutation, a c.3909_3914 deletion of nucleotides CTTGGA and insertion of nucleotides TGT, a c.3915T→A mutation, and a c.3917_3918 CC duplication compared to a wild type CFTR gene, wherein administration of a prime editing composition corrects the two or more mutations and/or results in expression of a functional CFTR protein. In some embodiments, the subject comprises two copies of CFTR gene, wherein each copy of the CFTR gene comprises a one or more different mutations selected from c.3907A→C mutation, a c.3904A→T mutation, a c.3908 duplication of nucleotide A, a c.3908A→T mutation, a c.3908 deletion of nucleotide A, a c.3909C-G mutation, a c.3909_3914 deletion of nucleotides CTTGGA and insertion of nucleotides TGT, a c.3915T→A mutation, and a c.3917_3918 CC duplication compared to a wild type CFTR gene, wherein administration of a prime editing composition corrects the two or more mutations and/or results in expression of a functional CFTR protein. In some embodiments, the prime editing composition comprises two or more PEgRNAs. In some embodiments, the prime editing composition comprises a single PEgRNA.

[0940] In some embodiments, the subject comprises at least a copy of CFTR gene that comprises a c.1521_1523 CTT deletion as compared to a wild type CFTR gene. In some embodiments, the subject comprises two copies of CFTR gene, each of which comprises a c.1521_1523 CTT deletion as compared to a wild type CFTR gene. In some embodiments, administration of a prime editing composition results in incorporation of one or more intended nucleotide edits in the CFTR gene, wherein incorporation of the one or more intended nucleotide edits results in expression of a functional CFTR protein. In some embodiments, administration of a prime editing composition results in incorporation of one or more intended nucleotide edits in the CFTR gene, wherein incorporation of the one or more intended nucleotide edits corrects the c.1521_1523 CTT deletion on one or both copies of the CFTR gene. In some embodiments, the subject comprises two copies of CFTR gene, wherein a first copy comprises a c.1521_1523 CTT deletion as compared to a wild type CFTR gene and wherein a second copy comprises a pathogenic mutation other than a c.1521_1523 CTT deletion as compared to a wild type CFTR gene. In some embodiments, administration of a prime editing composition results in incorporation of one or more intended nucleotide edits in the CFTR gene, wherein incorporation of the one or more intended nucleotide edits results in expression of a functional CFTR protein encoded by at least one copy of the two copies of CFTR gene. In some embodiments, administration of a prime editing composition results in incorporation of one or more intended nucleotide edits in the CFTR gene, wherein incorporation of the one or more intended nucleotide edits corrects the c.1521_1523 CTT deletion and/or the pathogenic mutation other than a c.1521_1523 CTT deletion. In some embodiments, the prime editing composition comprises two or more PEgRNAs. In some embodiments, the prime editing composition comprises a single PEgRNA.

[0941] In some embodiments, the subject comprises at least a copy of CFTR gene that comprises two or more of a c.1624G>T mutation, a c.1646G>A mutation, a c.1652G>A mutation, and a c.1657C>T mutation compared to a wild type CFTR gene. In some embodiments, administration of a prime editing composition results in incorporation of one or more intended nucleotide edits in the CFTR gene, wherein incorporation of the one or more intended nucleotide edits results in expression of a functional CFTR protein. For example, in some embodiments, the CFTR gene comprises a c.1624G>T mutation, incorporation of the one or more nucleotide edits results in a A>T or A>C substitution at a position corresponding to position 117587778 of human chromosome 7, thereby replacing the G542 nonsense mutation in the CFTR protein encoded by the CFTR gene with a Cystine and allowing for expression of a functional CFTR protein. In some embodiments, administration of the prime editing composition results in incorporation of one or more intended nucleotide edits in the CFTR gene, wherein incorporation of the one or more intended nucleotide edits corrects each of the two or more mutations in the CFTR gene. In some embodiments, the subject comprises two copies of CFTR gene, wherein each of the two copies comprises a mutation selected from a c.1624G>T mutation, a c.1646G>A mutation, a c.1652G>A mutation, and a c.1657C>T mutation compared to a wild type CFTR gene. In some embodiments, each of the two copies of CFTR gene comprises a different mutation selected from a c.1624G>T mutation, a c.1646G>A mutation, a c.1652G>A mutation, and a c.1657C>T mutation compared to a wild type CFTR gene. In some embodiments, administration of a prime editing composition results in incorporation of one or more intended nucleotide edits in the CFTR gene, wherein incorporation of the one or more intended nucleotide edits results in expression of a functional CFTR protein. In some embodiments, administration of the prime editing composition results in incorporation of one or more intended nucleotide edits in the CFTR gene, wherein incorporation of the one or more intended nucleotide edits corrects each of the two or more mutations in the CFTR gene. In some embodiments, the prime editing composition comprises two or more PEgRNAs. In some embodiments, the prime editing composition comprises a single PEgRNA.

[0942] In some embodiments, the subject comprises at least a copy of CFTR gene that comprises a c.3472C>T mutation and a c.3484C>T mutation compared to a wild type CFTR gene. In some embodiments, administration of a prime editing composition results in incorporation of one or more intended nucleotide edits in the CFTR gene, wherein incorporation of the one or more intended nucleotide edits results in expression of a functional CFTR protein. In some embodiments, administration of the prime editing composition results in incorporation of one or more intended nucleotide edits in the CFTR gene, wherein incorporation of the one or more intended nucleotide edits corrects both the c.3472C>T mutation and the c.3484C>T mutation in the CFTR gene. In some embodiments, the subject comprises two copies of CFTR gene, wherein each of the two copies comprises a c.3472C>T mutation and/or a c.3484C>T mutation compared to a wild type CFTR gene. In some embodiments, each of the two copies of CFTR gene comprises a different mutation selected from a c.3472C>T mutation and a c.3484C>T mutation compared to a wild type CFTR gene. In some embodiments, administration of a prime editing composition results in incorporation of one or more intended nucleotide edits in the CFTR gene, wherein incorporation of the one or more intended nucleotide edits results in expression of a functional CFTR protein. In some embodiments, administration of the prime editing composition results in incorporation of one or more intended nucleotide edits in the CFTR gene, wherein incorporation of the one or more intended nucleotide edits corrects each of the two or more mutations in the CFTR gene. In some embodiments, the prime editing composition comprises two or more PEgRNAs. In some embodiments, the prime editing composition comprises a single PEgRNA.

[0943] In some embodiments, the subject comprises at least a copy of the CFTR gene comprising a mutation that encodes an amino acid substitution F508del relative to a wild type CFTR polypeptide set forth in SEQ ID NO: 19. In some embodiments, the subject comprises at least a copy of CFTR gene that comprises a CTT deletion at positions chr7:117559591-117559594 (GRCh38) of the CFTR gene. In some embodiments, the PEgRNA comprises a spacer comprising a sequence selected from SEQ ID NOs: A330-A334, A343-A361, and A364-A380. In some embodiments, the PEgRNA comprises a PBS comprising a sequence selected from the group consisting of SEQ ID NOs: B1377-B1403, B1413-B1520, and B1530-B1565. In some embodiments, the PEgRNA comprises an editing template comprising a sequence selected from the group consisting of SEQ ID NO: C4592-C4964 and C4976-C5414.

[0944] In some embodiments, the method comprises directly administering prime editing compositions provided herein to a subject. The prime editing compositions described herein can be delivered with in any form as described herein, e.g., as LNPs, RNPs, polynucleotide vectors such as viral vectors, or mRNAs. The prime editing compositions can be formulated with any pharmaceutically acceptable carrier described herein or known in the art for administering directly to a subject. Components of a prime editing composition or a pharmaceutical composition thereof may be administered to the subject simultaneously or sequentially. For example, in some embodiments, the method comprises administering a prime editing composition, or pharmaceutical composition thereof, comprising a complex that comprises a prime editor fusion protein and a PEgRNA and/or a ngRNA, to a subject. In some embodiments, the method comprises administering a polynucleotide or vector encoding a prime editor to a subject simultaneously with a PEgRNA and/or a ngRNA. In some embodiments, the method comprises administering a polynucleotide or vector encoding a prime editor to a subject before administration with a PEgRNA and/or a ngRNA.

[0945] Suitable routes of administrating the prime editing compositions to a subject include, without limitation: topical, subcutaneous, transdermal, intradermal, intralesional, intraarticular, intraperitoneal, intravesical, transmucosal, gingival, intradental, intracochlear, transtympanic, intraorgan, epidural, intrathecal, intramuscular, intravenous, intravascular, intraosseus, periocular, intratumoral, intracerebral, and intracerebroventricular administration. In some embodiments, the compositions described are administered intraperitoneally, intravenously, or by direct injection or direct infusion. In some embodiments, the compositions described are administered by inhalation therapy, e.g., by aerosolized or nebulized compositions. In some embodiments, the compositions described are administered by direct injection or infusion into an affected organ or tissue of a subject, e.g., the lungs or pancreas. In some embodiments, the compositions described herein are administered to a subject by injection, by means of a catheter, by means of a suppository, or by means of an implant.

[0946] In some embodiments, the method comprises administering cells edited with a prime editing composition described herein to a subject. In some embodiments, the cells are allogeneic. In some embodiments, allogeneic cells are or have been contacted ex vivo with a prime editing composition or pharmaceutical composition thereof and are introduced into a human subject in need thereof. In some embodiments, the cells are autologous to the subject. In some embodiments, cells are removed from a subject and contacted ex vivo with a prime editing composition or pharmaceutical composition thereof and are re-introduced into the subject.

[0947] In some embodiments, cells are contacted ex vivo with one or more components of a prime editing composition. In some embodiments, the ex vivo-contacted cells are introduced into the subject, and the subject is administered in vivo with one or more components of a prime editing composition. For example, in some embodiments, cells are contacted ex vivo with a prime editor and introduced into a subject. In some embodiments, the subject is then administered with a PEgRNA and/or a ngRNA, or a polynucleotide encoding the PEgRNA and/or the ngRNA.

[0948] In some embodiments, cells contacted with the prime editing composition are determined for incorporation of the one or more intended nucleotide edits in the genome before re-introduction into the subject. In some embodiments, the cells are enriched for incorporation of the one or more intended nucleotide edits in the genome before re-introduction into the subject. In some embodiments, the edited cells are primary cells. In some embodiments, the edited cells are progenitor cells. In some embodiments, the edited cells are stem cells. In some embodiments, the edited cells are hepatocytes. In some embodiments, the edited cells are primary human cells. In some embodiments, the edited cells are human progenitor cells. In some embodiments, the edited cells are human stem cells.

[0949] In some embodiments, the edited cells are induced human pluripotent stem cells (iPSCs). In some embodiments, the edited cells are lung progenitor cells. In some embodiments, the edited cells are bronchioalveolar stem cells. In some embodiments, the edited cells are human bronchioalveolar stem cells. In some embodiments, the edited cells are human lung progenitor cells. In some embodiments, the edited cells are basal cells. In some embodiments, the edited cells are club cells. In some embodiments, the edited cells are ciliated cells. In some embodiments, the edited cells are club cells. In some embodiments, the edited cells are ionocytes, e.g., pulmonary human ionocytes. In some embodiments, the edited cells are human basal cells. In some embodiments, the cell is a human basal cell from the respiratory epithelium. In some embodiments, the edited cells are human club cells. In some embodiments, the edited cells are human ciliated cells. In some embodiments, the edited cells are club cells. In some embodiments, the edited cells are human ionocytes, e.g., pulmonary human ionocytes. In some embodiments, the edited cells are epithelial cells. In some embodiments, the edited cells are airway epithelial cells. In some embodiments, the edited cells are human airway epithelial cells. In some embodiments, the edited cells are bronchial epithelial cells. In some embodiments, the edited cells are human bronchial epithelial cells. In some embodiments, the edited cells are human bronchial epithelial cells induced from iPSCs. In some embodiments, the edited cells are pancreatic epithelial cells. In some embodiments, the edited cells are pancreatic ductal epithelia cells. In some embodiments, the edited cells are pancreatic acinar cells. In some embodiments, the edited cells are human pancreatic epithelial cells. In some embodiments, the edited cells are human pancreatic ductal epithelia cells. In some embodiments, the edited cells are human pancreatic acinar cells. In some embodiments, the edited cells are hepatocytes. In some embodiments, the edited cells are human hepatocytes. In some embodiments, the edited cells are kidney epithelial cells. In some embodiments, the edited cells are intestine epithelial cells. In some embodiments, the edited cells are human kidney epithelial cells. In some embodiments, the edited cells are human intestine epithelial cells. In some embodiments, the edited cells are tuft cells. In some embodiments, the edited cells are neuroendocrine cells. In some embodiments, the edited cells are goblet cells. In some embodiments, the edited cells are reproductive tissue epithelial cells. In some embodiments, the edited cells are sperm canal epithelial cells. In some embodiments, the edited cells are human tuft cells. In some embodiments, the edited cells are human neuroendocrine cells. In some embodiments, the edited cells are human goblet cells. In some embodiments, the edited cells are human reproductive tissue epithelial cells. In some embodiments, the edited cells are human sperm canal epithelial cells. In some embodiments, the edited cells are an ex vivo cells. In some embodiments, the edited cells are an ex vivo cells obtained from a human subject. In some embodiments, the edited cells are in a subject, e.g., a human subject.

[0950] The prime editing composition or components thereof may be introduced into a cell by any delivery approaches as described herein, including LNP administration, RNP administration, electroporation, nucleofection, transfection, viral transduction, microinjection, cell membrane disruption and diffusion, or any other approach known in the art.

[0951] The cells edited with prime editing can be introduced into the subject by any route known in the art. In some embodiments, the edited cells are administered to a subject by direct infusion. In some embodiments, the edited cells are administered to a subject by intravenous infusion. In some embodiments, the edited cells are administered to a subject as implants.

[0952] The pharmaceutical compositions, prime editing compositions, and cells, as described herein, can be administered in effective amounts. In some embodiments, the effective amount depends upon the mode of administration. In some embodiments, the effective amount depends upon the stage of the condition, the age and physical condition of the subject, the nature of concurrent therapy, if any, and like factors well-known to the medical practitioner.

[0953] The specific dose administered can be a uniform dose for each subject. Alternatively, a subject's dose can be tailored to the approximate body weight of the subject. Other factors in determining the appropriate dosage can include the disease or condition to be treated or prevented, the severity of the disease, the route of administration, and the age, sex and medical condition of the patient.

[0954] In embodiments wherein components of a prime editing composition are administered sequentially, the time between sequential administration can be at least 1 hour, at least 2 hours, at least 6 hours, at least 12 hours, at least 24 hours, at least 36 hours, at least 48 hours, at least 3 days, at least 4 days, at least 5 days, at least 7 days, at least 10 days, or at least 14 days.

[0955] In some embodiments, a method of monitoring treatment progress is provided. In some embodiments, the method includes the step of determining a level of diagnostic marker, for example, correction of a mutation in CFTR gene, or diagnostic measurement associated with Cystic Fibrosis, (e.g., chloride efflux assay) in a subject suffering from Cystic Fibrosis symptoms and has been administered an effective amount of a prime editing composition described herein. The level of the diagnostic marker determined in the method can be compared to known levels of the marker in either healthy normal controls or in other afflicted subjects to establish the subject's disease status.

### Delivery

[0956] Prime editing compositions described herein can be delivered to a cellular environment with any approach known in the art. Components of a prime editing composition can be delivered to a cell by the same mode or different modes. For example, in some embodiments, a prime editor can be delivered as a polypeptide or a polynucleotide (DNA or RNA) encoding the polypeptide. In some embodiments, a PEgRNA can be delivered directly as an RNA or as a DNA encoding the PEgRNA.

[0957] In some embodiments, a prime editing composition component is encoded by a polynucleotide, a vector, or a construct. In some embodiments, a prime editor polypeptide, a PEgRNA and/or a ngRNA is encoded by a polynucleotide. In some embodiments, the polynucleotide encodes a prime editor fusion protein comprising a DNA binding domain and a DNA polymerase domain. In some embodiments, the polynucleotide encodes a DNA polymerase domain of a prime editor. In some embodiments, the polynucleotide encodes a DNA polymerase domain of a prime editor. In some embodiments, the polynucleotide encodes a portion of a prime editor protein, for example, a N-terminal portion of a prime editor fusion protein connected to an intein-N. In some embodiments, the polynucleotide encodes a portion of a prime editor protein, for example, a C-terminal portion of a prime editor fusion protein connected to an intein-C. In some embodiments, the polynucleotide encodes a PEgRNA and/or a ngRNA. In some embodiments, the polypeptide encodes two or more components of a prime editing composition, for example, a prime editor fusion protein and a PEgRNA.

[0958] In some embodiments, the polynucleotide encoding one or more prime editing composition components is delivered to a target cell is integrated into the genome of the cell for long-term expression, for example, by a retroviral vector. In some embodiments, the polynucleotide delivered to a target cell is expressed transiently. For example, the polynucleotide may be delivered in the form of a mRNA, or a non-integrating vector (non-integrating virus, plasmids, minicircle DNAs) for episomal expression.

[0959] In some embodiments, a polynucleotide encoding one or more prime editing system components can be operably linked to a regulatory element, e.g., a transcriptional control element, such as a promoter. In some embodiments, the polynucleotide is operably linked to multiple control elements. Depending on the expression system utilized, any of a number of suitable transcription and translation control elements, including constitutive and inducible promoters, transcription enhancer elements, transcription terminators, etc. may be used in the expression vector (e.g., U6 promoter, H1 promoter).

[0960] In some embodiments, the polynucleotide encoding one or more prime editing composition components is a part of, or is encoded by, a vector. In some embodiments, the vector is a viral vector. In some embodiments, the vector is a non-viral vector.

[0961] Non-viral vector delivery systems can include DNA plasmids, RNA (e.g., a transcript of a vector described herein), naked nucleic acid, and nucleic acid complexed with a delivery vehicle, such as a liposome. In some embodiments, the polynucleotide is provided as an RNA, e.g., a mRNA or a transcript. Any RNA of the prime editing systems, for example a guide RNA or a base editor-encoding mRNA, can be delivered in the form of RNA. In some embodiments, one or more components of the prime editing system that are RNAs is produced by direct chemical synthesis or may be transcribed in vitro from a DNA. In some embodiments, a mRNA that encodes a prime editor polypeptide is generated using in vitro transcription. Guide polynucleotides (e.g., PEgRNA or ngRNA) can also be transcribed using in vitro transcription from a cassette containing a T7 promoter, followed by the sequence “GG”, and guide polynucleotide sequence. In some embodiments, the prime editor encoding mRNA, PEgRNA, and/or ngRNA are synthesized in vitro using an RNA polymerase enzyme (e.g., T7 polymerase, T3 polymerase, SP6 polymerase, etc.). Once synthesized, the RNA can directly contact a target CFTR gene or can be introduced into a cell using any suitable technique for introducing nucleic acids into cells (e.g., microinjection, electroporation, transfection). In some embodiments, the prime editor-coding sequences, the PEgRNAs, and/or the ngRNAs are modified to include one or more modified nucleoside e.g. using pseudo-U or 5-Methyl-C.

[0962] Methods of non-viral delivery of nucleic acids can include lipofection, electroporation, nucleofection, microinjection, biolistics, virosomes, liposomes, immunoliposomes, polycation or lipid:nucleic acid conjugates, nanoparticles, cell penetrating peptides and associated conjugated molecules and chemistry, naked DNA, artificial virions, cell membrane disruption by a microfluidics device, and agent-enhanced uptake of DNA. Cationic and neutral lipids that are suitable for efficient receptor-recognition lipofection of polynucleotides can be used. Delivery can be to cells (e.g., in vitro or ex vivo administration) or target tissues (e.g., in vivo administration). The preparation of lipid:nucleic acid complexes, including targeted liposomes such as immunolipid complexes, can be used.

[0963] Viral vector delivery systems can include DNA and RNA viruses, which can have either episomal or integrated genomes after delivery to the cell. RNA or DNA viral based systems can be used to target specific cells and trafficking the viral payload to an organelle of the cell. Viral vectors can be administered directly (in vivo) or they can be used to treat cells in vitro, and the modified cells can optionally be administered after delivery (ex vivo).

[0964] In some embodiments, the viral vector is a retroviral, lentiviral, adenoviral, adeno-associated viral or herpes simplex viral vector. Retroviral vectors can include those based upon murine leukemia virus (MuLV), gibbon ape leukemia virus (GaLV), Simian Immuno deficiency virus (SIV), human immuno deficiency virus (HIV), and combinations thereof. In some embodiments, the retroviral vector is a lentiviral vector. In some embodiments, the retroviral vector is a gamma retroviral vector. In some embodiments, the viral vector is an adenoviral vector. In some embodiments, the viral vector is an adeno-associated virus (“AAV”) vector.

[0965] In some embodiments, polynucleotides encoding one or more prime editing composition components are packaged in a virus particle. Packaging cells can be used to form virus particles that can infect a target cell. Such cells can include 293 cells, (e.g., for packaging adenovirus), and .psi.2 cells or PA317 cells (e.g., for packaging retrovirus). Viral vectors can be generated by producing a cell line that packages a nucleic acid vector into a viral particle. The vectors can contain the minimal viral sequences required for packaging and subsequent integration into a host. The vectors can contain other viral sequences being replaced by an expression cassette for the polynucleotide(s) to be expressed. The missing viral functions can be supplied in trans by the packaging cell line. For example, AAV vectors can comprise ITR sequences from the AAV genome which are required for packaging and integration into the host genome. In some embodiment, the polynucleotides are a DNA polynucleotide. In some embodiment, the polynucleotides are an RNA polynucleotide; e.g., an mRNA polynucleotide.

[0966] In some embodiments, the AAV vector is selected for tropism to a particular cell, tissue, organism. In some embodiments, the AAV vector is pseudotyped, e.g., AAV5/8. In some embodiments, polynucleotides encoding one or more prime editing composition components are packaged in a first AAV and a second AAV. In some embodiments, the polynucleotides encoding one or more prime editing composition components are packaged in a first rAAV and a second rAAV.

[0967] In some embodiments, dual AAV vectors are generated by splitting a large transgene expression cassette in two separate halves (5′ and 3′ ends that encode N-terminal portion and C-terminal portion of, e.g., a prime editor polypeptide), where each half of the cassette is no more than 5 kb in length, optionally no more than 4.7 kb in length, and is packaged in a single AAV vector. In some embodiments, the full-length transgene expression cassette is reassembled upon co-infection of the same cell by both dual AAV vectors. In some embodiments, a portion or fragment of a prime editor polypeptide, e.g., a Cas9 nickase, is fused to an intein. The portion or fragment of the polypeptide can be fused to the N-terminus or the C-terminus of the intein. In some embodiments, a N-terminal portion of the polypeptide is fused to an intein-N, and a C-terminal portion of the polypeptide is separately fused to an intein-C. In some embodiments, a portion or fragment of a prime editor fusion protein is fused to an intein and fused to an AAV capsid protein. In some embodiments, intein-N may be fused to the N-terminal portion of a first domain described herein, and and intein-C may be fused to the C-terminal portion of a second domain described herein for the joining of the N-terminal portion to the C-terminal portion, thereby joining the first and second domains. In some embodiments, the first and second domains are each independently chosen from a DNA binding domain or a DNA polymerase domain. The intein, nuclease and capsid protein can be fused together in any arrangement (e.g., nuclease-intein-capsid, intein-nuclease-capsid, capsid-intein-nuclease, etc.). In some embodiments, a polynucleotide encoding a prime editor fusion protein is split in two separate halves, each encoding a portion of the prime editor fusion protein and separately fused to an intein. In some embodiments, each of the two halves of the polynucleotide is packaged in an individual AAV vector of a dual AAV vector system. In some embodiments, each of the two halves of the polynucleotide is no more than 5 kb in length, optionally no more than 4.7 kb in length. In some embodiments, the full-length prime editor fusion protein is reassembled upon co-infection of the same cell by both dual AAV vectors, expression of both halves of the prime editor fusion protein, and self-excision of the inteins.

[0968] In some embodiments, the in vivo use of dual AAV vectors results in the expression of full-length full-length prime editor fusion proteins. In some embodiments, the use of the dual AAV vector platform allows viable delivery of transgenes of greater than about 4.5, 4.6, 4.7, 4.8, 4.9, or 5.0 kb in size.

[0969] In some embodiments, an intein is inserted at a splice site within a Cas protein. In some embodiments, insertion of an intein disrupts a Cas activity. As used herein, “intein” refers to a self-splicing protein intron (e.g., peptide), e.g., which ligates flanking N-terminal and C-terminal exteins (e.g., fragments to be joined). In some embodiments, an intein may comprise a polypeptide that is able to excise itself and join exteins with a peptide bond (e.g., protein splicing). In some embodiments, an intein of a precursor gene comes from two genes (e.g., split intein). In some embodiments, an intein may be a synthetic intein. Non-limiting examples of intein pairs that may be used in accordance with the present disclosure include: dnaE-n and dnaE-c. a 4-hydroxytamoxifen (4-HT)-responsive intein, an iCas molecule, a Ssp DnaX intein, Ter DnaE3 intein, Ter ThyX intein, Rma DnaB intein, Cfa DnaE intein, Ssp GyrB intein, and Rma DnaB intein. In some embodiments, intein fragments may be fused to the N terminal and C-terminal portion of a split Cas protein respectively for joining the fragments of split Cas9.

[0970] In some embodiments, the split Cas9 system may be used in general to bypass the packing limit of the viral delivery vehicles. In some embodiments, a split Cas9 may be a Type II CRISPR system Cas9. In some embodiments, a first nucleic acid encodes a first portion of the Cas9 protein having a first split-intein and wherein the second nucleic acid encodes a second portion of the Cas9 protein having a second split-intein complementary to the first split-intein and wherein the first portion of the Cas9 protein and the second portion of the Cas9 protein are joined together to form the Cas9 protein. In some embodiments, the first portion of the Cas9 protein is the N-terminal fragment of the Cas9 protein and the second portion of the Cas9 protein is the C-terminal fragment of the Cas9 protein. In some embodiments, a split site may be selected which are surface exposed due to the sterical need for protein splicing.

[0971] In some embodiments, a Cas protein may be split into two fragments at any C, T, A, or S. In some embodiments, a Cas9 may be intein split at residues 203-204, 280-292, 292-364, 311-325, 417-438, 445-483, 468-469, 481-502, 513-520, 522-530, 565-637, 696-707, 713-714, 795-804, 803-810, 878-887, and 1153-1154. In some embodiments, protein is divided into two fragments at SpCas9 T310, T313, A456, S469, or C574. In some embodiments, split Cas9 fragments across different split pairs yield combinations that provided the complete polypeptide sequence activate gene expression even when fragments are partially redundant. In some embodiments, a functional Cas9 protein may be reconstituted from two inactive split-Cas9 peptides in the presence of gRNA by using a split-intein protein splicing strategy. In some embodiment, the split Cas9 fragments are fused to either a N-terminal intein fragment or a C-terminal intein fragment, which can associate with each other and catalytically splice the two split Cas9 fragments into a functional reconstituted Cas9 protein. In some embodiments, a split-Cas9 can be packaged into self-complementary AAV. In some embodiments, a split-Cas9 comprises a 2.5 kb and a 2.2 kb fragment of S. pyogenes Cas9 coding sequences.

[0972] In some embodiments, a split-Cas9 architecture reduces the length and/or size of the coding sequences of a viral vector, e.g., AAV.

[0973] A target cell can be transiently or non-transiently transfected with one or more vectors described herein. A cell can be transfected as it naturally occurs in a subject. A cell can be taken or derived from a subject and transfected. A cell can be derived from cells taken from a subject, such as a cell line. In some embodiments, a cell transfected with one or more vectors described herein can be used to establish a new cell line comprising one or more vector-derived sequences. In some embodiments, a cell transiently transfected with the compositions of the disclosure (such as by transient transfection of one or more vectors, or transfection with RNA), and modified through the activity of a prime editor, can be used to establish a new cell line comprising cells containing the modification but lacking any other exogenous sequence. Any suitable vector compatible with the host cell can be used with the methods of the disclosure. Non-limiting examples of vectors include pXT1, pSG5, pSVK3, pBPV, pMSG, and pSVLSV40.

[0974] In some embodiments, a prime editor protein can be provided to cells as a polypeptide. In some embodiments, the prime editor protein is fused to a polypeptide domain that increases solubility of the protein. In some embodiments, the prime editor protein is formulated to improve solubility of the protein.

[0975] In some embodiment, a prime editor polypeptide is fused to a polypeptide permeant domain to promote uptake by the cell. In some embodiments, the permeant domain is a including peptide, a peptidomimetic, or a non-peptide carrier. For example, a permeant peptide may be derived from the third alpha helix of Drosophila melanogaster transcription factor Antennapaedia, referred to as penetratin, which comprises the amino acid sequence RQIKIWFQNRRMKWKK (SEQ ID NO: 346). As another example, the permeant peptide can comprise the HIV-1 tat basic region amino acid sequence, which may include, for example, amino acids 49-57 of naturally-occurring tat protein. Other permeant domains can include poly-arginine motifs, for example, the region of amino acids 34-56 of HIV-1 rev protein, nona-arginine (SEQ ID NO: 21633), and octa-arginine (SEQ ID NO: 21634). The nona-arginine (R9) sequence (SEQ ID NO: 21633) can be used. The site at which the fusion can be made may be selected in order to optimize the biological activity, secretion or binding characteristics of the polypeptide.

[0976] In some embodiments, a prime editor polypeptide is produced in vitro or by host cells, and it may be further processed by unfolding, e.g., heat denaturation, DTT reduction, etc. and may be further refolded. In some embodiments, a prime editor polypeptide is prepared by in vitro synthesis. Various commercial synthetic apparatuses can be used. By using synthesizers, naturally occurring amino acids can be substituted with unnatural amino acids. In some embodiments, a prime editor polypeptide is isolated and purified in accordance with recombinant synthesis methods, for example, by expression in a host cell and the lysate purified using HPLC, exclusion chromatography, gel electrophoresis, affinity chromatography, or other purification technique.

[0977] In some embodiments, a prime editing composition, for example, prime editor polypeptide components and PEgRNA/ngRNA are introduced to a target cell by nanoparticles. In some embodiments, the prime editor polypeptide components and the PEgRNA and/or ngRNA form a complex in the nanoparticle. Any suitable nanoparticle design can be used to deliver genome editing system components or nucleic acids encoding such components. In some embodiments, the nanoparticle is inorganic. In some embodiments, the nanoparticle is organic. In some embodiments, a prime editing composition is delivered to a target cell, e.g., an epithelial cell, in an organic nanoparticle, e.g. a lipid nanoparticle (LNP) or polymer nanoparticle.

[0978] In some embodiments, LNPs are formulated from cationic, anionic, neutral lipids, or combinations thereof. In some embodiments, neutral lipids, such as the fusogenic phospholipid DOPE or the membrane component cholesterol, are included to enhance transfection activity and nanoparticle stability. In some embodiments, LNPs are formulated with hydrophobic lipids, hydrophilic lipids, or combinations thereof. Lipids may be formulated in a wide range of molar ratios to produce an LNP. Any lipid or combination of lipids that are known in the art can be used to produce an LNP. Exemplary lipids used to produce LNPs are provided in Table 4 below.

[0979] In some embodiments, components of a prime editing composition form a complex prior to delivery to a target cell. For example, a prime editor fusion protein, a PEgRNA, and/or a ngRNA can form a complex prior to delivery to the target cell. In some embodiments, a prime editing polypeptide (e.g. a prime editor fusion protein) and a guide polynucleotide (e.g. a PEgRNA or ngRNA) form a ribonucleoprotein (RNP) for delivery to a target cell. In some embodiments, the RNP comprises a prime editor fusion protein complex with a PEgRNA. RNPs may be delivered to cells using known methods, such as electroporation, nucleofection, or cationic lipid-mediated methods, or any other approaches known in the art. In some embodiments, delivery of a prime editing composition or complex to the target cell does not require the delivery of foreign DNA into the cell. In some embodiments, the RNP comprising the prime editing complex is degraded over time in the target cell. Exemplary lipids for use in nanoparticle formulations and/or gene transfer are shown in Table 4 below.

TABLE 4
Exemplary lipids for nanoparticle formulation or gene transfer

| Lipid | Abbreviation | Feature |
|---|---|---|
| 1,2-Dioleoyl-sn-glycero-3-phosphatidylcholine | DOPC | Helper |
| 1,2-Dioleoyl-sn-glycero-3-phosphatidylethanolamine | DOPE | Helper |
| Cholesterol | | Helper |
| N41-(2,3-Dioleyloxy)prophyliN,N,N-trimethylammonium | DOTMA | Cationic |
| chloride | | |
| 1,2-Dioleoyloxy-3-trimethylammonium-propane | DOGS | Cationic |
| Dioctadecylamidoglycylspermine | | |
| N-(3-Aminopropyl)-N,N-dimethyl-2,3-bis(dodecyloxy)-1- | GAP-DLRIE | Cationic |
| propanaminium bromide | | |
| Cetyltrimethylammonium bromide | CTAB | Cationic |
| 6-Lauroxyhexyl omithinate | LHON | Cationic |
| 1-(2,3-Dioleoyloxypropyl)-2,4,6-trimethylpyridinium | 2Oc | Cationic |
| 2,3-Dioleyloxy-N-P(spenninecarboxamido-ethylJ-N,Ndimethyl- | DOSPA | Cationic |
| 1-propanatninium trifluoroacetate | | |
| 1,2-Dioleyl-3-trimethylamtnonium-propane | DOPA | Cationic |
| N-(2-Hydroxyethyl)-N,N-dimethyl-2,3-bis(tetradecyloxy)-1- | MDRIE | Cationic |
| propanaminium bromide | | |
| Dimyristooxypropyl dimethyl hydroxyethyl ammonium bromide | DMRI | Cationic |
| 3β-[N-(N′,N′-Dimethylaminoethane)-carbamoyl]cholesterol | DC-Chol | Cationic |
| Bis-guanidium-tren-cholesterol | BGTC | Cationic |
| 1,3-Diodeoxy-2-(6-carboxy-spermyl)-propylamide | DOSPER | Cationic |
| Dimethyloctadecylammonium bromide | DDAB | Cationic |
| Dioctadecylamidoglicylspermidin | DSL | Cationic |
| rac-[(2,3-Dioctadecyloxypropyl)(2-hydroxyethyl)]- | CLIP-1 | Cationic |
| dimethylammonium chloride | | |
| rac-[2(2,3-Dihexadecyloxypropyloxymethyloxy) | CLIP-6 | Cationic |
| ethyl]trimethylammoniun bromide | | |
| Ethyldimyristoylphosphatidylcholine | EDMPC | Cationic |
| 1,2-Distearyloxy-N,N-dimethyl-3-aminopropane | DSDMA | Cationic |
| 1,2-Dimyristoyl-trimethylammonium propane | DMTAP | Cationic |
| O,O′-Dimyristyl-N-lysyl aspartate | DMKE | Cationic |
| 1,2-Distearoyl-sn-glycero-3-ethylphosphocholine | DSEPC | Cationic |
| N-Palmitoyl D-erythro-sphingosyl carbamoyl-spenmine | CCS | Cationic |
| N-t-Butyl-N0-tetradecyl-3-tetradecylaminopropionamidine | diC14-amidine | Cationic |
| Octadecenolyoxy[ethyl-2-heptadecenyl-3 hydroxyethyl] | DOTIM | Cationic |
| imidazolinium chloride | | |
| N1-Cholesteryloxycarbonyl-3,7-diazanonane-1,9-diamine | CDAN | Cationic |
| 2-(3-Bis(3-amino-propyl)-amino]propylamino)- | RPR209120 | Cationic |
| Nditetradecylcarbamoylme-ethyl-acetamide | | |
| 1,2-dilinoleyloxy-3-dimethylaminopropane | DLinDMA | Cationic |
| 2,2-dilinoleyl-4-dimethylaminoethyl-[1,3]-dioxolane | DLin-KC2- | Cationic |
| | DMA | |
| dilinoleyl-methyl-4-dimethylaminobutyrate | DLin-MC3- | Cationic |
| | DMA | |

[0980] Exemplary polymers for use in nanoparticle formulations and/or gene transfer are shown in Table 5 below.

TABLE 5
Exemplary lipids for nanoparticle formulation or gene transfer

| Polymer | Abbreviation |
|---|---|
| Poly(ethylene)glycol | PEG |
| Polyethylenimine | PEI |
| Dithiobis (succinimidylpropionate) | DSP |
| Dimethy1-3,3′-dithiobispropionimidate | DTBP |
| Poly(ethylene imine)biscarbamate | PEIC |
| Poly(L-lysine) | PLL |
| Histidine modified PLL | |
| Poly(N-vinylpyrrolidone) | PVP |
| Poly(propylenimine) | PPI |
| Poly(amidoamine) | PAMAM |
| Poly(amidoethylenimine) | SS_PAEI |
| Triethylenetetramine | TETA |
| Poly(β-aminoester) | |
| Poly(4-hydroxy-L-proline ester) | PHP |
| Poly(allylamine) | |
| Poly(α-[4-aminobutyl]-L-glycolic acid) | PAGA |
| Poly(D,L-lactic-co-glycolic acid) | PLGA |
| Poly(N-ethyl-4-vinylpyridinium bromide) | |
| Poly(phosphazene)s | PPZ |
| Poly(phosphoester)s | PPE |
| Poly(phosphoramidate)s | PPA |
| Poly(N-2-hydroxypropylmethacrylamide) | pHPMA |
| Poly (2-(dimethylamino)ethyl methacrylate) | pDMAEMA |
| Poly(2-aminoethyl propylene phosphate) | PPE-EA |
| Chitosan | |
| Galactosylated chitosan | |
| N-dodacylated chitosam | |
| Histone | |
| Collagen | |
| Dextran-spermine | D-SPM |

[0981] Exemplary delivery methods for polynucleotides encoding prime editing composition components are shown in Table 6 below.

TABLE 6
Exemplary polynucleotide delivery methods

| | | Delivery into | | | Type of |
|---|---|---|---|---|---|
| | | Non-Dividing | Duration of | Genome | Molecule |
| Delivery | Vector/Mode | Cells | Expression | Integration | Delivered |
| Physical | (e.g., | YES | Transient | NO | Nucleic Acids |
| | electroporation, | | | | and Proteins |
| | particle gun, | | | | |
| | Calcium phosphate | | | | |
| | transfection) | | | | |
| Viral | Retrovirus | NO | Stable | YES | RNA |
| | Lentivirus | YES | Stable | YES/NO with | RNA |
| | | | | modification | |
| | Adenovirus | YES | Transient | NO | DNA |
| | Adeno-Associated | YES | Stable | NO | DNA |
| | Virus (AAV) | | | | |
| | Vaccinia Virus | YES | Very | NO | DNA |
| | | | Transient | | |
| | Herpes Simplex | YES | Stable | NO | DNA |
| | Virus | | | | |
| Non-Viral | Cationic | YES | Transient | Depends on | Nucleic acids |
| | | | | what is | and Proteins |
| | | | | delivered | |
| | Polymeric | YES | Transient | NO | Nucleic Acids |
| | Nanoparticles | | | | |
| Biological | Attenuated Bacteria | YES | Transient | NO | Nucleic Acids |
| Non-Viral | Engineered | YES | Transient | NO | Nucleic Acids |
| Delivery | Bacteriophages | | | | |
| Vehicles | Mammalian Virus- | YES | Transient | NO | Nucleic Acids |
| | like Particles | | | | |
| | Biological | YES | Transient | NO | Nucleic Acids |
| | liposomes: | | | | |
| | Erythrocyte Ghosts | | | | |
| | and Exosomes | | | | |

[0982] The prime editing compositions of the disclosure, whether introduced as polynucleotides or polypeptides, can be provided to the cells for about 30 minutes to about 24 hours, e.g., 1 hour, 1.5 hours, 2 hours, 2.5 hours, 3 hours, 3.5 hours 4 hours, 5 hours, 6 hours, 7 hours, 8 hours, 12 hours, 16 hours, 18 hours, 20 hours, or any other period from about 30 minutes to about 24 hours, which can be repeated with a frequency of about every day to about every 4 days, e.g., every 1.5 days, every 2 days, every 3 days, or any other frequency from about every day to about every four days. The compositions may be provided to the subject cells one or more times, e.g., one time, twice, three times, or more than three times, and the cells allowed to incubate with the agent(s) for some amount of time following each contacting event e.g., 16-24 hours. In cases in which two or more different prime editing system components, e.g., two different polynucleotide constructs are provided to the cell (e.g., different components of the same prim editing system, or two different guide nucleic acids that are complementary to different sequences within the same or different target genes), the compositions may be delivered simultaneously (e.g., as two polypeptides and/or nucleic acids). Alternatively, they may be provided sequentially, e.g., one composition being provided first, followed by a second composition.

[0983] The prime editing compositions and pharmaceutical compositions of the disclosure, whether introduced as polynucleotides or polypeptides, can be administered to subjects in need thereof for about 30 minutes to about 24 hours, e.g., 1 hour, 1.5 hours, 2 hours, 2.5 hours, 3 hours, 3.5 hours 4 hours, 5 hours, 6 hours, 7 hours, 8 hours, 12 hours, 16 hours, 18 hours, 20 hours, or any other period from about 30 minutes to about 24 hours, which can be repeated with a frequency of about every day to about every 4 days, e.g., every 1.5 days, every 2 days, every 3 days, or any other frequency from about every day to about every four days. The compositions may be provided to the subject one or more times, e.g., one time, twice, three times, or more than three times. In cases in which two or more different prime editing system components, e.g. two different polynucleotide constructs are administered to the subject (e.g., different components of the same prim editing system, or two different guide nucleic acids that are complementary to different sequences within the same or different target genes), the compositions may be administered simultaneously (e.g., as two polypeptides and/or nucleic acids). Alternatively, they may be provided sequentially, e.g., one composition being provided first, followed by a second composition.

### EXAMPLES

### Example 1—Screening of PEgRNA for Editing of a Mutation Associated with Cystic Fibrosis

[0984] The following examples are provided for illustrative purposes only and are not intended to limit the scope of the claims provided herein.

[0985] PEgRNA assembly: PEgRNAs are cloned as follows: double-stranded linear DNA fragments encoding PEgRNA and flanking U6 expression plasmid homology sequences are individually Gibson-cloned into U6 expression plasmids. Alternatively, for each PEgRNA, separate oligos encoding a protospacer, a gRNA scaffold, and PEgRNA extension (PBS and RTT) are ligated, and then cloned into a U6 expression plasmid as described in Anzalone et al., Nature. 2019 December; 576(7785):149-157. Bacterial colonies carrying sequence-verified plasmids are propagated in LB or TB. Plasmid DNA is purified by minipreps for mammalian transfection.

[0986] Chemically synthesized PEgRNAs are also used (Integrated DNA Technologies, following the vendor's standard procedure).

[0987] HEK cell culture and transfection: PEgRNAs each harboring a mutation corresponding to one of F508del, G542*, S549N, G551D, R553* mutations in the CFTR polypeptide are used for installation in wild type HEK293T cells, using installation frequency as a proxy for editing efficiency. HEK293T cells are propagated in DMEM with 10% FBS. Prior to transfection, cells are seeded in 96-well plates and then transfected with Lipofectamine 2000 according to the manufacturer's directions with plasmids encoding PEgRNAs as described above and a prime editor (PE) fusion, or transfected with Lipofectamine MessengerMAX™ with mRNA encoding the PE and synthetic PEgRNAs. Three days after transfection, gDNA is harvested in lysis buffer for high throughput sequencing and sequenced using Miseq. PEgRNA sequences are provided in Table 7.

[0988] Lentiviral production and cell line generation and CFTR mutation correction: DNA sequences each containing one of F508del, G542*, S549N, G551D, R553* amino acid mutations respectively with flanking sequences from the CFTR gene on each side, and an EF11a short promoter driven Puromycin selection cassette, are cloned in lentiviral transfer plasmids. HEK 293T cells are transiently transfected with the transfer plasmids and packaging plasmids containing VSV glycoprotein and lentiviral gag/pol coding sequences. After transfection, lentiviral particles are harvested from the cell media and concentrated. HEK 293T cells are transduced using serial dilutions of the lentiviral particles. Cells generated at a dilution of MOI<1, as determined by survival following puromycin, are selected for expansion. PEgRNAs each designed to correct one of the F508del, G542*, S549N, R553*, and G551D mutations are also transfected in each cell line that harbors the lentivirus that has the corresponding mutation. Three days after transfection, gDNA is harvested in lysis buffer for high throughput sequencing and sequenced using Miseq. Prime editing efficiency of each PEgRNA in each of the resulting HEK293T cell lines is examined using Miseq. PEgRNA and ngRNA sequences are provided in Table 8.

[0989] Prime editing of CFTR in human cells: PEgRNAs screened from the lentiviral assay as described above are tested in human fibroblasts, lymphoblasts, and iPSCs, respectively. Human fibroblasts lymphoblasts, and iPSCs carrying CFTR mutations are transfected with RNA encoding the PE2 protein and the PEgRNA as tested above. Genomic DNA is harvested after a 1-week incubation, and editing efficiency is examined using Miseq.

[0990] Chloride efflux assay: N-[ethoxycarbonylmethyl]-6-methoxy-quinolinium bromide (MQAE), a chloride sensitive fluorescent dye, is used to assess chloride flux in plated human intestinal epithelial cells. Cells are grown to confluence directly on coverslips. Then, cells are placed in C1-containing solution (135 mM NaCl, 5 mM KCl, 1 mM CaCl2), 1.2 mM MgSO4, 2 mM NaH2PO4, 2 mM HEPES, and 10 mM glucose), then moved to a chloride free solution (135 mM NaCyclamate, 3 mM KGluconate, 0.5 mM CaCyclamate, 1.2 mM MgSO4, 2 mM KH2PO4, 2 mM HEPES, 10 mM glucose). Chloride flux is assessed in solution with forskolin (10 μM) and IBMX (100 μM) added. MQAE fluorescence is examined on an Olympus IX-71 inverted microscope, with MQAE excited at 354 nm and fluorescence measured at 460 nm every 5 s. Fluorescence is measured on a cell-by-cell basis, with 30 to 100 cells catalogued per slide. The rate of change in MQAE fluorescence (arbitrary fluorescence units AFU/time) is graphed, and AFU/min is compared between groups.

Lengthy table referenced here
US20240301444A1-20240912-T00001
Please refer to the end of the specification for access instructions.

Lengthy table referenced here
US20240301444A1-20240912-T00002
Please refer to the end of the specification for access instructions.

Lengthy table referenced here
US20240301444A1-20240912-T00003
Please refer to the end of the specification for access instructions.

Lengthy table referenced here
US20240301444A1-20240912-T00004
Please refer to the end of the specification for access instructions.

Lengthy table referenced here
US20240301444A1-20240912-T00005
Please refer to the end of the specification for access instructions.

Lengthy table referenced here
US20240301444A1-20240912-T00006
Please refer to the end of the specification for access instructions.

LENGTHY TABLES
The patent application contains a lengthy table section. A copy of the table is available in electronic form from the USPTO web site (https://seqdata.uspto.gov/?pageRequest=docDetail&DocID=US20240301444A1). An electronic copy of the table will also be available from the USPTO upon request and payment of the fee set forth in 37 CFR 1.19(b)(3).

The application's sequence listing, which the Patent Office published only in electronic form, follows.

SEQUENCE LISTING (21634 sequences)

SEQ ID NO: 1 - protein, 677 aa, unidentified
TLNIEDEYRLHETSKEPDVSLGSTWLSDFPQAWAETGGMGLAVRQAPLIIPLKATSTPVSIKQYPMSQEARLGIKPHIQRLLDQGILVPCQSPWNTPLLPVKKPGTNDYRPVQDLREVNKRVEDIHPTVPNPYNLLSGLPPSHQWYTVLDLKDAFFCLRLHPTSQPLFAFEWRDPEMGISGQLTWTRLPQGFKNSPTLFDEALHRDLADFRIQHPDLILLQYVDDLLLAATSELDCQQGTRALLQTLGNLGYRASAKKAQICQKQVKYLGYLLKEGQRWLTEARKETVMGQPTPKTPRQLREFLGTAGFCRLWIPGFAEMAAPLYPLTKTGTLFNWGPDQQKAYQEIKQALLTAPALGLPDLTKPFELFVDEKQGYAKGVLTQKLGPWRRPVAYLSKKLDPVAAGWPPCLRMVAAIAVLTKDAGKLTMGQPLVILAPHAVEALVKQPPDRWLSNARMTHYQALLLDTDRVQFGPVVALNPATLLPLPEEGLQHNCLDILAEAHGTRPDLTDQPLPDADHTWYTDGSSLLQEGQRKAGAAVTTETEVIWAKALPAGTSAQRAELIALTQALKMAEGKKLNVYTDSRYAFATAHIHGEIYRRRGLLTSEGKEIKNKDEILALLKALFLPKRLSIIHCPGHQKGHSAEARGNRMADQAARKAAITETPDTSTLLIENSSP

SEQ ID NO: 2 - protein, 677 aa, unidentified
TLNIEDEHRLHETSKEPDVSLGSTWLSDFPQAWAETGGMGLAVRQAPLIIPLKATSTPVSIKQYPMSQEARLGIKPHIQRLLDQGILVPCQSPWNTPLLPVKKPGTNDYRPVQDLREVNKRVEDIHPTVPNPYNLLSGLPPSHQWYTVLDLKDAFFCLRLHPTSQPLFAFEWRDPEMGISGQLTWTRLPQGFKNSPTLFDEALHRDLADFRIQHPDLILLQYVDDLLLAATSELDCQQGTRALLQTLGNLGYRASAKKAQICQKQVKYLGYLLKEGQRWLTEARKETVMGQPTPKTPRQLREFLGTAGFCRLWIPGFAEMAAPLYPLTKTGTLFNWGPDQQKAYQEIKQALLTAPALGLPDLTKPFELFVDEKQGYAKGVLTQKLGPWRRPVAYLSKKLDPVAAGWPPCLRMVAAIAVLTKDAGKLTMGQPLVILAPHAVEALVKQPPDRWLSNARMTHYQALLLDTDRVQFGPVVALNPATLLPLPEEGLQHNCLDILAEAHGTRPDLTDQPLPDADHTWYTDGSSLLQEGQRKAGAAVTTETEVIWAKALPAGTSAQRAELIALTQALKMAEGKKLNVYTDSRYAFATAHIHGEIYRRRGLLTSEGKEIKNKDEILALLKALFLPKRLSIIHCPGHQKGHSAEARGNRMADQAARKAAITETPDTSTLLIENSSP

SEQ ID NO: 3 - protein, 677 aa, unidentified
TLNIEDEYRLHETSKEPDVSLGSTWLSDFPQAWAETGGMGLAVRQAPLIIPLKATSTPVSIKQYPMSQEARLGIKPHIQRLLDQGILVPCQSPWNTPLLPVKKPGTNDYRPVQDLREVNKRVEDIHPTVPNPYNLLSGLPPSHQWYTVLDLKDAFFCLRLHPTSQPLFAFEWRDPEMGISGQLTWTRLPQGFKNSPTLFNEALHRDLADFRIQHPDLILLQYVDDLLLAATSELDCQQGTRALLQTLGNLGYRASAKKAQICQKQVKYLGYLLKEGQRWLTEARKETVMGQPTPKTPRQLREFLGKAGFCRLFIPGFAEMAAPLYPLTKPGTLFNWGPDQQKAYQEIKQALLTAPALGLPDLTKPFELFVDEKQGYAKGVLTQKLGPWRRPVAYLSKKLDPVAAGWPPCLRMVAAIAVLTKDAGKLTMGQPLVILAPHAVEALVKQPPDRWLSNARMTHYQALLLDTDRVQFGPVVALNPATLLPLPEEGLQHNCLDILAEAHGTRPDLTDQPLPDADHTWYTDGSSLLQEGQRKAGAAVTTETEVIWAKALPAGTSAQRAELIALTQALKMAEGKKLNVYTDSRYAFATAHIHGEIYRRRGWLTSEGKEIKNKDEILALLKALFLPKRLSIIHCPGHQKGHSAEARGNRMADQAARKAAITETPDTSTLLIENSSP

SEQ ID NO: 4 - protein, 7 aa, synthetic construct
PKKKRKV

SEQ ID NO: 5 - protein, 19 aa, synthetic construct
MKRTADGSEFESPKKKRKV

SEQ ID NO: 6 - protein, 30 aa, synthetic construct
MDSLLMNRRKFLYQFKNVRWAKGRRETYLC

SEQ ID NO: 7 - protein, 20 aa, synthetic construct
AVKRPAATKKAGQAKKKKLD

SEQ ID NO: 8 - protein, 25 aa, synthetic construct
MSRRRKANPTKLSENAKKLAKEVEN

SEQ ID NO: 9 - protein, 9 aa, synthetic construct
PAAKRVKLD

SEQ ID NO: 10 - protein, 9 aa, synthetic construct
KLKIKRPVK

SEQ ID NO: 11 - protein, 8 aa, synthetic construct
VSRKRPRP

SEQ ID NO: 12 - protein, 10 aa, synthetic construct
EGAPPAKRAR

SEQ ID NO: 13 - protein, 12 aa, synthetic construct
PPQPKKKPLDGE

SEQ ID NO: 14 - protein, 21 aa, synthetic construct
SGGSKRTADGSEFEPKKKRKV

SEQ ID NO: 15 - protein, 2117 aa, synthetic construct
MKRTADGSEFESPKKKRKVDKKYSIGLDIGTNSVGWAVITDEYKVPSKKFKVLGNTDRHSIKKNLIGALLFDSGETAEATRLKRTARRRYTRRKNRICYLQEIFSNEMAKVDDSFFHRLEESFLVEEDKKHERHPIFGNIVDEVAYHEKYPTIYHLRKKLVDSTDKADLRLIYLALAHMIKFRGHFLIEGDLNPDNSDVDKLFIQLVQTYNQLFEENPINASGVDAKAILSARLSKSRRLENLIAQLPGEKKNGLFGNLIALSLGLTPNFKSNFDLAEDAKLQLSKDTYDDDLDNLLAQIGDQYADLFLAAKNLSDAILLSDILRVNTEITKAPLSASMIKRYDEHHQDLTLLKALVRQQLPEKYKEIFFDQSKNGYAGYIDGGASQEEFYKFIKPILEKMDGTEELLVKLNREDLLRKQRTFDNGSIPHQIHLGELHAILRRQEDFYPFLKDNREKIEKILTFRIPYYVGPLARGNSRFAWMTRKSEETITPWNFEEVVDKGASAQSFIERMTNFDKNLPNEKVLPKHSLLYEYFTVYNELTKVKYVTEGMRKPAFLSGEQKKAIVDLLFKTNRKVTVKQLKEDYFKKIECFDSVEISGVEDRFNASLGTYHDLLKIIKDKDFLDNEENEDILEDIVLTLTLFEDREMIEERLKTYAHLFDDKVMKQLKRRRYTGWGRLSRKLINGIRDKQSGKTILDFLKSDGFANRNFMQLIHDDSLTFKEDIQKAQVSGQGDSLHEHIANLAGSPAIKKGILQTVKVVDELVKVMGRHKPENIVIEMARENQTTQKGQKNSRERMKRIEEGIKELGSQILKEHPVENTQLQNEKLYLYYLQNGRDMYVDQELDINRLSDYDVDAIVPQSFLKDDSIDNKVLTRSDKNRGKSDNVPSEEVVKKMKNYWRQLLNAKLITQRKFDNLTKAERGGLSELDKAGFIKRQLVETRQITKHVAQILDSRMNTKYDENDKLIREVKVITLKSKLVSDFRKDFQFYKVREINNYHHAHDAYLNAVVGTALIKKYPKLESEFVYGDYKVYDVRKMIAKSEQEIGKATAKYFFYSNIMNFFKTEITLANGEIRKRPLIETNGETGEIVWDKGRDFATVRKVLSMPQVNIVKKTEVQTGGFSKESILPKRNSDKLIARKKDWDPKKYGGFDSPTVAYSVLVVAKVEKGKSKKLKSVKELLGITIMERSSFEKNPIDFLEAKGYKEVKKDLIIKLPKYSLFELENGRKRMLASAGELQKGNELALPSKYVNFLYLASHYEKLKGSPEDNEQKQLFVEQHKHYLDEIIEQISEFSKRVILADANLDKVLSAYNKHRDKPIREQAENIIHLFTLTNLGAPAAFKYFDTTIDRKRYTSTKEVLDATLIHQSITGLYETRIDLSQLGGDSGGSSGGSSGSETPGTSESATPESSGGSSGGSSTLNIEDEYRLHETSKEPDVSLGSTWLSDFPQAWAETGGMGLAVRQAPLIIPLKATSTPVSIKQYPMSQEARLGIKPHIQRLLDQGILVPCQSPWNTPLLPVKKPGTNDYRPVQDLREVNKRVEDIHPTVPNPYNLLSGLPPSHQWYTVLDLKDAFFCLRLHPTSQPLFAFEWRDPEMGISGQLTWTRLPQGFKNSPTLFNEALHRDLADFRIQHPDLILLQYVDDLLLAATSELDCQQGTRALLQTLGNLGYRASAKKAQICQKQVKYLGYLLKEGQRWLTEARKETVMGQPTPKTPRQLREFLGKAGFCRLFIPGFAEMAAPLYPLTKPGTLFNWGPDQQKAYQEIKQALLTAPALGLPDLTKPFELFVDEKQGYAKGVLTQKLGPWRRPVAYLSKKLDPVAAGWPPCLRMVAAIAVLTKDAGKLTMGQPLVILAPHAVEALVKQPPDRWLSNARMTHYQALLLDTDRVQFGPVVALNPATLLPLPEEGLQHNCLDILAEAHGTRPDLTDQPLPDADHTWYTDGSSLLQEGQRKAGAAVTTETEVIWAKALPAGTSAQRAELIALTQALKMAEGKKLNVYTDSRYAFATAHIHGEIYRRRGWLTSEGKEIKNKDEILALLKALFLPKRLSIIHCPGHQKGHSAEARGNRMADQAARKAAITETPDTSTLLIENSSPSGGSKRTADGSEFEPKKKRKV

SEQ ID NO: 16 - RNA, 76 nt, synthetic construct
  source 1..76: mol_type = other RNA
gttttagagctagaaatagcaagttaaaataaggctagtccgttatcaacttgaaaaagtggcaccgagtcggtgc

SEQ ID NO: 17 - RNA, 76 nt, synthetic construct
  source 1..76: mol_type = other RNA
gtttgagagctagaaatagcaagtttaaataaggctagtccgttatcaacttgaaaaagtgggaccgagtcggtcc

SEQ ID NO: 18 - RNA, 86 nt, synthetic construct
  source 1..86: mol_type = other RNA
gtttaagagctatgctggaaacagcatagcaagtttaaataaggctagtccgttatcaacttgaaaaagtggcaccgagtcggtgc

SEQ ID NO: 19 - protein, 1480 aa, unidentified
MQRSPLEKASVVSKLFFSWTRPILRKGYRQRLELSDIYQIPSVDSADNLSEKLEREWDRELASKKNPKLINALRRCFFWRFMFYGIFLYLGEVTKAVQPLLLGRIIASYDPDNKEERSIAIYLGIGLCLLFIVRTLLLHPAIFGLHHIGMQMRIAMFSLIYKKTLKLSSRVLDKISIGQLVSLLSNNLNKFDEGLALAHFVWIAPLQVALLMGLIWELLQASAFCGLGFLIVLALFQAGLGRMMMKYRDQRAGKISERLVITSEMIENIQSVKAYCWEEAMEKMIENLRQTELKLTRKAAYVRYFNSSAFFFSGFFVVFLSVLPYALIKGIILRKIFTTISFCIVLRMAVTRQFPWAVQTWYDSLGAINKIQDFLQKQEYKTLEYNLTTTEVVMENVTAFWEEGFGELFEKAKQNNNNRKTSNGDDSLFFSNFSLLGTPVLKDINFKIERGQLLAVAGSTGAGKTSLLMVIMGELEPSEGKIKHSGRISFCSQFSWIMPGTIKENIIFGVSYDEYRYRSVIKACQLEEDISKFAEKDNIVLGEGGITLSGGQRARISLARAVYKDADLYLLDSPFGYLDVLTEKEIFESCVCKLMANKTRILVTSKMEHLKKADKILILHEGSSYFYGTFSELQNLQPDFSSKLMGCDSFDQFSAERRNSILTETLHRFSLEGDAPVSWTETKKQSFKQTGEFGEKRKNSILNPINSIRKFSIVQKTPLQMNGIEEDSDEPLERRLSLVPDSEQGEAILPRISVISTGPTLQARRRQSVLNLMTHSVNQGQNIHRKTTASTRKVSLAPQANLTELDIYSRRLSQETGLEISEEINEEDLKECFFDDMESIPAVTTWNTYLRYITVHKSLIFVLIWCLVIFLAEVAASLVVLWLLGNTPLQDKGNSTHSRNNSYAVIITSTSSYYVFYIYVGVADTLLAMGFFRGLPLVHTLITVSKILHHKMLHSVLQAPMSTLNTLKAGGILNRFSKDIAILDDLLPLTIFDFIQLLLIVIGAIAVVAVLQPYIFVATVPVIVAFIMLRAYFLQTSQQLKQLESEGRSPIFTHLVTSLKGLWTLRAFGRQPYFETLFHKALNLHTANWFLYLSTLRWFQMRIEMIFVIFFIAVTFISILTTGEGEGRVGIILTLAMNIMSTLQWAVNSSIDVDSLMRSVSRVFKFIDMPTEGKPTKSTKPYKNGQLSKVMIIENSHVKKDDIWPSGGQMTVKDLTAKYTEGGNAILENISFSISPGQRVGLLGRTGSGKSTLLSAFLRLLNTEGEIQIDGVSWDSITLQQWRKAFGVIPQKVFIFSGTFRKNLDPYEQWSDQEIWKVADEVGLRSVIEQFPGKLDFVLVDGGCVLSHGHKQLMCLARSVLSKAKILLLDEPSAHLDPVTYQIIRRTLKQAFADCTVILCEHRIEAMLECQQFLVIEENKVRQYDSIQKLLNERSLFRQAISPSDRVKLFPHRNSSKCKSKPQIAALKEETEEEVQDTRL

SEQ ID NO: 20 - DNA, 136 bp, synthetic construct
  source 1..136: mol_type = other DNA
gaatatagttcttggagaagggttttagagctagaaatagcaagttaaaataaggctagtccgttatcaacttgaaaaagtggcaccgagtcggtgctcgttgacctccactcagtgtgattccaccttctccaag

SEQ ID NO: 21 - DNA, 139 bp, synthetic construct
  source 1..139: mol_type = other DNA
gaatatagttcttggagaagggttttagagctagaaatagcaagttaaaataaggctagtccgttatcaacttgaaaaagtggcaccgagtcggtgctcgttgacctccactcagtgtgattccaccttctccaagaac

SEQ ID NO: 22 - DNA, 140 bp, synthetic construct
  source 1..140: mol_type = other DNA
gaatatagttcttggagaagggttttagagctagaaatagcaagttaaaataaggctagtccgttatcaacttgaaaaagtggcaccgagtcggtgctcgttgacctccactcagtgtgattccaccttctccaagaact

SEQ ID NO: 23 - DNA, 142 bp, synthetic construct
  source 1..142: mol_type = other DNA
gaatatagttcttggagaagggttttagagctagaaatagcaagttaaaataaggctagtccgttatcaacttgaaaaagtggcaccgagtcggtgctcgttgacctccactcagtgtgattccaccttctccaagaactat

SEQ ID NO: 24 - DNA, 140 bp, synthetic construct
  source 1..140: mol_type = other DNA
gaatatagttcttggagaagggttttagagctagaaatagcaagttaaaataaggctagtccgttatcaacttgaaaaagtggcaccgagtcggtgcttgctcgttgacctccactcagtgtgattccaccttctccaag

SEQ ID NO: 25 - DNA, 143 bp, synthetic construct
  source 1..143: mol_type = other DNA
gaatatagttcttggagaagggttttagagctagaaatagcaagttaaaataaggctagtccgttatcaacttgaaaaagtggcaccgagtcggtgcttgctcgttgacctccactcagtgtgattccaccttctccaagaac

SEQ ID NO: 26 - DNA, 144 bp, synthetic construct
  source 1..144: mol_type = other DNA
gaatatagttcttggagaagggttttagagctagaaatagcaagttaaaataaggctagtccgttatcaacttgaaaaagtggcaccgagtcggtgcttgctcgttgacctccactcagtgtgattccaccttctccaagaact

SEQ ID NO: 27 - DNA, 146 bp, synthetic construct
  source 1..146: mol_type = other DNA
gaatatagttcttggagaagggttttagagctagaaatagcaagttaaaataaggctagtccgttatcaacttgaaaaagtggcaccgagtcggtgcttgctcgttgacctccactcagtgtgattccaccttctccaagaactat

SEQ ID NO: 28 - DNA, 144 bp, synthetic construct
  source 1..144: mol_type = other DNA
gaatatagttcttggagaagggttttagagctagaaatagcaagttaaaataaggctagtccgttatcaacttgaaaaagtggcaccgagtcggtgcattcttgctcgttgacctccactcagtgtgattccaccttctccaag

SEQ ID NO: 29 - DNA, 147 bp, synthetic construct
  source 1..147: mol_type = other DNA
gaatatagttcttggagaagggttttagagctagaaatagcaagttaaaataaggctagtccgttatcaacttgaaaaagtggcaccgagtcggtgcattcttgctcgttgacctccactcagtgtgattccaccttctccaagaac

SEQ ID NO: 30 - DNA, 148 bp, synthetic construct
  source 1..148: mol_type = other DNA
gaatatagttcttggagaagggttttagagctagaaatagcaagttaaaataaggctagtccgttatcaacttgaaaaagtggcaccgagtcggtgcattcttgctcgttgacctccactcagtgtgattccaccttctccaagaact

SEQ ID NO: 31 - DNA, 150 bp, synthetic construct
  source 1..150: mol_type = other DNA
gaatatagttcttggagaagggttttagagctagaaatagcaagttaaaataaggctagtccgttatcaacttgaaaaagtggcaccgagtcggtgcattcttgctcgttgacctccactcagtgtgattccaccttctccaagaactat

SEQ ID NO: 32 - DNA, 147 bp, synthetic construct
  source 1..147: mol_type = other DNA
gaatatagttcttggagaagggttttagagctagaaatagcaagttaaaataaggctagtccgttatcaacttgaaaaagtggcaccgagtcggtgcttcattcttgctcgttgacctccactcagtgtgattccaccttctccaag

SEQ ID NO: 33 - DNA, 150 bp, synthetic construct
  source 1..150: mol_type = other DNA
gaatatagttcttggagaagggttttagagctagaaatagcaagttaaaataaggctagtccgttatcaacttgaaaaagtggcaccgagtcggtgcttcattcttgctcgttgacctccactcagtgtgattccaccttctccaagaac

SEQ ID NO: 34 - DNA, 151 bp, synthetic construct
  source 1..151: mol_type = other DNA
gaatatagttcttggagaagggttttagagctagaaatagcaagttaaaataaggctagtccgttatcaacttgaaaaagtggcaccgagtcggtgcttcattcttgctcgttgacctccactcagtgtgattccaccttctccaagaact

SEQ ID NO: 35 - DNA, 153 bp, synthetic construct
  source 1..153: mol_type = other DNA
gaatatagttcttggagaagggttttagagctagaaatagcaagttaaaataaggctagtccgttatcaacttgaaaaagtggcaccgagtcggtgcttcattcttgctcgttgacctccactcagtgtgattccaccttctccaagaactat

SEQ ID NO: 36 - DNA, 126 bp, synthetic construct
  source 1..126: mol_type = other DNA
gtggagaaggtggaatcacacgttttagagctagaaatagcaagttaaaataaggctagtccgttatcaacttgaaaaagtggcaccgagtcggtgctcgttgacctccactcagtgtgattccac

SEQ ID NO: 37 - DNA, 129 bp, synthetic construct
  source 1..129: mol_type = other DNA
gtggagaaggtggaatcacacgttttagagctagaaatagcaagttaaaataaggctagtccgttatcaacttgaaaaagtggcaccgagtcggtgctcgttgacctccactcagtgtgattccaccta

SEQ ID NO: 38 - DNA, 131 bp, synthetic construct
  source 1..131: mol_type = other DNA
gtggagaaggtggaatcacacgttttagagctagaaatagcaagttaaaataaggctagtccgttatcaacttgaaaaagtggcaccgagtcggtgctcgttgacctccactcagtgtgattccaccttca

SEQ ID NO: 39 - DNA, 131 bp, synthetic construct
  source 1..131: mol_type = other DNA
gtggagaaggtggaatcacacgttttagagctagaaatagcaagttaaaataaggctagtccgttatcaacttgaaaaagtggcaccgagtcggtgctcgttgacctccactcagtgtgattccaccttct

SEQ ID NO: 40 - DNA, 130 bp, synthetic construct
  source 1..130: mol_type = other DNA
gtggagaaggtggaatcacacgttttagagctagaaatagcaagttaaaataaggctagtccgttatcaacttgaaaaagtggcaccgagtcggtgcttgctcgttgacctccactcagtgtgattccac

SEQ ID NO: 41 - DNA, 133 bp, synthetic construct
  source 1..133: mol_type = other DNA
gtggagaaggtggaatcacacgttttagagctagaaatagcaagttaaaataaggctagtccgttatcaacttgaaaaagtggcaccgagtcggtgcttgctcgttgacctccactcagtgtgattccaccta

SEQ ID NO: 42 - DNA, 135 bp, synthetic construct
  source 1..135: mol_type = other DNA
gtggagaaggtggaatcacacgttttagagctagaaatagcaagttaaaataaggctagtccgttatcaacttgaaaaagtggcaccgagtcggtgcttgctcgttgacctccactcagtgtgattccaccttca

SEQ ID NO: 43 - DNA, 135 bp, synthetic construct
  source 1..135: mol_type = other DNA
gtggagaaggtggaatcacacgttttagagctagaaatagcaagttaaaataaggctagtccgttatcaacttgaaaaagtggcaccgagtcggtgcttgctcgttgacctccactcagtgtgattccaccttct

SEQ ID NO: 44 - DNA, 134 bp, synthetic construct
  source 1..134: mol_type = other DNA
gtggagaaggtggaatcacacgttttagagctagaaatagcaagttaaaataaggctagtccgttatcaacttgaaaaagtggcaccgagtcggtgcattcttgctcgttgacctccactcagtgtgattccac

SEQ ID NO: 45 - DNA, 137 bp, synthetic construct
  source 1..137: mol_type = other DNA
gtggagaaggtggaatcacacgttttagagctagaaatagcaagttaaaataaggctagtccgttatcaacttgaaaaagtggcaccgagtcggtgcattcttgctcgttgacctccactcagtgtgattccaccta

SEQ ID NO: 46 - DNA, 139 bp, synthetic construct
  source 1..139: mol_type = other DNA
gtggagaaggtggaatcacacgttttagagctagaaatagcaagttaaaataaggctagtccgttatcaacttgaaaaagtggcaccgagtcggtgcattcttgctcgttgacctccactcagtgtgattccaccttca

SEQ ID NO: 47 - DNA, 139 bp, synthetic construct
  source 1..139: mol_type = other DNA
gtggagaaggtggaatcacacgttttagagctagaaatagcaagttaaaataaggctagtccgttatcaacttgaaaaagtggcaccgagtcggtgcattcttgctcgttgacctccactcagtgtgattccaccttct

SEQ ID NO: 48 - DNA, 137 bp, synthetic construct
  source 1..137: mol_type = other DNA
gtggagaaggtggaatcacacgttttagagctagaaatagcaagttaaaataaggctagtccgttatcaacttgaaaaagtggcaccgagtcggtgcttcattcttgctcgttgacctccactcagtgtgattccac

SEQ ID NO: 49 - DNA, 140 bp, synthetic construct
  source 1..140: mol_type = other DNA
gtggagaaggtggaatcacacgttttagagctagaaatagcaagttaaaataaggctagtccgttatcaacttgaaaaagtggcaccgagtcggtgcttcattcttgctcgttgacctccactcagtgtgattccaccta

SEQ ID NO: 50 - DNA, 142 bp, synthetic construct
  source 1..142: mol_type = other DNA
gtggagaaggtggaatcacacgttttagagctagaaatagcaagttaaaataaggctagtccgttatcaacttgaaaaagtggcaccgagtcggtgcttcattcttgctcgttgacctccactcagtgtgattccaccttca

SEQ ID NO: 51 - DNA, 142 bp, synthetic construct
  source 1..142: mol_type = other DNA
gtggagaaggtggaatcacacgttttagagctagaaatagcaagttaaaataaggctagtccgttatcaacttgaaaaagtggcaccgagtcggtgcttcattcttgctcgttgacctccactcagtgtgattccaccttct

SEQ ID NO: 52 - DNA, 131 bp, synthetic construct
  source 1..131: mol_type = other DNA
gatctccaagtttgcagagaagttttagagctagaaatagcaagttaaaataaggctagtccgttatcaacttgaaaaagtggcaccgagtcggtgcttctccaagaactatattgtctttctctgcaaac

SEQ ID NO: 53 - DNA, 134 bp, synthetic construct
  source 1..134: mol_type = other DNA
gatctccaagtttgcagagaagttttagagctagaaatagcaagttaaaataaggctagtccgttatcaacttgaaaaagtggcaccgagtcggtgcttctccaagaactatattgtctttctctgcaaacttg

SEQ ID NO: 54 - DNA, 135 bp, synthetic construct
  source 1..135: mol_type = other DNA
gatctccaagtttgcagagaagttttagagctagaaatagcaagttaaaataaggctagtccgttatcaacttgaaaaagtggcaccgagtcggtgcttctccaagaactatattgtctttctctgcaaacttgg

SEQ ID NO: 55 - DNA, 134 bp, synthetic construct
  source 1..134: mol_type = other DNA
gatctccaagtttgcagagaagttttagagctagaaatagcaagttaaaataaggctagtccgttatcaacttgaaaaagtggcaccgagtcggtgcaccttctccaagaactatattgtctttctctgcaaac

SEQ ID NO: 56 - DNA, 137 bp, synthetic construct
  source 1..137: mol_type = other DNA
gatctccaagtttgcagagaagttttagagctagaaatagcaagttaaaataaggctagtccgttatcaacttgaaaaagtggcaccgagtcggtgcaccttctccaagaactatattgtctttctctgcaaacttg

SEQ ID NO: 57 - DNA, 138 bp, synthetic construct
  source 1..138: mol_type = other DNA
gatctccaagtttgcagagaagttttagagctagaaatagcaagttaaaataaggctagtccgttatcaacttgaaaaagtggcaccgagtcggtgcaccttctccaagaactatattgtctttctctgcaaacttgg

SEQ ID NO: 58 - DNA, 140 bp, synthetic construct
  source 1..140: mol_type = other DNA
gatctccaagtttgcagagaagttttagagctagaaatagcaagttaaaataaggctagtccgttatcaacttgaaaaagtggcaccgagtcggtgcgattccaccttctccaagaactatattgtctttctctgcaaac

SEQ ID NO: 59 - DNA, 143 bp, synthetic construct
  source 1..143: mol_type = other DNA
gatctccaagtttgcagagaagttttagagctagaaatagcaagttaaaataaggctagtccgttatcaacttgaaaaagtggcaccgagtcggtgcgattccaccttctccaagaactatattgtctttctctgcaaacttg

SEQ ID NO: 60 - DNA, 144 bp, synthetic construct
  source 1..144: mol_type = other DNA
gatctccaagtttgcagagaagttttagagctagaaatagcaagttaaaataaggctagtccgttatcaacttgaaaaagtggcaccgagtcggtgcgattccaccttctccaagaactatattgtctttctctgcaaacttgg

SEQ ID NO: 61 - DNA, 161 bp, synthetic construct
  source 1..161: mol_type = other DNA
gatctccaagtttgcagagaagttttagagctagaaatagcaagttaaaataaggctagtccgttatcaacttgaaaaagtggcaccgagtcggtgctcgttgacctccactcagtgtgattccaccttctccaagaactatattgtctttctctgcaaac

SEQ ID NO: 62 - DNA, 164 bp, synthetic construct
  source 1..164: mol_type = other DNA
gatctccaagtttgcagagaagttttagagctagaaatagcaagttaaaataaggctagtccgttatcaacttgaaaaagtggcaccgagtcggtgctcgttgacctccactcagtgtgattccaccttctccaagaactatattgtctttctctgcaaacttg

SEQ ID NO: 63 - DNA, 165 bp, synthetic construct
  source 1..165: mol_type = other DNA
gatctccaagtttgcagagaagttttagagctagaaatagcaagttaaaataaggctagtccgttatcaacttgaaaaagtggcaccgagtcggtgctcgttgacctccactcagtgtgattccaccttctccaagaactatattgtctttctctgcaaacttgg

SEQ ID NO: 64 - DNA, 165 bp, synthetic construct
  source 1..165: mol_type = other DNA
gatctccaagtttgcagagaagttttagagctagaaatagcaagttaaaataaggctagtccgttatcaacttgaaaaagtggcaccgagtcggtgcttgctcgttgacctccactcagtgtgattccaccttctccaagaactatattgtctttctctgcaaac

SEQ ID NO: 65 - DNA, 168 bp, synthetic construct
  source 1..168: mol_type = other DNA
gatctccaagtttgcagagaagttttagagctagaaatagcaagttaaaataaggctagtccgttatcaacttgaaaaagtggcaccgagtcggtgcttgctcgttgacctccactcagtgtgattccaccttctccaagaactatattgtctttctctgcaaacttg

SEQ ID NO: 66 - DNA, 169 bp, synthetic construct
  source 1..169: mol_type = other DNA
gatctccaagtttgcagagaagttttagagctagaaatagcaagttaaaataaggctagtccgttatcaacttgaaaaagtggcaccgagtcggtgcttgctcgttgacctccactcagtgtgattccaccttctccaagaactatattgtctttctctgcaaacttgg

SEQ ID NO: 67 - DNA, 169 bp, synthetic construct
  source 1..169: mol_type = other DNA
gatctccaagtttgcagagaagttttagagctagaaatagcaagttaaaataaggctagtccgttatcaacttgaaaaagtggcaccgagtcggtgcattcttgctcgttgacctccactcagtgtgattccaccttctccaagaactatattgtctttctctgcaaac

SEQ ID NO: 68 - DNA, 172 bp, synthetic construct
  source 1..172: mol_type = other DNA
gatctccaagtttgcagagaagttttagagctagaaatagcaagttaaaataaggctagtccgttatcaacttgaaaaagtggcaccgagtcggtgcattcttgctcgttgacctccactcagtgtgattccaccttctccaagaactatattgtctttctctgcaaacttg

SEQ ID NO: 69 - DNA, 173 bp, synthetic construct
  source 1..173: mol_type = other DNA
gatctccaagtttgcagagaagttttagagctagaaatagcaagttaaaataaggctagtccgttatcaacttgaaaaagtggcaccgagtcggtgcattcttgctcgttgacctccactcagtgtgattccaccttctccaagaactatattgtctttctctgcaaacttgg

SEQ ID NO: 70 - DNA, 119 bp, synthetic construct
  source 1..119: mol_type = other DNA
gttcatcataggaaacaccaagttttagagctagaaatagcaagttaaaataaggctagtccgttatcaacttgaaaaagtggcaccgagtcggtgcaatatcatctttggtgtttcct

SEQ ID NO: 71 - DNA, 121 bp, synthetic construct
  source 1..121: mol_type = other DNA
gttcatcataggaaacaccaagttttagagctagaaatagcaagttaaaataaggctagtccgttatcaacttgaaaaagtggcaccgagtcggtgcaatatcatctttggtgtttcctat

SEQ ID NO: 72 - DNA, 123 bp, synthetic construct
  source 1..123: mol_type = other DNA
gttcatcataggaaacaccaagttttagagctagaaatagcaagttaaaataaggctagtccgttatcaacttgaaaaagtggcaccgagtcggtgcaatatcatctttggtgtttcctatga

SEQ ID NO: 73 - DNA, 122 bp, synthetic construct
  source 1..122: mol_type = other DNA
gttcatcataggaaacaccaagttttagagctagaaatagcaagttaaaataaggctagtccgttatcaacttgaaaaagtggcaccgagtcggtgcgaaaatatcatctttggtgtttcct

SEQ ID NO: 74 - DNA, 124 bp, synthetic construct
  source 1..124: mol_type = other DNA
gttcatcataggaaacaccaagttttagagctagaaatagcaagttaaaataaggctagtccgttatcaacttgaaaaagtggcaccgagtcggtgcgaaaatatcatctttggtgtttcctat

SEQ ID NO: 75 - DNA, 126 bp, synthetic construct
  source 1..126: mol_type = other DNA
gttcatcataggaaacaccaagttttagagctagaaatagcaagttaaaataaggctagtccgttatcaacttgaaaaagtggcaccgagtcggtgcgaaaatatcatctttggtgtttcctatga

SEQ ID NO: 76 - DNA, 124 bp, synthetic construct
  source 1..124: mol_type = other DNA
gttcatcataggaaacaccaagttttagagctagaaatagcaagttaaaataaggctagtccgttatcaacttgaaaaagtggcaccgagtcggtgcaagaaaatatcatctttggtgtttcct

SEQ ID NO: 77 - DNA, 126 bp, synthetic construct
  source 1..126: mol_type = other DNA
gttcatcataggaaacaccaagttttagagctagaaatagcaagttaaaataaggctagtccgttatcaacttgaaaaagtggcaccgagtcggtgcaagaaaatatcatctttggtgtttcctat

SEQ ID NO: 78 - DNA, 128 bp, synthetic construct
  source 1..128: mol_type = other DNA
gttcatcataggaaacaccaagttttagagctagaaatagcaagttaaaataaggctagtccgttatcaacttgaaaaagtggcaccgagtcggtgcaagaaaatatcatctttggtgtttcctatga

SEQ ID NO: 79 - DNA, 128 bp, synthetic construct
  source 1..128: mol_type = other DNA
gttcatcataggaaacaccaagttttagagctagaaatagcaagttaaaataaggctagtccgttatcaacttgaaaaagtggcaccgagtcggtgcattaaagaaaatatcatctttggtgtttcct

SEQ ID NO: 80 - DNA, 130 bp, synthetic construct
  source 1..130: mol_type = other DNA
gttcatcataggaaacaccaagttttagagctagaaatagcaagttaaaataaggctagtccgttatcaacttgaaaaagtggcaccgagtcggtgcattaaagaaaatatcatctttggtgtttcctat

SEQ ID NO: 81 - DNA, 132 bp, synthetic construct
  source 1..132: mol_type = other DNA
gttcatcataggaaacaccaagttttagagctagaaatagcaagttaaaataaggctagtccgttatcaacttgaaaaagtggcaccgagtcggtgcattaaagaaaatatcatctttggtgtttcctatga

SEQ ID NO: 82 - DNA, 97 bp, synthetic construct
  source 1..97: mol_type = other DNA
gctaaagaaattcttgctcgtgttttagagctagaaatagcaagttaaaataaggctagtccgttatcaacttgaaaaagtggcaccgagtcggtgc

SEQ ID NO: 83 - DNA, 97 bp, synthetic construct
  source 1..97: mol_type = other DNA
gttagttattcaccttgctaagttttagagctagaaatagcaagttaaaataaggctagtccgttatcaacttgaaaaagtggcaccgagtcggtgc

SEQ ID NO: 84 - DNA, 97 bp, synthetic construct
  source 1..97: mol_type = other DNA
gatttacagcaaatgcttgctgttttagagctagaaatagcaagttaaaataaggctagtccgttatcaacttgaaaaagtggcaccgagtcggtgc

SEQ ID NO: 85 - DNA, 97 bp, synthetic construct
  source 1..97: mol_type = other DNA
gtcgttgacctccactcagtggttttagagctagaaatagcaagttaaaataaggctagtccgttatcaacttgaaaaagtggcaccgagtcggtgc

SEQ ID NO: 86 - DNA, 97 bp, synthetic construct
  source 1..97: mol_type = other DNA
gattctgttctcagttttcctgttttagagctagaaatagcaagttaaaataaggctagtccgttatcaacttgaaaaagtggcaccgagtcggtgc

SEQ ID NO: 87 - DNA, 96 bp, synthetic construct
  source 1..96: mol_type = other DNA
gtaaaattaagcacagtggagttttagagctagaaatagcaagttaaaataaggctagtccgttatcaacttgaaaaagtggcaccgagtcggtgc

SEQ ID NO: 88 - DNA, 97 bp, synthetic construct
  source 1..97: mol_type = other DNA
gagggtaaaattaagcacagtgttttagagctagaaatagcaagttaaaataaggctagtccgttatcaacttgaaaaagtggcaccgagtcggtgc

SEQ ID NO: 89 - DNA, 97 bp, synthetic construct
  source 1..97: mol_type = other DNA
gatcatctttggtgtttcctagttttagagctagaaatagcaagttaaaataaggctagtccgttatcaacttgaaaaagtggcaccgagtcggtgc

SEQ ID NO: 90 - DNA, 97 bp, synthetic construct
  source 1..97: mol_type = other DNA
gatctttggtgtttcctatgagttttagagctagaaatagcaagttaaaataaggctagtccgttatcaacttgaaaaagtggcaccgagtcggtgc

SEQ ID NO: 91 - DNA, 125 bp, synthetic construct
  source 1..125: mol_type = other DNA
accattaaagaaaatatcatgttttagagctagaaatagcaagttaaaataaggctagtccgttatcaacttgaaaaagtggcaccgagtcggtgcatcataggaaacaccaaagatgatatttt

SEQ ID NO: 92 - DNA, 127 bp, synthetic construct
  source 1..127: mol_type = other DNA
accattaaagaaaatatcatgttttagagctagaaatagcaagttaaaataaggctagtccgttatcaacttgaaaaagtggcaccgagtcggtgcatcataggaaacaccaaagatgatattttct

SEQ ID NO: 93 - DNA, 121 bp, synthetic construct
  source 1..121: mol_type = other DNA
accattaaagaaaatatcatgttttagagctagaaatagcaagttaaaataaggctagtccgttatcaacttgaaaaagtggcaccgagtcggtgcggaaacaccaaagatgatattttct

SEQ ID NO: 94 - DNA, 123 bp, synthetic construct
  source 1..123: mol_type = other DNA
accattaaagaaaatatcatgttttagagctagaaatagcaagttaaaataaggctagtccgttatcaacttgaaaaagtggcaccgagtcggtgcggaaacaccaaagatgatattttcttt

SEQ ID NO: 95 - DNA, 134 bp, synthetic construct
  source 1..134: mol_type = other DNA
attatgcctggcaccattaagttttagagctagaaatagcaagttaaaataaggctagtccgttatcaacttgaaaaagtggcaccgagtcggtgctaggaaacaccaaagatgatattttctttaatggtgcc

SEQ ID NO: 96 - DNA, 136 bp, synthetic construct
  source 1..136: mol_type = other DNA
attatgcctggcaccattaagttttagagctagaaatagcaagttaaaataaggctagtccgttatcaacttgaaaaagtggcaccgagtcggtgctaggaaacaccaaagatgatattttctttaatggtgccag

SEQ ID NO: 97 - DNA, 131 bp, synthetic construct
  source 1..131: mol_type = other DNA
attatgcctggcaccattaagttttagagctagaaatagcaagttaaaataaggctagtccgttatcaacttgaaaaagtggcaccgagtcggtgcaacaccaaagatgatattttctttaatggtgccag

SEQ ID NO: 98 - DNA, 133 bp, synthetic construct
  source 1..133: mol_type = other DNA
attatgcctggcaccattaagttttagagctagaaatagcaagttaaaataaggctagtccgttatcaacttgaaaaagtggcaccgagtcggtgcaacaccaaagatgatattttctttaatggtgccaggc

SEQ ID NO: 99 - DNA, 144 bp, synthetic construct
  source 1..144: mol_type = other DNA
agttttcctggattatgcctgttttagagctagaaatagcaagttaaaataaggctagtccgttatcaacttgaaaaagtggcaccgagtcggtgcgaaacaccaaagatgatattttctttaatggtgccaggcataatccag

SEQ ID NO: 100 - DNA, 146 bp, synthetic construct
  source 1..146: mol_type = other DNA
agttttcctggattatgcctgttttagagctagaaatagcaagttaaaataaggctagtccgttatcaacttgaaaaagtggcaccgagtcggtgcgaaacaccaaagatgatattttctttaatggtgccaggcataatccagga

SEQ ID NO: 101 - DNA, 141 bp, synthetic construct
  source 1..141: mol_type = other DNA
agttttcctggattatgcctgttttagagctagaaatagcaagttaaaataaggctagtccgttatcaacttgaaaaagtggcaccgagtcggtgcaccaaagatgatattttctttaatggtgccaggcataatccagga

SEQ ID NO: 102 - DNA, 143 bp, synthetic construct
  source 1..143: mol_type = other DNA
agttttcctggattatgcctgttttagagctagaaatagcaagttaaaataaggctagtccgttatcaacttgaaaaagtggcaccgagtcggtgcaccaaagatgatattttctttaatggtgccaggcataatccaggaaa

SEQ ID NO: 103 - DNA, 145 bp, synthetic construct
  source 1..145: mol_type = other DNA
cagttttcctggattatgccgttttagagctagaaatagcaagttaaaataaggctagtccgttatcaacttgaaaaagtggcaccgagtcggtgcgaaacaccaaagatgatattttctttaatggtgccaggcataatccagg

SEQ ID NO: 104 - DNA, 147 bp, synthetic construct
  source 1..147: mol_type = other DNA
cagttttcctggattatgccgttttagagctagaaatagcaagttaaaataaggctagtccgttatcaacttgaaaaagtggcaccgagtcggtgcgaaacaccaaagatgatattttctttaatggtgccaggcataatccaggaa

SEQ ID NO: 105 - DNA, 142 bp, synthetic construct
  source 1..142: mol_type = other DNA
cagttttcctggattatgccgttttagagctagaaatagcaagttaaaataaggctagtccgttatcaacttgaaaaagtggcaccgagtcggtgcaccaaagatgatattttctttaatggtgccaggcataatccaggaa

SEQ ID NO: 106 - DNA, 144 bp, synthetic construct
  source 1..144: mol_type = other DNA
cagttttcctggattatgccgttttagagctagaaatagcaagttaaaataaggctagtccgttatcaacttgaaaaagtggcaccgagtcggtgcaccaaagatgatattttctttaatggtgccaggcataatccaggaaaa

SEQ ID NO: 107 - DNA, 132 bp, synthetic construct
  source 1..132: mol_type = other DNA
ctgtatctatattcatcatagttttagagctagaaatagcaagttaaaataaggctagtccgttatcaacttgaaaaagtggcaccgagtcggtgcgaaaatatcatctttggtgtttcctatgatgaatat

SEQ ID NO: 108 - DNA, 134 bp, synthetic construct
  source 1..134: mol_type = other DNA
ctgtatctatattcatcatagttttagagctagaaatagcaagttaaaataaggctagtccgttatcaacttgaaaaagtggcaccgagtcggtgcgaaaatatcatctttggtgtttcctatgatgaatatag

SEQ ID NO: 109 - DNA, 128 bp, synthetic construct
  source 1..128: mol_type = other DNA
ctgtatctatattcatcatagttttagagctagaaatagcaagttaaaataaggctagtccgttatcaacttgaaaaagtggcaccgagtcggtgcatcatctttggtgtttcctatgatgaatatag

SEQ ID NO: 110 - DNA, 131 bp, synthetic construct
  source 1..131: mol_type = other DNA
ctgtatctatattcatcatagttttagagctagaaatagcaagttaaaataaggctagtccgttatcaacttgaaaaagtggcaccgagtcggtgcatcatctttggtgtttcctatgatgaatatagata

SEQ ID NO: 111 - DNA, 132 bp, synthetic construct
  source 1..132: mol_type = other DNA
tctgtatctatattcatcatgttttagagctagaaatagcaagttaaaataaggctagtccgttatcaacttgaaaaagtggcaccgagtcggtgcaaatatcatctttggtgtttcctatgatgaatatag

SEQ ID NO: 112 - DNA, 134 bp, synthetic construct
  source 1..134: mol_type = other DNA
tctgtatctatattcatcatgttttagagctagaaatagcaagttaaaataaggctagtccgttatcaacttgaaaaagtggcaccgagtcggtgcaaatatcatctttggtgtttcctatgatgaatatagat

SEQ ID NO: 113 - DNA, 129 bp, synthetic construct
  source 1..129: mol_type = other DNA
tctgtatctatattcatcatgttttagagctagaaatagcaagttaaaataaggctagtccgttatcaacttgaaaaagtggcaccgagtcggtgctcatctttggtgtttcctatgatgaatatagat

SEQ ID NO: 114 - DNA, 131 bp, synthetic construct
  source 1..131: mol_type = other DNA
tctgtatctatattcatcatgttttagagctagaaatagcaagttaaaataaggctagtccgttatcaacttgaaaaagtggcaccgagtcggtgctcatctttggtgtttcctatgatgaatatagatac

SEQ ID NO: 115 - DNA, 149 bp, synthetic construct
  source 1..149: mol_type = other DNA
gcatgctttgatgacgcttcgttttagagctagaaatagcaagttaaaataaggctagtccgttatcaacttgaaaaagtggcaccgagtcggtgcaaaatatcatctttggtgtttcctatgatgaatatagatacagaagcgtcatc

SEQ ID NO: 116 - DNA, 151 bp, synthetic construct
  source 1..151: mol_type = other DNA
gcatgctttgatgacgcttcgttttagagctagaaatagcaagttaaaataaggctagtccgttatcaacttgaaaaagtggcaccgagtcggtgcaaaatatcatctttggtgtttcctatgatgaatatagatacagaagcgtcatcaa

SEQ ID NO: 117 - DNA, 146 bp, synthetic construct
  source 1..146: mol_type = other DNA
gcatgctttgatgacgcttcgttttagagctagaaatagcaagttaaaataaggctagtccgttatcaacttgaaaaagtggcaccgagtcggtgcatcatctttggtgtttcctatgatgaatatagatacagaagcgtcatcaa

SEQ ID NO: 118 - DNA, 148 bp, synthetic construct
  source 1..148: mol_type = other DNA
gcatgctttgatgacgcttcgttttagagctagaaatagcaagttaaaataaggctagtccgttatcaacttgaaaaagtggcaccgagtcggtgcatcatctttggtgtttcctatgatgaatatagatacagaagcgtcatcaaag

SEQ ID NO: 119 - DNA, 125 bp, synthetic construct
  source 1..125: mol_type = other DNA
ttcatcataggaaacaccaagttttagagctagaaatagcaagttaaaataaggctagtccgttatcaacttgaaaaagtggcaccgagtcggtgcaagaaaatatcatctttggtgtttcctat

SEQ ID NO: 120 - DNA, 129 bp, synthetic construct
  source 1..129: mol_type = other DNA
ttcatcataggaaacaccaagttttagagctagaaatagcaagttaaaataaggctagtccgttatcaacttgaaaaagtggcaccgagtcggtgcattaaagaaaatatcatctttggtgtttcctat

SEQ ID NO: 121 - DNA, 127 bp, synthetic construct
  source 1..127: mol_type = other DNA
ttcatcataggaaacaccaagttttagagctagaaatagcaagttaaaataaggctagtccgttatcaacttgaaaaagtggcaccgagtcggtgcaagaaaatatcatctttggtgtttcctatga

SEQ ID NO: 122 - DNA, 131 bp, synthetic construct
  source 1..131: mol_type = other DNA
ttcatcataggaaacaccaagttttagagctagaaatagcaagttaaaataaggctagtccgttatcaacttgaaaaagtggcaccgagtcggtgcattaaagaaaatatcatctttggtgtttcctatga

SEQ ID NO: 123 - DNA, 122 bp, synthetic construct
  source 1..122: mol_type = other DNA
tttgcagagaaagacaatatgttttagagctagaaatagcaagttaaaataaggctagtccgttatcaacttgaaaaagtggcaccgagtcggtgcttctccaagaactatattgtctttct

SEQ ID NO: 124 - DNA, 124 bp, synthetic construct
  source 1..124: mol_type = other DNA
tttgcagagaaagacaatatgttttagagctagaaatagcaagttaaaataaggctagtccgttatcaacttgaaaaagtggcaccgagtcggtgcttctccaagaactatattgtctttctct

SEQ ID NO: 125 - DNA, 121 bp, synthetic construct
  source 1..121: mol_type = other DNA
tttgcagagaaagacaatatgttttagagctagaaatagcaagttaaaataaggctagtccgttatcaacttgaaaaagtggcaccgagtcggtgctccaagaactatattgtctttctct

SEQ ID NO: 126 - DNA, 123 bp, synthetic construct
  source 1..123: mol_type = other DNA
tttgcagagaaagacaatatgttttagagctagaaatagcaagttaaaataaggctagtccgttatcaacttgaaaaagtggcaccgagtcggtgctccaagaactatattgtctttctctgc

SEQ ID NO: 127 - DNA, 121 bp, synthetic construct
  source 1..121: mol_type = other DNA
agaaagacaatatagttcttgttttagagctagaaatagcaagttaaaataaggctagtccgttatcaacttgaaaaagtggcaccgagtcggtgctccaccttctccaagaactatattg

SEQ ID NO: 128 - DNA, 123 bp, synthetic construct
  source 1..123: mol_type = other DNA
agaaagacaatatagttcttgttttagagctagaaatagcaagttaaaataaggctagtccgttatcaacttgaaaaagtggcaccgagtcggtgctccaccttctccaagaactatattgtc

SEQ ID NO: 129 - DNA, 120 bp, synthetic construct
  source 1..120: mol_type = other DNA
agaaagacaatatagttcttgttttagagctagaaatagcaagttaaaataaggctagtccgttatcaacttgaaaaagtggcaccgagtcggtgcaccttctccaagaactatattgtc

SEQ ID NO: 130 - DNA, 122 bp, synthetic construct
  source 1..122: mol_type = other DNA
agaaagacaatatagttcttgttttagagctagaaatagcaagttaaaataaggctagtccgttatcaacttgaaaaagtggcaccgagtcggtgcaccttctccaagaactatattgtctt

SEQ ID NO: 131 - DNA, 120 bp, synthetic construct
  source 1..120: mol_type = other DNA
aaagacaatatagttcttgggttttagagctagaaatagcaagttaaaataaggctagtccgttatcaacttgaaaaagtggcaccgagtcggtgcttccaccttctccaagaactatat

SEQ ID NO: 132 - DNA, 122 bp, synthetic construct
  source 1..122: mol_type = other DNA
aaagacaatatagttcttgggttttagagctagaaatagcaagttaaaataaggctagtccgttatcaacttgaaaaagtggcaccgagtcggtgcttccaccttctccaagaactatattg

SEQ ID NO: 133 - DNA, 118 bp, synthetic construct
  source 1..118: mol_type = other DNA
aaagacaatatagttcttgggttttagagctagaaatagcaagttaaaataaggctagtccgttatcaacttgaaaaagtggcaccgagtcggtgcaccttctccaagaactatattg

SEQ ID NO: 134 - DNA, 120 bp, synthetic construct
  source 1..120: mol_type = other DNA
aaagacaatatagttcttgggttttagagctagaaatagcaagttaaaataaggctagtccgttatcaacttgaaaaagtggcaccgagtcggtgcaccttctccaagaactatattgtc

SEQ ID NO: 135 - DNA, 131 bp, synthetic construct
  source 1..131: mol_type = other DNA
gacaatatagttcttggagagttttagagctagaaatagcaagttaaaataaggctagtccgttatcaacttgaaaaagtggcaccgagtcggtgctccactcagtgtgattccaccttctccaagaacta

SEQ ID NO: 136 - DNA, 133 bp, synthetic construct
  source 1..133: mol_type = other DNA
gacaatatagttcttggagagttttagagctagaaatagcaagttaaaataaggctagtccgttatcaacttgaaaaagtggcaccgagtcggtgctccactcagtgtgattccaccttctccaagaactata

SEQ ID NO: 137 - DNA, 130 bp, synthetic construct
  source 1..130: mol_type = other DNA
gacaatatagttcttggagagttttagagctagaaatagcaagttaaaataaggctagtccgttatcaacttgaaaaagtggcaccgagtcggtgcactcagtgtgattccaccttctccaagaactata

SEQ ID NO: 138 - DNA, 132 bp, synthetic construct
  source 1..132: mol_type = other DNA
gacaatatagttcttggagagttttagagctagaaatagcaagttaaaataaggctagtccgttatcaacttgaaaaagtggcaccgagtcggtgcactcagtgtgattccaccttctccaagaactatatt

SEQ ID NO: 139 - DNA, 119 bp, synthetic construct
  source 1..119: mol_type = other DNA
tggagaaggtggaatcacacgttttagagctagaaatagcaagttaaaataaggctagtccgttatcaacttgaaaaagtggcaccgagtcggtgcacctccactcagtgtgattccac

SEQ ID NO: 140 - DNA, 121 bp, synthetic construct
  source 1..121: mol_type = other DNA
tggagaaggtggaatcacacgttttagagctagaaatagcaagttaaaataaggctagtccgttatcaacttgaaaaagtggcaccgagtcggtgcacctccactcagtgtgattccacct

SEQ ID NO: 141 - DNA, 118 bp, synthetic construct
  source 1..118: mol_type = other DNA
tggagaaggtggaatcacacgttttagagctagaaatagcaagttaaaataaggctagtccgttatcaacttgaaaaagtggcaccgagtcggtgctccactcagtgtgattccacct

SEQ ID NO: 142 - DNA, 120 bp, synthetic construct
  source 1..120: mol_type = other DNA
tggagaaggtggaatcacacgttttagagctagaaatagcaagttaaaataaggctagtccgttatcaacttgaaaaagtggcaccgagtcggtgctccactcagtgtgattccaccttc

SEQ ID NO: 143 - DNA, 119 bp, synthetic construct
  source 1..119: mol_type = other DNA
caccttgctaaagaaattctgttttagagctagaaatagcaagttaaaataaggctagtccgttatcaacttgaaaaagtggcaccgagtcggtgctcaacgagcaagaatttctttag

SEQ ID NO: 144 - DNA, 121 bp, synthetic construct
  source 1..121: mol_type = other DNA
caccttgctaaagaaattctgttttagagctagaaatagcaagttaaaataaggctagtccgttatcaacttgaaaaagtggcaccgagtcggtgctcaacgagcaagaatttctttagca

SEQ ID NO: 145 - DNA, 119 bp, synthetic construct
  source 1..119: mol_type = other DNA
caccttgctaaagaaattctgttttagagctagaaatagcaagttaaaataaggctagtccgttatcaacttgaaaaagtggcaccgagtcggtgcaacgagcaagaatttctttagca

SEQ ID NO: 146 - DNA, 121 bp, synthetic construct
  source 1..121: mol_type = other DNA
caccttgctaaagaaattctgttttagagctagaaatagcaagttaaaataaggctagtccgttatcaacttgaaaaagtggcaccgagtcggtgcaacgagcaagaatttctttagcaag

SEQ ID NO: 147 - DNA, 126 bp, synthetic construct
  source 1..126: mol_type = other DNA
ttagttattcaccttgctaagttttagagctagaaatagcaagttaaaataaggctagtccgttatcaacttgaaaaagtggcaccgagtcggtgctcaacgagcaagaatttctttagcaaggtg

SEQ ID NO: 148 - DNA, 129 bp, synthetic construct
  source 1..129: mol_type = other DNA
ttagttattcaccttgctaagttttagagctagaaatagcaagttaaaataaggctagtccgttatcaacttgaaaaagtggcaccgagtcggtgctcaacgagcaagaatttctttagcaaggtgaat

SEQ ID NO: 149 - DNA, 126 bp, synthetic construct
  source 1..126: mol_type = other DNA
ttagttattcaccttgctaagttttagagctagaaatagcaagttaaaataaggctagtccgttatcaacttgaaaaagtggcaccgagtcggtgcacgagcaagaatttctttagcaaggtgaat

SEQ ID NO: 150 - DNA, 129 bp, synthetic construct
  source 1..129: mol_type = other DNA
ttagttattcaccttgctaagttttagagctagaaatagcaagttaaaataaggctagtccgttatcaacttgaaaaagtggcaccgagtcggtgcacgagcaagaatttctttagcaaggtgaataac

SEQ ID NO: 151 - DNA, 134 bp, synthetic construct
  source 1..134: mol_type = other DNA
caataattagttattcacctgttttagagctagaaatagcaagttaaaataaggctagtccgttatcaacttgaaaaagtggcaccgagtcggtgctcaacgagcaagaatttctttagcaaggtgaataacta

SEQ ID NO: 152 - DNA, 136 bp, synthetic construct
  source 1..136: mol_type = other DNA
caataattagttattcacctgttttagagctagaaatagcaagttaaaataaggctagtccgttatcaacttgaaaaagtggcaccgagtcggtgctcaacgagcaagaatttctttagcaaggtgaataactaat

SEQ ID NO: 153 - DNA, 133 bp, synthetic construct
  source 1..133: mol_type = other DNA
caataattagttattcacctgttttagagctagaaatagcaagttaaaataaggctagtccgttatcaacttgaaaaagtggcaccgagtcggtgcacgagcaagaatttctttagcaaggtgaataactaat

SEQ ID NO: 154 - DNA, 135 bp, synthetic construct
  source 1..135: mol_type = other DNA
caataattagttattcacctgttttagagctagaaatagcaagttaaaataaggctagtccgttatcaacttgaaaaagtggcaccgagtcggtgcacgagcaagaatttctttagcaaggtgaataactaatta

SEQ ID NO: 155 - DNA, 127 bp, synthetic construct
  source 1..127: mol_type = other DNA
tggagaaggtggaatcacacgttttagagctagaaatagcaagttaaaataaggctagtccgttatcaacttgaaaaagtggcaccgagtcggtgctcgttgacctccactcagtgtgattccacct

SEQ ID NO: 156 - DNA, 129 bp, synthetic construct
  source 1..129: mol_type = other DNA
tggagaaggtggaatcacacgttttagagctagaaatagcaagttaaaataaggctagtccgttatcaacttgaaaaagtggcaccgagtcggtgctcgttgacctccactcagtgtgattccaccttc

SEQ ID NO: 157 - DNA, 136 bp, synthetic construct
  source 1..136: mol_type = other DNA
gaatatagttcttggagaagggttttagagctagaaatagcaagttaaaataaggctagtccgttatcaacttgaaaaagtggcaccgagtcggtgctcgttgacctccattcagtgtgattccaccttctccaag

SEQ ID NO: 158 - DNA, 139 bp, synthetic construct
  source 1..139: mol_type = other DNA
gaatatagttcttggagaagggttttagagctagaaatagcaagttaaaataaggctagtccgttatcaacttgaaaaagtggcaccgagtcggtgctcgttgacctccattcagtgtgattccaccttctccaagaac

SEQ ID NO: 159 - DNA, 140 bp, synthetic construct
  source 1..140: mol_type = other DNA
gaatatagttcttggagaagggttttagagctagaaatagcaagttaaaataaggctagtccgttatcaacttgaaaaagtggcaccgagtcggtgctcgttgacctccattcagtgtgattccaccttctccaagaact

SEQ ID NO: 160 - DNA, 142 bp, synthetic construct
  source 1..142: mol_type = other DNA
gaatatagttcttggagaagggttttagagctagaaatagcaagttaaaataaggctagtccgttatcaacttgaaaaagtggcaccgagtcggtgctcgttgacctccattcagtgtgattccaccttctccaagaactat

SEQ ID NO: 161 - DNA, 140 bp, synthetic construct
  source 1..140: mol_type = other DNA
gaatatagttcttggagaagggttttagagctagaaatagcaagttaaaataaggctagtccgttatcaacttgaaaaagtggcaccgagtcggtgcttgctcgttgacctccattcagtgtgattccaccttctccaag

SEQ ID NO: 162 - DNA, 143 bp, synthetic construct
  source 1..143: mol_type = other DNA
gaatatagttcttggagaagggttttagagctagaaatagcaagttaaaataaggctagtccgttatcaacttgaaaaagtggcaccgagtcggtgcttgctcgttgacctccattcagtgtgattccaccttctccaagaac

SEQ ID NO: 163 - DNA, 144 bp, synthetic construct
  source 1..144: mol_type = other DNA
gaatatagttcttggagaagggttttagagctagaaatagcaagttaaaataaggctagtccgttatcaacttgaaaaagtggcaccgagtcggtgcttgctcgttgacctccattcagtgtgattccaccttctccaagaact

SEQ ID NO: 164 - DNA, 146 bp, synthetic construct
  source 1..146: mol_type = other DNA
gaatatagttcttggagaagggttttagagctagaaatagcaagttaaaataaggctagtccgttatcaacttgaaaaagtggcaccgagtcggtgcttgctcgttgacctccattcagtgtgattccaccttctccaagaactat

SEQ ID NO: 165 - DNA, 144 bp, synthetic construct
  source 1..144: mol_type = other DNA
gaatatagttcttggagaagggttttagagctagaaatagcaagttaaaataaggctagtccgttatcaacttgaaaaagtggcaccgagtcggtgcattcttgctcgttgacctccattcagtgtgattccaccttctccaag

SEQ ID NO: 166 - DNA, 147 bp, synthetic construct
  source 1..147: mol_type = other DNA
gaatatagttcttggagaagggttttagagctagaaatagcaagttaaaataaggctagtccgttatcaacttgaaaaagtggcaccgagtcggtgcattcttgctcgttgacctccattcagtgtgattccaccttctccaagaac

SEQ ID NO: 167 - DNA, 148 bp, synthetic construct
  source 1..148: mol_type = other DNA
gaatatagttcttggagaagggttttagagctagaaatagcaagttaaaataaggctagtccgttatcaacttgaaaaagtggcaccgagtcggtgcattcttgctcgttgacctccattcagtgtgattccaccttctccaagaact

SEQ ID NO: 168 - DNA, 150 bp, synthetic construct
  source 1..150: mol_type = other DNA
gaatatagttcttggagaagggttttagagctagaaatagcaagttaaaataaggctagtccgttatcaacttgaaaaagtggcaccgagtcggtgcattcttgctcgttgacctccattcagtgtgattccaccttctccaagaactat

SEQ ID NO: 169 - DNA, 147 bp, synthetic construct
  source 1..147: mol_type = other DNA
gaatatagttcttggagaagggttttagagctagaaatagcaagttaaaataaggctagtccgttatcaacttgaaaaagtggcaccgagtcggtgcttcattcttgctcgttgacctccattcagtgtgattccaccttctccaag

SEQ ID NO: 170 - DNA, 150 bp, synthetic construct
  source 1..150: mol_type = other DNA
gaatatagttcttggagaagggttttagagctagaaatagcaagttaaaataaggctagtccgttatcaacttgaaaaagtggcaccgagtcggtgcttcattcttgctcgttgacctccattcagtgtgattccaccttctccaagaac

SEQ ID NO: 171 - DNA, 151 bp, synthetic construct
  source 1..151: mol_type = other DNA
gaatatagttcttggagaagggttttagagctagaaatagcaagttaaaataaggctagtccgttatcaacttgaaaaagtggcaccgagtcggtgcttcattcttgctcgttgacctccattcagtgtgattccaccttctccaagaact

SEQ ID NO: 172 - DNA, 153 bp, synthetic construct
  source 1..153: mol_type = other DNA
gaatatagttcttggagaagggttttagagctagaaatagcaagttaaaataaggctagtccgttatcaacttgaaaaagtggcaccgagtcggtgcttcattcttgctcgttgacctccattcagtgtgattccaccttctccaagaactat

SEQ ID NO: 173 - DNA, 156 bp, synthetic construct
  source 1..156: mol_type = other DNA
gtggagaaggtggaatcacacgttttagagctagaaatagcaagttaaaataaggctagtccgttatcaacttgaaaaagtggcaccgagtcggtgctcgttgacctccattcagtgtgattccacaacattgacgcgtctctacgtgggggcgcg

SEQ ID NO: 174 - DNA, 159 bp, synthetic construct
  source 1..159: mol_type = other DNA
gtggagaaggtggaatcacacgttttagagctagaaatagcaagttaaaataaggctagtccgttatcaacttgaaaaagtggcaccgagtcggtgctcgttgacctccattcagtgtgattccacctaaacattgacgcgtctctacgtgggggcgcg

SEQ ID NO: 175 - DNA, 161 bp, synthetic construct
  source 1..161: mol_type = other DNA
gtggagaaggtggaatcacacgttttagagctagaaatagcaagttaaaataaggctagtccgttatcaacttgaaaaagtggcaccgagtcggtgctcgttgacctccattcagtgtgattccaccttcaaacattgacgcgtctctacgtgggggcgcg

SEQ ID NO: 176 - DNA, 161 bp, synthetic construct
  source 1..161: mol_type = other DNA
gtggagaaggtggaatcacacgttttagagctagaaatagcaagttaaaataaggctagtccgttatcaacttgaaaaagtggcaccgagtcggtgctcgttgacctccattcagtgtgattccaccttctaacattgacgcgtctctacgtgggggcgcg

SEQ ID NO: 177 - DNA, 160 bp, synthetic construct
  source 1..160: mol_type = other DNA
gtggagaaggtggaatcacacgttttagagctagaaatagcaagttaaaataaggctagtccgttatcaacttgaaaaagtggcaccgagtcggtgcttgctcgttgacctccattcagtgtgattccacaacattgacgcgtctctacgtgggggcgcg

SEQ ID NO: 178 - DNA, 163 bp, synthetic construct
  source 1..163: mol_type = other DNA
gtggagaaggtggaatcacacgttttagagctagaaatagcaagttaaaataaggctagtccgttatcaacttgaaaaagtggcaccgagtcggtgcttgctcgttgacctccattcagtgtgattccacctaaacattgacgcgtctctacgtgggggcgcg

SEQ ID NO: 179 - DNA, 165 bp, synthetic construct
  source 1..165: mol_type = other DNA
gtggagaaggtggaatcacacgttttagagctagaaatagcaagttaaaataaggctagtccgttatcaacttgaaaaagtggcaccgagtcggtgcttgctcgttgacctccattcagtgtgattccaccttcaaacattgacgcgtctctacgtgggggcgcg

SEQ ID NO: 180 - DNA, 165 bp, synthetic construct
  source 1..165: mol_type = other DNA
gtggagaaggtggaatcacacgttttagagctagaaatagcaagttaaaataaggctagtccgttatcaacttgaaaaagtggcaccgagtcggtgcttgctcgttgacctccattcagtgtgattccaccttctaacattgacgcgtctctacgtgggggcgcg

SEQ ID NO: 181 - DNA, 164 bp, synthetic construct
  source 1..164: mol_type = other DNA
gtggagaaggtggaatcacacgttttagagctagaaatagcaagttaaaataaggctagtccgttatcaacttgaaaaagtggcaccgagtcggtgcattcttgctcgttgacctccattcagtgtgattccacaacattgacgcgtctctacgtgggggcgcg

SEQ ID NO: 182 - DNA, 167 bp, synthetic construct
  source 1..167: mol_type = other DNA
gtggagaaggtggaatcacacgttttagagctagaaatagcaagttaaaataaggctagtccgttatcaacttgaaaaagtggcaccgagtcggtgcattcttgctcgttgacctccattcagtgtgattccacctaaacattgacgcgtctctacgtgggggcgcg

SEQ ID NO: 183 - DNA, 169 bp, synthetic construct
  source 1..169: mol_type = other DNA
gtggagaaggtggaatcacacgttttagagctagaaatagcaagttaaaataaggctagtccgttatcaacttgaaaaagtggcaccgagtcggtgcattcttgctcgttgacctccattcagtgtgattccaccttcaaacattgacgcgtctctacgtgggggcgcg

SEQ ID NO: 184 - DNA, 169 bp, synthetic construct
  source 1..169: mol_type = other DNA
gtggagaaggtggaatcacacgttttagagctagaaatagcaagttaaaataaggctagtccgttatcaacttgaaaaagtggcaccgagtcggtgcattcttgctcgttgacctccattcagtgtgattccaccttctaacattgacgcgtctctacgtgggggcgcg

SEQ ID NO: 185 - DNA, 167 bp, synthetic construct
  source 1..167: mol_type = other DNA
gtggagaaggtggaatcacacgttttagagctagaaatagcaagttaaaataaggctagtccgttatcaacttgaaaaagtggcaccgagtcggtgcttcattcttgctcgttgacctccattcagtgtgattccacaacattgacgcgtctctacgtgggggcgcg

SEQ ID NO: 186 - DNA, 170 bp, synthetic construct
  source 1..170: mol_type = other DNA
gtggagaaggtggaatcacacgttttagagctagaaatagcaagttaaaataaggctagtccgttatcaacttgaaaaagtggcaccgagtcggtgcttcattcttgctcgttgacctccattcagtgtgattccacctaaacattgacgcgtctctacgtgggggcgcg

SEQ ID NO: 187 - DNA, 172 bp, synthetic construct
  source 1..172: mol_type = other DNA
gtggagaaggtggaatcacacgttttagagctagaaatagcaagttaaaataaggctagtccgttatcaacttgaaaaagtggcaccgagtcggtgcttcattcttgctcgttgacctccattcagtgtgattccaccttcaaacattgacgcgtctctacgtgggggcgcg

SEQ ID NO: 188 - DNA, 172 bp, synthetic construct
  source 1..172: mol_type = other DNA
gtggagaaggtggaatcacacgttttagagctagaaatagcaagttaaaataaggctagtccgttatcaacttgaaaaagtggcaccgagtcggtgcttcattcttgctcgttgacctccattcagtgtgattccaccttctaacattgacgcgtctctacgtgggggcgcg

SEQ ID NO: 189 - DNA, 161 bp, synthetic construct
  source 1..161: mol_type = other DNA
gatctccaagtttgcagagaagttttagagctagaaatagcaagttaaaataaggctagtccgttatcaacttgaaaaagtggcaccgagtcggtgcttctcaaagaactatattgtctttctctgcaaacaacattgacgcgtctctacgtgggggcgcg

SEQ ID NO: 190 - DNA, 164 bp, synthetic construct
  source 1..164: mol_type = other DNA
gatctccaagtttgcagagaagttttagagctagaaatagcaagttaaaataaggctagtccgttatcaacttgaaaaagtggcaccgagtcggtgcttctcaaagaactatattgtctttctctgcaaacttgaacattgacgcgtctctacgtgggggcgcg

SEQ ID NO: 191 - DNA, 165 bp, synthetic construct
  source 1..165: mol_type = other DNA
gatctccaagtttgcagagaagttttagagctagaaatagcaagttaaaataaggctagtccgttatcaacttgaaaaagtggcaccgagtcggtgcttctcaaagaactatattgtctttctctgcaaacttggaacattgacgcgtctctacgtgggggcgcg

SEQ ID NO: 192 - DNA, 164 bp, synthetic construct
  source 1..164: mol_type = other DNA
gatctccaagtttgcagagaagttttagagctagaaatagcaagttaaaataaggctagtccgttatcaacttgaaaaagtggcaccgagtcggtgcaccttctcaaagaactatattgtctttctctgcaaacaacattgacgcgtctctacgtgggggcgcg

SEQ ID NO: 193 - DNA, 167 bp, synthetic construct
  source 1..167: mol_type = other DNA
gatctccaagtttgcagagaagttttagagctagaaatagcaagttaaaataaggctagtccgttatcaacttgaaaaagtggcaccgagtcggtgcaccttctcaaagaactatattgtctttctctgcaaacttgaacattgacgcgtctctacgtgggggcgcg

SEQ ID NO: 194 - DNA, 168 bp, synthetic construct
  source 1..168: mol_type = other DNA
gatctccaagtttgcagagaagttttagagctagaaatagcaagttaaaataaggctagtccgttatcaacttgaaaaagtggcaccgagtcggtgcaccttctcaaagaactatattgtctttctctgcaaacttggaacattgacgcgtctctacgtgggggcgcg

SEQ ID NO: 195 - DNA, 170 bp, synthetic construct
  source 1..170: mol_type = other DNA
gatctccaagtttgcagagaagttttagagctagaaatagcaagttaaaataaggctagtccgttatcaacttgaaaaagtggcaccgagtcggtgcgattccaccttctcaaagaactatattgtctttctctgcaaacaacattgacgcgtctctacgtgggggcgcg

SEQ ID NO: 196 - DNA, 173 bp, synthetic construct
  source 1..173: mol_type = other DNA
gatctccaagtttgcagagaagttttagagctagaaatagcaagttaaaataaggctagtccgttatcaacttgaaaaagtggcaccgagtcggtgcgattccaccttctcaaagaactatattgtctttctctgcaaacttgaacattgacgcgtctctacgtgggggcgcg

SEQ ID NO: 197 - DNA, 174 bp, synthetic construct
  source 1..174: mol_type = other DNA
gatctccaagtttgcagagaagttttagagctagaaatagcaagttaaaataaggctagtccgttatcaacttgaaaaagtggcaccgagtcggtgcgattccaccttctcaaagaactatattgtctttctctgcaaacttggaacattgacgcgtctctacgtgggggcgcg

SEQ ID NO: 198 - DNA, 191 bp, synthetic construct
  source 1..191: mol_type = other DNA
gatctccaagtttgcagagaagttttagagctagaaatagcaagttaaaataaggctagtccgttatcaacttgaaaaagtggcaccgagtcggtgctcgttgatctccactcagtgtgattccaccttctccaagaactatattgtctttctctgcaaacaacattgacgcgtctctacgtgggggcgcg

SEQ ID NO: 199 - DNA, 194 bp, synthetic construct
  source 1..194: mol_type = other DNA
gatctccaagtttgcagagaagttttagagctagaaatagcaagttaaaataaggctagtccgttatcaacttgaaaaagtggcaccgagtcggtgctcgttgatctccactcagtgtgattccaccttctccaagaactatattgtctttctctgcaaacttgaacattgacgcgtctctacgtgggggcgcg

SEQ ID NO: 200 - DNA, 195 bp, synthetic construct
  source 1..195: mol_type = other DNA
gatctccaagtttgcagagaagttttagagctagaaatagcaagttaaaataaggctagtccgttatcaacttgaaaaagtggcaccgagtcggtgctcgttgatctccactcagtgtgattccaccttctccaagaactatattgtctttctctgcaaacttggaacattgacgcgtctctacgtgggggcgcg

SEQ ID NO: 201 - DNA, 195 bp, synthetic construct
  source 1..195: mol_type = other DNA
gatctccaagtttgcagagaagttttagagctagaaatagcaagttaaaataaggctagtccgttatcaacttgaaaaagtggcaccgagtcggtgcttgctcgttgatctccactcagtgtgattccaccttctccaagaactatattgtctttctctgcaaacaacattgacgcgtctctacgtgggggcgcg

SEQ ID NO: 202 - DNA, 198 bp, synthetic construct
  source 1..198: mol_type = other DNA
gatctccaagtttgcagagaagttttagagctagaaatagcaagttaaaataaggctagtccgttatcaacttgaaaaagtggcaccgagtcggtgcttgctcgttgatctccactcagtgtgattccaccttctccaagaactatattgtctttctctgcaaacttgaacattgacgcgtctctacgtgggggcgcg

SEQ ID NO: 203 - DNA, 199 bp, synthetic construct
  source 1..199: mol_type = other DNA
gatctccaagtttgcagagaagttttagagctagaaatagcaagttaaaataaggctagtccgttatcaacttgaaaaagtggcaccgagtcggtgcttgctcgttgatctccactcagtgtgattccaccttctccaagaactatattgtctttctctgcaaacttggaacattgacgcgtctctacgtgggggcgcg

SEQ ID NO: 204 - DNA, 199 bp, synthetic construct
  source 1..199: mol_type = other DNA
gatctccaagtttgcagagaagttttagagctagaaatagcaagttaaaataaggctagtccgttatcaacttgaaaaagtggcaccgagtcggtgcattcttgctcgttgatctccactcagtgtgattccaccttctccaagaactatattgtctttctctgcaaacaacattgacgcgtctctacgtgggggcgcg

SEQ ID NO: 205 - DNA, 202 bp, synthetic construct
  source 1..202: mol_type = other DNA
gatctccaagtttgcagagaagttttagagctagaaatagcaagttaaaataaggctagtccgttatcaacttgaaaaagtggcaccgagtcggtgcattcttgctcgttgatctccactcagtgtgattccaccttctccaagaactatattgtctttctctgcaaacttgaacattgacgcgtctctacgtgggggcgcg

SEQ ID NO: 206 - DNA, 203 bp, synthetic construct
  source 1..203: mol_type = other DNA
gatctccaagtttgcagagaagttttagagctagaaatagcaagttaaaataaggctagtccgttatcaacttgaaaaagtggcaccgagtcggtgcattcttgctcgttgatctccactcagtgtgattccaccttctccaagaactatattgtctttctctgcaaacttggaacattgacgcgtctctacgtgggggcgcg

SEQ ID NO: 207 - DNA, 146 bp, synthetic construct
  source 1..146: mol_type = other DNA
gttcatcataggaaacaccaagttttagagctagaaatagcaagttaaaataaggctagtccgttatcaacttgaaaaagtggcaccgagtcggtgcaatatcattggtgtttcctaacattgacgcgtctctacgtgggggcgcg

SEQ ID NO: 208 - DNA, 148 bp, synthetic construct
  source 1..148: mol_type = other DNA
gttcatcataggaaacaccaagttttagagctagaaatagcaagttaaaataaggctagtccgttatcaacttgaaaaagtggcaccgagtcggtgcaatatcattggtgtttcctataacattgacgcgtctctacgtgggggcgcg

SEQ ID NO: 209 - DNA, 150 bp, synthetic construct
  source 1..150: mol_type = other DNA
gttcatcataggaaacaccaagttttagagctagaaatagcaagttaaaataaggctagtccgttatcaacttgaaaaagtggcaccgagtcggtgcaatatcattggtgtttcctatgaaacattgacgcgtctctacgtgggggcgcg

SEQ ID NO: 210 - DNA, 149 bp, synthetic construct
  source 1..149: mol_type = other DNA
gttcatcataggaaacaccaagttttagagctagaaatagcaagttaaaataaggctagtccgttatcaacttgaaaaagtggcaccgagtcggtgcgaaaatatcattggtgtttcctaacattgacgcgtctctacgtgggggcgcg

SEQ ID NO: 211 - DNA, 151 bp, synthetic construct
  source 1..151: mol_type = other DNA
gttcatcataggaaacaccaagttttagagctagaaatagcaagttaaaataaggctagtccgttatcaacttgaaaaagtggcaccgagtcggtgcgaaaatatcattggtgtttcctataacattgacgcgtctctacgtgggggcgcg

SEQ ID NO: 212 - DNA, 153 bp, synthetic construct
  source 1..153: mol_type = other DNA
gttcatcataggaaacaccaagttttagagctagaaatagcaagttaaaataaggctagtccgttatcaacttgaaaaagtggcaccgagtcggtgcgaaaatatcattggtgtttcctatgaaacattgacgcgtctctacgtgggggcgcg

SEQ ID NO: 213 - DNA, 151 bp, synthetic construct
  source 1..151: mol_type = other DNA
gttcatcataggaaacaccaagttttagagctagaaatagcaagttaaaataaggctagtccgttatcaacttgaaaaagtggcaccgagtcggtgcaagaaaatatcattggtgtttcctaacattgacgcgtctctacgtgggggcgcg

SEQ ID NO: 214 - DNA, 153 bp, synthetic construct
  source 1..153: mol_type = other DNA
gttcatcataggaaacaccaagttttagagctagaaatagcaagttaaaataaggctagtccgttatcaacttgaaaaagtggcaccgagtcggtgcaagaaaatatcattggtgtttcctataacattgacgcgtctctacgtgggggcgcg

SEQ ID NO: 215 - DNA, 155 bp, synthetic construct
  source 1..155: mol_type = other DNA
gttcatcataggaaacaccaagttttagagctagaaatagcaagttaaaataaggctagtccgttatcaacttgaaaaagtggcaccgagtcggtgcaagaaaatatcattggtgtttcctatgaaacattgacgcgtctctacgtgggggcgcg

SEQ ID NO: 216 - DNA, 155 bp, synthetic construct
  source 1..155: mol_type = other DNA
gttcatcataggaaacaccaagttttagagctagaaatagcaagttaaaataaggctagtccgttatcaacttgaaaaagtggcaccgagtcggtgcattaaagaaaatatcattggtgtttcctaacattgacgcgtctctacgtgggggcgcg

SEQ ID NO: 217 - DNA, 157 bp, synthetic construct
  source 1..157: mol_type = other DNA
gttcatcataggaaacaccaagttttagagctagaaatagcaagttaaaataaggctagtccgttatcaacttgaaaaagtggcaccgagtcggtgcattaaagaaaatatcattggtgtttcctataacattgacgcgtctctacgtgggggcgcg

SEQ ID NO: 218 - DNA, 159 bp, synthetic construct
  source 1..159: mol_type = other DNA
gttcatcataggaaacaccaagttttagagctagaaatagcaagttaaaataaggctagtccgttatcaacttgaaaaagtggcaccgagtcggtgcattaaagaaaatatcattggtgtttcctatgaaacattgacgcgtctctacgtgggggcgcg

SEQ ID NO: 219 - DNA, 96 bp, synthetic construct; identical to SEQ ID NO: 87
  source 1..96: mol_type = other DNA

SEQ ID NO: 220 - DNA, 97 bp, synthetic construct; identical to SEQ ID NO: 88
  source 1..97: mol_type = other DNA

SEQ ID NO: 221 - DNA, 97 bp, synthetic construct; identical to SEQ ID NO: 82
  source 1..97: mol_type = other DNA

SEQ ID NO: 222 - DNA, 97 bp, synthetic construct; identical to SEQ ID NO: 83
  source 1..97: mol_type = other DNA

SEQ ID NO: 223 - DNA, 97 bp, synthetic construct; identical to SEQ ID NO: 84
  source 1..97: mol_type = other DNA

SEQ ID NO: 224 - DNA, 97 bp, synthetic construct
  source 1..97: mol_type = other DNA
gtcgttgacctccattcagtggttttagagctagaaatagcaagttaaaataaggctagtccgttatcaacttgaaaaagtggcaccgagtcggtgc

SEQ ID NO: 225 - DNA, 97 bp, synthetic construct; identical to SEQ ID NO: 86
  source 1..97: mol_type = other DNA

SEQ ID NO: 226 - DNA, 96 bp, synthetic construct; identical to SEQ ID NO: 87
  source 1..96: mol_type = other DNA

SEQ ID NO: 227 - DNA, 97 bp, synthetic construct; identical to SEQ ID NO: 88
  source 1..97: mol_type = other DNA

SEQ ID NO: 228 - DNA, 97 bp, synthetic construct
  source 1..97: mol_type = other DNA
gaatatcattggtgtttcctagttttagagctagaaatagcaagttaaaataaggctagtccgttatcaacttgaaaaagtggcaccgagtcggtgc

SEQ ID NO: 229 - DNA, 97 bp, synthetic construct
  source 1..97: mol_type = other DNA
gatcattggtgtttcctatgagttttagagctagaaatagcaagttaaaataaggctagtccgttatcaacttgaaaaagtggcaccgagtcggtgc

SEQ ID NO: 230 - DNA, 122 bp, synthetic construct
  source 1..122: mol_type = other DNA
attaaagaaaatatcatcttgttttagagctagaaatagcaagttaaaataaggctagtccgttatcaacttgaaaaagtggcaccgagtcggtgcatcataggaaacaccaatgatatttt

SEQ ID NO: 231 - DNA, 124 bp, synthetic construct
  source 1..124: mol_type = other DNA
attaaagaaaatatcatcttgttttagagctagaaatagcaagttaaaataaggctagtccgttatcaacttgaaaaagtggcaccgagtcggtgcatcataggaaacaccaatgatattttct

SEQ ID NO: 232 - DNA, 118 bp, synthetic construct
  source 1..118: mol_type = other DNA
attaaagaaaatatcatcttgttttagagctagaaatagcaagttaaaataaggctagtccgttatcaacttgaaaaagtggcaccgagtcggtgcggaaacaccaatgatattttct

SEQ ID NO: 233 - DNA, 120 bp, synthetic construct
  source 1..120: mol_type = other DNA
attaaagaaaatatcatcttgttttagagctagaaatagcaagttaaaataaggctagtccgttatcaacttgaaaaagtggcaccgagtcggtgcggaaacaccaatgatattttcttt

SEQ ID NO: 234 - DNA, 131 bp, synthetic construct
  source 1..131: mol_type = other DNA
attatgcctggcaccattaagttttagagctagaaatagcaagttaaaataaggctagtccgttatcaacttgaaaaagtggcaccgagtcggtgctaggaaacaccaatgatattttctttaatggtgcc

SEQ ID NO: 235 - DNA, 133 bp, synthetic construct
  source 1..133: mol_type = other DNA
attatgcctggcaccattaagttttagagctagaaatagcaagttaaaataaggctagtccgttatcaacttgaaaaagtggcaccgagtcggtgctaggaaacaccaatgatattttctttaatggtgccag

SEQ ID NO: 236 - DNA, 128 bp, synthetic construct
  source 1..128: mol_type = other DNA
attatgcctggcaccattaagttttagagctagaaatagcaagttaaaataaggctagtccgttatcaacttgaaaaagtggcaccgagtcggtgcaacaccaatgatattttctttaatggtgccag

SEQ ID NO: 237 - DNA, 130 bp, synthetic construct
  source 1..130: mol_type = other DNA
attatgcctggcaccattaagttttagagctagaaatagcaagttaaaataaggctagtccgttatcaacttgaaaaagtggcaccgagtcggtgcaacaccaatgatattttctttaatggtgccaggc

SEQ ID NO: 238 - DNA, 141 bp, synthetic construct
  source 1..141: mol_type = other DNA
agttttcctggattatgcctgttttagagctagaaatagcaagttaaaataaggctagtccgttatcaacttgaaaaagtggcaccgagtcggtgcgaaacaccaatgatattttctttaatggtgccaggcataatccag

SEQ ID NO: 239 - DNA, 143 bp, synthetic construct
  source 1..143: mol_type = other DNA
agttttcctggattatgcctgttttagagctagaaatagcaagttaaaataaggctagtccgttatcaacttgaaaaagtggcaccgagtcggtgcgaaacaccaatgatattttctttaatggtgccaggcataatccagga

SEQ ID NO: 240 - DNA, 138 bp, synthetic construct
  source 1..138: mol_type = other DNA
agttttcctggattatgcctgttttagagctagaaatagcaagttaaaataaggctagtccgttatcaacttgaaaaagtggcaccgagtcggtgcaccaatgatattttctttaatggtgccaggcataatccagga

SEQ ID NO: 241 - DNA, 140 bp, synthetic construct
  source 1..140: mol_type = other DNA
agttttcctggattatgcctgttttagagctagaaatagcaagttaaaataaggctagtccgttatcaacttgaaaaagtggcaccgagtcggtgcaccaatgatattttctttaatggtgccaggcataatccaggaaa

SEQ ID NO: 242 - DNA, 142 bp, synthetic construct
  source 1..142: mol_type = other DNA
cagttttcctggattatgccgttttagagctagaaatagcaagttaaaataaggctagtccgttatcaacttgaaaaagtggcaccgagtcggtgcgaaacaccaatgatattttctttaatggtgccaggcataatccagg

SEQ ID NO: 243 - DNA, 144 bp, synthetic construct
  source 1..144: mol_type = other DNA
cagttttcctggattatgccgttttagagctagaaatagcaagttaaaataaggctagtccgttatcaacttgaaaaagtggcaccgagtcggtgcgaaacaccaatgatattttctttaatggtgccaggcataatccaggaa

SEQ ID NO: 244 - DNA, 139 bp, synthetic construct
  source 1..139: mol_type = other DNA
cagttttcctggattatgccgttttagagctagaaatagcaagttaaaataaggctagtccgttatcaacttgaaaaagtggcaccgagtcggtgcaccaatgatattttctttaatggtgccaggcataatccaggaa

SEQ ID NO: 245 - DNA, 141 bp, synthetic construct
  source 1..141: mol_type = other DNA
cagttttcctggattatgccgttttagagctagaaatagcaagttaaaataaggctagtccgttatcaacttgaaaaagtggcaccgagtcggtgcaccaatgatattttctttaatggtgccaggcataatccaggaaaa

SEQ ID NO: 246 - DNA, 129 bp, synthetic construct
  source 1..129: mol_type = other DNA
ctgtatctatattcatcatagttttagagctagaaatagcaagttaaaataaggctagtccgttatcaacttgaaaaagtggcaccgagtcggtgcgaaaatatcattggtgtttcctatgatgaatat

SEQ ID NO: 247 - DNA, 131 bp, synthetic construct
  source 1..131: mol_type = other DNA
ctgtatctatattcatcatagttttagagctagaaatagcaagttaaaataaggctagtccgttatcaacttgaaaaagtggcaccgagtcggtgcgaaaatatcattggtgtttcctatgatgaatatag

SEQ ID NO: 248 - DNA, 125 bp, synthetic construct
  source 1..125: mol_type = other DNA
ctgtatctatattcatcatagttttagagctagaaatagcaagttaaaataaggctagtccgttatcaacttgaaaaagtggcaccgagtcggtgcatcattggtgtttcctatgatgaatatag

SEQ ID NO: 249 - DNA, 128 bp, synthetic construct
  source 1..128: mol_type = other DNA
ctgtatctatattcatcatagttttagagctagaaatagcaagttaaaataaggctagtccgttatcaacttgaaaaagtggcaccgagtcggtgcatcattggtgtttcctatgatgaatatagata

SEQ ID NO: 250 - DNA, 129 bp, synthetic construct
  source 1..129: mol_type = other DNA
tctgtatctatattcatcatgttttagagctagaaatagcaagttaaaataaggctagtccgttatcaacttgaaaaagtggcaccgagtcggtgcaaatatcattggtgtttcctatgatgaatatag

SEQ ID NO: 251 - DNA, 131 bp, synthetic construct
  source 1..131: mol_type = other DNA
tctgtatctatattcatcatgttttagagctagaaatagcaagttaaaataaggctagtccgttatcaacttgaaaaagtggcaccgagtcggtgcaaatatcattggtgtttcctatgatgaatatagat

SEQ ID NO: 252 - DNA, 126 bp, synthetic construct
  source 1..126: mol_type = other DNA
tctgtatctatattcatcatgttttagagctagaaatagcaagttaaaataaggctagtccgttatcaacttgaaaaagtggcaccgagtcggtgctcattggtgtttcctatgatgaatatagat

SEQ ID NO: 253 - DNA, 128 bp, synthetic construct
  source 1..128: mol_type = other DNA
tctgtatctatattcatcatgttttagagctagaaatagcaagttaaaataaggctagtccgttatcaacttgaaaaagtggcaccgagtcggtgctcattggtgtttcctatgatgaatatagatac

SEQ ID NO: 254 - DNA, 146 bp, synthetic construct
  source 1..146: mol_type = other DNA
gcatgctttgatgacgcttcgttttagagctagaaatagcaagttaaaataaggctagtccgttatcaacttgaaaaagtggcaccgagtcggtgcaaaatatcattggtgtttcctatgatgaatatagatacagaagcgtcatc

SEQ ID NO: 255 - DNA, 148 bp, synthetic construct
  source 1..148: mol_type = other DNA
gcatgctttgatgacgcttcgttttagagctagaaatagcaagttaaaataaggctagtccgttatcaacttgaaaaagtggcaccgagtcggtgcaaaatatcattggtgtttcctatgatgaatatagatacagaagcgtcatcaa

SEQ ID NO: 256 - DNA, 143 bp, synthetic construct
  source 1..143: mol_type = other DNA
gcatgctttgatgacgcttcgttttagagctagaaatagcaagttaaaataaggctagtccgttatcaacttgaaaaagtggcaccgagtcggtgcatcattggtgtttcctatgatgaatatagatacagaagcgtcatcaa

SEQ ID NO: 257 - DNA, 145 bp, synthetic construct
  source 1..145: mol_type = other DNA
gcatgctttgatgacgcttcgttttagagctagaaatagcaagttaaaataaggctagtccgttatcaacttgaaaaagtggcaccgagtcggtgcatcattggtgtttcctatgatgaatatagatacagaagcgtcatcaaag

SEQ ID NO: 258 - DNA, 122 bp, synthetic construct
  source 1..122: mol_type = other DNA
ttcatcataggaaacaccaagttttagagctagaaatagcaagttaaaataaggctagtccgttatcaacttgaaaaagtggcaccgagtcggtgcaagaaaatatcattggtgtttcctat

SEQ ID NO: 259 - DNA, 126 bp, synthetic construct
  source 1..126: mol_type = other DNA
ttcatcataggaaacaccaagttttagagctagaaatagcaagttaaaataaggctagtccgttatcaacttgaaaaagtggcaccgagtcggtgcattaaagaaaatatcattggtgtttcctat

SEQ ID NO: 260 - DNA, 124 bp, synthetic construct
  source 1..124: mol_type = other DNA
ttcatcataggaaacaccaagttttagagctagaaatagcaagttaaaataaggctagtccgttatcaacttgaaaaagtggcaccgagtcggtgcaagaaaatatcattggtgtttcctatga

SEQ ID NO: 261 - DNA, 128 bp, synthetic construct
  source 1..128: mol_type = other DNA
ttcatcataggaaacaccaagttttagagctagaaatagcaagttaaaataaggctagtccgttatcaacttgaaaaagtggcaccgagtcggtgcattaaagaaaatatcattggtgtttcctatga

SEQ ID NO: 262 - DNA, 122 bp, synthetic construct
  source 1..122: mol_type = other DNA
tttgcagagaaagacaatatgttttagagctagaaatagcaagttaaaataaggctagtccgttatcaacttgaaaaagtggcaccgagtcggtgcttctcaaagaactatattgtctttct

SEQ ID NO: 263 - DNA, 124 bp, synthetic construct
  source 1..124: mol_type = other DNA
tttgcagagaaagacaatatgttttagagctagaaatagcaagttaaaataaggctagtccgttatcaacttgaaaaagtggcaccgagtcggtgcttctcaaagaactatattgtctttctct

SEQ ID NO: 264 - DNA, 121 bp, synthetic construct
  source 1..121: mol_type = other DNA
tttgcagagaaagacaatatgttttagagctagaaatagcaagttaaaataaggctagtccgttatcaacttgaaaaagtggcaccgagtcggtgctcaaagaactatattgtctttctct

SEQ ID NO: 265 - DNA, 123 bp, synthetic construct
  source 1..123: mol_type = other DNA
tttgcagagaaagacaatatgttttagagctagaaatagcaagttaaaataaggctagtccgttatcaacttgaaaaagtggcaccgagtcggtgctcaaagaactatattgtctttctctgc

SEQ ID NO: 266 - DNA, 121 bp, synthetic construct
  source 1..121: mol_type = other DNA
agaaagacaatatagttcttgttttagagctagaaatagcaagttaaaataaggctagtccgttatcaacttgaaaaagtggcaccgagtcggtgctccaccttctcaaagaactatattg

SEQ ID NO: 267 - DNA, 123 bp, synthetic construct
  source 1..123: mol_type = other DNA
agaaagacaatatagttcttgttttagagctagaaatagcaagttaaaataaggctagtccgttatcaacttgaaaaagtggcaccgagtcggtgctccaccttctcaaagaactatattgtc

SEQ ID NO: 268 - DNA, 120 bp, synthetic construct
  source 1..120: mol_type = other DNA
agaaagacaatatagttcttgttttagagctagaaatagcaagttaaaataaggctagtccgttatcaacttgaaaaagtggcaccgagtcggtgcaccttctcaaagaactatattgtc

SEQ ID NO: 269 - DNA, 122 bp, synthetic construct
  source 1..122: mol_type = other DNA
agaaagacaatatagttcttgttttagagctagaaatagcaagttaaaataaggctagtccgttatcaacttgaaaaagtggcaccgagtcggtgcaccttctcaaagaactatattgtctt

SEQ ID NO: 270 - DNA, 120 bp, synthetic construct
  source 1..120: mol_type = other DNA
aaagacaatatagttcttgggttttagagctagaaatagcaagttaaaataaggctagtccgttatcaacttgaaaaagtggcaccgagtcggtgcttccaccttctcaaagaactatat

SEQ ID NO: 271 - DNA, 122 bp, synthetic construct
  source 1..122: mol_type = other DNA
aaagacaatatagttcttgggttttagagctagaaatagcaagttaaaataaggctagtccgttatcaacttgaaaaagtggcaccgagtcggtgcttccaccttctcaaagaactatattg

SEQ ID NO: 272 - DNA, 118 bp, synthetic construct
  source 1..118: mol_type = other DNA
aaagacaatatagttcttgggttttagagctagaaatagcaagttaaaataaggctagtccgttatcaacttgaaaaagtggcaccgagtcggtgcaccttctcaaagaactatattg

SEQ ID NO: 273 - DNA, 120 bp, synthetic construct
  source 1..120: mol_type = other DNA
aaagacaatatagttcttgggttttagagctagaaatagcaagttaaaataaggctagtccgttatcaacttgaaaaagtggcaccgagtcggtgcaccttctcaaagaactatattgtc

SEQ ID NO: 274 - DNA, 131 bp, synthetic construct
  source 1..131: mol_type = other DNA
gacaatatagttcttggagagttttagagctagaaatagcaagttaaaataaggctagtccgttatcaacttgaaaaagtggcaccgagtcggtgctccattcagtgtgattccaccttctccaagaacta

SEQ ID NO: 275 - DNA, 133 bp, synthetic construct
  source 1..133: mol_type = other DNA
gacaatatagttcttggagagttttagagctagaaatagcaagttaaaataaggctagtccgttatcaacttgaaaaagtggcaccgagtcggtgctccattcagtgtgattccaccttctccaagaactata

SEQ ID NO: 276 - DNA, 130 bp, synthetic construct
  source 1..130: mol_type = other DNA
gacaatatagttcttggagagttttagagctagaaatagcaagttaaaataaggctagtccgttatcaacttgaaaaagtggcaccgagtcggtgcattcagtgtgattccaccttctccaagaactata

SEQ ID NO: 277 - DNA, 132 bp, synthetic construct
  source 1..132: mol_type = other DNA
gacaatatagttcttggagagttttagagctagaaatagcaagttaaaataaggctagtccgttatcaacttgaaaaagtggcaccgagtcggtgcattcagtgtgattccaccttctccaagaactatatt

SEQ ID NO: 278 - DNA, 119 bp, synthetic construct
  source 1..119: mol_type = other DNA
tggagaaggtggaatcacacgttttagagctagaaatagcaagttaaaataaggctagtccgttatcaacttgaaaaagtggcaccgagtcggtgcacctccattcagtgtgattccac

SEQ ID NO: 279 - DNA, 121 bp, synthetic construct
  source 1..121: mol_type = other DNA
tggagaaggtggaatcacacgttttagagctagaaatagcaagttaaaataaggctagtccgttatcaacttgaaaaagtggcaccgagtcggtgcacctccattcagtgtgattccacct

SEQ ID NO: 280 - DNA, 118 bp, synthetic construct
  source 1..118: mol_type = other DNA
tggagaaggtggaatcacacgttttagagctagaaatagcaagttaaaataaggctagtccgttatcaacttgaaaaagtggcaccgagtcggtgctccattcagtgtgattccacct

SEQ ID NO: 281 - DNA, 120 bp, synthetic construct
  source 1..120: mol_type = other DNA
tggagaaggtggaatcacacgttttagagctagaaatagcaagttaaaataaggctagtccgttatcaacttgaaaaagtggcaccgagtcggtgctccattcagtgtgattccaccttc

SEQ ID NO: 282 - DNA, 119 bp, synthetic construct
  source 1..119: mol_type = other DNA
caccttgctaaagaaattctgttttagagctagaaatagcaagttaaaataaggctagtccgttatcaacttgaaaaagtggcaccgagtcggtgctcaatgagcaagaatttctttag

SEQ ID NO: 283 - DNA, 121 bp, synthetic construct
  source 1..121: mol_type = other DNA
caccttgctaaagaaattctgttttagagctagaaatagcaagttaaaataaggctagtccgttatcaacttgaaaaagtggcaccgagtcggtgctcaatgagcaagaatttctttagca

SEQ ID NO: 284 - DNA, 119 bp, synthetic construct
  source 1..119: mol_type = other DNA
caccttgctaaagaaattctgttttagagctagaaatagcaagttaaaataaggctagtccgttatcaacttgaaaaagtggcaccgagtcggtgcaatgagcaagaatttctttagca

SEQ ID NO: 285 - DNA, 121 bp, synthetic construct
  source 1..121: mol_type = other DNA
caccttgctaaagaaattctgttttagagctagaaatagcaagttaaaataaggctagtccgttatcaacttgaaaaagtggcaccgagtcggtgcaatgagcaagaatttctttagcaag

SEQ ID NO: 286 - DNA, 126 bp, synthetic construct
  source 1..126: mol_type = other DNA
ttagttattcaccttgctaagttttagagctagaaatagcaagttaaaataaggctagtccgttatcaacttgaaaaagtggcaccgagtcggtgctcaatgagcaagaatttctttagcaaggtg

SEQ ID NO: 287 - DNA, 129 bp, synthetic construct
  source 1..129: mol_type = other DNA
ttagttattcaccttgctaagttttagagctagaaatagcaagttaaaataaggctagtccgttatcaacttgaaaaagtggcaccgagtcggtgctcaatgagcaagaatttctttagcaaggtgaat

SEQ ID NO: 288 - DNA, 126 bp, synthetic construct
  source 1..126: mol_type = other DNA
ttagttattcaccttgctaagttttagagctagaaatagcaagttaaaataaggctagtccgttatcaacttgaaaaagtggcaccgagtcggtgcatgagcaagaatttctttagcaaggtgaat

SEQ ID NO: 289 - DNA, 129 bp, synthetic construct
  source 1..129: mol_type = other DNA
ttagttattcaccttgctaagttttagagctagaaatagcaagttaaaataaggctagtccgttatcaacttgaaaaagtggcaccgagtcggtgcatgagcaagaatttctttagcaaggtgaataac

SEQ ID NO: 290 - DNA, 134 bp, synthetic construct
  source 1..134: mol_type = other DNA
caataattagttattcacctgttttagagctagaaatagcaagttaaaataaggctagtccgttatcaacttgaaaaagtggcaccgagtcggtgctcaatgagcaagaatttctttagcaaggtgaataacta

SEQ ID NO: 291 - DNA, 136 bp, synthetic construct
  source 1..136: mol_type = other DNA
caataattagttattcacctgttttagagctagaaatagcaagttaaaataaggctagtccgttatcaacttgaaaaagtggcaccgagtcggtgctcaatgagcaagaatttctttagcaaggtgaataactaat

SEQ ID NO: 292 - DNA, 133 bp, synthetic construct
  source 1..133: mol_type = other DNA
caataattagttattcacctgttttagagctagaaatagcaagttaaaataaggctagtccgttatcaacttgaaaaagtggcaccgagtcggtgcatgagcaagaatttctttagcaaggtgaataactaat

SEQ ID NO: 293 - DNA, 135 bp, synthetic construct
  source 1..135: mol_type = other DNA
caataattagttattcacctgttttagagctagaaatagcaagttaaaataaggctagtccgttatcaacttgaaaaagtggcaccgagtcggtgcatgagcaagaatttctttagcaaggtgaataactaatta

SEQ ID NO: 294 - DNA, 127 bp, synthetic construct
  source 1..127: mol_type = other DNA
tggagaaggtggaatcacacgttttagagctagaaatagcaagttaaaataaggctagtccgttatcaacttgaaaaagtggcaccgagtcggtgctcgttgacctccattcagtgtgattccacct

SEQ ID NO: 295 - DNA, 129 bp, synthetic construct
  source 1..129: mol_type = other DNA
tggagaaggtggaatcacacgttttagagctagaaatagcaagttaaaataaggctagtccgttatcaacttgaaaaagtggcaccgagtcggtgctcgttgacctccattcagtgtgattccaccttc

SEQ ID NO: 296 - DNA, 127 bp, synthetic construct
  source 1..127: mol_type = other DNA
tggagaaggtggaatcacacgttttagagctagaaatagcaagttaaaataaggctagtccgttatcaacttgaaaaagtggcaccgagtcggtgctcattgacctccactcagtgtgattccacct

SEQ ID NO: 297 - DNA, 129 bp, synthetic construct
  source 1..129: mol_type = other DNA
tggagaaggtggaatcacacgttttagagctagaaatagcaagttaaaataaggctagtccgttatcaacttgaaaaagtggcaccgagtcggtgctcattgacctccactcagtgtgattccaccttc

SEQ ID NO: 298 - protein, 1368 aa, Streptococcus pyogenes [sequence omitted]

SEQ ID NO: 299 - protein, 1368 aa, synthetic construct
MDKKYSIGLDIGTNSVGWAVITDEYKVPSKKFKVLGNTDRHSIKKNLIGALLFDSGETAEATRLKRTARRRYTRRKNRICYLQEIFSNEMAKVDDSFFHRLEESFLVEEDKKHERHPIFGNIVDEVAYHEKYPTIYHLRKKLVDSTDKADLRLIYLALAHMIKFRGHFLIEGDLNPDNSDVDKLFIQLVQTYNQLFEENPINASGVDAKAILSARLSKSRRLENLIAQLPGEKKNGLFGNLIALSLGLTPNFKSNFDLAEDAKLQLSKDTYDDDLDNLLAQIGDQYADLFLAAKNLSDAILLSDILRVNTEITKAPLSASMIKRYDEHHQDLTLLKALVRQQLPEKYKEIFFDQSKNGYAGYIDGGASQEEFYKFIKPILEKMDGTEELLVKLNREDLLRKQRTFDNGSIPHQIHLGELHAILRRQEDFYPFLKDNREKIEKILTFRIPYYVGPLARGNSRFAWMTRKSEETITPWNFEEVVDKGASAQSFIERMTNFDKNLPNEKVLPKHSLLYEYFTVYNELTKVKYVTEGMRKPAFLSGEQKKAIVDLLFKTNRKVTVKQLKEDYFKKIECFDSVEISGVEDRFNASLGTYHDLLKIIKDKDFLDNEENEDILEDIVLTLTLFEDREMIEERLKTYAHLFDDKVMKQLKRRRYTGWGRLSRKLINGIRDKQSGKTILDFLKSDGFANRNFMQLIHDDSLTFKEDIQKAQVSGQGDSLHEHIANLAGSPAIKKGILQTVKVVDELVKVMGRHKPENIVIEMARENQTTQKGQKNSRERMKRIEEGIKELGSQILKEHPVENTQLQNEKLYLYYLQNGRDMYVDQELDINRLSDYDVDAIVPQSFLKDDSIDNKVLTRSDKNRGKSDNVPSEEVVKKMKNYWRQLLNAKLITQRKFDNLTKAERGGLSELDKAGFIKRQLVETRQITKHVAQILDSRMNTKYDENDKLIREVKVITLKSKLVSDFRKDFQFYKVREINNYHHAHDAYLNAVVGTALIKKYPKLESEFVYGDYKVYDVRKMIAKSEQEIGKATAKYFFYSNIMNFFKTEITLANGEIRKRPLIETNGETGEIVWDKGRDFATVRKVLSMPQVNIVKKTEVQTGGFSKESILPKRNSDKLIARKKDWDPKKYGGFDSPTVAYSVLVVAKVEKGKSKKLKSVKELLGITIMERSSFEKNPIDFLEAKGYKEVKKDLIIKLPKYSLFELENGRKRMLASAGELQKGNELALPSKYVNFLYLASHYEKLKGSPEDNEQKQLFVEQHKHYLDEIIEQISEFSKRVILADANLDKVLSAYNKHRDKPIREQAENIIHLFTLTNLGAPAAFKYFDTTIDRKRYTSTKEVLDATLIHQSITGLYETRIDLSQLGGD

SEQ ID NO: 300 - protein, 1367 aa, synthetic construct
DKKYSIGLDIGTNSVGWAVITDEYKVPSKKFKVLGNTDRHSIKKNLIGALLFDSGETAEATRLKRTARRRYTRRKNRICYLQEIFSNEMAKVDDSFFHRLEESFLVEEDKKHERHPIFGNIVDEVAYHEKYPTIYHLRKKLVDSTDKADLRLIYLALAHMIKFRGHFLIEGDLNPDNSDVDKLFIQLVQTYNQLFEENPINASGVDAKAILSARLSKSRRLENLIAQLPGEKKNGLFGNLIALSLGLTPNFKSNFDLAEDAKLQLSKDTYDDDLDNLLAQIGDQYADLFLAAKNLSDAILLSDILRVNTEITKAPLSASMIKRYDEHHQDLTLLKALVRQQLPEKYKEIFFDQSKNGYAGYIDGGASQEEFYKFIKPILEKMDGTEELLVKLNREDLLRKQRTFDNGSIPHQIHLGELHAILRRQEDFYPFLKDNREKIEKILTFRIPYYVGPLARGNSRFAWMTRKSEETITPWNFEEVVDKGASAQSFIERMTNFDKNLPNEKVLPKHSLLYEYFTVYNELTKVKYVTEGMRKPAFLSGEQKKAIVDLLFKTNRKVTVKQLKEDYFKKIECFDSVEISGVEDRFNASLGTYHDLLKIIKDKDFLDNEENEDILEDIVLTLTLFEDREMIEERLKTYAHLFDDKVMKQLKRRRYTGWGRLSRKLINGIRDKQSGKTILDFLKSDGFANRNFMQLIHDDSLTFKEDIQKAQVSGQGDSLHEHIANLAGSPAIKKGILQTVKVVDELVKVMGRHKPENIVIEMARENQTTQKGQKNSRERMKRIEEGIKELGSQILKEHPVENTQLQNEKLYLYYLQNGRDMYVDQELDINRLSDYDVDAIVPQSFLKDDSIDNKVLTRSDKNRGKSDNVPSEEVVKKMKNYWRQLLNAKLITQRKFDNLTKAERGGLSELDKAGFIKRQLVETRQITKHVAQILDSRMNTKYDENDKLIREVKVITLKSKLVSDFRKDFQFYKVREINNYHHAHDAYLNAVVGTALIKKYPKLESEFVYGDYKVYDVRKMIAKSEQEIGKATAKYFFYSNIMNFFKTEITLANGEIRKRPLIETNGETGEIVWDKGRDFATVRKVLSMPQVNIVKKTEVQTGGFSKESILPKRNSDKLIARKKDWDPKKYGGFDSPTVAYSVLVVAKVEKGKSKKLKSVKELLGITIMERSSFEKNPIDFLEAKGYKEVKKDLIIKLPKYSLFELENGRKRMLASAGELQKGNELALPSKYVNFLYLASHYEKLKGSPEDNEQKQLFVEQHKHYLDEIIEQISEFSKRVILADANLDKVLSAYNKHRDKPIREQAENIIHLFTLTNLGAPAAFKYFDTTIDRKRYTSTKEVLDATLIHQSITGLYETRIDLSQLGGD

SEQ ID NO: 301 - protein, 1054 aa, Staphylococcus lugdunensis
MNQKFILGLDIGITSVGYGLIDYETKNIIDAGVRLFPEANVENNEGRRSKRGSRRLKRRRIHRLERVKKLLEDYNLLDQSQIPQSTNPYAIRVKGLSEALSKDELVIALLHIAKRRGIHKIDVIDSNDDVGNELSTKEQLNKNSKLLKDKFVCQIQLERMNEGQVRGEKNRFKTADIIKEIIQLLNVQKNFHQLDENFINKYIELVEMRREYFEGPGKGSPYGWEGDPKAWYETLMGHCTYFPDELRSVKYAYSADLFNALNDLNNLVIQRDGLSKLEYHEKYHIIENVFKQKKKPTLKQIANEINVNPEDIKGYRITKSGKPQFTEFKLYHDLKSVLFDQSILENEDVLDQIAEILTIYQDKDSIKSKLTELDILLNEEDKENIAQLTGYTGTHRLSLKCIRLVLEEQWYSSRNQMEIFTHLNIKPKKINLTAANKIPKAMIDEFILSPVVKRTFGQAINLINKIIEKYGVPEDIIIELARENNSKDKQKFINEMQKKNENTRKRINEIIGKYGNQNAKRLVEKIRLHDEQEGKCLYSLESIPLEDLLNNPNHYEVDHIIPRSVSFDNSYHNKVLVKQSENSKKSNLTPYQYFNSGKSKLSYNQFKQHILNLSKSQDRISKKKKEYLLEERDINKFEVQKEFINRNLVDTRYATRELTNYLKAYFSANNMNVKVKTINGSFTDYLRKVWKFKKERNHGYKHHAEDALIIANADFLFKENKKLKAVNSVLEKPEIESKQLDIQVDSEDNYSEMFIIPKQVQDIKDFRNFKYSHRVDKKPNRQLINDTLYSTRKKDNSTYIVQTIKDIYAKDNTTLKKQFDKSPEKFLMYQHDPRTFEKLEVIMKQYANEKNPLAKYHEETGEYLTKYSKKNNGPIVKSLKYIGNKLGSHLDVTHQFKSSTKKLVKLSIKPYRFDVYLTDKGYKFITISYLDVLKKDNYYYIPEQKYDKLKLGKAIDKNAKFIASFYKNDLIKLDGEIYKIIGVNSDTRNMIELDLPDIRYKEYCELNNIKGEPRIKKTIGKKVNSIEKLTTDVLGNVFTNTQYTKPQLLFKRGN

SEQ ID NO: 302 - protein, 1054 aa, synthetic construct
MNQKFILGLDIGITSVGYGLIDYETKNIIDAGVRLFPEANVENNEGRRSKRGSRRLKRRRIHRLERVKKLLEDYNLLDQSQIPQSTNPYAIRVKGLSEALSKDELVIALLHIAKRRGIHKIDVIDSNDDVGNELSTKEQLNKNSKLLKDKFVCQIQLERMNEGQVRGEKNRFKTADIIKEIIQLLNVQKNFHQLDENFINKYIELVEMRREYFEGPGKGSPYGWEGDPKAWYETLMGHCTYFPDELRSVKYAYSADLFNALNDLNNLVIQRDGLSKLEYHEKYHIIENVFKQKKKPTLKQIANEINVNPEDIKGYRITKSGKPQFTEFKLYHDLKSVLFDQSILENEDVLDQIAEILTIYQDKDSIKSKLTELDILLNEEDKENIAQLTGYTGTHRLSLKCIRLVLEEQWYSSRNQMEIFTHLNIKPKKINLTAANKIPKAMIDEFILSPVVKRTFGQAINLINKIIEKYGVPEDIIIELARENNSKDKQKFINEMQKKNENTRKRINEIIGKYGNQNAKRLVEKIRLHDEQEGKCLYSLESIPLEDLLNNPNHYEVDHIIPRSVSFDNSYHNKVLVKQSEASKKSNLTPYQYFNSGKSKLSYNQFKQHILNLSKSQDRISKKKKEYLLEERDINKFEVQKEFINRNLVDTRYATRELTNYLKAYFSANNMNVKVKTINGSFTDYLRKVWKFKKERNHGYKHHAEDALIIANADFLFKENKKLKAVNSVLEKPEIESKQLDIQVDSEDNYSEMFIIPKQVQDIKDFRNFKYSHRVDKKPNRQLINDTLYSTRKKDNSTYIVQTIKDIYAKDNTTLKKQFDKSPEKFLMYQHDPRTFEKLEVIMKQYANEKNPLAKYHEETGEYLTKYSKKNNGPIVKSLKYIGNKLGSHLDVTHQFKSSTKKLVKLSIKPYRFDVYLTDKGYKFITISYLDVLKKDNYYYIPEQKYDKLKLGKAIDKNAKFIASFYKNDLIKLDGEIYKIIGVNSDTRNMIELDLPDIRYKEYCELNNIKGEPRIKKTIGKKVNSIEKLTTDVLGNVFTNTQYTKPQLLFKRGN

SEQ ID NO: 303 - protein, 1053 aa, synthetic construct
NQKFILGLDIGITSVGYGLIDYETKNIIDAGVRLFPEANVENNEGRRSKRGSRRLKRRRIHRLERVKKLLEDYNLLDQSQIPQSTNPYAIRVKGLSEALSKDELVIALLHIAKRRGIHKIDVIDSNDDVGNELSTKEQLNKNSKLLKDKFVCQIQLERMNEGQVRGEKNRFKTADIIKEIIQLLNVQKNFHQLDENFINKYIELVEMRREYFEGPGKGSPYGWEGDPKAWYETLMGHCTYFPDELRSVKYAYSADLFNALNDLNNLVIQRDGLSKLEYHEKYHIIENVFKQKKKPTLKQIANEINVNPEDIKGYRITKSGKPQFTEFKLYHDLKSVLFDQSILENEDVLDQIAEILTIYQDKDSIKSKLTELDILLNEEDKENIAQLTGYTGTHRLSLKCIRLVLEEQWYSSRNQMEIFTHLNIKPKKINLTAANKIPKAMIDEFILSPVVKRTFGQAINLINKIIEKYGVPEDIIIELARENNSKDKQKFINEMQKKNENTRKRINEIIGKYGNQNAKRLVEKIRLHDEQEGKCLYSLESIPLEDLLNNPNHYEVDHIIPRSVSFDNSYHNKVLVKQSEASKKSNLTPYQYFNSGKSKLSYNQFKQHILNLSKSQDRISKKKKEYLLEERDINKFEVQKEFINRNLVDTRYATRELTNYLKAYFSANNMNVKVKTINGSFTDYLRKVWKFKKERNHGYKHHAEDALIIANADFLFKENKKLKAVNSVLEKPEIESKQLDIQVDSEDNYSEMFIIPKQVQDIKDFRNFKYSHRVDKKPNRQLINDTLYSTRKKDNSTYIVQTIKDIYAKDNTTLKKQFDKSPEKFLMYQHDPRTFEKLEVIMKQYANEKNPLAKYHEETGEYLTKYSKKNNGPIVKSLKYIGNKLGSHLDVTHQFKSSTKKLVKLSIKPYRFDVYLTDKGYKFITISYLDVLKKDNYYYIPEQKYDKLKLGKAIDKNAKFIASFYKNDLIKLDGEIYKIIGVNSDTRNMIELDLPDIRYKEYCELNNIKGEPRIKKTIGKKVNSIEKLTTDVLGNVFTNTQYTKPQLLFKRGN

SEQ ID NO: 304 - protein, 1053 aa, Staphylococcus aureus
MKRNYILGLDIGITSVGYGIIDYETRDVIDAGVRLFKEANVENNEGRRSKRGARRLKRRRRHRIQRVKKLLFDYNLLTDHSELSGINPYEARVKGLSQKLSEEEFSAALLHLAKRRGVHNVNEVEEDTGNELSTKEQISRNSKALEEKYVAELQLERLKKDGEVRGSINRFKTSDYVKEAKQLLKVQKAYHQLDQSFIDTYIDLLETRRTYYEGPGEGSPFGWKDIKEWYEMLMGHCTYFPEELRSVKYAYNADLYNALNDLNNLVITRDENEKLEYYEKFQIIENVFKQKKKPTLKQIAKEILVNEEDIKGYRVTSTGKPEFTNLKVYHDIKDITARKEIIENAELLDQIAKILTIYQSSEDIQEELTNLNSELTQEEIEQISNLKGYTGTHNLSLKAINLILDELWHTNDNQIAIFNRLKLVPKKVDLSQQKEIPTTLVDDFILSPVVKRSFIQSIKVINAIIKKYGLPNDIIIELAREKNSKDAQKMINEMQKRNRQTNERIEEIIRTTGKENAKYLIEKIKLHDMQEGKCLYSLEAIPLEDLLNNPFNYEVDHIIPRSVSFDNSFNNKVLVKQEENSKKGNRTPFQYLSSSDSKISYETFKKHILNLAKGKGRISKTKKEYLLEERDINRFSVQKDFINRNLVDTRYATRGLMNLLRSYFRVNNLDVKVKSINGGFTSFLRRKWKFKKERNKGYKHHAEDALIIANADFIFKEWKKLDKAKKVMENQMFEEKQAESMPEIETEQEYKEIFITPHQIKHIKDFKDYKYSHRVDKKPNRELINDTLYSTRKDDKGNTLIVNNLNGLYDKDNDKLKKLINKSPEKLLMYHHDPQTYQKLKLIMEQYGDEKNPLYKYYEETGNYLTKYSKKDNGPVIKKIKYYGNKLNAHLDITDDYPNSRNKVVKLSLKPYRFDVYLDNGVYKFVTVKNLDVIKKENYYEVNSKCYEEAKKLKKISNQAEFIASFYNNDLIKINGELYRVIGVNNDLLNRIEVNMIDITYREYLENMNDKRPPRIIKTIASKTQSIKKYSTDILGNLYEVKSKKHPQIIKKG

SEQ ID NO: 305 - protein, 1053 aa, synthetic construct
MKRNYILGLDIGITSVGYGIIDYETRDVIDAGVRLFKEANVENNEGRRSKRGARRLKRRRRHRIQRVKKLLFDYNLLTDHSELSGINPYEARVKGLSQKLSEEEFSAALLHLAKRRGVHNVNEVEEDTGNELSTKEQISRNSKALEEKYVAELQLERLKKDGEVRGSINRFKTSDYVKEAKQLLKVQKAYHQLDQSFIDTYIDLLETRRTYYEGPGEGSPFGWKDIKEWYEMLMGHCTYFPEELRSVKYAYNADLYNALNDLNNLVITRDENEKLEYYEKFQIIENVFKQKKKPTLKQIAKEILVNEEDIKGYRVTSTGKPEFTNLKVYHDIKDITARKEIIENAELLDQIAKILTIYQSSEDIQEELTNLNSELTQEEIEQISNLKGYTGTHNLSLKAINLILDELWHTNDNQIAIFNRLKLVPKKVDLSQQKEIPTTLVDDFILSPVVKRSFIQSIKVINAIIKKYGLPNDIIIELAREKNSKDAQKMINEMQKRNRQTNERIEEIIRTTGKENAKYLIEKIKLHDMQEGKCLYSLEAIPLEDLLNNPFNYEVDHIIPRSVSFDNSFNNKVLVKQEEASKKGNRTPFQYLSSSDSKISYETFKKHILNLAKGKGRISKTKKEYLLEERDINRFSVQKDFINRNLVDTRYATRGLMNLLRSYFRVNNLDVKVKSINGGFTSFLRRKWKFKKERNKGYKHHAEDALIIANADFIFKEWKKLDKAKKVMENQMFEEKQAESMPEIETEQEYKEIFITPHQIKHIKDFKDYKYSHRVDKKPNRELINDTLYSTRKDDKGNTLIVNNLNGLYDKDNDKLKKLINKSPEKLLMYHHDPQTYQKLKLIMEQYGDEKNPLYKYYEETGNYLTKYSKKDNGPVIKKIKYYGNKLNAHLDITDDYPNSRNKVVKLSLKPYRFDVYLDNGVYKFVTVKNLDVIKKENYYEVNSKCYEEAKKLKKISNQAEFIASFYNNDLIKINGELYRVIGVNNDLLNRIEVNMIDITYREYLENMNDKRPPRIIKTIASKTQSIKKYSTDILGNLYEVKSKKHPQIIKKG

SEQ ID NO: 306 - protein, 1052 aa, synthetic construct
KRNYILGLDIGITSVGYGIIDYETRDVIDAGVRLFKEANVENNEGRRSKRGARRLKRRRRHRIQRVKKLLFDYNLLTDHSELSGINPYEARVKGLSQKLSEEEFSAALLHLAKRRGVHNVNEVEEDTGNELSTKEQISRNSKALEEKYVAELQLERLKKDGEVRGSINRFKTSDYVKEAKQLLKVQKAYHQLDQSFIDTYIDLLETRRTYYEGPGEGSPFGWKDIKEWYEMLMGHCTYFPEELRSVKYAYNADLYNALNDLNNLVITRDENEKLEYYEKFQIIENVFKQKKKPTLKQIAKEILVNEEDIKGYRVTSTGKPEFTNLKVYHDIKDITARKEIIENAELLDQIAKILTIYQSSEDIQEELTNLNSELTQEEIEQISNLKGYTGTHNLSLKAINLILDELWHTNDNQIAIFNRLKLVPKKVDLSQQKEIPTTLVDDFILSPVVKRSFIQSIKVINAIIKKYGLPNDIIIELAREKNSKDAQKMINEMQKRNRQTNERIEEIIRTTGKENAKYLIEKIKLHDMQEGKCLYSLEAIPLEDLLNNPFNYEVDHIIPRSVSFDNSFNNKVLVKQEEASKKGNRTPFQYLSSSDSKISYETFKKHILNLAKGKGRISKTKKEYLLEERDINRFSVQKDFINRNLVDTRYATRGLMNLLRSYFRVNNLDVKVKSINGGFTSFLRRKWKFKKERNKGYKHHAEDALIIANADFIFKEWKKLDKAKKVMENQMFEEKQAESMPEIETEQEYKEIFITPHQIKHIKDFKDYKYSHRVDKKPNRELINDTLYSTRKDDKGNTLIVNNLNGLYDKDNDKLKKLINKSPEKLLMYHHDPQTYQKLKLIMEQYGDEKNPLYKYYEETGNYLTKYSKKDNGPVIKKIKYYGNKLNAHLDITDDYPNSRNKVVKLSLKPYRFDVYLDNGVYKFVTVKNLDVIKKENYYEVNSKCYEEAKKLKKISNQAEFIASFYNNDLIKINGELYRVIGVNNDLLNRIEVNMIDITYREYLENMNDKRPPRIIKTIASKTQSIKKYSTDILGNLYEVKSKKHPQIIKKG

SEQ ID NO: 307 - protein, 1368 aa, synthetic construct
MDKKYSIGLDIGTNSVGWAVITDEYKVPSKKFKVLGNTDRHSIKKNLIGALLFDSGETAEATRLKRTARRRYTRRKNRICYLQEIFSNEMAKVDDSFFHRLEESFLVEEDKKHERHPIFGNIVDEVAYHEKYPTIYHLRKKLVDSTDKADLRLIYLALAHMIKFRGHFLIEGDLNPDNSDVDKLFIQLVQTYNQLFEENPINASGVDAKAILSARLSKSRRLENLIAQLPGEKKNGLFGNLIALSLGLTPNFKSNFDLAEDAKLQLSKDTYDDDLDNLLAQIGDQYADLFLAAKNLSDAILLSDILRVNTEITKAPLSASMIKRYDEHHQDLTLLKALVRQQLPEKYKEIFFDQSKNGYAGYIDGGASQEEFYKFIKPILEKMDGTEELLVKLNREDLLRKQRTFDNGSIPHQIHLGELHAILRRQEDFYPFLKDNREKIEKILTFRIPYYVGPLARGNSRFAWMTRKSEETITPWNFEEVVDKGASAQSFIERMTNFDKNLPNEKVLPKHSLLYEYFTVYNELTKVKYVTEGMRKPAFLSGEQKKAIVDLLFKTNRKVTVKQLKEDYFKKIECFDSVEISGVEDRFNASLGTYHDLLKIIKDKDFLDNEENEDILEDIVLTLTLFEDREMIEERLKTYAHLFDDKVMKQLKRRRYTGWGRLSRKLINGIRDKQSGKTILDFLKSDGFANRNFMQLIHDDSLTFKEDIQKAQVSGQGDSLHEHIANLAGSPAIKKGILQTVKVVDELVKVMGRHKPENIVIEMARENQTTQKGQKNSRERMKRIEEGIKELGSQILKEHPVENTQLQNEKLYLYYLQNGRDMYVDQELDINRLSDYDVDHIVPQSFLKDDSIDNKVLTRSDKNRGKSDNVPSEEVVKKMKNYWRQLLNAKLITQRKFDNLTKAERGGLSELDKAGFIKRQLVETRQITKHVAQILDSRMNTKYDENDKLIREVKVITLKSKLVSDFRKDFQFYKVREINNYHHAHDAYLNAVVGTALIKKYPKLESEFVYGDYKVYDVRKMIAKSEQEIGKATAKYFFYSNIMNFFKTEITLANGEIRKRPLIETNGETGEIVWDKGRDFATVRKVLSMPQVNIVKKTEVQTGGFSKESIRPKRNSDKLIARKKDWDPKKYGGFVSPTVAYSVLVVAKVEKGKSKKLKSVKELLGITIMERSSFEKNPIDFLEAKGYKEVKKDLIIKLPKYSLFELENGRKRMLASARFLQKGNELALPSKYVNFLYLASHYEKLKGSPEDNEQKQLFVEQHKHYLDEIIEQISEFSKRVILADANLDKVLSAYNKHRDKPIREQAENIIHLFTLTNLGAPRAFKYFDTTIDRKVYRSTKEVLDATLIHQSITGLYETRIDLSQLGGD

SEQ ID NO: 308 - protein, 1368 aa, synthetic construct
MDKKYSIGLDIGTNSVGWAVITDEYKVPSKKFKVLGNTDRHSIKKNLIGALLFDSGETAEATRLKRTARRRYTRRKNRICYLQEIFSNEMAKVDDSFFHRLEESFLVEEDKKHERHPIFGNIVDEVAYHEKYPTIYHLRKKLVDSTDKADLRLIYLALAHMIKFRGHFLIEGDLNPDNSDVDKLFIQLVQTYNQLFEENPINASGVDAKAILSARLSKSRRLENLIAQLPGEKKNGLFGNLIALSLGLTPNFKSNFDLAEDAKLQLSKDTYDDDLDNLLAQIGDQYADLFLAAKNLSDAILLSDILRVNTEITKAPLSASMIKRYDEHHQDLTLLKALVRQQLPEKYKEIFFDQSKNGYAGYIDGGASQEEFYKFIKPILEKMDGTEELLVKLNREDLLRKQRTFDNGSIPHQIHLGELHAILRRQEDFYPFLKDNREKIEKILTFRIPYYVGPLARGNSRFAWMTRKSEETITPWNFEEVVDKGASAQSFIERMTNFDKNLPNEKVLPKHSLLYEYFTVYNELTKVKYVTEGMRKPAFLSGEQKKAIVDLLFKTNRKVTVKQLKEDYFKKIECFDSVEISGVEDRFNASLGTYHDLLKIIKDKDFLDNEENEDILEDIVLTLTLFEDREMIEERLKTYAHLFDDKVMKQLKRRRYTGWGRLSRKLINGIRDKQSGKTILDFLKSDGFANRNFMQLIHDDSLTFKEDIQKAQVSGQGDSLHEHIANLAGSPAIKKGILQTVKVVDELVKVMGRHKPENIVIEMARENQTTQKGQKNSRERMKRIEEGIKELGSQILKEHPVENTQLQNEKLYLYYLQNGRDMYVDQELDINRLSDYDVDAIVPQSFLKDDSIDNKVLTRSDKNRGKSDNVPSEEVVKKMKNYWRQLLNAKLITQRKFDNLTKAERGGLSELDKAGFIKRQLVETRQITKHVAQILDSRMNTKYDENDKLIREVKVITLKSKLVSDFRKDFQFYKVREINNYHHAHDAYLNAVVGTALIKKYPKLESEFVYGDYKVYDVRKMIAKSEQEIGKATAKYFFYSNIMNFFKTEITLANGEIRKRPLIETNGETGEIVWDKGRDFATVRKVLSMPQVNIVKKTEVQTGGFSKESIRPKRNSDKLIARKKDWDPKKYGGFVSPTVAYSVLVVAKVEKGKSKKLKSVKELLGITIMERSSFEKNPIDFLEAKGYKEVKKDLIIKLPKYSLFELENGRKRMLASARFLQKGNELALPSKYVNFLYLASHYEKLKGSPEDNEQKQLFVEQHKHYLDEIIEQISEFSKRVILADANLDKVLSAYNKHRDKPIREQAENIIHLFTLTNLGAPRAFKYFDTTIDRKVYRSTKEVLDATLIHQSITGLYETRIDLSQLGGD

SEQ ID NO: 309 - protein, 1367 aa, synthetic construct
DKKYSIGLDIGTNSVGWAVITDEYKVPSKKFKVLGNTDRHSIKKNLIGALLFDSGETAEATRLKRTARRRYTRRKNRICYLQEIFSNEMAKVDDSFFHRLEESFLVEEDKKHERHPIFGNIVDEVAYHEKYPTIYHLRKKLVDSTDKADLRLIYLALAHMIKFRGHFLIEGDLNPDNSDVDKLFIQLVQTYNQLFEENPINASGVDAKAILSARLSKSRRLENLIAQLPGEKKNGLFGNLIALSLGLTPNFKSNFDLAEDAKLQLSKDTYDDDLDNLLAQIGDQYADLFLAAKNLSDAILLSDILRVNTEITKAPLSASMIKRYDEHHQDLTLLKALVRQQLPEKYKEIFFDQSKNGYAGYIDGGASQEEFYKFIKPILEKMDGTEELLVKLNREDLLRKQRTFDNGSIPHQIHLGELHAILRRQEDFYPFLKDNREKIEKILTFRIPYYVGPLARGNSRFAWMTRKSEETITPWNFEEVVDKGASAQSFIERMTNFDKNLPNEKVLPKHSLLYEYFTVYNELTKVKYVTEGMRKPAFLSGEQKKAIVDLLFKTNRKVTVKQLKEDYFKKIECFDSVEISGVEDRFNASLGTYHDLLKIIKDKDFLDNEENEDILEDIVLTLTLFEDREMIEERLKTYAHLFDDKVMKQLKRRRYTGWGRLSRKLINGIRDKQSGKTILDFLKSDGFANRNFMQLIHDDSLTFKEDIQKAQVSGQGDSLHEHIANLAGSPAIKKGILQTVKVVDELVKVMGRHKPENIVIEMARENQTTQKGQKNSRERMKRIEEGIKELGSQILKEHPVENTQLQNEKLYLYYLQNGRDMYVDQELDINRLSDYDVDAIVPQSFLKDDSIDNKVLTRSDKNRGKSDNVPSEEVVKKMKNYWRQLLNAKLITQRKFDNLTKAERGGLSELDKAGFIKRQLVETRQITKHVAQILDSRMNTKYDENDKLIREVKVITLKSKLVSDFRKDFQFYKVREINNYHHAHDAYLNAVVGTALIKKYPKLESEFVYGDYKVYDVRKMIAKSEQEIGKATAKYFFYSNIMNFFKTEITLANGEIRKRPLIETNGETGEIVWDKGRDFATVRKVLSMPQVNIVKKTEVQTGGFSKESIRPKRNSDKLIARKKDWDPKKYGGFVSPTVAYSVLVVAKVEKGKSKKLKSVKELLGITIMERSSFEKNPIDFLEAKGYKEVKKDLIIKLPKYSLFELENGRKRMLASARFLQKGNELALPSKYVNFLYLASHYEKLKGSPEDNEQKQLFVEQHKHYLDEIIEQISEFSKRVILADANLDKVLSAYNKHRDKPIREQAENIIHLFTLTNLGAPRAFKYFDTTIDRKVYRSTKEVLDATLIHQSITGLYETRIDLSQLGGD

SEQ ID NO: 310 - protein, 1368 aa, synthetic construct
MDKKYSIGLDIGTNSVGWAVITDEYKVPSKKFKVLGNTDRHSIKKNLIGALLFDSGETAEATRLKRTARRRYTRRKNRICYLQEIFSNEMAKVDDSFFHRLEESFLVEEDKKHERHPIFGNIVDEVAYHEKYPTIYHLRKKLVDSTDKADLRLIYLALAHMIKFRGHFLIEGDLNPDNSDVDKLFIQLVQTYNQLFEENPINASGVDAKAILSARLSKSRRLENLIAQLPGEKKNGLFGNLIALSLGLTPNFKSNFDLAEDAKLQLSKDTYDDDLDNLLAQIGDQYADLFLAAKNLSDAILLSDILRVNTEITKAPLSASMIKRYDEHHQDLTLLKALVRQQLPEKYKEIFFDQSKNGYAGYIDGGASQEEFYKFIKPILEKMDGTEELLVKLNREDLLRKQRTFDNGSIPHQIHLGELHAILRRQEDFYPFLKDNREKIEKILTFRIPYYVGPLARGNSRFAWMTRKSEETITPWNFEEVVDKGASAQSFIERMTNFDKNLPNEKVLPKHSLLYEYFTVYNELTKVKYVTEGMRKPAFLSGEQKKAIVDLLFKTNRKVTVKQLKEDYFKKIECFDSVEISGVEDRFNASLGTYHDLLKIIKDKDFLDNEENEDILEDIVLTLTLFEDREMIEERLKTYAHLFDDKVMKQLKRRRYTGWGRLSRKLINGIRDKQSGKTILDFLKSDGFANRNFMQLIHDDSLTFKEDIQKAQVSGQGDSLHEHIANLAGSPAIKKGILQTVKVVDELVKVMGRHKPENIVIEMARENQTTQKGQKNSRERMKRIEEGIKELGSQILKEHPVENTQLQNEKLYLYYLQNGRDMYVDQELDINRLSDYDVDHIVPQSFLKDDSIDNKVLTRSDKNRGKSDNVPSEEVVKKMKNYWRQLLNAKLITQRKFDNLTKAERGGLSELDKAGFIKRQLVETRQITKHVAQILDSRMNTKYDENDKLIREVKVITLKSKLVSDFRKDFQFYKVREINNYHHAHDAYLNAVVGTALIKKYPKLESEFVYGDYKVYDVRKMIAKSEQEIGKATAKYFFYSNIMNFFKTEITLANGEIRKRPLIETNGETGEIVWDKGRDFATVRKVLSMPQVNIVKKTEVQTGGFSKESILPKRNSDKLIARKKDWDPKKYGGFVSPTVAYSVLVVAKVEKGKSKKLKSVKELLGITIMERSSFEKNPIDFLEAKGYKEVKKDLIIKLPKYSLFELENGRKRMLASARELQKGNELALPSKYVNFLYLASHYEKLKGSPEDNEQKQLFVEQHKHYLDEIIEQISEFSKRVILADANLDKVLSAYNKHRDKPIREQAENIIHLFTLTNLGAPAAFKYFDTTIDRKQYRSTKEVLDATLIHQSITGLYETRIDLSQLGGD

SEQ ID NO: 311 - protein, 1368 aa, synthetic construct
MDKKYSIGLDIGTNSVGWAVITDEYKVPSKKFKVLGNTDRHSIKKNLIGALLFDSGETAEATRLKRTARRRYTRRKNRICYLQEIFSNEMAKVDDSFFHRLEESFLVEEDKKHERHPIFGNIVDEVAYHEKYPTIYHLRKKLVDSTDKADLRLIYLALAHMIKFRGHFLIEGDLNPDNSDVDKLFIQLVQTYNQLFEENPINASGVDAKAILSARLSKSRRLENLIAQLPGEKKNGLFGNLIALSLGLTPNFKSNFDLAEDAKLQLSKDTYDDDLDNLLAQIGDQYADLFLAAKNLSDAILLSDILRVNTEITKAPLSASMIKRYDEHHQDLTLLKALVRQQLPEKYKEIFFDQSKNGYAGYIDGGASQEEFYKFIKPILEKMDGTEELLVKLNREDLLRKQRTFDNGSIPHQIHLGELHAILRRQEDFYPFLKDNREKIEKILTFRIPYYVGPLARGNSRFAWMTRKSEETITPWNFEEVVDKGASAQSFIERMTNFDKNLPNEKVLPKHSLLYEYFTVYNELTKVKYVTEGMRKPAFLSGEQKKAIVDLLFKTNRKVTVKQLKEDYFKKIECFDSVEISGVEDRFNASLGTYHDLLKIIKDKDFLDNEENEDILEDIVLTLTLFEDREMIEERLKTYAHLFDDKVMKQLKRRRYTGWGRLSRKLINGIRDKQSGKTILDFLKSDGFANRNFMQLIHDDSLTFKEDIQKAQVSGQGDSLHEHIANLAGSPAIKKGILQTVKVVDELVKVMGRHKPENIVIEMARENQTTQKGQKNSRERMKRIEEGIKELGSQILKEHPVENTQLQNEKLYLYYLQNGRDMYVDQELDINRLSDYDVDAIVPQSFLKDDSIDNKVLTRSDKNRGKSDNVPSEEVVKKMKNYWRQLLNAKLITQRKFDNLTKAERGGLSELDKAGFIKRQLVETRQITKHVAQILDSRMNTKYDENDKLIREVKVITLKSKLVSDFRKDFQFYKVREINNYHHAHDAYLNAVVGTALIKKYPKLESEFVYGDYKVYDVRKMIAKSEQEIGKATAKYFFYSNIMNFFKTEITLANGEIRKRPLIETNGETGEIVWDKGRDFATVRKVLSMPQVNIVKKTEVQTGGFSKESILPKRNSDKLIARKKDWDPKKYGGFVSPTVAYSVLVVAKVEKGKSKKLKSVKELLGITIMERSSFEKNPIDFLEAKGYKEVKKDLIIKLPKYSLFELENGRKRMLASARELQKGNELALPSKYVNFLYLASHYEKLKGSPEDNEQKQLFVEQHKHYLDEIIEQISEFSKRVILADANLDKVLSAYNKHRDKPIREQAENIIHLFTLTNLGAPAAFKYFDTTIDRKQYRSTKEVLDATLIHQSITGLYETRIDLSQLGGD

SEQ ID NO: 312 - protein, 1367 aa, synthetic construct
DKKYSIGLDIGTNSVGWAVITDEYKVPSKKFKVLGNTDRHSIKKNLIGALLFDSGETAEATRLKRTARRRYTRRKNRICYLQEIFSNEMAKVDDSFFHRLEESFLVEEDKKHERHPIFGNIVDEVAYHEKYPTIYHLRKKLVDSTDKADLRLIYLALAHMIKFRGHFLIEGDLNPDNSDVDKLFIQLVQTYNQLFEENPINASGVDAKAILSARLSKSRRLENLIAQLPGEKKNGLFGNLIALSLGLTPNFKSNFDLAEDAKLQLSKDTYDDDLDNLLAQIGDQYADLFLAAKNLSDAILLSDILRVNTEITKAPLSASMIKRYDEHHQDLTLLKALVRQQLPEKYKEIFFDQSKNGYAGYIDGGASQEEFYKFIKPILEKMDGTEELLVKLNREDLLRKQRTFDNGSIPHQIHLGELHAILRRQEDFYPFLKDNREKIEKILTFRIPYYVGPLARGNSRFAWMTRKSEETITPWNFEEVVDKGASAQSFIERMTNFDKNLPNEKVLPKHSLLYEYFTVYNELTKVKYVTEGMRKPAFLSGEQKKAIVDLLFKTNRKVTVKQLKEDYFKKIECFDSVEISGVEDRFNASLGTYHDLLKIIKDKDFLDNEENEDILEDIVLTLTLFEDREMIEERLKTYAHLFDDKVMKQLKRRRYTGWGRLSRKLINGIRDKQSGKTILDFLKSDGFANRNFMQLIHDDSLTFKEDIQKAQVSGQGDSLHEHIANLAGSPAIKKGILQTVKVVDELVKVMGRHKPENIVIEMARENQTTQKGQKNSRERMKRIEEGIKELGSQILKEHPVENTQLQNEKLYLYYLQNGRDMYVDQELDINRLSDYDVDAIVPQSFLKDDSIDNKVLTRSDKNRGKSDNVPSEEVVKKMKNYWRQLLNAKLITQRKFDNLTKAERGGLSELDKAGFIKRQLVETRQITKHVAQILDSRMNTKYDENDKLIREVKVITLKSKLVSDFRKDFQFYKVREINNYHHAHDAYLNAVVGTALIKKYPKLESEFVYGDYKVYDVRKMIAKSEQEIGKATAKYFFYSNIMNFFKTEITLANGEIRKRPLIETNGETGEIVWDKGRDFATVRKVLSMPQVNIVKKTEVQTGGFSKESILPKRNSDKLIARKKDWDPKKYGGFVSPTVAYSVLVVAKVEKGKSKKLKSVKELLGITIMERSSFEKNPIDFLEAKGYKEVKKDLIIKLPKYSLFELENGRKRMLASARELQKGNELALPSKYVNFLYLASHYEKLKGSPEDNEQKQLFVEQHKHYLDEIIEQISEFSKRVILADANLDKVLSAYNKHRDKPIREQAENIIHLFTLTNLGAPAAFKYFDTTIDRKQYRSTKEVLDATLIHQSITGLYETRIDLSQLGGD

SEQ ID NO: 313 - protein, 1368 aa, synthetic construct
MDKKYSIGLDIGTNSVGWAVITDEYKVPSKKFKVLGNTDRHSIKKNLIGALLFDSGETAERTRLKRTARRRYTRRKNRICYLQEIFSNEMAKVDDSFFHRLEESFLVEEDKKHERHPIFGNIVDEVAYHEKYPTIYHLRKKLVDSTDKADLRLIYLALAHMIKFRGHFLIEGDLNPDNSDVDKLFIQLVQTYNQLFEENPINASGVDAKAILSARLSKSRRLENLIAQLPGEKKNGLFGNLIALSLGLTPNFKSNFDLAEDAKLQLSKDTYDDDLDNLLAQIGDQYADLFLAAKNLSDAILLSDILRVNTEITKAPLSASMIKRYDEHHQDLTLLKALVRQQLPEKYKEIFFDQSKNGYAGYIDGGASQEEFYKFIKPILEKMDGTEELLVKLNREDLLRKQRTFDNGSIPHQIHLGELHAILRRQEDFYPFLKDNREKIEKILTFRIPYYVGPLARGNSRFAWMTRKSEETITPWNFEEVVDKGASAQSFIERMTNFDKNLPNEKVLPKHSLLYEYFTVYNELTKVKYVTEGMRKPAFLSGEQKKAIVDLLFKTNRKVTVKQLKEDYFKKIECFDSVEISGVEDRFNASLGTYHDLLKIIKDKDFLDNEENEDILEDIVLTLTLFEDREMIEERLKTYAHLFDDKVMKQLKRRRYTGWGRLSRKLINGIRDKQSGKTILDFLKSDGFANRNFMQLIHDDSLTFKEDIQKAQVSGQGDSLHEHIANLAGSPAIKKGILQTVKVVDELVKVMGRHKPENIVIEMARENQTTQKGQKNSRERMKRIEEGIKELGSQILKEHPVENTQLQNEKLYLYYLQNGRDMYVDQELDINRLSDYDVDHIVPQSFLKDDSIDNKVLTRSDKNRGKSDNVPSEEVVKKMKNYWRQLLNAKLITQRKFDNLTKAERGGLSELDKAGFIKRQLVETRQITKHVAQILDSRMNTKYDENDKLIREVKVITLKSKLVSDFRKDFQFYKVREINNYHHAHDAYLNAVVGTALIKKYPKLESEFVYGDYKVYDVRKMIAKSEQEIGKATAKYFFYSNIMNFFKTEITLANGEIRKRPLIETNGETGEIVWDKGRDFATVRKVLSMPQVNIVKKTEVQTGGFSKESIRPKRNSDKLIARKKDWDPKKYGGFLWPTVAYSVLVVAKVEKGKSKKLKSVKELLGITIMERSSFEKNPIDFLEAKGYKEVKKDLIIKLPKYSLFELENGRKRMLASAKQLQKGNELALPSKYVNFLYLASHYEKLKGSPEDNEQKQLFVEQHKHYLDEIIEQISEFSKRVILADANLDKVLSAYNKHRDKPIREQAENIIHLFTLTRLGAPRAFKYFDTTIDPKQYRSTKEVLDATLIHQSITGLYETRIDLSQLGGD

SEQ ID NO: 314 - protein, 1368 aa, synthetic construct
MDKKYSIGLDIGTNSVGWAVITDEYKVPSKKFKVLGNTDRHSIKKNLIGALLFDSGETAERTRLKRTARRRYTRRKNRICYLQEIFSNEMAKVDDSFFHRLEESFLVEEDKKHERHPIFGNIVDEVAYHEKYPTIYHLRKKLVDSTDKADLRLIYLALAHMIKFRGHFLIEGDLNPDNSDVDKLFIQLVQTYNQLFEENPINASGVDAKAILSARLSKSRRLENLIAQLPGEKKNGLFGNLIALSLGLTPNFKSNFDLAEDAKLQLSKDTYDDDLDNLLAQIGDQYADLFLAAKNLSDAILLSDILRVNTEITKAPLSASMIKRYDEHHQDLTLLKALVRQQLPEKYKEIFFDQSKNGYAGYIDGGASQEEFYKFIKPILEKMDGTEELLVKLNREDLLRKQRTFDNGSIPHQIHLGELHAILRRQEDFYPFLKDNREKIEKILTFRIPYYVGPLARGNSRFAWMTRKSEETITPWNFEEVVDKGASAQSFIERMTNFDKNLPNEKVLPKHSLLYEYFTVYNELTKVKYVTEGMRKPAFLSGEQKKAIVDLLFKTNRKVTVKQLKEDYFKKIECFDSVEISGVEDRFNASLGTYHDLLKIIKDKDFLDNEENEDILEDIVLTLTLFEDREMIEERLKTYAHLFDDKVMKQLKRRRYTGWGRLSRKLINGIRDKQSGKTILDFLKSDGFANRNFMQLIHDDSLTFKEDIQKAQVSGQGDSLHEHIANLAGSPAIKKGILQTVKVVDELVKVMGRHKPENIVIEMARENQTTQKGQKNSRERMKRIEEGIKELGSQILKEHPVENTQLQNEKLYLYYLQNGRDMYVDQELDINRLSDYDVDAIVPQSFLKDDSIDNKVLTRSDKNRGKSDNVPSEEVVKKMKNYWRQLLNAKLITQRKFDNLTKAERGGLSELDKAGFIKRQLVETRQITKHVAQILDSRMNTKYDENDKLIREVKVITLKSKLVSDFRKDFQFYKVREINNYHHAHDAYLNAVVGTALIKKYPKLESEFVYGDYKVYDVRKMIAKSEQEIGKATAKYFFYSNIMNFFKTEITLANGEIRKRPLIETNGETGEIVWDKGRDFATVRKVLSMPQVNIVKKTEVQTGGFSKESIRPKRNSDKLIARKKDWDPKKYGGFLWPTVAYSVLVVAKVEKGKSKKLKSVKELLGITIMERSSFEKNPIDFLEAKGYKEVKKDLIIKLPKYSLFELENGRKRMLASAKQLQKGNELALPSKYVNFLYLASHYEKLKGSPEDNEQKQLFVEQHKHYLDEIIEQISEFSKRVILADANLDKVLSAYNKHRDKPIREQAENIIHLFTLTRLGAPRAFKYFDTTIDPKQYRSTKEVLDATLIHQSITGLYETRIDLSQLGGD

SEQ ID NO: 315 - protein, 1367 aa, synthetic construct
DKKYSIGLDIGTNSVGWAVITDEYKVPSKKFKVLGNTDRHSIKKNLIGALLFDSGETAERTRLKRTARRRYTRRKNRICYLQEIFSNEMAKVDDSFFHRLEESFLVEEDKKHERHPIFGNIVDEVAYHEKYPTIYHLRKKLVDSTDKADLRLIYLALAHMIKFRGHFLIEGDLNPDNSDVDKLFIQLVQTYNQLFEENPINASGVDAKAILSARLSKSRRLENLIAQLPGEKKNGLFGNLIALSLGLTPNFKSNFDLAEDAKLQLSKDTYDDDLDNLLAQIGDQYADLFLAAKNLSDAILLSDILRVNTEITKAPLSASMIKRYDEHHQDLTLLKALVRQQLPEKYKEIFFDQSKNGYAGYIDGGASQEEFYKFIKPILEKMDGTEELLVKLNREDLLRKQRTFDNGSIPHQIHLGELHAILRRQEDFYPFLKDNREKIEKILTFRIPYYVGPLARGNSRFAWMTRKSEETITPWNFEEVVDKGASAQSFIERMTNFDKNLPNEKVLPKHSLLYEYFTVYNELTKVKYVTEGMRKPAFLSGEQKKAIVDLLFKTNRKVTVKQLKEDYFKKIECFDSVEISGVEDRFNASLGTYHDLLKIIKDKDFLDNEENEDILEDIVLTLTLFEDREMIEERLKTYAHLFDDKVMKQLKRRRYTGWGRLSRKLINGIRDKQSGKTILDFLKSDGFANRNFMQLIHDDSLTFKEDIQKAQVSGQGDSLHEHIANLAGSPAIKKGILQTVKVVDELVKVMGRHKPENIVIEMARENQTTQKGQKNSRERMKRIEEGIKELGSQILKEHPVENTQLQNEKLYLYYLQNGRDMYVDQELDINRLSDYDVDAIVPQSFLKDDSIDNKVLTRSDKNRGKSDNVPSEEVVKKMKNYWRQLLNAKLITQRKFDNLTKAERGGLSELDKAGFIKRQLVETRQITKHVAQILDSRMNTKYDENDKLIREVKVITLKSKLVSDFRKDFQFYKVREINNYHHAHDAYLNAVVGTALIKKYPKLESEFVYGDYKVYDVRKMIAKSEQEIGKATAKYFFYSNIMNFFKTEITLANGEIRKRPLIETNGETGEIVWDKGRDFATVRKVLSMPQVNIVKKTEVQTGGFSKESIRPKRNSDKLIARKKDWDPKKYGGFLWPTVAYSVLVVAKVEKGKSKKLKSVKELLGITIMERSSFEKNPIDFLEAKGYKEVKKDLIIKLPKYSLFELENGRKRMLASAKQLQKGNELALPSKYVNFLYLASHYEKLKGSPEDNEQKQLFVEQHKHYLDEIIEQISEFSKRVILADANLDKVLSAYNKHRDKPIREQAENIIHLFTLTRLGAPRAFKYFDTTIDPKQYRSTKEVLDATLIHQSITGLYETRIDLSQLGGD

SEQ ID NO: 316 - protein, 1057 aa, synthetic construct
MNQKFILGLDIGITSVGYGLIDYETKNIIDAGVRLFPEANVENNEGRRSKRGSRRLKRRRIHRLERVKLLLTEYDLINKEQIPTSNNPYQIRVKGLSEILSKDELAIALLHLAKRRGIHNVDVAADKEETASDSLSTKDQINKNAKFLESRYVCELQKERLENEGHVRGVENRFLTKDIVREAKKIIDTQMQYYPEIDETFKEKYISLVETRREYFEGPGQGSPFGWNGDLKKWYEMLMGHCTYFPQELRSVKYAYSADLFNALNDLNNLIIQRDNSEKLEYHEKYHIIENVFKQKKKPTLKQIAKEIGVNPEDIKGYRITKSGTPEFTSFKLFHDLKKVVKDHAILDDIDLLNQIAEILTIYQDKDSIVAELGQLEYLMSEADKQSISELTGYTGTHSLSLKCMNMIIDELWHSSMNQMEVFTYLNMRPKKYELKGYQRIPTDMIDDAILSPVVKRTFIQSINVINKVIEKYGIPEDIIIELARENNSDDRKKFINNLQKKNEATRKRINEIIGQTGNQNAKRIVEKIRLHDQQEGKCLYSLESIPLEDLLNNPNHYEVDHIIPRSVSFDNSYHNKVLVKQSENSKKSNLTPYQYFNSGKSKLSYNQFKQHILNLSKSQDRISKKKKEYLLEERDINKFEVQKEFINRNLVDTRYATRELTNYLKAYFSANNMNVKVKTINGSFTDYLRKVWKFKKERNHGYKHHAEDALIIANADFLFKENKKLKAVNSVLEKPEIETKQLDIQVDSEDNYSEMFIIPKQVQDIKDFRNFKYSHRVDKKPNRQLINDTLYSTRKKDNSTYIVQTIKDIYAKDNTTLKKQFDKSPEKFLMYQHDPRTFEKLEVIMKQYANEKNPLAKYHEETGEYLTKYSKKNNGPIVKSLKYIGNKLGSHLDVTHQFKSSTKKLVKLSIKNYRFDVYLTEKGYKFVTIAYLNVFKKDNYYYIPKDKYQELKEKKKIKDTDQFIASFYKNDLIKLNGDLYKIIGVNSDDRNIIELDYYDIKYKDYCEINNIKGEPRIKKTIGKKTESIEKFTTDVLGNLYLHSTEKAPQLIFKRGL

SEQ ID NO: 317 - protein, 1057 aa, synthetic construct
MNQKFILGLDIGITSVGYGLIDYETKNIIDAGVRLFPEANVENNEGRRSKRGSRRLKRRRIHRLERVKLLLTEYDLINKEQIPTSNNPYQIRVKGLSEILSKDELAIALLHLAKRRGIHNVDVAADKEETASDSLSTKDQINKNAKFLESRYVCELQKERLENEGHVRGVENRFLTKDIVREAKKIIDTQMQYYPEIDETFKEKYISLVETRREYFEGPGQGSPFGWNGDLKKWYEMLMGHCTYFPQELRSVKYAYSADLFNALNDLNNLIIQRDNSEKLEYHEKYHIIENVFKQKKKPTLKQIAKEIGVNPEDIKGYRITKSGTPEFTSFKLFHDLKKVVKDHAILDDIDLLNQIAEILTIYQDKDSIVAELGQLEYLMSEADKQSISELTGYTGTHSLSLKCMNMIIDELWHSSMNQMEVFTYLNMRPKKYELKGYQRIPTDMIDDAILSPVVKRTFIQSINVINKVIEKYGIPEDIIIELARENNSDDRKKFINNLQKKNEATRKRINEIIGQTGNQNAKRIVEKIRLHDQQEGKCLYSLESIPLEDLLNNPNHYEVDHIIPRSVSFDNSYHNKVLVKQSEASKKSNLTPYQYFNSGKSKLSYNQFKQHILNLSKSQDRISKKKKEYLLEERDINKFEVQKEFINRNLVDTRYATRELTNYLKAYFSANNMNVKVKTINGSFTDYLRKVWKFKKERNHGYKHHAEDALIIANADFLFKENKKLKAVNSVLEKPEIETKQLDIQVDSEDNYSEMFIIPKQVQDIKDFRNFKYSHRVDKKPNRQLINDTLYSTRKKDNSTYIVQTIKDIYAKDNTTLKKQFDKSPEKFLMYQHDPRTFEKLEVIMKQYANEKNPLAKYHEETGEYLTKYSKKNNGPIVKSLKYIGNKLGSHLDVTHQFKSSTKKLVKLSIKNYRFDVYLTEKGYKFVTIAYLNVFKKDNYYYIPKDKYQELKEKKKIKDTDQFIASFYKNDLIKLNGDLYKIIGVNSDDRNIIELDYYDIKYKDYCEINNIKGEPRIKKTIGKKTESIEKFTTDVLGNLYLHSTEKAPQLIFKRGL

SEQ ID NO: 318 - protein, 1056 aa, synthetic construct
NQKFILGLDIGITSVGYGLIDYETKNIIDAGVRLFPEANVENNEGRRSKRGSRRLKRRRIHRLERVKLLLTEYDLINKEQIPTSNNPYQIRVKGLSEILSKDELAIALLHLAKRRGIHNVDVAADKEETASDSLSTKDQINKNAKFLESRYVCELQKERLENEGHVRGVENRFLTKDIVREAKKIIDTQMQYYPEIDETFKEKYISLVETRREYFEGPGQGSPFGWNGDLKKWYEMLMGHCTYFPQELRSVKYAYSADLFNALNDLNNLIIQRDNSEKLEYHEKYHIIENVFKQKKKPTLKQIAKEIGVNPEDIKGYRITKSGTPEFTSFKLFHDLKKVVKDHAILDDIDLLNQIAEILTIYQDKDSIVAELGQLEYLMSEADKQSISELTGYTGTHSLSLKCMNMIIDELWHSSMNQMEVFTYLNMRPKKYELKGYQRIPTDMIDDAILSPVVKRTFIQSINVINKVIEKYGIPEDIIIELARENNSDDRKKFINNLQKKNEATRKRINEIIGQTGNQNAKRIVEKIRLHDQQEGKCLYSLESIPLEDLLNNPNHYEVDHIIPRSVSFDNSYHNKVLVKQSEASKKSNLTPYQYFNSGKSKLSYNQFKQHILNLSKSQDRISKKKKEYLLEERDINKFEVQKEFINRNLVDTRYATRELTNYLKAYFSANNMNVKVKTINGSFTDYLRKVWKFKKERNHGYKHHAEDALIIANADFLFKENKKLKAVNSVLEKPEIETKQLDIQVDSEDNYSEMFIIPKQVQDIKDFRNFKYSHRVDKKPNRQLINDTLYSTRKKDNSTYIVQTIKDIYAKDNTTLKKQFDKSPEKFLMYQHDPRTFEKLEVIMKQYANEKNPLAKYHEETGEYLTKYSKKNNGPIVKSLKYIGNKLGSHLDVTHQFKSSTKKLVKLSIKNYRFDVYLTEKGYKFVTIAYLNVFKKDNYYYIPKDKYQELKEKKKIKDTDQFIASFYKNDLIKLNGDLYKIIGVNSDDRNIIELDYYDIKYKDYCEINNIKGEPRIKKTIGKKTESIEKFTTDVLGNLYLHSTEKAPQLIFKRGL

SEQ ID NO: 319 - protein, 1057 aa, synthetic construct
MNQKFILGLDIGITSVGYGLIDYETKNIIDAGVRLFPEANVENNEGRRSKRGSRRLKRRRIHRLERVKLLLTEYDLINKEQIPTSNNPYQIRVKGLSEILSKDELAIALLHLAKRRGIHNVDVAADKEETASDSLSTKDQINKNAKFLESRYVCELQKERLENEGHVRGVENRFLTKDIVREAKKIIDTQMQYYPEIDETFKEKYISLVETRREYFEGPGQGSPFGWNGDLKKWYEMLMGHCTYFPQELRSVKYAYSADLFNALNDLNNLIIQRDNSEKLEYHEKYHIIENVFKQKKKPTLKQIAKEIGVNPEDIKGYRITKSGTPEFTSFKLFHDLKKVVKDHAILDDIDLLNQIAEILTIYQDKDSIVAELGQLEYLMSEADKQSISELTGYTGTHSLSLKCMNMIIDELWHSSMNQMEVFTYLNMRPKKYELKGYQRIPTDMIDDAILSPVVKRTFIQSINVINKVIEKYGIPEDIIIELARENNSDDRKKFINNLQKKNEATRKRINEIIGQTGNQNAKRIVEKIRLHDQQEGKCLYSLESIPLEDLLNNPNHYEVDHIIPRSVSFDNSYHNKVLVKQSENSKKSNLTPYQYFNSGKSKLSYNQFKQHILNLSKSQDRISKKKKEYLLEERDINKFEVQKEFINRNLVDTRYATRELTSYLKAYFSANNMDVKVKTINGSFTNHLRKVWRFDKYRNHGYKHHAEDALIIANADFLFKENKKLQNTNKILEKPTIENNTKKVTVEKEEDYNNVFETPKLVEDIKQYRDYKFSHRVDKKPNRQLINDTLYSTRMKDEHDYIVQTITDIYGKDNTNLKKQFNKNPEKFLMYQNDPKTFEKLSIIMKQYSDEKNPLAKYYEETGEYLTKYSKKNNGPIVKKIKLLGNKVGNHLDVTNKYENSTKKLVKLSIKNYRFDVYLTEKGYKFVTIAYLNVFKKDNYYYIPKDKYQELKEKKKIKDTDQFIASFYKNDLIKLNGDLYKIIGVNSDDRNIIELDYYDIKYKDYCEINNIKGEPRIKKTIGKKTESIEKFTTDVLGNLYLHSTEKAPQLIFKRGL

SEQ ID NO: 320 - protein, 1057 aa, synthetic construct
MNQKFILGLDIGITSVGYGLIDYETKNIIDAGVRLFPEANVENNEGRRSKRGSRRLKRRRIHRLERVKLLLTEYDLINKEQIPTSNNPYQIRVKGLSEILSKDELAIALLHLAKRRGIHNVDVAADKEETASDSLSTKDQINKNAKFLESRYVCELQKERLENEGHVRGVENRFLTKDIVREAKKIIDTQMQYYPEIDETFKEKYISLVETRREYFEGPGQGSPFGWNGDLKKWYEMLMGHCTYFPQELRSVKYAYSADLFNALNDLNNLIIQRDNSEKLEYHEKYHIIENVFKQKKKPTLKQIAKEIGVNPEDIKGYRITKSGTPEFTSFKLFHDLKKVVKDHAILDDIDLLNQIAEILTIYQDKDSIVAELGQLEYLMSEADKQSISELTGYTGTHSLSLKCMNMIIDELWHSSMNQMEVFTYLNMRPKKYELKGYQRIPTDMIDDAILSPVVKRTFIQSINVINKVIEKYGIPEDIIIELARENNSDDRKKFINNLQKKNEATRKRINEIIGQTGNQNAKRIVEKIRLHDQQEGKCLYSLESIPLEDLLNNPNHYEVDHIIPRSVSFDNSYHNKVLVKQSEASKKSNLTPYQYFNSGKSKLSYNQFKQHILNLSKSQDRISKKKKEYLLEERDINKFEVQKEFINRNLVDTRYATRELTSYLKAYFSANNMDVKVKTINGSFTNHLRKVWRFDKYRNHGYKHHAEDALIIANADFLFKENKKLQNTNKILEKPTIENNTKKVTVEKEEDYNNVFETPKLVEDIKQYRDYKFSHRVDKKPNRQLINDTLYSTRMKDEHDYIVQTITDIYGKDNTNLKKQFNKNPEKFLMYQNDPKTFEKLSIIMKQYSDEKNPLAKYYEETGEYLTKYSKKNNGPIVKKIKLLGNKVGNHLDVTNKYENSTKKLVKLSIKNYRFDVYLTEKGYKFVTIAYLNVFKKDNYYYIPKDKYQELKEKKKIKDTDQFIASFYKNDLIKLNGDLYKIIGVNSDDRNIIELDYYDIKYKDYCEINNIKGEPRIKKTIGKKTESIEKFTTDVLGNLYLHSTEKAPQLIFKRGL

SEQ ID NO: 321 - protein, 1056 aa, synthetic construct
NQKFILGLDIGITSVGYGLIDYETKNIIDAGVRLFPEANVENNEGRRSKRGSRRLKRRRIHRLERVKLLLTEYDLINKEQIPTSNNPYQIRVKGLSEILSKDELAIALLHLAKRRGIHNVDVAADKEETASDSLSTKDQINKNAKFLESRYVCELQKERLENEGHVRGVENRFLTKDIVREAKKIIDTQMQYYPEIDETFKEKYISLVETRREYFEGPGQGSPFGWNGDLKKWYEMLMGHCTYFPQELRSVKYAYSADLFNALNDLNNLIIQRDNSEKLEYHEKYHIIENVFKQKKKPTLKQIAKEIGVNPEDIKGYRITKSGTPEFTSFKLFHDLKKVVKDHAILDDIDLLNQIAEILTIYQDKDSIVAELGQLEYLMSEADKQSISELTGYTGTHSLSLKCMNMIIDELWHSSMNQMEVFTYLNMRPKKYELKGYQRIPTDMIDDAILSPVVKRTFIQSINVINKVIEKYGIPEDIIIELARENNSDDRKKFINNLQKKNEATRKRINEIIGQTGNQNAKRIVEKIRLHDQQEGKCLYSLESIPLEDLLNNPNHYEVDHIIPRSVSFDNSYHNKVLVKQSEASKKSNLTPYQYFNSGKSKLSYNQFKQHILNLSKSQDRISKKKKEYLLEERDINKFEVQKEFINRNLVDTRYATRELTSYLKAYFSANNMDVKVKTINGSFTNHLRKVWRFDKYRNHGYKHHAEDALIIANADFLFKENKKLQNTNKILEKPTIENNTKKVTVEKEEDYNNVFETPKLVEDIKQYRDYKFSHRVDKKPNRQLINDTLYSTRMKDEHDYIVQTITDIYGKDNTNLKKQFNKNPEKFLMYQNDPKTFEKLSIIMKQYSDEKNPLAKYYEETGEYLTKYSKKNNGPIVKKIKLLGNKVGNHLDVTNKYENSTKKLVKLSIKNYRFDVYLTEKGYKFVTIAYLNVFKKDNYYYIPKDKYQELKEKKKIKDTDQFIASFYKNDLIKLNGDLYKIIGVNSDDRNIIELDYYDIKYKDYCEINNIKGEPRIKKTIGKKTESIEKFTTDVLGNLYLHSTEKAPQLIFKRGL

SEQ ID NO: 322 - protein, 1368 aa, synthetic construct
MDKKYSIGLDIGTNSVGWAVITDEYKVPSKKFKVLGNTDRHSIKKNLIGALLFDSGETAEATRLKRTARRRYTRRKNRICYLQEIFSNEMAKVDDSFFHRLEESFLVEEDKKHERHPIFGNIVDEVAYHEKYPTIYHLRKKLVDSTDKADLRLIYLALAHMIKFRGHFLIEGDLNPDNSDVDKLFIQLVQTYNQLFEENPINASGVDAKAILSARLSKSRRLENLIAQLPGEKKNGLFGNLIALSLGLTPNFKSNFDLAEDAKLQLSKDTYDDDLDNLLAQIGDQYADLFLAAKNLSDAILLSDILRVNTEITKAPLSASMIKRYDEHHQDLTLLKALVRQQLPEKYKEIFFDQSKNGYAGYIDGGASQEEFYKFIKPILEKMDGTEELLVKLNREDLLRKQRTFDNGSIPHQIHLGELHAILRRQEDFYPFLKDNREKIEKILTFRIPYYVGPLARGNSRFAWMTRKSEETITPWNFEEVVDKGASAQSFIERMTNFDKNLPNEKVLPKHSLLYEYFTVYNELTKVKYVTEGMRKPAFLSGEQKKAIVDLLFKTNRKVTVKQLKEDYFKKIECFDSVEISGVEDRFNASLGTYHDLLKIIKDKDFLDNEENEDILEDIVLTLTLFEDREMIEERLKTYAHLFDDKVMKQLKRRRYTGWGRLSRKLINGIRDKQSGKTILDFLKSDGFANRNFMQLIHDDSLTFKEDIQKAQVSGQGDSLHEHIANLAGSPAIKKGILQTVKVVDELVKVMGRHKPENIVIEMARENQTTQKGQKNSRERMKRIEEGIKELGSQILKEHPVENTQLQNEKLYLYYLQNGRDMYVDQELDINRLSDYDVDHIVPQSFLKDDSIDNKVLTRSDKNRGKSDNVPSEEVVKKMKNYWRQLLNAKLITQRKFDNLTKAERGGLSELDKAGFIKRQLVETRQITKHVAQILDSRMNTKYDENDKLIREVKVITLKSKLVSDFRKDFQFYKVREINNYHHAHDAYLNAVVGTALIKKYPKLESEFVYGDYKVYDVRKMIAKSEQEIGKATAKYFFYSNIMNFFKTEITLANGEIRKRPLIETNGETGEIVWDKGRDFATVRKVLSMPQVNIVKKTEVQTGGFSKESILPKRNSDKLIARKKDWDPKKYGGFLWPTVAYSVLVVAKVEKGKSKKLKSVKELLGITIMERSSFEKNPIDFLEAKGYKEVKKDLIIKLPKYSLFELENGRKRMLASAKQLQKGNELALPSKYVNFLYLASHYEKLKGSPEDNEQKQLFVEQHKHYLDEIIEQISEFSKRVILADANLDKVLSAYNKHRDKPIREQAENIIHLFTLTNLGAPAAFKYFDTTIDRKQYRSTKEVLDATLIHQSITGLYETRIDLSQLGGD

SEQ ID NO: 323 - protein, 1368 aa, synthetic construct
MDKKYSIGLDIGTNSVGWAVITDEYKVPSKKFKVLGNTDRHSIKKNLIGALLFDSGETAEATRLKRTARRRYTRRKNRICYLQEIFSNEMAKVDDSFFHRLEESFLVEEDKKHERHPIFGNIVDEVAYHEKYPTIYHLRKKLVDSTDKADLRLIYLALAHMIKFRGHFLIEGDLNPDNSDVDKLFIQLVQTYNQLFEENPINASGVDAKAILSARLSKSRRLENLIAQLPGEKKNGLFGNLIALSLGLTPNFKSNFDLAEDAKLQLSKDTYDDDLDNLLAQIGDQYADLFLAAKNLSDAILLSDILRVNTEITKAPLSASMIKRYDEHHQDLTLLKALVRQQLPEKYKEIFFDQSKNGYAGYIDGGASQEEFYKFIKPILEKMDGTEELLVKLNREDLLRKQRTFDNGSIPHQIHLGELHAILRRQEDFYPFLKDNREKIEKILTFRIPYYVGPLARGNSRFAWMTRKSEETITPWNFEEVVDKGASAQSFIERMTNFDKNLPNEKVLPKHSLLYEYFTVYNELTKVKYVTEGMRKPAFLSGEQKKAIVDLLFKTNRKVTVKQLKEDYFKKIECFDSVEISGVEDRFNASLGTYHDLLKIIKDKDFLDNEENEDILEDIVLTLTLFEDREMIEERLKTYAHLFDDKVMKQLKRRRYTGWGRLSRKLINGIRDKQSGKTILDFLKSDGFANRNFMQLIHDDSLTFKEDIQKAQVSGQGDSLHEHIANLAGSPAIKKGILQTVKVVDELVKVMGRHKPENIVIEMARENQTTQKGQKNSRERMKRIEEGIKELGSQILKEHPVENTQLQNEKLYLYYLQNGRDMYVDQELDINRLSDYDVDAIVPQSFLKDDSIDNKVLTRSDKNRGKSDNVPSEEVVKKMKNYWRQLLNAKLITQRKFDNLTKAERGGLSELDKAGFIKRQLVETRQITKHVAQILDSRMNTKYDENDKLIREVKVITLKSKLVSDFRKDFQFYKVREINNYHHAHDAYLNAVVGTALIKKYPKLESEFVYGDYKVYDVRKMIAKSEQEIGKATAKYFFYSNIMNFFKTEITLANGEIRKRPLIETNGETGEIVWDKGRDFATVRKVLSMPQVNIVKKTEVQTGGFSKESILPKRNSDKLIARKKDWDPKKYGGFLWPTVAYSVLVVAKVEKGKSKKLKSVKELLGITIMERSSFEKNPIDFLEAKGYKEVKKDLIIKLPKYSLFELENGRKRMLASAKQLQKGNELALPSKYVNFLYLASHYEKLKGSPEDNEQKQLFVEQHKHYLDEIIEQISEFSKRVILADANLDKVLSAYNKHRDKPIREQAENIIHLFTLTNLGAPAAFKYFDTTIDRKQYRSTKEVLDATLIHQSITGLYETRIDLSQLGGD

SEQ ID NO: 324 - protein, 1367 aa, synthetic construct
DKKYSIGLDIGTNSVGWAVITDEYKVPSKKFKVLGNTDRHSIKKNLIGALLFDSGETAEATRLKRTARRRYTRRKNRICYLQEIFSNEMAKVDDSFFHRLEESFLVEEDKKHERHPIFGNIVDEVAYHEKYPTIYHLRKKLVDSTDKADLRLIYLALAHMIKFRGHFLIEGDLNPDNSDVDKLFIQLVQTYNQLFEENPINASGVDAKAILSARLSKSRRLENLIAQLPGEKKNGLFGNLIALSLGLTPNFKSNFDLAEDAKLQLSKDTYDDDLDNLLAQIGDQYADLFLAAKNLSDAILLSDILRVNTEITKAPLSASMIKRYDEHHQDLTLLKALVRQQLPEKYKEIFFDQSKNGYAGYIDGGASQEEFYKFIKPILEKMDGTEELLVKLNREDLLRKQRTFDNGSIPHQIHLGELHAILRRQEDFYPFLKDNREKIEKILTFRIPYYVGPLARGNSRFAWMTRKSEETITPWNFEEVVDKGASAQSFIERMTNFDKNLPNEKVLPKHSLLYEYFTVYNELTKVKYVTEGMRKPAFLSGEQKKAIVDLLFKTNRKVTVKQLKEDYFKKIECFDSVEISGVEDRFNASLGTYHDLLKIIKDKDFLDNEENEDILEDIVLTLTLFEDREMIEERLKTYAHLFDDKVMKQLKRRRYTGWGRLSRKLINGIRDKQSGKTILDFLKSDGFANRNFMQLIHDDSLTFKEDIQKAQVSGQGDSLHEHIANLAGSPAIKKGILQTVKVVDELVKVMGRHKPENIVIEMARENQTTQKGQKNSRERMKRIEEGIKELGSQILKEHPVENTQLQNEKLYLYYLQNGRDMYVDQELDINRLSDYDVDAIVPQSFLKDDSIDNKVLTRSDKNRGKSDNVPSEEVVKKMKNYWRQLLNAKLITQRKFDNLTKAERGGLSELDKAGFIKRQLVETRQITKHVAQILDSRMNTKYDENDKLIREVKVITLKSKLVSDFRKDFQFYKVREINNYHHAHDAYLNAVVGTALIKKYPKLESEFVYGDYKVYDVRKMIAKSEQEIGKATAKYFFYSNIMNFFKTEITLANGEIRKRPLIETNGETGEIVWDKGRDFATVRKVLSMPQVNIVKKTEVQTGGFSKESILPKRNSDKLIARKKDWDPKKYGGFLWPTVAYSVLVVAKVEKGKSKKLKSVKELLGITIMERSSFEKNPIDFLEAKGYKEVKKDLIIKLPKYSLFELENGRKRMLASAKQLQKGNELALPSKYVNFLYLASHYEKLKGSPEDNEQKQLFVEQHKHYLDEIIEQISEFSKRVILADANLDKVLSAYNKHRDKPIREQAENIIHLFTLTNLGAPAAFKYFDTTIDRKQYRSTKEVLDATLIHQSITGLYETRIDLSQLGGD

SEQ ID NO: 325 - protein, 1367 aa, synthetic construct
DKKYSIGLDIGTNSVGWAVITDEYKVPSKKFKVLGNTDRHSIKKNLIGALLFDSGETAEATRLKRTARRRYTRRKNRICYLQEIFSNEMAKVDDSFFHRLEESFLVEEDKKHERHPIFGNIVDEVAYHEKYPTIYHLRKKLVDSTDKADLRLIYLALAHMIKFRGHFLIEGDLNPDNSDVDKLFIQLVQTYNQLFEENPINASGVDAKAILSARLSKSRKLENLIAQLPGEKKNGLFGNLIALSLGLTPNFKSNFDLAEDAKLQLSKDTYDDDLDNLLAQIGDQYADLFLAAKNLSDAILLSDILRVNTEITKAPLSASMIKRYDEHHQDLTLLKALVRQQLPEKYKEIFFDQSKNGYAGYIDGGASQEEFYKFIKPILEKMDGTEELLVKLKREDLLRKQRTFDNGSIPHQIHLGELHAILRRQEDFYPFLKDNREKIEKILTFRIPYYVGPLARGNSRFAWMTRKSEETITPWNFEEVVDKGASAQSFIERMTNFDKNLPNEKVLPKHSLLYEYFTVYNELTKVKYVTEGMRKPAFLSGEQKKAIVDLLFKTNRKVTVKQLKEDYFKKIECFDSVEISGVEDRFNASLGTYHDLLKIIKDKDFLDNEENEDILEDIVLTLTLFEDREMIEERLKTYAHLFDDKVMKQLKRRRYTGWGRLSRKLINGIRDKQSGKTILDFLKSDGFANRNFMQLIHDDSLTFKEDIQKAQVSGQGDSLHEHIANLAGSPAIKKGILQTVKVVDELVKVMGRHKPENIVIEMARENQTTQKGQKNSRERMKRIEEGIKELGSQILKEHPVENTQLQNEKLYLYYLQNGRDMYVDQELDINRLSDYDVDAIVPQSFLKDDSIDNKVLTRSDKNRGKSDNVPSEEVVKKMKNYWRQLLNAKLITQRKFDNLTKAERGGLSELDKAGFIKRQLVETRQITKHVAQILDSRMNTKYDENDKLIREVKVITLKSKLVSDFRKDFQFYKVREINNYHHAHDAYLNAVVGTALIKKYPKLESEFVYGDYKVYDVRKMIAKSEQEIGKATAKYFFYSNIMNFFKTEITLANGEIRKRPLIETNGETGEIVWDKGRDFATVRKVLSMPQVNIVKKTEVQTGGFSKESILPKRNSDKLIARKKDWDPKKYGGFDSPTVAYSVLVVAKVEKGKSKKLKSVKELLGITIMERSSFEKNPIDFLEAKGYKEVKKDLIIKLPKYSLFELENGRKRMLASAGELQKGNELALPSKYVNFLYLASHYEKLKGSPEDNEQKQLFVEQHKHYLDEIIEQISEFSKRVILADANLDKVLSAYNKHRDKPIREQAENIIHLFTLTNLGAPAAFKYFDTTIDRKRYTSTKEVLDATLIHQSITGLYETRIDLSQLGGD

SEQ ID NO: 326 - protein, 150 aa, synthetic construct
  VARIANT 1..150: note = This sequence may encompass 1-30 repeating GGGGS units
GGGGSGGGGSGGGGSGGGGSGGGGSGGGGSGGGGSGGGGSGGGGSGGGGSGGGGSGGGGSGGGGSGGGGSGGGGSGGGGSGGGGSGGGGSGGGGSGGGGSGGGGSGGGGSGGGGSGGGGSGGGGSGGGGSGGGGSGGGGSGGGGSGGGGS

SEQ ID NO: 327 - protein, 30 aa, synthetic construct
  VARIANT 1..30: note = This sequence may encompass 1-30 residues
GGGGGGGGGGGGGGGGGGGGGGGGGGGGGG

SEQ ID NO: 328 - protein, 150 aa, synthetic construct
  VARIANT 1..150: note = This sequence may encompass 1-30 repeating EAAAK units
EAAAKEAAAKEAAAKEAAAKEAAAKEAAAKEAAAKEAAAKEAAAKEAAAKEAAAKEAAAKEAAAKEAAAKEAAAKEAAAKEAAAKEAAAKEAAAKEAAAKEAAAKEAAAKEAAAKEAAAKEAAAKEAAAKEAAAKEAAAKEAAAKEAAAK

SEQ ID NO: 329 - protein, 90 aa, synthetic construct
  VARIANT 1..90: note = This sequence may encompass 1-30 repeating GGS units
GGSGGSGGSGGSGGSGGSGGSGGSGGSGGSGGSGGSGGSGGSGGSGGSGGSGGSGGSGGSGGSGGSGGSGGSGGSGGSGGSGGSGGSGGS

SEQ ID NO: 330 - protein, 120 aa, synthetic construct
  VARIANT 1..120: note = This sequence may encompass 1-30 repeating SGGS units
SGGSSGGSSGGSSGGSSGGSSGGSSGGSSGGSSGGSSGGSSGGSSGGSSGGSSGGSSGGSSGGSSGGSSGGSSGGSSGGSSGGSSGGSSGGSSGGSSGGSSGGSSGGSSGGSSGGSSGGS

SEQ ID NO: 331 - protein, 60 aa, synthetic construct
  VARIANT 1: note = Any amino acid
  VARIANT 3: note = Any amino acid
  VARIANT 5: note = Any amino acid
  VARIANT 7: note = Any amino acid
  VARIANT 9: note = Any amino acid
  VARIANT 11: note = Any amino acid
  VARIANT 13: note = Any amino acid
  VARIANT 15: note = Any amino acid
  VARIANT 17: note = Any amino acid
  VARIANT 19: note = Any amino acid
  VARIANT 21: note = Any amino acid
  VARIANT 23: note = Any amino acid
  VARIANT 25: note = Any amino acid
  VARIANT 27: note = Any amino acid
  VARIANT 29: note = Any amino acid
  VARIANT 31: note = Any amino acid
  VARIANT 33: note = Any amino acid
  VARIANT 35: note = Any amino acid
  VARIANT 37: note = Any amino acid
  VARIANT 39: note = Any amino acid
  VARIANT 41: note = Any amino acid
  VARIANT 43: note = Any amino acid
  VARIANT 45: note = Any amino acid
  VARIANT 47: note = Any amino acid
  VARIANT 49: note = Any amino acid
  VARIANT 51: note = Any amino acid
  VARIANT 53: note = Any amino acid
  VARIANT 55: note = Any amino acid
  VARIANT 57: note = Any amino acid
  VARIANT 59: note = Any amino acid
  VARIANT 1..60: note = This sequence may encompass 1-30 repeating XP units
XPXPXPXPXPXPXPXPXPXPXPXPXPXPXPXPXPXPXPXPXPXPXPXPXPXPXPXPXPXP

SEQ ID NO: 332 - protein, 16 aa, synthetic construct
SGSETPGTSESATPES

SEQ ID NO: 333 - protein, 32 aa, synthetic construct
SGGSSGGSSGSETPGTSESATPESSGGSSGGS

SEQ ID NO: 334 - protein, 33 aa, synthetic construct
SGGSSGGSSGSETPGTSESATPESSGGSSGGSS

SEQ ID NO: 335 - protein, 10 aa, synthetic construct
SGGSGGSGGS

SEQ ID NO: 336 - protein, 4 aa, synthetic construct
SGGS

SEQ ID NO: 337 - protein, 60 aa, synthetic construct
SGGSSGGSSGSETPGTSESATPESAGSYPYDVPDYAGSAAPAAKKKKLDGSGSGGSSGGS

SEQ ID NO: 338 - protein, 34 aa, synthetic construct
SGGSSGGSKRTADGSEFESPKKKRKVSGGSSGGS

SEQ ID NO: 339 - skipped

SEQ ID NO: 340 - protein, 22 aa, synthetic construct
SGGSKRTADGSEFESPKKKRKV

SEQ ID NO: 341 - protein, 2116 aa, synthetic construct
KRTADGSEFESPKKKRKVDKKYSIGLDIGTNSVGWAVITDEYKVPSKKFKVLGNTDRHSIKKNLIGALLFDSGETAEATRLKRTARRRYTRRKNRICYLQEIFSNEMAKVDDSFFHRLEESFLVEEDKKHERHPIFGNIVDEVAYHEKYPTIYHLRKKLVDSTDKADLRLIYLALAHMIKFRGHFLIEGDLNPDNSDVDKLFIQLVQTYNQLFEENPINASGVDAKAILSARLSKSRRLENLIAQLPGEKKNGLFGNLIALSLGLTPNFKSNFDLAEDAKLQLSKDTYDDDLDNLLAQIGDQYADLFLAAKNLSDAILLSDILRVNTEITKAPLSASMIKRYDEHHQDLTLLKALVRQQLPEKYKEIFFDQSKNGYAGYIDGGASQEEFYKFIKPILEKMDGTEELLVKLNREDLLRKQRTFDNGSIPHQIHLGELHAILRRQEDFYPFLKDNREKIEKILTFRIPYYVGPLARGNSRFAWMTRKSEETITPWNFEEVVDKGASAQSFIERMTNFDKNLPNEKVLPKHSLLYEYFTVYNELTKVKYVTEGMRKPAFLSGEQKKAIVDLLFKTNRKVTVKQLKEDYFKKIECFDSVEISGVEDRFNASLGTYHDLLKIIKDKDFLDNEENEDILEDIVLTLTLFEDREMIEERLKTYAHLFDDKVMKQLKRRRYTGWGRLSRKLINGIRDKQSGKTILDFLKSDGFANRNFMQLIHDDSLTFKEDIQKAQVSGQGDSLHEHIANLAGSPAIKKGILQTVKVVDELVKVMGRHKPENIVIEMARENQTTQKGQKNSRERMKRIEEGIKELGSQILKEHPVENTQLQNEKLYLYYLQNGRDMYVDQELDINRLSDYDVDAIVPQSFLKDDSIDNKVLTRSDKNRGKSDNVPSEEVVKKMKNYWRQLLNAKLITQRKFDNLTKAERGGLSELDKAGFIKRQLVETRQITKHVAQILDSRMNTKYDENDKLIREVKVITLKSKLVSDFRKDFQFYKVREINNYHHAHDAYLNAVVGTALIKKYPKLESEFVYGDYKVYDVRKMIAKSEQEIGKATAKYFFYSNIMNFFKTEITLANGEIRKRPLIETNGETGEIVWDKGRDFATVRKVLSMPQVNIVKKTEVQTGGFSKESILPKRNSDKLIARKKDWDPKKYGGFDSPTVAYSVLVVAKVEKGKSKKLKSVKELLGITIMERSSFEKNPIDFLEAKGYKEVKKDLIIKLPKYSLFELENGRKRMLASAGELQKGNELALPSKYVNFLYLASHYEKLKGSPEDNEQKQLFVEQHKHYLDEIIEQISEFSKRVILADANLDKVLSAYNKHRDKPIREQAENIIHLFTLTNLGAPAAFKYFDTTIDRKRYTSTKEVLDATLIHQSITGLYETRIDLSQLGGDSGGSSGGSSGSETPGTSESATPESSGGSSGGSSTLNIEDEYRLHETSKEPDVSLGSTWLSDFPQAWAETGGMGLAVRQAPLIIPLKATSTPVSIKQYPMSQEARLGIKPHIQRLLDQGILVPCQSPWNTPLLPVKKPGTNDYRPVQDLREVNKRVEDIHPTVPNPYNLLSGLPPSHQWYTVLDLKDAFFCLRLHPTSQPLFAFEWRDPEMGISGQLTWTRLPQGFKNSPTLFNEALHRDLADFRIQHPDLILLQYVDDLLLAATSELDCQQGTRALLQTLGNLGYRASAKKAQICQKQVKYLGYLLKEGQRWLTEARKETVMGQPTPKTPRQLREFLGKAGFCRLFIPGFAEMAAPLYPLTKPGTLFNWGPDQQKAYQEIKQALLTAPALGLPDLTKPFELFVDEKQGYAKGVLTQKLGPWRRPVAYLSKKLDPVAAGWPPCLRMVAAIAVLTKDAGKLTMGQPLVILAPHAVEALVKQPPDRWLSNARMTHYQALLLDTDRVQFGPVVALNPATLLPLPEEGLQHNCLDILAEAHGTRPDLTDQPLPDADHTWYTDGSSLLQEGQRKAGAAVTTETEVIWAKALPAGTSAQRAELIALTQALKMAEGKKLNVYTDSRYAFATAHIHGEIYRRRGWLTSEGKEIKNKDEILALLKALFLPKRLSIIHCPGHQKGHSAEARGNRMADQAARKAAITETPDTSTLLIENSSPSGGSKRTADGSEFEPKKKRKV

SEQ ID NO: 342 - protein, 2131 aa, synthetic construct
MKRTADGSEFESPKKKRKVDKKYSIGLDIGTNSVGWAVITDEYKVPSKKFKVLGNTDRHSIKKNLIGALLFDSGETAEATRLKRTARRRYTRRKNRICYLQEIFSNEMAKVDDSFFHRLEESFLVEEDKKHERHPIFGNIVDEVAYHEKYPTIYHLRKKLVDSTDKADLRLIYLALAHMIKFRGHFLIEGDLNPDNSDVDKLFIQLVQTYNQLFEENPINASGVDAKAILSARLSKSRKLENLIAQLPGEKKNGLFGNLIALSLGLTPNFKSNFDLAEDAKLQLSKDTYDDDLDNLLAQIGDQYADLFLAAKNLSDAILLSDILRVNTEITKAPLSASMIKRYDEHHQDLTLLKALVRQQLPEKYKEIFFDQSKNGYAGYIDGGASQEEFYKFIKPILEKMDGTEELLVKLKREDLLRKQRTFDNGSIPHQIHLGELHAILRRQEDFYPFLKDNREKIEKILTFRIPYYVGPLARGNSRFAWMTRKSEETITPWNFEEVVDKGASAQSFIERMTNFDKNLPNEKVLPKHSLLYEYFTVYNELTKVKYVTEGMRKPAFLSGEQKKAIVDLLFKTNRKVTVKQLKEDYFKKIECFDSVEISGVEDRFNASLGTYHDLLKIIKDKDFLDNEENEDILEDIVLTLTLFEDREMIEERLKTYAHLFDDKVMKQLKRRRYTGWGRLSRKLINGIRDKQSGKTILDFLKSDGFANRNFMQLIHDDSLTFKEDIQKAQVSGQGDSLHEHIANLAGSPAIKKGILQTVKVVDELVKVMGRHKPENIVIEMARENQTTQKGQKNSRERMKRIEEGIKELGSQILKEHPVENTQLQNEKLYLYYLQNGRDMYVDQELDINRLSDYDVDAIVPQSFLKDDSIDNKVLTRSDKNRGKSDNVPSEEVVKKMKNYWRQLLNAKLITQRKFDNLTKAERGGLSELDKAGFIKRQLVETRQITKHVAQILDSRMNTKYDENDKLIREVKVITLKSKLVSDFRKDFQFYKVREINNYHHAHDAYLNAVVGTALIKKYPKLESEFVYGDYKVYDVRKMIAKSEQEIGKATAKYFFYSNIMNFFKTEITLANGEIRKRPLIETNGETGEIVWDKGRDFATVRKVLSMPQVNIVKKTEVQTGGFSKESILPKRNSDKLIARKKDWDPKKYGGFDSPTVAYSVLVVAKVEKGKSKKLKSVKELLGITIMERSSFEKNPIDFLEAKGYKEVKKDLIIKLPKYSLFELENGRKRMLASAGELQKGNELALPSKYVNFLYLASHYEKLKGSPEDNEQKQLFVEQHKHYLDEIIEQISEFSKRVILADANLDKVLSAYNKHRDKPIREQAENIIHLFTLTNLGAPAAFKYFDTTIDRKRYTSTKEVLDATLIHQSITGLYETRIDLSQLGGDSGGSSGGSKRTADGSEFESPKKKRKVSGGSSGGSTLNIEDEYRLHETSKEPDVSLGSTWLSDFPQAWAETGGMGLAVRQAPLIIPLKATSTPVSIKQYPMSQEARLGIKPHIQRLLDQGILVPCQSPWNTPLLPVKKPGTNDYRPVQDLREVNKRVEDIHPTVPNPYNLLSGLPPSHQWYTVLDLKDAFFCLRLHPTSQPLFAFEWRDPEMGISGQLTWTRLPQGFKNSPTLFNEALHRDLADFRIQHPDLILLQYVDDLLLAATSELDCQQGTRALLQTLGNLGYRASAKKAQICQKQVKYLGYLLKEGQRWLTEARKETVMGQPTPKTPRQLREFLGKAGFCRLFIPGFAEMAAPLYPLTKPGTLFNWGPDQQKAYQEIKQALLTAPALGLPDLTKPFELFVDEKQGYAKGVLTQKLGPWRRPVAYLSKKLDPVAAGWPPCLRMVAAIAVLTKDAGKLTMGQPLVILAPHAVEALVKQPPDRWLSNARMTHYQALLLDTDRVQFGPVVALNPATLLPLPEEGLQHNCLDILAEAHGTRPDLTDQPLPDADHTWYTDGSSLLQEGQRKAGAAVTTETEVIWAKALPAGTSAQRAELIALTQALKMAEGKKLNVYTDSRYAFATAHIHGEIYRRRGWLTSEGKEIKNKDEILALLKALFLPKRLSIIHCPGHQKGHSAEARGNRMADQAARKAAITETPDTSTLLIENSSPSGGSKRTADGSEFESPKKKRKVGSGPAAKRVKLD

SEQ ID NO: 343 - protein, 2130 aa, synthetic construct
KRTADGSEFESPKKKRKVDKKYSIGLDIGTNSVGWAVITDEYKVPSKKFKVLGNTDRHSIKKNLIGALLFDSGETAEATRLKRTARRRYTRRKNRICYLQEIFSNEMAKVDDSFFHRLEESFLVEEDKKHERHPIFGNIVDEVAYHEKYPTIYHLRKKLVDSTDKADLRLIYLALAHMIKFRGHFLIEGDLNPDNSDVDKLFIQLVQTYNQLFEENPINASGVDAKAILSARLSKSRKLENLIAQLPGEKKNGLFGNLIALSLGLTPNFKSNFDLAEDAKLQLSKDTYDDDLDNLLAQIGDQYADLFLAAKNLSDAILLSDILRVNTEITKAPLSASMIKRYDEHHQDLTLLKALVRQQLPEKYKEIFFDQSKNGYAGYIDGGASQEEFYKFIKPILEKMDGTEELLVKLKREDLLRKQRTFDNGSIPHQIHLGELHAILRRQEDFYPFLKDNREKIEKILTFRIPYYVGPLARGNSRFAWMTRKSEETITPWNFEEVVDKGASAQSFIERMTNFDKNLPNEKVLPKHSLLYEYFTVYNELTKVKYVTEGMRKPAFLSGEQKKAIVDLLFKTNRKVTVKQLKEDYFKKIECFDSVEISGVEDRFNASLGTYHDLLKIIKDKDFLDNEENEDILEDIVLTLTLFEDREMIEERLKTYAHLFDDKVMKQLKRRRYTGWGRLSRKLINGIRDKQSGKTILDFLKSDGFANRNFMQLIHDDSLTFKEDIQKAQVSGQGDSLHEHIANLAGSPAIKKGILQTVKVVDELVKVMGRHKPENIVIEMARENQTTQKGQKNSRERMKRIEEGIKELGSQILKEHPVENTQLQNEKLYLYYLQNGRDMYVDQELDINRLSDYDVDAIVPQSFLKDDSIDNKVLTRSDKNRGKSDNVPSEEVVKKMKNYWRQLLNAKLITQRKFDNLTKAERGGLSELDKAGFIKRQLVETRQITKHVAQILDSRMNTKYDENDKLIREVKVITLKSKLVSDFRKDFQFYKVREINNYHHAHDAYLNAVVGTALIKKYPKLESEFVYGDYKVYDVRKMIAKSEQEIGKATAKYFFYSNIMNFFKTEITLANGEIRKRPLIETNGETGEIVWDKGRDFATVRKVLSMPQVNIVKKTEVQTGGFSKESILPKRNSDKLIARKKDWDPKKYGGFDSPTVAYSVLVVAKVEKGKSKKLKSVKELLGITIMERSSFEKNPIDFLEAKGYKEVKKDLIIKLPKYSLFELENGRKRMLASAGELQKGNELALPSKYVNFLYLASHYEKLKGSPEDNEQKQLFVEQHKHYLDEIIEQISEFSKRVILADANLDKVLSAYNKHRDKPIREQAENIIHLFTLTNLGAPAAFKYFDTTIDRKRYTSTKEVLDATLIHQSITGLYETRIDLSQLGGDSGGSSGGSKRTADGSEFESPKKKRKVSGGSSGGSTLNIEDEYRLHETSKEPDVSLGSTWLSDFPQAWAETGGMGLAVRQAPLIIPLKATSTPVSIKQYPMSQEARLGIKPHIQRLLDQGILVPCQSPWNTPLLPVKKPGTNDYRPVQDLREVNKRVEDIHPTVPNPYNLLSGLPPSHQWYTVLDLKDAFFCLRLHPTSQPLFAFEWRDPEMGISGQLTWTRLPQGFKNSPTLFNEALHRDLADFRIQHPDLILLQYVDDLLLAATSELDCQQGTRALLQTLGNLGYRASAKKAQICQKQVKYLGYLLKEGQRWLTEARKETVMGQPTPKTPRQLREFLGKAGFCRLFIPGFAEMAAPLYPLTKPGTLFNWGPDQQKAYQEIKQALLTAPALGLPDLTKPFELFVDEKQGYAKGVLTQKLGPWRRPVAYLSKKLDPVAAGWPPCLRMVAAIAVLTKDAGKLTMGQPLVILAPHAVEALVKQPPDRWLSNARMTHYQALLLDTDRVQFGPVVALNPATLLPLPEEGLQHNCLDILAEAHGTRPDLTDQPLPDADHTWYTDGSSLLQEGQRKAGAAVTTETEVIWAKALPAGTSAQRAELIALTQALKMAEGKKLNVYTDSRYAFATAHIHGEIYRRRGWLTSEGKEIKNKDEILALLKALFLPKRLSIIHCPGHQKGHSAEARGNRMADQAARKAAITETPDTSTLLIENSSPSGGSKRTADGSEFESPKKKRKVGSGPAAKRVKLD

SEQ ID NO: 344 - skipped

SEQ ID NO: 345 - protein, 12 aa, synthetic construct
GSGPAAKRVKLD

SEQ ID NO: 346 - protein, 16 aa, synthetic construct
RQIKIWFQNRRMKWKK

SEQ ID NO: 347 - DNA, 13 bp, synthetic construct
  source 1..13: mol_type = other DNA
aaggaggaacgct

SEQ ID NO: 348 - DNA, 13 bp, synthetic construct
  source 1..13: mol_type = other DNA
aggaggaacgctc

SEQ ID NO: 349 - DNA, 19 bp, synthetic construct
  source 1..19: mol_type = other DNA
acataatgaatgtacaaat

SEQ ID NO: 350 - DNA, 20 bp, synthetic construct
  source 1..20: mol_type = other DNA
tacataatgaatgtacaaat

SEQ ID NO: 351 - DNA, 19 bp, synthetic construct
  source 1..19: mol_type = other DNA
actcattaatgcccttcgg

SEQ ID NO: 352 - DNA, 20 bp, synthetic construct
  source 1..20: mol_type = other DNA
aactcattaatgcccttcgg

SEQ ID NO: 353 - DNA, 20 bp, synthetic construct
  source 1..20: mol_type = other DNA
atgttttttctggagattta

SEQ ID NO: 354 - DNA, 19 bp, synthetic construct
  source 1..19: mol_type = other DNA
cataatgaatgtacaaatg

SEQ ID NO: 355 - DNA, 20 bp, synthetic construct
  source 1..20: mol_type = other DNA
acataatgaatgtacaaatg

SEQ ID NO: 356 - DNA, 20 bp, synthetic construct
  source 1..20: mol_type = other DNA
cctaaactcattaatgccct

SEQ ID NO: 357 - DNA, 21 bp, synthetic construct
  source 1..21: mol_type = other DNA
tcctaaactcattaatgccct

SEQ ID NO: 358 - DNA, 22 bp, synthetic construct
  source 1..22: mol_type = other DNA
atcctaaactcattaatgccct

SEQ ID NO: 359 - DNA, 19 bp, synthetic construct
  source 1..19: mol_type = other DNA
ccttacccctaaatataaa

SEQ ID NO: 360 - DNA, 20 bp, synthetic construct
  source 1..20: mol_type = other DNA
tccttacccctaaatataaa

SEQ ID NO: 361 - DNA, 19 bp, synthetic construct
  source 1..19: mol_type = other DNA
ccttcggcgatgttttttc

SEQ ID NO: 362 - DNA, 20 bp, synthetic construct
  source 1..20: mol_type = other DNA
cccttcggcgatgttttttc

SEQ ID NO: 363 - DNA, 19 bp, synthetic construct
  source 1..19: mol_type = other DNA
cttacccctaaatataaaa

SEQ ID NO: 364 - DNA, 20 bp, synthetic construct
  source 1..20: mol_type = other DNA
ccttacccctaaatataaaa

SEQ ID NO: 365 - DNA, 19 bp, synthetic construct
  source 1..19: mol_type = other DNA
cttcggcgatgttttttct

SEQ ID NO: 366 - DNA, 20 bp, synthetic construct
  source 1..20: mol_type = other DNA
ccttcggcgatgttttttct

SEQ ID NO: 367 - DNA, 20 bp, synthetic construct
  source 1..20: mol_type = other DNA
gcccttcggcgatgtttttt

SEQ ID NO: 368 - DNA, 21 bp, synthetic construct
  source 1..21: mol_type = other DNA
tgcccttcggcgatgtttttt

SEQ ID NO: 369 - DNA, 22 bp, synthetic construct
  source 1..22: mol_type = other DNA
atgcccttcggcgatgtttttt

SEQ ID NO: 370 - DNA, 19 bp, synthetic construct
  source 1..19: mol_type = other DNA
taaactcattaatgccctt

SEQ ID NO: 371 - DNA, 20 bp, synthetic construct
  source 1..20: mol_type = other DNA
ctaaactcattaatgccctt

SEQ ID NO: 372 - DNA, 20 bp, synthetic construct
  source 1..20: mol_type = other DNA
taaactcattaatgcccttc

SEQ ID NO: 373 - DNA, 19 bp, synthetic construct
  source 1..19: mol_type = other DNA
taaatataaaaagatttca

SEQ ID NO: 374 - DNA, 20 bp, synthetic construct
  source 1..20: mol_type = other DNA
ctaaatataaaaagatttca

SEQ ID NO: 375 - DNA, 19 bp, synthetic construct
  source 1..19: mol_type = other DNA
tacataatgaatgtacaaa

SEQ ID NO: 376 - DNA, 20 bp, synthetic construct
  source 1..20: mol_type = other DNA
atacataatgaatgtacaaa

SEQ ID NO: 377 - DNA, 20 bp, synthetic construct
  source 1..20: mol_type = other DNA
tcattaatgcccttcggcga

SEQ ID NO: 378 - DNA, 19 bp, synthetic construct
  source 1..19: mol_type = other DNA
tcggcgatgttttttctgg

SEQ ID NO: 379 - DNA, 20 bp, synthetic construct
  source 1..20: mol_type = other DNA
ttcggcgatgttttttctgg

SEQ ID NO: 380 - DNA, 19 bp, synthetic construct
  source 1..19: mol_type = other DNA
tctggagatttatgttcta

SEQ ID NO: 381 - DNA, 20 bp, synthetic construct
  source 1..20: mol_type = other DNA
ttctggagatttatgttcta

SEQ ID NO: 382 - DNA, 19 bp, synthetic construct
  source 1..19: mol_type = other DNA
ttcggcgatgttttttctg

SEQ ID NO: 383 - DNA, 20 bp, synthetic construct
  source 1..20: mol_type = other DNA
cttcggcgatgttttttctg

SEQ ID NO: 384 - DNA, 19 bp, synthetic construct
  source 1..19: mol_type = other DNA
atagttatgtgatacataa

SEQ ID NO: 385 - DNA, 20 bp, synthetic construct
  source 1..20: mol_type = other DNA
tatagttatgtgatacataa

SEQ ID NO: 386 - DNA, 19 bp, synthetic construct
  source 1..19: mol_type = other DNA
atccttacccctaaatata

SEQ ID NO: 387 - DNA, 20 bp, synthetic construct
  source 1..20: mol_type = other DNA
gatccttacccctaaatata

SEQ ID NO: 388 - DNA, 19 bp, synthetic construct
  source 1..19: mol_type = other DNA
ctggagatttatgttctat

SEQ ID NO: 389 - DNA, 20 bp, synthetic construct
  source 1..20: mol_type = other DNA
tctggagatttatgttctat

SEQ ID NO: 390 - DNA, 20 bp, synthetic construct
  source 1..20: mol_type = other DNA
gttatgtgatacataatgaa

SEQ ID NO: 391 - DNA, 19 bp, synthetic construct
  source 1..19: mol_type = other DNA
tccttacccctaaatataa

SEQ ID NO: 392 - DNA, 20 bp, synthetic construct
  source 1..20: mol_type = other DNA
atccttacccctaaatataa

SEQ ID NO: 393 - DNA, 21 bp, synthetic construct
  source 1..21: mol_type = other DNA
tttctggagatttatgttcta

SEQ ID NO: 394 - DNA, 22 bp, synthetic construct
  source 1..22: mol_type = other DNA
ttttctggagatttatgttcta

SEQ ID NO: 395 - DNA, 20 bp, synthetic construct
  source 1..20: mol_type = other DNA
tttctggagatttatgttct

SEQ ID NO: 396 - DNA, 21 bp, synthetic construct
  source 1..21: mol_type = other DNA
ttttctggagatttatgttct

SEQ ID NO: 397 - DNA, 22 bp, synthetic construct
  source 1..22: mol_type = other DNA
tttttctggagatttatgttct

SEQ ID NO: 398 - DNA, 20 bp, synthetic construct
  source 1..20: mol_type = other DNA
aaagagaaggcataagccta

SEQ ID NO: 399 - DNA, 20 bp, synthetic construct
  source 1..20: mol_type = other DNA
aagcctatgcctagataaat

SEQ ID NO: 400 - DNA, 19 bp, synthetic construct
  source 1..19: mol_type = other DNA
aaggcataagcctatgcct

SEQ ID NO: 401 - DNA, 20 bp, synthetic construct
  source 1..20: mol_type = other DNA
gaaggcataagcctatgcct

SEQ ID NO: 402 - DNA, 19 bp, synthetic construct
  source 1..19: mol_type = other DNA
atcatagcttcctatgacc

SEQ ID NO: 403 - DNA, 20 bp, synthetic construct
  source 1..20: mol_type = other DNA
aatcatagcttcctatgacc

SEQ ID NO: 404 - DNA, 19 bp, synthetic construct
  source 1..19: mol_type = other DNA
atgacccggataacaagga

SEQ ID NO: 405 - DNA, 20 bp, synthetic construct
  source 1..20: mol_type = other DNA
tatgacccggataacaagga

SEQ ID NO: 406 - DNA, 19 bp, synthetic construct
  source 1..19: mol_type = other DNA
atgcctagataaatcgcga

SEQ ID NO: 407 - DNA, 20 bp, synthetic construct
  source 1..20: mol_type = other DNA
tatgcctagataaatcgcga

SEQ ID NO: 408 - DNA, 19 bp, synthetic construct
  source 1..19: mol_type = other DNA
cacaataaagagaaggcat

SEQ ID NO: 409 - DNA, 20 bp, synthetic construct
  source 1..20: mol_type = other DNA
tcacaataaagagaaggcat

SEQ ID NO: 410 - DNA, 20 bp, synthetic construct
  source 1..20: mol_type = other DNA
cacaataaagagaaggcata

SEQ ID NO: 411 - DNA, 19 bp, synthetic construct
  source 1..19: mol_type = other DNA
cctagataaatcgcgatag

SEQ ID NO: 412 - DNA, 20 bp, synthetic construct
  source 1..20: mol_type = other DNA
gcctagataaatcgcgatag

SEQ ID NO: 413 - DNA, 21 bp, synthetic construct
  source 1..21: mol_type = other DNA
tgcctagataaatcgcgatag

SEQ ID NO: 414 - DNA, 22 bp, synthetic construct
  source 1..22: mol_type = other DNA
atgcctagataaatcgcgatag

SEQ ID NO: 415 - DNA, 19 bp, synthetic construct
  source 1..19: mol_type = other DNA
cctatgacccggataacaa

SEQ ID NO: 416 - DNA, 20 bp, synthetic construct
  source 1..20: mol_type = other DNA
tcctatgacccggataacaa

SEQ ID NO: 417 - DNA, 19 bp, synthetic construct
  source 1..19: mol_type = other DNA
cctatgcctagataaatcg

SEQ ID NO: 418 - DNA, 20 bp, synthetic construct
  source 1..20: mol_type = other DNA
gcctatgcctagataaatcg

SEQ ID NO: 419 - DNA, 19 bp, synthetic construct
  source 1..19: mol_type = other DNA
ctagataaatcgcgataga

SEQ ID NO: 420 - DNA, 20 bp, synthetic construct
  source 1..20: mol_type = other DNA
cctagataaatcgcgataga

SEQ ID NO: 421 - DNA, 20 bp, synthetic construct
  source 1..20: mol_type = other DNA
ctagataaatcgcgatagag

SEQ ID NO: 422 - DNA, 19 bp, synthetic construct
  source 1..19: mol_type = other DNA
ctatgacccggataacaag

SEQ ID NO: 423 - DNA, 20 bp, synthetic construct
  source 1..20: mol_type = other DNA
cctatgacccggataacaag

SEQ ID NO: 424 - DNA, 21 bp, synthetic construct
  source 1..21: mol_type = other DNA
tcctatgacccggataacaag

SEQ ID NO: 425 - DNA, 22 bp, synthetic construct
  source 1..22: mol_type = other DNA
ttcctatgacccggataacaag

SEQ ID NO: 426 - DNA, 19 bp, synthetic construct
  source 1..19: mol_type = other DNA
ctcttactgggaagaatca

SEQ ID NO: 427 - DNA, 20 bp, synthetic construct
  source 1..20: mol_type = other DNA
tctcttactgggaagaatca

SEQ ID NO: 428 - DNA, 20 bp, synthetic construct
  source 1..20: mol_type = other DNA
ctcttactgggaagaatcat

SEQ ID NO: 429 - DNA, 19 bp, synthetic construct
  source 1..19: mol_type = other DNA
gaagaatcatagcttccta

SEQ ID NO: 430 - DNA, 20 bp, synthetic construct
  source 1..20: mol_type = other DNA
ggaagaatcatagcttccta

SEQ ID NO: 431 - DNA, 19 bp, synthetic construct
  source 1..19: mol_type = other DNA
gaaggcataagcctatgcc

SEQ ID NO: 432 - DNA, 20 bp, synthetic construct
  source 1..20: mol_type = other DNA
agaaggcataagcctatgcc

SEQ ID NO: 433 - DNA, 20 bp, synthetic construct
  source 1..20: mol_type = other DNA
gaatcatagcttcctatgac

SEQ ID NO: 434 - DNA, 21 bp, synthetic construct
  source 1..21: mol_type = other DNA
agaatcatagcttcctatgac

SEQ ID NO: 435 - DNA, 22 bp, synthetic construct
  source 1..22: mol_type = other DNA
aagaatcatagcttcctatgac

SEQ ID NO: 436 - DNA, 19 bp, synthetic construct
  source 1..19: mol_type = other DNA
gcctagataaatcgcgata

SEQ ID NO: 437 - DNA, 20 bp, synthetic construct
  source 1..20: mol_type = other DNA
tgcctagataaatcgcgata

SEQ ID NO: 438 - DNA, 21 bp, synthetic construct
  source 1..21: mol_type = other DNA
atgcctagataaatcgcgata

SEQ ID NO: 439 - DNA, 22 bp, synthetic construct
  source 1..22: mol_type = other DNA
tatgcctagataaatcgcgata

SEQ ID NO: 440 - DNA, 19 bp, synthetic construct
  source 1..19: mol_type = other DNA
tatgacccggataacaagg

SEQ ID NO: 441 - DNA, 20 bp, synthetic construct
  source 1..20: mol_type = other DNA
ctatgacccggataacaagg

SEQ ID NO: 442 - DNA, 19 bp, synthetic construct
  source 1..19: mol_type = other DNA
tcatagcttcctatgaccc

SEQ ID NO: 443 - DNA, 20 bp, synthetic construct
  source 1..20: mol_type = other DNA
atcatagcttcctatgaccc

SEQ ID NO: 444 - DNA, 19 bp, synthetic construct
  source 1..19: mol_type = other DNA
tcctatgacccggataaca

SEQ ID NO: 445 - DNA, 20 bp, synthetic construct
  source 1..20: mol_type = other DNA
ttcctatgacccggataaca

SEQ ID NO: 446 - DNA, 19 bp, synthetic construct
  source 1..19: mol_type = other DNA
tgcctagataaatcgcgat

SEQ ID NO: 447 - DNA, 20 bp, synthetic construct
  source 1..20: mol_type = other DNA
atgcctagataaatcgcgat

SEQ ID NO: 448 - DNA, 20 bp, synthetic construct
  source 1..20: mol_type = other DNA
tgtcctcacaataaagagaa

SEQ ID NO: 449 - DNA, 19 bp, synthetic construct
  source 1..19: mol_type = other DNA
ttcctatgacccggataac

SEQ ID NO: 450 - DNA, 20 bp, synthetic construct
  source 1..20: mol_type = other DNA
cttcctatgacccggataac

SEQ ID NO: 451 - DNA, 21 bp, synthetic construct
  source 1..21: mol_type = other DNA
gcttcctatgacccggataac

SEQ ID NO: 452 - DNA, 22 bp, synthetic construct
  source 1..22: mol_type = other DNA
agcttcctatgacccggataac

SEQ ID NO: 453 - DNA, 21 bp, synthetic construct
  source 1..21: mol_type = other DNA
ctatgcctagataaatcgcga

SEQ ID NO: 454 - DNA, 22 bp, synthetic construct
  source 1..22: mol_type = other DNA
cctatgcctagataaatcgcga

SEQ ID NO: 455 - DNA, 19 bp, synthetic construct
  source 1..19: mol_type = other DNA
agctcagccttcttcttct

SEQ ID NO: 456 - DNA, 20 bp, synthetic construct
  source 1..20: mol_type = other DNA
tagctcagccttcttcttct

SEQ ID NO: 457 - DNA, 21 bp, synthetic construct
  source 1..21: mol_type = other DNA
atagctcagccttcttcttct

SEQ ID NO: 458 - DNA, 22 bp, synthetic construct
  source 1..22: mol_type = other DNA
aatagctcagccttcttcttct

SEQ ID NO: 459 - DNA, 20 bp, synthetic construct
  source 1..20: mol_type = other DNA
aggatgattcctttgattag

SEQ ID NO: 460 - DNA, 19 bp, synthetic construct
  source 1..19: mol_type = other DNA
attagtgcatagggaagca

SEQ ID NO: 461 - DNA, 20 bp, synthetic construct
  source 1..20: mol_type = other DNA
gattagtgcatagggaagca

SEQ ID NO: 462 - DNA, 19 bp, synthetic construct
  source 1..19: mol_type = other DNA
attcctttgattagtgcat

SEQ ID NO: 463 - DNA, 20 bp, synthetic construct
  source 1..20: mol_type = other DNA
gattcctttgattagtgcat

SEQ ID NO: 464 - DNA, 21 bp, synthetic construct
  source 1..21: mol_type = other DNA
tgattcctttgattagtgcat

SEQ ID NO: 465 - DNA, 22 bp, synthetic construct
  source 1..22: mol_type = other DNA
atgattcctttgattagtgcat

SEQ ID NO: 466 - DNA, 19 bp, synthetic construct
  source 1..19: mol_type = other DNA
cacagataaaaacaccaca

SEQ ID NO: 467 - DNA, 20 bp, synthetic construct
  source 1..20: mol_type = other DNA
gcacagataaaaacaccaca

SEQ ID NO: 468 - DNA, 19 bp, synthetic construct
  source 1..19: mol_type = other DNA
cctatgtgagatacttcaa

SEQ ID NO: 469 - DNA, 20 bp, synthetic construct
  source 1..20: mol_type = other DNA
gcctatgtgagatacttcaa

SEQ ID NO: 470 - DNA, 20 bp, synthetic construct
  source 1..20: mol_type = other DNA
cctatgtgagatacttcaat

SEQ ID NO: 471 - DNA, 19 bp, synthetic construct
  source 1..19: mol_type = other DNA
ctcagccttcttcttctca

SEQ ID NO: 472 - DNA, 20 bp, synthetic construct
  source 1..20: mol_type = other DNA
gctcagccttcttcttctca

SEQ ID NO: 473 - DNA, 20 bp, synthetic construct
  source 1..20: mol_type = other DNA
ctcagccttcttcttctcag

SEQ ID NO: 474 - DNA, 19 bp, synthetic construct
  source 1..19: mol_type = other DNA
cttcttctcagggttcttg

SEQ ID NO: 475 - DNA, 20 bp, synthetic construct
  source 1..20: mol_type = other DNA
tcttcttctcagggttcttg

SEQ ID NO: 476 - DNA, 20 bp, synthetic construct
  source 1..20: mol_type = other DNA
cttcttctcagggttcttgt

SEQ ID NO: 477 - DNA, 20 bp, synthetic construct
  source 1..20: mol_type = other DNA
cttcttcttctcagggttct

SEQ ID NO: 478 - DNA, 19 bp, synthetic construct
  source 1..19: mol_type = other DNA
ctttgattagtgcataggg

SEQ ID NO: 479 - DNA, 20 bp, synthetic construct
  source 1..20: mol_type = other DNA
cctttgattagtgcataggg

SEQ ID NO: 480 - DNA, 20 bp, synthetic construct
  source 1..20: mol_type = other DNA
ctttgattagtgcataggga

SEQ ID NO: 481 - DNA, 19 bp, synthetic construct
  source 1..19: mol_type = other DNA
gattcctttgattagtgca

SEQ ID NO: 482 - DNA, 20 bp, synthetic construct
  source 1..20: mol_type = other DNA
tgattcctttgattagtgca

SEQ ID NO: 483 - DNA, 21 bp, synthetic construct
  source 1..21: mol_type = other DNA
atgattcctttgattagtgca

SEQ ID NO: 484 - DNA, 22 bp, synthetic construct
  source 1..22: mol_type = other DNA
gatgattcctttgattagtgca

SEQ ID NO: 485 - DNA, 19 bp, synthetic construct
  source 1..19: mol_type = other DNA
gcacagataaaaacaccac

SEQ ID NO: 486 - DNA, 20 bp, synthetic construct
  source 1..20: mol_type = other DNA
agcacagataaaaacaccac

SEQ ID NO: 487 - DNA, 19 bp, synthetic construct
  source 1..19: mol_type = other DNA
gctcagccttcttcttctc

SEQ ID NO: 488 - DNA, 20 bp, synthetic construct
  source 1..20: mol_type = other DNA
agctcagccttcttcttctc

SEQ ID NO: 489 - DNA, 21 bp, synthetic construct
  source 1..21: mol_type = other DNA
tagctcagccttcttcttctc

SEQ ID NO: 490 - DNA, 22 bp, synthetic construct
  source 1..22: mol_type = other DNA
atagctcagccttcttcttctc

SEQ ID NO: 491 - DNA, 19 bp, synthetic construct
  source 1..19: mol_type = other DNA
ggaggatgattcctttgat

SEQ ID NO: 492 - DNA, 20 bp, synthetic construct
  source 1..20: mol_type = other DNA
cggaggatgattcctttgat

SEQ ID NO: 493 - DNA, 20 bp, synthetic construct
  source 1..20: mol_type = other DNA
ggaggatgattcctttgatt

SEQ ID NO: 494 - DNA, 19 bp, synthetic construct
  source 1..19: mol_type = other DNA
gtgagatacttcaatagct

SEQ ID NO: 495 - DNA, 20 bp, synthetic construct
  source 1..20: mol_type = other DNA
tgtgagatacttcaatagct

SEQ ID NO: 496 - DNA, 20 bp, synthetic construct
  source 1..20: mol_type = other DNA
gtgagatacttcaatagctc

SEQ ID NO: 497 - DNA, 19 bp, synthetic construct
  source 1..19: mol_type = other DNA
tcctttgattagtgcatag

SEQ ID NO: 498 - DNA, 20 bp, synthetic construct
  source 1..20: mol_type = other DNA
ttcctttgattagtgcatag

SEQ ID NO: 499 - DNA, 19 bp, synthetic construct
  source 1..19: mol_type = other DNA
ttagtgcatagggaagcac

SEQ ID NO: 500 - DNA, 20 bp, synthetic construct
  source 1..20: mol_type = other DNA
attagtgcatagggaagcac

SEQ ID NO: 501 - DNA, 19 bp, synthetic construct
  source 1..19: mol_type = other DNA
ttcctttgattagtgcata

SEQ ID NO: 502 - DNA, 20 bp, synthetic construct
  source 1..20: mol_type = other DNA
attcctttgattagtgcata

SEQ ID NO: 503 - DNA, 20 bp, synthetic construct
  source 1..20: mol_type = other DNA
ttcttcttctcagggttctt

SEQ ID NO: 504 - DNA, 21 bp, synthetic construct
  source 1..21: mol_type = other DNA
cttcttcttctcagggttctt

SEQ ID NO: 505 - DNA, 22 bp, synthetic construct
  source 1..22: mol_type = other DNA
ccttcttcttctcagggttctt

SEQ ID NO: 506 - DNA, 19 bp, synthetic construct
  source 1..19: mol_type = other DNA
aatcaaaggaatcatcctc

SEQ ID NO: 507 - DNA, 20 bp, synthetic construct
  source 1..20: mol_type = other DNA
taatcaaaggaatcatcctc

SEQ ID NO: 508 - DNA, 19 bp, synthetic construct
  source 1..19: mol_type = other DNA
acaatgcagaatgagatgg

SEQ ID NO: 509 - DNA, 20 bp, synthetic construct
  source 1..20: mol_type = other DNA
aacaatgcagaatgagatgg

SEQ ID NO: 510 - DNA, 20 bp, synthetic construct
  source 1..20: mol_type = other DNA
acaatgcagaatgagatggt

SEQ ID NO: 511 - DNA, 19 bp, synthetic construct
  source 1..19: mol_type = other DNA
agaacaatgcagaatgaga

SEQ ID NO: 512 - DNA, 20 bp, synthetic construct
  source 1..20: mol_type = other DNA
cagaacaatgcagaatgaga

SEQ ID NO: 513 - DNA, 20 bp, synthetic construct
  source 1..20: mol_type = other DNA
agaacaatgcagaatgagat

SEQ ID NO: 514 - DNA, 19 bp, synthetic construct
  source 1..19: mol_type = other DNA
atcaaaggaatcatcctct

SEQ ID NO: 515 - DNA, 20 bp, synthetic construct
  source 1..20: mol_type = other DNA
aatcaaaggaatcatcctct

SEQ ID NO: 516 - DNA, 19 bp, synthetic construct
  source 1..19: mol_type = other DNA
atgcagaatgagatggtgg

SEQ ID NO: 517 - DNA, 20 bp, synthetic construct
  source 1..20: mol_type = other DNA
aatgcagaatgagatggtgg

SEQ ID NO: 518 - DNA, 19 bp, synthetic construct
  source 1..19: mol_type = other DNA
atggtggtgaatattttcc

SEQ ID NO: 519 - DNA, 20 bp, synthetic construct
  source 1..20: mol_type = other DNA
gatggtggtgaatattttcc

SEQ ID NO: 520 - DNA, 20 bp, synthetic construct
  source 1..20: mol_type = other DNA
caatgcagaatgagatggtg

SEQ ID NO: 521 - DNA, 21 bp, synthetic construct
  source 1..21: mol_type = other DNA
acaatgcagaatgagatggtg

SEQ ID NO: 522 - DNA, 22 bp, synthetic construct
  source 1..22: mol_type = other DNA
aacaatgcagaatgagatggtg

SEQ ID NO: 523 - DNA, 19 bp, synthetic construct
  source 1..19: mol_type = other DNA
cgcagaacaatgcagaatg

SEQ ID NO: 524 - DNA, 20 bp, synthetic construct
  source 1..20: mol_type = other DNA
gcgcagaacaatgcagaatg

SEQ ID NO: 525 - DNA, 19 bp, synthetic construct
  source 1..19: mol_type = other DNA
cgccatgcgcagaacaatg

SEQ ID NO: 526 - DNA, 20 bp, synthetic construct
  source 1..20: mol_type = other DNA
ccgccatgcgcagaacaatg

SEQ ID NO: 527 - DNA, 21 bp, synthetic construct
  source 1..21: mol_type = other DNA
accgccatgcgcagaacaatg

SEQ ID NO: 528 - DNA, 22 bp, synthetic construct
  source 1..22: mol_type = other DNA
gaccgccatgcgcagaacaatg

SEQ ID NO: 529 - DNA, 20 bp, synthetic construct
  source 1..20: mol_type = other DNA
ctaatcaaaggaatcatcct

SEQ ID NO: 530 - DNA, 21 bp, synthetic construct
  source 1..21: mol_type = other DNA
actaatcaaaggaatcatcct

SEQ ID NO: 531 - DNA, 22 bp, synthetic construct
  source 1..22: mol_type = other DNA
cactaatcaaaggaatcatcct

SEQ ID NO: 532 - DNA, 19 bp, synthetic construct
  source 1..19: mol_type = other DNA
cttccctatgcactaatca

SEQ ID NO: 533 - DNA, 20 bp, synthetic construct
  source 1..20: mol_type = other DNA
gcttccctatgcactaatca

SEQ ID NO: 534 - DNA, 21 bp, synthetic construct
  source 1..21: mol_type = other DNA
tgcttccctatgcactaatca

SEQ ID NO: 535 - DNA, 22 bp, synthetic construct
  source 1..22: mol_type = other DNA
gtgcttccctatgcactaatca

SEQ ID NO: 536 - DNA, 20 bp, synthetic construct
  source 1..20: mol_type = other DNA
ctttgtggtgtttttatctg

SEQ ID NO: 537 - DNA, 20 bp, synthetic construct
  source 1..20: mol_type = other DNA
gaacaatgcagaatgagatg

SEQ ID NO: 538 - DNA, 21 bp, synthetic construct
  source 1..21: mol_type = other DNA
agaacaatgcagaatgagatg

SEQ ID NO: 539 - DNA, 22 bp, synthetic construct
  source 1..22: mol_type = other DNA
cagaacaatgcagaatgagatg

SEQ ID NO: 540 - DNA, 20 bp, synthetic construct
  source 1..20: mol_type = other DNA
gaccgccatgcgcagaacaa

SEQ ID NO: 541 - DNA, 19 bp, synthetic construct
  source 1..19: mol_type = other DNA
gatggtggtgaatattttc

SEQ ID NO: 542 - DNA, 20 bp, synthetic construct
  source 1..20: mol_type = other DNA
agatggtggtgaatattttc

SEQ ID NO: 543 - DNA, 20 bp, synthetic construct
  source 1..20: mol_type = other DNA
gcagaacaatgcagaatgag

SEQ ID NO: 544 - DNA, 21 bp, synthetic construct
  source 1..21: mol_type = other DNA
cgcagaacaatgcagaatgag

SEQ ID NO: 545 - DNA, 22 bp, synthetic construct
  source 1..22: mol_type = other DNA
gcgcagaacaatgcagaatgag

SEQ ID NO: 546 - DNA, 19 bp, synthetic construct
  source 1..19: mol_type = other DNA
gccatgcgcagaacaatgc

SEQ ID NO: 547 - DNA, 20 bp, synthetic construct
  source 1..20: mol_type = other DNA
cgccatgcgcagaacaatgc

SEQ ID NO: 548 - DNA, 19 bp, synthetic construct
  source 1..19: mol_type = other DNA
gcgcagaacaatgcagaat

SEQ ID NO: 549 - DNA, 20 bp, synthetic construct
  source 1..20: mol_type = other DNA
tgcgcagaacaatgcagaat

SEQ ID NO: 550 - DNA, 19 bp, synthetic construct
  source 1..19: mol_type = other DNA
ggtggtgaatattttccag

SEQ ID NO: 551 - DNA, 20 bp, synthetic construct
  source 1..20: mol_type = other DNA
tggtggtgaatattttccag

SEQ ID NO: 552 - DNA, 19 bp, synthetic construct
  source 1..19: mol_type = other DNA
gtggtgaatattttccaga

SEQ ID NO: 553 - DNA, 20 bp, synthetic construct
  source 1..20: mol_type = other DNA
ggtggtgaatattttccaga

SEQ ID NO: 554 - DNA, 19 bp, synthetic construct
  source 1..19: mol_type = other DNA
tccctatgcactaatcaaa

SEQ ID NO: 555 - DNA, 20 bp, synthetic construct
  source 1..20: mol_type = other DNA
ttccctatgcactaatcaaa

SEQ ID NO: 556 - DNA, 19 bp, synthetic construct
  source 1..19: mol_type = other DNA
tgcgcagaacaatgcagaa

SEQ ID NO: 557 - DNA, 20 bp, synthetic construct
  source 1..20: mol_type = other DNA
atgcgcagaacaatgcagaa

SEQ ID NO: 558 - DNA, 19 bp, synthetic construct
  source 1..19: mol_type = other DNA
tggtggtgaatattttcca

SEQ ID NO: 559 - DNA, 20 bp, synthetic construct
  source 1..20: mol_type = other DNA
atggtggtgaatattttcca

SEQ ID NO: 560 - DNA, 21 bp, synthetic construct
  source 1..21: mol_type = other DNA
gatggtggtgaatattttcca

SEQ ID NO: 561 - DNA, 22 bp, synthetic construct
  source 1..22: mol_type = other DNA
agatggtggtgaatattttcca

SEQ ID NO: 562 - DNA, 19 bp, synthetic construct
  source 1..19: mol_type = other DNA
ttccctatgcactaatcaa

SEQ ID NO: 563 - DNA, 20 bp, synthetic construct
  source 1..20: mol_type = other DNA
cttccctatgcactaatcaa

SEQ ID NO: 564 - DNA, 21 bp, synthetic construct
  source 1..21: mol_type = other DNA
gcttccctatgcactaatcaa

SEQ ID NO: 565 - DNA, 22 bp, synthetic construct
  source 1..22: mol_type = other DNA
tgcttccctatgcactaatcaa

SEQ ID NO: 566 - DNA, 20 bp, synthetic construct
  source 1..20: mol_type = other DNA
tttttatctgtgcttcccta

SEQ ID NO: 567 - DNA, 19 bp, synthetic construct
  source 1..19: mol_type = other DNA
aattgccgagtgaccgcca

SEQ ID NO: 568 - DNA, 20 bp, synthetic construct
  source 1..20: mol_type = other DNA
aaattgccgagtgaccgcca

SEQ ID NO: 569 - DNA, 21 bp, synthetic construct
  source 1..21: mol_type = other DNA
gaaattgccgagtgaccgcca

SEQ ID NO: 570 - DNA, 22 bp, synthetic construct
  source 1..22: mol_type = other DNA
ggaaattgccgagtgaccgcca

SEQ ID NO: 571 - DNA, 19 bp, synthetic construct
  source 1..19: mol_type = other DNA
acagcccagggaaattgcc

SEQ ID NO: 572 - DNA, 20 bp, synthetic construct
  source 1..20: mol_type = other DNA
tacagcccagggaaattgcc

SEQ ID NO: 573 - DNA, 20 bp, synthetic construct
  source 1..20: mol_type = other DNA
acagcccagggaaattgccg

SEQ ID NO: 574 - DNA, 20 bp, synthetic construct
  source 1..20: mol_type = other DNA
accaccatctcattctgcat

SEQ ID NO: 575 - DNA, 19 bp, synthetic construct
  source 1..19: mol_type = other DNA
accatgtttgtacagccca

SEQ ID NO: 576 - DNA, 20 bp, synthetic construct
  source 1..20: mol_type = other DNA
taccatgtttgtacagccca

SEQ ID NO: 577 - DNA, 19 bp, synthetic construct
  source 1..19: mol_type = other DNA
ataccatgtttgtacagcc

SEQ ID NO: 578 - DNA, 20 bp, synthetic construct
  source 1..20: mol_type = other DNA
cataccatgtttgtacagcc

SEQ ID NO: 579 - DNA, 21 bp, synthetic construct
  source 1..21: mol_type = other DNA
tcataccatgtttgtacagcc

SEQ ID NO: 580 - DNA, 22 bp, synthetic construct
  source 1..22: mol_type = other DNA
gtcataccatgtttgtacagcc

SEQ ID NO: 581 - DNA, 19 bp, synthetic construct
  source 1..19: mol_type = other DNA
attgccgagtgaccgccat

SEQ ID NO: 582 - DNA, 20 bp, synthetic construct
  source 1..20: mol_type = other DNA
aattgccgagtgaccgccat

SEQ ID NO: 583 - DNA, 20 bp, synthetic construct
  source 1..20: mol_type = other DNA
attgccgagtgaccgccatg

SEQ ID NO: 584 - DNA, 20 bp, synthetic construct
  source 1..20: mol_type = other DNA
cagggaaattgccgagtgac

SEQ ID NO: 585 - DNA, 20 bp, synthetic construct
  source 1..20: mol_type = other DNA
catctcattctgcattgttc

SEQ ID NO: 586 - DNA, 20 bp, synthetic construct
  source 1..20: mol_type = other DNA
cattctgcattgttctgccc

SEQ ID NO: 587 - DNA, 21 bp, synthetic construct
  source 1..21: mol_type = other DNA
tcattctgcattgttctgccc

SEQ ID NO: 588 - DNA, 22 bp, synthetic construct
  source 1..22: mol_type = other DNA
ctcattctgcattgttctgccc

SEQ ID NO: 589 - DNA, 19 bp, synthetic construct
  source 1..19: mol_type = other DNA
ccatgtttgtacagcccag

SEQ ID NO: 590 - DNA, 20 bp, synthetic construct
  source 1..20: mol_type = other DNA
accatgtttgtacagcccag

SEQ ID NO: 591 - DNA, 19 bp, synthetic construct
  source 1..19: mol_type = other DNA
ccgagtgaccgccatgggc

SEQ ID NO: 592 - DNA, 20 bp, synthetic construct
  source 1..20: mol_type = other DNA
gccgagtgaccgccatgggc

SEQ ID NO: 593 - DNA, 20 bp, synthetic construct
  source 1..20: mol_type = other DNA
gaaattgccgagtgaccgcc

SEQ ID NO: 594 - DNA, 21 bp, synthetic construct
  source 1..21: mol_type = other DNA
ggaaattgccgagtgaccgcc

SEQ ID NO: 595 - DNA, 22 bp, synthetic construct
  source 1..22: mol_type = other DNA
gggaaattgccgagtgaccgcc

SEQ ID NO: 596 - DNA, 19 bp, synthetic construct
  source 1..19: mol_type = other DNA
gagtcataccatgtttgta

SEQ ID NO: 597 - DNA, 20 bp, synthetic construct
  source 1..20: mol_type = other DNA
agagtcataccatgtttgta

SEQ ID NO: 598 - DNA, 20 bp, synthetic construct
  source 1..20: mol_type = other DNA
gagtcataccatgtttgtac

SEQ ID NO: 599 - DNA, 19 bp, synthetic construct
  source 1..19: mol_type = other DNA
gcccagggaaattgccgag

SEQ ID NO: 600 - DNA, 20 bp, synthetic construct
  source 1..20: mol_type = other DNA
agcccagggaaattgccgag

SEQ ID NO: 601 - DNA, 19 bp, synthetic construct
  source 1..19: mol_type = other DNA
gccgagtgaccgccatggg

SEQ ID NO: 602 - DNA, 20 bp, synthetic construct
  source 1..20: mol_type = other DNA
tgccgagtgaccgccatggg

SEQ ID NO: 603 - DNA, 19 bp, synthetic construct
  source 1..19: mol_type = other DNA
tacagcccagggaaattgc

SEQ ID NO: 604 - DNA, 20 bp, synthetic construct
  source 1..20: mol_type = other DNA
gtacagcccagggaaattgc

SEQ ID NO: 605 - DNA, 19 bp, synthetic construct
  source 1..19: mol_type = other DNA
taccatgtttgtacagccc

SEQ ID NO: 606 - DNA, 20 bp, synthetic construct
  source 1..20: mol_type = other DNA
ataccatgtttgtacagccc

SEQ ID NO: 607 - DNA, 21 bp, synthetic construct
  source 1..21: mol_type = other DNA
cataccatgtttgtacagccc

SEQ ID NO: 608 - DNA, 22 bp, synthetic construct
  source 1..22: mol_type = other DNA
tcataccatgtttgtacagccc

SEQ ID NO: 609 - DNA, 20 bp, synthetic construct
  source 1..20: mol_type = other DNA
tattcaccaccatctcattc

SEQ ID NO: 610 - DNA, 20 bp, synthetic construct
  source 1..20: mol_type = other DNA
tgtacagcccagggaaattg

SEQ ID NO: 611 - DNA, 21 bp, synthetic construct
  source 1..21: mol_type = other DNA
ttgtacagcccagggaaattg

SEQ ID NO: 612 - DNA, 22 bp, synthetic construct
  source 1..22: mol_type = other DNA
tttgtacagcccagggaaattg

SEQ ID NO: 613 - DNA, 19 bp, synthetic construct
  source 1..19: mol_type = other DNA
ttctgcattgttctgccca

SEQ ID NO: 614 - DNA, 20 bp, synthetic construct
  source 1..20: mol_type = other DNA
attctgcattgttctgccca

SEQ ID NO: 615 - DNA, 20 bp, synthetic construct
  source 1..20: mol_type = other DNA
tttgtacagcccagggaaat

SEQ ID NO: 616 - DNA, 20 bp, synthetic construct
  source 1..20: mol_type = other DNA
cattctgcattgttctgcac

SEQ ID NO: 617 - DNA, 21 bp, synthetic construct
  source 1..21: mol_type = other DNA
tcattctgcattgttctgcac

SEQ ID NO: 618 - DNA, 22 bp, synthetic construct
  source 1..22: mol_type = other DNA
ctcattctgcattgttctgcac

SEQ ID NO: 619 - DNA, 19 bp, synthetic construct
  source 1..19: mol_type = other DNA
ccgagtgaccgccatgtgc

SEQ ID NO: 620 - DNA, 20 bp, synthetic construct
  source 1..20: mol_type = other DNA
gccgagtgaccgccatgtgc

SEQ ID NO: 621 - DNA, 19 bp, synthetic construct
  source 1..19: mol_type = other DNA
gccgagtgaccgccatgtg

SEQ ID NO: 622 - DNA, 20 bp, synthetic construct
  source 1..20: mol_type = other DNA
tgccgagtgaccgccatgtg

SEQ ID NO: 623 - DNA, 19 bp, synthetic construct
  source 1..19: mol_type = other DNA
ttctgcattgttctgcaca

SEQ ID NO: 624 - DNA, 20 bp, synthetic construct
  source 1..20: mol_type = other DNA
attctgcattgttctgcaca

SEQ ID NO: 625 - DNA, 19 bp, synthetic construct
  source 1..19: mol_type = other DNA
aaagatattaatttcaaga

SEQ ID NO: 626 - DNA, 20 bp, synthetic construct
  source 1..20: mol_type = other DNA
gaaagatattaatttcaaga

SEQ ID NO: 627 - DNA, 20 bp, synthetic construct
  source 1..20: mol_type = other DNA
aacaaaagaactaccttgcc

SEQ ID NO: 628 - DNA, 19 bp, synthetic construct
  source 1..19: mol_type = other DNA
aagatattaatttcaagat

SEQ ID NO: 629 - DNA, 20 bp, synthetic construct
  source 1..20: mol_type = other DNA
aaagatattaatttcaagat

SEQ ID NO: 630 - DNA, 19 bp, synthetic construct
  source 1..19: mol_type = other DNA
actaccttgcctgctccag

SEQ ID NO: 631 - DNA, 20 bp, synthetic construct
  source 1..20: mol_type = other DNA
aactaccttgcctgctccag

SEQ ID NO: 632 - DNA, 19 bp, synthetic construct
  source 1..19: mol_type = other DNA
agaaagaggacagttgttg

SEQ ID NO: 633 - DNA, 20 bp, synthetic construct
  source 1..20: mol_type = other DNA
tagaaagaggacagttgttg

SEQ ID NO: 634 - DNA, 21 bp, synthetic construct
  source 1..21: mol_type = other DNA
atagaaagaggacagttgttg

SEQ ID NO: 635 - DNA, 22 bp, synthetic construct
  source 1..22: mol_type = other DNA
gatagaaagaggacagttgttg

SEQ ID NO: 636 - DNA, 19 bp, synthetic construct
  source 1..19: mol_type = other DNA
agaactaccttgcctgctc

SEQ ID NO: 637 - DNA, 20 bp, synthetic construct
  source 1..20: mol_type = other DNA
aagaactaccttgcctgctc

SEQ ID NO: 638 - DNA, 20 bp, synthetic construct
  source 1..20: mol_type = other DNA
agaactaccttgcctgctcc

SEQ ID NO: 639 - DNA, 20 bp, synthetic construct
  source 1..20: mol_type = other DNA
agatagaaagaggacagttg

SEQ ID NO: 640 - DNA, 21 bp, synthetic construct
  source 1..21: mol_type = other DNA
aagatagaaagaggacagttg

SEQ ID NO: 641 - DNA, 22 bp, synthetic construct
  source 1..22: mol_type = other DNA
caagatagaaagaggacagttg

SEQ ID NO: 642 - DNA, 19 bp, synthetic construct
  source 1..19: mol_type = other DNA
atagaaagaggacagttgt

SEQ ID NO: 643 - DNA, 20 bp, synthetic construct
  source 1..20: mol_type = other DNA
gatagaaagaggacagttgt

SEQ ID NO: 644 - DNA, 19 bp, synthetic construct
  source 1..19: mol_type = other DNA
atattaatttcaagataga

SEQ ID NO: 645 - DNA, 20 bp, synthetic construct
  source 1..20: mol_type = other DNA
gatattaatttcaagataga

SEQ ID NO: 646 - DNA, 19 bp, synthetic construct
  source 1..19: mol_type = other DNA
attaatttcaagatagaaa

SEQ ID NO: 647 - DNA, 20 bp, synthetic construct
  source 1..20: mol_type = other DNA
tattaatttcaagatagaaa

SEQ ID NO: 648 - DNA, 21 bp, synthetic construct
  source 1..21: mol_type = other DNA
atattaatttcaagatagaaa

SEQ ID NO: 649 - DNA, 22 bp, synthetic construct
  source 1..22: mol_type = other DNA
gatattaatttcaagatagaaa

SEQ ID NO: 650 - DNA, 20 bp, synthetic construct
  source 1..20: mol_type = other DNA
caagatagaaagaggacagt

SEQ ID NO: 651 - DNA, 19 bp, synthetic construct
  source 1..19: mol_type = other DNA
cctgaaagatattaatttc

SEQ ID NO: 652 - DNA, 20 bp, synthetic construct
  source 1..20: mol_type = other DNA
tcctgaaagatattaatttc

SEQ ID NO: 653 - DNA, 19 bp, synthetic construct
  source 1..19: mol_type = other DNA
ctaccttgcctgctccagt

SEQ ID NO: 654 - DNA, 20 bp, synthetic construct
  source 1..20: mol_type = other DNA
actaccttgcctgctccagt

SEQ ID NO: 655 - DNA, 19 bp, synthetic construct
  source 1..19: mol_type = other DNA
ctgaaagatattaatttca

SEQ ID NO: 656 - DNA, 20 bp, synthetic construct
  source 1..20: mol_type = other DNA
cctgaaagatattaatttca

SEQ ID NO: 657 - DNA, 19 bp, synthetic construct
  source 1..19: mol_type = other DNA
gaaagaggacagttgttgg

SEQ ID NO: 658 - DNA, 20 bp, synthetic construct
  source 1..20: mol_type = other DNA
agaaagaggacagttgttgg

SEQ ID NO: 659 - DNA, 20 bp, synthetic construct
  source 1..20: mol_type = other DNA
gaaagaggacagttgttgga

SEQ ID NO: 660 - DNA, 20 bp, synthetic construct
  source 1..20: mol_type = other DNA
gaactaccttgcctgctcca

SEQ ID NO: 661 - DNA, 21 bp, synthetic construct
  source 1..21: mol_type = other DNA
agaactaccttgcctgctcca

SEQ ID NO: 662 - DNA, 22 bp, synthetic construct
  source 1..22: mol_type = other DNA
aagaactaccttgcctgctcca

SEQ ID NO: 663 - DNA, 20 bp, synthetic construct
  source 1..20: mol_type = other DNA
gaagaacaaaagaactacct

SEQ ID NO: 664 - DNA, 19 bp, synthetic construct
  source 1..19: mol_type = other DNA
taatttcaagatagaaaga

SEQ ID NO: 665 - DNA, 20 bp, synthetic construct
  source 1..20: mol_type = other DNA
ttaatttcaagatagaaaga

SEQ ID NO: 666 - DNA, 19 bp, synthetic construct
  source 1..19: mol_type = other DNA
tagaaagaggacagttgtt

SEQ ID NO: 667 - DNA, 20 bp, synthetic construct
  source 1..20: mol_type = other DNA
atagaaagaggacagttgtt

SEQ ID NO: 668 - DNA, 19 bp, synthetic construct
  source 1..19: mol_type = other DNA
tattaatttcaagatagaa

SEQ ID NO: 669 - DNA, 20 bp, synthetic construct
  source 1..20: mol_type = other DNA
atattaatttcaagatagaa

SEQ ID NO: 670 - DNA, 19 bp, synthetic construct
  source 1..19: mol_type = other DNA
ttaatttcaagatagaaag

SEQ ID NO: 671 - DNA, 20 bp, synthetic construct
  source 1..20: mol_type = other DNA
attaatttcaagatagaaag

SEQ ID NO: 672 - DNA, 19 bp, synthetic construct
  source 1..19: mol_type = other DNA
ttgcctgctccagtggatc

SEQ ID NO: 673 - DNA, 20 bp, synthetic construct
  source 1..20: mol_type = other DNA
cttgcctgctccagtggatc

SEQ ID NO: 674 - DNA, 20 bp, synthetic construct
  source 1..20: mol_type = other DNA
ttgcctgctccagtggatcc

SEQ ID NO: 675 - DNA, 19 bp, synthetic construct
  source 1..19: mol_type = other DNA
tttcaagatagaaagagga

SEQ ID NO: 676 - DNA, 20 bp, synthetic construct
  source 1..20: mol_type = other DNA
atttcaagatagaaagagga

SEQ ID NO: 677 - DNA, 20 bp, synthetic construct
  source 1..20: mol_type = other DNA
tttcaagatagaaagaggac

SEQ ID NO: 678 - DNA, 19 bp, synthetic construct
  source 1..19: mol_type = other DNA
agttttcctggattatgcc

SEQ ID NO: 679 - DNA, 20 bp, synthetic construct
  source 1..20: mol_type = other DNA
cagttttcctggattatgcc

SEQ ID NO: 680 - DNA, 20 bp, synthetic construct
  source 1..20: mol_type = other DNA
agttttcctggattatgcct

SEQ ID NO: 681 - DNA, 19 bp, synthetic construct
  source 1..19: mol_type = other DNA
attatgcctggcaccatta

SEQ ID NO: 682 - DNA, 20 bp, synthetic construct
  source 1..20: mol_type = other DNA
gattatgcctggcaccatta

SEQ ID NO: 683 - DNA, 19 bp, synthetic construct
  source 1..19: mol_type = other DNA
attctgttctcagttttcc

SEQ ID NO: 684 - DNA, 20 bp, synthetic construct
  source 1..20: mol_type = other DNA
cattctgttctcagttttcc

SEQ ID NO: 685 - DNA, 20 bp, synthetic construct
  source 1..20: mol_type = other DNA
caccattaaagaaaatatct

SEQ ID NO: 686 - DNA, 21 bp, synthetic construct
  source 1..21: mol_type = other DNA
gcaccattaaagaaaatatct

SEQ ID NO: 687 - DNA, 22 bp, synthetic construct
  source 1..22: mol_type = other DNA
ggcaccattaaagaaaatatct

SEQ ID NO: 688 - DNA, 19 bp, synthetic construct
  source 1..19: mol_type = other DNA
ccattaaagaaaatatctt

SEQ ID NO: 689 - DNA, 20 bp, synthetic construct
  source 1..20: mol_type = other DNA
accattaaagaaaatatctt

SEQ ID NO: 690 - DNA, 20 bp, synthetic construct
  source 1..20: mol_type = other DNA
ccattaaagaaaatatcttt

SEQ ID NO: 691 - DNA, 19 bp, synthetic construct
  source 1..19: mol_type = other DNA
ctgtatctatattcatcat

SEQ ID NO: 692 - DNA, 20 bp, synthetic construct
  source 1..20: mol_type = other DNA
tctgtatctatattcatcat

SEQ ID NO: 693 - DNA, 20 bp, synthetic construct
  source 1..20: mol_type = other DNA
gcatgctttgatgacgcttc

SEQ ID NO: 694 - DNA, 20 bp, synthetic construct
  source 1..20: mol_type = other DNA
tcagttttcctggattatgc

SEQ ID NO: 695 - DNA, 21 bp, synthetic construct
  source 1..21: mol_type = other DNA
ctcagttttcctggattatgc

SEQ ID NO: 696 - DNA, 22 bp, synthetic construct
  source 1..22: mol_type = other DNA
tctcagttttcctggattatgc

SEQ ID NO: 697 - DNA, 19 bp, synthetic construct
  source 1..19: mol_type = other DNA
tcatcataggaaacaccaa

SEQ ID NO: 698 - DNA, 20 bp, synthetic construct
  source 1..20: mol_type = other DNA
ttcatcataggaaacaccaa

SEQ ID NO: 699 - DNA, 19 bp, synthetic construct
  source 1..19: mol_type = other DNA
tctgtatctatattcatca

SEQ ID NO: 700 - DNA, 20 bp, synthetic construct
  source 1..20: mol_type = other DNA
ttctgtatctatattcatca

SEQ ID NO: 701 - DNA, 21 bp, synthetic construct
  source 1..21: mol_type = other DNA
cttctgtatctatattcatca

SEQ ID NO: 702 - DNA, 22 bp, synthetic construct
  source 1..22: mol_type = other DNA
gcttctgtatctatattcatca

SEQ ID NO: 703 - DNA, 19 bp, synthetic construct
  source 1..19: mol_type = other DNA
tgtatctatattcatcata

SEQ ID NO: 704 - DNA, 20 bp, synthetic construct
  source 1..20: mol_type = other DNA
ctgtatctatattcatcata

SEQ ID NO: 705 - DNA, 19 bp, synthetic construct
  source 1..19: mol_type = other DNA
ttatgcctggcaccattaa

SEQ ID NO: 706 - DNA, 20 bp, synthetic construct
  source 1..20: mol_type = other DNA
attatgcctggcaccattaa

SEQ ID NO: 707 - DNA, 19 bp, synthetic construct
  source 1..19: mol_type = other DNA
ttcatcataggaaacacca

SEQ ID NO: 708 - DNA, 20 bp, synthetic construct
  source 1..20: mol_type = other DNA
attcatcataggaaacacca

SEQ ID NO: 709 - DNA, 20 bp, synthetic construct
  source 1..20: mol_type = other DNA
ttctcagttttcctggatta

SEQ ID NO: 710 - DNA, 19 bp, synthetic construct
  source 1..19: mol_type = other DNA
ttctgttctcagttttcct

SEQ ID NO: 711 - DNA, 20 bp, synthetic construct
  source 1..20: mol_type = other DNA
attctgttctcagttttcct

SEQ ID NO: 712 - DNA, 20 bp, synthetic construct
  source 1..20: mol_type = other DNA
attaaagaaaatatcattgg

SEQ ID NO: 713 - DNA, 20 bp, synthetic construct
  source 1..20: mol_type = other DNA
caccattaaagaaaatatca

SEQ ID NO: 714 - DNA, 21 bp, synthetic construct
  source 1..21: mol_type = other DNA
gcaccattaaagaaaatatca

SEQ ID NO: 715 - DNA, 22 bp, synthetic construct
  source 1..22: mol_type = other DNA
ggcaccattaaagaaaatatca

SEQ ID NO: 716 - DNA, 19 bp, synthetic construct
  source 1..19: mol_type = other DNA
ccattaaagaaaatatcat

SEQ ID NO: 717 - DNA, 20 bp, synthetic construct
  source 1..20: mol_type = other DNA
accattaaagaaaatatcat

SEQ ID NO: 718 - DNA, 20 bp, synthetic construct
  source 1..20: mol_type = other DNA
ccattaaagaaaatatcatt

SEQ ID NO: 719 - DNA, 20 bp, synthetic construct
  source 1..20: mol_type = other DNA
cattaaagaaaatatcatct

SEQ ID NO: 720 - DNA, 21 bp, synthetic construct
  source 1..21: mol_type = other DNA
ccattaaagaaaatatcatct

SEQ ID NO: 721 - DNA, 22 bp, synthetic construct
  source 1..22: mol_type = other DNA
accattaaagaaaatatcatct

SEQ ID NO: 722 - DNA, 20 bp, synthetic construct
  source 1..20: mol_type = other DNA
ccattaaagaaaatatcatc

SEQ ID NO: 723 - DNA, 20 bp, synthetic construct
  source 1..20: mol_type = other DNA
tagttggcatgctttgatga

SEQ ID NO: 724 - DNA, 19 bp, synthetic construct
  source 1..19: mol_type = other DNA
tcatcataggaaacaccac

SEQ ID NO: 725 - DNA, 20 bp, synthetic construct
  source 1..20: mol_type = other DNA
ttcatcataggaaacaccac

SEQ ID NO: 726 - DNA, 19 bp, synthetic construct
  source 1..19: mol_type = other DNA
ttaaagaaaatatcatctg

SEQ ID NO: 727 - DNA, 20 bp, synthetic construct
  source 1..20: mol_type = other DNA
attaaagaaaatatcatctg

SEQ ID NO: 728 - DNA, 20 bp, synthetic construct
  source 1..20: mol_type = other DNA
ttaaagaaaatatcatctgt

SEQ ID NO: 729 - DNA, 19 bp, synthetic construct
  source 1..19: mol_type = other DNA
aaagacaatatagttcttt

SEQ ID NO: 730 - DNA, 20 bp, synthetic construct
  source 1..20: mol_type = other DNA
gaaagacaatatagttcttt

SEQ ID NO: 731 - DNA, 19 bp, synthetic construct
  source 1..19: mol_type = other DNA
aagacaatatagttctttg

SEQ ID NO: 732 - DNA, 20 bp, synthetic construct
  source 1..20: mol_type = other DNA
aaagacaatatagttctttg

SEQ ID NO: 733 - DNA, 19 bp, synthetic construct
  source 1..19: mol_type = other DNA
aggacatctccaagtttgc

SEQ ID NO: 734 - DNA, 20 bp, synthetic construct
  source 1..20: mol_type = other DNA
taggacatctccaagtttgc

SEQ ID NO: 735 - DNA, 19 bp, synthetic construct
  source 1..19: mol_type = other DNA
atctccaagtttgcagaga

SEQ ID NO: 736 - DNA, 20 bp, synthetic construct
  source 1..20: mol_type = other DNA
catctccaagtttgcagaga

SEQ ID NO: 737 - DNA, 19 bp, synthetic construct
  source 1..19: mol_type = other DNA
cgttgacctccactcagtg

SEQ ID NO: 738 - DNA, 20 bp, synthetic construct
  source 1..20: mol_type = other DNA
tcgttgacctccactcagtg

SEQ ID NO: 739 - DNA, 19 bp, synthetic construct
  source 1..19: mol_type = other DNA
gaaagacaatatagttctt

SEQ ID NO: 740 - DNA, 20 bp, synthetic construct
  source 1..20: mol_type = other DNA
agaaagacaatatagttctt

SEQ ID NO: 741 - DNA, 19 bp, synthetic construct
  source 1..19: mol_type = other DNA
gacatctccaagtttgcag

SEQ ID NO: 742 - DNA, 20 bp, synthetic construct
  source 1..20: mol_type = other DNA
ggacatctccaagtttgcag

SEQ ID NO: 743 - DNA, 20 bp, synthetic construct
  source 1..20: mol_type = other DNA
gctcgttgacctccactcag

SEQ ID NO: 744 - DNA, 19 bp, synthetic construct
  source 1..19: mol_type = other DNA
ggacatctccaagtttgca

SEQ ID NO: 745 - DNA, 20 bp, synthetic construct
  source 1..20: mol_type = other DNA
aggacatctccaagtttgca

SEQ ID NO: 746 - DNA, 19 bp, synthetic construct
  source 1..19: mol_type = other DNA
gtgtgattccaccttctca

SEQ ID NO: 747 - DNA, 20 bp, synthetic construct
  source 1..20: mol_type = other DNA
agtgtgattccaccttctca

SEQ ID NO: 748 - DNA, 19 bp, synthetic construct
  source 1..19: mol_type = other DNA
taaagaaattcttgctcgt

SEQ ID NO: 749 - DNA, 20 bp, synthetic construct
  source 1..20: mol_type = other DNA
ctaaagaaattcttgctcgt

SEQ ID NO: 750 - DNA, 20 bp, synthetic construct
  source 1..20: mol_type = other DNA
taataggacatctccaagtt

SEQ ID NO: 751 - DNA, 19 bp, synthetic construct
  source 1..19: mol_type = other DNA
taggacatctccaagtttg

SEQ ID NO: 752 - DNA, 20 bp, synthetic construct
  source 1..20: mol_type = other DNA
ataggacatctccaagtttg

SEQ ID NO: 753 - DNA, 19 bp, synthetic construct
  source 1..19: mol_type = other DNA
tctccaagtttgcagagaa

SEQ ID NO: 754 - DNA, 20 bp, synthetic construct
  source 1..20: mol_type = other DNA
atctccaagtttgcagagaa

SEQ ID NO: 755 - DNA, 19 bp, synthetic construct
  source 1..19: mol_type = other DNA
tgtgattccaccttctcaa

SEQ ID NO: 756 - DNA, 20 bp, synthetic construct
  source 1..20: mol_type = other DNA
gtgtgattccaccttctcaa

SEQ ID NO: 757 - DNA, 20 bp, synthetic construct
  source 1..20: mol_type = other DNA
ttgctaaagaaattcttgct

SEQ ID NO: 758 - DNA, 19 bp, synthetic construct
  source 1..19: mol_type = other DNA
ttgctcgttgacctccact

SEQ ID NO: 759 - DNA, 20 bp, synthetic construct
  source 1..20: mol_type = other DNA
cttgctcgttgacctccact

SEQ ID NO: 760 - DNA, 20 bp, synthetic construct
  source 1..20: mol_type = other DNA
ttgctcgttgacctccactc

SEQ ID NO: 761 - DNA, 19 bp, synthetic construct
  source 1..19: mol_type = other DNA
ttggtaataggacatctcc

SEQ ID NO: 762 - DNA, 20 bp, synthetic construct
  source 1..20: mol_type = other DNA
tttggtaataggacatctcc

SEQ ID NO: 763 - DNA, 20 bp, synthetic construct
  source 1..20: mol_type = other DNA
ttggtaataggacatctcca

SEQ ID NO: 764 - DNA, 19 bp, synthetic construct
  source 1..19: mol_type = other DNA
tttgcagagaaagacaata

SEQ ID NO: 765 - DNA, 20 bp, synthetic construct
  source 1..20: mol_type = other DNA
gtttgcagagaaagacaata

SEQ ID NO: 766 - DNA, 20 bp, synthetic construct
  source 1..20: mol_type = other DNA
tttgcagagaaagacaatat

SEQ ID NO: 767 - DNA, 19 bp, synthetic construct
  source 1..19: mol_type = other DNA
aaagacaatatagttcttg

SEQ ID NO: 768 - DNA, 20 bp, synthetic construct
  source 1..20: mol_type = other DNA
gaaagacaatatagttcttg

SEQ ID NO: 769 - DNA, 19 bp, synthetic construct
  source 1..19: mol_type = other DNA
aagacaatatagttcttgg

SEQ ID NO: 770 - DNA, 20 bp, synthetic construct
  source 1..20: mol_type = other DNA
aaagacaatatagttcttgg

SEQ ID NO: 771 - DNA, 19 bp, synthetic construct
  source 1..19: mol_type = other DNA
aaggtggaatcacactgcg

SEQ ID NO: 772 - DNA, 20 bp, synthetic construct
  source 1..20: mol_type = other DNA
gaaggtggaatcacactgcg

SEQ ID NO: 773 - DNA, 19 bp, synthetic construct
  source 1..19: mol_type = other DNA
acaatatagttcttggaga

SEQ ID NO: 774 - DNA, 20 bp, synthetic construct
  source 1..20: mol_type = other DNA
gacaatatagttcttggaga

SEQ ID NO: 775 - DNA, 20 bp, synthetic construct
  source 1..20: mol_type = other DNA
acaatatagttcttggagaa

SEQ ID NO: 776 - DNA, 19 bp, synthetic construct
  source 1..19: mol_type = other DNA
agaaagacaatatagttct

SEQ ID NO: 777 - DNA, 20 bp, synthetic construct
  source 1..20: mol_type = other DNA
gagaaagacaatatagttct

SEQ ID NO: 778 - DNA, 20 bp, synthetic construct
  source 1..20: mol_type = other DNA
agaaggtggaatcacactgc

SEQ ID NO: 779 - DNA, 21 bp, synthetic construct
  source 1..21: mol_type = other DNA
gagaaggtggaatcacactgc

SEQ ID NO: 780 - DNA, 22 bp, synthetic construct
  source 1..22: mol_type = other DNA
ggagaaggtggaatcacactgc

SEQ ID NO: 781 - DNA, 20 bp, synthetic construct
  source 1..20: mol_type = other DNA
agagaaagacaatatagttc

SEQ ID NO: 782 - DNA, 21 bp, synthetic construct
  source 1..21: mol_type = other DNA
cagagaaagacaatatagttc

SEQ ID NO: 783 - DNA, 22 bp, synthetic construct
  source 1..22: mol_type = other DNA
gcagagaaagacaatatagttc

SEQ ID NO: 784 - DNA, 19 bp, synthetic construct
  source 1..19: mol_type = other DNA
aggtggaatcacactgcgt

SEQ ID NO: 785 - DNA, 20 bp, synthetic construct
  source 1..20: mol_type = other DNA
aaggtggaatcacactgcgt

SEQ ID NO: 786 - DNA, 19 bp, synthetic construct
  source 1..19: mol_type = other DNA
atatagttcttggagaagg

SEQ ID NO: 787 - DNA, 20 bp, synthetic construct
  source 1..20: mol_type = other DNA
aatatagttcttggagaagg

SEQ ID NO: 788 - DNA, 21 bp, synthetic construct
  source 1..21: mol_type = other DNA
caatatagttcttggagaagg

SEQ ID NO: 789 - DNA, 22 bp, synthetic construct
  source 1..22: mol_type = other DNA
acaatatagttcttggagaagg

SEQ ID NO: 790 - DNA, 20 bp, synthetic construct
  source 1..20: mol_type = other DNA
caataattagttattcacct

SEQ ID NO: 791 - DNA, 20 bp, synthetic construct
  source 1..20: mol_type = other DNA
caatatagttcttggagaag

SEQ ID NO: 792 - DNA, 21 bp, synthetic construct
  source 1..21: mol_type = other DNA
acaatatagttcttggagaag

SEQ ID NO: 793 - DNA, 22 bp, synthetic construct
  source 1..22: mol_type = other DNA
gacaatatagttcttggagaag

SEQ ID NO: 794 - DNA, 20 bp, synthetic construct
  source 1..20: mol_type = other DNA
caccttgctaaagaaattct

SEQ ID NO: 795 - DNA, 19 bp, synthetic construct
  source 1..19: mol_type = other DNA
gacaatatagttcttggag

SEQ ID NO: 796 - DNA, 20 bp, synthetic construct
  source 1..20: mol_type = other DNA
agacaatatagttcttggag

SEQ ID NO: 797 - DNA, 21 bp, synthetic construct
  source 1..21: mol_type = other DNA
aagacaatatagttcttggag

SEQ ID NO: 798 - DNA, 22 bp, synthetic construct
  source 1..22: mol_type = other DNA
aaagacaatatagttcttggag

SEQ ID NO: 799 - DNA, 20 bp, synthetic construct
  source 1..20: mol_type = other DNA
gagaaggtggaatcacactg

SEQ ID NO: 800 - DNA, 19 bp, synthetic construct
  source 1..19: mol_type = other DNA
tagttattcaccttgctaa

SEQ ID NO: 801 - DNA, 20 bp, synthetic construct
  source 1..20: mol_type = other DNA
ttagttattcaccttgctaa

SEQ ID NO: 802 - DNA, 19 bp, synthetic construct
  source 1..19: mol_type = other DNA
tatagttcttggagaaggt

SEQ ID NO: 803 - DNA, 20 bp, synthetic construct
  source 1..20: mol_type = other DNA
atatagttcttggagaaggt

SEQ ID NO: 804 - DNA, 20 bp, synthetic construct
  source 1..20: mol_type = other DNA
tggagaaggtggaatcacac

SEQ ID NO: 805 - DNA, 19 bp, synthetic construct
  source 1..19: mol_type = other DNA
ttagttattcaccttgcta

SEQ ID NO: 806 - DNA, 20 bp, synthetic construct
  source 1..20: mol_type = other DNA
attagttattcaccttgcta

SEQ ID NO: 807 - DNA, 20 bp, synthetic construct
  source 1..20: mol_type = other DNA
ttcttgctcgttgacctcca

SEQ ID NO: 808 - DNA, 19 bp, synthetic construct
  source 1..19: mol_type = other DNA
ttgctcgttgacctccacg

SEQ ID NO: 809 - DNA, 20 bp, synthetic construct
  source 1..20: mol_type = other DNA
cttgctcgttgacctccacg

SEQ ID NO: 810 - DNA, 20 bp, synthetic construct
  source 1..20: mol_type = other DNA
ttgctcgttgacctccacgc

SEQ ID NO: 811 - DNA, 19 bp, synthetic construct
  source 1..19: mol_type = other DNA
aaggtggaatcacactgaa

SEQ ID NO: 812 - DNA, 20 bp, synthetic construct
  source 1..20: mol_type = other DNA
gaaggtggaatcacactgaa

SEQ ID NO: 813 - DNA, 20 bp, synthetic construct
  source 1..20: mol_type = other DNA
agaaggtggaatcacactga

SEQ ID NO: 814 - DNA, 21 bp, synthetic construct
  source 1..21: mol_type = other DNA
gagaaggtggaatcacactga

SEQ ID NO: 815 - DNA, 22 bp, synthetic construct
  source 1..22: mol_type = other DNA
ggagaaggtggaatcacactga

SEQ ID NO: 816 - DNA, 19 bp, synthetic construct
  source 1..19: mol_type = other DNA
aggtggaatcacactgaat

SEQ ID NO: 817 - DNA, 20 bp, synthetic construct
  source 1..20: mol_type = other DNA
aaggtggaatcacactgaat

SEQ ID NO: 818 - DNA, 19 bp, synthetic construct
  source 1..19: mol_type = other DNA
ggagaaggtggaatcacac

SEQ ID NO: 819 - DNA, 19 bp, synthetic construct
  source 1..19: mol_type = other DNA
ggtggaatcacactgaatg

SEQ ID NO: 820 - DNA, 20 bp, synthetic construct
  source 1..20: mol_type = other DNA
aggtggaatcacactgaatg

SEQ ID NO: 821 - DNA, 21 bp, synthetic construct
  source 1..21: mol_type = other DNA
aaggtggaatcacactgaatg

SEQ ID NO: 822 - DNA, 22 bp, synthetic construct
  source 1..22: mol_type = other DNA
gaaggtggaatcacactgaatg

SEQ ID NO: 823 - DNA, 19 bp, synthetic construct
  source 1..19: mol_type = other DNA
ttgctcgttgacctccatt

SEQ ID NO: 824 - DNA, 20 bp, synthetic construct
  source 1..20: mol_type = other DNA
cttgctcgttgacctccatt

SEQ ID NO: 825 - DNA, 20 bp, synthetic construct
  source 1..20: mol_type = other DNA
ttgctcgttgacctccattc

SEQ ID NO: 826 - DNA, 20 bp, synthetic construct
  source 1..20: mol_type = other DNA
ttggagaaggtggaatcaca

SEQ ID NO: 827 - DNA, 21 bp, synthetic construct
  source 1..21: mol_type = other DNA
cttggagaaggtggaatcaca

SEQ ID NO: 828 - DNA, 22 bp, synthetic construct
  source 1..22: mol_type = other DNA
tcttggagaaggtggaatcaca

SEQ ID NO: 829 - DNA, 19 bp, synthetic construct
  source 1..19: mol_type = other DNA
aaggtggaatcacactgag

SEQ ID NO: 830 - DNA, 20 bp, synthetic construct
  source 1..20: mol_type = other DNA
gaaggtggaatcacactgag

SEQ ID NO: 831 - DNA, 19 bp, synthetic construct
  source 1..19: mol_type = other DNA
agaaggtggaatcacactg

SEQ ID NO: 832 - DNA, 21 bp, synthetic construct
  source 1..21: mol_type = other DNA
ggagaaggtggaatcacactg

SEQ ID NO: 833 - DNA, 22 bp, synthetic construct
  source 1..22: mol_type = other DNA
tggagaaggtggaatcacactg

SEQ ID NO: 834 - DNA, 19 bp, synthetic construct
  source 1..19: mol_type = other DNA
aggtggaatcacactgagg

SEQ ID NO: 835 - DNA, 20 bp, synthetic construct
  source 1..20: mol_type = other DNA
aaggtggaatcacactgagg

SEQ ID NO: 836 - DNA, 19 bp, synthetic construct
  source 1..19: mol_type = other DNA
gaaggtggaatcacactga

SEQ ID NO: 837 - DNA, 19 bp, synthetic construct
  source 1..19: mol_type = other DNA
gagaaggtggaatcacact

SEQ ID NO: 838 - DNA, 20 bp, synthetic construct
  source 1..20: mol_type = other DNA
ggagaaggtggaatcacact

SEQ ID NO: 839 - DNA, 21 bp, synthetic construct
  source 1..21: mol_type = other DNA
tggagaaggtggaatcacact

SEQ ID NO: 840 - DNA, 22 bp, synthetic construct
  source 1..22: mol_type = other DNA
ttggagaaggtggaatcacact

SEQ ID NO: 841 - DNA, 19 bp, synthetic construct
  source 1..19: mol_type = other DNA
ggtggaatcacactgaggg

SEQ ID NO: 842 - DNA, 20 bp, synthetic construct
  source 1..20: mol_type = other DNA
aggtggaatcacactgaggg

SEQ ID NO: 843 - DNA, 21 bp, synthetic construct
  source 1..21: mol_type = other DNA
aaggtggaatcacactgaggg

SEQ ID NO: 844 - DNA, 22 bp, synthetic construct
  source 1..22: mol_type = other DNA
gaaggtggaatcacactgaggg

SEQ ID NO: 845 - DNA, 19 bp, synthetic construct
  source 1..19: mol_type = other DNA
gtggaatcacactgagggg

SEQ ID NO: 846 - DNA, 20 bp, synthetic construct
  source 1..20: mol_type = other DNA
ggtggaatcacactgagggg

SEQ ID NO: 847 - DNA, 19 bp, synthetic construct
  source 1..19: mol_type = other DNA
ttgctcgttgacctcccct

SEQ ID NO: 848 - DNA, 20 bp, synthetic construct
  source 1..20: mol_type = other DNA
cttgctcgttgacctcccct

SEQ ID NO: 849 - DNA, 19 bp, synthetic construct
  source 1..19: mol_type = other DNA
aggtggaatcacactgagt

SEQ ID NO: 850 - DNA, 20 bp, synthetic construct
  source 1..20: mol_type = other DNA
aaggtggaatcacactgagt

SEQ ID NO: 851 - DNA, 19 bp, synthetic construct
  source 1..19: mol_type = other DNA
gtggaatcacactgagtgg

SEQ ID NO: 852 - DNA, 20 bp, synthetic construct
  source 1..20: mol_type = other DNA
ggtggaatcacactgagtgg

SEQ ID NO: 853 - DNA, 20 bp, synthetic construct
  source 1..20: mol_type = other DNA
gtggaatcacactgagtgga

SEQ ID NO: 854 - DNA, 19 bp, synthetic construct
  source 1..19: mol_type = other DNA
ggtggaatcacactgagtg

SEQ ID NO: 855 - DNA, 20 bp, synthetic construct
  source 1..20: mol_type = other DNA
aggtggaatcacactgagtg

SEQ ID NO: 856 - DNA, 19 bp, synthetic construct
  source 1..19: mol_type = other DNA
acactgagtggaggtcaat

SEQ ID NO: 857 - DNA, 20 bp, synthetic construct
  source 1..20: mol_type = other DNA
cacactgagtggaggtcaat

SEQ ID NO: 858 - DNA, 20 bp, synthetic construct
  source 1..20: mol_type = other DNA
acactgagtggaggtcaatg

SEQ ID NO: 859 - DNA, 19 bp, synthetic construct
  source 1..19: mol_type = other DNA
cacactgagtggaggtcaa

SEQ ID NO: 860 - DNA, 20 bp, synthetic construct
  source 1..20: mol_type = other DNA
tcacactgagtggaggtcaa

SEQ ID NO: 861 - DNA, 21 bp, synthetic construct
  source 1..21: mol_type = other DNA
aaggtggaatcacactgagtg

SEQ ID NO: 862 - DNA, 22 bp, synthetic construct
  source 1..22: mol_type = other DNA
gaaggtggaatcacactgagtg

SEQ ID NO: 863 - DNA, 19 bp, synthetic construct
  source 1..19: mol_type = other DNA
taaagaaattcttgctcat

SEQ ID NO: 864 - DNA, 20 bp, synthetic construct
  source 1..20: mol_type = other DNA
ctaaagaaattcttgctcat

SEQ ID NO: 865 - DNA, 19 bp, synthetic construct
  source 1..19: mol_type = other DNA
tgcttgctagaccaataat

SEQ ID NO: 866 - DNA, 20 bp, synthetic construct
  source 1..20: mol_type = other DNA
atgcttgctagaccaataat

SEQ ID NO: 867 - DNA, 20 bp, synthetic construct
  source 1..20: mol_type = other DNA
tgcttgctagaccaataatt

SEQ ID NO: 868 - DNA, 19 bp, synthetic construct
  source 1..19: mol_type = other DNA
aagaatttctttagcaacg

SEQ ID NO: 869 - DNA, 20 bp, synthetic construct
  source 1..20: mol_type = other DNA
caagaatttctttagcaacg

SEQ ID NO: 870 - DNA, 19 bp, synthetic construct
  source 1..19: mol_type = other DNA
acactgagtggaggtcaac

SEQ ID NO: 871 - DNA, 20 bp, synthetic construct
  source 1..20: mol_type = other DNA
cacactgagtggaggtcaac

SEQ ID NO: 872 - DNA, 20 bp, synthetic construct
  source 1..20: mol_type = other DNA
acactgagtggaggtcaacg

SEQ ID NO: 873 - DNA, 20 bp, synthetic construct
  source 1..20: mol_type = other DNA
agcaagaatttctttagcaa

SEQ ID NO: 874 - DNA, 19 bp, synthetic construct
  source 1..19: mol_type = other DNA
atttacagcaaatgcttgc

SEQ ID NO: 875 - DNA, 20 bp, synthetic construct
  source 1..20: mol_type = other DNA
catttacagcaaatgcttgc

SEQ ID NO: 876 - DNA, 19 bp, synthetic construct
  source 1..19: mol_type = other DNA
caacgagcaagaatttctt

SEQ ID NO: 877 - DNA, 20 bp, synthetic construct
  source 1..20: mol_type = other DNA
tcaacgagcaagaatttctt

SEQ ID NO: 878 - DNA, 20 bp, synthetic construct
  source 1..20: mol_type = other DNA
caacgagcaagaatttcttt

SEQ ID NO: 879 - DNA, 20 bp, synthetic construct
  source 1..20: mol_type = other DNA
caataattagttattcacgt

SEQ ID NO: 880 - DNA, 20 bp, synthetic construct
  source 1..20: mol_type = other DNA
gaccaataattagttattca

SEQ ID NO: 881 - DNA, 19 bp, synthetic construct
  source 1..19: mol_type = other DNA
gagtggaggtcaacgagca

SEQ ID NO: 882 - DNA, 20 bp, synthetic construct
  source 1..20: mol_type = other DNA
tgagtggaggtcaacgagca

SEQ ID NO: 883 - DNA, 20 bp, synthetic construct
  source 1..20: mol_type = other DNA
gcaagaatttctttagcaac

SEQ ID NO: 884 - DNA, 21 bp, synthetic construct
  source 1..21: mol_type = other DNA
agcaagaatttctttagcaac

SEQ ID NO: 885 - DNA, 22 bp, synthetic construct
  source 1..22: mol_type = other DNA
gagcaagaatttctttagcaac

SEQ ID NO: 886 - DNA, 20 bp, synthetic construct
  source 1..20: mol_type = other DNA
tgaatgacatttacagcaaa

SEQ ID NO: 887 - DNA, 20 bp, synthetic construct
  source 1..20: mol_type = other DNA
tgacatttacagcaaatgct

SEQ ID NO: 888 - DNA, 19 bp, synthetic construct
  source 1..19: mol_type = other DNA
tgagtggaggtcaacgagc

SEQ ID NO: 889 - DNA, 20 bp, synthetic construct
  source 1..20: mol_type = other DNA
ctgagtggaggtcaacgagc

SEQ ID NO: 890 - DNA, 21 bp, synthetic construct
  source 1..21: mol_type = other DNA
actgagtggaggtcaacgagc

SEQ ID NO: 891 - DNA, 22 bp, synthetic construct
  source 1..22: mol_type = other DNA
cactgagtggaggtcaacgagc

SEQ ID NO: 892 - DNA, 19 bp, synthetic construct
  source 1..19: mol_type = other DNA
tttacagcaaatgcttgct

SEQ ID NO: 893 - DNA, 20 bp, synthetic construct
  source 1..20: mol_type = other DNA
atttacagcaaatgcttgct

SEQ ID NO: 894 - DNA, 19 bp, synthetic construct
  source 1..19: mol_type = other DNA
aactctccagtctgtttaa

SEQ ID NO: 895 - DNA, 20 bp, synthetic construct
  source 1..20: mol_type = other DNA
aaactctccagtctgtttaa

SEQ ID NO: 896 - DNA, 19 bp, synthetic construct
  source 1..19: mol_type = other DNA
acaccgtttctcattagaa

SEQ ID NO: 897 - DNA, 20 bp, synthetic construct
  source 1..20: mol_type = other DNA
tacaccgtttctcattagaa

SEQ ID NO: 898 - DNA, 19 bp, synthetic construct
  source 1..19: mol_type = other DNA
accgtttctcattagaagg

SEQ ID NO: 899 - DNA, 20 bp, synthetic construct
  source 1..20: mol_type = other DNA
caccgtttctcattagaagg

SEQ ID NO: 900 - DNA, 19 bp, synthetic construct
  source 1..19: mol_type = other DNA
actctccagtctgtttaaa

SEQ ID NO: 901 - DNA, 20 bp, synthetic construct
  source 1..20: mol_type = other DNA
aactctccagtctgtttaaa

SEQ ID NO: 902 - DNA, 19 bp, synthetic construct
  source 1..19: mol_type = other DNA
aggagatgctcctgtctcc

SEQ ID NO: 903 - DNA, 20 bp, synthetic construct
  source 1..20: mol_type = other DNA
aaggagatgctcctgtctcc

SEQ ID NO: 904 - DNA, 19 bp, synthetic construct
  source 1..19: mol_type = other DNA
atgctcctgtctcctggac

SEQ ID NO: 905 - DNA, 20 bp, synthetic construct
  source 1..20: mol_type = other DNA
gatgctcctgtctcctggac

SEQ ID NO: 906 - DNA, 19 bp, synthetic construct
  source 1..19: mol_type = other DNA
caccgtttctcattagaag

SEQ ID NO: 907 - DNA, 20 bp, synthetic construct
  source 1..20: mol_type = other DNA
acaccgtttctcattagaag

SEQ ID NO: 908 - DNA, 20 bp, synthetic construct
  source 1..20: mol_type = other DNA
cgtttctcattagaaggaga

SEQ ID NO: 909 - DNA, 20 bp, synthetic construct
  source 1..20: mol_type = other DNA
ctccagtctgtttaaaagat

SEQ ID NO: 910 - DNA, 19 bp, synthetic construct
  source 1..19: mol_type = other DNA
cttttttccccaaactctc

SEQ ID NO: 911 - DNA, 20 bp, synthetic construct
  source 1..20: mol_type = other DNA
ccttttttccccaaactctc

SEQ ID NO: 912 - DNA, 20 bp, synthetic construct
  source 1..20: mol_type = other DNA
cttttttccccaaactctcc

SEQ ID NO: 913 - DNA, 20 bp, synthetic construct
  source 1..20: mol_type = other DNA
gaaggagatgctcctgtctc

SEQ ID NO: 914 - DNA, 21 bp, synthetic construct
  source 1..21: mol_type = other DNA
agaaggagatgctcctgtctc

SEQ ID NO: 915 - DNA, 22 bp, synthetic construct
  source 1..22: mol_type = other DNA
tagaaggagatgctcctgtctc

SEQ ID NO: 916 - DNA, 19 bp, synthetic construct
  source 1..19: mol_type = other DNA
gatgctcctgtctcctgga

SEQ ID NO: 917 - DNA, 20 bp, synthetic construct
  source 1..20: mol_type = other DNA
agatgctcctgtctcctgga

SEQ ID NO: 918 - DNA, 19 bp, synthetic construct
  source 1..19: mol_type = other DNA
ggagatgctcctgtctcct

SEQ ID NO: 919 - DNA, 20 bp, synthetic construct
  source 1..20: mol_type = other DNA
aggagatgctcctgtctcct

SEQ ID NO: 920 - DNA, 20 bp, synthetic construct
  source 1..20: mol_type = other DNA
tcattagaaggagatgctcc

SEQ ID NO: 921 - DNA, 19 bp, synthetic construct
  source 1..19: mol_type = other DNA
tctcctggacagaaacaaa

SEQ ID NO: 922 - DNA, 20 bp, synthetic construct
  source 1..20: mol_type = other DNA
gtctcctggacagaaacaaa

SEQ ID NO: 923 - DNA, 20 bp, synthetic construct
  source 1..20: mol_type = other DNA
tctcctggacagaaacaaaa

SEQ ID NO: 924 - DNA, 20 bp, synthetic construct
  source 1..20: mol_type = other DNA
tttccccaaactctccagtc

SEQ ID NO: 925 - DNA, 19 bp, synthetic construct
  source 1..19: mol_type = other DNA
aaaagttaaaaagatgata

SEQ ID NO: 926 - DNA, 20 bp, synthetic construct
  source 1..20: mol_type = other DNA
taaaagttaaaaagatgata

SEQ ID NO: 927 - DNA, 19 bp, synthetic construct
  source 1..19: mol_type = other DNA
aaagatgataagacttacc

SEQ ID NO: 928 - DNA, 20 bp, synthetic construct
  source 1..20: mol_type = other DNA
aaaagatgataagacttacc

SEQ ID NO: 929 - DNA, 20 bp, synthetic construct
  source 1..20: mol_type = other DNA
aaagatgataagacttacca

SEQ ID NO: 930 - DNA, 20 bp, synthetic construct
  source 1..20: mol_type = other DNA
aatatcatgagtacattgca

SEQ ID NO: 931 - DNA, 21 bp, synthetic construct
  source 1..21: mol_type = other DNA
gaatatcatgagtacattgca

SEQ ID NO: 932 - DNA, 22 bp, synthetic construct
  source 1..22: mol_type = other DNA
tgaatatcatgagtacattgca

SEQ ID NO: 933 - DNA, 19 bp, synthetic construct
  source 1..19: mol_type = other DNA
actttagccatgaatatca

SEQ ID NO: 934 - DNA, 20 bp, synthetic construct
  source 1..20: mol_type = other DNA
gactttagccatgaatatca

SEQ ID NO: 935 - DNA, 19 bp, synthetic construct
  source 1..19: mol_type = other DNA
atcatgagtacattgcagt

SEQ ID NO: 936 - DNA, 20 bp, synthetic construct
  source 1..20: mol_type = other DNA
tatcatgagtacattgcagt

SEQ ID NO: 937 - DNA, 20 bp, synthetic construct
  source 1..20: mol_type = other DNA
atcatgagtacattgcagtg

SEQ ID NO: 938 - DNA, 20 bp, synthetic construct
  source 1..20: mol_type = other DNA
atgagtacattgcagtgggc

SEQ ID NO: 939 - DNA, 20 bp, synthetic construct
  source 1..20: mol_type = other DNA
catgaatatcatgagtacat

SEQ ID NO: 940 - DNA, 20 bp, synthetic construct
  source 1..20: mol_type = other DNA
ctgtaaactccagcatacat

SEQ ID NO: 941 - DNA, 21 bp, synthetic construct
  source 1..21: mol_type = other DNA
gctgtaaactccagcatacat

SEQ ID NO: 942 - DNA, 22 bp, synthetic construct
  source 1..22: mol_type = other DNA
ggctgtaaactccagcatacat

SEQ ID NO: 943 - DNA, 19 bp, synthetic construct
  source 1..19: mol_type = other DNA
ctttagccatgaatatcat

SEQ ID NO: 944 - DNA, 20 bp, synthetic construct
  source 1..20: mol_type = other DNA
actttagccatgaatatcat

SEQ ID NO: 945 - DNA, 20 bp, synthetic construct
  source 1..20: mol_type = other DNA
ctttagccatgaatatcatg

SEQ ID NO: 946 - DNA, 19 bp, synthetic construct
  source 1..19: mol_type = other DNA
gaatatcatgagtacattg

SEQ ID NO: 947 - DNA, 20 bp, synthetic construct
  source 1..20: mol_type = other DNA
tgaatatcatgagtacattg

SEQ ID NO: 948 - DNA, 20 bp, synthetic construct
  source 1..20: mol_type = other DNA
gaatatcatgagtacattgc

SEQ ID NO: 949 - DNA, 20 bp, synthetic construct
  source 1..20: mol_type = other DNA
gacttaccaagctatccaca

SEQ ID NO: 950 - DNA, 20 bp, synthetic construct
  source 1..20: mol_type = other DNA
gctgtaaactccagcataca

SEQ ID NO: 951 - DNA, 19 bp, synthetic construct
  source 1..19: mol_type = other DNA
taaaagttaaaaagatgat

SEQ ID NO: 952 - DNA, 20 bp, synthetic construct
  source 1..20: mol_type = other DNA
ataaaagttaaaaagatgat

SEQ ID NO: 953 - DNA, 20 bp, synthetic construct
  source 1..20: mol_type = other DNA
taccaagctatccacatgta

SEQ ID NO: 954 - DNA, 19 bp, synthetic construct
  source 1..19: mol_type = other DNA
tatcatgagtacattgcag

SEQ ID NO: 955 - DNA, 20 bp, synthetic construct
  source 1..20: mol_type = other DNA
atatcatgagtacattgcag

SEQ ID NO: 956 - DNA, 21 bp, synthetic construct
  source 1..21: mol_type = other DNA
aatatcatgagtacattgcag

SEQ ID NO: 957 - DNA, 22 bp, synthetic construct
  source 1..22: mol_type = other DNA
gaatatcatgagtacattgcag

SEQ ID NO: 958 - DNA, 19 bp, synthetic construct
  source 1..19: mol_type = other DNA
tgcagtgggctgtaaactc

SEQ ID NO: 959 - DNA, 20 bp, synthetic construct
  source 1..20: mol_type = other DNA
ttgcagtgggctgtaaactc

SEQ ID NO: 960 - DNA, 20 bp, synthetic construct
  source 1..20: mol_type = other DNA
tgcagtgggctgtaaactcc

SEQ ID NO: 961 - DNA, 19 bp, synthetic construct
  source 1..19: mol_type = other DNA
ttcataaaagttaaaaaga

SEQ ID NO: 962 - DNA, 20 bp, synthetic construct
  source 1..20: mol_type = other DNA
tttcataaaagttaaaaaga

SEQ ID NO: 963 - DNA, 19 bp, synthetic construct
  source 1..19: mol_type = other DNA
tttttcataaaagttaaaa

SEQ ID NO: 964 - DNA, 20 bp, synthetic construct
  source 1..20: mol_type = other DNA
ttttttcataaaagttaaaa

SEQ ID NO: 965 - DNA, 19 bp, synthetic construct
  source 1..19: mol_type = other DNA
ttttttcataaaagttaaa

SEQ ID NO: 966 - DNA, 20 bp, synthetic construct
  source 1..20: mol_type = other DNA
tttttttcataaaagttaaa

SEQ ID NO: 967 - DNA, 19 bp, synthetic construct
  source 1..19: mol_type = other DNA
aacttaaagactcggctca

SEQ ID NO: 968 - DNA, 20 bp, synthetic construct
  source 1..20: mol_type = other DNA
gaacttaaagactcggctca

SEQ ID NO: 969 - DNA, 19 bp, synthetic construct
  source 1..19: mol_type = other DNA
aatgttgttatttttattt

SEQ ID NO: 970 - DNA, 20 bp, synthetic construct
  source 1..20: mol_type = other DNA
aaatgttgttatttttattt

SEQ ID NO: 971 - DNA, 19 bp, synthetic construct
  source 1..19: mol_type = other DNA
acttaaagactcggctcac

SEQ ID NO: 972 - DNA, 20 bp, synthetic construct
  source 1..20: mol_type = other DNA
aacttaaagactcggctcac

SEQ ID NO: 973 - DNA, 20 bp, synthetic construct
  source 1..20: mol_type = other DNA
aggtttaccttctgttggca

SEQ ID NO: 974 - DNA, 20 bp, synthetic construct
  source 1..20: mol_type = other DNA
atgtcaatgaacttaaagac

SEQ ID NO: 975 - DNA, 21 bp, synthetic construct
  source 1..21: mol_type = other DNA
catgtcaatgaacttaaagac

SEQ ID NO: 976 - DNA, 22 bp, synthetic construct
  source 1..22: mol_type = other DNA
gcatgtcaatgaacttaaagac

SEQ ID NO: 977 - DNA, 19 bp, synthetic construct
  source 1..19: mol_type = other DNA
atgttgttatttttatttc

SEQ ID NO: 978 - DNA, 20 bp, synthetic construct
  source 1..20: mol_type = other DNA
aatgttgttatttttatttc

SEQ ID NO: 979 - DNA, 20 bp, synthetic construct
  source 1..20: mol_type = other DNA
attcttaaaaacaaaaatgt

SEQ ID NO: 980 - DNA, 19 bp, synthetic construct
  source 1..19: mol_type = other DNA
ccttctgttggcatgtcaa

SEQ ID NO: 981 - DNA, 20 bp, synthetic construct
  source 1..20: mol_type = other DNA
accttctgttggcatgtcaa

SEQ ID NO: 982 - DNA, 20 bp, synthetic construct
  source 1..20: mol_type = other DNA
gccattcttaaaaacaaaaa

SEQ ID NO: 983 - DNA, 19 bp, synthetic construct
  source 1..19: mol_type = other DNA
ggcatgtcaatgaacttaa

SEQ ID NO: 984 - DNA, 20 bp, synthetic construct
  source 1..20: mol_type = other DNA
tggcatgtcaatgaacttaa

SEQ ID NO: 985 - DNA, 19 bp, synthetic construct
  source 1..19: mol_type = other DNA
gtcaatgaacttaaagact

SEQ ID NO: 986 - DNA, 20 bp, synthetic construct
  source 1..20: mol_type = other DNA
tgtcaatgaacttaaagact

SEQ ID NO: 987 - DNA, 20 bp, synthetic construct
  source 1..20: mol_type = other DNA
gtcaatgaacttaaagactc

SEQ ID NO: 988 - DNA, 19 bp, synthetic construct
  source 1..19: mol_type = other DNA
gttatttttatttcagatg

SEQ ID NO: 989 - DNA, 20 bp, synthetic construct
  source 1..20: mol_type = other DNA
tgttatttttatttcagatg

SEQ ID NO: 990 - DNA, 20 bp, synthetic construct
  source 1..20: mol_type = other DNA
gttgttatttttatttcaga

SEQ ID NO: 991 - DNA, 19 bp, synthetic construct
  source 1..19: mol_type = other DNA
tggcatgtcaatgaactta

SEQ ID NO: 992 - DNA, 20 bp, synthetic construct
  source 1..20: mol_type = other DNA
ttggcatgtcaatgaactta

SEQ ID NO: 993 - DNA, 19 bp, synthetic construct
  source 1..19: mol_type = other DNA
cagatgcgatctgtgagct

SEQ ID NO: 994 - DNA, 20 bp, synthetic construct
  source 1..20: mol_type = other DNA
tcagatgcgatctgtgagct

SEQ ID NO: 995 - DNA, 20 bp, synthetic construct
  source 1..20: mol_type = other DNA
cagatgcgatctgtgagctg

SEQ ID NO: 996 - DNA, 20 bp, synthetic construct
  source 1..20: mol_type = other DNA
cttggtaggtttaccttctg

SEQ ID NO: 997 - DNA, 21 bp, synthetic construct
  source 1..21: mol_type = other DNA
acttggtaggtttaccttctg

SEQ ID NO: 998 - DNA, 22 bp, synthetic construct
  source 1..22: mol_type = other DNA
gacttggtaggtttaccttctg

SEQ ID NO: 999 - DNA, 20 bp, synthetic construct
  source 1..20: mol_type = other DNA
gacttggtaggtttaccttc

SEQ ID NO: 1000 - DNA, 19 bp, synthetic construct
  source 1..19: mol_type = other DNA
tatttcagatgcgatctgt

SEQ ID NO: 1001 - DNA, 20 bp, synthetic construct
  source 1..20: mol_type = other DNA
ttatttcagatgcgatctgt

SEQ ID NO: 1002 - DNA, 20 bp, synthetic construct
  source 1..20: mol_type = other DNA
tatttcagatgcgatctgtg

SEQ ID NO: 1003 - DNA, 19 bp, synthetic construct
  source 1..19: mol_type = other DNA
tcagatgcgatctgtgagc

SEQ ID NO: 1004 - DNA, 20 bp, synthetic construct
  source 1..20: mol_type = other DNA
ttcagatgcgatctgtgagc

SEQ ID NO: 1005 - DNA, 19 bp, synthetic construct
  source 1..19: mol_type = other DNA
tggtaggtttaccttctgt

SEQ ID NO: 1006 - DNA, 20 bp, synthetic construct
  source 1..20: mol_type = other DNA
ttggtaggtttaccttctgt

SEQ ID NO: 1007 - DNA, 20 bp, synthetic construct
  source 1..20: mol_type = other DNA
tggtaggtttaccttctgtt

SEQ ID NO: 1008 - DNA, 19 bp, synthetic construct
  source 1..19: mol_type = other DNA
ttatttcagatgcgatctg

SEQ ID NO: 1009 - DNA, 20 bp, synthetic construct
  source 1..20: mol_type = other DNA
tttatttcagatgcgatctg

SEQ ID NO: 1010 - DNA, 20 bp, synthetic construct
  source 1..20: mol_type = other DNA
tttcagatgcgatctgtgag

SEQ ID NO: 1011 - DNA, 21 bp, synthetic construct
  source 1..21: mol_type = other DNA
atttcagatgcgatctgtgag

SEQ ID NO: 1012 - DNA, 22 bp, synthetic construct
  source 1..22: mol_type = other DNA
tatttcagatgcgatctgtgag

SEQ ID NO: 1013 - DNA, 20 bp, synthetic construct
  source 1..20: mol_type = other DNA
tttttatttcagatgcgatc

SEQ ID NO: 1014 - DNA, 19 bp, synthetic construct
  source 1..19: mol_type = other DNA
cagatgcgatctgtgagcc

SEQ ID NO: 1015 - DNA, 20 bp, synthetic construct
  source 1..20: mol_type = other DNA
tcagatgcgatctgtgagcc

SEQ ID NO: 1016 - DNA, 20 bp, synthetic construct
  source 1..20: mol_type = other DNA
cagatgcgatctgtgagcct

SEQ ID NO: 1017 - DNA, 20 bp, synthetic construct
  source 1..20: mol_type = other DNA
gtcaatgaacttaaagacta

SEQ ID NO: 1018 - DNA, 19 bp, synthetic construct
  source 1..19: mol_type = other DNA
tgtcaatgaacttaaagac

SEQ ID NO: 1019 - DNA, 19 bp, synthetic construct
  source 1..19: mol_type = other DNA
aagttcattgacatgccaa

SEQ ID NO: 1020 - DNA, 20 bp, synthetic construct
  source 1..20: mol_type = other DNA
taagttcattgacatgccaa

SEQ ID NO: 1021 - DNA, 19 bp, synthetic construct
  source 1..19: mol_type = other DNA
aatcataactttcgagagt

SEQ ID NO: 1022 - DNA, 20 bp, synthetic construct
  source 1..20: mol_type = other DNA
taatcataactttcgagagt

SEQ ID NO: 1023 - DNA, 20 bp, synthetic construct
  source 1..20: mol_type = other DNA
aatcataactttcgagagtt

SEQ ID NO: 1024 - DNA, 19 bp, synthetic construct
  source 1..19: mol_type = other DNA
agagttggccattcttgta

SEQ ID NO: 1025 - DNA, 20 bp, synthetic construct
  source 1..20: mol_type = other DNA
gagagttggccattcttgta

SEQ ID NO: 1026 - DNA, 20 bp, synthetic construct
  source 1..20: mol_type = other DNA
agagttggccattcttgtat

SEQ ID NO: 1027 - DNA, 20 bp, synthetic construct
  source 1..20: mol_type = other DNA
agtctttaagttcattgaca

SEQ ID NO: 1028 - DNA, 19 bp, synthetic construct
  source 1..19: mol_type = other DNA
agttcattgacatgccaac

SEQ ID NO: 1029 - DNA, 20 bp, synthetic construct
  source 1..20: mol_type = other DNA
aagttcattgacatgccaac

SEQ ID NO: 1030 - DNA, 20 bp, synthetic construct
  source 1..20: mol_type = other DNA
ataatcataactttcgagag

SEQ ID NO: 1031 - DNA, 21 bp, synthetic construct
  source 1..21: mol_type = other DNA
aataatcataactttcgagag

SEQ ID NO: 1032 - DNA, 22 bp, synthetic construct
  source 1..22: mol_type = other DNA
caataatcataactttcgagag

SEQ ID NO: 1033 - DNA, 19 bp, synthetic construct
  source 1..19: mol_type = other DNA
atctgtgagccgagtcttt

SEQ ID NO: 1034 - DNA, 20 bp, synthetic construct
  source 1..20: mol_type = other DNA
gatctgtgagccgagtcttt

SEQ ID NO: 1035 - DNA, 20 bp, synthetic construct
  source 1..20: mol_type = other DNA
atctgtgagccgagtcttta

SEQ ID NO: 1036 - DNA, 19 bp, synthetic construct
  source 1..19: mol_type = other DNA
caacagaaggtaaacctac

SEQ ID NO: 1037 - DNA, 20 bp, synthetic construct
  source 1..20: mol_type = other DNA
ccaacagaaggtaaacctac

SEQ ID NO: 1038 - DNA, 20 bp, synthetic construct
  source 1..20: mol_type = other DNA
caacagaaggtaaacctaca

SEQ ID NO: 1039 - DNA, 19 bp, synthetic construct
  source 1..19: mol_type = other DNA
caataatcataactttcga

SEQ ID NO: 1040 - DNA, 20 bp, synthetic construct
  source 1..20: mol_type = other DNA
tcaataatcataactttcga

SEQ ID NO: 1041 - DNA, 20 bp, synthetic construct
  source 1..20: mol_type = other DNA
caataatcataactttcgag

SEQ ID NO: 1042 - DNA, 19 bp, synthetic construct
  source 1..19: mol_type = other DNA
cattcttgtatggtttggt

SEQ ID NO: 1043 - DNA, 20 bp, synthetic construct
  source 1..20: mol_type = other DNA
ccattcttgtatggtttggt

SEQ ID NO: 1044 - DNA, 20 bp, synthetic construct
  source 1..20: mol_type = other DNA
cgagagttggccattcttgt

SEQ ID NO: 1045 - DNA, 21 bp, synthetic construct
  source 1..21: mol_type = other DNA
tcgagagttggccattcttgt

SEQ ID NO: 1046 - DNA, 22 bp, synthetic construct
  source 1..22: mol_type = other DNA
ttcgagagttggccattcttgt

SEQ ID NO: 1047 - DNA, 19 bp, synthetic construct
  source 1..19: mol_type = other DNA
ctcaataatcataactttc

SEQ ID NO: 1048 - DNA, 20 bp, synthetic construct
  source 1..20: mol_type = other DNA
tctcaataatcataactttc

SEQ ID NO: 1049 - DNA, 21 bp, synthetic construct
  source 1..21: mol_type = other DNA
ttctcaataatcataactttc

SEQ ID NO: 1050 - DNA, 22 bp, synthetic construct
  source 1..22: mol_type = other DNA
attctcaataatcataactttc

SEQ ID NO: 1051 - DNA, 20 bp, synthetic construct
  source 1..20: mol_type = other DNA
cttgtatggtttggttgact

SEQ ID NO: 1052 - DNA, 19 bp, synthetic construct
  source 1..19: mol_type = other DNA
gccgagtctttaagttcat

SEQ ID NO: 1053 - DNA, 20 bp, synthetic construct
  source 1..20: mol_type = other DNA
agccgagtctttaagttcat

SEQ ID NO: 1054 - DNA, 19 bp, synthetic construct
  source 1..19: mol_type = other DNA
gtatggtttggttgacttg

SEQ ID NO: 1055 - DNA, 20 bp, synthetic construct
  source 1..20: mol_type = other DNA
tgtatggtttggttgacttg

SEQ ID NO: 1056 - DNA, 21 bp, synthetic construct
  source 1..21: mol_type = other DNA
ttgtatggtttggttgacttg

SEQ ID NO: 1057 - DNA, 22 bp, synthetic construct
  source 1..22: mol_type = other DNA
cttgtatggtttggttgacttg

SEQ ID NO: 1058 - DNA, 20 bp, synthetic construct
  source 1..20: mol_type = other DNA
gttggccattcttgtatggt

SEQ ID NO: 1059 - DNA, 21 bp, synthetic construct
  source 1..21: mol_type = other DNA
agttggccattcttgtatggt

SEQ ID NO: 1060 - DNA, 22 bp, synthetic construct
  source 1..22: mol_type = other DNA
gagttggccattcttgtatggt

SEQ ID NO: 1061 - DNA, 19 bp, synthetic construct
  source 1..19: mol_type = other DNA
tatggtttggttgacttgt

SEQ ID NO: 1062 - DNA, 20 bp, synthetic construct
  source 1..20: mol_type = other DNA
gtatggtttggttgacttgt

SEQ ID NO: 1063 - DNA, 20 bp, synthetic construct
  source 1..20: mol_type = other DNA
tatggtttggttgacttgta

SEQ ID NO: 1064 - DNA, 19 bp, synthetic construct
  source 1..19: mol_type = other DNA
tcaataatcataactttcg

SEQ ID NO: 1065 - DNA, 20 bp, synthetic construct
  source 1..20: mol_type = other DNA
ctcaataatcataactttcg

SEQ ID NO: 1066 - DNA, 19 bp, synthetic construct
  source 1..19: mol_type = other DNA
tcattgacatgccaacaga

SEQ ID NO: 1067 - DNA, 20 bp, synthetic construct
  source 1..20: mol_type = other DNA
ttcattgacatgccaacaga

SEQ ID NO: 1068 - DNA, 20 bp, synthetic construct
  source 1..20: mol_type = other DNA
tcattgacatgccaacagaa

SEQ ID NO: 1069 - DNA, 19 bp, synthetic construct
  source 1..19: mol_type = other DNA
tggccattcttgtatggtt

SEQ ID NO: 1070 - DNA, 20 bp, synthetic construct
  source 1..20: mol_type = other DNA
ttggccattcttgtatggtt

SEQ ID NO: 1071 - DNA, 20 bp, synthetic construct
  source 1..20: mol_type = other DNA
tggccattcttgtatggttt

SEQ ID NO: 1072 - DNA, 19 bp, synthetic construct
  source 1..19: mol_type = other DNA
ttcattgacatgccaacag

SEQ ID NO: 1073 - DNA, 20 bp, synthetic construct
  source 1..20: mol_type = other DNA
gttcattgacatgccaacag

SEQ ID NO: 1074 - DNA, 21 bp, synthetic construct
  source 1..21: mol_type = other DNA
agttcattgacatgccaacag

SEQ ID NO: 1075 - DNA, 22 bp, synthetic construct
  source 1..22: mol_type = other DNA
aagttcattgacatgccaacag

SEQ ID NO: 1076 - DNA, 20 bp, synthetic construct
  source 1..20: mol_type = other DNA
tttcgagagttggccattct

SEQ ID NO: 1077 - DNA, 19 bp, synthetic construct
  source 1..19: mol_type = other DNA
caagacacaccatcgatct

SEQ ID NO: 1078 - DNA, 20 bp, synthetic construct
  source 1..20: mol_type = other DNA
ccaagacacaccatcgatct

SEQ ID NO: 1079 - DNA, 19 bp, synthetic construct
  source 1..19: mol_type = other DNA
ccaagacacaccatcgatc

SEQ ID NO: 1080 - DNA, 20 bp, synthetic construct
  source 1..20: mol_type = other DNA
cccaagacacaccatcgatc

SEQ ID NO: 1081 - DNA, 19 bp, synthetic construct
  source 1..19: mol_type = other DNA
ctcttgggaagaactggat

SEQ ID NO: 1082 - DNA, 20 bp, synthetic construct
  source 1..20: mol_type = other DNA
cctcttgggaagaactggat

SEQ ID NO: 1083 - DNA, 21 bp, synthetic construct
  source 1..21: mol_type = other DNA
gcctcttgggaagaactggat

SEQ ID NO: 1084 - DNA, 22 bp, synthetic construct
  source 1..22: mol_type = other DNA
ggcctcttgggaagaactggat

SEQ ID NO: 1085 - DNA, 19 bp, synthetic construct
  source 1..19: mol_type = other DNA
cttgggaagaactggatca

SEQ ID NO: 1086 - DNA, 20 bp, synthetic construct
  source 1..20: mol_type = other DNA
tcttgggaagaactggatca

SEQ ID NO: 1087 - DNA, 19 bp, synthetic construct
  source 1..19: mol_type = other DNA
ctttgttatcagctttttt

SEQ ID NO: 1088 - DNA, 20 bp, synthetic construct
  source 1..20: mol_type = other DNA
actttgttatcagctttttt

SEQ ID NO: 1089 - DNA, 19 bp, synthetic construct
  source 1..19: mol_type = other DNA
gaagaactggatcagggaa

SEQ ID NO: 1090 - DNA, 20 bp, synthetic construct
  source 1..20: mol_type = other DNA
ggaagaactggatcagggaa

SEQ ID NO: 1091 - DNA, 20 bp, synthetic construct
  source 1..20: mol_type = other DNA
gaagaactggatcagggaag

SEQ ID NO: 1092 - DNA, 19 bp, synthetic construct
  source 1..19: mol_type = other DNA
gaatcccaagacacaccat

SEQ ID NO: 1093 - DNA, 20 bp, synthetic construct
  source 1..20: mol_type = other DNA
tgaatcccaagacacaccat

SEQ ID NO: 1094 - DNA, 20 bp, synthetic construct
  source 1..20: mol_type = other DNA
gatctggatttctccttcag

SEQ ID NO: 1095 - DNA, 19 bp, synthetic construct
  source 1..19: mol_type = other DNA
ggaagaactggatcaggga

SEQ ID NO: 1096 - DNA, 20 bp, synthetic construct
  source 1..20: mol_type = other DNA
gggaagaactggatcaggga

SEQ ID NO: 1097 - DNA, 19 bp, synthetic construct
  source 1..19: mol_type = other DNA
ggatttctccttcagtgtt

SEQ ID NO: 1098 - DNA, 20 bp, synthetic construct
  source 1..20: mol_type = other DNA
tggatttctccttcagtgtt

SEQ ID NO: 1099 - DNA, 20 bp, synthetic construct
  source 1..20: mol_type = other DNA
ggatttctccttcagtgttc

SEQ ID NO: 1100 - DNA, 19 bp, synthetic construct
  source 1..19: mol_type = other DNA
gggaagaactggatcaggg

SEQ ID NO: 1101 - DNA, 20 bp, synthetic construct
  source 1..20: mol_type = other DNA
tgggaagaactggatcaggg

SEQ ID NO: 1102 - DNA, 21 bp, synthetic construct
  source 1..21: mol_type = other DNA
ttgggaagaactggatcaggg

SEQ ID NO: 1103 - DNA, 22 bp, synthetic construct
  source 1..22: mol_type = other DNA
cttgggaagaactggatcaggg

SEQ ID NO: 1104 - DNA, 19 bp, synthetic construct
  source 1..19: mol_type = other DNA
gggaagagtactttgttat

SEQ ID NO: 1105 - DNA, 20 bp, synthetic construct
  source 1..20: mol_type = other DNA
agggaagagtactttgttat

SEQ ID NO: 1106 - DNA, 20 bp, synthetic construct
  source 1..20: mol_type = other DNA
gggaagagtactttgttatc

SEQ ID NO: 1107 - DNA, 19 bp, synthetic construct
  source 1..19: mol_type = other DNA
gggcctcttgggaagaact

SEQ ID NO: 1108 - DNA, 20 bp, synthetic construct
  source 1..20: mol_type = other DNA
tgggcctcttgggaagaact

SEQ ID NO: 1109 - DNA, 20 bp, synthetic construct
  source 1..20: mol_type = other DNA
tcccaagacacaccatcgat

SEQ ID NO: 1110 - DNA, 21 bp, synthetic construct
  source 1..21: mol_type = other DNA
atcccaagacacaccatcgat

SEQ ID NO: 1111 - DNA, 22 bp, synthetic construct
  source 1..22: mol_type = other DNA
aatcccaagacacaccatcgat

SEQ ID NO: 1112 - DNA, 19 bp, synthetic construct
  source 1..19: mol_type = other DNA
tcgatctggatttctcctt

SEQ ID NO: 1113 - DNA, 20 bp, synthetic construct
  source 1..20: mol_type = other DNA
atcgatctggatttctcctt

SEQ ID NO: 1114 - DNA, 20 bp, synthetic construct
  source 1..20: mol_type = other DNA
tcgatctggatttctccttc

SEQ ID NO: 1115 - DNA, 19 bp, synthetic construct
  source 1..19: mol_type = other DNA
tcttgggaagaactggatc

SEQ ID NO: 1116 - DNA, 20 bp, synthetic construct
  source 1..20: mol_type = other DNA
ctcttgggaagaactggatc

SEQ ID NO: 1117 - DNA, 21 bp, synthetic construct
  source 1..21: mol_type = other DNA
cctcttgggaagaactggatc

SEQ ID NO: 1118 - DNA, 22 bp, synthetic construct
  source 1..22: mol_type = other DNA
gcctcttgggaagaactggatc

SEQ ID NO: 1119 - DNA, 20 bp, synthetic construct
  source 1..20: mol_type = other DNA
tggatcagggaagagtactt

SEQ ID NO: 1120 - DNA, 19 bp, synthetic construct
  source 1..19: mol_type = other DNA
tgggcctcttgggaagaac

SEQ ID NO: 1121 - DNA, 20 bp, synthetic construct
  source 1..20: mol_type = other DNA
gtgggcctcttgggaagaac

SEQ ID NO: 1122 - DNA, 19 bp, synthetic construct
  source 1..19: mol_type = other DNA
ttgggaagaactggatcag

SEQ ID NO: 1123 - DNA, 20 bp, synthetic construct
  source 1..20: mol_type = other DNA
cttgggaagaactggatcag

SEQ ID NO: 1124 - DNA, 19 bp, synthetic construct
  source 1..19: mol_type = other DNA
ttgttatcagctttttttg

SEQ ID NO: 1125 - DNA, 20 bp, synthetic construct
  source 1..20: mol_type = other DNA
tttgttatcagctttttttg

SEQ ID NO: 1126 - DNA, 19 bp, synthetic construct
  source 1..19: mol_type = other DNA
tttctccttcagtgttcag

SEQ ID NO: 1127 - DNA, 20 bp, synthetic construct
  source 1..20: mol_type = other DNA
atttctccttcagtgttcag

SEQ ID NO: 1128 - DNA, 20 bp, synthetic construct
  source 1..20: mol_type = other DNA
tttctccttcagtgttcagt

SEQ ID NO: 1129 - DNA, 19 bp, synthetic construct
  source 1..19: mol_type = other DNA
tttgttatcagcttttttt

SEQ ID NO: 1130 - DNA, 20 bp, synthetic construct
  source 1..20: mol_type = other DNA
ctttgttatcagcttttttt

SEQ ID NO: 1131 - DNA, 20 bp, synthetic construct
  source 1..20: mol_type = other DNA
aaggagaaatccagatcgat

SEQ ID NO: 1132 - DNA, 19 bp, synthetic construct
  source 1..19: mol_type = other DNA
aagtccttttgctcacctg

SEQ ID NO: 1133 - DNA, 20 bp, synthetic construct
  source 1..20: mol_type = other DNA
taagtccttttgctcacctg

SEQ ID NO: 1134 - DNA, 20 bp, synthetic construct
  source 1..20: mol_type = other DNA
aagtccttttgctcacctgt

SEQ ID NO: 1135 - DNA, 19 bp, synthetic construct
  source 1..19: mol_type = other DNA
aataactttgcaacagtga

SEQ ID NO: 1136 - DNA, 20 bp, synthetic construct
  source 1..20: mol_type = other DNA
caataactttgcaacagtga

SEQ ID NO: 1137 - DNA, 19 bp, synthetic construct
  source 1..19: mol_type = other DNA
acctgtggtatcactccaa

SEQ ID NO: 1138 - DNA, 20 bp, synthetic construct
  source 1..20: mol_type = other DNA
cacctgtggtatcactccaa

SEQ ID NO: 1139 - DNA, 20 bp, synthetic construct
  source 1..20: mol_type = other DNA
acctgtggtatcactccaaa

SEQ ID NO: 1140 - DNA, 20 bp, synthetic construct
  source 1..20: mol_type = other DNA
agaaatccagatcgatggtg

SEQ ID NO: 1141 - DNA, 19 bp, synthetic construct
  source 1..19: mol_type = other DNA
agatcgatggtgtgtcttg

SEQ ID NO: 1142 - DNA, 20 bp, synthetic construct
  source 1..20: mol_type = other DNA
cagatcgatggtgtgtcttg

SEQ ID NO: 1143 - DNA, 19 bp, synthetic construct
  source 1..19: mol_type = other DNA
ataactttgcaacagtgaa

SEQ ID NO: 1144 - DNA, 20 bp, synthetic construct
  source 1..20: mol_type = other DNA
aataactttgcaacagtgaa

SEQ ID NO: 1145 - DNA, 20 bp, synthetic construct
  source 1..20: mol_type = other DNA
atccagatcgatggtgtgtc

SEQ ID NO: 1146 - DNA, 21 bp, synthetic construct
  source 1..21: mol_type = other DNA
aatccagatcgatggtgtgtc

SEQ ID NO: 1147 - DNA, 22 bp, synthetic construct
  source 1..22: mol_type = other DNA
aaatccagatcgatggtgtgtc

SEQ ID NO: 1148 - DNA, 19 bp, synthetic construct
  source 1..19: mol_type = other DNA
caataactttgcaacagtg

SEQ ID NO: 1149 - DNA, 20 bp, synthetic construct
  source 1..20: mol_type = other DNA
tcaataactttgcaacagtg

SEQ ID NO: 1150 - DNA, 21 bp, synthetic construct
  source 1..21: mol_type = other DNA
ttcaataactttgcaacagtg

SEQ ID NO: 1151 - DNA, 22 bp, synthetic construct
  source 1..22: mol_type = other DNA
attcaataactttgcaacagtg

SEQ ID NO: 1152 - DNA, 19 bp, synthetic construct
  source 1..19: mol_type = other DNA
cacctgtggtatcactcca

SEQ ID NO: 1153 - DNA, 20 bp, synthetic construct
  source 1..20: mol_type = other DNA
tcacctgtggtatcactcca

SEQ ID NO: 1154 - DNA, 21 bp, synthetic construct
  source 1..21: mol_type = other DNA
ctcacctgtggtatcactcca

SEQ ID NO: 1155 - DNA, 22 bp, synthetic construct
  source 1..22: mol_type = other DNA
gctcacctgtggtatcactcca

SEQ ID NO: 1156 - DNA, 19 bp, synthetic construct
  source 1..19: mol_type = other DNA
cagatcgatggtgtgtctt

SEQ ID NO: 1157 - DNA, 20 bp, synthetic construct
  source 1..20: mol_type = other DNA
ccagatcgatggtgtgtctt

SEQ ID NO: 1158 - DNA, 19 bp, synthetic construct
  source 1..19: mol_type = other DNA
ccagatcgatggtgtgtct

SEQ ID NO: 1159 - DNA, 20 bp, synthetic construct
  source 1..20: mol_type = other DNA
tccagatcgatggtgtgtct

SEQ ID NO: 1160 - DNA, 21 bp, synthetic construct
  source 1..21: mol_type = other DNA
atccagatcgatggtgtgtct

SEQ ID NO: 1161 - DNA, 22 bp, synthetic construct
  source 1..22: mol_type = other DNA
aatccagatcgatggtgtgtct

SEQ ID NO: 1162 - DNA, 20 bp, synthetic construct
  source 1..20: mol_type = other DNA
ctaagtccttttgctcacct

SEQ ID NO: 1163 - DNA, 21 bp, synthetic construct
  source 1..21: mol_type = other DNA
gctaagtccttttgctcacct

SEQ ID NO: 1164 - DNA, 22 bp, synthetic construct
  source 1..22: mol_type = other DNA
ggctaagtccttttgctcacct

SEQ ID NO: 1165 - DNA, 20 bp, synthetic construct
  source 1..20: mol_type = other DNA
gctaagtccttttgctcacc

SEQ ID NO: 1166 - DNA, 20 bp, synthetic construct
  source 1..20: mol_type = other DNA
ggagaaatccagatcgatgg

SEQ ID NO: 1167 - DNA, 19 bp, synthetic construct
  source 1..19: mol_type = other DNA
ggattcaataactttgcaa

SEQ ID NO: 1168 - DNA, 20 bp, synthetic construct
  source 1..20: mol_type = other DNA
gggattcaataactttgcaa

SEQ ID NO: 1169 - DNA, 20 bp, synthetic construct
  source 1..20: mol_type = other DNA
ggattcaataactttgcaac

SEQ ID NO: 1170 - DNA, 20 bp, synthetic construct
  source 1..20: mol_type = other DNA
gtcttgggattcaataactt

SEQ ID NO: 1171 - DNA, 19 bp, synthetic construct
  source 1..19: mol_type = other DNA
ttcaataactttgcaacag

SEQ ID NO: 1172 - DNA, 20 bp, synthetic construct
  source 1..20: mol_type = other DNA
attcaataactttgcaacag

SEQ ID NO: 1173 - DNA, 20 bp, synthetic construct
  source 1..20: mol_type = other DNA
tttttctggctaagtccttt

SEQ ID NO: 1174 - DNA, 19 bp, synthetic construct
  source 1..19: mol_type = other DNA
agaaagtatttattttttc

SEQ ID NO: 1175 - DNA, 20 bp, synthetic construct
  source 1..20: mol_type = other DNA
tagaaagtatttattttttc

SEQ ID NO: 1176 - DNA, 20 bp, synthetic construct
  source 1..20: mol_type = other DNA
atagaaagtatttatttttt

SEQ ID NO: 1177 - DNA, 21 bp, synthetic construct
  source 1..21: mol_type = other DNA
tatagaaagtatttatttttt

SEQ ID NO: 1178 - DNA, 22 bp, synthetic construct
  source 1..22: mol_type = other DNA
ctatagaaagtatttatttttt

SEQ ID NO: 1179 - DNA, 20 bp, synthetic construct
  source 1..20: mol_type = other DNA
atatttcttgatcactccac

SEQ ID NO: 1180 - DNA, 19 bp, synthetic construct
  source 1..19: mol_type = other DNA
atcactccactgttcatag

SEQ ID NO: 1181 - DNA, 20 bp, synthetic construct
  source 1..20: mol_type = other DNA
gatcactccactgttcatag

SEQ ID NO: 1182 - DNA, 20 bp, synthetic construct
  source 1..20: mol_type = other DNA
ctggaacatttagaaaaaag

SEQ ID NO: 1183 - DNA, 21 bp, synthetic construct
  source 1..21: mol_type = other DNA
tctggaacatttagaaaaaag

SEQ ID NO: 1184 - DNA, 22 bp, synthetic construct
  source 1..22: mol_type = other DNA
ttctggaacatttagaaaaaag

SEQ ID NO: 1185 - DNA, 19 bp, synthetic construct
  source 1..19: mol_type = other DNA
gaaagtatttattttttct

SEQ ID NO: 1186 - DNA, 20 bp, synthetic construct
  source 1..20: mol_type = other DNA
agaaagtatttattttttct

SEQ ID NO: 1187 - DNA, 19 bp, synthetic construct
  source 1..19: mol_type = other DNA
gaacatttagaaaaaagtt

SEQ ID NO: 1188 - DNA, 20 bp, synthetic construct
  source 1..20: mol_type = other DNA
ggaacatttagaaaaaagtt

SEQ ID NO: 1189 - DNA, 19 bp, synthetic construct
  source 1..19: mol_type = other DNA
gatcactccactgttcata

SEQ ID NO: 1190 - DNA, 20 bp, synthetic construct
  source 1..20: mol_type = other DNA
tgatcactccactgttcata

SEQ ID NO: 1191 - DNA, 19 bp, synthetic construct
  source 1..19: mol_type = other DNA
ggaacatttagaaaaaagt

SEQ ID NO: 1192 - DNA, 20 bp, synthetic construct
  source 1..20: mol_type = other DNA
tggaacatttagaaaaaagt

SEQ ID NO: 1193 - DNA, 19 bp, synthetic construct
  source 1..19: mol_type = other DNA
tattttttctggaacattt

SEQ ID NO: 1194 - DNA, 20 bp, synthetic construct
  source 1..20: mol_type = other DNA
ttattttttctggaacattt

SEQ ID NO: 1195 - DNA, 19 bp, synthetic construct
  source 1..19: mol_type = other DNA
tgatcactccactgttcat

SEQ ID NO: 1196 - DNA, 20 bp, synthetic construct
  source 1..20: mol_type = other DNA
ttgatcactccactgttcat

SEQ ID NO: 1197 - DNA, 21 bp, synthetic construct
  source 1..21: mol_type = other DNA
cttgatcactccactgttcat

SEQ ID NO: 1198 - DNA, 22 bp, synthetic construct
  source 1..22: mol_type = other DNA
tcttgatcactccactgttcat

SEQ ID NO: 1199 - DNA, 19 bp, synthetic construct
  source 1..19: mol_type = other DNA
tgcaactttccatatttct

SEQ ID NO: 1200 - DNA, 20 bp, synthetic construct
  source 1..20: mol_type = other DNA
ctgcaactttccatatttct

SEQ ID NO: 1201 - DNA, 19 bp, synthetic construct
  source 1..19: mol_type = other DNA
ttattttttctggaacatt

SEQ ID NO: 1202 - DNA, 20 bp, synthetic construct
  source 1..20: mol_type = other DNA
tttattttttctggaacatt

SEQ ID NO: 1203 - DNA, 19 bp, synthetic construct
  source 1..19: mol_type = other DNA
ttctggaacatttagaaaa

SEQ ID NO: 1204 - DNA, 20 bp, synthetic construct
  source 1..20: mol_type = other DNA
tttctggaacatttagaaaa

SEQ ID NO: 1205 - DNA, 20 bp, synthetic construct
  source 1..20: mol_type = other DNA
ttctggaacatttagaaaaa

SEQ ID NO: 1206 - DNA, 19 bp, synthetic construct
  source 1..19: mol_type = other DNA
ttgatcactccactgttca

SEQ ID NO: 1207 - DNA, 20 bp, synthetic construct
  source 1..20: mol_type = other DNA
cttgatcactccactgttca

SEQ ID NO: 1208 - DNA, 21 bp, synthetic construct
  source 1..21: mol_type = other DNA
tcttgatcactccactgttca

SEQ ID NO: 1209 - DNA, 22 bp, synthetic construct
  source 1..22: mol_type = other DNA
ttcttgatcactccactgttca

SEQ ID NO: 1210 - DNA, 19 bp, synthetic construct
  source 1..19: mol_type = other DNA
ttttcttttttgctataga

SEQ ID NO: 1211 - DNA, 20 bp, synthetic construct
  source 1..20: mol_type = other DNA
cttttcttttttgctataga

SEQ ID NO: 1212 - DNA, 20 bp, synthetic construct
  source 1..20: mol_type = other DNA
ttttcttttttgctatagaa

SEQ ID NO: 1213 - DNA, 10 bp, synthetic construct
  source 1..10: mol_type = other DNA
tgtacattca

SEQ ID NO: 1214 - DNA, 11 bp, synthetic construct
  source 1..11: mol_type = other DNA
tgtacattcat

SEQ ID NO: 1215 - DNA, 12 bp, synthetic construct
  source 1..12: mol_type = other DNA
tgtacattcatt

SEQ ID NO: 1216 - DNA, 13 bp, synthetic construct
  source 1..13: mol_type = other DNA
tgtacattcatta

SEQ ID NO: 1217 - DNA, 14 bp, synthetic construct
  source 1..14: mol_type = other DNA
tgtacattcattat

SEQ ID NO: 1218 - DNA, 15 bp, synthetic construct
  source 1..15: mol_type = other DNA
tgtacattcattatg

SEQ ID NO: 1219 - DNA, 16 bp, synthetic construct
  source 1..16: mol_type = other DNA
tgtacattcattatgt

SEQ ID NO: 1220 - DNA, 10 bp, synthetic construct
  source 1..10: mol_type = other DNA
aagggcatta

SEQ ID NO: 1221 - DNA, 11 bp, synthetic construct
  source 1..11: mol_type = other DNA
aagggcattaa

SEQ ID NO: 1222 - DNA, 12 bp, synthetic construct
  source 1..12: mol_type = other DNA
aagggcattaat

SEQ ID NO: 1223 - DNA, 13 bp, synthetic construct
  source 1..13: mol_type = other DNA
aagggcattaatg

SEQ ID NO: 1224 - DNA, 14 bp, synthetic construct
  source 1..14: mol_type = other DNA
aagggcattaatga

SEQ ID NO: 1225 - DNA, 15 bp, synthetic construct
  source 1..15: mol_type = other DNA
aagggcattaatgag

SEQ ID NO: 1226 - DNA, 16 bp, synthetic construct
  source 1..16: mol_type = other DNA
aagggcattaatgagt

SEQ ID NO: 1227 - DNA, 10 bp, synthetic construct
  source 1..10: mol_type = other DNA
atctccagaa

SEQ ID NO: 1228 - DNA, 11 bp, synthetic construct
  source 1..11: mol_type = other DNA
atctccagaaa

SEQ ID NO: 1229 - DNA, 12 bp, synthetic construct
  source 1..12: mol_type = other DNA
atctccagaaaa

SEQ ID NO: 1230 - DNA, 13 bp, synthetic construct
  source 1..13: mol_type = other DNA
atctccagaaaaa

SEQ ID NO: 1231 - DNA, 14 bp, synthetic construct
  source 1..14: mol_type = other DNA
atctccagaaaaaa

SEQ ID NO: 1232 - DNA, 15 bp, synthetic construct
  source 1..15: mol_type = other DNA
atctccagaaaaaac

SEQ ID NO: 1233 - DNA, 16 bp, synthetic construct
  source 1..16: mol_type = other DNA
atctccagaaaaaaca

SEQ ID NO: 1234 - DNA, 10 bp, synthetic construct
  source 1..10: mol_type = other DNA
ttgtacattc

SEQ ID NO: 1235 - DNA, 11 bp, synthetic construct
  source 1..11: mol_type = other DNA
ttgtacattca

SEQ ID NO: 1236 - DNA, 12 bp, synthetic construct
  source 1..12: mol_type = other DNA
ttgtacattcat

SEQ ID NO: 1237 - DNA, 13 bp, synthetic construct
  source 1..13: mol_type = other DNA
ttgtacattcatt

SEQ ID NO: 1238 - DNA, 14 bp, synthetic construct
  source 1..14: mol_type = other DNA
ttgtacattcatta

SEQ ID NO: 1239 - DNA, 15 bp, synthetic construct
  source 1..15: mol_type = other DNA
ttgtacattcattat

SEQ ID NO: 1240 - DNA, 16 bp, synthetic construct
  source 1..16: mol_type = other DNA
ttgtacattcattatg

SEQ ID NO: 1241 - DNA, 10 bp, synthetic construct
  source 1..10: mol_type = other DNA
gcattaatga

SEQ ID NO: 1242 - DNA, 11 bp, synthetic construct
  source 1..11: mol_type = other DNA
gcattaatgag

SEQ ID NO: 1243 - DNA, 12 bp, synthetic construct
  source 1..12: mol_type = other DNA
gcattaatgagt

SEQ ID NO: 1244 - DNA, 13 bp, synthetic construct
  source 1..13: mol_type = other DNA
gcattaatgagtt

SEQ ID NO: 1245 - DNA, 14 bp, synthetic construct
  source 1..14: mol_type = other DNA
gcattaatgagttt

SEQ ID NO: 1246 - DNA, 15 bp, synthetic construct
  source 1..15: mol_type = other DNA
gcattaatgagttta

SEQ ID NO: 1247 - DNA, 16 bp, synthetic construct
  source 1..16: mol_type = other DNA
gcattaatgagtttag

SEQ ID NO: 1248 - DNA, 10 bp, synthetic construct
  source 1..10: mol_type = other DNA
atatttaggg

SEQ ID NO: 1249 - DNA, 11 bp, synthetic construct
  source 1..11: mol_type = other DNA
atatttagggg

SEQ ID NO: 1250 - DNA, 12 bp, synthetic construct
  source 1..12: mol_type = other DNA
atatttaggggt

SEQ ID NO: 1251 - DNA, 13 bp, synthetic construct
  source 1..13: mol_type = other DNA
atatttaggggta

SEQ ID NO: 1252 - DNA, 14 bp, synthetic construct
  source 1..14: mol_type = other DNA
atatttaggggtaa

SEQ ID NO: 1253 - DNA, 15 bp, synthetic construct
  source 1..15: mol_type = other DNA
atatttaggggtaag

SEQ ID NO: 1254 - DNA, 16 bp, synthetic construct
  source 1..16: mol_type = other DNA
atatttaggggtaagg

SEQ ID NO: 1255 - DNA, 10 bp, synthetic construct
  source 1..10: mol_type = other DNA
aaaacatcgc

SEQ ID NO: 1256 - DNA, 11 bp, synthetic construct
  source 1..11: mol_type = other DNA
aaaacatcgcc

SEQ ID NO: 1257 - DNA, 12 bp, synthetic construct
  source 1..12: mol_type = other DNA
aaaacatcgccg

SEQ ID NO: 1258 - DNA, 13 bp, synthetic construct
  source 1..13: mol_type = other DNA
aaaacatcgccga

SEQ ID NO: 1259 - DNA, 14 bp, synthetic construct
  source 1..14: mol_type = other DNA
aaaacatcgccgaa

SEQ ID NO: 1260 - DNA, 15 bp, synthetic construct
  source 1..15: mol_type = other DNA
aaaacatcgccgaag

SEQ ID NO: 1261 - DNA, 16 bp, synthetic construct
  source 1..16: mol_type = other DNA
aaaacatcgccgaagg

SEQ ID NO: 1262 - DNA, 10 bp, synthetic construct
  source 1..10: mol_type = other DNA
tatatttagg

SEQ ID NO: 1263 - DNA, 11 bp, synthetic construct
  source 1..11: mol_type = other DNA
tatatttaggg

SEQ ID NO: 1264 - DNA, 12 bp, synthetic construct
  source 1..12: mol_type = other DNA
tatatttagggg

SEQ ID NO: 1265 - DNA, 13 bp, synthetic construct
  source 1..13: mol_type = other DNA
tatatttaggggt

SEQ ID NO: 1266 - DNA, 14 bp, synthetic construct
  source 1..14: mol_type = other DNA
tatatttaggggta

SEQ ID NO: 1267 - DNA, 15 bp, synthetic construct
  source 1..15: mol_type = other DNA
tatatttaggggtaa

SEQ ID NO: 1268 - DNA, 16 bp, synthetic construct
  source 1..16: mol_type = other DNA
tatatttaggggtaag

SEQ ID NO: 1269 - DNA, 10 bp, synthetic construct
  source 1..10: mol_type = other DNA
aaaaacatcg

SEQ ID NO: 1270 - DNA, 11 bp, synthetic construct
  source 1..11: mol_type = other DNA
aaaaacatcgc

SEQ ID NO: 1271 - DNA, 12 bp, synthetic construct
  source 1..12: mol_type = other DNA
aaaaacatcgcc

SEQ ID NO: 1272 - DNA, 13 bp, synthetic construct
  source 1..13: mol_type = other DNA
aaaaacatcgccg

SEQ ID NO: 1273 - DNA, 14 bp, synthetic construct
  source 1..14: mol_type = other DNA
aaaaacatcgccga

SEQ ID NO: 1274 - DNA, 15 bp, synthetic construct
  source 1..15: mol_type = other DNA
aaaaacatcgccgaa

SEQ ID NO: 1275 - DNA, 16 bp, synthetic construct
  source 1..16: mol_type = other DNA
aaaaacatcgccgaag

SEQ ID NO: 1276 - DNA, 10 bp, synthetic construct
  source 1..10: mol_type = other DNA
aaacatcgcc

SEQ ID NO: 1277 - DNA, 11 bp, synthetic construct
  source 1..11: mol_type = other DNA
aaacatcgccg

SEQ ID NO: 1278 - DNA, 12 bp, synthetic construct
  source 1..12: mol_type = other DNA
aaacatcgccga

SEQ ID NO: 1279 - DNA, 13 bp, synthetic construct
  source 1..13: mol_type = other DNA
aaacatcgccgaa

SEQ ID NO: 1280 - DNA, 14 bp, synthetic construct
  source 1..14: mol_type = other DNA
aaacatcgccgaag

SEQ ID NO: 1281 - DNA, 15 bp, synthetic construct
  source 1..15: mol_type = other DNA
aaacatcgccgaagg

SEQ ID NO: 1282 - DNA, 16 bp, synthetic construct
  source 1..16: mol_type = other DNA
aaacatcgccgaaggg

SEQ ID NO: 1283 - DNA, 10 bp, synthetic construct
  source 1..10: mol_type = other DNA
ggcattaatg

SEQ ID NO: 1284 - DNA, 11 bp, synthetic construct
  source 1..11: mol_type = other DNA
ggcattaatga

SEQ ID NO: 1285 - DNA, 12 bp, synthetic construct
  source 1..12: mol_type = other DNA
ggcattaatgag

SEQ ID NO: 1286 - DNA, 13 bp, synthetic construct
  source 1..13: mol_type = other DNA
ggcattaatgagt

SEQ ID NO: 1287 - DNA, 14 bp, synthetic construct
  source 1..14: mol_type = other DNA
ggcattaatgagtt

SEQ ID NO: 1288 - DNA, 15 bp, synthetic construct
  source 1..15: mol_type = other DNA
ggcattaatgagttt

SEQ ID NO: 1289 - DNA, 16 bp, synthetic construct
  source 1..16: mol_type = other DNA
ggcattaatgagttta

SEQ ID NO: 1290 - DNA, 10 bp, synthetic construct
  source 1..10: mol_type = other DNA
gggcattaat

SEQ ID NO: 1291 - DNA, 11 bp, synthetic construct
  source 1..11: mol_type = other DNA
gggcattaatg

SEQ ID NO: 1292 - DNA, 12 bp, synthetic construct
  source 1..12: mol_type = other DNA
gggcattaatga

SEQ ID NO: 1293 - DNA, 13 bp, synthetic construct
  source 1..13: mol_type = other DNA
gggcattaatgag

SEQ ID NO: 1294 - DNA, 14 bp, synthetic construct
  source 1..14: mol_type = other DNA
gggcattaatgagt

SEQ ID NO: 1295 - DNA, 15 bp, synthetic construct
  source 1..15: mol_type = other DNA
gggcattaatgagtt

SEQ ID NO: 1296 - DNA, 16 bp, synthetic construct
  source 1..16: mol_type = other DNA
gggcattaatgagttt

SEQ ID NO: 1297 - DNA, 10 bp, synthetic construct
  source 1..10: mol_type = other DNA
aatcttttta

SEQ ID NO: 1298 - DNA, 11 bp, synthetic construct
  source 1..11: mol_type = other DNA
aatctttttat

SEQ ID NO: 1299 - DNA, 12 bp, synthetic construct
  source 1..12: mol_type = other DNA
aatctttttata

SEQ ID NO: 1300 - DNA, 13 bp, synthetic construct
  source 1..13: mol_type = other DNA
aatctttttatat

SEQ ID NO: 1301 - DNA, 14 bp, synthetic construct
  source 1..14: mol_type = other DNA
aatctttttatatt

SEQ ID NO: 1302 - DNA, 15 bp, synthetic construct
  source 1..15: mol_type = other DNA
aatctttttatattt

SEQ ID NO: 1303 - DNA, 16 bp, synthetic construct
  source 1..16: mol_type = other DNA
aatctttttatattta

SEQ ID NO: 1304 - DNA, 10 bp, synthetic construct
  source 1..10: mol_type = other DNA
gtacattcat

SEQ ID NO: 1305 - DNA, 11 bp, synthetic construct
  source 1..11: mol_type = other DNA
gtacattcatt

SEQ ID NO: 1306 - DNA, 12 bp, synthetic construct
  source 1..12: mol_type = other DNA
gtacattcatta

SEQ ID NO: 1307 - DNA, 13 bp, synthetic construct
  source 1..13: mol_type = other DNA
gtacattcattat

SEQ ID NO: 1308 - DNA, 14 bp, synthetic construct
  source 1..14: mol_type = other DNA
gtacattcattatg

SEQ ID NO: 1309 - DNA, 15 bp, synthetic construct
  source 1..15: mol_type = other DNA
gtacattcattatgt

SEQ ID NO: 1310 - DNA, 16 bp, synthetic construct
  source 1..16: mol_type = other DNA
gtacattcattatgta

SEQ ID NO: 1311 - DNA, 10 bp, synthetic construct
  source 1..10: mol_type = other DNA
ccgaagggca

SEQ ID NO: 1312 - DNA, 11 bp, synthetic construct
  source 1..11: mol_type = other DNA
ccgaagggcat

SEQ ID NO: 1313 - DNA, 12 bp, synthetic construct
  source 1..12: mol_type = other DNA
ccgaagggcatt

SEQ ID NO: 1314 - DNA, 13 bp, synthetic construct
  source 1..13: mol_type = other DNA
ccgaagggcatta

SEQ ID NO: 1315 - DNA, 14 bp, synthetic construct
  source 1..14: mol_type = other DNA
ccgaagggcattaa

SEQ ID NO: 1316 - DNA, 15 bp, synthetic construct
  source 1..15: mol_type = other DNA
ccgaagggcattaat

SEQ ID NO: 1317 - DNA, 16 bp, synthetic construct
  source 1..16: mol_type = other DNA
ccgaagggcattaatg

SEQ ID NO: 1318 - DNA, 10 bp, synthetic construct
  source 1..10: mol_type = other DNA
gaaaaaacat

SEQ ID NO: 1319 - DNA, 11 bp, synthetic construct
  source 1..11: mol_type = other DNA
gaaaaaacatc

SEQ ID NO: 1320 - DNA, 12 bp, synthetic construct
  source 1..12: mol_type = other DNA
gaaaaaacatcg

SEQ ID NO: 1321 - DNA, 13 bp, synthetic construct
  source 1..13: mol_type = other DNA
gaaaaaacatcgc

SEQ ID NO: 1322 - DNA, 14 bp, synthetic construct
  source 1..14: mol_type = other DNA
gaaaaaacatcgcc

SEQ ID NO: 1323 - DNA, 15 bp, synthetic construct
  source 1..15: mol_type = other DNA
gaaaaaacatcgccg

SEQ ID NO: 1324 - DNA, 16 bp, synthetic construct
  source 1..16: mol_type = other DNA
gaaaaaacatcgccga

SEQ ID NO: 1325 - DNA, 10 bp, synthetic construct
  source 1..10: mol_type = other DNA
aacataaatc

SEQ ID NO: 1326 - DNA, 11 bp, synthetic construct
  source 1..11: mol_type = other DNA
aacataaatct

SEQ ID NO: 1327 - DNA, 12 bp, synthetic construct
  source 1..12: mol_type = other DNA
aacataaatctc

SEQ ID NO: 1328 - DNA, 13 bp, synthetic construct
  source 1..13: mol_type = other DNA
aacataaatctcc

SEQ ID NO: 1329 - DNA, 14 bp, synthetic construct
  source 1..14: mol_type = other DNA
aacataaatctcca

SEQ ID NO: 1330 - DNA, 15 bp, synthetic construct
  source 1..15: mol_type = other DNA
aacataaatctccag

SEQ ID NO: 1331 - DNA, 16 bp, synthetic construct
  source 1..16: mol_type = other DNA
aacataaatctccaga

SEQ ID NO: 1332 - DNA, 10 bp, synthetic construct
  source 1..10: mol_type = other DNA
aaaaaacatc

SEQ ID NO: 1333 - DNA, 11 bp, synthetic construct
  source 1..11: mol_type = other DNA
aaaaaacatcg

SEQ ID NO: 1334 - DNA, 12 bp, synthetic construct
  source 1..12: mol_type = other DNA
aaaaaacatcgc

SEQ ID NO: 1335 - DNA, 13 bp, synthetic construct
  source 1..13: mol_type = other DNA
aaaaaacatcgcc

SEQ ID NO: 1336 - DNA, 14 bp, synthetic construct
  source 1..14: mol_type = other DNA
aaaaaacatcgccg

SEQ ID NO: 1337 - DNA, 15 bp, synthetic construct
  source 1..15: mol_type = other DNA
aaaaaacatcgccga

SEQ ID NO: 1338 - DNA, 16 bp, synthetic construct
  source 1..16: mol_type = other DNA
aaaaaacatcgccgaa

SEQ ID NO: 1339 - DNA, 10 bp, synthetic construct
  source 1..10: mol_type = other DNA
tgtatcacat

SEQ ID NO: 1340 - DNA, 11 bp, synthetic construct
  source 1..11: mol_type = other DNA
tgtatcacata

SEQ ID NO: 1341 - DNA, 12 bp, synthetic construct
  source 1..12: mol_type = other DNA
tgtatcacataa

SEQ ID NO: 1342 - DNA, 13 bp, synthetic construct
  source 1..13: mol_type = other DNA
tgtatcacataac

SEQ ID NO: 1343 - DNA, 14 bp, synthetic construct
  source 1..14: mol_type = other DNA
tgtatcacataact

SEQ ID NO: 1344 - DNA, 15 bp, synthetic construct
  source 1..15: mol_type = other DNA
tgtatcacataacta

SEQ ID NO: 1345 - DNA, 16 bp, synthetic construct
  source 1..16: mol_type = other DNA
tgtatcacataactat

SEQ ID NO: 1346 - DNA, 10 bp, synthetic construct
  source 1..10: mol_type = other DNA
atttaggggt

SEQ ID NO: 1347 - DNA, 11 bp, synthetic construct
  source 1..11: mol_type = other DNA
atttaggggta

SEQ ID NO: 1348 - DNA, 12 bp, synthetic construct
  source 1..12: mol_type = other DNA
atttaggggtaa

SEQ ID NO: 1349 - DNA, 13 bp, synthetic construct
  source 1..13: mol_type = other DNA
atttaggggtaag

SEQ ID NO: 1350 - DNA, 14 bp, synthetic construct
  source 1..14: mol_type = other DNA
atttaggggtaagg

SEQ ID NO: 1351 - DNA, 15 bp, synthetic construct
  source 1..15: mol_type = other DNA
atttaggggtaagga

SEQ ID NO: 1352 - DNA, 16 bp, synthetic construct
  source 1..16: mol_type = other DNA
atttaggggtaaggat

SEQ ID NO: 1353 - DNA, 10 bp, synthetic construct
  source 1..10: mol_type = other DNA
gaacataaat

SEQ ID NO: 1354 - DNA, 11 bp, synthetic construct
  source 1..11: mol_type = other DNA
gaacataaatc

SEQ ID NO: 1355 - DNA, 12 bp, synthetic construct
  source 1..12: mol_type = other DNA
gaacataaatct

SEQ ID NO: 1356 - DNA, 13 bp, synthetic construct
  source 1..13: mol_type = other DNA
gaacataaatctc

SEQ ID NO: 1357 - DNA, 14 bp, synthetic construct
  source 1..14: mol_type = other DNA
gaacataaatctcc

SEQ ID NO: 1358 - DNA, 15 bp, synthetic construct
  source 1..15: mol_type = other DNA
gaacataaatctcca

SEQ ID NO: 1359 - DNA, 16 bp, synthetic construct
  source 1..16: mol_type = other DNA
gaacataaatctccag

SEQ ID NO: 1360 - DNA, 10 bp, synthetic construct
  source 1..10: mol_type = other DNA
attatgtatc

SEQ ID NO: 1361 - DNA, 11 bp, synthetic construct
  source 1..11: mol_type = other DNA
attatgtatca

SEQ ID NO: 1362 - DNA, 12 bp, synthetic construct
  source 1..12: mol_type = other DNA
attatgtatcac

SEQ ID NO: 1363 - DNA, 13 bp, synthetic construct
  source 1..13: mol_type = other DNA
attatgtatcaca

SEQ ID NO: 1364 - DNA, 14 bp, synthetic construct
  source 1..14: mol_type = other DNA
attatgtatcacat

SEQ ID NO: 1365 - DNA, 15 bp, synthetic construct
  source 1..15: mol_type = other DNA
attatgtatcacata

SEQ ID NO: 1366 - DNA, 16 bp, synthetic construct
  source 1..16: mol_type = other DNA
attatgtatcacataa

SEQ ID NO: 1367 - DNA, 10 bp, synthetic construct
  source 1..10: mol_type = other DNA
tatttagggg

SEQ ID NO: 1368 - DNA, 11 bp, synthetic construct
  source 1..11: mol_type = other DNA
tatttaggggt

SEQ ID NO: 1369 - DNA, 12 bp, synthetic construct
  source 1..12: mol_type = other DNA
tatttaggggta

SEQ ID NO: 1370 - DNA, 13 bp, synthetic construct
  source 1..13: mol_type = other DNA
tatttaggggtaa

SEQ ID NO: 1371 - DNA, 14 bp, synthetic construct
  source 1..14: mol_type = other DNA
tatttaggggtaag

SEQ ID NO: 1372 - DNA, 15 bp, synthetic construct
  source 1..15: mol_type = other DNA
tatttaggggtaagg

SEQ ID NO: 1373 - DNA, 16 bp, synthetic construct
  source 1..16: mol_type = other DNA
tatttaggggtaagga

SEQ ID NO: 1374 - DNA, 10 bp, synthetic construct
  source 1..10: mol_type = other DNA
acataaatct

SEQ ID NO: 1375 - DNA, 11 bp, synthetic construct
  source 1..11: mol_type = other DNA
acataaatctc

SEQ ID NO: 1376 - DNA, 12 bp, synthetic construct
  source 1..12: mol_type = other DNA
acataaatctcc

SEQ ID NO: 1377 - DNA, 13 bp, synthetic construct
  source 1..13: mol_type = other DNA
acataaatctcca

SEQ ID NO: 1378 - DNA, 14 bp, synthetic construct
  source 1..14: mol_type = other DNA
acataaatctccag

SEQ ID NO: 1379 - DNA, 15 bp, synthetic construct
  source 1..15: mol_type = other DNA
acataaatctccaga

SEQ ID NO: 1380 - DNA, 16 bp, synthetic construct
  source 1..16: mol_type = other DNA
acataaatctccagaa

SEQ ID NO: 1381 - DNA, 10 bp, synthetic construct
  source 1..10: mol_type = other DNA
gcttatgcct

SEQ ID NO: 1382 - DNA, 11 bp, synthetic construct
  source 1..11: mol_type = other DNA
gcttatgcctt

SEQ ID NO: 1383 - DNA, 12 bp, synthetic construct
  source 1..12: mol_type = other DNA
gcttatgccttc

SEQ ID NO: 1384 - DNA, 13 bp, synthetic construct
  source 1..13: mol_type = other DNA
gcttatgccttct

SEQ ID NO: 1385 - DNA, 14 bp, synthetic construct
  source 1..14: mol_type = other DNA
gcttatgccttctc

SEQ ID NO: 1386 - DNA, 15 bp, synthetic construct
  source 1..15: mol_type = other DNA
gcttatgccttctct

SEQ ID NO: 1387 - DNA, 16 bp, synthetic construct
  source 1..16: mol_type = other DNA
gcttatgccttctctt

SEQ ID NO: 1388 - DNA, 10 bp, synthetic construct
  source 1..10: mol_type = other DNA
tatctaggca

SEQ ID NO: 1389 - DNA, 11 bp, synthetic construct
  source 1..11: mol_type = other DNA
tatctaggcat

SEQ ID NO: 1390 - DNA, 12 bp, synthetic construct
  source 1..12: mol_type = other DNA
tatctaggcata

SEQ ID NO: 1391 - DNA, 13 bp, synthetic construct
  source 1..13: mol_type = other DNA
tatctaggcatag

SEQ ID NO: 1392 - DNA, 14 bp, synthetic construct
  source 1..14: mol_type = other DNA
tatctaggcatagg

SEQ ID NO: 1393 - DNA, 15 bp, synthetic construct
  source 1..15: mol_type = other DNA
tatctaggcataggc

SEQ ID NO: 1394 - DNA, 16 bp, synthetic construct
  source 1..16: mol_type = other DNA
tatctaggcataggct

SEQ ID NO: 1395 - DNA, 10 bp, synthetic construct
  source 1..10: mol_type = other DNA
cataggctta

SEQ ID NO: 1396 - DNA, 11 bp, synthetic construct
  source 1..11: mol_type = other DNA
cataggcttat

SEQ ID NO: 1397 - DNA, 12 bp, synthetic construct
  source 1..12: mol_type = other DNA
cataggcttatg

SEQ ID NO: 1398 - DNA, 13 bp, synthetic construct
  source 1..13: mol_type = other DNA
cataggcttatgc

SEQ ID NO: 1399 - DNA, 14 bp, synthetic construct
  source 1..14: mol_type = other DNA
cataggcttatgcc

SEQ ID NO: 1400 - DNA, 15 bp, synthetic construct
  source 1..15: mol_type = other DNA
cataggcttatgcct

SEQ ID NO: 1401 - DNA, 16 bp, synthetic construct
  source 1..16: mol_type = other DNA
cataggcttatgcctt

SEQ ID NO: 1402 - DNA, 10 bp, synthetic construct
  source 1..10: mol_type = other DNA
cataggaagc

SEQ ID NO: 1403 - DNA, 11 bp, synthetic construct
  source 1..11: mol_type = other DNA
cataggaagct

SEQ ID NO: 1404 - DNA, 12 bp, synthetic construct
  source 1..12: mol_type = other DNA
cataggaagcta

SEQ ID NO: 1405 - DNA, 13 bp, synthetic construct
  source 1..13: mol_type = other DNA
cataggaagctat

SEQ ID NO: 1406 - DNA, 14 bp, synthetic construct
  source 1..14: mol_type = other DNA
cataggaagctatg

SEQ ID NO: 1407 - DNA, 15 bp, synthetic construct
  source 1..15: mol_type = other DNA
cataggaagctatga

SEQ ID NO: 1408 - DNA, 16 bp, synthetic construct
  source 1..16: mol_type = other DNA
cataggaagctatgat

SEQ ID NO: 1409 - DNA, 10 bp, synthetic construct
  source 1..10: mol_type = other DNA
ttgttatccg

SEQ ID NO: 1410 - DNA, 11 bp, synthetic construct
  source 1..11: mol_type = other DNA
ttgttatccgg

SEQ ID NO: 1411 - DNA, 12 bp, synthetic construct
  source 1..12: mol_type = other DNA
ttgttatccggg

SEQ ID NO: 1412 - DNA, 13 bp, synthetic construct
  source 1..13: mol_type = other DNA
ttgttatccgggt

SEQ ID NO: 1413 - DNA, 14 bp, synthetic construct
  source 1..14: mol_type = other DNA
ttgttatccgggtc

SEQ ID NO: 1414 - DNA, 15 bp, synthetic construct
  source 1..15: mol_type = other DNA
ttgttatccgggtca

SEQ ID NO: 1415 - DNA, 16 bp, synthetic construct
  source 1..16: mol_type = other DNA
ttgttatccgggtcat

SEQ ID NO: 1416 - DNA, 10 bp, synthetic construct
  source 1..10: mol_type = other DNA
cgatttatct

SEQ ID NO: 1417 - DNA, 11 bp, synthetic construct
  source 1..11: mol_type = other DNA
cgatttatcta

SEQ ID NO: 1418 - DNA, 12 bp, synthetic construct
  source 1..12: mol_type = other DNA
cgatttatctag

SEQ ID NO: 1419 - DNA, 13 bp, synthetic construct
  source 1..13: mol_type = other DNA
cgatttatctagg

SEQ ID NO: 1420 - DNA, 14 bp, synthetic construct
  source 1..14: mol_type = other DNA
cgatttatctaggc

SEQ ID NO: 1421 - DNA, 15 bp, synthetic construct
  source 1..15: mol_type = other DNA
cgatttatctaggca

SEQ ID NO: 1422 - DNA, 16 bp, synthetic construct
  source 1..16: mol_type = other DNA
cgatttatctaggcat

SEQ ID NO: 1423 - DNA, 10 bp, synthetic construct
  source 1..10: mol_type = other DNA
ccttctcttt

SEQ ID NO: 1424 - DNA, 11 bp, synthetic construct
  source 1..11: mol_type = other DNA
ccttctcttta

SEQ ID NO: 1425 - DNA, 12 bp, synthetic construct
  source 1..12: mol_type = other DNA
ccttctctttat

SEQ ID NO: 1426 - DNA, 13 bp, synthetic construct
  source 1..13: mol_type = other DNA
ccttctctttatt

SEQ ID NO: 1427 - DNA, 14 bp, synthetic construct
  source 1..14: mol_type = other DNA
ccttctctttattg

SEQ ID NO: 1428 - DNA, 15 bp, synthetic construct
  source 1..15: mol_type = other DNA
ccttctctttattgt

SEQ ID NO: 1429 - DNA, 16 bp, synthetic construct
  source 1..16: mol_type = other DNA
ccttctctttattgtg

SEQ ID NO: 1430 - DNA, 10 bp, synthetic construct
  source 1..10: mol_type = other DNA
gccttctctt

SEQ ID NO: 1431 - DNA, 11 bp, synthetic construct
  source 1..11: mol_type = other DNA
gccttctcttt

SEQ ID NO: 1432 - DNA, 12 bp, synthetic construct
  source 1..12: mol_type = other DNA
gccttctcttta

SEQ ID NO: 1433 - DNA, 13 bp, synthetic construct
  source 1..13: mol_type = other DNA
gccttctctttat

SEQ ID NO: 1434 - DNA, 14 bp, synthetic construct
  source 1..14: mol_type = other DNA
gccttctctttatt

SEQ ID NO: 1435 - DNA, 15 bp, synthetic construct
  source 1..15: mol_type = other DNA
gccttctctttattg

SEQ ID NO: 1436 - DNA, 16 bp, synthetic construct
  source 1..16: mol_type = other DNA
gccttctctttattgt

SEQ ID NO: 1437 - DNA, 10 bp, synthetic construct
  source 1..10: mol_type = other DNA
tcgcgattta

SEQ ID NO: 1438 - DNA, 11 bp, synthetic construct
  source 1..11: mol_type = other DNA
tcgcgatttat

SEQ ID NO: 1439 - DNA, 12 bp, synthetic construct
  source 1..12: mol_type = other DNA
tcgcgatttatc

SEQ ID NO: 1440 - DNA, 13 bp, synthetic construct
  source 1..13: mol_type = other DNA
tcgcgatttatct

SEQ ID NO: 1441 - DNA, 14 bp, synthetic construct
  source 1..14: mol_type = other DNA
tcgcgatttatcta

SEQ ID NO: 1442 - DNA, 15 bp, synthetic construct
  source 1..15: mol_type = other DNA
tcgcgatttatctag

SEQ ID NO: 1443 - DNA, 16 bp, synthetic construct
  source 1..16: mol_type = other DNA
tcgcgatttatctagg

SEQ ID NO: 1444 - DNA, 10 bp, synthetic construct
  source 1..10: mol_type = other DNA
ttatccgggt

SEQ ID NO: 1445 - DNA, 11 bp, synthetic construct
  source 1..11: mol_type = other DNA
ttatccgggtc

SEQ ID NO: 1446 - DNA, 12 bp, synthetic construct
  source 1..12: mol_type = other DNA
ttatccgggtca

SEQ ID NO: 1447 - DNA, 13 bp, synthetic construct
  source 1..13: mol_type = other DNA
ttatccgggtcat

SEQ ID NO: 1448 - DNA, 14 bp, synthetic construct
  source 1..14: mol_type = other DNA
ttatccgggtcata

SEQ ID NO: 1449 - DNA, 15 bp, synthetic construct
  source 1..15: mol_type = other DNA
ttatccgggtcatag

SEQ ID NO: 1450 - DNA, 16 bp, synthetic construct
  source 1..16: mol_type = other DNA
ttatccgggtcatagg

SEQ ID NO: 1451 - DNA, 10 bp, synthetic construct
  source 1..10: mol_type = other DNA
tttatctagg

SEQ ID NO: 1452 - DNA, 11 bp, synthetic construct
  source 1..11: mol_type = other DNA
tttatctaggc

SEQ ID NO: 1453 - DNA, 12 bp, synthetic construct
  source 1..12: mol_type = other DNA
tttatctaggca

SEQ ID NO: 1454 - DNA, 13 bp, synthetic construct
  source 1..13: mol_type = other DNA
tttatctaggcat

SEQ ID NO: 1455 - DNA, 14 bp, synthetic construct
  source 1..14: mol_type = other DNA
tttatctaggcata

SEQ ID NO: 1456 - DNA, 15 bp, synthetic construct
  source 1..15: mol_type = other DNA
tttatctaggcatag

SEQ ID NO: 1457 - DNA, 16 bp, synthetic construct
  source 1..16: mol_type = other DNA
tttatctaggcatagg

SEQ ID NO: 1458 - DNA, 10 bp, synthetic construct
  source 1..10: mol_type = other DNA
atcgcgattt

SEQ ID NO: 1459 - DNA, 11 bp, synthetic construct
  source 1..11: mol_type = other DNA
atcgcgattta

SEQ ID NO: 1460 - DNA, 12 bp, synthetic construct
  source 1..12: mol_type = other DNA
atcgcgatttat

SEQ ID NO: 1461 - DNA, 13 bp, synthetic construct
  source 1..13: mol_type = other DNA
atcgcgatttatc

SEQ ID NO: 1462 - DNA, 14 bp, synthetic construct
  source 1..14: mol_type = other DNA
atcgcgatttatct

SEQ ID NO: 1463 - DNA, 15 bp, synthetic construct
  source 1..15: mol_type = other DNA
atcgcgatttatcta

SEQ ID NO: 1464 - DNA, 16 bp, synthetic construct
  source 1..16: mol_type = other DNA
atcgcgatttatctag

SEQ ID NO: 1465 - DNA, 10 bp, synthetic construct
  source 1..10: mol_type = other DNA
tatcgcgatt

SEQ ID NO: 1466 - DNA, 11 bp, synthetic construct
  source 1..11: mol_type = other DNA
tatcgcgattt

SEQ ID NO: 1467 - DNA, 12 bp, synthetic construct
  source 1..12: mol_type = other DNA
tatcgcgattta

SEQ ID NO: 1468 - DNA, 13 bp, synthetic construct
  source 1..13: mol_type = other DNA
tatcgcgatttat

SEQ ID NO: 1469 - DNA, 14 bp, synthetic construct
  source 1..14: mol_type = other DNA
tatcgcgatttatc

SEQ ID NO: 1470 - DNA, 15 bp, synthetic construct
  source 1..15: mol_type = other DNA
tatcgcgatttatct

SEQ ID NO: 1471 - DNA, 16 bp, synthetic construct
  source 1..16: mol_type = other DNA
tatcgcgatttatcta

SEQ ID NO: 1472 - DNA, 10 bp, synthetic construct
  source 1..10: mol_type = other DNA
gttatccggg

SEQ ID NO: 1473 - DNA, 11 bp, synthetic construct
  source 1..11: mol_type = other DNA
gttatccgggt

SEQ ID NO: 1474 - DNA, 12 bp, synthetic construct
  source 1..12: mol_type = other DNA
gttatccgggtc

SEQ ID NO: 1475 - DNA, 13 bp, synthetic construct
  source 1..13: mol_type = other DNA
gttatccgggtca

SEQ ID NO: 1476 - DNA, 14 bp, synthetic construct
  source 1..14: mol_type = other DNA
gttatccgggtcat

SEQ ID NO: 1477 - DNA, 15 bp, synthetic construct
  source 1..15: mol_type = other DNA
gttatccgggtcata

SEQ ID NO: 1478 - DNA, 16 bp, synthetic construct
  source 1..16: mol_type = other DNA
gttatccgggtcatag

SEQ ID NO: 1479 - DNA, 10 bp, synthetic construct
  source 1..10: mol_type = other DNA
ttcttcccag

SEQ ID NO: 1480 - DNA, 11 bp, synthetic construct
  source 1..11: mol_type = other DNA
ttcttcccagt

SEQ ID NO: 1481 - DNA, 12 bp, synthetic construct
  source 1..12: mol_type = other DNA
ttcttcccagta

SEQ ID NO: 1482 - DNA, 13 bp, synthetic construct
  source 1..13: mol_type = other DNA
ttcttcccagtaa

SEQ ID NO: 1483 - DNA, 14 bp, synthetic construct
  source 1..14: mol_type = other DNA
ttcttcccagtaag

SEQ ID NO: 1484 - DNA, 15 bp, synthetic construct
  source 1..15: mol_type = other DNA
ttcttcccagtaaga

SEQ ID NO: 1485 - DNA, 16 bp, synthetic construct
  source 1..16: mol_type = other DNA
ttcttcccagtaagag

SEQ ID NO: 1486 - DNA, 10 bp, synthetic construct
  source 1..10: mol_type = other DNA
attcttccca

SEQ ID NO: 1487 - DNA, 11 bp, synthetic construct
  source 1..11: mol_type = other DNA
attcttcccag

SEQ ID NO: 1488 - DNA, 12 bp, synthetic construct
  source 1..12: mol_type = other DNA
attcttcccagt

SEQ ID NO: 1489 - DNA, 13 bp, synthetic construct
  source 1..13: mol_type = other DNA
attcttcccagta

SEQ ID NO: 1490 - DNA, 14 bp, synthetic construct
  source 1..14: mol_type = other DNA
attcttcccagtaa

SEQ ID NO: 1491 - DNA, 15 bp, synthetic construct
  source 1..15: mol_type = other DNA
attcttcccagtaag

SEQ ID NO: 1492 - DNA, 16 bp, synthetic construct
  source 1..16: mol_type = other DNA
attcttcccagtaaga

SEQ ID NO: 1493 - DNA, 10 bp, synthetic construct
  source 1..10: mol_type = other DNA
gaagctatga

SEQ ID NO: 1494 - DNA, 11 bp, synthetic construct
  source 1..11: mol_type = other DNA
gaagctatgat

SEQ ID NO: 1495 - DNA, 12 bp, synthetic construct
  source 1..12: mol_type = other DNA
gaagctatgatt

SEQ ID NO: 1496 - DNA, 13 bp, synthetic construct
  source 1..13: mol_type = other DNA
gaagctatgattc

SEQ ID NO: 1497 - DNA, 14 bp, synthetic construct
  source 1..14: mol_type = other DNA
gaagctatgattct

SEQ ID NO: 1498 - DNA, 15 bp, synthetic construct
  source 1..15: mol_type = other DNA
gaagctatgattctt

SEQ ID NO: 1499 - DNA, 16 bp, synthetic construct
  source 1..16: mol_type = other DNA
gaagctatgattcttc

SEQ ID NO: 1500 - DNA, 10 bp, synthetic construct
  source 1..10: mol_type = other DNA
ataggcttat

SEQ ID NO: 1501 - DNA, 11 bp, synthetic construct
  source 1..11: mol_type = other DNA
ataggcttatg

SEQ ID NO: 1502 - DNA, 12 bp, synthetic construct
  source 1..12: mol_type = other DNA
ataggcttatgc

SEQ ID NO: 1503 - DNA, 13 bp, synthetic construct
  source 1..13: mol_type = other DNA
ataggcttatgcc

SEQ ID NO: 1504 - DNA, 14 bp, synthetic construct
  source 1..14: mol_type = other DNA
ataggcttatgcct

SEQ ID NO: 1505 - DNA, 15 bp, synthetic construct
  source 1..15: mol_type = other DNA
ataggcttatgcctt

SEQ ID NO: 1506 - DNA, 16 bp, synthetic construct
  source 1..16: mol_type = other DNA
ataggcttatgccttc

SEQ ID NO: 1507 - DNA, 10 bp, synthetic construct
  source 1..10: mol_type = other DNA
ataggaagct

SEQ ID NO: 1508 - DNA, 11 bp, synthetic construct
  source 1..11: mol_type = other DNA
ataggaagcta

SEQ ID NO: 1509 - DNA, 12 bp, synthetic construct
  source 1..12: mol_type = other DNA
ataggaagctat

SEQ ID NO: 1510 - DNA, 13 bp, synthetic construct
  source 1..13: mol_type = other DNA
ataggaagctatg

SEQ ID NO: 1511 - DNA, 14 bp, synthetic construct
  source 1..14: mol_type = other DNA
ataggaagctatga

SEQ ID NO: 1512 - DNA, 15 bp, synthetic construct
  source 1..15: mol_type = other DNA
ataggaagctatgat

SEQ ID NO: 1513 - DNA, 16 bp, synthetic construct
  source 1..16: mol_type = other DNA
ataggaagctatgatt

SEQ ID NO: 1514 - DNA, 10 bp, synthetic construct
  source 1..10: mol_type = other DNA
cgcgatttat

SEQ ID NO: 1515 - DNA, 11 bp, synthetic construct
  source 1..11: mol_type = other DNA
cgcgatttatc

SEQ ID NO: 1516 - DNA, 12 bp, synthetic construct
  source 1..12: mol_type = other DNA
cgcgatttatct

SEQ ID NO: 1517 - DNA, 13 bp, synthetic construct
  source 1..13: mol_type = other DNA
cgcgatttatcta

SEQ ID NO: 1518 - DNA, 14 bp, synthetic construct
  source 1..14: mol_type = other DNA
cgcgatttatctag

SEQ ID NO: 1519 - DNA, 15 bp, synthetic construct
  source 1..15: mol_type = other DNA
cgcgatttatctagg

SEQ ID NO: 1520 - DNA, 16 bp, synthetic construct
  source 1..16: mol_type = other DNA
cgcgatttatctaggc

SEQ ID NO: 1521 - DNA, 10 bp, synthetic construct
  source 1..10: mol_type = other DNA
tgttatccgg

SEQ ID NO: 1522 - DNA, 11 bp, synthetic construct
  source 1..11: mol_type = other DNA
tgttatccggg

SEQ ID NO: 1523 - DNA, 12 bp, synthetic construct
  source 1..12: mol_type = other DNA
tgttatccgggt

SEQ ID NO: 1524 - DNA, 13 bp, synthetic construct
  source 1..13: mol_type = other DNA
tgttatccgggtc

SEQ ID NO: 1525 - DNA, 14 bp, synthetic construct
  source 1..14: mol_type = other DNA
tgttatccgggtca

SEQ ID NO: 1526 - DNA, 15 bp, synthetic construct
  source 1..15: mol_type = other DNA
tgttatccgggtcat

SEQ ID NO: 1527 - DNA, 16 bp, synthetic construct
  source 1..16: mol_type = other DNA
tgttatccgggtcata

SEQ ID NO: 1528 - DNA, 10 bp, synthetic construct
  source 1..10: mol_type = other DNA
tcataggaag

SEQ ID NO: 1529 - DNA, 11 bp, synthetic construct
  source 1..11: mol_type = other DNA
tcataggaagc

SEQ ID NO: 1530 - DNA, 12 bp, synthetic construct
  source 1..12: mol_type = other DNA
tcataggaagct

SEQ ID NO: 1531 - DNA, 13 bp, synthetic construct
  source 1..13: mol_type = other DNA
tcataggaagcta

SEQ ID NO: 1532 - DNA, 14 bp, synthetic construct
  source 1..14: mol_type = other DNA
tcataggaagctat

SEQ ID NO: 1533 - DNA, 15 bp, synthetic construct
  source 1..15: mol_type = other DNA
tcataggaagctatg

SEQ ID NO: 1534 - DNA, 16 bp, synthetic construct
  source 1..16: mol_type = other DNA
tcataggaagctatga

SEQ ID NO: 1535 - DNA, 10 bp, synthetic construct
  source 1..10: mol_type = other DNA
tatccgggtc

SEQ ID NO: 1536 - DNA, 11 bp, synthetic construct
  source 1..11: mol_type = other DNA
tatccgggtca

SEQ ID NO: 1537 - DNA, 12 bp, synthetic construct
  source 1..12: mol_type = other DNA
tatccgggtcat

SEQ ID NO: 1538 - DNA, 13 bp, synthetic construct
  source 1..13: mol_type = other DNA
tatccgggtcata

SEQ ID NO: 1539 - DNA, 14 bp, synthetic construct
  source 1..14: mol_type = other DNA
tatccgggtcatag

SEQ ID NO: 1540 - DNA, 15 bp, synthetic construct
  source 1..15: mol_type = other DNA
tatccgggtcatagg

SEQ ID NO: 1541 - DNA, 16 bp, synthetic construct
  source 1..16: mol_type = other DNA
tatccgggtcatagga

SEQ ID NO: 1542 - DNA, 10 bp, synthetic construct
  source 1..10: mol_type = other DNA
gcgatttatc

SEQ ID NO: 1543 - DNA, 11 bp, synthetic construct
  source 1..11: mol_type = other DNA
gcgatttatct

SEQ ID NO: 1544 - DNA, 12 bp, synthetic construct
  source 1..12: mol_type = other DNA
gcgatttatcta

SEQ ID NO: 1545 - DNA, 13 bp, synthetic construct
  source 1..13: mol_type = other DNA
gcgatttatctag

SEQ ID NO: 1546 - DNA, 14 bp, synthetic construct
  source 1..14: mol_type = other DNA
gcgatttatctagg

SEQ ID NO: 1547 - DNA, 15 bp, synthetic construct
  source 1..15: mol_type = other DNA
gcgatttatctaggc

SEQ ID NO: 1548 - DNA, 16 bp, synthetic construct
  source 1..16: mol_type = other DNA
gcgatttatctaggca

SEQ ID NO: 1549 - DNA, 10 bp, synthetic construct
  source 1..10: mol_type = other DNA
tctttattgt

SEQ ID NO: 1550 - DNA, 11 bp, synthetic construct
  source 1..11: mol_type = other DNA
tctttattgtg

SEQ ID NO: 1551 - DNA, 12 bp, synthetic construct
  source 1..12: mol_type = other DNA
tctttattgtga

SEQ ID NO: 1552 - DNA, 13 bp, synthetic construct
  source 1..13: mol_type = other DNA
tctttattgtgag

SEQ ID NO: 1553 - DNA, 14 bp, synthetic construct
  source 1..14: mol_type = other DNA
tctttattgtgagg

SEQ ID NO: 1554 - DNA, 15 bp, synthetic construct
  source 1..15: mol_type = other DNA
tctttattgtgagga

SEQ ID NO: 1555 - DNA, 16 bp, synthetic construct
  source 1..16: mol_type = other DNA
tctttattgtgaggac

SEQ ID NO: 1556 - DNA, 10 bp, synthetic construct
  source 1..10: mol_type = other DNA
atccgggtca

SEQ ID NO: 1557 - DNA, 11 bp, synthetic construct
  source 1..11: mol_type = other DNA
atccgggtcat

SEQ ID NO: 1558 - DNA, 12 bp, synthetic construct
  source 1..12: mol_type = other DNA
atccgggtcata

SEQ ID NO: 1559 - DNA, 13 bp, synthetic construct
  source 1..13: mol_type = other DNA
atccgggtcatag

SEQ ID NO: 1560 - DNA, 14 bp, synthetic construct
  source 1..14: mol_type = other DNA
atccgggtcatagg

SEQ ID NO: 1561 - DNA, 15 bp, synthetic construct
  source 1..15: mol_type = other DNA
atccgggtcatagga

SEQ ID NO: 1562 - DNA, 16 bp, synthetic construct
  source 1..16: mol_type = other DNA
atccgggtcataggaa

SEQ ID NO: 1563 - DNA, 10 bp, synthetic construct
  source 1..10: mol_type = other DNA
agaagaaggc

SEQ ID NO: 1564 - DNA, 11 bp, synthetic construct
  source 1..11: mol_type = other DNA
agaagaaggct

SEQ ID NO: 1565 - DNA, 12 bp, synthetic construct
  source 1..12: mol_type = other DNA
agaagaaggctg

SEQ ID NO: 1566 - DNA, 13 bp, synthetic construct
  source 1..13: mol_type = other DNA
agaagaaggctga

SEQ ID NO: 1567 - DNA, 14 bp, synthetic construct
  source 1..14: mol_type = other DNA
agaagaaggctgag

SEQ ID NO: 1568 - DNA, 15 bp, synthetic construct
  source 1..15: mol_type = other DNA
agaagaaggctgagc

SEQ ID NO: 1569 - DNA, 16 bp, synthetic construct
  source 1..16: mol_type = other DNA
agaagaaggctgagct

SEQ ID NO: 1570 - DNA, 10 bp, synthetic construct
  source 1..10: mol_type = other DNA
atcaaaggaa

SEQ ID NO: 1571 - DNA, 11 bp, synthetic construct
  source 1..11: mol_type = other DNA
atcaaaggaat

SEQ ID NO: 1572 - DNA, 12 bp, synthetic construct
  source 1..12: mol_type = other DNA
atcaaaggaatc

SEQ ID NO: 1573 - DNA, 13 bp, synthetic construct
  source 1..13: mol_type = other DNA
atcaaaggaatca

SEQ ID NO: 1574 - DNA, 14 bp, synthetic construct
  source 1..14: mol_type = other DNA
atcaaaggaatcat

SEQ ID NO: 1575 - DNA, 15 bp, synthetic construct
  source 1..15: mol_type = other DNA
atcaaaggaatcatc

SEQ ID NO: 1576 - DNA, 16 bp, synthetic construct
  source 1..16: mol_type = other DNA
atcaaaggaatcatcc

SEQ ID NO: 1577 - DNA, 10 bp, synthetic construct
  source 1..10: mol_type = other DNA
ttccctatgc

SEQ ID NO: 1578 - DNA, 11 bp, synthetic construct
  source 1..11: mol_type = other DNA
ttccctatgca

SEQ ID NO: 1579 - DNA, 12 bp, synthetic construct
  source 1..12: mol_type = other DNA
ttccctatgcac

SEQ ID NO: 1580 - DNA, 13 bp, synthetic construct
  source 1..13: mol_type = other DNA
ttccctatgcact

SEQ ID NO: 1581 - DNA, 14 bp, synthetic construct
  source 1..14: mol_type = other DNA
ttccctatgcacta

SEQ ID NO: 1582 - DNA, 15 bp, synthetic construct
  source 1..15: mol_type = other DNA
ttccctatgcactaa

SEQ ID NO: 1583 - DNA, 16 bp, synthetic construct
  source 1..16: mol_type = other DNA
ttccctatgcactaat

SEQ ID NO: 1584 - DNA, 10 bp, synthetic construct
  source 1..10: mol_type = other DNA
cactaatcaa

SEQ ID NO: 1585 - DNA, 11 bp, synthetic construct
  source 1..11: mol_type = other DNA
cactaatcaaa

SEQ ID NO: 1586 - DNA, 12 bp, synthetic construct
  source 1..12: mol_type = other DNA
cactaatcaaag

SEQ ID NO: 1587 - DNA, 13 bp, synthetic construct
  source 1..13: mol_type = other DNA
cactaatcaaagg

SEQ ID NO: 1588 - DNA, 14 bp, synthetic construct
  source 1..14: mol_type = other DNA
cactaatcaaagga

SEQ ID NO: 1589 - DNA, 15 bp, synthetic construct
  source 1..15: mol_type = other DNA
cactaatcaaaggaa

SEQ ID NO: 1590 - DNA, 16 bp, synthetic construct
  source 1..16: mol_type = other DNA
cactaatcaaaggaat

SEQ ID NO: 1591 - DNA, 10 bp, synthetic construct
  source 1..10: mol_type = other DNA
ggtgttttta

SEQ ID NO: 1592 - DNA, 11 bp, synthetic construct
  source 1..11: mol_type = other DNA
ggtgtttttat

SEQ ID NO: 1593 - DNA, 12 bp, synthetic construct
  source 1..12: mol_type = other DNA
ggtgtttttatc

SEQ ID NO: 1594 - DNA, 13 bp, synthetic construct
  source 1..13: mol_type = other DNA
ggtgtttttatct

SEQ ID NO: 1595 - DNA, 14 bp, synthetic construct
  source 1..14: mol_type = other DNA
ggtgtttttatctg

SEQ ID NO: 1596 - DNA, 15 bp, synthetic construct
  source 1..15: mol_type = other DNA
ggtgtttttatctgt

SEQ ID NO: 1597 - DNA, 16 bp, synthetic construct
  source 1..16: mol_type = other DNA
ggtgtttttatctgtg

SEQ ID NO: 1598 - DNA, 10 bp, synthetic construct
  source 1..10: mol_type = other DNA
aagtatctca

SEQ ID NO: 1599 - DNA, 11 bp, synthetic construct
  source 1..11: mol_type = other DNA
aagtatctcac

SEQ ID NO: 1600 - DNA, 12 bp, synthetic construct
  source 1..12: mol_type = other DNA
aagtatctcaca

SEQ ID NO: 1601 - DNA, 13 bp, synthetic construct
  source 1..13: mol_type = other DNA
aagtatctcacat

SEQ ID NO: 1602 - DNA, 14 bp, synthetic construct
  source 1..14: mol_type = other DNA
aagtatctcacata

SEQ ID NO: 1603 - DNA, 15 bp, synthetic construct
  source 1..15: mol_type = other DNA
aagtatctcacatag

SEQ ID NO: 1604 - DNA, 16 bp, synthetic construct
  source 1..16: mol_type = other DNA
aagtatctcacatagg

SEQ ID NO: 1605 - DNA, 10 bp, synthetic construct
  source 1..10: mol_type = other DNA
gaagtatctc

SEQ ID NO: 1606 - DNA, 11 bp, synthetic construct
  source 1..11: mol_type = other DNA
gaagtatctca

SEQ ID NO: 1607 - DNA, 12 bp, synthetic construct
  source 1..12: mol_type = other DNA
gaagtatctcac

SEQ ID NO: 1608 - DNA, 13 bp, synthetic construct
  source 1..13: mol_type = other DNA
gaagtatctcaca

SEQ ID NO: 1609 - DNA, 14 bp, synthetic construct
  source 1..14: mol_type = other DNA
gaagtatctcacat

SEQ ID NO: 1610 - DNA, 15 bp, synthetic construct
  source 1..15: mol_type = other DNA
gaagtatctcacata

SEQ ID NO: 1611 - DNA, 16 bp, synthetic construct
  source 1..16: mol_type = other DNA
gaagtatctcacatag

SEQ ID NO: 1612 - DNA, 10 bp, synthetic construct
  source 1..10: mol_type = other DNA
gaagaagaag

SEQ ID NO: 1613 - DNA, 11 bp, synthetic construct
  source 1..11: mol_type = other DNA
gaagaagaagg

SEQ ID NO: 1614 - DNA, 12 bp, synthetic construct
  source 1..12: mol_type = other DNA
gaagaagaaggc

SEQ ID NO: 1615 - DNA, 13 bp, synthetic construct
  source 1..13: mol_type = other DNA
gaagaagaaggct

SEQ ID NO: 1616 - DNA, 14 bp, synthetic construct
  source 1..14: mol_type = other DNA
gaagaagaaggctg

SEQ ID NO: 1617 - DNA, 15 bp, synthetic construct
  source 1..15: mol_type = other DNA
gaagaagaaggctga

SEQ ID NO: 1618 - DNA, 16 bp, synthetic construct
  source 1..16: mol_type = other DNA
gaagaagaaggctgag

SEQ ID NO: 1619 - DNA, 10 bp, synthetic construct
  source 1..10: mol_type = other DNA
agaagaagaa

SEQ ID NO: 1620 - DNA, 11 bp, synthetic construct
  source 1..11: mol_type = other DNA
agaagaagaag

SEQ ID NO: 1621 - DNA, 12 bp, synthetic construct
  source 1..12: mol_type = other DNA
agaagaagaagg

SEQ ID NO: 1622 - DNA, 13 bp, synthetic construct
  source 1..13: mol_type = other DNA
agaagaagaaggc

SEQ ID NO: 1623 - DNA, 14 bp, synthetic construct
  source 1..14: mol_type = other DNA
agaagaagaaggct

SEQ ID NO: 1624 - DNA, 15 bp, synthetic construct
  source 1..15: mol_type = other DNA
agaagaagaaggctg

SEQ ID NO: 1625 - DNA, 16 bp, synthetic construct
  source 1..16: mol_type = other DNA
agaagaagaaggctga

SEQ ID NO: 1626 - DNA, 10 bp, synthetic construct
  source 1..10: mol_type = other DNA
gaaccctgag

SEQ ID NO: 1627 - DNA, 11 bp, synthetic construct
  source 1..11: mol_type = other DNA
gaaccctgaga

SEQ ID NO: 1628 - DNA, 12 bp, synthetic construct
  source 1..12: mol_type = other DNA
gaaccctgagaa

SEQ ID NO: 1629 - DNA, 13 bp, synthetic construct
  source 1..13: mol_type = other DNA
gaaccctgagaag

SEQ ID NO: 1630 - DNA, 14 bp, synthetic construct
  source 1..14: mol_type = other DNA
gaaccctgagaaga

SEQ ID NO: 1631 - DNA, 15 bp, synthetic construct
  source 1..15: mol_type = other DNA
gaaccctgagaagaa

SEQ ID NO: 1632 - DNA, 16 bp, synthetic construct
  source 1..16: mol_type = other DNA
gaaccctgagaagaag

SEQ ID NO: 1633 - DNA, 10 bp, synthetic construct
  source 1..10: mol_type = other DNA
agaaccctga

SEQ ID NO: 1634 - DNA, 11 bp, synthetic construct
  source 1..11: mol_type = other DNA
agaaccctgag

SEQ ID NO: 1635 - DNA, 12 bp, synthetic construct
  source 1..12: mol_type = other DNA
agaaccctgaga

SEQ ID NO: 1636 - DNA, 13 bp, synthetic construct
  source 1..13: mol_type = other DNA
agaaccctgagaa

SEQ ID NO: 1637 - DNA, 14 bp, synthetic construct
  source 1..14: mol_type = other DNA
agaaccctgagaag

SEQ ID NO: 1638 - DNA, 15 bp, synthetic construct
  source 1..15: mol_type = other DNA
agaaccctgagaaga

SEQ ID NO: 1639 - DNA, 16 bp, synthetic construct
  source 1..16: mol_type = other DNA
agaaccctgagaagaa

SEQ ID NO: 1640 - DNA, 10 bp, synthetic construct
  source 1..10: mol_type = other DNA
accctgagaa

SEQ ID NO: 1641 - DNA, 11 bp, synthetic construct
  source 1..11: mol_type = other DNA
accctgagaag

SEQ ID NO: 1642 - DNA, 12 bp, synthetic construct
  source 1..12: mol_type = other DNA
accctgagaaga

SEQ ID NO: 1643 - DNA, 13 bp, synthetic construct
  source 1..13: mol_type = other DNA
accctgagaagaa

SEQ ID NO: 1644 - DNA, 14 bp, synthetic construct
  source 1..14: mol_type = other DNA
accctgagaagaag

SEQ ID NO: 1645 - DNA, 15 bp, synthetic construct
  source 1..15: mol_type = other DNA
accctgagaagaaga

SEQ ID NO: 1646 - DNA, 16 bp, synthetic construct
  source 1..16: mol_type = other DNA
accctgagaagaagaa

SEQ ID NO: 1647 - DNA, 10 bp, synthetic construct
  source 1..10: mol_type = other DNA
tatgcactaa

SEQ ID NO: 1648 - DNA, 11 bp, synthetic construct
  source 1..11: mol_type = other DNA
tatgcactaat

SEQ ID NO: 1649 - DNA, 12 bp, synthetic construct
  source 1..12: mol_type = other DNA
tatgcactaatc

SEQ ID NO: 1650 - DNA, 13 bp, synthetic construct
  source 1..13: mol_type = other DNA
tatgcactaatca

SEQ ID NO: 1651 - DNA, 14 bp, synthetic construct
  source 1..14: mol_type = other DNA
tatgcactaatcaa

SEQ ID NO: 1652 - DNA, 15 bp, synthetic construct
  source 1..15: mol_type = other DNA
tatgcactaatcaaa

SEQ ID NO: 1653 - DNA, 16 bp, synthetic construct
  source 1..16: mol_type = other DNA
tatgcactaatcaaag

SEQ ID NO: 1654 - DNA, 10 bp, synthetic construct
  source 1..10: mol_type = other DNA
ctatgcacta

SEQ ID NO: 1655 - DNA, 11 bp, synthetic construct
  source 1..11: mol_type = other DNA
ctatgcactaa

SEQ ID NO: 1656 - DNA, 12 bp, synthetic construct
  source 1..12: mol_type = other DNA
ctatgcactaat

SEQ ID NO: 1657 - DNA, 13 bp, synthetic construct
  source 1..13: mol_type = other DNA
ctatgcactaatc

SEQ ID NO: 1658 - DNA, 14 bp, synthetic construct
  source 1..14: mol_type = other DNA
ctatgcactaatca

SEQ ID NO: 1659 - DNA, 15 bp, synthetic construct
  source 1..15: mol_type = other DNA
ctatgcactaatcaa

SEQ ID NO: 1660 - DNA, 16 bp, synthetic construct
  source 1..16: mol_type = other DNA
ctatgcactaatcaaa

SEQ ID NO: 1661 - DNA, 10 bp, synthetic construct
  source 1..10: mol_type = other DNA
actaatcaaa

SEQ ID NO: 1662 - DNA, 11 bp, synthetic construct
  source 1..11: mol_type = other DNA
actaatcaaag

SEQ ID NO: 1663 - DNA, 12 bp, synthetic construct
  source 1..12: mol_type = other DNA
actaatcaaagg

SEQ ID NO: 1664 - DNA, 13 bp, synthetic construct
  source 1..13: mol_type = other DNA
actaatcaaagga

SEQ ID NO: 1665 - DNA, 14 bp, synthetic construct
  source 1..14: mol_type = other DNA
actaatcaaaggaa

SEQ ID NO: 1666 - DNA, 15 bp, synthetic construct
  source 1..15: mol_type = other DNA
actaatcaaaggaat

SEQ ID NO: 1667 - DNA, 16 bp, synthetic construct
  source 1..16: mol_type = other DNA
actaatcaaaggaatc

SEQ ID NO: 1668 - DNA, 10 bp, synthetic construct
  source 1..10: mol_type = other DNA
gtgtttttat

SEQ ID NO: 1669 - DNA, 11 bp, synthetic construct
  source 1..11: mol_type = other DNA
gtgtttttatc

SEQ ID NO: 1670 - DNA, 12 bp, synthetic construct
  source 1..12: mol_type = other DNA
gtgtttttatct

SEQ ID NO: 1671 - DNA, 13 bp, synthetic construct
  source 1..13: mol_type = other DNA
gtgtttttatctg

SEQ ID NO: 1672 - DNA, 14 bp, synthetic construct
  source 1..14: mol_type = other DNA
gtgtttttatctgt

SEQ ID NO: 1673 - DNA, 15 bp, synthetic construct
  source 1..15: mol_type = other DNA
gtgtttttatctgtg

SEQ ID NO: 1674 - DNA, 16 bp, synthetic construct
  source 1..16: mol_type = other DNA
gtgtttttatctgtgc

SEQ ID NO: 1675 - DNA, 10 bp, synthetic construct
  source 1..10: mol_type = other DNA
aagaagaagg

SEQ ID NO: 1676 - DNA, 11 bp, synthetic construct
  source 1..11: mol_type = other DNA
aagaagaaggc

SEQ ID NO: 1677 - DNA, 12 bp, synthetic construct
  source 1..12: mol_type = other DNA
aagaagaaggct

SEQ ID NO: 1678 - DNA, 13 bp, synthetic construct
  source 1..13: mol_type = other DNA
aagaagaaggctg

SEQ ID NO: 1679 - DNA, 14 bp, synthetic construct
  source 1..14: mol_type = other DNA
aagaagaaggctga

SEQ ID NO: 1680 - DNA, 15 bp, synthetic construct
  source 1..15: mol_type = other DNA
aagaagaaggctgag

SEQ ID NO: 1681 - DNA, 16 bp, synthetic construct
  source 1..16: mol_type = other DNA
aagaagaaggctgagc

SEQ ID NO: 1682 - DNA, 10 bp, synthetic construct
  source 1..10: mol_type = other DNA
aaaggaatca

SEQ ID NO: 1683 - DNA, 11 bp, synthetic construct
  source 1..11: mol_type = other DNA
aaaggaatcat

SEQ ID NO: 1684 - DNA, 12 bp, synthetic construct
  source 1..12: mol_type = other DNA
aaaggaatcatc

SEQ ID NO: 1685 - DNA, 13 bp, synthetic construct
  source 1..13: mol_type = other DNA
aaaggaatcatcc

SEQ ID NO: 1686 - DNA, 14 bp, synthetic construct
  source 1..14: mol_type = other DNA
aaaggaatcatcct

SEQ ID NO: 1687 - DNA, 15 bp, synthetic construct
  source 1..15: mol_type = other DNA
aaaggaatcatcctc

SEQ ID NO: 1688 - DNA, 16 bp, synthetic construct
  source 1..16: mol_type = other DNA
aaaggaatcatcctcc

SEQ ID NO: 1689 - DNA, 10 bp, synthetic construct
  source 1..10: mol_type = other DNA
caaaggaatc

SEQ ID NO: 1690 - DNA, 11 bp, synthetic construct
  source 1..11: mol_type = other DNA
caaaggaatca

SEQ ID NO: 1691 - DNA, 12 bp, synthetic construct
  source 1..12: mol_type = other DNA
caaaggaatcat

SEQ ID NO: 1692 - DNA, 13 bp, synthetic construct
  source 1..13: mol_type = other DNA
caaaggaatcatc

SEQ ID NO: 1693 - DNA, 14 bp, synthetic construct
  source 1..14: mol_type = other DNA
caaaggaatcatcc

SEQ ID NO: 1694 - DNA, 15 bp, synthetic construct
  source 1..15: mol_type = other DNA
caaaggaatcatcct

SEQ ID NO: 1695 - DNA, 16 bp, synthetic construct
  source 1..16: mol_type = other DNA
caaaggaatcatcctc

SEQ ID NO: 1696 - DNA, 10 bp, synthetic construct
  source 1..10: mol_type = other DNA
tattgaagta

SEQ ID NO: 1697 - DNA, 11 bp, synthetic construct
  source 1..11: mol_type = other DNA
tattgaagtat

SEQ ID NO: 1698 - DNA, 12 bp, synthetic construct
  source 1..12: mol_type = other DNA
tattgaagtatc

SEQ ID NO: 1699 - DNA, 13 bp, synthetic construct
  source 1..13: mol_type = other DNA
tattgaagtatct

SEQ ID NO: 1700 - DNA, 14 bp, synthetic construct
  source 1..14: mol_type = other DNA
tattgaagtatctc

SEQ ID NO: 1701 - DNA, 15 bp, synthetic construct
  source 1..15: mol_type = other DNA
tattgaagtatctca

SEQ ID NO: 1702 - DNA, 16 bp, synthetic construct
  source 1..16: mol_type = other DNA
tattgaagtatctcac

SEQ ID NO: 1703 - DNA, 10 bp, synthetic construct
  source 1..10: mol_type = other DNA
ctattgaagt

SEQ ID NO: 1704 - DNA, 11 bp, synthetic construct
  source 1..11: mol_type = other DNA
ctattgaagta

SEQ ID NO: 1705 - DNA, 12 bp, synthetic construct
  source 1..12: mol_type = other DNA
ctattgaagtat

SEQ ID NO: 1706 - DNA, 13 bp, synthetic construct
  source 1..13: mol_type = other DNA
ctattgaagtatc

SEQ ID NO: 1707 - DNA, 14 bp, synthetic construct
  source 1..14: mol_type = other DNA
ctattgaagtatct

SEQ ID NO: 1708 - DNA, 15 bp, synthetic construct
  source 1..15: mol_type = other DNA
ctattgaagtatctc

SEQ ID NO: 1709 - DNA, 16 bp, synthetic construct
  source 1..16: mol_type = other DNA
ctattgaagtatctca

SEQ ID NO: 1710 - DNA, 10 bp, synthetic construct
  source 1..10: mol_type = other DNA
tgcactaatc

SEQ ID NO: 1711 - DNA, 11 bp, synthetic construct
  source 1..11: mol_type = other DNA
tgcactaatca

SEQ ID NO: 1712 - DNA, 12 bp, synthetic construct
  source 1..12: mol_type = other DNA
tgcactaatcaa

SEQ ID NO: 1713 - DNA, 13 bp, synthetic construct
  source 1..13: mol_type = other DNA
tgcactaatcaaa

SEQ ID NO: 1714 - DNA, 14 bp, synthetic construct
  source 1..14: mol_type = other DNA
tgcactaatcaaag

SEQ ID NO: 1715 - DNA, 15 bp, synthetic construct
  source 1..15: mol_type = other DNA
tgcactaatcaaagg

SEQ ID NO: 1716 - DNA, 16 bp, synthetic construct
  source 1..16: mol_type = other DNA
tgcactaatcaaagga

SEQ ID NO: 1717 - DNA, 10 bp, synthetic construct
  source 1..10: mol_type = other DNA
cttccctatg

SEQ ID NO: 1718 - DNA, 11 bp, synthetic construct
  source 1..11: mol_type = other DNA
cttccctatgc

SEQ ID NO: 1719 - DNA, 12 bp, synthetic construct
  source 1..12: mol_type = other DNA
cttccctatgca

SEQ ID NO: 1720 - DNA, 13 bp, synthetic construct
  source 1..13: mol_type = other DNA
cttccctatgcac

SEQ ID NO: 1721 - DNA, 14 bp, synthetic construct
  source 1..14: mol_type = other DNA
cttccctatgcact

SEQ ID NO: 1722 - DNA, 15 bp, synthetic construct
  source 1..15: mol_type = other DNA
cttccctatgcacta

SEQ ID NO: 1723 - DNA, 16 bp, synthetic construct
  source 1..16: mol_type = other DNA
cttccctatgcactaa

SEQ ID NO: 1724 - DNA, 10 bp, synthetic construct
  source 1..10: mol_type = other DNA
gcactaatca

SEQ ID NO: 1725 - DNA, 11 bp, synthetic construct
  source 1..11: mol_type = other DNA
gcactaatcaa

SEQ ID NO: 1726 - DNA, 12 bp, synthetic construct
  source 1..12: mol_type = other DNA
gcactaatcaaa

SEQ ID NO: 1727 - DNA, 13 bp, synthetic construct
  source 1..13: mol_type = other DNA
gcactaatcaaag

SEQ ID NO: 1728 - DNA, 14 bp, synthetic construct
  source 1..14: mol_type = other DNA
gcactaatcaaagg

SEQ ID NO: 1729 - DNA, 15 bp, synthetic construct
  source 1..15: mol_type = other DNA
gcactaatcaaagga

SEQ ID NO: 1730 - DNA, 16 bp, synthetic construct
  source 1..16: mol_type = other DNA
gcactaatcaaaggaa

SEQ ID NO: 1731 - DNA, 10 bp, synthetic construct
  source 1..10: mol_type = other DNA
aaccctgaga

SEQ ID NO: 1732 - DNA, 11 bp, synthetic construct
  source 1..11: mol_type = other DNA
aaccctgagaa

SEQ ID NO: 1733 - DNA, 12 bp, synthetic construct
  source 1..12: mol_type = other DNA
aaccctgagaag

SEQ ID NO: 1734 - DNA, 13 bp, synthetic construct
  source 1..13: mol_type = other DNA
aaccctgagaaga

SEQ ID NO: 1735 - DNA, 14 bp, synthetic construct
  source 1..14: mol_type = other DNA
aaccctgagaagaa

SEQ ID NO: 1736 - DNA, 15 bp, synthetic construct
  source 1..15: mol_type = other DNA
aaccctgagaagaag

SEQ ID NO: 1737 - DNA, 16 bp, synthetic construct
  source 1..16: mol_type = other DNA
aaccctgagaagaaga

SEQ ID NO: 1738 - DNA, 10 bp, synthetic construct
  source 1..10: mol_type = other DNA
gatgattcct

SEQ ID NO: 1739 - DNA, 11 bp, synthetic construct
  source 1..11: mol_type = other DNA
gatgattcctt

SEQ ID NO: 1740 - DNA, 12 bp, synthetic construct
  source 1..12: mol_type = other DNA
gatgattccttt

SEQ ID NO: 1741 - DNA, 13 bp, synthetic construct
  source 1..13: mol_type = other DNA
gatgattcctttg

SEQ ID NO: 1742 - DNA, 14 bp, synthetic construct
  source 1..14: mol_type = other DNA
gatgattcctttga

SEQ ID NO: 1743 - DNA, 15 bp, synthetic construct
  source 1..15: mol_type = other DNA
gatgattcctttgat

SEQ ID NO: 1744 - DNA, 16 bp, synthetic construct
  source 1..16: mol_type = other DNA
gatgattcctttgatt

SEQ ID NO: 1745 - DNA, 10 bp, synthetic construct
  source 1..10: mol_type = other DNA
tctcattctg

SEQ ID NO: 1746 - DNA, 11 bp, synthetic construct
  source 1..11: mol_type = other DNA
tctcattctgc

SEQ ID NO: 1747 - DNA, 12 bp, synthetic construct
  source 1..12: mol_type = other DNA
tctcattctgca

SEQ ID NO: 1748 - DNA, 13 bp, synthetic construct
  source 1..13: mol_type = other DNA
tctcattctgcat

SEQ ID NO: 1749 - DNA, 14 bp, synthetic construct
  source 1..14: mol_type = other DNA
tctcattctgcatt

SEQ ID NO: 1750 - DNA, 15 bp, synthetic construct
  source 1..15: mol_type = other DNA
tctcattctgcattg

SEQ ID NO: 1751 - DNA, 16 bp, synthetic construct
  source 1..16: mol_type = other DNA
tctcattctgcattgt

SEQ ID NO: 1752 - DNA, 10 bp, synthetic construct
  source 1..10: mol_type = other DNA
atctcattct

SEQ ID NO: 1753 - DNA, 11 bp, synthetic construct
  source 1..11: mol_type = other DNA
atctcattctg

SEQ ID NO: 1754 - DNA, 12 bp, synthetic construct
  source 1..12: mol_type = other DNA
atctcattctgc

SEQ ID NO: 1755 - DNA, 13 bp, synthetic construct
  source 1..13: mol_type = other DNA
atctcattctgca

SEQ ID NO: 1756 - DNA, 14 bp, synthetic construct
  source 1..14: mol_type = other DNA
atctcattctgcat

SEQ ID NO: 1757 - DNA, 15 bp, synthetic construct
  source 1..15: mol_type = other DNA
atctcattctgcatt

SEQ ID NO: 1758 - DNA, 16 bp, synthetic construct
  source 1..16: mol_type = other DNA
atctcattctgcattg

SEQ ID NO: 1759 - DNA, 10 bp, synthetic construct
  source 1..10: mol_type = other DNA
cattctgcat

SEQ ID NO: 1760 - DNA, 11 bp, synthetic construct
  source 1..11: mol_type = other DNA
cattctgcatt

SEQ ID NO: 1761 - DNA, 12 bp, synthetic construct
  source 1..12: mol_type = other DNA
cattctgcattg

SEQ ID NO: 1762 - DNA, 13 bp, synthetic construct
  source 1..13: mol_type = other DNA
cattctgcattgt

SEQ ID NO: 1763 - DNA, 14 bp, synthetic construct
  source 1..14: mol_type = other DNA
cattctgcattgtt

SEQ ID NO: 1764 - DNA, 15 bp, synthetic construct
  source 1..15: mol_type = other DNA
cattctgcattgttc

SEQ ID NO: 1765 - DNA, 16 bp, synthetic construct
  source 1..16: mol_type = other DNA
cattctgcattgttct

SEQ ID NO: 1766 - DNA, 10 bp, synthetic construct
  source 1..10: mol_type = other DNA
tcattctgca

SEQ ID NO: 1767 - DNA, 11 bp, synthetic construct
  source 1..11: mol_type = other DNA
tcattctgcat

SEQ ID NO: 1768 - DNA, 12 bp, synthetic construct
  source 1..12: mol_type = other DNA
tcattctgcatt

SEQ ID NO: 1769 - DNA, 13 bp, synthetic construct
  source 1..13: mol_type = other DNA
tcattctgcattg

SEQ ID NO: 1770 - DNA, 14 bp, synthetic construct
  source 1..14: mol_type = other DNA
tcattctgcattgt

SEQ ID NO: 1771 - DNA, 15 bp, synthetic construct
  source 1..15: mol_type = other DNA
tcattctgcattgtt

SEQ ID NO: 1772 - DNA, 16 bp, synthetic construct
  source 1..16: mol_type = other DNA
tcattctgcattgttc

SEQ ID NO: 1773 - DNA, 10 bp, synthetic construct
  source 1..10: mol_type = other DNA
ggatgattcc

SEQ ID NO: 1774 - DNA, 11 bp, synthetic construct
  source 1..11: mol_type = other DNA
ggatgattcct

SEQ ID NO: 1775 - DNA, 12 bp, synthetic construct
  source 1..12: mol_type = other DNA
ggatgattcctt

SEQ ID NO: 1776 - DNA, 13 bp, synthetic construct
  source 1..13: mol_type = other DNA
ggatgattccttt

SEQ ID NO: 1777 - DNA, 14 bp, synthetic construct
  source 1..14: mol_type = other DNA
ggatgattcctttg

SEQ ID NO: 1778 - DNA, 15 bp, synthetic construct
  source 1..15: mol_type = other DNA
ggatgattcctttga

SEQ ID NO: 1779 - DNA, 16 bp, synthetic construct
  source 1..16: mol_type = other DNA
ggatgattcctttgat

SEQ ID NO: 1780 - DNA, 10 bp, synthetic construct
  source 1..10: mol_type = other DNA
ccatctcatt

SEQ ID NO: 1781 - DNA, 11 bp, synthetic construct
  source 1..11: mol_type = other DNA
ccatctcattc

SEQ ID NO: 1782 - DNA, 12 bp, synthetic construct
  source 1..12: mol_type = other DNA
ccatctcattct

SEQ ID NO: 1783 - DNA, 13 bp, synthetic construct
  source 1..13: mol_type = other DNA
ccatctcattctg

SEQ ID NO: 1784 - DNA, 14 bp, synthetic construct
  source 1..14: mol_type = other DNA
ccatctcattctgc

SEQ ID NO: 1785 - DNA, 15 bp, synthetic construct
  source 1..15: mol_type = other DNA
ccatctcattctgca

SEQ ID NO: 1786 - DNA, 16 bp, synthetic construct
  source 1..16: mol_type = other DNA
ccatctcattctgcat

SEQ ID NO: 1787 - DNA, 10 bp, synthetic construct
  source 1..10: mol_type = other DNA
aaatattcac

SEQ ID NO: 1788 - DNA, 11 bp, synthetic construct
  source 1..11: mol_type = other DNA
aaatattcacc

SEQ ID NO: 1789 - DNA, 12 bp, synthetic construct
  source 1..12: mol_type = other DNA
aaatattcacca

SEQ ID NO: 1790 - DNA, 13 bp, synthetic construct
  source 1..13: mol_type = other DNA
aaatattcaccac

SEQ ID NO: 1791 - DNA, 14 bp, synthetic construct
  source 1..14: mol_type = other DNA
aaatattcaccacc

SEQ ID NO: 1792 - DNA, 15 bp, synthetic construct
  source 1..15: mol_type = other DNA
aaatattcaccacca

SEQ ID NO: 1793 - DNA, 16 bp, synthetic construct
  source 1..16: mol_type = other DNA
aaatattcaccaccat

SEQ ID NO: 1794 - DNA, 10 bp, synthetic construct
  source 1..10: mol_type = other DNA
catctcattc

SEQ ID NO: 1795 - DNA, 11 bp, synthetic construct
  source 1..11: mol_type = other DNA
catctcattct

SEQ ID NO: 1796 - DNA, 12 bp, synthetic construct
  source 1..12: mol_type = other DNA
catctcattctg

SEQ ID NO: 1797 - DNA, 13 bp, synthetic construct
  source 1..13: mol_type = other DNA
catctcattctgc

SEQ ID NO: 1798 - DNA, 14 bp, synthetic construct
  source 1..14: mol_type = other DNA
catctcattctgca

SEQ ID NO: 1799 - DNA, 15 bp, synthetic construct
  source 1..15: mol_type = other DNA
catctcattctgcat

SEQ ID NO: 1800 - DNA, 16 bp, synthetic construct
  source 1..16: mol_type = other DNA
catctcattctgcatt

SEQ ID NO: 1801 - DNA, 10 bp, synthetic construct
  source 1..10: mol_type = other DNA
tctgcattgt

SEQ ID NO: 1802 - DNA, 11 bp, synthetic construct
  source 1..11: mol_type = other DNA
tctgcattgtt

SEQ ID NO: 1803 - DNA, 12 bp, synthetic construct
  source 1..12: mol_type = other DNA
tctgcattgttc

SEQ ID NO: 1804 - DNA, 13 bp, synthetic construct
  source 1..13: mol_type = other DNA
tctgcattgttct

SEQ ID NO: 1805 - DNA, 14 bp, synthetic construct
  source 1..14: mol_type = other DNA
tctgcattgttctg

SEQ ID NO: 1806 - DNA, 15 bp, synthetic construct
  source 1..15: mol_type = other DNA
tctgcattgttctgc

SEQ ID NO: 1807 - DNA, 16 bp, synthetic construct
  source 1..16: mol_type = other DNA
tctgcattgttctgcg

SEQ ID NO: 1808 - DNA, 10 bp, synthetic construct
  source 1..10: mol_type = other DNA
tgttctgcgc

SEQ ID NO: 1809 - DNA, 11 bp, synthetic construct
  source 1..11: mol_type = other DNA
tgttctgcgca

SEQ ID NO: 1810 - DNA, 12 bp, synthetic construct
  source 1..12: mol_type = other DNA
tgttctgcgcat

SEQ ID NO: 1811 - DNA, 13 bp, synthetic construct
  source 1..13: mol_type = other DNA
tgttctgcgcatg

SEQ ID NO: 1812 - DNA, 14 bp, synthetic construct
  source 1..14: mol_type = other DNA
tgttctgcgcatgg

SEQ ID NO: 1813 - DNA, 15 bp, synthetic construct
  source 1..15: mol_type = other DNA
tgttctgcgcatggc

SEQ ID NO: 1814 - DNA, 16 bp, synthetic construct
  source 1..16: mol_type = other DNA
tgttctgcgcatggcg

SEQ ID NO: 1815 - DNA, 10 bp, synthetic construct
  source 1..10: mol_type = other DNA
atgattcctt

SEQ ID NO: 1816 - DNA, 11 bp, synthetic construct
  source 1..11: mol_type = other DNA
atgattccttt

SEQ ID NO: 1817 - DNA, 12 bp, synthetic construct
  source 1..12: mol_type = other DNA
atgattcctttg

SEQ ID NO: 1818 - DNA, 13 bp, synthetic construct
  source 1..13: mol_type = other DNA
atgattcctttga

SEQ ID NO: 1819 - DNA, 14 bp, synthetic construct
  source 1..14: mol_type = other DNA
atgattcctttgat

SEQ ID NO: 1820 - DNA, 15 bp, synthetic construct
  source 1..15: mol_type = other DNA
atgattcctttgatt

SEQ ID NO: 1821 - DNA, 16 bp, synthetic construct
  source 1..16: mol_type = other DNA
atgattcctttgatta

SEQ ID NO: 1822 - DNA, 10 bp, synthetic construct
  source 1..10: mol_type = other DNA
ttagtgcata

SEQ ID NO: 1823 - DNA, 11 bp, synthetic construct
  source 1..11: mol_type = other DNA
ttagtgcatag

SEQ ID NO: 1824 - DNA, 12 bp, synthetic construct
  source 1..12: mol_type = other DNA
ttagtgcatagg

SEQ ID NO: 1825 - DNA, 13 bp, synthetic construct
  source 1..13: mol_type = other DNA
ttagtgcataggg

SEQ ID NO: 1826 - DNA, 14 bp, synthetic construct
  source 1..14: mol_type = other DNA
ttagtgcataggga

SEQ ID NO: 1827 - DNA, 15 bp, synthetic construct
  source 1..15: mol_type = other DNA
ttagtgcatagggaa

SEQ ID NO: 1828 - DNA, 16 bp, synthetic construct
  source 1..16: mol_type = other DNA
ttagtgcatagggaag

SEQ ID NO: 1829 - DNA, 10 bp, synthetic construct
  source 1..10: mol_type = other DNA
ataaaaacac

SEQ ID NO: 1830 - DNA, 11 bp, synthetic construct
  source 1..11: mol_type = other DNA
ataaaaacacc

SEQ ID NO: 1831 - DNA, 12 bp, synthetic construct
  source 1..12: mol_type = other DNA
ataaaaacacca

SEQ ID NO: 1832 - DNA, 13 bp, synthetic construct
  source 1..13: mol_type = other DNA
ataaaaacaccac

SEQ ID NO: 1833 - DNA, 14 bp, synthetic construct
  source 1..14: mol_type = other DNA
ataaaaacaccaca

SEQ ID NO: 1834 - DNA, 15 bp, synthetic construct
  source 1..15: mol_type = other DNA
ataaaaacaccacaa

SEQ ID NO: 1835 - DNA, 16 bp, synthetic construct
  source 1..16: mol_type = other DNA
ataaaaacaccacaaa

SEQ ID NO: 1836 - DNA, 10 bp, synthetic construct
  source 1..10: mol_type = other DNA
ctcattctgc

SEQ ID NO: 1837 - DNA, 11 bp, synthetic construct
  source 1..11: mol_type = other DNA
ctcattctgca

SEQ ID NO: 1838 - DNA, 12 bp, synthetic construct
  source 1..12: mol_type = other DNA
ctcattctgcat

SEQ ID NO: 1839 - DNA, 13 bp, synthetic construct
  source 1..13: mol_type = other DNA
ctcattctgcatt

SEQ ID NO: 1840 - DNA, 14 bp, synthetic construct
  source 1..14: mol_type = other DNA
ctcattctgcattg

SEQ ID NO: 1841 - DNA, 15 bp, synthetic construct
  source 1..15: mol_type = other DNA
ctcattctgcattgt

SEQ ID NO: 1842 - DNA, 16 bp, synthetic construct
  source 1..16: mol_type = other DNA
ctcattctgcattgtt

SEQ ID NO: 1843 - DNA, 10 bp, synthetic construct
  source 1..10: mol_type = other DNA
ttctgcgcat

SEQ ID NO: 1844 - DNA, 11 bp, synthetic construct
  source 1..11: mol_type = other DNA
ttctgcgcatg

SEQ ID NO: 1845 - DNA, 12 bp, synthetic construct
  source 1..12: mol_type = other DNA
ttctgcgcatgg

SEQ ID NO: 1846 - DNA, 13 bp, synthetic construct
  source 1..13: mol_type = other DNA
ttctgcgcatggc

SEQ ID NO: 1847 - DNA, 14 bp, synthetic construct
  source 1..14: mol_type = other DNA
ttctgcgcatggcg

SEQ ID NO: 1848 - DNA, 15 bp, synthetic construct
  source 1..15: mol_type = other DNA
ttctgcgcatggcgg

SEQ ID NO: 1849 - DNA, 16 bp, synthetic construct
  source 1..16: mol_type = other DNA
ttctgcgcatggcggt

SEQ ID NO: 1850 - DNA, 10 bp, synthetic construct
  source 1..10: mol_type = other DNA
aatattcacc

SEQ ID NO: 1851 - DNA, 11 bp, synthetic construct
  source 1..11: mol_type = other DNA
aatattcacca

SEQ ID NO: 1852 - DNA, 12 bp, synthetic construct
  source 1..12: mol_type = other DNA
aatattcaccac

SEQ ID NO: 1853 - DNA, 13 bp, synthetic construct
  source 1..13: mol_type = other DNA
aatattcaccacc

SEQ ID NO: 1854 - DNA, 14 bp, synthetic construct
  source 1..14: mol_type = other DNA
aatattcaccacca

SEQ ID NO: 1855 - DNA, 15 bp, synthetic construct
  source 1..15: mol_type = other DNA
aatattcaccaccat

SEQ ID NO: 1856 - DNA, 16 bp, synthetic construct
  source 1..16: mol_type = other DNA
aatattcaccaccatc

SEQ ID NO: 1857 - DNA, 10 bp, synthetic construct
  source 1..10: mol_type = other DNA
attctgcatt

SEQ ID NO: 1858 - DNA, 11 bp, synthetic construct
  source 1..11: mol_type = other DNA
attctgcattg

SEQ ID NO: 1859 - DNA, 12 bp, synthetic construct
  source 1..12: mol_type = other DNA
attctgcattgt

SEQ ID NO: 1860 - DNA, 13 bp, synthetic construct
  source 1..13: mol_type = other DNA
attctgcattgtt

SEQ ID NO: 1861 - DNA, 14 bp, synthetic construct
  source 1..14: mol_type = other DNA
attctgcattgttc

SEQ ID NO: 1862 - DNA, 15 bp, synthetic construct
  source 1..15: mol_type = other DNA
attctgcattgttct

SEQ ID NO: 1863 - DNA, 16 bp, synthetic construct
  source 1..16: mol_type = other DNA
attctgcattgttctg

SEQ ID NO: 1864 - DNA, 10 bp, synthetic construct
  source 1..10: mol_type = other DNA
ttgttctgcg

SEQ ID NO: 1865 - DNA, 11 bp, synthetic construct
  source 1..11: mol_type = other DNA
ttgttctgcgc

SEQ ID NO: 1866 - DNA, 12 bp, synthetic construct
  source 1..12: mol_type = other DNA
ttgttctgcgca

SEQ ID NO: 1867 - DNA, 13 bp, synthetic construct
  source 1..13: mol_type = other DNA
ttgttctgcgcat

SEQ ID NO: 1868 - DNA, 14 bp, synthetic construct
  source 1..14: mol_type = other DNA
ttgttctgcgcatg

SEQ ID NO: 1869 - DNA, 15 bp, synthetic construct
  source 1..15: mol_type = other DNA
ttgttctgcgcatgg

SEQ ID NO: 1870 - DNA, 16 bp, synthetic construct
  source 1..16: mol_type = other DNA
ttgttctgcgcatggc

SEQ ID NO: 1871 - DNA, 10 bp, synthetic construct
  source 1..10: mol_type = other DNA
ctgcattgtt

SEQ ID NO: 1872 - DNA, 11 bp, synthetic construct
  source 1..11: mol_type = other DNA
ctgcattgttc

SEQ ID NO: 1873 - DNA, 12 bp, synthetic construct
  source 1..12: mol_type = other DNA
ctgcattgttct

SEQ ID NO: 1874 - DNA, 13 bp, synthetic construct
  source 1..13: mol_type = other DNA
ctgcattgttctg

SEQ ID NO: 1875 - DNA, 14 bp, synthetic construct
  source 1..14: mol_type = other DNA
ctgcattgttctgc

SEQ ID NO: 1876 - DNA, 15 bp, synthetic construct
  source 1..15: mol_type = other DNA
ctgcattgttctgcg

SEQ ID NO: 1877 - DNA, 16 bp, synthetic construct
  source 1..16: mol_type = other DNA
ctgcattgttctgcgc

SEQ ID NO: 1878 - DNA, 10 bp, synthetic construct
  source 1..10: mol_type = other DNA
gaaaatattc

SEQ ID NO: 1879 - DNA, 11 bp, synthetic construct
  source 1..11: mol_type = other DNA
gaaaatattca

SEQ ID NO: 1880 - DNA, 12 bp, synthetic construct
  source 1..12: mol_type = other DNA
gaaaatattcac

SEQ ID NO: 1881 - DNA, 13 bp, synthetic construct
  source 1..13: mol_type = other DNA
gaaaatattcacc

SEQ ID NO: 1882 - DNA, 14 bp, synthetic construct
  source 1..14: mol_type = other DNA
gaaaatattcacca

SEQ ID NO: 1883 - DNA, 15 bp, synthetic construct
  source 1..15: mol_type = other DNA
gaaaatattcaccac

SEQ ID NO: 1884 - DNA, 16 bp, synthetic construct
  source 1..16: mol_type = other DNA
gaaaatattcaccacc

SEQ ID NO: 1885 - DNA, 10 bp, synthetic construct
  source 1..10: mol_type = other DNA
ggaaaatatt

SEQ ID NO: 1886 - DNA, 11 bp, synthetic construct
  source 1..11: mol_type = other DNA
ggaaaatattc

SEQ ID NO: 1887 - DNA, 12 bp, synthetic construct
  source 1..12: mol_type = other DNA
ggaaaatattca

SEQ ID NO: 1888 - DNA, 13 bp, synthetic construct
  source 1..13: mol_type = other DNA
ggaaaatattcac

SEQ ID NO: 1889 - DNA, 14 bp, synthetic construct
  source 1..14: mol_type = other DNA
ggaaaatattcacc

SEQ ID NO: 1890 - DNA, 15 bp, synthetic construct
  source 1..15: mol_type = other DNA
ggaaaatattcacca

SEQ ID NO: 1891 - DNA, 16 bp, synthetic construct
  source 1..16: mol_type = other DNA
ggaaaatattcaccac

SEQ ID NO: 1892 - DNA, 10 bp, synthetic construct
  source 1..10: mol_type = other DNA
gattagtgca

SEQ ID NO: 1893 - DNA, 11 bp, synthetic construct
  source 1..11: mol_type = other DNA
gattagtgcat

SEQ ID NO: 1894 - DNA, 12 bp, synthetic construct
  source 1..12: mol_type = other DNA
gattagtgcata

SEQ ID NO: 1895 - DNA, 13 bp, synthetic construct
  source 1..13: mol_type = other DNA
gattagtgcatag

SEQ ID NO: 1896 - DNA, 14 bp, synthetic construct
  source 1..14: mol_type = other DNA
gattagtgcatagg

SEQ ID NO: 1897 - DNA, 15 bp, synthetic construct
  source 1..15: mol_type = other DNA
gattagtgcataggg

SEQ ID NO: 1898 - DNA, 16 bp, synthetic construct
  source 1..16: mol_type = other DNA
gattagtgcataggga

SEQ ID NO: 1899 - DNA, 10 bp, synthetic construct
  source 1..10: mol_type = other DNA
tgcattgttc

SEQ ID NO: 1900 - DNA, 11 bp, synthetic construct
  source 1..11: mol_type = other DNA
tgcattgttct

SEQ ID NO: 1901 - DNA, 12 bp, synthetic construct
  source 1..12: mol_type = other DNA
tgcattgttctg

SEQ ID NO: 1902 - DNA, 13 bp, synthetic construct
  source 1..13: mol_type = other DNA
tgcattgttctgc

SEQ ID NO: 1903 - DNA, 14 bp, synthetic construct
  source 1..14: mol_type = other DNA
tgcattgttctgcg

SEQ ID NO: 1904 - DNA, 15 bp, synthetic construct
  source 1..15: mol_type = other DNA
tgcattgttctgcgc

SEQ ID NO: 1905 - DNA, 16 bp, synthetic construct
  source 1..16: mol_type = other DNA
tgcattgttctgcgca

SEQ ID NO: 1906 - DNA, 10 bp, synthetic construct
  source 1..10: mol_type = other DNA
aaaatattca

SEQ ID NO: 1907 - DNA, 11 bp, synthetic construct
  source 1..11: mol_type = other DNA
aaaatattcac

SEQ ID NO: 1908 - DNA, 12 bp, synthetic construct
  source 1..12: mol_type = other DNA
aaaatattcacc

SEQ ID NO: 1909 - DNA, 13 bp, synthetic construct
  source 1..13: mol_type = other DNA
aaaatattcacca

SEQ ID NO: 1910 - DNA, 14 bp, synthetic construct
  source 1..14: mol_type = other DNA
aaaatattcaccac

SEQ ID NO: 1911 - DNA, 15 bp, synthetic construct
  source 1..15: mol_type = other DNA
aaaatattcaccacc

SEQ ID NO: 1912 - DNA, 16 bp, synthetic construct
  source 1..16: mol_type = other DNA
aaaatattcaccacca

SEQ ID NO: 1913 - DNA, 10 bp, synthetic construct
  source 1..10: mol_type = other DNA
attagtgcat

SEQ ID NO: 1914 - DNA, 11 bp, synthetic construct
  source 1..11: mol_type = other DNA
attagtgcata

SEQ ID NO: 1915 - DNA, 12 bp, synthetic construct
  source 1..12: mol_type = other DNA
attagtgcatag

SEQ ID NO: 1916 - DNA, 13 bp, synthetic construct
  source 1..13: mol_type = other DNA
attagtgcatagg

SEQ ID NO: 1917 - DNA, 14 bp, synthetic construct
  source 1..14: mol_type = other DNA
attagtgcataggg

SEQ ID NO: 1918 - DNA, 15 bp, synthetic construct
  source 1..15: mol_type = other DNA
attagtgcataggga

SEQ ID NO: 1919 - DNA, 16 bp, synthetic construct
  source 1..16: mol_type = other DNA
attagtgcatagggaa

SEQ ID NO: 1920 - DNA, 10 bp, synthetic construct
  source 1..10: mol_type = other DNA
ggaagcacag

SEQ ID NO: 1921 - DNA, 11 bp, synthetic construct
  source 1..11: mol_type = other DNA
ggaagcacaga

SEQ ID NO: 1922 - DNA, 12 bp, synthetic construct
  source 1..12: mol_type = other DNA
ggaagcacagat

SEQ ID NO: 1923 - DNA, 13 bp, synthetic construct
  source 1..13: mol_type = other DNA
ggaagcacagata

SEQ ID NO: 1924 - DNA, 14 bp, synthetic construct
  source 1..14: mol_type = other DNA
ggaagcacagataa

SEQ ID NO: 1925 - DNA, 15 bp, synthetic construct
  source 1..15: mol_type = other DNA
ggaagcacagataaa

SEQ ID NO: 1926 - DNA, 16 bp, synthetic construct
  source 1..16: mol_type = other DNA
ggaagcacagataaaa

SEQ ID NO: 1927 - DNA, 10 bp, synthetic construct
  source 1..10: mol_type = other DNA
cggtcactcg

SEQ ID NO: 1928 - DNA, 11 bp, synthetic construct
  source 1..11: mol_type = other DNA
cggtcactcgg

SEQ ID NO: 1929 - DNA, 12 bp, synthetic construct
  source 1..12: mol_type = other DNA
cggtcactcggc

SEQ ID NO: 1930 - DNA, 13 bp, synthetic construct
  source 1..13: mol_type = other DNA
cggtcactcggca

SEQ ID NO: 1931 - DNA, 14 bp, synthetic construct
  source 1..14: mol_type = other DNA
cggtcactcggcaa

SEQ ID NO: 1932 - DNA, 15 bp, synthetic construct
  source 1..15: mol_type = other DNA
cggtcactcggcaat

SEQ ID NO: 1933 - DNA, 16 bp, synthetic construct
  source 1..16: mol_type = other DNA
cggtcactcggcaatt

SEQ ID NO: 1934 - DNA, 10 bp, synthetic construct
  source 1..10: mol_type = other DNA
aatttccctg

SEQ ID NO: 1935 - DNA, 11 bp, synthetic construct
  source 1..11: mol_type = other DNA
aatttccctgg

SEQ ID NO: 1936 - DNA, 12 bp, synthetic construct
  source 1..12: mol_type = other DNA
aatttccctggg

SEQ ID NO: 1937 - DNA, 13 bp, synthetic construct
  source 1..13: mol_type = other DNA
aatttccctgggc

SEQ ID NO: 1938 - DNA, 14 bp, synthetic construct
  source 1..14: mol_type = other DNA
aatttccctgggct

SEQ ID NO: 1939 - DNA, 15 bp, synthetic construct
  source 1..15: mol_type = other DNA
aatttccctgggctg

SEQ ID NO: 1940 - DNA, 16 bp, synthetic construct
  source 1..16: mol_type = other DNA
aatttccctgggctgt

SEQ ID NO: 1941 - DNA, 10 bp, synthetic construct
  source 1..10: mol_type = other DNA
caatttccct

SEQ ID NO: 1942 - DNA, 11 bp, synthetic construct
  source 1..11: mol_type = other DNA
caatttccctg

SEQ ID NO: 1943 - DNA, 12 bp, synthetic construct
  source 1..12: mol_type = other DNA
caatttccctgg

SEQ ID NO: 1944 - DNA, 13 bp, synthetic construct
  source 1..13: mol_type = other DNA
caatttccctggg

SEQ ID NO: 1945 - DNA, 14 bp, synthetic construct
  source 1..14: mol_type = other DNA
caatttccctgggc

SEQ ID NO: 1946 - DNA, 15 bp, synthetic construct
  source 1..15: mol_type = other DNA
caatttccctgggct

SEQ ID NO: 1947 - DNA, 16 bp, synthetic construct
  source 1..16: mol_type = other DNA
caatttccctgggctg

SEQ ID NO: 1948 - DNA, 10 bp, synthetic construct
  source 1..10: mol_type = other DNA
cagaatgaga

SEQ ID NO: 1949 - DNA, 11 bp, synthetic construct
  source 1..11: mol_type = other DNA
cagaatgagat

SEQ ID NO: 1950 - DNA, 12 bp, synthetic construct
  source 1..12: mol_type = other DNA
cagaatgagatg

SEQ ID NO: 1951 - DNA, 13 bp, synthetic construct
  source 1..13: mol_type = other DNA
cagaatgagatgg

SEQ ID NO: 1952 - DNA, 14 bp, synthetic construct
  source 1..14: mol_type = other DNA
cagaatgagatggt

SEQ ID NO: 1953 - DNA, 15 bp, synthetic construct
  source 1..15: mol_type = other DNA
cagaatgagatggtg

SEQ ID NO: 1954 - DNA, 16 bp, synthetic construct
  source 1..16: mol_type = other DNA
cagaatgagatggtgg

SEQ ID NO: 1955 - DNA, 10 bp, synthetic construct
  source 1..10: mol_type = other DNA
gctgtacaaa

SEQ ID NO: 1956 - DNA, 11 bp, synthetic construct
  source 1..11: mol_type = other DNA
gctgtacaaac

SEQ ID NO: 1957 - DNA, 12 bp, synthetic construct
  source 1..12: mol_type = other DNA
gctgtacaaaca

SEQ ID NO: 1958 - DNA, 13 bp, synthetic construct
  source 1..13: mol_type = other DNA
gctgtacaaacat

SEQ ID NO: 1959 - DNA, 14 bp, synthetic construct
  source 1..14: mol_type = other DNA
gctgtacaaacatg

SEQ ID NO: 1960 - DNA, 15 bp, synthetic construct
  source 1..15: mol_type = other DNA
gctgtacaaacatgg

SEQ ID NO: 1961 - DNA, 16 bp, synthetic construct
  source 1..16: mol_type = other DNA
gctgtacaaacatggt

SEQ ID NO: 1962 - DNA, 10 bp, synthetic construct
  source 1..10: mol_type = other DNA
tgtacaaaca

SEQ ID NO: 1963 - DNA, 11 bp, synthetic construct
  source 1..11: mol_type = other DNA
tgtacaaacat

SEQ ID NO: 1964 - DNA, 12 bp, synthetic construct
  source 1..12: mol_type = other DNA
tgtacaaacatg

SEQ ID NO: 1965 - DNA, 13 bp, synthetic construct
  source 1..13: mol_type = other DNA
tgtacaaacatgg

SEQ ID NO: 1966 - DNA, 14 bp, synthetic construct
  source 1..14: mol_type = other DNA
tgtacaaacatggt

SEQ ID NO: 1967 - DNA, 15 bp, synthetic construct
  source 1..15: mol_type = other DNA
tgtacaaacatggta

SEQ ID NO: 1968 - DNA, 16 bp, synthetic construct
  source 1..16: mol_type = other DNA
tgtacaaacatggtat

SEQ ID NO: 1969 - DNA, 10 bp, synthetic construct
  source 1..10: mol_type = other DNA
gcggtcactc

SEQ ID NO: 1970 - DNA, 11 bp, synthetic construct
  source 1..11: mol_type = other DNA
gcggtcactcg

SEQ ID NO: 1971 - DNA, 12 bp, synthetic construct
  source 1..12: mol_type = other DNA
gcggtcactcgg

SEQ ID NO: 1972 - DNA, 13 bp, synthetic construct
  source 1..13: mol_type = other DNA
gcggtcactcggc

SEQ ID NO: 1973 - DNA, 14 bp, synthetic construct
  source 1..14: mol_type = other DNA
gcggtcactcggca

SEQ ID NO: 1974 - DNA, 15 bp, synthetic construct
  source 1..15: mol_type = other DNA
gcggtcactcggcaa

SEQ ID NO: 1975 - DNA, 16 bp, synthetic construct
  source 1..16: mol_type = other DNA
gcggtcactcggcaat

SEQ ID NO: 1976 - DNA, 10 bp, synthetic construct
  source 1..10: mol_type = other DNA
ggcggtcact

SEQ ID NO: 1977 - DNA, 11 bp, synthetic construct
  source 1..11: mol_type = other DNA
ggcggtcactc

SEQ ID NO: 1978 - DNA, 12 bp, synthetic construct
  source 1..12: mol_type = other DNA
ggcggtcactcg

SEQ ID NO: 1979 - DNA, 13 bp, synthetic construct
  source 1..13: mol_type = other DNA
ggcggtcactcgg

SEQ ID NO: 1980 - DNA, 14 bp, synthetic construct
  source 1..14: mol_type = other DNA
ggcggtcactcggc

SEQ ID NO: 1981 - DNA, 15 bp, synthetic construct
  source 1..15: mol_type = other DNA
ggcggtcactcggca

SEQ ID NO: 1982 - DNA, 16 bp, synthetic construct
  source 1..16: mol_type = other DNA
ggcggtcactcggcaa

SEQ ID NO: 1983 - DNA, 10 bp, synthetic construct
  source 1..10: mol_type = other DNA
actcggcaat

SEQ ID NO: 1984 - DNA, 11 bp, synthetic construct
  source 1..11: mol_type = other DNA
actcggcaatt

SEQ ID NO: 1985 - DNA, 12 bp, synthetic construct
  source 1..12: mol_type = other DNA
actcggcaattt

SEQ ID NO: 1986 - DNA, 13 bp, synthetic construct
  source 1..13: mol_type = other DNA
actcggcaatttc

SEQ ID NO: 1987 - DNA, 14 bp, synthetic construct
  source 1..14: mol_type = other DNA
actcggcaatttcc

SEQ ID NO: 1988 - DNA, 15 bp, synthetic construct
  source 1..15: mol_type = other DNA
actcggcaatttccc

SEQ ID NO: 1989 - DNA, 16 bp, synthetic construct
  source 1..16: mol_type = other DNA
actcggcaatttccct

SEQ ID NO: 1990 - DNA, 10 bp, synthetic construct
  source 1..10: mol_type = other DNA
caatgcagaa

SEQ ID NO: 1991 - DNA, 11 bp, synthetic construct
  source 1..11: mol_type = other DNA
caatgcagaat

SEQ ID NO: 1992 - DNA, 12 bp, synthetic construct
  source 1..12: mol_type = other DNA
caatgcagaatg

SEQ ID NO: 1993 - DNA, 13 bp, synthetic construct
  source 1..13: mol_type = other DNA
caatgcagaatga

SEQ ID NO: 1994 - DNA, 14 bp, synthetic construct
  source 1..14: mol_type = other DNA
caatgcagaatgag

SEQ ID NO: 1995 - DNA, 15 bp, synthetic construct
  source 1..15: mol_type = other DNA
caatgcagaatgaga

SEQ ID NO: 1996 - DNA, 16 bp, synthetic construct
  source 1..16: mol_type = other DNA
caatgcagaatgagat

SEQ ID NO: 1997 - DNA, 10 bp, synthetic construct
  source 1..10: mol_type = other DNA
cagaacaatg

SEQ ID NO: 1998 - DNA, 11 bp, synthetic construct
  source 1..11: mol_type = other DNA
cagaacaatgc

SEQ ID NO: 1999 - DNA, 12 bp, synthetic construct
  source 1..12: mol_type = other DNA
cagaacaatgca

SEQ ID NO: 2000 - DNA, 13 bp, synthetic construct
  source 1..13: mol_type = other DNA
cagaacaatgcag

SEQ ID NO: 2001 - DNA, 14 bp, synthetic construct
  source 1..14: mol_type = other DNA
cagaacaatgcaga

SEQ ID NO: 2002 - DNA, 15 bp, synthetic construct
  source 1..15: mol_type = other DNA
cagaacaatgcagaa

SEQ ID NO: 2003 - DNA, 16 bp, synthetic construct
  source 1..16: mol_type = other DNA
cagaacaatgcagaat

SEQ ID NO: 2004 - DNA, 10 bp, synthetic construct
  source 1..10: mol_type = other DNA
ggctgtacaa

SEQ ID NO: 2005 - DNA, 11 bp, synthetic construct
  source 1..11: mol_type = other DNA
ggctgtacaaa

SEQ ID NO: 2006 - DNA, 12 bp, synthetic construct
  source 1..12: mol_type = other DNA
ggctgtacaaac

SEQ ID NO: 2007 - DNA, 13 bp, synthetic construct
  source 1..13: mol_type = other DNA
ggctgtacaaaca

SEQ ID NO: 2008 - DNA, 14 bp, synthetic construct
  source 1..14: mol_type = other DNA
ggctgtacaaacat

SEQ ID NO: 2009 - DNA, 15 bp, synthetic construct
  source 1..15: mol_type = other DNA
ggctgtacaaacatg

SEQ ID NO: 2010 - DNA, 16 bp, synthetic construct
  source 1..16: mol_type = other DNA
ggctgtacaaacatgg

SEQ ID NO: 2011 - DNA, 10 bp, synthetic construct
  source 1..10: mol_type = other DNA
catggcggtc

SEQ ID NO: 2012 - DNA, 11 bp, synthetic construct
  source 1..11: mol_type = other DNA
catggcggtca

SEQ ID NO: 2013 - DNA, 12 bp, synthetic construct
  source 1..12: mol_type = other DNA
catggcggtcac

SEQ ID NO: 2014 - DNA, 13 bp, synthetic construct
  source 1..13: mol_type = other DNA
catggcggtcact

SEQ ID NO: 2015 - DNA, 14 bp, synthetic construct
  source 1..14: mol_type = other DNA
catggcggtcactc

SEQ ID NO: 2016 - DNA, 15 bp, synthetic construct
  source 1..15: mol_type = other DNA
catggcggtcactcg

SEQ ID NO: 2017 - DNA, 16 bp, synthetic construct
  source 1..16: mol_type = other DNA
catggcggtcactcgg

SEQ ID NO: 2018 - DNA, 10 bp, synthetic construct
  source 1..10: mol_type = other DNA
ggtcactcgg

SEQ ID NO: 2019 - DNA, 11 bp, synthetic construct
  source 1..11: mol_type = other DNA
ggtcactcggc

SEQ ID NO: 2020 - DNA, 12 bp, synthetic construct
  source 1..12: mol_type = other DNA
ggtcactcggca

SEQ ID NO: 2021 - DNA, 13 bp, synthetic construct
  source 1..13: mol_type = other DNA
ggtcactcggcaa

SEQ ID NO: 2022 - DNA, 14 bp, synthetic construct
  source 1..14: mol_type = other DNA
ggtcactcggcaat

SEQ ID NO: 2023 - DNA, 15 bp, synthetic construct
  source 1..15: mol_type = other DNA
ggtcactcggcaatt

SEQ ID NO: 2024 - DNA, 16 bp, synthetic construct
  source 1..16: mol_type = other DNA
ggtcactcggcaattt

SEQ ID NO: 2025 - DNA, 10 bp, synthetic construct
  source 1..10: mol_type = other DNA
aaacatggta

SEQ ID NO: 2026 - DNA, 11 bp, synthetic construct
  source 1..11: mol_type = other DNA
aaacatggtat

SEQ ID NO: 2027 - DNA, 12 bp, synthetic construct
  source 1..12: mol_type = other DNA
aaacatggtatg

SEQ ID NO: 2028 - DNA, 13 bp, synthetic construct
  source 1..13: mol_type = other DNA
aaacatggtatga

SEQ ID NO: 2029 - DNA, 14 bp, synthetic construct
  source 1..14: mol_type = other DNA
aaacatggtatgac

SEQ ID NO: 2030 - DNA, 15 bp, synthetic construct
  source 1..15: mol_type = other DNA
aaacatggtatgact

SEQ ID NO: 2031 - DNA, 16 bp, synthetic construct
  source 1..16: mol_type = other DNA
aaacatggtatgactc

SEQ ID NO: 2032 - DNA, 10 bp, synthetic construct
  source 1..10: mol_type = other DNA
caaacatggt

SEQ ID NO: 2033 - DNA, 11 bp, synthetic construct
  source 1..11: mol_type = other DNA
caaacatggta

SEQ ID NO: 2034 - DNA, 12 bp, synthetic construct
  source 1..12: mol_type = other DNA
caaacatggtat

SEQ ID NO: 2035 - DNA, 13 bp, synthetic construct
  source 1..13: mol_type = other DNA
caaacatggtatg

SEQ ID NO: 2036 - DNA, 14 bp, synthetic construct
  source 1..14: mol_type = other DNA
caaacatggtatga

SEQ ID NO: 2037 - DNA, 15 bp, synthetic construct
  source 1..15: mol_type = other DNA
caaacatggtatgac

SEQ ID NO: 2038 - DNA, 16 bp, synthetic construct
  source 1..16: mol_type = other DNA
caaacatggtatgact

SEQ ID NO: 2039 - DNA, 10 bp, synthetic construct
  source 1..10: mol_type = other DNA
ggcaatttcc

SEQ ID NO: 2040 - DNA, 11 bp, synthetic construct
  source 1..11: mol_type = other DNA
ggcaatttccc

SEQ ID NO: 2041 - DNA, 12 bp, synthetic construct
  source 1..12: mol_type = other DNA
ggcaatttccct

SEQ ID NO: 2042 - DNA, 13 bp, synthetic construct
  source 1..13: mol_type = other DNA
ggcaatttccctg

SEQ ID NO: 2043 - DNA, 14 bp, synthetic construct
  source 1..14: mol_type = other DNA
ggcaatttccctgg

SEQ ID NO: 2044 - DNA, 15 bp, synthetic construct
  source 1..15: mol_type = other DNA
ggcaatttccctggg

SEQ ID NO: 2045 - DNA, 16 bp, synthetic construct
  source 1..16: mol_type = other DNA
ggcaatttccctgggc

SEQ ID NO: 2046 - DNA, 10 bp, synthetic construct
  source 1..10: mol_type = other DNA
atggcggtca

SEQ ID NO: 2047 - DNA, 11 bp, synthetic construct
  source 1..11: mol_type = other DNA
atggcggtcac

SEQ ID NO: 2048 - DNA, 12 bp, synthetic construct
  source 1..12: mol_type = other DNA
atggcggtcact

SEQ ID NO: 2049 - DNA, 13 bp, synthetic construct
  source 1..13: mol_type = other DNA
atggcggtcactc

SEQ ID NO: 2050 - DNA, 14 bp, synthetic construct
  source 1..14: mol_type = other DNA
atggcggtcactcg

SEQ ID NO: 2051 - DNA, 15 bp, synthetic construct
  source 1..15: mol_type = other DNA
atggcggtcactcgg

SEQ ID NO: 2052 - DNA, 16 bp, synthetic construct
  source 1..16: mol_type = other DNA
atggcggtcactcggc

SEQ ID NO: 2053 - DNA, 10 bp, synthetic construct
  source 1..10: mol_type = other DNA
atttccctgg

SEQ ID NO: 2054 - DNA, 11 bp, synthetic construct
  source 1..11: mol_type = other DNA
atttccctggg

SEQ ID NO: 2055 - DNA, 12 bp, synthetic construct
  source 1..12: mol_type = other DNA
atttccctgggc

SEQ ID NO: 2056 - DNA, 13 bp, synthetic construct
  source 1..13: mol_type = other DNA
atttccctgggct

SEQ ID NO: 2057 - DNA, 14 bp, synthetic construct
  source 1..14: mol_type = other DNA
atttccctgggctg

SEQ ID NO: 2058 - DNA, 15 bp, synthetic construct
  source 1..15: mol_type = other DNA
atttccctgggctgt

SEQ ID NO: 2059 - DNA, 16 bp, synthetic construct
  source 1..16: mol_type = other DNA
atttccctgggctgta

SEQ ID NO: 2060 - DNA, 10 bp, synthetic construct
  source 1..10: mol_type = other DNA
ctgtacaaac

SEQ ID NO: 2061 - DNA, 11 bp, synthetic construct
  source 1..11: mol_type = other DNA
ctgtacaaaca

SEQ ID NO: 2062 - DNA, 12 bp, synthetic construct
  source 1..12: mol_type = other DNA
ctgtacaaacat

SEQ ID NO: 2063 - DNA, 13 bp, synthetic construct
  source 1..13: mol_type = other DNA
ctgtacaaacatg

SEQ ID NO: 2064 - DNA, 14 bp, synthetic construct
  source 1..14: mol_type = other DNA
ctgtacaaacatgg

SEQ ID NO: 2065 - DNA, 15 bp, synthetic construct
  source 1..15: mol_type = other DNA
ctgtacaaacatggt

SEQ ID NO: 2066 - DNA, 16 bp, synthetic construct
  source 1..16: mol_type = other DNA
ctgtacaaacatggta

SEQ ID NO: 2067 - DNA, 10 bp, synthetic construct
  source 1..10: mol_type = other DNA
tgagatggtg

SEQ ID NO: 2068 - DNA, 11 bp, synthetic construct
  source 1..11: mol_type = other DNA
tgagatggtgg

SEQ ID NO: 2069 - DNA, 12 bp, synthetic construct
  source 1..12: mol_type = other DNA
tgagatggtggt

SEQ ID NO: 2070 - DNA, 13 bp, synthetic construct
  source 1..13: mol_type = other DNA
tgagatggtggtg

SEQ ID NO: 2071 - DNA, 14 bp, synthetic construct
  source 1..14: mol_type = other DNA
tgagatggtggtga

SEQ ID NO: 2072 - DNA, 15 bp, synthetic construct
  source 1..15: mol_type = other DNA
tgagatggtggtgaa

SEQ ID NO: 2073 - DNA, 16 bp, synthetic construct
  source 1..16: mol_type = other DNA
tgagatggtggtgaat

SEQ ID NO: 2074 - DNA, 10 bp, synthetic construct
  source 1..10: mol_type = other DNA
tttccctggg

SEQ ID NO: 2075 - DNA, 11 bp, synthetic construct
  source 1..11: mol_type = other DNA
tttccctgggc

SEQ ID NO: 2076 - DNA, 12 bp, synthetic construct
  source 1..12: mol_type = other DNA
tttccctgggct

SEQ ID NO: 2077 - DNA, 13 bp, synthetic construct
  source 1..13: mol_type = other DNA
tttccctgggctg

SEQ ID NO: 2078 - DNA, 14 bp, synthetic construct
  source 1..14: mol_type = other DNA
tttccctgggctgt

SEQ ID NO: 2079 - DNA, 15 bp, synthetic construct
  source 1..15: mol_type = other DNA
tttccctgggctgta

SEQ ID NO: 2080 - DNA, 16 bp, synthetic construct
  source 1..16: mol_type = other DNA
tttccctgggctgtac

SEQ ID NO: 2081 - DNA, 10 bp, synthetic construct
  source 1..10: mol_type = other DNA
gcagaacaat

SEQ ID NO: 2082 - DNA, 11 bp, synthetic construct
  source 1..11: mol_type = other DNA
gcagaacaatg

SEQ ID NO: 2083 - DNA, 12 bp, synthetic construct
  source 1..12: mol_type = other DNA
gcagaacaatgc

SEQ ID NO: 2084 - DNA, 13 bp, synthetic construct
  source 1..13: mol_type = other DNA
gcagaacaatgca

SEQ ID NO: 2085 - DNA, 14 bp, synthetic construct
  source 1..14: mol_type = other DNA
gcagaacaatgcag

SEQ ID NO: 2086 - DNA, 15 bp, synthetic construct
  source 1..15: mol_type = other DNA
gcagaacaatgcaga

SEQ ID NO: 2087 - DNA, 16 bp, synthetic construct
  source 1..16: mol_type = other DNA
gcagaacaatgcagaa

SEQ ID NO: 2088 - DNA, 10 bp, synthetic construct
  source 1..10: mol_type = other DNA
tccctgggct

SEQ ID NO: 2089 - DNA, 11 bp, synthetic construct
  source 1..11: mol_type = other DNA
tccctgggctg

SEQ ID NO: 2090 - DNA, 12 bp, synthetic construct
  source 1..12: mol_type = other DNA
tccctgggctgt

SEQ ID NO: 2091 - DNA, 13 bp, synthetic construct
  source 1..13: mol_type = other DNA
tccctgggctgta

SEQ ID NO: 2092 - DNA, 14 bp, synthetic construct
  source 1..14: mol_type = other DNA
tccctgggctgtac

SEQ ID NO: 2093 - DNA, 15 bp, synthetic construct
  source 1..15: mol_type = other DNA
tccctgggctgtaca

SEQ ID NO: 2094 - DNA, 16 bp, synthetic construct
  source 1..16: mol_type = other DNA
tccctgggctgtacaa

SEQ ID NO: 2095 - DNA, 10 bp, synthetic construct
  source 1..10: mol_type = other DNA
tgaaattaat

SEQ ID NO: 2096 - DNA, 11 bp, synthetic construct
  source 1..11: mol_type = other DNA
tgaaattaata

SEQ ID NO: 2097 - DNA, 12 bp, synthetic construct
  source 1..12: mol_type = other DNA
tgaaattaatat

SEQ ID NO: 2098 - DNA, 13 bp, synthetic construct
  source 1..13: mol_type = other DNA
tgaaattaatatc

SEQ ID NO: 2099 - DNA, 14 bp, synthetic construct
  source 1..14: mol_type = other DNA
tgaaattaatatct

SEQ ID NO: 2100 - DNA, 15 bp, synthetic construct
  source 1..15: mol_type = other DNA
tgaaattaatatctt

SEQ ID NO: 2101 - DNA, 16 bp, synthetic construct
  source 1..16: mol_type = other DNA
tgaaattaatatcttt

SEQ ID NO: 2102 - DNA, 10 bp, synthetic construct
  source 1..10: mol_type = other DNA
aaggtagttc

SEQ ID NO: 2103 - DNA, 11 bp, synthetic construct
  source 1..11: mol_type = other DNA
aaggtagttct

SEQ ID NO: 2104 - DNA, 12 bp, synthetic construct
  source 1..12: mol_type = other DNA
aaggtagttctt

SEQ ID NO: 2105 - DNA, 13 bp, synthetic construct
  source 1..13: mol_type = other DNA
aaggtagttcttt

SEQ ID NO: 2106 - DNA, 14 bp, synthetic construct
  source 1..14: mol_type = other DNA
aaggtagttctttt

SEQ ID NO: 2107 - DNA, 15 bp, synthetic construct
  source 1..15: mol_type = other DNA
aaggtagttcttttg

SEQ ID NO: 2108 - DNA, 16 bp, synthetic construct
  source 1..16: mol_type = other DNA
aaggtagttcttttgt

SEQ ID NO: 2109 - DNA, 10 bp, synthetic construct
  source 1..10: mol_type = other DNA
ttgaaattaa

SEQ ID NO: 2110 - DNA, 11 bp, synthetic construct
  source 1..11: mol_type = other DNA
ttgaaattaat

SEQ ID NO: 2111 - DNA, 12 bp, synthetic construct
  source 1..12: mol_type = other DNA
ttgaaattaata

SEQ ID NO: 2112 - DNA, 13 bp, synthetic construct
  source 1..13: mol_type = other DNA
ttgaaattaatat

SEQ ID NO: 2113 - DNA, 14 bp, synthetic construct
  source 1..14: mol_type = other DNA
ttgaaattaatatc

SEQ ID NO: 2114 - DNA, 15 bp, synthetic construct
  source 1..15: mol_type = other DNA
ttgaaattaatatct

SEQ ID NO: 2115 - DNA, 16 bp, synthetic construct
  source 1..16: mol_type = other DNA
ttgaaattaatatctt

SEQ ID NO: 2116 - DNA, 10 bp, synthetic construct
  source 1..10: mol_type = other DNA
gagcaggcaa

SEQ ID NO: 2117 - DNA, 11 bp, synthetic construct
  source 1..11: mol_type = other DNA
gagcaggcaag

SEQ ID NO: 2118 - DNA, 12 bp, synthetic construct
  source 1..12: mol_type = other DNA
gagcaggcaagg

SEQ ID NO: 2119 - DNA, 13 bp, synthetic construct
  source 1..13: mol_type = other DNA
gagcaggcaaggt

SEQ ID NO: 2120 - DNA, 14 bp, synthetic construct
  source 1..14: mol_type = other DNA
gagcaggcaaggta

SEQ ID NO: 2121 - DNA, 15 bp, synthetic construct
  source 1..15: mol_type = other DNA
gagcaggcaaggtag

SEQ ID NO: 2122 - DNA, 16 bp, synthetic construct
  source 1..16: mol_type = other DNA
gagcaggcaaggtagt

SEQ ID NO: 2123 - DNA, 10 bp, synthetic construct
  source 1..10: mol_type = other DNA
caactgtcct

SEQ ID NO: 2124 - DNA, 11 bp, synthetic construct
  source 1..11: mol_type = other DNA
caactgtcctc

SEQ ID NO: 2125 - DNA, 12 bp, synthetic construct
  source 1..12: mol_type = other DNA
caactgtcctct

SEQ ID NO: 2126 - DNA, 13 bp, synthetic construct
  source 1..13: mol_type = other DNA
caactgtcctctt

SEQ ID NO: 2127 - DNA, 14 bp, synthetic construct
  source 1..14: mol_type = other DNA
caactgtcctcttt

SEQ ID NO: 2128 - DNA, 15 bp, synthetic construct
  source 1..15: mol_type = other DNA
caactgtcctctttc

SEQ ID NO: 2129 - DNA, 16 bp, synthetic construct
  source 1..16: mol_type = other DNA
caactgtcctctttct

SEQ ID NO: 2130 - DNA, 10 bp, synthetic construct
  source 1..10: mol_type = other DNA
caggcaaggt

SEQ ID NO: 2131 - DNA, 11 bp, synthetic construct
  source 1..11: mol_type = other DNA
caggcaaggta

SEQ ID NO: 2132 - DNA, 12 bp, synthetic construct
  source 1..12: mol_type = other DNA
caggcaaggtag

SEQ ID NO: 2133 - DNA, 13 bp, synthetic construct
  source 1..13: mol_type = other DNA
caggcaaggtagt

SEQ ID NO: 2134 - DNA, 14 bp, synthetic construct
  source 1..14: mol_type = other DNA
caggcaaggtagtt

SEQ ID NO: 2135 - DNA, 15 bp, synthetic construct
  source 1..15: mol_type = other DNA
caggcaaggtagttc

SEQ ID NO: 2136 - DNA, 16 bp, synthetic construct
  source 1..16: mol_type = other DNA
caggcaaggtagttct

SEQ ID NO: 2137 - DNA, 10 bp, synthetic construct
  source 1..10: mol_type = other DNA
gcaggcaagg

SEQ ID NO: 2138 - DNA, 11 bp, synthetic construct
  source 1..11: mol_type = other DNA
gcaggcaaggt

SEQ ID NO: 2139 - DNA, 12 bp, synthetic construct
  source 1..12: mol_type = other DNA
gcaggcaaggta

SEQ ID NO: 2140 - DNA, 13 bp, synthetic construct
  source 1..13: mol_type = other DNA
gcaggcaaggtag

SEQ ID NO: 2141 - DNA, 14 bp, synthetic construct
  source 1..14: mol_type = other DNA
gcaggcaaggtagt

SEQ ID NO: 2142 - DNA, 15 bp, synthetic construct
  source 1..15: mol_type = other DNA
gcaggcaaggtagtt

SEQ ID NO: 2143 - DNA, 16 bp, synthetic construct
  source 1..16: mol_type = other DNA
gcaggcaaggtagttc

SEQ ID NO: 2144 - DNA, 10 bp, synthetic construct
  source 1..10: mol_type = other DNA
ctgtcctctt

SEQ ID NO: 2145 - DNA, 11 bp, synthetic construct
  source 1..11: mol_type = other DNA
ctgtcctcttt

SEQ ID NO: 2146 - DNA, 12 bp, synthetic construct
  source 1..12: mol_type = other DNA
ctgtcctctttc

SEQ ID NO: 2147 - DNA, 13 bp, synthetic construct
  source 1..13: mol_type = other DNA
ctgtcctctttct

SEQ ID NO: 2148 - DNA, 14 bp, synthetic construct
  source 1..14: mol_type = other DNA
ctgtcctctttcta

SEQ ID NO: 2149 - DNA, 15 bp, synthetic construct
  source 1..15: mol_type = other DNA
ctgtcctctttctat

SEQ ID NO: 2150 - DNA, 16 bp, synthetic construct
  source 1..16: mol_type = other DNA
ctgtcctctttctatc

SEQ ID NO: 2151 - DNA, 10 bp, synthetic construct
  source 1..10: mol_type = other DNA
actgtcctct

SEQ ID NO: 2152 - DNA, 11 bp, synthetic construct
  source 1..11: mol_type = other DNA
actgtcctctt

SEQ ID NO: 2153 - DNA, 12 bp, synthetic construct
  source 1..12: mol_type = other DNA
actgtcctcttt

SEQ ID NO: 2154 - DNA, 13 bp, synthetic construct
  source 1..13: mol_type = other DNA
actgtcctctttc

SEQ ID NO: 2155 - DNA, 14 bp, synthetic construct
  source 1..14: mol_type = other DNA
actgtcctctttct

SEQ ID NO: 2156 - DNA, 15 bp, synthetic construct
  source 1..15: mol_type = other DNA
actgtcctctttcta

SEQ ID NO: 2157 - DNA, 16 bp, synthetic construct
  source 1..16: mol_type = other DNA
actgtcctctttctat

SEQ ID NO: 2158 - DNA, 10 bp, synthetic construct
  source 1..10: mol_type = other DNA
atcttgaaat

SEQ ID NO: 2159 - DNA, 11 bp, synthetic construct
  source 1..11: mol_type = other DNA
atcttgaaatt

SEQ ID NO: 2160 - DNA, 12 bp, synthetic construct
  source 1..12: mol_type = other DNA
atcttgaaatta

SEQ ID NO: 2161 - DNA, 13 bp, synthetic construct
  source 1..13: mol_type = other DNA
atcttgaaattaa

SEQ ID NO: 2162 - DNA, 14 bp, synthetic construct
  source 1..14: mol_type = other DNA
atcttgaaattaat

SEQ ID NO: 2163 - DNA, 15 bp, synthetic construct
  source 1..15: mol_type = other DNA
atcttgaaattaata

SEQ ID NO: 2164 - DNA, 16 bp, synthetic construct
  source 1..16: mol_type = other DNA
atcttgaaattaatat

SEQ ID NO: 2165 - DNA, 10 bp, synthetic construct
  source 1..10: mol_type = other DNA
ctatcttgaa

SEQ ID NO: 2166 - DNA, 11 bp, synthetic construct
  source 1..11: mol_type = other DNA
ctatcttgaaa

SEQ ID NO: 2167 - DNA, 12 bp, synthetic construct
  source 1..12: mol_type = other DNA
ctatcttgaaat

SEQ ID NO: 2168 - DNA, 13 bp, synthetic construct
  source 1..13: mol_type = other DNA
ctatcttgaaatt

SEQ ID NO: 2169 - DNA, 14 bp, synthetic construct
  source 1..14: mol_type = other DNA
ctatcttgaaatta

SEQ ID NO: 2170 - DNA, 15 bp, synthetic construct
  source 1..15: mol_type = other DNA
ctatcttgaaattaa

SEQ ID NO: 2171 - DNA, 16 bp, synthetic construct
  source 1..16: mol_type = other DNA
ctatcttgaaattaat

SEQ ID NO: 2172 - DNA, 10 bp, synthetic construct
  source 1..10: mol_type = other DNA
gtcctctttc

SEQ ID NO: 2173 - DNA, 11 bp, synthetic construct
  source 1..11: mol_type = other DNA
gtcctctttct

SEQ ID NO: 2174 - DNA, 12 bp, synthetic construct
  source 1..12: mol_type = other DNA
gtcctctttcta

SEQ ID NO: 2175 - DNA, 13 bp, synthetic construct
  source 1..13: mol_type = other DNA
gtcctctttctat

SEQ ID NO: 2176 - DNA, 14 bp, synthetic construct
  source 1..14: mol_type = other DNA
gtcctctttctatc

SEQ ID NO: 2177 - DNA, 15 bp, synthetic construct
  source 1..15: mol_type = other DNA
gtcctctttctatct

SEQ ID NO: 2178 - DNA, 16 bp, synthetic construct
  source 1..16: mol_type = other DNA
gtcctctttctatctt

SEQ ID NO: 2179 - DNA, 10 bp, synthetic construct
  source 1..10: mol_type = other DNA
attaatatct

SEQ ID NO: 2180 - DNA, 11 bp, synthetic construct
  source 1..11: mol_type = other DNA
attaatatctt

SEQ ID NO: 2181 - DNA, 12 bp, synthetic construct
  source 1..12: mol_type = other DNA
attaatatcttt

SEQ ID NO: 2182 - DNA, 13 bp, synthetic construct
  source 1..13: mol_type = other DNA
attaatatctttc

SEQ ID NO: 2183 - DNA, 14 bp, synthetic construct
  source 1..14: mol_type = other DNA
attaatatctttca

SEQ ID NO: 2184 - DNA, 15 bp, synthetic construct
  source 1..15: mol_type = other DNA
attaatatctttcag

SEQ ID NO: 2185 - DNA, 16 bp, synthetic construct
  source 1..16: mol_type = other DNA
attaatatctttcagg

SEQ ID NO: 2186 - DNA, 10 bp, synthetic construct
  source 1..10: mol_type = other DNA
ggagcaggca

SEQ ID NO: 2187 - DNA, 11 bp, synthetic construct
  source 1..11: mol_type = other DNA
ggagcaggcaa

SEQ ID NO: 2188 - DNA, 12 bp, synthetic construct
  source 1..12: mol_type = other DNA
ggagcaggcaag

SEQ ID NO: 2189 - DNA, 13 bp, synthetic construct
  source 1..13: mol_type = other DNA
ggagcaggcaagg

SEQ ID NO: 2190 - DNA, 14 bp, synthetic construct
  source 1..14: mol_type = other DNA
ggagcaggcaaggt

SEQ ID NO: 2191 - DNA, 15 bp, synthetic construct
  source 1..15: mol_type = other DNA
ggagcaggcaaggta

SEQ ID NO: 2192 - DNA, 16 bp, synthetic construct
  source 1..16: mol_type = other DNA
ggagcaggcaaggtag

SEQ ID NO: 2193 - DNA, 10 bp, synthetic construct
  source 1..10: mol_type = other DNA
aattaatatc

SEQ ID NO: 2194 - DNA, 11 bp, synthetic construct
  source 1..11: mol_type = other DNA
aattaatatct

SEQ ID NO: 2195 - DNA, 12 bp, synthetic construct
  source 1..12: mol_type = other DNA
aattaatatctt

SEQ ID NO: 2196 - DNA, 13 bp, synthetic construct
  source 1..13: mol_type = other DNA
aattaatatcttt

SEQ ID NO: 2197 - DNA, 14 bp, synthetic construct
  source 1..14: mol_type = other DNA
aattaatatctttc

SEQ ID NO: 2198 - DNA, 15 bp, synthetic construct
  source 1..15: mol_type = other DNA
aattaatatctttca

SEQ ID NO: 2199 - DNA, 16 bp, synthetic construct
  source 1..16: mol_type = other DNA
aattaatatctttcag

SEQ ID NO: 2200 - DNA, 10 bp, synthetic construct
  source 1..10: mol_type = other DNA
acaactgtcc

SEQ ID NO: 2201 - DNA, 11 bp, synthetic construct
  source 1..11: mol_type = other DNA
acaactgtcct

SEQ ID NO: 2202 - DNA, 12 bp, synthetic construct
  source 1..12: mol_type = other DNA
acaactgtcctc

SEQ ID NO: 2203 - DNA, 13 bp, synthetic construct
  source 1..13: mol_type = other DNA
acaactgtcctct

SEQ ID NO: 2204 - DNA, 14 bp, synthetic construct
  source 1..14: mol_type = other DNA
acaactgtcctctt

SEQ ID NO: 2205 - DNA, 15 bp, synthetic construct
  source 1..15: mol_type = other DNA
acaactgtcctcttt

SEQ ID NO: 2206 - DNA, 16 bp, synthetic construct
  source 1..16: mol_type = other DNA
acaactgtcctctttc

SEQ ID NO: 2207 - DNA, 10 bp, synthetic construct
  source 1..10: mol_type = other DNA
aacaactgtc

SEQ ID NO: 2208 - DNA, 11 bp, synthetic construct
  source 1..11: mol_type = other DNA
aacaactgtcc

SEQ ID NO: 2209 - DNA, 12 bp, synthetic construct
  source 1..12: mol_type = other DNA
aacaactgtcct

SEQ ID NO: 2210 - DNA, 13 bp, synthetic construct
  source 1..13: mol_type = other DNA
aacaactgtcctc

SEQ ID NO: 2211 - DNA, 14 bp, synthetic construct
  source 1..14: mol_type = other DNA
aacaactgtcctct

SEQ ID NO: 2212 - DNA, 15 bp, synthetic construct
  source 1..15: mol_type = other DNA
aacaactgtcctctt

SEQ ID NO: 2213 - DNA, 16 bp, synthetic construct
  source 1..16: mol_type = other DNA
aacaactgtcctcttt

SEQ ID NO: 2214 - DNA, 10 bp, synthetic construct
  source 1..10: mol_type = other DNA
agcaggcaag

SEQ ID NO: 2215 - DNA, 11 bp, synthetic construct
  source 1..11: mol_type = other DNA
agcaggcaagg

SEQ ID NO: 2216 - DNA, 12 bp, synthetic construct
  source 1..12: mol_type = other DNA
agcaggcaaggt

SEQ ID NO: 2217 - DNA, 13 bp, synthetic construct
  source 1..13: mol_type = other DNA
agcaggcaaggta

SEQ ID NO: 2218 - DNA, 14 bp, synthetic construct
  source 1..14: mol_type = other DNA
agcaggcaaggtag

SEQ ID NO: 2219 - DNA, 15 bp, synthetic construct
  source 1..15: mol_type = other DNA
agcaggcaaggtagt

SEQ ID NO: 2220 - DNA, 16 bp, synthetic construct
  source 1..16: mol_type = other DNA
agcaggcaaggtagtt

SEQ ID NO: 2221 - DNA, 10 bp, synthetic construct
  source 1..10: mol_type = other DNA
tagttctttt

SEQ ID NO: 2222 - DNA, 11 bp, synthetic construct
  source 1..11: mol_type = other DNA
tagttcttttg

SEQ ID NO: 2223 - DNA, 12 bp, synthetic construct
  source 1..12: mol_type = other DNA
tagttcttttgt

SEQ ID NO: 2224 - DNA, 13 bp, synthetic construct
  source 1..13: mol_type = other DNA
tagttcttttgtt

SEQ ID NO: 2225 - DNA, 14 bp, synthetic construct
  source 1..14: mol_type = other DNA
tagttcttttgttc

SEQ ID NO: 2226 - DNA, 15 bp, synthetic construct
  source 1..15: mol_type = other DNA
tagttcttttgttct

SEQ ID NO: 2227 - DNA, 16 bp, synthetic construct
  source 1..16: mol_type = other DNA
tagttcttttgttctt

SEQ ID NO: 2228 - DNA, 10 bp, synthetic construct
  source 1..10: mol_type = other DNA
ttctatcttg

SEQ ID NO: 2229 - DNA, 11 bp, synthetic construct
  source 1..11: mol_type = other DNA
ttctatcttga

SEQ ID NO: 2230 - DNA, 12 bp, synthetic construct
  source 1..12: mol_type = other DNA
ttctatcttgaa

SEQ ID NO: 2231 - DNA, 13 bp, synthetic construct
  source 1..13: mol_type = other DNA
ttctatcttgaaa

SEQ ID NO: 2232 - DNA, 14 bp, synthetic construct
  source 1..14: mol_type = other DNA
ttctatcttgaaat

SEQ ID NO: 2233 - DNA, 15 bp, synthetic construct
  source 1..15: mol_type = other DNA
ttctatcttgaaatt

SEQ ID NO: 2234 - DNA, 16 bp, synthetic construct
  source 1..16: mol_type = other DNA
ttctatcttgaaatta

SEQ ID NO: 2235 - DNA, 10 bp, synthetic construct
  source 1..10: mol_type = other DNA
aactgtcctc

SEQ ID NO: 2236 - DNA, 11 bp, synthetic construct
  source 1..11: mol_type = other DNA
aactgtcctct

SEQ ID NO: 2237 - DNA, 12 bp, synthetic construct
  source 1..12: mol_type = other DNA
aactgtcctctt

SEQ ID NO: 2238 - DNA, 13 bp, synthetic construct
  source 1..13: mol_type = other DNA
aactgtcctcttt

SEQ ID NO: 2239 - DNA, 14 bp, synthetic construct
  source 1..14: mol_type = other DNA
aactgtcctctttc

SEQ ID NO: 2240 - DNA, 15 bp, synthetic construct
  source 1..15: mol_type = other DNA
aactgtcctctttct

SEQ ID NO: 2241 - DNA, 16 bp, synthetic construct
  source 1..16: mol_type = other DNA
aactgtcctctttcta

SEQ ID NO: 2242 - DNA, 10 bp, synthetic construct
  source 1..10: mol_type = other DNA
tatcttgaaa

SEQ ID NO: 2243 - DNA, 11 bp, synthetic construct
  source 1..11: mol_type = other DNA
tatcttgaaat

SEQ ID NO: 2244 - DNA, 12 bp, synthetic construct
  source 1..12: mol_type = other DNA
tatcttgaaatt

SEQ ID NO: 2245 - DNA, 13 bp, synthetic construct
  source 1..13: mol_type = other DNA
tatcttgaaatta

SEQ ID NO: 2246 - DNA, 14 bp, synthetic construct
  source 1..14: mol_type = other DNA
tatcttgaaattaa

SEQ ID NO: 2247 - DNA, 15 bp, synthetic construct
  source 1..15: mol_type = other DNA
tatcttgaaattaat

SEQ ID NO: 2248 - DNA, 16 bp, synthetic construct
  source 1..16: mol_type = other DNA
tatcttgaaattaata

SEQ ID NO: 2249 - DNA, 10 bp, synthetic construct
  source 1..10: mol_type = other DNA
tctatcttga

SEQ ID NO: 2250 - DNA, 11 bp, synthetic construct
  source 1..11: mol_type = other DNA
tctatcttgaa

SEQ ID NO: 2251 - DNA, 12 bp, synthetic construct
  source 1..12: mol_type = other DNA
tctatcttgaaa

SEQ ID NO: 2252 - DNA, 13 bp, synthetic construct
  source 1..13: mol_type = other DNA
tctatcttgaaat

SEQ ID NO: 2253 - DNA, 14 bp, synthetic construct
  source 1..14: mol_type = other DNA
tctatcttgaaatt

SEQ ID NO: 2254 - DNA, 15 bp, synthetic construct
  source 1..15: mol_type = other DNA
tctatcttgaaatta

SEQ ID NO: 2255 - DNA, 16 bp, synthetic construct
  source 1..16: mol_type = other DNA
tctatcttgaaattaa

SEQ ID NO: 2256 - DNA, 10 bp, synthetic construct
  source 1..10: mol_type = other DNA
ccactggagc

SEQ ID NO: 2257 - DNA, 11 bp, synthetic construct
  source 1..11: mol_type = other DNA
ccactggagca

SEQ ID NO: 2258 - DNA, 12 bp, synthetic construct
  source 1..12: mol_type = other DNA
ccactggagcag

SEQ ID NO: 2259 - DNA, 13 bp, synthetic construct
  source 1..13: mol_type = other DNA
ccactggagcagg

SEQ ID NO: 2260 - DNA, 14 bp, synthetic construct
  source 1..14: mol_type = other DNA
ccactggagcaggc

SEQ ID NO: 2261 - DNA, 15 bp, synthetic construct
  source 1..15: mol_type = other DNA
ccactggagcaggca

SEQ ID NO: 2262 - DNA, 16 bp, synthetic construct
  source 1..16: mol_type = other DNA
ccactggagcaggcaa

SEQ ID NO: 2263 - DNA, 10 bp, synthetic construct
  source 1..10: mol_type = other DNA
tccactggag

SEQ ID NO: 2264 - DNA, 11 bp, synthetic construct
  source 1..11: mol_type = other DNA
tccactggagc

SEQ ID NO: 2265 - DNA, 12 bp, synthetic construct
  source 1..12: mol_type = other DNA
tccactggagca

SEQ ID NO: 2266 - DNA, 13 bp, synthetic construct
  source 1..13: mol_type = other DNA
tccactggagcag

SEQ ID NO: 2267 - DNA, 14 bp, synthetic construct
  source 1..14: mol_type = other DNA
tccactggagcagg

SEQ ID NO: 2268 - DNA, 15 bp, synthetic construct
  source 1..15: mol_type = other DNA
tccactggagcaggc

SEQ ID NO: 2269 - DNA, 16 bp, synthetic construct
  source 1..16: mol_type = other DNA
tccactggagcaggca

SEQ ID NO: 2270 - DNA, 10 bp, synthetic construct
  source 1..10: mol_type = other DNA
tctttctatc

SEQ ID NO: 2271 - DNA, 11 bp, synthetic construct
  source 1..11: mol_type = other DNA
tctttctatct

SEQ ID NO: 2272 - DNA, 12 bp, synthetic construct
  source 1..12: mol_type = other DNA
tctttctatctt

SEQ ID NO: 2273 - DNA, 13 bp, synthetic construct
  source 1..13: mol_type = other DNA
tctttctatcttg

SEQ ID NO: 2274 - DNA, 14 bp, synthetic construct
  source 1..14: mol_type = other DNA
tctttctatcttga

SEQ ID NO: 2275 - DNA, 15 bp, synthetic construct
  source 1..15: mol_type = other DNA
tctttctatcttgaa

SEQ ID NO: 2276 - DNA, 16 bp, synthetic construct
  source 1..16: mol_type = other DNA
tctttctatcttgaaa

SEQ ID NO: 2277 - DNA, 10 bp, synthetic construct
  source 1..10: mol_type = other DNA
ctctttctat

SEQ ID NO: 2278 - DNA, 11 bp, synthetic construct
  source 1..11: mol_type = other DNA
ctctttctatc

SEQ ID NO: 2279 - DNA, 12 bp, synthetic construct
  source 1..12: mol_type = other DNA
ctctttctatct

SEQ ID NO: 2280 - DNA, 13 bp, synthetic construct
  source 1..13: mol_type = other DNA
ctctttctatctt

SEQ ID NO: 2281 - DNA, 14 bp, synthetic construct
  source 1..14: mol_type = other DNA
ctctttctatcttg

SEQ ID NO: 2282 - DNA, 15 bp, synthetic construct
  source 1..15: mol_type = other DNA
ctctttctatcttga

SEQ ID NO: 2283 - DNA, 16 bp, synthetic construct
  source 1..16: mol_type = other DNA
ctctttctatcttgaa

SEQ ID NO: 2284 - DNA, 10 bp, synthetic construct
  source 1..10: mol_type = other DNA
ataatccagg

SEQ ID NO: 2285 - DNA, 11 bp, synthetic construct
  source 1..11: mol_type = other DNA
ataatccagga

SEQ ID NO: 2286 - DNA, 12 bp, synthetic construct
  source 1..12: mol_type = other DNA
ataatccaggaa

SEQ ID NO: 2287 - DNA, 13 bp, synthetic construct
  source 1..13: mol_type = other DNA
ataatccaggaaa

SEQ ID NO: 2288 - DNA, 14 bp, synthetic construct
  source 1..14: mol_type = other DNA
ataatccaggaaaa

SEQ ID NO: 2289 - DNA, 15 bp, synthetic construct
  source 1..15: mol_type = other DNA
ataatccaggaaaac

SEQ ID NO: 2290 - DNA, 16 bp, synthetic construct
  source 1..16: mol_type = other DNA
ataatccaggaaaact

SEQ ID NO: 2291 - DNA, 10 bp, synthetic construct
  source 1..10: mol_type = other DNA
cataatccag

SEQ ID NO: 2292 - DNA, 11 bp, synthetic construct
  source 1..11: mol_type = other DNA
cataatccagg

SEQ ID NO: 2293 - DNA, 12 bp, synthetic construct
  source 1..12: mol_type = other DNA
cataatccagga

SEQ ID NO: 2294 - DNA, 13 bp, synthetic construct
  source 1..13: mol_type = other DNA
cataatccaggaa

SEQ ID NO: 2295 - DNA, 14 bp, synthetic construct
  source 1..14: mol_type = other DNA
cataatccaggaaa

SEQ ID NO: 2296 - DNA, 15 bp, synthetic construct
  source 1..15: mol_type = other DNA
cataatccaggaaaa

SEQ ID NO: 2297 - DNA, 16 bp, synthetic construct
  source 1..16: mol_type = other DNA
cataatccaggaaaac

SEQ ID NO: 2298 - DNA, 10 bp, synthetic construct
  source 1..10: mol_type = other DNA
tggtgccagg

SEQ ID NO: 2299 - DNA, 11 bp, synthetic construct
  source 1..11: mol_type = other DNA
tggtgccaggc

SEQ ID NO: 2300 - DNA, 12 bp, synthetic construct
  source 1..12: mol_type = other DNA
tggtgccaggca

SEQ ID NO: 2301 - DNA, 13 bp, synthetic construct
  source 1..13: mol_type = other DNA
tggtgccaggcat

SEQ ID NO: 2302 - DNA, 14 bp, synthetic construct
  source 1..14: mol_type = other DNA
tggtgccaggcata

SEQ ID NO: 2303 - DNA, 15 bp, synthetic construct
  source 1..15: mol_type = other DNA
tggtgccaggcataa

SEQ ID NO: 2304 - DNA, 16 bp, synthetic construct
  source 1..16: mol_type = other DNA
tggtgccaggcataat

SEQ ID NO: 2305 - DNA, 10 bp, synthetic construct
  source 1..10: mol_type = other DNA
aaactgagaa

SEQ ID NO: 2306 - DNA, 11 bp, synthetic construct
  source 1..11: mol_type = other DNA
aaactgagaac

SEQ ID NO: 2307 - DNA, 12 bp, synthetic construct
  source 1..12: mol_type = other DNA
aaactgagaaca

SEQ ID NO: 2308 - DNA, 13 bp, synthetic construct
  source 1..13: mol_type = other DNA
aaactgagaacag

SEQ ID NO: 2309 - DNA, 14 bp, synthetic construct
  source 1..14: mol_type = other DNA
aaactgagaacaga

SEQ ID NO: 2310 - DNA, 15 bp, synthetic construct
  source 1..15: mol_type = other DNA
aaactgagaacagaa

SEQ ID NO: 2311 - DNA, 16 bp, synthetic construct
  source 1..16: mol_type = other DNA
aaactgagaacagaat

SEQ ID NO: 2312 - DNA, 10 bp, synthetic construct
  source 1..10: mol_type = other DNA
tattttcttt

SEQ ID NO: 2313 - DNA, 11 bp, synthetic construct
  source 1..11: mol_type = other DNA
tattttcttta

SEQ ID NO: 2314 - DNA, 12 bp, synthetic construct
  source 1..12: mol_type = other DNA
tattttctttaa

SEQ ID NO: 2315 - DNA, 13 bp, synthetic construct
  source 1..13: mol_type = other DNA
tattttctttaat

SEQ ID NO: 2316 - DNA, 14 bp, synthetic construct
  source 1..14: mol_type = other DNA
tattttctttaatg

SEQ ID NO: 2317 - DNA, 15 bp, synthetic construct
  source 1..15: mol_type = other DNA
tattttctttaatgg

SEQ ID NO: 2318 - DNA, 16 bp, synthetic construct
  source 1..16: mol_type = other DNA
tattttctttaatggt

SEQ ID NO: 2319 - DNA, 10 bp, synthetic construct
  source 1..10: mol_type = other DNA
atattttctt

SEQ ID NO: 2320 - DNA, 11 bp, synthetic construct
  source 1..11: mol_type = other DNA
atattttcttt

SEQ ID NO: 2321 - DNA, 12 bp, synthetic construct
  source 1..12: mol_type = other DNA
atattttcttta

SEQ ID NO: 2322 - DNA, 13 bp, synthetic construct
  source 1..13: mol_type = other DNA
atattttctttaa

SEQ ID NO: 2323 - DNA, 14 bp, synthetic construct
  source 1..14: mol_type = other DNA
atattttctttaat

SEQ ID NO: 2324 - DNA, 15 bp, synthetic construct
  source 1..15: mol_type = other DNA
atattttctttaatg

SEQ ID NO: 2325 - DNA, 16 bp, synthetic construct
  source 1..16: mol_type = other DNA
atattttctttaatgg

SEQ ID NO: 2326 - DNA, 10 bp, synthetic construct
  source 1..10: mol_type = other DNA
gatattttct

SEQ ID NO: 2327 - DNA, 11 bp, synthetic construct
  source 1..11: mol_type = other DNA
gatattttctt

SEQ ID NO: 2328 - DNA, 12 bp, synthetic construct
  source 1..12: mol_type = other DNA
gatattttcttt

SEQ ID NO: 2329 - DNA, 13 bp, synthetic construct
  source 1..13: mol_type = other DNA
gatattttcttta

SEQ ID NO: 2330 - DNA, 14 bp, synthetic construct
  source 1..14: mol_type = other DNA
gatattttctttaa

SEQ ID NO: 2331 - DNA, 15 bp, synthetic construct
  source 1..15: mol_type = other DNA
gatattttctttaat

SEQ ID NO: 2332 - DNA, 16 bp, synthetic construct
  source 1..16: mol_type = other DNA
gatattttctttaatg

SEQ ID NO: 2333 - DNA, 10 bp, synthetic construct
  source 1..10: mol_type = other DNA
atgaatatag

SEQ ID NO: 2334 - DNA, 11 bp, synthetic construct
  source 1..11: mol_type = other DNA
atgaatataga

SEQ ID NO: 2335 - DNA, 12 bp, synthetic construct
  source 1..12: mol_type = other DNA
atgaatatagat

SEQ ID NO: 2336 - DNA, 13 bp, synthetic construct
  source 1..13: mol_type = other DNA
atgaatatagata

SEQ ID NO: 2337 - DNA, 14 bp, synthetic construct
  source 1..14: mol_type = other DNA
atgaatatagatac

SEQ ID NO: 2338 - DNA, 15 bp, synthetic construct
  source 1..15: mol_type = other DNA
atgaatatagataca

SEQ ID NO: 2339 - DNA, 16 bp, synthetic construct
  source 1..16: mol_type = other DNA
atgaatatagatacag

SEQ ID NO: 2340 - DNA, 10 bp, synthetic construct
  source 1..10: mol_type = other DNA
gcgtcatcaa

SEQ ID NO: 2341 - DNA, 11 bp, synthetic construct
  source 1..11: mol_type = other DNA
gcgtcatcaaa

SEQ ID NO: 2342 - DNA, 12 bp, synthetic construct
  source 1..12: mol_type = other DNA
gcgtcatcaaag

SEQ ID NO: 2343 - DNA, 13 bp, synthetic construct
  source 1..13: mol_type = other DNA
gcgtcatcaaagc

SEQ ID NO: 2344 - DNA, 14 bp, synthetic construct
  source 1..14: mol_type = other DNA
gcgtcatcaaagca

SEQ ID NO: 2345 - DNA, 15 bp, synthetic construct
  source 1..15: mol_type = other DNA
gcgtcatcaaagcat

SEQ ID NO: 2346 - DNA, 16 bp, synthetic construct
  source 1..16: mol_type = other DNA
gcgtcatcaaagcatg

SEQ ID NO: 2347 - DNA, 10 bp, synthetic construct
  source 1..10: mol_type = other DNA
taatccagga

SEQ ID NO: 2348 - DNA, 11 bp, synthetic construct
  source 1..11: mol_type = other DNA
taatccaggaa

SEQ ID NO: 2349 - DNA, 12 bp, synthetic construct
  source 1..12: mol_type = other DNA
taatccaggaaa

SEQ ID NO: 2350 - DNA, 13 bp, synthetic construct
  source 1..13: mol_type = other DNA
taatccaggaaaa

SEQ ID NO: 2351 - DNA, 14 bp, synthetic construct
  source 1..14: mol_type = other DNA
taatccaggaaaac

SEQ ID NO: 2352 - DNA, 15 bp, synthetic construct
  source 1..15: mol_type = other DNA
taatccaggaaaact

SEQ ID NO: 2353 - DNA, 16 bp, synthetic construct
  source 1..16: mol_type = other DNA
taatccaggaaaactg

SEQ ID NO: 2354 - DNA, 10 bp, synthetic construct
  source 1..10: mol_type = other DNA
gtgtttccta

SEQ ID NO: 2355 - DNA, 11 bp, synthetic construct
  source 1..11: mol_type = other DNA
gtgtttcctat

SEQ ID NO: 2356 - DNA, 12 bp, synthetic construct
  source 1..12: mol_type = other DNA
gtgtttcctatg

SEQ ID NO: 2357 - DNA, 13 bp, synthetic construct
  source 1..13: mol_type = other DNA
gtgtttcctatga

SEQ ID NO: 2358 - DNA, 14 bp, synthetic construct
  source 1..14: mol_type = other DNA
gtgtttcctatgat

SEQ ID NO: 2359 - DNA, 15 bp, synthetic construct
  source 1..15: mol_type = other DNA
gtgtttcctatgatg

SEQ ID NO: 2360 - DNA, 16 bp, synthetic construct
  source 1..16: mol_type = other DNA
gtgtttcctatgatga

SEQ ID NO: 2361 - DNA, 10 bp, synthetic construct
  source 1..10: mol_type = other DNA
tgaatataga

SEQ ID NO: 2362 - DNA, 11 bp, synthetic construct
  source 1..11: mol_type = other DNA
tgaatatagat

SEQ ID NO: 2363 - DNA, 12 bp, synthetic construct
  source 1..12: mol_type = other DNA
tgaatatagata

SEQ ID NO: 2364 - DNA, 13 bp, synthetic construct
  source 1..13: mol_type = other DNA
tgaatatagatac

SEQ ID NO: 2365 - DNA, 14 bp, synthetic construct
  source 1..14: mol_type = other DNA
tgaatatagataca

SEQ ID NO: 2366 - DNA, 15 bp, synthetic construct
  source 1..15: mol_type = other DNA
tgaatatagatacag

SEQ ID NO: 2367 - DNA, 16 bp, synthetic construct
  source 1..16: mol_type = other DNA
tgaatatagatacaga

SEQ ID NO: 2368 - DNA, 10 bp, synthetic construct
  source 1..10: mol_type = other DNA
gatgaatata

SEQ ID NO: 2369 - DNA, 11 bp, synthetic construct
  source 1..11: mol_type = other DNA
gatgaatatag

SEQ ID NO: 2370 - DNA, 12 bp, synthetic construct
  source 1..12: mol_type = other DNA
gatgaatataga

SEQ ID NO: 2371 - DNA, 13 bp, synthetic construct
  source 1..13: mol_type = other DNA
gatgaatatagat

SEQ ID NO: 2372 - DNA, 14 bp, synthetic construct
  source 1..14: mol_type = other DNA
gatgaatatagata

SEQ ID NO: 2373 - DNA, 15 bp, synthetic construct
  source 1..15: mol_type = other DNA
gatgaatatagatac

SEQ ID NO: 2374 - DNA, 16 bp, synthetic construct
  source 1..16: mol_type = other DNA
gatgaatatagataca

SEQ ID NO: 2375 - DNA, 10 bp, synthetic construct
  source 1..10: mol_type = other DNA
atggtgccag

SEQ ID NO: 2376 - DNA, 11 bp, synthetic construct
  source 1..11: mol_type = other DNA
atggtgccagg

SEQ ID NO: 2377 - DNA, 12 bp, synthetic construct
  source 1..12: mol_type = other DNA
atggtgccaggc

SEQ ID NO: 2378 - DNA, 13 bp, synthetic construct
  source 1..13: mol_type = other DNA
atggtgccaggca

SEQ ID NO: 2379 - DNA, 14 bp, synthetic construct
  source 1..14: mol_type = other DNA
atggtgccaggcat

SEQ ID NO: 2380 - DNA, 15 bp, synthetic construct
  source 1..15: mol_type = other DNA
atggtgccaggcata

SEQ ID NO: 2381 - DNA, 16 bp, synthetic construct
  source 1..16: mol_type = other DNA
atggtgccaggcataa

SEQ ID NO: 2382 - DNA, 10 bp, synthetic construct
  source 1..10: mol_type = other DNA
tgtttcctat

SEQ ID NO: 2383 - DNA, 11 bp, synthetic construct
  source 1..11: mol_type = other DNA
tgtttcctatg

SEQ ID NO: 2384 - DNA, 12 bp, synthetic construct
  source 1..12: mol_type = other DNA
tgtttcctatga

SEQ ID NO: 2385 - DNA, 13 bp, synthetic construct
  source 1..13: mol_type = other DNA
tgtttcctatgat

SEQ ID NO: 2386 - DNA, 14 bp, synthetic construct
  source 1..14: mol_type = other DNA
tgtttcctatgatg

SEQ ID NO: 2387 - DNA, 15 bp, synthetic construct
  source 1..15: mol_type = other DNA
tgtttcctatgatga

SEQ ID NO: 2388 - DNA, 16 bp, synthetic construct
  source 1..16: mol_type = other DNA
tgtttcctatgatgaa

SEQ ID NO: 2389 - DNA, 10 bp, synthetic construct
  source 1..10: mol_type = other DNA
tccaggaaaa

SEQ ID NO: 2390 - DNA, 11 bp, synthetic construct
  source 1..11: mol_type = other DNA
tccaggaaaac

SEQ ID NO: 2391 - DNA, 12 bp, synthetic construct
  source 1..12: mol_type = other DNA
tccaggaaaact

SEQ ID NO: 2392 - DNA, 13 bp, synthetic construct
  source 1..13: mol_type = other DNA
tccaggaaaactg

SEQ ID NO: 2393 - DNA, 14 bp, synthetic construct
  source 1..14: mol_type = other DNA
tccaggaaaactga

SEQ ID NO: 2394 - DNA, 15 bp, synthetic construct
  source 1..15: mol_type = other DNA
tccaggaaaactgag

SEQ ID NO: 2395 - DNA, 16 bp, synthetic construct
  source 1..16: mol_type = other DNA
tccaggaaaactgaga

SEQ ID NO: 2396 - DNA, 10 bp, synthetic construct
  source 1..10: mol_type = other DNA
aaaactgaga

SEQ ID NO: 2397 - DNA, 11 bp, synthetic construct
  source 1..11: mol_type = other DNA
aaaactgagaa

SEQ ID NO: 2398 - DNA, 12 bp, synthetic construct
  source 1..12: mol_type = other DNA
aaaactgagaac

SEQ ID NO: 2399 - DNA, 13 bp, synthetic construct
  source 1..13: mol_type = other DNA
aaaactgagaaca

SEQ ID NO: 2400 - DNA, 14 bp, synthetic construct
  source 1..14: mol_type = other DNA
aaaactgagaacag

SEQ ID NO: 2401 - DNA, 15 bp, synthetic construct
  source 1..15: mol_type = other DNA
aaaactgagaacaga

SEQ ID NO: 2402 - DNA, 16 bp, synthetic construct
  source 1..16: mol_type = other DNA
aaaactgagaacagaa

SEQ ID NO: 2403 - DNA, 10 bp, synthetic construct
  source 1..10: mol_type = other DNA
atgatatttt

SEQ ID NO: 2404 - DNA, 11 bp, synthetic construct
  source 1..11: mol_type = other DNA
atgatattttc

SEQ ID NO: 2405 - DNA, 12 bp, synthetic construct
  source 1..12: mol_type = other DNA
atgatattttct

SEQ ID NO: 2406 - DNA, 13 bp, synthetic construct
  source 1..13: mol_type = other DNA
atgatattttctt

SEQ ID NO: 2407 - DNA, 14 bp, synthetic construct
  source 1..14: mol_type = other DNA
atgatattttcttt

SEQ ID NO: 2408 - DNA, 15 bp, synthetic construct
  source 1..15: mol_type = other DNA
atgatattttcttta

SEQ ID NO: 2409 - DNA, 16 bp, synthetic construct
  source 1..16: mol_type = other DNA
atgatattttctttaa

SEQ ID NO: 2410 - DNA, 10 bp, synthetic construct
  source 1..10: mol_type = other DNA
tgatattttc

SEQ ID NO: 2411 - DNA, 11 bp, synthetic construct
  source 1..11: mol_type = other DNA
tgatattttct

SEQ ID NO: 2412 - DNA, 12 bp, synthetic construct
  source 1..12: mol_type = other DNA
tgatattttctt

SEQ ID NO: 2413 - DNA, 13 bp, synthetic construct
  source 1..13: mol_type = other DNA
tgatattttcttt

SEQ ID NO: 2414 - DNA, 14 bp, synthetic construct
  source 1..14: mol_type = other DNA
tgatattttcttta

SEQ ID NO: 2415 - DNA, 15 bp, synthetic construct
  source 1..15: mol_type = other DNA
tgatattttctttaa

SEQ ID NO: 2416 - DNA, 16 bp, synthetic construct
  source 1..16: mol_type = other DNA
tgatattttctttaat

SEQ ID NO: 2417 - DNA, 10 bp, synthetic construct
  source 1..10: mol_type = other DNA
tcaaagcatg

SEQ ID NO: 2418 - DNA, 11 bp, synthetic construct
  source 1..11: mol_type = other DNA
tcaaagcatgc

SEQ ID NO: 2419 - DNA, 12 bp, synthetic construct
  source 1..12: mol_type = other DNA
tcaaagcatgcc

SEQ ID NO: 2420 - DNA, 13 bp, synthetic construct
  source 1..13: mol_type = other DNA
tcaaagcatgcca

SEQ ID NO: 2421 - DNA, 14 bp, synthetic construct
  source 1..14: mol_type = other DNA
tcaaagcatgccaa

SEQ ID NO: 2422 - DNA, 15 bp, synthetic construct
  source 1..15: mol_type = other DNA
tcaaagcatgccaac

SEQ ID NO: 2423 - DNA, 16 bp, synthetic construct
  source 1..16: mol_type = other DNA
tcaaagcatgccaact

SEQ ID NO: 2424 - DNA, 10 bp, synthetic construct
  source 1..10: mol_type = other DNA
gatgatattt

SEQ ID NO: 2425 - DNA, 11 bp, synthetic construct
  source 1..11: mol_type = other DNA
gatgatatttt

SEQ ID NO: 2426 - DNA, 12 bp, synthetic construct
  source 1..12: mol_type = other DNA
gatgatattttc

SEQ ID NO: 2427 - DNA, 13 bp, synthetic construct
  source 1..13: mol_type = other DNA
gatgatattttct

SEQ ID NO: 2428 - DNA, 14 bp, synthetic construct
  source 1..14: mol_type = other DNA
gatgatattttctt

SEQ ID NO: 2429 - DNA, 15 bp, synthetic construct
  source 1..15: mol_type = other DNA
gatgatattttcttt

SEQ ID NO: 2430 - DNA, 16 bp, synthetic construct
  source 1..16: mol_type = other DNA
gatgatattttcttta

SEQ ID NO: 2431 - DNA, 10 bp, synthetic construct
  source 1..10: mol_type = other DNA
gaactatatt

SEQ ID NO: 2432 - DNA, 11 bp, synthetic construct
  source 1..11: mol_type = other DNA
gaactatattg

SEQ ID NO: 2433 - DNA, 12 bp, synthetic construct
  source 1..12: mol_type = other DNA
gaactatattgt

SEQ ID NO: 2434 - DNA, 13 bp, synthetic construct
  source 1..13: mol_type = other DNA
gaactatattgtc

SEQ ID NO: 2435 - DNA, 14 bp, synthetic construct
  source 1..14: mol_type = other DNA
gaactatattgtct

SEQ ID NO: 2436 - DNA, 15 bp, synthetic construct
  source 1..15: mol_type = other DNA
gaactatattgtctt

SEQ ID NO: 2437 - DNA, 16 bp, synthetic construct
  source 1..16: mol_type = other DNA
gaactatattgtcttt

SEQ ID NO: 2438 - DNA, 10 bp, synthetic construct
  source 1..10: mol_type = other DNA
agaactatat

SEQ ID NO: 2439 - DNA, 11 bp, synthetic construct
  source 1..11: mol_type = other DNA
agaactatatt

SEQ ID NO: 2440 - DNA, 12 bp, synthetic construct
  source 1..12: mol_type = other DNA
agaactatattg

SEQ ID NO: 2441 - DNA, 13 bp, synthetic construct
  source 1..13: mol_type = other DNA
agaactatattgt

SEQ ID NO: 2442 - DNA, 14 bp, synthetic construct
  source 1..14: mol_type = other DNA
agaactatattgtc

SEQ ID NO: 2443 - DNA, 15 bp, synthetic construct
  source 1..15: mol_type = other DNA
agaactatattgtct

SEQ ID NO: 2444 - DNA, 16 bp, synthetic construct
  source 1..16: mol_type = other DNA
agaactatattgtctt

SEQ ID NO: 2445 - DNA, 10 bp, synthetic construct
  source 1..10: mol_type = other DNA
aacttggaga

SEQ ID NO: 2446 - DNA, 11 bp, synthetic construct
  source 1..11: mol_type = other DNA
aacttggagat

SEQ ID NO: 2447 - DNA, 12 bp, synthetic construct
  source 1..12: mol_type = other DNA
aacttggagatg

SEQ ID NO: 2448 - DNA, 13 bp, synthetic construct
  source 1..13: mol_type = other DNA
aacttggagatgt

SEQ ID NO: 2449 - DNA, 14 bp, synthetic construct
  source 1..14: mol_type = other DNA
aacttggagatgtc

SEQ ID NO: 2450 - DNA, 15 bp, synthetic construct
  source 1..15: mol_type = other DNA
aacttggagatgtcc

SEQ ID NO: 2451 - DNA, 16 bp, synthetic construct
  source 1..16: mol_type = other DNA
aacttggagatgtcct

SEQ ID NO: 2452 - DNA, 10 bp, synthetic construct
  source 1..10: mol_type = other DNA
ctgcaaactt

SEQ ID NO: 2453 - DNA, 11 bp, synthetic construct
  source 1..11: mol_type = other DNA
ctgcaaacttg

SEQ ID NO: 2454 - DNA, 12 bp, synthetic construct
  source 1..12: mol_type = other DNA
ctgcaaacttgg

SEQ ID NO: 2455 - DNA, 13 bp, synthetic construct
  source 1..13: mol_type = other DNA
ctgcaaacttgga

SEQ ID NO: 2456 - DNA, 14 bp, synthetic construct
  source 1..14: mol_type = other DNA
ctgcaaacttggag

SEQ ID NO: 2457 - DNA, 15 bp, synthetic construct
  source 1..15: mol_type = other DNA
ctgcaaacttggaga

SEQ ID NO: 2458 - DNA, 16 bp, synthetic construct
  source 1..16: mol_type = other DNA
ctgcaaacttggagat

SEQ ID NO: 2459 - DNA, 10 bp, synthetic construct
  source 1..10: mol_type = other DNA
tgagtggagg

SEQ ID NO: 2460 - DNA, 11 bp, synthetic construct
  source 1..11: mol_type = other DNA
tgagtggaggt

SEQ ID NO: 2461 - DNA, 12 bp, synthetic construct
  source 1..12: mol_type = other DNA
tgagtggaggtc

SEQ ID NO: 2462 - DNA, 13 bp, synthetic construct
  source 1..13: mol_type = other DNA
tgagtggaggtca

SEQ ID NO: 2463 - DNA, 14 bp, synthetic construct
  source 1..14: mol_type = other DNA
tgagtggaggtcaa

SEQ ID NO: 2464 - DNA, 15 bp, synthetic construct
  source 1..15: mol_type = other DNA
tgagtggaggtcaac

SEQ ID NO: 2465 - DNA, 16 bp, synthetic construct
  source 1..16: mol_type = other DNA
tgagtggaggtcaacg

SEQ ID NO: 2466 - DNA, 10 bp, synthetic construct
  source 1..10: mol_type = other DNA
aactatattg

SEQ ID NO: 2467 - DNA, 11 bp, synthetic construct
  source 1..11: mol_type = other DNA
aactatattgt

SEQ ID NO: 2468 - DNA, 12 bp, synthetic construct
  source 1..12: mol_type = other DNA
aactatattgtc

SEQ ID NO: 2469 - DNA, 13 bp, synthetic construct
  source 1..13: mol_type = other DNA
aactatattgtct

SEQ ID NO: 2470 - DNA, 14 bp, synthetic construct
  source 1..14: mol_type = other DNA
aactatattgtctt

SEQ ID NO: 2471 - DNA, 15 bp, synthetic construct
  source 1..15: mol_type = other DNA
aactatattgtcttt

SEQ ID NO: 2472 - DNA, 16 bp, synthetic construct
  source 1..16: mol_type = other DNA
aactatattgtctttc

SEQ ID NO: 2473 - DNA, 10 bp, synthetic construct
  source 1..10: mol_type = other DNA
caaacttgga

SEQ ID NO: 2474 - DNA, 11 bp, synthetic construct
  source 1..11: mol_type = other DNA
caaacttggag

SEQ ID NO: 2475 - DNA, 12 bp, synthetic construct
  source 1..12: mol_type = other DNA
caaacttggaga

SEQ ID NO: 2476 - DNA, 13 bp, synthetic construct
  source 1..13: mol_type = other DNA
caaacttggagat

SEQ ID NO: 2477 - DNA, 14 bp, synthetic construct
  source 1..14: mol_type = other DNA
caaacttggagatg

SEQ ID NO: 2478 - DNA, 15 bp, synthetic construct
  source 1..15: mol_type = other DNA
caaacttggagatgt

SEQ ID NO: 2479 - DNA, 16 bp, synthetic construct
  source 1..16: mol_type = other DNA
caaacttggagatgtc

SEQ ID NO: 2480 - DNA, 10 bp, synthetic construct
  source 1..10: mol_type = other DNA
agtggaggtc

SEQ ID NO: 2481 - DNA, 11 bp, synthetic construct
  source 1..11: mol_type = other DNA
agtggaggtca

SEQ ID NO: 2482 - DNA, 12 bp, synthetic construct
  source 1..12: mol_type = other DNA
agtggaggtcaa

SEQ ID NO: 2483 - DNA, 13 bp, synthetic construct
  source 1..13: mol_type = other DNA
agtggaggtcaac

SEQ ID NO: 2484 - DNA, 14 bp, synthetic construct
  source 1..14: mol_type = other DNA
agtggaggtcaacg

SEQ ID NO: 2485 - DNA, 15 bp, synthetic construct
  source 1..15: mol_type = other DNA
agtggaggtcaacga

SEQ ID NO: 2486 - DNA, 16 bp, synthetic construct
  source 1..16: mol_type = other DNA
agtggaggtcaacgag

SEQ ID NO: 2487 - DNA, 10 bp, synthetic construct
  source 1..10: mol_type = other DNA
aaacttggag

SEQ ID NO: 2488 - DNA, 11 bp, synthetic construct
  source 1..11: mol_type = other DNA
aaacttggaga

SEQ ID NO: 2489 - DNA, 12 bp, synthetic construct
  source 1..12: mol_type = other DNA
aaacttggagat

SEQ ID NO: 2490 - DNA, 13 bp, synthetic construct
  source 1..13: mol_type = other DNA
aaacttggagatg

SEQ ID NO: 2491 - DNA, 14 bp, synthetic construct
  source 1..14: mol_type = other DNA
aaacttggagatgt

SEQ ID NO: 2492 - DNA, 15 bp, synthetic construct
  source 1..15: mol_type = other DNA
aaacttggagatgtc

SEQ ID NO: 2493 - DNA, 16 bp, synthetic construct
  source 1..16: mol_type = other DNA
aaacttggagatgtcc

SEQ ID NO: 2494 - DNA, 10 bp, synthetic construct
  source 1..10: mol_type = other DNA
gaaggtggaa

SEQ ID NO: 2495 - DNA, 11 bp, synthetic construct
  source 1..11: mol_type = other DNA
gaaggtggaat

SEQ ID NO: 2496 - DNA, 12 bp, synthetic construct
  source 1..12: mol_type = other DNA
gaaggtggaatc

SEQ ID NO: 2497 - DNA, 13 bp, synthetic construct
  source 1..13: mol_type = other DNA
gaaggtggaatca

SEQ ID NO: 2498 - DNA, 14 bp, synthetic construct
  source 1..14: mol_type = other DNA
gaaggtggaatcac

SEQ ID NO: 2499 - DNA, 15 bp, synthetic construct
  source 1..15: mol_type = other DNA
gaaggtggaatcaca

SEQ ID NO: 2500 - DNA, 16 bp, synthetic construct
  source 1..16: mol_type = other DNA
gaaggtggaatcacac

SEQ ID NO: 2501 - DNA, 10 bp, synthetic construct
  source 1..10: mol_type = other DNA
agcaagaatt

SEQ ID NO: 2502 - DNA, 11 bp, synthetic construct
  source 1..11: mol_type = other DNA
agcaagaattt

SEQ ID NO: 2503 - DNA, 12 bp, synthetic construct
  source 1..12: mol_type = other DNA
agcaagaatttc

SEQ ID NO: 2504 - DNA, 13 bp, synthetic construct
  source 1..13: mol_type = other DNA
agcaagaatttct

SEQ ID NO: 2505 - DNA, 14 bp, synthetic construct
  source 1..14: mol_type = other DNA
agcaagaatttctt

SEQ ID NO: 2506 - DNA, 15 bp, synthetic construct
  source 1..15: mol_type = other DNA
agcaagaatttcttt

SEQ ID NO: 2507 - DNA, 16 bp, synthetic construct
  source 1..16: mol_type = other DNA
agcaagaatttcttta

SEQ ID NO: 2508 - DNA, 10 bp, synthetic construct
  source 1..10: mol_type = other DNA
ttggagatgt

SEQ ID NO: 2509 - DNA, 11 bp, synthetic construct
  source 1..11: mol_type = other DNA
ttggagatgtc

SEQ ID NO: 2510 - DNA, 12 bp, synthetic construct
  source 1..12: mol_type = other DNA
ttggagatgtcc

SEQ ID NO: 2511 - DNA, 13 bp, synthetic construct
  source 1..13: mol_type = other DNA
ttggagatgtcct

SEQ ID NO: 2512 - DNA, 14 bp, synthetic construct
  source 1..14: mol_type = other DNA
ttggagatgtccta

SEQ ID NO: 2513 - DNA, 15 bp, synthetic construct
  source 1..15: mol_type = other DNA
ttggagatgtcctat

SEQ ID NO: 2514 - DNA, 16 bp, synthetic construct
  source 1..16: mol_type = other DNA
ttggagatgtcctatt

SEQ ID NO: 2515 - DNA, 10 bp, synthetic construct
  source 1..10: mol_type = other DNA
acttggagat

SEQ ID NO: 2516 - DNA, 11 bp, synthetic construct
  source 1..11: mol_type = other DNA
acttggagatg

SEQ ID NO: 2517 - DNA, 12 bp, synthetic construct
  source 1..12: mol_type = other DNA
acttggagatgt

SEQ ID NO: 2518 - DNA, 13 bp, synthetic construct
  source 1..13: mol_type = other DNA
acttggagatgtc

SEQ ID NO: 2519 - DNA, 14 bp, synthetic construct
  source 1..14: mol_type = other DNA
acttggagatgtcc

SEQ ID NO: 2520 - DNA, 15 bp, synthetic construct
  source 1..15: mol_type = other DNA
acttggagatgtcct

SEQ ID NO: 2521 - DNA, 16 bp, synthetic construct
  source 1..16: mol_type = other DNA
acttggagatgtccta

SEQ ID NO: 2522 - DNA, 10 bp, synthetic construct
  source 1..10: mol_type = other DNA
tctgcaaact

SEQ ID NO: 2523 - DNA, 11 bp, synthetic construct
  source 1..11: mol_type = other DNA
tctgcaaactt

SEQ ID NO: 2524 - DNA, 12 bp, synthetic construct
  source 1..12: mol_type = other DNA
tctgcaaacttg

SEQ ID NO: 2525 - DNA, 13 bp, synthetic construct
  source 1..13: mol_type = other DNA
tctgcaaacttgg

SEQ ID NO: 2526 - DNA, 14 bp, synthetic construct
  source 1..14: mol_type = other DNA
tctgcaaacttgga

SEQ ID NO: 2527 - DNA, 15 bp, synthetic construct
  source 1..15: mol_type = other DNA
tctgcaaacttggag

SEQ ID NO: 2528 - DNA, 16 bp, synthetic construct
  source 1..16: mol_type = other DNA
tctgcaaacttggaga

SEQ ID NO: 2529 - DNA, 10 bp, synthetic construct
  source 1..10: mol_type = other DNA
agaaggtgga

SEQ ID NO: 2530 - DNA, 11 bp, synthetic construct
  source 1..11: mol_type = other DNA
agaaggtggaa

SEQ ID NO: 2531 - DNA, 12 bp, synthetic construct
  source 1..12: mol_type = other DNA
agaaggtggaat

SEQ ID NO: 2532 - DNA, 13 bp, synthetic construct
  source 1..13: mol_type = other DNA
agaaggtggaatc

SEQ ID NO: 2533 - DNA, 14 bp, synthetic construct
  source 1..14: mol_type = other DNA
agaaggtggaatca

SEQ ID NO: 2534 - DNA, 15 bp, synthetic construct
  source 1..15: mol_type = other DNA
agaaggtggaatcac

SEQ ID NO: 2535 - DNA, 16 bp, synthetic construct
  source 1..16: mol_type = other DNA
agaaggtggaatcaca

SEQ ID NO: 2536 - DNA, 10 bp, synthetic construct
  source 1..10: mol_type = other DNA
aagaatttct

SEQ ID NO: 2537 - DNA, 11 bp, synthetic construct
  source 1..11: mol_type = other DNA
aagaatttctt

SEQ ID NO: 2538 - DNA, 12 bp, synthetic construct
  source 1..12: mol_type = other DNA
aagaatttcttt

SEQ ID NO: 2539 - DNA, 13 bp, synthetic construct
  source 1..13: mol_type = other DNA
aagaatttcttta

SEQ ID NO: 2540 - DNA, 14 bp, synthetic construct
  source 1..14: mol_type = other DNA
aagaatttctttag

SEQ ID NO: 2541 - DNA, 15 bp, synthetic construct
  source 1..15: mol_type = other DNA
aagaatttctttagc

SEQ ID NO: 2542 - DNA, 16 bp, synthetic construct
  source 1..16: mol_type = other DNA
aagaatttctttagca

SEQ ID NO: 2543 - DNA, 10 bp, synthetic construct
  source 1..10: mol_type = other DNA
ggaggtcaac

SEQ ID NO: 2544 - DNA, 11 bp, synthetic construct
  source 1..11: mol_type = other DNA
ggaggtcaacg

SEQ ID NO: 2545 - DNA, 12 bp, synthetic construct
  source 1..12: mol_type = other DNA
ggaggtcaacga

SEQ ID NO: 2546 - DNA, 13 bp, synthetic construct
  source 1..13: mol_type = other DNA
ggaggtcaacgag

SEQ ID NO: 2547 - DNA, 14 bp, synthetic construct
  source 1..14: mol_type = other DNA
ggaggtcaacgagc

SEQ ID NO: 2548 - DNA, 15 bp, synthetic construct
  source 1..15: mol_type = other DNA
ggaggtcaacgagca

SEQ ID NO: 2549 - DNA, 16 bp, synthetic construct
  source 1..16: mol_type = other DNA
ggaggtcaacgagcaa

SEQ ID NO: 2550 - DNA, 10 bp, synthetic construct
  source 1..10: mol_type = other DNA
tggaggtcaa

SEQ ID NO: 2551 - DNA, 11 bp, synthetic construct
  source 1..11: mol_type = other DNA
tggaggtcaac

SEQ ID NO: 2552 - DNA, 12 bp, synthetic construct
  source 1..12: mol_type = other DNA
tggaggtcaacg

SEQ ID NO: 2553 - DNA, 13 bp, synthetic construct
  source 1..13: mol_type = other DNA
tggaggtcaacga

SEQ ID NO: 2554 - DNA, 14 bp, synthetic construct
  source 1..14: mol_type = other DNA
tggaggtcaacgag

SEQ ID NO: 2555 - DNA, 15 bp, synthetic construct
  source 1..15: mol_type = other DNA
tggaggtcaacgagc

SEQ ID NO: 2556 - DNA, 16 bp, synthetic construct
  source 1..16: mol_type = other DNA
tggaggtcaacgagca

SEQ ID NO: 2557 - DNA, 10 bp, synthetic construct
  source 1..10: mol_type = other DNA
gatgtcctat

SEQ ID NO: 2558 - DNA, 11 bp, synthetic construct
  source 1..11: mol_type = other DNA
gatgtcctatt

SEQ ID NO: 2559 - DNA, 12 bp, synthetic construct
  source 1..12: mol_type = other DNA
gatgtcctatta

SEQ ID NO: 2560 - DNA, 13 bp, synthetic construct
  source 1..13: mol_type = other DNA
gatgtcctattac

SEQ ID NO: 2561 - DNA, 14 bp, synthetic construct
  source 1..14: mol_type = other DNA
gatgtcctattacc

SEQ ID NO: 2562 - DNA, 15 bp, synthetic construct
  source 1..15: mol_type = other DNA
gatgtcctattacca

SEQ ID NO: 2563 - DNA, 16 bp, synthetic construct
  source 1..16: mol_type = other DNA
gatgtcctattaccaa

SEQ ID NO: 2564 - DNA, 10 bp, synthetic construct
  source 1..10: mol_type = other DNA
agatgtccta

SEQ ID NO: 2565 - DNA, 11 bp, synthetic construct
  source 1..11: mol_type = other DNA
agatgtcctat

SEQ ID NO: 2566 - DNA, 12 bp, synthetic construct
  source 1..12: mol_type = other DNA
agatgtcctatt

SEQ ID NO: 2567 - DNA, 13 bp, synthetic construct
  source 1..13: mol_type = other DNA
agatgtcctatta

SEQ ID NO: 2568 - DNA, 14 bp, synthetic construct
  source 1..14: mol_type = other DNA
agatgtcctattac

SEQ ID NO: 2569 - DNA, 15 bp, synthetic construct
  source 1..15: mol_type = other DNA
agatgtcctattacc

SEQ ID NO: 2570 - DNA, 16 bp, synthetic construct
  source 1..16: mol_type = other DNA
agatgtcctattacca

SEQ ID NO: 2571 - DNA, 10 bp, synthetic construct
  source 1..10: mol_type = other DNA
tgtctttctc

SEQ ID NO: 2572 - DNA, 11 bp, synthetic construct
  source 1..11: mol_type = other DNA
tgtctttctct

SEQ ID NO: 2573 - DNA, 12 bp, synthetic construct
  source 1..12: mol_type = other DNA
tgtctttctctg

SEQ ID NO: 2574 - DNA, 13 bp, synthetic construct
  source 1..13: mol_type = other DNA
tgtctttctctgc

SEQ ID NO: 2575 - DNA, 14 bp, synthetic construct
  source 1..14: mol_type = other DNA
tgtctttctctgca

SEQ ID NO: 2576 - DNA, 15 bp, synthetic construct
  source 1..15: mol_type = other DNA
tgtctttctctgcaa

SEQ ID NO: 2577 - DNA, 16 bp, synthetic construct
  source 1..16: mol_type = other DNA
tgtctttctctgcaaa

SEQ ID NO: 2578 - DNA, 10 bp, synthetic construct
  source 1..10: mol_type = other DNA
ttgtctttct

SEQ ID NO: 2579 - DNA, 11 bp, synthetic construct
  source 1..11: mol_type = other DNA
ttgtctttctc

SEQ ID NO: 2580 - DNA, 12 bp, synthetic construct
  source 1..12: mol_type = other DNA
ttgtctttctct

SEQ ID NO: 2581 - DNA, 13 bp, synthetic construct
  source 1..13: mol_type = other DNA
ttgtctttctctg

SEQ ID NO: 2582 - DNA, 14 bp, synthetic construct
  source 1..14: mol_type = other DNA
ttgtctttctctgc

SEQ ID NO: 2583 - DNA, 15 bp, synthetic construct
  source 1..15: mol_type = other DNA
ttgtctttctctgca

SEQ ID NO: 2584 - DNA, 16 bp, synthetic construct
  source 1..16: mol_type = other DNA
ttgtctttctctgcaa

SEQ ID NO: 2585 - DNA, 10 bp, synthetic construct
  source 1..10: mol_type = other DNA
agtgtgattc

SEQ ID NO: 2586 - DNA, 11 bp, synthetic construct
  source 1..11: mol_type = other DNA
agtgtgattcc

SEQ ID NO: 2587 - DNA, 12 bp, synthetic construct
  source 1..12: mol_type = other DNA
agtgtgattcca

SEQ ID NO: 2588 - DNA, 13 bp, synthetic construct
  source 1..13: mol_type = other DNA
agtgtgattccac

SEQ ID NO: 2589 - DNA, 14 bp, synthetic construct
  source 1..14: mol_type = other DNA
agtgtgattccacc

SEQ ID NO: 2590 - DNA, 15 bp, synthetic construct
  source 1..15: mol_type = other DNA
agtgtgattccacct

SEQ ID NO: 2591 - DNA, 16 bp, synthetic construct
  source 1..16: mol_type = other DNA
agtgtgattccacctt

SEQ ID NO: 2592 - DNA, 10 bp, synthetic construct
  source 1..10: mol_type = other DNA
ccaagaacta

SEQ ID NO: 2593 - DNA, 11 bp, synthetic construct
  source 1..11: mol_type = other DNA
ccaagaactat

SEQ ID NO: 2594 - DNA, 12 bp, synthetic construct
  source 1..12: mol_type = other DNA
ccaagaactata

SEQ ID NO: 2595 - DNA, 13 bp, synthetic construct
  source 1..13: mol_type = other DNA
ccaagaactatat

SEQ ID NO: 2596 - DNA, 14 bp, synthetic construct
  source 1..14: mol_type = other DNA
ccaagaactatatt

SEQ ID NO: 2597 - DNA, 15 bp, synthetic construct
  source 1..15: mol_type = other DNA
ccaagaactatattg

SEQ ID NO: 2598 - DNA, 16 bp, synthetic construct
  source 1..16: mol_type = other DNA
ccaagaactatattgt

SEQ ID NO: 2599 - DNA, 10 bp, synthetic construct
  source 1..10: mol_type = other DNA
tccaagaact

SEQ ID NO: 2600 - DNA, 11 bp, synthetic construct
  source 1..11: mol_type = other DNA
tccaagaacta

SEQ ID NO: 2601 - DNA, 12 bp, synthetic construct
  source 1..12: mol_type = other DNA
tccaagaactat

SEQ ID NO: 2602 - DNA, 13 bp, synthetic construct
  source 1..13: mol_type = other DNA
tccaagaactata

SEQ ID NO: 2603 - DNA, 14 bp, synthetic construct
  source 1..14: mol_type = other DNA
tccaagaactatat

SEQ ID NO: 2604 - DNA, 15 bp, synthetic construct
  source 1..15: mol_type = other DNA
tccaagaactatatt

SEQ ID NO: 2605 - DNA, 16 bp, synthetic construct
  source 1..16: mol_type = other DNA
tccaagaactatattg

SEQ ID NO: 2606 - DNA, 10 bp, synthetic construct
  source 1..10: mol_type = other DNA
actatattgt

SEQ ID NO: 2607 - DNA, 11 bp, synthetic construct
  source 1..11: mol_type = other DNA
actatattgtc

SEQ ID NO: 2608 - DNA, 12 bp, synthetic construct
  source 1..12: mol_type = other DNA
actatattgtct

SEQ ID NO: 2609 - DNA, 13 bp, synthetic construct
  source 1..13: mol_type = other DNA
actatattgtctt

SEQ ID NO: 2610 - DNA, 14 bp, synthetic construct
  source 1..14: mol_type = other DNA
actatattgtcttt

SEQ ID NO: 2611 - DNA, 15 bp, synthetic construct
  source 1..15: mol_type = other DNA
actatattgtctttc

SEQ ID NO: 2612 - DNA, 16 bp, synthetic construct
  source 1..16: mol_type = other DNA
actatattgtctttct

SEQ ID NO: 2613 - DNA, 10 bp, synthetic construct
  source 1..10: mol_type = other DNA
gtgtgattcc

SEQ ID NO: 2614 - DNA, 11 bp, synthetic construct
  source 1..11: mol_type = other DNA
gtgtgattcca

SEQ ID NO: 2615 - DNA, 12 bp, synthetic construct
  source 1..12: mol_type = other DNA
gtgtgattccac

SEQ ID NO: 2616 - DNA, 13 bp, synthetic construct
  source 1..13: mol_type = other DNA
gtgtgattccacc

SEQ ID NO: 2617 - DNA, 14 bp, synthetic construct
  source 1..14: mol_type = other DNA
gtgtgattccacct

SEQ ID NO: 2618 - DNA, 15 bp, synthetic construct
  source 1..15: mol_type = other DNA
gtgtgattccacctt

SEQ ID NO: 2619 - DNA, 16 bp, synthetic construct
  source 1..16: mol_type = other DNA
gtgtgattccaccttc

SEQ ID NO: 2620 - DNA, 10 bp, synthetic construct
  source 1..10: mol_type = other DNA
ctatattgtc

SEQ ID NO: 2621 - DNA, 11 bp, synthetic construct
  source 1..11: mol_type = other DNA
ctatattgtct

SEQ ID NO: 2622 - DNA, 12 bp, synthetic construct
  source 1..12: mol_type = other DNA
ctatattgtctt

SEQ ID NO: 2623 - DNA, 13 bp, synthetic construct
  source 1..13: mol_type = other DNA
ctatattgtcttt

SEQ ID NO: 2624 - DNA, 14 bp, synthetic construct
  source 1..14: mol_type = other DNA
ctatattgtctttc

SEQ ID NO: 2625 - DNA, 15 bp, synthetic construct
  source 1..15: mol_type = other DNA
ctatattgtctttct

SEQ ID NO: 2626 - DNA, 16 bp, synthetic construct
  source 1..16: mol_type = other DNA
ctatattgtctttctc

SEQ ID NO: 2627 - DNA, 10 bp, synthetic construct
  source 1..10: mol_type = other DNA
cagtgtgatt

SEQ ID NO: 2628 - DNA, 11 bp, synthetic construct
  source 1..11: mol_type = other DNA
cagtgtgattc

SEQ ID NO: 2629 - DNA, 12 bp, synthetic construct
  source 1..12: mol_type = other DNA
cagtgtgattcc

SEQ ID NO: 2630 - DNA, 13 bp, synthetic construct
  source 1..13: mol_type = other DNA
cagtgtgattcca

SEQ ID NO: 2631 - DNA, 14 bp, synthetic construct
  source 1..14: mol_type = other DNA
cagtgtgattccac

SEQ ID NO: 2632 - DNA, 15 bp, synthetic construct
  source 1..15: mol_type = other DNA
cagtgtgattccacc

SEQ ID NO: 2633 - DNA, 16 bp, synthetic construct
  source 1..16: mol_type = other DNA
cagtgtgattccacct

SEQ ID NO: 2634 - DNA, 10 bp, synthetic construct
  source 1..10: mol_type = other DNA
tctccaagaa

SEQ ID NO: 2635 - DNA, 11 bp, synthetic construct
  source 1..11: mol_type = other DNA
tctccaagaac

SEQ ID NO: 2636 - DNA, 12 bp, synthetic construct
  source 1..12: mol_type = other DNA
tctccaagaact

SEQ ID NO: 2637 - DNA, 13 bp, synthetic construct
  source 1..13: mol_type = other DNA
tctccaagaacta

SEQ ID NO: 2638 - DNA, 14 bp, synthetic construct
  source 1..14: mol_type = other DNA
tctccaagaactat

SEQ ID NO: 2639 - DNA, 15 bp, synthetic construct
  source 1..15: mol_type = other DNA
tctccaagaactata

SEQ ID NO: 2640 - DNA, 16 bp, synthetic construct
  source 1..16: mol_type = other DNA
tctccaagaactatat

SEQ ID NO: 2641 - DNA, 10 bp, synthetic construct
  source 1..10: mol_type = other DNA
tgaataacta

SEQ ID NO: 2642 - DNA, 11 bp, synthetic construct
  source 1..11: mol_type = other DNA
tgaataactaa

SEQ ID NO: 2643 - DNA, 12 bp, synthetic construct
  source 1..12: mol_type = other DNA
tgaataactaat

SEQ ID NO: 2644 - DNA, 13 bp, synthetic construct
  source 1..13: mol_type = other DNA
tgaataactaatt

SEQ ID NO: 2645 - DNA, 14 bp, synthetic construct
  source 1..14: mol_type = other DNA
tgaataactaatta

SEQ ID NO: 2646 - DNA, 15 bp, synthetic construct
  source 1..15: mol_type = other DNA
tgaataactaattat

SEQ ID NO: 2647 - DNA, 16 bp, synthetic construct
  source 1..16: mol_type = other DNA
tgaataactaattatt

SEQ ID NO: 2648 - DNA, 10 bp, synthetic construct
  source 1..10: mol_type = other DNA
ctccaagaac

SEQ ID NO: 2649 - DNA, 11 bp, synthetic construct
  source 1..11: mol_type = other DNA
ctccaagaact

SEQ ID NO: 2650 - DNA, 12 bp, synthetic construct
  source 1..12: mol_type = other DNA
ctccaagaacta

SEQ ID NO: 2651 - DNA, 13 bp, synthetic construct
  source 1..13: mol_type = other DNA
ctccaagaactat

SEQ ID NO: 2652 - DNA, 14 bp, synthetic construct
  source 1..14: mol_type = other DNA
ctccaagaactata

SEQ ID NO: 2653 - DNA, 15 bp, synthetic construct
  source 1..15: mol_type = other DNA
ctccaagaactatat

SEQ ID NO: 2654 - DNA, 16 bp, synthetic construct
  source 1..16: mol_type = other DNA
ctccaagaactatatt

SEQ ID NO: 2655 - DNA, 10 bp, synthetic construct
  source 1..10: mol_type = other DNA
atttctttag

SEQ ID NO: 2656 - DNA, 11 bp, synthetic construct
  source 1..11: mol_type = other DNA
atttctttagc

SEQ ID NO: 2657 - DNA, 12 bp, synthetic construct
  source 1..12: mol_type = other DNA
atttctttagca

SEQ ID NO: 2658 - DNA, 13 bp, synthetic construct
  source 1..13: mol_type = other DNA
atttctttagcaa

SEQ ID NO: 2659 - DNA, 14 bp, synthetic construct
  source 1..14: mol_type = other DNA
atttctttagcaag

SEQ ID NO: 2660 - DNA, 15 bp, synthetic construct
  source 1..15: mol_type = other DNA
atttctttagcaagg

SEQ ID NO: 2661 - DNA, 16 bp, synthetic construct
  source 1..16: mol_type = other DNA
atttctttagcaaggt

SEQ ID NO: 2662 - DNA, 10 bp, synthetic construct
  source 1..10: mol_type = other DNA
caagaactat

SEQ ID NO: 2663 - DNA, 11 bp, synthetic construct
  source 1..11: mol_type = other DNA
caagaactata

SEQ ID NO: 2664 - DNA, 12 bp, synthetic construct
  source 1..12: mol_type = other DNA
caagaactatat

SEQ ID NO: 2665 - DNA, 13 bp, synthetic construct
  source 1..13: mol_type = other DNA
caagaactatatt

SEQ ID NO: 2666 - DNA, 14 bp, synthetic construct
  source 1..14: mol_type = other DNA
caagaactatattg

SEQ ID NO: 2667 - DNA, 15 bp, synthetic construct
  source 1..15: mol_type = other DNA
caagaactatattgt

SEQ ID NO: 2668 - DNA, 16 bp, synthetic construct
  source 1..16: mol_type = other DNA
caagaactatattgtc

SEQ ID NO: 2669 - DNA, 10 bp, synthetic construct
  source 1..10: mol_type = other DNA
tgtgattcca

SEQ ID NO: 2670 - DNA, 11 bp, synthetic construct
  source 1..11: mol_type = other DNA
tgtgattccac

SEQ ID NO: 2671 - DNA, 12 bp, synthetic construct
  source 1..12: mol_type = other DNA
tgtgattccacc

SEQ ID NO: 2672 - DNA, 13 bp, synthetic construct
  source 1..13: mol_type = other DNA
tgtgattccacct

SEQ ID NO: 2673 - DNA, 14 bp, synthetic construct
  source 1..14: mol_type = other DNA
tgtgattccacctt

SEQ ID NO: 2674 - DNA, 15 bp, synthetic construct
  source 1..15: mol_type = other DNA
tgtgattccaccttc

SEQ ID NO: 2675 - DNA, 16 bp, synthetic construct
  source 1..16: mol_type = other DNA
tgtgattccaccttct

SEQ ID NO: 2676 - DNA, 10 bp, synthetic construct
  source 1..10: mol_type = other DNA
gcaaggtgaa

SEQ ID NO: 2677 - DNA, 11 bp, synthetic construct
  source 1..11: mol_type = other DNA
gcaaggtgaat

SEQ ID NO: 2678 - DNA, 12 bp, synthetic construct
  source 1..12: mol_type = other DNA
gcaaggtgaata

SEQ ID NO: 2679 - DNA, 13 bp, synthetic construct
  source 1..13: mol_type = other DNA
gcaaggtgaataa

SEQ ID NO: 2680 - DNA, 14 bp, synthetic construct
  source 1..14: mol_type = other DNA
gcaaggtgaataac

SEQ ID NO: 2681 - DNA, 15 bp, synthetic construct
  source 1..15: mol_type = other DNA
gcaaggtgaataact

SEQ ID NO: 2682 - DNA, 16 bp, synthetic construct
  source 1..16: mol_type = other DNA
gcaaggtgaataacta

SEQ ID NO: 2683 - DNA, 10 bp, synthetic construct
  source 1..10: mol_type = other DNA
ttctccaaga

SEQ ID NO: 2684 - DNA, 11 bp, synthetic construct
  source 1..11: mol_type = other DNA
ttctccaagaa

SEQ ID NO: 2685 - DNA, 12 bp, synthetic construct
  source 1..12: mol_type = other DNA
ttctccaagaac

SEQ ID NO: 2686 - DNA, 13 bp, synthetic construct
  source 1..13: mol_type = other DNA
ttctccaagaact

SEQ ID NO: 2687 - DNA, 14 bp, synthetic construct
  source 1..14: mol_type = other DNA
ttctccaagaacta

SEQ ID NO: 2688 - DNA, 15 bp, synthetic construct
  source 1..15: mol_type = other DNA
ttctccaagaactat

SEQ ID NO: 2689 - DNA, 16 bp, synthetic construct
  source 1..16: mol_type = other DNA
ttctccaagaactata

SEQ ID NO: 2690 - DNA, 10 bp, synthetic construct
  source 1..10: mol_type = other DNA
tgattccacc

SEQ ID NO: 2691 - DNA, 11 bp, synthetic construct
  source 1..11: mol_type = other DNA
tgattccacct

SEQ ID NO: 2692 - DNA, 12 bp, synthetic construct
  source 1..12: mol_type = other DNA
tgattccacctt

SEQ ID NO: 2693 - DNA, 13 bp, synthetic construct
  source 1..13: mol_type = other DNA
tgattccaccttc

SEQ ID NO: 2694 - DNA, 14 bp, synthetic construct
  source 1..14: mol_type = other DNA
tgattccaccttct

SEQ ID NO: 2695 - DNA, 15 bp, synthetic construct
  source 1..15: mol_type = other DNA
tgattccaccttctc

SEQ ID NO: 2696 - DNA, 16 bp, synthetic construct
  source 1..16: mol_type = other DNA
tgattccaccttctcc

SEQ ID NO: 2697 - DNA, 10 bp, synthetic construct
  source 1..10: mol_type = other DNA
caaggtgaat

SEQ ID NO: 2698 - DNA, 11 bp, synthetic construct
  source 1..11: mol_type = other DNA
caaggtgaata

SEQ ID NO: 2699 - DNA, 12 bp, synthetic construct
  source 1..12: mol_type = other DNA
caaggtgaataa

SEQ ID NO: 2700 - DNA, 13 bp, synthetic construct
  source 1..13: mol_type = other DNA
caaggtgaataac

SEQ ID NO: 2701 - DNA, 14 bp, synthetic construct
  source 1..14: mol_type = other DNA
caaggtgaataact

SEQ ID NO: 2702 - DNA, 15 bp, synthetic construct
  source 1..15: mol_type = other DNA
caaggtgaataacta

SEQ ID NO: 2703 - DNA, 16 bp, synthetic construct
  source 1..16: mol_type = other DNA
caaggtgaataactaa

SEQ ID NO: 2704 - DNA, 10 bp, synthetic construct
  source 1..10: mol_type = other DNA
aggtcaacga

SEQ ID NO: 2705 - DNA, 11 bp, synthetic construct
  source 1..11: mol_type = other DNA
aggtcaacgag

SEQ ID NO: 2706 - DNA, 12 bp, synthetic construct
  source 1..12: mol_type = other DNA
aggtcaacgagc

SEQ ID NO: 2707 - DNA, 13 bp, synthetic construct
  source 1..13: mol_type = other DNA
aggtcaacgagca

SEQ ID NO: 2708 - DNA, 14 bp, synthetic construct
  source 1..14: mol_type = other DNA
aggtcaacgagcaa

SEQ ID NO: 2709 - DNA, 15 bp, synthetic construct
  source 1..15: mol_type = other DNA
aggtcaacgagcaag

SEQ ID NO: 2710 - DNA, 16 bp, synthetic construct
  source 1..16: mol_type = other DNA
aggtcaacgagcaaga

SEQ ID NO: 2711 - DNA, 10 bp, synthetic construct
  source 1..10: mol_type = other DNA
tcagtgtgat

SEQ ID NO: 2712 - DNA, 11 bp, synthetic construct
  source 1..11: mol_type = other DNA
tcagtgtgatt

SEQ ID NO: 2713 - DNA, 12 bp, synthetic construct
  source 1..12: mol_type = other DNA
tcagtgtgattc

SEQ ID NO: 2714 - DNA, 13 bp, synthetic construct
  source 1..13: mol_type = other DNA
tcagtgtgattcc

SEQ ID NO: 2715 - DNA, 14 bp, synthetic construct
  source 1..14: mol_type = other DNA
tcagtgtgattcca

SEQ ID NO: 2716 - DNA, 15 bp, synthetic construct
  source 1..15: mol_type = other DNA
tcagtgtgattccac

SEQ ID NO: 2717 - DNA, 16 bp, synthetic construct
  source 1..16: mol_type = other DNA
tcagtgtgattccacc

SEQ ID NO: 2718 - DNA, 10 bp, synthetic construct
  source 1..10: mol_type = other DNA
gattccacct

SEQ ID NO: 2719 - DNA, 11 bp, synthetic construct
  source 1..11: mol_type = other DNA
gattccacctt

SEQ ID NO: 2720 - DNA, 12 bp, synthetic construct
  source 1..12: mol_type = other DNA
gattccaccttc

SEQ ID NO: 2721 - DNA, 13 bp, synthetic construct
  source 1..13: mol_type = other DNA
gattccaccttct

SEQ ID NO: 2722 - DNA, 14 bp, synthetic construct
  source 1..14: mol_type = other DNA
gattccaccttctc

SEQ ID NO: 2723 - DNA, 15 bp, synthetic construct
  source 1..15: mol_type = other DNA
gattccaccttctcc

SEQ ID NO: 2724 - DNA, 16 bp, synthetic construct
  source 1..16: mol_type = other DNA
gattccaccttctcca

SEQ ID NO: 2725 - DNA, 10 bp, synthetic construct
  source 1..10: mol_type = other DNA
gtgattccac

SEQ ID NO: 2726 - DNA, 11 bp, synthetic construct
  source 1..11: mol_type = other DNA
gtgattccacc

SEQ ID NO: 2727 - DNA, 12 bp, synthetic construct
  source 1..12: mol_type = other DNA
gtgattccacct

SEQ ID NO: 2728 - DNA, 13 bp, synthetic construct
  source 1..13: mol_type = other DNA
gtgattccacctt

SEQ ID NO: 2729 - DNA, 14 bp, synthetic construct
  source 1..14: mol_type = other DNA
gtgattccaccttc

SEQ ID NO: 2730 - DNA, 15 bp, synthetic construct
  source 1..15: mol_type = other DNA
gtgattccaccttct

SEQ ID NO: 2731 - DNA, 16 bp, synthetic construct
  source 1..16: mol_type = other DNA
gtgattccaccttctc

SEQ ID NO: 2732 - DNA, 10 bp, synthetic construct
  source 1..10: mol_type = other DNA
ctcagtgtga

SEQ ID NO: 2733 - DNA, 11 bp, synthetic construct
  source 1..11: mol_type = other DNA
ctcagtgtgat

SEQ ID NO: 2734 - DNA, 12 bp, synthetic construct
  source 1..12: mol_type = other DNA
ctcagtgtgatt

SEQ ID NO: 2735 - DNA, 13 bp, synthetic construct
  source 1..13: mol_type = other DNA
ctcagtgtgattc

SEQ ID NO: 2736 - DNA, 14 bp, synthetic construct
  source 1..14: mol_type = other DNA
ctcagtgtgattcc

SEQ ID NO: 2737 - DNA, 15 bp, synthetic construct
  source 1..15: mol_type = other DNA
ctcagtgtgattcca

SEQ ID NO: 2738 - DNA, 16 bp, synthetic construct
  source 1..16: mol_type = other DNA
ctcagtgtgattccac

SEQ ID NO: 2739 - DNA, 10 bp, synthetic construct
  source 1..10: mol_type = other DNA
actcagtgtg

SEQ ID NO: 2740 - DNA, 11 bp, synthetic construct
  source 1..11: mol_type = other DNA
actcagtgtga

SEQ ID NO: 2741 - DNA, 12 bp, synthetic construct
  source 1..12: mol_type = other DNA
actcagtgtgat

SEQ ID NO: 2742 - DNA, 13 bp, synthetic construct
  source 1..13: mol_type = other DNA
actcagtgtgatt

SEQ ID NO: 2743 - DNA, 14 bp, synthetic construct
  source 1..14: mol_type = other DNA
actcagtgtgattc

SEQ ID NO: 2744 - DNA, 15 bp, synthetic construct
  source 1..15: mol_type = other DNA
actcagtgtgattcc

SEQ ID NO: 2745 - DNA, 16 bp, synthetic construct
  source 1..16: mol_type = other DNA
actcagtgtgattcca

SEQ ID NO: 2746 - DNA, 10 bp, synthetic construct
  source 1..10: mol_type = other DNA
gacctccact

SEQ ID NO: 2747 - DNA, 11 bp, synthetic construct
  source 1..11: mol_type = other DNA
gacctccactc

SEQ ID NO: 2748 - DNA, 12 bp, synthetic construct
  source 1..12: mol_type = other DNA
gacctccactca

SEQ ID NO: 2749 - DNA, 13 bp, synthetic construct
  source 1..13: mol_type = other DNA
gacctccactcag

SEQ ID NO: 2750 - DNA, 14 bp, synthetic construct
  source 1..14: mol_type = other DNA
gacctccactcagt

SEQ ID NO: 2751 - DNA, 15 bp, synthetic construct
  source 1..15: mol_type = other DNA
gacctccactcagtg

SEQ ID NO: 2752 - DNA, 16 bp, synthetic construct
  source 1..16: mol_type = other DNA
gacctccactcagtgt

SEQ ID NO: 2753 - DNA, 10 bp, synthetic construct
  source 1..10: mol_type = other DNA
tgacctccac

SEQ ID NO: 2754 - DNA, 11 bp, synthetic construct
  source 1..11: mol_type = other DNA
tgacctccact

SEQ ID NO: 2755 - DNA, 12 bp, synthetic construct
  source 1..12: mol_type = other DNA
tgacctccactc

SEQ ID NO: 2756 - DNA, 13 bp, synthetic construct
  source 1..13: mol_type = other DNA
tgacctccactca

SEQ ID NO: 2757 - DNA, 14 bp, synthetic construct
  source 1..14: mol_type = other DNA
tgacctccactcag

SEQ ID NO: 2758 - DNA, 15 bp, synthetic construct
  source 1..15: mol_type = other DNA
tgacctccactcagt

SEQ ID NO: 2759 - DNA, 16 bp, synthetic construct
  source 1..16: mol_type = other DNA
tgacctccactcagtg

SEQ ID NO: 2760 - DNA, 10 bp, synthetic construct
  source 1..10: mol_type = other DNA
acctccactc

SEQ ID NO: 2761 - DNA, 11 bp, synthetic construct
  source 1..11: mol_type = other DNA
acctccactca

SEQ ID NO: 2762 - DNA, 12 bp, synthetic construct
  source 1..12: mol_type = other DNA
acctccactcag

SEQ ID NO: 2763 - DNA, 13 bp, synthetic construct
  source 1..13: mol_type = other DNA
acctccactcagt

SEQ ID NO: 2764 - DNA, 14 bp, synthetic construct
  source 1..14: mol_type = other DNA
acctccactcagtg

SEQ ID NO: 2765 - DNA, 15 bp, synthetic construct
  source 1..15: mol_type = other DNA
acctccactcagtgt

SEQ ID NO: 2766 - DNA, 16 bp, synthetic construct
  source 1..16: mol_type = other DNA
acctccactcagtgtg

SEQ ID NO: 2767 - DNA, 10 bp, synthetic construct
  source 1..10: mol_type = other DNA
attggtctag

SEQ ID NO: 2768 - DNA, 11 bp, synthetic construct
  source 1..11: mol_type = other DNA
attggtctagc

SEQ ID NO: 2769 - DNA, 12 bp, synthetic construct
  source 1..12: mol_type = other DNA
attggtctagca

SEQ ID NO: 2770 - DNA, 13 bp, synthetic construct
  source 1..13: mol_type = other DNA
attggtctagcaa

SEQ ID NO: 2771 - DNA, 14 bp, synthetic construct
  source 1..14: mol_type = other DNA
attggtctagcaag

SEQ ID NO: 2772 - DNA, 15 bp, synthetic construct
  source 1..15: mol_type = other DNA
attggtctagcaagc

SEQ ID NO: 2773 - DNA, 16 bp, synthetic construct
  source 1..16: mol_type = other DNA
attggtctagcaagca

SEQ ID NO: 2774 - DNA, 10 bp, synthetic construct
  source 1..10: mol_type = other DNA
tattggtcta

SEQ ID NO: 2775 - DNA, 11 bp, synthetic construct
  source 1..11: mol_type = other DNA
tattggtctag

SEQ ID NO: 2776 - DNA, 12 bp, synthetic construct
  source 1..12: mol_type = other DNA
tattggtctagc

SEQ ID NO: 2777 - DNA, 13 bp, synthetic construct
  source 1..13: mol_type = other DNA
tattggtctagca

SEQ ID NO: 2778 - DNA, 14 bp, synthetic construct
  source 1..14: mol_type = other DNA
tattggtctagcaa

SEQ ID NO: 2779 - DNA, 15 bp, synthetic construct
  source 1..15: mol_type = other DNA
tattggtctagcaag

SEQ ID NO: 2780 - DNA, 16 bp, synthetic construct
  source 1..16: mol_type = other DNA
tattggtctagcaagc

SEQ ID NO: 2781 - DNA, 10 bp, synthetic construct
  source 1..10: mol_type = other DNA
tgctaaagaa

SEQ ID NO: 2782 - DNA, 11 bp, synthetic construct
  source 1..11: mol_type = other DNA
tgctaaagaaa

SEQ ID NO: 2783 - DNA, 12 bp, synthetic construct
  source 1..12: mol_type = other DNA
tgctaaagaaat

SEQ ID NO: 2784 - DNA, 13 bp, synthetic construct
  source 1..13: mol_type = other DNA
tgctaaagaaatt

SEQ ID NO: 2785 - DNA, 14 bp, synthetic construct
  source 1..14: mol_type = other DNA
tgctaaagaaattc

SEQ ID NO: 2786 - DNA, 15 bp, synthetic construct
  source 1..15: mol_type = other DNA
tgctaaagaaattct

SEQ ID NO: 2787 - DNA, 16 bp, synthetic construct
  source 1..16: mol_type = other DNA
tgctaaagaaattctt

SEQ ID NO: 2788 - DNA, 10 bp, synthetic construct
  source 1..10: mol_type = other DNA
ctaaagaaat

SEQ ID NO: 2789 - DNA, 11 bp, synthetic construct
  source 1..11: mol_type = other DNA
ctaaagaaatt

SEQ ID NO: 2790 - DNA, 12 bp, synthetic construct
  source 1..12: mol_type = other DNA
ctaaagaaattc

SEQ ID NO: 2791 - DNA, 13 bp, synthetic construct
  source 1..13: mol_type = other DNA
ctaaagaaattct

SEQ ID NO: 2792 - DNA, 14 bp, synthetic construct
  source 1..14: mol_type = other DNA
ctaaagaaattctt

SEQ ID NO: 2793 - DNA, 15 bp, synthetic construct
  source 1..15: mol_type = other DNA
ctaaagaaattcttg

SEQ ID NO: 2794 - DNA, 16 bp, synthetic construct
  source 1..16: mol_type = other DNA
ctaaagaaattcttgc

SEQ ID NO: 2795 - DNA, 10 bp, synthetic construct
  source 1..10: mol_type = other DNA
agcatttgct

SEQ ID NO: 2796 - DNA, 11 bp, synthetic construct
  source 1..11: mol_type = other DNA
agcatttgctg

SEQ ID NO: 2797 - DNA, 12 bp, synthetic construct
  source 1..12: mol_type = other DNA
agcatttgctgt

SEQ ID NO: 2798 - DNA, 13 bp, synthetic construct
  source 1..13: mol_type = other DNA
agcatttgctgta

SEQ ID NO: 2799 - DNA, 14 bp, synthetic construct
  source 1..14: mol_type = other DNA
agcatttgctgtaa

SEQ ID NO: 2800 - DNA, 15 bp, synthetic construct
  source 1..15: mol_type = other DNA
agcatttgctgtaaa

SEQ ID NO: 2801 - DNA, 16 bp, synthetic construct
  source 1..16: mol_type = other DNA
agcatttgctgtaaat

SEQ ID NO: 2802 - DNA, 10 bp, synthetic construct
  source 1..10: mol_type = other DNA
aaattcttgc

SEQ ID NO: 2803 - DNA, 11 bp, synthetic construct
  source 1..11: mol_type = other DNA
aaattcttgct

SEQ ID NO: 2804 - DNA, 12 bp, synthetic construct
  source 1..12: mol_type = other DNA
aaattcttgctc

SEQ ID NO: 2805 - DNA, 13 bp, synthetic construct
  source 1..13: mol_type = other DNA
aaattcttgctcg

SEQ ID NO: 2806 - DNA, 14 bp, synthetic construct
  source 1..14: mol_type = other DNA
aaattcttgctcgt

SEQ ID NO: 2807 - DNA, 15 bp, synthetic construct
  source 1..15: mol_type = other DNA
aaattcttgctcgtt

SEQ ID NO: 2808 - DNA, 16 bp, synthetic construct
  source 1..16: mol_type = other DNA
aaattcttgctcgttg

SEQ ID NO: 2809 - DNA, 10 bp, synthetic construct
  source 1..10: mol_type = other DNA
gaaattcttg

SEQ ID NO: 2810 - DNA, 11 bp, synthetic construct
  source 1..11: mol_type = other DNA
gaaattcttgc

SEQ ID NO: 2811 - DNA, 12 bp, synthetic construct
  source 1..12: mol_type = other DNA
gaaattcttgct

SEQ ID NO: 2812 - DNA, 13 bp, synthetic construct
  source 1..13: mol_type = other DNA
gaaattcttgctc

SEQ ID NO: 2813 - DNA, 14 bp, synthetic construct
  source 1..14: mol_type = other DNA
gaaattcttgctcg

SEQ ID NO: 2814 - DNA, 15 bp, synthetic construct
  source 1..15: mol_type = other DNA
gaaattcttgctcgt

SEQ ID NO: 2815 - DNA, 16 bp, synthetic construct
  source 1..16: mol_type = other DNA
gaaattcttgctcgtt

SEQ ID NO: 2816 - DNA, 10 bp, synthetic construct
  source 1..10: mol_type = other DNA
ataactaatt

SEQ ID NO: 2817 - DNA, 11 bp, synthetic construct
  source 1..11: mol_type = other DNA
ataactaatta

SEQ ID NO: 2818 - DNA, 12 bp, synthetic construct
  source 1..12: mol_type = other DNA
ataactaattat

SEQ ID NO: 2819 - DNA, 13 bp, synthetic construct
  source 1..13: mol_type = other DNA
ataactaattatt

SEQ ID NO: 2820 - DNA, 14 bp, synthetic construct
  source 1..14: mol_type = other DNA
ataactaattattg

SEQ ID NO: 2821 - DNA, 15 bp, synthetic construct
  source 1..15: mol_type = other DNA
ataactaattattgg

SEQ ID NO: 2822 - DNA, 16 bp, synthetic construct
  source 1..16: mol_type = other DNA
ataactaattattggt

SEQ ID NO: 2823 - DNA, 10 bp, synthetic construct
  source 1..10: mol_type = other DNA
tcgttgacct

SEQ ID NO: 2824 - DNA, 11 bp, synthetic construct
  source 1..11: mol_type = other DNA
tcgttgacctc

SEQ ID NO: 2825 - DNA, 12 bp, synthetic construct
  source 1..12: mol_type = other DNA
tcgttgacctcc

SEQ ID NO: 2826 - DNA, 13 bp, synthetic construct
  source 1..13: mol_type = other DNA
tcgttgacctcca

SEQ ID NO: 2827 - DNA, 14 bp, synthetic construct
  source 1..14: mol_type = other DNA
tcgttgacctccac

SEQ ID NO: 2828 - DNA, 15 bp, synthetic construct
  source 1..15: mol_type = other DNA
tcgttgacctccact

SEQ ID NO: 2829 - DNA, 16 bp, synthetic construct
  source 1..16: mol_type = other DNA
tcgttgacctccactc

SEQ ID NO: 2830 - DNA, 10 bp, synthetic construct
  source 1..10: mol_type = other DNA
gctaaagaaa

SEQ ID NO: 2831 - DNA, 11 bp, synthetic construct
  source 1..11: mol_type = other DNA
gctaaagaaat

SEQ ID NO: 2832 - DNA, 12 bp, synthetic construct
  source 1..12: mol_type = other DNA
gctaaagaaatt

SEQ ID NO: 2833 - DNA, 13 bp, synthetic construct
  source 1..13: mol_type = other DNA
gctaaagaaattc

SEQ ID NO: 2834 - DNA, 14 bp, synthetic construct
  source 1..14: mol_type = other DNA
gctaaagaaattct

SEQ ID NO: 2835 - DNA, 15 bp, synthetic construct
  source 1..15: mol_type = other DNA
gctaaagaaattctt

SEQ ID NO: 2836 - DNA, 16 bp, synthetic construct
  source 1..16: mol_type = other DNA
gctaaagaaattcttg

SEQ ID NO: 2837 - DNA, 10 bp, synthetic construct
  source 1..10: mol_type = other DNA
gctgtaaatg

SEQ ID NO: 2838 - DNA, 11 bp, synthetic construct
  source 1..11: mol_type = other DNA
gctgtaaatgt

SEQ ID NO: 2839 - DNA, 12 bp, synthetic construct
  source 1..12: mol_type = other DNA
gctgtaaatgtc

SEQ ID NO: 2840 - DNA, 13 bp, synthetic construct
  source 1..13: mol_type = other DNA
gctgtaaatgtca

SEQ ID NO: 2841 - DNA, 14 bp, synthetic construct
  source 1..14: mol_type = other DNA
gctgtaaatgtcat

SEQ ID NO: 2842 - DNA, 15 bp, synthetic construct
  source 1..15: mol_type = other DNA
gctgtaaatgtcatt

SEQ ID NO: 2843 - DNA, 16 bp, synthetic construct
  source 1..16: mol_type = other DNA
gctgtaaatgtcattc

SEQ ID NO: 2844 - DNA, 10 bp, synthetic construct
  source 1..10: mol_type = other DNA
atttgctgta

SEQ ID NO: 2845 - DNA, 11 bp, synthetic construct
  source 1..11: mol_type = other DNA
atttgctgtaa

SEQ ID NO: 2846 - DNA, 12 bp, synthetic construct
  source 1..12: mol_type = other DNA
atttgctgtaaa

SEQ ID NO: 2847 - DNA, 13 bp, synthetic construct
  source 1..13: mol_type = other DNA
atttgctgtaaat

SEQ ID NO: 2848 - DNA, 14 bp, synthetic construct
  source 1..14: mol_type = other DNA
atttgctgtaaatg

SEQ ID NO: 2849 - DNA, 15 bp, synthetic construct
  source 1..15: mol_type = other DNA
atttgctgtaaatgt

SEQ ID NO: 2850 - DNA, 16 bp, synthetic construct
  source 1..16: mol_type = other DNA
atttgctgtaaatgtc

SEQ ID NO: 2851 - DNA, 10 bp, synthetic construct
  source 1..10: mol_type = other DNA
cgttgacctc

SEQ ID NO: 2852 - DNA, 11 bp, synthetic construct
  source 1..11: mol_type = other DNA
cgttgacctcc

SEQ ID NO: 2853 - DNA, 12 bp, synthetic construct
  source 1..12: mol_type = other DNA
cgttgacctcca

SEQ ID NO: 2854 - DNA, 13 bp, synthetic construct
  source 1..13: mol_type = other DNA
cgttgacctccac

SEQ ID NO: 2855 - DNA, 14 bp, synthetic construct
  source 1..14: mol_type = other DNA
cgttgacctccact

SEQ ID NO: 2856 - DNA, 15 bp, synthetic construct
  source 1..15: mol_type = other DNA
cgttgacctccactc

SEQ ID NO: 2857 - DNA, 16 bp, synthetic construct
  source 1..16: mol_type = other DNA
cgttgacctccactca

SEQ ID NO: 2858 - DNA, 10 bp, synthetic construct
  source 1..10: mol_type = other DNA
aagcatttgc

SEQ ID NO: 2859 - DNA, 11 bp, synthetic construct
  source 1..11: mol_type = other DNA
aagcatttgct

SEQ ID NO: 2860 - DNA, 12 bp, synthetic construct
  source 1..12: mol_type = other DNA
aagcatttgctg

SEQ ID NO: 2861 - DNA, 13 bp, synthetic construct
  source 1..13: mol_type = other DNA
aagcatttgctgt

SEQ ID NO: 2862 - DNA, 14 bp, synthetic construct
  source 1..14: mol_type = other DNA
aagcatttgctgta

SEQ ID NO: 2863 - DNA, 15 bp, synthetic construct
  source 1..15: mol_type = other DNA
aagcatttgctgtaa

SEQ ID NO: 2864 - DNA, 16 bp, synthetic construct
  source 1..16: mol_type = other DNA
aagcatttgctgtaaa

SEQ ID NO: 2865 - DNA, 10 bp, synthetic construct
  source 1..10: mol_type = other DNA
aacagactgg

SEQ ID NO: 2866 - DNA, 11 bp, synthetic construct
  source 1..11: mol_type = other DNA
aacagactgga

SEQ ID NO: 2867 - DNA, 12 bp, synthetic construct
  source 1..12: mol_type = other DNA
aacagactggag

SEQ ID NO: 2868 - DNA, 13 bp, synthetic construct
  source 1..13: mol_type = other DNA
aacagactggaga

SEQ ID NO: 2869 - DNA, 14 bp, synthetic construct
  source 1..14: mol_type = other DNA
aacagactggagag

SEQ ID NO: 2870 - DNA, 15 bp, synthetic construct
  source 1..15: mol_type = other DNA
aacagactggagagt

SEQ ID NO: 2871 - DNA, 16 bp, synthetic construct
  source 1..16: mol_type = other DNA
aacagactggagagtt

SEQ ID NO: 2872 - DNA, 10 bp, synthetic construct
  source 1..10: mol_type = other DNA
taatgagaaa

SEQ ID NO: 2873 - DNA, 11 bp, synthetic construct
  source 1..11: mol_type = other DNA
taatgagaaac

SEQ ID NO: 2874 - DNA, 12 bp, synthetic construct
  source 1..12: mol_type = other DNA
taatgagaaacg

SEQ ID NO: 2875 - DNA, 13 bp, synthetic construct
  source 1..13: mol_type = other DNA
taatgagaaacgg

SEQ ID NO: 2876 - DNA, 14 bp, synthetic construct
  source 1..14: mol_type = other DNA
taatgagaaacggt

SEQ ID NO: 2877 - DNA, 15 bp, synthetic construct
  source 1..15: mol_type = other DNA
taatgagaaacggtg

SEQ ID NO: 2878 - DNA, 16 bp, synthetic construct
  source 1..16: mol_type = other DNA
taatgagaaacggtgt

SEQ ID NO: 2879 - DNA, 10 bp, synthetic construct
  source 1..10: mol_type = other DNA
tctaatgaga

SEQ ID NO: 2880 - DNA, 11 bp, synthetic construct
  source 1..11: mol_type = other DNA
tctaatgagaa

SEQ ID NO: 2881 - DNA, 12 bp, synthetic construct
  source 1..12: mol_type = other DNA
tctaatgagaaa

SEQ ID NO: 2882 - DNA, 13 bp, synthetic construct
  source 1..13: mol_type = other DNA
tctaatgagaaac

SEQ ID NO: 2883 - DNA, 14 bp, synthetic construct
  source 1..14: mol_type = other DNA
tctaatgagaaacg

SEQ ID NO: 2884 - DNA, 15 bp, synthetic construct
  source 1..15: mol_type = other DNA
tctaatgagaaacgg

SEQ ID NO: 2885 - DNA, 16 bp, synthetic construct
  source 1..16: mol_type = other DNA
tctaatgagaaacggt

SEQ ID NO: 2886 - DNA, 10 bp, synthetic construct
  source 1..10: mol_type = other DNA
aaacagactg

SEQ ID NO: 2887 - DNA, 11 bp, synthetic construct
  source 1..11: mol_type = other DNA
aaacagactgg

SEQ ID NO: 2888 - DNA, 12 bp, synthetic construct
  source 1..12: mol_type = other DNA
aaacagactgga

SEQ ID NO: 2889 - DNA, 13 bp, synthetic construct
  source 1..13: mol_type = other DNA
aaacagactggag

SEQ ID NO: 2890 - DNA, 14 bp, synthetic construct
  source 1..14: mol_type = other DNA
aaacagactggaga

SEQ ID NO: 2891 - DNA, 15 bp, synthetic construct
  source 1..15: mol_type = other DNA
aaacagactggagag

SEQ ID NO: 2892 - DNA, 16 bp, synthetic construct
  source 1..16: mol_type = other DNA
aaacagactggagagt

SEQ ID NO: 2893 - DNA, 10 bp, synthetic construct
  source 1..10: mol_type = other DNA
gacaggagca

SEQ ID NO: 2894 - DNA, 11 bp, synthetic construct
  source 1..11: mol_type = other DNA
gacaggagcat

SEQ ID NO: 2895 - DNA, 12 bp, synthetic construct
  source 1..12: mol_type = other DNA
gacaggagcatc

SEQ ID NO: 2896 - DNA, 13 bp, synthetic construct
  source 1..13: mol_type = other DNA
gacaggagcatct

SEQ ID NO: 2897 - DNA, 14 bp, synthetic construct
  source 1..14: mol_type = other DNA
gacaggagcatctc

SEQ ID NO: 2898 - DNA, 15 bp, synthetic construct
  source 1..15: mol_type = other DNA
gacaggagcatctcc

SEQ ID NO: 2899 - DNA, 16 bp, synthetic construct
  source 1..16: mol_type = other DNA
gacaggagcatctcct

SEQ ID NO: 2900 - DNA, 10 bp, synthetic construct
  source 1..10: mol_type = other DNA
caggagacag

SEQ ID NO: 2901 - DNA, 11 bp, synthetic construct
  source 1..11: mol_type = other DNA
caggagacagg

SEQ ID NO: 2902 - DNA, 12 bp, synthetic construct
  source 1..12: mol_type = other DNA
caggagacagga

SEQ ID NO: 2903 - DNA, 13 bp, synthetic construct
  source 1..13: mol_type = other DNA
caggagacaggag

SEQ ID NO: 2904 - DNA, 14 bp, synthetic construct
  source 1..14: mol_type = other DNA
caggagacaggagc

SEQ ID NO: 2905 - DNA, 15 bp, synthetic construct
  source 1..15: mol_type = other DNA
caggagacaggagca

SEQ ID NO: 2906 - DNA, 16 bp, synthetic construct
  source 1..16: mol_type = other DNA
caggagacaggagcat

SEQ ID NO: 2907 - DNA, 10 bp, synthetic construct
  source 1..10: mol_type = other DNA
ctaatgagaa

SEQ ID NO: 2908 - DNA, 11 bp, synthetic construct
  source 1..11: mol_type = other DNA
ctaatgagaaa

SEQ ID NO: 2909 - DNA, 12 bp, synthetic construct
  source 1..12: mol_type = other DNA
ctaatgagaaac

SEQ ID NO: 2910 - DNA, 13 bp, synthetic construct
  source 1..13: mol_type = other DNA
ctaatgagaaacg

SEQ ID NO: 2911 - DNA, 14 bp, synthetic construct
  source 1..14: mol_type = other DNA
ctaatgagaaacgg

SEQ ID NO: 2912 - DNA, 15 bp, synthetic construct
  source 1..15: mol_type = other DNA
ctaatgagaaacggt

SEQ ID NO: 2913 - DNA, 16 bp, synthetic construct
  source 1..16: mol_type = other DNA
ctaatgagaaacggtg

SEQ ID NO: 2914 - DNA, 10 bp, synthetic construct
  source 1..10: mol_type = other DNA
ccttctaatg

SEQ ID NO: 2915 - DNA, 11 bp, synthetic construct
  source 1..11: mol_type = other DNA
ccttctaatga

SEQ ID NO: 2916 - DNA, 12 bp, synthetic construct
  source 1..12: mol_type = other DNA
ccttctaatgag

SEQ ID NO: 2917 - DNA, 13 bp, synthetic construct
  source 1..13: mol_type = other DNA
ccttctaatgaga

SEQ ID NO: 2918 - DNA, 14 bp, synthetic construct
  source 1..14: mol_type = other DNA
ccttctaatgagaa

SEQ ID NO: 2919 - DNA, 15 bp, synthetic construct
  source 1..15: mol_type = other DNA
ccttctaatgagaaa

SEQ ID NO: 2920 - DNA, 16 bp, synthetic construct
  source 1..16: mol_type = other DNA
ccttctaatgagaaac

SEQ ID NO: 2921 - DNA, 10 bp, synthetic construct
  source 1..10: mol_type = other DNA
ttttaaacag

SEQ ID NO: 2922 - DNA, 11 bp, synthetic construct
  source 1..11: mol_type = other DNA
ttttaaacaga

SEQ ID NO: 2923 - DNA, 12 bp, synthetic construct
  source 1..12: mol_type = other DNA
ttttaaacagac

SEQ ID NO: 2924 - DNA, 13 bp, synthetic construct
  source 1..13: mol_type = other DNA
ttttaaacagact

SEQ ID NO: 2925 - DNA, 14 bp, synthetic construct
  source 1..14: mol_type = other DNA
ttttaaacagactg

SEQ ID NO: 2926 - DNA, 15 bp, synthetic construct
  source 1..15: mol_type = other DNA
ttttaaacagactgg

SEQ ID NO: 2927 - DNA, 16 bp, synthetic construct
  source 1..16: mol_type = other DNA
ttttaaacagactgga

SEQ ID NO: 2928 - DNA, 10 bp, synthetic construct
  source 1..10: mol_type = other DNA
agtttgggga

SEQ ID NO: 2929 - DNA, 11 bp, synthetic construct
  source 1..11: mol_type = other DNA
agtttggggaa

SEQ ID NO: 2930 - DNA, 12 bp, synthetic construct
  source 1..12: mol_type = other DNA
agtttggggaaa

SEQ ID NO: 2931 - DNA, 13 bp, synthetic construct
  source 1..13: mol_type = other DNA
agtttggggaaaa

SEQ ID NO: 2932 - DNA, 14 bp, synthetic construct
  source 1..14: mol_type = other DNA
agtttggggaaaaa

SEQ ID NO: 2933 - DNA, 15 bp, synthetic construct
  source 1..15: mol_type = other DNA
agtttggggaaaaaa

SEQ ID NO: 2934 - DNA, 16 bp, synthetic construct
  source 1..16: mol_type = other DNA
agtttggggaaaaaag

SEQ ID NO: 2935 - DNA, 10 bp, synthetic construct
  source 1..10: mol_type = other DNA
gagtttgggg

SEQ ID NO: 2936 - DNA, 11 bp, synthetic construct
  source 1..11: mol_type = other DNA
gagtttgggga

SEQ ID NO: 2937 - DNA, 12 bp, synthetic construct
  source 1..12: mol_type = other DNA
gagtttggggaa

SEQ ID NO: 2938 - DNA, 13 bp, synthetic construct
  source 1..13: mol_type = other DNA
gagtttggggaaa

SEQ ID NO: 2939 - DNA, 14 bp, synthetic construct
  source 1..14: mol_type = other DNA
gagtttggggaaaa

SEQ ID NO: 2940 - DNA, 15 bp, synthetic construct
  source 1..15: mol_type = other DNA
gagtttggggaaaaa

SEQ ID NO: 2941 - DNA, 16 bp, synthetic construct
  source 1..16: mol_type = other DNA
gagtttggggaaaaaa

SEQ ID NO: 2942 - DNA, 10 bp, synthetic construct
  source 1..10: mol_type = other DNA
acaggagcat

SEQ ID NO: 2943 - DNA, 11 bp, synthetic construct
  source 1..11: mol_type = other DNA
acaggagcatc

SEQ ID NO: 2944 - DNA, 12 bp, synthetic construct
  source 1..12: mol_type = other DNA
acaggagcatct

SEQ ID NO: 2945 - DNA, 13 bp, synthetic construct
  source 1..13: mol_type = other DNA
acaggagcatctc

SEQ ID NO: 2946 - DNA, 14 bp, synthetic construct
  source 1..14: mol_type = other DNA
acaggagcatctcc

SEQ ID NO: 2947 - DNA, 15 bp, synthetic construct
  source 1..15: mol_type = other DNA
acaggagcatctcct

SEQ ID NO: 2948 - DNA, 16 bp, synthetic construct
  source 1..16: mol_type = other DNA
acaggagcatctcctt

SEQ ID NO: 2949 - DNA, 10 bp, synthetic construct
  source 1..10: mol_type = other DNA
aggagacagg

SEQ ID NO: 2950 - DNA, 11 bp, synthetic construct
  source 1..11: mol_type = other DNA
aggagacagga

SEQ ID NO: 2951 - DNA, 12 bp, synthetic construct
  source 1..12: mol_type = other DNA
aggagacaggag

SEQ ID NO: 2952 - DNA, 13 bp, synthetic construct
  source 1..13: mol_type = other DNA
aggagacaggagc

SEQ ID NO: 2953 - DNA, 14 bp, synthetic construct
  source 1..14: mol_type = other DNA
aggagacaggagca

SEQ ID NO: 2954 - DNA, 15 bp, synthetic construct
  source 1..15: mol_type = other DNA
aggagacaggagcat

SEQ ID NO: 2955 - DNA, 16 bp, synthetic construct
  source 1..16: mol_type = other DNA
aggagacaggagcatc

SEQ ID NO: 2956 - DNA, 10 bp, synthetic construct
  source 1..10: mol_type = other DNA
agacaggagc

SEQ ID NO: 2957 - DNA, 11 bp, synthetic construct
  source 1..11: mol_type = other DNA
agacaggagca

SEQ ID NO: 2958 - DNA, 12 bp, synthetic construct
  source 1..12: mol_type = other DNA
agacaggagcat

SEQ ID NO: 2959 - DNA, 13 bp, synthetic construct
  source 1..13: mol_type = other DNA
agacaggagcatc

SEQ ID NO: 2960 - DNA, 14 bp, synthetic construct
  source 1..14: mol_type = other DNA
agacaggagcatct

SEQ ID NO: 2961 - DNA, 15 bp, synthetic construct
  source 1..15: mol_type = other DNA
agacaggagcatctc

SEQ ID NO: 2962 - DNA, 16 bp, synthetic construct
  source 1..16: mol_type = other DNA
agacaggagcatctcc

SEQ ID NO: 2963 - DNA, 10 bp, synthetic construct
  source 1..10: mol_type = other DNA
gcatctcctt

SEQ ID NO: 2964 - DNA, 11 bp, synthetic construct
  source 1..11: mol_type = other DNA
gcatctccttc

SEQ ID NO: 2965 - DNA, 12 bp, synthetic construct
  source 1..12: mol_type = other DNA
gcatctccttct

SEQ ID NO: 2966 - DNA, 13 bp, synthetic construct
  source 1..13: mol_type = other DNA
gcatctccttcta

SEQ ID NO: 2967 - DNA, 14 bp, synthetic construct
  source 1..14: mol_type = other DNA
gcatctccttctaa

SEQ ID NO: 2968 - DNA, 15 bp, synthetic construct
  source 1..15: mol_type = other DNA
gcatctccttctaat

SEQ ID NO: 2969 - DNA, 16 bp, synthetic construct
  source 1..16: mol_type = other DNA
gcatctccttctaatg

SEQ ID NO: 2970 - DNA, 10 bp, synthetic construct
  source 1..10: mol_type = other DNA
gtttctgtcc

SEQ ID NO: 2971 - DNA, 11 bp, synthetic construct
  source 1..11: mol_type = other DNA
gtttctgtcca

SEQ ID NO: 2972 - DNA, 12 bp, synthetic construct
  source 1..12: mol_type = other DNA
gtttctgtccag

SEQ ID NO: 2973 - DNA, 13 bp, synthetic construct
  source 1..13: mol_type = other DNA
gtttctgtccagg

SEQ ID NO: 2974 - DNA, 14 bp, synthetic construct
  source 1..14: mol_type = other DNA
gtttctgtccagga

SEQ ID NO: 2975 - DNA, 15 bp, synthetic construct
  source 1..15: mol_type = other DNA
gtttctgtccaggag

SEQ ID NO: 2976 - DNA, 16 bp, synthetic construct
  source 1..16: mol_type = other DNA
gtttctgtccaggaga

SEQ ID NO: 2977 - DNA, 10 bp, synthetic construct
  source 1..10: mol_type = other DNA
tgtttctgtc

SEQ ID NO: 2978 - DNA, 11 bp, synthetic construct
  source 1..11: mol_type = other DNA
tgtttctgtcc

SEQ ID NO: 2979 - DNA, 12 bp, synthetic construct
  source 1..12: mol_type = other DNA
tgtttctgtcca

SEQ ID NO: 2980 - DNA, 13 bp, synthetic construct
  source 1..13: mol_type = other DNA
tgtttctgtccag

SEQ ID NO: 2981 - DNA, 14 bp, synthetic construct
  source 1..14: mol_type = other DNA
tgtttctgtccagg

SEQ ID NO: 2982 - DNA, 15 bp, synthetic construct
  source 1..15: mol_type = other DNA
tgtttctgtccagga

SEQ ID NO: 2983 - DNA, 16 bp, synthetic construct
  source 1..16: mol_type = other DNA
tgtttctgtccaggag

SEQ ID NO: 2984 - DNA, 10 bp, synthetic construct
  source 1..10: mol_type = other DNA
tggagagttt

SEQ ID NO: 2985 - DNA, 11 bp, synthetic construct
  source 1..11: mol_type = other DNA
tggagagtttg

SEQ ID NO: 2986 - DNA, 12 bp, synthetic construct
  source 1..12: mol_type = other DNA
tggagagtttgg

SEQ ID NO: 2987 - DNA, 13 bp, synthetic construct
  source 1..13: mol_type = other DNA
tggagagtttggg

SEQ ID NO: 2988 - DNA, 14 bp, synthetic construct
  source 1..14: mol_type = other DNA
tggagagtttgggg

SEQ ID NO: 2989 - DNA, 15 bp, synthetic construct
  source 1..15: mol_type = other DNA
tggagagtttgggga

SEQ ID NO: 2990 - DNA, 16 bp, synthetic construct
  source 1..16: mol_type = other DNA
tggagagtttggggaa

SEQ ID NO: 2991 - DNA, 10 bp, synthetic construct
  source 1..10: mol_type = other DNA
catcttttta

SEQ ID NO: 2992 - DNA, 11 bp, synthetic construct
  source 1..11: mol_type = other DNA
catctttttaa

SEQ ID NO: 2993 - DNA, 12 bp, synthetic construct
  source 1..12: mol_type = other DNA
catctttttaac

SEQ ID NO: 2994 - DNA, 13 bp, synthetic construct
  source 1..13: mol_type = other DNA
catctttttaact

SEQ ID NO: 2995 - DNA, 14 bp, synthetic construct
  source 1..14: mol_type = other DNA
catctttttaactt

SEQ ID NO: 2996 - DNA, 15 bp, synthetic construct
  source 1..15: mol_type = other DNA
catctttttaacttt

SEQ ID NO: 2997 - DNA, 16 bp, synthetic construct
  source 1..16: mol_type = other DNA
catctttttaactttt

SEQ ID NO: 2998 - DNA, 10 bp, synthetic construct
  source 1..10: mol_type = other DNA
aagtcttatc

SEQ ID NO: 2999 - DNA, 11 bp, synthetic construct
  source 1..11: mol_type = other DNA
aagtcttatca

SEQ ID NO: 3000 - DNA, 12 bp, synthetic construct
  source 1..12: mol_type = other DNA
aagtcttatcat

SEQ ID NO: 3001 - DNA, 13 bp, synthetic construct
  source 1..13: mol_type = other DNA
aagtcttatcatc

SEQ ID NO: 3002 - DNA, 14 bp, synthetic construct
  source 1..14: mol_type = other DNA
aagtcttatcatct

SEQ ID NO: 3003 - DNA, 15 bp, synthetic construct
  source 1..15: mol_type = other DNA
aagtcttatcatctt

SEQ ID NO: 3004 - DNA, 16 bp, synthetic construct
  source 1..16: mol_type = other DNA
aagtcttatcatcttt

SEQ ID NO: 3005 - DNA, 10 bp, synthetic construct
  source 1..10: mol_type = other DNA
taagtcttat

SEQ ID NO: 3006 - DNA, 11 bp, synthetic construct
  source 1..11: mol_type = other DNA
taagtcttatc

SEQ ID NO: 3007 - DNA, 12 bp, synthetic construct
  source 1..12: mol_type = other DNA
taagtcttatca

SEQ ID NO: 3008 - DNA, 13 bp, synthetic construct
  source 1..13: mol_type = other DNA
taagtcttatcat

SEQ ID NO: 3009 - DNA, 14 bp, synthetic construct
  source 1..14: mol_type = other DNA
taagtcttatcatc

SEQ ID NO: 3010 - DNA, 15 bp, synthetic construct
  source 1..15: mol_type = other DNA
taagtcttatcatct

SEQ ID NO: 3011 - DNA, 16 bp, synthetic construct
  source 1..16: mol_type = other DNA
taagtcttatcatctt

SEQ ID NO: 3012 - DNA, 10 bp, synthetic construct
  source 1..10: mol_type = other DNA
aatgtactca

SEQ ID NO: 3013 - DNA, 11 bp, synthetic construct
  source 1..11: mol_type = other DNA
aatgtactcat

SEQ ID NO: 3014 - DNA, 12 bp, synthetic construct
  source 1..12: mol_type = other DNA
aatgtactcatg

SEQ ID NO: 3015 - DNA, 13 bp, synthetic construct
  source 1..13: mol_type = other DNA
aatgtactcatga

SEQ ID NO: 3016 - DNA, 14 bp, synthetic construct
  source 1..14: mol_type = other DNA
aatgtactcatgat

SEQ ID NO: 3017 - DNA, 15 bp, synthetic construct
  source 1..15: mol_type = other DNA
aatgtactcatgata

SEQ ID NO: 3018 - DNA, 16 bp, synthetic construct
  source 1..16: mol_type = other DNA
aatgtactcatgatat

SEQ ID NO: 3019 - DNA, 10 bp, synthetic construct
  source 1..10: mol_type = other DNA
tattcatggc

SEQ ID NO: 3020 - DNA, 11 bp, synthetic construct
  source 1..11: mol_type = other DNA
tattcatggct

SEQ ID NO: 3021 - DNA, 12 bp, synthetic construct
  source 1..12: mol_type = other DNA
tattcatggcta

SEQ ID NO: 3022 - DNA, 13 bp, synthetic construct
  source 1..13: mol_type = other DNA
tattcatggctaa

SEQ ID NO: 3023 - DNA, 14 bp, synthetic construct
  source 1..14: mol_type = other DNA
tattcatggctaaa

SEQ ID NO: 3024 - DNA, 15 bp, synthetic construct
  source 1..15: mol_type = other DNA
tattcatggctaaag

SEQ ID NO: 3025 - DNA, 16 bp, synthetic construct
  source 1..16: mol_type = other DNA
tattcatggctaaagt

SEQ ID NO: 3026 - DNA, 10 bp, synthetic construct
  source 1..10: mol_type = other DNA
gcaatgtact

SEQ ID NO: 3027 - DNA, 11 bp, synthetic construct
  source 1..11: mol_type = other DNA
gcaatgtactc

SEQ ID NO: 3028 - DNA, 12 bp, synthetic construct
  source 1..12: mol_type = other DNA
gcaatgtactca

SEQ ID NO: 3029 - DNA, 13 bp, synthetic construct
  source 1..13: mol_type = other DNA
gcaatgtactcat

SEQ ID NO: 3030 - DNA, 14 bp, synthetic construct
  source 1..14: mol_type = other DNA
gcaatgtactcatg

SEQ ID NO: 3031 - DNA, 15 bp, synthetic construct
  source 1..15: mol_type = other DNA
gcaatgtactcatga

SEQ ID NO: 3032 - DNA, 16 bp, synthetic construct
  source 1..16: mol_type = other DNA
gcaatgtactcatgat

SEQ ID NO: 3033 - DNA, 10 bp, synthetic construct
  source 1..10: mol_type = other DNA
tgcaatgtac

SEQ ID NO: 3034 - DNA, 11 bp, synthetic construct
  source 1..11: mol_type = other DNA
tgcaatgtact

SEQ ID NO: 3035 - DNA, 12 bp, synthetic construct
  source 1..12: mol_type = other DNA
tgcaatgtactc

SEQ ID NO: 3036 - DNA, 13 bp, synthetic construct
  source 1..13: mol_type = other DNA
tgcaatgtactca

SEQ ID NO: 3037 - DNA, 14 bp, synthetic construct
  source 1..14: mol_type = other DNA
tgcaatgtactcat

SEQ ID NO: 3038 - DNA, 15 bp, synthetic construct
  source 1..15: mol_type = other DNA
tgcaatgtactcatg

SEQ ID NO: 3039 - DNA, 16 bp, synthetic construct
  source 1..16: mol_type = other DNA
tgcaatgtactcatga

SEQ ID NO: 3040 - DNA, 10 bp, synthetic construct
  source 1..10: mol_type = other DNA
cactgcaatg

SEQ ID NO: 3041 - DNA, 11 bp, synthetic construct
  source 1..11: mol_type = other DNA
cactgcaatgt

SEQ ID NO: 3042 - DNA, 12 bp, synthetic construct
  source 1..12: mol_type = other DNA
cactgcaatgta

SEQ ID NO: 3043 - DNA, 13 bp, synthetic construct
  source 1..13: mol_type = other DNA
cactgcaatgtac

SEQ ID NO: 3044 - DNA, 14 bp, synthetic construct
  source 1..14: mol_type = other DNA
cactgcaatgtact

SEQ ID NO: 3045 - DNA, 15 bp, synthetic construct
  source 1..15: mol_type = other DNA
cactgcaatgtactc

SEQ ID NO: 3046 - DNA, 16 bp, synthetic construct
  source 1..16: mol_type = other DNA
cactgcaatgtactca

SEQ ID NO: 3047 - DNA, 10 bp, synthetic construct
  source 1..10: mol_type = other DNA
tactcatgat

SEQ ID NO: 3048 - DNA, 11 bp, synthetic construct
  source 1..11: mol_type = other DNA
tactcatgata

SEQ ID NO: 3049 - DNA, 12 bp, synthetic construct
  source 1..12: mol_type = other DNA
tactcatgatat

SEQ ID NO: 3050 - DNA, 13 bp, synthetic construct
  source 1..13: mol_type = other DNA
tactcatgatatt

SEQ ID NO: 3051 - DNA, 14 bp, synthetic construct
  source 1..14: mol_type = other DNA
tactcatgatattc

SEQ ID NO: 3052 - DNA, 15 bp, synthetic construct
  source 1..15: mol_type = other DNA
tactcatgatattca

SEQ ID NO: 3053 - DNA, 16 bp, synthetic construct
  source 1..16: mol_type = other DNA
tactcatgatattcat

SEQ ID NO: 3054 - DNA, 10 bp, synthetic construct
  source 1..10: mol_type = other DNA
tatgctggag

SEQ ID NO: 3055 - DNA, 11 bp, synthetic construct
  source 1..11: mol_type = other DNA
tatgctggagt

SEQ ID NO: 3056 - DNA, 12 bp, synthetic construct
  source 1..12: mol_type = other DNA
tatgctggagtt

SEQ ID NO: 3057 - DNA, 13 bp, synthetic construct
  source 1..13: mol_type = other DNA
tatgctggagttt

SEQ ID NO: 3058 - DNA, 14 bp, synthetic construct
  source 1..14: mol_type = other DNA
tatgctggagttta

SEQ ID NO: 3059 - DNA, 15 bp, synthetic construct
  source 1..15: mol_type = other DNA
tatgctggagtttac

SEQ ID NO: 3060 - DNA, 16 bp, synthetic construct
  source 1..16: mol_type = other DNA
tatgctggagtttaca

SEQ ID NO: 3061 - DNA, 10 bp, synthetic construct
  source 1..10: mol_type = other DNA
atattcatgg

SEQ ID NO: 3062 - DNA, 11 bp, synthetic construct
  source 1..11: mol_type = other DNA
atattcatggc

SEQ ID NO: 3063 - DNA, 12 bp, synthetic construct
  source 1..12: mol_type = other DNA
atattcatggct

SEQ ID NO: 3064 - DNA, 13 bp, synthetic construct
  source 1..13: mol_type = other DNA
atattcatggcta

SEQ ID NO: 3065 - DNA, 14 bp, synthetic construct
  source 1..14: mol_type = other DNA
atattcatggctaa

SEQ ID NO: 3066 - DNA, 15 bp, synthetic construct
  source 1..15: mol_type = other DNA
atattcatggctaaa

SEQ ID NO: 3067 - DNA, 16 bp, synthetic construct
  source 1..16: mol_type = other DNA
atattcatggctaaag

SEQ ID NO: 3068 - DNA, 10 bp, synthetic construct
  source 1..10: mol_type = other DNA
gatattcatg

SEQ ID NO: 3069 - DNA, 11 bp, synthetic construct
  source 1..11: mol_type = other DNA
gatattcatgg

SEQ ID NO: 3070 - DNA, 12 bp, synthetic construct
  source 1..12: mol_type = other DNA
gatattcatggc

SEQ ID NO: 3071 - DNA, 13 bp, synthetic construct
  source 1..13: mol_type = other DNA
gatattcatggct

SEQ ID NO: 3072 - DNA, 14 bp, synthetic construct
  source 1..14: mol_type = other DNA
gatattcatggcta

SEQ ID NO: 3073 - DNA, 15 bp, synthetic construct
  source 1..15: mol_type = other DNA
gatattcatggctaa

SEQ ID NO: 3074 - DNA, 16 bp, synthetic construct
  source 1..16: mol_type = other DNA
gatattcatggctaaa

SEQ ID NO: 3075 - DNA, 10 bp, synthetic construct
  source 1..10: mol_type = other DNA
tgtactcatg

SEQ ID NO: 3076 - DNA, 11 bp, synthetic construct
  source 1..11: mol_type = other DNA
tgtactcatga

SEQ ID NO: 3077 - DNA, 12 bp, synthetic construct
  source 1..12: mol_type = other DNA
tgtactcatgat

SEQ ID NO: 3078 - DNA, 13 bp, synthetic construct
  source 1..13: mol_type = other DNA
tgtactcatgata

SEQ ID NO: 3079 - DNA, 14 bp, synthetic construct
  source 1..14: mol_type = other DNA
tgtactcatgatat

SEQ ID NO: 3080 - DNA, 15 bp, synthetic construct
  source 1..15: mol_type = other DNA
tgtactcatgatatt

SEQ ID NO: 3081 - DNA, 16 bp, synthetic construct
  source 1..16: mol_type = other DNA
tgtactcatgatattc

SEQ ID NO: 3082 - DNA, 10 bp, synthetic construct
  source 1..10: mol_type = other DNA
atgtactcat

SEQ ID NO: 3083 - DNA, 11 bp, synthetic construct
  source 1..11: mol_type = other DNA
atgtactcatg

SEQ ID NO: 3084 - DNA, 12 bp, synthetic construct
  source 1..12: mol_type = other DNA
atgtactcatga

SEQ ID NO: 3085 - DNA, 13 bp, synthetic construct
  source 1..13: mol_type = other DNA
atgtactcatgat

SEQ ID NO: 3086 - DNA, 14 bp, synthetic construct
  source 1..14: mol_type = other DNA
atgtactcatgata

SEQ ID NO: 3087 - DNA, 15 bp, synthetic construct
  source 1..15: mol_type = other DNA
atgtactcatgatat

SEQ ID NO: 3088 - DNA, 16 bp, synthetic construct
  source 1..16: mol_type = other DNA
atgtactcatgatatt

SEQ ID NO: 3089 - DNA, 10 bp, synthetic construct
  source 1..10: mol_type = other DNA
ggatagcttg

SEQ ID NO: 3090 - DNA, 11 bp, synthetic construct
  source 1..11: mol_type = other DNA
ggatagcttgg

SEQ ID NO: 3091 - DNA, 12 bp, synthetic construct
  source 1..12: mol_type = other DNA
ggatagcttggt

SEQ ID NO: 3092 - DNA, 13 bp, synthetic construct
  source 1..13: mol_type = other DNA
ggatagcttggta

SEQ ID NO: 3093 - DNA, 14 bp, synthetic construct
  source 1..14: mol_type = other DNA
ggatagcttggtaa

SEQ ID NO: 3094 - DNA, 15 bp, synthetic construct
  source 1..15: mol_type = other DNA
ggatagcttggtaag

SEQ ID NO: 3095 - DNA, 16 bp, synthetic construct
  source 1..16: mol_type = other DNA
ggatagcttggtaagt

SEQ ID NO: 3096 - DNA, 10 bp, synthetic construct
  source 1..10: mol_type = other DNA
atgctggagt

SEQ ID NO: 3097 - DNA, 11 bp, synthetic construct
  source 1..11: mol_type = other DNA
atgctggagtt

SEQ ID NO: 3098 - DNA, 12 bp, synthetic construct
  source 1..12: mol_type = other DNA
atgctggagttt

SEQ ID NO: 3099 - DNA, 13 bp, synthetic construct
  source 1..13: mol_type = other DNA
atgctggagttta

SEQ ID NO: 3100 - DNA, 14 bp, synthetic construct
  source 1..14: mol_type = other DNA
atgctggagtttac

SEQ ID NO: 3101 - DNA, 15 bp, synthetic construct
  source 1..15: mol_type = other DNA
atgctggagtttaca

SEQ ID NO: 3102 - DNA, 16 bp, synthetic construct
  source 1..16: mol_type = other DNA
atgctggagtttacag

SEQ ID NO: 3103 - DNA, 10 bp, synthetic construct
  source 1..10: mol_type = other DNA
atctttttaa

SEQ ID NO: 3104 - DNA, 11 bp, synthetic construct
  source 1..11: mol_type = other DNA
atctttttaac

SEQ ID NO: 3105 - DNA, 12 bp, synthetic construct
  source 1..12: mol_type = other DNA
atctttttaact

SEQ ID NO: 3106 - DNA, 13 bp, synthetic construct
  source 1..13: mol_type = other DNA
atctttttaactt

SEQ ID NO: 3107 - DNA, 14 bp, synthetic construct
  source 1..14: mol_type = other DNA
atctttttaacttt

SEQ ID NO: 3108 - DNA, 15 bp, synthetic construct
  source 1..15: mol_type = other DNA
atctttttaactttt

SEQ ID NO: 3109 - DNA, 16 bp, synthetic construct
  source 1..16: mol_type = other DNA
atctttttaactttta

SEQ ID NO: 3110 - DNA, 10 bp, synthetic construct
  source 1..10: mol_type = other DNA
atgtggatag

SEQ ID NO: 3111 - DNA, 11 bp, synthetic construct
  source 1..11: mol_type = other DNA
atgtggatagc

SEQ ID NO: 3112 - DNA, 12 bp, synthetic construct
  source 1..12: mol_type = other DNA
atgtggatagct

SEQ ID NO: 3113 - DNA, 13 bp, synthetic construct
  source 1..13: mol_type = other DNA
atgtggatagctt

SEQ ID NO: 3114 - DNA, 14 bp, synthetic construct
  source 1..14: mol_type = other DNA
atgtggatagcttg

SEQ ID NO: 3115 - DNA, 15 bp, synthetic construct
  source 1..15: mol_type = other DNA
atgtggatagcttgg

SEQ ID NO: 3116 - DNA, 16 bp, synthetic construct
  source 1..16: mol_type = other DNA
atgtggatagcttggt

SEQ ID NO: 3117 - DNA, 10 bp, synthetic construct
  source 1..10: mol_type = other DNA
caatgtactc

SEQ ID NO: 3118 - DNA, 11 bp, synthetic construct
  source 1..11: mol_type = other DNA
caatgtactca

SEQ ID NO: 3119 - DNA, 12 bp, synthetic construct
  source 1..12: mol_type = other DNA
caatgtactcat

SEQ ID NO: 3120 - DNA, 13 bp, synthetic construct
  source 1..13: mol_type = other DNA
caatgtactcatg

SEQ ID NO: 3121 - DNA, 14 bp, synthetic construct
  source 1..14: mol_type = other DNA
caatgtactcatga

SEQ ID NO: 3122 - DNA, 15 bp, synthetic construct
  source 1..15: mol_type = other DNA
caatgtactcatgat

SEQ ID NO: 3123 - DNA, 16 bp, synthetic construct
  source 1..16: mol_type = other DNA
caatgtactcatgata

SEQ ID NO: 3124 - DNA, 10 bp, synthetic construct
  source 1..10: mol_type = other DNA
tttacagccc

SEQ ID NO: 3125 - DNA, 11 bp, synthetic construct
  source 1..11: mol_type = other DNA
tttacagccca

SEQ ID NO: 3126 - DNA, 12 bp, synthetic construct
  source 1..12: mol_type = other DNA
tttacagcccac

SEQ ID NO: 3127 - DNA, 13 bp, synthetic construct
  source 1..13: mol_type = other DNA
tttacagcccact

SEQ ID NO: 3128 - DNA, 14 bp, synthetic construct
  source 1..14: mol_type = other DNA
tttacagcccactg

SEQ ID NO: 3129 - DNA, 15 bp, synthetic construct
  source 1..15: mol_type = other DNA
tttacagcccactgc

SEQ ID NO: 3130 - DNA, 16 bp, synthetic construct
  source 1..16: mol_type = other DNA
tttacagcccactgca

SEQ ID NO: 3131 - DNA, 10 bp, synthetic construct
  source 1..10: mol_type = other DNA
gtttacagcc

SEQ ID NO: 3132 - DNA, 11 bp, synthetic construct
  source 1..11: mol_type = other DNA
gtttacagccc

SEQ ID NO: 3133 - DNA, 12 bp, synthetic construct
  source 1..12: mol_type = other DNA
gtttacagccca

SEQ ID NO: 3134 - DNA, 13 bp, synthetic construct
  source 1..13: mol_type = other DNA
gtttacagcccac

SEQ ID NO: 3135 - DNA, 14 bp, synthetic construct
  source 1..14: mol_type = other DNA
gtttacagcccact

SEQ ID NO: 3136 - DNA, 15 bp, synthetic construct
  source 1..15: mol_type = other DNA
gtttacagcccactg

SEQ ID NO: 3137 - DNA, 16 bp, synthetic construct
  source 1..16: mol_type = other DNA
gtttacagcccactgc

SEQ ID NO: 3138 - DNA, 10 bp, synthetic construct
  source 1..10: mol_type = other DNA
ttttaacttt

SEQ ID NO: 3139 - DNA, 11 bp, synthetic construct
  source 1..11: mol_type = other DNA
ttttaactttt

SEQ ID NO: 3140 - DNA, 12 bp, synthetic construct
  source 1..12: mol_type = other DNA
ttttaactttta

SEQ ID NO: 3141 - DNA, 13 bp, synthetic construct
  source 1..13: mol_type = other DNA
ttttaacttttat

SEQ ID NO: 3142 - DNA, 14 bp, synthetic construct
  source 1..14: mol_type = other DNA
ttttaacttttatg

SEQ ID NO: 3143 - DNA, 15 bp, synthetic construct
  source 1..15: mol_type = other DNA
ttttaacttttatga

SEQ ID NO: 3144 - DNA, 16 bp, synthetic construct
  source 1..16: mol_type = other DNA
ttttaacttttatgaa

SEQ ID NO: 3145 - DNA, 10 bp, synthetic construct
  source 1..10: mol_type = other DNA
taacttttat

SEQ ID NO: 3146 - DNA, 11 bp, synthetic construct
  source 1..11: mol_type = other DNA
taacttttatg

SEQ ID NO: 3147 - DNA, 12 bp, synthetic construct
  source 1..12: mol_type = other DNA
taacttttatga

SEQ ID NO: 3148 - DNA, 13 bp, synthetic construct
  source 1..13: mol_type = other DNA
taacttttatgaa

SEQ ID NO: 3149 - DNA, 14 bp, synthetic construct
  source 1..14: mol_type = other DNA
taacttttatgaaa

SEQ ID NO: 3150 - DNA, 15 bp, synthetic construct
  source 1..15: mol_type = other DNA
taacttttatgaaaa

SEQ ID NO: 3151 - DNA, 16 bp, synthetic construct
  source 1..16: mol_type = other DNA
taacttttatgaaaaa

SEQ ID NO: 3152 - DNA, 10 bp, synthetic construct
  source 1..10: mol_type = other DNA
aacttttatg

SEQ ID NO: 3153 - DNA, 11 bp, synthetic construct
  source 1..11: mol_type = other DNA
aacttttatga

SEQ ID NO: 3154 - DNA, 12 bp, synthetic construct
  source 1..12: mol_type = other DNA
aacttttatgaa

SEQ ID NO: 3155 - DNA, 13 bp, synthetic construct
  source 1..13: mol_type = other DNA
aacttttatgaaa

SEQ ID NO: 3156 - DNA, 14 bp, synthetic construct
  source 1..14: mol_type = other DNA
aacttttatgaaaa

SEQ ID NO: 3157 - DNA, 15 bp, synthetic construct
  source 1..15: mol_type = other DNA
aacttttatgaaaaa

SEQ ID NO: 3158 - DNA, 16 bp, synthetic construct
  source 1..16: mol_type = other DNA
aacttttatgaaaaaa

SEQ ID NO: 3159 - DNA, 10 bp, synthetic construct
  source 1..10: mol_type = other DNA
gccgagtctt

SEQ ID NO: 3160 - DNA, 11 bp, synthetic construct
  source 1..11: mol_type = other DNA
gccgagtcttt

SEQ ID NO: 3161 - DNA, 12 bp, synthetic construct
  source 1..12: mol_type = other DNA
gccgagtcttta

SEQ ID NO: 3162 - DNA, 13 bp, synthetic construct
  source 1..13: mol_type = other DNA
gccgagtctttaa

SEQ ID NO: 3163 - DNA, 14 bp, synthetic construct
  source 1..14: mol_type = other DNA
gccgagtctttaag

SEQ ID NO: 3164 - DNA, 15 bp, synthetic construct
  source 1..15: mol_type = other DNA
gccgagtctttaagt

SEQ ID NO: 3165 - DNA, 16 bp, synthetic construct
  source 1..16: mol_type = other DNA
gccgagtctttaagtt

SEQ ID NO: 3166 - DNA, 10 bp, synthetic construct
  source 1..10: mol_type = other DNA
taaaaataac

SEQ ID NO: 3167 - DNA, 11 bp, synthetic construct
  source 1..11: mol_type = other DNA
taaaaataaca

SEQ ID NO: 3168 - DNA, 12 bp, synthetic construct
  source 1..12: mol_type = other DNA
taaaaataacaa

SEQ ID NO: 3169 - DNA, 13 bp, synthetic construct
  source 1..13: mol_type = other DNA
taaaaataacaac

SEQ ID NO: 3170 - DNA, 14 bp, synthetic construct
  source 1..14: mol_type = other DNA
taaaaataacaaca

SEQ ID NO: 3171 - DNA, 15 bp, synthetic construct
  source 1..15: mol_type = other DNA
taaaaataacaacat

SEQ ID NO: 3172 - DNA, 16 bp, synthetic construct
  source 1..16: mol_type = other DNA
taaaaataacaacatt

SEQ ID NO: 3173 - DNA, 10 bp, synthetic construct
  source 1..10: mol_type = other DNA
agccgagtct

SEQ ID NO: 3174 - DNA, 11 bp, synthetic construct
  source 1..11: mol_type = other DNA
agccgagtctt

SEQ ID NO: 3175 - DNA, 12 bp, synthetic construct
  source 1..12: mol_type = other DNA
agccgagtcttt

SEQ ID NO: 3176 - DNA, 13 bp, synthetic construct
  source 1..13: mol_type = other DNA
agccgagtcttta

SEQ ID NO: 3177 - DNA, 14 bp, synthetic construct
  source 1..14: mol_type = other DNA
agccgagtctttaa

SEQ ID NO: 3178 - DNA, 15 bp, synthetic construct
  source 1..15: mol_type = other DNA
agccgagtctttaag

SEQ ID NO: 3179 - DNA, 16 bp, synthetic construct
  source 1..16: mol_type = other DNA
agccgagtctttaagt

SEQ ID NO: 3180 - DNA, 10 bp, synthetic construct
  source 1..10: mol_type = other DNA
caacagaagg

SEQ ID NO: 3181 - DNA, 11 bp, synthetic construct
  source 1..11: mol_type = other DNA
caacagaaggt

SEQ ID NO: 3182 - DNA, 12 bp, synthetic construct
  source 1..12: mol_type = other DNA
caacagaaggta

SEQ ID NO: 3183 - DNA, 13 bp, synthetic construct
  source 1..13: mol_type = other DNA
caacagaaggtaa

SEQ ID NO: 3184 - DNA, 14 bp, synthetic construct
  source 1..14: mol_type = other DNA
caacagaaggtaaa

SEQ ID NO: 3185 - DNA, 15 bp, synthetic construct
  source 1..15: mol_type = other DNA
caacagaaggtaaac

SEQ ID NO: 3186 - DNA, 16 bp, synthetic construct
  source 1..16: mol_type = other DNA
caacagaaggtaaacc

SEQ ID NO: 3187 - DNA, 10 bp, synthetic construct
  source 1..10: mol_type = other DNA
tttaagttca

SEQ ID NO: 3188 - DNA, 11 bp, synthetic construct
  source 1..11: mol_type = other DNA
tttaagttcat

SEQ ID NO: 3189 - DNA, 12 bp, synthetic construct
  source 1..12: mol_type = other DNA
tttaagttcatt

SEQ ID NO: 3190 - DNA, 13 bp, synthetic construct
  source 1..13: mol_type = other DNA
tttaagttcattg

SEQ ID NO: 3191 - DNA, 14 bp, synthetic construct
  source 1..14: mol_type = other DNA
tttaagttcattga

SEQ ID NO: 3192 - DNA, 15 bp, synthetic construct
  source 1..15: mol_type = other DNA
tttaagttcattgac

SEQ ID NO: 3193 - DNA, 16 bp, synthetic construct
  source 1..16: mol_type = other DNA
tttaagttcattgaca

SEQ ID NO: 3194 - DNA, 10 bp, synthetic construct
  source 1..10: mol_type = other DNA
ataaaaataa

SEQ ID NO: 3195 - DNA, 11 bp, synthetic construct
  source 1..11: mol_type = other DNA
ataaaaataac

SEQ ID NO: 3196 - DNA, 12 bp, synthetic construct
  source 1..12: mol_type = other DNA
ataaaaataaca

SEQ ID NO: 3197 - DNA, 13 bp, synthetic construct
  source 1..13: mol_type = other DNA
ataaaaataacaa

SEQ ID NO: 3198 - DNA, 14 bp, synthetic construct
  source 1..14: mol_type = other DNA
ataaaaataacaac

SEQ ID NO: 3199 - DNA, 15 bp, synthetic construct
  source 1..15: mol_type = other DNA
ataaaaataacaaca

SEQ ID NO: 3200 - DNA, 16 bp, synthetic construct
  source 1..16: mol_type = other DNA
ataaaaataacaacat

SEQ ID NO: 3201 - DNA, 10 bp, synthetic construct
  source 1..10: mol_type = other DNA
tttttgtttt

SEQ ID NO: 3202 - DNA, 11 bp, synthetic construct
  source 1..11: mol_type = other DNA
tttttgttttt

SEQ ID NO: 3203 - DNA, 12 bp, synthetic construct
  source 1..12: mol_type = other DNA
tttttgttttta

SEQ ID NO: 3204 - DNA, 13 bp, synthetic construct
  source 1..13: mol_type = other DNA
tttttgtttttaa

SEQ ID NO: 3205 - DNA, 14 bp, synthetic construct
  source 1..14: mol_type = other DNA
tttttgtttttaag

SEQ ID NO: 3206 - DNA, 15 bp, synthetic construct
  source 1..15: mol_type = other DNA
tttttgtttttaaga

SEQ ID NO: 3207 - DNA, 16 bp, synthetic construct
  source 1..16: mol_type = other DNA
tttttgtttttaagaa

SEQ ID NO: 3208 - DNA, 10 bp, synthetic construct
  source 1..10: mol_type = other DNA
acatgccaac

SEQ ID NO: 3209 - DNA, 11 bp, synthetic construct
  source 1..11: mol_type = other DNA
acatgccaaca

SEQ ID NO: 3210 - DNA, 12 bp, synthetic construct
  source 1..12: mol_type = other DNA
acatgccaacag

SEQ ID NO: 3211 - DNA, 13 bp, synthetic construct
  source 1..13: mol_type = other DNA
acatgccaacaga

SEQ ID NO: 3212 - DNA, 14 bp, synthetic construct
  source 1..14: mol_type = other DNA
acatgccaacagaa

SEQ ID NO: 3213 - DNA, 15 bp, synthetic construct
  source 1..15: mol_type = other DNA
acatgccaacagaag

SEQ ID NO: 3214 - DNA, 16 bp, synthetic construct
  source 1..16: mol_type = other DNA
acatgccaacagaagg

SEQ ID NO: 3215 - DNA, 10 bp, synthetic construct
  source 1..10: mol_type = other DNA
ttgtttttaa

SEQ ID NO: 3216 - DNA, 11 bp, synthetic construct
  source 1..11: mol_type = other DNA
ttgtttttaag

SEQ ID NO: 3217 - DNA, 12 bp, synthetic construct
  source 1..12: mol_type = other DNA
ttgtttttaaga

SEQ ID NO: 3218 - DNA, 13 bp, synthetic construct
  source 1..13: mol_type = other DNA
ttgtttttaagaa

SEQ ID NO: 3219 - DNA, 14 bp, synthetic construct
  source 1..14: mol_type = other DNA
ttgtttttaagaat

SEQ ID NO: 3220 - DNA, 15 bp, synthetic construct
  source 1..15: mol_type = other DNA
ttgtttttaagaatg

SEQ ID NO: 3221 - DNA, 16 bp, synthetic construct
  source 1..16: mol_type = other DNA
ttgtttttaagaatgg

SEQ ID NO: 3222 - DNA, 10 bp, synthetic construct
  source 1..10: mol_type = other DNA
agttcattga

SEQ ID NO: 3223 - DNA, 11 bp, synthetic construct
  source 1..11: mol_type = other DNA
agttcattgac

SEQ ID NO: 3224 - DNA, 12 bp, synthetic construct
  source 1..12: mol_type = other DNA
agttcattgaca

SEQ ID NO: 3225 - DNA, 13 bp, synthetic construct
  source 1..13: mol_type = other DNA
agttcattgacat

SEQ ID NO: 3226 - DNA, 14 bp, synthetic construct
  source 1..14: mol_type = other DNA
agttcattgacatg

SEQ ID NO: 3227 - DNA, 15 bp, synthetic construct
  source 1..15: mol_type = other DNA
agttcattgacatgc

SEQ ID NO: 3228 - DNA, 16 bp, synthetic construct
  source 1..16: mol_type = other DNA
agttcattgacatgcc

SEQ ID NO: 3229 - DNA, 10 bp, synthetic construct
  source 1..10: mol_type = other DNA
ctttaagttc

SEQ ID NO: 3230 - DNA, 11 bp, synthetic construct
  source 1..11: mol_type = other DNA
ctttaagttca

SEQ ID NO: 3231 - DNA, 12 bp, synthetic construct
  source 1..12: mol_type = other DNA
ctttaagttcat

SEQ ID NO: 3232 - DNA, 13 bp, synthetic construct
  source 1..13: mol_type = other DNA
ctttaagttcatt

SEQ ID NO: 3233 - DNA, 14 bp, synthetic construct
  source 1..14: mol_type = other DNA
ctttaagttcattg

SEQ ID NO: 3234 - DNA, 15 bp, synthetic construct
  source 1..15: mol_type = other DNA
ctttaagttcattga

SEQ ID NO: 3235 - DNA, 16 bp, synthetic construct
  source 1..16: mol_type = other DNA
ctttaagttcattgac

SEQ ID NO: 3236 - DNA, 10 bp, synthetic construct
  source 1..10: mol_type = other DNA
tctttaagtt

SEQ ID NO: 3237 - DNA, 11 bp, synthetic construct
  source 1..11: mol_type = other DNA
tctttaagttc

SEQ ID NO: 3238 - DNA, 12 bp, synthetic construct
  source 1..12: mol_type = other DNA
tctttaagttca

SEQ ID NO: 3239 - DNA, 13 bp, synthetic construct
  source 1..13: mol_type = other DNA
tctttaagttcat

SEQ ID NO: 3240 - DNA, 14 bp, synthetic construct
  source 1..14: mol_type = other DNA
tctttaagttcatt

SEQ ID NO: 3241 - DNA, 15 bp, synthetic construct
  source 1..15: mol_type = other DNA
tctttaagttcattg

SEQ ID NO: 3242 - DNA, 16 bp, synthetic construct
  source 1..16: mol_type = other DNA
tctttaagttcattga

SEQ ID NO: 3243 - DNA, 10 bp, synthetic construct
  source 1..10: mol_type = other DNA
ctgaaataaa

SEQ ID NO: 3244 - DNA, 11 bp, synthetic construct
  source 1..11: mol_type = other DNA
ctgaaataaaa

SEQ ID NO: 3245 - DNA, 12 bp, synthetic construct
  source 1..12: mol_type = other DNA
ctgaaataaaaa

SEQ ID NO: 3246 - DNA, 13 bp, synthetic construct
  source 1..13: mol_type = other DNA
ctgaaataaaaat

SEQ ID NO: 3247 - DNA, 14 bp, synthetic construct
  source 1..14: mol_type = other DNA
ctgaaataaaaata

SEQ ID NO: 3248 - DNA, 15 bp, synthetic construct
  source 1..15: mol_type = other DNA
ctgaaataaaaataa

SEQ ID NO: 3249 - DNA, 16 bp, synthetic construct
  source 1..16: mol_type = other DNA
ctgaaataaaaataac

SEQ ID NO: 3250 - DNA, 10 bp, synthetic construct
  source 1..10: mol_type = other DNA
gaaataaaaa

SEQ ID NO: 3251 - DNA, 11 bp, synthetic construct
  source 1..11: mol_type = other DNA
gaaataaaaat

SEQ ID NO: 3252 - DNA, 12 bp, synthetic construct
  source 1..12: mol_type = other DNA
gaaataaaaata

SEQ ID NO: 3253 - DNA, 13 bp, synthetic construct
  source 1..13: mol_type = other DNA
gaaataaaaataa

SEQ ID NO: 3254 - DNA, 14 bp, synthetic construct
  source 1..14: mol_type = other DNA
gaaataaaaataac

SEQ ID NO: 3255 - DNA, 15 bp, synthetic construct
  source 1..15: mol_type = other DNA
gaaataaaaataaca

SEQ ID NO: 3256 - DNA, 16 bp, synthetic construct
  source 1..16: mol_type = other DNA
gaaataaaaataacaa

SEQ ID NO: 3257 - DNA, 10 bp, synthetic construct
  source 1..10: mol_type = other DNA
gttcattgac

SEQ ID NO: 3258 - DNA, 11 bp, synthetic construct
  source 1..11: mol_type = other DNA
gttcattgaca

SEQ ID NO: 3259 - DNA, 12 bp, synthetic construct
  source 1..12: mol_type = other DNA
gttcattgacat

SEQ ID NO: 3260 - DNA, 13 bp, synthetic construct
  source 1..13: mol_type = other DNA
gttcattgacatg

SEQ ID NO: 3261 - DNA, 14 bp, synthetic construct
  source 1..14: mol_type = other DNA
gttcattgacatgc

SEQ ID NO: 3262 - DNA, 15 bp, synthetic construct
  source 1..15: mol_type = other DNA
gttcattgacatgcc

SEQ ID NO: 3263 - DNA, 16 bp, synthetic construct
  source 1..16: mol_type = other DNA
gttcattgacatgcca

SEQ ID NO: 3264 - DNA, 10 bp, synthetic construct
  source 1..10: mol_type = other DNA
tcacagatcg

SEQ ID NO: 3265 - DNA, 11 bp, synthetic construct
  source 1..11: mol_type = other DNA
tcacagatcgc

SEQ ID NO: 3266 - DNA, 12 bp, synthetic construct
  source 1..12: mol_type = other DNA
tcacagatcgca

SEQ ID NO: 3267 - DNA, 13 bp, synthetic construct
  source 1..13: mol_type = other DNA
tcacagatcgcat

SEQ ID NO: 3268 - DNA, 14 bp, synthetic construct
  source 1..14: mol_type = other DNA
tcacagatcgcatc

SEQ ID NO: 3269 - DNA, 15 bp, synthetic construct
  source 1..15: mol_type = other DNA
tcacagatcgcatct

SEQ ID NO: 3270 - DNA, 16 bp, synthetic construct
  source 1..16: mol_type = other DNA
tcacagatcgcatctg

SEQ ID NO: 3271 - DNA, 10 bp, synthetic construct
  source 1..10: mol_type = other DNA
ctcacagatc

SEQ ID NO: 3272 - DNA, 11 bp, synthetic construct
  source 1..11: mol_type = other DNA
ctcacagatcg

SEQ ID NO: 3273 - DNA, 12 bp, synthetic construct
  source 1..12: mol_type = other DNA
ctcacagatcgc

SEQ ID NO: 3274 - DNA, 13 bp, synthetic construct
  source 1..13: mol_type = other DNA
ctcacagatcgca

SEQ ID NO: 3275 - DNA, 14 bp, synthetic construct
  source 1..14: mol_type = other DNA
ctcacagatcgcat

SEQ ID NO: 3276 - DNA, 15 bp, synthetic construct
  source 1..15: mol_type = other DNA
ctcacagatcgcatc

SEQ ID NO: 3277 - DNA, 16 bp, synthetic construct
  source 1..16: mol_type = other DNA
ctcacagatcgcatct

SEQ ID NO: 3278 - DNA, 10 bp, synthetic construct
  source 1..10: mol_type = other DNA
aaggtaaacc

SEQ ID NO: 3279 - DNA, 11 bp, synthetic construct
  source 1..11: mol_type = other DNA
aaggtaaacct

SEQ ID NO: 3280 - DNA, 12 bp, synthetic construct
  source 1..12: mol_type = other DNA
aaggtaaaccta

SEQ ID NO: 3281 - DNA, 13 bp, synthetic construct
  source 1..13: mol_type = other DNA
aaggtaaacctac

SEQ ID NO: 3282 - DNA, 14 bp, synthetic construct
  source 1..14: mol_type = other DNA
aaggtaaacctacc

SEQ ID NO: 3283 - DNA, 15 bp, synthetic construct
  source 1..15: mol_type = other DNA
aaggtaaacctacca

SEQ ID NO: 3284 - DNA, 16 bp, synthetic construct
  source 1..16: mol_type = other DNA
aaggtaaacctaccaa

SEQ ID NO: 3285 - DNA, 10 bp, synthetic construct
  source 1..10: mol_type = other DNA
ggtaaaccta

SEQ ID NO: 3286 - DNA, 11 bp, synthetic construct
  source 1..11: mol_type = other DNA
ggtaaacctac

SEQ ID NO: 3287 - DNA, 12 bp, synthetic construct
  source 1..12: mol_type = other DNA
ggtaaacctacc

SEQ ID NO: 3288 - DNA, 13 bp, synthetic construct
  source 1..13: mol_type = other DNA
ggtaaacctacca

SEQ ID NO: 3289 - DNA, 14 bp, synthetic construct
  source 1..14: mol_type = other DNA
ggtaaacctaccaa

SEQ ID NO: 3290 - DNA, 15 bp, synthetic construct
  source 1..15: mol_type = other DNA
ggtaaacctaccaag

SEQ ID NO: 3291 - DNA, 16 bp, synthetic construct
  source 1..16: mol_type = other DNA
ggtaaacctaccaagt

SEQ ID NO: 3292 - DNA, 10 bp, synthetic construct
  source 1..10: mol_type = other DNA
gatcgcatct

SEQ ID NO: 3293 - DNA, 11 bp, synthetic construct
  source 1..11: mol_type = other DNA
gatcgcatctg

SEQ ID NO: 3294 - DNA, 12 bp, synthetic construct
  source 1..12: mol_type = other DNA
gatcgcatctga

SEQ ID NO: 3295 - DNA, 13 bp, synthetic construct
  source 1..13: mol_type = other DNA
gatcgcatctgaa

SEQ ID NO: 3296 - DNA, 14 bp, synthetic construct
  source 1..14: mol_type = other DNA
gatcgcatctgaaa

SEQ ID NO: 3297 - DNA, 15 bp, synthetic construct
  source 1..15: mol_type = other DNA
gatcgcatctgaaat

SEQ ID NO: 3298 - DNA, 16 bp, synthetic construct
  source 1..16: mol_type = other DNA
gatcgcatctgaaata

SEQ ID NO: 3299 - DNA, 10 bp, synthetic construct
  source 1..10: mol_type = other DNA
agatcgcatc

SEQ ID NO: 3300 - DNA, 11 bp, synthetic construct
  source 1..11: mol_type = other DNA
agatcgcatct

SEQ ID NO: 3301 - DNA, 12 bp, synthetic construct
  source 1..12: mol_type = other DNA
agatcgcatctg

SEQ ID NO: 3302 - DNA, 13 bp, synthetic construct
  source 1..13: mol_type = other DNA
agatcgcatctga

SEQ ID NO: 3303 - DNA, 14 bp, synthetic construct
  source 1..14: mol_type = other DNA
agatcgcatctgaa

SEQ ID NO: 3304 - DNA, 15 bp, synthetic construct
  source 1..15: mol_type = other DNA
agatcgcatctgaaa

SEQ ID NO: 3305 - DNA, 16 bp, synthetic construct
  source 1..16: mol_type = other DNA
agatcgcatctgaaat

SEQ ID NO: 3306 - DNA, 10 bp, synthetic construct
  source 1..10: mol_type = other DNA
cacagatcgc

SEQ ID NO: 3307 - DNA, 11 bp, synthetic construct
  source 1..11: mol_type = other DNA
cacagatcgca

SEQ ID NO: 3308 - DNA, 12 bp, synthetic construct
  source 1..12: mol_type = other DNA
cacagatcgcat

SEQ ID NO: 3309 - DNA, 13 bp, synthetic construct
  source 1..13: mol_type = other DNA
cacagatcgcatc

SEQ ID NO: 3310 - DNA, 14 bp, synthetic construct
  source 1..14: mol_type = other DNA
cacagatcgcatct

SEQ ID NO: 3311 - DNA, 15 bp, synthetic construct
  source 1..15: mol_type = other DNA
cacagatcgcatctg

SEQ ID NO: 3312 - DNA, 16 bp, synthetic construct
  source 1..16: mol_type = other DNA
cacagatcgcatctga

SEQ ID NO: 3313 - DNA, 10 bp, synthetic construct
  source 1..10: mol_type = other DNA
gaaggtaaac

SEQ ID NO: 3314 - DNA, 11 bp, synthetic construct
  source 1..11: mol_type = other DNA
gaaggtaaacc

SEQ ID NO: 3315 - DNA, 12 bp, synthetic construct
  source 1..12: mol_type = other DNA
gaaggtaaacct

SEQ ID NO: 3316 - DNA, 13 bp, synthetic construct
  source 1..13: mol_type = other DNA
gaaggtaaaccta

SEQ ID NO: 3317 - DNA, 14 bp, synthetic construct
  source 1..14: mol_type = other DNA
gaaggtaaacctac

SEQ ID NO: 3318 - DNA, 15 bp, synthetic construct
  source 1..15: mol_type = other DNA
gaaggtaaacctacc

SEQ ID NO: 3319 - DNA, 16 bp, synthetic construct
  source 1..16: mol_type = other DNA
gaaggtaaacctacca

SEQ ID NO: 3320 - DNA, 10 bp, synthetic construct
  source 1..10: mol_type = other DNA
agaaggtaaa

SEQ ID NO: 3321 - DNA, 11 bp, synthetic construct
  source 1..11: mol_type = other DNA
agaaggtaaac

SEQ ID NO: 3322 - DNA, 12 bp, synthetic construct
  source 1..12: mol_type = other DNA
agaaggtaaacc

SEQ ID NO: 3323 - DNA, 13 bp, synthetic construct
  source 1..13: mol_type = other DNA
agaaggtaaacct

SEQ ID NO: 3324 - DNA, 14 bp, synthetic construct
  source 1..14: mol_type = other DNA
agaaggtaaaccta

SEQ ID NO: 3325 - DNA, 15 bp, synthetic construct
  source 1..15: mol_type = other DNA
agaaggtaaacctac

SEQ ID NO: 3326 - DNA, 16 bp, synthetic construct
  source 1..16: mol_type = other DNA
agaaggtaaacctacc

SEQ ID NO: 3327 - DNA, 10 bp, synthetic construct
  source 1..10: mol_type = other DNA
atcgcatctg

SEQ ID NO: 3328 - DNA, 11 bp, synthetic construct
  source 1..11: mol_type = other DNA
atcgcatctga

SEQ ID NO: 3329 - DNA, 12 bp, synthetic construct
  source 1..12: mol_type = other DNA
atcgcatctgaa

SEQ ID NO: 3330 - DNA, 13 bp, synthetic construct
  source 1..13: mol_type = other DNA
atcgcatctgaaa

SEQ ID NO: 3331 - DNA, 14 bp, synthetic construct
  source 1..14: mol_type = other DNA
atcgcatctgaaat

SEQ ID NO: 3332 - DNA, 15 bp, synthetic construct
  source 1..15: mol_type = other DNA
atcgcatctgaaata

SEQ ID NO: 3333 - DNA, 16 bp, synthetic construct
  source 1..16: mol_type = other DNA
atcgcatctgaaataa

SEQ ID NO: 3334 - DNA, 10 bp, synthetic construct
  source 1..10: mol_type = other DNA
acagatcgca

SEQ ID NO: 3335 - DNA, 11 bp, synthetic construct
  source 1..11: mol_type = other DNA
acagatcgcat

SEQ ID NO: 3336 - DNA, 12 bp, synthetic construct
  source 1..12: mol_type = other DNA
acagatcgcatc

SEQ ID NO: 3337 - DNA, 13 bp, synthetic construct
  source 1..13: mol_type = other DNA
acagatcgcatct

SEQ ID NO: 3338 - DNA, 14 bp, synthetic construct
  source 1..14: mol_type = other DNA
acagatcgcatctg

SEQ ID NO: 3339 - DNA, 15 bp, synthetic construct
  source 1..15: mol_type = other DNA
acagatcgcatctga

SEQ ID NO: 3340 - DNA, 16 bp, synthetic construct
  source 1..16: mol_type = other DNA
acagatcgcatctgaa

SEQ ID NO: 3341 - DNA, 10 bp, synthetic construct
  source 1..10: mol_type = other DNA
cgcatctgaa

SEQ ID NO: 3342 - DNA, 11 bp, synthetic construct
  source 1..11: mol_type = other DNA
cgcatctgaaa

SEQ ID NO: 3343 - DNA, 12 bp, synthetic construct
  source 1..12: mol_type = other DNA
cgcatctgaaat

SEQ ID NO: 3344 - DNA, 13 bp, synthetic construct
  source 1..13: mol_type = other DNA
cgcatctgaaata

SEQ ID NO: 3345 - DNA, 14 bp, synthetic construct
  source 1..14: mol_type = other DNA
cgcatctgaaataa

SEQ ID NO: 3346 - DNA, 15 bp, synthetic construct
  source 1..15: mol_type = other DNA
cgcatctgaaataaa

SEQ ID NO: 3347 - DNA, 16 bp, synthetic construct
  source 1..16: mol_type = other DNA
cgcatctgaaataaaa

SEQ ID NO: 3348 - DNA, 10 bp, synthetic construct
  source 1..10: mol_type = other DNA
gcatgtcaat

SEQ ID NO: 3349 - DNA, 11 bp, synthetic construct
  source 1..11: mol_type = other DNA
gcatgtcaatg

SEQ ID NO: 3350 - DNA, 12 bp, synthetic construct
  source 1..12: mol_type = other DNA
gcatgtcaatga

SEQ ID NO: 3351 - DNA, 13 bp, synthetic construct
  source 1..13: mol_type = other DNA
gcatgtcaatgaa

SEQ ID NO: 3352 - DNA, 14 bp, synthetic construct
  source 1..14: mol_type = other DNA
gcatgtcaatgaac

SEQ ID NO: 3353 - DNA, 15 bp, synthetic construct
  source 1..15: mol_type = other DNA
gcatgtcaatgaact

SEQ ID NO: 3354 - DNA, 16 bp, synthetic construct
  source 1..16: mol_type = other DNA
gcatgtcaatgaactt

SEQ ID NO: 3355 - DNA, 10 bp, synthetic construct
  source 1..10: mol_type = other DNA
ctcgaaagtt

SEQ ID NO: 3356 - DNA, 11 bp, synthetic construct
  source 1..11: mol_type = other DNA
ctcgaaagtta

SEQ ID NO: 3357 - DNA, 12 bp, synthetic construct
  source 1..12: mol_type = other DNA
ctcgaaagttat

SEQ ID NO: 3358 - DNA, 13 bp, synthetic construct
  source 1..13: mol_type = other DNA
ctcgaaagttatg

SEQ ID NO: 3359 - DNA, 14 bp, synthetic construct
  source 1..14: mol_type = other DNA
ctcgaaagttatga

SEQ ID NO: 3360 - DNA, 15 bp, synthetic construct
  source 1..15: mol_type = other DNA
ctcgaaagttatgat

SEQ ID NO: 3361 - DNA, 16 bp, synthetic construct
  source 1..16: mol_type = other DNA
ctcgaaagttatgatt

SEQ ID NO: 3362 - DNA, 10 bp, synthetic construct
  source 1..10: mol_type = other DNA
tctcgaaagt

SEQ ID NO: 3363 - DNA, 11 bp, synthetic construct
  source 1..11: mol_type = other DNA
tctcgaaagtt

SEQ ID NO: 3364 - DNA, 12 bp, synthetic construct
  source 1..12: mol_type = other DNA
tctcgaaagtta

SEQ ID NO: 3365 - DNA, 13 bp, synthetic construct
  source 1..13: mol_type = other DNA
tctcgaaagttat

SEQ ID NO: 3366 - DNA, 14 bp, synthetic construct
  source 1..14: mol_type = other DNA
tctcgaaagttatg

SEQ ID NO: 3367 - DNA, 15 bp, synthetic construct
  source 1..15: mol_type = other DNA
tctcgaaagttatga

SEQ ID NO: 3368 - DNA, 16 bp, synthetic construct
  source 1..16: mol_type = other DNA
tctcgaaagttatgat

SEQ ID NO: 3369 - DNA, 10 bp, synthetic construct
  source 1..10: mol_type = other DNA
aagaatggcc

SEQ ID NO: 3370 - DNA, 11 bp, synthetic construct
  source 1..11: mol_type = other DNA
aagaatggcca

SEQ ID NO: 3371 - DNA, 12 bp, synthetic construct
  source 1..12: mol_type = other DNA
aagaatggccaa

SEQ ID NO: 3372 - DNA, 13 bp, synthetic construct
  source 1..13: mol_type = other DNA
aagaatggccaac

SEQ ID NO: 3373 - DNA, 14 bp, synthetic construct
  source 1..14: mol_type = other DNA
aagaatggccaact

SEQ ID NO: 3374 - DNA, 15 bp, synthetic construct
  source 1..15: mol_type = other DNA
aagaatggccaactc

SEQ ID NO: 3375 - DNA, 16 bp, synthetic construct
  source 1..16: mol_type = other DNA
aagaatggccaactct

SEQ ID NO: 3376 - DNA, 10 bp, synthetic construct
  source 1..10: mol_type = other DNA
caagaatggc

SEQ ID NO: 3377 - DNA, 11 bp, synthetic construct
  source 1..11: mol_type = other DNA
caagaatggcc

SEQ ID NO: 3378 - DNA, 12 bp, synthetic construct
  source 1..12: mol_type = other DNA
caagaatggcca

SEQ ID NO: 3379 - DNA, 13 bp, synthetic construct
  source 1..13: mol_type = other DNA
caagaatggccaa

SEQ ID NO: 3380 - DNA, 14 bp, synthetic construct
  source 1..14: mol_type = other DNA
caagaatggccaac

SEQ ID NO: 3381 - DNA, 15 bp, synthetic construct
  source 1..15: mol_type = other DNA
caagaatggccaact

SEQ ID NO: 3382 - DNA, 16 bp, synthetic construct
  source 1..16: mol_type = other DNA
caagaatggccaactc

SEQ ID NO: 3383 - DNA, 10 bp, synthetic construct
  source 1..10: mol_type = other DNA
caatgaactt

SEQ ID NO: 3384 - DNA, 11 bp, synthetic construct
  source 1..11: mol_type = other DNA
caatgaactta

SEQ ID NO: 3385 - DNA, 12 bp, synthetic construct
  source 1..12: mol_type = other DNA
caatgaacttaa

SEQ ID NO: 3386 - DNA, 13 bp, synthetic construct
  source 1..13: mol_type = other DNA
caatgaacttaaa

SEQ ID NO: 3387 - DNA, 14 bp, synthetic construct
  source 1..14: mol_type = other DNA
caatgaacttaaag

SEQ ID NO: 3388 - DNA, 15 bp, synthetic construct
  source 1..15: mol_type = other DNA
caatgaacttaaaga

SEQ ID NO: 3389 - DNA, 16 bp, synthetic construct
  source 1..16: mol_type = other DNA
caatgaacttaaagac

SEQ ID NO: 3390 - DNA, 10 bp, synthetic construct
  source 1..10: mol_type = other DNA
ggcatgtcaa

SEQ ID NO: 3391 - DNA, 11 bp, synthetic construct
  source 1..11: mol_type = other DNA
ggcatgtcaat

SEQ ID NO: 3392 - DNA, 12 bp, synthetic construct
  source 1..12: mol_type = other DNA
ggcatgtcaatg

SEQ ID NO: 3393 - DNA, 13 bp, synthetic construct
  source 1..13: mol_type = other DNA
ggcatgtcaatga

SEQ ID NO: 3394 - DNA, 14 bp, synthetic construct
  source 1..14: mol_type = other DNA
ggcatgtcaatgaa

SEQ ID NO: 3395 - DNA, 15 bp, synthetic construct
  source 1..15: mol_type = other DNA
ggcatgtcaatgaac

SEQ ID NO: 3396 - DNA, 16 bp, synthetic construct
  source 1..16: mol_type = other DNA
ggcatgtcaatgaact

SEQ ID NO: 3397 - DNA, 10 bp, synthetic construct
  source 1..10: mol_type = other DNA
tcgaaagtta

SEQ ID NO: 3398 - DNA, 11 bp, synthetic construct
  source 1..11: mol_type = other DNA
tcgaaagttat

SEQ ID NO: 3399 - DNA, 12 bp, synthetic construct
  source 1..12: mol_type = other DNA
tcgaaagttatg

SEQ ID NO: 3400 - DNA, 13 bp, synthetic construct
  source 1..13: mol_type = other DNA
tcgaaagttatga

SEQ ID NO: 3401 - DNA, 14 bp, synthetic construct
  source 1..14: mol_type = other DNA
tcgaaagttatgat

SEQ ID NO: 3402 - DNA, 15 bp, synthetic construct
  source 1..15: mol_type = other DNA
tcgaaagttatgatt

SEQ ID NO: 3403 - DNA, 16 bp, synthetic construct
  source 1..16: mol_type = other DNA
tcgaaagttatgatta

SEQ ID NO: 3404 - DNA, 10 bp, synthetic construct
  source 1..10: mol_type = other DNA
gactcggctc

SEQ ID NO: 3405 - DNA, 11 bp, synthetic construct
  source 1..11: mol_type = other DNA
gactcggctca

SEQ ID NO: 3406 - DNA, 12 bp, synthetic construct
  source 1..12: mol_type = other DNA
gactcggctcac

SEQ ID NO: 3407 - DNA, 13 bp, synthetic construct
  source 1..13: mol_type = other DNA
gactcggctcaca

SEQ ID NO: 3408 - DNA, 14 bp, synthetic construct
  source 1..14: mol_type = other DNA
gactcggctcacag

SEQ ID NO: 3409 - DNA, 15 bp, synthetic construct
  source 1..15: mol_type = other DNA
gactcggctcacaga

SEQ ID NO: 3410 - DNA, 16 bp, synthetic construct
  source 1..16: mol_type = other DNA
gactcggctcacagat

SEQ ID NO: 3411 - DNA, 10 bp, synthetic construct
  source 1..10: mol_type = other DNA
agactcggct

SEQ ID NO: 3412 - DNA, 11 bp, synthetic construct
  source 1..11: mol_type = other DNA
agactcggctc

SEQ ID NO: 3413 - DNA, 12 bp, synthetic construct
  source 1..12: mol_type = other DNA
agactcggctca

SEQ ID NO: 3414 - DNA, 13 bp, synthetic construct
  source 1..13: mol_type = other DNA
agactcggctcac

SEQ ID NO: 3415 - DNA, 14 bp, synthetic construct
  source 1..14: mol_type = other DNA
agactcggctcaca

SEQ ID NO: 3416 - DNA, 15 bp, synthetic construct
  source 1..15: mol_type = other DNA
agactcggctcacag

SEQ ID NO: 3417 - DNA, 16 bp, synthetic construct
  source 1..16: mol_type = other DNA
agactcggctcacaga

SEQ ID NO: 3418 - DNA, 10 bp, synthetic construct
  source 1..10: mol_type = other DNA
ggtttacctt

SEQ ID NO: 3419 - DNA, 11 bp, synthetic construct
  source 1..11: mol_type = other DNA
ggtttaccttc

SEQ ID NO: 3420 - DNA, 12 bp, synthetic construct
  source 1..12: mol_type = other DNA
ggtttaccttct

SEQ ID NO: 3421 - DNA, 13 bp, synthetic construct
  source 1..13: mol_type = other DNA
ggtttaccttctg

SEQ ID NO: 3422 - DNA, 14 bp, synthetic construct
  source 1..14: mol_type = other DNA
ggtttaccttctgt

SEQ ID NO: 3423 - DNA, 15 bp, synthetic construct
  source 1..15: mol_type = other DNA
ggtttaccttctgtt

SEQ ID NO: 3424 - DNA, 16 bp, synthetic construct
  source 1..16: mol_type = other DNA
ggtttaccttctgttg

SEQ ID NO: 3425 - DNA, 10 bp, synthetic construct
  source 1..10: mol_type = other DNA
aggtttacct

SEQ ID NO: 3426 - DNA, 11 bp, synthetic construct
  source 1..11: mol_type = other DNA
aggtttacctt

SEQ ID NO: 3427 - DNA, 12 bp, synthetic construct
  source 1..12: mol_type = other DNA
aggtttaccttc

SEQ ID NO: 3428 - DNA, 13 bp, synthetic construct
  source 1..13: mol_type = other DNA
aggtttaccttct

SEQ ID NO: 3429 - DNA, 14 bp, synthetic construct
  source 1..14: mol_type = other DNA
aggtttaccttctg

SEQ ID NO: 3430 - DNA, 15 bp, synthetic construct
  source 1..15: mol_type = other DNA
aggtttaccttctgt

SEQ ID NO: 3431 - DNA, 16 bp, synthetic construct
  source 1..16: mol_type = other DNA
aggtttaccttctgtt

SEQ ID NO: 3432 - DNA, 10 bp, synthetic construct
  source 1..10: mol_type = other DNA
aaagttatga

SEQ ID NO: 3433 - DNA, 11 bp, synthetic construct
  source 1..11: mol_type = other DNA
aaagttatgat

SEQ ID NO: 3434 - DNA, 12 bp, synthetic construct
  source 1..12: mol_type = other DNA
aaagttatgatt

SEQ ID NO: 3435 - DNA, 13 bp, synthetic construct
  source 1..13: mol_type = other DNA
aaagttatgatta

SEQ ID NO: 3436 - DNA, 14 bp, synthetic construct
  source 1..14: mol_type = other DNA
aaagttatgattat

SEQ ID NO: 3437 - DNA, 15 bp, synthetic construct
  source 1..15: mol_type = other DNA
aaagttatgattatt

SEQ ID NO: 3438 - DNA, 16 bp, synthetic construct
  source 1..16: mol_type = other DNA
aaagttatgattattg

SEQ ID NO: 3439 - DNA, 10 bp, synthetic construct
  source 1..10: mol_type = other DNA
gaaagttatg

SEQ ID NO: 3440 - DNA, 11 bp, synthetic construct
  source 1..11: mol_type = other DNA
gaaagttatga

SEQ ID NO: 3441 - DNA, 12 bp, synthetic construct
  source 1..12: mol_type = other DNA
gaaagttatgat

SEQ ID NO: 3442 - DNA, 13 bp, synthetic construct
  source 1..13: mol_type = other DNA
gaaagttatgatt

SEQ ID NO: 3443 - DNA, 14 bp, synthetic construct
  source 1..14: mol_type = other DNA
gaaagttatgatta

SEQ ID NO: 3444 - DNA, 15 bp, synthetic construct
  source 1..15: mol_type = other DNA
gaaagttatgattat

SEQ ID NO: 3445 - DNA, 16 bp, synthetic construct
  source 1..16: mol_type = other DNA
gaaagttatgattatt

SEQ ID NO: 3446 - DNA, 10 bp, synthetic construct
  source 1..10: mol_type = other DNA
aaaccataca

SEQ ID NO: 3447 - DNA, 11 bp, synthetic construct
  source 1..11: mol_type = other DNA
aaaccatacaa

SEQ ID NO: 3448 - DNA, 12 bp, synthetic construct
  source 1..12: mol_type = other DNA
aaaccatacaag

SEQ ID NO: 3449 - DNA, 13 bp, synthetic construct
  source 1..13: mol_type = other DNA
aaaccatacaaga

SEQ ID NO: 3450 - DNA, 14 bp, synthetic construct
  source 1..14: mol_type = other DNA
aaaccatacaagaa

SEQ ID NO: 3451 - DNA, 15 bp, synthetic construct
  source 1..15: mol_type = other DNA
aaaccatacaagaat

SEQ ID NO: 3452 - DNA, 16 bp, synthetic construct
  source 1..16: mol_type = other DNA
aaaccatacaagaatg

SEQ ID NO: 3453 - DNA, 10 bp, synthetic construct
  source 1..10: mol_type = other DNA
agaatggcca

SEQ ID NO: 3454 - DNA, 11 bp, synthetic construct
  source 1..11: mol_type = other DNA
agaatggccaa

SEQ ID NO: 3455 - DNA, 12 bp, synthetic construct
  source 1..12: mol_type = other DNA
agaatggccaac

SEQ ID NO: 3456 - DNA, 13 bp, synthetic construct
  source 1..13: mol_type = other DNA
agaatggccaact

SEQ ID NO: 3457 - DNA, 14 bp, synthetic construct
  source 1..14: mol_type = other DNA
agaatggccaactc

SEQ ID NO: 3458 - DNA, 15 bp, synthetic construct
  source 1..15: mol_type = other DNA
agaatggccaactct

SEQ ID NO: 3459 - DNA, 16 bp, synthetic construct
  source 1..16: mol_type = other DNA
agaatggccaactctc

SEQ ID NO: 3460 - DNA, 10 bp, synthetic construct
  source 1..10: mol_type = other DNA
agttatgatt

SEQ ID NO: 3461 - DNA, 11 bp, synthetic construct
  source 1..11: mol_type = other DNA
agttatgatta

SEQ ID NO: 3462 - DNA, 12 bp, synthetic construct
  source 1..12: mol_type = other DNA
agttatgattat

SEQ ID NO: 3463 - DNA, 13 bp, synthetic construct
  source 1..13: mol_type = other DNA
agttatgattatt

SEQ ID NO: 3464 - DNA, 14 bp, synthetic construct
  source 1..14: mol_type = other DNA
agttatgattattg

SEQ ID NO: 3465 - DNA, 15 bp, synthetic construct
  source 1..15: mol_type = other DNA
agttatgattattga

SEQ ID NO: 3466 - DNA, 16 bp, synthetic construct
  source 1..16: mol_type = other DNA
agttatgattattgag

SEQ ID NO: 3467 - DNA, 10 bp, synthetic construct
  source 1..10: mol_type = other DNA
caaccaaacc

SEQ ID NO: 3468 - DNA, 11 bp, synthetic construct
  source 1..11: mol_type = other DNA
caaccaaacca

SEQ ID NO: 3469 - DNA, 12 bp, synthetic construct
  source 1..12: mol_type = other DNA
caaccaaaccat

SEQ ID NO: 3470 - DNA, 13 bp, synthetic construct
  source 1..13: mol_type = other DNA
caaccaaaccata

SEQ ID NO: 3471 - DNA, 14 bp, synthetic construct
  source 1..14: mol_type = other DNA
caaccaaaccatac

SEQ ID NO: 3472 - DNA, 15 bp, synthetic construct
  source 1..15: mol_type = other DNA
caaccaaaccataca

SEQ ID NO: 3473 - DNA, 16 bp, synthetic construct
  source 1..16: mol_type = other DNA
caaccaaaccatacaa

SEQ ID NO: 3474 - DNA, 10 bp, synthetic construct
  source 1..10: mol_type = other DNA
aacttaaaga

SEQ ID NO: 3475 - DNA, 11 bp, synthetic construct
  source 1..11: mol_type = other DNA
aacttaaagac

SEQ ID NO: 3476 - DNA, 12 bp, synthetic construct
  source 1..12: mol_type = other DNA
aacttaaagact

SEQ ID NO: 3477 - DNA, 13 bp, synthetic construct
  source 1..13: mol_type = other DNA
aacttaaagactc

SEQ ID NO: 3478 - DNA, 14 bp, synthetic construct
  source 1..14: mol_type = other DNA
aacttaaagactcg

SEQ ID NO: 3479 - DNA, 15 bp, synthetic construct
  source 1..15: mol_type = other DNA
aacttaaagactcgg

SEQ ID NO: 3480 - DNA, 16 bp, synthetic construct
  source 1..16: mol_type = other DNA
aacttaaagactcggc

SEQ ID NO: 3481 - DNA, 10 bp, synthetic construct
  source 1..10: mol_type = other DNA
gtcaaccaaa

SEQ ID NO: 3482 - DNA, 11 bp, synthetic construct
  source 1..11: mol_type = other DNA
gtcaaccaaac

SEQ ID NO: 3483 - DNA, 12 bp, synthetic construct
  source 1..12: mol_type = other DNA
gtcaaccaaacc

SEQ ID NO: 3484 - DNA, 13 bp, synthetic construct
  source 1..13: mol_type = other DNA
gtcaaccaaacca

SEQ ID NO: 3485 - DNA, 14 bp, synthetic construct
  source 1..14: mol_type = other DNA
gtcaaccaaaccat

SEQ ID NO: 3486 - DNA, 15 bp, synthetic construct
  source 1..15: mol_type = other DNA
gtcaaccaaaccata

SEQ ID NO: 3487 - DNA, 16 bp, synthetic construct
  source 1..16: mol_type = other DNA
gtcaaccaaaccatac

SEQ ID NO: 3488 - DNA, 10 bp, synthetic construct
  source 1..10: mol_type = other DNA
atacaagaat

SEQ ID NO: 3489 - DNA, 11 bp, synthetic construct
  source 1..11: mol_type = other DNA
atacaagaatg

SEQ ID NO: 3490 - DNA, 12 bp, synthetic construct
  source 1..12: mol_type = other DNA
atacaagaatgg

SEQ ID NO: 3491 - DNA, 13 bp, synthetic construct
  source 1..13: mol_type = other DNA
atacaagaatggc

SEQ ID NO: 3492 - DNA, 14 bp, synthetic construct
  source 1..14: mol_type = other DNA
atacaagaatggcc

SEQ ID NO: 3493 - DNA, 15 bp, synthetic construct
  source 1..15: mol_type = other DNA
atacaagaatggcca

SEQ ID NO: 3494 - DNA, 16 bp, synthetic construct
  source 1..16: mol_type = other DNA
atacaagaatggccaa

SEQ ID NO: 3495 - DNA, 10 bp, synthetic construct
  source 1..10: mol_type = other DNA
agtcaaccaa

SEQ ID NO: 3496 - DNA, 11 bp, synthetic construct
  source 1..11: mol_type = other DNA
agtcaaccaaa

SEQ ID NO: 3497 - DNA, 12 bp, synthetic construct
  source 1..12: mol_type = other DNA
agtcaaccaaac

SEQ ID NO: 3498 - DNA, 13 bp, synthetic construct
  source 1..13: mol_type = other DNA
agtcaaccaaacc

SEQ ID NO: 3499 - DNA, 14 bp, synthetic construct
  source 1..14: mol_type = other DNA
agtcaaccaaacca

SEQ ID NO: 3500 - DNA, 15 bp, synthetic construct
  source 1..15: mol_type = other DNA
agtcaaccaaaccat

SEQ ID NO: 3501 - DNA, 16 bp, synthetic construct
  source 1..16: mol_type = other DNA
agtcaaccaaaccata

SEQ ID NO: 3502 - DNA, 10 bp, synthetic construct
  source 1..10: mol_type = other DNA
aagtcaacca

SEQ ID NO: 3503 - DNA, 11 bp, synthetic construct
  source 1..11: mol_type = other DNA
aagtcaaccaa

SEQ ID NO: 3504 - DNA, 12 bp, synthetic construct
  source 1..12: mol_type = other DNA
aagtcaaccaaa

SEQ ID NO: 3505 - DNA, 13 bp, synthetic construct
  source 1..13: mol_type = other DNA
aagtcaaccaaac

SEQ ID NO: 3506 - DNA, 14 bp, synthetic construct
  source 1..14: mol_type = other DNA
aagtcaaccaaacc

SEQ ID NO: 3507 - DNA, 15 bp, synthetic construct
  source 1..15: mol_type = other DNA
aagtcaaccaaacca

SEQ ID NO: 3508 - DNA, 16 bp, synthetic construct
  source 1..16: mol_type = other DNA
aagtcaaccaaaccat

SEQ ID NO: 3509 - DNA, 10 bp, synthetic construct
  source 1..10: mol_type = other DNA
aagttatgat

SEQ ID NO: 3510 - DNA, 11 bp, synthetic construct
  source 1..11: mol_type = other DNA
aagttatgatt

SEQ ID NO: 3511 - DNA, 12 bp, synthetic construct
  source 1..12: mol_type = other DNA
aagttatgatta

SEQ ID NO: 3512 - DNA, 13 bp, synthetic construct
  source 1..13: mol_type = other DNA
aagttatgattat

SEQ ID NO: 3513 - DNA, 14 bp, synthetic construct
  source 1..14: mol_type = other DNA
aagttatgattatt

SEQ ID NO: 3514 - DNA, 15 bp, synthetic construct
  source 1..15: mol_type = other DNA
aagttatgattattg

SEQ ID NO: 3515 - DNA, 16 bp, synthetic construct
  source 1..16: mol_type = other DNA
aagttatgattattga

SEQ ID NO: 3516 - DNA, 10 bp, synthetic construct
  source 1..10: mol_type = other DNA
gttggcatgt

SEQ ID NO: 3517 - DNA, 11 bp, synthetic construct
  source 1..11: mol_type = other DNA
gttggcatgtc

SEQ ID NO: 3518 - DNA, 12 bp, synthetic construct
  source 1..12: mol_type = other DNA
gttggcatgtca

SEQ ID NO: 3519 - DNA, 13 bp, synthetic construct
  source 1..13: mol_type = other DNA
gttggcatgtcaa

SEQ ID NO: 3520 - DNA, 14 bp, synthetic construct
  source 1..14: mol_type = other DNA
gttggcatgtcaat

SEQ ID NO: 3521 - DNA, 15 bp, synthetic construct
  source 1..15: mol_type = other DNA
gttggcatgtcaatg

SEQ ID NO: 3522 - DNA, 16 bp, synthetic construct
  source 1..16: mol_type = other DNA
gttggcatgtcaatga

SEQ ID NO: 3523 - DNA, 10 bp, synthetic construct
  source 1..10: mol_type = other DNA
tgttggcatg

SEQ ID NO: 3524 - DNA, 11 bp, synthetic construct
  source 1..11: mol_type = other DNA
tgttggcatgt

SEQ ID NO: 3525 - DNA, 12 bp, synthetic construct
  source 1..12: mol_type = other DNA
tgttggcatgtc

SEQ ID NO: 3526 - DNA, 13 bp, synthetic construct
  source 1..13: mol_type = other DNA
tgttggcatgtca

SEQ ID NO: 3527 - DNA, 14 bp, synthetic construct
  source 1..14: mol_type = other DNA
tgttggcatgtcaa

SEQ ID NO: 3528 - DNA, 15 bp, synthetic construct
  source 1..15: mol_type = other DNA
tgttggcatgtcaat

SEQ ID NO: 3529 - DNA, 16 bp, synthetic construct
  source 1..16: mol_type = other DNA
tgttggcatgtcaatg

SEQ ID NO: 3530 - DNA, 10 bp, synthetic construct
  source 1..10: mol_type = other DNA
catacaagaa

SEQ ID NO: 3531 - DNA, 11 bp, synthetic construct
  source 1..11: mol_type = other DNA
catacaagaat

SEQ ID NO: 3532 - DNA, 12 bp, synthetic construct
  source 1..12: mol_type = other DNA
catacaagaatg

SEQ ID NO: 3533 - DNA, 13 bp, synthetic construct
  source 1..13: mol_type = other DNA
catacaagaatgg

SEQ ID NO: 3534 - DNA, 14 bp, synthetic construct
  source 1..14: mol_type = other DNA
catacaagaatggc

SEQ ID NO: 3535 - DNA, 15 bp, synthetic construct
  source 1..15: mol_type = other DNA
catacaagaatggcc

SEQ ID NO: 3536 - DNA, 16 bp, synthetic construct
  source 1..16: mol_type = other DNA
catacaagaatggcca

SEQ ID NO: 3537 - DNA, 10 bp, synthetic construct
  source 1..10: mol_type = other DNA
ccatacaaga

SEQ ID NO: 3538 - DNA, 11 bp, synthetic construct
  source 1..11: mol_type = other DNA
ccatacaagaa

SEQ ID NO: 3539 - DNA, 12 bp, synthetic construct
  source 1..12: mol_type = other DNA
ccatacaagaat

SEQ ID NO: 3540 - DNA, 13 bp, synthetic construct
  source 1..13: mol_type = other DNA
ccatacaagaatg

SEQ ID NO: 3541 - DNA, 14 bp, synthetic construct
  source 1..14: mol_type = other DNA
ccatacaagaatgg

SEQ ID NO: 3542 - DNA, 15 bp, synthetic construct
  source 1..15: mol_type = other DNA
ccatacaagaatggc

SEQ ID NO: 3543 - DNA, 16 bp, synthetic construct
  source 1..16: mol_type = other DNA
ccatacaagaatggcc

SEQ ID NO: 3544 - DNA, 10 bp, synthetic construct
  source 1..10: mol_type = other DNA
ttggcatgtc

SEQ ID NO: 3545 - DNA, 11 bp, synthetic construct
  source 1..11: mol_type = other DNA
ttggcatgtca

SEQ ID NO: 3546 - DNA, 12 bp, synthetic construct
  source 1..12: mol_type = other DNA
ttggcatgtcaa

SEQ ID NO: 3547 - DNA, 13 bp, synthetic construct
  source 1..13: mol_type = other DNA
ttggcatgtcaat

SEQ ID NO: 3548 - DNA, 14 bp, synthetic construct
  source 1..14: mol_type = other DNA
ttggcatgtcaatg

SEQ ID NO: 3549 - DNA, 15 bp, synthetic construct
  source 1..15: mol_type = other DNA
ttggcatgtcaatga

SEQ ID NO: 3550 - DNA, 16 bp, synthetic construct
  source 1..16: mol_type = other DNA
ttggcatgtcaatgaa

SEQ ID NO: 3551 - DNA, 10 bp, synthetic construct
  source 1..10: mol_type = other DNA
atggccaact

SEQ ID NO: 3552 - DNA, 11 bp, synthetic construct
  source 1..11: mol_type = other DNA
atggccaactc

SEQ ID NO: 3553 - DNA, 12 bp, synthetic construct
  source 1..12: mol_type = other DNA
atggccaactct

SEQ ID NO: 3554 - DNA, 13 bp, synthetic construct
  source 1..13: mol_type = other DNA
atggccaactctc

SEQ ID NO: 3555 - DNA, 14 bp, synthetic construct
  source 1..14: mol_type = other DNA
atggccaactctcg

SEQ ID NO: 3556 - DNA, 15 bp, synthetic construct
  source 1..15: mol_type = other DNA
atggccaactctcga

SEQ ID NO: 3557 - DNA, 16 bp, synthetic construct
  source 1..16: mol_type = other DNA
atggccaactctcgaa

SEQ ID NO: 3558 - DNA, 10 bp, synthetic construct
  source 1..10: mol_type = other DNA
tcgatggtgt

SEQ ID NO: 3559 - DNA, 11 bp, synthetic construct
  source 1..11: mol_type = other DNA
tcgatggtgtg

SEQ ID NO: 3560 - DNA, 12 bp, synthetic construct
  source 1..12: mol_type = other DNA
tcgatggtgtgt

SEQ ID NO: 3561 - DNA, 13 bp, synthetic construct
  source 1..13: mol_type = other DNA
tcgatggtgtgtc

SEQ ID NO: 3562 - DNA, 14 bp, synthetic construct
  source 1..14: mol_type = other DNA
tcgatggtgtgtct

SEQ ID NO: 3563 - DNA, 15 bp, synthetic construct
  source 1..15: mol_type = other DNA
tcgatggtgtgtctt

SEQ ID NO: 3564 - DNA, 16 bp, synthetic construct
  source 1..16: mol_type = other DNA
tcgatggtgtgtcttg

SEQ ID NO: 3565 - DNA, 10 bp, synthetic construct
  source 1..10: mol_type = other DNA
cgatggtgtg

SEQ ID NO: 3566 - DNA, 11 bp, synthetic construct
  source 1..11: mol_type = other DNA
cgatggtgtgt

SEQ ID NO: 3567 - DNA, 12 bp, synthetic construct
  source 1..12: mol_type = other DNA
cgatggtgtgtc

SEQ ID NO: 3568 - DNA, 13 bp, synthetic construct
  source 1..13: mol_type = other DNA
cgatggtgtgtct

SEQ ID NO: 3569 - DNA, 14 bp, synthetic construct
  source 1..14: mol_type = other DNA
cgatggtgtgtctt

SEQ ID NO: 3570 - DNA, 15 bp, synthetic construct
  source 1..15: mol_type = other DNA
cgatggtgtgtcttg

SEQ ID NO: 3571 - DNA, 16 bp, synthetic construct
  source 1..16: mol_type = other DNA
cgatggtgtgtcttgg

SEQ ID NO: 3572 - DNA, 10 bp, synthetic construct
  source 1..10: mol_type = other DNA
cagttcttcc

SEQ ID NO: 3573 - DNA, 11 bp, synthetic construct
  source 1..11: mol_type = other DNA
cagttcttccc

SEQ ID NO: 3574 - DNA, 12 bp, synthetic construct
  source 1..12: mol_type = other DNA
cagttcttccca

SEQ ID NO: 3575 - DNA, 13 bp, synthetic construct
  source 1..13: mol_type = other DNA
cagttcttcccaa

SEQ ID NO: 3576 - DNA, 14 bp, synthetic construct
  source 1..14: mol_type = other DNA
cagttcttcccaag

SEQ ID NO: 3577 - DNA, 15 bp, synthetic construct
  source 1..15: mol_type = other DNA
cagttcttcccaaga

SEQ ID NO: 3578 - DNA, 16 bp, synthetic construct
  source 1..16: mol_type = other DNA
cagttcttcccaagag

SEQ ID NO: 3579 - DNA, 10 bp, synthetic construct
  source 1..10: mol_type = other DNA
tccagttctt

SEQ ID NO: 3580 - DNA, 11 bp, synthetic construct
  source 1..11: mol_type = other DNA
tccagttcttc

SEQ ID NO: 3581 - DNA, 12 bp, synthetic construct
  source 1..12: mol_type = other DNA
tccagttcttcc

SEQ ID NO: 3582 - DNA, 13 bp, synthetic construct
  source 1..13: mol_type = other DNA
tccagttcttccc

SEQ ID NO: 3583 - DNA, 14 bp, synthetic construct
  source 1..14: mol_type = other DNA
tccagttcttccca

SEQ ID NO: 3584 - DNA, 15 bp, synthetic construct
  source 1..15: mol_type = other DNA
tccagttcttcccaa

SEQ ID NO: 3585 - DNA, 16 bp, synthetic construct
  source 1..16: mol_type = other DNA
tccagttcttcccaag

SEQ ID NO: 3586 - DNA, 10 bp, synthetic construct
  source 1..10: mol_type = other DNA
aaagctgata

SEQ ID NO: 3587 - DNA, 11 bp, synthetic construct
  source 1..11: mol_type = other DNA
aaagctgataa

SEQ ID NO: 3588 - DNA, 12 bp, synthetic construct
  source 1..12: mol_type = other DNA
aaagctgataac

SEQ ID NO: 3589 - DNA, 13 bp, synthetic construct
  source 1..13: mol_type = other DNA
aaagctgataaca

SEQ ID NO: 3590 - DNA, 14 bp, synthetic construct
  source 1..14: mol_type = other DNA
aaagctgataacaa

SEQ ID NO: 3591 - DNA, 15 bp, synthetic construct
  source 1..15: mol_type = other DNA
aaagctgataacaaa

SEQ ID NO: 3592 - DNA, 16 bp, synthetic construct
  source 1..16: mol_type = other DNA
aaagctgataacaaag

SEQ ID NO: 3593 - DNA, 10 bp, synthetic construct
  source 1..10: mol_type = other DNA
cctgatccag

SEQ ID NO: 3594 - DNA, 11 bp, synthetic construct
  source 1..11: mol_type = other DNA
cctgatccagt

SEQ ID NO: 3595 - DNA, 12 bp, synthetic construct
  source 1..12: mol_type = other DNA
cctgatccagtt

SEQ ID NO: 3596 - DNA, 13 bp, synthetic construct
  source 1..13: mol_type = other DNA
cctgatccagttc

SEQ ID NO: 3597 - DNA, 14 bp, synthetic construct
  source 1..14: mol_type = other DNA
cctgatccagttct

SEQ ID NO: 3598 - DNA, 15 bp, synthetic construct
  source 1..15: mol_type = other DNA
cctgatccagttctt

SEQ ID NO: 3599 - DNA, 16 bp, synthetic construct
  source 1..16: mol_type = other DNA
cctgatccagttcttc

SEQ ID NO: 3600 - DNA, 10 bp, synthetic construct
  source 1..10: mol_type = other DNA
ccctgatcca

SEQ ID NO: 3601 - DNA, 11 bp, synthetic construct
  source 1..11: mol_type = other DNA
ccctgatccag

SEQ ID NO: 3602 - DNA, 12 bp, synthetic construct
  source 1..12: mol_type = other DNA
ccctgatccagt

SEQ ID NO: 3603 - DNA, 13 bp, synthetic construct
  source 1..13: mol_type = other DNA
ccctgatccagtt

SEQ ID NO: 3604 - DNA, 14 bp, synthetic construct
  source 1..14: mol_type = other DNA
ccctgatccagttc

SEQ ID NO: 3605 - DNA, 15 bp, synthetic construct
  source 1..15: mol_type = other DNA
ccctgatccagttct

SEQ ID NO: 3606 - DNA, 16 bp, synthetic construct
  source 1..16: mol_type = other DNA
ccctgatccagttctt

SEQ ID NO: 3607 - DNA, 10 bp, synthetic construct
  source 1..10: mol_type = other DNA
gtgtgtcttg

SEQ ID NO: 3608 - DNA, 11 bp, synthetic construct
  source 1..11: mol_type = other DNA
gtgtgtcttgg

SEQ ID NO: 3609 - DNA, 12 bp, synthetic construct
  source 1..12: mol_type = other DNA
gtgtgtcttggg

SEQ ID NO: 3610 - DNA, 13 bp, synthetic construct
  source 1..13: mol_type = other DNA
gtgtgtcttggga

SEQ ID NO: 3611 - DNA, 14 bp, synthetic construct
  source 1..14: mol_type = other DNA
gtgtgtcttgggat

SEQ ID NO: 3612 - DNA, 15 bp, synthetic construct
  source 1..15: mol_type = other DNA
gtgtgtcttgggatt

SEQ ID NO: 3613 - DNA, 16 bp, synthetic construct
  source 1..16: mol_type = other DNA
gtgtgtcttgggattc

SEQ ID NO: 3614 - DNA, 10 bp, synthetic construct
  source 1..10: mol_type = other DNA
aaggagaaat

SEQ ID NO: 3615 - DNA, 11 bp, synthetic construct
  source 1..11: mol_type = other DNA
aaggagaaatc

SEQ ID NO: 3616 - DNA, 12 bp, synthetic construct
  source 1..12: mol_type = other DNA
aaggagaaatcc

SEQ ID NO: 3617 - DNA, 13 bp, synthetic construct
  source 1..13: mol_type = other DNA
aaggagaaatcca

SEQ ID NO: 3618 - DNA, 14 bp, synthetic construct
  source 1..14: mol_type = other DNA
aaggagaaatccag

SEQ ID NO: 3619 - DNA, 15 bp, synthetic construct
  source 1..15: mol_type = other DNA
aaggagaaatccaga

SEQ ID NO: 3620 - DNA, 16 bp, synthetic construct
  source 1..16: mol_type = other DNA
aaggagaaatccagat

SEQ ID NO: 3621 - DNA, 10 bp, synthetic construct
  source 1..10: mol_type = other DNA
ctgatccagt

SEQ ID NO: 3622 - DNA, 11 bp, synthetic construct
  source 1..11: mol_type = other DNA
ctgatccagtt

SEQ ID NO: 3623 - DNA, 12 bp, synthetic construct
  source 1..12: mol_type = other DNA
ctgatccagttc

SEQ ID NO: 3624 - DNA, 13 bp, synthetic construct
  source 1..13: mol_type = other DNA
ctgatccagttct

SEQ ID NO: 3625 - DNA, 14 bp, synthetic construct
  source 1..14: mol_type = other DNA
ctgatccagttctt

SEQ ID NO: 3626 - DNA, 15 bp, synthetic construct
  source 1..15: mol_type = other DNA
ctgatccagttcttc

SEQ ID NO: 3627 - DNA, 16 bp, synthetic construct
  source 1..16: mol_type = other DNA
ctgatccagttcttcc

SEQ ID NO: 3628 - DNA, 10 bp, synthetic construct
  source 1..10: mol_type = other DNA
actgaaggag

SEQ ID NO: 3629 - DNA, 11 bp, synthetic construct
  source 1..11: mol_type = other DNA
actgaaggaga

SEQ ID NO: 3630 - DNA, 12 bp, synthetic construct
  source 1..12: mol_type = other DNA
actgaaggagaa

SEQ ID NO: 3631 - DNA, 13 bp, synthetic construct
  source 1..13: mol_type = other DNA
actgaaggagaaa

SEQ ID NO: 3632 - DNA, 14 bp, synthetic construct
  source 1..14: mol_type = other DNA
actgaaggagaaat

SEQ ID NO: 3633 - DNA, 15 bp, synthetic construct
  source 1..15: mol_type = other DNA
actgaaggagaaatc

SEQ ID NO: 3634 - DNA, 16 bp, synthetic construct
  source 1..16: mol_type = other DNA
actgaaggagaaatcc

SEQ ID NO: 3635 - DNA, 10 bp, synthetic construct
  source 1..10: mol_type = other DNA
cactgaagga

SEQ ID NO: 3636 - DNA, 11 bp, synthetic construct
  source 1..11: mol_type = other DNA
cactgaaggag

SEQ ID NO: 3637 - DNA, 12 bp, synthetic construct
  source 1..12: mol_type = other DNA
cactgaaggaga

SEQ ID NO: 3638 - DNA, 13 bp, synthetic construct
  source 1..13: mol_type = other DNA
cactgaaggagaa

SEQ ID NO: 3639 - DNA, 14 bp, synthetic construct
  source 1..14: mol_type = other DNA
cactgaaggagaaa

SEQ ID NO: 3640 - DNA, 15 bp, synthetic construct
  source 1..15: mol_type = other DNA
cactgaaggagaaat

SEQ ID NO: 3641 - DNA, 16 bp, synthetic construct
  source 1..16: mol_type = other DNA
cactgaaggagaaatc

SEQ ID NO: 3642 - DNA, 10 bp, synthetic construct
  source 1..10: mol_type = other DNA
tgatccagtt

SEQ ID NO: 3643 - DNA, 11 bp, synthetic construct
  source 1..11: mol_type = other DNA
tgatccagttc

SEQ ID NO: 3644 - DNA, 12 bp, synthetic construct
  source 1..12: mol_type = other DNA
tgatccagttct

SEQ ID NO: 3645 - DNA, 13 bp, synthetic construct
  source 1..13: mol_type = other DNA
tgatccagttctt

SEQ ID NO: 3646 - DNA, 14 bp, synthetic construct
  source 1..14: mol_type = other DNA
tgatccagttcttc

SEQ ID NO: 3647 - DNA, 15 bp, synthetic construct
  source 1..15: mol_type = other DNA
tgatccagttcttcc

SEQ ID NO: 3648 - DNA, 16 bp, synthetic construct
  source 1..16: mol_type = other DNA
tgatccagttcttccc

SEQ ID NO: 3649 - DNA, 10 bp, synthetic construct
  source 1..10: mol_type = other DNA
acaaagtact

SEQ ID NO: 3650 - DNA, 11 bp, synthetic construct
  source 1..11: mol_type = other DNA
acaaagtactc

SEQ ID NO: 3651 - DNA, 12 bp, synthetic construct
  source 1..12: mol_type = other DNA
acaaagtactct

SEQ ID NO: 3652 - DNA, 13 bp, synthetic construct
  source 1..13: mol_type = other DNA
acaaagtactctt

SEQ ID NO: 3653 - DNA, 14 bp, synthetic construct
  source 1..14: mol_type = other DNA
acaaagtactcttc

SEQ ID NO: 3654 - DNA, 15 bp, synthetic construct
  source 1..15: mol_type = other DNA
acaaagtactcttcc

SEQ ID NO: 3655 - DNA, 16 bp, synthetic construct
  source 1..16: mol_type = other DNA
acaaagtactcttccc

SEQ ID NO: 3656 - DNA, 10 bp, synthetic construct
  source 1..10: mol_type = other DNA
aacaaagtac

SEQ ID NO: 3657 - DNA, 11 bp, synthetic construct
  source 1..11: mol_type = other DNA
aacaaagtact

SEQ ID NO: 3658 - DNA, 12 bp, synthetic construct
  source 1..12: mol_type = other DNA
aacaaagtactc

SEQ ID NO: 3659 - DNA, 13 bp, synthetic construct
  source 1..13: mol_type = other DNA
aacaaagtactct

SEQ ID NO: 3660 - DNA, 14 bp, synthetic construct
  source 1..14: mol_type = other DNA
aacaaagtactctt

SEQ ID NO: 3661 - DNA, 15 bp, synthetic construct
  source 1..15: mol_type = other DNA
aacaaagtactcttc

SEQ ID NO: 3662 - DNA, 16 bp, synthetic construct
  source 1..16: mol_type = other DNA
aacaaagtactcttcc

SEQ ID NO: 3663 - DNA, 10 bp, synthetic construct
  source 1..10: mol_type = other DNA
tcttcccaag

SEQ ID NO: 3664 - DNA, 11 bp, synthetic construct
  source 1..11: mol_type = other DNA
tcttcccaaga

SEQ ID NO: 3665 - DNA, 12 bp, synthetic construct
  source 1..12: mol_type = other DNA
tcttcccaagag

SEQ ID NO: 3666 - DNA, 13 bp, synthetic construct
  source 1..13: mol_type = other DNA
tcttcccaagagg

SEQ ID NO: 3667 - DNA, 14 bp, synthetic construct
  source 1..14: mol_type = other DNA
tcttcccaagaggc

SEQ ID NO: 3668 - DNA, 15 bp, synthetic construct
  source 1..15: mol_type = other DNA
tcttcccaagaggcc

SEQ ID NO: 3669 - DNA, 16 bp, synthetic construct
  source 1..16: mol_type = other DNA
tcttcccaagaggccc

SEQ ID NO: 3670 - DNA, 10 bp, synthetic construct
  source 1..10: mol_type = other DNA
gatggtgtgt

SEQ ID NO: 3671 - DNA, 11 bp, synthetic construct
  source 1..11: mol_type = other DNA
gatggtgtgtc

SEQ ID NO: 3672 - DNA, 12 bp, synthetic construct
  source 1..12: mol_type = other DNA
gatggtgtgtct

SEQ ID NO: 3673 - DNA, 13 bp, synthetic construct
  source 1..13: mol_type = other DNA
gatggtgtgtctt

SEQ ID NO: 3674 - DNA, 14 bp, synthetic construct
  source 1..14: mol_type = other DNA
gatggtgtgtcttg

SEQ ID NO: 3675 - DNA, 15 bp, synthetic construct
  source 1..15: mol_type = other DNA
gatggtgtgtcttgg

SEQ ID NO: 3676 - DNA, 16 bp, synthetic construct
  source 1..16: mol_type = other DNA
gatggtgtgtcttggg

SEQ ID NO: 3677 - DNA, 10 bp, synthetic construct
  source 1..10: mol_type = other DNA
gagaaatcca

SEQ ID NO: 3678 - DNA, 11 bp, synthetic construct
  source 1..11: mol_type = other DNA
gagaaatccag

SEQ ID NO: 3679 - DNA, 12 bp, synthetic construct
  source 1..12: mol_type = other DNA
gagaaatccaga

SEQ ID NO: 3680 - DNA, 13 bp, synthetic construct
  source 1..13: mol_type = other DNA
gagaaatccagat

SEQ ID NO: 3681 - DNA, 14 bp, synthetic construct
  source 1..14: mol_type = other DNA
gagaaatccagatc

SEQ ID NO: 3682 - DNA, 15 bp, synthetic construct
  source 1..15: mol_type = other DNA
gagaaatccagatcg

SEQ ID NO: 3683 - DNA, 16 bp, synthetic construct
  source 1..16: mol_type = other DNA
gagaaatccagatcga

SEQ ID NO: 3684 - DNA, 10 bp, synthetic construct
  source 1..10: mol_type = other DNA
ggagaaatcc

SEQ ID NO: 3685 - DNA, 11 bp, synthetic construct
  source 1..11: mol_type = other DNA
ggagaaatcca

SEQ ID NO: 3686 - DNA, 12 bp, synthetic construct
  source 1..12: mol_type = other DNA
ggagaaatccag

SEQ ID NO: 3687 - DNA, 13 bp, synthetic construct
  source 1..13: mol_type = other DNA
ggagaaatccaga

SEQ ID NO: 3688 - DNA, 14 bp, synthetic construct
  source 1..14: mol_type = other DNA
ggagaaatccagat

SEQ ID NO: 3689 - DNA, 15 bp, synthetic construct
  source 1..15: mol_type = other DNA
ggagaaatccagatc

SEQ ID NO: 3690 - DNA, 16 bp, synthetic construct
  source 1..16: mol_type = other DNA
ggagaaatccagatcg

SEQ ID NO: 3691 - DNA, 10 bp, synthetic construct
  source 1..10: mol_type = other DNA
ccagttcttc

SEQ ID NO: 3692 - DNA, 11 bp, synthetic construct
  source 1..11: mol_type = other DNA
ccagttcttcc

SEQ ID NO: 3693 - DNA, 12 bp, synthetic construct
  source 1..12: mol_type = other DNA
ccagttcttccc

SEQ ID NO: 3694 - DNA, 13 bp, synthetic construct
  source 1..13: mol_type = other DNA
ccagttcttccca

SEQ ID NO: 3695 - DNA, 14 bp, synthetic construct
  source 1..14: mol_type = other DNA
ccagttcttcccaa

SEQ ID NO: 3696 - DNA, 15 bp, synthetic construct
  source 1..15: mol_type = other DNA
ccagttcttcccaag

SEQ ID NO: 3697 - DNA, 16 bp, synthetic construct
  source 1..16: mol_type = other DNA
ccagttcttcccaaga

SEQ ID NO: 3698 - DNA, 10 bp, synthetic construct
  source 1..10: mol_type = other DNA
tactcttccc

SEQ ID NO: 3699 - DNA, 11 bp, synthetic construct
  source 1..11: mol_type = other DNA
tactcttccct

SEQ ID NO: 3700 - DNA, 12 bp, synthetic construct
  source 1..12: mol_type = other DNA
tactcttccctg

SEQ ID NO: 3701 - DNA, 13 bp, synthetic construct
  source 1..13: mol_type = other DNA
tactcttccctga

SEQ ID NO: 3702 - DNA, 14 bp, synthetic construct
  source 1..14: mol_type = other DNA
tactcttccctgat

SEQ ID NO: 3703 - DNA, 15 bp, synthetic construct
  source 1..15: mol_type = other DNA
tactcttccctgatc

SEQ ID NO: 3704 - DNA, 16 bp, synthetic construct
  source 1..16: mol_type = other DNA
tactcttccctgatcc

SEQ ID NO: 3705 - DNA, 10 bp, synthetic construct
  source 1..10: mol_type = other DNA
cttcccaaga

SEQ ID NO: 3706 - DNA, 11 bp, synthetic construct
  source 1..11: mol_type = other DNA
cttcccaagag

SEQ ID NO: 3707 - DNA, 12 bp, synthetic construct
  source 1..12: mol_type = other DNA
cttcccaagagg

SEQ ID NO: 3708 - DNA, 13 bp, synthetic construct
  source 1..13: mol_type = other DNA
cttcccaagaggc

SEQ ID NO: 3709 - DNA, 14 bp, synthetic construct
  source 1..14: mol_type = other DNA
cttcccaagaggcc

SEQ ID NO: 3710 - DNA, 15 bp, synthetic construct
  source 1..15: mol_type = other DNA
cttcccaagaggccc

SEQ ID NO: 3711 - DNA, 16 bp, synthetic construct
  source 1..16: mol_type = other DNA
cttcccaagaggccca

SEQ ID NO: 3712 - DNA, 10 bp, synthetic construct
  source 1..10: mol_type = other DNA
atccagttct

SEQ ID NO: 3713 - DNA, 11 bp, synthetic construct
  source 1..11: mol_type = other DNA
atccagttctt

SEQ ID NO: 3714 - DNA, 12 bp, synthetic construct
  source 1..12: mol_type = other DNA
atccagttcttc

SEQ ID NO: 3715 - DNA, 13 bp, synthetic construct
  source 1..13: mol_type = other DNA
atccagttcttcc

SEQ ID NO: 3716 - DNA, 14 bp, synthetic construct
  source 1..14: mol_type = other DNA
atccagttcttccc

SEQ ID NO: 3717 - DNA, 15 bp, synthetic construct
  source 1..15: mol_type = other DNA
atccagttcttccca

SEQ ID NO: 3718 - DNA, 16 bp, synthetic construct
  source 1..16: mol_type = other DNA
atccagttcttcccaa

SEQ ID NO: 3719 - DNA, 10 bp, synthetic construct
  source 1..10: mol_type = other DNA
aaaaagctga

SEQ ID NO: 3720 - DNA, 11 bp, synthetic construct
  source 1..11: mol_type = other DNA
aaaaagctgat

SEQ ID NO: 3721 - DNA, 12 bp, synthetic construct
  source 1..12: mol_type = other DNA
aaaaagctgata

SEQ ID NO: 3722 - DNA, 13 bp, synthetic construct
  source 1..13: mol_type = other DNA
aaaaagctgataa

SEQ ID NO: 3723 - DNA, 14 bp, synthetic construct
  source 1..14: mol_type = other DNA
aaaaagctgataac

SEQ ID NO: 3724 - DNA, 15 bp, synthetic construct
  source 1..15: mol_type = other DNA
aaaaagctgataaca

SEQ ID NO: 3725 - DNA, 16 bp, synthetic construct
  source 1..16: mol_type = other DNA
aaaaagctgataacaa

SEQ ID NO: 3726 - DNA, 10 bp, synthetic construct
  source 1..10: mol_type = other DNA
aacactgaag

SEQ ID NO: 3727 - DNA, 11 bp, synthetic construct
  source 1..11: mol_type = other DNA
aacactgaagg

SEQ ID NO: 3728 - DNA, 12 bp, synthetic construct
  source 1..12: mol_type = other DNA
aacactgaagga

SEQ ID NO: 3729 - DNA, 13 bp, synthetic construct
  source 1..13: mol_type = other DNA
aacactgaaggag

SEQ ID NO: 3730 - DNA, 14 bp, synthetic construct
  source 1..14: mol_type = other DNA
aacactgaaggaga

SEQ ID NO: 3731 - DNA, 15 bp, synthetic construct
  source 1..15: mol_type = other DNA
aacactgaaggagaa

SEQ ID NO: 3732 - DNA, 16 bp, synthetic construct
  source 1..16: mol_type = other DNA
aacactgaaggagaaa

SEQ ID NO: 3733 - DNA, 10 bp, synthetic construct
  source 1..10: mol_type = other DNA
gaacactgaa

SEQ ID NO: 3734 - DNA, 11 bp, synthetic construct
  source 1..11: mol_type = other DNA
gaacactgaag

SEQ ID NO: 3735 - DNA, 12 bp, synthetic construct
  source 1..12: mol_type = other DNA
gaacactgaagg

SEQ ID NO: 3736 - DNA, 13 bp, synthetic construct
  source 1..13: mol_type = other DNA
gaacactgaagga

SEQ ID NO: 3737 - DNA, 14 bp, synthetic construct
  source 1..14: mol_type = other DNA
gaacactgaaggag

SEQ ID NO: 3738 - DNA, 15 bp, synthetic construct
  source 1..15: mol_type = other DNA
gaacactgaaggaga

SEQ ID NO: 3739 - DNA, 16 bp, synthetic construct
  source 1..16: mol_type = other DNA
gaacactgaaggagaa

SEQ ID NO: 3740 - DNA, 10 bp, synthetic construct
  source 1..10: mol_type = other DNA
aaaagctgat

SEQ ID NO: 3741 - DNA, 11 bp, synthetic construct
  source 1..11: mol_type = other DNA
aaaagctgata

SEQ ID NO: 3742 - DNA, 12 bp, synthetic construct
  source 1..12: mol_type = other DNA
aaaagctgataa

SEQ ID NO: 3743 - DNA, 13 bp, synthetic construct
  source 1..13: mol_type = other DNA
aaaagctgataac

SEQ ID NO: 3744 - DNA, 14 bp, synthetic construct
  source 1..14: mol_type = other DNA
aaaagctgataaca

SEQ ID NO: 3745 - DNA, 15 bp, synthetic construct
  source 1..15: mol_type = other DNA
aaaagctgataacaa

SEQ ID NO: 3746 - DNA, 16 bp, synthetic construct
  source 1..16: mol_type = other DNA
aaaagctgataacaaa

SEQ ID NO: 3747 - DNA, 10 bp, synthetic construct
  source 1..10: mol_type = other DNA
gatctggatt

SEQ ID NO: 3748 - DNA, 11 bp, synthetic construct
  source 1..11: mol_type = other DNA
gatctggattt

SEQ ID NO: 3749 - DNA, 12 bp, synthetic construct
  source 1..12: mol_type = other DNA
gatctggatttc

SEQ ID NO: 3750 - DNA, 13 bp, synthetic construct
  source 1..13: mol_type = other DNA
gatctggatttct

SEQ ID NO: 3751 - DNA, 14 bp, synthetic construct
  source 1..14: mol_type = other DNA
gatctggatttctc

SEQ ID NO: 3752 - DNA, 15 bp, synthetic construct
  source 1..15: mol_type = other DNA
gatctggatttctcc

SEQ ID NO: 3753 - DNA, 16 bp, synthetic construct
  source 1..16: mol_type = other DNA
gatctggatttctcct

SEQ ID NO: 3754 - DNA, 10 bp, synthetic construct
  source 1..10: mol_type = other DNA
gtgagcaaaa

SEQ ID NO: 3755 - DNA, 11 bp, synthetic construct
  source 1..11: mol_type = other DNA
gtgagcaaaag

SEQ ID NO: 3756 - DNA, 12 bp, synthetic construct
  source 1..12: mol_type = other DNA
gtgagcaaaagg

SEQ ID NO: 3757 - DNA, 13 bp, synthetic construct
  source 1..13: mol_type = other DNA
gtgagcaaaagga

SEQ ID NO: 3758 - DNA, 14 bp, synthetic construct
  source 1..14: mol_type = other DNA
gtgagcaaaaggac

SEQ ID NO: 3759 - DNA, 15 bp, synthetic construct
  source 1..15: mol_type = other DNA
gtgagcaaaaggact

SEQ ID NO: 3760 - DNA, 16 bp, synthetic construct
  source 1..16: mol_type = other DNA
gtgagcaaaaggactt

SEQ ID NO: 3761 - DNA, 10 bp, synthetic construct
  source 1..10: mol_type = other DNA
ggtgagcaaa

SEQ ID NO: 3762 - DNA, 11 bp, synthetic construct
  source 1..11: mol_type = other DNA
ggtgagcaaaa

SEQ ID NO: 3763 - DNA, 12 bp, synthetic construct
  source 1..12: mol_type = other DNA
ggtgagcaaaag

SEQ ID NO: 3764 - DNA, 13 bp, synthetic construct
  source 1..13: mol_type = other DNA
ggtgagcaaaagg

SEQ ID NO: 3765 - DNA, 14 bp, synthetic construct
  source 1..14: mol_type = other DNA
ggtgagcaaaagga

SEQ ID NO: 3766 - DNA, 15 bp, synthetic construct
  source 1..15: mol_type = other DNA
ggtgagcaaaaggac

SEQ ID NO: 3767 - DNA, 16 bp, synthetic construct
  source 1..16: mol_type = other DNA
ggtgagcaaaaggact

SEQ ID NO: 3768 - DNA, 10 bp, synthetic construct
  source 1..10: mol_type = other DNA
ctgttgcaaa

SEQ ID NO: 3769 - DNA, 11 bp, synthetic construct
  source 1..11: mol_type = other DNA
ctgttgcaaag

SEQ ID NO: 3770 - DNA, 12 bp, synthetic construct
  source 1..12: mol_type = other DNA
ctgttgcaaagt

SEQ ID NO: 3771 - DNA, 13 bp, synthetic construct
  source 1..13: mol_type = other DNA
ctgttgcaaagtt

SEQ ID NO: 3772 - DNA, 14 bp, synthetic construct
  source 1..14: mol_type = other DNA
ctgttgcaaagtta

SEQ ID NO: 3773 - DNA, 15 bp, synthetic construct
  source 1..15: mol_type = other DNA
ctgttgcaaagttat

SEQ ID NO: 3774 - DNA, 16 bp, synthetic construct
  source 1..16: mol_type = other DNA
ctgttgcaaagttatt

SEQ ID NO: 3775 - DNA, 10 bp, synthetic construct
  source 1..10: mol_type = other DNA
gagtgatacc

SEQ ID NO: 3776 - DNA, 11 bp, synthetic construct
  source 1..11: mol_type = other DNA
gagtgatacca

SEQ ID NO: 3777 - DNA, 12 bp, synthetic construct
  source 1..12: mol_type = other DNA
gagtgataccac

SEQ ID NO: 3778 - DNA, 13 bp, synthetic construct
  source 1..13: mol_type = other DNA
gagtgataccaca

SEQ ID NO: 3779 - DNA, 14 bp, synthetic construct
  source 1..14: mol_type = other DNA
gagtgataccacag

SEQ ID NO: 3780 - DNA, 15 bp, synthetic construct
  source 1..15: mol_type = other DNA
gagtgataccacagg

SEQ ID NO: 3781 - DNA, 16 bp, synthetic construct
  source 1..16: mol_type = other DNA
gagtgataccacaggt

SEQ ID NO: 3782 - DNA, 10 bp, synthetic construct
  source 1..10: mol_type = other DNA
ggagtgatac

SEQ ID NO: 3783 - DNA, 11 bp, synthetic construct
  source 1..11: mol_type = other DNA
ggagtgatacc

SEQ ID NO: 3784 - DNA, 12 bp, synthetic construct
  source 1..12: mol_type = other DNA
ggagtgatacca

SEQ ID NO: 3785 - DNA, 13 bp, synthetic construct
  source 1..13: mol_type = other DNA
ggagtgataccac

SEQ ID NO: 3786 - DNA, 14 bp, synthetic construct
  source 1..14: mol_type = other DNA
ggagtgataccaca

SEQ ID NO: 3787 - DNA, 15 bp, synthetic construct
  source 1..15: mol_type = other DNA
ggagtgataccacag

SEQ ID NO: 3788 - DNA, 16 bp, synthetic construct
  source 1..16: mol_type = other DNA
ggagtgataccacagg

SEQ ID NO: 3789 - DNA, 10 bp, synthetic construct
  source 1..10: mol_type = other DNA
catcgatctg

SEQ ID NO: 3790 - DNA, 11 bp, synthetic construct
  source 1..11: mol_type = other DNA
catcgatctgg

SEQ ID NO: 3791 - DNA, 12 bp, synthetic construct
  source 1..12: mol_type = other DNA
catcgatctgga

SEQ ID NO: 3792 - DNA, 13 bp, synthetic construct
  source 1..13: mol_type = other DNA
catcgatctggat

SEQ ID NO: 3793 - DNA, 14 bp, synthetic construct
  source 1..14: mol_type = other DNA
catcgatctggatt

SEQ ID NO: 3794 - DNA, 15 bp, synthetic construct
  source 1..15: mol_type = other DNA
catcgatctggattt

SEQ ID NO: 3795 - DNA, 16 bp, synthetic construct
  source 1..16: mol_type = other DNA
catcgatctggatttc

SEQ ID NO: 3796 - DNA, 10 bp, synthetic construct
  source 1..10: mol_type = other DNA
gacacaccat

SEQ ID NO: 3797 - DNA, 11 bp, synthetic construct
  source 1..11: mol_type = other DNA
gacacaccatc

SEQ ID NO: 3798 - DNA, 12 bp, synthetic construct
  source 1..12: mol_type = other DNA
gacacaccatcg

SEQ ID NO: 3799 - DNA, 13 bp, synthetic construct
  source 1..13: mol_type = other DNA
gacacaccatcga

SEQ ID NO: 3800 - DNA, 14 bp, synthetic construct
  source 1..14: mol_type = other DNA
gacacaccatcgat

SEQ ID NO: 3801 - DNA, 15 bp, synthetic construct
  source 1..15: mol_type = other DNA
gacacaccatcgatc

SEQ ID NO: 3802 - DNA, 16 bp, synthetic construct
  source 1..16: mol_type = other DNA
gacacaccatcgatct

SEQ ID NO: 3803 - DNA, 10 bp, synthetic construct
  source 1..10: mol_type = other DNA
actgttgcaa

SEQ ID NO: 3804 - DNA, 11 bp, synthetic construct
  source 1..11: mol_type = other DNA
actgttgcaaa

SEQ ID NO: 3805 - DNA, 12 bp, synthetic construct
  source 1..12: mol_type = other DNA
actgttgcaaag

SEQ ID NO: 3806 - DNA, 13 bp, synthetic construct
  source 1..13: mol_type = other DNA
actgttgcaaagt

SEQ ID NO: 3807 - DNA, 14 bp, synthetic construct
  source 1..14: mol_type = other DNA
actgttgcaaagtt

SEQ ID NO: 3808 - DNA, 15 bp, synthetic construct
  source 1..15: mol_type = other DNA
actgttgcaaagtta

SEQ ID NO: 3809 - DNA, 16 bp, synthetic construct
  source 1..16: mol_type = other DNA
actgttgcaaagttat

SEQ ID NO: 3810 - DNA, 10 bp, synthetic construct
  source 1..10: mol_type = other DNA
acaccatcga

SEQ ID NO: 3811 - DNA, 11 bp, synthetic construct
  source 1..11: mol_type = other DNA
acaccatcgat

SEQ ID NO: 3812 - DNA, 12 bp, synthetic construct
  source 1..12: mol_type = other DNA
acaccatcgatc

SEQ ID NO: 3813 - DNA, 13 bp, synthetic construct
  source 1..13: mol_type = other DNA
acaccatcgatct

SEQ ID NO: 3814 - DNA, 14 bp, synthetic construct
  source 1..14: mol_type = other DNA
acaccatcgatctg

SEQ ID NO: 3815 - DNA, 15 bp, synthetic construct
  source 1..15: mol_type = other DNA
acaccatcgatctgg

SEQ ID NO: 3816 - DNA, 16 bp, synthetic construct
  source 1..16: mol_type = other DNA
acaccatcgatctgga

SEQ ID NO: 3817 - DNA, 10 bp, synthetic construct
  source 1..10: mol_type = other DNA
tgttgcaaag

SEQ ID NO: 3818 - DNA, 11 bp, synthetic construct
  source 1..11: mol_type = other DNA
tgttgcaaagt

SEQ ID NO: 3819 - DNA, 12 bp, synthetic construct
  source 1..12: mol_type = other DNA
tgttgcaaagtt

SEQ ID NO: 3820 - DNA, 13 bp, synthetic construct
  source 1..13: mol_type = other DNA
tgttgcaaagtta

SEQ ID NO: 3821 - DNA, 14 bp, synthetic construct
  source 1..14: mol_type = other DNA
tgttgcaaagttat

SEQ ID NO: 3822 - DNA, 15 bp, synthetic construct
  source 1..15: mol_type = other DNA
tgttgcaaagttatt

SEQ ID NO: 3823 - DNA, 16 bp, synthetic construct
  source 1..16: mol_type = other DNA
tgttgcaaagttattg

SEQ ID NO: 3824 - DNA, 10 bp, synthetic construct
  source 1..10: mol_type = other DNA
agtgatacca

SEQ ID NO: 3825 - DNA, 11 bp, synthetic construct
  source 1..11: mol_type = other DNA
agtgataccac

SEQ ID NO: 3826 - DNA, 12 bp, synthetic construct
  source 1..12: mol_type = other DNA
agtgataccaca

SEQ ID NO: 3827 - DNA, 13 bp, synthetic construct
  source 1..13: mol_type = other DNA
agtgataccacag

SEQ ID NO: 3828 - DNA, 14 bp, synthetic construct
  source 1..14: mol_type = other DNA
agtgataccacagg

SEQ ID NO: 3829 - DNA, 15 bp, synthetic construct
  source 1..15: mol_type = other DNA
agtgataccacaggt

SEQ ID NO: 3830 - DNA, 16 bp, synthetic construct
  source 1..16: mol_type = other DNA
agtgataccacaggtg

SEQ ID NO: 3831 - DNA, 10 bp, synthetic construct
  source 1..10: mol_type = other DNA
acacaccatc

SEQ ID NO: 3832 - DNA, 11 bp, synthetic construct
  source 1..11: mol_type = other DNA
acacaccatcg

SEQ ID NO: 3833 - DNA, 12 bp, synthetic construct
  source 1..12: mol_type = other DNA
acacaccatcga

SEQ ID NO: 3834 - DNA, 13 bp, synthetic construct
  source 1..13: mol_type = other DNA
acacaccatcgat

SEQ ID NO: 3835 - DNA, 14 bp, synthetic construct
  source 1..14: mol_type = other DNA
acacaccatcgatc

SEQ ID NO: 3836 - DNA, 15 bp, synthetic construct
  source 1..15: mol_type = other DNA
acacaccatcgatct

SEQ ID NO: 3837 - DNA, 16 bp, synthetic construct
  source 1..16: mol_type = other DNA
acacaccatcgatctg

SEQ ID NO: 3838 - DNA, 10 bp, synthetic construct
  source 1..10: mol_type = other DNA
cacaccatcg

SEQ ID NO: 3839 - DNA, 11 bp, synthetic construct
  source 1..11: mol_type = other DNA
cacaccatcga

SEQ ID NO: 3840 - DNA, 12 bp, synthetic construct
  source 1..12: mol_type = other DNA
cacaccatcgat

SEQ ID NO: 3841 - DNA, 13 bp, synthetic construct
  source 1..13: mol_type = other DNA
cacaccatcgatc

SEQ ID NO: 3842 - DNA, 14 bp, synthetic construct
  source 1..14: mol_type = other DNA
cacaccatcgatct

SEQ ID NO: 3843 - DNA, 15 bp, synthetic construct
  source 1..15: mol_type = other DNA
cacaccatcgatctg

SEQ ID NO: 3844 - DNA, 16 bp, synthetic construct
  source 1..16: mol_type = other DNA
cacaccatcgatctgg

SEQ ID NO: 3845 - DNA, 10 bp, synthetic construct
  source 1..10: mol_type = other DNA
tgagcaaaag

SEQ ID NO: 3846 - DNA, 11 bp, synthetic construct
  source 1..11: mol_type = other DNA
tgagcaaaagg

SEQ ID NO: 3847 - DNA, 12 bp, synthetic construct
  source 1..12: mol_type = other DNA
tgagcaaaagga

SEQ ID NO: 3848 - DNA, 13 bp, synthetic construct
  source 1..13: mol_type = other DNA
tgagcaaaaggac

SEQ ID NO: 3849 - DNA, 14 bp, synthetic construct
  source 1..14: mol_type = other DNA
tgagcaaaaggact

SEQ ID NO: 3850 - DNA, 15 bp, synthetic construct
  source 1..15: mol_type = other DNA
tgagcaaaaggactt

SEQ ID NO: 3851 - DNA, 16 bp, synthetic construct
  source 1..16: mol_type = other DNA
tgagcaaaaggactta

SEQ ID NO: 3852 - DNA, 10 bp, synthetic construct
  source 1..10: mol_type = other DNA
gagcaaaagg

SEQ ID NO: 3853 - DNA, 11 bp, synthetic construct
  source 1..11: mol_type = other DNA
gagcaaaagga

SEQ ID NO: 3854 - DNA, 12 bp, synthetic construct
  source 1..12: mol_type = other DNA
gagcaaaaggac

SEQ ID NO: 3855 - DNA, 13 bp, synthetic construct
  source 1..13: mol_type = other DNA
gagcaaaaggact

SEQ ID NO: 3856 - DNA, 14 bp, synthetic construct
  source 1..14: mol_type = other DNA
gagcaaaaggactt

SEQ ID NO: 3857 - DNA, 15 bp, synthetic construct
  source 1..15: mol_type = other DNA
gagcaaaaggactta

SEQ ID NO: 3858 - DNA, 16 bp, synthetic construct
  source 1..16: mol_type = other DNA
gagcaaaaggacttag

SEQ ID NO: 3859 - DNA, 10 bp, synthetic construct
  source 1..10: mol_type = other DNA
tcgatctgga

SEQ ID NO: 3860 - DNA, 11 bp, synthetic construct
  source 1..11: mol_type = other DNA
tcgatctggat

SEQ ID NO: 3861 - DNA, 12 bp, synthetic construct
  source 1..12: mol_type = other DNA
tcgatctggatt

SEQ ID NO: 3862 - DNA, 13 bp, synthetic construct
  source 1..13: mol_type = other DNA
tcgatctggattt

SEQ ID NO: 3863 - DNA, 14 bp, synthetic construct
  source 1..14: mol_type = other DNA
tcgatctggatttc

SEQ ID NO: 3864 - DNA, 15 bp, synthetic construct
  source 1..15: mol_type = other DNA
tcgatctggatttct

SEQ ID NO: 3865 - DNA, 16 bp, synthetic construct
  source 1..16: mol_type = other DNA
tcgatctggatttctc

SEQ ID NO: 3866 - DNA, 10 bp, synthetic construct
  source 1..10: mol_type = other DNA
caaagttatt

SEQ ID NO: 3867 - DNA, 11 bp, synthetic construct
  source 1..11: mol_type = other DNA
caaagttattg

SEQ ID NO: 3868 - DNA, 12 bp, synthetic construct
  source 1..12: mol_type = other DNA
caaagttattga

SEQ ID NO: 3869 - DNA, 13 bp, synthetic construct
  source 1..13: mol_type = other DNA
caaagttattgaa

SEQ ID NO: 3870 - DNA, 14 bp, synthetic construct
  source 1..14: mol_type = other DNA
caaagttattgaat

SEQ ID NO: 3871 - DNA, 15 bp, synthetic construct
  source 1..15: mol_type = other DNA
caaagttattgaatc

SEQ ID NO: 3872 - DNA, 16 bp, synthetic construct
  source 1..16: mol_type = other DNA
caaagttattgaatcc

SEQ ID NO: 3873 - DNA, 10 bp, synthetic construct
  source 1..10: mol_type = other DNA
gcaaagttat

SEQ ID NO: 3874 - DNA, 11 bp, synthetic construct
  source 1..11: mol_type = other DNA
gcaaagttatt

SEQ ID NO: 3875 - DNA, 12 bp, synthetic construct
  source 1..12: mol_type = other DNA
gcaaagttattg

SEQ ID NO: 3876 - DNA, 13 bp, synthetic construct
  source 1..13: mol_type = other DNA
gcaaagttattga

SEQ ID NO: 3877 - DNA, 14 bp, synthetic construct
  source 1..14: mol_type = other DNA
gcaaagttattgaa

SEQ ID NO: 3878 - DNA, 15 bp, synthetic construct
  source 1..15: mol_type = other DNA
gcaaagttattgaat

SEQ ID NO: 3879 - DNA, 16 bp, synthetic construct
  source 1..16: mol_type = other DNA
gcaaagttattgaatc

SEQ ID NO: 3880 - DNA, 10 bp, synthetic construct
  source 1..10: mol_type = other DNA
ttattgaatc

SEQ ID NO: 3881 - DNA, 11 bp, synthetic construct
  source 1..11: mol_type = other DNA
ttattgaatcc

SEQ ID NO: 3882 - DNA, 12 bp, synthetic construct
  source 1..12: mol_type = other DNA
ttattgaatccc

SEQ ID NO: 3883 - DNA, 13 bp, synthetic construct
  source 1..13: mol_type = other DNA
ttattgaatccca

SEQ ID NO: 3884 - DNA, 14 bp, synthetic construct
  source 1..14: mol_type = other DNA
ttattgaatcccaa

SEQ ID NO: 3885 - DNA, 15 bp, synthetic construct
  source 1..15: mol_type = other DNA
ttattgaatcccaag

SEQ ID NO: 3886 - DNA, 16 bp, synthetic construct
  source 1..16: mol_type = other DNA
ttattgaatcccaaga

SEQ ID NO: 3887 - DNA, 10 bp, synthetic construct
  source 1..10: mol_type = other DNA
ttgcaaagtt

SEQ ID NO: 3888 - DNA, 11 bp, synthetic construct
  source 1..11: mol_type = other DNA
ttgcaaagtta

SEQ ID NO: 3889 - DNA, 12 bp, synthetic construct
  source 1..12: mol_type = other DNA
ttgcaaagttat

SEQ ID NO: 3890 - DNA, 13 bp, synthetic construct
  source 1..13: mol_type = other DNA
ttgcaaagttatt

SEQ ID NO: 3891 - DNA, 14 bp, synthetic construct
  source 1..14: mol_type = other DNA
ttgcaaagttattg

SEQ ID NO: 3892 - DNA, 15 bp, synthetic construct
  source 1..15: mol_type = other DNA
ttgcaaagttattga

SEQ ID NO: 3893 - DNA, 16 bp, synthetic construct
  source 1..16: mol_type = other DNA
ttgcaaagttattgaa

SEQ ID NO: 3894 - DNA, 10 bp, synthetic construct
  source 1..10: mol_type = other DNA
ggacttagcc

SEQ ID NO: 3895 - DNA, 11 bp, synthetic construct
  source 1..11: mol_type = other DNA
ggacttagcca

SEQ ID NO: 3896 - DNA, 12 bp, synthetic construct
  source 1..12: mol_type = other DNA
ggacttagccag

SEQ ID NO: 3897 - DNA, 13 bp, synthetic construct
  source 1..13: mol_type = other DNA
ggacttagccaga

SEQ ID NO: 3898 - DNA, 14 bp, synthetic construct
  source 1..14: mol_type = other DNA
ggacttagccagaa

SEQ ID NO: 3899 - DNA, 15 bp, synthetic construct
  source 1..15: mol_type = other DNA
ggacttagccagaaa

SEQ ID NO: 3900 - DNA, 16 bp, synthetic construct
  source 1..16: mol_type = other DNA
ggacttagccagaaaa

SEQ ID NO: 3901 - DNA, 10 bp, synthetic construct
  source 1..10: mol_type = other DNA
aaaataaata

SEQ ID NO: 3902 - DNA, 11 bp, synthetic construct
  source 1..11: mol_type = other DNA
aaaataaatac

SEQ ID NO: 3903 - DNA, 12 bp, synthetic construct
  source 1..12: mol_type = other DNA
aaaataaatact

SEQ ID NO: 3904 - DNA, 13 bp, synthetic construct
  source 1..13: mol_type = other DNA
aaaataaatactt

SEQ ID NO: 3905 - DNA, 14 bp, synthetic construct
  source 1..14: mol_type = other DNA
aaaataaatacttt

SEQ ID NO: 3906 - DNA, 15 bp, synthetic construct
  source 1..15: mol_type = other DNA
aaaataaatactttc

SEQ ID NO: 3907 - DNA, 16 bp, synthetic construct
  source 1..16: mol_type = other DNA
aaaataaatactttct

SEQ ID NO: 3908 - DNA, 10 bp, synthetic construct
  source 1..10: mol_type = other DNA
aaataaatac

SEQ ID NO: 3909 - DNA, 11 bp, synthetic construct
  source 1..11: mol_type = other DNA
aaataaatact

SEQ ID NO: 3910 - DNA, 12 bp, synthetic construct
  source 1..12: mol_type = other DNA
aaataaatactt

SEQ ID NO: 3911 - DNA, 13 bp, synthetic construct
  source 1..13: mol_type = other DNA
aaataaatacttt

SEQ ID NO: 3912 - DNA, 14 bp, synthetic construct
  source 1..14: mol_type = other DNA
aaataaatactttc

SEQ ID NO: 3913 - DNA, 15 bp, synthetic construct
  source 1..15: mol_type = other DNA
aaataaatactttct

SEQ ID NO: 3914 - DNA, 16 bp, synthetic construct
  source 1..16: mol_type = other DNA
aaataaatactttcta

SEQ ID NO: 3915 - DNA, 10 bp, synthetic construct
  source 1..10: mol_type = other DNA
gagtgatcaa

SEQ ID NO: 3916 - DNA, 11 bp, synthetic construct
  source 1..11: mol_type = other DNA
gagtgatcaag

SEQ ID NO: 3917 - DNA, 12 bp, synthetic construct
  source 1..12: mol_type = other DNA
gagtgatcaaga

SEQ ID NO: 3918 - DNA, 13 bp, synthetic construct
  source 1..13: mol_type = other DNA
gagtgatcaagaa

SEQ ID NO: 3919 - DNA, 14 bp, synthetic construct
  source 1..14: mol_type = other DNA
gagtgatcaagaaa

SEQ ID NO: 3920 - DNA, 15 bp, synthetic construct
  source 1..15: mol_type = other DNA
gagtgatcaagaaat

SEQ ID NO: 3921 - DNA, 16 bp, synthetic construct
  source 1..16: mol_type = other DNA
gagtgatcaagaaata

SEQ ID NO: 3922 - DNA, 10 bp, synthetic construct
  source 1..10: mol_type = other DNA
tgaacagtgg

SEQ ID NO: 3923 - DNA, 11 bp, synthetic construct
  source 1..11: mol_type = other DNA
tgaacagtgga

SEQ ID NO: 3924 - DNA, 12 bp, synthetic construct
  source 1..12: mol_type = other DNA
tgaacagtggag

SEQ ID NO: 3925 - DNA, 13 bp, synthetic construct
  source 1..13: mol_type = other DNA
tgaacagtggagt

SEQ ID NO: 3926 - DNA, 14 bp, synthetic construct
  source 1..14: mol_type = other DNA
tgaacagtggagtg

SEQ ID NO: 3927 - DNA, 15 bp, synthetic construct
  source 1..15: mol_type = other DNA
tgaacagtggagtga

SEQ ID NO: 3928 - DNA, 16 bp, synthetic construct
  source 1..16: mol_type = other DNA
tgaacagtggagtgat

SEQ ID NO: 3929 - DNA, 10 bp, synthetic construct
  source 1..10: mol_type = other DNA
ttttctaaat

SEQ ID NO: 3930 - DNA, 11 bp, synthetic construct
  source 1..11: mol_type = other DNA
ttttctaaatg

SEQ ID NO: 3931 - DNA, 12 bp, synthetic construct
  source 1..12: mol_type = other DNA
ttttctaaatgt

SEQ ID NO: 3932 - DNA, 13 bp, synthetic construct
  source 1..13: mol_type = other DNA
ttttctaaatgtt

SEQ ID NO: 3933 - DNA, 14 bp, synthetic construct
  source 1..14: mol_type = other DNA
ttttctaaatgttc

SEQ ID NO: 3934 - DNA, 15 bp, synthetic construct
  source 1..15: mol_type = other DNA
ttttctaaatgttcc

SEQ ID NO: 3935 - DNA, 16 bp, synthetic construct
  source 1..16: mol_type = other DNA
ttttctaaatgttcca

SEQ ID NO: 3936 - DNA, 10 bp, synthetic construct
  source 1..10: mol_type = other DNA
aaaaataaat

SEQ ID NO: 3937 - DNA, 11 bp, synthetic construct
  source 1..11: mol_type = other DNA
aaaaataaata

SEQ ID NO: 3938 - DNA, 12 bp, synthetic construct
  source 1..12: mol_type = other DNA
aaaaataaatac

SEQ ID NO: 3939 - DNA, 13 bp, synthetic construct
  source 1..13: mol_type = other DNA
aaaaataaatact

SEQ ID NO: 3940 - DNA, 14 bp, synthetic construct
  source 1..14: mol_type = other DNA
aaaaataaatactt

SEQ ID NO: 3941 - DNA, 15 bp, synthetic construct
  source 1..15: mol_type = other DNA
aaaaataaatacttt

SEQ ID NO: 3942 - DNA, 16 bp, synthetic construct
  source 1..16: mol_type = other DNA
aaaaataaatactttc

SEQ ID NO: 3943 - DNA, 10 bp, synthetic construct
  source 1..10: mol_type = other DNA
ttttttctaa

SEQ ID NO: 3944 - DNA, 11 bp, synthetic construct
  source 1..11: mol_type = other DNA
ttttttctaaa

SEQ ID NO: 3945 - DNA, 12 bp, synthetic construct
  source 1..12: mol_type = other DNA
ttttttctaaat

SEQ ID NO: 3946 - DNA, 13 bp, synthetic construct
  source 1..13: mol_type = other DNA
ttttttctaaatg

SEQ ID NO: 3947 - DNA, 14 bp, synthetic construct
  source 1..14: mol_type = other DNA
ttttttctaaatgt

SEQ ID NO: 3948 - DNA, 15 bp, synthetic construct
  source 1..15: mol_type = other DNA
ttttttctaaatgtt

SEQ ID NO: 3949 - DNA, 16 bp, synthetic construct
  source 1..16: mol_type = other DNA
ttttttctaaatgttc

SEQ ID NO: 3950 - DNA, 10 bp, synthetic construct
  source 1..10: mol_type = other DNA
gaacagtgga

SEQ ID NO: 3951 - DNA, 11 bp, synthetic construct
  source 1..11: mol_type = other DNA
gaacagtggag

SEQ ID NO: 3952 - DNA, 12 bp, synthetic construct
  source 1..12: mol_type = other DNA
gaacagtggagt

SEQ ID NO: 3953 - DNA, 13 bp, synthetic construct
  source 1..13: mol_type = other DNA
gaacagtggagtg

SEQ ID NO: 3954 - DNA, 14 bp, synthetic construct
  source 1..14: mol_type = other DNA
gaacagtggagtga

SEQ ID NO: 3955 - DNA, 15 bp, synthetic construct
  source 1..15: mol_type = other DNA
gaacagtggagtgat

SEQ ID NO: 3956 - DNA, 16 bp, synthetic construct
  source 1..16: mol_type = other DNA
gaacagtggagtgatc

SEQ ID NO: 3957 - DNA, 10 bp, synthetic construct
  source 1..10: mol_type = other DNA
tttttctaaa

SEQ ID NO: 3958 - DNA, 11 bp, synthetic construct
  source 1..11: mol_type = other DNA
tttttctaaat

SEQ ID NO: 3959 - DNA, 12 bp, synthetic construct
  source 1..12: mol_type = other DNA
tttttctaaatg

SEQ ID NO: 3960 - DNA, 13 bp, synthetic construct
  source 1..13: mol_type = other DNA
tttttctaaatgt

SEQ ID NO: 3961 - DNA, 14 bp, synthetic construct
  source 1..14: mol_type = other DNA
tttttctaaatgtt

SEQ ID NO: 3962 - DNA, 15 bp, synthetic construct
  source 1..15: mol_type = other DNA
tttttctaaatgttc

SEQ ID NO: 3963 - DNA, 16 bp, synthetic construct
  source 1..16: mol_type = other DNA
tttttctaaatgttcc

SEQ ID NO: 3964 - DNA, 10 bp, synthetic construct
  source 1..10: mol_type = other DNA
tgttccagaa

SEQ ID NO: 3965 - DNA, 11 bp, synthetic construct
  source 1..11: mol_type = other DNA
tgttccagaaa

SEQ ID NO: 3966 - DNA, 12 bp, synthetic construct
  source 1..12: mol_type = other DNA
tgttccagaaaa

SEQ ID NO: 3967 - DNA, 13 bp, synthetic construct
  source 1..13: mol_type = other DNA
tgttccagaaaaa

SEQ ID NO: 3968 - DNA, 14 bp, synthetic construct
  source 1..14: mol_type = other DNA
tgttccagaaaaaa

SEQ ID NO: 3969 - DNA, 15 bp, synthetic construct
  source 1..15: mol_type = other DNA
tgttccagaaaaaat

SEQ ID NO: 3970 - DNA, 16 bp, synthetic construct
  source 1..16: mol_type = other DNA
tgttccagaaaaaata

SEQ ID NO: 3971 - DNA, 10 bp, synthetic construct
  source 1..10: mol_type = other DNA
aacagtggag

SEQ ID NO: 3972 - DNA, 11 bp, synthetic construct
  source 1..11: mol_type = other DNA
aacagtggagt

SEQ ID NO: 3973 - DNA, 12 bp, synthetic construct
  source 1..12: mol_type = other DNA
aacagtggagtg

SEQ ID NO: 3974 - DNA, 13 bp, synthetic construct
  source 1..13: mol_type = other DNA
aacagtggagtga

SEQ ID NO: 3975 - DNA, 14 bp, synthetic construct
  source 1..14: mol_type = other DNA
aacagtggagtgat

SEQ ID NO: 3976 - DNA, 15 bp, synthetic construct
  source 1..15: mol_type = other DNA
aacagtggagtgatc

SEQ ID NO: 3977 - DNA, 16 bp, synthetic construct
  source 1..16: mol_type = other DNA
aacagtggagtgatca

SEQ ID NO: 3978 - DNA, 10 bp, synthetic construct
  source 1..10: mol_type = other DNA
aatatggaaa

SEQ ID NO: 3979 - DNA, 11 bp, synthetic construct
  source 1..11: mol_type = other DNA
aatatggaaag

SEQ ID NO: 3980 - DNA, 12 bp, synthetic construct
  source 1..12: mol_type = other DNA
aatatggaaagt

SEQ ID NO: 3981 - DNA, 13 bp, synthetic construct
  source 1..13: mol_type = other DNA
aatatggaaagtt

SEQ ID NO: 3982 - DNA, 14 bp, synthetic construct
  source 1..14: mol_type = other DNA
aatatggaaagttg

SEQ ID NO: 3983 - DNA, 15 bp, synthetic construct
  source 1..15: mol_type = other DNA
aatatggaaagttgc

SEQ ID NO: 3984 - DNA, 16 bp, synthetic construct
  source 1..16: mol_type = other DNA
aatatggaaagttgca

SEQ ID NO: 3985 - DNA, 10 bp, synthetic construct
  source 1..10: mol_type = other DNA
gttccagaaa

SEQ ID NO: 3986 - DNA, 11 bp, synthetic construct
  source 1..11: mol_type = other DNA
gttccagaaaa

SEQ ID NO: 3987 - DNA, 12 bp, synthetic construct
  source 1..12: mol_type = other DNA
gttccagaaaaa

SEQ ID NO: 3988 - DNA, 13 bp, synthetic construct
  source 1..13: mol_type = other DNA
gttccagaaaaaa

SEQ ID NO: 3989 - DNA, 14 bp, synthetic construct
  source 1..14: mol_type = other DNA
gttccagaaaaaat

SEQ ID NO: 3990 - DNA, 15 bp, synthetic construct
  source 1..15: mol_type = other DNA
gttccagaaaaaata

SEQ ID NO: 3991 - DNA, 16 bp, synthetic construct
  source 1..16: mol_type = other DNA
gttccagaaaaaataa

SEQ ID NO: 3992 - DNA, 10 bp, synthetic construct
  source 1..10: mol_type = other DNA
tctaaatgtt

SEQ ID NO: 3993 - DNA, 11 bp, synthetic construct
  source 1..11: mol_type = other DNA
tctaaatgttc

SEQ ID NO: 3994 - DNA, 12 bp, synthetic construct
  source 1..12: mol_type = other DNA
tctaaatgttcc

SEQ ID NO: 3995 - DNA, 13 bp, synthetic construct
  source 1..13: mol_type = other DNA
tctaaatgttcca

SEQ ID NO: 3996 - DNA, 14 bp, synthetic construct
  source 1..14: mol_type = other DNA
tctaaatgttccag

SEQ ID NO: 3997 - DNA, 15 bp, synthetic construct
  source 1..15: mol_type = other DNA
tctaaatgttccaga

SEQ ID NO: 3998 - DNA, 16 bp, synthetic construct
  source 1..16: mol_type = other DNA
tctaaatgttccagaa

SEQ ID NO: 3999 - DNA, 10 bp, synthetic construct
  source 1..10: mol_type = other DNA
ttctaaatgt

SEQ ID NO: 4000 - DNA, 11 bp, synthetic construct
  source 1..11: mol_type = other DNA
ttctaaatgtt

SEQ ID NO: 4001 - DNA, 12 bp, synthetic construct
  source 1..12: mol_type = other DNA
ttctaaatgttc

SEQ ID NO: 4002 - DNA, 13 bp, synthetic construct
  source 1..13: mol_type = other DNA
ttctaaatgttcc

SEQ ID NO: 4003 - DNA, 14 bp, synthetic construct
  source 1..14: mol_type = other DNA
ttctaaatgttcca

SEQ ID NO: 4004 - DNA, 15 bp, synthetic construct
  source 1..15: mol_type = other DNA
ttctaaatgttccag

SEQ ID NO: 4005 - DNA, 16 bp, synthetic construct
  source 1..16: mol_type = other DNA
ttctaaatgttccaga

SEQ ID NO: 4006 - DNA, 10 bp, synthetic construct
  source 1..10: mol_type = other DNA
acagtggagt

SEQ ID NO: 4007 - DNA, 11 bp, synthetic construct
  source 1..11: mol_type = other DNA
acagtggagtg

SEQ ID NO: 4008 - DNA, 12 bp, synthetic construct
  source 1..12: mol_type = other DNA
acagtggagtga

SEQ ID NO: 4009 - DNA, 13 bp, synthetic construct
  source 1..13: mol_type = other DNA
acagtggagtgat

SEQ ID NO: 4010 - DNA, 14 bp, synthetic construct
  source 1..14: mol_type = other DNA
acagtggagtgatc

SEQ ID NO: 4011 - DNA, 15 bp, synthetic construct
  source 1..15: mol_type = other DNA
acagtggagtgatca

SEQ ID NO: 4012 - DNA, 16 bp, synthetic construct
  source 1..16: mol_type = other DNA
acagtggagtgatcaa

SEQ ID NO: 4013 - DNA, 10 bp, synthetic construct
  source 1..10: mol_type = other DNA
atagcaaaaa

SEQ ID NO: 4014 - DNA, 11 bp, synthetic construct
  source 1..11: mol_type = other DNA
atagcaaaaaa

SEQ ID NO: 4015 - DNA, 12 bp, synthetic construct
  source 1..12: mol_type = other DNA
atagcaaaaaag

SEQ ID NO: 4016 - DNA, 13 bp, synthetic construct
  source 1..13: mol_type = other DNA
atagcaaaaaaga

SEQ ID NO: 4017 - DNA, 14 bp, synthetic construct
  source 1..14: mol_type = other DNA
atagcaaaaaagaa

SEQ ID NO: 4018 - DNA, 15 bp, synthetic construct
  source 1..15: mol_type = other DNA
atagcaaaaaagaaa

SEQ ID NO: 4019 - DNA, 16 bp, synthetic construct
  source 1..16: mol_type = other DNA
atagcaaaaaagaaaa

SEQ ID NO: 4020 - DNA, 10 bp, synthetic construct
  source 1..10: mol_type = other DNA
tatagcaaaa

SEQ ID NO: 4021 - DNA, 11 bp, synthetic construct
  source 1..11: mol_type = other DNA
tatagcaaaaa

SEQ ID NO: 4022 - DNA, 12 bp, synthetic construct
  source 1..12: mol_type = other DNA
tatagcaaaaaa

SEQ ID NO: 4023 - DNA, 13 bp, synthetic construct
  source 1..13: mol_type = other DNA
tatagcaaaaaag

SEQ ID NO: 4024 - DNA, 14 bp, synthetic construct
  source 1..14: mol_type = other DNA
tatagcaaaaaaga

SEQ ID NO: 4025 - DNA, 15 bp, synthetic construct
  source 1..15: mol_type = other DNA
tatagcaaaaaagaa

SEQ ID NO: 4026 - DNA, 16 bp, synthetic construct
  source 1..16: mol_type = other DNA
tatagcaaaaaagaaa

SEQ ID NO: 4027 - DNA, 35 bp, synthetic construct
  source 1..35: mol_type = other DNA
ggaatctttttatatttaggggtaaggatctcatt

SEQ ID NO: 4028 - DNA, 35 bp, synthetic construct
  source 1..35: mol_type = other DNA
ggaatctttttatatttaggggtaaggatttcatt

SEQ ID NO: 4029 - DNA, 36 bp, synthetic construct
  source 1..36: mol_type = other DNA
tggaatctttttatatttaggggtaaggatttcatt

SEQ ID NO: 4030 - DNA, 36 bp, synthetic construct
  source 1..36: mol_type = other DNA
tggaatctttttatatttaggggtaaggatctcatt

SEQ ID NO: 4031 - DNA, 37 bp, synthetic construct
  source 1..37: mol_type = other DNA
atggaatctttttatatttaggggtaaggatctcatt

SEQ ID NO: 4032 - DNA, 37 bp, synthetic construct
  source 1..37: mol_type = other DNA
atggaatctttttatatttaggggtaaggatttcatt

SEQ ID NO: 4033 - DNA, 38 bp, synthetic construct
  source 1..38: mol_type = other DNA
tatggaatctttttatatttaggggtaaggatttcatt

SEQ ID NO: 4034 - DNA, 38 bp, synthetic construct
  source 1..38: mol_type = other DNA
tatggaatctttttatatttaggggtaaggatctcatt

SEQ ID NO: 4035 - DNA, 39 bp, synthetic construct
  source 1..39: mol_type = other DNA
ctatggaatctttttatatttaggggtaaggatttcatt

SEQ ID NO: 4036 - DNA, 39 bp, synthetic construct
  source 1..39: mol_type = other DNA
ctatggaatctttttatatttaggggtaaggatctcatt

SEQ ID NO: 4037 - DNA, 40 bp, synthetic construct
  source 1..40: mol_type = other DNA
tctatggaatctttttatatttaggggtaaggatttcatt

SEQ ID NO: 4038 - DNA, 40 bp, synthetic construct
  source 1..40: mol_type = other DNA
tctatggaatctttttatatttaggggtaaggatctcatt

SEQ ID NO: 4039 - DNA, 36 bp, synthetic construct
  source 1..36: mol_type = other DNA
tccatagaacataaatctccagaaaaaacatcgccg

SEQ ID NO: 4040 - DNA, 37 bp, synthetic construct
  source 1..37: mol_type = other DNA
ttccatagaacataaatctccagaaaaaacatcgccg

SEQ ID NO: 4041 - DNA, 38 bp, synthetic construct
  source 1..38: mol_type = other DNA
attccatagaacataaatctccagaaaaaacatcgccg

SEQ ID NO: 4042 - DNA, 39 bp, synthetic construct
  source 1..39: mol_type = other DNA
gattccatagaacataaatctccagaaaaaacatcgccg

SEQ ID NO: 4043 - DNA, 40 bp, synthetic construct
  source 1..40: mol_type = other DNA
agattccatagaacataaatctccagaaaaaacatcgccg

SEQ ID NO: 4044 - DNA, 14 bp, synthetic construct
  source 1..14: mol_type = other DNA
tccatagaacataa

SEQ ID NO: 4045 - DNA, 15 bp, synthetic construct
  source 1..15: mol_type = other DNA
ttccatagaacataa

SEQ ID NO: 4046 - DNA, 16 bp, synthetic construct
  source 1..16: mol_type = other DNA
attccatagaacataa

SEQ ID NO: 4047 - DNA, 17 bp, synthetic construct
  source 1..17: mol_type = other DNA
gattccatagaacataa

SEQ ID NO: 4048 - DNA, 18 bp, synthetic construct
  source 1..18: mol_type = other DNA
agattccatagaacataa

SEQ ID NO: 4049 - DNA, 19 bp, synthetic construct
  source 1..19: mol_type = other DNA
aagattccatagaacataa

SEQ ID NO: 4050 - DNA, 20 bp, synthetic construct
  source 1..20: mol_type = other DNA
aaagattccatagaacataa

SEQ ID NO: 4051 - DNA, 21 bp, synthetic construct
  source 1..21: mol_type = other DNA
aaaagattccatagaacataa

SEQ ID NO: 4052 - DNA, 22 bp, synthetic construct
  source 1..22: mol_type = other DNA
aaaaagattccatagaacataa

SEQ ID NO: 4053 - DNA, 23 bp, synthetic construct
  source 1..23: mol_type = other DNA
taaaaagattccatagaacataa

SEQ ID NO: 4054 - DNA, 24 bp, synthetic construct
  source 1..24: mol_type = other DNA
ataaaaagattccatagaacataa

SEQ ID NO: 4055 - DNA, 25 bp, synthetic construct
  source 1..25: mol_type = other DNA
tataaaaagattccatagaacataa

SEQ ID NO: 4056 - DNA, 26 bp, synthetic construct
  source 1..26: mol_type = other DNA
atataaaaagattccatagaacataa

SEQ ID NO: 4057 - DNA, 27 bp, synthetic construct
  source 1..27: mol_type = other DNA
aatataaaaagattccatagaacataa

SEQ ID NO: 4058 - DNA, 28 bp, synthetic construct
  source 1..28: mol_type = other DNA
aaatataaaaagattccatagaacataa

SEQ ID NO: 4059 - DNA, 29 bp, synthetic construct
  source 1..29: mol_type = other DNA
taaatataaaaagattccatagaacataa

SEQ ID NO: 4060 - DNA, 30 bp, synthetic construct
  source 1..30: mol_type = other DNA
ctaaatataaaaagattccatagaacataa

SEQ ID NO: 4061 - DNA, 31 bp, synthetic construct
  source 1..31: mol_type = other DNA
cctaaatataaaaagattccatagaacataa

SEQ ID NO: 4062 - DNA, 32 bp, synthetic construct
  source 1..32: mol_type = other DNA
ccctaaatataaaaagattccatagaacataa

SEQ ID NO: 4063 - DNA, 33 bp, synthetic construct
  source 1..33: mol_type = other DNA
cccctaaatataaaaagattccatagaacataa

SEQ ID NO: 4064 - DNA, 34 bp, synthetic construct
  source 1..34: mol_type = other DNA
acccctaaatataaaaagattccatagaacataa

SEQ ID NO: 4065 - DNA, 35 bp, synthetic construct
  source 1..35: mol_type = other DNA
tacccctaaatataaaaagattccatagaacataa

SEQ ID NO: 4066 - DNA, 36 bp, synthetic construct
  source 1..36: mol_type = other DNA
ttacccctaaatataaaaagattccatagaacataa

SEQ ID NO: 4067 - DNA, 37 bp, synthetic construct
  source 1..37: mol_type = other DNA
cttacccctaaatataaaaagattccatagaacataa

SEQ ID NO: 4068 - DNA, 38 bp, synthetic construct
  source 1..38: mol_type = other DNA
ccttacccctaaatataaaaagattccatagaacataa

SEQ ID NO: 4069 - DNA, 39 bp, synthetic construct
  source 1..39: mol_type = other DNA
tccttacccctaaatataaaaagattccatagaacataa

SEQ ID NO: 4070 - DNA, 40 bp, synthetic construct
  source 1..40: mol_type = other DNA
atccttacccctaaatataaaaagattccatagaacataa

SEQ ID NO: 4071 - DNA, 34 bp, synthetic construct
  source 1..34: mol_type = other DNA
ggaatctttttatatttaggggtaaggatctcat

SEQ ID NO: 4072 - DNA, 35 bp, synthetic construct
  source 1..35: mol_type = other DNA
tggaatctttttatatttaggggtaaggatctcat

SEQ ID NO: 4073 - DNA, 36 bp, synthetic construct
  source 1..36: mol_type = other DNA
atggaatctttttatatttaggggtaaggatctcat

SEQ ID NO: 4074 - DNA, 37 bp, synthetic construct
  source 1..37: mol_type = other DNA
tatggaatctttttatatttaggggtaaggatctcat

SEQ ID NO: 4075 - DNA, 38 bp, synthetic construct
  source 1..38: mol_type = other DNA
ctatggaatctttttatatttaggggtaaggatctcat

SEQ ID NO: 4076 - DNA, 39 bp, synthetic construct
  source 1..39: mol_type = other DNA
tctatggaatctttttatatttaggggtaaggatctcat

SEQ ID NO: 4077 - DNA, 40 bp, synthetic construct
  source 1..40: mol_type = other DNA
ttctatggaatctttttatatttaggggtaaggatctcat

SEQ ID NO: 4078 - DNA, 40 bp, synthetic construct
  source 1..40: mol_type = other DNA
tccatagaacataaatctccagaaaaaacatcgccgaagg

SEQ ID NO: 4079 - DNA, 11 bp, synthetic construct
  source 1..11: mol_type = other DNA
ggaattttttt

SEQ ID NO: 4080 - DNA, 11 bp, synthetic construct
  source 1..11: mol_type = other DNA
ggaatcttttt

SEQ ID NO: 4081 - DNA, 12 bp, synthetic construct
  source 1..12: mol_type = other DNA
tggaatcttttt

SEQ ID NO: 4082 - DNA, 12 bp, synthetic construct
  source 1..12: mol_type = other DNA
tggaattttttt

SEQ ID NO: 4083 - DNA, 13 bp, synthetic construct
  source 1..13: mol_type = other DNA
atggaattttttt

SEQ ID NO: 4084 - DNA, 13 bp, synthetic construct
  source 1..13: mol_type = other DNA
atggaatcttttt

SEQ ID NO: 4085 - DNA, 14 bp, synthetic construct
  source 1..14: mol_type = other DNA
tatggaattttttt

SEQ ID NO: 4086 - DNA, 14 bp, synthetic construct
  source 1..14: mol_type = other DNA
tatggaatcttttt

SEQ ID NO: 4087 - DNA, 15 bp, synthetic construct
  source 1..15: mol_type = other DNA
ctatggaatcttttt

SEQ ID NO: 4088 - DNA, 15 bp, synthetic construct
  source 1..15: mol_type = other DNA
ctatggaattttttt

SEQ ID NO: 4089 - DNA, 16 bp, synthetic construct
  source 1..16: mol_type = other DNA
tctatggaattttttt

SEQ ID NO: 4090 - DNA, 16 bp, synthetic construct
  source 1..16: mol_type = other DNA
tctatggaatcttttt

SEQ ID NO: 4091 - DNA, 17 bp, synthetic construct
  source 1..17: mol_type = other DNA
ttctatggaattttttt

SEQ ID NO: 4092 - DNA, 17 bp, synthetic construct
  source 1..17: mol_type = other DNA
ttctatggaatcttttt

SEQ ID NO: 4093 - DNA, 18 bp, synthetic construct
  source 1..18: mol_type = other DNA
gttctatggaatcttttt

SEQ ID NO: 4094 - DNA, 18 bp, synthetic construct
  source 1..18: mol_type = other DNA
gttctatggaattttttt

SEQ ID NO: 4095 - DNA, 19 bp, synthetic construct
  source 1..19: mol_type = other DNA
tgttctatggaatcttttt

SEQ ID NO: 4096 - DNA, 19 bp, synthetic construct
  source 1..19: mol_type = other DNA
tgttctatggaattttttt

SEQ ID NO: 4097 - DNA, 20 bp, synthetic construct
  source 1..20: mol_type = other DNA
atgttctatggaattttttt

SEQ ID NO: 4098 - DNA, 20 bp, synthetic construct
  source 1..20: mol_type = other DNA
atgttctatggaatcttttt

SEQ ID NO: 4099 - DNA, 21 bp, synthetic construct
  source 1..21: mol_type = other DNA
tatgttctatggaattttttt

SEQ ID NO: 4100 - DNA, 21 bp, synthetic construct
  source 1..21: mol_type = other DNA
tatgttctatggaatcttttt

SEQ ID NO: 4101 - DNA, 22 bp, synthetic construct
  source 1..22: mol_type = other DNA
ttatgttctatggaattttttt

SEQ ID NO: 4102 - DNA, 22 bp, synthetic construct
  source 1..22: mol_type = other DNA
ttatgttctatggaatcttttt

SEQ ID NO: 4103 - DNA, 23 bp, synthetic construct
  source 1..23: mol_type = other DNA
tttatgttctatggaattttttt

SEQ ID NO: 4104 - DNA, 23 bp, synthetic construct
  source 1..23: mol_type = other DNA
tttatgttctatggaatcttttt

SEQ ID NO: 4105 - DNA, 24 bp, synthetic construct
  source 1..24: mol_type = other DNA
atttatgttctatggaattttttt

SEQ ID NO: 4106 - DNA, 24 bp, synthetic construct
  source 1..24: mol_type = other DNA
atttatgttctatggaatcttttt

SEQ ID NO: 4107 - DNA, 25 bp, synthetic construct
  source 1..25: mol_type = other DNA
gatttatgttctatggaattttttt

SEQ ID NO: 4108 - DNA, 25 bp, synthetic construct
  source 1..25: mol_type = other DNA
gatttatgttctatggaatcttttt

SEQ ID NO: 4109 - DNA, 26 bp, synthetic construct
  source 1..26: mol_type = other DNA
agatttatgttctatggaatcttttt

SEQ ID NO: 4110 - DNA, 26 bp, synthetic construct
  source 1..26: mol_type = other DNA
agatttatgttctatggaattttttt

SEQ ID NO: 4111 - DNA, 27 bp, synthetic construct
  source 1..27: mol_type = other DNA
gagatttatgttctatggaattttttt

SEQ ID NO: 4112 - DNA, 27 bp, synthetic construct
  source 1..27: mol_type = other DNA
gagatttatgttctatggaatcttttt

SEQ ID NO: 4113 - DNA, 28 bp, synthetic construct
  source 1..28: mol_type = other DNA
ggagatttatgttctatggaattttttt

SEQ ID NO: 4114 - DNA, 28 bp, synthetic construct
  source 1..28: mol_type = other DNA
ggagatttatgttctatggaatcttttt

SEQ ID NO: 4115 - DNA, 29 bp, synthetic construct
  source 1..29: mol_type = other DNA
tggagatttatgttctatggaattttttt

SEQ ID NO: 4116 - DNA, 29 bp, synthetic construct
  source 1..29: mol_type = other DNA
tggagatttatgttctatggaatcttttt

SEQ ID NO: 4117 - DNA, 30 bp, synthetic construct
  source 1..30: mol_type = other DNA
ctggagatttatgttctatggaattttttt

SEQ ID NO: 4118 - DNA, 30 bp, synthetic construct
  source 1..30: mol_type = other DNA
ctggagatttatgttctatggaatcttttt

SEQ ID NO: 4119 - DNA, 31 bp, synthetic construct
  source 1..31: mol_type = other DNA
tctggagatttatgttctatggaatcttttt

SEQ ID NO: 4120 - DNA, 31 bp, synthetic construct
  source 1..31: mol_type = other DNA
tctggagatttatgttctatggaattttttt

SEQ ID NO: 4121 - DNA, 32 bp, synthetic construct
  source 1..32: mol_type = other DNA
ttctggagatttatgttctatggaattttttt

SEQ ID NO: 4122 - DNA, 32 bp, synthetic construct
  source 1..32: mol_type = other DNA
ttctggagatttatgttctatggaatcttttt

SEQ ID NO: 4123 - DNA, 33 bp, synthetic construct
  source 1..33: mol_type = other DNA
tttctggagatttatgttctatggaattttttt

SEQ ID NO: 4124 - DNA, 33 bp, synthetic construct
  source 1..33: mol_type = other DNA
tttctggagatttatgttctatggaatcttttt

SEQ ID NO: 4125 - DNA, 34 bp, synthetic construct
  source 1..34: mol_type = other DNA
ttttctggagatttatgttctatggaatcttttt

SEQ ID NO: 4126 - DNA, 34 bp, synthetic construct
  source 1..34: mol_type = other DNA
ttttctggagatttatgttctatggaattttttt

SEQ ID NO: 4127 - DNA, 35 bp, synthetic construct
  source 1..35: mol_type = other DNA
tttttctggagatttatgttctatggaattttttt

SEQ ID NO: 4128 - DNA, 35 bp, synthetic construct
  source 1..35: mol_type = other DNA
tttttctggagatttatgttctatggaatcttttt

SEQ ID NO: 4129 - DNA, 36 bp, synthetic construct
  source 1..36: mol_type = other DNA
ttttttctggagatttatgttctatggaatcttttt

SEQ ID NO: 4130 - DNA, 36 bp, synthetic construct
  source 1..36: mol_type = other DNA
ttttttctggagatttatgttctatggaattttttt

SEQ ID NO: 4131 - DNA, 37 bp, synthetic construct
  source 1..37: mol_type = other DNA
gttttttctggagatttatgttctatggaatcttttt

SEQ ID NO: 4132 - DNA, 37 bp, synthetic construct
  source 1..37: mol_type = other DNA
gttttttctggagatttatgttctatggaattttttt

SEQ ID NO: 4133 - DNA, 38 bp, synthetic construct
  source 1..38: mol_type = other DNA
tgttttttctggagatttatgttctatggaattttttt

SEQ ID NO: 4134 - DNA, 38 bp, synthetic construct
  source 1..38: mol_type = other DNA
tgttttttctggagatttatgttctatggaatcttttt

SEQ ID NO: 4135 - DNA, 39 bp, synthetic construct
  source 1..39: mol_type = other DNA
atgttttttctggagatttatgttctatggaattttttt

SEQ ID NO: 4136 - DNA, 39 bp, synthetic construct
  source 1..39: mol_type = other DNA
atgttttttctggagatttatgttctatggaatcttttt

SEQ ID NO: 4137 - DNA, 40 bp, synthetic construct
  source 1..40: mol_type = other DNA
gatgttttttctggagatttatgttctatggaattttttt

SEQ ID NO: 4138 - DNA, 40 bp, synthetic construct
  source 1..40: mol_type = other DNA
gatgttttttctggagatttatgttctatggaatcttttt

SEQ ID NO: 4139 - DNA, 24 bp, synthetic construct
  source 1..24: mol_type = other DNA
tccatagaacataaatctccagaa

SEQ ID NO: 4140 - DNA, 25 bp, synthetic construct
  source 1..25: mol_type = other DNA
ttccatagaacataaatctccagaa

SEQ ID NO: 4141 - DNA, 26 bp, synthetic construct
  source 1..26: mol_type = other DNA
attccatagaacataaatctccagaa

SEQ ID NO: 4142 - DNA, 27 bp, synthetic construct
  source 1..27: mol_type = other DNA
gattccatagaacataaatctccagaa

SEQ ID NO: 4143 - DNA, 28 bp, synthetic construct
  source 1..28: mol_type = other DNA
agattccatagaacataaatctccagaa

SEQ ID NO: 4144 - DNA, 29 bp, synthetic construct
  source 1..29: mol_type = other DNA
aagattccatagaacataaatctccagaa

SEQ ID NO: 4145 - DNA, 30 bp, synthetic construct
  source 1..30: mol_type = other DNA
aaagattccatagaacataaatctccagaa

SEQ ID NO: 4146 - DNA, 31 bp, synthetic construct
  source 1..31: mol_type = other DNA
aaaagattccatagaacataaatctccagaa

SEQ ID NO: 4147 - DNA, 32 bp, synthetic construct
  source 1..32: mol_type = other DNA
aaaaagattccatagaacataaatctccagaa

SEQ ID NO: 4148 - DNA, 33 bp, synthetic construct
  source 1..33: mol_type = other DNA
taaaaagattccatagaacataaatctccagaa

SEQ ID NO: 4149 - DNA, 34 bp, synthetic construct
  source 1..34: mol_type = other DNA
ataaaaagattccatagaacataaatctccagaa

SEQ ID NO: 4150 - DNA, 35 bp, synthetic construct
  source 1..35: mol_type = other DNA
tataaaaagattccatagaacataaatctccagaa

SEQ ID NO: 4151 - DNA, 36 bp, synthetic construct
  source 1..36: mol_type = other DNA
atataaaaagattccatagaacataaatctccagaa

SEQ ID NO: 4152 - DNA, 37 bp, synthetic construct
  source 1..37: mol_type = other DNA
aatataaaaagattccatagaacataaatctccagaa

SEQ ID NO: 4153 - DNA, 38 bp, synthetic construct
  source 1..38: mol_type = other DNA
aaatataaaaagattccatagaacataaatctccagaa

SEQ ID NO: 4154 - DNA, 39 bp, synthetic construct
  source 1..39: mol_type = other DNA
taaatataaaaagattccatagaacataaatctccagaa

SEQ ID NO: 4155 - DNA, 40 bp, synthetic construct
  source 1..40: mol_type = other DNA
ctaaatataaaaagattccatagaacataaatctccagaa

SEQ ID NO: 4156 - DNA, 10 bp, synthetic construct
  source 1..10: mol_type = other DNA
ggaatctttt

SEQ ID NO: 4157 - DNA, 11 bp, synthetic construct
  source 1..11: mol_type = other DNA
tggaatctttt

SEQ ID NO: 4158 - DNA, 12 bp, synthetic construct
  source 1..12: mol_type = other DNA
atggaatctttt

SEQ ID NO: 4159 - DNA, 13 bp, synthetic construct
  source 1..13: mol_type = other DNA
tatggaatctttt

SEQ ID NO: 4160 - DNA, 14 bp, synthetic construct
  source 1..14: mol_type = other DNA
ctatggaatctttt

SEQ ID NO: 4161 - DNA, 15 bp, synthetic construct
  source 1..15: mol_type = other DNA
tctatggaatctttt

SEQ ID NO: 4162 - DNA, 16 bp, synthetic construct
  source 1..16: mol_type = other DNA
ttctatggaatctttt

SEQ ID NO: 4163 - DNA, 17 bp, synthetic construct
  source 1..17: mol_type = other DNA
gttctatggaatctttt

SEQ ID NO: 4164 - DNA, 18 bp, synthetic construct
  source 1..18: mol_type = other DNA
tgttctatggaatctttt

SEQ ID NO: 4165 - DNA, 19 bp, synthetic construct
  source 1..19: mol_type = other DNA
atgttctatggaatctttt

SEQ ID NO: 4166 - DNA, 20 bp, synthetic construct
  source 1..20: mol_type = other DNA
tatgttctatggaatctttt

SEQ ID NO: 4167 - DNA, 21 bp, synthetic construct
  source 1..21: mol_type = other DNA
ttatgttctatggaatctttt

SEQ ID NO: 4168 - DNA, 22 bp, synthetic construct
  source 1..22: mol_type = other DNA
tttatgttctatggaatctttt

SEQ ID NO: 4169 - DNA, 23 bp, synthetic construct
  source 1..23: mol_type = other DNA
atttatgttctatggaatctttt

SEQ ID NO: 4170 - DNA, 24 bp, synthetic construct
  source 1..24: mol_type = other DNA
gatttatgttctatggaatctttt

SEQ ID NO: 4171 - DNA, 25 bp, synthetic construct
  source 1..25: mol_type = other DNA
agatttatgttctatggaatctttt

SEQ ID NO: 4172 - DNA, 26 bp, synthetic construct
  source 1..26: mol_type = other DNA
gagatttatgttctatggaatctttt

SEQ ID NO: 4173 - DNA, 27 bp, synthetic construct
  source 1..27: mol_type = other DNA
ggagatttatgttctatggaatctttt

SEQ ID NO: 4174 - DNA, 28 bp, synthetic construct
  source 1..28: mol_type = other DNA
tggagatttatgttctatggaatctttt

SEQ ID NO: 4175 - DNA, 29 bp, synthetic construct
  source 1..29: mol_type = other DNA
ctggagatttatgttctatggaatctttt

SEQ ID NO: 4176 - DNA, 30 bp, synthetic construct
  source 1..30: mol_type = other DNA
tctggagatttatgttctatggaatctttt

SEQ ID NO: 4177 - DNA, 31 bp, synthetic construct
  source 1..31: mol_type = other DNA
ttctggagatttatgttctatggaatctttt

SEQ ID NO: 4178 - DNA, 32 bp, synthetic construct
  source 1..32: mol_type = other DNA
tttctggagatttatgttctatggaatctttt

SEQ ID NO: 4179 - DNA, 33 bp, synthetic construct
  source 1..33: mol_type = other DNA
ttttctggagatttatgttctatggaatctttt

SEQ ID NO: 4180 - DNA, 34 bp, synthetic construct
  source 1..34: mol_type = other DNA
tttttctggagatttatgttctatggaatctttt

SEQ ID NO: 4181 - DNA, 35 bp, synthetic construct
  source 1..35: mol_type = other DNA
ttttttctggagatttatgttctatggaatctttt

SEQ ID NO: 4182 - DNA, 36 bp, synthetic construct
  source 1..36: mol_type = other DNA
gttttttctggagatttatgttctatggaatctttt

SEQ ID NO: 4183 - DNA, 37 bp, synthetic construct
  source 1..37: mol_type = other DNA
tgttttttctggagatttatgttctatggaatctttt

SEQ ID NO: 4184 - DNA, 38 bp, synthetic construct
  source 1..38: mol_type = other DNA
atgttttttctggagatttatgttctatggaatctttt

SEQ ID NO: 4185 - DNA, 39 bp, synthetic construct
  source 1..39: mol_type = other DNA
gatgttttttctggagatttatgttctatggaatctttt

SEQ ID NO: 4186 - DNA, 40 bp, synthetic construct
  source 1..40: mol_type = other DNA
cgatgttttttctggagatttatgttctatggaatctttt

SEQ ID NO: 4187 - DNA, 23 bp, synthetic construct
  source 1..23: mol_type = other DNA
tccatagaacataaatctccaga

SEQ ID NO: 4188 - DNA, 24 bp, synthetic construct
  source 1..24: mol_type = other DNA
ttccatagaacataaatctccaga

SEQ ID NO: 4189 - DNA, 25 bp, synthetic construct
  source 1..25: mol_type = other DNA
attccatagaacataaatctccaga

SEQ ID NO: 4190 - DNA, 26 bp, synthetic construct
  source 1..26: mol_type = other DNA
gattccatagaacataaatctccaga

SEQ ID NO: 4191 - DNA, 27 bp, synthetic construct
  source 1..27: mol_type = other DNA
agattccatagaacataaatctccaga

SEQ ID NO: 4192 - DNA, 28 bp, synthetic construct
  source 1..28: mol_type = other DNA
aagattccatagaacataaatctccaga

SEQ ID NO: 4193 - DNA, 29 bp, synthetic construct
  source 1..29: mol_type = other DNA
aaagattccatagaacataaatctccaga

SEQ ID NO: 4194 - DNA, 30 bp, synthetic construct
  source 1..30: mol_type = other DNA
aaaagattccatagaacataaatctccaga

SEQ ID NO: 4195 - DNA, 31 bp, synthetic construct
  source 1..31: mol_type = other DNA
aaaaagattccatagaacataaatctccaga

SEQ ID NO: 4196 - DNA, 32 bp, synthetic construct
  source 1..32: mol_type = other DNA
taaaaagattccatagaacataaatctccaga

SEQ ID NO: 4197 - DNA, 33 bp, synthetic construct
  source 1..33: mol_type = other DNA
ataaaaagattccatagaacataaatctccaga

SEQ ID NO: 4198 - DNA, 34 bp, synthetic construct
  source 1..34: mol_type = other DNA
tataaaaagattccatagaacataaatctccaga

SEQ ID NO: 4199 - DNA, 35 bp, synthetic construct
  source 1..35: mol_type = other DNA
atataaaaagattccatagaacataaatctccaga

SEQ ID NO: 4200 - DNA, 36 bp, synthetic construct
  source 1..36: mol_type = other DNA
aatataaaaagattccatagaacataaatctccaga

SEQ ID NO: 4201 - DNA, 37 bp, synthetic construct
  source 1..37: mol_type = other DNA
aaatataaaaagattccatagaacataaatctccaga

SEQ ID NO: 4202 - DNA, 38 bp, synthetic construct
  source 1..38: mol_type = other DNA
taaatataaaaagattccatagaacataaatctccaga

SEQ ID NO: 4203 - DNA, 39 bp, synthetic construct
  source 1..39: mol_type = other DNA
ctaaatataaaaagattccatagaacataaatctccaga

SEQ ID NO: 4204 - DNA, 40 bp, synthetic construct
  source 1..40: mol_type = other DNA
cctaaatataaaaagattccatagaacataaatctccaga

SEQ ID NO: 4205 - DNA, 25 bp, synthetic construct
  source 1..25: mol_type = other DNA
tccatagaacataaatctccagaaa

SEQ ID NO: 4206 - DNA, 26 bp, synthetic construct
  source 1..26: mol_type = other DNA
ttccatagaacataaatctccagaaa

SEQ ID NO: 4207 - DNA, 27 bp, synthetic construct
  source 1..27: mol_type = other DNA
attccatagaacataaatctccagaaa

SEQ ID NO: 4208 - DNA, 28 bp, synthetic construct
  source 1..28: mol_type = other DNA
gattccatagaacataaatctccagaaa

SEQ ID NO: 4209 - DNA, 29 bp, synthetic construct
  source 1..29: mol_type = other DNA
agattccatagaacataaatctccagaaa

SEQ ID NO: 4210 - DNA, 30 bp, synthetic construct
  source 1..30: mol_type = other DNA
aagattccatagaacataaatctccagaaa

SEQ ID NO: 4211 - DNA, 31 bp, synthetic construct
  source 1..31: mol_type = other DNA
aaagattccatagaacataaatctccagaaa

SEQ ID NO: 4212 - DNA, 32 bp, synthetic construct
  source 1..32: mol_type = other DNA
aaaagattccatagaacataaatctccagaaa

SEQ ID NO: 4213 - DNA, 33 bp, synthetic construct
  source 1..33: mol_type = other DNA
aaaaagattccatagaacataaatctccagaaa

SEQ ID NO: 4214 - DNA, 34 bp, synthetic construct
  source 1..34: mol_type = other DNA
taaaaagattccatagaacataaatctccagaaa

SEQ ID NO: 4215 - DNA, 35 bp, synthetic construct
  source 1..35: mol_type = other DNA
ataaaaagattccatagaacataaatctccagaaa

SEQ ID NO: 4216 - DNA, 36 bp, synthetic construct
  source 1..36: mol_type = other DNA
tataaaaagattccatagaacataaatctccagaaa

SEQ ID NO: 4217 - DNA, 37 bp, synthetic construct
  source 1..37: mol_type = other DNA
atataaaaagattccatagaacataaatctccagaaa

SEQ ID NO: 4218 - DNA, 38 bp, synthetic construct
  source 1..38: mol_type = other DNA
aatataaaaagattccatagaacataaatctccagaaa

SEQ ID NO: 4219 - DNA, 39 bp, synthetic construct
  source 1..39: mol_type = other DNA
aaatataaaaagattccatagaacataaatctccagaaa

SEQ ID NO: 4220 - DNA, 40 bp, synthetic construct
  source 1..40: mol_type = other DNA
taaatataaaaagattccatagaacataaatctccagaaa

SEQ ID NO: 4221 - DNA, 39 bp, synthetic construct
  source 1..39: mol_type = other DNA
tccatagaacataaatctccagaaaaaacatcgtctaag

SEQ ID NO: 4222 - DNA, 39 bp, synthetic construct
  source 1..39: mol_type = other DNA
tccatagaacataaatctccagaaaaaacatcgccgaag

SEQ ID NO: 4223 - DNA, 40 bp, synthetic construct
  source 1..40: mol_type = other DNA
ttccatagaacataaatctccagaaaaaacatcgtctaag

SEQ ID NO: 4224 - DNA, 40 bp, synthetic construct
  source 1..40: mol_type = other DNA
ttccatagaacataaatctccagaaaaaacatcgccgaag

SEQ ID NO: 4225 - DNA, 38 bp, synthetic construct
  source 1..38: mol_type = other DNA
tccatagaacataaatctccagaaaaaacatcgccgaa

SEQ ID NO: 4226 - DNA, 39 bp, synthetic construct
  source 1..39: mol_type = other DNA
ttccatagaacataaatctccagaaaaaacatcgccgaa

SEQ ID NO: 4227 - DNA, 40 bp, synthetic construct
  source 1..40: mol_type = other DNA
attccatagaacataaatctccagaaaaaacatcgccgaa

SEQ ID NO: 4228 - DNA, 10 bp, synthetic construct
  source 1..10: mol_type = other DNA
tgttctatgg

SEQ ID NO: 4229 - DNA, 10 bp, synthetic construct
  source 1..10: mol_type = other DNA
tgttttatgg

SEQ ID NO: 4230 - DNA, 11 bp, synthetic construct
  source 1..11: mol_type = other DNA
atgttttatgg

SEQ ID NO: 4231 - DNA, 11 bp, synthetic construct
  source 1..11: mol_type = other DNA
atgttctatgg

SEQ ID NO: 4232 - DNA, 12 bp, synthetic construct
  source 1..12: mol_type = other DNA
tatgttttatgg

SEQ ID NO: 4233 - DNA, 12 bp, synthetic construct
  source 1..12: mol_type = other DNA
tatgttctatgg

SEQ ID NO: 4234 - DNA, 13 bp, synthetic construct
  source 1..13: mol_type = other DNA
ttatgttttatgg

SEQ ID NO: 4235 - DNA, 13 bp, synthetic construct
  source 1..13: mol_type = other DNA
ttatgttctatgg

SEQ ID NO: 4236 - DNA, 14 bp, synthetic construct
  source 1..14: mol_type = other DNA
tttatgttctatgg

SEQ ID NO: 4237 - DNA, 14 bp, synthetic construct
  source 1..14: mol_type = other DNA
tttatgttttatgg

SEQ ID NO: 4238 - DNA, 15 bp, synthetic construct
  source 1..15: mol_type = other DNA
atttatgttttatgg

SEQ ID NO: 4239 - DNA, 15 bp, synthetic construct
  source 1..15: mol_type = other DNA
atttatgttctatgg

SEQ ID NO: 4240 - DNA, 16 bp, synthetic construct
  source 1..16: mol_type = other DNA
gatttatgttttatgg

SEQ ID NO: 4241 - DNA, 16 bp, synthetic construct
  source 1..16: mol_type = other DNA
gatttatgttctatgg

SEQ ID NO: 4242 - DNA, 17 bp, synthetic construct
  source 1..17: mol_type = other DNA
agatttatgttttatgg

SEQ ID NO: 4243 - DNA, 17 bp, synthetic construct
  source 1..17: mol_type = other DNA
agatttatgttctatgg

SEQ ID NO: 4244 - DNA, 18 bp, synthetic construct
  source 1..18: mol_type = other DNA
gagatttatgttttatgg

SEQ ID NO: 4245 - DNA, 18 bp, synthetic construct
  source 1..18: mol_type = other DNA
gagatttatgttctatgg

SEQ ID NO: 4246 - DNA, 19 bp, synthetic construct
  source 1..19: mol_type = other DNA
ggagatttatgttttatgg

SEQ ID NO: 4247 - DNA, 19 bp, synthetic construct
  source 1..19: mol_type = other DNA
ggagatttatgttctatgg

SEQ ID NO: 4248 - DNA, 20 bp, synthetic construct
  source 1..20: mol_type = other DNA
tggagatttatgttctatgg

SEQ ID NO: 4249 - DNA, 20 bp, synthetic construct
  source 1..20: mol_type = other DNA
tggagatttatgttttatgg

SEQ ID NO: 4250 - DNA, 21 bp, synthetic construct
  source 1..21: mol_type = other DNA
ctggagatttatgttctatgg

SEQ ID NO: 4251 - DNA, 21 bp, synthetic construct
  source 1..21: mol_type = other DNA
ctggagatttatgttttatgg

SEQ ID NO: 4252 - DNA, 22 bp, synthetic construct
  source 1..22: mol_type = other DNA
tctggagatttatgttttatgg

SEQ ID NO: 4253 - DNA, 22 bp, synthetic construct
  source 1..22: mol_type = other DNA
tctggagatttatgttctatgg

SEQ ID NO: 4254 - DNA, 23 bp, synthetic construct
  source 1..23: mol_type = other DNA
ttctggagatttatgttctatgg

SEQ ID NO: 4255 - DNA, 23 bp, synthetic construct
  source 1..23: mol_type = other DNA
ttctggagatttatgttttatgg

SEQ ID NO: 4256 - DNA, 24 bp, synthetic construct
  source 1..24: mol_type = other DNA
tttctggagatttatgttttatgg

SEQ ID NO: 4257 - DNA, 24 bp, synthetic construct
  source 1..24: mol_type = other DNA
tttctggagatttatgttctatgg

SEQ ID NO: 4258 - DNA, 25 bp, synthetic construct
  source 1..25: mol_type = other DNA
ttttctggagatttatgttctatgg

SEQ ID NO: 4259 - DNA, 25 bp, synthetic construct
  source 1..25: mol_type = other DNA
ttttctggagatttatgttttatgg

SEQ ID NO: 4260 - DNA, 26 bp, synthetic construct
  source 1..26: mol_type = other DNA
tttttctggagatttatgttttatgg

SEQ ID NO: 4261 - DNA, 26 bp, synthetic construct
  source 1..26: mol_type = other DNA
tttttctggagatttatgttctatgg

SEQ ID NO: 4262 - DNA, 27 bp, synthetic construct
  source 1..27: mol_type = other DNA
ttttttctggagatttatgttttatgg

SEQ ID NO: 4263 - DNA, 27 bp, synthetic construct
  source 1..27: mol_type = other DNA
ttttttctggagatttatgttctatgg

SEQ ID NO: 4264 - DNA, 28 bp, synthetic construct
  source 1..28: mol_type = other DNA
gttttttctggagatttatgttttatgg

SEQ ID NO: 4265 - DNA, 28 bp, synthetic construct
  source 1..28: mol_type = other DNA
gttttttctggagatttatgttctatgg

SEQ ID NO: 4266 - DNA, 29 bp, synthetic construct
  source 1..29: mol_type = other DNA
tgttttttctggagatttatgttctatgg

SEQ ID NO: 4267 - DNA, 29 bp, synthetic construct
  source 1..29: mol_type = other DNA
tgttttttctggagatttatgttttatgg

SEQ ID NO: 4268 - DNA, 30 bp, synthetic construct
  source 1..30: mol_type = other DNA
atgttttttctggagatttatgttttatgg

SEQ ID NO: 4269 - DNA, 30 bp, synthetic construct
  source 1..30: mol_type = other DNA
atgttttttctggagatttatgttctatgg

SEQ ID NO: 4270 - DNA, 31 bp, synthetic construct
  source 1..31: mol_type = other DNA
gatgttttttctggagatttatgttctatgg

SEQ ID NO: 4271 - DNA, 31 bp, synthetic construct
  source 1..31: mol_type = other DNA
gatgttttttctggagatttatgttttatgg

SEQ ID NO: 4272 - DNA, 32 bp, synthetic construct
  source 1..32: mol_type = other DNA
cgatgttttttctggagatttatgttttatgg

SEQ ID NO: 4273 - DNA, 32 bp, synthetic construct
  source 1..32: mol_type = other DNA
cgatgttttttctggagatttatgttctatgg

SEQ ID NO: 4274 - DNA, 33 bp, synthetic construct
  source 1..33: mol_type = other DNA
gcgatgttttttctggagatttatgttttatgg

SEQ ID NO: 4275 - DNA, 33 bp, synthetic construct
  source 1..33: mol_type = other DNA
gcgatgttttttctggagatttatgttctatgg

SEQ ID NO: 4276 - DNA, 34 bp, synthetic construct
  source 1..34: mol_type = other DNA
ggcgatgttttttctggagatttatgttctatgg

SEQ ID NO: 4277 - DNA, 34 bp, synthetic construct
  source 1..34: mol_type = other DNA
ggcgatgttttttctggagatttatgttttatgg

SEQ ID NO: 4278 - DNA, 35 bp, synthetic construct
  source 1..35: mol_type = other DNA
cggcgatgttttttctggagatttatgttttatgg

SEQ ID NO: 4279 - DNA, 35 bp, synthetic construct
  source 1..35: mol_type = other DNA
cggcgatgttttttctggagatttatgttctatgg

SEQ ID NO: 4280 - DNA, 36 bp, synthetic construct
  source 1..36: mol_type = other DNA
tcggcgatgttttttctggagatttatgttctatgg

SEQ ID NO: 4281 - DNA, 36 bp, synthetic construct
  source 1..36: mol_type = other DNA
tcggcgatgttttttctggagatttatgttttatgg

SEQ ID NO: 4282 - DNA, 37 bp, synthetic construct
  source 1..37: mol_type = other DNA
ttcggcgatgttttttctggagatttatgttctatgg

SEQ ID NO: 4283 - DNA, 37 bp, synthetic construct
  source 1..37: mol_type = other DNA
ttcggcgatgttttttctggagatttatgttttatgg

SEQ ID NO: 4284 - DNA, 38 bp, synthetic construct
  source 1..38: mol_type = other DNA
cttcggcgatgttttttctggagatttatgttttatgg

SEQ ID NO: 4285 - DNA, 38 bp, synthetic construct
  source 1..38: mol_type = other DNA
cttcggcgatgttttttctggagatttatgttctatgg

SEQ ID NO: 4286 - DNA, 39 bp, synthetic construct
  source 1..39: mol_type = other DNA
ccttcggcgatgttttttctggagatttatgttctatgg

SEQ ID NO: 4287 - DNA, 39 bp, synthetic construct
  source 1..39: mol_type = other DNA
ccttcggcgatgttttttctggagatttatgttttatgg

SEQ ID NO: 4288 - DNA, 40 bp, synthetic construct
  source 1..40: mol_type = other DNA
cccttcggcgatgttttttctggagatttatgttctatgg

SEQ ID NO: 4289 - DNA, 40 bp, synthetic construct
  source 1..40: mol_type = other DNA
cccttcggcgatgttttttctggagatttatgttttatgg

SEQ ID NO: 4290 - DNA, 36 bp, synthetic construct
  source 1..36: mol_type = other DNA
ggaatctttttatatttaggggtaaggatctcattt

SEQ ID NO: 4291 - DNA, 37 bp, synthetic construct
  source 1..37: mol_type = other DNA
tggaatctttttatatttaggggtaaggatctcattt

SEQ ID NO: 4292 - DNA, 38 bp, synthetic construct
  source 1..38: mol_type = other DNA
atggaatctttttatatttaggggtaaggatctcattt

SEQ ID NO: 4293 - DNA, 39 bp, synthetic construct
  source 1..39: mol_type = other DNA
tatggaatctttttatatttaggggtaaggatctcattt

SEQ ID NO: 4294 - DNA, 40 bp, synthetic construct
  source 1..40: mol_type = other DNA
ctatggaatctttttatatttaggggtaaggatctcattt

SEQ ID NO: 4295 - DNA, 33 bp, synthetic construct
  source 1..33: mol_type = other DNA
tccatagaacataaatctccagaaaaaacatcg

SEQ ID NO: 4296 - DNA, 34 bp, synthetic construct
  source 1..34: mol_type = other DNA
ttccatagaacataaatctccagaaaaaacatcg

SEQ ID NO: 4297 - DNA, 35 bp, synthetic construct
  source 1..35: mol_type = other DNA
attccatagaacataaatctccagaaaaaacatcg

SEQ ID NO: 4298 - DNA, 36 bp, synthetic construct
  source 1..36: mol_type = other DNA
gattccatagaacataaatctccagaaaaaacatcg

SEQ ID NO: 4299 - DNA, 37 bp, synthetic construct
  source 1..37: mol_type = other DNA
agattccatagaacataaatctccagaaaaaacatcg

SEQ ID NO: 4300 - DNA, 38 bp, synthetic construct
  source 1..38: mol_type = other DNA
aagattccatagaacataaatctccagaaaaaacatcg

SEQ ID NO: 4301 - DNA, 39 bp, synthetic construct
  source 1..39: mol_type = other DNA
aaagattccatagaacataaatctccagaaaaaacatcg

SEQ ID NO: 4302 - DNA, 40 bp, synthetic construct
  source 1..40: mol_type = other DNA
aaaagattccatagaacataaatctccagaaaaaacatcg

SEQ ID NO: 4303 - DNA, 21 bp, synthetic construct
  source 1..21: mol_type = other DNA
tccatagaacataaatctcca

SEQ ID NO: 4304 - DNA, 22 bp, synthetic construct
  source 1..22: mol_type = other DNA
ttccatagaacataaatctcca

SEQ ID NO: 4305 - DNA, 23 bp, synthetic construct
  source 1..23: mol_type = other DNA
attccatagaacataaatctcca

SEQ ID NO: 4306 - DNA, 24 bp, synthetic construct
  source 1..24: mol_type = other DNA
gattccatagaacataaatctcca

SEQ ID NO: 4307 - DNA, 25 bp, synthetic construct
  source 1..25: mol_type = other DNA
agattccatagaacataaatctcca

SEQ ID NO: 4308 - DNA, 26 bp, synthetic construct
  source 1..26: mol_type = other DNA
aagattccatagaacataaatctcca

SEQ ID NO: 4309 - DNA, 27 bp, synthetic construct
  source 1..27: mol_type = other DNA
aaagattccatagaacataaatctcca

SEQ ID NO: 4310 - DNA, 28 bp, synthetic construct
  source 1..28: mol_type = other DNA
aaaagattccatagaacataaatctcca

SEQ ID NO: 4311 - DNA, 29 bp, synthetic construct
  source 1..29: mol_type = other DNA
aaaaagattccatagaacataaatctcca

SEQ ID NO: 4312 - DNA, 30 bp, synthetic construct
  source 1..30: mol_type = other DNA
taaaaagattccatagaacataaatctcca

SEQ ID NO: 4313 - DNA, 31 bp, synthetic construct
  source 1..31: mol_type = other DNA
ataaaaagattccatagaacataaatctcca

SEQ ID NO: 4314 - DNA, 32 bp, synthetic construct
  source 1..32: mol_type = other DNA
tataaaaagattccatagaacataaatctcca

SEQ ID NO: 4315 - DNA, 33 bp, synthetic construct
  source 1..33: mol_type = other DNA
atataaaaagattccatagaacataaatctcca

SEQ ID NO: 4316 - DNA, 34 bp, synthetic construct
  source 1..34: mol_type = other DNA
aatataaaaagattccatagaacataaatctcca

SEQ ID NO: 4317 - DNA, 35 bp, synthetic construct
  source 1..35: mol_type = other DNA
aaatataaaaagattccatagaacataaatctcca

SEQ ID NO: 4318 - DNA, 36 bp, synthetic construct
  source 1..36: mol_type = other DNA
taaatataaaaagattccatagaacataaatctcca

SEQ ID NO: 4319 - DNA, 37 bp, synthetic construct
  source 1..37: mol_type = other DNA
ctaaatataaaaagattccatagaacataaatctcca

SEQ ID NO: 4320 - DNA, 38 bp, synthetic construct
  source 1..38: mol_type = other DNA
cctaaatataaaaagattccatagaacataaatctcca

SEQ ID NO: 4321 - DNA, 39 bp, synthetic construct
  source 1..39: mol_type = other DNA
ccctaaatataaaaagattccatagaacataaatctcca

SEQ ID NO: 4322 - DNA, 40 bp, synthetic construct
  source 1..40: mol_type = other DNA
cccctaaatataaaaagattccatagaacataaatctcca

SEQ ID NO: 4323 - DNA, 10 bp, synthetic construct
  source 1..10: mol_type = other DNA
gattccatag

SEQ ID NO: 4324 - DNA, 11 bp, synthetic construct
  source 1..11: mol_type = other DNA
agattccatag

SEQ ID NO: 4325 - DNA, 12 bp, synthetic construct
  source 1..12: mol_type = other DNA
aagattccatag

SEQ ID NO: 4326 - DNA, 13 bp, synthetic construct
  source 1..13: mol_type = other DNA
aaagattccatag

SEQ ID NO: 4327 - DNA, 14 bp, synthetic construct
  source 1..14: mol_type = other DNA
aaaagattccatag

SEQ ID NO: 4328 - DNA, 15 bp, synthetic construct
  source 1..15: mol_type = other DNA
aaaaagattccatag

SEQ ID NO: 4329 - DNA, 16 bp, synthetic construct
  source 1..16: mol_type = other DNA
taaaaagattccatag

SEQ ID NO: 4330 - DNA, 17 bp, synthetic construct
  source 1..17: mol_type = other DNA
ataaaaagattccatag

SEQ ID NO: 4331 - DNA, 18 bp, synthetic construct
  source 1..18: mol_type = other DNA
tataaaaagattccatag

SEQ ID NO: 4332 - DNA, 19 bp, synthetic construct
  source 1..19: mol_type = other DNA
atataaaaagattccatag

SEQ ID NO: 4333 - DNA, 20 bp, synthetic construct
  source 1..20: mol_type = other DNA
aatataaaaagattccatag

SEQ ID NO: 4334 - DNA, 21 bp, synthetic construct
  source 1..21: mol_type = other DNA
aaatataaaaagattccatag

SEQ ID NO: 4335 - DNA, 22 bp, synthetic construct
  source 1..22: mol_type = other DNA
taaatataaaaagattccatag

SEQ ID NO: 4336 - DNA, 23 bp, synthetic construct
  source 1..23: mol_type = other DNA
ctaaatataaaaagattccatag

SEQ ID NO: 4337 - DNA, 24 bp, synthetic construct
  source 1..24: mol_type = other DNA
cctaaatataaaaagattccatag

SEQ ID NO: 4338 - DNA, 25 bp, synthetic construct
  source 1..25: mol_type = other DNA
ccctaaatataaaaagattccatag

SEQ ID NO: 4339 - DNA, 26 bp, synthetic construct
  source 1..26: mol_type = other DNA
cccctaaatataaaaagattccatag

SEQ ID NO: 4340 - DNA, 27 bp, synthetic construct
  source 1..27: mol_type = other DNA
acccctaaatataaaaagattccatag

SEQ ID NO: 4341 - DNA, 28 bp, synthetic construct
  source 1..28: mol_type = other DNA
tacccctaaatataaaaagattccatag

SEQ ID NO: 4342 - DNA, 29 bp, synthetic construct
  source 1..29: mol_type = other DNA
ttacccctaaatataaaaagattccatag

SEQ ID NO: 4343 - DNA, 30 bp, synthetic construct
  source 1..30: mol_type = other DNA
cttacccctaaatataaaaagattccatag

SEQ ID NO: 4344 - DNA, 31 bp, synthetic construct
  source 1..31: mol_type = other DNA
ccttacccctaaatataaaaagattccatag

SEQ ID NO: 4345 - DNA, 32 bp, synthetic construct
  source 1..32: mol_type = other DNA
tccttacccctaaatataaaaagattccatag

SEQ ID NO: 4346 - DNA, 33 bp, synthetic construct
  source 1..33: mol_type = other DNA
atccttacccctaaatataaaaagattccatag

SEQ ID NO: 4347 - DNA, 34 bp, synthetic construct
  source 1..34: mol_type = other DNA
gatccttacccctaaatataaaaagattccatag

SEQ ID NO: 4348 - DNA, 35 bp, synthetic construct
  source 1..35: mol_type = other DNA
agatccttacccctaaatataaaaagattccatag

SEQ ID NO: 4349 - DNA, 36 bp, synthetic construct
  source 1..36: mol_type = other DNA
gagatccttacccctaaatataaaaagattccatag

SEQ ID NO: 4350 - DNA, 37 bp, synthetic construct
  source 1..37: mol_type = other DNA
tgagatccttacccctaaatataaaaagattccatag

SEQ ID NO: 4351 - DNA, 38 bp, synthetic construct
  source 1..38: mol_type = other DNA
atgagatccttacccctaaatataaaaagattccatag

SEQ ID NO: 4352 - DNA, 39 bp, synthetic construct
  source 1..39: mol_type = other DNA
aatgagatccttacccctaaatataaaaagattccatag

SEQ ID NO: 4353 - DNA, 40 bp, synthetic construct
  source 1..40: mol_type = other DNA
aaatgagatccttacccctaaatataaaaagattccatag

SEQ ID NO: 4354 - DNA, 22 bp, synthetic construct
  source 1..22: mol_type = other DNA
tccatagaacataaaccgccag

SEQ ID NO: 4355 - DNA, 22 bp, synthetic construct
  source 1..22: mol_type = other DNA
tccatagaacataaatctccag

SEQ ID NO: 4356 - DNA, 23 bp, synthetic construct
  source 1..23: mol_type = other DNA
ttccatagaacataaatctccag

SEQ ID NO: 4357 - DNA, 23 bp, synthetic construct
  source 1..23: mol_type = other DNA
ttccatagaacataaaccgccag

SEQ ID NO: 4358 - DNA, 24 bp, synthetic construct
  source 1..24: mol_type = other DNA
attccatagaacataaatctccag

SEQ ID NO: 4359 - DNA, 24 bp, synthetic construct
  source 1..24: mol_type = other DNA
attccatagaacataaaccgccag

SEQ ID NO: 4360 - DNA, 25 bp, synthetic construct
  source 1..25: mol_type = other DNA
gattccatagaacataaatctccag

SEQ ID NO: 4361 - DNA, 25 bp, synthetic construct
  source 1..25: mol_type = other DNA
gattccatagaacataaaccgccag

SEQ ID NO: 4362 - DNA, 26 bp, synthetic construct
  source 1..26: mol_type = other DNA
agattccatagaacataaaccgccag

SEQ ID NO: 4363 - DNA, 26 bp, synthetic construct
  source 1..26: mol_type = other DNA
agattccatagaacataaatctccag

SEQ ID NO: 4364 - DNA, 27 bp, synthetic construct
  source 1..27: mol_type = other DNA
aagattccatagaacataaaccgccag

SEQ ID NO: 4365 - DNA, 27 bp, synthetic construct
  source 1..27: mol_type = other DNA
aagattccatagaacataaatctccag

SEQ ID NO: 4366 - DNA, 28 bp, synthetic construct
  source 1..28: mol_type = other DNA
aaagattccatagaacataaatctccag

SEQ ID NO: 4367 - DNA, 28 bp, synthetic construct
  source 1..28: mol_type = other DNA
aaagattccatagaacataaaccgccag

SEQ ID NO: 4368 - DNA, 29 bp, synthetic construct
  source 1..29: mol_type = other DNA
aaaagattccatagaacataaaccgccag

SEQ ID NO: 4369 - DNA, 29 bp, synthetic construct
  source 1..29: mol_type = other DNA
aaaagattccatagaacataaatctccag

SEQ ID NO: 4370 - DNA, 30 bp, synthetic construct
  source 1..30: mol_type = other DNA
aaaaagattccatagaacataaatctccag

SEQ ID NO: 4371 - DNA, 30 bp, synthetic construct
  source 1..30: mol_type = other DNA
aaaaagattccatagaacataaaccgccag

SEQ ID NO: 4372 - DNA, 31 bp, synthetic construct
  source 1..31: mol_type = other DNA
taaaaagattccatagaacataaaccgccag

SEQ ID NO: 4373 - DNA, 31 bp, synthetic construct
  source 1..31: mol_type = other DNA
taaaaagattccatagaacataaatctccag

SEQ ID NO: 4374 - DNA, 32 bp, synthetic construct
  source 1..32: mol_type = other DNA
ataaaaagattccatagaacataaatctccag

SEQ ID NO: 4375 - DNA, 32 bp, synthetic construct
  source 1..32: mol_type = other DNA
ataaaaagattccatagaacataaaccgccag

SEQ ID NO: 4376 - DNA, 33 bp, synthetic construct
  source 1..33: mol_type = other DNA
tataaaaagattccatagaacataaaccgccag

SEQ ID NO: 4377 - DNA, 33 bp, synthetic construct
  source 1..33: mol_type = other DNA
tataaaaagattccatagaacataaatctccag

SEQ ID NO: 4378 - DNA, 34 bp, synthetic construct
  source 1..34: mol_type = other DNA
atataaaaagattccatagaacataaaccgccag

SEQ ID NO: 4379 - DNA, 34 bp, synthetic construct
  source 1..34: mol_type = other DNA
atataaaaagattccatagaacataaatctccag

SEQ ID NO: 4380 - DNA, 35 bp, synthetic construct
  source 1..35: mol_type = other DNA
aatataaaaagattccatagaacataaatctccag

SEQ ID NO: 4381 - DNA, 35 bp, synthetic construct
  source 1..35: mol_type = other DNA
aatataaaaagattccatagaacataaaccgccag

SEQ ID NO: 4382 - DNA, 36 bp, synthetic construct
  source 1..36: mol_type = other DNA
aaatataaaaagattccatagaacataaaccgccag

SEQ ID NO: 4383 - DNA, 36 bp, synthetic construct
  source 1..36: mol_type = other DNA
aaatataaaaagattccatagaacataaatctccag

SEQ ID NO: 4384 - DNA, 37 bp, synthetic construct
  source 1..37: mol_type = other DNA
taaatataaaaagattccatagaacataaaccgccag

SEQ ID NO: 4385 - DNA, 37 bp, synthetic construct
  source 1..37: mol_type = other DNA
taaatataaaaagattccatagaacataaatctccag

SEQ ID NO: 4386 - DNA, 38 bp, synthetic construct
  source 1..38: mol_type = other DNA
ctaaatataaaaagattccatagaacataaatctccag

SEQ ID NO: 4387 - DNA, 38 bp, synthetic construct
  source 1..38: mol_type = other DNA
ctaaatataaaaagattccatagaacataaaccgccag

SEQ ID NO: 4388 - DNA, 39 bp, synthetic construct
  source 1..39: mol_type = other DNA
cctaaatataaaaagattccatagaacataaaccgccag

SEQ ID NO: 4389 - DNA, 39 bp, synthetic construct
  source 1..39: mol_type = other DNA
cctaaatataaaaagattccatagaacataaatctccag

SEQ ID NO: 4390 - DNA, 40 bp, synthetic construct
  source 1..40: mol_type = other DNA
ccctaaatataaaaagattccatagaacataaatctccag

SEQ ID NO: 4391 - DNA, 40 bp, synthetic construct
  source 1..40: mol_type = other DNA
ccctaaatataaaaagattccatagaacataaaccgccag

SEQ ID NO: 4392 - DNA, 27 bp, synthetic construct
  source 1..27: mol_type = other DNA
tttatatttaggggtaaggatctcatt

SEQ ID NO: 4393 - DNA, 27 bp, synthetic construct
  source 1..27: mol_type = other DNA
tttatatttaggggtaaggatttcatt

SEQ ID NO: 4394 - DNA, 28 bp, synthetic construct
  source 1..28: mol_type = other DNA
ttttatatttaggggtaaggatctcatt

SEQ ID NO: 4395 - DNA, 28 bp, synthetic construct
  source 1..28: mol_type = other DNA
ttttatatttaggggtaaggatttcatt

SEQ ID NO: 4396 - DNA, 29 bp, synthetic construct
  source 1..29: mol_type = other DNA
tttttatatttaggggtaaggatctcatt

SEQ ID NO: 4397 - DNA, 29 bp, synthetic construct
  source 1..29: mol_type = other DNA
tttttatatttaggggtaaggatttcatt

SEQ ID NO: 4398 - DNA, 30 bp, synthetic construct
  source 1..30: mol_type = other DNA
ctttttatatttaggggtaaggatttcatt

SEQ ID NO: 4399 - DNA, 30 bp, synthetic construct
  source 1..30: mol_type = other DNA
ctttttatatttaggggtaaggatctcatt

SEQ ID NO: 4400 - DNA, 31 bp, synthetic construct
  source 1..31: mol_type = other DNA
tctttttatatttaggggtaaggatttcatt

SEQ ID NO: 4401 - DNA, 31 bp, synthetic construct
  source 1..31: mol_type = other DNA
tctttttatatttaggggtaaggatctcatt

SEQ ID NO: 4402 - DNA, 32 bp, synthetic construct
  source 1..32: mol_type = other DNA
atctttttatatttaggggtaaggatttcatt

SEQ ID NO: 4403 - DNA, 32 bp, synthetic construct
  source 1..32: mol_type = other DNA
atctttttatatttaggggtaaggatctcatt

SEQ ID NO: 4404 - DNA, 33 bp, synthetic construct
  source 1..33: mol_type = other DNA
aatctttttatatttaggggtaaggatctcatt

SEQ ID NO: 4405 - DNA, 33 bp, synthetic construct
  source 1..33: mol_type = other DNA
aatctttttatatttaggggtaaggatttcatt

SEQ ID NO: 4406 - DNA, 34 bp, synthetic construct
  source 1..34: mol_type = other DNA
gaatctttttatatttaggggtaaggatttcatt

SEQ ID NO: 4407 - DNA, 34 bp, synthetic construct
  source 1..34: mol_type = other DNA
gaatctttttatatttaggggtaaggatctcatt

SEQ ID NO: 4408 - DNA, 35 bp, synthetic construct; identical to SEQ ID NO: 4027
  source 1..35: mol_type = other DNA

SEQ ID NO: 4409 - DNA, 35 bp, synthetic construct; identical to SEQ ID NO: 4028
  source 1..35: mol_type = other DNA

SEQ ID NO: 4410 - DNA, 36 bp, synthetic construct; identical to SEQ ID NO: 4029
  source 1..36: mol_type = other DNA

SEQ ID NO: 4411 - DNA, 36 bp, synthetic construct; identical to SEQ ID NO: 4030
  source 1..36: mol_type = other DNA

SEQ ID NO: 4412 - DNA, 37 bp, synthetic construct; identical to SEQ ID NO: 4032
  source 1..37: mol_type = other DNA

SEQ ID NO: 4413 - DNA, 37 bp, synthetic construct; identical to SEQ ID NO: 4031
  source 1..37: mol_type = other DNA

SEQ ID NO: 4414 - DNA, 38 bp, synthetic construct; identical to SEQ ID NO: 4034
  source 1..38: mol_type = other DNA

SEQ ID NO: 4415 - DNA, 38 bp, synthetic construct; identical to SEQ ID NO: 4033
  source 1..38: mol_type = other DNA

SEQ ID NO: 4416 - DNA, 39 bp, synthetic construct; identical to SEQ ID NO: 4036
  source 1..39: mol_type = other DNA

SEQ ID NO: 4417 - DNA, 39 bp, synthetic construct; identical to SEQ ID NO: 4035
  source 1..39: mol_type = other DNA

SEQ ID NO: 4418 - DNA, 40 bp, synthetic construct; identical to SEQ ID NO: 4037
  source 1..40: mol_type = other DNA

SEQ ID NO: 4419 - DNA, 40 bp, synthetic construct; identical to SEQ ID NO: 4038
  source 1..40: mol_type = other DNA

SEQ ID NO: 4420 - DNA, 40 bp, synthetic construct
  source 1..40: mol_type = other DNA
tttatatttaggggtaaggatctcatttgtacattcatta

SEQ ID NO: 4421 - DNA, 10 bp, synthetic construct
  source 1..10: mol_type = other DNA
atctttttat

SEQ ID NO: 4422 - DNA, 11 bp, synthetic construct
  source 1..11: mol_type = other DNA
aatctttttat

SEQ ID NO: 4423 - DNA, 12 bp, synthetic construct
  source 1..12: mol_type = other DNA
gaatctttttat

SEQ ID NO: 4424 - DNA, 13 bp, synthetic construct
  source 1..13: mol_type = other DNA
ggaatctttttat

SEQ ID NO: 4425 - DNA, 14 bp, synthetic construct
  source 1..14: mol_type = other DNA
tggaatctttttat

SEQ ID NO: 4426 - DNA, 15 bp, synthetic construct
  source 1..15: mol_type = other DNA
atggaatctttttat

SEQ ID NO: 4427 - DNA, 16 bp, synthetic construct
  source 1..16: mol_type = other DNA
tatggaatctttttat

SEQ ID NO: 4428 - DNA, 17 bp, synthetic construct
  source 1..17: mol_type = other DNA
ctatggaatctttttat

SEQ ID NO: 4429 - DNA, 18 bp, synthetic construct
  source 1..18: mol_type = other DNA
tctatggaatctttttat

SEQ ID NO: 4430 - DNA, 19 bp, synthetic construct
  source 1..19: mol_type = other DNA
ttctatggaatctttttat

SEQ ID NO: 4431 - DNA, 20 bp, synthetic construct
  source 1..20: mol_type = other DNA
gttctatggaatctttttat

SEQ ID NO: 4432 - DNA, 21 bp, synthetic construct
  source 1..21: mol_type = other DNA
tgttctatggaatctttttat

SEQ ID NO: 4433 - DNA, 22 bp, synthetic construct
  source 1..22: mol_type = other DNA
atgttctatggaatctttttat

SEQ ID NO: 4434 - DNA, 23 bp, synthetic construct
  source 1..23: mol_type = other DNA
tatgttctatggaatctttttat

SEQ ID NO: 4435 - DNA, 24 bp, synthetic construct
  source 1..24: mol_type = other DNA
ttatgttctatggaatctttttat

SEQ ID NO: 4436 - DNA, 25 bp, synthetic construct
  source 1..25: mol_type = other DNA
tttatgttctatggaatctttttat

SEQ ID NO: 4437 - DNA, 26 bp, synthetic construct
  source 1..26: mol_type = other DNA
atttatgttctatggaatctttttat

SEQ ID NO: 4438 - DNA, 27 bp, synthetic construct
  source 1..27: mol_type = other DNA
gatttatgttctatggaatctttttat

SEQ ID NO: 4439 - DNA, 28 bp, synthetic construct
  source 1..28: mol_type = other DNA
agatttatgttctatggaatctttttat

SEQ ID NO: 4440 - DNA, 29 bp, synthetic construct
  source 1..29: mol_type = other DNA
gagatttatgttctatggaatctttttat

SEQ ID NO: 4441 - DNA, 30 bp, synthetic construct
  source 1..30: mol_type = other DNA
ggagatttatgttctatggaatctttttat

SEQ ID NO: 4442 - DNA, 31 bp, synthetic construct
  source 1..31: mol_type = other DNA
tggagatttatgttctatggaatctttttat

SEQ ID NO: 4443 - DNA, 32 bp, synthetic construct
  source 1..32: mol_type = other DNA
ctggagatttatgttctatggaatctttttat

SEQ ID NO: 4444 - DNA, 33 bp, synthetic construct
  source 1..33: mol_type = other DNA
tctggagatttatgttctatggaatctttttat

SEQ ID NO: 4445 - DNA, 34 bp, synthetic construct
  source 1..34: mol_type = other DNA
ttctggagatttatgttctatggaatctttttat

SEQ ID NO: 4446 - DNA, 35 bp, synthetic construct
  source 1..35: mol_type = other DNA
tttctggagatttatgttctatggaatctttttat

SEQ ID NO: 4447 - DNA, 36 bp, synthetic construct
  source 1..36: mol_type = other DNA
ttttctggagatttatgttctatggaatctttttat

SEQ ID NO: 4448 - DNA, 37 bp, synthetic construct
  source 1..37: mol_type = other DNA
tttttctggagatttatgttctatggaatctttttat

SEQ ID NO: 4449 - DNA, 38 bp, synthetic construct
  source 1..38: mol_type = other DNA
ttttttctggagatttatgttctatggaatctttttat

SEQ ID NO: 4450 - DNA, 39 bp, synthetic construct
  source 1..39: mol_type = other DNA
gttttttctggagatttatgttctatggaatctttttat

SEQ ID NO: 4451 - DNA, 40 bp, synthetic construct
  source 1..40: mol_type = other DNA
tgttttttctggagatttatgttctatggaatctttttat

SEQ ID NO: 4452 - DNA, 23 bp, synthetic construct
  source 1..23: mol_type = other DNA
taaaaagattccatagaacataa

SEQ ID NO: 4453 - DNA, 24 bp, synthetic construct
  source 1..24: mol_type = other DNA
ataaaaagattccatagaacataa

SEQ ID NO: 4454 - DNA, 25 bp, synthetic construct
  source 1..25: mol_type = other DNA
tataaaaagattccatagaacataa

SEQ ID NO: 4455 - DNA, 26 bp, synthetic construct
  source 1..26: mol_type = other DNA
atataaaaagattccatagaacataa

SEQ ID NO: 4456 - DNA, 27 bp, synthetic construct
  source 1..27: mol_type = other DNA
aatataaaaagattccatagaacataa

SEQ ID NO: 4457 - DNA, 28 bp, synthetic construct
  source 1..28: mol_type = other DNA
aaatataaaaagattccatagaacataa

SEQ ID NO: 4458 - DNA, 29 bp, synthetic construct
  source 1..29: mol_type = other DNA
taaatataaaaagattccatagaacataa

SEQ ID NO: 4459 - DNA, 30 bp, synthetic construct; identical to SEQ ID NO: 4060
  source 1..30: mol_type = other DNA

SEQ ID NO: 4460 - DNA, 31 bp, synthetic construct; identical to SEQ ID NO: 4061
  source 1..31: mol_type = other DNA

SEQ ID NO: 4461 - DNA, 32 bp, synthetic construct; identical to SEQ ID NO: 4062
  source 1..32: mol_type = other DNA

SEQ ID NO: 4462 - DNA, 33 bp, synthetic construct; identical to SEQ ID NO: 4063
  source 1..33: mol_type = other DNA

SEQ ID NO: 4463 - DNA, 34 bp, synthetic construct; identical to SEQ ID NO: 4064
  source 1..34: mol_type = other DNA

SEQ ID NO: 4464 - DNA, 35 bp, synthetic construct; identical to SEQ ID NO: 4065
  source 1..35: mol_type = other DNA

SEQ ID NO: 4465 - DNA, 36 bp, synthetic construct; identical to SEQ ID NO: 4066
  source 1..36: mol_type = other DNA

SEQ ID NO: 4466 - DNA, 37 bp, synthetic construct; identical to SEQ ID NO: 4067
  source 1..37: mol_type = other DNA

SEQ ID NO: 4467 - DNA, 38 bp, synthetic construct; identical to SEQ ID NO: 4068
  source 1..38: mol_type = other DNA

SEQ ID NO: 4468 - DNA, 39 bp, synthetic construct; identical to SEQ ID NO: 4069
  source 1..39: mol_type = other DNA

SEQ ID NO: 4469 - DNA, 40 bp, synthetic construct; identical to SEQ ID NO: 4070
  source 1..40: mol_type = other DNA

SEQ ID NO: 4470 - DNA, 26 bp, synthetic construct
  source 1..26: mol_type = other DNA
tttatatttaggggtaaggatctcat

SEQ ID NO: 4471 - DNA, 27 bp, synthetic construct
  source 1..27: mol_type = other DNA
ttttatatttaggggtaaggatctcat

SEQ ID NO: 4472 - DNA, 28 bp, synthetic construct
  source 1..28: mol_type = other DNA
tttttatatttaggggtaaggatctcat

SEQ ID NO: 4473 - DNA, 29 bp, synthetic construct
  source 1..29: mol_type = other DNA
ctttttatatttaggggtaaggatctcat

SEQ ID NO: 4474 - DNA, 30 bp, synthetic construct
  source 1..30: mol_type = other DNA
tctttttatatttaggggtaaggatctcat

SEQ ID NO: 4475 - DNA, 31 bp, synthetic construct
  source 1..31: mol_type = other DNA
atctttttatatttaggggtaaggatctcat

SEQ ID NO: 4476 - DNA, 32 bp, synthetic construct
  source 1..32: mol_type = other DNA
aatctttttatatttaggggtaaggatctcat

SEQ ID NO: 4477 - DNA, 33 bp, synthetic construct
  source 1..33: mol_type = other DNA
gaatctttttatatttaggggtaaggatctcat

SEQ ID NO: 4478 - DNA, 34 bp, synthetic construct; identical to SEQ ID NO: 4071
  source 1..34: mol_type = other DNA

SEQ ID NO: 4479 - DNA, 35 bp, synthetic construct; identical to SEQ ID NO: 4072
  source 1..35: mol_type = other DNA

SEQ ID NO: 4480 - DNA, 36 bp, synthetic construct; identical to SEQ ID NO: 4073
  source 1..36: mol_type = other DNA

SEQ ID NO: 4481 - DNA, 37 bp, synthetic construct; identical to SEQ ID NO: 4074
  source 1..37: mol_type = other DNA

SEQ ID NO: 4482 - DNA, 38 bp, synthetic construct; identical to SEQ ID NO: 4075
  source 1..38: mol_type = other DNA

SEQ ID NO: 4483 - DNA, 39 bp, synthetic construct; identical to SEQ ID NO: 4076
  source 1..39: mol_type = other DNA

SEQ ID NO: 4484 - DNA, 40 bp, synthetic construct; identical to SEQ ID NO: 4077
  source 1..40: mol_type = other DNA

SEQ ID NO: 4485 - DNA, 33 bp, synthetic construct; identical to SEQ ID NO: 4148
  source 1..33: mol_type = other DNA

SEQ ID NO: 4486 - DNA, 34 bp, synthetic construct; identical to SEQ ID NO: 4149
  source 1..34: mol_type = other DNA

SEQ ID NO: 4487 - DNA, 35 bp, synthetic construct; identical to SEQ ID NO: 4150
  source 1..35: mol_type = other DNA

SEQ ID NO: 4488 - DNA, 36 bp, synthetic construct; identical to SEQ ID NO: 4151
  source 1..36: mol_type = other DNA

SEQ ID NO: 4489 - DNA, 37 bp, synthetic construct; identical to SEQ ID NO: 4152
  source 1..37: mol_type = other DNA

SEQ ID NO: 4490 - DNA, 38 bp, synthetic construct; identical to SEQ ID NO: 4153
  source 1..38: mol_type = other DNA

SEQ ID NO: 4491 - DNA, 39 bp, synthetic construct; identical to SEQ ID NO: 4154
  source 1..39: mol_type = other DNA

SEQ ID NO: 4492 - DNA, 40 bp, synthetic construct; identical to SEQ ID NO: 4155
  source 1..40: mol_type = other DNA

SEQ ID NO: 4493 - DNA, 15 bp, synthetic construct
  source 1..15: mol_type = other DNA
taaaaagattccata

SEQ ID NO: 4494 - DNA, 16 bp, synthetic construct
  source 1..16: mol_type = other DNA
ataaaaagattccata

SEQ ID NO: 4495 - DNA, 17 bp, synthetic construct
  source 1..17: mol_type = other DNA
tataaaaagattccata

SEQ ID NO: 4496 - DNA, 18 bp, synthetic construct
  source 1..18: mol_type = other DNA
atataaaaagattccata

SEQ ID NO: 4497 - DNA, 19 bp, synthetic construct
  source 1..19: mol_type = other DNA
aatataaaaagattccata

SEQ ID NO: 4498 - DNA, 20 bp, synthetic construct
  source 1..20: mol_type = other DNA
aaatataaaaagattccata

SEQ ID NO: 4499 - DNA, 21 bp, synthetic construct
  source 1..21: mol_type = other DNA
taaatataaaaagattccata

SEQ ID NO: 4500 - DNA, 22 bp, synthetic construct
  source 1..22: mol_type = other DNA
ctaaatataaaaagattccata

SEQ ID NO: 4501 - DNA, 23 bp, synthetic construct
  source 1..23: mol_type = other DNA
cctaaatataaaaagattccata

SEQ ID NO: 4502 - DNA, 24 bp, synthetic construct
  source 1..24: mol_type = other DNA
ccctaaatataaaaagattccata

SEQ ID NO: 4503 - DNA, 25 bp, synthetic construct
  source 1..25: mol_type = other DNA
cccctaaatataaaaagattccata

SEQ ID NO: 4504 - DNA, 26 bp, synthetic construct
  source 1..26: mol_type = other DNA
acccctaaatataaaaagattccata

SEQ ID NO: 4505 - DNA, 27 bp, synthetic construct
  source 1..27: mol_type = other DNA
tacccctaaatataaaaagattccata

SEQ ID NO: 4506 - DNA, 28 bp, synthetic construct
  source 1..28: mol_type = other DNA
ttacccctaaatataaaaagattccata

SEQ ID NO: 4507 - DNA, 29 bp, synthetic construct
  source 1..29: mol_type = other DNA
cttacccctaaatataaaaagattccata

SEQ ID NO: 4508 - DNA, 30 bp, synthetic construct
  source 1..30: mol_type = other DNA
ccttacccctaaatataaaaagattccata

SEQ ID NO: 4509 - DNA, 31 bp, synthetic construct
  source 1..31: mol_type = other DNA
tccttacccctaaatataaaaagattccata

SEQ ID NO: 4510 - DNA, 32 bp, synthetic construct
  source 1..32: mol_type = other DNA
atccttacccctaaatataaaaagattccata

SEQ ID NO: 4511 - DNA, 33 bp, synthetic construct
  source 1..33: mol_type = other DNA
gatccttacccctaaatataaaaagattccata

SEQ ID NO: 4512 - DNA, 34 bp, synthetic construct
  source 1..34: mol_type = other DNA
agatccttacccctaaatataaaaagattccata

SEQ ID NO: 4513 - DNA, 35 bp, synthetic construct
  source 1..35: mol_type = other DNA
gagatccttacccctaaatataaaaagattccata

SEQ ID NO: 4514 - DNA, 36 bp, synthetic construct
  source 1..36: mol_type = other DNA
tgagatccttacccctaaatataaaaagattccata

SEQ ID NO: 4515 - DNA, 37 bp, synthetic construct
  source 1..37: mol_type = other DNA
atgagatccttacccctaaatataaaaagattccata

SEQ ID NO: 4516 - DNA, 38 bp, synthetic construct
  source 1..38: mol_type = other DNA
aatgagatccttacccctaaatataaaaagattccata

SEQ ID NO: 4517 - DNA, 39 bp, synthetic construct
  source 1..39: mol_type = other DNA
aaatgagatccttacccctaaatataaaaagattccata

SEQ ID NO: 4518 - DNA, 40 bp, synthetic construct
  source 1..40: mol_type = other DNA
caaatgagatccttacccctaaatataaaaagattccata

SEQ ID NO: 4519 - DNA, 32 bp, synthetic construct; identical to SEQ ID NO: 4196
  source 1..32: mol_type = other DNA

SEQ ID NO: 4520 - DNA, 33 bp, synthetic construct; identical to SEQ ID NO: 4197
  source 1..33: mol_type = other DNA

SEQ ID NO: 4521 - DNA, 34 bp, synthetic construct; identical to SEQ ID NO: 4198
  source 1..34: mol_type = other DNA

SEQ ID NO: 4522 - DNA, 35 bp, synthetic construct; identical to SEQ ID NO: 4199
  source 1..35: mol_type = other DNA

SEQ ID NO: 4523 - DNA, 36 bp, synthetic construct; identical to SEQ ID NO: 4200
  source 1..36: mol_type = other DNA

SEQ ID NO: 4524 - DNA, 37 bp, synthetic construct; identical to SEQ ID NO: 4201
  source 1..37: mol_type = other DNA

SEQ ID NO: 4525 - DNA, 38 bp, synthetic construct; identical to SEQ ID NO: 4202
  source 1..38: mol_type = other DNA

SEQ ID NO: 4526 - DNA, 39 bp, synthetic construct; identical to SEQ ID NO: 4203
  source 1..39: mol_type = other DNA

SEQ ID NO: 4527 - DNA, 40 bp, synthetic construct; identical to SEQ ID NO: 4204
  source 1..40: mol_type = other DNA

SEQ ID NO: 4528 - DNA, 34 bp, synthetic construct; identical to SEQ ID NO: 4214
  source 1..34: mol_type = other DNA

SEQ ID NO: 4529 - DNA, 35 bp, synthetic construct; identical to SEQ ID NO: 4215
  source 1..35: mol_type = other DNA

SEQ ID NO: 4530 - DNA, 36 bp, synthetic construct; identical to SEQ ID NO: 4216
  source 1..36: mol_type = other DNA

SEQ ID NO: 4531 - DNA, 37 bp, synthetic construct; identical to SEQ ID NO: 4217
  source 1..37: mol_type = other DNA

SEQ ID NO: 4532 - DNA, 38 bp, synthetic construct; identical to SEQ ID NO: 4218
  source 1..38: mol_type = other DNA

SEQ ID NO: 4533 - DNA, 39 bp, synthetic construct; identical to SEQ ID NO: 4219
  source 1..39: mol_type = other DNA

SEQ ID NO: 4534 - DNA, 40 bp, synthetic construct; identical to SEQ ID NO: 4220
  source 1..40: mol_type = other DNA

SEQ ID NO: 4535 - DNA, 36 bp, synthetic construct
  source 1..36: mol_type = other DNA
tttatatttaggggtaaggatctcatttgtacattc

SEQ ID NO: 4536 - DNA, 37 bp, synthetic construct
  source 1..37: mol_type = other DNA
ttttatatttaggggtaaggatctcatttgtacattc

SEQ ID NO: 4537 - DNA, 38 bp, synthetic construct
  source 1..38: mol_type = other DNA
tttttatatttaggggtaaggatctcatttgtacattc

SEQ ID NO: 4538 - DNA, 39 bp, synthetic construct
  source 1..39: mol_type = other DNA
ctttttatatttaggggtaaggatctcatttgtacattc

SEQ ID NO: 4539 - DNA, 40 bp, synthetic construct
  source 1..40: mol_type = other DNA
tctttttatatttaggggtaaggatctcatttgtacattc

SEQ ID NO: 4540 - DNA, 28 bp, synthetic construct
  source 1..28: mol_type = other DNA
tttatatttaggggtaaggatctcattt

SEQ ID NO: 4541 - DNA, 29 bp, synthetic construct
  source 1..29: mol_type = other DNA
ttttatatttaggggtaaggatctcattt

SEQ ID NO: 4542 - DNA, 30 bp, synthetic construct
  source 1..30: mol_type = other DNA
tttttatatttaggggtaaggatctcattt

SEQ ID NO: 4543 - DNA, 31 bp, synthetic construct
  source 1..31: mol_type = other DNA
ctttttatatttaggggtaaggatctcattt

SEQ ID NO: 4544 - DNA, 32 bp, synthetic construct
  source 1..32: mol_type = other DNA
tctttttatatttaggggtaaggatctcattt

SEQ ID NO: 4545 - DNA, 33 bp, synthetic construct
  source 1..33: mol_type = other DNA
atctttttatatttaggggtaaggatctcattt

SEQ ID NO: 4546 - DNA, 34 bp, synthetic construct
  source 1..34: mol_type = other DNA
aatctttttatatttaggggtaaggatctcattt

SEQ ID NO: 4547 - DNA, 35 bp, synthetic construct
  source 1..35: mol_type = other DNA
gaatctttttatatttaggggtaaggatctcattt

SEQ ID NO: 4548 - DNA, 36 bp, synthetic construct; identical to SEQ ID NO: 4290
  source 1..36: mol_type = other DNA

SEQ ID NO: 4549 - DNA, 37 bp, synthetic construct; identical to SEQ ID NO: 4291
  source 1..37: mol_type = other DNA

SEQ ID NO: 4550 - DNA, 38 bp, synthetic construct; identical to SEQ ID NO: 4292
  source 1..38: mol_type = other DNA

SEQ ID NO: 4551 - DNA, 39 bp, synthetic construct; identical to SEQ ID NO: 4293
  source 1..39: mol_type = other DNA

SEQ ID NO: 4552 - DNA, 40 bp, synthetic construct; identical to SEQ ID NO: 4294
  source 1..40: mol_type = other DNA

SEQ ID NO: 4553 - DNA, 10 bp, synthetic construct
  source 1..10: mol_type = other DNA
aatcttttta

SEQ ID NO: 4554 - DNA, 11 bp, synthetic construct
  source 1..11: mol_type = other DNA
gaatcttttta

SEQ ID NO: 4555 - DNA, 12 bp, synthetic construct
  source 1..12: mol_type = other DNA
ggaatcttttta

SEQ ID NO: 4556 - DNA, 13 bp, synthetic construct
  source 1..13: mol_type = other DNA
tggaatcttttta

SEQ ID NO: 4557 - DNA, 14 bp, synthetic construct
  source 1..14: mol_type = other DNA
atggaatcttttta

SEQ ID NO: 4558 - DNA, 15 bp, synthetic construct
  source 1..15: mol_type = other DNA
tatggaatcttttta

SEQ ID NO: 4559 - DNA, 16 bp, synthetic construct
  source 1..16: mol_type = other DNA
ctatggaatcttttta

SEQ ID NO: 4560 - DNA, 17 bp, synthetic construct
  source 1..17: mol_type = other DNA
tctatggaatcttttta

SEQ ID NO: 4561 - DNA, 18 bp, synthetic construct
  source 1..18: mol_type = other DNA
ttctatggaatcttttta

SEQ ID NO: 4562 - DNA, 19 bp, synthetic construct
  source 1..19: mol_type = other DNA
gttctatggaatcttttta

SEQ ID NO: 4563 - DNA, 20 bp, synthetic construct
  source 1..20: mol_type = other DNA
tgttctatggaatcttttta

SEQ ID NO: 4564 - DNA, 21 bp, synthetic construct
  source 1..21: mol_type = other DNA
atgttctatggaatcttttta

SEQ ID NO: 4565 - DNA, 22 bp, synthetic construct
  source 1..22: mol_type = other DNA
tatgttctatggaatcttttta

SEQ ID NO: 4566 - DNA, 23 bp, synthetic construct
  source 1..23: mol_type = other DNA
ttatgttctatggaatcttttta

SEQ ID NO: 4567 - DNA, 24 bp, synthetic construct
  source 1..24: mol_type = other DNA
tttatgttctatggaatcttttta

SEQ ID NO: 4568 - DNA, 25 bp, synthetic construct
  source 1..25: mol_type = other DNA
atttatgttctatggaatcttttta

SEQ ID NO: 4569 - DNA, 26 bp, synthetic construct
  source 1..26: mol_type = other DNA
gatttatgttctatggaatcttttta

SEQ ID NO: 4570 - DNA, 27 bp, synthetic construct
  source 1..27: mol_type = other DNA
agatttatgttctatggaatcttttta

SEQ ID NO: 4571 - DNA, 28 bp, synthetic construct
  source 1..28: mol_type = other DNA
gagatttatgttctatggaatcttttta

SEQ ID NO: 4572 - DNA, 29 bp, synthetic construct
  source 1..29: mol_type = other DNA
ggagatttatgttctatggaatcttttta

SEQ ID NO: 4573 - DNA, 30 bp, synthetic construct
  source 1..30: mol_type = other DNA
tggagatttatgttctatggaatcttttta

SEQ ID NO: 4574 - DNA, 31 bp, synthetic construct
  source 1..31: mol_type = other DNA
ctggagatttatgttctatggaatcttttta

SEQ ID NO: 4575 - DNA, 32 bp, synthetic construct
  source 1..32: mol_type = other DNA
tctggagatttatgttctatggaatcttttta

SEQ ID NO: 4576 - DNA, 33 bp, synthetic construct
  source 1..33: mol_type = other DNA
ttctggagatttatgttctatggaatcttttta

SEQ ID NO: 4577 - DNA, 34 bp, synthetic construct
  source 1..34: mol_type = other DNA
tttctggagatttatgttctatggaatcttttta

SEQ ID NO: 4578 - DNA, 35 bp, synthetic construct
  source 1..35: mol_type = other DNA
ttttctggagatttatgttctatggaatcttttta

SEQ ID NO: 4579 - DNA, 36 bp, synthetic construct
  source 1..36: mol_type = other DNA
tttttctggagatttatgttctatggaatcttttta

SEQ ID NO: 4580 - DNA, 37 bp, synthetic construct
  source 1..37: mol_type = other DNA
ttttttctggagatttatgttctatggaatcttttta

SEQ ID NO: 4581 - DNA, 38 bp, synthetic construct
  source 1..38: mol_type = other DNA
gttttttctggagatttatgttctatggaatcttttta

SEQ ID NO: 4582 - DNA, 39 bp, synthetic construct
  source 1..39: mol_type = other DNA
tgttttttctggagatttatgttctatggaatcttttta

SEQ ID NO: 4583 - DNA, 40 bp, synthetic construct
  source 1..40: mol_type = other DNA
atgttttttctggagatttatgttctatggaatcttttta

SEQ ID NO: 4584 - DNA, 30 bp, synthetic construct; identical to SEQ ID NO: 4312
  source 1..30: mol_type = other DNA

SEQ ID NO: 4585 - DNA, 31 bp, synthetic construct; identical to SEQ ID NO: 4313
  source 1..31: mol_type = other DNA

SEQ ID NO: 4586 - DNA, 32 bp, synthetic construct; identical to SEQ ID NO: 4314
  source 1..32: mol_type = other DNA

SEQ ID NO: 4587 - DNA, 33 bp, synthetic construct; identical to SEQ ID NO: 4315
  source 1..33: mol_type = other DNA

SEQ ID NO: 4588 - DNA, 34 bp, synthetic construct; identical to SEQ ID NO: 4316
  source 1..34: mol_type = other DNA

SEQ ID NO: 4589 - DNA, 35 bp, synthetic construct; identical to SEQ ID NO: 4317
  source 1..35: mol_type = other DNA

SEQ ID NO: 4590 - DNA, 36 bp, synthetic construct; identical to SEQ ID NO: 4318
  source 1..36: mol_type = other DNA

SEQ ID NO: 4591 - DNA, 37 bp, synthetic construct; identical to SEQ ID NO: 4319
  source 1..37: mol_type = other DNA

SEQ ID NO: 4592 - DNA, 38 bp, synthetic construct; identical to SEQ ID NO: 4320
  source 1..38: mol_type = other DNA

SEQ ID NO: 4593 - DNA, 39 bp, synthetic construct; identical to SEQ ID NO: 4321
  source 1..39: mol_type = other DNA

SEQ ID NO: 4594 - DNA, 40 bp, synthetic construct; identical to SEQ ID NO: 4322
  source 1..40: mol_type = other DNA

SEQ ID NO: 4595 - DNA, 16 bp, synthetic construct
  source 1..16: mol_type = other DNA
taaaaagattccatag

SEQ ID NO: 4596 - DNA, 17 bp, synthetic construct
  source 1..17: mol_type = other DNA
ataaaaagattccatag

SEQ ID NO: 4597 - DNA, 18 bp, synthetic construct
  source 1..18: mol_type = other DNA
tataaaaagattccatag

SEQ ID NO: 4598 - DNA, 19 bp, synthetic construct
  source 1..19: mol_type = other DNA
atataaaaagattccatag

SEQ ID NO: 4599 - DNA, 20 bp, synthetic construct
  source 1..20: mol_type = other DNA
aatataaaaagattccatag

SEQ ID NO: 4600 - DNA, 21 bp, synthetic construct
  source 1..21: mol_type = other DNA
aaatataaaaagattccatag

SEQ ID NO: 4601 - DNA, 22 bp, synthetic construct
  source 1..22: mol_type = other DNA
taaatataaaaagattccatag

SEQ ID NO: 4602 - DNA, 23 bp, synthetic construct
  source 1..23: mol_type = other DNA
ctaaatataaaaagattccatag

SEQ ID NO: 4603 - DNA, 24 bp, synthetic construct
  source 1..24: mol_type = other DNA
cctaaatataaaaagattccatag

SEQ ID NO: 4604 - DNA, 25 bp, synthetic construct
  source 1..25: mol_type = other DNA
ccctaaatataaaaagattccatag

SEQ ID NO: 4605 - DNA, 26 bp, synthetic construct
  source 1..26: mol_type = other DNA
cccctaaatataaaaagattccatag

SEQ ID NO: 4606 - DNA, 27 bp, synthetic construct
  source 1..27: mol_type = other DNA
acccctaaatataaaaagattccatag

SEQ ID NO: 4607 - DNA, 28 bp, synthetic construct
  source 1..28: mol_type = other DNA
tacccctaaatataaaaagattccatag

SEQ ID NO: 4608 - DNA, 29 bp, synthetic construct
  source 1..29: mol_type = other DNA
ttacccctaaatataaaaagattccatag

SEQ ID NO: 4609 - DNA, 30 bp, synthetic construct; identical to SEQ ID NO: 4343
  source 1..30: mol_type = other DNA

SEQ ID NO: 4610 - DNA, 31 bp, synthetic construct; identical to SEQ ID NO: 4344
  source 1..31: mol_type = other DNA

SEQ ID NO: 4611 - DNA, 32 bp, synthetic construct; identical to SEQ ID NO: 4345
  source 1..32: mol_type = other DNA

SEQ ID NO: 4612 - DNA, 33 bp, synthetic construct; identical to SEQ ID NO: 4346
  source 1..33: mol_type = other DNA

SEQ ID NO: 4613 - DNA, 34 bp, synthetic construct; identical to SEQ ID NO: 4347
  source 1..34: mol_type = other DNA

SEQ ID NO: 4614 - DNA, 35 bp, synthetic construct; identical to SEQ ID NO: 4348
  source 1..35: mol_type = other DNA

SEQ ID NO: 4615 - DNA, 36 bp, synthetic construct; identical to SEQ ID NO: 4349
  source 1..36: mol_type = other DNA

SEQ ID NO: 4616 - DNA, 37 bp, synthetic construct; identical to SEQ ID NO: 4350
  source 1..37: mol_type = other DNA

SEQ ID NO: 4617 - DNA, 38 bp, synthetic construct; identical to SEQ ID NO: 4351
  source 1..38: mol_type = other DNA

SEQ ID NO: 4618 - DNA, 39 bp, synthetic construct; identical to SEQ ID NO: 4352
  source 1..39: mol_type = other DNA

SEQ ID NO: 4619 - DNA, 40 bp, synthetic construct; identical to SEQ ID NO: 4353
  source 1..40: mol_type = other DNA

SEQ ID NO: 4620 - DNA, 31 bp, synthetic construct; identical to SEQ ID NO: 4372
  source 1..31: mol_type = other DNA

SEQ ID NO: 4621 - DNA, 31 bp, synthetic construct; identical to SEQ ID NO: 4373
  source 1..31: mol_type = other DNA

SEQ ID NO: 4622 - DNA, 32 bp, synthetic construct; identical to SEQ ID NO: 4375
  source 1..32: mol_type = other DNA

SEQ ID NO: 4623 - DNA, 32 bp, synthetic construct; identical to SEQ ID NO: 4374
  source 1..32: mol_type = other DNA

SEQ ID NO: 4624 - DNA, 33 bp, synthetic construct; identical to SEQ ID NO: 4376
  source 1..33: mol_type = other DNA

SEQ ID NO: 4625 - DNA, 33 bp, synthetic construct; identical to SEQ ID NO: 4377
  source 1..33: mol_type = other DNA

SEQ ID NO: 4626 - DNA, 34 bp, synthetic construct; identical to SEQ ID NO: 4378
  source 1..34: mol_type = other DNA

SEQ ID NO: 4627 - DNA, 34 bp, synthetic construct; identical to SEQ ID NO: 4379
  source 1..34: mol_type = other DNA

SEQ ID NO: 4628 - DNA, 35 bp, synthetic construct; identical to SEQ ID NO: 4380
  source 1..35: mol_type = other DNA

SEQ ID NO: 4629 - DNA, 35 bp, synthetic construct; identical to SEQ ID NO: 4381
  source 1..35: mol_type = other DNA

SEQ ID NO: 4630 - DNA, 36 bp, synthetic construct; identical to SEQ ID NO: 4383
  source 1..36: mol_type = other DNA

SEQ ID NO: 4631 - DNA, 36 bp, synthetic construct; identical to SEQ ID NO: 4382
  source 1..36: mol_type = other DNA

SEQ ID NO: 4632 - DNA, 37 bp, synthetic construct; identical to SEQ ID NO: 4384
  source 1..37: mol_type = other DNA

SEQ ID NO: 4633 - DNA, 37 bp, synthetic construct; identical to SEQ ID NO: 4385
  source 1..37: mol_type = other DNA

SEQ ID NO: 4634 - DNA, 38 bp, synthetic construct; identical to SEQ ID NO: 4386
  source 1..38: mol_type = other DNA

SEQ ID NO: 4635 - DNA, 38 bp, synthetic construct; identical to SEQ ID NO: 4387
  source 1..38: mol_type = other DNA

SEQ ID NO: 4636 - DNA, 39 bp, synthetic construct; identical to SEQ ID NO: 4388
  source 1..39: mol_type = other DNA

SEQ ID NO: 4637 - DNA, 39 bp, synthetic construct; identical to SEQ ID NO: 4389
  source 1..39: mol_type = other DNA

SEQ ID NO: 4638 - DNA, 40 bp, synthetic construct; identical to SEQ ID NO: 4390
  source 1..40: mol_type = other DNA

SEQ ID NO: 4639 - DNA, 40 bp, synthetic construct; identical to SEQ ID NO: 4391
  source 1..40: mol_type = other DNA

SEQ ID NO: 4640 - DNA, 17 bp, synthetic construct
  source 1..17: mol_type = other DNA
taaaaagattccataga

SEQ ID NO: 4641 - DNA, 18 bp, synthetic construct
  source 1..18: mol_type = other DNA
ataaaaagattccataga

SEQ ID NO: 4642 - DNA, 19 bp, synthetic construct
  source 1..19: mol_type = other DNA
tataaaaagattccataga

SEQ ID NO: 4643 - DNA, 20 bp, synthetic construct
  source 1..20: mol_type = other DNA
atataaaaagattccataga

SEQ ID NO: 4644 - DNA, 21 bp, synthetic construct
  source 1..21: mol_type = other DNA
aatataaaaagattccataga

SEQ ID NO: 4645 - DNA, 22 bp, synthetic construct
  source 1..22: mol_type = other DNA
aaatataaaaagattccataga

SEQ ID NO: 4646 - DNA, 23 bp, synthetic construct
  source 1..23: mol_type = other DNA
taaatataaaaagattccataga

SEQ ID NO: 4647 - DNA, 24 bp, synthetic construct
  source 1..24: mol_type = other DNA
ctaaatataaaaagattccataga

SEQ ID NO: 4648 - DNA, 25 bp, synthetic construct
  source 1..25: mol_type = other DNA
cctaaatataaaaagattccataga

SEQ ID NO: 4649 - DNA, 26 bp, synthetic construct
  source 1..26: mol_type = other DNA
ccctaaatataaaaagattccataga

SEQ ID NO: 4650 - DNA, 27 bp, synthetic construct
  source 1..27: mol_type = other DNA
cccctaaatataaaaagattccataga

SEQ ID NO: 4651 - DNA, 28 bp, synthetic construct
  source 1..28: mol_type = other DNA
acccctaaatataaaaagattccataga

SEQ ID NO: 4652 - DNA, 29 bp, synthetic construct
  source 1..29: mol_type = other DNA
tacccctaaatataaaaagattccataga

SEQ ID NO: 4653 - DNA, 30 bp, synthetic construct
  source 1..30: mol_type = other DNA
ttacccctaaatataaaaagattccataga

SEQ ID NO: 4654 - DNA, 31 bp, synthetic construct
  source 1..31: mol_type = other DNA
cttacccctaaatataaaaagattccataga

SEQ ID NO: 4655 - DNA, 32 bp, synthetic construct
  source 1..32: mol_type = other DNA
ccttacccctaaatataaaaagattccataga

SEQ ID NO: 4656 - DNA, 33 bp, synthetic construct
  source 1..33: mol_type = other DNA
tccttacccctaaatataaaaagattccataga

SEQ ID NO: 4657 - DNA, 34 bp, synthetic construct
  source 1..34: mol_type = other DNA
atccttacccctaaatataaaaagattccataga

SEQ ID NO: 4658 - DNA, 35 bp, synthetic construct
  source 1..35: mol_type = other DNA
gatccttacccctaaatataaaaagattccataga

SEQ ID NO: 4659 - DNA, 36 bp, synthetic construct
  source 1..36: mol_type = other DNA
agatccttacccctaaatataaaaagattccataga

SEQ ID NO: 4660 - DNA, 37 bp, synthetic construct
  source 1..37: mol_type = other DNA
gagatccttacccctaaatataaaaagattccataga

SEQ ID NO: 4661 - DNA, 38 bp, synthetic construct
  source 1..38: mol_type = other DNA
tgagatccttacccctaaatataaaaagattccataga

SEQ ID NO: 4662 - DNA, 39 bp, synthetic construct
  source 1..39: mol_type = other DNA
atgagatccttacccctaaatataaaaagattccataga

SEQ ID NO: 4663 - DNA, 40 bp, synthetic construct
  source 1..40: mol_type = other DNA
aatgagatccttacccctaaatataaaaagattccataga

SEQ ID NO: 4664 - DNA, 28 bp, synthetic construct
  source 1..28: mol_type = other DNA
cgctctatcgcgatttatctaggcatag

SEQ ID NO: 4665 - DNA, 29 bp, synthetic construct
  source 1..29: mol_type = other DNA
acgctctatcgcgatttatctaggcatag

SEQ ID NO: 4666 - DNA, 30 bp, synthetic construct
  source 1..30: mol_type = other DNA
aacgctctatcgcgatttatctaggcatag

SEQ ID NO: 4667 - DNA, 31 bp, synthetic construct
  source 1..31: mol_type = other DNA
gaacgctctatcgcgatttatctaggcatag

SEQ ID NO: 4668 - DNA, 32 bp, synthetic construct
  source 1..32: mol_type = other DNA
ggaacgctctatcgcgatttatctaggcatag

SEQ ID NO: 4669 - DNA, 33 bp, synthetic construct
  source 1..33: mol_type = other DNA
aggaacgctctatcgcgatttatctaggcatag

SEQ ID NO: 4670 - DNA, 34 bp, synthetic construct
  source 1..34: mol_type = other DNA
gaggaacgctctatcgcgatttatctaggcatag

SEQ ID NO: 4671 - DNA, 35 bp, synthetic construct
  source 1..35: mol_type = other DNA
ggaggaacgctctatcgcgatttatctaggcatag

SEQ ID NO: 4672 - DNA, 36 bp, synthetic construct
  source 1..36: mol_type = other DNA
aggaggaacgctctatcgcgatttatctaggcatag

SEQ ID NO: 4673 - DNA, 37 bp, synthetic construct
  source 1..37: mol_type = other DNA
aaggaggaacgctctatcgcgatttatctaggcatag

SEQ ID NO: 4674 - DNA, 38 bp, synthetic construct
  source 1..38: mol_type = other DNA
caaggaggaacgctctatcgcgatttatctaggcatag

SEQ ID NO: 4675 - DNA, 39 bp, synthetic construct
  source 1..39: mol_type = other DNA
acaaggaggaacgctctatcgcgatttatctaggcatag

SEQ ID NO: 4676 - DNA, 40 bp, synthetic construct
  source 1..40: mol_type = other DNA
aacaaggaggaacgctctatcgcgatttatctaggcatag

SEQ ID NO: 4677 - DNA, 15 bp, synthetic construct
  source 1..15: mol_type = other DNA
cgctctatcgcgatt

SEQ ID NO: 4678 - DNA, 16 bp, synthetic construct
  source 1..16: mol_type = other DNA
acgctctatcgcgatt

SEQ ID NO: 4679 - DNA, 17 bp, synthetic construct
  source 1..17: mol_type = other DNA
aacgctctatcgcgatt

SEQ ID NO: 4680 - DNA, 18 bp, synthetic construct
  source 1..18: mol_type = other DNA
gaacgctctatcgcgatt

SEQ ID NO: 4681 - DNA, 19 bp, synthetic construct
  source 1..19: mol_type = other DNA
ggaacgctctatcgcgatt

SEQ ID NO: 4682 - DNA, 20 bp, synthetic construct
  source 1..20: mol_type = other DNA
aggaacgctctatcgcgatt

SEQ ID NO: 4683 - DNA, 21 bp, synthetic construct
  source 1..21: mol_type = other DNA
gaggaacgctctatcgcgatt

SEQ ID NO: 4684 - DNA, 22 bp, synthetic construct
  source 1..22: mol_type = other DNA
ggaggaacgctctatcgcgatt

SEQ ID NO: 4685 - DNA, 23 bp, synthetic construct
  source 1..23: mol_type = other DNA
aggaggaacgctctatcgcgatt

SEQ ID NO: 4686 - DNA, 24 bp, synthetic construct
  source 1..24: mol_type = other DNA
aaggaggaacgctctatcgcgatt

SEQ ID NO: 4687 - DNA, 25 bp, synthetic construct
  source 1..25: mol_type = other DNA
caaggaggaacgctctatcgcgatt

SEQ ID NO: 4688 - DNA, 26 bp, synthetic construct
  source 1..26: mol_type = other DNA
acaaggaggaacgctctatcgcgatt

SEQ ID NO: 4689 - DNA, 27 bp, synthetic construct
  source 1..27: mol_type = other DNA
aacaaggaggaacgctctatcgcgatt

SEQ ID NO: 4690 - DNA, 28 bp, synthetic construct
  source 1..28: mol_type = other DNA
taacaaggaggaacgctctatcgcgatt

SEQ ID NO: 4691 - DNA, 29 bp, synthetic construct
  source 1..29: mol_type = other DNA
ataacaaggaggaacgctctatcgcgatt

SEQ ID NO: 4692 - DNA, 30 bp, synthetic construct
  source 1..30: mol_type = other DNA
gataacaaggaggaacgctctatcgcgatt

SEQ ID NO: 4693 - DNA, 31 bp, synthetic construct
  source 1..31: mol_type = other DNA
ggataacaaggaggaacgctctatcgcgatt

SEQ ID NO: 4694 - DNA, 32 bp, synthetic construct
  source 1..32: mol_type = other DNA
cggataacaaggaggaacgctctatcgcgatt

SEQ ID NO: 4695 - DNA, 33 bp, synthetic construct
  source 1..33: mol_type = other DNA
ccggataacaaggaggaacgctctatcgcgatt

SEQ ID NO: 4696 - DNA, 34 bp, synthetic construct
  source 1..34: mol_type = other DNA
cccggataacaaggaggaacgctctatcgcgatt

SEQ ID NO: 4697 - DNA, 35 bp, synthetic construct
  source 1..35: mol_type = other DNA
acccggataacaaggaggaacgctctatcgcgatt

SEQ ID NO: 4698 - DNA, 36 bp, synthetic construct
  source 1..36: mol_type = other DNA
gacccggataacaaggaggaacgctctatcgcgatt

SEQ ID NO: 4699 - DNA, 37 bp, synthetic construct
  source 1..37: mol_type = other DNA
tgacccggataacaaggaggaacgctctatcgcgatt

SEQ ID NO: 4700 - DNA, 38 bp, synthetic construct
  source 1..38: mol_type = other DNA
atgacccggataacaaggaggaacgctctatcgcgatt

SEQ ID NO: 4701 - DNA, 39 bp, synthetic construct
  source 1..39: mol_type = other DNA
tatgacccggataacaaggaggaacgctctatcgcgatt

SEQ ID NO: 4702 - DNA, 40 bp, synthetic construct
  source 1..40: mol_type = other DNA
ctatgacccggataacaaggaggaacgctctatcgcgatt

SEQ ID NO: 4703 - DNA, 23 bp, synthetic construct
  source 1..23: mol_type = other DNA
cgctctatcgcgatttatctagg

SEQ ID NO: 4704 - DNA, 24 bp, synthetic construct
  source 1..24: mol_type = other DNA
acgctctatcgcgatttatctagg

SEQ ID NO: 4705 - DNA, 25 bp, synthetic construct
  source 1..25: mol_type = other DNA
aacgctctatcgcgatttatctagg

SEQ ID NO: 4706 - DNA, 26 bp, synthetic construct
  source 1..26: mol_type = other DNA
gaacgctctatcgcgatttatctagg

SEQ ID NO: 4707 - DNA, 27 bp, synthetic construct
  source 1..27: mol_type = other DNA
ggaacgctctatcgcgatttatctagg

SEQ ID NO: 4708 - DNA, 28 bp, synthetic construct
  source 1..28: mol_type = other DNA
aggaacgctctatcgcgatttatctagg

SEQ ID NO: 4709 - DNA, 29 bp, synthetic construct
  source 1..29: mol_type = other DNA
gaggaacgctctatcgcgatttatctagg

SEQ ID NO: 4710 - DNA, 30 bp, synthetic construct
  source 1..30: mol_type = other DNA
ggaggaacgctctatcgcgatttatctagg

SEQ ID NO: 4711 - DNA, 31 bp, synthetic construct
  source 1..31: mol_type = other DNA
aggaggaacgctctatcgcgatttatctagg

SEQ ID NO: 4712 - DNA, 32 bp, synthetic construct
  source 1..32: mol_type = other DNA
aaggaggaacgctctatcgcgatttatctagg

SEQ ID NO: 4713 - DNA, 33 bp, synthetic construct
  source 1..33: mol_type = other DNA
caaggaggaacgctctatcgcgatttatctagg

SEQ ID NO: 4714 - DNA, 34 bp, synthetic construct
  source 1..34: mol_type = other DNA
acaaggaggaacgctctatcgcgatttatctagg

SEQ ID NO: 4715 - DNA, 35 bp, synthetic construct
  source 1..35: mol_type = other DNA
aacaaggaggaacgctctatcgcgatttatctagg

SEQ ID NO: 4716 - DNA, 36 bp, synthetic construct
  source 1..36: mol_type = other DNA
taacaaggaggaacgctctatcgcgatttatctagg

SEQ ID NO: 4717 - DNA, 37 bp, synthetic construct
  source 1..37: mol_type = other DNA
ataacaaggaggaacgctctatcgcgatttatctagg

SEQ ID NO: 4718 - DNA, 38 bp, synthetic construct
  source 1..38: mol_type = other DNA
gataacaaggaggaacgctctatcgcgatttatctagg

SEQ ID NO: 4719 - DNA, 39 bp, synthetic construct
  source 1..39: mol_type = other DNA
ggataacaaggaggaacgctctatcgcgatttatctagg

SEQ ID NO: 4720 - DNA, 40 bp, synthetic construct
  source 1..40: mol_type = other DNA
cggataacaaggaggaacgctctatcgcgatttatctagg

SEQ ID NO: 4721 - DNA, 23 bp, synthetic construct
  source 1..23: mol_type = other DNA
gcgttcctccttgttatccgggt

SEQ ID NO: 4722 - DNA, 23 bp, synthetic construct
  source 1..23: mol_type = other DNA
gcgttcctccttgttatcggggt

SEQ ID NO: 4723 - DNA, 24 bp, synthetic construct
  source 1..24: mol_type = other DNA
agcgttcctccttgttatcggggt

SEQ ID NO: 4724 - DNA, 24 bp, synthetic construct
  source 1..24: mol_type = other DNA
agcgttcctccttgttatccgggt

SEQ ID NO: 4725 - DNA, 25 bp, synthetic construct
  source 1..25: mol_type = other DNA
gagcgttcctccttgttatcggggt

SEQ ID NO: 4726 - DNA, 25 bp, synthetic construct
  source 1..25: mol_type = other DNA
gagcgttcctccttgttatccgggt

SEQ ID NO: 4727 - DNA, 26 bp, synthetic construct
  source 1..26: mol_type = other DNA
agagcgttcctccttgttatccgggt

SEQ ID NO: 4728 - DNA, 26 bp, synthetic construct
  source 1..26: mol_type = other DNA
agagcgttcctccttgttatcggggt

SEQ ID NO: 4729 - DNA, 27 bp, synthetic construct
  source 1..27: mol_type = other DNA
tagagcgttcctccttgttatccgggt

SEQ ID NO: 4730 - DNA, 27 bp, synthetic construct
  source 1..27: mol_type = other DNA
tagagcgttcctccttgttatcggggt

SEQ ID NO: 4731 - DNA, 28 bp, synthetic construct
  source 1..28: mol_type = other DNA
atagagcgttcctccttgttatccgggt

SEQ ID NO: 4732 - DNA, 28 bp, synthetic construct
  source 1..28: mol_type = other DNA
atagagcgttcctccttgttatcggggt

SEQ ID NO: 4733 - DNA, 29 bp, synthetic construct
  source 1..29: mol_type = other DNA
gatagagcgttcctccttgttatccgggt

SEQ ID NO: 4734 - DNA, 29 bp, synthetic construct
  source 1..29: mol_type = other DNA
gatagagcgttcctccttgttatcggggt

SEQ ID NO: 4735 - DNA, 30 bp, synthetic construct
  source 1..30: mol_type = other DNA
cgatagagcgttcctccttgttatccgggt

SEQ ID NO: 4736 - DNA, 30 bp, synthetic construct
  source 1..30: mol_type = other DNA
cgatagagcgttcctccttgttatcggggt

SEQ ID NO: 4737 - DNA, 31 bp, synthetic construct
  source 1..31: mol_type = other DNA
gcgatagagcgttcctccttgttatccgggt

SEQ ID NO: 4738 - DNA, 31 bp, synthetic construct
  source 1..31: mol_type = other DNA
gcgatagagcgttcctccttgttatcggggt

SEQ ID NO: 4739 - DNA, 32 bp, synthetic construct
  source 1..32: mol_type = other DNA
cgcgatagagcgttcctccttgttatcggggt

SEQ ID NO: 4740 - DNA, 32 bp, synthetic construct
  source 1..32: mol_type = other DNA
cgcgatagagcgttcctccttgttatccgggt

SEQ ID NO: 4741 - DNA, 33 bp, synthetic construct
  source 1..33: mol_type = other DNA
tcgcgatagagcgttcctccttgttatccgggt

SEQ ID NO: 4742 - DNA, 33 bp, synthetic construct
  source 1..33: mol_type = other DNA
tcgcgatagagcgttcctccttgttatcggggt

SEQ ID NO: 4743 - DNA, 34 bp, synthetic construct
  source 1..34: mol_type = other DNA
atcgcgatagagcgttcctccttgttatcggggt

SEQ ID NO: 4744 - DNA, 34 bp, synthetic construct
  source 1..34: mol_type = other DNA
atcgcgatagagcgttcctccttgttatccgggt

SEQ ID NO: 4745 - DNA, 35 bp, synthetic construct
  source 1..35: mol_type = other DNA
aatcgcgatagagcgttcctccttgttatcggggt

SEQ ID NO: 4746 - DNA, 35 bp, synthetic construct
  source 1..35: mol_type = other DNA
aatcgcgatagagcgttcctccttgttatccgggt

SEQ ID NO: 4747 - DNA, 36 bp, synthetic construct
  source 1..36: mol_type = other DNA
aaatcgcgatagagcgttcctccttgttatcggggt

SEQ ID NO: 4748 - DNA, 36 bp, synthetic construct
  source 1..36: mol_type = other DNA
aaatcgcgatagagcgttcctccttgttatccgggt

SEQ ID NO: 4749 - DNA, 37 bp, synthetic construct
  source 1..37: mol_type = other DNA
taaatcgcgatagagcgttcctccttgttatccgggt

SEQ ID NO: 4750 - DNA, 37 bp, synthetic construct
  source 1..37: mol_type = other DNA
taaatcgcgatagagcgttcctccttgttatcggggt

SEQ ID NO: 4751 - DNA, 38 bp, synthetic construct
  source 1..38: mol_type = other DNA
ataaatcgcgatagagcgttcctccttgttatcggggt

SEQ ID NO: 4752 - DNA, 38 bp, synthetic construct
  source 1..38: mol_type = other DNA
ataaatcgcgatagagcgttcctccttgttatccgggt

SEQ ID NO: 4753 - DNA, 39 bp, synthetic construct
  source 1..39: mol_type = other DNA
gataaatcgcgatagagcgttcctccttgttatcggggt

SEQ ID NO: 4754 - DNA, 39 bp, synthetic construct
  source 1..39: mol_type = other DNA
gataaatcgcgatagagcgttcctccttgttatccgggt

SEQ ID NO: 4755 - DNA, 40 bp, synthetic construct
  source 1..40: mol_type = other DNA
agataaatcgcgatagagcgttcctccttgttatccgggt

SEQ ID NO: 4756 - DNA, 40 bp, synthetic construct
  source 1..40: mol_type = other DNA
agataaatcgcgatagagcgttcctccttgttatcggggt

SEQ ID NO: 4757 - DNA, 10 bp, synthetic construct
  source 1..10: mol_type = other DNA
gcgttcctcc

SEQ ID NO: 4758 - DNA, 11 bp, synthetic construct
  source 1..11: mol_type = other DNA
agcgttcctcc

SEQ ID NO: 4759 - DNA, 12 bp, synthetic construct
  source 1..12: mol_type = other DNA
gagcgttcctcc

SEQ ID NO: 4760 - DNA, 13 bp, synthetic construct
  source 1..13: mol_type = other DNA
agagcgttcctcc

SEQ ID NO: 4761 - DNA, 14 bp, synthetic construct
  source 1..14: mol_type = other DNA
tagagcgttcctcc

SEQ ID NO: 4762 - DNA, 15 bp, synthetic construct
  source 1..15: mol_type = other DNA
atagagcgttcctcc

SEQ ID NO: 4763 - DNA, 16 bp, synthetic construct
  source 1..16: mol_type = other DNA
gatagagcgttcctcc

SEQ ID NO: 4764 - DNA, 17 bp, synthetic construct
  source 1..17: mol_type = other DNA
cgatagagcgttcctcc

SEQ ID NO: 4765 - DNA, 18 bp, synthetic construct
  source 1..18: mol_type = other DNA
gcgatagagcgttcctcc

SEQ ID NO: 4766 - DNA, 19 bp, synthetic construct
  source 1..19: mol_type = other DNA
cgcgatagagcgttcctcc

SEQ ID NO: 4767 - DNA, 20 bp, synthetic construct
  source 1..20: mol_type = other DNA
tcgcgatagagcgttcctcc

SEQ ID NO: 4768 - DNA, 21 bp, synthetic construct
  source 1..21: mol_type = other DNA
atcgcgatagagcgttcctcc

SEQ ID NO: 4769 - DNA, 22 bp, synthetic construct
  source 1..22: mol_type = other DNA
aatcgcgatagagcgttcctcc

SEQ ID NO: 4770 - DNA, 23 bp, synthetic construct
  source 1..23: mol_type = other DNA
aaatcgcgatagagcgttcctcc

SEQ ID NO: 4771 - DNA, 24 bp, synthetic construct
  source 1..24: mol_type = other DNA
taaatcgcgatagagcgttcctcc

SEQ ID NO: 4772 - DNA, 25 bp, synthetic construct
  source 1..25: mol_type = other DNA
ataaatcgcgatagagcgttcctcc

SEQ ID NO: 4773 - DNA, 26 bp, synthetic construct
  source 1..26: mol_type = other DNA
gataaatcgcgatagagcgttcctcc

SEQ ID NO: 4774 - DNA, 27 bp, synthetic construct
  source 1..27: mol_type = other DNA
agataaatcgcgatagagcgttcctcc

SEQ ID NO: 4775 - DNA, 28 bp, synthetic construct
  source 1..28: mol_type = other DNA
tagataaatcgcgatagagcgttcctcc

SEQ ID NO: 4776 - DNA, 29 bp, synthetic construct
  source 1..29: mol_type = other DNA
ctagataaatcgcgatagagcgttcctcc

SEQ ID NO: 4777 - DNA, 30 bp, synthetic construct
  source 1..30: mol_type = other DNA
cctagataaatcgcgatagagcgttcctcc

SEQ ID NO: 4778 - DNA, 31 bp, synthetic construct
  source 1..31: mol_type = other DNA
gcctagataaatcgcgatagagcgttcctcc

SEQ ID NO: 4779 - DNA, 32 bp, synthetic construct
  source 1..32: mol_type = other DNA
tgcctagataaatcgcgatagagcgttcctcc

SEQ ID NO: 4780 - DNA, 33 bp, synthetic construct
  source 1..33: mol_type = other DNA
atgcctagataaatcgcgatagagcgttcctcc

SEQ ID NO: 4781 - DNA, 34 bp, synthetic construct
  source 1..34: mol_type = other DNA
tatgcctagataaatcgcgatagagcgttcctcc

SEQ ID NO: 4782 - DNA, 35 bp, synthetic construct
  source 1..35: mol_type = other DNA
ctatgcctagataaatcgcgatagagcgttcctcc

SEQ ID NO: 4783 - DNA, 36 bp, synthetic construct
  source 1..36: mol_type = other DNA
cctatgcctagataaatcgcgatagagcgttcctcc

SEQ ID NO: 4784 - DNA, 37 bp, synthetic construct
  source 1..37: mol_type = other DNA
gcctatgcctagataaatcgcgatagagcgttcctcc

SEQ ID NO: 4785 - DNA, 38 bp, synthetic construct
  source 1..38: mol_type = other DNA
agcctatgcctagataaatcgcgatagagcgttcctcc

SEQ ID NO: 4786 - DNA, 39 bp, synthetic construct
  source 1..39: mol_type = other DNA
aagcctatgcctagataaatcgcgatagagcgttcctcc

SEQ ID NO: 4787 - DNA, 40 bp, synthetic construct
  source 1..40: mol_type = other DNA
taagcctatgcctagataaatcgcgatagagcgttcctcc

SEQ ID NO: 4788 - DNA, 10 bp, synthetic construct
  source 1..10: mol_type = other DNA
cgctctatcg

SEQ ID NO: 4789 - DNA, 10 bp, synthetic construct
  source 1..10: mol_type = other DNA
cgcagcatcg

SEQ ID NO: 4790 - DNA, 11 bp, synthetic construct
  source 1..11: mol_type = other DNA
acgcagcatcg

SEQ ID NO: 4791 - DNA, 11 bp, synthetic construct
  source 1..11: mol_type = other DNA
acgctctatcg

SEQ ID NO: 4792 - DNA, 12 bp, synthetic construct
  source 1..12: mol_type = other DNA
aacgctctatcg

SEQ ID NO: 4793 - DNA, 12 bp, synthetic construct
  source 1..12: mol_type = other DNA
aacgcagcatcg

SEQ ID NO: 4794 - DNA, 13 bp, synthetic construct
  source 1..13: mol_type = other DNA
gaacgctctatcg

SEQ ID NO: 4795 - DNA, 13 bp, synthetic construct
  source 1..13: mol_type = other DNA
gaacgcagcatcg

SEQ ID NO: 4796 - DNA, 14 bp, synthetic construct
  source 1..14: mol_type = other DNA
ggaacgctctatcg

SEQ ID NO: 4797 - DNA, 14 bp, synthetic construct
  source 1..14: mol_type = other DNA
ggaacgcagcatcg

SEQ ID NO: 4798 - DNA, 15 bp, synthetic construct
  source 1..15: mol_type = other DNA
aggaacgctctatcg

SEQ ID NO: 4799 - DNA, 15 bp, synthetic construct
  source 1..15: mol_type = other DNA
aggaacgcagcatcg

SEQ ID NO: 4800 - DNA, 16 bp, synthetic construct
  source 1..16: mol_type = other DNA
gaggaacgctctatcg

SEQ ID NO: 4801 - DNA, 16 bp, synthetic construct
  source 1..16: mol_type = other DNA
gaggaacgcagcatcg

SEQ ID NO: 4802 - DNA, 17 bp, synthetic construct
  source 1..17: mol_type = other DNA
ggaggaacgcagcatcg

SEQ ID NO: 4803 - DNA, 17 bp, synthetic construct
  source 1..17: mol_type = other DNA
ggaggaacgctctatcg

SEQ ID NO: 4804 - DNA, 18 bp, synthetic construct
  source 1..18: mol_type = other DNA
aggaggaacgctctatcg

SEQ ID NO: 4805 - DNA, 18 bp, synthetic construct
  source 1..18: mol_type = other DNA
aggaggaacgcagcatcg

SEQ ID NO: 4806 - DNA, 19 bp, synthetic construct
  source 1..19: mol_type = other DNA
aaggaggaacgctctatcg

SEQ ID NO: 4807 - DNA, 19 bp, synthetic construct
  source 1..19: mol_type = other DNA
aaggaggaacgcagcatcg

SEQ ID NO: 4808 - DNA, 20 bp, synthetic construct
  source 1..20: mol_type = other DNA
caaggaggaacgcagcatcg

SEQ ID NO: 4809 - DNA, 20 bp, synthetic construct
  source 1..20: mol_type = other DNA
caaggaggaacgctctatcg

SEQ ID NO: 4810 - DNA, 21 bp, synthetic construct
  source 1..21: mol_type = other DNA
acaaggaggaacgcagcatcg

SEQ ID NO: 4811 - DNA, 21 bp, synthetic construct
  source 1..21: mol_type = other DNA
acaaggaggaacgctctatcg

SEQ ID NO: 4812 - DNA, 22 bp, synthetic construct
  source 1..22: mol_type = other DNA
aacaaggaggaacgctctatcg

SEQ ID NO: 4813 - DNA, 22 bp, synthetic construct
  source 1..22: mol_type = other DNA
aacaaggaggaacgcagcatcg

SEQ ID NO: 4814 - DNA, 23 bp, synthetic construct
  source 1..23: mol_type = other DNA
taacaaggaggaacgctctatcg

SEQ ID NO: 4815 - DNA, 23 bp, synthetic construct
  source 1..23: mol_type = other DNA
taacaaggaggaacgcagcatcg

SEQ ID NO: 4816 - DNA, 24 bp, synthetic construct
  source 1..24: mol_type = other DNA
ataacaaggaggaacgctctatcg

SEQ ID NO: 4817 - DNA, 24 bp, synthetic construct
  source 1..24: mol_type = other DNA
ataacaaggaggaacgcagcatcg

SEQ ID NO: 4818 - DNA, 25 bp, synthetic construct
  source 1..25: mol_type = other DNA
gataacaaggaggaacgcagcatcg

SEQ ID NO: 4819 - DNA, 25 bp, synthetic construct
  source 1..25: mol_type = other DNA
gataacaaggaggaacgctctatcg

SEQ ID NO: 4820 - DNA, 26 bp, synthetic construct
  source 1..26: mol_type = other DNA
ggataacaaggaggaacgctctatcg

SEQ ID NO: 4821 - DNA, 26 bp, synthetic construct
  source 1..26: mol_type = other DNA
ggataacaaggaggaacgcagcatcg

SEQ ID NO: 4822 - DNA, 27 bp, synthetic construct
  source 1..27: mol_type = other DNA
cggataacaaggaggaacgcagcatcg

SEQ ID NO: 4823 - DNA, 27 bp, synthetic construct
  source 1..27: mol_type = other DNA
cggataacaaggaggaacgctctatcg

SEQ ID NO: 4824 - DNA, 28 bp, synthetic construct
  source 1..28: mol_type = other DNA
ccggataacaaggaggaacgctctatcg

SEQ ID NO: 4825 - DNA, 28 bp, synthetic construct
  source 1..28: mol_type = other DNA
ccggataacaaggaggaacgcagcatcg

SEQ ID NO: 4826 - DNA, 29 bp, synthetic construct
  source 1..29: mol_type = other DNA
cccggataacaaggaggaacgcagcatcg

SEQ ID NO: 4827 - DNA, 29 bp, synthetic construct
  source 1..29: mol_type = other DNA
cccggataacaaggaggaacgctctatcg

SEQ ID NO: 4828 - DNA, 30 bp, synthetic construct
  source 1..30: mol_type = other DNA
acccggataacaaggaggaacgcagcatcg

SEQ ID NO: 4829 - DNA, 30 bp, synthetic construct
  source 1..30: mol_type = other DNA
acccggataacaaggaggaacgctctatcg

SEQ ID NO: 4830 - DNA, 31 bp, synthetic construct
  source 1..31: mol_type = other DNA
gacccggataacaaggaggaacgctctatcg

SEQ ID NO: 4831 - DNA, 31 bp, synthetic construct
  source 1..31: mol_type = other DNA
gacccggataacaaggaggaacgcagcatcg

SEQ ID NO: 4832 - DNA, 32 bp, synthetic construct
  source 1..32: mol_type = other DNA
tgacccggataacaaggaggaacgcagcatcg

SEQ ID NO: 4833 - DNA, 32 bp, synthetic construct
  source 1..32: mol_type = other DNA
tgacccggataacaaggaggaacgctctatcg

SEQ ID NO: 4834 - DNA, 33 bp, synthetic construct
  source 1..33: mol_type = other DNA
atgacccggataacaaggaggaacgcagcatcg

SEQ ID NO: 4835 - DNA, 33 bp, synthetic construct
  source 1..33: mol_type = other DNA
atgacccggataacaaggaggaacgctctatcg

SEQ ID NO: 4836 - DNA, 34 bp, synthetic construct
  source 1..34: mol_type = other DNA
tatgacccggataacaaggaggaacgcagcatcg

SEQ ID NO: 4837 - DNA, 34 bp, synthetic construct
  source 1..34: mol_type = other DNA
tatgacccggataacaaggaggaacgctctatcg

SEQ ID NO: 4838 - DNA, 35 bp, synthetic construct
  source 1..35: mol_type = other DNA
ctatgacccggataacaaggaggaacgctctatcg

SEQ ID NO: 4839 - DNA, 35 bp, synthetic construct
  source 1..35: mol_type = other DNA
ctatgacccggataacaaggaggaacgcagcatcg

SEQ ID NO: 4840 - DNA, 36 bp, synthetic construct
  source 1..36: mol_type = other DNA
cctatgacccggataacaaggaggaacgctctatcg

SEQ ID NO: 4841 - DNA, 36 bp, synthetic construct
  source 1..36: mol_type = other DNA
cctatgacccggataacaaggaggaacgcagcatcg

SEQ ID NO: 4842 - DNA, 37 bp, synthetic construct
  source 1..37: mol_type = other DNA
tcctatgacccggataacaaggaggaacgctctatcg

SEQ ID NO: 4843 - DNA, 37 bp, synthetic construct
  source 1..37: mol_type = other DNA
tcctatgacccggataacaaggaggaacgcagcatcg

SEQ ID NO: 4844 - DNA, 38 bp, synthetic construct
  source 1..38: mol_type = other DNA
ttcctatgacccggataacaaggaggaacgctctatcg

SEQ ID NO: 4845 - DNA, 38 bp, synthetic construct
  source 1..38: mol_type = other DNA
ttcctatgacccggataacaaggaggaacgcagcatcg

SEQ ID NO: 4846 - DNA, 39 bp, synthetic construct
  source 1..39: mol_type = other DNA
cttcctatgacccggataacaaggaggaacgcagcatcg

SEQ ID NO: 4847 - DNA, 39 bp, synthetic construct
  source 1..39: mol_type = other DNA
cttcctatgacccggataacaaggaggaacgctctatcg

SEQ ID NO: 4848 - DNA, 40 bp, synthetic construct
  source 1..40: mol_type = other DNA
gcttcctatgacccggataacaaggaggaacgcagcatcg

SEQ ID NO: 4849 - DNA, 40 bp, synthetic construct
  source 1..40: mol_type = other DNA
gcttcctatgacccggataacaaggaggaacgctctatcg

SEQ ID NO: 4850 - DNA, 35 bp, synthetic construct
  source 1..35: mol_type = other DNA
cgctctatcgcgatttatctaggcatagggttatg

SEQ ID NO: 4851 - DNA, 35 bp, synthetic construct
  source 1..35: mol_type = other DNA
cgctctatcgcgatttatctaggcataggcttatg

SEQ ID NO: 4852 - DNA, 36 bp, synthetic construct
  source 1..36: mol_type = other DNA
acgctctatcgcgatttatctaggcataggcttatg

SEQ ID NO: 4853 - DNA, 36 bp, synthetic construct
  source 1..36: mol_type = other DNA
acgctctatcgcgatttatctaggcatagggttatg

SEQ ID NO: 4854 - DNA, 37 bp, synthetic construct
  source 1..37: mol_type = other DNA
aacgctctatcgcgatttatctaggcataggcttatg

SEQ ID NO: 4855 - DNA, 37 bp, synthetic construct
  source 1..37: mol_type = other DNA
aacgctctatcgcgatttatctaggcatagggttatg

SEQ ID NO: 4856 - DNA, 38 bp, synthetic construct
  source 1..38: mol_type = other DNA
gaacgctctatcgcgatttatctaggcatagggttatg

SEQ ID NO: 4857 - DNA, 38 bp, synthetic construct
  source 1..38: mol_type = other DNA
gaacgctctatcgcgatttatctaggcataggcttatg

SEQ ID NO: 4858 - DNA, 39 bp, synthetic construct
  source 1..39: mol_type = other DNA
ggaacgctctatcgcgatttatctaggcataggcttatg

SEQ ID NO: 4859 - DNA, 39 bp, synthetic construct
  source 1..39: mol_type = other DNA
ggaacgctctatcgcgatttatctaggcatagggttatg

SEQ ID NO: 4860 - DNA, 40 bp, synthetic construct
  source 1..40: mol_type = other DNA
aggaacgctctatcgcgatttatctaggcatagggttatg

SEQ ID NO: 4861 - DNA, 40 bp, synthetic construct
  source 1..40: mol_type = other DNA
aggaacgctctatcgcgatttatctaggcataggcttatg

SEQ ID NO: 4862 - DNA, 34 bp, synthetic construct
  source 1..34: mol_type = other DNA
cgctctatcgcgatttatctaggcataggcttat

SEQ ID NO: 4863 - DNA, 35 bp, synthetic construct
  source 1..35: mol_type = other DNA
acgctctatcgcgatttatctaggcataggcttat

SEQ ID NO: 4864 - DNA, 36 bp, synthetic construct
  source 1..36: mol_type = other DNA
aacgctctatcgcgatttatctaggcataggcttat

SEQ ID NO: 4865 - DNA, 37 bp, synthetic construct
  source 1..37: mol_type = other DNA
gaacgctctatcgcgatttatctaggcataggcttat

SEQ ID NO: 4866 - DNA, 38 bp, synthetic construct
  source 1..38: mol_type = other DNA
ggaacgctctatcgcgatttatctaggcataggcttat

SEQ ID NO: 4867 - DNA, 39 bp, synthetic construct
  source 1..39: mol_type = other DNA
aggaacgctctatcgcgatttatctaggcataggcttat

SEQ ID NO: 4868 - DNA, 40 bp, synthetic construct
  source 1..40: mol_type = other DNA
gaggaacgctctatcgcgatttatctaggcataggcttat

SEQ ID NO: 4869 - DNA, 10 bp, synthetic construct
  source 1..10: mol_type = other DNA
gaacgctcta

SEQ ID NO: 4870 - DNA, 11 bp, synthetic construct
  source 1..11: mol_type = other DNA
ggaacgctcta

SEQ ID NO: 4871 - DNA, 12 bp, synthetic construct
  source 1..12: mol_type = other DNA
aggaacgctcta

SEQ ID NO: 4872 - DNA, 13 bp, synthetic construct
  source 1..13: mol_type = other DNA
gaggaacgctcta

SEQ ID NO: 4873 - DNA, 14 bp, synthetic construct
  source 1..14: mol_type = other DNA
ggaggaacgctcta

SEQ ID NO: 4874 - DNA, 15 bp, synthetic construct
  source 1..15: mol_type = other DNA
aggaggaacgctcta

SEQ ID NO: 4875 - DNA, 16 bp, synthetic construct
  source 1..16: mol_type = other DNA
aaggaggaacgctcta

SEQ ID NO: 4876 - DNA, 17 bp, synthetic construct
  source 1..17: mol_type = other DNA
caaggaggaacgctcta

SEQ ID NO: 4877 - DNA, 18 bp, synthetic construct
  source 1..18: mol_type = other DNA
acaaggaggaacgctcta

SEQ ID NO: 4878 - DNA, 19 bp, synthetic construct
  source 1..19: mol_type = other DNA
aacaaggaggaacgctcta

SEQ ID NO: 4879 - DNA, 20 bp, synthetic construct
  source 1..20: mol_type = other DNA
taacaaggaggaacgctcta

SEQ ID NO: 4880 - DNA, 21 bp, synthetic construct
  source 1..21: mol_type = other DNA
ataacaaggaggaacgctcta

SEQ ID NO: 4881 - DNA, 22 bp, synthetic construct
  source 1..22: mol_type = other DNA
gataacaaggaggaacgctcta

SEQ ID NO: 4882 - DNA, 23 bp, synthetic construct
  source 1..23: mol_type = other DNA
ggataacaaggaggaacgctcta

SEQ ID NO: 4883 - DNA, 24 bp, synthetic construct
  source 1..24: mol_type = other DNA
cggataacaaggaggaacgctcta

SEQ ID NO: 4884 - DNA, 25 bp, synthetic construct
  source 1..25: mol_type = other DNA
ccggataacaaggaggaacgctcta

SEQ ID NO: 4885 - DNA, 26 bp, synthetic construct
  source 1..26: mol_type = other DNA
cccggataacaaggaggaacgctcta

SEQ ID NO: 4886 - DNA, 27 bp, synthetic construct
  source 1..27: mol_type = other DNA
acccggataacaaggaggaacgctcta

SEQ ID NO: 4887 - DNA, 28 bp, synthetic construct
  source 1..28: mol_type = other DNA
gacccggataacaaggaggaacgctcta

SEQ ID NO: 4888 - DNA, 29 bp, synthetic construct
  source 1..29: mol_type = other DNA
tgacccggataacaaggaggaacgctcta

SEQ ID NO: 4889 - DNA, 30 bp, synthetic construct
  source 1..30: mol_type = other DNA
atgacccggataacaaggaggaacgctcta

SEQ ID NO: 4890 - DNA, 31 bp, synthetic construct
  source 1..31: mol_type = other DNA
tatgacccggataacaaggaggaacgctcta

SEQ ID NO: 4891 - DNA, 32 bp, synthetic construct
  source 1..32: mol_type = other DNA
ctatgacccggataacaaggaggaacgctcta

SEQ ID NO: 4892 - DNA, 33 bp, synthetic construct
  source 1..33: mol_type = other DNA
cctatgacccggataacaaggaggaacgctcta

SEQ ID NO: 4893 - DNA, 34 bp, synthetic construct
  source 1..34: mol_type = other DNA
tcctatgacccggataacaaggaggaacgctcta

SEQ ID NO: 4894 - DNA, 35 bp, synthetic construct
  source 1..35: mol_type = other DNA
ttcctatgacccggataacaaggaggaacgctcta

SEQ ID NO: 4895 - DNA, 36 bp, synthetic construct
  source 1..36: mol_type = other DNA
cttcctatgacccggataacaaggaggaacgctcta

SEQ ID NO: 4896 - DNA, 37 bp, synthetic construct
  source 1..37: mol_type = other DNA
gcttcctatgacccggataacaaggaggaacgctcta

SEQ ID NO: 4897 - DNA, 38 bp, synthetic construct
  source 1..38: mol_type = other DNA
agcttcctatgacccggataacaaggaggaacgctcta

SEQ ID NO: 4898 - DNA, 39 bp, synthetic construct
  source 1..39: mol_type = other DNA
tagcttcctatgacccggataacaaggaggaacgctcta

SEQ ID NO: 4899 - DNA, 40 bp, synthetic construct
  source 1..40: mol_type = other DNA
atagcttcctatgacccggataacaaggaggaacgctcta

SEQ ID NO: 4900 - DNA, 13 bp, synthetic construct
  source 1..13: mol_type = other DNA
gcgttcctccttg

SEQ ID NO: 4901 - DNA, 14 bp, synthetic construct
  source 1..14: mol_type = other DNA
agcgttcctccttg

SEQ ID NO: 4902 - DNA, 15 bp, synthetic construct
  source 1..15: mol_type = other DNA
gagcgttcctccttg

SEQ ID NO: 4903 - DNA, 16 bp, synthetic construct
  source 1..16: mol_type = other DNA
agagcgttcctccttg

SEQ ID NO: 4904 - DNA, 17 bp, synthetic construct
  source 1..17: mol_type = other DNA
tagagcgttcctccttg

SEQ ID NO: 4905 - DNA, 18 bp, synthetic construct
  source 1..18: mol_type = other DNA
atagagcgttcctccttg

SEQ ID NO: 4906 - DNA, 19 bp, synthetic construct
  source 1..19: mol_type = other DNA
gatagagcgttcctccttg

SEQ ID NO: 4907 - DNA, 20 bp, synthetic construct
  source 1..20: mol_type = other DNA
cgatagagcgttcctccttg

SEQ ID NO: 4908 - DNA, 21 bp, synthetic construct
  source 1..21: mol_type = other DNA
gcgatagagcgttcctccttg

SEQ ID NO: 4909 - DNA, 22 bp, synthetic construct
  source 1..22: mol_type = other DNA
cgcgatagagcgttcctccttg

SEQ ID NO: 4910 - DNA, 23 bp, synthetic construct
  source 1..23: mol_type = other DNA
tcgcgatagagcgttcctccttg

SEQ ID NO: 4911 - DNA, 24 bp, synthetic construct
  source 1..24: mol_type = other DNA
atcgcgatagagcgttcctccttg

SEQ ID NO: 4912 - DNA, 25 bp, synthetic construct
  source 1..25: mol_type = other DNA
aatcgcgatagagcgttcctccttg

SEQ ID NO: 4913 - DNA, 26 bp, synthetic construct
  source 1..26: mol_type = other DNA
aaatcgcgatagagcgttcctccttg

SEQ ID NO: 4914 - DNA, 27 bp, synthetic construct
  source 1..27: mol_type = other DNA
taaatcgcgatagagcgttcctccttg

SEQ ID NO: 4915 - DNA, 28 bp, synthetic construct
  source 1..28: mol_type = other DNA
ataaatcgcgatagagcgttcctccttg

SEQ ID NO: 4916 - DNA, 29 bp, synthetic construct
  source 1..29: mol_type = other DNA
gataaatcgcgatagagcgttcctccttg

SEQ ID NO: 4917 - DNA, 30 bp, synthetic construct
  source 1..30: mol_type = other DNA
agataaatcgcgatagagcgttcctccttg

SEQ ID NO: 4918 - DNA, 31 bp, synthetic construct
  source 1..31: mol_type = other DNA
tagataaatcgcgatagagcgttcctccttg

SEQ ID NO: 4919 - DNA, 32 bp, synthetic construct
  source 1..32: mol_type = other DNA
ctagataaatcgcgatagagcgttcctccttg

SEQ ID NO: 4920 - DNA, 33 bp, synthetic construct
  source 1..33: mol_type = other DNA
cctagataaatcgcgatagagcgttcctccttg

SEQ ID NO: 4921 - DNA, 34 bp, synthetic construct
  source 1..34: mol_type = other DNA
gcctagataaatcgcgatagagcgttcctccttg

SEQ ID NO: 4922 - DNA, 35 bp, synthetic construct
  source 1..35: mol_type = other DNA
tgcctagataaatcgcgatagagcgttcctccttg

SEQ ID NO: 4923 - DNA, 36 bp, synthetic construct
  source 1..36: mol_type = other DNA
atgcctagataaatcgcgatagagcgttcctccttg

SEQ ID NO: 4924 - DNA, 37 bp, synthetic construct
  source 1..37: mol_type = other DNA
tatgcctagataaatcgcgatagagcgttcctccttg

SEQ ID NO: 4925 - DNA, 38 bp, synthetic construct
  source 1..38: mol_type = other DNA
ctatgcctagataaatcgcgatagagcgttcctccttg

SEQ ID NO: 4926 - DNA, 39 bp, synthetic construct
  source 1..39: mol_type = other DNA
cctatgcctagataaatcgcgatagagcgttcctccttg

SEQ ID NO: 4927 - DNA, 40 bp, synthetic construct
  source 1..40: mol_type = other DNA
gcctatgcctagataaatcgcgatagagcgttcctccttg

SEQ ID NO: 4928 - DNA, 13 bp, synthetic construct
  source 1..13: mol_type = other DNA
cgctctatcgcga

SEQ ID NO: 4929 - DNA, 14 bp, synthetic construct
  source 1..14: mol_type = other DNA
acgctctatcgcga

SEQ ID NO: 4930 - DNA, 15 bp, synthetic construct
  source 1..15: mol_type = other DNA
aacgctctatcgcga

SEQ ID NO: 4931 - DNA, 16 bp, synthetic construct
  source 1..16: mol_type = other DNA
gaacgctctatcgcga

SEQ ID NO: 4932 - DNA, 17 bp, synthetic construct
  source 1..17: mol_type = other DNA
ggaacgctctatcgcga

SEQ ID NO: 4933 - DNA, 18 bp, synthetic construct
  source 1..18: mol_type = other DNA
aggaacgctctatcgcga

SEQ ID NO: 4934 - DNA, 19 bp, synthetic construct
  source 1..19: mol_type = other DNA
gaggaacgctctatcgcga

SEQ ID NO: 4935 - DNA, 20 bp, synthetic construct
  source 1..20: mol_type = other DNA
ggaggaacgctctatcgcga

SEQ ID NO: 4936 - DNA, 21 bp, synthetic construct
  source 1..21: mol_type = other DNA
aggaggaacgctctatcgcga

SEQ ID NO: 4937 - DNA, 22 bp, synthetic construct
  source 1..22: mol_type = other DNA
aaggaggaacgctctatcgcga

SEQ ID NO: 4938 - DNA, 23 bp, synthetic construct
  source 1..23: mol_type = other DNA
caaggaggaacgctctatcgcga

SEQ ID NO: 4939 - DNA, 24 bp, synthetic construct
  source 1..24: mol_type = other DNA
acaaggaggaacgctctatcgcga

SEQ ID NO: 4940 - DNA, 25 bp, synthetic construct
  source 1..25: mol_type = other DNA
aacaaggaggaacgctctatcgcga

SEQ ID NO: 4941 - DNA, 26 bp, synthetic construct
  source 1..26: mol_type = other DNA
taacaaggaggaacgctctatcgcga

SEQ ID NO: 4942 - DNA, 27 bp, synthetic construct
  source 1..27: mol_type = other DNA
ataacaaggaggaacgctctatcgcga

SEQ ID NO: 4943 - DNA, 28 bp, synthetic construct
  source 1..28: mol_type = other DNA
gataacaaggaggaacgctctatcgcga

SEQ ID NO: 4944 - DNA, 29 bp, synthetic construct
  source 1..29: mol_type = other DNA
ggataacaaggaggaacgctctatcgcga

SEQ ID NO: 4945 - DNA, 30 bp, synthetic construct
  source 1..30: mol_type = other DNA
cggataacaaggaggaacgctctatcgcga

SEQ ID NO: 4946 - DNA, 31 bp, synthetic construct
  source 1..31: mol_type = other DNA
ccggataacaaggaggaacgctctatcgcga

SEQ ID NO: 4947 - DNA, 32 bp, synthetic construct
  source 1..32: mol_type = other DNA
cccggataacaaggaggaacgctctatcgcga

SEQ ID NO: 4948 - DNA, 33 bp, synthetic construct
  source 1..33: mol_type = other DNA
acccggataacaaggaggaacgctctatcgcga

SEQ ID NO: 4949 - DNA, 34 bp, synthetic construct
  source 1..34: mol_type = other DNA
gacccggataacaaggaggaacgctctatcgcga

SEQ ID NO: 4950 - DNA, 35 bp, synthetic construct
  source 1..35: mol_type = other DNA
tgacccggataacaaggaggaacgctctatcgcga

SEQ ID NO: 4951 - DNA, 36 bp, synthetic construct
  source 1..36: mol_type = other DNA
atgacccggataacaaggaggaacgctctatcgcga

SEQ ID NO: 4952 - DNA, 37 bp, synthetic construct
  source 1..37: mol_type = other DNA
tatgacccggataacaaggaggaacgctctatcgcga

SEQ ID NO: 4953 - DNA, 38 bp, synthetic construct
  source 1..38: mol_type = other DNA
ctatgacccggataacaaggaggaacgctctatcgcga

SEQ ID NO: 4954 - DNA, 39 bp, synthetic construct
  source 1..39: mol_type = other DNA
cctatgacccggataacaaggaggaacgctctatcgcga

SEQ ID NO: 4955 - DNA, 40 bp, synthetic construct
  source 1..40: mol_type = other DNA
tcctatgacccggataacaaggaggaacgctctatcgcga

SEQ ID NO: 4956 - DNA, 10 bp, synthetic construct
  source 1..10: mol_type = other DNA
ggaacgctct

SEQ ID NO: 4957 - DNA, 11 bp, synthetic construct
  source 1..11: mol_type = other DNA
aggaacgctct

SEQ ID NO: 4958 - DNA, 12 bp, synthetic construct
  source 1..12: mol_type = other DNA
gaggaacgctct

SEQ ID NO: 4959 - DNA, 13 bp, synthetic construct
  source 1..13: mol_type = other DNA
ggaggaacgctct

SEQ ID NO: 4960 - DNA, 14 bp, synthetic construct
  source 1..14: mol_type = other DNA
aggaggaacgctct

SEQ ID NO: 4961 - DNA, 15 bp, synthetic construct
  source 1..15: mol_type = other DNA
aaggaggaacgctct

SEQ ID NO: 4962 - DNA, 16 bp, synthetic construct
  source 1..16: mol_type = other DNA
caaggaggaacgctct

SEQ ID NO: 4963 - DNA, 17 bp, synthetic construct
  source 1..17: mol_type = other DNA
acaaggaggaacgctct

SEQ ID NO: 4964 - DNA, 18 bp, synthetic construct
  source 1..18: mol_type = other DNA
aacaaggaggaacgctct

SEQ ID NO: 4965 - DNA, 19 bp, synthetic construct
  source 1..19: mol_type = other DNA
taacaaggaggaacgctct

SEQ ID NO: 4966 - DNA, 20 bp, synthetic construct
  source 1..20: mol_type = other DNA
ataacaaggaggaacgctct

SEQ ID NO: 4967 - DNA, 21 bp, synthetic construct
  source 1..21: mol_type = other DNA
gataacaaggaggaacgctct

SEQ ID NO: 4968 - DNA, 22 bp, synthetic construct
  source 1..22: mol_type = other DNA
ggataacaaggaggaacgctct

SEQ ID NO: 4969 - DNA, 23 bp, synthetic construct
  source 1..23: mol_type = other DNA
cggataacaaggaggaacgctct

SEQ ID NO: 4970 - DNA, 24 bp, synthetic construct
  source 1..24: mol_type = other DNA
ccggataacaaggaggaacgctct

SEQ ID NO: 4971 - DNA, 25 bp, synthetic construct
  source 1..25: mol_type = other DNA
cccggataacaaggaggaacgctct

SEQ ID NO: 4972 - DNA, 26 bp, synthetic construct
  source 1..26: mol_type = other DNA
acccggataacaaggaggaacgctct

SEQ ID NO: 4973 - DNA, 27 bp, synthetic construct
  source 1..27: mol_type = other DNA
gacccggataacaaggaggaacgctct

SEQ ID NO: 4974 - DNA, 28 bp, synthetic construct
  source 1..28: mol_type = other DNA
tgacccggataacaaggaggaacgctct

SEQ ID NO: 4975 - DNA, 29 bp, synthetic construct
  source 1..29: mol_type = other DNA
atgacccggataacaaggaggaacgctct

SEQ ID NO: 4976 - DNA, 30 bp, synthetic construct
  source 1..30: mol_type = other DNA
tatgacccggataacaaggaggaacgctct

SEQ ID NO: 4977 - DNA, 31 bp, synthetic construct
  source 1..31: mol_type = other DNA
ctatgacccggataacaaggaggaacgctct

SEQ ID NO: 4978 - DNA, 32 bp, synthetic construct
  source 1..32: mol_type = other DNA
cctatgacccggataacaaggaggaacgctct

SEQ ID NO: 4979 - DNA, 33 bp, synthetic construct
  source 1..33: mol_type = other DNA
tcctatgacccggataacaaggaggaacgctct

SEQ ID NO: 4980 - DNA, 34 bp, synthetic construct
  source 1..34: mol_type = other DNA
ttcctatgacccggataacaaggaggaacgctct

SEQ ID NO: 4981 - DNA, 35 bp, synthetic construct
  source 1..35: mol_type = other DNA
cttcctatgacccggataacaaggaggaacgctct

SEQ ID NO: 4982 - DNA, 36 bp, synthetic construct
  source 1..36: mol_type = other DNA
gcttcctatgacccggataacaaggaggaacgctct

SEQ ID NO: 4983 - DNA, 37 bp, synthetic construct
  source 1..37: mol_type = other DNA
agcttcctatgacccggataacaaggaggaacgctct

SEQ ID NO: 4984 - DNA, 38 bp, synthetic construct
  source 1..38: mol_type = other DNA
tagcttcctatgacccggataacaaggaggaacgctct

SEQ ID NO: 4985 - DNA, 39 bp, synthetic construct
  source 1..39: mol_type = other DNA
atagcttcctatgacccggataacaaggaggaacgctct

SEQ ID NO: 4986 - DNA, 40 bp, synthetic construct
  source 1..40: mol_type = other DNA
catagcttcctatgacccggataacaaggaggaacgctct

SEQ ID NO: 4987 - DNA, 10 bp, synthetic construct
  source 1..10: mol_type = other DNA
aggaacgctc

SEQ ID NO: 4988 - DNA, 11 bp, synthetic construct
  source 1..11: mol_type = other DNA
gaggaacgctc

SEQ ID NO: 4989 - DNA, 12 bp, synthetic construct
  source 1..12: mol_type = other DNA
ggaggaacgctc

SEQ ID NO: 4990 - DNA, 13 bp, synthetic construct
  source 1..13: mol_type = other DNA
aggaggaacgctc

SEQ ID NO: 4991 - DNA, 14 bp, synthetic construct
  source 1..14: mol_type = other DNA
aaggaggaacgctc

SEQ ID NO: 4992 - DNA, 15 bp, synthetic construct
  source 1..15: mol_type = other DNA
caaggaggaacgctc

SEQ ID NO: 4993 - DNA, 16 bp, synthetic construct
  source 1..16: mol_type = other DNA
acaaggaggaacgctc

SEQ ID NO: 4994 - DNA, 17 bp, synthetic construct
  source 1..17: mol_type = other DNA
aacaaggaggaacgctc

SEQ ID NO: 4995 - DNA, 18 bp, synthetic construct
  source 1..18: mol_type = other DNA
taacaaggaggaacgctc

SEQ ID NO: 4996 - DNA, 19 bp, synthetic construct
  source 1..19: mol_type = other DNA
ataacaaggaggaacgctc

SEQ ID NO: 4997 - DNA, 20 bp, synthetic construct
  source 1..20: mol_type = other DNA
gataacaaggaggaacgctc

SEQ ID NO: 4998 - DNA, 21 bp, synthetic construct
  source 1..21: mol_type = other DNA
ggataacaaggaggaacgctc

SEQ ID NO: 4999 - DNA, 22 bp, synthetic construct
  source 1..22: mol_type = other DNA
cggataacaaggaggaacgctc

SEQ ID NO: 5000 - DNA, 23 bp, synthetic construct
  source 1..23: mol_type = other DNA
ccggataacaaggaggaacgctc

SEQ ID NO: 5001 - DNA, 24 bp, synthetic construct
  source 1..24: mol_type = other DNA
cccggataacaaggaggaacgctc

SEQ ID NO: 5002 - DNA, 25 bp, synthetic construct
  source 1..25: mol_type = other DNA
acccggataacaaggaggaacgctc

SEQ ID NO: 5003 - DNA, 26 bp, synthetic construct
  source 1..26: mol_type = other DNA
gacccggataacaaggaggaacgctc

SEQ ID NO: 5004 - DNA, 27 bp, synthetic construct
  source 1..27: mol_type = other DNA
tgacccggataacaaggaggaacgctc

SEQ ID NO: 5005 - DNA, 28 bp, synthetic construct
  source 1..28: mol_type = other DNA
atgacccggataacaaggaggaacgctc

SEQ ID NO: 5006 - DNA, 29 bp, synthetic construct
  source 1..29: mol_type = other DNA
tatgacccggataacaaggaggaacgctc

SEQ ID NO: 5007 - DNA, 30 bp, synthetic construct
  source 1..30: mol_type = other DNA
ctatgacccggataacaaggaggaacgctc

SEQ ID NO: 5008 - DNA, 31 bp, synthetic construct
  source 1..31: mol_type = other DNA
cctatgacccggataacaaggaggaacgctc

SEQ ID NO: 5009 - DNA, 32 bp, synthetic construct
  source 1..32: mol_type = other DNA
tcctatgacccggataacaaggaggaacgctc

SEQ ID NO: 5010 - DNA, 33 bp, synthetic construct
  source 1..33: mol_type = other DNA
ttcctatgacccggataacaaggaggaacgctc

SEQ ID NO: 5011 - DNA, 34 bp, synthetic construct
  source 1..34: mol_type = other DNA
cttcctatgacccggataacaaggaggaacgctc

SEQ ID NO: 5012 - DNA, 35 bp, synthetic construct
  source 1..35: mol_type = other DNA
gcttcctatgacccggataacaaggaggaacgctc

SEQ ID NO: 5013 - DNA, 36 bp, synthetic construct
  source 1..36: mol_type = other DNA
agcttcctatgacccggataacaaggaggaacgctc

SEQ ID NO: 5014 - DNA, 37 bp, synthetic construct
  source 1..37: mol_type = other DNA
tagcttcctatgacccggataacaaggaggaacgctc

SEQ ID NO: 5015 - DNA, 38 bp, synthetic construct
  source 1..38: mol_type = other DNA
atagcttcctatgacccggataacaaggaggaacgctc

SEQ ID NO: 5016 - DNA, 39 bp, synthetic construct
  source 1..39: mol_type = other DNA
catagcttcctatgacccggataacaaggaggaacgctc

SEQ ID NO: 5017 - DNA, 40 bp, synthetic construct
  source 1..40: mol_type = other DNA
tcatagcttcctatgacccggataacaaggaggaacgctc

SEQ ID NO: 5018 - DNA, 12 bp, synthetic construct
  source 1..12: mol_type = other DNA
gcgttcctcctt

SEQ ID NO: 5019 - DNA, 12 bp, synthetic construct
  source 1..12: mol_type = other DNA
gcgttcttcctt

SEQ ID NO: 5020 - DNA, 13 bp, synthetic construct
  source 1..13: mol_type = other DNA
agcgttcctcctt

SEQ ID NO: 5021 - DNA, 13 bp, synthetic construct
  source 1..13: mol_type = other DNA
agcgttcttcctt

SEQ ID NO: 5022 - DNA, 14 bp, synthetic construct
  source 1..14: mol_type = other DNA
gagcgttcttcctt

SEQ ID NO: 5023 - DNA, 14 bp, synthetic construct
  source 1..14: mol_type = other DNA
gagcgttcctcctt

SEQ ID NO: 5024 - DNA, 15 bp, synthetic construct
  source 1..15: mol_type = other DNA
agagcgttcttcctt

SEQ ID NO: 5025 - DNA, 15 bp, synthetic construct
  source 1..15: mol_type = other DNA
agagcgttcctcctt

SEQ ID NO: 5026 - DNA, 16 bp, synthetic construct
  source 1..16: mol_type = other DNA
tagagcgttcttcctt

SEQ ID NO: 5027 - DNA, 16 bp, synthetic construct
  source 1..16: mol_type = other DNA
tagagcgttcctcctt

SEQ ID NO: 5028 - DNA, 17 bp, synthetic construct
  source 1..17: mol_type = other DNA
atagagcgttcctcctt

SEQ ID NO: 5029 - DNA, 17 bp, synthetic construct
  source 1..17: mol_type = other DNA
atagagcgttcttcctt

SEQ ID NO: 5030 - DNA, 18 bp, synthetic construct
  source 1..18: mol_type = other DNA
gatagagcgttcttcctt

SEQ ID NO: 5031 - DNA, 18 bp, synthetic construct
  source 1..18: mol_type = other DNA
gatagagcgttcctcctt

SEQ ID NO: 5032 - DNA, 19 bp, synthetic construct
  source 1..19: mol_type = other DNA
cgatagagcgttcctcctt

SEQ ID NO: 5033 - DNA, 19 bp, synthetic construct
  source 1..19: mol_type = other DNA
cgatagagcgttcttcctt

SEQ ID NO: 5034 - DNA, 20 bp, synthetic construct
  source 1..20: mol_type = other DNA
gcgatagagcgttcttcctt

SEQ ID NO: 5035 - DNA, 20 bp, synthetic construct
  source 1..20: mol_type = other DNA
gcgatagagcgttcctcctt

SEQ ID NO: 5036 - DNA, 21 bp, synthetic construct
  source 1..21: mol_type = other DNA
cgcgatagagcgttcctcctt

SEQ ID NO: 5037 - DNA, 21 bp, synthetic construct
  source 1..21: mol_type = other DNA
cgcgatagagcgttcttcctt

SEQ ID NO: 5038 - DNA, 22 bp, synthetic construct
  source 1..22: mol_type = other DNA
tcgcgatagagcgttcttcctt

SEQ ID NO: 5039 - DNA, 22 bp, synthetic construct
  source 1..22: mol_type = other DNA
tcgcgatagagcgttcctcctt

SEQ ID NO: 5040 - DNA, 23 bp, synthetic construct
  source 1..23: mol_type = other DNA
atcgcgatagagcgttcctcctt

SEQ ID NO: 5041 - DNA, 23 bp, synthetic construct
  source 1..23: mol_type = other DNA
atcgcgatagagcgttcttcctt

SEQ ID NO: 5042 - DNA, 24 bp, synthetic construct
  source 1..24: mol_type = other DNA
aatcgcgatagagcgttcttcctt

SEQ ID NO: 5043 - DNA, 24 bp, synthetic construct
  source 1..24: mol_type = other DNA
aatcgcgatagagcgttcctcctt

SEQ ID NO: 5044 - DNA, 25 bp, synthetic construct
  source 1..25: mol_type = other DNA
aaatcgcgatagagcgttcttcctt

SEQ ID NO: 5045 - DNA, 25 bp, synthetic construct
  source 1..25: mol_type = other DNA
aaatcgcgatagagcgttcctcctt

SEQ ID NO: 5046 - DNA, 26 bp, synthetic construct
  source 1..26: mol_type = other DNA
taaatcgcgatagagcgttcttcctt

SEQ ID NO: 5047 - DNA, 26 bp, synthetic construct
  source 1..26: mol_type = other DNA
taaatcgcgatagagcgttcctcctt

SEQ ID NO: 5048 - DNA, 27 bp, synthetic construct
  source 1..27: mol_type = other DNA
ataaatcgcgatagagcgttcctcctt

SEQ ID NO: 5049 - DNA, 27 bp, synthetic construct
  source 1..27: mol_type = other DNA
ataaatcgcgatagagcgttcttcctt

SEQ ID NO: 5050 - DNA, 28 bp, synthetic construct
  source 1..28: mol_type = other DNA
gataaatcgcgatagagcgttcctcctt

SEQ ID NO: 5051 - DNA, 28 bp, synthetic construct
  source 1..28: mol_type = other DNA
gataaatcgcgatagagcgttcttcctt

SEQ ID NO: 5052 - DNA, 29 bp, synthetic construct
  source 1..29: mol_type = other DNA
agataaatcgcgatagagcgttcctcctt

SEQ ID NO: 5053 - DNA, 29 bp, synthetic construct
  source 1..29: mol_type = other DNA
agataaatcgcgatagagcgttcttcctt

SEQ ID NO: 5054 - DNA, 30 bp, synthetic construct
  source 1..30: mol_type = other DNA
tagataaatcgcgatagagcgttcttcctt

SEQ ID NO: 5055 - DNA, 30 bp, synthetic construct
  source 1..30: mol_type = other DNA
tagataaatcgcgatagagcgttcctcctt

SEQ ID NO: 5056 - DNA, 31 bp, synthetic construct
  source 1..31: mol_type = other DNA
ctagataaatcgcgatagagcgttcctcctt

SEQ ID NO: 5057 - DNA, 31 bp, synthetic construct
  source 1..31: mol_type = other DNA
ctagataaatcgcgatagagcgttcttcctt

SEQ ID NO: 5058 - DNA, 32 bp, synthetic construct
  source 1..32: mol_type = other DNA
cctagataaatcgcgatagagcgttcctcctt

SEQ ID NO: 5059 - DNA, 32 bp, synthetic construct
  source 1..32: mol_type = other DNA
cctagataaatcgcgatagagcgttcttcctt

SEQ ID NO: 5060 - DNA, 33 bp, synthetic construct
  source 1..33: mol_type = other DNA
gcctagataaatcgcgatagagcgttcctcctt

SEQ ID NO: 5061 - DNA, 33 bp, synthetic construct
  source 1..33: mol_type = other DNA
gcctagataaatcgcgatagagcgttcttcctt

SEQ ID NO: 5062 - DNA, 34 bp, synthetic construct
  source 1..34: mol_type = other DNA
tgcctagataaatcgcgatagagcgttcctcctt

SEQ ID NO: 5063 - DNA, 34 bp, synthetic construct
  source 1..34: mol_type = other DNA
tgcctagataaatcgcgatagagcgttcttcctt

SEQ ID NO: 5064 - DNA, 35 bp, synthetic construct
  source 1..35: mol_type = other DNA
atgcctagataaatcgcgatagagcgttcctcctt

SEQ ID NO: 5065 - DNA, 35 bp, synthetic construct
  source 1..35: mol_type = other DNA
atgcctagataaatcgcgatagagcgttcttcctt

SEQ ID NO: 5066 - DNA, 36 bp, synthetic construct
  source 1..36: mol_type = other DNA
tatgcctagataaatcgcgatagagcgttcctcctt

SEQ ID NO: 5067 - DNA, 36 bp, synthetic construct
  source 1..36: mol_type = other DNA
tatgcctagataaatcgcgatagagcgttcttcctt

SEQ ID NO: 5068 - DNA, 37 bp, synthetic construct
  source 1..37: mol_type = other DNA
ctatgcctagataaatcgcgatagagcgttcttcctt

SEQ ID NO: 5069 - DNA, 37 bp, synthetic construct
  source 1..37: mol_type = other DNA
ctatgcctagataaatcgcgatagagcgttcctcctt

SEQ ID NO: 5070 - DNA, 38 bp, synthetic construct
  source 1..38: mol_type = other DNA
cctatgcctagataaatcgcgatagagcgttcctcctt

SEQ ID NO: 5071 - DNA, 38 bp, synthetic construct
  source 1..38: mol_type = other DNA
cctatgcctagataaatcgcgatagagcgttcttcctt

SEQ ID NO: 5072 - DNA, 39 bp, synthetic construct
  source 1..39: mol_type = other DNA
gcctatgcctagataaatcgcgatagagcgttcctcctt

SEQ ID NO: 5073 - DNA, 39 bp, synthetic construct
  source 1..39: mol_type = other DNA
gcctatgcctagataaatcgcgatagagcgttcttcctt

SEQ ID NO: 5074 - DNA, 40 bp, synthetic construct
  source 1..40: mol_type = other DNA
agcctatgcctagataaatcgcgatagagcgttcctcctt

SEQ ID NO: 5075 - DNA, 40 bp, synthetic construct
  source 1..40: mol_type = other DNA
agcctatgcctagataaatcgcgatagagcgttcttcctt

SEQ ID NO: 5076 - DNA, 38 bp, synthetic construct
  source 1..38: mol_type = other DNA
gcgttcctccttgttatccgggtcataggaagcgatga

SEQ ID NO: 5077 - DNA, 38 bp, synthetic construct
  source 1..38: mol_type = other DNA
gcgttcctccttgttatccgggtcataggaagctatga

SEQ ID NO: 5078 - DNA, 39 bp, synthetic construct
  source 1..39: mol_type = other DNA
agcgttcctccttgttatccgggtcataggaagctatga

SEQ ID NO: 5079 - DNA, 39 bp, synthetic construct
  source 1..39: mol_type = other DNA
agcgttcctccttgttatccgggtcataggaagcgatga

SEQ ID NO: 5080 - DNA, 40 bp, synthetic construct
  source 1..40: mol_type = other DNA
gagcgttcctccttgttatccgggtcataggaagcgatga

SEQ ID NO: 5081 - DNA, 40 bp, synthetic construct
  source 1..40: mol_type = other DNA
gagcgttcctccttgttatccgggtcataggaagctatga

SEQ ID NO: 5082 - DNA, 37 bp, synthetic construct
  source 1..37: mol_type = other DNA
gcgttcctccttgttatccgggtcataggaagctatg

SEQ ID NO: 5083 - DNA, 38 bp, synthetic construct
  source 1..38: mol_type = other DNA
agcgttcctccttgttatccgggtcataggaagctatg

SEQ ID NO: 5084 - DNA, 39 bp, synthetic construct
  source 1..39: mol_type = other DNA
gagcgttcctccttgttatccgggtcataggaagctatg

SEQ ID NO: 5085 - DNA, 40 bp, synthetic construct
  source 1..40: mol_type = other DNA
agagcgttcctccttgttatccgggtcataggaagctatg

SEQ ID NO: 5086 - DNA, 28 bp, synthetic construct
  source 1..28: mol_type = other DNA
gcgttcctccttgttatccgggtcatag

SEQ ID NO: 5087 - DNA, 29 bp, synthetic construct
  source 1..29: mol_type = other DNA
agcgttcctccttgttatccgggtcatag

SEQ ID NO: 5088 - DNA, 30 bp, synthetic construct
  source 1..30: mol_type = other DNA
gagcgttcctccttgttatccgggtcatag

SEQ ID NO: 5089 - DNA, 31 bp, synthetic construct
  source 1..31: mol_type = other DNA
agagcgttcctccttgttatccgggtcatag

SEQ ID NO: 5090 - DNA, 32 bp, synthetic construct
  source 1..32: mol_type = other DNA
tagagcgttcctccttgttatccgggtcatag

SEQ ID NO: 5091 - DNA, 33 bp, synthetic construct
  source 1..33: mol_type = other DNA
atagagcgttcctccttgttatccgggtcatag

SEQ ID NO: 5092 - DNA, 34 bp, synthetic construct
  source 1..34: mol_type = other DNA
gatagagcgttcctccttgttatccgggtcatag

SEQ ID NO: 5093 - DNA, 35 bp, synthetic construct
  source 1..35: mol_type = other DNA
cgatagagcgttcctccttgttatccgggtcatag

SEQ ID NO: 5094 - DNA, 36 bp, synthetic construct
  source 1..36: mol_type = other DNA
gcgatagagcgttcctccttgttatccgggtcatag

SEQ ID NO: 5095 - DNA, 37 bp, synthetic construct
  source 1..37: mol_type = other DNA
cgcgatagagcgttcctccttgttatccgggtcatag

SEQ ID NO: 5096 - DNA, 38 bp, synthetic construct
  source 1..38: mol_type = other DNA
tcgcgatagagcgttcctccttgttatccgggtcatag

SEQ ID NO: 5097 - DNA, 39 bp, synthetic construct
  source 1..39: mol_type = other DNA
atcgcgatagagcgttcctccttgttatccgggtcatag

SEQ ID NO: 5098 - DNA, 40 bp, synthetic construct
  source 1..40: mol_type = other DNA
aatcgcgatagagcgttcctccttgttatccgggtcatag

SEQ ID NO: 5099 - DNA, 24 bp, synthetic construct
  source 1..24: mol_type = other DNA
cgctctatcgcgatttatctaggc

SEQ ID NO: 5100 - DNA, 24 bp, synthetic construct
  source 1..24: mol_type = other DNA
cgctctatcgcgatttatttgggc

SEQ ID NO: 5101 - DNA, 25 bp, synthetic construct
  source 1..25: mol_type = other DNA
acgctctatcgcgatttatctaggc

SEQ ID NO: 5102 - DNA, 25 bp, synthetic construct
  source 1..25: mol_type = other DNA
acgctctatcgcgatttatttgggc

SEQ ID NO: 5103 - DNA, 26 bp, synthetic construct
  source 1..26: mol_type = other DNA
aacgctctatcgcgatttatctaggc

SEQ ID NO: 5104 - DNA, 26 bp, synthetic construct
  source 1..26: mol_type = other DNA
aacgctctatcgcgatttatttgggc

SEQ ID NO: 5105 - DNA, 27 bp, synthetic construct
  source 1..27: mol_type = other DNA
gaacgctctatcgcgatttatctaggc

SEQ ID NO: 5106 - DNA, 27 bp, synthetic construct
  source 1..27: mol_type = other DNA
gaacgctctatcgcgatttatttgggc

SEQ ID NO: 5107 - DNA, 28 bp, synthetic construct
  source 1..28: mol_type = other DNA
ggaacgctctatcgcgatttatctaggc

SEQ ID NO: 5108 - DNA, 28 bp, synthetic construct
  source 1..28: mol_type = other DNA
ggaacgctctatcgcgatttatttgggc

SEQ ID NO: 5109 - DNA, 29 bp, synthetic construct
  source 1..29: mol_type = other DNA
aggaacgctctatcgcgatttatttgggc

SEQ ID NO: 5110 - DNA, 29 bp, synthetic construct
  source 1..29: mol_type = other DNA
aggaacgctctatcgcgatttatctaggc

SEQ ID NO: 5111 - DNA, 30 bp, synthetic construct
  source 1..30: mol_type = other DNA
gaggaacgctctatcgcgatttatttgggc

SEQ ID NO: 5112 - DNA, 30 bp, synthetic construct
  source 1..30: mol_type = other DNA
gaggaacgctctatcgcgatttatctaggc

SEQ ID NO: 5113 - DNA, 31 bp, synthetic construct
  source 1..31: mol_type = other DNA
ggaggaacgctctatcgcgatttatttgggc

SEQ ID NO: 5114 - DNA, 31 bp, synthetic construct
  source 1..31: mol_type = other DNA
ggaggaacgctctatcgcgatttatctaggc

SEQ ID NO: 5115 - DNA, 32 bp, synthetic construct
  source 1..32: mol_type = other DNA
aggaggaacgctctatcgcgatttatctaggc

SEQ ID NO: 5116 - DNA, 32 bp, synthetic construct
  source 1..32: mol_type = other DNA
aggaggaacgctctatcgcgatttatttgggc

SEQ ID NO: 5117 - DNA, 33 bp, synthetic construct
  source 1..33: mol_type = other DNA
aaggaggaacgctctatcgcgatttatctaggc

SEQ ID NO: 5118 - DNA, 33 bp, synthetic construct
  source 1..33: mol_type = other DNA
aaggaggaacgctctatcgcgatttatttgggc

SEQ ID NO: 5119 - DNA, 34 bp, synthetic construct
  source 1..34: mol_type = other DNA
caaggaggaacgctctatcgcgatttatctaggc

SEQ ID NO: 5120 - DNA, 34 bp, synthetic construct
  source 1..34: mol_type = other DNA
caaggaggaacgctctatcgcgatttatttgggc

SEQ ID NO: 5121 - DNA, 35 bp, synthetic construct
  source 1..35: mol_type = other DNA
acaaggaggaacgctctatcgcgatttatctaggc

SEQ ID NO: 5122 - DNA, 35 bp, synthetic construct
  source 1..35: mol_type = other DNA
acaaggaggaacgctctatcgcgatttatttgggc

SEQ ID NO: 5123 - DNA, 36 bp, synthetic construct
  source 1..36: mol_type = other DNA
aacaaggaggaacgctctatcgcgatttatctaggc

SEQ ID NO: 5124 - DNA, 36 bp, synthetic construct
  source 1..36: mol_type = other DNA
aacaaggaggaacgctctatcgcgatttatttgggc

SEQ ID NO: 5125 - DNA, 37 bp, synthetic construct
  source 1..37: mol_type = other DNA
taacaaggaggaacgctctatcgcgatttatttgggc

SEQ ID NO: 5126 - DNA, 37 bp, synthetic construct
  source 1..37: mol_type = other DNA
taacaaggaggaacgctctatcgcgatttatctaggc

SEQ ID NO: 5127 - DNA, 38 bp, synthetic construct
  source 1..38: mol_type = other DNA
ataacaaggaggaacgctctatcgcgatttatctaggc

SEQ ID NO: 5128 - DNA, 38 bp, synthetic construct
  source 1..38: mol_type = other DNA
ataacaaggaggaacgctctatcgcgatttatttgggc

SEQ ID NO: 5129 - DNA, 39 bp, synthetic construct
  source 1..39: mol_type = other DNA
gataacaaggaggaacgctctatcgcgatttatttgggc

SEQ ID NO: 5130 - DNA, 39 bp, synthetic construct
  source 1..39: mol_type = other DNA
gataacaaggaggaacgctctatcgcgatttatctaggc

SEQ ID NO: 5131 - DNA, 40 bp, synthetic construct
  source 1..40: mol_type = other DNA
ggataacaaggaggaacgctctatcgcgatttatttgggc

SEQ ID NO: 5132 - DNA, 40 bp, synthetic construct
  source 1..40: mol_type = other DNA
ggataacaaggaggaacgctctatcgcgatttatctaggc

SEQ ID NO: 5133 - DNA, 24 bp, synthetic construct
  source 1..24: mol_type = other DNA
gcgttcctccttgttatccgggtc

SEQ ID NO: 5134 - DNA, 25 bp, synthetic construct
  source 1..25: mol_type = other DNA
agcgttcctccttgttatccgggtc

SEQ ID NO: 5135 - DNA, 26 bp, synthetic construct
  source 1..26: mol_type = other DNA
gagcgttcctccttgttatccgggtc

SEQ ID NO: 5136 - DNA, 27 bp, synthetic construct
  source 1..27: mol_type = other DNA
agagcgttcctccttgttatccgggtc

SEQ ID NO: 5137 - DNA, 28 bp, synthetic construct
  source 1..28: mol_type = other DNA
tagagcgttcctccttgttatccgggtc

SEQ ID NO: 5138 - DNA, 29 bp, synthetic construct
  source 1..29: mol_type = other DNA
atagagcgttcctccttgttatccgggtc

SEQ ID NO: 5139 - DNA, 30 bp, synthetic construct
  source 1..30: mol_type = other DNA
gatagagcgttcctccttgttatccgggtc

SEQ ID NO: 5140 - DNA, 31 bp, synthetic construct
  source 1..31: mol_type = other DNA
cgatagagcgttcctccttgttatccgggtc

SEQ ID NO: 5141 - DNA, 32 bp, synthetic construct
  source 1..32: mol_type = other DNA
gcgatagagcgttcctccttgttatccgggtc

SEQ ID NO: 5142 - DNA, 33 bp, synthetic construct
  source 1..33: mol_type = other DNA
cgcgatagagcgttcctccttgttatccgggtc

SEQ ID NO: 5143 - DNA, 34 bp, synthetic construct
  source 1..34: mol_type = other DNA
tcgcgatagagcgttcctccttgttatccgggtc

SEQ ID NO: 5144 - DNA, 35 bp, synthetic construct
  source 1..35: mol_type = other DNA
atcgcgatagagcgttcctccttgttatccgggtc

SEQ ID NO: 5145 - DNA, 36 bp, synthetic construct
  source 1..36: mol_type = other DNA
aatcgcgatagagcgttcctccttgttatccgggtc

SEQ ID NO: 5146 - DNA, 37 bp, synthetic construct
  source 1..37: mol_type = other DNA
aaatcgcgatagagcgttcctccttgttatccgggtc

SEQ ID NO: 5147 - DNA, 38 bp, synthetic construct
  source 1..38: mol_type = other DNA
taaatcgcgatagagcgttcctccttgttatccgggtc

SEQ ID NO: 5148 - DNA, 39 bp, synthetic construct
  source 1..39: mol_type = other DNA
ataaatcgcgatagagcgttcctccttgttatccgggtc

SEQ ID NO: 5149 - DNA, 40 bp, synthetic construct
  source 1..40: mol_type = other DNA
gataaatcgcgatagagcgttcctccttgttatccgggtc

SEQ ID NO: 5150 - DNA, 10 bp, synthetic construct
  source 1..10: mol_type = other DNA
aacgctctat

SEQ ID NO: 5151 - DNA, 10 bp, synthetic construct
  source 1..10: mol_type = other DNA
aacggtctat

SEQ ID NO: 5152 - DNA, 11 bp, synthetic construct
  source 1..11: mol_type = other DNA
gaacgctctat

SEQ ID NO: 5153 - DNA, 11 bp, synthetic construct
  source 1..11: mol_type = other DNA
gaacggtctat

SEQ ID NO: 5154 - DNA, 12 bp, synthetic construct
  source 1..12: mol_type = other DNA
ggaacgctctat

SEQ ID NO: 5155 - DNA, 12 bp, synthetic construct
  source 1..12: mol_type = other DNA
ggaacggtctat

SEQ ID NO: 5156 - DNA, 13 bp, synthetic construct
  source 1..13: mol_type = other DNA
aggaacggtctat

SEQ ID NO: 5157 - DNA, 13 bp, synthetic construct
  source 1..13: mol_type = other DNA
aggaacgctctat

SEQ ID NO: 5158 - DNA, 14 bp, synthetic construct
  source 1..14: mol_type = other DNA
gaggaacgctctat

SEQ ID NO: 5159 - DNA, 14 bp, synthetic construct
  source 1..14: mol_type = other DNA
gaggaacggtctat

SEQ ID NO: 5160 - DNA, 15 bp, synthetic construct
  source 1..15: mol_type = other DNA
ggaggaacgctctat

SEQ ID NO: 5161 - DNA, 15 bp, synthetic construct
  source 1..15: mol_type = other DNA
ggaggaacggtctat

SEQ ID NO: 5162 - DNA, 16 bp, synthetic construct
  source 1..16: mol_type = other DNA
aggaggaacgctctat

SEQ ID NO: 5163 - DNA, 16 bp, synthetic construct
  source 1..16: mol_type = other DNA
aggaggaacggtctat

SEQ ID NO: 5164 - DNA, 17 bp, synthetic construct
  source 1..17: mol_type = other DNA
aaggaggaacgctctat

SEQ ID NO: 5165 - DNA, 17 bp, synthetic construct
  source 1..17: mol_type = other DNA
aaggaggaacggtctat

SEQ ID NO: 5166 - DNA, 18 bp, synthetic construct
  source 1..18: mol_type = other DNA
caaggaggaacgctctat

SEQ ID NO: 5167 - DNA, 18 bp, synthetic construct
  source 1..18: mol_type = other DNA
caaggaggaacggtctat

SEQ ID NO: 5168 - DNA, 19 bp, synthetic construct
  source 1..19: mol_type = other DNA
acaaggaggaacgctctat

SEQ ID NO: 5169 - DNA, 19 bp, synthetic construct
  source 1..19: mol_type = other DNA
acaaggaggaacggtctat

SEQ ID NO: 5170 - DNA, 20 bp, synthetic construct
  source 1..20: mol_type = other DNA
aacaaggaggaacgctctat

SEQ ID NO: 5171 - DNA, 20 bp, synthetic construct
  source 1..20: mol_type = other DNA
aacaaggaggaacggtctat

SEQ ID NO: 5172 - DNA, 21 bp, synthetic construct
  source 1..21: mol_type = other DNA
taacaaggaggaacggtctat

SEQ ID NO: 5173 - DNA, 21 bp, synthetic construct
  source 1..21: mol_type = other DNA
taacaaggaggaacgctctat

SEQ ID NO: 5174 - DNA, 22 bp, synthetic construct
  source 1..22: mol_type = other DNA
ataacaaggaggaacgctctat

SEQ ID NO: 5175 - DNA, 22 bp, synthetic construct
  source 1..22: mol_type = other DNA
ataacaaggaggaacggtctat

SEQ ID NO: 5176 - DNA, 23 bp, synthetic construct
  source 1..23: mol_type = other DNA
gataacaaggaggaacggtctat

SEQ ID NO: 5177 - DNA, 23 bp, synthetic construct
  source 1..23: mol_type = other DNA
gataacaaggaggaacgctctat

SEQ ID NO: 5178 - DNA, 24 bp, synthetic construct
  source 1..24: mol_type = other DNA
ggataacaaggaggaacggtctat

SEQ ID NO: 5179 - DNA, 24 bp, synthetic construct
  source 1..24: mol_type = other DNA
ggataacaaggaggaacgctctat

SEQ ID NO: 5180 - DNA, 25 bp, synthetic construct
  source 1..25: mol_type = other DNA
cggataacaaggaggaacgctctat

SEQ ID NO: 5181 - DNA, 25 bp, synthetic construct
  source 1..25: mol_type = other DNA
cggataacaaggaggaacggtctat

SEQ ID NO: 5182 - DNA, 26 bp, synthetic construct
  source 1..26: mol_type = other DNA
ccggataacaaggaggaacgctctat

SEQ ID NO: 5183 - DNA, 26 bp, synthetic construct
  source 1..26: mol_type = other DNA
ccggataacaaggaggaacggtctat

SEQ ID NO: 5184 - DNA, 27 bp, synthetic construct
  source 1..27: mol_type = other DNA
cccggataacaaggaggaacggtctat

SEQ ID NO: 5185 - DNA, 27 bp, synthetic construct
  source 1..27: mol_type = other DNA
cccggataacaaggaggaacgctctat

SEQ ID NO: 5186 - DNA, 28 bp, synthetic construct
  source 1..28: mol_type = other DNA
acccggataacaaggaggaacggtctat

SEQ ID NO: 5187 - DNA, 28 bp, synthetic construct
  source 1..28: mol_type = other DNA
acccggataacaaggaggaacgctctat

SEQ ID NO: 5188 - DNA, 29 bp, synthetic construct
  source 1..29: mol_type = other DNA
gacccggataacaaggaggaacgctctat

SEQ ID NO: 5189 - DNA, 29 bp, synthetic construct
  source 1..29: mol_type = other DNA
gacccggataacaaggaggaacggtctat

SEQ ID NO: 5190 - DNA, 30 bp, synthetic construct
  source 1..30: mol_type = other DNA
tgacccggataacaaggaggaacggtctat

SEQ ID NO: 5191 - DNA, 30 bp, synthetic construct
  source 1..30: mol_type = other DNA
tgacccggataacaaggaggaacgctctat

SEQ ID NO: 5192 - DNA, 31 bp, synthetic construct
  source 1..31: mol_type = other DNA
atgacccggataacaaggaggaacgctctat

SEQ ID NO: 5193 - DNA, 31 bp, synthetic construct
  source 1..31: mol_type = other DNA
atgacccggataacaaggaggaacggtctat

SEQ ID NO: 5194 - DNA, 32 bp, synthetic construct
  source 1..32: mol_type = other DNA
tatgacccggataacaaggaggaacgctctat

SEQ ID NO: 5195 - DNA, 32 bp, synthetic construct
  source 1..32: mol_type = other DNA
tatgacccggataacaaggaggaacggtctat

SEQ ID NO: 5196 - DNA, 33 bp, synthetic construct
  source 1..33: mol_type = other DNA
ctatgacccggataacaaggaggaacggtctat

SEQ ID NO: 5197 - DNA, 33 bp, synthetic construct
  source 1..33: mol_type = other DNA
ctatgacccggataacaaggaggaacgctctat

SEQ ID NO: 5198 - DNA, 34 bp, synthetic construct
  source 1..34: mol_type = other DNA
cctatgacccggataacaaggaggaacggtctat

SEQ ID NO: 5199 - DNA, 34 bp, synthetic construct
  source 1..34: mol_type = other DNA
cctatgacccggataacaaggaggaacgctctat

SEQ ID NO: 5200 - DNA, 35 bp, synthetic construct
  source 1..35: mol_type = other DNA
tcctatgacccggataacaaggaggaacgctctat

SEQ ID NO: 5201 - DNA, 35 bp, synthetic construct
  source 1..35: mol_type = other DNA
tcctatgacccggataacaaggaggaacggtctat

SEQ ID NO: 5202 - DNA, 36 bp, synthetic construct
  source 1..36: mol_type = other DNA
ttcctatgacccggataacaaggaggaacggtctat

SEQ ID NO: 5203 - DNA, 36 bp, synthetic construct
  source 1..36: mol_type = other DNA
ttcctatgacccggataacaaggaggaacgctctat

SEQ ID NO: 5204 - DNA, 37 bp, synthetic construct
  source 1..37: mol_type = other DNA
cttcctatgacccggataacaaggaggaacggtctat

SEQ ID NO: 5205 - DNA, 37 bp, synthetic construct
  source 1..37: mol_type = other DNA
cttcctatgacccggataacaaggaggaacgctctat

SEQ ID NO: 5206 - DNA, 38 bp, synthetic construct
  source 1..38: mol_type = other DNA
gcttcctatgacccggataacaaggaggaacgctctat

SEQ ID NO: 5207 - DNA, 38 bp, synthetic construct
  source 1..38: mol_type = other DNA
gcttcctatgacccggataacaaggaggaacggtctat

SEQ ID NO: 5208 - DNA, 39 bp, synthetic construct
  source 1..39: mol_type = other DNA
agcttcctatgacccggataacaaggaggaacgctctat

SEQ ID NO: 5209 - DNA, 39 bp, synthetic construct
  source 1..39: mol_type = other DNA
agcttcctatgacccggataacaaggaggaacggtctat

SEQ ID NO: 5210 - DNA, 40 bp, synthetic construct
  source 1..40: mol_type = other DNA
tagcttcctatgacccggataacaaggaggaacgctctat

SEQ ID NO: 5211 - DNA, 40 bp, synthetic construct
  source 1..40: mol_type = other DNA
tagcttcctatgacccggataacaaggaggaacggtctat

SEQ ID NO: 5212 - DNA, 11 bp, synthetic construct
  source 1..11: mol_type = other DNA
gcgttcctcct

SEQ ID NO: 5213 - DNA, 11 bp, synthetic construct
  source 1..11: mol_type = other DNA
gcgttcttcct

SEQ ID NO: 5214 - DNA, 12 bp, synthetic construct
  source 1..12: mol_type = other DNA
agcgttcttcct

SEQ ID NO: 5215 - DNA, 12 bp, synthetic construct
  source 1..12: mol_type = other DNA
agcgttcctcct

SEQ ID NO: 5216 - DNA, 13 bp, synthetic construct
  source 1..13: mol_type = other DNA
gagcgttcctcct

SEQ ID NO: 5217 - DNA, 13 bp, synthetic construct
  source 1..13: mol_type = other DNA
gagcgttcttcct

SEQ ID NO: 5218 - DNA, 14 bp, synthetic construct
  source 1..14: mol_type = other DNA
agagcgttcttcct

SEQ ID NO: 5219 - DNA, 14 bp, synthetic construct
  source 1..14: mol_type = other DNA
agagcgttcctcct

SEQ ID NO: 5220 - DNA, 15 bp, synthetic construct
  source 1..15: mol_type = other DNA
tagagcgttcctcct

SEQ ID NO: 5221 - DNA, 15 bp, synthetic construct
  source 1..15: mol_type = other DNA
tagagcgttcttcct

SEQ ID NO: 5222 - DNA, 16 bp, synthetic construct
  source 1..16: mol_type = other DNA
atagagcgttcttcct

SEQ ID NO: 5223 - DNA, 16 bp, synthetic construct
  source 1..16: mol_type = other DNA
atagagcgttcctcct

SEQ ID NO: 5224 - DNA, 17 bp, synthetic construct
  source 1..17: mol_type = other DNA
gatagagcgttcctcct

SEQ ID NO: 5225 - DNA, 17 bp, synthetic construct
  source 1..17: mol_type = other DNA
gatagagcgttcttcct

SEQ ID NO: 5226 - DNA, 18 bp, synthetic construct
  source 1..18: mol_type = other DNA
cgatagagcgttcttcct

SEQ ID NO: 5227 - DNA, 18 bp, synthetic construct
  source 1..18: mol_type = other DNA
cgatagagcgttcctcct

SEQ ID NO: 5228 - DNA, 19 bp, synthetic construct
  source 1..19: mol_type = other DNA
gcgatagagcgttcttcct

SEQ ID NO: 5229 - DNA, 19 bp, synthetic construct
  source 1..19: mol_type = other DNA
gcgatagagcgttcctcct

SEQ ID NO: 5230 - DNA, 20 bp, synthetic construct
  source 1..20: mol_type = other DNA
cgcgatagagcgttcttcct

SEQ ID NO: 5231 - DNA, 20 bp, synthetic construct
  source 1..20: mol_type = other DNA
cgcgatagagcgttcctcct

SEQ ID NO: 5232 - DNA, 21 bp, synthetic construct
  source 1..21: mol_type = other DNA
tcgcgatagagcgttcttcct

SEQ ID NO: 5233 - DNA, 21 bp, synthetic construct
  source 1..21: mol_type = other DNA
tcgcgatagagcgttcctcct

SEQ ID NO: 5234 - DNA, 22 bp, synthetic construct
  source 1..22: mol_type = other DNA
atcgcgatagagcgttcttcct

SEQ ID NO: 5235 - DNA, 22 bp, synthetic construct
  source 1..22: mol_type = other DNA
atcgcgatagagcgttcctcct

SEQ ID NO: 5236 - DNA, 23 bp, synthetic construct
  source 1..23: mol_type = other DNA
aatcgcgatagagcgttcctcct

SEQ ID NO: 5237 - DNA, 23 bp, synthetic construct
  source 1..23: mol_type = other DNA
aatcgcgatagagcgttcttcct

SEQ ID NO: 5238 - DNA, 24 bp, synthetic construct
  source 1..24: mol_type = other DNA
aaatcgcgatagagcgttcctcct

SEQ ID NO: 5239 - DNA, 24 bp, synthetic construct
  source 1..24: mol_type = other DNA
aaatcgcgatagagcgttcttcct

SEQ ID NO: 5240 - DNA, 25 bp, synthetic construct
  source 1..25: mol_type = other DNA
taaatcgcgatagagcgttcctcct

SEQ ID NO: 5241 - DNA, 25 bp, synthetic construct
  source 1..25: mol_type = other DNA
taaatcgcgatagagcgttcttcct

SEQ ID NO: 5242 - DNA, 26 bp, synthetic construct
  source 1..26: mol_type = other DNA
ataaatcgcgatagagcgttcctcct

SEQ ID NO: 5243 - DNA, 26 bp, synthetic construct
  source 1..26: mol_type = other DNA
ataaatcgcgatagagcgttcttcct

SEQ ID NO: 5244 - DNA, 27 bp, synthetic construct
  source 1..27: mol_type = other DNA
gataaatcgcgatagagcgttcttcct

SEQ ID NO: 5245 - DNA, 27 bp, synthetic construct
  source 1..27: mol_type = other DNA
gataaatcgcgatagagcgttcctcct

SEQ ID NO: 5246 - DNA, 28 bp, synthetic construct
  source 1..28: mol_type = other DNA
agataaatcgcgatagagcgttcttcct

SEQ ID NO: 5247 - DNA, 28 bp, synthetic construct
  source 1..28: mol_type = other DNA
agataaatcgcgatagagcgttcctcct

SEQ ID NO: 5248 - DNA, 29 bp, synthetic construct
  source 1..29: mol_type = other DNA
tagataaatcgcgatagagcgttcttcct

SEQ ID NO: 5249 - DNA, 29 bp, synthetic construct
  source 1..29: mol_type = other DNA
tagataaatcgcgatagagcgttcctcct

SEQ ID NO: 5250 - DNA, 30 bp, synthetic construct
  source 1..30: mol_type = other DNA
ctagataaatcgcgatagagcgttcctcct

SEQ ID NO: 5251 - DNA, 30 bp, synthetic construct
  source 1..30: mol_type = other DNA
ctagataaatcgcgatagagcgttcttcct

SEQ ID NO: 5252 - DNA, 31 bp, synthetic construct
  source 1..31: mol_type = other DNA
cctagataaatcgcgatagagcgttcctcct

SEQ ID NO: 5253 - DNA, 31 bp, synthetic construct
  source 1..31: mol_type = other DNA
cctagataaatcgcgatagagcgttcttcct

SEQ ID NO: 5254 - DNA, 32 bp, synthetic construct
  source 1..32: mol_type = other DNA
gcctagataaatcgcgatagagcgttcctcct

SEQ ID NO: 5255 - DNA, 32 bp, synthetic construct
  source 1..32: mol_type = other DNA
gcctagataaatcgcgatagagcgttcttcct

SEQ ID NO: 5256 - DNA, 33 bp, synthetic construct
  source 1..33: mol_type = other DNA
tgcctagataaatcgcgatagagcgttcttcct

SEQ ID NO: 5257 - DNA, 33 bp, synthetic construct
  source 1..33: mol_type = other DNA
tgcctagataaatcgcgatagagcgttcctcct

SEQ ID NO: 5258 - DNA, 34 bp, synthetic construct
  source 1..34: mol_type = other DNA
atgcctagataaatcgcgatagagcgttcctcct

SEQ ID NO: 5259 - DNA, 34 bp, synthetic construct
  source 1..34: mol_type = other DNA
atgcctagataaatcgcgatagagcgttcttcct

SEQ ID NO: 5260 - DNA, 35 bp, synthetic construct
  source 1..35: mol_type = other DNA
tatgcctagataaatcgcgatagagcgttcctcct

SEQ ID NO: 5261 - DNA, 35 bp, synthetic construct
  source 1..35: mol_type = other DNA
tatgcctagataaatcgcgatagagcgttcttcct

SEQ ID NO: 5262 - DNA, 36 bp, synthetic construct
  source 1..36: mol_type = other DNA
ctatgcctagataaatcgcgatagagcgttcctcct

SEQ ID NO: 5263 - DNA, 36 bp, synthetic construct
  source 1..36: mol_type = other DNA
ctatgcctagataaatcgcgatagagcgttcttcct

SEQ ID NO: 5264 - DNA, 37 bp, synthetic construct
  source 1..37: mol_type = other DNA
cctatgcctagataaatcgcgatagagcgttcctcct

SEQ ID NO: 5265 - DNA, 37 bp, synthetic construct
  source 1..37: mol_type = other DNA
cctatgcctagataaatcgcgatagagcgttcttcct

SEQ ID NO: 5266 - DNA, 38 bp, synthetic construct
  source 1..38: mol_type = other DNA
gcctatgcctagataaatcgcgatagagcgttcctcct

SEQ ID NO: 5267 - DNA, 38 bp, synthetic construct
  source 1..38: mol_type = other DNA
gcctatgcctagataaatcgcgatagagcgttcttcct

SEQ ID NO: 5268 - DNA, 39 bp, synthetic construct
  source 1..39: mol_type = other DNA
agcctatgcctagataaatcgcgatagagcgttcttcct

SEQ ID NO: 5269 - DNA, 39 bp, synthetic construct
  source 1..39: mol_type = other DNA
agcctatgcctagataaatcgcgatagagcgttcctcct

SEQ ID NO: 5270 - DNA, 40 bp, synthetic construct
  source 1..40: mol_type = other DNA
aagcctatgcctagataaatcgcgatagagcgttcctcct

SEQ ID NO: 5271 - DNA, 40 bp, synthetic construct
  source 1..40: mol_type = other DNA
aagcctatgcctagataaatcgcgatagagcgttcttcct

SEQ ID NO: 5272 - DNA, 22 bp, synthetic construct
  source 1..22: mol_type = other DNA
gcgttcctccttgttatccggg

SEQ ID NO: 5273 - DNA, 23 bp, synthetic construct
  source 1..23: mol_type = other DNA
agcgttcctccttgttatccggg

SEQ ID NO: 5274 - DNA, 24 bp, synthetic construct
  source 1..24: mol_type = other DNA
gagcgttcctccttgttatccggg

SEQ ID NO: 5275 - DNA, 25 bp, synthetic construct
  source 1..25: mol_type = other DNA
agagcgttcctccttgttatccggg

SEQ ID NO: 5276 - DNA, 26 bp, synthetic construct
  source 1..26: mol_type = other DNA
tagagcgttcctccttgttatccggg

SEQ ID NO: 5277 - DNA, 27 bp, synthetic construct
  source 1..27: mol_type = other DNA
atagagcgttcctccttgttatccggg

SEQ ID NO: 5278 - DNA, 28 bp, synthetic construct
  source 1..28: mol_type = other DNA
gatagagcgttcctccttgttatccggg

SEQ ID NO: 5279 - DNA, 29 bp, synthetic construct
  source 1..29: mol_type = other DNA
cgatagagcgttcctccttgttatccggg

SEQ ID NO: 5280 - DNA, 30 bp, synthetic construct
  source 1..30: mol_type = other DNA
gcgatagagcgttcctccttgttatccggg

SEQ ID NO: 5281 - DNA, 31 bp, synthetic construct
  source 1..31: mol_type = other DNA
cgcgatagagcgttcctccttgttatccggg

SEQ ID NO: 5282 - DNA, 32 bp, synthetic construct
  source 1..32: mol_type = other DNA
tcgcgatagagcgttcctccttgttatccggg

SEQ ID NO: 5283 - DNA, 33 bp, synthetic construct
  source 1..33: mol_type = other DNA
atcgcgatagagcgttcctccttgttatccggg

SEQ ID NO: 5284 - DNA, 34 bp, synthetic construct
  source 1..34: mol_type = other DNA
aatcgcgatagagcgttcctccttgttatccggg

SEQ ID NO: 5285 - DNA, 35 bp, synthetic construct
  source 1..35: mol_type = other DNA
aaatcgcgatagagcgttcctccttgttatccggg

SEQ ID NO: 5286 - DNA, 36 bp, synthetic construct
  source 1..36: mol_type = other DNA
taaatcgcgatagagcgttcctccttgttatccggg

SEQ ID NO: 5287 - DNA, 37 bp, synthetic construct
  source 1..37: mol_type = other DNA
ataaatcgcgatagagcgttcctccttgttatccggg

SEQ ID NO: 5288 - DNA, 38 bp, synthetic construct
  source 1..38: mol_type = other DNA
gataaatcgcgatagagcgttcctccttgttatccggg

SEQ ID NO: 5289 - DNA, 39 bp, synthetic construct
  source 1..39: mol_type = other DNA
agataaatcgcgatagagcgttcctccttgttatccggg

SEQ ID NO: 5290 - DNA, 40 bp, synthetic construct
  source 1..40: mol_type = other DNA
tagataaatcgcgatagagcgttcctccttgttatccggg

SEQ ID NO: 5291 - DNA, 14 bp, synthetic construct
  source 1..14: mol_type = other DNA
gcgttcctccttgt

SEQ ID NO: 5292 - DNA, 14 bp, synthetic construct
  source 1..14: mol_type = other DNA
gcgttcctctttgt

SEQ ID NO: 5293 - DNA, 15 bp, synthetic construct
  source 1..15: mol_type = other DNA
agcgttcctccttgt

SEQ ID NO: 5294 - DNA, 15 bp, synthetic construct
  source 1..15: mol_type = other DNA
agcgttcctctttgt

SEQ ID NO: 5295 - DNA, 16 bp, synthetic construct
  source 1..16: mol_type = other DNA
gagcgttcctccttgt

SEQ ID NO: 5296 - DNA, 16 bp, synthetic construct
  source 1..16: mol_type = other DNA
gagcgttcctctttgt

SEQ ID NO: 5297 - DNA, 17 bp, synthetic construct
  source 1..17: mol_type = other DNA
agagcgttcctctttgt

SEQ ID NO: 5298 - DNA, 17 bp, synthetic construct
  source 1..17: mol_type = other DNA
agagcgttcctccttgt

SEQ ID NO: 5299 - DNA, 18 bp, synthetic construct
  source 1..18: mol_type = other DNA
tagagcgttcctccttgt

SEQ ID NO: 5300 - DNA, 18 bp, synthetic construct
  source 1..18: mol_type = other DNA
tagagcgttcctctttgt

SEQ ID NO: 5301 - DNA, 19 bp, synthetic construct
  source 1..19: mol_type = other DNA
atagagcgttcctccttgt

SEQ ID NO: 5302 - DNA, 19 bp, synthetic construct
  source 1..19: mol_type = other DNA
atagagcgttcctctttgt

SEQ ID NO: 5303 - DNA, 20 bp, synthetic construct
  source 1..20: mol_type = other DNA
gatagagcgttcctccttgt

SEQ ID NO: 5304 - DNA, 20 bp, synthetic construct
  source 1..20: mol_type = other DNA
gatagagcgttcctctttgt

SEQ ID NO: 5305 - DNA, 21 bp, synthetic construct
  source 1..21: mol_type = other DNA
cgatagagcgttcctccttgt

SEQ ID NO: 5306 - DNA, 21 bp, synthetic construct
  source 1..21: mol_type = other DNA
cgatagagcgttcctctttgt

SEQ ID NO: 5307 - DNA, 22 bp, synthetic construct
  source 1..22: mol_type = other DNA
gcgatagagcgttcctccttgt

SEQ ID NO: 5308 - DNA, 22 bp, synthetic construct
  source 1..22: mol_type = other DNA
gcgatagagcgttcctctttgt

SEQ ID NO: 5309 - DNA, 23 bp, synthetic construct
  source 1..23: mol_type = other DNA
cgcgatagagcgttcctccttgt

SEQ ID NO: 5310 - DNA, 23 bp, synthetic construct
  source 1..23: mol_type = other DNA
cgcgatagagcgttcctctttgt

SEQ ID NO: 5311 - DNA, 24 bp, synthetic construct
  source 1..24: mol_type = other DNA
tcgcgatagagcgttcctctttgt

SEQ ID NO: 5312 - DNA, 24 bp, synthetic construct
  source 1..24: mol_type = other DNA
tcgcgatagagcgttcctccttgt

SEQ ID NO: 5313 - DNA, 25 bp, synthetic construct
  source 1..25: mol_type = other DNA
atcgcgatagagcgttcctctttgt

SEQ ID NO: 5314 - DNA, 25 bp, synthetic construct
  source 1..25: mol_type = other DNA
atcgcgatagagcgttcctccttgt

SEQ ID NO: 5315 - DNA, 26 bp, synthetic construct
  source 1..26: mol_type = other DNA
aatcgcgatagagcgttcctccttgt

SEQ ID NO: 5316 - DNA, 26 bp, synthetic construct
  source 1..26: mol_type = other DNA
aatcgcgatagagcgttcctctttgt

SEQ ID NO: 5317 - DNA, 27 bp, synthetic construct
  source 1..27: mol_type = other DNA
aaatcgcgatagagcgttcctctttgt

SEQ ID NO: 5318 - DNA, 27 bp, synthetic construct
  source 1..27: mol_type = other DNA
aaatcgcgatagagcgttcctccttgt

SEQ ID NO: 5319 - DNA, 28 bp, synthetic construct
  source 1..28: mol_type = other DNA
taaatcgcgatagagcgttcctctttgt

SEQ ID NO: 5320 - DNA, 28 bp, synthetic construct
  source 1..28: mol_type = other DNA
taaatcgcgatagagcgttcctccttgt

SEQ ID NO: 5321 - DNA, 29 bp, synthetic construct
  source 1..29: mol_type = other DNA
ataaatcgcgatagagcgttcctctttgt

SEQ ID NO: 5322 - DNA, 29 bp, synthetic construct
  source 1..29: mol_type = other DNA
ataaatcgcgatagagcgttcctccttgt

SEQ ID NO: 5323 - DNA, 30 bp, synthetic construct
  source 1..30: mol_type = other DNA
gataaatcgcgatagagcgttcctccttgt

SEQ ID NO: 5324 - DNA, 30 bp, synthetic construct
  source 1..30: mol_type = other DNA
gataaatcgcgatagagcgttcctctttgt

SEQ ID NO: 5325 - DNA, 31 bp, synthetic construct
  source 1..31: mol_type = other DNA
agataaatcgcgatagagcgttcctctttgt

SEQ ID NO: 5326 - DNA, 31 bp, synthetic construct
  source 1..31: mol_type = other DNA
agataaatcgcgatagagcgttcctccttgt

SEQ ID NO: 5327 - DNA, 32 bp, synthetic construct
  source 1..32: mol_type = other DNA
tagataaatcgcgatagagcgttcctctttgt

SEQ ID NO: 5328 - DNA, 32 bp, synthetic construct
  source 1..32: mol_type = other DNA
tagataaatcgcgatagagcgttcctccttgt

SEQ ID NO: 5329 - DNA, 33 bp, synthetic construct
  source 1..33: mol_type = other DNA
ctagataaatcgcgatagagcgttcctctttgt

SEQ ID NO: 5330 - DNA, 33 bp, synthetic construct
  source 1..33: mol_type = other DNA
ctagataaatcgcgatagagcgttcctccttgt

SEQ ID NO: 5331 - DNA, 34 bp, synthetic construct
  source 1..34: mol_type = other DNA
cctagataaatcgcgatagagcgttcctctttgt

SEQ ID NO: 5332 - DNA, 34 bp, synthetic construct
  source 1..34: mol_type = other DNA
cctagataaatcgcgatagagcgttcctccttgt

SEQ ID NO: 5333 - DNA, 35 bp, synthetic construct
  source 1..35: mol_type = other DNA
gcctagataaatcgcgatagagcgttcctctttgt

SEQ ID NO: 5334 - DNA, 35 bp, synthetic construct
  source 1..35: mol_type = other DNA
gcctagataaatcgcgatagagcgttcctccttgt

SEQ ID NO: 5335 - DNA, 36 bp, synthetic construct
  source 1..36: mol_type = other DNA
tgcctagataaatcgcgatagagcgttcctctttgt

SEQ ID NO: 5336 - DNA, 36 bp, synthetic construct
  source 1..36: mol_type = other DNA
tgcctagataaatcgcgatagagcgttcctccttgt

SEQ ID NO: 5337 - DNA, 37 bp, synthetic construct
  source 1..37: mol_type = other DNA
atgcctagataaatcgcgatagagcgttcctctttgt

SEQ ID NO: 5338 - DNA, 37 bp, synthetic construct
  source 1..37: mol_type = other DNA
atgcctagataaatcgcgatagagcgttcctccttgt

SEQ ID NO: 5339 - DNA, 38 bp, synthetic construct
  source 1..38: mol_type = other DNA
tatgcctagataaatcgcgatagagcgttcctccttgt

SEQ ID NO: 5340 - DNA, 38 bp, synthetic construct
  source 1..38: mol_type = other DNA
tatgcctagataaatcgcgatagagcgttcctctttgt

SEQ ID NO: 5341 - DNA, 39 bp, synthetic construct
  source 1..39: mol_type = other DNA
ctatgcctagataaatcgcgatagagcgttcctctttgt

SEQ ID NO: 5342 - DNA, 39 bp, synthetic construct
  source 1..39: mol_type = other DNA
ctatgcctagataaatcgcgatagagcgttcctccttgt

SEQ ID NO: 5343 - DNA, 40 bp, synthetic construct
  source 1..40: mol_type = other DNA
cctatgcctagataaatcgcgatagagcgttcctctttgt

SEQ ID NO: 5344 - DNA, 40 bp, synthetic construct
  source 1..40: mol_type = other DNA
cctatgcctagataaatcgcgatagagcgttcctccttgt

SEQ ID NO: 5345 - DNA, 10 bp, synthetic construct
  source 1..10: mol_type = other DNA
acgctctatc

SEQ ID NO: 5346 - DNA, 11 bp, synthetic construct
  source 1..11: mol_type = other DNA
aacgctctatc

SEQ ID NO: 5347 - DNA, 12 bp, synthetic construct
  source 1..12: mol_type = other DNA
gaacgctctatc

SEQ ID NO: 5348 - DNA, 13 bp, synthetic construct
  source 1..13: mol_type = other DNA
ggaacgctctatc

SEQ ID NO: 5349 - DNA, 14 bp, synthetic construct
  source 1..14: mol_type = other DNA
aggaacgctctatc

SEQ ID NO: 5350 - DNA, 15 bp, synthetic construct
  source 1..15: mol_type = other DNA
gaggaacgctctatc

SEQ ID NO: 5351 - DNA, 16 bp, synthetic construct
  source 1..16: mol_type = other DNA
ggaggaacgctctatc

SEQ ID NO: 5352 - DNA, 17 bp, synthetic construct
  source 1..17: mol_type = other DNA
aggaggaacgctctatc

SEQ ID NO: 5353 - DNA, 18 bp, synthetic construct
  source 1..18: mol_type = other DNA
aaggaggaacgctctatc

SEQ ID NO: 5354 - DNA, 19 bp, synthetic construct
  source 1..19: mol_type = other DNA
caaggaggaacgctctatc

SEQ ID NO: 5355 - DNA, 20 bp, synthetic construct
  source 1..20: mol_type = other DNA
acaaggaggaacgctctatc

SEQ ID NO: 5356 - DNA, 21 bp, synthetic construct
  source 1..21: mol_type = other DNA
aacaaggaggaacgctctatc

SEQ ID NO: 5357 - DNA, 22 bp, synthetic construct
  source 1..22: mol_type = other DNA
taacaaggaggaacgctctatc

SEQ ID NO: 5358 - DNA, 23 bp, synthetic construct
  source 1..23: mol_type = other DNA
ataacaaggaggaacgctctatc

SEQ ID NO: 5359 - DNA, 24 bp, synthetic construct
  source 1..24: mol_type = other DNA
gataacaaggaggaacgctctatc

SEQ ID NO: 5360 - DNA, 25 bp, synthetic construct
  source 1..25: mol_type = other DNA
ggataacaaggaggaacgctctatc

SEQ ID NO: 5361 - DNA, 26 bp, synthetic construct
  source 1..26: mol_type = other DNA
cggataacaaggaggaacgctctatc

SEQ ID NO: 5362 - DNA, 27 bp, synthetic construct
  source 1..27: mol_type = other DNA
ccggataacaaggaggaacgctctatc

SEQ ID NO: 5363 - DNA, 28 bp, synthetic construct
  source 1..28: mol_type = other DNA
cccggataacaaggaggaacgctctatc

SEQ ID NO: 5364 - DNA, 29 bp, synthetic construct
  source 1..29: mol_type = other DNA
acccggataacaaggaggaacgctctatc

SEQ ID NO: 5365 - DNA, 30 bp, synthetic construct
  source 1..30: mol_type = other DNA
gacccggataacaaggaggaacgctctatc

SEQ ID NO: 5366 - DNA, 31 bp, synthetic construct
  source 1..31: mol_type = other DNA
tgacccggataacaaggaggaacgctctatc

SEQ ID NO: 5367 - DNA, 32 bp, synthetic construct
  source 1..32: mol_type = other DNA
atgacccggataacaaggaggaacgctctatc

SEQ ID NO: 5368 - DNA, 33 bp, synthetic construct
  source 1..33: mol_type = other DNA
tatgacccggataacaaggaggaacgctctatc

SEQ ID NO: 5369 - DNA, 34 bp, synthetic construct
  source 1..34: mol_type = other DNA
ctatgacccggataacaaggaggaacgctctatc

SEQ ID NO: 5370 - DNA, 35 bp, synthetic construct
  source 1..35: mol_type = other DNA
cctatgacccggataacaaggaggaacgctctatc

SEQ ID NO: 5371 - DNA, 36 bp, synthetic construct
  source 1..36: mol_type = other DNA
tcctatgacccggataacaaggaggaacgctctatc

SEQ ID NO: 5372 - DNA, 37 bp, synthetic construct
  source 1..37: mol_type = other DNA
ttcctatgacccggataacaaggaggaacgctctatc

SEQ ID NO: 5373 - DNA, 38 bp, synthetic construct
  source 1..38: mol_type = other DNA
cttcctatgacccggataacaaggaggaacgctctatc

SEQ ID NO: 5374 - DNA, 39 bp, synthetic construct
  source 1..39: mol_type = other DNA
gcttcctatgacccggataacaaggaggaacgctctatc

SEQ ID NO: 5375 - DNA, 40 bp, synthetic construct
  source 1..40: mol_type = other DNA
agcttcctatgacccggataacaaggaggaacgctctatc

SEQ ID NO: 5376 - DNA, 40 bp, synthetic construct
  source 1..40: mol_type = other DNA
cgctctatcgcgatttatctaggcataggcttatgccttc

SEQ ID NO: 5377 - DNA, 15 bp, synthetic construct
  source 1..15: mol_type = other DNA
gcgttcctctttgtt

SEQ ID NO: 5378 - DNA, 15 bp, synthetic construct
  source 1..15: mol_type = other DNA
gcgttcctccttgtt

SEQ ID NO: 5379 - DNA, 16 bp, synthetic construct
  source 1..16: mol_type = other DNA
agcgttcctctttgtt

SEQ ID NO: 5380 - DNA, 16 bp, synthetic construct
  source 1..16: mol_type = other DNA
agcgttcctccttgtt

SEQ ID NO: 5381 - DNA, 17 bp, synthetic construct
  source 1..17: mol_type = other DNA
gagcgttcctccttgtt

SEQ ID NO: 5382 - DNA, 17 bp, synthetic construct
  source 1..17: mol_type = other DNA
gagcgttcctctttgtt

SEQ ID NO: 5383 - DNA, 18 bp, synthetic construct
  source 1..18: mol_type = other DNA
agagcgttcctccttgtt

SEQ ID NO: 5384 - DNA, 18 bp, synthetic construct
  source 1..18: mol_type = other DNA
agagcgttcctctttgtt

SEQ ID NO: 5385 - DNA, 19 bp, synthetic construct
  source 1..19: mol_type = other DNA
tagagcgttcctccttgtt

SEQ ID NO: 5386 - DNA, 19 bp, synthetic construct
  source 1..19: mol_type = other DNA
tagagcgttcctctttgtt

SEQ ID NO: 5387 - DNA, 20 bp, synthetic construct
  source 1..20: mol_type = other DNA
atagagcgttcctccttgtt

SEQ ID NO: 5388 - DNA, 20 bp, synthetic construct
  source 1..20: mol_type = other DNA
atagagcgttcctctttgtt

SEQ ID NO: 5389 - DNA, 21 bp, synthetic construct
  source 1..21: mol_type = other DNA
gatagagcgttcctctttgtt

SEQ ID NO: 5390 - DNA, 21 bp, synthetic construct
  source 1..21: mol_type = other DNA
gatagagcgttcctccttgtt

SEQ ID NO: 5391 - DNA, 22 bp, synthetic construct
  source 1..22: mol_type = other DNA
cgatagagcgttcctccttgtt

SEQ ID NO: 5392 - DNA, 22 bp, synthetic construct
  source 1..22: mol_type = other DNA
cgatagagcgttcctctttgtt

SEQ ID NO: 5393 - DNA, 23 bp, synthetic construct
  source 1..23: mol_type = other DNA
gcgatagagcgttcctctttgtt

SEQ ID NO: 5394 - DNA, 23 bp, synthetic construct
  source 1..23: mol_type = other DNA
gcgatagagcgttcctccttgtt

SEQ ID NO: 5395 - DNA, 24 bp, synthetic construct
  source 1..24: mol_type = other DNA
cgcgatagagcgttcctctttgtt

SEQ ID NO: 5396 - DNA, 24 bp, synthetic construct
  source 1..24: mol_type = other DNA
cgcgatagagcgttcctccttgtt

SEQ ID NO: 5397 - DNA, 25 bp, synthetic construct
  source 1..25: mol_type = other DNA
tcgcgatagagcgttcctccttgtt

SEQ ID NO: 5398 - DNA, 25 bp, synthetic construct
  source 1..25: mol_type = other DNA
tcgcgatagagcgttcctctttgtt

SEQ ID NO: 5399 - DNA, 26 bp, synthetic construct
  source 1..26: mol_type = other DNA
atcgcgatagagcgttcctccttgtt

SEQ ID NO: 5400 - DNA, 26 bp, synthetic construct
  source 1..26: mol_type = other DNA
atcgcgatagagcgttcctctttgtt

SEQ ID NO: 5401 - DNA, 27 bp, synthetic construct
  source 1..27: mol_type = other DNA
aatcgcgatagagcgttcctccttgtt

SEQ ID NO: 5402 - DNA, 27 bp, synthetic construct
  source 1..27: mol_type = other DNA
aatcgcgatagagcgttcctctttgtt

SEQ ID NO: 5403 - DNA, 28 bp, synthetic construct
  source 1..28: mol_type = other DNA
aaatcgcgatagagcgttcctctttgtt

SEQ ID NO: 5404 - DNA, 28 bp, synthetic construct
  source 1..28: mol_type = other DNA
aaatcgcgatagagcgttcctccttgtt

SEQ ID NO: 5405 - DNA, 29 bp, synthetic construct
  source 1..29: mol_type = other DNA
taaatcgcgatagagcgttcctctttgtt

SEQ ID NO: 5406 - DNA, 29 bp, synthetic construct
  source 1..29: mol_type = other DNA
taaatcgcgatagagcgttcctccttgtt

SEQ ID NO: 5407 - DNA, 30 bp, synthetic construct
  source 1..30: mol_type = other DNA
ataaatcgcgatagagcgttcctctttgtt

SEQ ID NO: 5408 - DNA, 30 bp, synthetic construct
  source 1..30: mol_type = other DNA
ataaatcgcgatagagcgttcctccttgtt

SEQ ID NO: 5409 - DNA, 31 bp, synthetic construct
  source 1..31: mol_type = other DNA
gataaatcgcgatagagcgttcctctttgtt

SEQ ID NO: 5410 - DNA, 31 bp, synthetic construct
  source 1..31: mol_type = other DNA
gataaatcgcgatagagcgttcctccttgtt

SEQ ID NO: 5411 - DNA, 32 bp, synthetic construct
  source 1..32: mol_type = other DNA
agataaatcgcgatagagcgttcctctttgtt

SEQ ID NO: 5412 - DNA, 32 bp, synthetic construct
  source 1..32: mol_type = other DNA
agataaatcgcgatagagcgttcctccttgtt

SEQ ID NO: 5413 - DNA, 33 bp, synthetic construct
  source 1..33: mol_type = other DNA
tagataaatcgcgatagagcgttcctctttgtt

SEQ ID NO: 5414 - DNA, 33 bp, synthetic construct
  source 1..33: mol_type = other DNA
tagataaatcgcgatagagcgttcctccttgtt

SEQ ID NO: 5415 - DNA, 34 bp, synthetic construct
  source 1..34: mol_type = other DNA
ctagataaatcgcgatagagcgttcctccttgtt

SEQ ID NO: 5416 - DNA, 34 bp, synthetic construct
  source 1..34: mol_type = other DNA
ctagataaatcgcgatagagcgttcctctttgtt

SEQ ID NO: 5417 - DNA, 35 bp, synthetic construct
  source 1..35: mol_type = other DNA
cctagataaatcgcgatagagcgttcctccttgtt

SEQ ID NO: 5418 - DNA, 35 bp, synthetic construct
  source 1..35: mol_type = other DNA
cctagataaatcgcgatagagcgttcctctttgtt

SEQ ID NO: 5419 - DNA, 36 bp, synthetic construct
  source 1..36: mol_type = other DNA
gcctagataaatcgcgatagagcgttcctctttgtt

SEQ ID NO: 5420 - DNA, 36 bp, synthetic construct
  source 1..36: mol_type = other DNA
gcctagataaatcgcgatagagcgttcctccttgtt

SEQ ID NO: 5421 - DNA, 37 bp, synthetic construct
  source 1..37: mol_type = other DNA
tgcctagataaatcgcgatagagcgttcctctttgtt

SEQ ID NO: 5422 - DNA, 37 bp, synthetic construct
  source 1..37: mol_type = other DNA
tgcctagataaatcgcgatagagcgttcctccttgtt

SEQ ID NO: 5423 - DNA, 38 bp, synthetic construct
  source 1..38: mol_type = other DNA
atgcctagataaatcgcgatagagcgttcctccttgtt

SEQ ID NO: 5424 - DNA, 38 bp, synthetic construct
  source 1..38: mol_type = other DNA
atgcctagataaatcgcgatagagcgttcctctttgtt

SEQ ID NO: 5425 - DNA, 39 bp, synthetic construct
  source 1..39: mol_type = other DNA
tatgcctagataaatcgcgatagagcgttcctccttgtt

SEQ ID NO: 5426 - DNA, 39 bp, synthetic construct
  source 1..39: mol_type = other DNA
tatgcctagataaatcgcgatagagcgttcctctttgtt

SEQ ID NO: 5427 - DNA, 40 bp, synthetic construct
  source 1..40: mol_type = other DNA
ctatgcctagataaatcgcgatagagcgttcctccttgtt

SEQ ID NO: 5428 - DNA, 40 bp, synthetic construct
  source 1..40: mol_type = other DNA
ctatgcctagataaatcgcgatagagcgttcctctttgtt

SEQ ID NO: 5429 - DNA, 15 bp, synthetic construct
  source 1..15: mol_type = other DNA
caaagaacccgctga

SEQ ID NO: 5430 - DNA, 15 bp, synthetic construct
  source 1..15: mol_type = other DNA
caaagaaccctgaga

SEQ ID NO: 5431 - DNA, 16 bp, synthetic construct
  source 1..16: mol_type = other DNA
acaaagaacccgctga

SEQ ID NO: 5432 - DNA, 16 bp, synthetic construct
  source 1..16: mol_type = other DNA
acaaagaaccctgaga

SEQ ID NO: 5433 - DNA, 17 bp, synthetic construct
  source 1..17: mol_type = other DNA
cacaaagaaccctgaga

SEQ ID NO: 5434 - DNA, 17 bp, synthetic construct
  source 1..17: mol_type = other DNA
cacaaagaacccgctga

SEQ ID NO: 5435 - DNA, 18 bp, synthetic construct
  source 1..18: mol_type = other DNA
ccacaaagaacccgctga

SEQ ID NO: 5436 - DNA, 18 bp, synthetic construct
  source 1..18: mol_type = other DNA
ccacaaagaaccctgaga

SEQ ID NO: 5437 - DNA, 19 bp, synthetic construct
  source 1..19: mol_type = other DNA
accacaaagaacccgctga

SEQ ID NO: 5438 - DNA, 19 bp, synthetic construct
  source 1..19: mol_type = other DNA
accacaaagaaccctgaga

SEQ ID NO: 5439 - DNA, 20 bp, synthetic construct
  source 1..20: mol_type = other DNA
caccacaaagaaccctgaga

SEQ ID NO: 5440 - DNA, 20 bp, synthetic construct
  source 1..20: mol_type = other DNA
caccacaaagaacccgctga

SEQ ID NO: 5441 - DNA, 21 bp, synthetic construct
  source 1..21: mol_type = other DNA
acaccacaaagaaccctgaga

SEQ ID NO: 5442 - DNA, 21 bp, synthetic construct
  source 1..21: mol_type = other DNA
acaccacaaagaacccgctga

SEQ ID NO: 5443 - DNA, 22 bp, synthetic construct
  source 1..22: mol_type = other DNA
aacaccacaaagaacccgctga

SEQ ID NO: 5444 - DNA, 22 bp, synthetic construct
  source 1..22: mol_type = other DNA
aacaccacaaagaaccctgaga

SEQ ID NO: 5445 - DNA, 23 bp, synthetic construct
  source 1..23: mol_type = other DNA
aaacaccacaaagaaccctgaga

SEQ ID NO: 5446 - DNA, 23 bp, synthetic construct
  source 1..23: mol_type = other DNA
aaacaccacaaagaacccgctga

SEQ ID NO: 5447 - DNA, 24 bp, synthetic construct
  source 1..24: mol_type = other DNA
aaaacaccacaaagaaccctgaga

SEQ ID NO: 5448 - DNA, 24 bp, synthetic construct
  source 1..24: mol_type = other DNA
aaaacaccacaaagaacccgctga

SEQ ID NO: 5449 - DNA, 25 bp, synthetic construct
  source 1..25: mol_type = other DNA
aaaaacaccacaaagaaccctgaga

SEQ ID NO: 5450 - DNA, 25 bp, synthetic construct
  source 1..25: mol_type = other DNA
aaaaacaccacaaagaacccgctga

SEQ ID NO: 5451 - DNA, 26 bp, synthetic construct
  source 1..26: mol_type = other DNA
taaaaacaccacaaagaacccgctga

SEQ ID NO: 5452 - DNA, 26 bp, synthetic construct
  source 1..26: mol_type = other DNA
taaaaacaccacaaagaaccctgaga

SEQ ID NO: 5453 - DNA, 27 bp, synthetic construct
  source 1..27: mol_type = other DNA
ataaaaacaccacaaagaacccgctga

SEQ ID NO: 5454 - DNA, 27 bp, synthetic construct
  source 1..27: mol_type = other DNA
ataaaaacaccacaaagaaccctgaga

SEQ ID NO: 5455 - DNA, 28 bp, synthetic construct
  source 1..28: mol_type = other DNA
gataaaaacaccacaaagaaccctgaga

SEQ ID NO: 5456 - DNA, 28 bp, synthetic construct
  source 1..28: mol_type = other DNA
gataaaaacaccacaaagaacccgctga

SEQ ID NO: 5457 - DNA, 29 bp, synthetic construct
  source 1..29: mol_type = other DNA
agataaaaacaccacaaagaacccgctga

SEQ ID NO: 5458 - DNA, 29 bp, synthetic construct
  source 1..29: mol_type = other DNA
agataaaaacaccacaaagaaccctgaga

SEQ ID NO: 5459 - DNA, 30 bp, synthetic construct
  source 1..30: mol_type = other DNA
cagataaaaacaccacaaagaacccgctga

SEQ ID NO: 5460 - DNA, 30 bp, synthetic construct
  source 1..30: mol_type = other DNA
cagataaaaacaccacaaagaaccctgaga

SEQ ID NO: 5461 - DNA, 31 bp, synthetic construct
  source 1..31: mol_type = other DNA
acagataaaaacaccacaaagaaccctgaga

SEQ ID NO: 5462 - DNA, 31 bp, synthetic construct
  source 1..31: mol_type = other DNA
acagataaaaacaccacaaagaacccgctga

SEQ ID NO: 5463 - DNA, 32 bp, synthetic construct
  source 1..32: mol_type = other DNA
cacagataaaaacaccacaaagaaccctgaga

SEQ ID NO: 5464 - DNA, 32 bp, synthetic construct
  source 1..32: mol_type = other DNA
cacagataaaaacaccacaaagaacccgctga

SEQ ID NO: 5465 - DNA, 33 bp, synthetic construct
  source 1..33: mol_type = other DNA
gcacagataaaaacaccacaaagaacccgctga

SEQ ID NO: 5466 - DNA, 33 bp, synthetic construct
  source 1..33: mol_type = other DNA
gcacagataaaaacaccacaaagaaccctgaga

SEQ ID NO: 5467 - DNA, 34 bp, synthetic construct
  source 1..34: mol_type = other DNA
agcacagataaaaacaccacaaagaacccgctga

SEQ ID NO: 5468 - DNA, 34 bp, synthetic construct
  source 1..34: mol_type = other DNA
agcacagataaaaacaccacaaagaaccctgaga

SEQ ID NO: 5469 - DNA, 35 bp, synthetic construct
  source 1..35: mol_type = other DNA
aagcacagataaaaacaccacaaagaacccgctga

SEQ ID NO: 5470 - DNA, 35 bp, synthetic construct
  source 1..35: mol_type = other DNA
aagcacagataaaaacaccacaaagaaccctgaga

SEQ ID NO: 5471 - DNA, 36 bp, synthetic construct
  source 1..36: mol_type = other DNA
gaagcacagataaaaacaccacaaagaaccctgaga

SEQ ID NO: 5472 - DNA, 36 bp, synthetic construct
  source 1..36: mol_type = other DNA
gaagcacagataaaaacaccacaaagaacccgctga

SEQ ID NO: 5473 - DNA, 37 bp, synthetic construct
  source 1..37: mol_type = other DNA
ggaagcacagataaaaacaccacaaagaacccgctga

SEQ ID NO: 5474 - DNA, 37 bp, synthetic construct
  source 1..37: mol_type = other DNA
ggaagcacagataaaaacaccacaaagaaccctgaga

SEQ ID NO: 5475 - DNA, 38 bp, synthetic construct
  source 1..38: mol_type = other DNA
gggaagcacagataaaaacaccacaaagaaccctgaga

SEQ ID NO: 5476 - DNA, 38 bp, synthetic construct
  source 1..38: mol_type = other DNA
gggaagcacagataaaaacaccacaaagaacccgctga

SEQ ID NO: 5477 - DNA, 39 bp, synthetic construct
  source 1..39: mol_type = other DNA
agggaagcacagataaaaacaccacaaagaaccctgaga

SEQ ID NO: 5478 - DNA, 39 bp, synthetic construct
  source 1..39: mol_type = other DNA
agggaagcacagataaaaacaccacaaagaacccgctga

SEQ ID NO: 5479 - DNA, 40 bp, synthetic construct
  source 1..40: mol_type = other DNA
tagggaagcacagataaaaacaccacaaagaaccctgaga

SEQ ID NO: 5480 - DNA, 40 bp, synthetic construct
  source 1..40: mol_type = other DNA
tagggaagcacagataaaaacaccacaaagaacccgctga

SEQ ID NO: 5481 - DNA, 35 bp, synthetic construct
  source 1..35: mol_type = other DNA
ttgtggtgtttttatctgtgcttccctatgcacta

SEQ ID NO: 5482 - DNA, 36 bp, synthetic construct
  source 1..36: mol_type = other DNA
tttgtggtgtttttatctgtgcttccctatgcacta

SEQ ID NO: 5483 - DNA, 37 bp, synthetic construct
  source 1..37: mol_type = other DNA
ctttgtggtgtttttatctgtgcttccctatgcacta

SEQ ID NO: 5484 - DNA, 38 bp, synthetic construct
  source 1..38: mol_type = other DNA
tctttgtggtgtttttatctgtgcttccctatgcacta

SEQ ID NO: 5485 - DNA, 39 bp, synthetic construct
  source 1..39: mol_type = other DNA
ttctttgtggtgtttttatctgtgcttccctatgcacta

SEQ ID NO: 5486 - DNA, 40 bp, synthetic construct
  source 1..40: mol_type = other DNA
gttctttgtggtgtttttatctgtgcttccctatgcacta

SEQ ID NO: 5487 - DNA, 21 bp, synthetic construct
  source 1..21: mol_type = other DNA
ttgtggtgtttttatctgtgc

SEQ ID NO: 5488 - DNA, 21 bp, synthetic construct
  source 1..21: mol_type = other DNA
ttgtggtgtttttaagcgtgc

SEQ ID NO: 5489 - DNA, 22 bp, synthetic construct
  source 1..22: mol_type = other DNA
tttgtggtgtttttaagcgtgc

SEQ ID NO: 5490 - DNA, 22 bp, synthetic construct
  source 1..22: mol_type = other DNA
tttgtggtgtttttatctgtgc

SEQ ID NO: 5491 - DNA, 23 bp, synthetic construct
  source 1..23: mol_type = other DNA
ctttgtggtgtttttaagcgtgc

SEQ ID NO: 5492 - DNA, 23 bp, synthetic construct
  source 1..23: mol_type = other DNA
ctttgtggtgtttttatctgtgc

SEQ ID NO: 5493 - DNA, 24 bp, synthetic construct
  source 1..24: mol_type = other DNA
tctttgtggtgtttttaagcgtgc

SEQ ID NO: 5494 - DNA, 24 bp, synthetic construct
  source 1..24: mol_type = other DNA
tctttgtggtgtttttatctgtgc

SEQ ID NO: 5495 - DNA, 25 bp, synthetic construct
  source 1..25: mol_type = other DNA
ttctttgtggtgtttttatctgtgc

SEQ ID NO: 5496 - DNA, 25 bp, synthetic construct
  source 1..25: mol_type = other DNA
ttctttgtggtgtttttaagcgtgc

SEQ ID NO: 5497 - DNA, 26 bp, synthetic construct
  source 1..26: mol_type = other DNA
gttctttgtggtgtttttatctgtgc

SEQ ID NO: 5498 - DNA, 26 bp, synthetic construct
  source 1..26: mol_type = other DNA
gttctttgtggtgtttttaagcgtgc

SEQ ID NO: 5499 - DNA, 27 bp, synthetic construct
  source 1..27: mol_type = other DNA
ggttctttgtggtgtttttatctgtgc

SEQ ID NO: 5500 - DNA, 27 bp, synthetic construct
  source 1..27: mol_type = other DNA
ggttctttgtggtgtttttaagcgtgc

SEQ ID NO: 5501 - DNA, 28 bp, synthetic construct
  source 1..28: mol_type = other DNA
gggttctttgtggtgtttttaagcgtgc

SEQ ID NO: 5502 - DNA, 28 bp, synthetic construct
  source 1..28: mol_type = other DNA
gggttctttgtggtgtttttatctgtgc

SEQ ID NO: 5503 - DNA, 29 bp, synthetic construct
  source 1..29: mol_type = other DNA
agggttctttgtggtgtttttaagcgtgc

SEQ ID NO: 5504 - DNA, 29 bp, synthetic construct
  source 1..29: mol_type = other DNA
agggttctttgtggtgtttttatctgtgc

SEQ ID NO: 5505 - DNA, 30 bp, synthetic construct
  source 1..30: mol_type = other DNA
cagggttctttgtggtgtttttaagcgtgc

SEQ ID NO: 5506 - DNA, 30 bp, synthetic construct
  source 1..30: mol_type = other DNA
cagggttctttgtggtgtttttatctgtgc

SEQ ID NO: 5507 - DNA, 31 bp, synthetic construct
  source 1..31: mol_type = other DNA
tcagggttctttgtggtgtttttaagcgtgc

SEQ ID NO: 5508 - DNA, 31 bp, synthetic construct
  source 1..31: mol_type = other DNA
tcagggttctttgtggtgtttttatctgtgc

SEQ ID NO: 5509 - DNA, 32 bp, synthetic construct
  source 1..32: mol_type = other DNA
ctcagggttctttgtggtgtttttatctgtgc

SEQ ID NO: 5510 - DNA, 32 bp, synthetic construct
  source 1..32: mol_type = other DNA
ctcagggttctttgtggtgtttttaagcgtgc

SEQ ID NO: 5511 - DNA, 33 bp, synthetic construct
  source 1..33: mol_type = other DNA
tctcagggttctttgtggtgtttttaagcgtgc

SEQ ID NO: 5512 - DNA, 33 bp, synthetic construct
  source 1..33: mol_type = other DNA
tctcagggttctttgtggtgtttttatctgtgc

SEQ ID NO: 5513 - DNA, 34 bp, synthetic construct
  source 1..34: mol_type = other DNA
ttctcagggttctttgtggtgtttttatctgtgc

SEQ ID NO: 5514 - DNA, 34 bp, synthetic construct
  source 1..34: mol_type = other DNA
ttctcagggttctttgtggtgtttttaagcgtgc

SEQ ID NO: 5515 - DNA, 35 bp, synthetic construct
  source 1..35: mol_type = other DNA
cttctcagggttctttgtggtgtttttatctgtgc

SEQ ID NO: 5516 - DNA, 35 bp, synthetic construct
  source 1..35: mol_type = other DNA
cttctcagggttctttgtggtgtttttaagcgtgc

SEQ ID NO: 5517 - DNA, 36 bp, synthetic construct
  source 1..36: mol_type = other DNA
tcttctcagggttctttgtggtgtttttatctgtgc

SEQ ID NO: 5518 - DNA, 36 bp, synthetic construct
  source 1..36: mol_type = other DNA
tcttctcagggttctttgtggtgtttttaagcgtgc

SEQ ID NO: 5519 - DNA, 37 bp, synthetic construct
  source 1..37: mol_type = other DNA
ttcttctcagggttctttgtggtgtttttatctgtgc

SEQ ID NO: 5520 - DNA, 37 bp, synthetic construct
  source 1..37: mol_type = other DNA
ttcttctcagggttctttgtggtgtttttaagcgtgc

SEQ ID NO: 5521 - DNA, 38 bp, synthetic construct
  source 1..38: mol_type = other DNA
cttcttctcagggttctttgtggtgtttttatctgtgc

SEQ ID NO: 5522 - DNA, 38 bp, synthetic construct
  source 1..38: mol_type = other DNA
cttcttctcagggttctttgtggtgtttttaagcgtgc

SEQ ID NO: 5523 - DNA, 39 bp, synthetic construct
  source 1..39: mol_type = other DNA
tcttcttctcagggttctttgtggtgtttttatctgtgc

SEQ ID NO: 5524 - DNA, 39 bp, synthetic construct
  source 1..39: mol_type = other DNA
tcttcttctcagggttctttgtggtgtttttaagcgtgc

SEQ ID NO: 5525 - DNA, 40 bp, synthetic construct
  source 1..40: mol_type = other DNA
ttcttcttctcagggttctttgtggtgtttttatctgtgc

SEQ ID NO: 5526 - DNA, 40 bp, synthetic construct
  source 1..40: mol_type = other DNA
ttcttcttctcagggttctttgtggtgtttttaagcgtgc

SEQ ID NO: 5527 - DNA, 30 bp, synthetic construct
  source 1..30: mol_type = other DNA
ttgtggtgtttttatctgtgcttccttatg

SEQ ID NO: 5528 - DNA, 30 bp, synthetic construct
  source 1..30: mol_type = other DNA
ttgtggtgtttttatctgtgcttccctatg

SEQ ID NO: 5529 - DNA, 31 bp, synthetic construct
  source 1..31: mol_type = other DNA
tttgtggtgtttttatctgtgcttccctatg

SEQ ID NO: 5530 - DNA, 31 bp, synthetic construct
  source 1..31: mol_type = other DNA
tttgtggtgtttttatctgtgcttccttatg

SEQ ID NO: 5531 - DNA, 32 bp, synthetic construct
  source 1..32: mol_type = other DNA
ctttgtggtgtttttatctgtgcttccttatg

SEQ ID NO: 5532 - DNA, 32 bp, synthetic construct
  source 1..32: mol_type = other DNA
ctttgtggtgtttttatctgtgcttccctatg

SEQ ID NO: 5533 - DNA, 33 bp, synthetic construct
  source 1..33: mol_type = other DNA
tctttgtggtgtttttatctgtgcttccttatg

SEQ ID NO: 5534 - DNA, 33 bp, synthetic construct
  source 1..33: mol_type = other DNA
tctttgtggtgtttttatctgtgcttccctatg

SEQ ID NO: 5535 - DNA, 34 bp, synthetic construct
  source 1..34: mol_type = other DNA
ttctttgtggtgtttttatctgtgcttccctatg

SEQ ID NO: 5536 - DNA, 34 bp, synthetic construct
  source 1..34: mol_type = other DNA
ttctttgtggtgtttttatctgtgcttccttatg

SEQ ID NO: 5537 - DNA, 35 bp, synthetic construct
  source 1..35: mol_type = other DNA
gttctttgtggtgtttttatctgtgcttccctatg

SEQ ID NO: 5538 - DNA, 35 bp, synthetic construct
  source 1..35: mol_type = other DNA
gttctttgtggtgtttttatctgtgcttccttatg

SEQ ID NO: 5539 - DNA, 36 bp, synthetic construct
  source 1..36: mol_type = other DNA
ggttctttgtggtgtttttatctgtgcttccttatg

SEQ ID NO: 5540 - DNA, 36 bp, synthetic construct
  source 1..36: mol_type = other DNA
ggttctttgtggtgtttttatctgtgcttccctatg

SEQ ID NO: 5541 - DNA, 37 bp, synthetic construct
  source 1..37: mol_type = other DNA
gggttctttgtggtgtttttatctgtgcttccttatg

SEQ ID NO: 5542 - DNA, 37 bp, synthetic construct
  source 1..37: mol_type = other DNA
gggttctttgtggtgtttttatctgtgcttccctatg

SEQ ID NO: 5543 - DNA, 38 bp, synthetic construct
  source 1..38: mol_type = other DNA
agggttctttgtggtgtttttatctgtgcttccctatg

SEQ ID NO: 5544 - DNA, 38 bp, synthetic construct
  source 1..38: mol_type = other DNA
agggttctttgtggtgtttttatctgtgcttccttatg

SEQ ID NO: 5545 - DNA, 39 bp, synthetic construct
  source 1..39: mol_type = other DNA
cagggttctttgtggtgtttttatctgtgcttccttatg

SEQ ID NO: 5546 - DNA, 39 bp, synthetic construct
  source 1..39: mol_type = other DNA
cagggttctttgtggtgtttttatctgtgcttccctatg

SEQ ID NO: 5547 - DNA, 40 bp, synthetic construct
  source 1..40: mol_type = other DNA
tcagggttctttgtggtgtttttatctgtgcttccctatg

SEQ ID NO: 5548 - DNA, 40 bp, synthetic construct
  source 1..40: mol_type = other DNA
tcagggttctttgtggtgtttttatctgtgcttccttatg

SEQ ID NO: 5549 - DNA, 10 bp, synthetic construct
  source 1..10: mol_type = other DNA
ggttctttgt

SEQ ID NO: 5550 - DNA, 11 bp, synthetic construct
  source 1..11: mol_type = other DNA
gggttctttgt

SEQ ID NO: 5551 - DNA, 12 bp, synthetic construct
  source 1..12: mol_type = other DNA
agggttctttgt

SEQ ID NO: 5552 - DNA, 13 bp, synthetic construct
  source 1..13: mol_type = other DNA
cagggttctttgt

SEQ ID NO: 5553 - DNA, 14 bp, synthetic construct
  source 1..14: mol_type = other DNA
tcagggttctttgt

SEQ ID NO: 5554 - DNA, 15 bp, synthetic construct
  source 1..15: mol_type = other DNA
ctcagggttctttgt

SEQ ID NO: 5555 - DNA, 16 bp, synthetic construct
  source 1..16: mol_type = other DNA
tctcagggttctttgt

SEQ ID NO: 5556 - DNA, 17 bp, synthetic construct
  source 1..17: mol_type = other DNA
ttctcagggttctttgt

SEQ ID NO: 5557 - DNA, 18 bp, synthetic construct
  source 1..18: mol_type = other DNA
cttctcagggttctttgt

SEQ ID NO: 5558 - DNA, 19 bp, synthetic construct
  source 1..19: mol_type = other DNA
tcttctcagggttctttgt

SEQ ID NO: 5559 - DNA, 20 bp, synthetic construct
  source 1..20: mol_type = other DNA
ttcttctcagggttctttgt

SEQ ID NO: 5560 - DNA, 21 bp, synthetic construct
  source 1..21: mol_type = other DNA
cttcttctcagggttctttgt

SEQ ID NO: 5561 - DNA, 22 bp, synthetic construct
  source 1..22: mol_type = other DNA
tcttcttctcagggttctttgt

SEQ ID NO: 5562 - DNA, 23 bp, synthetic construct
  source 1..23: mol_type = other DNA
ttcttcttctcagggttctttgt

SEQ ID NO: 5563 - DNA, 24 bp, synthetic construct
  source 1..24: mol_type = other DNA
cttcttcttctcagggttctttgt

SEQ ID NO: 5564 - DNA, 25 bp, synthetic construct
  source 1..25: mol_type = other DNA
ccttcttcttctcagggttctttgt

SEQ ID NO: 5565 - DNA, 26 bp, synthetic construct
  source 1..26: mol_type = other DNA
gccttcttcttctcagggttctttgt

SEQ ID NO: 5566 - DNA, 27 bp, synthetic construct
  source 1..27: mol_type = other DNA
agccttcttcttctcagggttctttgt

SEQ ID NO: 5567 - DNA, 28 bp, synthetic construct
  source 1..28: mol_type = other DNA
cagccttcttcttctcagggttctttgt

SEQ ID NO: 5568 - DNA, 29 bp, synthetic construct
  source 1..29: mol_type = other DNA
tcagccttcttcttctcagggttctttgt

SEQ ID NO: 5569 - DNA, 30 bp, synthetic construct
  source 1..30: mol_type = other DNA
ctcagccttcttcttctcagggttctttgt

SEQ ID NO: 5570 - DNA, 31 bp, synthetic construct
  source 1..31: mol_type = other DNA
gctcagccttcttcttctcagggttctttgt

SEQ ID NO: 5571 - DNA, 32 bp, synthetic construct
  source 1..32: mol_type = other DNA
agctcagccttcttcttctcagggttctttgt

SEQ ID NO: 5572 - DNA, 33 bp, synthetic construct
  source 1..33: mol_type = other DNA
tagctcagccttcttcttctcagggttctttgt

SEQ ID NO: 5573 - DNA, 34 bp, synthetic construct
  source 1..34: mol_type = other DNA
atagctcagccttcttcttctcagggttctttgt

SEQ ID NO: 5574 - DNA, 35 bp, synthetic construct
  source 1..35: mol_type = other DNA
aatagctcagccttcttcttctcagggttctttgt

SEQ ID NO: 5575 - DNA, 36 bp, synthetic construct
  source 1..36: mol_type = other DNA
caatagctcagccttcttcttctcagggttctttgt

SEQ ID NO: 5576 - DNA, 37 bp, synthetic construct
  source 1..37: mol_type = other DNA
tcaatagctcagccttcttcttctcagggttctttgt

SEQ ID NO: 5577 - DNA, 38 bp, synthetic construct
  source 1..38: mol_type = other DNA
ttcaatagctcagccttcttcttctcagggttctttgt

SEQ ID NO: 5578 - DNA, 39 bp, synthetic construct
  source 1..39: mol_type = other DNA
cttcaatagctcagccttcttcttctcagggttctttgt

SEQ ID NO: 5579 - DNA, 40 bp, synthetic construct
  source 1..40: mol_type = other DNA
acttcaatagctcagccttcttcttctcagggttctttgt

SEQ ID NO: 5580 - DNA, 35 bp, synthetic construct
  source 1..35: mol_type = other DNA
caaagaaccctgagaagaagaaggctgaggaattg

SEQ ID NO: 5581 - DNA, 35 bp, synthetic construct
  source 1..35: mol_type = other DNA
caaagaaccctgagaagaagaaggctgagctattg

SEQ ID NO: 5582 - DNA, 36 bp, synthetic construct
  source 1..36: mol_type = other DNA
acaaagaaccctgagaagaagaaggctgagctattg

SEQ ID NO: 5583 - DNA, 36 bp, synthetic construct
  source 1..36: mol_type = other DNA
acaaagaaccctgagaagaagaaggctgaggaattg

SEQ ID NO: 5584 - DNA, 37 bp, synthetic construct
  source 1..37: mol_type = other DNA
cacaaagaaccctgagaagaagaaggctgaggaattg

SEQ ID NO: 5585 - DNA, 37 bp, synthetic construct
  source 1..37: mol_type = other DNA
cacaaagaaccctgagaagaagaaggctgagctattg

SEQ ID NO: 5586 - DNA, 38 bp, synthetic construct
  source 1..38: mol_type = other DNA
ccacaaagaaccctgagaagaagaaggctgaggaattg

SEQ ID NO: 5587 - DNA, 38 bp, synthetic construct
  source 1..38: mol_type = other DNA
ccacaaagaaccctgagaagaagaaggctgagctattg

SEQ ID NO: 5588 - DNA, 39 bp, synthetic construct
  source 1..39: mol_type = other DNA
accacaaagaaccctgagaagaagaaggctgagctattg

SEQ ID NO: 5589 - DNA, 39 bp, synthetic construct
  source 1..39: mol_type = other DNA
accacaaagaaccctgagaagaagaaggctgaggaattg

SEQ ID NO: 5590 - DNA, 40 bp, synthetic construct
  source 1..40: mol_type = other DNA
caccacaaagaaccctgagaagaagaaggctgaggaattg

SEQ ID NO: 5591 - DNA, 40 bp, synthetic construct
  source 1..40: mol_type = other DNA
caccacaaagaaccctgagaagaagaaggctgagctattg

SEQ ID NO: 5592 - DNA, 34 bp, synthetic construct
  source 1..34: mol_type = other DNA
caaagaaccctgagaagaagaaggctgagctatt

SEQ ID NO: 5593 - DNA, 35 bp, synthetic construct
  source 1..35: mol_type = other DNA
acaaagaaccctgagaagaagaaggctgagctatt

SEQ ID NO: 5594 - DNA, 36 bp, synthetic construct
  source 1..36: mol_type = other DNA
cacaaagaaccctgagaagaagaaggctgagctatt

SEQ ID NO: 5595 - DNA, 37 bp, synthetic construct
  source 1..37: mol_type = other DNA
ccacaaagaaccctgagaagaagaaggctgagctatt

SEQ ID NO: 5596 - DNA, 38 bp, synthetic construct
  source 1..38: mol_type = other DNA
accacaaagaaccctgagaagaagaaggctgagctatt

SEQ ID NO: 5597 - DNA, 39 bp, synthetic construct
  source 1..39: mol_type = other DNA
caccacaaagaaccctgagaagaagaaggctgagctatt

SEQ ID NO: 5598 - DNA, 40 bp, synthetic construct
  source 1..40: mol_type = other DNA
acaccacaaagaaccctgagaagaagaaggctgagctatt

SEQ ID NO: 5599 - DNA, 13 bp, synthetic construct
  source 1..13: mol_type = other DNA
caaagaagcctga

SEQ ID NO: 5600 - DNA, 13 bp, synthetic construct
  source 1..13: mol_type = other DNA
caaagaaccctga

SEQ ID NO: 5601 - DNA, 14 bp, synthetic construct
  source 1..14: mol_type = other DNA
acaaagaaccctga

SEQ ID NO: 5602 - DNA, 14 bp, synthetic construct
  source 1..14: mol_type = other DNA
acaaagaagcctga

SEQ ID NO: 5603 - DNA, 15 bp, synthetic construct
  source 1..15: mol_type = other DNA
cacaaagaaccctga

SEQ ID NO: 5604 - DNA, 15 bp, synthetic construct
  source 1..15: mol_type = other DNA
cacaaagaagcctga

SEQ ID NO: 5605 - DNA, 16 bp, synthetic construct
  source 1..16: mol_type = other DNA
ccacaaagaagcctga

SEQ ID NO: 5606 - DNA, 16 bp, synthetic construct
  source 1..16: mol_type = other DNA
ccacaaagaaccctga

SEQ ID NO: 5607 - DNA, 17 bp, synthetic construct
  source 1..17: mol_type = other DNA
accacaaagaagcctga

SEQ ID NO: 5608 - DNA, 17 bp, synthetic construct
  source 1..17: mol_type = other DNA
accacaaagaaccctga

SEQ ID NO: 5609 - DNA, 18 bp, synthetic construct
  source 1..18: mol_type = other DNA
caccacaaagaaccctga

SEQ ID NO: 5610 - DNA, 18 bp, synthetic construct
  source 1..18: mol_type = other DNA
caccacaaagaagcctga

SEQ ID NO: 5611 - DNA, 19 bp, synthetic construct
  source 1..19: mol_type = other DNA
acaccacaaagaagcctga

SEQ ID NO: 5612 - DNA, 19 bp, synthetic construct
  source 1..19: mol_type = other DNA
acaccacaaagaaccctga

SEQ ID NO: 5613 - DNA, 20 bp, synthetic construct
  source 1..20: mol_type = other DNA
aacaccacaaagaagcctga

SEQ ID NO: 5614 - DNA, 20 bp, synthetic construct
  source 1..20: mol_type = other DNA
aacaccacaaagaaccctga

SEQ ID NO: 5615 - DNA, 21 bp, synthetic construct
  source 1..21: mol_type = other DNA
aaacaccacaaagaagcctga

SEQ ID NO: 5616 - DNA, 21 bp, synthetic construct
  source 1..21: mol_type = other DNA
aaacaccacaaagaaccctga

SEQ ID NO: 5617 - DNA, 22 bp, synthetic construct
  source 1..22: mol_type = other DNA
aaaacaccacaaagaaccctga

SEQ ID NO: 5618 - DNA, 22 bp, synthetic construct
  source 1..22: mol_type = other DNA
aaaacaccacaaagaagcctga

SEQ ID NO: 5619 - DNA, 23 bp, synthetic construct
  source 1..23: mol_type = other DNA
aaaaacaccacaaagaaccctga

SEQ ID NO: 5620 - DNA, 23 bp, synthetic construct
  source 1..23: mol_type = other DNA
aaaaacaccacaaagaagcctga

SEQ ID NO: 5621 - DNA, 24 bp, synthetic construct
  source 1..24: mol_type = other DNA
taaaaacaccacaaagaaccctga

SEQ ID NO: 5622 - DNA, 24 bp, synthetic construct
  source 1..24: mol_type = other DNA
taaaaacaccacaaagaagcctga

SEQ ID NO: 5623 - DNA, 25 bp, synthetic construct
  source 1..25: mol_type = other DNA
ataaaaacaccacaaagaaccctga

SEQ ID NO: 5624 - DNA, 25 bp, synthetic construct
  source 1..25: mol_type = other DNA
ataaaaacaccacaaagaagcctga

SEQ ID NO: 5625 - DNA, 26 bp, synthetic construct
  source 1..26: mol_type = other DNA
gataaaaacaccacaaagaagcctga

SEQ ID NO: 5626 - DNA, 26 bp, synthetic construct
  source 1..26: mol_type = other DNA
gataaaaacaccacaaagaaccctga

SEQ ID NO: 5627 - DNA, 27 bp, synthetic construct
  source 1..27: mol_type = other DNA
agataaaaacaccacaaagaaccctga

SEQ ID NO: 5628 - DNA, 27 bp, synthetic construct
  source 1..27: mol_type = other DNA
agataaaaacaccacaaagaagcctga

SEQ ID NO: 5629 - DNA, 28 bp, synthetic construct
  source 1..28: mol_type = other DNA
cagataaaaacaccacaaagaaccctga

SEQ ID NO: 5630 - DNA, 28 bp, synthetic construct
  source 1..28: mol_type = other DNA
cagataaaaacaccacaaagaagcctga

SEQ ID NO: 5631 - DNA, 29 bp, synthetic construct
  source 1..29: mol_type = other DNA
acagataaaaacaccacaaagaagcctga

SEQ ID NO: 5632 - DNA, 29 bp, synthetic construct
  source 1..29: mol_type = other DNA
acagataaaaacaccacaaagaaccctga

SEQ ID NO: 5633 - DNA, 30 bp, synthetic construct
  source 1..30: mol_type = other DNA
cacagataaaaacaccacaaagaagcctga

SEQ ID NO: 5634 - DNA, 30 bp, synthetic construct
  source 1..30: mol_type = other DNA
cacagataaaaacaccacaaagaaccctga

SEQ ID NO: 5635 - DNA, 31 bp, synthetic construct
  source 1..31: mol_type = other DNA
gcacagataaaaacaccacaaagaagcctga

SEQ ID NO: 5636 - DNA, 31 bp, synthetic construct
  source 1..31: mol_type = other DNA
gcacagataaaaacaccacaaagaaccctga

SEQ ID NO: 5637 - DNA, 32 bp, synthetic construct
  source 1..32: mol_type = other DNA
agcacagataaaaacaccacaaagaaccctga

SEQ ID NO: 5638 - DNA, 32 bp, synthetic construct
  source 1..32: mol_type = other DNA
agcacagataaaaacaccacaaagaagcctga

SEQ ID NO: 5639 - DNA, 33 bp, synthetic construct
  source 1..33: mol_type = other DNA
aagcacagataaaaacaccacaaagaaccctga

SEQ ID NO: 5640 - DNA, 33 bp, synthetic construct
  source 1..33: mol_type = other DNA
aagcacagataaaaacaccacaaagaagcctga

SEQ ID NO: 5641 - DNA, 34 bp, synthetic construct
  source 1..34: mol_type = other DNA
gaagcacagataaaaacaccacaaagaaccctga

SEQ ID NO: 5642 - DNA, 34 bp, synthetic construct
  source 1..34: mol_type = other DNA
gaagcacagataaaaacaccacaaagaagcctga

SEQ ID NO: 5643 - DNA, 35 bp, synthetic construct
  source 1..35: mol_type = other DNA
ggaagcacagataaaaacaccacaaagaagcctga

SEQ ID NO: 5644 - DNA, 35 bp, synthetic construct
  source 1..35: mol_type = other DNA
ggaagcacagataaaaacaccacaaagaaccctga

SEQ ID NO: 5645 - DNA, 36 bp, synthetic construct
  source 1..36: mol_type = other DNA
gggaagcacagataaaaacaccacaaagaaccctga

SEQ ID NO: 5646 - DNA, 36 bp, synthetic construct
  source 1..36: mol_type = other DNA
gggaagcacagataaaaacaccacaaagaagcctga

SEQ ID NO: 5647 - DNA, 37 bp, synthetic construct
  source 1..37: mol_type = other DNA
agggaagcacagataaaaacaccacaaagaagcctga

SEQ ID NO: 5648 - DNA, 37 bp, synthetic construct
  source 1..37: mol_type = other DNA
agggaagcacagataaaaacaccacaaagaaccctga

SEQ ID NO: 5649 - DNA, 38 bp, synthetic construct
  source 1..38: mol_type = other DNA
tagggaagcacagataaaaacaccacaaagaagcctga

SEQ ID NO: 5650 - DNA, 38 bp, synthetic construct
  source 1..38: mol_type = other DNA
tagggaagcacagataaaaacaccacaaagaaccctga

SEQ ID NO: 5651 - DNA, 39 bp, synthetic construct
  source 1..39: mol_type = other DNA
atagggaagcacagataaaaacaccacaaagaaccctga

SEQ ID NO: 5652 - DNA, 39 bp, synthetic construct
  source 1..39: mol_type = other DNA
atagggaagcacagataaaaacaccacaaagaagcctga

SEQ ID NO: 5653 - DNA, 40 bp, synthetic construct
  source 1..40: mol_type = other DNA
catagggaagcacagataaaaacaccacaaagaagcctga

SEQ ID NO: 5654 - DNA, 40 bp, synthetic construct
  source 1..40: mol_type = other DNA
catagggaagcacagataaaaacaccacaaagaaccctga

SEQ ID NO: 5655 - DNA, 12 bp, synthetic construct
  source 1..12: mol_type = other DNA
caaagaaccctg

SEQ ID NO: 5656 - DNA, 13 bp, synthetic construct
  source 1..13: mol_type = other DNA
acaaagaaccctg

SEQ ID NO: 5657 - DNA, 14 bp, synthetic construct
  source 1..14: mol_type = other DNA
cacaaagaaccctg

SEQ ID NO: 5658 - DNA, 15 bp, synthetic construct
  source 1..15: mol_type = other DNA
ccacaaagaaccctg

SEQ ID NO: 5659 - DNA, 16 bp, synthetic construct
  source 1..16: mol_type = other DNA
accacaaagaaccctg

SEQ ID NO: 5660 - DNA, 17 bp, synthetic construct
  source 1..17: mol_type = other DNA
caccacaaagaaccctg

SEQ ID NO: 5661 - DNA, 18 bp, synthetic construct
  source 1..18: mol_type = other DNA
acaccacaaagaaccctg

SEQ ID NO: 5662 - DNA, 19 bp, synthetic construct
  source 1..19: mol_type = other DNA
aacaccacaaagaaccctg

SEQ ID NO: 5663 - DNA, 20 bp, synthetic construct
  source 1..20: mol_type = other DNA
aaacaccacaaagaaccctg

SEQ ID NO: 5664 - DNA, 21 bp, synthetic construct
  source 1..21: mol_type = other DNA
aaaacaccacaaagaaccctg

SEQ ID NO: 5665 - DNA, 22 bp, synthetic construct
  source 1..22: mol_type = other DNA
aaaaacaccacaaagaaccctg

SEQ ID NO: 5666 - DNA, 23 bp, synthetic construct
  source 1..23: mol_type = other DNA
taaaaacaccacaaagaaccctg

SEQ ID NO: 5667 - DNA, 24 bp, synthetic construct
  source 1..24: mol_type = other DNA
ataaaaacaccacaaagaaccctg

SEQ ID NO: 5668 - DNA, 25 bp, synthetic construct
  source 1..25: mol_type = other DNA
gataaaaacaccacaaagaaccctg

SEQ ID NO: 5669 - DNA, 26 bp, synthetic construct
  source 1..26: mol_type = other DNA
agataaaaacaccacaaagaaccctg

SEQ ID NO: 5670 - DNA, 27 bp, synthetic construct
  source 1..27: mol_type = other DNA
cagataaaaacaccacaaagaaccctg

SEQ ID NO: 5671 - DNA, 28 bp, synthetic construct
  source 1..28: mol_type = other DNA
acagataaaaacaccacaaagaaccctg

SEQ ID NO: 5672 - DNA, 29 bp, synthetic construct
  source 1..29: mol_type = other DNA
cacagataaaaacaccacaaagaaccctg

SEQ ID NO: 5673 - DNA, 30 bp, synthetic construct
  source 1..30: mol_type = other DNA
gcacagataaaaacaccacaaagaaccctg

SEQ ID NO: 5674 - DNA, 31 bp, synthetic construct
  source 1..31: mol_type = other DNA
agcacagataaaaacaccacaaagaaccctg

SEQ ID NO: 5675 - DNA, 32 bp, synthetic construct
  source 1..32: mol_type = other DNA
aagcacagataaaaacaccacaaagaaccctg

SEQ ID NO: 5676 - DNA, 33 bp, synthetic construct
  source 1..33: mol_type = other DNA
gaagcacagataaaaacaccacaaagaaccctg

SEQ ID NO: 5677 - DNA, 34 bp, synthetic construct
  source 1..34: mol_type = other DNA
ggaagcacagataaaaacaccacaaagaaccctg

SEQ ID NO: 5678 - DNA, 35 bp, synthetic construct
  source 1..35: mol_type = other DNA
gggaagcacagataaaaacaccacaaagaaccctg

SEQ ID NO: 5679 - DNA, 36 bp, synthetic construct
  source 1..36: mol_type = other DNA
agggaagcacagataaaaacaccacaaagaaccctg

SEQ ID NO: 5680 - DNA, 37 bp, synthetic construct
  source 1..37: mol_type = other DNA
tagggaagcacagataaaaacaccacaaagaaccctg

SEQ ID NO: 5681 - DNA, 38 bp, synthetic construct
  source 1..38: mol_type = other DNA
atagggaagcacagataaaaacaccacaaagaaccctg

SEQ ID NO: 5682 - DNA, 39 bp, synthetic construct
  source 1..39: mol_type = other DNA
catagggaagcacagataaaaacaccacaaagaaccctg

SEQ ID NO: 5683 - DNA, 40 bp, synthetic construct
  source 1..40: mol_type = other DNA
gcatagggaagcacagataaaaacaccacaaagaaccctg

SEQ ID NO: 5684 - DNA, 10 bp, synthetic construct
  source 1..10: mol_type = other DNA
acaccacaaa

SEQ ID NO: 5685 - DNA, 11 bp, synthetic construct
  source 1..11: mol_type = other DNA
aacaccacaaa

SEQ ID NO: 5686 - DNA, 12 bp, synthetic construct
  source 1..12: mol_type = other DNA
aaacaccacaaa

SEQ ID NO: 5687 - DNA, 13 bp, synthetic construct
  source 1..13: mol_type = other DNA
aaaacaccacaaa

SEQ ID NO: 5688 - DNA, 14 bp, synthetic construct
  source 1..14: mol_type = other DNA
aaaaacaccacaaa

SEQ ID NO: 5689 - DNA, 15 bp, synthetic construct
  source 1..15: mol_type = other DNA
taaaaacaccacaaa

SEQ ID NO: 5690 - DNA, 16 bp, synthetic construct
  source 1..16: mol_type = other DNA
ataaaaacaccacaaa

SEQ ID NO: 5691 - DNA, 17 bp, synthetic construct
  source 1..17: mol_type = other DNA
gataaaaacaccacaaa

SEQ ID NO: 5692 - DNA, 18 bp, synthetic construct
  source 1..18: mol_type = other DNA
agataaaaacaccacaaa

SEQ ID NO: 5693 - DNA, 19 bp, synthetic construct
  source 1..19: mol_type = other DNA
cagataaaaacaccacaaa

SEQ ID NO: 5694 - DNA, 20 bp, synthetic construct
  source 1..20: mol_type = other DNA
acagataaaaacaccacaaa

SEQ ID NO: 5695 - DNA, 21 bp, synthetic construct
  source 1..21: mol_type = other DNA
cacagataaaaacaccacaaa

SEQ ID NO: 5696 - DNA, 22 bp, synthetic construct
  source 1..22: mol_type = other DNA
gcacagataaaaacaccacaaa

SEQ ID NO: 5697 - DNA, 23 bp, synthetic construct
  source 1..23: mol_type = other DNA
agcacagataaaaacaccacaaa

SEQ ID NO: 5698 - DNA, 24 bp, synthetic construct
  source 1..24: mol_type = other DNA
aagcacagataaaaacaccacaaa

SEQ ID NO: 5699 - DNA, 25 bp, synthetic construct
  source 1..25: mol_type = other DNA
gaagcacagataaaaacaccacaaa

SEQ ID NO: 5700 - DNA, 26 bp, synthetic construct
  source 1..26: mol_type = other DNA
ggaagcacagataaaaacaccacaaa

SEQ ID NO: 5701 - DNA, 27 bp, synthetic construct
  source 1..27: mol_type = other DNA
gggaagcacagataaaaacaccacaaa

SEQ ID NO: 5702 - DNA, 28 bp, synthetic construct
  source 1..28: mol_type = other DNA
agggaagcacagataaaaacaccacaaa

SEQ ID NO: 5703 - DNA, 29 bp, synthetic construct
  source 1..29: mol_type = other DNA
tagggaagcacagataaaaacaccacaaa

SEQ ID NO: 5704 - DNA, 30 bp, synthetic construct
  source 1..30: mol_type = other DNA
atagggaagcacagataaaaacaccacaaa

SEQ ID NO: 5705 - DNA, 31 bp, synthetic construct
  source 1..31: mol_type = other DNA
catagggaagcacagataaaaacaccacaaa

SEQ ID NO: 5706 - DNA, 32 bp, synthetic construct
  source 1..32: mol_type = other DNA
gcatagggaagcacagataaaaacaccacaaa

SEQ ID NO: 5707 - DNA, 33 bp, synthetic construct
  source 1..33: mol_type = other DNA
tgcatagggaagcacagataaaaacaccacaaa

SEQ ID NO: 5708 - DNA, 34 bp, synthetic construct
  source 1..34: mol_type = other DNA
gtgcatagggaagcacagataaaaacaccacaaa

SEQ ID NO: 5709 - DNA, 35 bp, synthetic construct
  source 1..35: mol_type = other DNA
agtgcatagggaagcacagataaaaacaccacaaa

SEQ ID NO: 5710 - DNA, 36 bp, synthetic construct
  source 1..36: mol_type = other DNA
tagtgcatagggaagcacagataaaaacaccacaaa

SEQ ID NO: 5711 - DNA, 37 bp, synthetic construct
  source 1..37: mol_type = other DNA
ttagtgcatagggaagcacagataaaaacaccacaaa

SEQ ID NO: 5712 - DNA, 38 bp, synthetic construct
  source 1..38: mol_type = other DNA
attagtgcatagggaagcacagataaaaacaccacaaa

SEQ ID NO: 5713 - DNA, 39 bp, synthetic construct
  source 1..39: mol_type = other DNA
gattagtgcatagggaagcacagataaaaacaccacaaa

SEQ ID NO: 5714 - DNA, 40 bp, synthetic construct
  source 1..40: mol_type = other DNA
tgattagtgcatagggaagcacagataaaaacaccacaaa

SEQ ID NO: 5715 - DNA, 10 bp, synthetic construct
  source 1..10: mol_type = other DNA
aacaccacaa

SEQ ID NO: 5716 - DNA, 11 bp, synthetic construct
  source 1..11: mol_type = other DNA
aaacaccacaa

SEQ ID NO: 5717 - DNA, 12 bp, synthetic construct
  source 1..12: mol_type = other DNA
aaaacaccacaa

SEQ ID NO: 5718 - DNA, 13 bp, synthetic construct
  source 1..13: mol_type = other DNA
aaaaacaccacaa

SEQ ID NO: 5719 - DNA, 14 bp, synthetic construct
  source 1..14: mol_type = other DNA
taaaaacaccacaa

SEQ ID NO: 5720 - DNA, 15 bp, synthetic construct
  source 1..15: mol_type = other DNA
ataaaaacaccacaa

SEQ ID NO: 5721 - DNA, 16 bp, synthetic construct
  source 1..16: mol_type = other DNA
gataaaaacaccacaa

SEQ ID NO: 5722 - DNA, 17 bp, synthetic construct
  source 1..17: mol_type = other DNA
agataaaaacaccacaa

SEQ ID NO: 5723 - DNA, 18 bp, synthetic construct
  source 1..18: mol_type = other DNA
cagataaaaacaccacaa

SEQ ID NO: 5724 - DNA, 19 bp, synthetic construct
  source 1..19: mol_type = other DNA
acagataaaaacaccacaa

SEQ ID NO: 5725 - DNA, 20 bp, synthetic construct
  source 1..20: mol_type = other DNA
cacagataaaaacaccacaa

SEQ ID NO: 5726 - DNA, 21 bp, synthetic construct
  source 1..21: mol_type = other DNA
gcacagataaaaacaccacaa

SEQ ID NO: 5727 - DNA, 22 bp, synthetic construct
  source 1..22: mol_type = other DNA
agcacagataaaaacaccacaa

SEQ ID NO: 5728 - DNA, 23 bp, synthetic construct
  source 1..23: mol_type = other DNA
aagcacagataaaaacaccacaa

SEQ ID NO: 5729 - DNA, 24 bp, synthetic construct
  source 1..24: mol_type = other DNA
gaagcacagataaaaacaccacaa

SEQ ID NO: 5730 - DNA, 25 bp, synthetic construct
  source 1..25: mol_type = other DNA
ggaagcacagataaaaacaccacaa

SEQ ID NO: 5731 - DNA, 26 bp, synthetic construct
  source 1..26: mol_type = other DNA
gggaagcacagataaaaacaccacaa

SEQ ID NO: 5732 - DNA, 27 bp, synthetic construct
  source 1..27: mol_type = other DNA
agggaagcacagataaaaacaccacaa

SEQ ID NO: 5733 - DNA, 28 bp, synthetic construct
  source 1..28: mol_type = other DNA
tagggaagcacagataaaaacaccacaa

SEQ ID NO: 5734 - DNA, 29 bp, synthetic construct
  source 1..29: mol_type = other DNA
atagggaagcacagataaaaacaccacaa

SEQ ID NO: 5735 - DNA, 30 bp, synthetic construct
  source 1..30: mol_type = other DNA
catagggaagcacagataaaaacaccacaa

SEQ ID NO: 5736 - DNA, 31 bp, synthetic construct
  source 1..31: mol_type = other DNA
gcatagggaagcacagataaaaacaccacaa

SEQ ID NO: 5737 - DNA, 32 bp, synthetic construct
  source 1..32: mol_type = other DNA
tgcatagggaagcacagataaaaacaccacaa

SEQ ID NO: 5738 - DNA, 33 bp, synthetic construct
  source 1..33: mol_type = other DNA
gtgcatagggaagcacagataaaaacaccacaa

SEQ ID NO: 5739 - DNA, 34 bp, synthetic construct
  source 1..34: mol_type = other DNA
agtgcatagggaagcacagataaaaacaccacaa

SEQ ID NO: 5740 - DNA, 35 bp, synthetic construct
  source 1..35: mol_type = other DNA
tagtgcatagggaagcacagataaaaacaccacaa

SEQ ID NO: 5741 - DNA, 36 bp, synthetic construct
  source 1..36: mol_type = other DNA
ttagtgcatagggaagcacagataaaaacaccacaa

SEQ ID NO: 5742 - DNA, 37 bp, synthetic construct
  source 1..37: mol_type = other DNA
attagtgcatagggaagcacagataaaaacaccacaa

SEQ ID NO: 5743 - DNA, 38 bp, synthetic construct
  source 1..38: mol_type = other DNA
gattagtgcatagggaagcacagataaaaacaccacaa

SEQ ID NO: 5744 - DNA, 39 bp, synthetic construct
  source 1..39: mol_type = other DNA
tgattagtgcatagggaagcacagataaaaacaccacaa

SEQ ID NO: 5745 - DNA, 40 bp, synthetic construct
  source 1..40: mol_type = other DNA
ttgattagtgcatagggaagcacagataaaaacaccacaa

SEQ ID NO: 5746 - DNA, 10 bp, synthetic construct
  source 1..10: mol_type = other DNA
accacaaaga

SEQ ID NO: 5747 - DNA, 11 bp, synthetic construct
  source 1..11: mol_type = other DNA
caccacaaaga

SEQ ID NO: 5748 - DNA, 12 bp, synthetic construct
  source 1..12: mol_type = other DNA
acaccacaaaga

SEQ ID NO: 5749 - DNA, 13 bp, synthetic construct
  source 1..13: mol_type = other DNA
aacaccacaaaga

SEQ ID NO: 5750 - DNA, 14 bp, synthetic construct
  source 1..14: mol_type = other DNA
aaacaccacaaaga

SEQ ID NO: 5751 - DNA, 15 bp, synthetic construct
  source 1..15: mol_type = other DNA
aaaacaccacaaaga

SEQ ID NO: 5752 - DNA, 16 bp, synthetic construct
  source 1..16: mol_type = other DNA
aaaaacaccacaaaga

SEQ ID NO: 5753 - DNA, 17 bp, synthetic construct
  source 1..17: mol_type = other DNA
taaaaacaccacaaaga

SEQ ID NO: 5754 - DNA, 18 bp, synthetic construct
  source 1..18: mol_type = other DNA
ataaaaacaccacaaaga

SEQ ID NO: 5755 - DNA, 19 bp, synthetic construct
  source 1..19: mol_type = other DNA
gataaaaacaccacaaaga

SEQ ID NO: 5756 - DNA, 20 bp, synthetic construct
  source 1..20: mol_type = other DNA
agataaaaacaccacaaaga

SEQ ID NO: 5757 - DNA, 21 bp, synthetic construct
  source 1..21: mol_type = other DNA
cagataaaaacaccacaaaga

SEQ ID NO: 5758 - DNA, 22 bp, synthetic construct
  source 1..22: mol_type = other DNA
acagataaaaacaccacaaaga

SEQ ID NO: 5759 - DNA, 23 bp, synthetic construct
  source 1..23: mol_type = other DNA
cacagataaaaacaccacaaaga

SEQ ID NO: 5760 - DNA, 24 bp, synthetic construct
  source 1..24: mol_type = other DNA
gcacagataaaaacaccacaaaga

SEQ ID NO: 5761 - DNA, 25 bp, synthetic construct
  source 1..25: mol_type = other DNA
agcacagataaaaacaccacaaaga

SEQ ID NO: 5762 - DNA, 26 bp, synthetic construct
  source 1..26: mol_type = other DNA
aagcacagataaaaacaccacaaaga

SEQ ID NO: 5763 - DNA, 27 bp, synthetic construct
  source 1..27: mol_type = other DNA
gaagcacagataaaaacaccacaaaga

SEQ ID NO: 5764 - DNA, 28 bp, synthetic construct
  source 1..28: mol_type = other DNA
ggaagcacagataaaaacaccacaaaga

SEQ ID NO: 5765 - DNA, 29 bp, synthetic construct
  source 1..29: mol_type = other DNA
gggaagcacagataaaaacaccacaaaga

SEQ ID NO: 5766 - DNA, 30 bp, synthetic construct
  source 1..30: mol_type = other DNA
agggaagcacagataaaaacaccacaaaga

SEQ ID NO: 5767 - DNA, 31 bp, synthetic construct
  source 1..31: mol_type = other DNA
tagggaagcacagataaaaacaccacaaaga

SEQ ID NO: 5768 - DNA, 32 bp, synthetic construct
  source 1..32: mol_type = other DNA
atagggaagcacagataaaaacaccacaaaga

SEQ ID NO: 5769 - DNA, 33 bp, synthetic construct
  source 1..33: mol_type = other DNA
catagggaagcacagataaaaacaccacaaaga

SEQ ID NO: 5770 - DNA, 34 bp, synthetic construct
  source 1..34: mol_type = other DNA
gcatagggaagcacagataaaaacaccacaaaga

SEQ ID NO: 5771 - DNA, 35 bp, synthetic construct
  source 1..35: mol_type = other DNA
tgcatagggaagcacagataaaaacaccacaaaga

SEQ ID NO: 5772 - DNA, 36 bp, synthetic construct
  source 1..36: mol_type = other DNA
gtgcatagggaagcacagataaaaacaccacaaaga

SEQ ID NO: 5773 - DNA, 37 bp, synthetic construct
  source 1..37: mol_type = other DNA
agtgcatagggaagcacagataaaaacaccacaaaga

SEQ ID NO: 5774 - DNA, 38 bp, synthetic construct
  source 1..38: mol_type = other DNA
tagtgcatagggaagcacagataaaaacaccacaaaga

SEQ ID NO: 5775 - DNA, 39 bp, synthetic construct
  source 1..39: mol_type = other DNA
ttagtgcatagggaagcacagataaaaacaccacaaaga

SEQ ID NO: 5776 - DNA, 40 bp, synthetic construct
  source 1..40: mol_type = other DNA
attagtgcatagggaagcacagataaaaacaccacaaaga

SEQ ID NO: 5777 - DNA, 26 bp, synthetic construct
  source 1..26: mol_type = other DNA
ttgtggtgtttttatctgtgttgccc

SEQ ID NO: 5778 - DNA, 26 bp, synthetic construct
  source 1..26: mol_type = other DNA
ttgtggtgtttttatctgtgcttccc

SEQ ID NO: 5779 - DNA, 27 bp, synthetic construct
  source 1..27: mol_type = other DNA
tttgtggtgtttttatctgtgttgccc

SEQ ID NO: 5780 - DNA, 27 bp, synthetic construct
  source 1..27: mol_type = other DNA
tttgtggtgtttttatctgtgcttccc

SEQ ID NO: 5781 - DNA, 28 bp, synthetic construct
  source 1..28: mol_type = other DNA
ctttgtggtgtttttatctgtgttgccc

SEQ ID NO: 5782 - DNA, 28 bp, synthetic construct
  source 1..28: mol_type = other DNA
ctttgtggtgtttttatctgtgcttccc

SEQ ID NO: 5783 - DNA, 29 bp, synthetic construct
  source 1..29: mol_type = other DNA
tctttgtggtgtttttatctgtgttgccc

SEQ ID NO: 5784 - DNA, 29 bp, synthetic construct
  source 1..29: mol_type = other DNA
tctttgtggtgtttttatctgtgcttccc

SEQ ID NO: 5785 - DNA, 30 bp, synthetic construct
  source 1..30: mol_type = other DNA
ttctttgtggtgtttttatctgtgcttccc

SEQ ID NO: 5786 - DNA, 30 bp, synthetic construct
  source 1..30: mol_type = other DNA
ttctttgtggtgtttttatctgtgttgccc

SEQ ID NO: 5787 - DNA, 31 bp, synthetic construct
  source 1..31: mol_type = other DNA
gttctttgtggtgtttttatctgtgcttccc

SEQ ID NO: 5788 - DNA, 31 bp, synthetic construct
  source 1..31: mol_type = other DNA
gttctttgtggtgtttttatctgtgttgccc

SEQ ID NO: 5789 - DNA, 32 bp, synthetic construct
  source 1..32: mol_type = other DNA
ggttctttgtggtgtttttatctgtgcttccc

SEQ ID NO: 5790 - DNA, 32 bp, synthetic construct
  source 1..32: mol_type = other DNA
ggttctttgtggtgtttttatctgtgttgccc

SEQ ID NO: 5791 - DNA, 33 bp, synthetic construct
  source 1..33: mol_type = other DNA
gggttctttgtggtgtttttatctgtgcttccc

SEQ ID NO: 5792 - DNA, 33 bp, synthetic construct
  source 1..33: mol_type = other DNA
gggttctttgtggtgtttttatctgtgttgccc

SEQ ID NO: 5793 - DNA, 34 bp, synthetic construct
  source 1..34: mol_type = other DNA
agggttctttgtggtgtttttatctgtgcttccc

SEQ ID NO: 5794 - DNA, 34 bp, synthetic construct
  source 1..34: mol_type = other DNA
agggttctttgtggtgtttttatctgtgttgccc

SEQ ID NO: 5795 - DNA, 35 bp, synthetic construct
  source 1..35: mol_type = other DNA
cagggttctttgtggtgtttttatctgtgcttccc

SEQ ID NO: 5796 - DNA, 35 bp, synthetic construct
  source 1..35: mol_type = other DNA
cagggttctttgtggtgtttttatctgtgttgccc

SEQ ID NO: 5797 - DNA, 36 bp, synthetic construct
  source 1..36: mol_type = other DNA
tcagggttctttgtggtgtttttatctgtgttgccc

SEQ ID NO: 5798 - DNA, 36 bp, synthetic construct
  source 1..36: mol_type = other DNA
tcagggttctttgtggtgtttttatctgtgcttccc

SEQ ID NO: 5799 - DNA, 37 bp, synthetic construct
  source 1..37: mol_type = other DNA
ctcagggttctttgtggtgtttttatctgtgttgccc

SEQ ID NO: 5800 - DNA, 37 bp, synthetic construct
  source 1..37: mol_type = other DNA
ctcagggttctttgtggtgtttttatctgtgcttccc

SEQ ID NO: 5801 - DNA, 38 bp, synthetic construct
  source 1..38: mol_type = other DNA
tctcagggttctttgtggtgtttttatctgtgttgccc

SEQ ID NO: 5802 - DNA, 38 bp, synthetic construct
  source 1..38: mol_type = other DNA
tctcagggttctttgtggtgtttttatctgtgcttccc

SEQ ID NO: 5803 - DNA, 39 bp, synthetic construct
  source 1..39: mol_type = other DNA
ttctcagggttctttgtggtgtttttatctgtgcttccc

SEQ ID NO: 5804 - DNA, 39 bp, synthetic construct
  source 1..39: mol_type = other DNA
ttctcagggttctttgtggtgtttttatctgtgttgccc

SEQ ID NO: 5805 - DNA, 40 bp, synthetic construct
  source 1..40: mol_type = other DNA
cttctcagggttctttgtggtgtttttatctgtgttgccc

SEQ ID NO: 5806 - DNA, 40 bp, synthetic construct
  source 1..40: mol_type = other DNA
cttctcagggttctttgtggtgtttttatctgtgcttccc

SEQ ID NO: 5807 - DNA, 25 bp, synthetic construct
  source 1..25: mol_type = other DNA
ttgtggtgtttttatctgtgcttcc

SEQ ID NO: 5808 - DNA, 26 bp, synthetic construct
  source 1..26: mol_type = other DNA
tttgtggtgtttttatctgtgcttcc

SEQ ID NO: 5809 - DNA, 27 bp, synthetic construct
  source 1..27: mol_type = other DNA
ctttgtggtgtttttatctgtgcttcc

SEQ ID NO: 5810 - DNA, 28 bp, synthetic construct
  source 1..28: mol_type = other DNA
tctttgtggtgtttttatctgtgcttcc

SEQ ID NO: 5811 - DNA, 29 bp, synthetic construct
  source 1..29: mol_type = other DNA
ttctttgtggtgtttttatctgtgcttcc

SEQ ID NO: 5812 - DNA, 30 bp, synthetic construct
  source 1..30: mol_type = other DNA
gttctttgtggtgtttttatctgtgcttcc

SEQ ID NO: 5813 - DNA, 31 bp, synthetic construct
  source 1..31: mol_type = other DNA
ggttctttgtggtgtttttatctgtgcttcc

SEQ ID NO: 5814 - DNA, 32 bp, synthetic construct
  source 1..32: mol_type = other DNA
gggttctttgtggtgtttttatctgtgcttcc

SEQ ID NO: 5815 - DNA, 33 bp, synthetic construct
  source 1..33: mol_type = other DNA
agggttctttgtggtgtttttatctgtgcttcc

SEQ ID NO: 5816 - DNA, 34 bp, synthetic construct
  source 1..34: mol_type = other DNA
cagggttctttgtggtgtttttatctgtgcttcc

SEQ ID NO: 5817 - DNA, 35 bp, synthetic construct
  source 1..35: mol_type = other DNA
tcagggttctttgtggtgtttttatctgtgcttcc

SEQ ID NO: 5818 - DNA, 36 bp, synthetic construct
  source 1..36: mol_type = other DNA
ctcagggttctttgtggtgtttttatctgtgcttcc

SEQ ID NO: 5819 - DNA, 37 bp, synthetic construct
  source 1..37: mol_type = other DNA
tctcagggttctttgtggtgtttttatctgtgcttcc

SEQ ID NO: 5820 - DNA, 38 bp, synthetic construct
  source 1..38: mol_type = other DNA
ttctcagggttctttgtggtgtttttatctgtgcttcc

SEQ ID NO: 5821 - DNA, 39 bp, synthetic construct
  source 1..39: mol_type = other DNA
cttctcagggttctttgtggtgtttttatctgtgcttcc

SEQ ID NO: 5822 - DNA, 40 bp, synthetic construct
  source 1..40: mol_type = other DNA
tcttctcagggttctttgtggtgtttttatctgtgcttcc

SEQ ID NO: 5823 - DNA, 31 bp, synthetic construct
  source 1..31: mol_type = other DNA
ttgtggtgtttttatctgtgcttccctatgc

SEQ ID NO: 5824 - DNA, 31 bp, synthetic construct
  source 1..31: mol_type = other DNA
ttgtggtgtttttatctgtgcttccttatgc

SEQ ID NO: 5825 - DNA, 32 bp, synthetic construct
  source 1..32: mol_type = other DNA
tttgtggtgtttttatctgtgcttccttatgc

SEQ ID NO: 5826 - DNA, 32 bp, synthetic construct
  source 1..32: mol_type = other DNA
tttgtggtgtttttatctgtgcttccctatgc

SEQ ID NO: 5827 - DNA, 33 bp, synthetic construct
  source 1..33: mol_type = other DNA
ctttgtggtgtttttatctgtgcttccctatgc

SEQ ID NO: 5828 - DNA, 33 bp, synthetic construct
  source 1..33: mol_type = other DNA
ctttgtggtgtttttatctgtgcttccttatgc

SEQ ID NO: 5829 - DNA, 34 bp, synthetic construct
  source 1..34: mol_type = other DNA
tctttgtggtgtttttatctgtgcttccctatgc

SEQ ID NO: 5830 - DNA, 34 bp, synthetic construct
  source 1..34: mol_type = other DNA
tctttgtggtgtttttatctgtgcttccttatgc

SEQ ID NO: 5831 - DNA, 35 bp, synthetic construct
  source 1..35: mol_type = other DNA
ttctttgtggtgtttttatctgtgcttccttatgc

SEQ ID NO: 5832 - DNA, 35 bp, synthetic construct
  source 1..35: mol_type = other DNA
ttctttgtggtgtttttatctgtgcttccctatgc

SEQ ID NO: 5833 - DNA, 36 bp, synthetic construct
  source 1..36: mol_type = other DNA
gttctttgtggtgtttttatctgtgcttccctatgc

SEQ ID NO: 5834 - DNA, 36 bp, synthetic construct
  source 1..36: mol_type = other DNA
gttctttgtggtgtttttatctgtgcttccttatgc

SEQ ID NO: 5835 - DNA, 37 bp, synthetic construct
  source 1..37: mol_type = other DNA
ggttctttgtggtgtttttatctgtgcttccctatgc

SEQ ID NO: 5836 - DNA, 37 bp, synthetic construct
  source 1..37: mol_type = other DNA
ggttctttgtggtgtttttatctgtgcttccttatgc

SEQ ID NO: 5837 - DNA, 38 bp, synthetic construct
  source 1..38: mol_type = other DNA
gggttctttgtggtgtttttatctgtgcttccttatgc

SEQ ID NO: 5838 - DNA, 38 bp, synthetic construct
  source 1..38: mol_type = other DNA
gggttctttgtggtgtttttatctgtgcttccctatgc

SEQ ID NO: 5839 - DNA, 39 bp, synthetic construct
  source 1..39: mol_type = other DNA
agggttctttgtggtgtttttatctgtgcttccttatgc

SEQ ID NO: 5840 - DNA, 39 bp, synthetic construct
  source 1..39: mol_type = other DNA
agggttctttgtggtgtttttatctgtgcttccctatgc

SEQ ID NO: 5841 - DNA, 40 bp, synthetic construct
  source 1..40: mol_type = other DNA
cagggttctttgtggtgtttttatctgtgcttccttatgc

SEQ ID NO: 5842 - DNA, 40 bp, synthetic construct
  source 1..40: mol_type = other DNA
cagggttctttgtggtgtttttatctgtgcttccctatgc

SEQ ID NO: 5843 - DNA, 10 bp, synthetic construct
  source 1..10: mol_type = other DNA
gttctttgtg

SEQ ID NO: 5844 - DNA, 11 bp, synthetic construct
  source 1..11: mol_type = other DNA
ggttctttgtg

SEQ ID NO: 5845 - DNA, 12 bp, synthetic construct
  source 1..12: mol_type = other DNA
gggttctttgtg

SEQ ID NO: 5846 - DNA, 13 bp, synthetic construct
  source 1..13: mol_type = other DNA
agggttctttgtg

SEQ ID NO: 5847 - DNA, 14 bp, synthetic construct
  source 1..14: mol_type = other DNA
cagggttctttgtg

SEQ ID NO: 5848 - DNA, 15 bp, synthetic construct
  source 1..15: mol_type = other DNA
tcagggttctttgtg

SEQ ID NO: 5849 - DNA, 16 bp, synthetic construct
  source 1..16: mol_type = other DNA
ctcagggttctttgtg

SEQ ID NO: 5850 - DNA, 17 bp, synthetic construct
  source 1..17: mol_type = other DNA
tctcagggttctttgtg

SEQ ID NO: 5851 - DNA, 18 bp, synthetic construct
  source 1..18: mol_type = other DNA
ttctcagggttctttgtg

SEQ ID NO: 5852 - DNA, 19 bp, synthetic construct
  source 1..19: mol_type = other DNA
cttctcagggttctttgtg

SEQ ID NO: 5853 - DNA, 20 bp, synthetic construct
  source 1..20: mol_type = other DNA
tcttctcagggttctttgtg

SEQ ID NO: 5854 - DNA, 21 bp, synthetic construct
  source 1..21: mol_type = other DNA
ttcttctcagggttctttgtg

SEQ ID NO: 5855 - DNA, 22 bp, synthetic construct
  source 1..22: mol_type = other DNA
cttcttctcagggttctttgtg

SEQ ID NO: 5856 - DNA, 23 bp, synthetic construct
  source 1..23: mol_type = other DNA
tcttcttctcagggttctttgtg

SEQ ID NO: 5857 - DNA, 24 bp, synthetic construct
  source 1..24: mol_type = other DNA
ttcttcttctcagggttctttgtg

SEQ ID NO: 5858 - DNA, 25 bp, synthetic construct
  source 1..25: mol_type = other DNA
cttcttcttctcagggttctttgtg

SEQ ID NO: 5859 - DNA, 26 bp, synthetic construct
  source 1..26: mol_type = other DNA
ccttcttcttctcagggttctttgtg

SEQ ID NO: 5860 - DNA, 27 bp, synthetic construct
  source 1..27: mol_type = other DNA
gccttcttcttctcagggttctttgtg

SEQ ID NO: 5861 - DNA, 28 bp, synthetic construct
  source 1..28: mol_type = other DNA
agccttcttcttctcagggttctttgtg

SEQ ID NO: 5862 - DNA, 29 bp, synthetic construct
  source 1..29: mol_type = other DNA
cagccttcttcttctcagggttctttgtg

SEQ ID NO: 5863 - DNA, 30 bp, synthetic construct
  source 1..30: mol_type = other DNA
tcagccttcttcttctcagggttctttgtg

SEQ ID NO: 5864 - DNA, 31 bp, synthetic construct
  source 1..31: mol_type = other DNA
ctcagccttcttcttctcagggttctttgtg

SEQ ID NO: 5865 - DNA, 32 bp, synthetic construct
  source 1..32: mol_type = other DNA
gctcagccttcttcttctcagggttctttgtg

SEQ ID NO: 5866 - DNA, 33 bp, synthetic construct
  source 1..33: mol_type = other DNA
agctcagccttcttcttctcagggttctttgtg

SEQ ID NO: 5867 - DNA, 34 bp, synthetic construct
  source 1..34: mol_type = other DNA
tagctcagccttcttcttctcagggttctttgtg

SEQ ID NO: 5868 - DNA, 35 bp, synthetic construct
  source 1..35: mol_type = other DNA
atagctcagccttcttcttctcagggttctttgtg

SEQ ID NO: 5869 - DNA, 36 bp, synthetic construct
  source 1..36: mol_type = other DNA
aatagctcagccttcttcttctcagggttctttgtg

SEQ ID NO: 5870 - DNA, 37 bp, synthetic construct
  source 1..37: mol_type = other DNA
caatagctcagccttcttcttctcagggttctttgtg

SEQ ID NO: 5871 - DNA, 38 bp, synthetic construct
  source 1..38: mol_type = other DNA
tcaatagctcagccttcttcttctcagggttctttgtg

SEQ ID NO: 5872 - DNA, 39 bp, synthetic construct
  source 1..39: mol_type = other DNA
ttcaatagctcagccttcttcttctcagggttctttgtg

SEQ ID NO: 5873 - DNA, 40 bp, synthetic construct
  source 1..40: mol_type = other DNA
cttcaatagctcagccttcttcttctcagggttctttgtg

SEQ ID NO: 5874 - DNA, 14 bp, synthetic construct
  source 1..14: mol_type = other DNA
caaagaaccctgag

SEQ ID NO: 5875 - DNA, 15 bp, synthetic construct
  source 1..15: mol_type = other DNA
acaaagaaccctgag

SEQ ID NO: 5876 - DNA, 16 bp, synthetic construct
  source 1..16: mol_type = other DNA
cacaaagaaccctgag

SEQ ID NO: 5877 - DNA, 17 bp, synthetic construct
  source 1..17: mol_type = other DNA
ccacaaagaaccctgag

SEQ ID NO: 5878 - DNA, 18 bp, synthetic construct
  source 1..18: mol_type = other DNA
accacaaagaaccctgag

SEQ ID NO: 5879 - DNA, 19 bp, synthetic construct
  source 1..19: mol_type = other DNA
caccacaaagaaccctgag

SEQ ID NO: 5880 - DNA, 20 bp, synthetic construct
  source 1..20: mol_type = other DNA
acaccacaaagaaccctgag

SEQ ID NO: 5881 - DNA, 21 bp, synthetic construct
  source 1..21: mol_type = other DNA
aacaccacaaagaaccctgag

SEQ ID NO: 5882 - DNA, 22 bp, synthetic construct
  source 1..22: mol_type = other DNA
aaacaccacaaagaaccctgag

SEQ ID NO: 5883 - DNA, 23 bp, synthetic construct
  source 1..23: mol_type = other DNA
aaaacaccacaaagaaccctgag

SEQ ID NO: 5884 - DNA, 24 bp, synthetic construct
  source 1..24: mol_type = other DNA
aaaaacaccacaaagaaccctgag

SEQ ID NO: 5885 - DNA, 25 bp, synthetic construct
  source 1..25: mol_type = other DNA
taaaaacaccacaaagaaccctgag

SEQ ID NO: 5886 - DNA, 26 bp, synthetic construct
  source 1..26: mol_type = other DNA
ataaaaacaccacaaagaaccctgag

SEQ ID NO: 5887 - DNA, 27 bp, synthetic construct
  source 1..27: mol_type = other DNA
gataaaaacaccacaaagaaccctgag

SEQ ID NO: 5888 - DNA, 28 bp, synthetic construct
  source 1..28: mol_type = other DNA
agataaaaacaccacaaagaaccctgag

SEQ ID NO: 5889 - DNA, 29 bp, synthetic construct
  source 1..29: mol_type = other DNA
cagataaaaacaccacaaagaaccctgag

SEQ ID NO: 5890 - DNA, 30 bp, synthetic construct
  source 1..30: mol_type = other DNA
acagataaaaacaccacaaagaaccctgag

SEQ ID NO: 5891 - DNA, 31 bp, synthetic construct
  source 1..31: mol_type = other DNA
cacagataaaaacaccacaaagaaccctgag

SEQ ID NO: 5892 - DNA, 32 bp, synthetic construct
  source 1..32: mol_type = other DNA
gcacagataaaaacaccacaaagaaccctgag

SEQ ID NO: 5893 - DNA, 33 bp, synthetic construct
  source 1..33: mol_type = other DNA
agcacagataaaaacaccacaaagaaccctgag

SEQ ID NO: 5894 - DNA, 34 bp, synthetic construct
  source 1..34: mol_type = other DNA
aagcacagataaaaacaccacaaagaaccctgag

SEQ ID NO: 5895 - DNA, 35 bp, synthetic construct
  source 1..35: mol_type = other DNA
gaagcacagataaaaacaccacaaagaaccctgag

SEQ ID NO: 5896 - DNA, 36 bp, synthetic construct
  source 1..36: mol_type = other DNA
ggaagcacagataaaaacaccacaaagaaccctgag

SEQ ID NO: 5897 - DNA, 37 bp, synthetic construct
  source 1..37: mol_type = other DNA
gggaagcacagataaaaacaccacaaagaaccctgag

SEQ ID NO: 5898 - DNA, 38 bp, synthetic construct
  source 1..38: mol_type = other DNA
agggaagcacagataaaaacaccacaaagaaccctgag

SEQ ID NO: 5899 - DNA, 39 bp, synthetic construct
  source 1..39: mol_type = other DNA
tagggaagcacagataaaaacaccacaaagaaccctgag

SEQ ID NO: 5900 - DNA, 40 bp, synthetic construct
  source 1..40: mol_type = other DNA
atagggaagcacagataaaaacaccacaaagaaccctgag

SEQ ID NO: 5901 - DNA, 38 bp, synthetic construct
  source 1..38: mol_type = other DNA
ttgtggtgtttttatctgtgcttccctatgcattgatc

SEQ ID NO: 5902 - DNA, 38 bp, synthetic construct
  source 1..38: mol_type = other DNA
ttgtggtgtttttatctgtgcttccctatgcactaatc

SEQ ID NO: 5903 - DNA, 39 bp, synthetic construct
  source 1..39: mol_type = other DNA
tttgtggtgtttttatctgtgcttccctatgcactaatc

SEQ ID NO: 5904 - DNA, 39 bp, synthetic construct
  source 1..39: mol_type = other DNA
tttgtggtgtttttatctgtgcttccctatgcattgatc

SEQ ID NO: 5905 - DNA, 40 bp, synthetic construct
  source 1..40: mol_type = other DNA
ctttgtggtgtttttatctgtgcttccctatgcattgatc

SEQ ID NO: 5906 - DNA, 40 bp, synthetic construct
  source 1..40: mol_type = other DNA
ctttgtggtgtttttatctgtgcttccctatgcactaatc

SEQ ID NO: 5907 - DNA, 37 bp, synthetic construct
  source 1..37: mol_type = other DNA
ttgtggtgtttttatctgtgcttccctatgcactaat

SEQ ID NO: 5908 - DNA, 38 bp, synthetic construct
  source 1..38: mol_type = other DNA
tttgtggtgtttttatctgtgcttccctatgcactaat

SEQ ID NO: 5909 - DNA, 39 bp, synthetic construct
  source 1..39: mol_type = other DNA
ctttgtggtgtttttatctgtgcttccctatgcactaat

SEQ ID NO: 5910 - DNA, 40 bp, synthetic construct
  source 1..40: mol_type = other DNA
tctttgtggtgtttttatctgtgcttccctatgcactaat

SEQ ID NO: 5911 - DNA, 30 bp, synthetic construct
  source 1..30: mol_type = other DNA
caaagaaccctgagaagaagaaggctgagc

SEQ ID NO: 5912 - DNA, 30 bp, synthetic construct
  source 1..30: mol_type = other DNA
caaagaaccctgagaagaagaaggcgctgc

SEQ ID NO: 5913 - DNA, 31 bp, synthetic construct
  source 1..31: mol_type = other DNA
acaaagaaccctgagaagaagaaggctgagc

SEQ ID NO: 5914 - DNA, 31 bp, synthetic construct
  source 1..31: mol_type = other DNA
acaaagaaccctgagaagaagaaggcgctgc

SEQ ID NO: 5915 - DNA, 32 bp, synthetic construct
  source 1..32: mol_type = other DNA
cacaaagaaccctgagaagaagaaggctgagc

SEQ ID NO: 5916 - DNA, 32 bp, synthetic construct
  source 1..32: mol_type = other DNA
cacaaagaaccctgagaagaagaaggcgctgc

SEQ ID NO: 5917 - DNA, 33 bp, synthetic construct
  source 1..33: mol_type = other DNA
ccacaaagaaccctgagaagaagaaggcgctgc

SEQ ID NO: 5918 - DNA, 33 bp, synthetic construct
  source 1..33: mol_type = other DNA
ccacaaagaaccctgagaagaagaaggctgagc

SEQ ID NO: 5919 - DNA, 34 bp, synthetic construct
  source 1..34: mol_type = other DNA
accacaaagaaccctgagaagaagaaggcgctgc

SEQ ID NO: 5920 - DNA, 34 bp, synthetic construct
  source 1..34: mol_type = other DNA
accacaaagaaccctgagaagaagaaggctgagc

SEQ ID NO: 5921 - DNA, 35 bp, synthetic construct
  source 1..35: mol_type = other DNA
caccacaaagaaccctgagaagaagaaggcgctgc

SEQ ID NO: 5922 - DNA, 35 bp, synthetic construct
  source 1..35: mol_type = other DNA
caccacaaagaaccctgagaagaagaaggctgagc

SEQ ID NO: 5923 - DNA, 36 bp, synthetic construct
  source 1..36: mol_type = other DNA
acaccacaaagaaccctgagaagaagaaggcgctgc

SEQ ID NO: 5924 - DNA, 36 bp, synthetic construct
  source 1..36: mol_type = other DNA
acaccacaaagaaccctgagaagaagaaggctgagc

SEQ ID NO: 5925 - DNA, 37 bp, synthetic construct
  source 1..37: mol_type = other DNA
aacaccacaaagaaccctgagaagaagaaggcgctgc

SEQ ID NO: 5926 - DNA, 37 bp, synthetic construct
  source 1..37: mol_type = other DNA
aacaccacaaagaaccctgagaagaagaaggctgagc

SEQ ID NO: 5927 - DNA, 38 bp, synthetic construct
  source 1..38: mol_type = other DNA
aaacaccacaaagaaccctgagaagaagaaggctgagc

SEQ ID NO: 5928 - DNA, 38 bp, synthetic construct
  source 1..38: mol_type = other DNA
aaacaccacaaagaaccctgagaagaagaaggcgctgc

SEQ ID NO: 5929 - DNA, 39 bp, synthetic construct
  source 1..39: mol_type = other DNA
aaaacaccacaaagaaccctgagaagaagaaggcgctgc

SEQ ID NO: 5930 - DNA, 39 bp, synthetic construct
  source 1..39: mol_type = other DNA
aaaacaccacaaagaaccctgagaagaagaaggctgagc

SEQ ID NO: 5931 - DNA, 40 bp, synthetic construct
  source 1..40: mol_type = other DNA
aaaaacaccacaaagaaccctgagaagaagaaggctgagc

SEQ ID NO: 5932 - DNA, 40 bp, synthetic construct
  source 1..40: mol_type = other DNA
aaaaacaccacaaagaaccctgagaagaagaaggcgctgc

SEQ ID NO: 5933 - DNA, 29 bp, synthetic construct
  source 1..29: mol_type = other DNA
caaagaaccctgagaagaagaaggctgag

SEQ ID NO: 5934 - DNA, 30 bp, synthetic construct
  source 1..30: mol_type = other DNA
acaaagaaccctgagaagaagaaggctgag

SEQ ID NO: 5935 - DNA, 31 bp, synthetic construct
  source 1..31: mol_type = other DNA
cacaaagaaccctgagaagaagaaggctgag

SEQ ID NO: 5936 - DNA, 32 bp, synthetic construct
  source 1..32: mol_type = other DNA
ccacaaagaaccctgagaagaagaaggctgag

SEQ ID NO: 5937 - DNA, 33 bp, synthetic construct
  source 1..33: mol_type = other DNA
accacaaagaaccctgagaagaagaaggctgag

SEQ ID NO: 5938 - DNA, 34 bp, synthetic construct
  source 1..34: mol_type = other DNA
caccacaaagaaccctgagaagaagaaggctgag

SEQ ID NO: 5939 - DNA, 35 bp, synthetic construct
  source 1..35: mol_type = other DNA
acaccacaaagaaccctgagaagaagaaggctgag

SEQ ID NO: 5940 - DNA, 36 bp, synthetic construct
  source 1..36: mol_type = other DNA
aacaccacaaagaaccctgagaagaagaaggctgag

SEQ ID NO: 5941 - DNA, 37 bp, synthetic construct
  source 1..37: mol_type = other DNA
aaacaccacaaagaaccctgagaagaagaaggctgag

SEQ ID NO: 5942 - DNA, 38 bp, synthetic construct
  source 1..38: mol_type = other DNA
aaaacaccacaaagaaccctgagaagaagaaggctgag

SEQ ID NO: 5943 - DNA, 39 bp, synthetic construct
  source 1..39: mol_type = other DNA
aaaaacaccacaaagaaccctgagaagaagaaggctgag

SEQ ID NO: 5944 - DNA, 40 bp, synthetic construct
  source 1..40: mol_type = other DNA
taaaaacaccacaaagaaccctgagaagaagaaggctgag

SEQ ID NO: 5945 - DNA, 28 bp, synthetic construct
  source 1..28: mol_type = other DNA
ttgtggtgtttttatctgtgcttcccta

SEQ ID NO: 5946 - DNA, 29 bp, synthetic construct
  source 1..29: mol_type = other DNA
tttgtggtgtttttatctgtgcttcccta

SEQ ID NO: 5947 - DNA, 30 bp, synthetic construct
  source 1..30: mol_type = other DNA
ctttgtggtgtttttatctgtgcttcccta

SEQ ID NO: 5948 - DNA, 31 bp, synthetic construct
  source 1..31: mol_type = other DNA
tctttgtggtgtttttatctgtgcttcccta

SEQ ID NO: 5949 - DNA, 32 bp, synthetic construct
  source 1..32: mol_type = other DNA
ttctttgtggtgtttttatctgtgcttcccta

SEQ ID NO: 5950 - DNA, 33 bp, synthetic construct
  source 1..33: mol_type = other DNA
gttctttgtggtgtttttatctgtgcttcccta

SEQ ID NO: 5951 - DNA, 34 bp, synthetic construct
  source 1..34: mol_type = other DNA
ggttctttgtggtgtttttatctgtgcttcccta

SEQ ID NO: 5952 - DNA, 35 bp, synthetic construct
  source 1..35: mol_type = other DNA
gggttctttgtggtgtttttatctgtgcttcccta

SEQ ID NO: 5953 - DNA, 36 bp, synthetic construct
  source 1..36: mol_type = other DNA
agggttctttgtggtgtttttatctgtgcttcccta

SEQ ID NO: 5954 - DNA, 37 bp, synthetic construct
  source 1..37: mol_type = other DNA
cagggttctttgtggtgtttttatctgtgcttcccta

SEQ ID NO: 5955 - DNA, 38 bp, synthetic construct
  source 1..38: mol_type = other DNA
tcagggttctttgtggtgtttttatctgtgcttcccta

SEQ ID NO: 5956 - DNA, 39 bp, synthetic construct
  source 1..39: mol_type = other DNA
ctcagggttctttgtggtgtttttatctgtgcttcccta

SEQ ID NO: 5957 - DNA, 40 bp, synthetic construct
  source 1..40: mol_type = other DNA
tctcagggttctttgtggtgtttttatctgtgcttcccta

SEQ ID NO: 5958 - DNA, 20 bp, synthetic construct
  source 1..20: mol_type = other DNA
ttgtggtgtttttatctgtg

SEQ ID NO: 5959 - DNA, 21 bp, synthetic construct
  source 1..21: mol_type = other DNA
tttgtggtgtttttatctgtg

SEQ ID NO: 5960 - DNA, 22 bp, synthetic construct
  source 1..22: mol_type = other DNA
ctttgtggtgtttttatctgtg

SEQ ID NO: 5961 - DNA, 23 bp, synthetic construct
  source 1..23: mol_type = other DNA
tctttgtggtgtttttatctgtg

SEQ ID NO: 5962 - DNA, 24 bp, synthetic construct
  source 1..24: mol_type = other DNA
ttctttgtggtgtttttatctgtg

SEQ ID NO: 5963 - DNA, 25 bp, synthetic construct
  source 1..25: mol_type = other DNA
gttctttgtggtgtttttatctgtg

SEQ ID NO: 5964 - DNA, 26 bp, synthetic construct
  source 1..26: mol_type = other DNA
ggttctttgtggtgtttttatctgtg

SEQ ID NO: 5965 - DNA, 27 bp, synthetic construct
  source 1..27: mol_type = other DNA
gggttctttgtggtgtttttatctgtg

SEQ ID NO: 5966 - DNA, 28 bp, synthetic construct
  source 1..28: mol_type = other DNA
agggttctttgtggtgtttttatctgtg

SEQ ID NO: 5967 - DNA, 29 bp, synthetic construct
  source 1..29: mol_type = other DNA
cagggttctttgtggtgtttttatctgtg

SEQ ID NO: 5968 - DNA, 30 bp, synthetic construct
  source 1..30: mol_type = other DNA
tcagggttctttgtggtgtttttatctgtg

SEQ ID NO: 5969 - DNA, 31 bp, synthetic construct
  source 1..31: mol_type = other DNA
ctcagggttctttgtggtgtttttatctgtg

SEQ ID NO: 5970 - DNA, 32 bp, synthetic construct
  source 1..32: mol_type = other DNA
tctcagggttctttgtggtgtttttatctgtg

SEQ ID NO: 5971 - DNA, 33 bp, synthetic construct
  source 1..33: mol_type = other DNA
ttctcagggttctttgtggtgtttttatctgtg

SEQ ID NO: 5972 - DNA, 34 bp, synthetic construct
  source 1..34: mol_type = other DNA
cttctcagggttctttgtggtgtttttatctgtg

SEQ ID NO: 5973 - DNA, 35 bp, synthetic construct
  source 1..35: mol_type = other DNA
tcttctcagggttctttgtggtgtttttatctgtg

SEQ ID NO: 5974 - DNA, 36 bp, synthetic construct
  source 1..36: mol_type = other DNA
ttcttctcagggttctttgtggtgtttttatctgtg

SEQ ID NO: 5975 - DNA, 37 bp, synthetic construct
  source 1..37: mol_type = other DNA
cttcttctcagggttctttgtggtgtttttatctgtg

SEQ ID NO: 5976 - DNA, 38 bp, synthetic construct
  source 1..38: mol_type = other DNA
tcttcttctcagggttctttgtggtgtttttatctgtg

SEQ ID NO: 5977 - DNA, 39 bp, synthetic construct
  source 1..39: mol_type = other DNA
ttcttcttctcagggttctttgtggtgtttttatctgtg

SEQ ID NO: 5978 - DNA, 40 bp, synthetic construct
  source 1..40: mol_type = other DNA
cttcttcttctcagggttctttgtggtgtttttatctgtg

SEQ ID NO: 5979 - DNA, 29 bp, synthetic construct
  source 1..29: mol_type = other DNA
ttgtggtgtttttatctgtgcttccctat

SEQ ID NO: 5980 - DNA, 30 bp, synthetic construct
  source 1..30: mol_type = other DNA
tttgtggtgtttttatctgtgcttccctat

SEQ ID NO: 5981 - DNA, 31 bp, synthetic construct
  source 1..31: mol_type = other DNA
ctttgtggtgtttttatctgtgcttccctat

SEQ ID NO: 5982 - DNA, 32 bp, synthetic construct
  source 1..32: mol_type = other DNA
tctttgtggtgtttttatctgtgcttccctat

SEQ ID NO: 5983 - DNA, 33 bp, synthetic construct
  source 1..33: mol_type = other DNA
ttctttgtggtgtttttatctgtgcttccctat

SEQ ID NO: 5984 - DNA, 34 bp, synthetic construct
  source 1..34: mol_type = other DNA
gttctttgtggtgtttttatctgtgcttccctat

SEQ ID NO: 5985 - DNA, 35 bp, synthetic construct
  source 1..35: mol_type = other DNA
ggttctttgtggtgtttttatctgtgcttccctat

SEQ ID NO: 5986 - DNA, 36 bp, synthetic construct
  source 1..36: mol_type = other DNA
gggttctttgtggtgtttttatctgtgcttccctat

SEQ ID NO: 5987 - DNA, 37 bp, synthetic construct
  source 1..37: mol_type = other DNA
agggttctttgtggtgtttttatctgtgcttccctat

SEQ ID NO: 5988 - DNA, 38 bp, synthetic construct
  source 1..38: mol_type = other DNA
cagggttctttgtggtgtttttatctgtgcttccctat

SEQ ID NO: 5989 - DNA, 39 bp, synthetic construct
  source 1..39: mol_type = other DNA
tcagggttctttgtggtgtttttatctgtgcttccctat

SEQ ID NO: 5990 - DNA, 40 bp, synthetic construct
  source 1..40: mol_type = other DNA
ctcagggttctttgtggtgtttttatctgtgcttccctat

SEQ ID NO: 5991 - DNA, 10 bp, synthetic construct
  source 1..10: mol_type = other DNA
caccacaaag

SEQ ID NO: 5992 - DNA, 11 bp, synthetic construct
  source 1..11: mol_type = other DNA
acaccacaaag

SEQ ID NO: 5993 - DNA, 12 bp, synthetic construct
  source 1..12: mol_type = other DNA
aacaccacaaag

SEQ ID NO: 5994 - DNA, 13 bp, synthetic construct
  source 1..13: mol_type = other DNA
aaacaccacaaag

SEQ ID NO: 5995 - DNA, 14 bp, synthetic construct
  source 1..14: mol_type = other DNA
aaaacaccacaaag

SEQ ID NO: 5996 - DNA, 15 bp, synthetic construct
  source 1..15: mol_type = other DNA
aaaaacaccacaaag

SEQ ID NO: 5997 - DNA, 16 bp, synthetic construct
  source 1..16: mol_type = other DNA
taaaaacaccacaaag

SEQ ID NO: 5998 - DNA, 17 bp, synthetic construct
  source 1..17: mol_type = other DNA
ataaaaacaccacaaag

SEQ ID NO: 5999 - DNA, 18 bp, synthetic construct
  source 1..18: mol_type = other DNA
gataaaaacaccacaaag

SEQ ID NO: 6000 - DNA, 19 bp, synthetic construct
  source 1..19: mol_type = other DNA
agataaaaacaccacaaag

SEQ ID NO: 6001 - DNA, 20 bp, synthetic construct
  source 1..20: mol_type = other DNA
cagataaaaacaccacaaag

SEQ ID NO: 6002 - DNA, 21 bp, synthetic construct
  source 1..21: mol_type = other DNA
acagataaaaacaccacaaag

SEQ ID NO: 6003 - DNA, 22 bp, synthetic construct
  source 1..22: mol_type = other DNA
cacagataaaaacaccacaaag

SEQ ID NO: 6004 - DNA, 23 bp, synthetic construct
  source 1..23: mol_type = other DNA
gcacagataaaaacaccacaaag

SEQ ID NO: 6005 - DNA, 24 bp, synthetic construct
  source 1..24: mol_type = other DNA
agcacagataaaaacaccacaaag

SEQ ID NO: 6006 - DNA, 25 bp, synthetic construct
  source 1..25: mol_type = other DNA
aagcacagataaaaacaccacaaag

SEQ ID NO: 6007 - DNA, 26 bp, synthetic construct
  source 1..26: mol_type = other DNA
gaagcacagataaaaacaccacaaag

SEQ ID NO: 6008 - DNA, 27 bp, synthetic construct
  source 1..27: mol_type = other DNA
ggaagcacagataaaaacaccacaaag

SEQ ID NO: 6009 - DNA, 28 bp, synthetic construct
  source 1..28: mol_type = other DNA
gggaagcacagataaaaacaccacaaag

SEQ ID NO: 6010 - DNA, 29 bp, synthetic construct
  source 1..29: mol_type = other DNA
agggaagcacagataaaaacaccacaaag

SEQ ID NO: 6011 - DNA, 30 bp, synthetic construct
  source 1..30: mol_type = other DNA
tagggaagcacagataaaaacaccacaaag

SEQ ID NO: 6012 - DNA, 31 bp, synthetic construct
  source 1..31: mol_type = other DNA
atagggaagcacagataaaaacaccacaaag

SEQ ID NO: 6013 - DNA, 32 bp, synthetic construct
  source 1..32: mol_type = other DNA
catagggaagcacagataaaaacaccacaaag

SEQ ID NO: 6014 - DNA, 33 bp, synthetic construct
  source 1..33: mol_type = other DNA
gcatagggaagcacagataaaaacaccacaaag

SEQ ID NO: 6015 - DNA, 34 bp, synthetic construct
  source 1..34: mol_type = other DNA
tgcatagggaagcacagataaaaacaccacaaag

SEQ ID NO: 6016 - DNA, 35 bp, synthetic construct
  source 1..35: mol_type = other DNA
gtgcatagggaagcacagataaaaacaccacaaag

SEQ ID NO: 6017 - DNA, 36 bp, synthetic construct
  source 1..36: mol_type = other DNA
agtgcatagggaagcacagataaaaacaccacaaag

SEQ ID NO: 6018 - DNA, 37 bp, synthetic construct
  source 1..37: mol_type = other DNA
tagtgcatagggaagcacagataaaaacaccacaaag

SEQ ID NO: 6019 - DNA, 38 bp, synthetic construct
  source 1..38: mol_type = other DNA
ttagtgcatagggaagcacagataaaaacaccacaaag

SEQ ID NO: 6020 - DNA, 39 bp, synthetic construct
  source 1..39: mol_type = other DNA
attagtgcatagggaagcacagataaaaacaccacaaag

SEQ ID NO: 6021 - DNA, 40 bp, synthetic construct
  source 1..40: mol_type = other DNA
gattagtgcatagggaagcacagataaaaacaccacaaag

SEQ ID NO: 6022 - DNA, 10 bp, synthetic construct
  source 1..10: mol_type = other DNA
ttttccggag

SEQ ID NO: 6023 - DNA, 10 bp, synthetic construct
  source 1..10: mol_type = other DNA
tttttctgag

SEQ ID NO: 6024 - DNA, 11 bp, synthetic construct
  source 1..11: mol_type = other DNA
atttttctgag

SEQ ID NO: 6025 - DNA, 11 bp, synthetic construct
  source 1..11: mol_type = other DNA
attttccggag

SEQ ID NO: 6026 - DNA, 12 bp, synthetic construct
  source 1..12: mol_type = other DNA
tatttttctgag

SEQ ID NO: 6027 - DNA, 12 bp, synthetic construct
  source 1..12: mol_type = other DNA
tattttccggag

SEQ ID NO: 6028 - DNA, 13 bp, synthetic construct
  source 1..13: mol_type = other DNA
atatttttctgag

SEQ ID NO: 6029 - DNA, 13 bp, synthetic construct
  source 1..13: mol_type = other DNA
atattttccggag

SEQ ID NO: 6030 - DNA, 14 bp, synthetic construct
  source 1..14: mol_type = other DNA
aatattttccggag

SEQ ID NO: 6031 - DNA, 14 bp, synthetic construct
  source 1..14: mol_type = other DNA
aatatttttctgag

SEQ ID NO: 6032 - DNA, 15 bp, synthetic construct
  source 1..15: mol_type = other DNA
gaatattttccggag

SEQ ID NO: 6033 - DNA, 15 bp, synthetic construct
  source 1..15: mol_type = other DNA
gaatatttttctgag

SEQ ID NO: 6034 - DNA, 16 bp, synthetic construct
  source 1..16: mol_type = other DNA
tgaatatttttctgag

SEQ ID NO: 6035 - DNA, 16 bp, synthetic construct
  source 1..16: mol_type = other DNA
tgaatattttccggag

SEQ ID NO: 6036 - DNA, 17 bp, synthetic construct
  source 1..17: mol_type = other DNA
gtgaatatttttctgag

SEQ ID NO: 6037 - DNA, 17 bp, synthetic construct
  source 1..17: mol_type = other DNA
gtgaatattttccggag

SEQ ID NO: 6038 - DNA, 18 bp, synthetic construct
  source 1..18: mol_type = other DNA
ggtgaatattttccggag

SEQ ID NO: 6039 - DNA, 18 bp, synthetic construct
  source 1..18: mol_type = other DNA
ggtgaatatttttctgag

SEQ ID NO: 6040 - DNA, 19 bp, synthetic construct
  source 1..19: mol_type = other DNA
tggtgaatatttttctgag

SEQ ID NO: 6041 - DNA, 19 bp, synthetic construct
  source 1..19: mol_type = other DNA
tggtgaatattttccggag

SEQ ID NO: 6042 - DNA, 20 bp, synthetic construct
  source 1..20: mol_type = other DNA
gtggtgaatatttttctgag

SEQ ID NO: 6043 - DNA, 20 bp, synthetic construct
  source 1..20: mol_type = other DNA
gtggtgaatattttccggag

SEQ ID NO: 6044 - DNA, 21 bp, synthetic construct
  source 1..21: mol_type = other DNA
ggtggtgaatattttccggag

SEQ ID NO: 6045 - DNA, 21 bp, synthetic construct
  source 1..21: mol_type = other DNA
ggtggtgaatatttttctgag

SEQ ID NO: 6046 - DNA, 22 bp, synthetic construct
  source 1..22: mol_type = other DNA
tggtggtgaatatttttctgag

SEQ ID NO: 6047 - DNA, 22 bp, synthetic construct
  source 1..22: mol_type = other DNA
tggtggtgaatattttccggag

SEQ ID NO: 6048 - DNA, 23 bp, synthetic construct
  source 1..23: mol_type = other DNA
atggtggtgaatatttttctgag

SEQ ID NO: 6049 - DNA, 23 bp, synthetic construct
  source 1..23: mol_type = other DNA
atggtggtgaatattttccggag

SEQ ID NO: 6050 - DNA, 24 bp, synthetic construct
  source 1..24: mol_type = other DNA
gatggtggtgaatatttttctgag

SEQ ID NO: 6051 - DNA, 24 bp, synthetic construct
  source 1..24: mol_type = other DNA
gatggtggtgaatattttccggag

SEQ ID NO: 6052 - DNA, 25 bp, synthetic construct
  source 1..25: mol_type = other DNA
agatggtggtgaatattttccggag

SEQ ID NO: 6053 - DNA, 25 bp, synthetic construct
  source 1..25: mol_type = other DNA
agatggtggtgaatatttttctgag

SEQ ID NO: 6054 - DNA, 26 bp, synthetic construct
  source 1..26: mol_type = other DNA
gagatggtggtgaatatttttctgag

SEQ ID NO: 6055 - DNA, 26 bp, synthetic construct
  source 1..26: mol_type = other DNA
gagatggtggtgaatattttccggag

SEQ ID NO: 6056 - DNA, 27 bp, synthetic construct
  source 1..27: mol_type = other DNA
tgagatggtggtgaatatttttctgag

SEQ ID NO: 6057 - DNA, 27 bp, synthetic construct
  source 1..27: mol_type = other DNA
tgagatggtggtgaatattttccggag

SEQ ID NO: 6058 - DNA, 28 bp, synthetic construct
  source 1..28: mol_type = other DNA
atgagatggtggtgaatatttttctgag

SEQ ID NO: 6059 - DNA, 28 bp, synthetic construct
  source 1..28: mol_type = other DNA
atgagatggtggtgaatattttccggag

SEQ ID NO: 6060 - DNA, 29 bp, synthetic construct
  source 1..29: mol_type = other DNA
aatgagatggtggtgaatattttccggag

SEQ ID NO: 6061 - DNA, 29 bp, synthetic construct
  source 1..29: mol_type = other DNA
aatgagatggtggtgaatatttttctgag

SEQ ID NO: 6062 - DNA, 30 bp, synthetic construct
  source 1..30: mol_type = other DNA
gaatgagatggtggtgaatatttttctgag

SEQ ID NO: 6063 - DNA, 30 bp, synthetic construct
  source 1..30: mol_type = other DNA
gaatgagatggtggtgaatattttccggag

SEQ ID NO: 6064 - DNA, 31 bp, synthetic construct
  source 1..31: mol_type = other DNA
agaatgagatggtggtgaatattttccggag

SEQ ID NO: 6065 - DNA, 31 bp, synthetic construct
  source 1..31: mol_type = other DNA
agaatgagatggtggtgaatatttttctgag

SEQ ID NO: 6066 - DNA, 32 bp, synthetic construct
  source 1..32: mol_type = other DNA
cagaatgagatggtggtgaatattttccggag

SEQ ID NO: 6067 - DNA, 32 bp, synthetic construct
  source 1..32: mol_type = other DNA
cagaatgagatggtggtgaatatttttctgag

SEQ ID NO: 6068 - DNA, 33 bp, synthetic construct
  source 1..33: mol_type = other DNA
gcagaatgagatggtggtgaatattttccggag

SEQ ID NO: 6069 - DNA, 33 bp, synthetic construct
  source 1..33: mol_type = other DNA
gcagaatgagatggtggtgaatatttttctgag

SEQ ID NO: 6070 - DNA, 34 bp, synthetic construct
  source 1..34: mol_type = other DNA
tgcagaatgagatggtggtgaatattttccggag

SEQ ID NO: 6071 - DNA, 34 bp, synthetic construct
  source 1..34: mol_type = other DNA
tgcagaatgagatggtggtgaatatttttctgag

SEQ ID NO: 6072 - DNA, 35 bp, synthetic construct
  source 1..35: mol_type = other DNA
atgcagaatgagatggtggtgaatatttttctgag

SEQ ID NO: 6073 - DNA, 35 bp, synthetic construct
  source 1..35: mol_type = other DNA
atgcagaatgagatggtggtgaatattttccggag

SEQ ID NO: 6074 - DNA, 36 bp, synthetic construct
  source 1..36: mol_type = other DNA
aatgcagaatgagatggtggtgaatattttccggag

SEQ ID NO: 6075 - DNA, 36 bp, synthetic construct
  source 1..36: mol_type = other DNA
aatgcagaatgagatggtggtgaatatttttctgag

SEQ ID NO: 6076 - DNA, 37 bp, synthetic construct
  source 1..37: mol_type = other DNA
caatgcagaatgagatggtggtgaatattttccggag

SEQ ID NO: 6077 - DNA, 37 bp, synthetic construct
  source 1..37: mol_type = other DNA
caatgcagaatgagatggtggtgaatatttttctgag

SEQ ID NO: 6078 - DNA, 38 bp, synthetic construct
  source 1..38: mol_type = other DNA
acaatgcagaatgagatggtggtgaatattttccggag

SEQ ID NO: 6079 - DNA, 38 bp, synthetic construct
  source 1..38: mol_type = other DNA
acaatgcagaatgagatggtggtgaatatttttctgag

SEQ ID NO: 6080 - DNA, 39 bp, synthetic construct
  source 1..39: mol_type = other DNA
aacaatgcagaatgagatggtggtgaatatttttctgag

SEQ ID NO: 6081 - DNA, 39 bp, synthetic construct
  source 1..39: mol_type = other DNA
aacaatgcagaatgagatggtggtgaatattttccggag

SEQ ID NO: 6082 - DNA, 40 bp, synthetic construct
  source 1..40: mol_type = other DNA
gaacaatgcagaatgagatggtggtgaatattttccggag

SEQ ID NO: 6083 - DNA, 40 bp, synthetic construct
  source 1..40: mol_type = other DNA
gaacaatgcagaatgagatggtggtgaatatttttctgag

SEQ ID NO: 6084 - DNA, 20 bp, synthetic construct
  source 1..20: mol_type = other DNA
ccggaaaatattcaccacca

SEQ ID NO: 6085 - DNA, 20 bp, synthetic construct
  source 1..20: mol_type = other DNA
ccggaaaatattcacaacca

SEQ ID NO: 6086 - DNA, 21 bp, synthetic construct
  source 1..21: mol_type = other DNA
tccggaaaatattcaccacca

SEQ ID NO: 6087 - DNA, 21 bp, synthetic construct
  source 1..21: mol_type = other DNA
tccggaaaatattcacaacca

SEQ ID NO: 6088 - DNA, 22 bp, synthetic construct
  source 1..22: mol_type = other DNA
ctccggaaaatattcacaacca

SEQ ID NO: 6089 - DNA, 22 bp, synthetic construct
  source 1..22: mol_type = other DNA
ctccggaaaatattcaccacca

SEQ ID NO: 6090 - DNA, 23 bp, synthetic construct
  source 1..23: mol_type = other DNA
cctccggaaaatattcacaacca

SEQ ID NO: 6091 - DNA, 23 bp, synthetic construct
  source 1..23: mol_type = other DNA
cctccggaaaatattcaccacca

SEQ ID NO: 6092 - DNA, 24 bp, synthetic construct
  source 1..24: mol_type = other DNA
tcctccggaaaatattcaccacca

SEQ ID NO: 6093 - DNA, 24 bp, synthetic construct
  source 1..24: mol_type = other DNA
tcctccggaaaatattcacaacca

SEQ ID NO: 6094 - DNA, 25 bp, synthetic construct
  source 1..25: mol_type = other DNA
atcctccggaaaatattcaccacca

SEQ ID NO: 6095 - DNA, 25 bp, synthetic construct
  source 1..25: mol_type = other DNA
atcctccggaaaatattcacaacca

SEQ ID NO: 6096 - DNA, 26 bp, synthetic construct
  source 1..26: mol_type = other DNA
catcctccggaaaatattcacaacca

SEQ ID NO: 6097 - DNA, 26 bp, synthetic construct
  source 1..26: mol_type = other DNA
catcctccggaaaatattcaccacca

SEQ ID NO: 6098 - DNA, 27 bp, synthetic construct
  source 1..27: mol_type = other DNA
tcatcctccggaaaatattcaccacca

SEQ ID NO: 6099 - DNA, 27 bp, synthetic construct
  source 1..27: mol_type = other DNA
tcatcctccggaaaatattcacaacca

SEQ ID NO: 6100 - DNA, 28 bp, synthetic construct
  source 1..28: mol_type = other DNA
atcatcctccggaaaatattcacaacca

SEQ ID NO: 6101 - DNA, 28 bp, synthetic construct
  source 1..28: mol_type = other DNA
atcatcctccggaaaatattcaccacca

SEQ ID NO: 6102 - DNA, 29 bp, synthetic construct
  source 1..29: mol_type = other DNA
aatcatcctccggaaaatattcacaacca

SEQ ID NO: 6103 - DNA, 29 bp, synthetic construct
  source 1..29: mol_type = other DNA
aatcatcctccggaaaatattcaccacca

SEQ ID NO: 6104 - DNA, 30 bp, synthetic construct
  source 1..30: mol_type = other DNA
gaatcatcctccggaaaatattcaccacca

SEQ ID NO: 6105 - DNA, 30 bp, synthetic construct
  source 1..30: mol_type = other DNA
gaatcatcctccggaaaatattcacaacca

SEQ ID NO: 6106 - DNA, 31 bp, synthetic construct
  source 1..31: mol_type = other DNA
ggaatcatcctccggaaaatattcaccacca

SEQ ID NO: 6107 - DNA, 31 bp, synthetic construct
  source 1..31: mol_type = other DNA
ggaatcatcctccggaaaatattcacaacca

SEQ ID NO: 6108 - DNA, 32 bp, synthetic construct
  source 1..32: mol_type = other DNA
aggaatcatcctccggaaaatattcaccacca

SEQ ID NO: 6109 - DNA, 32 bp, synthetic construct
  source 1..32: mol_type = other DNA
aggaatcatcctccggaaaatattcacaacca

SEQ ID NO: 6110 - DNA, 33 bp, synthetic construct
  source 1..33: mol_type = other DNA
aaggaatcatcctccggaaaatattcacaacca

SEQ ID NO: 6111 - DNA, 33 bp, synthetic construct
  source 1..33: mol_type = other DNA
aaggaatcatcctccggaaaatattcaccacca

SEQ ID NO: 6112 - DNA, 34 bp, synthetic construct
  source 1..34: mol_type = other DNA
aaaggaatcatcctccggaaaatattcacaacca

SEQ ID NO: 6113 - DNA, 34 bp, synthetic construct
  source 1..34: mol_type = other DNA
aaaggaatcatcctccggaaaatattcaccacca

SEQ ID NO: 6114 - DNA, 35 bp, synthetic construct
  source 1..35: mol_type = other DNA
caaaggaatcatcctccggaaaatattcaccacca

SEQ ID NO: 6115 - DNA, 35 bp, synthetic construct
  source 1..35: mol_type = other DNA
caaaggaatcatcctccggaaaatattcacaacca

SEQ ID NO: 6116 - DNA, 36 bp, synthetic construct
  source 1..36: mol_type = other DNA
tcaaaggaatcatcctccggaaaatattcacaacca

SEQ ID NO: 6117 - DNA, 36 bp, synthetic construct
  source 1..36: mol_type = other DNA
tcaaaggaatcatcctccggaaaatattcaccacca

SEQ ID NO: 6118 - DNA, 37 bp, synthetic construct
  source 1..37: mol_type = other DNA
atcaaaggaatcatcctccggaaaatattcaccacca

SEQ ID NO: 6119 - DNA, 37 bp, synthetic construct
  source 1..37: mol_type = other DNA
atcaaaggaatcatcctccggaaaatattcacaacca

SEQ ID NO: 6120 - DNA, 38 bp, synthetic construct
  source 1..38: mol_type = other DNA
aatcaaaggaatcatcctccggaaaatattcaccacca

SEQ ID NO: 6121 - DNA, 38 bp, synthetic construct
  source 1..38: mol_type = other DNA
aatcaaaggaatcatcctccggaaaatattcacaacca

SEQ ID NO: 6122 - DNA, 39 bp, synthetic construct
  source 1..39: mol_type = other DNA
taatcaaaggaatcatcctccggaaaatattcacaacca

SEQ ID NO: 6123 - DNA, 39 bp, synthetic construct
  source 1..39: mol_type = other DNA
taatcaaaggaatcatcctccggaaaatattcaccacca

SEQ ID NO: 6124 - DNA, 40 bp, synthetic construct
  source 1..40: mol_type = other DNA
ctaatcaaaggaatcatcctccggaaaatattcaccacca

SEQ ID NO: 6125 - DNA, 40 bp, synthetic construct
  source 1..40: mol_type = other DNA
ctaatcaaaggaatcatcctccggaaaatattcacaacca

SEQ ID NO: 6126 - DNA, 19 bp, synthetic construct
  source 1..19: mol_type = other DNA
ccggaaaatattcaccacc

SEQ ID NO: 6127 - DNA, 20 bp, synthetic construct
  source 1..20: mol_type = other DNA
tccggaaaatattcaccacc

SEQ ID NO: 6128 - DNA, 21 bp, synthetic construct
  source 1..21: mol_type = other DNA
ctccggaaaatattcaccacc

SEQ ID NO: 6129 - DNA, 22 bp, synthetic construct
  source 1..22: mol_type = other DNA
cctccggaaaatattcaccacc

SEQ ID NO: 6130 - DNA, 23 bp, synthetic construct
  source 1..23: mol_type = other DNA
tcctccggaaaatattcaccacc

SEQ ID NO: 6131 - DNA, 24 bp, synthetic construct
  source 1..24: mol_type = other DNA
atcctccggaaaatattcaccacc

SEQ ID NO: 6132 - DNA, 25 bp, synthetic construct
  source 1..25: mol_type = other DNA
catcctccggaaaatattcaccacc

SEQ ID NO: 6133 - DNA, 26 bp, synthetic construct
  source 1..26: mol_type = other DNA
tcatcctccggaaaatattcaccacc

SEQ ID NO: 6134 - DNA, 27 bp, synthetic construct
  source 1..27: mol_type = other DNA
atcatcctccggaaaatattcaccacc

SEQ ID NO: 6135 - DNA, 28 bp, synthetic construct
  source 1..28: mol_type = other DNA
aatcatcctccggaaaatattcaccacc

SEQ ID NO: 6136 - DNA, 29 bp, synthetic construct
  source 1..29: mol_type = other DNA
gaatcatcctccggaaaatattcaccacc

SEQ ID NO: 6137 - DNA, 30 bp, synthetic construct
  source 1..30: mol_type = other DNA
ggaatcatcctccggaaaatattcaccacc

SEQ ID NO: 6138 - DNA, 31 bp, synthetic construct
  source 1..31: mol_type = other DNA
aggaatcatcctccggaaaatattcaccacc

SEQ ID NO: 6139 - DNA, 32 bp, synthetic construct
  source 1..32: mol_type = other DNA
aaggaatcatcctccggaaaatattcaccacc

SEQ ID NO: 6140 - DNA, 33 bp, synthetic construct
  source 1..33: mol_type = other DNA
aaaggaatcatcctccggaaaatattcaccacc

SEQ ID NO: 6141 - DNA, 34 bp, synthetic construct
  source 1..34: mol_type = other DNA
caaaggaatcatcctccggaaaatattcaccacc

SEQ ID NO: 6142 - DNA, 35 bp, synthetic construct
  source 1..35: mol_type = other DNA
tcaaaggaatcatcctccggaaaatattcaccacc

SEQ ID NO: 6143 - DNA, 36 bp, synthetic construct
  source 1..36: mol_type = other DNA
atcaaaggaatcatcctccggaaaatattcaccacc

SEQ ID NO: 6144 - DNA, 37 bp, synthetic construct
  source 1..37: mol_type = other DNA
aatcaaaggaatcatcctccggaaaatattcaccacc

SEQ ID NO: 6145 - DNA, 38 bp, synthetic construct
  source 1..38: mol_type = other DNA
taatcaaaggaatcatcctccggaaaatattcaccacc

SEQ ID NO: 6146 - DNA, 39 bp, synthetic construct
  source 1..39: mol_type = other DNA
ctaatcaaaggaatcatcctccggaaaatattcaccacc

SEQ ID NO: 6147 - DNA, 40 bp, synthetic construct
  source 1..40: mol_type = other DNA
actaatcaaaggaatcatcctccggaaaatattcaccacc

SEQ ID NO: 6148 - DNA, 23 bp, synthetic construct
  source 1..23: mol_type = other DNA
ccggaaaatattcaccaccatct

SEQ ID NO: 6149 - DNA, 23 bp, synthetic construct
  source 1..23: mol_type = other DNA
ccggaaaatattcaccacaatct

SEQ ID NO: 6150 - DNA, 24 bp, synthetic construct
  source 1..24: mol_type = other DNA
tccggaaaatattcaccaccatct

SEQ ID NO: 6151 - DNA, 24 bp, synthetic construct
  source 1..24: mol_type = other DNA
tccggaaaatattcaccacaatct

SEQ ID NO: 6152 - DNA, 25 bp, synthetic construct
  source 1..25: mol_type = other DNA
ctccggaaaatattcaccacaatct

SEQ ID NO: 6153 - DNA, 25 bp, synthetic construct
  source 1..25: mol_type = other DNA
ctccggaaaatattcaccaccatct

SEQ ID NO: 6154 - DNA, 26 bp, synthetic construct
  source 1..26: mol_type = other DNA
cctccggaaaatattcaccacaatct

SEQ ID NO: 6155 - DNA, 26 bp, synthetic construct
  source 1..26: mol_type = other DNA
cctccggaaaatattcaccaccatct

SEQ ID NO: 6156 - DNA, 27 bp, synthetic construct
  source 1..27: mol_type = other DNA
tcctccggaaaatattcaccaccatct

SEQ ID NO: 6157 - DNA, 27 bp, synthetic construct
  source 1..27: mol_type = other DNA
tcctccggaaaatattcaccacaatct

SEQ ID NO: 6158 - DNA, 28 bp, synthetic construct
  source 1..28: mol_type = other DNA
atcctccggaaaatattcaccaccatct

SEQ ID NO: 6159 - DNA, 28 bp, synthetic construct
  source 1..28: mol_type = other DNA
atcctccggaaaatattcaccacaatct

SEQ ID NO: 6160 - DNA, 29 bp, synthetic construct
  source 1..29: mol_type = other DNA
catcctccggaaaatattcaccaccatct

SEQ ID NO: 6161 - DNA, 29 bp, synthetic construct
  source 1..29: mol_type = other DNA
catcctccggaaaatattcaccacaatct

SEQ ID NO: 6162 - DNA, 30 bp, synthetic construct
  source 1..30: mol_type = other DNA
tcatcctccggaaaatattcaccacaatct

SEQ ID NO: 6163 - DNA, 30 bp, synthetic construct
  source 1..30: mol_type = other DNA
tcatcctccggaaaatattcaccaccatct

SEQ ID NO: 6164 - DNA, 31 bp, synthetic construct
  source 1..31: mol_type = other DNA
atcatcctccggaaaatattcaccaccatct

SEQ ID NO: 6165 - DNA, 31 bp, synthetic construct
  source 1..31: mol_type = other DNA
atcatcctccggaaaatattcaccacaatct

SEQ ID NO: 6166 - DNA, 32 bp, synthetic construct
  source 1..32: mol_type = other DNA
aatcatcctccggaaaatattcaccacaatct

SEQ ID NO: 6167 - DNA, 32 bp, synthetic construct
  source 1..32: mol_type = other DNA
aatcatcctccggaaaatattcaccaccatct

SEQ ID NO: 6168 - DNA, 33 bp, synthetic construct
  source 1..33: mol_type = other DNA
gaatcatcctccggaaaatattcaccaccatct

SEQ ID NO: 6169 - DNA, 33 bp, synthetic construct
  source 1..33: mol_type = other DNA
gaatcatcctccggaaaatattcaccacaatct

SEQ ID NO: 6170 - DNA, 34 bp, synthetic construct
  source 1..34: mol_type = other DNA
ggaatcatcctccggaaaatattcaccacaatct

SEQ ID NO: 6171 - DNA, 34 bp, synthetic construct
  source 1..34: mol_type = other DNA
ggaatcatcctccggaaaatattcaccaccatct

SEQ ID NO: 6172 - DNA, 35 bp, synthetic construct
  source 1..35: mol_type = other DNA
aggaatcatcctccggaaaatattcaccaccatct

SEQ ID NO: 6173 - DNA, 35 bp, synthetic construct
  source 1..35: mol_type = other DNA
aggaatcatcctccggaaaatattcaccacaatct

SEQ ID NO: 6174 - DNA, 36 bp, synthetic construct
  source 1..36: mol_type = other DNA
aaggaatcatcctccggaaaatattcaccaccatct

SEQ ID NO: 6175 - DNA, 36 bp, synthetic construct
  source 1..36: mol_type = other DNA
aaggaatcatcctccggaaaatattcaccacaatct

SEQ ID NO: 6176 - DNA, 37 bp, synthetic construct
  source 1..37: mol_type = other DNA
aaaggaatcatcctccggaaaatattcaccaccatct

SEQ ID NO: 6177 - DNA, 37 bp, synthetic construct
  source 1..37: mol_type = other DNA
aaaggaatcatcctccggaaaatattcaccacaatct

SEQ ID NO: 6178 - DNA, 38 bp, synthetic construct
  source 1..38: mol_type = other DNA
caaaggaatcatcctccggaaaatattcaccacaatct

SEQ ID NO: 6179 - DNA, 38 bp, synthetic construct
  source 1..38: mol_type = other DNA
caaaggaatcatcctccggaaaatattcaccaccatct

SEQ ID NO: 6180 - DNA, 39 bp, synthetic construct
  source 1..39: mol_type = other DNA
tcaaaggaatcatcctccggaaaatattcaccacaatct

SEQ ID NO: 6181 - DNA, 39 bp, synthetic construct
  source 1..39: mol_type = other DNA
tcaaaggaatcatcctccggaaaatattcaccaccatct

SEQ ID NO: 6182 - DNA, 40 bp, synthetic construct
  source 1..40: mol_type = other DNA
atcaaaggaatcatcctccggaaaatattcaccaccatct

SEQ ID NO: 6183 - DNA, 40 bp, synthetic construct
  source 1..40: mol_type = other DNA
atcaaaggaatcatcctccggaaaatattcaccacaatct

SEQ ID NO: 6184 - DNA, 22 bp, synthetic construct
  source 1..22: mol_type = other DNA
ccggaaaatattcaccaccatc

SEQ ID NO: 6185 - DNA, 23 bp, synthetic construct
  source 1..23: mol_type = other DNA
tccggaaaatattcaccaccatc

SEQ ID NO: 6186 - DNA, 24 bp, synthetic construct
  source 1..24: mol_type = other DNA
ctccggaaaatattcaccaccatc

SEQ ID NO: 6187 - DNA, 25 bp, synthetic construct
  source 1..25: mol_type = other DNA
cctccggaaaatattcaccaccatc

SEQ ID NO: 6188 - DNA, 26 bp, synthetic construct
  source 1..26: mol_type = other DNA
tcctccggaaaatattcaccaccatc

SEQ ID NO: 6189 - DNA, 27 bp, synthetic construct
  source 1..27: mol_type = other DNA
atcctccggaaaatattcaccaccatc

SEQ ID NO: 6190 - DNA, 28 bp, synthetic construct
  source 1..28: mol_type = other DNA
catcctccggaaaatattcaccaccatc

SEQ ID NO: 6191 - DNA, 29 bp, synthetic construct
  source 1..29: mol_type = other DNA
tcatcctccggaaaatattcaccaccatc

SEQ ID NO: 6192 - DNA, 30 bp, synthetic construct
  source 1..30: mol_type = other DNA
atcatcctccggaaaatattcaccaccatc

SEQ ID NO: 6193 - DNA, 31 bp, synthetic construct
  source 1..31: mol_type = other DNA
aatcatcctccggaaaatattcaccaccatc

SEQ ID NO: 6194 - DNA, 32 bp, synthetic construct
  source 1..32: mol_type = other DNA
gaatcatcctccggaaaatattcaccaccatc

SEQ ID NO: 6195 - DNA, 33 bp, synthetic construct
  source 1..33: mol_type = other DNA
ggaatcatcctccggaaaatattcaccaccatc

SEQ ID NO: 6196 - DNA, 34 bp, synthetic construct
  source 1..34: mol_type = other DNA
aggaatcatcctccggaaaatattcaccaccatc

SEQ ID NO: 6197 - DNA, 35 bp, synthetic construct
  source 1..35: mol_type = other DNA
aaggaatcatcctccggaaaatattcaccaccatc

SEQ ID NO: 6198 - DNA, 36 bp, synthetic construct
  source 1..36: mol_type = other DNA
aaaggaatcatcctccggaaaatattcaccaccatc

SEQ ID NO: 6199 - DNA, 37 bp, synthetic construct
  source 1..37: mol_type = other DNA
caaaggaatcatcctccggaaaatattcaccaccatc

SEQ ID NO: 6200 - DNA, 38 bp, synthetic construct
  source 1..38: mol_type = other DNA
tcaaaggaatcatcctccggaaaatattcaccaccatc

SEQ ID NO: 6201 - DNA, 39 bp, synthetic construct
  source 1..39: mol_type = other DNA
atcaaaggaatcatcctccggaaaatattcaccaccatc

SEQ ID NO: 6202 - DNA, 40 bp, synthetic construct
  source 1..40: mol_type = other DNA
aatcaaaggaatcatcctccggaaaatattcaccaccatc

SEQ ID NO: 6203 - DNA, 10 bp, synthetic construct
  source 1..10: mol_type = other DNA
attttccgga

SEQ ID NO: 6204 - DNA, 11 bp, synthetic construct
  source 1..11: mol_type = other DNA
tattttccgga

SEQ ID NO: 6205 - DNA, 12 bp, synthetic construct
  source 1..12: mol_type = other DNA
atattttccgga

SEQ ID NO: 6206 - DNA, 13 bp, synthetic construct
  source 1..13: mol_type = other DNA
aatattttccgga

SEQ ID NO: 6207 - DNA, 14 bp, synthetic construct
  source 1..14: mol_type = other DNA
gaatattttccgga

SEQ ID NO: 6208 - DNA, 15 bp, synthetic construct
  source 1..15: mol_type = other DNA
tgaatattttccgga

SEQ ID NO: 6209 - DNA, 16 bp, synthetic construct
  source 1..16: mol_type = other DNA
gtgaatattttccgga

SEQ ID NO: 6210 - DNA, 17 bp, synthetic construct
  source 1..17: mol_type = other DNA
ggtgaatattttccgga

SEQ ID NO: 6211 - DNA, 18 bp, synthetic construct
  source 1..18: mol_type = other DNA
tggtgaatattttccgga

SEQ ID NO: 6212 - DNA, 19 bp, synthetic construct
  source 1..19: mol_type = other DNA
gtggtgaatattttccgga

SEQ ID NO: 6213 - DNA, 20 bp, synthetic construct
  source 1..20: mol_type = other DNA
ggtggtgaatattttccgga

SEQ ID NO: 6214 - DNA, 21 bp, synthetic construct
  source 1..21: mol_type = other DNA
tggtggtgaatattttccgga

SEQ ID NO: 6215 - DNA, 22 bp, synthetic construct
  source 1..22: mol_type = other DNA
atggtggtgaatattttccgga

SEQ ID NO: 6216 - DNA, 23 bp, synthetic construct
  source 1..23: mol_type = other DNA
gatggtggtgaatattttccgga

SEQ ID NO: 6217 - DNA, 24 bp, synthetic construct
  source 1..24: mol_type = other DNA
agatggtggtgaatattttccgga

SEQ ID NO: 6218 - DNA, 25 bp, synthetic construct
  source 1..25: mol_type = other DNA
gagatggtggtgaatattttccgga

SEQ ID NO: 6219 - DNA, 26 bp, synthetic construct
  source 1..26: mol_type = other DNA
tgagatggtggtgaatattttccgga

SEQ ID NO: 6220 - DNA, 27 bp, synthetic construct
  source 1..27: mol_type = other DNA
atgagatggtggtgaatattttccgga

SEQ ID NO: 6221 - DNA, 28 bp, synthetic construct
  source 1..28: mol_type = other DNA
aatgagatggtggtgaatattttccgga

SEQ ID NO: 6222 - DNA, 29 bp, synthetic construct
  source 1..29: mol_type = other DNA
gaatgagatggtggtgaatattttccgga

SEQ ID NO: 6223 - DNA, 30 bp, synthetic construct
  source 1..30: mol_type = other DNA
agaatgagatggtggtgaatattttccgga

SEQ ID NO: 6224 - DNA, 31 bp, synthetic construct
  source 1..31: mol_type = other DNA
cagaatgagatggtggtgaatattttccgga

SEQ ID NO: 6225 - DNA, 32 bp, synthetic construct
  source 1..32: mol_type = other DNA
gcagaatgagatggtggtgaatattttccgga

SEQ ID NO: 6226 - DNA, 33 bp, synthetic construct
  source 1..33: mol_type = other DNA
tgcagaatgagatggtggtgaatattttccgga

SEQ ID NO: 6227 - DNA, 34 bp, synthetic construct
  source 1..34: mol_type = other DNA
atgcagaatgagatggtggtgaatattttccgga

SEQ ID NO: 6228 - DNA, 35 bp, synthetic construct
  source 1..35: mol_type = other DNA
aatgcagaatgagatggtggtgaatattttccgga

SEQ ID NO: 6229 - DNA, 36 bp, synthetic construct
  source 1..36: mol_type = other DNA
caatgcagaatgagatggtggtgaatattttccgga

SEQ ID NO: 6230 - DNA, 37 bp, synthetic construct
  source 1..37: mol_type = other DNA
acaatgcagaatgagatggtggtgaatattttccgga

SEQ ID NO: 6231 - DNA, 38 bp, synthetic construct
  source 1..38: mol_type = other DNA
aacaatgcagaatgagatggtggtgaatattttccgga

SEQ ID NO: 6232 - DNA, 39 bp, synthetic construct
  source 1..39: mol_type = other DNA
gaacaatgcagaatgagatggtggtgaatattttccgga

SEQ ID NO: 6233 - DNA, 40 bp, synthetic construct
  source 1..40: mol_type = other DNA
agaacaatgcagaatgagatggtggtgaatattttccgga

SEQ ID NO: 6234 - DNA, 17 bp, synthetic construct
  source 1..17: mol_type = other DNA
ccggaaaatattcacca

SEQ ID NO: 6235 - DNA, 18 bp, synthetic construct
  source 1..18: mol_type = other DNA
tccggaaaatattcacca

SEQ ID NO: 6236 - DNA, 19 bp, synthetic construct
  source 1..19: mol_type = other DNA
ctccggaaaatattcacca

SEQ ID NO: 6237 - DNA, 20 bp, synthetic construct
  source 1..20: mol_type = other DNA
cctccggaaaatattcacca

SEQ ID NO: 6238 - DNA, 21 bp, synthetic construct
  source 1..21: mol_type = other DNA
tcctccggaaaatattcacca

SEQ ID NO: 6239 - DNA, 22 bp, synthetic construct
  source 1..22: mol_type = other DNA
atcctccggaaaatattcacca

SEQ ID NO: 6240 - DNA, 23 bp, synthetic construct
  source 1..23: mol_type = other DNA
catcctccggaaaatattcacca

SEQ ID NO: 6241 - DNA, 24 bp, synthetic construct
  source 1..24: mol_type = other DNA
tcatcctccggaaaatattcacca

SEQ ID NO: 6242 - DNA, 25 bp, synthetic construct
  source 1..25: mol_type = other DNA
atcatcctccggaaaatattcacca

SEQ ID NO: 6243 - DNA, 26 bp, synthetic construct
  source 1..26: mol_type = other DNA
aatcatcctccggaaaatattcacca

SEQ ID NO: 6244 - DNA, 27 bp, synthetic construct
  source 1..27: mol_type = other DNA
gaatcatcctccggaaaatattcacca

SEQ ID NO: 6245 - DNA, 28 bp, synthetic construct
  source 1..28: mol_type = other DNA
ggaatcatcctccggaaaatattcacca

SEQ ID NO: 6246 - DNA, 29 bp, synthetic construct
  source 1..29: mol_type = other DNA
aggaatcatcctccggaaaatattcacca

SEQ ID NO: 6247 - DNA, 30 bp, synthetic construct
  source 1..30: mol_type = other DNA
aaggaatcatcctccggaaaatattcacca

SEQ ID NO: 6248 - DNA, 31 bp, synthetic construct
  source 1..31: mol_type = other DNA
aaaggaatcatcctccggaaaatattcacca

SEQ ID NO: 6249 - DNA, 32 bp, synthetic construct
  source 1..32: mol_type = other DNA
caaaggaatcatcctccggaaaatattcacca

SEQ ID NO: 6250 - DNA, 33 bp, synthetic construct
  source 1..33: mol_type = other DNA
tcaaaggaatcatcctccggaaaatattcacca

SEQ ID NO: 6251 - DNA, 34 bp, synthetic construct
  source 1..34: mol_type = other DNA
atcaaaggaatcatcctccggaaaatattcacca

SEQ ID NO: 6252 - DNA, 35 bp, synthetic construct
  source 1..35: mol_type = other DNA
aatcaaaggaatcatcctccggaaaatattcacca

SEQ ID NO: 6253 - DNA, 36 bp, synthetic construct
  source 1..36: mol_type = other DNA
taatcaaaggaatcatcctccggaaaatattcacca

SEQ ID NO: 6254 - DNA, 37 bp, synthetic construct
  source 1..37: mol_type = other DNA
ctaatcaaaggaatcatcctccggaaaatattcacca

SEQ ID NO: 6255 - DNA, 38 bp, synthetic construct
  source 1..38: mol_type = other DNA
actaatcaaaggaatcatcctccggaaaatattcacca

SEQ ID NO: 6256 - DNA, 39 bp, synthetic construct
  source 1..39: mol_type = other DNA
cactaatcaaaggaatcatcctccggaaaatattcacca

SEQ ID NO: 6257 - DNA, 40 bp, synthetic construct
  source 1..40: mol_type = other DNA
gcactaatcaaaggaatcatcctccggaaaatattcacca

SEQ ID NO: 6258 - DNA, 10 bp, synthetic construct
  source 1..10: mol_type = other DNA
atcctccgga

SEQ ID NO: 6259 - DNA, 11 bp, synthetic construct
  source 1..11: mol_type = other DNA
catcctccgga

SEQ ID NO: 6260 - DNA, 12 bp, synthetic construct
  source 1..12: mol_type = other DNA
tcatcctccgga

SEQ ID NO: 6261 - DNA, 13 bp, synthetic construct
  source 1..13: mol_type = other DNA
atcatcctccgga

SEQ ID NO: 6262 - DNA, 14 bp, synthetic construct
  source 1..14: mol_type = other DNA
aatcatcctccgga

SEQ ID NO: 6263 - DNA, 15 bp, synthetic construct
  source 1..15: mol_type = other DNA
gaatcatcctccgga

SEQ ID NO: 6264 - DNA, 16 bp, synthetic construct
  source 1..16: mol_type = other DNA
ggaatcatcctccgga

SEQ ID NO: 6265 - DNA, 17 bp, synthetic construct
  source 1..17: mol_type = other DNA
aggaatcatcctccgga

SEQ ID NO: 6266 - DNA, 18 bp, synthetic construct
  source 1..18: mol_type = other DNA
aaggaatcatcctccgga

SEQ ID NO: 6267 - DNA, 19 bp, synthetic construct
  source 1..19: mol_type = other DNA
aaaggaatcatcctccgga

SEQ ID NO: 6268 - DNA, 20 bp, synthetic construct
  source 1..20: mol_type = other DNA
caaaggaatcatcctccgga

SEQ ID NO: 6269 - DNA, 21 bp, synthetic construct
  source 1..21: mol_type = other DNA
tcaaaggaatcatcctccgga

SEQ ID NO: 6270 - DNA, 22 bp, synthetic construct
  source 1..22: mol_type = other DNA
atcaaaggaatcatcctccgga

SEQ ID NO: 6271 - DNA, 23 bp, synthetic construct
  source 1..23: mol_type = other DNA
aatcaaaggaatcatcctccgga

SEQ ID NO: 6272 - DNA, 24 bp, synthetic construct
  source 1..24: mol_type = other DNA
taatcaaaggaatcatcctccgga

SEQ ID NO: 6273 - DNA, 25 bp, synthetic construct
  source 1..25: mol_type = other DNA
ctaatcaaaggaatcatcctccgga

SEQ ID NO: 6274 - DNA, 26 bp, synthetic construct
  source 1..26: mol_type = other DNA
actaatcaaaggaatcatcctccgga

SEQ ID NO: 6275 - DNA, 27 bp, synthetic construct
  source 1..27: mol_type = other DNA
cactaatcaaaggaatcatcctccgga

SEQ ID NO: 6276 - DNA, 28 bp, synthetic construct
  source 1..28: mol_type = other DNA
gcactaatcaaaggaatcatcctccgga

SEQ ID NO: 6277 - DNA, 29 bp, synthetic construct
  source 1..29: mol_type = other DNA
tgcactaatcaaaggaatcatcctccgga

SEQ ID NO: 6278 - DNA, 30 bp, synthetic construct
  source 1..30: mol_type = other DNA
atgcactaatcaaaggaatcatcctccgga

SEQ ID NO: 6279 - DNA, 31 bp, synthetic construct
  source 1..31: mol_type = other DNA
tatgcactaatcaaaggaatcatcctccgga

SEQ ID NO: 6280 - DNA, 32 bp, synthetic construct
  source 1..32: mol_type = other DNA
ctatgcactaatcaaaggaatcatcctccgga

SEQ ID NO: 6281 - DNA, 33 bp, synthetic construct
  source 1..33: mol_type = other DNA
cctatgcactaatcaaaggaatcatcctccgga

SEQ ID NO: 6282 - DNA, 34 bp, synthetic construct
  source 1..34: mol_type = other DNA
ccctatgcactaatcaaaggaatcatcctccgga

SEQ ID NO: 6283 - DNA, 35 bp, synthetic construct
  source 1..35: mol_type = other DNA
tccctatgcactaatcaaaggaatcatcctccgga

SEQ ID NO: 6284 - DNA, 36 bp, synthetic construct
  source 1..36: mol_type = other DNA
ttccctatgcactaatcaaaggaatcatcctccgga

SEQ ID NO: 6285 - DNA, 37 bp, synthetic construct
  source 1..37: mol_type = other DNA
cttccctatgcactaatcaaaggaatcatcctccgga

SEQ ID NO: 6286 - DNA, 38 bp, synthetic construct
  source 1..38: mol_type = other DNA
gcttccctatgcactaatcaaaggaatcatcctccgga

SEQ ID NO: 6287 - DNA, 39 bp, synthetic construct
  source 1..39: mol_type = other DNA
tgcttccctatgcactaatcaaaggaatcatcctccgga

SEQ ID NO: 6288 - DNA, 40 bp, synthetic construct
  source 1..40: mol_type = other DNA
gtgcttccctatgcactaatcaaaggaatcatcctccgga

SEQ ID NO: 6289 - DNA, 18 bp, synthetic construct
  source 1..18: mol_type = other DNA
ccggaaaatattcaccac

SEQ ID NO: 6290 - DNA, 19 bp, synthetic construct
  source 1..19: mol_type = other DNA
tccggaaaatattcaccac

SEQ ID NO: 6291 - DNA, 20 bp, synthetic construct
  source 1..20: mol_type = other DNA
ctccggaaaatattcaccac

SEQ ID NO: 6292 - DNA, 21 bp, synthetic construct
  source 1..21: mol_type = other DNA
cctccggaaaatattcaccac

SEQ ID NO: 6293 - DNA, 22 bp, synthetic construct
  source 1..22: mol_type = other DNA
tcctccggaaaatattcaccac

SEQ ID NO: 6294 - DNA, 23 bp, synthetic construct
  source 1..23: mol_type = other DNA
atcctccggaaaatattcaccac

SEQ ID NO: 6295 - DNA, 24 bp, synthetic construct
  source 1..24: mol_type = other DNA
catcctccggaaaatattcaccac

SEQ ID NO: 6296 - DNA, 25 bp, synthetic construct
  source 1..25: mol_type = other DNA
tcatcctccggaaaatattcaccac

SEQ ID NO: 6297 - DNA, 26 bp, synthetic construct
  source 1..26: mol_type = other DNA
atcatcctccggaaaatattcaccac

SEQ ID NO: 6298 - DNA, 27 bp, synthetic construct
  source 1..27: mol_type = other DNA
aatcatcctccggaaaatattcaccac

SEQ ID NO: 6299 - DNA, 28 bp, synthetic construct
  source 1..28: mol_type = other DNA
gaatcatcctccggaaaatattcaccac

SEQ ID NO: 6300 - DNA, 29 bp, synthetic construct
  source 1..29: mol_type = other DNA
ggaatcatcctccggaaaatattcaccac

SEQ ID NO: 6301 - DNA, 30 bp, synthetic construct
  source 1..30: mol_type = other DNA
aggaatcatcctccggaaaatattcaccac

SEQ ID NO: 6302 - DNA, 31 bp, synthetic construct
  source 1..31: mol_type = other DNA
aaggaatcatcctccggaaaatattcaccac

SEQ ID NO: 6303 - DNA, 32 bp, synthetic construct
  source 1..32: mol_type = other DNA
aaaggaatcatcctccggaaaatattcaccac

SEQ ID NO: 6304 - DNA, 33 bp, synthetic construct
  source 1..33: mol_type = other DNA
caaaggaatcatcctccggaaaatattcaccac

SEQ ID NO: 6305 - DNA, 34 bp, synthetic construct
  source 1..34: mol_type = other DNA
tcaaaggaatcatcctccggaaaatattcaccac

SEQ ID NO: 6306 - DNA, 35 bp, synthetic construct
  source 1..35: mol_type = other DNA
atcaaaggaatcatcctccggaaaatattcaccac

SEQ ID NO: 6307 - DNA, 36 bp, synthetic construct
  source 1..36: mol_type = other DNA
aatcaaaggaatcatcctccggaaaatattcaccac

SEQ ID NO: 6308 - DNA, 37 bp, synthetic construct
  source 1..37: mol_type = other DNA
taatcaaaggaatcatcctccggaaaatattcaccac

SEQ ID NO: 6309 - DNA, 38 bp, synthetic construct
  source 1..38: mol_type = other DNA
ctaatcaaaggaatcatcctccggaaaatattcaccac

SEQ ID NO: 6310 - DNA, 39 bp, synthetic construct
  source 1..39: mol_type = other DNA
actaatcaaaggaatcatcctccggaaaatattcaccac

SEQ ID NO: 6311 - DNA, 40 bp, synthetic construct
  source 1..40: mol_type = other DNA
cactaatcaaaggaatcatcctccggaaaatattcaccac

SEQ ID NO: 6312 - DNA, 26 bp, synthetic construct
  source 1..26: mol_type = other DNA
ccggaaaatattcaccaccatctcat

SEQ ID NO: 6313 - DNA, 27 bp, synthetic construct
  source 1..27: mol_type = other DNA
tccggaaaatattcaccaccatctcat

SEQ ID NO: 6314 - DNA, 28 bp, synthetic construct
  source 1..28: mol_type = other DNA
ctccggaaaatattcaccaccatctcat

SEQ ID NO: 6315 - DNA, 29 bp, synthetic construct
  source 1..29: mol_type = other DNA
cctccggaaaatattcaccaccatctcat

SEQ ID NO: 6316 - DNA, 30 bp, synthetic construct
  source 1..30: mol_type = other DNA
tcctccggaaaatattcaccaccatctcat

SEQ ID NO: 6317 - DNA, 31 bp, synthetic construct
  source 1..31: mol_type = other DNA
atcctccggaaaatattcaccaccatctcat

SEQ ID NO: 6318 - DNA, 32 bp, synthetic construct
  source 1..32: mol_type = other DNA
catcctccggaaaatattcaccaccatctcat

SEQ ID NO: 6319 - DNA, 33 bp, synthetic construct
  source 1..33: mol_type = other DNA
tcatcctccggaaaatattcaccaccatctcat

SEQ ID NO: 6320 - DNA, 34 bp, synthetic construct
  source 1..34: mol_type = other DNA
atcatcctccggaaaatattcaccaccatctcat

SEQ ID NO: 6321 - DNA, 35 bp, synthetic construct
  source 1..35: mol_type = other DNA
aatcatcctccggaaaatattcaccaccatctcat

SEQ ID NO: 6322 - DNA, 36 bp, synthetic construct
  source 1..36: mol_type = other DNA
gaatcatcctccggaaaatattcaccaccatctcat

SEQ ID NO: 6323 - DNA, 37 bp, synthetic construct
  source 1..37: mol_type = other DNA
ggaatcatcctccggaaaatattcaccaccatctcat

SEQ ID NO: 6324 - DNA, 38 bp, synthetic construct
  source 1..38: mol_type = other DNA
aggaatcatcctccggaaaatattcaccaccatctcat

SEQ ID NO: 6325 - DNA, 39 bp, synthetic construct
  source 1..39: mol_type = other DNA
aaggaatcatcctccggaaaatattcaccaccatctcat

SEQ ID NO: 6326 - DNA, 40 bp, synthetic construct
  source 1..40: mol_type = other DNA
aaaggaatcatcctccggaaaatattcaccaccatctcat

SEQ ID NO: 6327 - DNA, 33 bp, synthetic construct
  source 1..33: mol_type = other DNA
ccggaaaatattcaccaccatctcattttgcat

SEQ ID NO: 6328 - DNA, 33 bp, synthetic construct
  source 1..33: mol_type = other DNA
ccggaaaatattcaccaccatctcattctgcat

SEQ ID NO: 6329 - DNA, 34 bp, synthetic construct
  source 1..34: mol_type = other DNA
tccggaaaatattcaccaccatctcattttgcat

SEQ ID NO: 6330 - DNA, 34 bp, synthetic construct
  source 1..34: mol_type = other DNA
tccggaaaatattcaccaccatctcattctgcat

SEQ ID NO: 6331 - DNA, 35 bp, synthetic construct
  source 1..35: mol_type = other DNA
ctccggaaaatattcaccaccatctcattctgcat

SEQ ID NO: 6332 - DNA, 35 bp, synthetic construct
  source 1..35: mol_type = other DNA
ctccggaaaatattcaccaccatctcattttgcat

SEQ ID NO: 6333 - DNA, 36 bp, synthetic construct
  source 1..36: mol_type = other DNA
cctccggaaaatattcaccaccatctcattctgcat

SEQ ID NO: 6334 - DNA, 36 bp, synthetic construct
  source 1..36: mol_type = other DNA
cctccggaaaatattcaccaccatctcattttgcat

SEQ ID NO: 6335 - DNA, 37 bp, synthetic construct
  source 1..37: mol_type = other DNA
tcctccggaaaatattcaccaccatctcattctgcat

SEQ ID NO: 6336 - DNA, 37 bp, synthetic construct
  source 1..37: mol_type = other DNA
tcctccggaaaatattcaccaccatctcattttgcat

SEQ ID NO: 6337 - DNA, 38 bp, synthetic construct
  source 1..38: mol_type = other DNA
atcctccggaaaatattcaccaccatctcattctgcat

SEQ ID NO: 6338 - DNA, 38 bp, synthetic construct
  source 1..38: mol_type = other DNA
atcctccggaaaatattcaccaccatctcattttgcat

SEQ ID NO: 6339 - DNA, 39 bp, synthetic construct
  source 1..39: mol_type = other DNA
catcctccggaaaatattcaccaccatctcattttgcat

SEQ ID NO: 6340 - DNA, 39 bp, synthetic construct
  source 1..39: mol_type = other DNA
catcctccggaaaatattcaccaccatctcattctgcat

SEQ ID NO: 6341 - DNA, 40 bp, synthetic construct
  source 1..40: mol_type = other DNA
tcatcctccggaaaatattcaccaccatctcattttgcat

SEQ ID NO: 6342 - DNA, 40 bp, synthetic construct
  source 1..40: mol_type = other DNA
tcatcctccggaaaatattcaccaccatctcattctgcat

SEQ ID NO: 6343 - DNA, 10 bp, synthetic construct
  source 1..10: mol_type = other DNA
tttccggagg

SEQ ID NO: 6344 - DNA, 11 bp, synthetic construct
  source 1..11: mol_type = other DNA
ttttccggagg

SEQ ID NO: 6345 - DNA, 12 bp, synthetic construct
  source 1..12: mol_type = other DNA
attttccggagg

SEQ ID NO: 6346 - DNA, 13 bp, synthetic construct
  source 1..13: mol_type = other DNA
tattttccggagg

SEQ ID NO: 6347 - DNA, 14 bp, synthetic construct
  source 1..14: mol_type = other DNA
atattttccggagg

SEQ ID NO: 6348 - DNA, 15 bp, synthetic construct
  source 1..15: mol_type = other DNA
aatattttccggagg

SEQ ID NO: 6349 - DNA, 16 bp, synthetic construct
  source 1..16: mol_type = other DNA
gaatattttccggagg

SEQ ID NO: 6350 - DNA, 17 bp, synthetic construct
  source 1..17: mol_type = other DNA
tgaatattttccggagg

SEQ ID NO: 6351 - DNA, 18 bp, synthetic construct
  source 1..18: mol_type = other DNA
gtgaatattttccggagg

SEQ ID NO: 6352 - DNA, 19 bp, synthetic construct
  source 1..19: mol_type = other DNA
ggtgaatattttccggagg

SEQ ID NO: 6353 - DNA, 20 bp, synthetic construct
  source 1..20: mol_type = other DNA
tggtgaatattttccggagg

SEQ ID NO: 6354 - DNA, 21 bp, synthetic construct
  source 1..21: mol_type = other DNA
gtggtgaatattttccggagg

SEQ ID NO: 6355 - DNA, 22 bp, synthetic construct
  source 1..22: mol_type = other DNA
ggtggtgaatattttccggagg

SEQ ID NO: 6356 - DNA, 23 bp, synthetic construct
  source 1..23: mol_type = other DNA
tggtggtgaatattttccggagg

SEQ ID NO: 6357 - DNA, 24 bp, synthetic construct
  source 1..24: mol_type = other DNA
atggtggtgaatattttccggagg

SEQ ID NO: 6358 - DNA, 25 bp, synthetic construct
  source 1..25: mol_type = other DNA
gatggtggtgaatattttccggagg

SEQ ID NO: 6359 - DNA, 26 bp, synthetic construct
  source 1..26: mol_type = other DNA
agatggtggtgaatattttccggagg

SEQ ID NO: 6360 - DNA, 27 bp, synthetic construct
  source 1..27: mol_type = other DNA
gagatggtggtgaatattttccggagg

SEQ ID NO: 6361 - DNA, 28 bp, synthetic construct
  source 1..28: mol_type = other DNA
tgagatggtggtgaatattttccggagg

SEQ ID NO: 6362 - DNA, 29 bp, synthetic construct
  source 1..29: mol_type = other DNA
atgagatggtggtgaatattttccggagg

SEQ ID NO: 6363 - DNA, 30 bp, synthetic construct
  source 1..30: mol_type = other DNA
aatgagatggtggtgaatattttccggagg

SEQ ID NO: 6364 - DNA, 31 bp, synthetic construct
  source 1..31: mol_type = other DNA
gaatgagatggtggtgaatattttccggagg

SEQ ID NO: 6365 - DNA, 32 bp, synthetic construct
  source 1..32: mol_type = other DNA
agaatgagatggtggtgaatattttccggagg

SEQ ID NO: 6366 - DNA, 33 bp, synthetic construct
  source 1..33: mol_type = other DNA
cagaatgagatggtggtgaatattttccggagg

SEQ ID NO: 6367 - DNA, 34 bp, synthetic construct
  source 1..34: mol_type = other DNA
gcagaatgagatggtggtgaatattttccggagg

SEQ ID NO: 6368 - DNA, 35 bp, synthetic construct
  source 1..35: mol_type = other DNA
tgcagaatgagatggtggtgaatattttccggagg

SEQ ID NO: 6369 - DNA, 36 bp, synthetic construct
  source 1..36: mol_type = other DNA
atgcagaatgagatggtggtgaatattttccggagg

SEQ ID NO: 6370 - DNA, 37 bp, synthetic construct
  source 1..37: mol_type = other DNA
aatgcagaatgagatggtggtgaatattttccggagg

SEQ ID NO: 6371 - DNA, 38 bp, synthetic construct
  source 1..38: mol_type = other DNA
caatgcagaatgagatggtggtgaatattttccggagg

SEQ ID NO: 6372 - DNA, 39 bp, synthetic construct
  source 1..39: mol_type = other DNA
acaatgcagaatgagatggtggtgaatattttccggagg

SEQ ID NO: 6373 - DNA, 40 bp, synthetic construct
  source 1..40: mol_type = other DNA
aacaatgcagaatgagatggtggtgaatattttccggagg

SEQ ID NO: 6374 - DNA, 19 bp, synthetic construct
  source 1..19: mol_type = other DNA
cggaggatgattcctttga

SEQ ID NO: 6375 - DNA, 19 bp, synthetic construct
  source 1..19: mol_type = other DNA
cggaggatgattcccttga

SEQ ID NO: 6376 - DNA, 20 bp, synthetic construct
  source 1..20: mol_type = other DNA
ccggaggatgattcctttga

SEQ ID NO: 6377 - DNA, 20 bp, synthetic construct
  source 1..20: mol_type = other DNA
ccggaggatgattcccttga

SEQ ID NO: 6378 - DNA, 21 bp, synthetic construct
  source 1..21: mol_type = other DNA
tccggaggatgattcctttga

SEQ ID NO: 6379 - DNA, 21 bp, synthetic construct
  source 1..21: mol_type = other DNA
tccggaggatgattcccttga

SEQ ID NO: 6380 - DNA, 22 bp, synthetic construct
  source 1..22: mol_type = other DNA
ttccggaggatgattcctttga

SEQ ID NO: 6381 - DNA, 22 bp, synthetic construct
  source 1..22: mol_type = other DNA
ttccggaggatgattcccttga

SEQ ID NO: 6382 - DNA, 23 bp, synthetic construct
  source 1..23: mol_type = other DNA
tttccggaggatgattcctttga

SEQ ID NO: 6383 - DNA, 23 bp, synthetic construct
  source 1..23: mol_type = other DNA
tttccggaggatgattcccttga

SEQ ID NO: 6384 - DNA, 24 bp, synthetic construct
  source 1..24: mol_type = other DNA
ttttccggaggatgattcctttga

SEQ ID NO: 6385 - DNA, 24 bp, synthetic construct
  source 1..24: mol_type = other DNA
ttttccggaggatgattcccttga

SEQ ID NO: 6386 - DNA, 25 bp, synthetic construct
  source 1..25: mol_type = other DNA
attttccggaggatgattcctttga

SEQ ID NO: 6387 - DNA, 25 bp, synthetic construct
  source 1..25: mol_type = other DNA
attttccggaggatgattcccttga

SEQ ID NO: 6388 - DNA, 26 bp, synthetic construct
  source 1..26: mol_type = other DNA
tattttccggaggatgattcccttga

SEQ ID NO: 6389 - DNA, 26 bp, synthetic construct
  source 1..26: mol_type = other DNA
tattttccggaggatgattcctttga

SEQ ID NO: 6390 - DNA, 27 bp, synthetic construct
  source 1..27: mol_type = other DNA
atattttccggaggatgattcctttga

SEQ ID NO: 6391 - DNA, 27 bp, synthetic construct
  source 1..27: mol_type = other DNA
atattttccggaggatgattcccttga

SEQ ID NO: 6392 - DNA, 28 bp, synthetic construct
  source 1..28: mol_type = other DNA
aatattttccggaggatgattcctttga

SEQ ID NO: 6393 - DNA, 28 bp, synthetic construct
  source 1..28: mol_type = other DNA
aatattttccggaggatgattcccttga

SEQ ID NO: 6394 - DNA, 29 bp, synthetic construct
  source 1..29: mol_type = other DNA
gaatattttccggaggatgattcctttga

SEQ ID NO: 6395 - DNA, 29 bp, synthetic construct
  source 1..29: mol_type = other DNA
gaatattttccggaggatgattcccttga

SEQ ID NO: 6396 - DNA, 30 bp, synthetic construct
  source 1..30: mol_type = other DNA
tgaatattttccggaggatgattcctttga

SEQ ID NO: 6397 - DNA, 30 bp, synthetic construct
  source 1..30: mol_type = other DNA
tgaatattttccggaggatgattcccttga

SEQ ID NO: 6398 - DNA, 31 bp, synthetic construct
  source 1..31: mol_type = other DNA
gtgaatattttccggaggatgattcctttga

SEQ ID NO: 6399 - DNA, 31 bp, synthetic construct
  source 1..31: mol_type = other DNA
gtgaatattttccggaggatgattcccttga

SEQ ID NO: 6400 - DNA, 32 bp, synthetic construct
  source 1..32: mol_type = other DNA
ggtgaatattttccggaggatgattcctttga

SEQ ID NO: 6401 - DNA, 32 bp, synthetic construct
  source 1..32: mol_type = other DNA
ggtgaatattttccggaggatgattcccttga

SEQ ID NO: 6402 - DNA, 33 bp, synthetic construct
  source 1..33: mol_type = other DNA
tggtgaatattttccggaggatgattcctttga

SEQ ID NO: 6403 - DNA, 33 bp, synthetic construct
  source 1..33: mol_type = other DNA
tggtgaatattttccggaggatgattcccttga

SEQ ID NO: 6404 - DNA, 34 bp, synthetic construct
  source 1..34: mol_type = other DNA
gtggtgaatattttccggaggatgattcccttga

SEQ ID NO: 6405 - DNA, 34 bp, synthetic construct
  source 1..34: mol_type = other DNA
gtggtgaatattttccggaggatgattcctttga

SEQ ID NO: 6406 - DNA, 35 bp, synthetic construct
  source 1..35: mol_type = other DNA
ggtggtgaatattttccggaggatgattcccttga

SEQ ID NO: 6407 - DNA, 35 bp, synthetic construct
  source 1..35: mol_type = other DNA
ggtggtgaatattttccggaggatgattcctttga

SEQ ID NO: 6408 - DNA, 36 bp, synthetic construct
  source 1..36: mol_type = other DNA
tggtggtgaatattttccggaggatgattcctttga

SEQ ID NO: 6409 - DNA, 36 bp, synthetic construct
  source 1..36: mol_type = other DNA
tggtggtgaatattttccggaggatgattcccttga

SEQ ID NO: 6410 - DNA, 37 bp, synthetic construct
  source 1..37: mol_type = other DNA
atggtggtgaatattttccggaggatgattcccttga

SEQ ID NO: 6411 - DNA, 37 bp, synthetic construct
  source 1..37: mol_type = other DNA
atggtggtgaatattttccggaggatgattcctttga

SEQ ID NO: 6412 - DNA, 38 bp, synthetic construct
  source 1..38: mol_type = other DNA
gatggtggtgaatattttccggaggatgattcccttga

SEQ ID NO: 6413 - DNA, 38 bp, synthetic construct
  source 1..38: mol_type = other DNA
gatggtggtgaatattttccggaggatgattcctttga

SEQ ID NO: 6414 - DNA, 39 bp, synthetic construct
  source 1..39: mol_type = other DNA
agatggtggtgaatattttccggaggatgattcccttga

SEQ ID NO: 6415 - DNA, 39 bp, synthetic construct
  source 1..39: mol_type = other DNA
agatggtggtgaatattttccggaggatgattcctttga

SEQ ID NO: 6416 - DNA, 40 bp, synthetic construct
  source 1..40: mol_type = other DNA
gagatggtggtgaatattttccggaggatgattcccttga

SEQ ID NO: 6417 - DNA, 40 bp, synthetic construct
  source 1..40: mol_type = other DNA
gagatggtggtgaatattttccggaggatgattcctttga

SEQ ID NO: 6418 - DNA, 40 bp, synthetic construct
  source 1..40: mol_type = other DNA
cggaggatgattcctttgattagtgcatagggaagcacag

SEQ ID NO: 6419 - DNA, 21 bp, synthetic construct
  source 1..21: mol_type = other DNA
ccggaaaatattcaccaccat

SEQ ID NO: 6420 - DNA, 22 bp, synthetic construct
  source 1..22: mol_type = other DNA
tccggaaaatattcaccaccat

SEQ ID NO: 6421 - DNA, 23 bp, synthetic construct
  source 1..23: mol_type = other DNA
ctccggaaaatattcaccaccat

SEQ ID NO: 6422 - DNA, 24 bp, synthetic construct
  source 1..24: mol_type = other DNA
cctccggaaaatattcaccaccat

SEQ ID NO: 6423 - DNA, 25 bp, synthetic construct
  source 1..25: mol_type = other DNA
tcctccggaaaatattcaccaccat

SEQ ID NO: 6424 - DNA, 26 bp, synthetic construct
  source 1..26: mol_type = other DNA
atcctccggaaaatattcaccaccat

SEQ ID NO: 6425 - DNA, 27 bp, synthetic construct
  source 1..27: mol_type = other DNA
catcctccggaaaatattcaccaccat

SEQ ID NO: 6426 - DNA, 28 bp, synthetic construct
  source 1..28: mol_type = other DNA
tcatcctccggaaaatattcaccaccat

SEQ ID NO: 6427 - DNA, 29 bp, synthetic construct
  source 1..29: mol_type = other DNA
atcatcctccggaaaatattcaccaccat

SEQ ID NO: 6428 - DNA, 30 bp, synthetic construct
  source 1..30: mol_type = other DNA
aatcatcctccggaaaatattcaccaccat

SEQ ID NO: 6429 - DNA, 31 bp, synthetic construct
  source 1..31: mol_type = other DNA
gaatcatcctccggaaaatattcaccaccat

SEQ ID NO: 6430 - DNA, 32 bp, synthetic construct
  source 1..32: mol_type = other DNA
ggaatcatcctccggaaaatattcaccaccat

SEQ ID NO: 6431 - DNA, 33 bp, synthetic construct
  source 1..33: mol_type = other DNA
aggaatcatcctccggaaaatattcaccaccat

SEQ ID NO: 6432 - DNA, 34 bp, synthetic construct
  source 1..34: mol_type = other DNA
aaggaatcatcctccggaaaatattcaccaccat

SEQ ID NO: 6433 - DNA, 35 bp, synthetic construct
  source 1..35: mol_type = other DNA
aaaggaatcatcctccggaaaatattcaccaccat

SEQ ID NO: 6434 - DNA, 36 bp, synthetic construct
  source 1..36: mol_type = other DNA
caaaggaatcatcctccggaaaatattcaccaccat

SEQ ID NO: 6435 - DNA, 37 bp, synthetic construct
  source 1..37: mol_type = other DNA
tcaaaggaatcatcctccggaaaatattcaccaccat

SEQ ID NO: 6436 - DNA, 38 bp, synthetic construct
  source 1..38: mol_type = other DNA
atcaaaggaatcatcctccggaaaatattcaccaccat

SEQ ID NO: 6437 - DNA, 39 bp, synthetic construct
  source 1..39: mol_type = other DNA
aatcaaaggaatcatcctccggaaaatattcaccaccat

SEQ ID NO: 6438 - DNA, 40 bp, synthetic construct
  source 1..40: mol_type = other DNA
taatcaaaggaatcatcctccggaaaatattcaccaccat

SEQ ID NO: 6439 - DNA, 35 bp, synthetic construct
  source 1..35: mol_type = other DNA
ccggaaaatattcaccaccatctcattctgcattg

SEQ ID NO: 6440 - DNA, 36 bp, synthetic construct
  source 1..36: mol_type = other DNA
tccggaaaatattcaccaccatctcattctgcattg

SEQ ID NO: 6441 - DNA, 37 bp, synthetic construct
  source 1..37: mol_type = other DNA
ctccggaaaatattcaccaccatctcattctgcattg

SEQ ID NO: 6442 - DNA, 38 bp, synthetic construct
  source 1..38: mol_type = other DNA
cctccggaaaatattcaccaccatctcattctgcattg

SEQ ID NO: 6443 - DNA, 39 bp, synthetic construct
  source 1..39: mol_type = other DNA
tcctccggaaaatattcaccaccatctcattctgcattg

SEQ ID NO: 6444 - DNA, 40 bp, synthetic construct
  source 1..40: mol_type = other DNA
atcctccggaaaatattcaccaccatctcattctgcattg

SEQ ID NO: 6445 - DNA, 10 bp, synthetic construct
  source 1..10: mol_type = other DNA
tcctccggaa

SEQ ID NO: 6446 - DNA, 11 bp, synthetic construct
  source 1..11: mol_type = other DNA
atcctccggaa

SEQ ID NO: 6447 - DNA, 12 bp, synthetic construct
  source 1..12: mol_type = other DNA
catcctccggaa

SEQ ID NO: 6448 - DNA, 13 bp, synthetic construct
  source 1..13: mol_type = other DNA
tcatcctccggaa

SEQ ID NO: 6449 - DNA, 14 bp, synthetic construct
  source 1..14: mol_type = other DNA
atcatcctccggaa

SEQ ID NO: 6450 - DNA, 15 bp, synthetic construct
  source 1..15: mol_type = other DNA
aatcatcctccggaa

SEQ ID NO: 6451 - DNA, 16 bp, synthetic construct
  source 1..16: mol_type = other DNA
gaatcatcctccggaa

SEQ ID NO: 6452 - DNA, 17 bp, synthetic construct
  source 1..17: mol_type = other DNA
ggaatcatcctccggaa

SEQ ID NO: 6453 - DNA, 18 bp, synthetic construct
  source 1..18: mol_type = other DNA
aggaatcatcctccggaa

SEQ ID NO: 6454 - DNA, 19 bp, synthetic construct
  source 1..19: mol_type = other DNA
aaggaatcatcctccggaa

SEQ ID NO: 6455 - DNA, 20 bp, synthetic construct
  source 1..20: mol_type = other DNA
aaaggaatcatcctccggaa

SEQ ID NO: 6456 - DNA, 21 bp, synthetic construct
  source 1..21: mol_type = other DNA
caaaggaatcatcctccggaa

SEQ ID NO: 6457 - DNA, 22 bp, synthetic construct
  source 1..22: mol_type = other DNA
tcaaaggaatcatcctccggaa

SEQ ID NO: 6458 - DNA, 23 bp, synthetic construct
  source 1..23: mol_type = other DNA
atcaaaggaatcatcctccggaa

SEQ ID NO: 6459 - DNA, 24 bp, synthetic construct
  source 1..24: mol_type = other DNA
aatcaaaggaatcatcctccggaa

SEQ ID NO: 6460 - DNA, 25 bp, synthetic construct
  source 1..25: mol_type = other DNA
taatcaaaggaatcatcctccggaa

SEQ ID NO: 6461 - DNA, 26 bp, synthetic construct
  source 1..26: mol_type = other DNA
ctaatcaaaggaatcatcctccggaa

SEQ ID NO: 6462 - DNA, 27 bp, synthetic construct
  source 1..27: mol_type = other DNA
actaatcaaaggaatcatcctccggaa

SEQ ID NO: 6463 - DNA, 28 bp, synthetic construct
  source 1..28: mol_type = other DNA
cactaatcaaaggaatcatcctccggaa

SEQ ID NO: 6464 - DNA, 29 bp, synthetic construct
  source 1..29: mol_type = other DNA
gcactaatcaaaggaatcatcctccggaa

SEQ ID NO: 6465 - DNA, 30 bp, synthetic construct
  source 1..30: mol_type = other DNA
tgcactaatcaaaggaatcatcctccggaa

SEQ ID NO: 6466 - DNA, 31 bp, synthetic construct
  source 1..31: mol_type = other DNA
atgcactaatcaaaggaatcatcctccggaa

SEQ ID NO: 6467 - DNA, 32 bp, synthetic construct
  source 1..32: mol_type = other DNA
tatgcactaatcaaaggaatcatcctccggaa

SEQ ID NO: 6468 - DNA, 33 bp, synthetic construct
  source 1..33: mol_type = other DNA
ctatgcactaatcaaaggaatcatcctccggaa

SEQ ID NO: 6469 - DNA, 34 bp, synthetic construct
  source 1..34: mol_type = other DNA
cctatgcactaatcaaaggaatcatcctccggaa

SEQ ID NO: 6470 - DNA, 35 bp, synthetic construct
  source 1..35: mol_type = other DNA
ccctatgcactaatcaaaggaatcatcctccggaa

SEQ ID NO: 6471 - DNA, 36 bp, synthetic construct
  source 1..36: mol_type = other DNA
tccctatgcactaatcaaaggaatcatcctccggaa

SEQ ID NO: 6472 - DNA, 37 bp, synthetic construct
  source 1..37: mol_type = other DNA
ttccctatgcactaatcaaaggaatcatcctccggaa

SEQ ID NO: 6473 - DNA, 38 bp, synthetic construct
  source 1..38: mol_type = other DNA
cttccctatgcactaatcaaaggaatcatcctccggaa

SEQ ID NO: 6474 - DNA, 39 bp, synthetic construct
  source 1..39: mol_type = other DNA
gcttccctatgcactaatcaaaggaatcatcctccggaa

SEQ ID NO: 6475 - DNA, 40 bp, synthetic construct
  source 1..40: mol_type = other DNA
tgcttccctatgcactaatcaaaggaatcatcctccggaa

SEQ ID NO: 6476 - DNA, 24 bp, synthetic construct
  source 1..24: mol_type = other DNA
ccggaaaatattcaccaccatctc

SEQ ID NO: 6477 - DNA, 25 bp, synthetic construct
  source 1..25: mol_type = other DNA
tccggaaaatattcaccaccatctc

SEQ ID NO: 6478 - DNA, 26 bp, synthetic construct
  source 1..26: mol_type = other DNA
ctccggaaaatattcaccaccatctc

SEQ ID NO: 6479 - DNA, 27 bp, synthetic construct
  source 1..27: mol_type = other DNA
cctccggaaaatattcaccaccatctc

SEQ ID NO: 6480 - DNA, 28 bp, synthetic construct
  source 1..28: mol_type = other DNA
tcctccggaaaatattcaccaccatctc

SEQ ID NO: 6481 - DNA, 29 bp, synthetic construct
  source 1..29: mol_type = other DNA
atcctccggaaaatattcaccaccatctc

SEQ ID NO: 6482 - DNA, 30 bp, synthetic construct
  source 1..30: mol_type = other DNA
catcctccggaaaatattcaccaccatctc

SEQ ID NO: 6483 - DNA, 31 bp, synthetic construct
  source 1..31: mol_type = other DNA
tcatcctccggaaaatattcaccaccatctc

SEQ ID NO: 6484 - DNA, 32 bp, synthetic construct
  source 1..32: mol_type = other DNA
atcatcctccggaaaatattcaccaccatctc

SEQ ID NO: 6485 - DNA, 33 bp, synthetic construct
  source 1..33: mol_type = other DNA
aatcatcctccggaaaatattcaccaccatctc

SEQ ID NO: 6486 - DNA, 34 bp, synthetic construct
  source 1..34: mol_type = other DNA
gaatcatcctccggaaaatattcaccaccatctc

SEQ ID NO: 6487 - DNA, 35 bp, synthetic construct
  source 1..35: mol_type = other DNA
ggaatcatcctccggaaaatattcaccaccatctc

SEQ ID NO: 6488 - DNA, 36 bp, synthetic construct
  source 1..36: mol_type = other DNA
aggaatcatcctccggaaaatattcaccaccatctc

SEQ ID NO: 6489 - DNA, 37 bp, synthetic construct
  source 1..37: mol_type = other DNA
aaggaatcatcctccggaaaatattcaccaccatctc

SEQ ID NO: 6490 - DNA, 38 bp, synthetic construct
  source 1..38: mol_type = other DNA
aaaggaatcatcctccggaaaatattcaccaccatctc

SEQ ID NO: 6491 - DNA, 39 bp, synthetic construct
  source 1..39: mol_type = other DNA
caaaggaatcatcctccggaaaatattcaccaccatctc

SEQ ID NO: 6492 - DNA, 40 bp, synthetic construct
  source 1..40: mol_type = other DNA
tcaaaggaatcatcctccggaaaatattcaccaccatctc

SEQ ID NO: 6493 - DNA, 32 bp, synthetic construct
  source 1..32: mol_type = other DNA
ccggaaaatattcaccaccatctcattctgca

SEQ ID NO: 6494 - DNA, 33 bp, synthetic construct
  source 1..33: mol_type = other DNA
tccggaaaatattcaccaccatctcattctgca

SEQ ID NO: 6495 - DNA, 34 bp, synthetic construct
  source 1..34: mol_type = other DNA
ctccggaaaatattcaccaccatctcattctgca

SEQ ID NO: 6496 - DNA, 35 bp, synthetic construct
  source 1..35: mol_type = other DNA
cctccggaaaatattcaccaccatctcattctgca

SEQ ID NO: 6497 - DNA, 36 bp, synthetic construct
  source 1..36: mol_type = other DNA
tcctccggaaaatattcaccaccatctcattctgca

SEQ ID NO: 6498 - DNA, 37 bp, synthetic construct
  source 1..37: mol_type = other DNA
atcctccggaaaatattcaccaccatctcattctgca

SEQ ID NO: 6499 - DNA, 38 bp, synthetic construct
  source 1..38: mol_type = other DNA
catcctccggaaaatattcaccaccatctcattctgca

SEQ ID NO: 6500 - DNA, 39 bp, synthetic construct
  source 1..39: mol_type = other DNA
tcatcctccggaaaatattcaccaccatctcattctgca

SEQ ID NO: 6501 - DNA, 40 bp, synthetic construct
  source 1..40: mol_type = other DNA
atcatcctccggaaaatattcaccaccatctcattctgca

SEQ ID NO: 6502 - DNA, 27 bp, synthetic construct
  source 1..27: mol_type = other DNA
ccggaaaatattcaccaccatttcatt

SEQ ID NO: 6503 - DNA, 27 bp, synthetic construct
  source 1..27: mol_type = other DNA
ccggaaaatattcaccaccatctcatt

SEQ ID NO: 6504 - DNA, 28 bp, synthetic construct
  source 1..28: mol_type = other DNA
tccggaaaatattcaccaccatctcatt

SEQ ID NO: 6505 - DNA, 28 bp, synthetic construct
  source 1..28: mol_type = other DNA
tccggaaaatattcaccaccatttcatt

SEQ ID NO: 6506 - DNA, 29 bp, synthetic construct
  source 1..29: mol_type = other DNA
ctccggaaaatattcaccaccatctcatt

SEQ ID NO: 6507 - DNA, 29 bp, synthetic construct
  source 1..29: mol_type = other DNA
ctccggaaaatattcaccaccatttcatt

SEQ ID NO: 6508 - DNA, 30 bp, synthetic construct
  source 1..30: mol_type = other DNA
cctccggaaaatattcaccaccatctcatt

SEQ ID NO: 6509 - DNA, 30 bp, synthetic construct
  source 1..30: mol_type = other DNA
cctccggaaaatattcaccaccatttcatt

SEQ ID NO: 6510 - DNA, 31 bp, synthetic construct
  source 1..31: mol_type = other DNA
tcctccggaaaatattcaccaccatttcatt

SEQ ID NO: 6511 - DNA, 31 bp, synthetic construct
  source 1..31: mol_type = other DNA
tcctccggaaaatattcaccaccatctcatt

SEQ ID NO: 6512 - DNA, 32 bp, synthetic construct
  source 1..32: mol_type = other DNA
atcctccggaaaatattcaccaccatttcatt

SEQ ID NO: 6513 - DNA, 32 bp, synthetic construct
  source 1..32: mol_type = other DNA
atcctccggaaaatattcaccaccatctcatt

SEQ ID NO: 6514 - DNA, 33 bp, synthetic construct
  source 1..33: mol_type = other DNA
catcctccggaaaatattcaccaccatttcatt

SEQ ID NO: 6515 - DNA, 33 bp, synthetic construct
  source 1..33: mol_type = other DNA
catcctccggaaaatattcaccaccatctcatt

SEQ ID NO: 6516 - DNA, 34 bp, synthetic construct
  source 1..34: mol_type = other DNA
tcatcctccggaaaatattcaccaccatttcatt

SEQ ID NO: 6517 - DNA, 34 bp, synthetic construct
  source 1..34: mol_type = other DNA
tcatcctccggaaaatattcaccaccatctcatt

SEQ ID NO: 6518 - DNA, 35 bp, synthetic construct
  source 1..35: mol_type = other DNA
atcatcctccggaaaatattcaccaccatctcatt

SEQ ID NO: 6519 - DNA, 35 bp, synthetic construct
  source 1..35: mol_type = other DNA
atcatcctccggaaaatattcaccaccatttcatt

SEQ ID NO: 6520 - DNA, 36 bp, synthetic construct
  source 1..36: mol_type = other DNA
aatcatcctccggaaaatattcaccaccatttcatt

SEQ ID NO: 6521 - DNA, 36 bp, synthetic construct
  source 1..36: mol_type = other DNA
aatcatcctccggaaaatattcaccaccatctcatt

SEQ ID NO: 6522 - DNA, 37 bp, synthetic construct
  source 1..37: mol_type = other DNA
gaatcatcctccggaaaatattcaccaccatttcatt

SEQ ID NO: 6523 - DNA, 37 bp, synthetic construct
  source 1..37: mol_type = other DNA
gaatcatcctccggaaaatattcaccaccatctcatt

SEQ ID NO: 6524 - DNA, 38 bp, synthetic construct
  source 1..38: mol_type = other DNA
ggaatcatcctccggaaaatattcaccaccatctcatt

SEQ ID NO: 6525 - DNA, 38 bp, synthetic construct
  source 1..38: mol_type = other DNA
ggaatcatcctccggaaaatattcaccaccatttcatt

SEQ ID NO: 6526 - DNA, 39 bp, synthetic construct
  source 1..39: mol_type = other DNA
aggaatcatcctccggaaaatattcaccaccatctcatt

SEQ ID NO: 6527 - DNA, 39 bp, synthetic construct
  source 1..39: mol_type = other DNA
aggaatcatcctccggaaaatattcaccaccatttcatt

SEQ ID NO: 6528 - DNA, 40 bp, synthetic construct
  source 1..40: mol_type = other DNA
aaggaatcatcctccggaaaatattcaccaccatttcatt

SEQ ID NO: 6529 - DNA, 40 bp, synthetic construct
  source 1..40: mol_type = other DNA
aaggaatcatcctccggaaaatattcaccaccatctcatt

SEQ ID NO: 6530 - DNA, 10 bp, synthetic construct
  source 1..10: mol_type = other DNA
tcatcctccg

SEQ ID NO: 6531 - DNA, 10 bp, synthetic construct
  source 1..10: mol_type = other DNA
tcattctccg

SEQ ID NO: 6532 - DNA, 11 bp, synthetic construct
  source 1..11: mol_type = other DNA
atcattctccg

SEQ ID NO: 6533 - DNA, 11 bp, synthetic construct
  source 1..11: mol_type = other DNA
atcatcctccg

SEQ ID NO: 6534 - DNA, 12 bp, synthetic construct
  source 1..12: mol_type = other DNA
aatcattctccg

SEQ ID NO: 6535 - DNA, 12 bp, synthetic construct
  source 1..12: mol_type = other DNA
aatcatcctccg

SEQ ID NO: 6536 - DNA, 13 bp, synthetic construct
  source 1..13: mol_type = other DNA
gaatcattctccg

SEQ ID NO: 6537 - DNA, 13 bp, synthetic construct
  source 1..13: mol_type = other DNA
gaatcatcctccg

SEQ ID NO: 6538 - DNA, 14 bp, synthetic construct
  source 1..14: mol_type = other DNA
ggaatcattctccg

SEQ ID NO: 6539 - DNA, 14 bp, synthetic construct
  source 1..14: mol_type = other DNA
ggaatcatcctccg

SEQ ID NO: 6540 - DNA, 15 bp, synthetic construct
  source 1..15: mol_type = other DNA
aggaatcatcctccg

SEQ ID NO: 6541 - DNA, 15 bp, synthetic construct
  source 1..15: mol_type = other DNA
aggaatcattctccg

SEQ ID NO: 6542 - DNA, 16 bp, synthetic construct
  source 1..16: mol_type = other DNA
aaggaatcatcctccg

SEQ ID NO: 6543 - DNA, 16 bp, synthetic construct
  source 1..16: mol_type = other DNA
aaggaatcattctccg

SEQ ID NO: 6544 - DNA, 17 bp, synthetic construct
  source 1..17: mol_type = other DNA
aaaggaatcattctccg

SEQ ID NO: 6545 - DNA, 17 bp, synthetic construct
  source 1..17: mol_type = other DNA
aaaggaatcatcctccg

SEQ ID NO: 6546 - DNA, 18 bp, synthetic construct
  source 1..18: mol_type = other DNA
caaaggaatcatcctccg

SEQ ID NO: 6547 - DNA, 18 bp, synthetic construct
  source 1..18: mol_type = other DNA
caaaggaatcattctccg

SEQ ID NO: 6548 - DNA, 19 bp, synthetic construct
  source 1..19: mol_type = other DNA
tcaaaggaatcattctccg

SEQ ID NO: 6549 - DNA, 19 bp, synthetic construct
  source 1..19: mol_type = other DNA
tcaaaggaatcatcctccg

SEQ ID NO: 6550 - DNA, 20 bp, synthetic construct
  source 1..20: mol_type = other DNA
atcaaaggaatcatcctccg

SEQ ID NO: 6551 - DNA, 20 bp, synthetic construct
  source 1..20: mol_type = other DNA
atcaaaggaatcattctccg

SEQ ID NO: 6552 - DNA, 21 bp, synthetic construct
  source 1..21: mol_type = other DNA
aatcaaaggaatcatcctccg

SEQ ID NO: 6553 - DNA, 21 bp, synthetic construct
  source 1..21: mol_type = other DNA
aatcaaaggaatcattctccg

SEQ ID NO: 6554 - DNA, 22 bp, synthetic construct
  source 1..22: mol_type = other DNA
taatcaaaggaatcatcctccg

SEQ ID NO: 6555 - DNA, 22 bp, synthetic construct
  source 1..22: mol_type = other DNA
taatcaaaggaatcattctccg

SEQ ID NO: 6556 - DNA, 23 bp, synthetic construct
  source 1..23: mol_type = other DNA
ctaatcaaaggaatcattctccg

SEQ ID NO: 6557 - DNA, 23 bp, synthetic construct
  source 1..23: mol_type = other DNA
ctaatcaaaggaatcatcctccg

SEQ ID NO: 6558 - DNA, 24 bp, synthetic construct
  source 1..24: mol_type = other DNA
actaatcaaaggaatcattctccg

SEQ ID NO: 6559 - DNA, 24 bp, synthetic construct
  source 1..24: mol_type = other DNA
actaatcaaaggaatcatcctccg

SEQ ID NO: 6560 - DNA, 25 bp, synthetic construct
  source 1..25: mol_type = other DNA
cactaatcaaaggaatcattctccg

SEQ ID NO: 6561 - DNA, 25 bp, synthetic construct
  source 1..25: mol_type = other DNA
cactaatcaaaggaatcatcctccg

SEQ ID NO: 6562 - DNA, 26 bp, synthetic construct
  source 1..26: mol_type = other DNA
gcactaatcaaaggaatcattctccg

SEQ ID NO: 6563 - DNA, 26 bp, synthetic construct
  source 1..26: mol_type = other DNA
gcactaatcaaaggaatcatcctccg

SEQ ID NO: 6564 - DNA, 27 bp, synthetic construct
  source 1..27: mol_type = other DNA
tgcactaatcaaaggaatcatcctccg

SEQ ID NO: 6565 - DNA, 27 bp, synthetic construct
  source 1..27: mol_type = other DNA
tgcactaatcaaaggaatcattctccg

SEQ ID NO: 6566 - DNA, 28 bp, synthetic construct
  source 1..28: mol_type = other DNA
atgcactaatcaaaggaatcatcctccg

SEQ ID NO: 6567 - DNA, 28 bp, synthetic construct
  source 1..28: mol_type = other DNA
atgcactaatcaaaggaatcattctccg

SEQ ID NO: 6568 - DNA, 29 bp, synthetic construct
  source 1..29: mol_type = other DNA
tatgcactaatcaaaggaatcattctccg

SEQ ID NO: 6569 - DNA, 29 bp, synthetic construct
  source 1..29: mol_type = other DNA
tatgcactaatcaaaggaatcatcctccg

SEQ ID NO: 6570 - DNA, 30 bp, synthetic construct
  source 1..30: mol_type = other DNA
ctatgcactaatcaaaggaatcatcctccg

SEQ ID NO: 6571 - DNA, 30 bp, synthetic construct
  source 1..30: mol_type = other DNA
ctatgcactaatcaaaggaatcattctccg

SEQ ID NO: 6572 - DNA, 31 bp, synthetic construct
  source 1..31: mol_type = other DNA
cctatgcactaatcaaaggaatcatcctccg

SEQ ID NO: 6573 - DNA, 31 bp, synthetic construct
  source 1..31: mol_type = other DNA
cctatgcactaatcaaaggaatcattctccg

SEQ ID NO: 6574 - DNA, 32 bp, synthetic construct
  source 1..32: mol_type = other DNA
ccctatgcactaatcaaaggaatcatcctccg

SEQ ID NO: 6575 - DNA, 32 bp, synthetic construct
  source 1..32: mol_type = other DNA
ccctatgcactaatcaaaggaatcattctccg

SEQ ID NO: 6576 - DNA, 33 bp, synthetic construct
  source 1..33: mol_type = other DNA
tccctatgcactaatcaaaggaatcattctccg

SEQ ID NO: 6577 - DNA, 33 bp, synthetic construct
  source 1..33: mol_type = other DNA
tccctatgcactaatcaaaggaatcatcctccg

SEQ ID NO: 6578 - DNA, 34 bp, synthetic construct
  source 1..34: mol_type = other DNA
ttccctatgcactaatcaaaggaatcattctccg

SEQ ID NO: 6579 - DNA, 34 bp, synthetic construct
  source 1..34: mol_type = other DNA
ttccctatgcactaatcaaaggaatcatcctccg

SEQ ID NO: 6580 - DNA, 35 bp, synthetic construct
  source 1..35: mol_type = other DNA
cttccctatgcactaatcaaaggaatcatcctccg

SEQ ID NO: 6581 - DNA, 35 bp, synthetic construct
  source 1..35: mol_type = other DNA
cttccctatgcactaatcaaaggaatcattctccg

SEQ ID NO: 6582 - DNA, 36 bp, synthetic construct
  source 1..36: mol_type = other DNA
gcttccctatgcactaatcaaaggaatcatcctccg

SEQ ID NO: 6583 - DNA, 36 bp, synthetic construct
  source 1..36: mol_type = other DNA
gcttccctatgcactaatcaaaggaatcattctccg

SEQ ID NO: 6584 - DNA, 37 bp, synthetic construct
  source 1..37: mol_type = other DNA
tgcttccctatgcactaatcaaaggaatcatcctccg

SEQ ID NO: 6585 - DNA, 37 bp, synthetic construct
  source 1..37: mol_type = other DNA
tgcttccctatgcactaatcaaaggaatcattctccg

SEQ ID NO: 6586 - DNA, 38 bp, synthetic construct
  source 1..38: mol_type = other DNA
gtgcttccctatgcactaatcaaaggaatcattctccg

SEQ ID NO: 6587 - DNA, 38 bp, synthetic construct
  source 1..38: mol_type = other DNA
gtgcttccctatgcactaatcaaaggaatcatcctccg

SEQ ID NO: 6588 - DNA, 39 bp, synthetic construct
  source 1..39: mol_type = other DNA
tgtgcttccctatgcactaatcaaaggaatcattctccg

SEQ ID NO: 6589 - DNA, 39 bp, synthetic construct
  source 1..39: mol_type = other DNA
tgtgcttccctatgcactaatcaaaggaatcatcctccg

SEQ ID NO: 6590 - DNA, 40 bp, synthetic construct
  source 1..40: mol_type = other DNA
ctgtgcttccctatgcactaatcaaaggaatcatcctccg

SEQ ID NO: 6591 - DNA, 40 bp, synthetic construct
  source 1..40: mol_type = other DNA
ctgtgcttccctatgcactaatcaaaggaatcattctccg

SEQ ID NO: 6592 - DNA, 10 bp, synthetic construct
  source 1..10: mol_type = other DNA
atcatcctcc

SEQ ID NO: 6593 - DNA, 11 bp, synthetic construct
  source 1..11: mol_type = other DNA
aatcatcctcc

SEQ ID NO: 6594 - DNA, 12 bp, synthetic construct
  source 1..12: mol_type = other DNA
gaatcatcctcc

SEQ ID NO: 6595 - DNA, 13 bp, synthetic construct
  source 1..13: mol_type = other DNA
ggaatcatcctcc

SEQ ID NO: 6596 - DNA, 14 bp, synthetic construct
  source 1..14: mol_type = other DNA
aggaatcatcctcc

SEQ ID NO: 6597 - DNA, 15 bp, synthetic construct
  source 1..15: mol_type = other DNA
aaggaatcatcctcc

SEQ ID NO: 6598 - DNA, 16 bp, synthetic construct
  source 1..16: mol_type = other DNA
aaaggaatcatcctcc

SEQ ID NO: 6599 - DNA, 17 bp, synthetic construct
  source 1..17: mol_type = other DNA
caaaggaatcatcctcc

SEQ ID NO: 6600 - DNA, 18 bp, synthetic construct
  source 1..18: mol_type = other DNA
tcaaaggaatcatcctcc

SEQ ID NO: 6601 - DNA, 19 bp, synthetic construct
  source 1..19: mol_type = other DNA
atcaaaggaatcatcctcc

SEQ ID NO: 6602 - DNA, 20 bp, synthetic construct
  source 1..20: mol_type = other DNA
aatcaaaggaatcatcctcc

SEQ ID NO: 6603 - DNA, 21 bp, synthetic construct
  source 1..21: mol_type = other DNA
taatcaaaggaatcatcctcc

SEQ ID NO: 6604 - DNA, 22 bp, synthetic construct
  source 1..22: mol_type = other DNA
ctaatcaaaggaatcatcctcc

SEQ ID NO: 6605 - DNA, 23 bp, synthetic construct
  source 1..23: mol_type = other DNA
actaatcaaaggaatcatcctcc

SEQ ID NO: 6606 - DNA, 24 bp, synthetic construct
  source 1..24: mol_type = other DNA
cactaatcaaaggaatcatcctcc

SEQ ID NO: 6607 - DNA, 25 bp, synthetic construct
  source 1..25: mol_type = other DNA
gcactaatcaaaggaatcatcctcc

SEQ ID NO: 6608 - DNA, 26 bp, synthetic construct
  source 1..26: mol_type = other DNA
tgcactaatcaaaggaatcatcctcc

SEQ ID NO: 6609 - DNA, 27 bp, synthetic construct
  source 1..27: mol_type = other DNA
atgcactaatcaaaggaatcatcctcc

SEQ ID NO: 6610 - DNA, 28 bp, synthetic construct
  source 1..28: mol_type = other DNA
tatgcactaatcaaaggaatcatcctcc

SEQ ID NO: 6611 - DNA, 29 bp, synthetic construct
  source 1..29: mol_type = other DNA
ctatgcactaatcaaaggaatcatcctcc

SEQ ID NO: 6612 - DNA, 30 bp, synthetic construct
  source 1..30: mol_type = other DNA
cctatgcactaatcaaaggaatcatcctcc

SEQ ID NO: 6613 - DNA, 31 bp, synthetic construct
  source 1..31: mol_type = other DNA
ccctatgcactaatcaaaggaatcatcctcc

SEQ ID NO: 6614 - DNA, 32 bp, synthetic construct
  source 1..32: mol_type = other DNA
tccctatgcactaatcaaaggaatcatcctcc

SEQ ID NO: 6615 - DNA, 33 bp, synthetic construct
  source 1..33: mol_type = other DNA
ttccctatgcactaatcaaaggaatcatcctcc

SEQ ID NO: 6616 - DNA, 34 bp, synthetic construct
  source 1..34: mol_type = other DNA
cttccctatgcactaatcaaaggaatcatcctcc

SEQ ID NO: 6617 - DNA, 35 bp, synthetic construct
  source 1..35: mol_type = other DNA
gcttccctatgcactaatcaaaggaatcatcctcc

SEQ ID NO: 6618 - DNA, 36 bp, synthetic construct
  source 1..36: mol_type = other DNA
tgcttccctatgcactaatcaaaggaatcatcctcc

SEQ ID NO: 6619 - DNA, 37 bp, synthetic construct
  source 1..37: mol_type = other DNA
gtgcttccctatgcactaatcaaaggaatcatcctcc

SEQ ID NO: 6620 - DNA, 38 bp, synthetic construct
  source 1..38: mol_type = other DNA
tgtgcttccctatgcactaatcaaaggaatcatcctcc

SEQ ID NO: 6621 - DNA, 39 bp, synthetic construct
  source 1..39: mol_type = other DNA
ctgtgcttccctatgcactaatcaaaggaatcatcctcc

SEQ ID NO: 6622 - DNA, 40 bp, synthetic construct
  source 1..40: mol_type = other DNA
tctgtgcttccctatgcactaatcaaaggaatcatcctcc

SEQ ID NO: 6623 - DNA, 17 bp, synthetic construct
  source 1..17: mol_type = other DNA
cggaggatgattccttt

SEQ ID NO: 6624 - DNA, 18 bp, synthetic construct
  source 1..18: mol_type = other DNA
ccggaggatgattccttt

SEQ ID NO: 6625 - DNA, 19 bp, synthetic construct
  source 1..19: mol_type = other DNA
tccggaggatgattccttt

SEQ ID NO: 6626 - DNA, 20 bp, synthetic construct
  source 1..20: mol_type = other DNA
ttccggaggatgattccttt

SEQ ID NO: 6627 - DNA, 21 bp, synthetic construct
  source 1..21: mol_type = other DNA
tttccggaggatgattccttt

SEQ ID NO: 6628 - DNA, 22 bp, synthetic construct
  source 1..22: mol_type = other DNA
ttttccggaggatgattccttt

SEQ ID NO: 6629 - DNA, 23 bp, synthetic construct
  source 1..23: mol_type = other DNA
attttccggaggatgattccttt

SEQ ID NO: 6630 - DNA, 24 bp, synthetic construct
  source 1..24: mol_type = other DNA
tattttccggaggatgattccttt

SEQ ID NO: 6631 - DNA, 25 bp, synthetic construct
  source 1..25: mol_type = other DNA
atattttccggaggatgattccttt

SEQ ID NO: 6632 - DNA, 26 bp, synthetic construct
  source 1..26: mol_type = other DNA
aatattttccggaggatgattccttt

SEQ ID NO: 6633 - DNA, 27 bp, synthetic construct
  source 1..27: mol_type = other DNA
gaatattttccggaggatgattccttt

SEQ ID NO: 6634 - DNA, 28 bp, synthetic construct
  source 1..28: mol_type = other DNA
tgaatattttccggaggatgattccttt

SEQ ID NO: 6635 - DNA, 29 bp, synthetic construct
  source 1..29: mol_type = other DNA
gtgaatattttccggaggatgattccttt

SEQ ID NO: 6636 - DNA, 30 bp, synthetic construct
  source 1..30: mol_type = other DNA
ggtgaatattttccggaggatgattccttt

SEQ ID NO: 6637 - DNA, 31 bp, synthetic construct
  source 1..31: mol_type = other DNA
tggtgaatattttccggaggatgattccttt

SEQ ID NO: 6638 - DNA, 32 bp, synthetic construct
  source 1..32: mol_type = other DNA
gtggtgaatattttccggaggatgattccttt

SEQ ID NO: 6639 - DNA, 33 bp, synthetic construct
  source 1..33: mol_type = other DNA
ggtggtgaatattttccggaggatgattccttt

SEQ ID NO: 6640 - DNA, 34 bp, synthetic construct
  source 1..34: mol_type = other DNA
tggtggtgaatattttccggaggatgattccttt

SEQ ID NO: 6641 - DNA, 35 bp, synthetic construct
  source 1..35: mol_type = other DNA
atggtggtgaatattttccggaggatgattccttt

SEQ ID NO: 6642 - DNA, 36 bp, synthetic construct
  source 1..36: mol_type = other DNA
gatggtggtgaatattttccggaggatgattccttt

SEQ ID NO: 6643 - DNA, 37 bp, synthetic construct
  source 1..37: mol_type = other DNA
agatggtggtgaatattttccggaggatgattccttt

SEQ ID NO: 6644 - DNA, 38 bp, synthetic construct
  source 1..38: mol_type = other DNA
gagatggtggtgaatattttccggaggatgattccttt

SEQ ID NO: 6645 - DNA, 39 bp, synthetic construct
  source 1..39: mol_type = other DNA
tgagatggtggtgaatattttccggaggatgattccttt

SEQ ID NO: 6646 - DNA, 40 bp, synthetic construct
  source 1..40: mol_type = other DNA
atgagatggtggtgaatattttccggaggatgattccttt

SEQ ID NO: 6647 - DNA, 28 bp, synthetic construct
  source 1..28: mol_type = other DNA
ccggaaaatattcaccaccatctcattc

SEQ ID NO: 6648 - DNA, 29 bp, synthetic construct
  source 1..29: mol_type = other DNA
tccggaaaatattcaccaccatctcattc

SEQ ID NO: 6649 - DNA, 30 bp, synthetic construct
  source 1..30: mol_type = other DNA
ctccggaaaatattcaccaccatctcattc

SEQ ID NO: 6650 - DNA, 31 bp, synthetic construct
  source 1..31: mol_type = other DNA
cctccggaaaatattcaccaccatctcattc

SEQ ID NO: 6651 - DNA, 32 bp, synthetic construct
  source 1..32: mol_type = other DNA
tcctccggaaaatattcaccaccatctcattc

SEQ ID NO: 6652 - DNA, 33 bp, synthetic construct
  source 1..33: mol_type = other DNA
atcctccggaaaatattcaccaccatctcattc

SEQ ID NO: 6653 - DNA, 34 bp, synthetic construct
  source 1..34: mol_type = other DNA
catcctccggaaaatattcaccaccatctcattc

SEQ ID NO: 6654 - DNA, 35 bp, synthetic construct
  source 1..35: mol_type = other DNA
tcatcctccggaaaatattcaccaccatctcattc

SEQ ID NO: 6655 - DNA, 36 bp, synthetic construct
  source 1..36: mol_type = other DNA
atcatcctccggaaaatattcaccaccatctcattc

SEQ ID NO: 6656 - DNA, 37 bp, synthetic construct
  source 1..37: mol_type = other DNA
aatcatcctccggaaaatattcaccaccatctcattc

SEQ ID NO: 6657 - DNA, 38 bp, synthetic construct
  source 1..38: mol_type = other DNA
gaatcatcctccggaaaatattcaccaccatctcattc

SEQ ID NO: 6658 - DNA, 39 bp, synthetic construct
  source 1..39: mol_type = other DNA
ggaatcatcctccggaaaatattcaccaccatctcattc

SEQ ID NO: 6659 - DNA, 40 bp, synthetic construct
  source 1..40: mol_type = other DNA
aggaatcatcctccggaaaatattcaccaccatctcattc

SEQ ID NO: 6660 - DNA, 10 bp, synthetic construct
  source 1..10: mol_type = other DNA
catcctccgg

SEQ ID NO: 6661 - DNA, 10 bp, synthetic construct
  source 1..10: mol_type = other DNA
catcttgcgg

SEQ ID NO: 6662 - DNA, 11 bp, synthetic construct
  source 1..11: mol_type = other DNA
tcatcttgcgg

SEQ ID NO: 6663 - DNA, 11 bp, synthetic construct
  source 1..11: mol_type = other DNA
tcatcctccgg

SEQ ID NO: 6664 - DNA, 12 bp, synthetic construct
  source 1..12: mol_type = other DNA
atcatcttgcgg

SEQ ID NO: 6665 - DNA, 12 bp, synthetic construct
  source 1..12: mol_type = other DNA
atcatcctccgg

SEQ ID NO: 6666 - DNA, 13 bp, synthetic construct
  source 1..13: mol_type = other DNA
aatcatcttgcgg

SEQ ID NO: 6667 - DNA, 13 bp, synthetic construct
  source 1..13: mol_type = other DNA
aatcatcctccgg

SEQ ID NO: 6668 - DNA, 14 bp, synthetic construct
  source 1..14: mol_type = other DNA
gaatcatcttgcgg

SEQ ID NO: 6669 - DNA, 14 bp, synthetic construct
  source 1..14: mol_type = other DNA
gaatcatcctccgg

SEQ ID NO: 6670 - DNA, 15 bp, synthetic construct
  source 1..15: mol_type = other DNA
ggaatcatcctccgg

SEQ ID NO: 6671 - DNA, 15 bp, synthetic construct
  source 1..15: mol_type = other DNA
ggaatcatcttgcgg

SEQ ID NO: 6672 - DNA, 16 bp, synthetic construct
  source 1..16: mol_type = other DNA
aggaatcatcttgcgg

SEQ ID NO: 6673 - DNA, 16 bp, synthetic construct
  source 1..16: mol_type = other DNA
aggaatcatcctccgg

SEQ ID NO: 6674 - DNA, 17 bp, synthetic construct
  source 1..17: mol_type = other DNA
aaggaatcatcctccgg

SEQ ID NO: 6675 - DNA, 17 bp, synthetic construct
  source 1..17: mol_type = other DNA
aaggaatcatcttgcgg

SEQ ID NO: 6676 - DNA, 18 bp, synthetic construct
  source 1..18: mol_type = other DNA
aaaggaatcatcttgcgg

SEQ ID NO: 6677 - DNA, 18 bp, synthetic construct
  source 1..18: mol_type = other DNA
aaaggaatcatcctccgg

SEQ ID NO: 6678 - DNA, 19 bp, synthetic construct
  source 1..19: mol_type = other DNA
caaaggaatcatcttgcgg

SEQ ID NO: 6679 - DNA, 19 bp, synthetic construct
  source 1..19: mol_type = other DNA
caaaggaatcatcctccgg

SEQ ID NO: 6680 - DNA, 20 bp, synthetic construct
  source 1..20: mol_type = other DNA
tcaaaggaatcatcctccgg

SEQ ID NO: 6681 - DNA, 20 bp, synthetic construct
  source 1..20: mol_type = other DNA
tcaaaggaatcatcttgcgg

SEQ ID NO: 6682 - DNA, 21 bp, synthetic construct
  source 1..21: mol_type = other DNA
atcaaaggaatcatcttgcgg

SEQ ID NO: 6683 - DNA, 21 bp, synthetic construct
  source 1..21: mol_type = other DNA
atcaaaggaatcatcctccgg

SEQ ID NO: 6684 - DNA, 22 bp, synthetic construct
  source 1..22: mol_type = other DNA
aatcaaaggaatcatcttgcgg

SEQ ID NO: 6685 - DNA, 22 bp, synthetic construct
  source 1..22: mol_type = other DNA
aatcaaaggaatcatcctccgg

SEQ ID NO: 6686 - DNA, 23 bp, synthetic construct
  source 1..23: mol_type = other DNA
taatcaaaggaatcatcctccgg

SEQ ID NO: 6687 - DNA, 23 bp, synthetic construct
  source 1..23: mol_type = other DNA
taatcaaaggaatcatcttgcgg

SEQ ID NO: 6688 - DNA, 24 bp, synthetic construct
  source 1..24: mol_type = other DNA
ctaatcaaaggaatcatcttgcgg

SEQ ID NO: 6689 - DNA, 24 bp, synthetic construct
  source 1..24: mol_type = other DNA
ctaatcaaaggaatcatcctccgg

SEQ ID NO: 6690 - DNA, 25 bp, synthetic construct
  source 1..25: mol_type = other DNA
actaatcaaaggaatcatcttgcgg

SEQ ID NO: 6691 - DNA, 25 bp, synthetic construct
  source 1..25: mol_type = other DNA
actaatcaaaggaatcatcctccgg

SEQ ID NO: 6692 - DNA, 26 bp, synthetic construct
  source 1..26: mol_type = other DNA
cactaatcaaaggaatcatcctccgg

SEQ ID NO: 6693 - DNA, 26 bp, synthetic construct
  source 1..26: mol_type = other DNA
cactaatcaaaggaatcatcttgcgg

SEQ ID NO: 6694 - DNA, 27 bp, synthetic construct
  source 1..27: mol_type = other DNA
gcactaatcaaaggaatcatcctccgg

SEQ ID NO: 6695 - DNA, 27 bp, synthetic construct
  source 1..27: mol_type = other DNA
gcactaatcaaaggaatcatcttgcgg

SEQ ID NO: 6696 - DNA, 28 bp, synthetic construct
  source 1..28: mol_type = other DNA
tgcactaatcaaaggaatcatcttgcgg

SEQ ID NO: 6697 - DNA, 28 bp, synthetic construct
  source 1..28: mol_type = other DNA
tgcactaatcaaaggaatcatcctccgg

SEQ ID NO: 6698 - DNA, 29 bp, synthetic construct
  source 1..29: mol_type = other DNA
atgcactaatcaaaggaatcatcctccgg

SEQ ID NO: 6699 - DNA, 29 bp, synthetic construct
  source 1..29: mol_type = other DNA
atgcactaatcaaaggaatcatcttgcgg

SEQ ID NO: 6700 - DNA, 30 bp, synthetic construct
  source 1..30: mol_type = other DNA
tatgcactaatcaaaggaatcatcttgcgg

SEQ ID NO: 6701 - DNA, 30 bp, synthetic construct
  source 1..30: mol_type = other DNA
tatgcactaatcaaaggaatcatcctccgg

SEQ ID NO: 6702 - DNA, 31 bp, synthetic construct
  source 1..31: mol_type = other DNA
ctatgcactaatcaaaggaatcatcttgcgg

SEQ ID NO: 6703 - DNA, 31 bp, synthetic construct
  source 1..31: mol_type = other DNA
ctatgcactaatcaaaggaatcatcctccgg

SEQ ID NO: 6704 - DNA, 32 bp, synthetic construct
  source 1..32: mol_type = other DNA
cctatgcactaatcaaaggaatcatcttgcgg

SEQ ID NO: 6705 - DNA, 32 bp, synthetic construct
  source 1..32: mol_type = other DNA
cctatgcactaatcaaaggaatcatcctccgg

SEQ ID NO: 6706 - DNA, 33 bp, synthetic construct
  source 1..33: mol_type = other DNA
ccctatgcactaatcaaaggaatcatcttgcgg

SEQ ID NO: 6707 - DNA, 33 bp, synthetic construct
  source 1..33: mol_type = other DNA
ccctatgcactaatcaaaggaatcatcctccgg

SEQ ID NO: 6708 - DNA, 34 bp, synthetic construct
  source 1..34: mol_type = other DNA
tccctatgcactaatcaaaggaatcatcctccgg

SEQ ID NO: 6709 - DNA, 34 bp, synthetic construct
  source 1..34: mol_type = other DNA
tccctatgcactaatcaaaggaatcatcttgcgg

SEQ ID NO: 6710 - DNA, 35 bp, synthetic construct
  source 1..35: mol_type = other DNA
ttccctatgcactaatcaaaggaatcatcttgcgg

SEQ ID NO: 6711 - DNA, 35 bp, synthetic construct
  source 1..35: mol_type = other DNA
ttccctatgcactaatcaaaggaatcatcctccgg

SEQ ID NO: 6712 - DNA, 36 bp, synthetic construct
  source 1..36: mol_type = other DNA
cttccctatgcactaatcaaaggaatcatcttgcgg

SEQ ID NO: 6713 - DNA, 36 bp, synthetic construct
  source 1..36: mol_type = other DNA
cttccctatgcactaatcaaaggaatcatcctccgg

SEQ ID NO: 6714 - DNA, 37 bp, synthetic construct
  source 1..37: mol_type = other DNA
gcttccctatgcactaatcaaaggaatcatcctccgg

SEQ ID NO: 6715 - DNA, 37 bp, synthetic construct
  source 1..37: mol_type = other DNA
gcttccctatgcactaatcaaaggaatcatcttgcgg

SEQ ID NO: 6716 - DNA, 38 bp, synthetic construct
  source 1..38: mol_type = other DNA
tgcttccctatgcactaatcaaaggaatcatcctccgg

SEQ ID NO: 6717 - DNA, 38 bp, synthetic construct
  source 1..38: mol_type = other DNA
tgcttccctatgcactaatcaaaggaatcatcttgcgg

SEQ ID NO: 6718 - DNA, 39 bp, synthetic construct
  source 1..39: mol_type = other DNA
gtgcttccctatgcactaatcaaaggaatcatcttgcgg

SEQ ID NO: 6719 - DNA, 39 bp, synthetic construct
  source 1..39: mol_type = other DNA
gtgcttccctatgcactaatcaaaggaatcatcctccgg

SEQ ID NO: 6720 - DNA, 40 bp, synthetic construct
  source 1..40: mol_type = other DNA
tgtgcttccctatgcactaatcaaaggaatcatcctccgg

SEQ ID NO: 6721 - DNA, 40 bp, synthetic construct
  source 1..40: mol_type = other DNA
tgtgcttccctatgcactaatcaaaggaatcatcttgcgg

SEQ ID NO: 6722 - DNA, 18 bp, synthetic construct
  source 1..18: mol_type = other DNA
cggaggatgattcctttg

SEQ ID NO: 6723 - DNA, 19 bp, synthetic construct
  source 1..19: mol_type = other DNA
ccggaggatgattcctttg

SEQ ID NO: 6724 - DNA, 20 bp, synthetic construct
  source 1..20: mol_type = other DNA
tccggaggatgattcctttg

SEQ ID NO: 6725 - DNA, 21 bp, synthetic construct
  source 1..21: mol_type = other DNA
ttccggaggatgattcctttg

SEQ ID NO: 6726 - DNA, 22 bp, synthetic construct
  source 1..22: mol_type = other DNA
tttccggaggatgattcctttg

SEQ ID NO: 6727 - DNA, 23 bp, synthetic construct
  source 1..23: mol_type = other DNA
ttttccggaggatgattcctttg

SEQ ID NO: 6728 - DNA, 24 bp, synthetic construct
  source 1..24: mol_type = other DNA
attttccggaggatgattcctttg

SEQ ID NO: 6729 - DNA, 25 bp, synthetic construct
  source 1..25: mol_type = other DNA
tattttccggaggatgattcctttg

SEQ ID NO: 6730 - DNA, 26 bp, synthetic construct
  source 1..26: mol_type = other DNA
atattttccggaggatgattcctttg

SEQ ID NO: 6731 - DNA, 27 bp, synthetic construct
  source 1..27: mol_type = other DNA
aatattttccggaggatgattcctttg

SEQ ID NO: 6732 - DNA, 28 bp, synthetic construct
  source 1..28: mol_type = other DNA
gaatattttccggaggatgattcctttg

SEQ ID NO: 6733 - DNA, 29 bp, synthetic construct
  source 1..29: mol_type = other DNA
tgaatattttccggaggatgattcctttg

SEQ ID NO: 6734 - DNA, 30 bp, synthetic construct
  source 1..30: mol_type = other DNA
gtgaatattttccggaggatgattcctttg

SEQ ID NO: 6735 - DNA, 31 bp, synthetic construct
  source 1..31: mol_type = other DNA
ggtgaatattttccggaggatgattcctttg

SEQ ID NO: 6736 - DNA, 32 bp, synthetic construct
  source 1..32: mol_type = other DNA
tggtgaatattttccggaggatgattcctttg

SEQ ID NO: 6737 - DNA, 33 bp, synthetic construct
  source 1..33: mol_type = other DNA
gtggtgaatattttccggaggatgattcctttg

SEQ ID NO: 6738 - DNA, 34 bp, synthetic construct
  source 1..34: mol_type = other DNA
ggtggtgaatattttccggaggatgattcctttg

SEQ ID NO: 6739 - DNA, 35 bp, synthetic construct
  source 1..35: mol_type = other DNA
tggtggtgaatattttccggaggatgattcctttg

SEQ ID NO: 6740 - DNA, 36 bp, synthetic construct
  source 1..36: mol_type = other DNA
atggtggtgaatattttccggaggatgattcctttg

SEQ ID NO: 6741 - DNA, 37 bp, synthetic construct
  source 1..37: mol_type = other DNA
gatggtggtgaatattttccggaggatgattcctttg

SEQ ID NO: 6742 - DNA, 38 bp, synthetic construct
  source 1..38: mol_type = other DNA
agatggtggtgaatattttccggaggatgattcctttg

SEQ ID NO: 6743 - DNA, 39 bp, synthetic construct
  source 1..39: mol_type = other DNA
gagatggtggtgaatattttccggaggatgattcctttg

SEQ ID NO: 6744 - DNA, 40 bp, synthetic construct
  source 1..40: mol_type = other DNA
tgagatggtggtgaatattttccggaggatgattcctttg

SEQ ID NO: 6745 - DNA, 30 bp, synthetic construct
  source 1..30: mol_type = other DNA
cggaggatgattcctttgattagtgcatag

SEQ ID NO: 6746 - DNA, 31 bp, synthetic construct
  source 1..31: mol_type = other DNA
ccggaggatgattcctttgattagtgcatag

SEQ ID NO: 6747 - DNA, 32 bp, synthetic construct
  source 1..32: mol_type = other DNA
tccggaggatgattcctttgattagtgcatag

SEQ ID NO: 6748 - DNA, 33 bp, synthetic construct
  source 1..33: mol_type = other DNA
ttccggaggatgattcctttgattagtgcatag

SEQ ID NO: 6749 - DNA, 34 bp, synthetic construct
  source 1..34: mol_type = other DNA
tttccggaggatgattcctttgattagtgcatag

SEQ ID NO: 6750 - DNA, 35 bp, synthetic construct
  source 1..35: mol_type = other DNA
ttttccggaggatgattcctttgattagtgcatag

SEQ ID NO: 6751 - DNA, 36 bp, synthetic construct
  source 1..36: mol_type = other DNA
attttccggaggatgattcctttgattagtgcatag

SEQ ID NO: 6752 - DNA, 37 bp, synthetic construct
  source 1..37: mol_type = other DNA
tattttccggaggatgattcctttgattagtgcatag

SEQ ID NO: 6753 - DNA, 38 bp, synthetic construct
  source 1..38: mol_type = other DNA
atattttccggaggatgattcctttgattagtgcatag

SEQ ID NO: 6754 - DNA, 39 bp, synthetic construct
  source 1..39: mol_type = other DNA
aatattttccggaggatgattcctttgattagtgcatag

SEQ ID NO: 6755 - DNA, 40 bp, synthetic construct
  source 1..40: mol_type = other DNA
gaatattttccggaggatgattcctttgattagtgcatag

SEQ ID NO: 6756 - DNA, 10 bp, synthetic construct
  source 1..10: mol_type = other DNA
ctgcgcatgg

SEQ ID NO: 6757 - DNA, 11 bp, synthetic construct
  source 1..11: mol_type = other DNA
tctgcgcatgg

SEQ ID NO: 6758 - DNA, 12 bp, synthetic construct
  source 1..12: mol_type = other DNA
ttctgcgcatgg

SEQ ID NO: 6759 - DNA, 13 bp, synthetic construct
  source 1..13: mol_type = other DNA
gttctgcgcatgg

SEQ ID NO: 6760 - DNA, 14 bp, synthetic construct
  source 1..14: mol_type = other DNA
tgttctgcgcatgg

SEQ ID NO: 6761 - DNA, 15 bp, synthetic construct
  source 1..15: mol_type = other DNA
ttgttctgcgcatgg

SEQ ID NO: 6762 - DNA, 16 bp, synthetic construct
  source 1..16: mol_type = other DNA
attgttctgcgcatgg

SEQ ID NO: 6763 - DNA, 17 bp, synthetic construct
  source 1..17: mol_type = other DNA
cattgttctgcgcatgg

SEQ ID NO: 6764 - DNA, 18 bp, synthetic construct
  source 1..18: mol_type = other DNA
gcattgttctgcgcatgg

SEQ ID NO: 6765 - DNA, 19 bp, synthetic construct
  source 1..19: mol_type = other DNA
tgcattgttctgcgcatgg

SEQ ID NO: 6766 - DNA, 20 bp, synthetic construct
  source 1..20: mol_type = other DNA
ctgcattgttctgcgcatgg

SEQ ID NO: 6767 - DNA, 21 bp, synthetic construct
  source 1..21: mol_type = other DNA
tctgcattgttctgcgcatgg

SEQ ID NO: 6768 - DNA, 22 bp, synthetic construct
  source 1..22: mol_type = other DNA
ttctgcattgttctgcgcatgg

SEQ ID NO: 6769 - DNA, 23 bp, synthetic construct
  source 1..23: mol_type = other DNA
attctgcattgttctgcgcatgg

SEQ ID NO: 6770 - DNA, 24 bp, synthetic construct
  source 1..24: mol_type = other DNA
cattctgcattgttctgcgcatgg

SEQ ID NO: 6771 - DNA, 25 bp, synthetic construct
  source 1..25: mol_type = other DNA
tcattctgcattgttctgcgcatgg

SEQ ID NO: 6772 - DNA, 26 bp, synthetic construct
  source 1..26: mol_type = other DNA
ctcattctgcattgttctgcgcatgg

SEQ ID NO: 6773 - DNA, 27 bp, synthetic construct
  source 1..27: mol_type = other DNA
tctcattctgcattgttctgcgcatgg

SEQ ID NO: 6774 - DNA, 28 bp, synthetic construct
  source 1..28: mol_type = other DNA
atctcattctgcattgttctgcgcatgg

SEQ ID NO: 6775 - DNA, 29 bp, synthetic construct
  source 1..29: mol_type = other DNA
catctcattctgcattgttctgcgcatgg

SEQ ID NO: 6776 - DNA, 30 bp, synthetic construct
  source 1..30: mol_type = other DNA
ccatctcattctgcattgttctgcgcatgg

SEQ ID NO: 6777 - DNA, 31 bp, synthetic construct
  source 1..31: mol_type = other DNA
accatctcattctgcattgttctgcgcatgg

SEQ ID NO: 6778 - DNA, 32 bp, synthetic construct
  source 1..32: mol_type = other DNA
caccatctcattctgcattgttctgcgcatgg

SEQ ID NO: 6779 - DNA, 33 bp, synthetic construct
  source 1..33: mol_type = other DNA
ccaccatctcattctgcattgttctgcgcatgg

SEQ ID NO: 6780 - DNA, 34 bp, synthetic construct
  source 1..34: mol_type = other DNA
accaccatctcattctgcattgttctgcgcatgg

SEQ ID NO: 6781 - DNA, 35 bp, synthetic construct
  source 1..35: mol_type = other DNA
caccaccatctcattctgcattgttctgcgcatgg

SEQ ID NO: 6782 - DNA, 36 bp, synthetic construct
  source 1..36: mol_type = other DNA
tcaccaccatctcattctgcattgttctgcgcatgg

SEQ ID NO: 6783 - DNA, 37 bp, synthetic construct
  source 1..37: mol_type = other DNA
ttcaccaccatctcattctgcattgttctgcgcatgg

SEQ ID NO: 6784 - DNA, 38 bp, synthetic construct
  source 1..38: mol_type = other DNA
attcaccaccatctcattctgcattgttctgcgcatgg

SEQ ID NO: 6785 - DNA, 39 bp, synthetic construct
  source 1..39: mol_type = other DNA
tattcaccaccatctcattctgcattgttctgcgcatgg

SEQ ID NO: 6786 - DNA, 40 bp, synthetic construct
  source 1..40: mol_type = other DNA
atattcaccaccatctcattctgcattgttctgcgcatgg

SEQ ID NO: 6787 - DNA, 19 bp, synthetic construct
  source 1..19: mol_type = other DNA
cgcatggcggtcacccggc

SEQ ID NO: 6788 - DNA, 19 bp, synthetic construct
  source 1..19: mol_type = other DNA
cgcatggcggtcactcggc

SEQ ID NO: 6789 - DNA, 20 bp, synthetic construct
  source 1..20: mol_type = other DNA
gcgcatggcggtcacccggc

SEQ ID NO: 6790 - DNA, 20 bp, synthetic construct
  source 1..20: mol_type = other DNA
gcgcatggcggtcactcggc

SEQ ID NO: 6791 - DNA, 21 bp, synthetic construct
  source 1..21: mol_type = other DNA
tgcgcatggcggtcactcggc

SEQ ID NO: 6792 - DNA, 21 bp, synthetic construct
  source 1..21: mol_type = other DNA
tgcgcatggcggtcacccggc

SEQ ID NO: 6793 - DNA, 22 bp, synthetic construct
  source 1..22: mol_type = other DNA
ctgcgcatggcggtcacccggc

SEQ ID NO: 6794 - DNA, 22 bp, synthetic construct
  source 1..22: mol_type = other DNA
ctgcgcatggcggtcactcggc

SEQ ID NO: 6795 - DNA, 23 bp, synthetic construct
  source 1..23: mol_type = other DNA
tctgcgcatggcggtcacccggc

SEQ ID NO: 6796 - DNA, 23 bp, synthetic construct
  source 1..23: mol_type = other DNA
tctgcgcatggcggtcactcggc

SEQ ID NO: 6797 - DNA, 24 bp, synthetic construct
  source 1..24: mol_type = other DNA
ttctgcgcatggcggtcacccggc

SEQ ID NO: 6798 - DNA, 24 bp, synthetic construct
  source 1..24: mol_type = other DNA
ttctgcgcatggcggtcactcggc

SEQ ID NO: 6799 - DNA, 25 bp, synthetic construct
  source 1..25: mol_type = other DNA
gttctgcgcatggcggtcacccggc

SEQ ID NO: 6800 - DNA, 25 bp, synthetic construct
  source 1..25: mol_type = other DNA
gttctgcgcatggcggtcactcggc

SEQ ID NO: 6801 - DNA, 26 bp, synthetic construct
  source 1..26: mol_type = other DNA
tgttctgcgcatggcggtcactcggc

SEQ ID NO: 6802 - DNA, 26 bp, synthetic construct
  source 1..26: mol_type = other DNA
tgttctgcgcatggcggtcacccggc

SEQ ID NO: 6803 - DNA, 27 bp, synthetic construct
  source 1..27: mol_type = other DNA
ttgttctgcgcatggcggtcacccggc

SEQ ID NO: 6804 - DNA, 27 bp, synthetic construct
  source 1..27: mol_type = other DNA
ttgttctgcgcatggcggtcactcggc

SEQ ID NO: 6805 - DNA, 28 bp, synthetic construct
  source 1..28: mol_type = other DNA
attgttctgcgcatggcggtcactcggc

SEQ ID NO: 6806 - DNA, 28 bp, synthetic construct
  source 1..28: mol_type = other DNA
attgttctgcgcatggcggtcacccggc

SEQ ID NO: 6807 - DNA, 29 bp, synthetic construct
  source 1..29: mol_type = other DNA
cattgttctgcgcatggcggtcactcggc

SEQ ID NO: 6808 - DNA, 29 bp, synthetic construct
  source 1..29: mol_type = other DNA
cattgttctgcgcatggcggtcacccggc

SEQ ID NO: 6809 - DNA, 30 bp, synthetic construct
  source 1..30: mol_type = other DNA
gcattgttctgcgcatggcggtcacccggc

SEQ ID NO: 6810 - DNA, 30 bp, synthetic construct
  source 1..30: mol_type = other DNA
gcattgttctgcgcatggcggtcactcggc

SEQ ID NO: 6811 - DNA, 31 bp, synthetic construct
  source 1..31: mol_type = other DNA
tgcattgttctgcgcatggcggtcactcggc

SEQ ID NO: 6812 - DNA, 31 bp, synthetic construct
  source 1..31: mol_type = other DNA
tgcattgttctgcgcatggcggtcacccggc

SEQ ID NO: 6813 - DNA, 32 bp, synthetic construct
  source 1..32: mol_type = other DNA
ctgcattgttctgcgcatggcggtcactcggc

SEQ ID NO: 6814 - DNA, 32 bp, synthetic construct
  source 1..32: mol_type = other DNA
ctgcattgttctgcgcatggcggtcacccggc

SEQ ID NO: 6815 - DNA, 33 bp, synthetic construct
  source 1..33: mol_type = other DNA
tctgcattgttctgcgcatggcggtcacccggc

SEQ ID NO: 6816 - DNA, 33 bp, synthetic construct
  source 1..33: mol_type = other DNA
tctgcattgttctgcgcatggcggtcactcggc

SEQ ID NO: 6817 - DNA, 34 bp, synthetic construct
  source 1..34: mol_type = other DNA
ttctgcattgttctgcgcatggcggtcacccggc

SEQ ID NO: 6818 - DNA, 34 bp, synthetic construct
  source 1..34: mol_type = other DNA
ttctgcattgttctgcgcatggcggtcactcggc

SEQ ID NO: 6819 - DNA, 35 bp, synthetic construct
  source 1..35: mol_type = other DNA
attctgcattgttctgcgcatggcggtcacccggc

SEQ ID NO: 6820 - DNA, 35 bp, synthetic construct
  source 1..35: mol_type = other DNA
attctgcattgttctgcgcatggcggtcactcggc

SEQ ID NO: 6821 - DNA, 36 bp, synthetic construct
  source 1..36: mol_type = other DNA
cattctgcattgttctgcgcatggcggtcactcggc

SEQ ID NO: 6822 - DNA, 36 bp, synthetic construct
  source 1..36: mol_type = other DNA
cattctgcattgttctgcgcatggcggtcacccggc

SEQ ID NO: 6823 - DNA, 37 bp, synthetic construct
  source 1..37: mol_type = other DNA
tcattctgcattgttctgcgcatggcggtcacccggc

SEQ ID NO: 6824 - DNA, 37 bp, synthetic construct
  source 1..37: mol_type = other DNA
tcattctgcattgttctgcgcatggcggtcactcggc

SEQ ID NO: 6825 - DNA, 38 bp, synthetic construct
  source 1..38: mol_type = other DNA
ctcattctgcattgttctgcgcatggcggtcactcggc

SEQ ID NO: 6826 - DNA, 38 bp, synthetic construct
  source 1..38: mol_type = other DNA
ctcattctgcattgttctgcgcatggcggtcacccggc

SEQ ID NO: 6827 - DNA, 39 bp, synthetic construct
  source 1..39: mol_type = other DNA
tctcattctgcattgttctgcgcatggcggtcactcggc

SEQ ID NO: 6828 - DNA, 39 bp, synthetic construct
  source 1..39: mol_type = other DNA
tctcattctgcattgttctgcgcatggcggtcacccggc

SEQ ID NO: 6829 - DNA, 40 bp, synthetic construct
  source 1..40: mol_type = other DNA
atctcattctgcattgttctgcgcatggcggtcacccggc

SEQ ID NO: 6830 - DNA, 40 bp, synthetic construct
  source 1..40: mol_type = other DNA
atctcattctgcattgttctgcgcatggcggtcactcggc

SEQ ID NO: 6831 - DNA, 18 bp, synthetic construct
  source 1..18: mol_type = other DNA
cgcatggcggtcactcgg

SEQ ID NO: 6832 - DNA, 19 bp, synthetic construct
  source 1..19: mol_type = other DNA
gcgcatggcggtcactcgg

SEQ ID NO: 6833 - DNA, 20 bp, synthetic construct
  source 1..20: mol_type = other DNA
tgcgcatggcggtcactcgg

SEQ ID NO: 6834 - DNA, 21 bp, synthetic construct
  source 1..21: mol_type = other DNA
ctgcgcatggcggtcactcgg

SEQ ID NO: 6835 - DNA, 22 bp, synthetic construct
  source 1..22: mol_type = other DNA
tctgcgcatggcggtcactcgg

SEQ ID NO: 6836 - DNA, 23 bp, synthetic construct
  source 1..23: mol_type = other DNA
ttctgcgcatggcggtcactcgg

SEQ ID NO: 6837 - DNA, 24 bp, synthetic construct
  source 1..24: mol_type = other DNA
gttctgcgcatggcggtcactcgg

SEQ ID NO: 6838 - DNA, 25 bp, synthetic construct
  source 1..25: mol_type = other DNA
tgttctgcgcatggcggtcactcgg

SEQ ID NO: 6839 - DNA, 26 bp, synthetic construct
  source 1..26: mol_type = other DNA
ttgttctgcgcatggcggtcactcgg

SEQ ID NO: 6840 - DNA, 27 bp, synthetic construct
  source 1..27: mol_type = other DNA
attgttctgcgcatggcggtcactcgg

SEQ ID NO: 6841 - DNA, 28 bp, synthetic construct
  source 1..28: mol_type = other DNA
cattgttctgcgcatggcggtcactcgg

SEQ ID NO: 6842 - DNA, 29 bp, synthetic construct
  source 1..29: mol_type = other DNA
gcattgttctgcgcatggcggtcactcgg

SEQ ID NO: 6843 - DNA, 30 bp, synthetic construct
  source 1..30: mol_type = other DNA
tgcattgttctgcgcatggcggtcactcgg

SEQ ID NO: 6844 - DNA, 31 bp, synthetic construct
  source 1..31: mol_type = other DNA
ctgcattgttctgcgcatggcggtcactcgg

SEQ ID NO: 6845 - DNA, 32 bp, synthetic construct
  source 1..32: mol_type = other DNA
tctgcattgttctgcgcatggcggtcactcgg

SEQ ID NO: 6846 - DNA, 33 bp, synthetic construct
  source 1..33: mol_type = other DNA
ttctgcattgttctgcgcatggcggtcactcgg

SEQ ID NO: 6847 - DNA, 34 bp, synthetic construct
  source 1..34: mol_type = other DNA
attctgcattgttctgcgcatggcggtcactcgg

SEQ ID NO: 6848 - DNA, 35 bp, synthetic construct
  source 1..35: mol_type = other DNA
cattctgcattgttctgcgcatggcggtcactcgg

SEQ ID NO: 6849 - DNA, 36 bp, synthetic construct
  source 1..36: mol_type = other DNA
tcattctgcattgttctgcgcatggcggtcactcgg

SEQ ID NO: 6850 - DNA, 37 bp, synthetic construct
  source 1..37: mol_type = other DNA
ctcattctgcattgttctgcgcatggcggtcactcgg

SEQ ID NO: 6851 - DNA, 38 bp, synthetic construct
  source 1..38: mol_type = other DNA
tctcattctgcattgttctgcgcatggcggtcactcgg

SEQ ID NO: 6852 - DNA, 39 bp, synthetic construct
  source 1..39: mol_type = other DNA
atctcattctgcattgttctgcgcatggcggtcactcgg

SEQ ID NO: 6853 - DNA, 40 bp, synthetic construct
  source 1..40: mol_type = other DNA
catctcattctgcattgttctgcgcatggcggtcactcgg

SEQ ID NO: 6854 - DNA, 13 bp, synthetic construct
  source 1..13: mol_type = other DNA
gcgcagaacaatg

SEQ ID NO: 6855 - DNA, 14 bp, synthetic construct
  source 1..14: mol_type = other DNA
tgcgcagaacaatg

SEQ ID NO: 6856 - DNA, 15 bp, synthetic construct
  source 1..15: mol_type = other DNA
atgcgcagaacaatg

SEQ ID NO: 6857 - DNA, 16 bp, synthetic construct
  source 1..16: mol_type = other DNA
catgcgcagaacaatg

SEQ ID NO: 6858 - DNA, 17 bp, synthetic construct
  source 1..17: mol_type = other DNA
ccatgcgcagaacaatg

SEQ ID NO: 6859 - DNA, 18 bp, synthetic construct
  source 1..18: mol_type = other DNA
gccatgcgcagaacaatg

SEQ ID NO: 6860 - DNA, 19 bp, synthetic construct
  source 1..19: mol_type = other DNA
cgccatgcgcagaacaatg

SEQ ID NO: 6861 - DNA, 20 bp, synthetic construct
  source 1..20: mol_type = other DNA
ccgccatgcgcagaacaatg

SEQ ID NO: 6862 - DNA, 21 bp, synthetic construct
  source 1..21: mol_type = other DNA
accgccatgcgcagaacaatg

SEQ ID NO: 6863 - DNA, 22 bp, synthetic construct
  source 1..22: mol_type = other DNA
gaccgccatgcgcagaacaatg

SEQ ID NO: 6864 - DNA, 23 bp, synthetic construct
  source 1..23: mol_type = other DNA
tgaccgccatgcgcagaacaatg

SEQ ID NO: 6865 - DNA, 24 bp, synthetic construct
  source 1..24: mol_type = other DNA
gtgaccgccatgcgcagaacaatg

SEQ ID NO: 6866 - DNA, 25 bp, synthetic construct
  source 1..25: mol_type = other DNA
agtgaccgccatgcgcagaacaatg

SEQ ID NO: 6867 - DNA, 26 bp, synthetic construct
  source 1..26: mol_type = other DNA
gagtgaccgccatgcgcagaacaatg

SEQ ID NO: 6868 - DNA, 27 bp, synthetic construct
  source 1..27: mol_type = other DNA
cgagtgaccgccatgcgcagaacaatg

SEQ ID NO: 6869 - DNA, 28 bp, synthetic construct
  source 1..28: mol_type = other DNA
ccgagtgaccgccatgcgcagaacaatg

SEQ ID NO: 6870 - DNA, 29 bp, synthetic construct
  source 1..29: mol_type = other DNA
gccgagtgaccgccatgcgcagaacaatg

SEQ ID NO: 6871 - DNA, 30 bp, synthetic construct
  source 1..30: mol_type = other DNA
tgccgagtgaccgccatgcgcagaacaatg

SEQ ID NO: 6872 - DNA, 31 bp, synthetic construct
  source 1..31: mol_type = other DNA
ttgccgagtgaccgccatgcgcagaacaatg

SEQ ID NO: 6873 - DNA, 32 bp, synthetic construct
  source 1..32: mol_type = other DNA
attgccgagtgaccgccatgcgcagaacaatg

SEQ ID NO: 6874 - DNA, 33 bp, synthetic construct
  source 1..33: mol_type = other DNA
aattgccgagtgaccgccatgcgcagaacaatg

SEQ ID NO: 6875 - DNA, 34 bp, synthetic construct
  source 1..34: mol_type = other DNA
aaattgccgagtgaccgccatgcgcagaacaatg

SEQ ID NO: 6876 - DNA, 35 bp, synthetic construct
  source 1..35: mol_type = other DNA
gaaattgccgagtgaccgccatgcgcagaacaatg

SEQ ID NO: 6877 - DNA, 36 bp, synthetic construct
  source 1..36: mol_type = other DNA
ggaaattgccgagtgaccgccatgcgcagaacaatg

SEQ ID NO: 6878 - DNA, 37 bp, synthetic construct
  source 1..37: mol_type = other DNA
gggaaattgccgagtgaccgccatgcgcagaacaatg

SEQ ID NO: 6879 - DNA, 38 bp, synthetic construct
  source 1..38: mol_type = other DNA
agggaaattgccgagtgaccgccatgcgcagaacaatg

SEQ ID NO: 6880 - DNA, 39 bp, synthetic construct
  source 1..39: mol_type = other DNA
cagggaaattgccgagtgaccgccatgcgcagaacaatg

SEQ ID NO: 6881 - DNA, 40 bp, synthetic construct
  source 1..40: mol_type = other DNA
ccagggaaattgccgagtgaccgccatgcgcagaacaatg

SEQ ID NO: 6882 - DNA, 30 bp, synthetic construct
  source 1..30: mol_type = other DNA
cgcatggcggtcactcggcaatttccctgg

SEQ ID NO: 6883 - DNA, 31 bp, synthetic construct
  source 1..31: mol_type = other DNA
gcgcatggcggtcactcggcaatttccctgg

SEQ ID NO: 6884 - DNA, 32 bp, synthetic construct
  source 1..32: mol_type = other DNA
tgcgcatggcggtcactcggcaatttccctgg

SEQ ID NO: 6885 - DNA, 33 bp, synthetic construct
  source 1..33: mol_type = other DNA
ctgcgcatggcggtcactcggcaatttccctgg

SEQ ID NO: 6886 - DNA, 34 bp, synthetic construct
  source 1..34: mol_type = other DNA
tctgcgcatggcggtcactcggcaatttccctgg

SEQ ID NO: 6887 - DNA, 35 bp, synthetic construct
  source 1..35: mol_type = other DNA
ttctgcgcatggcggtcactcggcaatttccctgg

SEQ ID NO: 6888 - DNA, 36 bp, synthetic construct
  source 1..36: mol_type = other DNA
gttctgcgcatggcggtcactcggcaatttccctgg

SEQ ID NO: 6889 - DNA, 37 bp, synthetic construct
  source 1..37: mol_type = other DNA
tgttctgcgcatggcggtcactcggcaatttccctgg

SEQ ID NO: 6890 - DNA, 38 bp, synthetic construct
  source 1..38: mol_type = other DNA
ttgttctgcgcatggcggtcactcggcaatttccctgg

SEQ ID NO: 6891 - DNA, 39 bp, synthetic construct
  source 1..39: mol_type = other DNA
attgttctgcgcatggcggtcactcggcaatttccctgg

SEQ ID NO: 6892 - DNA, 40 bp, synthetic construct
  source 1..40: mol_type = other DNA
cattgttctgcgcatggcggtcactcggcaatttccctgg

SEQ ID NO: 6893 - DNA, 32 bp, synthetic construct
  source 1..32: mol_type = other DNA
cgcatggcggtcactcggcaatttccctgggc

SEQ ID NO: 6894 - DNA, 32 bp, synthetic construct
  source 1..32: mol_type = other DNA
cgcatggcggtcactcggcaatttccttgggc

SEQ ID NO: 6895 - DNA, 33 bp, synthetic construct
  source 1..33: mol_type = other DNA
gcgcatggcggtcactcggcaatttccttgggc

SEQ ID NO: 6896 - DNA, 33 bp, synthetic construct
  source 1..33: mol_type = other DNA
gcgcatggcggtcactcggcaatttccctgggc

SEQ ID NO: 6897 - DNA, 34 bp, synthetic construct
  source 1..34: mol_type = other DNA
tgcgcatggcggtcactcggcaatttccctgggc

SEQ ID NO: 6898 - DNA, 34 bp, synthetic construct
  source 1..34: mol_type = other DNA
tgcgcatggcggtcactcggcaatttccttgggc

SEQ ID NO: 6899 - DNA, 35 bp, synthetic construct
  source 1..35: mol_type = other DNA
ctgcgcatggcggtcactcggcaatttccctgggc

SEQ ID NO: 6900 - DNA, 35 bp, synthetic construct
  source 1..35: mol_type = other DNA
ctgcgcatggcggtcactcggcaatttccttgggc

SEQ ID NO: 6901 - DNA, 36 bp, synthetic construct
  source 1..36: mol_type = other DNA
tctgcgcatggcggtcactcggcaatttccttgggc

SEQ ID NO: 6902 - DNA, 36 bp, synthetic construct
  source 1..36: mol_type = other DNA
tctgcgcatggcggtcactcggcaatttccctgggc

SEQ ID NO: 6903 - DNA, 37 bp, synthetic construct
  source 1..37: mol_type = other DNA
ttctgcgcatggcggtcactcggcaatttccttgggc

SEQ ID NO: 6904 - DNA, 37 bp, synthetic construct
  source 1..37: mol_type = other DNA
ttctgcgcatggcggtcactcggcaatttccctgggc

SEQ ID NO: 6905 - DNA, 38 bp, synthetic construct
  source 1..38: mol_type = other DNA
gttctgcgcatggcggtcactcggcaatttccttgggc

SEQ ID NO: 6906 - DNA, 38 bp, synthetic construct
  source 1..38: mol_type = other DNA
gttctgcgcatggcggtcactcggcaatttccctgggc

SEQ ID NO: 6907 - DNA, 39 bp, synthetic construct
  source 1..39: mol_type = other DNA
tgttctgcgcatggcggtcactcggcaatttccctgggc

SEQ ID NO: 6908 - DNA, 39 bp, synthetic construct
  source 1..39: mol_type = other DNA
tgttctgcgcatggcggtcactcggcaatttccttgggc

SEQ ID NO: 6909 - DNA, 40 bp, synthetic construct
  source 1..40: mol_type = other DNA
ttgttctgcgcatggcggtcactcggcaatttccttgggc

SEQ ID NO: 6910 - DNA, 40 bp, synthetic construct
  source 1..40: mol_type = other DNA
ttgttctgcgcatggcggtcactcggcaatttccctgggc

SEQ ID NO: 6911 - DNA, 10 bp, synthetic construct
  source 1..10: mol_type = other DNA
tctgcgcatg

SEQ ID NO: 6912 - DNA, 11 bp, synthetic construct
  source 1..11: mol_type = other DNA
ttctgcgcatg

SEQ ID NO: 6913 - DNA, 12 bp, synthetic construct
  source 1..12: mol_type = other DNA
gttctgcgcatg

SEQ ID NO: 6914 - DNA, 13 bp, synthetic construct
  source 1..13: mol_type = other DNA
tgttctgcgcatg

SEQ ID NO: 6915 - DNA, 14 bp, synthetic construct
  source 1..14: mol_type = other DNA
ttgttctgcgcatg

SEQ ID NO: 6916 - DNA, 15 bp, synthetic construct
  source 1..15: mol_type = other DNA
attgttctgcgcatg

SEQ ID NO: 6917 - DNA, 16 bp, synthetic construct
  source 1..16: mol_type = other DNA
cattgttctgcgcatg

SEQ ID NO: 6918 - DNA, 17 bp, synthetic construct
  source 1..17: mol_type = other DNA
gcattgttctgcgcatg

SEQ ID NO: 6919 - DNA, 18 bp, synthetic construct
  source 1..18: mol_type = other DNA
tgcattgttctgcgcatg

SEQ ID NO: 6920 - DNA, 19 bp, synthetic construct
  source 1..19: mol_type = other DNA
ctgcattgttctgcgcatg

SEQ ID NO: 6921 - DNA, 20 bp, synthetic construct
  source 1..20: mol_type = other DNA
tctgcattgttctgcgcatg

SEQ ID NO: 6922 - DNA, 21 bp, synthetic construct
  source 1..21: mol_type = other DNA
ttctgcattgttctgcgcatg

SEQ ID NO: 6923 - DNA, 22 bp, synthetic construct
  source 1..22: mol_type = other DNA
attctgcattgttctgcgcatg

SEQ ID NO: 6924 - DNA, 23 bp, synthetic construct
  source 1..23: mol_type = other DNA
cattctgcattgttctgcgcatg

SEQ ID NO: 6925 - DNA, 24 bp, synthetic construct
  source 1..24: mol_type = other DNA
tcattctgcattgttctgcgcatg

SEQ ID NO: 6926 - DNA, 25 bp, synthetic construct
  source 1..25: mol_type = other DNA
ctcattctgcattgttctgcgcatg

SEQ ID NO: 6927 - DNA, 26 bp, synthetic construct
  source 1..26: mol_type = other DNA
tctcattctgcattgttctgcgcatg

SEQ ID NO: 6928 - DNA, 27 bp, synthetic construct
  source 1..27: mol_type = other DNA
atctcattctgcattgttctgcgcatg

SEQ ID NO: 6929 - DNA, 28 bp, synthetic construct
  source 1..28: mol_type = other DNA
catctcattctgcattgttctgcgcatg

SEQ ID NO: 6930 - DNA, 29 bp, synthetic construct
  source 1..29: mol_type = other DNA
ccatctcattctgcattgttctgcgcatg

SEQ ID NO: 6931 - DNA, 30 bp, synthetic construct
  source 1..30: mol_type = other DNA
accatctcattctgcattgttctgcgcatg

SEQ ID NO: 6932 - DNA, 31 bp, synthetic construct
  source 1..31: mol_type = other DNA
caccatctcattctgcattgttctgcgcatg

SEQ ID NO: 6933 - DNA, 32 bp, synthetic construct
  source 1..32: mol_type = other DNA
ccaccatctcattctgcattgttctgcgcatg

SEQ ID NO: 6934 - DNA, 33 bp, synthetic construct
  source 1..33: mol_type = other DNA
accaccatctcattctgcattgttctgcgcatg

SEQ ID NO: 6935 - DNA, 34 bp, synthetic construct
  source 1..34: mol_type = other DNA
caccaccatctcattctgcattgttctgcgcatg

SEQ ID NO: 6936 - DNA, 35 bp, synthetic construct
  source 1..35: mol_type = other DNA
tcaccaccatctcattctgcattgttctgcgcatg

SEQ ID NO: 6937 - DNA, 36 bp, synthetic construct
  source 1..36: mol_type = other DNA
ttcaccaccatctcattctgcattgttctgcgcatg

SEQ ID NO: 6938 - DNA, 37 bp, synthetic construct
  source 1..37: mol_type = other DNA
attcaccaccatctcattctgcattgttctgcgcatg

SEQ ID NO: 6939 - DNA, 38 bp, synthetic construct
  source 1..38: mol_type = other DNA
tattcaccaccatctcattctgcattgttctgcgcatg

SEQ ID NO: 6940 - DNA, 39 bp, synthetic construct
  source 1..39: mol_type = other DNA
atattcaccaccatctcattctgcattgttctgcgcatg

SEQ ID NO: 6941 - DNA, 40 bp, synthetic construct
  source 1..40: mol_type = other DNA
aatattcaccaccatctcattctgcattgttctgcgcatg

SEQ ID NO: 6942 - DNA, 10 bp, synthetic construct
  source 1..10: mol_type = other DNA
ttctgcgcat

SEQ ID NO: 6943 - DNA, 11 bp, synthetic construct
  source 1..11: mol_type = other DNA
gttctgcgcat

SEQ ID NO: 6944 - DNA, 12 bp, synthetic construct
  source 1..12: mol_type = other DNA
tgttctgcgcat

SEQ ID NO: 6945 - DNA, 13 bp, synthetic construct
  source 1..13: mol_type = other DNA
ttgttctgcgcat

SEQ ID NO: 6946 - DNA, 14 bp, synthetic construct
  source 1..14: mol_type = other DNA
attgttctgcgcat

SEQ ID NO: 6947 - DNA, 15 bp, synthetic construct
  source 1..15: mol_type = other DNA
cattgttctgcgcat

SEQ ID NO: 6948 - DNA, 16 bp, synthetic construct
  source 1..16: mol_type = other DNA
gcattgttctgcgcat

SEQ ID NO: 6949 - DNA, 17 bp, synthetic construct
  source 1..17: mol_type = other DNA
tgcattgttctgcgcat

SEQ ID NO: 6950 - DNA, 18 bp, synthetic construct
  source 1..18: mol_type = other DNA
ctgcattgttctgcgcat

SEQ ID NO: 6951 - DNA, 19 bp, synthetic construct
  source 1..19: mol_type = other DNA
tctgcattgttctgcgcat

SEQ ID NO: 6952 - DNA, 20 bp, synthetic construct
  source 1..20: mol_type = other DNA
ttctgcattgttctgcgcat

SEQ ID NO: 6953 - DNA, 21 bp, synthetic construct
  source 1..21: mol_type = other DNA
attctgcattgttctgcgcat

SEQ ID NO: 6954 - DNA, 22 bp, synthetic construct
  source 1..22: mol_type = other DNA
cattctgcattgttctgcgcat

SEQ ID NO: 6955 - DNA, 23 bp, synthetic construct
  source 1..23: mol_type = other DNA
tcattctgcattgttctgcgcat

SEQ ID NO: 6956 - DNA, 24 bp, synthetic construct
  source 1..24: mol_type = other DNA
ctcattctgcattgttctgcgcat

SEQ ID NO: 6957 - DNA, 25 bp, synthetic construct
  source 1..25: mol_type = other DNA
tctcattctgcattgttctgcgcat

SEQ ID NO: 6958 - DNA, 26 bp, synthetic construct
  source 1..26: mol_type = other DNA
atctcattctgcattgttctgcgcat

SEQ ID NO: 6959 - DNA, 27 bp, synthetic construct
  source 1..27: mol_type = other DNA
catctcattctgcattgttctgcgcat

SEQ ID NO: 6960 - DNA, 28 bp, synthetic construct
  source 1..28: mol_type = other DNA
ccatctcattctgcattgttctgcgcat

SEQ ID NO: 6961 - DNA, 29 bp, synthetic construct
  source 1..29: mol_type = other DNA
accatctcattctgcattgttctgcgcat

SEQ ID NO: 6962 - DNA, 30 bp, synthetic construct
  source 1..30: mol_type = other DNA
caccatctcattctgcattgttctgcgcat

SEQ ID NO: 6963 - DNA, 31 bp, synthetic construct
  source 1..31: mol_type = other DNA
ccaccatctcattctgcattgttctgcgcat

SEQ ID NO: 6964 - DNA, 32 bp, synthetic construct
  source 1..32: mol_type = other DNA
accaccatctcattctgcattgttctgcgcat

SEQ ID NO: 6965 - DNA, 33 bp, synthetic construct
  source 1..33: mol_type = other DNA
caccaccatctcattctgcattgttctgcgcat

SEQ ID NO: 6966 - DNA, 34 bp, synthetic construct
  source 1..34: mol_type = other DNA
tcaccaccatctcattctgcattgttctgcgcat

SEQ ID NO: 6967 - DNA, 35 bp, synthetic construct
  source 1..35: mol_type = other DNA
ttcaccaccatctcattctgcattgttctgcgcat

SEQ ID NO: 6968 - DNA, 36 bp, synthetic construct
  source 1..36: mol_type = other DNA
attcaccaccatctcattctgcattgttctgcgcat

SEQ ID NO: 6969 - DNA, 37 bp, synthetic construct
  source 1..37: mol_type = other DNA
tattcaccaccatctcattctgcattgttctgcgcat

SEQ ID NO: 6970 - DNA, 38 bp, synthetic construct
  source 1..38: mol_type = other DNA
atattcaccaccatctcattctgcattgttctgcgcat

SEQ ID NO: 6971 - DNA, 39 bp, synthetic construct
  source 1..39: mol_type = other DNA
aatattcaccaccatctcattctgcattgttctgcgcat

SEQ ID NO: 6972 - DNA, 40 bp, synthetic construct
  source 1..40: mol_type = other DNA
aaatattcaccaccatctcattctgcattgttctgcgcat

SEQ ID NO: 6973 - DNA, 12 bp, synthetic construct
  source 1..12: mol_type = other DNA
cgcatggcggtc

SEQ ID NO: 6974 - DNA, 13 bp, synthetic construct
  source 1..13: mol_type = other DNA
gcgcatggcggtc

SEQ ID NO: 6975 - DNA, 14 bp, synthetic construct
  source 1..14: mol_type = other DNA
tgcgcatggcggtc

SEQ ID NO: 6976 - DNA, 15 bp, synthetic construct
  source 1..15: mol_type = other DNA
ctgcgcatggcggtc

SEQ ID NO: 6977 - DNA, 16 bp, synthetic construct
  source 1..16: mol_type = other DNA
tctgcgcatggcggtc

SEQ ID NO: 6978 - DNA, 17 bp, synthetic construct
  source 1..17: mol_type = other DNA
ttctgcgcatggcggtc

SEQ ID NO: 6979 - DNA, 18 bp, synthetic construct
  source 1..18: mol_type = other DNA
gttctgcgcatggcggtc

SEQ ID NO: 6980 - DNA, 19 bp, synthetic construct
  source 1..19: mol_type = other DNA
tgttctgcgcatggcggtc

SEQ ID NO: 6981 - DNA, 20 bp, synthetic construct
  source 1..20: mol_type = other DNA
ttgttctgcgcatggcggtc

SEQ ID NO: 6982 - DNA, 21 bp, synthetic construct
  source 1..21: mol_type = other DNA
attgttctgcgcatggcggtc

SEQ ID NO: 6983 - DNA, 22 bp, synthetic construct
  source 1..22: mol_type = other DNA
cattgttctgcgcatggcggtc

SEQ ID NO: 6984 - DNA, 23 bp, synthetic construct
  source 1..23: mol_type = other DNA
gcattgttctgcgcatggcggtc

SEQ ID NO: 6985 - DNA, 24 bp, synthetic construct
  source 1..24: mol_type = other DNA
tgcattgttctgcgcatggcggtc

SEQ ID NO: 6986 - DNA, 25 bp, synthetic construct
  source 1..25: mol_type = other DNA
ctgcattgttctgcgcatggcggtc

SEQ ID NO: 6987 - DNA, 26 bp, synthetic construct
  source 1..26: mol_type = other DNA
tctgcattgttctgcgcatggcggtc

SEQ ID NO: 6988 - DNA, 27 bp, synthetic construct
  source 1..27: mol_type = other DNA
ttctgcattgttctgcgcatggcggtc

SEQ ID NO: 6989 - DNA, 28 bp, synthetic construct
  source 1..28: mol_type = other DNA
attctgcattgttctgcgcatggcggtc

SEQ ID NO: 6990 - DNA, 29 bp, synthetic construct
  source 1..29: mol_type = other DNA
cattctgcattgttctgcgcatggcggtc

SEQ ID NO: 6991 - DNA, 30 bp, synthetic construct
  source 1..30: mol_type = other DNA
tcattctgcattgttctgcgcatggcggtc

SEQ ID NO: 6992 - DNA, 31 bp, synthetic construct
  source 1..31: mol_type = other DNA
ctcattctgcattgttctgcgcatggcggtc

SEQ ID NO: 6993 - DNA, 32 bp, synthetic construct
  source 1..32: mol_type = other DNA
tctcattctgcattgttctgcgcatggcggtc

SEQ ID NO: 6994 - DNA, 33 bp, synthetic construct
  source 1..33: mol_type = other DNA
atctcattctgcattgttctgcgcatggcggtc

SEQ ID NO: 6995 - DNA, 34 bp, synthetic construct
  source 1..34: mol_type = other DNA
catctcattctgcattgttctgcgcatggcggtc

SEQ ID NO: 6996 - DNA, 35 bp, synthetic construct
  source 1..35: mol_type = other DNA
ccatctcattctgcattgttctgcgcatggcggtc

SEQ ID NO: 6997 - DNA, 36 bp, synthetic construct
  source 1..36: mol_type = other DNA
accatctcattctgcattgttctgcgcatggcggtc

SEQ ID NO: 6998 - DNA, 37 bp, synthetic construct
  source 1..37: mol_type = other DNA
caccatctcattctgcattgttctgcgcatggcggtc

SEQ ID NO: 6999 - DNA, 38 bp, synthetic construct
  source 1..38: mol_type = other DNA
ccaccatctcattctgcattgttctgcgcatggcggtc

SEQ ID NO: 7000 - DNA, 39 bp, synthetic construct
  source 1..39: mol_type = other DNA
accaccatctcattctgcattgttctgcgcatggcggtc

SEQ ID NO: 7001 - DNA, 40 bp, synthetic construct
  source 1..40: mol_type = other DNA
caccaccatctcattctgcattgttctgcgcatggcggtc

SEQ ID NO: 7002 - DNA, 10 bp, synthetic construct
  source 1..10: mol_type = other DNA
atgcgcagaa

SEQ ID NO: 7003 - DNA, 11 bp, synthetic construct
  source 1..11: mol_type = other DNA
catgcgcagaa

SEQ ID NO: 7004 - DNA, 12 bp, synthetic construct
  source 1..12: mol_type = other DNA
ccatgcgcagaa

SEQ ID NO: 7005 - DNA, 13 bp, synthetic construct
  source 1..13: mol_type = other DNA
gccatgcgcagaa

SEQ ID NO: 7006 - DNA, 14 bp, synthetic construct
  source 1..14: mol_type = other DNA
cgccatgcgcagaa

SEQ ID NO: 7007 - DNA, 15 bp, synthetic construct
  source 1..15: mol_type = other DNA
ccgccatgcgcagaa

SEQ ID NO: 7008 - DNA, 16 bp, synthetic construct
  source 1..16: mol_type = other DNA
accgccatgcgcagaa

SEQ ID NO: 7009 - DNA, 17 bp, synthetic construct
  source 1..17: mol_type = other DNA
gaccgccatgcgcagaa

SEQ ID NO: 7010 - DNA, 18 bp, synthetic construct
  source 1..18: mol_type = other DNA
tgaccgccatgcgcagaa

SEQ ID NO: 7011 - DNA, 19 bp, synthetic construct
  source 1..19: mol_type = other DNA
gtgaccgccatgcgcagaa

SEQ ID NO: 7012 - DNA, 20 bp, synthetic construct
  source 1..20: mol_type = other DNA
agtgaccgccatgcgcagaa

SEQ ID NO: 7013 - DNA, 21 bp, synthetic construct
  source 1..21: mol_type = other DNA
gagtgaccgccatgcgcagaa

SEQ ID NO: 7014 - DNA, 22 bp, synthetic construct
  source 1..22: mol_type = other DNA
cgagtgaccgccatgcgcagaa

SEQ ID NO: 7015 - DNA, 23 bp, synthetic construct
  source 1..23: mol_type = other DNA
ccgagtgaccgccatgcgcagaa

SEQ ID NO: 7016 - DNA, 24 bp, synthetic construct
  source 1..24: mol_type = other DNA
gccgagtgaccgccatgcgcagaa

SEQ ID NO: 7017 - DNA, 25 bp, synthetic construct
  source 1..25: mol_type = other DNA
tgccgagtgaccgccatgcgcagaa

SEQ ID NO: 7018 - DNA, 26 bp, synthetic construct
  source 1..26: mol_type = other DNA
ttgccgagtgaccgccatgcgcagaa

SEQ ID NO: 7019 - DNA, 27 bp, synthetic construct
  source 1..27: mol_type = other DNA
attgccgagtgaccgccatgcgcagaa

SEQ ID NO: 7020 - DNA, 28 bp, synthetic construct
  source 1..28: mol_type = other DNA
aattgccgagtgaccgccatgcgcagaa

SEQ ID NO: 7021 - DNA, 29 bp, synthetic construct
  source 1..29: mol_type = other DNA
aaattgccgagtgaccgccatgcgcagaa

SEQ ID NO: 7022 - DNA, 30 bp, synthetic construct
  source 1..30: mol_type = other DNA
gaaattgccgagtgaccgccatgcgcagaa

SEQ ID NO: 7023 - DNA, 31 bp, synthetic construct
  source 1..31: mol_type = other DNA
ggaaattgccgagtgaccgccatgcgcagaa

SEQ ID NO: 7024 - DNA, 32 bp, synthetic construct
  source 1..32: mol_type = other DNA
gggaaattgccgagtgaccgccatgcgcagaa

SEQ ID NO: 7025 - DNA, 33 bp, synthetic construct
  source 1..33: mol_type = other DNA
agggaaattgccgagtgaccgccatgcgcagaa

SEQ ID NO: 7026 - DNA, 34 bp, synthetic construct
  source 1..34: mol_type = other DNA
cagggaaattgccgagtgaccgccatgcgcagaa

SEQ ID NO: 7027 - DNA, 35 bp, synthetic construct
  source 1..35: mol_type = other DNA
ccagggaaattgccgagtgaccgccatgcgcagaa

SEQ ID NO: 7028 - DNA, 36 bp, synthetic construct
  source 1..36: mol_type = other DNA
cccagggaaattgccgagtgaccgccatgcgcagaa

SEQ ID NO: 7029 - DNA, 37 bp, synthetic construct
  source 1..37: mol_type = other DNA
gcccagggaaattgccgagtgaccgccatgcgcagaa

SEQ ID NO: 7030 - DNA, 38 bp, synthetic construct
  source 1..38: mol_type = other DNA
agcccagggaaattgccgagtgaccgccatgcgcagaa

SEQ ID NO: 7031 - DNA, 39 bp, synthetic construct
  source 1..39: mol_type = other DNA
cagcccagggaaattgccgagtgaccgccatgcgcagaa

SEQ ID NO: 7032 - DNA, 40 bp, synthetic construct
  source 1..40: mol_type = other DNA
acagcccagggaaattgccgagtgaccgccatgcgcagaa

SEQ ID NO: 7033 - DNA, 10 bp, synthetic construct
  source 1..10: mol_type = other DNA
ccgccatgcg

SEQ ID NO: 7034 - DNA, 11 bp, synthetic construct
  source 1..11: mol_type = other DNA
accgccatgcg

SEQ ID NO: 7035 - DNA, 12 bp, synthetic construct
  source 1..12: mol_type = other DNA
gaccgccatgcg

SEQ ID NO: 7036 - DNA, 13 bp, synthetic construct
  source 1..13: mol_type = other DNA
tgaccgccatgcg

SEQ ID NO: 7037 - DNA, 14 bp, synthetic construct
  source 1..14: mol_type = other DNA
gtgaccgccatgcg

SEQ ID NO: 7038 - DNA, 15 bp, synthetic construct
  source 1..15: mol_type = other DNA
agtgaccgccatgcg

SEQ ID NO: 7039 - DNA, 16 bp, synthetic construct
  source 1..16: mol_type = other DNA
gagtgaccgccatgcg

SEQ ID NO: 7040 - DNA, 17 bp, synthetic construct
  source 1..17: mol_type = other DNA
cgagtgaccgccatgcg

SEQ ID NO: 7041 - DNA, 18 bp, synthetic construct
  source 1..18: mol_type = other DNA
ccgagtgaccgccatgcg

SEQ ID NO: 7042 - DNA, 19 bp, synthetic construct
  source 1..19: mol_type = other DNA
gccgagtgaccgccatgcg

SEQ ID NO: 7043 - DNA, 20 bp, synthetic construct
  source 1..20: mol_type = other DNA
tgccgagtgaccgccatgcg

SEQ ID NO: 7044 - DNA, 21 bp, synthetic construct
  source 1..21: mol_type = other DNA
ttgccgagtgaccgccatgcg

SEQ ID NO: 7045 - DNA, 22 bp, synthetic construct
  source 1..22: mol_type = other DNA
attgccgagtgaccgccatgcg

SEQ ID NO: 7046 - DNA, 23 bp, synthetic construct
  source 1..23: mol_type = other DNA
aattgccgagtgaccgccatgcg

SEQ ID NO: 7047 - DNA, 24 bp, synthetic construct
  source 1..24: mol_type = other DNA
aaattgccgagtgaccgccatgcg

SEQ ID NO: 7048 - DNA, 25 bp, synthetic construct
  source 1..25: mol_type = other DNA
gaaattgccgagtgaccgccatgcg

SEQ ID NO: 7049 - DNA, 26 bp, synthetic construct
  source 1..26: mol_type = other DNA
ggaaattgccgagtgaccgccatgcg

SEQ ID NO: 7050 - DNA, 27 bp, synthetic construct
  source 1..27: mol_type = other DNA
gggaaattgccgagtgaccgccatgcg

SEQ ID NO: 7051 - DNA, 28 bp, synthetic construct
  source 1..28: mol_type = other DNA
agggaaattgccgagtgaccgccatgcg

SEQ ID NO: 7052 - DNA, 29 bp, synthetic construct
  source 1..29: mol_type = other DNA
cagggaaattgccgagtgaccgccatgcg

SEQ ID NO: 7053 - DNA, 30 bp, synthetic construct
  source 1..30: mol_type = other DNA
ccagggaaattgccgagtgaccgccatgcg

SEQ ID NO: 7054 - DNA, 31 bp, synthetic construct
  source 1..31: mol_type = other DNA
cccagggaaattgccgagtgaccgccatgcg

SEQ ID NO: 7055 - DNA, 32 bp, synthetic construct
  source 1..32: mol_type = other DNA
gcccagggaaattgccgagtgaccgccatgcg

SEQ ID NO: 7056 - DNA, 33 bp, synthetic construct
  source 1..33: mol_type = other DNA
agcccagggaaattgccgagtgaccgccatgcg

SEQ ID NO: 7057 - DNA, 34 bp, synthetic construct
  source 1..34: mol_type = other DNA
cagcccagggaaattgccgagtgaccgccatgcg

SEQ ID NO: 7058 - DNA, 35 bp, synthetic construct
  source 1..35: mol_type = other DNA
acagcccagggaaattgccgagtgaccgccatgcg

SEQ ID NO: 7059 - DNA, 36 bp, synthetic construct
  source 1..36: mol_type = other DNA
tacagcccagggaaattgccgagtgaccgccatgcg

SEQ ID NO: 7060 - DNA, 37 bp, synthetic construct
  source 1..37: mol_type = other DNA
gtacagcccagggaaattgccgagtgaccgccatgcg

SEQ ID NO: 7061 - DNA, 38 bp, synthetic construct
  source 1..38: mol_type = other DNA
tgtacagcccagggaaattgccgagtgaccgccatgcg

SEQ ID NO: 7062 - DNA, 39 bp, synthetic construct
  source 1..39: mol_type = other DNA
ttgtacagcccagggaaattgccgagtgaccgccatgcg

SEQ ID NO: 7063 - DNA, 40 bp, synthetic construct
  source 1..40: mol_type = other DNA
tttgtacagcccagggaaattgccgagtgaccgccatgcg

SEQ ID NO: 7064 - DNA, 29 bp, synthetic construct
  source 1..29: mol_type = other DNA
cgcatggcggtcactcggcaatttccctg

SEQ ID NO: 7065 - DNA, 30 bp, synthetic construct
  source 1..30: mol_type = other DNA
gcgcatggcggtcactcggcaatttccctg

SEQ ID NO: 7066 - DNA, 31 bp, synthetic construct
  source 1..31: mol_type = other DNA
tgcgcatggcggtcactcggcaatttccctg

SEQ ID NO: 7067 - DNA, 32 bp, synthetic construct
  source 1..32: mol_type = other DNA
ctgcgcatggcggtcactcggcaatttccctg

SEQ ID NO: 7068 - DNA, 33 bp, synthetic construct
  source 1..33: mol_type = other DNA
tctgcgcatggcggtcactcggcaatttccctg

SEQ ID NO: 7069 - DNA, 34 bp, synthetic construct
  source 1..34: mol_type = other DNA
ttctgcgcatggcggtcactcggcaatttccctg

SEQ ID NO: 7070 - DNA, 35 bp, synthetic construct
  source 1..35: mol_type = other DNA
gttctgcgcatggcggtcactcggcaatttccctg

SEQ ID NO: 7071 - DNA, 36 bp, synthetic construct
  source 1..36: mol_type = other DNA
tgttctgcgcatggcggtcactcggcaatttccctg

SEQ ID NO: 7072 - DNA, 37 bp, synthetic construct
  source 1..37: mol_type = other DNA
ttgttctgcgcatggcggtcactcggcaatttccctg

SEQ ID NO: 7073 - DNA, 38 bp, synthetic construct
  source 1..38: mol_type = other DNA
attgttctgcgcatggcggtcactcggcaatttccctg

SEQ ID NO: 7074 - DNA, 39 bp, synthetic construct
  source 1..39: mol_type = other DNA
cattgttctgcgcatggcggtcactcggcaatttccctg

SEQ ID NO: 7075 - DNA, 40 bp, synthetic construct
  source 1..40: mol_type = other DNA
gcattgttctgcgcatggcggtcactcggcaatttccctg

SEQ ID NO: 7076 - DNA, 10 bp, synthetic construct
  source 1..10: mol_type = other DNA
ttgttctgcg

SEQ ID NO: 7077 - DNA, 11 bp, synthetic construct
  source 1..11: mol_type = other DNA
attgttctgcg

SEQ ID NO: 7078 - DNA, 12 bp, synthetic construct
  source 1..12: mol_type = other DNA
cattgttctgcg

SEQ ID NO: 7079 - DNA, 13 bp, synthetic construct
  source 1..13: mol_type = other DNA
gcattgttctgcg

SEQ ID NO: 7080 - DNA, 14 bp, synthetic construct
  source 1..14: mol_type = other DNA
tgcattgttctgcg

SEQ ID NO: 7081 - DNA, 15 bp, synthetic construct
  source 1..15: mol_type = other DNA
ctgcattgttctgcg

SEQ ID NO: 7082 - DNA, 16 bp, synthetic construct
  source 1..16: mol_type = other DNA
tctgcattgttctgcg

SEQ ID NO: 7083 - DNA, 17 bp, synthetic construct
  source 1..17: mol_type = other DNA
ttctgcattgttctgcg

SEQ ID NO: 7084 - DNA, 18 bp, synthetic construct
  source 1..18: mol_type = other DNA
attctgcattgttctgcg

SEQ ID NO: 7085 - DNA, 19 bp, synthetic construct
  source 1..19: mol_type = other DNA
cattctgcattgttctgcg

SEQ ID NO: 7086 - DNA, 20 bp, synthetic construct
  source 1..20: mol_type = other DNA
tcattctgcattgttctgcg

SEQ ID NO: 7087 - DNA, 21 bp, synthetic construct
  source 1..21: mol_type = other DNA
ctcattctgcattgttctgcg

SEQ ID NO: 7088 - DNA, 22 bp, synthetic construct
  source 1..22: mol_type = other DNA
tctcattctgcattgttctgcg

SEQ ID NO: 7089 - DNA, 23 bp, synthetic construct
  source 1..23: mol_type = other DNA
atctcattctgcattgttctgcg

SEQ ID NO: 7090 - DNA, 24 bp, synthetic construct
  source 1..24: mol_type = other DNA
catctcattctgcattgttctgcg

SEQ ID NO: 7091 - DNA, 25 bp, synthetic construct
  source 1..25: mol_type = other DNA
ccatctcattctgcattgttctgcg

SEQ ID NO: 7092 - DNA, 26 bp, synthetic construct
  source 1..26: mol_type = other DNA
accatctcattctgcattgttctgcg

SEQ ID NO: 7093 - DNA, 27 bp, synthetic construct
  source 1..27: mol_type = other DNA
caccatctcattctgcattgttctgcg

SEQ ID NO: 7094 - DNA, 28 bp, synthetic construct
  source 1..28: mol_type = other DNA
ccaccatctcattctgcattgttctgcg

SEQ ID NO: 7095 - DNA, 29 bp, synthetic construct
  source 1..29: mol_type = other DNA
accaccatctcattctgcattgttctgcg

SEQ ID NO: 7096 - DNA, 30 bp, synthetic construct
  source 1..30: mol_type = other DNA
caccaccatctcattctgcattgttctgcg

SEQ ID NO: 7097 - DNA, 31 bp, synthetic construct
  source 1..31: mol_type = other DNA
tcaccaccatctcattctgcattgttctgcg

SEQ ID NO: 7098 - DNA, 32 bp, synthetic construct
  source 1..32: mol_type = other DNA
ttcaccaccatctcattctgcattgttctgcg

SEQ ID NO: 7099 - DNA, 33 bp, synthetic construct
  source 1..33: mol_type = other DNA
attcaccaccatctcattctgcattgttctgcg

SEQ ID NO: 7100 - DNA, 34 bp, synthetic construct
  source 1..34: mol_type = other DNA
tattcaccaccatctcattctgcattgttctgcg

SEQ ID NO: 7101 - DNA, 35 bp, synthetic construct
  source 1..35: mol_type = other DNA
atattcaccaccatctcattctgcattgttctgcg

SEQ ID NO: 7102 - DNA, 36 bp, synthetic construct
  source 1..36: mol_type = other DNA
aatattcaccaccatctcattctgcattgttctgcg

SEQ ID NO: 7103 - DNA, 37 bp, synthetic construct
  source 1..37: mol_type = other DNA
aaatattcaccaccatctcattctgcattgttctgcg

SEQ ID NO: 7104 - DNA, 38 bp, synthetic construct
  source 1..38: mol_type = other DNA
aaaatattcaccaccatctcattctgcattgttctgcg

SEQ ID NO: 7105 - DNA, 39 bp, synthetic construct
  source 1..39: mol_type = other DNA
gaaaatattcaccaccatctcattctgcattgttctgcg

SEQ ID NO: 7106 - DNA, 40 bp, synthetic construct
  source 1..40: mol_type = other DNA
ggaaaatattcaccaccatctcattctgcattgttctgcg

SEQ ID NO: 7107 - DNA, 10 bp, synthetic construct
  source 1..10: mol_type = other DNA
tgcgcatggc

SEQ ID NO: 7108 - DNA, 11 bp, synthetic construct
  source 1..11: mol_type = other DNA
ctgcgcatggc

SEQ ID NO: 7109 - DNA, 12 bp, synthetic construct
  source 1..12: mol_type = other DNA
tctgcgcatggc

SEQ ID NO: 7110 - DNA, 13 bp, synthetic construct
  source 1..13: mol_type = other DNA
ttctgcgcatggc

SEQ ID NO: 7111 - DNA, 14 bp, synthetic construct
  source 1..14: mol_type = other DNA
gttctgcgcatggc

SEQ ID NO: 7112 - DNA, 15 bp, synthetic construct
  source 1..15: mol_type = other DNA
tgttctgcgcatggc

SEQ ID NO: 7113 - DNA, 16 bp, synthetic construct
  source 1..16: mol_type = other DNA
ttgttctgcgcatggc

SEQ ID NO: 7114 - DNA, 17 bp, synthetic construct
  source 1..17: mol_type = other DNA
attgttctgcgcatggc

SEQ ID NO: 7115 - DNA, 18 bp, synthetic construct
  source 1..18: mol_type = other DNA
cattgttctgcgcatggc

SEQ ID NO: 7116 - DNA, 19 bp, synthetic construct
  source 1..19: mol_type = other DNA
gcattgttctgcgcatggc

SEQ ID NO: 7117 - DNA, 20 bp, synthetic construct
  source 1..20: mol_type = other DNA
tgcattgttctgcgcatggc

SEQ ID NO: 7118 - DNA, 21 bp, synthetic construct
  source 1..21: mol_type = other DNA
ctgcattgttctgcgcatggc

SEQ ID NO: 7119 - DNA, 22 bp, synthetic construct
  source 1..22: mol_type = other DNA
tctgcattgttctgcgcatggc

SEQ ID NO: 7120 - DNA, 23 bp, synthetic construct
  source 1..23: mol_type = other DNA
ttctgcattgttctgcgcatggc

SEQ ID NO: 7121 - DNA, 24 bp, synthetic construct
  source 1..24: mol_type = other DNA
attctgcattgttctgcgcatggc

SEQ ID NO: 7122 - DNA, 25 bp, synthetic construct
  source 1..25: mol_type = other DNA
cattctgcattgttctgcgcatggc

SEQ ID NO: 7123 - DNA, 26 bp, synthetic construct
  source 1..26: mol_type = other DNA
tcattctgcattgttctgcgcatggc

SEQ ID NO: 7124 - DNA, 27 bp, synthetic construct
  source 1..27: mol_type = other DNA
ctcattctgcattgttctgcgcatggc

SEQ ID NO: 7125 - DNA, 28 bp, synthetic construct
  source 1..28: mol_type = other DNA
tctcattctgcattgttctgcgcatggc

SEQ ID NO: 7126 - DNA, 29 bp, synthetic construct
  source 1..29: mol_type = other DNA
atctcattctgcattgttctgcgcatggc

SEQ ID NO: 7127 - DNA, 30 bp, synthetic construct
  source 1..30: mol_type = other DNA
catctcattctgcattgttctgcgcatggc

SEQ ID NO: 7128 - DNA, 31 bp, synthetic construct
  source 1..31: mol_type = other DNA
ccatctcattctgcattgttctgcgcatggc

SEQ ID NO: 7129 - DNA, 32 bp, synthetic construct
  source 1..32: mol_type = other DNA
accatctcattctgcattgttctgcgcatggc

SEQ ID NO: 7130 - DNA, 33 bp, synthetic construct
  source 1..33: mol_type = other DNA
caccatctcattctgcattgttctgcgcatggc

SEQ ID NO: 7131 - DNA, 34 bp, synthetic construct
  source 1..34: mol_type = other DNA
ccaccatctcattctgcattgttctgcgcatggc

SEQ ID NO: 7132 - DNA, 35 bp, synthetic construct
  source 1..35: mol_type = other DNA
accaccatctcattctgcattgttctgcgcatggc

SEQ ID NO: 7133 - DNA, 36 bp, synthetic construct
  source 1..36: mol_type = other DNA
caccaccatctcattctgcattgttctgcgcatggc

SEQ ID NO: 7134 - DNA, 37 bp, synthetic construct
  source 1..37: mol_type = other DNA
tcaccaccatctcattctgcattgttctgcgcatggc

SEQ ID NO: 7135 - DNA, 38 bp, synthetic construct
  source 1..38: mol_type = other DNA
ttcaccaccatctcattctgcattgttctgcgcatggc

SEQ ID NO: 7136 - DNA, 39 bp, synthetic construct
  source 1..39: mol_type = other DNA
attcaccaccatctcattctgcattgttctgcgcatggc

SEQ ID NO: 7137 - DNA, 40 bp, synthetic construct
  source 1..40: mol_type = other DNA
tattcaccaccatctcattctgcattgttctgcgcatggc

SEQ ID NO: 7138 - DNA, 37 bp, synthetic construct
  source 1..37: mol_type = other DNA
cgcatggcggtcactcggcaatttccctgggccgtac

SEQ ID NO: 7139 - DNA, 37 bp, synthetic construct
  source 1..37: mol_type = other DNA
cgcatggcggtcactcggcaatttccctgggctgtac

SEQ ID NO: 7140 - DNA, 38 bp, synthetic construct
  source 1..38: mol_type = other DNA
gcgcatggcggtcactcggcaatttccctgggccgtac

SEQ ID NO: 7141 - DNA, 38 bp, synthetic construct
  source 1..38: mol_type = other DNA
gcgcatggcggtcactcggcaatttccctgggctgtac

SEQ ID NO: 7142 - DNA, 39 bp, synthetic construct
  source 1..39: mol_type = other DNA
tgcgcatggcggtcactcggcaatttccctgggccgtac

SEQ ID NO: 7143 - DNA, 39 bp, synthetic construct
  source 1..39: mol_type = other DNA
tgcgcatggcggtcactcggcaatttccctgggctgtac

SEQ ID NO: 7144 - DNA, 40 bp, synthetic construct
  source 1..40: mol_type = other DNA
ctgcgcatggcggtcactcggcaatttccctgggctgtac

SEQ ID NO: 7145 - DNA, 40 bp, synthetic construct
  source 1..40: mol_type = other DNA
ctgcgcatggcggtcactcggcaatttccctgggccgtac

SEQ ID NO: 7146 - DNA, 36 bp, synthetic construct
  source 1..36: mol_type = other DNA
cgcatggcggtcactcggcaatttccctgggctgta

SEQ ID NO: 7147 - DNA, 37 bp, synthetic construct
  source 1..37: mol_type = other DNA
gcgcatggcggtcactcggcaatttccctgggctgta

SEQ ID NO: 7148 - DNA, 38 bp, synthetic construct
  source 1..38: mol_type = other DNA
tgcgcatggcggtcactcggcaatttccctgggctgta

SEQ ID NO: 7149 - DNA, 39 bp, synthetic construct
  source 1..39: mol_type = other DNA
ctgcgcatggcggtcactcggcaatttccctgggctgta

SEQ ID NO: 7150 - DNA, 40 bp, synthetic construct
  source 1..40: mol_type = other DNA
tctgcgcatggcggtcactcggcaatttccctgggctgta

SEQ ID NO: 7151 - DNA, 16 bp, synthetic construct
  source 1..16: mol_type = other DNA
cgcatggcggtcactc

SEQ ID NO: 7152 - DNA, 17 bp, synthetic construct
  source 1..17: mol_type = other DNA
gcgcatggcggtcactc

SEQ ID NO: 7153 - DNA, 18 bp, synthetic construct
  source 1..18: mol_type = other DNA
tgcgcatggcggtcactc

SEQ ID NO: 7154 - DNA, 19 bp, synthetic construct
  source 1..19: mol_type = other DNA
ctgcgcatggcggtcactc

SEQ ID NO: 7155 - DNA, 20 bp, synthetic construct
  source 1..20: mol_type = other DNA
tctgcgcatggcggtcactc

SEQ ID NO: 7156 - DNA, 21 bp, synthetic construct
  source 1..21: mol_type = other DNA
ttctgcgcatggcggtcactc

SEQ ID NO: 7157 - DNA, 22 bp, synthetic construct
  source 1..22: mol_type = other DNA
gttctgcgcatggcggtcactc

SEQ ID NO: 7158 - DNA, 23 bp, synthetic construct
  source 1..23: mol_type = other DNA
tgttctgcgcatggcggtcactc

SEQ ID NO: 7159 - DNA, 24 bp, synthetic construct
  source 1..24: mol_type = other DNA
ttgttctgcgcatggcggtcactc

SEQ ID NO: 7160 - DNA, 25 bp, synthetic construct
  source 1..25: mol_type = other DNA
attgttctgcgcatggcggtcactc

SEQ ID NO: 7161 - DNA, 26 bp, synthetic construct
  source 1..26: mol_type = other DNA
cattgttctgcgcatggcggtcactc

SEQ ID NO: 7162 - DNA, 27 bp, synthetic construct
  source 1..27: mol_type = other DNA
gcattgttctgcgcatggcggtcactc

SEQ ID NO: 7163 - DNA, 28 bp, synthetic construct
  source 1..28: mol_type = other DNA
tgcattgttctgcgcatggcggtcactc

SEQ ID NO: 7164 - DNA, 29 bp, synthetic construct
  source 1..29: mol_type = other DNA
ctgcattgttctgcgcatggcggtcactc

SEQ ID NO: 7165 - DNA, 30 bp, synthetic construct
  source 1..30: mol_type = other DNA
tctgcattgttctgcgcatggcggtcactc

SEQ ID NO: 7166 - DNA, 31 bp, synthetic construct
  source 1..31: mol_type = other DNA
ttctgcattgttctgcgcatggcggtcactc

SEQ ID NO: 7167 - DNA, 32 bp, synthetic construct
  source 1..32: mol_type = other DNA
attctgcattgttctgcgcatggcggtcactc

SEQ ID NO: 7168 - DNA, 33 bp, synthetic construct
  source 1..33: mol_type = other DNA
cattctgcattgttctgcgcatggcggtcactc

SEQ ID NO: 7169 - DNA, 34 bp, synthetic construct
  source 1..34: mol_type = other DNA
tcattctgcattgttctgcgcatggcggtcactc

SEQ ID NO: 7170 - DNA, 35 bp, synthetic construct
  source 1..35: mol_type = other DNA
ctcattctgcattgttctgcgcatggcggtcactc

SEQ ID NO: 7171 - DNA, 36 bp, synthetic construct
  source 1..36: mol_type = other DNA
tctcattctgcattgttctgcgcatggcggtcactc

SEQ ID NO: 7172 - DNA, 37 bp, synthetic construct
  source 1..37: mol_type = other DNA
atctcattctgcattgttctgcgcatggcggtcactc

SEQ ID NO: 7173 - DNA, 38 bp, synthetic construct
  source 1..38: mol_type = other DNA
catctcattctgcattgttctgcgcatggcggtcactc

SEQ ID NO: 7174 - DNA, 39 bp, synthetic construct
  source 1..39: mol_type = other DNA
ccatctcattctgcattgttctgcgcatggcggtcactc

SEQ ID NO: 7175 - DNA, 40 bp, synthetic construct
  source 1..40: mol_type = other DNA
accatctcattctgcattgttctgcgcatggcggtcactc

SEQ ID NO: 7176 - DNA, 10 bp, synthetic construct
  source 1..10: mol_type = other DNA
tgttttgcgc

SEQ ID NO: 7177 - DNA, 10 bp, synthetic construct
  source 1..10: mol_type = other DNA
tgttctgcgc

SEQ ID NO: 7178 - DNA, 11 bp, synthetic construct
  source 1..11: mol_type = other DNA
ttgttttgcgc

SEQ ID NO: 7179 - DNA, 11 bp, synthetic construct
  source 1..11: mol_type = other DNA
ttgttctgcgc

SEQ ID NO: 7180 - DNA, 12 bp, synthetic construct
  source 1..12: mol_type = other DNA
attgttctgcgc

SEQ ID NO: 7181 - DNA, 12 bp, synthetic construct
  source 1..12: mol_type = other DNA
attgttttgcgc

SEQ ID NO: 7182 - DNA, 13 bp, synthetic construct
  source 1..13: mol_type = other DNA
cattgttttgcgc

SEQ ID NO: 7183 - DNA, 13 bp, synthetic construct
  source 1..13: mol_type = other DNA
cattgttctgcgc

SEQ ID NO: 7184 - DNA, 14 bp, synthetic construct
  source 1..14: mol_type = other DNA
gcattgttctgcgc

SEQ ID NO: 7185 - DNA, 14 bp, synthetic construct
  source 1..14: mol_type = other DNA
gcattgttttgcgc

SEQ ID NO: 7186 - DNA, 15 bp, synthetic construct
  source 1..15: mol_type = other DNA
tgcattgttttgcgc

SEQ ID NO: 7187 - DNA, 15 bp, synthetic construct
  source 1..15: mol_type = other DNA
tgcattgttctgcgc

SEQ ID NO: 7188 - DNA, 16 bp, synthetic construct
  source 1..16: mol_type = other DNA
ctgcattgttctgcgc

SEQ ID NO: 7189 - DNA, 16 bp, synthetic construct
  source 1..16: mol_type = other DNA
ctgcattgttttgcgc

SEQ ID NO: 7190 - DNA, 17 bp, synthetic construct
  source 1..17: mol_type = other DNA
tctgcattgttttgcgc

SEQ ID NO: 7191 - DNA, 17 bp, synthetic construct
  source 1..17: mol_type = other DNA
tctgcattgttctgcgc

SEQ ID NO: 7192 - DNA, 18 bp, synthetic construct
  source 1..18: mol_type = other DNA
ttctgcattgttctgcgc

SEQ ID NO: 7193 - DNA, 18 bp, synthetic construct
  source 1..18: mol_type = other DNA
ttctgcattgttttgcgc

SEQ ID NO: 7194 - DNA, 19 bp, synthetic construct
  source 1..19: mol_type = other DNA
attctgcattgttttgcgc

SEQ ID NO: 7195 - DNA, 19 bp, synthetic construct
  source 1..19: mol_type = other DNA
attctgcattgttctgcgc

SEQ ID NO: 7196 - DNA, 20 bp, synthetic construct
  source 1..20: mol_type = other DNA
cattctgcattgttttgcgc

SEQ ID NO: 7197 - DNA, 20 bp, synthetic construct
  source 1..20: mol_type = other DNA
cattctgcattgttctgcgc

SEQ ID NO: 7198 - DNA, 21 bp, synthetic construct
  source 1..21: mol_type = other DNA
tcattctgcattgttttgcgc

SEQ ID NO: 7199 - DNA, 21 bp, synthetic construct
  source 1..21: mol_type = other DNA
tcattctgcattgttctgcgc

SEQ ID NO: 7200 - DNA, 22 bp, synthetic construct
  source 1..22: mol_type = other DNA
ctcattctgcattgttctgcgc

SEQ ID NO: 7201 - DNA, 22 bp, synthetic construct
  source 1..22: mol_type = other DNA
ctcattctgcattgttttgcgc

SEQ ID NO: 7202 - DNA, 23 bp, synthetic construct
  source 1..23: mol_type = other DNA
tctcattctgcattgttctgcgc

SEQ ID NO: 7203 - DNA, 23 bp, synthetic construct
  source 1..23: mol_type = other DNA
tctcattctgcattgttttgcgc

SEQ ID NO: 7204 - DNA, 24 bp, synthetic construct
  source 1..24: mol_type = other DNA
atctcattctgcattgttttgcgc

SEQ ID NO: 7205 - DNA, 24 bp, synthetic construct
  source 1..24: mol_type = other DNA
atctcattctgcattgttctgcgc

SEQ ID NO: 7206 - DNA, 25 bp, synthetic construct
  source 1..25: mol_type = other DNA
catctcattctgcattgttctgcgc

SEQ ID NO: 7207 - DNA, 25 bp, synthetic construct
  source 1..25: mol_type = other DNA
catctcattctgcattgttttgcgc

SEQ ID NO: 7208 - DNA, 26 bp, synthetic construct
  source 1..26: mol_type = other DNA
ccatctcattctgcattgttttgcgc

SEQ ID NO: 7209 - DNA, 26 bp, synthetic construct
  source 1..26: mol_type = other DNA
ccatctcattctgcattgttctgcgc

SEQ ID NO: 7210 - DNA, 27 bp, synthetic construct
  source 1..27: mol_type = other DNA
accatctcattctgcattgttttgcgc

SEQ ID NO: 7211 - DNA, 27 bp, synthetic construct
  source 1..27: mol_type = other DNA
accatctcattctgcattgttctgcgc

SEQ ID NO: 7212 - DNA, 28 bp, synthetic construct
  source 1..28: mol_type = other DNA
caccatctcattctgcattgttctgcgc

SEQ ID NO: 7213 - DNA, 28 bp, synthetic construct
  source 1..28: mol_type = other DNA
caccatctcattctgcattgttttgcgc

SEQ ID NO: 7214 - DNA, 29 bp, synthetic construct
  source 1..29: mol_type = other DNA
ccaccatctcattctgcattgttctgcgc

SEQ ID NO: 7215 - DNA, 29 bp, synthetic construct
  source 1..29: mol_type = other DNA
ccaccatctcattctgcattgttttgcgc

SEQ ID NO: 7216 - DNA, 30 bp, synthetic construct
  source 1..30: mol_type = other DNA
accaccatctcattctgcattgttttgcgc

SEQ ID NO: 7217 - DNA, 30 bp, synthetic construct
  source 1..30: mol_type = other DNA
accaccatctcattctgcattgttctgcgc

SEQ ID NO: 7218 - DNA, 31 bp, synthetic construct
  source 1..31: mol_type = other DNA
caccaccatctcattctgcattgttttgcgc

SEQ ID NO: 7219 - DNA, 31 bp, synthetic construct
  source 1..31: mol_type = other DNA
caccaccatctcattctgcattgttctgcgc

SEQ ID NO: 7220 - DNA, 32 bp, synthetic construct
  source 1..32: mol_type = other DNA
tcaccaccatctcattctgcattgttttgcgc

SEQ ID NO: 7221 - DNA, 32 bp, synthetic construct
  source 1..32: mol_type = other DNA
tcaccaccatctcattctgcattgttctgcgc

SEQ ID NO: 7222 - DNA, 33 bp, synthetic construct
  source 1..33: mol_type = other DNA
ttcaccaccatctcattctgcattgttttgcgc

SEQ ID NO: 7223 - DNA, 33 bp, synthetic construct
  source 1..33: mol_type = other DNA
ttcaccaccatctcattctgcattgttctgcgc

SEQ ID NO: 7224 - DNA, 34 bp, synthetic construct
  source 1..34: mol_type = other DNA
attcaccaccatctcattctgcattgttctgcgc

SEQ ID NO: 7225 - DNA, 34 bp, synthetic construct
  source 1..34: mol_type = other DNA
attcaccaccatctcattctgcattgttttgcgc

SEQ ID NO: 7226 - DNA, 35 bp, synthetic construct
  source 1..35: mol_type = other DNA
tattcaccaccatctcattctgcattgttctgcgc

SEQ ID NO: 7227 - DNA, 35 bp, synthetic construct
  source 1..35: mol_type = other DNA
tattcaccaccatctcattctgcattgttttgcgc

SEQ ID NO: 7228 - DNA, 36 bp, synthetic construct
  source 1..36: mol_type = other DNA
atattcaccaccatctcattctgcattgttttgcgc

SEQ ID NO: 7229 - DNA, 36 bp, synthetic construct
  source 1..36: mol_type = other DNA
atattcaccaccatctcattctgcattgttctgcgc

SEQ ID NO: 7230 - DNA, 37 bp, synthetic construct
  source 1..37: mol_type = other DNA
aatattcaccaccatctcattctgcattgttctgcgc

SEQ ID NO: 7231 - DNA, 37 bp, synthetic construct
  source 1..37: mol_type = other DNA
aatattcaccaccatctcattctgcattgttttgcgc

SEQ ID NO: 7232 - DNA, 38 bp, synthetic construct
  source 1..38: mol_type = other DNA
aaatattcaccaccatctcattctgcattgttttgcgc

SEQ ID NO: 7233 - DNA, 38 bp, synthetic construct
  source 1..38: mol_type = other DNA
aaatattcaccaccatctcattctgcattgttctgcgc

SEQ ID NO: 7234 - DNA, 39 bp, synthetic construct
  source 1..39: mol_type = other DNA
aaaatattcaccaccatctcattctgcattgttctgcgc

SEQ ID NO: 7235 - DNA, 39 bp, synthetic construct
  source 1..39: mol_type = other DNA
aaaatattcaccaccatctcattctgcattgttttgcgc

SEQ ID NO: 7236 - DNA, 40 bp, synthetic construct
  source 1..40: mol_type = other DNA
gaaaatattcaccaccatctcattctgcattgttctgcgc

SEQ ID NO: 7237 - DNA, 40 bp, synthetic construct
  source 1..40: mol_type = other DNA
gaaaatattcaccaccatctcattctgcattgttttgcgc

SEQ ID NO: 7238 - DNA, 20 bp, synthetic construct
  source 1..20: mol_type = other DNA
cgcatggcggtcactcggca

SEQ ID NO: 7239 - DNA, 21 bp, synthetic construct
  source 1..21: mol_type = other DNA
gcgcatggcggtcactcggca

SEQ ID NO: 7240 - DNA, 22 bp, synthetic construct
  source 1..22: mol_type = other DNA
tgcgcatggcggtcactcggca

SEQ ID NO: 7241 - DNA, 23 bp, synthetic construct
  source 1..23: mol_type = other DNA
ctgcgcatggcggtcactcggca

SEQ ID NO: 7242 - DNA, 24 bp, synthetic construct
  source 1..24: mol_type = other DNA
tctgcgcatggcggtcactcggca

SEQ ID NO: 7243 - DNA, 25 bp, synthetic construct
  source 1..25: mol_type = other DNA
ttctgcgcatggcggtcactcggca

SEQ ID NO: 7244 - DNA, 26 bp, synthetic construct
  source 1..26: mol_type = other DNA
gttctgcgcatggcggtcactcggca

SEQ ID NO: 7245 - DNA, 27 bp, synthetic construct
  source 1..27: mol_type = other DNA
tgttctgcgcatggcggtcactcggca

SEQ ID NO: 7246 - DNA, 28 bp, synthetic construct
  source 1..28: mol_type = other DNA
ttgttctgcgcatggcggtcactcggca

SEQ ID NO: 7247 - DNA, 29 bp, synthetic construct
  source 1..29: mol_type = other DNA
attgttctgcgcatggcggtcactcggca

SEQ ID NO: 7248 - DNA, 30 bp, synthetic construct
  source 1..30: mol_type = other DNA
cattgttctgcgcatggcggtcactcggca

SEQ ID NO: 7249 - DNA, 31 bp, synthetic construct
  source 1..31: mol_type = other DNA
gcattgttctgcgcatggcggtcactcggca

SEQ ID NO: 7250 - DNA, 32 bp, synthetic construct
  source 1..32: mol_type = other DNA
tgcattgttctgcgcatggcggtcactcggca

SEQ ID NO: 7251 - DNA, 33 bp, synthetic construct
  source 1..33: mol_type = other DNA
ctgcattgttctgcgcatggcggtcactcggca

SEQ ID NO: 7252 - DNA, 34 bp, synthetic construct
  source 1..34: mol_type = other DNA
tctgcattgttctgcgcatggcggtcactcggca

SEQ ID NO: 7253 - DNA, 35 bp, synthetic construct
  source 1..35: mol_type = other DNA
ttctgcattgttctgcgcatggcggtcactcggca

SEQ ID NO: 7254 - DNA, 36 bp, synthetic construct
  source 1..36: mol_type = other DNA
attctgcattgttctgcgcatggcggtcactcggca

SEQ ID NO: 7255 - DNA, 37 bp, synthetic construct
  source 1..37: mol_type = other DNA
cattctgcattgttctgcgcatggcggtcactcggca

SEQ ID NO: 7256 - DNA, 38 bp, synthetic construct
  source 1..38: mol_type = other DNA
tcattctgcattgttctgcgcatggcggtcactcggca

SEQ ID NO: 7257 - DNA, 39 bp, synthetic construct
  source 1..39: mol_type = other DNA
ctcattctgcattgttctgcgcatggcggtcactcggca

SEQ ID NO: 7258 - DNA, 40 bp, synthetic construct
  source 1..40: mol_type = other DNA
tctcattctgcattgttctgcgcatggcggtcactcggca

SEQ ID NO: 7259 - DNA, 31 bp, synthetic construct
  source 1..31: mol_type = other DNA
cgcatggcggtcactcggcaatttccctggg

SEQ ID NO: 7260 - DNA, 31 bp, synthetic construct
  source 1..31: mol_type = other DNA
cgcatggcggtcactcggcaatttccttggg

SEQ ID NO: 7261 - DNA, 32 bp, synthetic construct
  source 1..32: mol_type = other DNA
gcgcatggcggtcactcggcaatttccctggg

SEQ ID NO: 7262 - DNA, 32 bp, synthetic construct
  source 1..32: mol_type = other DNA
gcgcatggcggtcactcggcaatttccttggg

SEQ ID NO: 7263 - DNA, 33 bp, synthetic construct
  source 1..33: mol_type = other DNA
tgcgcatggcggtcactcggcaatttccttggg

SEQ ID NO: 7264 - DNA, 33 bp, synthetic construct
  source 1..33: mol_type = other DNA
tgcgcatggcggtcactcggcaatttccctggg

SEQ ID NO: 7265 - DNA, 34 bp, synthetic construct
  source 1..34: mol_type = other DNA
ctgcgcatggcggtcactcggcaatttccctggg

SEQ ID NO: 7266 - DNA, 34 bp, synthetic construct
  source 1..34: mol_type = other DNA
ctgcgcatggcggtcactcggcaatttccttggg

SEQ ID NO: 7267 - DNA, 35 bp, synthetic construct
  source 1..35: mol_type = other DNA
tctgcgcatggcggtcactcggcaatttccctggg

SEQ ID NO: 7268 - DNA, 35 bp, synthetic construct
  source 1..35: mol_type = other DNA
tctgcgcatggcggtcactcggcaatttccttggg

SEQ ID NO: 7269 - DNA, 36 bp, synthetic construct
  source 1..36: mol_type = other DNA
ttctgcgcatggcggtcactcggcaatttccctggg

SEQ ID NO: 7270 - DNA, 36 bp, synthetic construct
  source 1..36: mol_type = other DNA
ttctgcgcatggcggtcactcggcaatttccttggg

SEQ ID NO: 7271 - DNA, 37 bp, synthetic construct
  source 1..37: mol_type = other DNA
gttctgcgcatggcggtcactcggcaatttccctggg

SEQ ID NO: 7272 - DNA, 37 bp, synthetic construct
  source 1..37: mol_type = other DNA
gttctgcgcatggcggtcactcggcaatttccttggg

SEQ ID NO: 7273 - DNA, 38 bp, synthetic construct
  source 1..38: mol_type = other DNA
tgttctgcgcatggcggtcactcggcaatttccttggg

SEQ ID NO: 7274 - DNA, 38 bp, synthetic construct
  source 1..38: mol_type = other DNA
tgttctgcgcatggcggtcactcggcaatttccctggg

SEQ ID NO: 7275 - DNA, 39 bp, synthetic construct
  source 1..39: mol_type = other DNA
ttgttctgcgcatggcggtcactcggcaatttccttggg

SEQ ID NO: 7276 - DNA, 39 bp, synthetic construct
  source 1..39: mol_type = other DNA
ttgttctgcgcatggcggtcactcggcaatttccctggg

SEQ ID NO: 7277 - DNA, 40 bp, synthetic construct
  source 1..40: mol_type = other DNA
attgttctgcgcatggcggtcactcggcaatttccttggg

SEQ ID NO: 7278 - DNA, 40 bp, synthetic construct
  source 1..40: mol_type = other DNA
attgttctgcgcatggcggtcactcggcaatttccctggg

SEQ ID NO: 7279 - DNA, 18 bp, synthetic construct
  source 1..18: mol_type = other DNA
gcgcagaacaatgcagaa

SEQ ID NO: 7280 - DNA, 19 bp, synthetic construct
  source 1..19: mol_type = other DNA
tgcgcagaacaatgcagaa

SEQ ID NO: 7281 - DNA, 20 bp, synthetic construct
  source 1..20: mol_type = other DNA
atgcgcagaacaatgcagaa

SEQ ID NO: 7282 - DNA, 21 bp, synthetic construct
  source 1..21: mol_type = other DNA
catgcgcagaacaatgcagaa

SEQ ID NO: 7283 - DNA, 22 bp, synthetic construct
  source 1..22: mol_type = other DNA
ccatgcgcagaacaatgcagaa

SEQ ID NO: 7284 - DNA, 23 bp, synthetic construct
  source 1..23: mol_type = other DNA
gccatgcgcagaacaatgcagaa

SEQ ID NO: 7285 - DNA, 24 bp, synthetic construct
  source 1..24: mol_type = other DNA
cgccatgcgcagaacaatgcagaa

SEQ ID NO: 7286 - DNA, 25 bp, synthetic construct
  source 1..25: mol_type = other DNA
ccgccatgcgcagaacaatgcagaa

SEQ ID NO: 7287 - DNA, 26 bp, synthetic construct
  source 1..26: mol_type = other DNA
accgccatgcgcagaacaatgcagaa

SEQ ID NO: 7288 - DNA, 27 bp, synthetic construct
  source 1..27: mol_type = other DNA
gaccgccatgcgcagaacaatgcagaa

SEQ ID NO: 7289 - DNA, 28 bp, synthetic construct
  source 1..28: mol_type = other DNA
tgaccgccatgcgcagaacaatgcagaa

SEQ ID NO: 7290 - DNA, 29 bp, synthetic construct
  source 1..29: mol_type = other DNA
gtgaccgccatgcgcagaacaatgcagaa

SEQ ID NO: 7291 - DNA, 30 bp, synthetic construct
  source 1..30: mol_type = other DNA
agtgaccgccatgcgcagaacaatgcagaa

SEQ ID NO: 7292 - DNA, 31 bp, synthetic construct
  source 1..31: mol_type = other DNA
gagtgaccgccatgcgcagaacaatgcagaa

SEQ ID NO: 7293 - DNA, 32 bp, synthetic construct
  source 1..32: mol_type = other DNA
cgagtgaccgccatgcgcagaacaatgcagaa

SEQ ID NO: 7294 - DNA, 33 bp, synthetic construct
  source 1..33: mol_type = other DNA
ccgagtgaccgccatgcgcagaacaatgcagaa

SEQ ID NO: 7295 - DNA, 34 bp, synthetic construct
  source 1..34: mol_type = other DNA
gccgagtgaccgccatgcgcagaacaatgcagaa

SEQ ID NO: 7296 - DNA, 35 bp, synthetic construct
  source 1..35: mol_type = other DNA
tgccgagtgaccgccatgcgcagaacaatgcagaa

SEQ ID NO: 7297 - DNA, 36 bp, synthetic construct
  source 1..36: mol_type = other DNA
ttgccgagtgaccgccatgcgcagaacaatgcagaa

SEQ ID NO: 7298 - DNA, 37 bp, synthetic construct
  source 1..37: mol_type = other DNA
attgccgagtgaccgccatgcgcagaacaatgcagaa

SEQ ID NO: 7299 - DNA, 38 bp, synthetic construct
  source 1..38: mol_type = other DNA
aattgccgagtgaccgccatgcgcagaacaatgcagaa

SEQ ID NO: 7300 - DNA, 39 bp, synthetic construct
  source 1..39: mol_type = other DNA
aaattgccgagtgaccgccatgcgcagaacaatgcagaa

SEQ ID NO: 7301 - DNA, 40 bp, synthetic construct
  source 1..40: mol_type = other DNA
gaaattgccgagtgaccgccatgcgcagaacaatgcagaa

SEQ ID NO: 7302 - DNA, 21 bp, synthetic construct
  source 1..21: mol_type = other DNA
cgcatggcggtcactcggcaa

SEQ ID NO: 7303 - DNA, 22 bp, synthetic construct
  source 1..22: mol_type = other DNA
gcgcatggcggtcactcggcaa

SEQ ID NO: 7304 - DNA, 23 bp, synthetic construct
  source 1..23: mol_type = other DNA
tgcgcatggcggtcactcggcaa

SEQ ID NO: 7305 - DNA, 24 bp, synthetic construct
  source 1..24: mol_type = other DNA
ctgcgcatggcggtcactcggcaa

SEQ ID NO: 7306 - DNA, 25 bp, synthetic construct
  source 1..25: mol_type = other DNA
tctgcgcatggcggtcactcggcaa

SEQ ID NO: 7307 - DNA, 26 bp, synthetic construct
  source 1..26: mol_type = other DNA
ttctgcgcatggcggtcactcggcaa

SEQ ID NO: 7308 - DNA, 27 bp, synthetic construct
  source 1..27: mol_type = other DNA
gttctgcgcatggcggtcactcggcaa

SEQ ID NO: 7309 - DNA, 28 bp, synthetic construct
  source 1..28: mol_type = other DNA
tgttctgcgcatggcggtcactcggcaa

SEQ ID NO: 7310 - DNA, 29 bp, synthetic construct
  source 1..29: mol_type = other DNA
ttgttctgcgcatggcggtcactcggcaa

SEQ ID NO: 7311 - DNA, 30 bp, synthetic construct
  source 1..30: mol_type = other DNA
attgttctgcgcatggcggtcactcggcaa

SEQ ID NO: 7312 - DNA, 31 bp, synthetic construct
  source 1..31: mol_type = other DNA
cattgttctgcgcatggcggtcactcggcaa

SEQ ID NO: 7313 - DNA, 32 bp, synthetic construct
  source 1..32: mol_type = other DNA
gcattgttctgcgcatggcggtcactcggcaa

SEQ ID NO: 7314 - DNA, 33 bp, synthetic construct
  source 1..33: mol_type = other DNA
tgcattgttctgcgcatggcggtcactcggcaa

SEQ ID NO: 7315 - DNA, 34 bp, synthetic construct
  source 1..34: mol_type = other DNA
ctgcattgttctgcgcatggcggtcactcggcaa

SEQ ID NO: 7316 - DNA, 35 bp, synthetic construct
  source 1..35: mol_type = other DNA
tctgcattgttctgcgcatggcggtcactcggcaa

SEQ ID NO: 7317 - DNA, 36 bp, synthetic construct
  source 1..36: mol_type = other DNA
ttctgcattgttctgcgcatggcggtcactcggcaa

SEQ ID NO: 7318 - DNA, 37 bp, synthetic construct
  source 1..37: mol_type = other DNA
attctgcattgttctgcgcatggcggtcactcggcaa

SEQ ID NO: 7319 - DNA, 38 bp, synthetic construct
  source 1..38: mol_type = other DNA
cattctgcattgttctgcgcatggcggtcactcggcaa

SEQ ID NO: 7320 - DNA, 39 bp, synthetic construct
  source 1..39: mol_type = other DNA
tcattctgcattgttctgcgcatggcggtcactcggcaa

SEQ ID NO: 7321 - DNA, 40 bp, synthetic construct
  source 1..40: mol_type = other DNA
ctcattctgcattgttctgcgcatggcggtcactcggcaa

SEQ ID NO: 7322 - DNA, 10 bp, synthetic construct
  source 1..10: mol_type = other DNA
accgccatgc

SEQ ID NO: 7323 - DNA, 11 bp, synthetic construct
  source 1..11: mol_type = other DNA
gaccgccatgc

SEQ ID NO: 7324 - DNA, 12 bp, synthetic construct
  source 1..12: mol_type = other DNA
tgaccgccatgc

SEQ ID NO: 7325 - DNA, 13 bp, synthetic construct
  source 1..13: mol_type = other DNA
gtgaccgccatgc

SEQ ID NO: 7326 - DNA, 14 bp, synthetic construct
  source 1..14: mol_type = other DNA
agtgaccgccatgc

SEQ ID NO: 7327 - DNA, 15 bp, synthetic construct
  source 1..15: mol_type = other DNA
gagtgaccgccatgc

SEQ ID NO: 7328 - DNA, 16 bp, synthetic construct
  source 1..16: mol_type = other DNA
cgagtgaccgccatgc

SEQ ID NO: 7329 - DNA, 17 bp, synthetic construct
  source 1..17: mol_type = other DNA
ccgagtgaccgccatgc

SEQ ID NO: 7330 - DNA, 18 bp, synthetic construct
  source 1..18: mol_type = other DNA
gccgagtgaccgccatgc

SEQ ID NO: 7331 - DNA, 19 bp, synthetic construct
  source 1..19: mol_type = other DNA
tgccgagtgaccgccatgc

SEQ ID NO: 7332 - DNA, 20 bp, synthetic construct
  source 1..20: mol_type = other DNA
ttgccgagtgaccgccatgc

SEQ ID NO: 7333 - DNA, 21 bp, synthetic construct
  source 1..21: mol_type = other DNA
attgccgagtgaccgccatgc

SEQ ID NO: 7334 - DNA, 22 bp, synthetic construct
  source 1..22: mol_type = other DNA
aattgccgagtgaccgccatgc

SEQ ID NO: 7335 - DNA, 23 bp, synthetic construct
  source 1..23: mol_type = other DNA
aaattgccgagtgaccgccatgc

SEQ ID NO: 7336 - DNA, 24 bp, synthetic construct
  source 1..24: mol_type = other DNA
gaaattgccgagtgaccgccatgc

SEQ ID NO: 7337 - DNA, 25 bp, synthetic construct
  source 1..25: mol_type = other DNA
ggaaattgccgagtgaccgccatgc

SEQ ID NO: 7338 - DNA, 26 bp, synthetic construct
  source 1..26: mol_type = other DNA
gggaaattgccgagtgaccgccatgc

SEQ ID NO: 7339 - DNA, 27 bp, synthetic construct
  source 1..27: mol_type = other DNA
agggaaattgccgagtgaccgccatgc

SEQ ID NO: 7340 - DNA, 28 bp, synthetic construct
  source 1..28: mol_type = other DNA
cagggaaattgccgagtgaccgccatgc

SEQ ID NO: 7341 - DNA, 29 bp, synthetic construct
  source 1..29: mol_type = other DNA
ccagggaaattgccgagtgaccgccatgc

SEQ ID NO: 7342 - DNA, 30 bp, synthetic construct
  source 1..30: mol_type = other DNA
cccagggaaattgccgagtgaccgccatgc

SEQ ID NO: 7343 - DNA, 31 bp, synthetic construct
  source 1..31: mol_type = other DNA
gcccagggaaattgccgagtgaccgccatgc

SEQ ID NO: 7344 - DNA, 32 bp, synthetic construct
  source 1..32: mol_type = other DNA
agcccagggaaattgccgagtgaccgccatgc

SEQ ID NO: 7345 - DNA, 33 bp, synthetic construct
  source 1..33: mol_type = other DNA
cagcccagggaaattgccgagtgaccgccatgc

SEQ ID NO: 7346 - DNA, 34 bp, synthetic construct
  source 1..34: mol_type = other DNA
acagcccagggaaattgccgagtgaccgccatgc

SEQ ID NO: 7347 - DNA, 35 bp, synthetic construct
  source 1..35: mol_type = other DNA
tacagcccagggaaattgccgagtgaccgccatgc

SEQ ID NO: 7348 - DNA, 36 bp, synthetic construct
  source 1..36: mol_type = other DNA
gtacagcccagggaaattgccgagtgaccgccatgc

SEQ ID NO: 7349 - DNA, 37 bp, synthetic construct
  source 1..37: mol_type = other DNA
tgtacagcccagggaaattgccgagtgaccgccatgc

SEQ ID NO: 7350 - DNA, 38 bp, synthetic construct
  source 1..38: mol_type = other DNA
ttgtacagcccagggaaattgccgagtgaccgccatgc

SEQ ID NO: 7351 - DNA, 39 bp, synthetic construct
  source 1..39: mol_type = other DNA
tttgtacagcccagggaaattgccgagtgaccgccatgc

SEQ ID NO: 7352 - DNA, 40 bp, synthetic construct
  source 1..40: mol_type = other DNA
gtttgtacagcccagggaaattgccgagtgaccgccatgc

SEQ ID NO: 7353 - DNA, 23 bp, synthetic construct
  source 1..23: mol_type = other DNA
cgcatggcggtcactcggcaatt

SEQ ID NO: 7354 - DNA, 24 bp, synthetic construct
  source 1..24: mol_type = other DNA
gcgcatggcggtcactcggcaatt

SEQ ID NO: 7355 - DNA, 25 bp, synthetic construct
  source 1..25: mol_type = other DNA
tgcgcatggcggtcactcggcaatt

SEQ ID NO: 7356 - DNA, 26 bp, synthetic construct
  source 1..26: mol_type = other DNA
ctgcgcatggcggtcactcggcaatt

SEQ ID NO: 7357 - DNA, 27 bp, synthetic construct
  source 1..27: mol_type = other DNA
tctgcgcatggcggtcactcggcaatt

SEQ ID NO: 7358 - DNA, 28 bp, synthetic construct
  source 1..28: mol_type = other DNA
ttctgcgcatggcggtcactcggcaatt

SEQ ID NO: 7359 - DNA, 29 bp, synthetic construct
  source 1..29: mol_type = other DNA
gttctgcgcatggcggtcactcggcaatt

SEQ ID NO: 7360 - DNA, 30 bp, synthetic construct
  source 1..30: mol_type = other DNA
tgttctgcgcatggcggtcactcggcaatt

SEQ ID NO: 7361 - DNA, 31 bp, synthetic construct
  source 1..31: mol_type = other DNA
ttgttctgcgcatggcggtcactcggcaatt

SEQ ID NO: 7362 - DNA, 32 bp, synthetic construct
  source 1..32: mol_type = other DNA
attgttctgcgcatggcggtcactcggcaatt

SEQ ID NO: 7363 - DNA, 33 bp, synthetic construct
  source 1..33: mol_type = other DNA
cattgttctgcgcatggcggtcactcggcaatt

SEQ ID NO: 7364 - DNA, 34 bp, synthetic construct
  source 1..34: mol_type = other DNA
gcattgttctgcgcatggcggtcactcggcaatt

SEQ ID NO: 7365 - DNA, 35 bp, synthetic construct
  source 1..35: mol_type = other DNA
tgcattgttctgcgcatggcggtcactcggcaatt

SEQ ID NO: 7366 - DNA, 36 bp, synthetic construct
  source 1..36: mol_type = other DNA
ctgcattgttctgcgcatggcggtcactcggcaatt

SEQ ID NO: 7367 - DNA, 37 bp, synthetic construct
  source 1..37: mol_type = other DNA
tctgcattgttctgcgcatggcggtcactcggcaatt

SEQ ID NO: 7368 - DNA, 38 bp, synthetic construct
  source 1..38: mol_type = other DNA
ttctgcattgttctgcgcatggcggtcactcggcaatt

SEQ ID NO: 7369 - DNA, 39 bp, synthetic construct
  source 1..39: mol_type = other DNA
attctgcattgttctgcgcatggcggtcactcggcaatt

SEQ ID NO: 7370 - DNA, 40 bp, synthetic construct
  source 1..40: mol_type = other DNA
cattctgcattgttctgcgcatggcggtcactcggcaatt

SEQ ID NO: 7371 - DNA, 26 bp, synthetic construct
  source 1..26: mol_type = other DNA
cgccaacaactgtcctctttctatct

SEQ ID NO: 7372 - DNA, 26 bp, synthetic construct
  source 1..26: mol_type = other DNA
cgccaacaactgtcctctttcgatct

SEQ ID NO: 7373 - DNA, 27 bp, synthetic construct
  source 1..27: mol_type = other DNA
ccgccaacaactgtcctctttcgatct

SEQ ID NO: 7374 - DNA, 27 bp, synthetic construct
  source 1..27: mol_type = other DNA
ccgccaacaactgtcctctttctatct

SEQ ID NO: 7375 - DNA, 28 bp, synthetic construct
  source 1..28: mol_type = other DNA
accgccaacaactgtcctctttctatct

SEQ ID NO: 7376 - DNA, 28 bp, synthetic construct
  source 1..28: mol_type = other DNA
accgccaacaactgtcctctttcgatct

SEQ ID NO: 7377 - DNA, 29 bp, synthetic construct
  source 1..29: mol_type = other DNA
aaccgccaacaactgtcctctttctatct

SEQ ID NO: 7378 - DNA, 29 bp, synthetic construct
  source 1..29: mol_type = other DNA
aaccgccaacaactgtcctctttcgatct

SEQ ID NO: 7379 - DNA, 30 bp, synthetic construct
  source 1..30: mol_type = other DNA
caaccgccaacaactgtcctctttcgatct

SEQ ID NO: 7380 - DNA, 30 bp, synthetic construct
  source 1..30: mol_type = other DNA
caaccgccaacaactgtcctctttctatct

SEQ ID NO: 7381 - DNA, 31 bp, synthetic construct
  source 1..31: mol_type = other DNA
gcaaccgccaacaactgtcctctttctatct

SEQ ID NO: 7382 - DNA, 31 bp, synthetic construct
  source 1..31: mol_type = other DNA
gcaaccgccaacaactgtcctctttcgatct

SEQ ID NO: 7383 - DNA, 32 bp, synthetic construct
  source 1..32: mol_type = other DNA
agcaaccgccaacaactgtcctctttctatct

SEQ ID NO: 7384 - DNA, 32 bp, synthetic construct
  source 1..32: mol_type = other DNA
agcaaccgccaacaactgtcctctttcgatct

SEQ ID NO: 7385 - DNA, 33 bp, synthetic construct
  source 1..33: mol_type = other DNA
cagcaaccgccaacaactgtcctctttcgatct

SEQ ID NO: 7386 - DNA, 33 bp, synthetic construct
  source 1..33: mol_type = other DNA
cagcaaccgccaacaactgtcctctttctatct

SEQ ID NO: 7387 - DNA, 34 bp, synthetic construct
  source 1..34: mol_type = other DNA
ccagcaaccgccaacaactgtcctctttcgatct

SEQ ID NO: 7388 - DNA, 34 bp, synthetic construct
  source 1..34: mol_type = other DNA
ccagcaaccgccaacaactgtcctctttctatct

SEQ ID NO: 7389 - DNA, 35 bp, synthetic construct
  source 1..35: mol_type = other DNA
tccagcaaccgccaacaactgtcctctttcgatct

SEQ ID NO: 7390 - DNA, 35 bp, synthetic construct
  source 1..35: mol_type = other DNA
tccagcaaccgccaacaactgtcctctttctatct

SEQ ID NO: 7391 - DNA, 36 bp, synthetic construct
  source 1..36: mol_type = other DNA
atccagcaaccgccaacaactgtcctctttcgatct

SEQ ID NO: 7392 - DNA, 36 bp, synthetic construct
  source 1..36: mol_type = other DNA
atccagcaaccgccaacaactgtcctctttctatct

SEQ ID NO: 7393 - DNA, 37 bp, synthetic construct
  source 1..37: mol_type = other DNA
gatccagcaaccgccaacaactgtcctctttctatct

SEQ ID NO: 7394 - DNA, 37 bp, synthetic construct
  source 1..37: mol_type = other DNA
gatccagcaaccgccaacaactgtcctctttcgatct

SEQ ID NO: 7395 - DNA, 38 bp, synthetic construct
  source 1..38: mol_type = other DNA
ggatccagcaaccgccaacaactgtcctctttcgatct

SEQ ID NO: 7396 - DNA, 38 bp, synthetic construct
  source 1..38: mol_type = other DNA
ggatccagcaaccgccaacaactgtcctctttctatct

SEQ ID NO: 7397 - DNA, 39 bp, synthetic construct
  source 1..39: mol_type = other DNA
tggatccagcaaccgccaacaactgtcctctttctatct

SEQ ID NO: 7398 - DNA, 39 bp, synthetic construct
  source 1..39: mol_type = other DNA
tggatccagcaaccgccaacaactgtcctctttcgatct

SEQ ID NO: 7399 - DNA, 40 bp, synthetic construct
  source 1..40: mol_type = other DNA
gtggatccagcaaccgccaacaactgtcctctttcgatct

SEQ ID NO: 7400 - DNA, 40 bp, synthetic construct
  source 1..40: mol_type = other DNA
gtggatccagcaaccgccaacaactgtcctctttctatct

SEQ ID NO: 7401 - DNA, 27 bp, synthetic construct
  source 1..27: mol_type = other DNA
gcggttgctggatccactggagcaggc

SEQ ID NO: 7402 - DNA, 28 bp, synthetic construct
  source 1..28: mol_type = other DNA
ggcggttgctggatccactggagcaggc

SEQ ID NO: 7403 - DNA, 29 bp, synthetic construct
  source 1..29: mol_type = other DNA
tggcggttgctggatccactggagcaggc

SEQ ID NO: 7404 - DNA, 30 bp, synthetic construct
  source 1..30: mol_type = other DNA
ttggcggttgctggatccactggagcaggc

SEQ ID NO: 7405 - DNA, 31 bp, synthetic construct
  source 1..31: mol_type = other DNA
gttggcggttgctggatccactggagcaggc

SEQ ID NO: 7406 - DNA, 32 bp, synthetic construct
  source 1..32: mol_type = other DNA
tgttggcggttgctggatccactggagcaggc

SEQ ID NO: 7407 - DNA, 33 bp, synthetic construct
  source 1..33: mol_type = other DNA
ttgttggcggttgctggatccactggagcaggc

SEQ ID NO: 7408 - DNA, 34 bp, synthetic construct
  source 1..34: mol_type = other DNA
gttgttggcggttgctggatccactggagcaggc

SEQ ID NO: 7409 - DNA, 35 bp, synthetic construct
  source 1..35: mol_type = other DNA
agttgttggcggttgctggatccactggagcaggc

SEQ ID NO: 7410 - DNA, 36 bp, synthetic construct
  source 1..36: mol_type = other DNA
cagttgttggcggttgctggatccactggagcaggc

SEQ ID NO: 7411 - DNA, 37 bp, synthetic construct
  source 1..37: mol_type = other DNA
acagttgttggcggttgctggatccactggagcaggc

SEQ ID NO: 7412 - DNA, 38 bp, synthetic construct
  source 1..38: mol_type = other DNA
gacagttgttggcggttgctggatccactggagcaggc

SEQ ID NO: 7413 - DNA, 39 bp, synthetic construct
  source 1..39: mol_type = other DNA
ggacagttgttggcggttgctggatccactggagcaggc

SEQ ID NO: 7414 - DNA, 40 bp, synthetic construct
  source 1..40: mol_type = other DNA
aggacagttgttggcggttgctggatccactggagcaggc

SEQ ID NO: 7415 - DNA, 25 bp, synthetic construct
  source 1..25: mol_type = other DNA
cgccaacaactgtcctctttctatc

SEQ ID NO: 7416 - DNA, 26 bp, synthetic construct
  source 1..26: mol_type = other DNA
ccgccaacaactgtcctctttctatc

SEQ ID NO: 7417 - DNA, 27 bp, synthetic construct
  source 1..27: mol_type = other DNA
accgccaacaactgtcctctttctatc

SEQ ID NO: 7418 - DNA, 28 bp, synthetic construct
  source 1..28: mol_type = other DNA
aaccgccaacaactgtcctctttctatc

SEQ ID NO: 7419 - DNA, 29 bp, synthetic construct
  source 1..29: mol_type = other DNA
caaccgccaacaactgtcctctttctatc

SEQ ID NO: 7420 - DNA, 30 bp, synthetic construct
  source 1..30: mol_type = other DNA
gcaaccgccaacaactgtcctctttctatc

SEQ ID NO: 7421 - DNA, 31 bp, synthetic construct
  source 1..31: mol_type = other DNA
agcaaccgccaacaactgtcctctttctatc

SEQ ID NO: 7422 - DNA, 32 bp, synthetic construct
  source 1..32: mol_type = other DNA
cagcaaccgccaacaactgtcctctttctatc

SEQ ID NO: 7423 - DNA, 33 bp, synthetic construct
  source 1..33: mol_type = other DNA
ccagcaaccgccaacaactgtcctctttctatc

SEQ ID NO: 7424 - DNA, 34 bp, synthetic construct
  source 1..34: mol_type = other DNA
tccagcaaccgccaacaactgtcctctttctatc

SEQ ID NO: 7425 - DNA, 35 bp, synthetic construct
  source 1..35: mol_type = other DNA
atccagcaaccgccaacaactgtcctctttctatc

SEQ ID NO: 7426 - DNA, 36 bp, synthetic construct
  source 1..36: mol_type = other DNA
gatccagcaaccgccaacaactgtcctctttctatc

SEQ ID NO: 7427 - DNA, 37 bp, synthetic construct
  source 1..37: mol_type = other DNA
ggatccagcaaccgccaacaactgtcctctttctatc

SEQ ID NO: 7428 - DNA, 38 bp, synthetic construct
  source 1..38: mol_type = other DNA
tggatccagcaaccgccaacaactgtcctctttctatc

SEQ ID NO: 7429 - DNA, 39 bp, synthetic construct
  source 1..39: mol_type = other DNA
gtggatccagcaaccgccaacaactgtcctctttctatc

SEQ ID NO: 7430 - DNA, 40 bp, synthetic construct
  source 1..40: mol_type = other DNA
agtggatccagcaaccgccaacaactgtcctctttctatc

SEQ ID NO: 7431 - DNA, 19 bp, synthetic construct
  source 1..19: mol_type = other DNA
gcggttgctggatccactg

SEQ ID NO: 7432 - DNA, 19 bp, synthetic construct
  source 1..19: mol_type = other DNA
gcggttgctggaagcactg

SEQ ID NO: 7433 - DNA, 20 bp, synthetic construct
  source 1..20: mol_type = other DNA
ggcggttgctggatccactg

SEQ ID NO: 7434 - DNA, 20 bp, synthetic construct
  source 1..20: mol_type = other DNA
ggcggttgctggaagcactg

SEQ ID NO: 7435 - DNA, 21 bp, synthetic construct
  source 1..21: mol_type = other DNA
tggcggttgctggaagcactg

SEQ ID NO: 7436 - DNA, 21 bp, synthetic construct
  source 1..21: mol_type = other DNA
tggcggttgctggatccactg

SEQ ID NO: 7437 - DNA, 22 bp, synthetic construct
  source 1..22: mol_type = other DNA
ttggcggttgctggatccactg

SEQ ID NO: 7438 - DNA, 22 bp, synthetic construct
  source 1..22: mol_type = other DNA
ttggcggttgctggaagcactg

SEQ ID NO: 7439 - DNA, 23 bp, synthetic construct
  source 1..23: mol_type = other DNA
gttggcggttgctggaagcactg

SEQ ID NO: 7440 - DNA, 23 bp, synthetic construct
  source 1..23: mol_type = other DNA
gttggcggttgctggatccactg

SEQ ID NO: 7441 - DNA, 24 bp, synthetic construct
  source 1..24: mol_type = other DNA
tgttggcggttgctggaagcactg

SEQ ID NO: 7442 - DNA, 24 bp, synthetic construct
  source 1..24: mol_type = other DNA
tgttggcggttgctggatccactg

SEQ ID NO: 7443 - DNA, 25 bp, synthetic construct
  source 1..25: mol_type = other DNA
ttgttggcggttgctggaagcactg

SEQ ID NO: 7444 - DNA, 25 bp, synthetic construct
  source 1..25: mol_type = other DNA
ttgttggcggttgctggatccactg

SEQ ID NO: 7445 - DNA, 26 bp, synthetic construct
  source 1..26: mol_type = other DNA
gttgttggcggttgctggatccactg

SEQ ID NO: 7446 - DNA, 26 bp, synthetic construct
  source 1..26: mol_type = other DNA
gttgttggcggttgctggaagcactg

SEQ ID NO: 7447 - DNA, 27 bp, synthetic construct
  source 1..27: mol_type = other DNA
agttgttggcggttgctggaagcactg

SEQ ID NO: 7448 - DNA, 27 bp, synthetic construct
  source 1..27: mol_type = other DNA
agttgttggcggttgctggatccactg

SEQ ID NO: 7449 - DNA, 28 bp, synthetic construct
  source 1..28: mol_type = other DNA
cagttgttggcggttgctggaagcactg

SEQ ID NO: 7450 - DNA, 28 bp, synthetic construct
  source 1..28: mol_type = other DNA
cagttgttggcggttgctggatccactg

SEQ ID NO: 7451 - DNA, 29 bp, synthetic construct
  source 1..29: mol_type = other DNA
acagttgttggcggttgctggaagcactg

SEQ ID NO: 7452 - DNA, 29 bp, synthetic construct
  source 1..29: mol_type = other DNA
acagttgttggcggttgctggatccactg

SEQ ID NO: 7453 - DNA, 30 bp, synthetic construct
  source 1..30: mol_type = other DNA
gacagttgttggcggttgctggaagcactg

SEQ ID NO: 7454 - DNA, 30 bp, synthetic construct
  source 1..30: mol_type = other DNA
gacagttgttggcggttgctggatccactg

SEQ ID NO: 7455 - DNA, 31 bp, synthetic construct
  source 1..31: mol_type = other DNA
ggacagttgttggcggttgctggatccactg

SEQ ID NO: 7456 - DNA, 31 bp, synthetic construct
  source 1..31: mol_type = other DNA
ggacagttgttggcggttgctggaagcactg

SEQ ID NO: 7457 - DNA, 32 bp, synthetic construct
  source 1..32: mol_type = other DNA
aggacagttgttggcggttgctggaagcactg

SEQ ID NO: 7458 - DNA, 32 bp, synthetic construct
  source 1..32: mol_type = other DNA
aggacagttgttggcggttgctggatccactg

SEQ ID NO: 7459 - DNA, 33 bp, synthetic construct
  source 1..33: mol_type = other DNA
gaggacagttgttggcggttgctggatccactg

SEQ ID NO: 7460 - DNA, 33 bp, synthetic construct
  source 1..33: mol_type = other DNA
gaggacagttgttggcggttgctggaagcactg

SEQ ID NO: 7461 - DNA, 34 bp, synthetic construct
  source 1..34: mol_type = other DNA
agaggacagttgttggcggttgctggatccactg

SEQ ID NO: 7462 - DNA, 34 bp, synthetic construct
  source 1..34: mol_type = other DNA
agaggacagttgttggcggttgctggaagcactg

SEQ ID NO: 7463 - DNA, 35 bp, synthetic construct
  source 1..35: mol_type = other DNA
aagaggacagttgttggcggttgctggaagcactg

SEQ ID NO: 7464 - DNA, 35 bp, synthetic construct
  source 1..35: mol_type = other DNA
aagaggacagttgttggcggttgctggatccactg

SEQ ID NO: 7465 - DNA, 36 bp, synthetic construct
  source 1..36: mol_type = other DNA
aaagaggacagttgttggcggttgctggatccactg

SEQ ID NO: 7466 - DNA, 36 bp, synthetic construct
  source 1..36: mol_type = other DNA
aaagaggacagttgttggcggttgctggaagcactg

SEQ ID NO: 7467 - DNA, 37 bp, synthetic construct
  source 1..37: mol_type = other DNA
gaaagaggacagttgttggcggttgctggaagcactg

SEQ ID NO: 7468 - DNA, 37 bp, synthetic construct
  source 1..37: mol_type = other DNA
gaaagaggacagttgttggcggttgctggatccactg

SEQ ID NO: 7469 - DNA, 38 bp, synthetic construct
  source 1..38: mol_type = other DNA
agaaagaggacagttgttggcggttgctggatccactg

SEQ ID NO: 7470 - DNA, 38 bp, synthetic construct
  source 1..38: mol_type = other DNA
agaaagaggacagttgttggcggttgctggaagcactg

SEQ ID NO: 7471 - DNA, 39 bp, synthetic construct
  source 1..39: mol_type = other DNA
tagaaagaggacagttgttggcggttgctggatccactg

SEQ ID NO: 7472 - DNA, 39 bp, synthetic construct
  source 1..39: mol_type = other DNA
tagaaagaggacagttgttggcggttgctggaagcactg

SEQ ID NO: 7473 - DNA, 40 bp, synthetic construct
  source 1..40: mol_type = other DNA
atagaaagaggacagttgttggcggttgctggaagcactg

SEQ ID NO: 7474 - DNA, 40 bp, synthetic construct
  source 1..40: mol_type = other DNA
atagaaagaggacagttgttggcggttgctggatccactg

SEQ ID NO: 7475 - DNA, 10 bp, synthetic construct
  source 1..10: mol_type = other DNA
caaccgccaa

SEQ ID NO: 7476 - DNA, 11 bp, synthetic construct
  source 1..11: mol_type = other DNA
gcaaccgccaa

SEQ ID NO: 7477 - DNA, 12 bp, synthetic construct
  source 1..12: mol_type = other DNA
agcaaccgccaa

SEQ ID NO: 7478 - DNA, 13 bp, synthetic construct
  source 1..13: mol_type = other DNA
cagcaaccgccaa

SEQ ID NO: 7479 - DNA, 14 bp, synthetic construct
  source 1..14: mol_type = other DNA
ccagcaaccgccaa

SEQ ID NO: 7480 - DNA, 15 bp, synthetic construct
  source 1..15: mol_type = other DNA
tccagcaaccgccaa

SEQ ID NO: 7481 - DNA, 16 bp, synthetic construct
  source 1..16: mol_type = other DNA
atccagcaaccgccaa

SEQ ID NO: 7482 - DNA, 17 bp, synthetic construct
  source 1..17: mol_type = other DNA
gatccagcaaccgccaa

SEQ ID NO: 7483 - DNA, 18 bp, synthetic construct
  source 1..18: mol_type = other DNA
ggatccagcaaccgccaa

SEQ ID NO: 7484 - DNA, 19 bp, synthetic construct
  source 1..19: mol_type = other DNA
tggatccagcaaccgccaa

SEQ ID NO: 7485 - DNA, 20 bp, synthetic construct
  source 1..20: mol_type = other DNA
gtggatccagcaaccgccaa

SEQ ID NO: 7486 - DNA, 21 bp, synthetic construct
  source 1..21: mol_type = other DNA
agtggatccagcaaccgccaa

SEQ ID NO: 7487 - DNA, 22 bp, synthetic construct
  source 1..22: mol_type = other DNA
cagtggatccagcaaccgccaa

SEQ ID NO: 7488 - DNA, 23 bp, synthetic construct
  source 1..23: mol_type = other DNA
ccagtggatccagcaaccgccaa

SEQ ID NO: 7489 - DNA, 24 bp, synthetic construct
  source 1..24: mol_type = other DNA
tccagtggatccagcaaccgccaa

SEQ ID NO: 7490 - DNA, 25 bp, synthetic construct
  source 1..25: mol_type = other DNA
ctccagtggatccagcaaccgccaa

SEQ ID NO: 7491 - DNA, 26 bp, synthetic construct
  source 1..26: mol_type = other DNA
gctccagtggatccagcaaccgccaa

SEQ ID NO: 7492 - DNA, 27 bp, synthetic construct
  source 1..27: mol_type = other DNA
tgctccagtggatccagcaaccgccaa

SEQ ID NO: 7493 - DNA, 28 bp, synthetic construct
  source 1..28: mol_type = other DNA
ctgctccagtggatccagcaaccgccaa

SEQ ID NO: 7494 - DNA, 29 bp, synthetic construct
  source 1..29: mol_type = other DNA
cctgctccagtggatccagcaaccgccaa

SEQ ID NO: 7495 - DNA, 30 bp, synthetic construct
  source 1..30: mol_type = other DNA
gcctgctccagtggatccagcaaccgccaa

SEQ ID NO: 7496 - DNA, 31 bp, synthetic construct
  source 1..31: mol_type = other DNA
tgcctgctccagtggatccagcaaccgccaa

SEQ ID NO: 7497 - DNA, 32 bp, synthetic construct
  source 1..32: mol_type = other DNA
ttgcctgctccagtggatccagcaaccgccaa

SEQ ID NO: 7498 - DNA, 33 bp, synthetic construct
  source 1..33: mol_type = other DNA
cttgcctgctccagtggatccagcaaccgccaa

SEQ ID NO: 7499 - DNA, 34 bp, synthetic construct
  source 1..34: mol_type = other DNA
ccttgcctgctccagtggatccagcaaccgccaa

SEQ ID NO: 7500 - DNA, 35 bp, synthetic construct
  source 1..35: mol_type = other DNA
accttgcctgctccagtggatccagcaaccgccaa

SEQ ID NO: 7501 - DNA, 36 bp, synthetic construct
  source 1..36: mol_type = other DNA
taccttgcctgctccagtggatccagcaaccgccaa

SEQ ID NO: 7502 - DNA, 37 bp, synthetic construct
  source 1..37: mol_type = other DNA
ctaccttgcctgctccagtggatccagcaaccgccaa

SEQ ID NO: 7503 - DNA, 38 bp, synthetic construct
  source 1..38: mol_type = other DNA
actaccttgcctgctccagtggatccagcaaccgccaa

SEQ ID NO: 7504 - DNA, 39 bp, synthetic construct
  source 1..39: mol_type = other DNA
aactaccttgcctgctccagtggatccagcaaccgccaa

SEQ ID NO: 7505 - DNA, 40 bp, synthetic construct
  source 1..40: mol_type = other DNA
gaactaccttgcctgctccagtggatccagcaaccgccaa

SEQ ID NO: 7506 - DNA, 22 bp, synthetic construct
  source 1..22: mol_type = other DNA
gcggttgctggatccaccggag

SEQ ID NO: 7507 - DNA, 22 bp, synthetic construct
  source 1..22: mol_type = other DNA
gcggttgctggatccactggag

SEQ ID NO: 7508 - DNA, 23 bp, synthetic construct
  source 1..23: mol_type = other DNA
ggcggttgctggatccaccggag

SEQ ID NO: 7509 - DNA, 23 bp, synthetic construct
  source 1..23: mol_type = other DNA
ggcggttgctggatccactggag

SEQ ID NO: 7510 - DNA, 24 bp, synthetic construct
  source 1..24: mol_type = other DNA
tggcggttgctggatccaccggag

SEQ ID NO: 7511 - DNA, 24 bp, synthetic construct
  source 1..24: mol_type = other DNA
tggcggttgctggatccactggag

SEQ ID NO: 7512 - DNA, 25 bp, synthetic construct
  source 1..25: mol_type = other DNA
ttggcggttgctggatccaccggag

SEQ ID NO: 7513 - DNA, 25 bp, synthetic construct
  source 1..25: mol_type = other DNA
ttggcggttgctggatccactggag

SEQ ID NO: 7514 - DNA, 26 bp, synthetic construct
  source 1..26: mol_type = other DNA
gttggcggttgctggatccaccggag

SEQ ID NO: 7515 - DNA, 26 bp, synthetic construct
  source 1..26: mol_type = other DNA
gttggcggttgctggatccactggag

SEQ ID NO: 7516 - DNA, 27 bp, synthetic construct
  source 1..27: mol_type = other DNA
tgttggcggttgctggatccaccggag

SEQ ID NO: 7517 - DNA, 27 bp, synthetic construct
  source 1..27: mol_type = other DNA
tgttggcggttgctggatccactggag

SEQ ID NO: 7518 - DNA, 28 bp, synthetic construct
  source 1..28: mol_type = other DNA
ttgttggcggttgctggatccactggag

SEQ ID NO: 7519 - DNA, 28 bp, synthetic construct
  source 1..28: mol_type = other DNA
ttgttggcggttgctggatccaccggag

SEQ ID NO: 7520 - DNA, 29 bp, synthetic construct
  source 1..29: mol_type = other DNA
gttgttggcggttgctggatccaccggag

SEQ ID NO: 7521 - DNA, 29 bp, synthetic construct
  source 1..29: mol_type = other DNA
gttgttggcggttgctggatccactggag

SEQ ID NO: 7522 - DNA, 30 bp, synthetic construct
  source 1..30: mol_type = other DNA
agttgttggcggttgctggatccactggag

SEQ ID NO: 7523 - DNA, 30 bp, synthetic construct
  source 1..30: mol_type = other DNA
agttgttggcggttgctggatccaccggag

SEQ ID NO: 7524 - DNA, 31 bp, synthetic construct
  source 1..31: mol_type = other DNA
cagttgttggcggttgctggatccaccggag

SEQ ID NO: 7525 - DNA, 31 bp, synthetic construct
  source 1..31: mol_type = other DNA
cagttgttggcggttgctggatccactggag

SEQ ID NO: 7526 - DNA, 32 bp, synthetic construct
  source 1..32: mol_type = other DNA
acagttgttggcggttgctggatccaccggag

SEQ ID NO: 7527 - DNA, 32 bp, synthetic construct
  source 1..32: mol_type = other DNA
acagttgttggcggttgctggatccactggag

SEQ ID NO: 7528 - DNA, 33 bp, synthetic construct
  source 1..33: mol_type = other DNA
gacagttgttggcggttgctggatccactggag

SEQ ID NO: 7529 - DNA, 33 bp, synthetic construct
  source 1..33: mol_type = other DNA
gacagttgttggcggttgctggatccaccggag

SEQ ID NO: 7530 - DNA, 34 bp, synthetic construct
  source 1..34: mol_type = other DNA
ggacagttgttggcggttgctggatccactggag

SEQ ID NO: 7531 - DNA, 34 bp, synthetic construct
  source 1..34: mol_type = other DNA
ggacagttgttggcggttgctggatccaccggag

SEQ ID NO: 7532 - DNA, 35 bp, synthetic construct
  source 1..35: mol_type = other DNA
aggacagttgttggcggttgctggatccaccggag

SEQ ID NO: 7533 - DNA, 35 bp, synthetic construct
  source 1..35: mol_type = other DNA
aggacagttgttggcggttgctggatccactggag

SEQ ID NO: 7534 - DNA, 36 bp, synthetic construct
  source 1..36: mol_type = other DNA
gaggacagttgttggcggttgctggatccactggag

SEQ ID NO: 7535 - DNA, 36 bp, synthetic construct
  source 1..36: mol_type = other DNA
gaggacagttgttggcggttgctggatccaccggag

SEQ ID NO: 7536 - DNA, 37 bp, synthetic construct
  source 1..37: mol_type = other DNA
agaggacagttgttggcggttgctggatccaccggag

SEQ ID NO: 7537 - DNA, 37 bp, synthetic construct
  source 1..37: mol_type = other DNA
agaggacagttgttggcggttgctggatccactggag

SEQ ID NO: 7538 - DNA, 38 bp, synthetic construct
  source 1..38: mol_type = other DNA
aagaggacagttgttggcggttgctggatccaccggag

SEQ ID NO: 7539 - DNA, 38 bp, synthetic construct
  source 1..38: mol_type = other DNA
aagaggacagttgttggcggttgctggatccactggag

SEQ ID NO: 7540 - DNA, 39 bp, synthetic construct
  source 1..39: mol_type = other DNA
aaagaggacagttgttggcggttgctggatccactggag

SEQ ID NO: 7541 - DNA, 39 bp, synthetic construct
  source 1..39: mol_type = other DNA
aaagaggacagttgttggcggttgctggatccaccggag

SEQ ID NO: 7542 - DNA, 40 bp, synthetic construct
  source 1..40: mol_type = other DNA
gaaagaggacagttgttggcggttgctggatccaccggag

SEQ ID NO: 7543 - DNA, 40 bp, synthetic construct
  source 1..40: mol_type = other DNA
gaaagaggacagttgttggcggttgctggatccactggag

SEQ ID NO: 7544 - DNA, 21 bp, synthetic construct
  source 1..21: mol_type = other DNA
gcggttgctggatccactgga

SEQ ID NO: 7545 - DNA, 22 bp, synthetic construct
  source 1..22: mol_type = other DNA
ggcggttgctggatccactgga

SEQ ID NO: 7546 - DNA, 23 bp, synthetic construct
  source 1..23: mol_type = other DNA
tggcggttgctggatccactgga

SEQ ID NO: 7547 - DNA, 24 bp, synthetic construct
  source 1..24: mol_type = other DNA
ttggcggttgctggatccactgga

SEQ ID NO: 7548 - DNA, 25 bp, synthetic construct
  source 1..25: mol_type = other DNA
gttggcggttgctggatccactgga

SEQ ID NO: 7549 - DNA, 26 bp, synthetic construct
  source 1..26: mol_type = other DNA
tgttggcggttgctggatccactgga

SEQ ID NO: 7550 - DNA, 27 bp, synthetic construct
  source 1..27: mol_type = other DNA
ttgttggcggttgctggatccactgga

SEQ ID NO: 7551 - DNA, 28 bp, synthetic construct
  source 1..28: mol_type = other DNA
gttgttggcggttgctggatccactgga

SEQ ID NO: 7552 - DNA, 29 bp, synthetic construct
  source 1..29: mol_type = other DNA
agttgttggcggttgctggatccactgga

SEQ ID NO: 7553 - DNA, 30 bp, synthetic construct
  source 1..30: mol_type = other DNA
cagttgttggcggttgctggatccactgga

SEQ ID NO: 7554 - DNA, 31 bp, synthetic construct
  source 1..31: mol_type = other DNA
acagttgttggcggttgctggatccactgga

SEQ ID NO: 7555 - DNA, 32 bp, synthetic construct
  source 1..32: mol_type = other DNA
gacagttgttggcggttgctggatccactgga

SEQ ID NO: 7556 - DNA, 33 bp, synthetic construct
  source 1..33: mol_type = other DNA
ggacagttgttggcggttgctggatccactgga

SEQ ID NO: 7557 - DNA, 34 bp, synthetic construct
  source 1..34: mol_type = other DNA
aggacagttgttggcggttgctggatccactgga

SEQ ID NO: 7558 - DNA, 35 bp, synthetic construct
  source 1..35: mol_type = other DNA
gaggacagttgttggcggttgctggatccactgga

SEQ ID NO: 7559 - DNA, 36 bp, synthetic construct
  source 1..36: mol_type = other DNA
agaggacagttgttggcggttgctggatccactgga

SEQ ID NO: 7560 - DNA, 37 bp, synthetic construct
  source 1..37: mol_type = other DNA
aagaggacagttgttggcggttgctggatccactgga

SEQ ID NO: 7561 - DNA, 38 bp, synthetic construct
  source 1..38: mol_type = other DNA
aaagaggacagttgttggcggttgctggatccactgga

SEQ ID NO: 7562 - DNA, 39 bp, synthetic construct
  source 1..39: mol_type = other DNA
gaaagaggacagttgttggcggttgctggatccactgga

SEQ ID NO: 7563 - DNA, 40 bp, synthetic construct
  source 1..40: mol_type = other DNA
agaaagaggacagttgttggcggttgctggatccactgga

SEQ ID NO: 7564 - DNA, 10 bp, synthetic construct
  source 1..10: mol_type = other DNA
ccgccaacaa

SEQ ID NO: 7565 - DNA, 11 bp, synthetic construct
  source 1..11: mol_type = other DNA
accgccaacaa

SEQ ID NO: 7566 - DNA, 12 bp, synthetic construct
  source 1..12: mol_type = other DNA
aaccgccaacaa

SEQ ID NO: 7567 - DNA, 13 bp, synthetic construct
  source 1..13: mol_type = other DNA
caaccgccaacaa

SEQ ID NO: 7568 - DNA, 14 bp, synthetic construct
  source 1..14: mol_type = other DNA
gcaaccgccaacaa

SEQ ID NO: 7569 - DNA, 15 bp, synthetic construct
  source 1..15: mol_type = other DNA
agcaaccgccaacaa

SEQ ID NO: 7570 - DNA, 16 bp, synthetic construct
  source 1..16: mol_type = other DNA
cagcaaccgccaacaa

SEQ ID NO: 7571 - DNA, 17 bp, synthetic construct
  source 1..17: mol_type = other DNA
ccagcaaccgccaacaa

SEQ ID NO: 7572 - DNA, 18 bp, synthetic construct
  source 1..18: mol_type = other DNA
tccagcaaccgccaacaa

SEQ ID NO: 7573 - DNA, 19 bp, synthetic construct
  source 1..19: mol_type = other DNA
atccagcaaccgccaacaa

SEQ ID NO: 7574 - DNA, 20 bp, synthetic construct
  source 1..20: mol_type = other DNA
gatccagcaaccgccaacaa

SEQ ID NO: 7575 - DNA, 21 bp, synthetic construct
  source 1..21: mol_type = other DNA
ggatccagcaaccgccaacaa

SEQ ID NO: 7576 - DNA, 22 bp, synthetic construct
  source 1..22: mol_type = other DNA
tggatccagcaaccgccaacaa

SEQ ID NO: 7577 - DNA, 23 bp, synthetic construct
  source 1..23: mol_type = other DNA
gtggatccagcaaccgccaacaa

SEQ ID NO: 7578 - DNA, 24 bp, synthetic construct
  source 1..24: mol_type = other DNA
agtggatccagcaaccgccaacaa

SEQ ID NO: 7579 - DNA, 25 bp, synthetic construct
  source 1..25: mol_type = other DNA
cagtggatccagcaaccgccaacaa

SEQ ID NO: 7580 - DNA, 26 bp, synthetic construct
  source 1..26: mol_type = other DNA
ccagtggatccagcaaccgccaacaa

SEQ ID NO: 7581 - DNA, 27 bp, synthetic construct
  source 1..27: mol_type = other DNA
tccagtggatccagcaaccgccaacaa

SEQ ID NO: 7582 - DNA, 28 bp, synthetic construct
  source 1..28: mol_type = other DNA
ctccagtggatccagcaaccgccaacaa

SEQ ID NO: 7583 - DNA, 29 bp, synthetic construct
  source 1..29: mol_type = other DNA
gctccagtggatccagcaaccgccaacaa

SEQ ID NO: 7584 - DNA, 30 bp, synthetic construct
  source 1..30: mol_type = other DNA
tgctccagtggatccagcaaccgccaacaa

SEQ ID NO: 7585 - DNA, 31 bp, synthetic construct
  source 1..31: mol_type = other DNA
ctgctccagtggatccagcaaccgccaacaa

SEQ ID NO: 7586 - DNA, 32 bp, synthetic construct
  source 1..32: mol_type = other DNA
cctgctccagtggatccagcaaccgccaacaa

SEQ ID NO: 7587 - DNA, 33 bp, synthetic construct
  source 1..33: mol_type = other DNA
gcctgctccagtggatccagcaaccgccaacaa

SEQ ID NO: 7588 - DNA, 34 bp, synthetic construct
  source 1..34: mol_type = other DNA
tgcctgctccagtggatccagcaaccgccaacaa

SEQ ID NO: 7589 - DNA, 35 bp, synthetic construct
  source 1..35: mol_type = other DNA
ttgcctgctccagtggatccagcaaccgccaacaa

SEQ ID NO: 7590 - DNA, 36 bp, synthetic construct
  source 1..36: mol_type = other DNA
cttgcctgctccagtggatccagcaaccgccaacaa

SEQ ID NO: 7591 - DNA, 37 bp, synthetic construct
  source 1..37: mol_type = other DNA
ccttgcctgctccagtggatccagcaaccgccaacaa

SEQ ID NO: 7592 - DNA, 38 bp, synthetic construct
  source 1..38: mol_type = other DNA
accttgcctgctccagtggatccagcaaccgccaacaa

SEQ ID NO: 7593 - DNA, 39 bp, synthetic construct
  source 1..39: mol_type = other DNA
taccttgcctgctccagtggatccagcaaccgccaacaa

SEQ ID NO: 7594 - DNA, 40 bp, synthetic construct
  source 1..40: mol_type = other DNA
ctaccttgcctgctccagtggatccagcaaccgccaacaa

SEQ ID NO: 7595 - DNA, 10 bp, synthetic construct
  source 1..10: mol_type = other DNA
accgccaaca

SEQ ID NO: 7596 - DNA, 10 bp, synthetic construct
  source 1..10: mol_type = other DNA
accgcgagca

SEQ ID NO: 7597 - DNA, 11 bp, synthetic construct
  source 1..11: mol_type = other DNA
aaccgcgagca

SEQ ID NO: 7598 - DNA, 11 bp, synthetic construct
  source 1..11: mol_type = other DNA
aaccgccaaca

SEQ ID NO: 7599 - DNA, 12 bp, synthetic construct
  source 1..12: mol_type = other DNA
caaccgcgagca

SEQ ID NO: 7600 - DNA, 12 bp, synthetic construct
  source 1..12: mol_type = other DNA
caaccgccaaca

SEQ ID NO: 7601 - DNA, 13 bp, synthetic construct
  source 1..13: mol_type = other DNA
gcaaccgcgagca

SEQ ID NO: 7602 - DNA, 13 bp, synthetic construct
  source 1..13: mol_type = other DNA
gcaaccgccaaca

SEQ ID NO: 7603 - DNA, 14 bp, synthetic construct
  source 1..14: mol_type = other DNA
agcaaccgccaaca

SEQ ID NO: 7604 - DNA, 14 bp, synthetic construct
  source 1..14: mol_type = other DNA
agcaaccgcgagca

SEQ ID NO: 7605 - DNA, 15 bp, synthetic construct
  source 1..15: mol_type = other DNA
cagcaaccgcgagca

SEQ ID NO: 7606 - DNA, 15 bp, synthetic construct
  source 1..15: mol_type = other DNA
cagcaaccgccaaca

SEQ ID NO: 7607 - DNA, 16 bp, synthetic construct
  source 1..16: mol_type = other DNA
ccagcaaccgcgagca

SEQ ID NO: 7608 - DNA, 16 bp, synthetic construct
  source 1..16: mol_type = other DNA
ccagcaaccgccaaca

SEQ ID NO: 7609 - DNA, 17 bp, synthetic construct
  source 1..17: mol_type = other DNA
tccagcaaccgcgagca

SEQ ID NO: 7610 - DNA, 17 bp, synthetic construct
  source 1..17: mol_type = other DNA
tccagcaaccgccaaca

SEQ ID NO: 7611 - DNA, 18 bp, synthetic construct
  source 1..18: mol_type = other DNA
atccagcaaccgcgagca

SEQ ID NO: 7612 - DNA, 18 bp, synthetic construct
  source 1..18: mol_type = other DNA
atccagcaaccgccaaca

SEQ ID NO: 7613 - DNA, 19 bp, synthetic construct
  source 1..19: mol_type = other DNA
gatccagcaaccgcgagca

SEQ ID NO: 7614 - DNA, 19 bp, synthetic construct
  source 1..19: mol_type = other DNA
gatccagcaaccgccaaca

SEQ ID NO: 7615 - DNA, 20 bp, synthetic construct
  source 1..20: mol_type = other DNA
ggatccagcaaccgcgagca

SEQ ID NO: 7616 - DNA, 20 bp, synthetic construct
  source 1..20: mol_type = other DNA
ggatccagcaaccgccaaca

SEQ ID NO: 7617 - DNA, 21 bp, synthetic construct
  source 1..21: mol_type = other DNA
tggatccagcaaccgcgagca

SEQ ID NO: 7618 - DNA, 21 bp, synthetic construct
  source 1..21: mol_type = other DNA
tggatccagcaaccgccaaca

SEQ ID NO: 7619 - DNA, 22 bp, synthetic construct
  source 1..22: mol_type = other DNA
gtggatccagcaaccgcgagca

SEQ ID NO: 7620 - DNA, 22 bp, synthetic construct
  source 1..22: mol_type = other DNA
gtggatccagcaaccgccaaca

SEQ ID NO: 7621 - DNA, 23 bp, synthetic construct
  source 1..23: mol_type = other DNA
agtggatccagcaaccgcgagca

SEQ ID NO: 7622 - DNA, 23 bp, synthetic construct
  source 1..23: mol_type = other DNA
agtggatccagcaaccgccaaca

SEQ ID NO: 7623 - DNA, 24 bp, synthetic construct
  source 1..24: mol_type = other DNA
cagtggatccagcaaccgcgagca

SEQ ID NO: 7624 - DNA, 24 bp, synthetic construct
  source 1..24: mol_type = other DNA
cagtggatccagcaaccgccaaca

SEQ ID NO: 7625 - DNA, 25 bp, synthetic construct
  source 1..25: mol_type = other DNA
ccagtggatccagcaaccgccaaca

SEQ ID NO: 7626 - DNA, 25 bp, synthetic construct
  source 1..25: mol_type = other DNA
ccagtggatccagcaaccgcgagca

SEQ ID NO: 7627 - DNA, 26 bp, synthetic construct
  source 1..26: mol_type = other DNA
tccagtggatccagcaaccgcgagca

SEQ ID NO: 7628 - DNA, 26 bp, synthetic construct
  source 1..26: mol_type = other DNA
tccagtggatccagcaaccgccaaca

SEQ ID NO: 7629 - DNA, 27 bp, synthetic construct
  source 1..27: mol_type = other DNA
ctccagtggatccagcaaccgcgagca

SEQ ID NO: 7630 - DNA, 27 bp, synthetic construct
  source 1..27: mol_type = other DNA
ctccagtggatccagcaaccgccaaca

SEQ ID NO: 7631 - DNA, 28 bp, synthetic construct
  source 1..28: mol_type = other DNA
gctccagtggatccagcaaccgcgagca

SEQ ID NO: 7632 - DNA, 28 bp, synthetic construct
  source 1..28: mol_type = other DNA
gctccagtggatccagcaaccgccaaca

SEQ ID NO: 7633 - DNA, 29 bp, synthetic construct
  source 1..29: mol_type = other DNA
tgctccagtggatccagcaaccgcgagca

SEQ ID NO: 7634 - DNA, 29 bp, synthetic construct
  source 1..29: mol_type = other DNA
tgctccagtggatccagcaaccgccaaca

SEQ ID NO: 7635 - DNA, 30 bp, synthetic construct
  source 1..30: mol_type = other DNA
ctgctccagtggatccagcaaccgccaaca

SEQ ID NO: 7636 - DNA, 30 bp, synthetic construct
  source 1..30: mol_type = other DNA
ctgctccagtggatccagcaaccgcgagca

SEQ ID NO: 7637 - DNA, 31 bp, synthetic construct
  source 1..31: mol_type = other DNA
cctgctccagtggatccagcaaccgcgagca

SEQ ID NO: 7638 - DNA, 31 bp, synthetic construct
  source 1..31: mol_type = other DNA
cctgctccagtggatccagcaaccgccaaca

SEQ ID NO: 7639 - DNA, 32 bp, synthetic construct
  source 1..32: mol_type = other DNA
gcctgctccagtggatccagcaaccgcgagca

SEQ ID NO: 7640 - DNA, 32 bp, synthetic construct
  source 1..32: mol_type = other DNA
gcctgctccagtggatccagcaaccgccaaca

SEQ ID NO: 7641 - DNA, 33 bp, synthetic construct
  source 1..33: mol_type = other DNA
tgcctgctccagtggatccagcaaccgcgagca

SEQ ID NO: 7642 - DNA, 33 bp, synthetic construct
  source 1..33: mol_type = other DNA
tgcctgctccagtggatccagcaaccgccaaca

SEQ ID NO: 7643 - DNA, 34 bp, synthetic construct
  source 1..34: mol_type = other DNA
ttgcctgctccagtggatccagcaaccgccaaca

SEQ ID NO: 7644 - DNA, 34 bp, synthetic construct
  source 1..34: mol_type = other DNA
ttgcctgctccagtggatccagcaaccgcgagca

SEQ ID NO: 7645 - DNA, 35 bp, synthetic construct
  source 1..35: mol_type = other DNA
cttgcctgctccagtggatccagcaaccgcgagca

SEQ ID NO: 7646 - DNA, 35 bp, synthetic construct
  source 1..35: mol_type = other DNA
cttgcctgctccagtggatccagcaaccgccaaca

SEQ ID NO: 7647 - DNA, 36 bp, synthetic construct
  source 1..36: mol_type = other DNA
ccttgcctgctccagtggatccagcaaccgccaaca

SEQ ID NO: 7648 - DNA, 36 bp, synthetic construct
  source 1..36: mol_type = other DNA
ccttgcctgctccagtggatccagcaaccgcgagca

SEQ ID NO: 7649 - DNA, 37 bp, synthetic construct
  source 1..37: mol_type = other DNA
accttgcctgctccagtggatccagcaaccgccaaca

SEQ ID NO: 7650 - DNA, 37 bp, synthetic construct
  source 1..37: mol_type = other DNA
accttgcctgctccagtggatccagcaaccgcgagca

SEQ ID NO: 7651 - DNA, 38 bp, synthetic construct
  source 1..38: mol_type = other DNA
taccttgcctgctccagtggatccagcaaccgcgagca

SEQ ID NO: 7652 - DNA, 38 bp, synthetic construct
  source 1..38: mol_type = other DNA
taccttgcctgctccagtggatccagcaaccgccaaca

SEQ ID NO: 7653 - DNA, 39 bp, synthetic construct
  source 1..39: mol_type = other DNA
ctaccttgcctgctccagtggatccagcaaccgcgagca

SEQ ID NO: 7654 - DNA, 39 bp, synthetic construct
  source 1..39: mol_type = other DNA
ctaccttgcctgctccagtggatccagcaaccgccaaca

SEQ ID NO: 7655 - DNA, 40 bp, synthetic construct
  source 1..40: mol_type = other DNA
actaccttgcctgctccagtggatccagcaaccgccaaca

SEQ ID NO: 7656 - DNA, 40 bp, synthetic construct
  source 1..40: mol_type = other DNA
actaccttgcctgctccagtggatccagcaaccgcgagca

SEQ ID NO: 7657 - DNA, 22 bp, synthetic construct
  source 1..22: mol_type = other DNA
cgccaacaactgtcctctttct

SEQ ID NO: 7658 - DNA, 22 bp, synthetic construct
  source 1..22: mol_type = other DNA
cgccaacaactgtccccgttct

SEQ ID NO: 7659 - DNA, 23 bp, synthetic construct
  source 1..23: mol_type = other DNA
ccgccaacaactgtccccgttct

SEQ ID NO: 7660 - DNA, 23 bp, synthetic construct
  source 1..23: mol_type = other DNA
ccgccaacaactgtcctctttct

SEQ ID NO: 7661 - DNA, 24 bp, synthetic construct
  source 1..24: mol_type = other DNA
accgccaacaactgtccccgttct

SEQ ID NO: 7662 - DNA, 24 bp, synthetic construct
  source 1..24: mol_type = other DNA
accgccaacaactgtcctctttct

SEQ ID NO: 7663 - DNA, 25 bp, synthetic construct
  source 1..25: mol_type = other DNA
aaccgccaacaactgtcctctttct

SEQ ID NO: 7664 - DNA, 25 bp, synthetic construct
  source 1..25: mol_type = other DNA
aaccgccaacaactgtccccgttct

SEQ ID NO: 7665 - DNA, 26 bp, synthetic construct
  source 1..26: mol_type = other DNA
caaccgccaacaactgtccccgttct

SEQ ID NO: 7666 - DNA, 26 bp, synthetic construct
  source 1..26: mol_type = other DNA
caaccgccaacaactgtcctctttct

SEQ ID NO: 7667 - DNA, 27 bp, synthetic construct
  source 1..27: mol_type = other DNA
gcaaccgccaacaactgtcctctttct

SEQ ID NO: 7668 - DNA, 27 bp, synthetic construct
  source 1..27: mol_type = other DNA
gcaaccgccaacaactgtccccgttct

SEQ ID NO: 7669 - DNA, 28 bp, synthetic construct
  source 1..28: mol_type = other DNA
agcaaccgccaacaactgtcctctttct

SEQ ID NO: 7670 - DNA, 28 bp, synthetic construct
  source 1..28: mol_type = other DNA
agcaaccgccaacaactgtccccgttct

SEQ ID NO: 7671 - DNA, 29 bp, synthetic construct
  source 1..29: mol_type = other DNA
cagcaaccgccaacaactgtcctctttct

SEQ ID NO: 7672 - DNA, 29 bp, synthetic construct
  source 1..29: mol_type = other DNA
cagcaaccgccaacaactgtccccgttct

SEQ ID NO: 7673 - DNA, 30 bp, synthetic construct
  source 1..30: mol_type = other DNA
ccagcaaccgccaacaactgtcctctttct

SEQ ID NO: 7674 - DNA, 30 bp, synthetic construct
  source 1..30: mol_type = other DNA
ccagcaaccgccaacaactgtccccgttct

SEQ ID NO: 7675 - DNA, 31 bp, synthetic construct
  source 1..31: mol_type = other DNA
tccagcaaccgccaacaactgtcctctttct

SEQ ID NO: 7676 - DNA, 31 bp, synthetic construct
  source 1..31: mol_type = other DNA
tccagcaaccgccaacaactgtccccgttct

SEQ ID NO: 7677 - DNA, 32 bp, synthetic construct
  source 1..32: mol_type = other DNA
atccagcaaccgccaacaactgtccccgttct

SEQ ID NO: 7678 - DNA, 32 bp, synthetic construct
  source 1..32: mol_type = other DNA
atccagcaaccgccaacaactgtcctctttct

SEQ ID NO: 7679 - DNA, 33 bp, synthetic construct
  source 1..33: mol_type = other DNA
gatccagcaaccgccaacaactgtccccgttct

SEQ ID NO: 7680 - DNA, 33 bp, synthetic construct
  source 1..33: mol_type = other DNA
gatccagcaaccgccaacaactgtcctctttct

SEQ ID NO: 7681 - DNA, 34 bp, synthetic construct
  source 1..34: mol_type = other DNA
ggatccagcaaccgccaacaactgtcctctttct

SEQ ID NO: 7682 - DNA, 34 bp, synthetic construct
  source 1..34: mol_type = other DNA
ggatccagcaaccgccaacaactgtccccgttct

SEQ ID NO: 7683 - DNA, 35 bp, synthetic construct
  source 1..35: mol_type = other DNA
tggatccagcaaccgccaacaactgtccccgttct

SEQ ID NO: 7684 - DNA, 35 bp, synthetic construct
  source 1..35: mol_type = other DNA
tggatccagcaaccgccaacaactgtcctctttct

SEQ ID NO: 7685 - DNA, 36 bp, synthetic construct
  source 1..36: mol_type = other DNA
gtggatccagcaaccgccaacaactgtcctctttct

SEQ ID NO: 7686 - DNA, 36 bp, synthetic construct
  source 1..36: mol_type = other DNA
gtggatccagcaaccgccaacaactgtccccgttct

SEQ ID NO: 7687 - DNA, 37 bp, synthetic construct
  source 1..37: mol_type = other DNA
agtggatccagcaaccgccaacaactgtcctctttct

SEQ ID NO: 7688 - DNA, 37 bp, synthetic construct
  source 1..37: mol_type = other DNA
agtggatccagcaaccgccaacaactgtccccgttct

SEQ ID NO: 7689 - DNA, 38 bp, synthetic construct
  source 1..38: mol_type = other DNA
cagtggatccagcaaccgccaacaactgtccccgttct

SEQ ID NO: 7690 - DNA, 38 bp, synthetic construct
  source 1..38: mol_type = other DNA
cagtggatccagcaaccgccaacaactgtcctctttct

SEQ ID NO: 7691 - DNA, 39 bp, synthetic construct
  source 1..39: mol_type = other DNA
ccagtggatccagcaaccgccaacaactgtcctctttct

SEQ ID NO: 7692 - DNA, 39 bp, synthetic construct
  source 1..39: mol_type = other DNA
ccagtggatccagcaaccgccaacaactgtccccgttct

SEQ ID NO: 7693 - DNA, 40 bp, synthetic construct
  source 1..40: mol_type = other DNA
tccagtggatccagcaaccgccaacaactgtccccgttct

SEQ ID NO: 7694 - DNA, 40 bp, synthetic construct
  source 1..40: mol_type = other DNA
tccagtggatccagcaaccgccaacaactgtcctctttct

SEQ ID NO: 7695 - DNA, 20 bp, synthetic construct
  source 1..20: mol_type = other DNA
cgccaacaactgtccccgtt

SEQ ID NO: 7696 - DNA, 20 bp, synthetic construct
  source 1..20: mol_type = other DNA
cgccaacaactgtcctcttt

SEQ ID NO: 7697 - DNA, 21 bp, synthetic construct
  source 1..21: mol_type = other DNA
ccgccaacaactgtcctcttt

SEQ ID NO: 7698 - DNA, 21 bp, synthetic construct
  source 1..21: mol_type = other DNA
ccgccaacaactgtccccgtt

SEQ ID NO: 7699 - DNA, 22 bp, synthetic construct
  source 1..22: mol_type = other DNA
accgccaacaactgtccccgtt

SEQ ID NO: 7700 - DNA, 22 bp, synthetic construct
  source 1..22: mol_type = other DNA
accgccaacaactgtcctcttt

SEQ ID NO: 7701 - DNA, 23 bp, synthetic construct
  source 1..23: mol_type = other DNA
aaccgccaacaactgtccccgtt

SEQ ID NO: 7702 - DNA, 23 bp, synthetic construct
  source 1..23: mol_type = other DNA
aaccgccaacaactgtcctcttt

SEQ ID NO: 7703 - DNA, 24 bp, synthetic construct
  source 1..24: mol_type = other DNA
caaccgccaacaactgtccccgtt

SEQ ID NO: 7704 - DNA, 24 bp, synthetic construct
  source 1..24: mol_type = other DNA
caaccgccaacaactgtcctcttt

SEQ ID NO: 7705 - DNA, 25 bp, synthetic construct
  source 1..25: mol_type = other DNA
gcaaccgccaacaactgtccccgtt

SEQ ID NO: 7706 - DNA, 25 bp, synthetic construct
  source 1..25: mol_type = other DNA
gcaaccgccaacaactgtcctcttt

SEQ ID NO: 7707 - DNA, 26 bp, synthetic construct
  source 1..26: mol_type = other DNA
agcaaccgccaacaactgtcctcttt

SEQ ID NO: 7708 - DNA, 26 bp, synthetic construct
  source 1..26: mol_type = other DNA
agcaaccgccaacaactgtccccgtt

SEQ ID NO: 7709 - DNA, 27 bp, synthetic construct
  source 1..27: mol_type = other DNA
cagcaaccgccaacaactgtcctcttt

SEQ ID NO: 7710 - DNA, 27 bp, synthetic construct
  source 1..27: mol_type = other DNA
cagcaaccgccaacaactgtccccgtt

SEQ ID NO: 7711 - DNA, 28 bp, synthetic construct
  source 1..28: mol_type = other DNA
ccagcaaccgccaacaactgtccccgtt

SEQ ID NO: 7712 - DNA, 28 bp, synthetic construct
  source 1..28: mol_type = other DNA
ccagcaaccgccaacaactgtcctcttt

SEQ ID NO: 7713 - DNA, 29 bp, synthetic construct
  source 1..29: mol_type = other DNA
tccagcaaccgccaacaactgtccccgtt

SEQ ID NO: 7714 - DNA, 29 bp, synthetic construct
  source 1..29: mol_type = other DNA
tccagcaaccgccaacaactgtcctcttt

SEQ ID NO: 7715 - DNA, 30 bp, synthetic construct
  source 1..30: mol_type = other DNA
atccagcaaccgccaacaactgtcctcttt

SEQ ID NO: 7716 - DNA, 30 bp, synthetic construct
  source 1..30: mol_type = other DNA
atccagcaaccgccaacaactgtccccgtt

SEQ ID NO: 7717 - DNA, 31 bp, synthetic construct
  source 1..31: mol_type = other DNA
gatccagcaaccgccaacaactgtccccgtt

SEQ ID NO: 7718 - DNA, 31 bp, synthetic construct
  source 1..31: mol_type = other DNA
gatccagcaaccgccaacaactgtcctcttt

SEQ ID NO: 7719 - DNA, 32 bp, synthetic construct
  source 1..32: mol_type = other DNA
ggatccagcaaccgccaacaactgtcctcttt

SEQ ID NO: 7720 - DNA, 32 bp, synthetic construct
  source 1..32: mol_type = other DNA
ggatccagcaaccgccaacaactgtccccgtt

SEQ ID NO: 7721 - DNA, 33 bp, synthetic construct
  source 1..33: mol_type = other DNA
tggatccagcaaccgccaacaactgtccccgtt

SEQ ID NO: 7722 - DNA, 33 bp, synthetic construct
  source 1..33: mol_type = other DNA
tggatccagcaaccgccaacaactgtcctcttt

SEQ ID NO: 7723 - DNA, 34 bp, synthetic construct
  source 1..34: mol_type = other DNA
gtggatccagcaaccgccaacaactgtcctcttt

SEQ ID NO: 7724 - DNA, 34 bp, synthetic construct
  source 1..34: mol_type = other DNA
gtggatccagcaaccgccaacaactgtccccgtt

SEQ ID NO: 7725 - DNA, 35 bp, synthetic construct
  source 1..35: mol_type = other DNA
agtggatccagcaaccgccaacaactgtccccgtt

SEQ ID NO: 7726 - DNA, 35 bp, synthetic construct
  source 1..35: mol_type = other DNA
agtggatccagcaaccgccaacaactgtcctcttt

SEQ ID NO: 7727 - DNA, 36 bp, synthetic construct
  source 1..36: mol_type = other DNA
cagtggatccagcaaccgccaacaactgtccccgtt

SEQ ID NO: 7728 - DNA, 36 bp, synthetic construct
  source 1..36: mol_type = other DNA
cagtggatccagcaaccgccaacaactgtcctcttt

SEQ ID NO: 7729 - DNA, 37 bp, synthetic construct
  source 1..37: mol_type = other DNA
ccagtggatccagcaaccgccaacaactgtcctcttt

SEQ ID NO: 7730 - DNA, 37 bp, synthetic construct
  source 1..37: mol_type = other DNA
ccagtggatccagcaaccgccaacaactgtccccgtt

SEQ ID NO: 7731 - DNA, 38 bp, synthetic construct
  source 1..38: mol_type = other DNA
tccagtggatccagcaaccgccaacaactgtccccgtt

SEQ ID NO: 7732 - DNA, 38 bp, synthetic construct
  source 1..38: mol_type = other DNA
tccagtggatccagcaaccgccaacaactgtcctcttt

SEQ ID NO: 7733 - DNA, 39 bp, synthetic construct
  source 1..39: mol_type = other DNA
ctccagtggatccagcaaccgccaacaactgtccccgtt

SEQ ID NO: 7734 - DNA, 39 bp, synthetic construct
  source 1..39: mol_type = other DNA
ctccagtggatccagcaaccgccaacaactgtcctcttt

SEQ ID NO: 7735 - DNA, 40 bp, synthetic construct
  source 1..40: mol_type = other DNA
gctccagtggatccagcaaccgccaacaactgtccccgtt

SEQ ID NO: 7736 - DNA, 40 bp, synthetic construct
  source 1..40: mol_type = other DNA
gctccagtggatccagcaaccgccaacaactgtcctcttt

SEQ ID NO: 7737 - DNA, 11 bp, synthetic construct
  source 1..11: mol_type = other DNA
cgccaacaact

SEQ ID NO: 7738 - DNA, 12 bp, synthetic construct
  source 1..12: mol_type = other DNA
ccgccaacaact

SEQ ID NO: 7739 - DNA, 13 bp, synthetic construct
  source 1..13: mol_type = other DNA
accgccaacaact

SEQ ID NO: 7740 - DNA, 14 bp, synthetic construct
  source 1..14: mol_type = other DNA
aaccgccaacaact

SEQ ID NO: 7741 - DNA, 15 bp, synthetic construct
  source 1..15: mol_type = other DNA
caaccgccaacaact

SEQ ID NO: 7742 - DNA, 16 bp, synthetic construct
  source 1..16: mol_type = other DNA
gcaaccgccaacaact

SEQ ID NO: 7743 - DNA, 17 bp, synthetic construct
  source 1..17: mol_type = other DNA
agcaaccgccaacaact

SEQ ID NO: 7744 - DNA, 18 bp, synthetic construct
  source 1..18: mol_type = other DNA
cagcaaccgccaacaact

SEQ ID NO: 7745 - DNA, 19 bp, synthetic construct
  source 1..19: mol_type = other DNA
ccagcaaccgccaacaact

SEQ ID NO: 7746 - DNA, 20 bp, synthetic construct
  source 1..20: mol_type = other DNA
tccagcaaccgccaacaact

SEQ ID NO: 7747 - DNA, 21 bp, synthetic construct
  source 1..21: mol_type = other DNA
atccagcaaccgccaacaact

SEQ ID NO: 7748 - DNA, 22 bp, synthetic construct
  source 1..22: mol_type = other DNA
gatccagcaaccgccaacaact

SEQ ID NO: 7749 - DNA, 23 bp, synthetic construct
  source 1..23: mol_type = other DNA
ggatccagcaaccgccaacaact

SEQ ID NO: 7750 - DNA, 24 bp, synthetic construct
  source 1..24: mol_type = other DNA
tggatccagcaaccgccaacaact

SEQ ID NO: 7751 - DNA, 25 bp, synthetic construct
  source 1..25: mol_type = other DNA
gtggatccagcaaccgccaacaact

SEQ ID NO: 7752 - DNA, 26 bp, synthetic construct
  source 1..26: mol_type = other DNA
agtggatccagcaaccgccaacaact

SEQ ID NO: 7753 - DNA, 27 bp, synthetic construct
  source 1..27: mol_type = other DNA
cagtggatccagcaaccgccaacaact

SEQ ID NO: 7754 - DNA, 28 bp, synthetic construct
  source 1..28: mol_type = other DNA
ccagtggatccagcaaccgccaacaact

SEQ ID NO: 7755 - DNA, 29 bp, synthetic construct
  source 1..29: mol_type = other DNA
tccagtggatccagcaaccgccaacaact

SEQ ID NO: 7756 - DNA, 30 bp, synthetic construct
  source 1..30: mol_type = other DNA
ctccagtggatccagcaaccgccaacaact

SEQ ID NO: 7757 - DNA, 31 bp, synthetic construct
  source 1..31: mol_type = other DNA
gctccagtggatccagcaaccgccaacaact

SEQ ID NO: 7758 - DNA, 32 bp, synthetic construct
  source 1..32: mol_type = other DNA
tgctccagtggatccagcaaccgccaacaact

SEQ ID NO: 7759 - DNA, 33 bp, synthetic construct
  source 1..33: mol_type = other DNA
ctgctccagtggatccagcaaccgccaacaact

SEQ ID NO: 7760 - DNA, 34 bp, synthetic construct
  source 1..34: mol_type = other DNA
cctgctccagtggatccagcaaccgccaacaact

SEQ ID NO: 7761 - DNA, 35 bp, synthetic construct
  source 1..35: mol_type = other DNA
gcctgctccagtggatccagcaaccgccaacaact

SEQ ID NO: 7762 - DNA, 36 bp, synthetic construct
  source 1..36: mol_type = other DNA
tgcctgctccagtggatccagcaaccgccaacaact

SEQ ID NO: 7763 - DNA, 37 bp, synthetic construct
  source 1..37: mol_type = other DNA
ttgcctgctccagtggatccagcaaccgccaacaact

SEQ ID NO: 7764 - DNA, 38 bp, synthetic construct
  source 1..38: mol_type = other DNA
cttgcctgctccagtggatccagcaaccgccaacaact

SEQ ID NO: 7765 - DNA, 39 bp, synthetic construct
  source 1..39: mol_type = other DNA
ccttgcctgctccagtggatccagcaaccgccaacaact

SEQ ID NO: 7766 - DNA, 40 bp, synthetic construct
  source 1..40: mol_type = other DNA
accttgcctgctccagtggatccagcaaccgccaacaact

SEQ ID NO: 7767 - DNA, 30 bp, synthetic construct
  source 1..30: mol_type = other DNA
cgccaacaactgtcctctttctatcttgaa

SEQ ID NO: 7768 - DNA, 30 bp, synthetic construct
  source 1..30: mol_type = other DNA
cgccaacaactgtcctctttctattttgaa

SEQ ID NO: 7769 - DNA, 31 bp, synthetic construct
  source 1..31: mol_type = other DNA
ccgccaacaactgtcctctttctatcttgaa

SEQ ID NO: 7770 - DNA, 31 bp, synthetic construct
  source 1..31: mol_type = other DNA
ccgccaacaactgtcctctttctattttgaa

SEQ ID NO: 7771 - DNA, 32 bp, synthetic construct
  source 1..32: mol_type = other DNA
accgccaacaactgtcctctttctatcttgaa

SEQ ID NO: 7772 - DNA, 32 bp, synthetic construct
  source 1..32: mol_type = other DNA
accgccaacaactgtcctctttctattttgaa

SEQ ID NO: 7773 - DNA, 33 bp, synthetic construct
  source 1..33: mol_type = other DNA
aaccgccaacaactgtcctctttctatcttgaa

SEQ ID NO: 7774 - DNA, 33 bp, synthetic construct
  source 1..33: mol_type = other DNA
aaccgccaacaactgtcctctttctattttgaa

SEQ ID NO: 7775 - DNA, 34 bp, synthetic construct
  source 1..34: mol_type = other DNA
caaccgccaacaactgtcctctttctattttgaa

SEQ ID NO: 7776 - DNA, 34 bp, synthetic construct
  source 1..34: mol_type = other DNA
caaccgccaacaactgtcctctttctatcttgaa

SEQ ID NO: 7777 - DNA, 35 bp, synthetic construct
  source 1..35: mol_type = other DNA
gcaaccgccaacaactgtcctctttctattttgaa

SEQ ID NO: 7778 - DNA, 35 bp, synthetic construct
  source 1..35: mol_type = other DNA
gcaaccgccaacaactgtcctctttctatcttgaa

SEQ ID NO: 7779 - DNA, 36 bp, synthetic construct
  source 1..36: mol_type = other DNA
agcaaccgccaacaactgtcctctttctattttgaa

SEQ ID NO: 7780 - DNA, 36 bp, synthetic construct
  source 1..36: mol_type = other DNA
agcaaccgccaacaactgtcctctttctatcttgaa

SEQ ID NO: 7781 - DNA, 37 bp, synthetic construct
  source 1..37: mol_type = other DNA
cagcaaccgccaacaactgtcctctttctatcttgaa

SEQ ID NO: 7782 - DNA, 37 bp, synthetic construct
  source 1..37: mol_type = other DNA
cagcaaccgccaacaactgtcctctttctattttgaa

SEQ ID NO: 7783 - DNA, 38 bp, synthetic construct
  source 1..38: mol_type = other DNA
ccagcaaccgccaacaactgtcctctttctattttgaa

SEQ ID NO: 7784 - DNA, 38 bp, synthetic construct
  source 1..38: mol_type = other DNA
ccagcaaccgccaacaactgtcctctttctatcttgaa

SEQ ID NO: 7785 - DNA, 39 bp, synthetic construct
  source 1..39: mol_type = other DNA
tccagcaaccgccaacaactgtcctctttctattttgaa

SEQ ID NO: 7786 - DNA, 39 bp, synthetic construct
  source 1..39: mol_type = other DNA
tccagcaaccgccaacaactgtcctctttctatcttgaa

SEQ ID NO: 7787 - DNA, 40 bp, synthetic construct
  source 1..40: mol_type = other DNA
atccagcaaccgccaacaactgtcctctttctattttgaa

SEQ ID NO: 7788 - DNA, 40 bp, synthetic construct
  source 1..40: mol_type = other DNA
atccagcaaccgccaacaactgtcctctttctatcttgaa

SEQ ID NO: 7789 - DNA, 18 bp, synthetic construct
  source 1..18: mol_type = other DNA
gcggttgctggatccact

SEQ ID NO: 7790 - DNA, 19 bp, synthetic construct
  source 1..19: mol_type = other DNA
ggcggttgctggatccact

SEQ ID NO: 7791 - DNA, 20 bp, synthetic construct
  source 1..20: mol_type = other DNA
tggcggttgctggatccact

SEQ ID NO: 7792 - DNA, 21 bp, synthetic construct
  source 1..21: mol_type = other DNA
ttggcggttgctggatccact

SEQ ID NO: 7793 - DNA, 22 bp, synthetic construct
  source 1..22: mol_type = other DNA
gttggcggttgctggatccact

SEQ ID NO: 7794 - DNA, 23 bp, synthetic construct
  source 1..23: mol_type = other DNA
tgttggcggttgctggatccact

SEQ ID NO: 7795 - DNA, 24 bp, synthetic construct
  source 1..24: mol_type = other DNA
ttgttggcggttgctggatccact

SEQ ID NO: 7796 - DNA, 25 bp, synthetic construct
  source 1..25: mol_type = other DNA
gttgttggcggttgctggatccact

SEQ ID NO: 7797 - DNA, 26 bp, synthetic construct
  source 1..26: mol_type = other DNA
agttgttggcggttgctggatccact

SEQ ID NO: 7798 - DNA, 27 bp, synthetic construct
  source 1..27: mol_type = other DNA
cagttgttggcggttgctggatccact

SEQ ID NO: 7799 - DNA, 28 bp, synthetic construct
  source 1..28: mol_type = other DNA
acagttgttggcggttgctggatccact

SEQ ID NO: 7800 - DNA, 29 bp, synthetic construct
  source 1..29: mol_type = other DNA
gacagttgttggcggttgctggatccact

SEQ ID NO: 7801 - DNA, 30 bp, synthetic construct
  source 1..30: mol_type = other DNA
ggacagttgttggcggttgctggatccact

SEQ ID NO: 7802 - DNA, 31 bp, synthetic construct
  source 1..31: mol_type = other DNA
aggacagttgttggcggttgctggatccact

SEQ ID NO: 7803 - DNA, 32 bp, synthetic construct
  source 1..32: mol_type = other DNA
gaggacagttgttggcggttgctggatccact

SEQ ID NO: 7804 - DNA, 33 bp, synthetic construct
  source 1..33: mol_type = other DNA
agaggacagttgttggcggttgctggatccact

SEQ ID NO: 7805 - DNA, 34 bp, synthetic construct
  source 1..34: mol_type = other DNA
aagaggacagttgttggcggttgctggatccact

SEQ ID NO: 7806 - DNA, 35 bp, synthetic construct
  source 1..35: mol_type = other DNA
aaagaggacagttgttggcggttgctggatccact

SEQ ID NO: 7807 - DNA, 36 bp, synthetic construct
  source 1..36: mol_type = other DNA
gaaagaggacagttgttggcggttgctggatccact

SEQ ID NO: 7808 - DNA, 37 bp, synthetic construct
  source 1..37: mol_type = other DNA
agaaagaggacagttgttggcggttgctggatccact

SEQ ID NO: 7809 - DNA, 38 bp, synthetic construct
  source 1..38: mol_type = other DNA
tagaaagaggacagttgttggcggttgctggatccact

SEQ ID NO: 7810 - DNA, 39 bp, synthetic construct
  source 1..39: mol_type = other DNA
atagaaagaggacagttgttggcggttgctggatccact

SEQ ID NO: 7811 - DNA, 40 bp, synthetic construct
  source 1..40: mol_type = other DNA
gatagaaagaggacagttgttggcggttgctggatccact

SEQ ID NO: 7812 - DNA, 29 bp, synthetic construct
  source 1..29: mol_type = other DNA
cgccaacaactgtcctctttctatcttga

SEQ ID NO: 7813 - DNA, 30 bp, synthetic construct
  source 1..30: mol_type = other DNA
ccgccaacaactgtcctctttctatcttga

SEQ ID NO: 7814 - DNA, 31 bp, synthetic construct
  source 1..31: mol_type = other DNA
accgccaacaactgtcctctttctatcttga

SEQ ID NO: 7815 - DNA, 32 bp, synthetic construct
  source 1..32: mol_type = other DNA
aaccgccaacaactgtcctctttctatcttga

SEQ ID NO: 7816 - DNA, 33 bp, synthetic construct
  source 1..33: mol_type = other DNA
caaccgccaacaactgtcctctttctatcttga

SEQ ID NO: 7817 - DNA, 34 bp, synthetic construct
  source 1..34: mol_type = other DNA
gcaaccgccaacaactgtcctctttctatcttga

SEQ ID NO: 7818 - DNA, 35 bp, synthetic construct
  source 1..35: mol_type = other DNA
agcaaccgccaacaactgtcctctttctatcttga

SEQ ID NO: 7819 - DNA, 36 bp, synthetic construct
  source 1..36: mol_type = other DNA
cagcaaccgccaacaactgtcctctttctatcttga

SEQ ID NO: 7820 - DNA, 37 bp, synthetic construct
  source 1..37: mol_type = other DNA
ccagcaaccgccaacaactgtcctctttctatcttga

SEQ ID NO: 7821 - DNA, 38 bp, synthetic construct
  source 1..38: mol_type = other DNA
tccagcaaccgccaacaactgtcctctttctatcttga

SEQ ID NO: 7822 - DNA, 39 bp, synthetic construct
  source 1..39: mol_type = other DNA
atccagcaaccgccaacaactgtcctctttctatcttga

SEQ ID NO: 7823 - DNA, 40 bp, synthetic construct
  source 1..40: mol_type = other DNA
gatccagcaaccgccaacaactgtcctctttctatcttga

SEQ ID NO: 7824 - DNA, 10 bp, synthetic construct
  source 1..10: mol_type = other DNA
gcaaccgcca

SEQ ID NO: 7825 - DNA, 10 bp, synthetic construct
  source 1..10: mol_type = other DNA
gcaacggcca

SEQ ID NO: 7826 - DNA, 11 bp, synthetic construct
  source 1..11: mol_type = other DNA
agcaacggcca

SEQ ID NO: 7827 - DNA, 11 bp, synthetic construct
  source 1..11: mol_type = other DNA
agcaaccgcca

SEQ ID NO: 7828 - DNA, 12 bp, synthetic construct
  source 1..12: mol_type = other DNA
cagcaaccgcca

SEQ ID NO: 7829 - DNA, 12 bp, synthetic construct
  source 1..12: mol_type = other DNA
cagcaacggcca

SEQ ID NO: 7830 - DNA, 13 bp, synthetic construct
  source 1..13: mol_type = other DNA
ccagcaaccgcca

SEQ ID NO: 7831 - DNA, 13 bp, synthetic construct
  source 1..13: mol_type = other DNA
ccagcaacggcca

SEQ ID NO: 7832 - DNA, 14 bp, synthetic construct
  source 1..14: mol_type = other DNA
tccagcaacggcca

SEQ ID NO: 7833 - DNA, 14 bp, synthetic construct
  source 1..14: mol_type = other DNA
tccagcaaccgcca

SEQ ID NO: 7834 - DNA, 15 bp, synthetic construct
  source 1..15: mol_type = other DNA
atccagcaaccgcca

SEQ ID NO: 7835 - DNA, 15 bp, synthetic construct
  source 1..15: mol_type = other DNA
atccagcaacggcca

SEQ ID NO: 7836 - DNA, 16 bp, synthetic construct
  source 1..16: mol_type = other DNA
gatccagcaacggcca

SEQ ID NO: 7837 - DNA, 16 bp, synthetic construct
  source 1..16: mol_type = other DNA
gatccagcaaccgcca

SEQ ID NO: 7838 - DNA, 17 bp, synthetic construct
  source 1..17: mol_type = other DNA
ggatccagcaaccgcca

SEQ ID NO: 7839 - DNA, 17 bp, synthetic construct
  source 1..17: mol_type = other DNA
ggatccagcaacggcca

SEQ ID NO: 7840 - DNA, 18 bp, synthetic construct
  source 1..18: mol_type = other DNA
tggatccagcaaccgcca

SEQ ID NO: 7841 - DNA, 18 bp, synthetic construct
  source 1..18: mol_type = other DNA
tggatccagcaacggcca

SEQ ID NO: 7842 - DNA, 19 bp, synthetic construct
  source 1..19: mol_type = other DNA
gtggatccagcaacggcca

SEQ ID NO: 7843 - DNA, 19 bp, synthetic construct
  source 1..19: mol_type = other DNA
gtggatccagcaaccgcca

SEQ ID NO: 7844 - DNA, 20 bp, synthetic construct
  source 1..20: mol_type = other DNA
agtggatccagcaaccgcca

SEQ ID NO: 7845 - DNA, 20 bp, synthetic construct
  source 1..20: mol_type = other DNA
agtggatccagcaacggcca

SEQ ID NO: 7846 - DNA, 21 bp, synthetic construct
  source 1..21: mol_type = other DNA
cagtggatccagcaaccgcca

SEQ ID NO: 7847 - DNA, 21 bp, synthetic construct
  source 1..21: mol_type = other DNA
cagtggatccagcaacggcca

SEQ ID NO: 7848 - DNA, 22 bp, synthetic construct
  source 1..22: mol_type = other DNA
ccagtggatccagcaaccgcca

SEQ ID NO: 7849 - DNA, 22 bp, synthetic construct
  source 1..22: mol_type = other DNA
ccagtggatccagcaacggcca

SEQ ID NO: 7850 - DNA, 23 bp, synthetic construct
  source 1..23: mol_type = other DNA
tccagtggatccagcaacggcca

SEQ ID NO: 7851 - DNA, 23 bp, synthetic construct
  source 1..23: mol_type = other DNA
tccagtggatccagcaaccgcca

SEQ ID NO: 7852 - DNA, 24 bp, synthetic construct
  source 1..24: mol_type = other DNA
ctccagtggatccagcaacggcca

SEQ ID NO: 7853 - DNA, 24 bp, synthetic construct
  source 1..24: mol_type = other DNA
ctccagtggatccagcaaccgcca

SEQ ID NO: 7854 - DNA, 25 bp, synthetic construct
  source 1..25: mol_type = other DNA
gctccagtggatccagcaaccgcca

SEQ ID NO: 7855 - DNA, 25 bp, synthetic construct
  source 1..25: mol_type = other DNA
gctccagtggatccagcaacggcca

SEQ ID NO: 7856 - DNA, 26 bp, synthetic construct
  source 1..26: mol_type = other DNA
tgctccagtggatccagcaacggcca

SEQ ID NO: 7857 - DNA, 26 bp, synthetic construct
  source 1..26: mol_type = other DNA
tgctccagtggatccagcaaccgcca

SEQ ID NO: 7858 - DNA, 27 bp, synthetic construct
  source 1..27: mol_type = other DNA
ctgctccagtggatccagcaaccgcca

SEQ ID NO: 7859 - DNA, 27 bp, synthetic construct
  source 1..27: mol_type = other DNA
ctgctccagtggatccagcaacggcca

SEQ ID NO: 7860 - DNA, 28 bp, synthetic construct
  source 1..28: mol_type = other DNA
cctgctccagtggatccagcaacggcca

SEQ ID NO: 7861 - DNA, 28 bp, synthetic construct
  source 1..28: mol_type = other DNA
cctgctccagtggatccagcaaccgcca

SEQ ID NO: 7862 - DNA, 29 bp, synthetic construct
  source 1..29: mol_type = other DNA
gcctgctccagtggatccagcaaccgcca

SEQ ID NO: 7863 - DNA, 29 bp, synthetic construct
  source 1..29: mol_type = other DNA
gcctgctccagtggatccagcaacggcca

SEQ ID NO: 7864 - DNA, 30 bp, synthetic construct
  source 1..30: mol_type = other DNA
tgcctgctccagtggatccagcaacggcca

SEQ ID NO: 7865 - DNA, 30 bp, synthetic construct
  source 1..30: mol_type = other DNA
tgcctgctccagtggatccagcaaccgcca

SEQ ID NO: 7866 - DNA, 31 bp, synthetic construct
  source 1..31: mol_type = other DNA
ttgcctgctccagtggatccagcaacggcca

SEQ ID NO: 7867 - DNA, 31 bp, synthetic construct
  source 1..31: mol_type = other DNA
ttgcctgctccagtggatccagcaaccgcca

SEQ ID NO: 7868 - DNA, 32 bp, synthetic construct
  source 1..32: mol_type = other DNA
cttgcctgctccagtggatccagcaaccgcca

SEQ ID NO: 7869 - DNA, 32 bp, synthetic construct
  source 1..32: mol_type = other DNA
cttgcctgctccagtggatccagcaacggcca

SEQ ID NO: 7870 - DNA, 33 bp, synthetic construct
  source 1..33: mol_type = other DNA
ccttgcctgctccagtggatccagcaaccgcca

SEQ ID NO: 7871 - DNA, 33 bp, synthetic construct
  source 1..33: mol_type = other DNA
ccttgcctgctccagtggatccagcaacggcca

SEQ ID NO: 7872 - DNA, 34 bp, synthetic construct
  source 1..34: mol_type = other DNA
accttgcctgctccagtggatccagcaaccgcca

SEQ ID NO: 7873 - DNA, 34 bp, synthetic construct
  source 1..34: mol_type = other DNA
accttgcctgctccagtggatccagcaacggcca

SEQ ID NO: 7874 - DNA, 35 bp, synthetic construct
  source 1..35: mol_type = other DNA
taccttgcctgctccagtggatccagcaaccgcca

SEQ ID NO: 7875 - DNA, 35 bp, synthetic construct
  source 1..35: mol_type = other DNA
taccttgcctgctccagtggatccagcaacggcca

SEQ ID NO: 7876 - DNA, 36 bp, synthetic construct
  source 1..36: mol_type = other DNA
ctaccttgcctgctccagtggatccagcaacggcca

SEQ ID NO: 7877 - DNA, 36 bp, synthetic construct
  source 1..36: mol_type = other DNA
ctaccttgcctgctccagtggatccagcaaccgcca

SEQ ID NO: 7878 - DNA, 37 bp, synthetic construct
  source 1..37: mol_type = other DNA
actaccttgcctgctccagtggatccagcaaccgcca

SEQ ID NO: 7879 - DNA, 37 bp, synthetic construct
  source 1..37: mol_type = other DNA
actaccttgcctgctccagtggatccagcaacggcca

SEQ ID NO: 7880 - DNA, 38 bp, synthetic construct
  source 1..38: mol_type = other DNA
aactaccttgcctgctccagtggatccagcaaccgcca

SEQ ID NO: 7881 - DNA, 38 bp, synthetic construct
  source 1..38: mol_type = other DNA
aactaccttgcctgctccagtggatccagcaacggcca

SEQ ID NO: 7882 - DNA, 39 bp, synthetic construct
  source 1..39: mol_type = other DNA
gaactaccttgcctgctccagtggatccagcaacggcca

SEQ ID NO: 7883 - DNA, 39 bp, synthetic construct
  source 1..39: mol_type = other DNA
gaactaccttgcctgctccagtggatccagcaaccgcca

SEQ ID NO: 7884 - DNA, 40 bp, synthetic construct
  source 1..40: mol_type = other DNA
agaactaccttgcctgctccagtggatccagcaacggcca

SEQ ID NO: 7885 - DNA, 40 bp, synthetic construct
  source 1..40: mol_type = other DNA
agaactaccttgcctgctccagtggatccagcaaccgcca

SEQ ID NO: 7886 - DNA, 10 bp, synthetic construct
  source 1..10: mol_type = other DNA
agcaaccgcc

SEQ ID NO: 7887 - DNA, 11 bp, synthetic construct
  source 1..11: mol_type = other DNA
cagcaaccgcc

SEQ ID NO: 7888 - DNA, 12 bp, synthetic construct
  source 1..12: mol_type = other DNA
ccagcaaccgcc

SEQ ID NO: 7889 - DNA, 13 bp, synthetic construct
  source 1..13: mol_type = other DNA
tccagcaaccgcc

SEQ ID NO: 7890 - DNA, 14 bp, synthetic construct
  source 1..14: mol_type = other DNA
atccagcaaccgcc

SEQ ID NO: 7891 - DNA, 15 bp, synthetic construct
  source 1..15: mol_type = other DNA
gatccagcaaccgcc

SEQ ID NO: 7892 - DNA, 16 bp, synthetic construct
  source 1..16: mol_type = other DNA
ggatccagcaaccgcc

SEQ ID NO: 7893 - DNA, 17 bp, synthetic construct
  source 1..17: mol_type = other DNA
tggatccagcaaccgcc

SEQ ID NO: 7894 - DNA, 18 bp, synthetic construct
  source 1..18: mol_type = other DNA
gtggatccagcaaccgcc

SEQ ID NO: 7895 - DNA, 19 bp, synthetic construct
  source 1..19: mol_type = other DNA
agtggatccagcaaccgcc

SEQ ID NO: 7896 - DNA, 20 bp, synthetic construct
  source 1..20: mol_type = other DNA
cagtggatccagcaaccgcc

SEQ ID NO: 7897 - DNA, 21 bp, synthetic construct
  source 1..21: mol_type = other DNA
ccagtggatccagcaaccgcc

SEQ ID NO: 7898 - DNA, 22 bp, synthetic construct
  source 1..22: mol_type = other DNA
tccagtggatccagcaaccgcc

SEQ ID NO: 7899 - DNA, 23 bp, synthetic construct
  source 1..23: mol_type = other DNA
ctccagtggatccagcaaccgcc

SEQ ID NO: 7900 - DNA, 24 bp, synthetic construct
  source 1..24: mol_type = other DNA
gctccagtggatccagcaaccgcc

SEQ ID NO: 7901 - DNA, 25 bp, synthetic construct
  source 1..25: mol_type = other DNA
tgctccagtggatccagcaaccgcc

SEQ ID NO: 7902 - DNA, 26 bp, synthetic construct
  source 1..26: mol_type = other DNA
ctgctccagtggatccagcaaccgcc

SEQ ID NO: 7903 - DNA, 27 bp, synthetic construct
  source 1..27: mol_type = other DNA
cctgctccagtggatccagcaaccgcc

SEQ ID NO: 7904 - DNA, 28 bp, synthetic construct
  source 1..28: mol_type = other DNA
gcctgctccagtggatccagcaaccgcc

SEQ ID NO: 7905 - DNA, 29 bp, synthetic construct
  source 1..29: mol_type = other DNA
tgcctgctccagtggatccagcaaccgcc

SEQ ID NO: 7906 - DNA, 30 bp, synthetic construct
  source 1..30: mol_type = other DNA
ttgcctgctccagtggatccagcaaccgcc

SEQ ID NO: 7907 - DNA, 31 bp, synthetic construct
  source 1..31: mol_type = other DNA
cttgcctgctccagtggatccagcaaccgcc

SEQ ID NO: 7908 - DNA, 32 bp, synthetic construct
  source 1..32: mol_type = other DNA
ccttgcctgctccagtggatccagcaaccgcc

SEQ ID NO: 7909 - DNA, 33 bp, synthetic construct
  source 1..33: mol_type = other DNA
accttgcctgctccagtggatccagcaaccgcc

SEQ ID NO: 7910 - DNA, 34 bp, synthetic construct
  source 1..34: mol_type = other DNA
taccttgcctgctccagtggatccagcaaccgcc

SEQ ID NO: 7911 - DNA, 35 bp, synthetic construct
  source 1..35: mol_type = other DNA
ctaccttgcctgctccagtggatccagcaaccgcc

SEQ ID NO: 7912 - DNA, 36 bp, synthetic construct
  source 1..36: mol_type = other DNA
actaccttgcctgctccagtggatccagcaaccgcc

SEQ ID NO: 7913 - DNA, 37 bp, synthetic construct
  source 1..37: mol_type = other DNA
aactaccttgcctgctccagtggatccagcaaccgcc

SEQ ID NO: 7914 - DNA, 38 bp, synthetic construct
  source 1..38: mol_type = other DNA
gaactaccttgcctgctccagtggatccagcaaccgcc

SEQ ID NO: 7915 - DNA, 39 bp, synthetic construct
  source 1..39: mol_type = other DNA
agaactaccttgcctgctccagtggatccagcaaccgcc

SEQ ID NO: 7916 - DNA, 40 bp, synthetic construct
  source 1..40: mol_type = other DNA
aagaactaccttgcctgctccagtggatccagcaaccgcc

SEQ ID NO: 7917 - DNA, 20 bp, synthetic construct
  source 1..20: mol_type = other DNA
gcggttgctggatccactgg

SEQ ID NO: 7918 - DNA, 21 bp, synthetic construct
  source 1..21: mol_type = other DNA
ggcggttgctggatccactgg

SEQ ID NO: 7919 - DNA, 22 bp, synthetic construct
  source 1..22: mol_type = other DNA
tggcggttgctggatccactgg

SEQ ID NO: 7920 - DNA, 23 bp, synthetic construct
  source 1..23: mol_type = other DNA
ttggcggttgctggatccactgg

SEQ ID NO: 7921 - DNA, 24 bp, synthetic construct
  source 1..24: mol_type = other DNA
gttggcggttgctggatccactgg

SEQ ID NO: 7922 - DNA, 25 bp, synthetic construct
  source 1..25: mol_type = other DNA
tgttggcggttgctggatccactgg

SEQ ID NO: 7923 - DNA, 26 bp, synthetic construct
  source 1..26: mol_type = other DNA
ttgttggcggttgctggatccactgg

SEQ ID NO: 7924 - DNA, 27 bp, synthetic construct
  source 1..27: mol_type = other DNA
gttgttggcggttgctggatccactgg

SEQ ID NO: 7925 - DNA, 28 bp, synthetic construct
  source 1..28: mol_type = other DNA
agttgttggcggttgctggatccactgg

SEQ ID NO: 7926 - DNA, 29 bp, synthetic construct
  source 1..29: mol_type = other DNA
cagttgttggcggttgctggatccactgg

SEQ ID NO: 7927 - DNA, 30 bp, synthetic construct
  source 1..30: mol_type = other DNA
acagttgttggcggttgctggatccactgg

SEQ ID NO: 7928 - DNA, 31 bp, synthetic construct
  source 1..31: mol_type = other DNA
gacagttgttggcggttgctggatccactgg

SEQ ID NO: 7929 - DNA, 32 bp, synthetic construct
  source 1..32: mol_type = other DNA
ggacagttgttggcggttgctggatccactgg

SEQ ID NO: 7930 - DNA, 33 bp, synthetic construct
  source 1..33: mol_type = other DNA
aggacagttgttggcggttgctggatccactgg

SEQ ID NO: 7931 - DNA, 34 bp, synthetic construct
  source 1..34: mol_type = other DNA
gaggacagttgttggcggttgctggatccactgg

SEQ ID NO: 7932 - DNA, 35 bp, synthetic construct
  source 1..35: mol_type = other DNA
agaggacagttgttggcggttgctggatccactgg

SEQ ID NO: 7933 - DNA, 36 bp, synthetic construct
  source 1..36: mol_type = other DNA
aagaggacagttgttggcggttgctggatccactgg

SEQ ID NO: 7934 - DNA, 37 bp, synthetic construct
  source 1..37: mol_type = other DNA
aaagaggacagttgttggcggttgctggatccactgg

SEQ ID NO: 7935 - DNA, 38 bp, synthetic construct
  source 1..38: mol_type = other DNA
gaaagaggacagttgttggcggttgctggatccactgg

SEQ ID NO: 7936 - DNA, 39 bp, synthetic construct
  source 1..39: mol_type = other DNA
agaaagaggacagttgttggcggttgctggatccactgg

SEQ ID NO: 7937 - DNA, 40 bp, synthetic construct
  source 1..40: mol_type = other DNA
tagaaagaggacagttgttggcggttgctggatccactgg

SEQ ID NO: 7938 - DNA, 31 bp, synthetic construct
  source 1..31: mol_type = other DNA
gcggttgctggatccactggagcaggcaagg

SEQ ID NO: 7939 - DNA, 32 bp, synthetic construct
  source 1..32: mol_type = other DNA
ggcggttgctggatccactggagcaggcaagg

SEQ ID NO: 7940 - DNA, 33 bp, synthetic construct
  source 1..33: mol_type = other DNA
tggcggttgctggatccactggagcaggcaagg

SEQ ID NO: 7941 - DNA, 34 bp, synthetic construct
  source 1..34: mol_type = other DNA
ttggcggttgctggatccactggagcaggcaagg

SEQ ID NO: 7942 - DNA, 35 bp, synthetic construct
  source 1..35: mol_type = other DNA
gttggcggttgctggatccactggagcaggcaagg

SEQ ID NO: 7943 - DNA, 36 bp, synthetic construct
  source 1..36: mol_type = other DNA
tgttggcggttgctggatccactggagcaggcaagg

SEQ ID NO: 7944 - DNA, 37 bp, synthetic construct
  source 1..37: mol_type = other DNA
ttgttggcggttgctggatccactggagcaggcaagg

SEQ ID NO: 7945 - DNA, 38 bp, synthetic construct
  source 1..38: mol_type = other DNA
gttgttggcggttgctggatccactggagcaggcaagg

SEQ ID NO: 7946 - DNA, 39 bp, synthetic construct
  source 1..39: mol_type = other DNA
agttgttggcggttgctggatccactggagcaggcaagg

SEQ ID NO: 7947 - DNA, 40 bp, synthetic construct
  source 1..40: mol_type = other DNA
cagttgttggcggttgctggatccactggagcaggcaagg

SEQ ID NO: 7948 - DNA, 18 bp, synthetic construct
  source 1..18: mol_type = other DNA
cgccaacaactgtcctct

SEQ ID NO: 7949 - DNA, 19 bp, synthetic construct
  source 1..19: mol_type = other DNA
ccgccaacaactgtcctct

SEQ ID NO: 7950 - DNA, 20 bp, synthetic construct
  source 1..20: mol_type = other DNA
accgccaacaactgtcctct

SEQ ID NO: 7951 - DNA, 21 bp, synthetic construct
  source 1..21: mol_type = other DNA
aaccgccaacaactgtcctct

SEQ ID NO: 7952 - DNA, 22 bp, synthetic construct
  source 1..22: mol_type = other DNA
caaccgccaacaactgtcctct

SEQ ID NO: 7953 - DNA, 23 bp, synthetic construct
  source 1..23: mol_type = other DNA
gcaaccgccaacaactgtcctct

SEQ ID NO: 7954 - DNA, 24 bp, synthetic construct
  source 1..24: mol_type = other DNA
agcaaccgccaacaactgtcctct

SEQ ID NO: 7955 - DNA, 25 bp, synthetic construct
  source 1..25: mol_type = other DNA
cagcaaccgccaacaactgtcctct

SEQ ID NO: 7956 - DNA, 26 bp, synthetic construct
  source 1..26: mol_type = other DNA
ccagcaaccgccaacaactgtcctct

SEQ ID NO: 7957 - DNA, 27 bp, synthetic construct
  source 1..27: mol_type = other DNA
tccagcaaccgccaacaactgtcctct

SEQ ID NO: 7958 - DNA, 28 bp, synthetic construct
  source 1..28: mol_type = other DNA
atccagcaaccgccaacaactgtcctct

SEQ ID NO: 7959 - DNA, 29 bp, synthetic construct
  source 1..29: mol_type = other DNA
gatccagcaaccgccaacaactgtcctct

SEQ ID NO: 7960 - DNA, 30 bp, synthetic construct
  source 1..30: mol_type = other DNA
ggatccagcaaccgccaacaactgtcctct

SEQ ID NO: 7961 - DNA, 31 bp, synthetic construct
  source 1..31: mol_type = other DNA
tggatccagcaaccgccaacaactgtcctct

SEQ ID NO: 7962 - DNA, 32 bp, synthetic construct
  source 1..32: mol_type = other DNA
gtggatccagcaaccgccaacaactgtcctct

SEQ ID NO: 7963 - DNA, 33 bp, synthetic construct
  source 1..33: mol_type = other DNA
agtggatccagcaaccgccaacaactgtcctct

SEQ ID NO: 7964 - DNA, 34 bp, synthetic construct
  source 1..34: mol_type = other DNA
cagtggatccagcaaccgccaacaactgtcctct

SEQ ID NO: 7965 - DNA, 35 bp, synthetic construct
  source 1..35: mol_type = other DNA
ccagtggatccagcaaccgccaacaactgtcctct

SEQ ID NO: 7966 - DNA, 36 bp, synthetic construct
  source 1..36: mol_type = other DNA
tccagtggatccagcaaccgccaacaactgtcctct

SEQ ID NO: 7967 - DNA, 37 bp, synthetic construct
  source 1..37: mol_type = other DNA
ctccagtggatccagcaaccgccaacaactgtcctct

SEQ ID NO: 7968 - DNA, 38 bp, synthetic construct
  source 1..38: mol_type = other DNA
gctccagtggatccagcaaccgccaacaactgtcctct

SEQ ID NO: 7969 - DNA, 39 bp, synthetic construct
  source 1..39: mol_type = other DNA
tgctccagtggatccagcaaccgccaacaactgtcctct

SEQ ID NO: 7970 - DNA, 40 bp, synthetic construct
  source 1..40: mol_type = other DNA
ctgctccagtggatccagcaaccgccaacaactgtcctct

SEQ ID NO: 7971 - DNA, 10 bp, synthetic construct
  source 1..10: mol_type = other DNA
aaccgccaac

SEQ ID NO: 7972 - DNA, 11 bp, synthetic construct
  source 1..11: mol_type = other DNA
caaccgccaac

SEQ ID NO: 7973 - DNA, 12 bp, synthetic construct
  source 1..12: mol_type = other DNA
gcaaccgccaac

SEQ ID NO: 7974 - DNA, 13 bp, synthetic construct
  source 1..13: mol_type = other DNA
agcaaccgccaac

SEQ ID NO: 7975 - DNA, 14 bp, synthetic construct
  source 1..14: mol_type = other DNA
cagcaaccgccaac

SEQ ID NO: 7976 - DNA, 15 bp, synthetic construct
  source 1..15: mol_type = other DNA
ccagcaaccgccaac

SEQ ID NO: 7977 - DNA, 16 bp, synthetic construct
  source 1..16: mol_type = other DNA
tccagcaaccgccaac

SEQ ID NO: 7978 - DNA, 17 bp, synthetic construct
  source 1..17: mol_type = other DNA
atccagcaaccgccaac

SEQ ID NO: 7979 - DNA, 18 bp, synthetic construct
  source 1..18: mol_type = other DNA
gatccagcaaccgccaac

SEQ ID NO: 7980 - DNA, 19 bp, synthetic construct
  source 1..19: mol_type = other DNA
ggatccagcaaccgccaac

SEQ ID NO: 7981 - DNA, 20 bp, synthetic construct
  source 1..20: mol_type = other DNA
tggatccagcaaccgccaac

SEQ ID NO: 7982 - DNA, 21 bp, synthetic construct
  source 1..21: mol_type = other DNA
gtggatccagcaaccgccaac

SEQ ID NO: 7983 - DNA, 22 bp, synthetic construct
  source 1..22: mol_type = other DNA
agtggatccagcaaccgccaac

SEQ ID NO: 7984 - DNA, 23 bp, synthetic construct
  source 1..23: mol_type = other DNA
cagtggatccagcaaccgccaac

SEQ ID NO: 7985 - DNA, 24 bp, synthetic construct
  source 1..24: mol_type = other DNA
ccagtggatccagcaaccgccaac

SEQ ID NO: 7986 - DNA, 25 bp, synthetic construct
  source 1..25: mol_type = other DNA
tccagtggatccagcaaccgccaac

SEQ ID NO: 7987 - DNA, 26 bp, synthetic construct
  source 1..26: mol_type = other DNA
ctccagtggatccagcaaccgccaac

SEQ ID NO: 7988 - DNA, 27 bp, synthetic construct
  source 1..27: mol_type = other DNA
gctccagtggatccagcaaccgccaac

SEQ ID NO: 7989 - DNA, 28 bp, synthetic construct
  source 1..28: mol_type = other DNA
tgctccagtggatccagcaaccgccaac

SEQ ID NO: 7990 - DNA, 29 bp, synthetic construct
  source 1..29: mol_type = other DNA
ctgctccagtggatccagcaaccgccaac

SEQ ID NO: 7991 - DNA, 30 bp, synthetic construct
  source 1..30: mol_type = other DNA
cctgctccagtggatccagcaaccgccaac

SEQ ID NO: 7992 - DNA, 31 bp, synthetic construct
  source 1..31: mol_type = other DNA
gcctgctccagtggatccagcaaccgccaac

SEQ ID NO: 7993 - DNA, 32 bp, synthetic construct
  source 1..32: mol_type = other DNA
tgcctgctccagtggatccagcaaccgccaac

SEQ ID NO: 7994 - DNA, 33 bp, synthetic construct
  source 1..33: mol_type = other DNA
ttgcctgctccagtggatccagcaaccgccaac

SEQ ID NO: 7995 - DNA, 34 bp, synthetic construct
  source 1..34: mol_type = other DNA
cttgcctgctccagtggatccagcaaccgccaac

SEQ ID NO: 7996 - DNA, 35 bp, synthetic construct
  source 1..35: mol_type = other DNA
ccttgcctgctccagtggatccagcaaccgccaac

SEQ ID NO: 7997 - DNA, 36 bp, synthetic construct
  source 1..36: mol_type = other DNA
accttgcctgctccagtggatccagcaaccgccaac

SEQ ID NO: 7998 - DNA, 37 bp, synthetic construct
  source 1..37: mol_type = other DNA
taccttgcctgctccagtggatccagcaaccgccaac

SEQ ID NO: 7999 - DNA, 38 bp, synthetic construct
  source 1..38: mol_type = other DNA
ctaccttgcctgctccagtggatccagcaaccgccaac

SEQ ID NO: 8000 - DNA, 39 bp, synthetic construct
  source 1..39: mol_type = other DNA
actaccttgcctgctccagtggatccagcaaccgccaac

SEQ ID NO: 8001 - DNA, 40 bp, synthetic construct
  source 1..40: mol_type = other DNA
aactaccttgcctgctccagtggatccagcaaccgccaac

SEQ ID NO: 8002 - DNA, 21 bp, synthetic construct
  source 1..21: mol_type = other DNA
cgccaacaactgtcctctttc

SEQ ID NO: 8003 - DNA, 22 bp, synthetic construct
  source 1..22: mol_type = other DNA
ccgccaacaactgtcctctttc

SEQ ID NO: 8004 - DNA, 23 bp, synthetic construct
  source 1..23: mol_type = other DNA
accgccaacaactgtcctctttc

SEQ ID NO: 8005 - DNA, 24 bp, synthetic construct
  source 1..24: mol_type = other DNA
aaccgccaacaactgtcctctttc

SEQ ID NO: 8006 - DNA, 25 bp, synthetic construct
  source 1..25: mol_type = other DNA
caaccgccaacaactgtcctctttc

SEQ ID NO: 8007 - DNA, 26 bp, synthetic construct
  source 1..26: mol_type = other DNA
gcaaccgccaacaactgtcctctttc

SEQ ID NO: 8008 - DNA, 27 bp, synthetic construct
  source 1..27: mol_type = other DNA
agcaaccgccaacaactgtcctctttc

SEQ ID NO: 8009 - DNA, 28 bp, synthetic construct
  source 1..28: mol_type = other DNA
cagcaaccgccaacaactgtcctctttc

SEQ ID NO: 8010 - DNA, 29 bp, synthetic construct
  source 1..29: mol_type = other DNA
ccagcaaccgccaacaactgtcctctttc

SEQ ID NO: 8011 - DNA, 30 bp, synthetic construct
  source 1..30: mol_type = other DNA
tccagcaaccgccaacaactgtcctctttc

SEQ ID NO: 8012 - DNA, 31 bp, synthetic construct
  source 1..31: mol_type = other DNA
atccagcaaccgccaacaactgtcctctttc

SEQ ID NO: 8013 - DNA, 32 bp, synthetic construct
  source 1..32: mol_type = other DNA
gatccagcaaccgccaacaactgtcctctttc

SEQ ID NO: 8014 - DNA, 33 bp, synthetic construct
  source 1..33: mol_type = other DNA
ggatccagcaaccgccaacaactgtcctctttc

SEQ ID NO: 8015 - DNA, 34 bp, synthetic construct
  source 1..34: mol_type = other DNA
tggatccagcaaccgccaacaactgtcctctttc

SEQ ID NO: 8016 - DNA, 35 bp, synthetic construct
  source 1..35: mol_type = other DNA
gtggatccagcaaccgccaacaactgtcctctttc

SEQ ID NO: 8017 - DNA, 36 bp, synthetic construct
  source 1..36: mol_type = other DNA
agtggatccagcaaccgccaacaactgtcctctttc

SEQ ID NO: 8018 - DNA, 37 bp, synthetic construct
  source 1..37: mol_type = other DNA
cagtggatccagcaaccgccaacaactgtcctctttc

SEQ ID NO: 8019 - DNA, 38 bp, synthetic construct
  source 1..38: mol_type = other DNA
ccagtggatccagcaaccgccaacaactgtcctctttc

SEQ ID NO: 8020 - DNA, 39 bp, synthetic construct
  source 1..39: mol_type = other DNA
tccagtggatccagcaaccgccaacaactgtcctctttc

SEQ ID NO: 8021 - DNA, 40 bp, synthetic construct
  source 1..40: mol_type = other DNA
ctccagtggatccagcaaccgccaacaactgtcctctttc

SEQ ID NO: 8022 - DNA, 19 bp, synthetic construct
  source 1..19: mol_type = other DNA
cgccaacaactgtcctctt

SEQ ID NO: 8023 - DNA, 20 bp, synthetic construct
  source 1..20: mol_type = other DNA
ccgccaacaactgtcctctt

SEQ ID NO: 8024 - DNA, 21 bp, synthetic construct
  source 1..21: mol_type = other DNA
accgccaacaactgtcctctt

SEQ ID NO: 8025 - DNA, 22 bp, synthetic construct
  source 1..22: mol_type = other DNA
aaccgccaacaactgtcctctt

SEQ ID NO: 8026 - DNA, 23 bp, synthetic construct
  source 1..23: mol_type = other DNA
caaccgccaacaactgtcctctt

SEQ ID NO: 8027 - DNA, 24 bp, synthetic construct
  source 1..24: mol_type = other DNA
gcaaccgccaacaactgtcctctt

SEQ ID NO: 8028 - DNA, 25 bp, synthetic construct
  source 1..25: mol_type = other DNA
agcaaccgccaacaactgtcctctt

SEQ ID NO: 8029 - DNA, 26 bp, synthetic construct
  source 1..26: mol_type = other DNA
cagcaaccgccaacaactgtcctctt

SEQ ID NO: 8030 - DNA, 27 bp, synthetic construct
  source 1..27: mol_type = other DNA
ccagcaaccgccaacaactgtcctctt

SEQ ID NO: 8031 - DNA, 28 bp, synthetic construct
  source 1..28: mol_type = other DNA
tccagcaaccgccaacaactgtcctctt

SEQ ID NO: 8032 - DNA, 29 bp, synthetic construct
  source 1..29: mol_type = other DNA
atccagcaaccgccaacaactgtcctctt

SEQ ID NO: 8033 - DNA, 30 bp, synthetic construct
  source 1..30: mol_type = other DNA
gatccagcaaccgccaacaactgtcctctt

SEQ ID NO: 8034 - DNA, 31 bp, synthetic construct
  source 1..31: mol_type = other DNA
ggatccagcaaccgccaacaactgtcctctt

SEQ ID NO: 8035 - DNA, 32 bp, synthetic construct
  source 1..32: mol_type = other DNA
tggatccagcaaccgccaacaactgtcctctt

SEQ ID NO: 8036 - DNA, 33 bp, synthetic construct
  source 1..33: mol_type = other DNA
gtggatccagcaaccgccaacaactgtcctctt

SEQ ID NO: 8037 - DNA, 34 bp, synthetic construct
  source 1..34: mol_type = other DNA
agtggatccagcaaccgccaacaactgtcctctt

SEQ ID NO: 8038 - DNA, 35 bp, synthetic construct
  source 1..35: mol_type = other DNA
cagtggatccagcaaccgccaacaactgtcctctt

SEQ ID NO: 8039 - DNA, 36 bp, synthetic construct
  source 1..36: mol_type = other DNA
ccagtggatccagcaaccgccaacaactgtcctctt

SEQ ID NO: 8040 - DNA, 37 bp, synthetic construct
  source 1..37: mol_type = other DNA
tccagtggatccagcaaccgccaacaactgtcctctt

SEQ ID NO: 8041 - DNA, 38 bp, synthetic construct
  source 1..38: mol_type = other DNA
ctccagtggatccagcaaccgccaacaactgtcctctt

SEQ ID NO: 8042 - DNA, 39 bp, synthetic construct
  source 1..39: mol_type = other DNA
gctccagtggatccagcaaccgccaacaactgtcctctt

SEQ ID NO: 8043 - DNA, 40 bp, synthetic construct
  source 1..40: mol_type = other DNA
tgctccagtggatccagcaaccgccaacaactgtcctctt

SEQ ID NO: 8044 - DNA, 13 bp, synthetic construct
  source 1..13: mol_type = other DNA
gcggttgctggat

SEQ ID NO: 8045 - DNA, 13 bp, synthetic construct
  source 1..13: mol_type = other DNA
gcggttgccggat

SEQ ID NO: 8046 - DNA, 14 bp, synthetic construct
  source 1..14: mol_type = other DNA
ggcggttgctggat

SEQ ID NO: 8047 - DNA, 14 bp, synthetic construct
  source 1..14: mol_type = other DNA
ggcggttgccggat

SEQ ID NO: 8048 - DNA, 15 bp, synthetic construct
  source 1..15: mol_type = other DNA
tggcggttgctggat

SEQ ID NO: 8049 - DNA, 15 bp, synthetic construct
  source 1..15: mol_type = other DNA
tggcggttgccggat

SEQ ID NO: 8050 - DNA, 16 bp, synthetic construct
  source 1..16: mol_type = other DNA
ttggcggttgccggat

SEQ ID NO: 8051 - DNA, 16 bp, synthetic construct
  source 1..16: mol_type = other DNA
ttggcggttgctggat

SEQ ID NO: 8052 - DNA, 17 bp, synthetic construct
  source 1..17: mol_type = other DNA
gttggcggttgccggat

SEQ ID NO: 8053 - DNA, 17 bp, synthetic construct
  source 1..17: mol_type = other DNA
gttggcggttgctggat

SEQ ID NO: 8054 - DNA, 18 bp, synthetic construct
  source 1..18: mol_type = other DNA
tgttggcggttgccggat

SEQ ID NO: 8055 - DNA, 18 bp, synthetic construct
  source 1..18: mol_type = other DNA
tgttggcggttgctggat

SEQ ID NO: 8056 - DNA, 19 bp, synthetic construct
  source 1..19: mol_type = other DNA
ttgttggcggttgctggat

SEQ ID NO: 8057 - DNA, 19 bp, synthetic construct
  source 1..19: mol_type = other DNA
ttgttggcggttgccggat

SEQ ID NO: 8058 - DNA, 20 bp, synthetic construct
  source 1..20: mol_type = other DNA
gttgttggcggttgctggat

SEQ ID NO: 8059 - DNA, 20 bp, synthetic construct
  source 1..20: mol_type = other DNA
gttgttggcggttgccggat

SEQ ID NO: 8060 - DNA, 21 bp, synthetic construct
  source 1..21: mol_type = other DNA
agttgttggcggttgctggat

SEQ ID NO: 8061 - DNA, 21 bp, synthetic construct
  source 1..21: mol_type = other DNA
agttgttggcggttgccggat

SEQ ID NO: 8062 - DNA, 22 bp, synthetic construct
  source 1..22: mol_type = other DNA
cagttgttggcggttgctggat

SEQ ID NO: 8063 - DNA, 22 bp, synthetic construct
  source 1..22: mol_type = other DNA
cagttgttggcggttgccggat

SEQ ID NO: 8064 - DNA, 23 bp, synthetic construct
  source 1..23: mol_type = other DNA
acagttgttggcggttgctggat

SEQ ID NO: 8065 - DNA, 23 bp, synthetic construct
  source 1..23: mol_type = other DNA
acagttgttggcggttgccggat

SEQ ID NO: 8066 - DNA, 24 bp, synthetic construct
  source 1..24: mol_type = other DNA
gacagttgttggcggttgctggat

SEQ ID NO: 8067 - DNA, 24 bp, synthetic construct
  source 1..24: mol_type = other DNA
gacagttgttggcggttgccggat

SEQ ID NO: 8068 - DNA, 25 bp, synthetic construct
  source 1..25: mol_type = other DNA
ggacagttgttggcggttgccggat

SEQ ID NO: 8069 - DNA, 25 bp, synthetic construct
  source 1..25: mol_type = other DNA
ggacagttgttggcggttgctggat

SEQ ID NO: 8070 - DNA, 26 bp, synthetic construct
  source 1..26: mol_type = other DNA
aggacagttgttggcggttgccggat

SEQ ID NO: 8071 - DNA, 26 bp, synthetic construct
  source 1..26: mol_type = other DNA
aggacagttgttggcggttgctggat

SEQ ID NO: 8072 - DNA, 27 bp, synthetic construct
  source 1..27: mol_type = other DNA
gaggacagttgttggcggttgctggat

SEQ ID NO: 8073 - DNA, 27 bp, synthetic construct
  source 1..27: mol_type = other DNA
gaggacagttgttggcggttgccggat

SEQ ID NO: 8074 - DNA, 28 bp, synthetic construct
  source 1..28: mol_type = other DNA
agaggacagttgttggcggttgctggat

SEQ ID NO: 8075 - DNA, 28 bp, synthetic construct
  source 1..28: mol_type = other DNA
agaggacagttgttggcggttgccggat

SEQ ID NO: 8076 - DNA, 29 bp, synthetic construct
  source 1..29: mol_type = other DNA
aagaggacagttgttggcggttgccggat

SEQ ID NO: 8077 - DNA, 29 bp, synthetic construct
  source 1..29: mol_type = other DNA
aagaggacagttgttggcggttgctggat

SEQ ID NO: 8078 - DNA, 30 bp, synthetic construct
  source 1..30: mol_type = other DNA
aaagaggacagttgttggcggttgctggat

SEQ ID NO: 8079 - DNA, 30 bp, synthetic construct
  source 1..30: mol_type = other DNA
aaagaggacagttgttggcggttgccggat

SEQ ID NO: 8080 - DNA, 31 bp, synthetic construct
  source 1..31: mol_type = other DNA
gaaagaggacagttgttggcggttgccggat

SEQ ID NO: 8081 - DNA, 31 bp, synthetic construct
  source 1..31: mol_type = other DNA
gaaagaggacagttgttggcggttgctggat

SEQ ID NO: 8082 - DNA, 32 bp, synthetic construct
  source 1..32: mol_type = other DNA
agaaagaggacagttgttggcggttgccggat

SEQ ID NO: 8083 - DNA, 32 bp, synthetic construct
  source 1..32: mol_type = other DNA
agaaagaggacagttgttggcggttgctggat

SEQ ID NO: 8084 - DNA, 33 bp, synthetic construct
  source 1..33: mol_type = other DNA
tagaaagaggacagttgttggcggttgctggat

SEQ ID NO: 8085 - DNA, 33 bp, synthetic construct
  source 1..33: mol_type = other DNA
tagaaagaggacagttgttggcggttgccggat

SEQ ID NO: 8086 - DNA, 34 bp, synthetic construct
  source 1..34: mol_type = other DNA
atagaaagaggacagttgttggcggttgctggat

SEQ ID NO: 8087 - DNA, 34 bp, synthetic construct
  source 1..34: mol_type = other DNA
atagaaagaggacagttgttggcggttgccggat

SEQ ID NO: 8088 - DNA, 35 bp, synthetic construct
  source 1..35: mol_type = other DNA
gatagaaagaggacagttgttggcggttgccggat

SEQ ID NO: 8089 - DNA, 35 bp, synthetic construct
  source 1..35: mol_type = other DNA
gatagaaagaggacagttgttggcggttgctggat

SEQ ID NO: 8090 - DNA, 36 bp, synthetic construct
  source 1..36: mol_type = other DNA
agatagaaagaggacagttgttggcggttgccggat

SEQ ID NO: 8091 - DNA, 36 bp, synthetic construct
  source 1..36: mol_type = other DNA
agatagaaagaggacagttgttggcggttgctggat

SEQ ID NO: 8092 - DNA, 37 bp, synthetic construct
  source 1..37: mol_type = other DNA
aagatagaaagaggacagttgttggcggttgctggat

SEQ ID NO: 8093 - DNA, 37 bp, synthetic construct
  source 1..37: mol_type = other DNA
aagatagaaagaggacagttgttggcggttgccggat

SEQ ID NO: 8094 - DNA, 38 bp, synthetic construct
  source 1..38: mol_type = other DNA
caagatagaaagaggacagttgttggcggttgccggat

SEQ ID NO: 8095 - DNA, 38 bp, synthetic construct
  source 1..38: mol_type = other DNA
caagatagaaagaggacagttgttggcggttgctggat

SEQ ID NO: 8096 - DNA, 39 bp, synthetic construct
  source 1..39: mol_type = other DNA
tcaagatagaaagaggacagttgttggcggttgccggat

SEQ ID NO: 8097 - DNA, 39 bp, synthetic construct
  source 1..39: mol_type = other DNA
tcaagatagaaagaggacagttgttggcggttgctggat

SEQ ID NO: 8098 - DNA, 40 bp, synthetic construct
  source 1..40: mol_type = other DNA
ttcaagatagaaagaggacagttgttggcggttgctggat

SEQ ID NO: 8099 - DNA, 40 bp, synthetic construct
  source 1..40: mol_type = other DNA
ttcaagatagaaagaggacagttgttggcggttgccggat

SEQ ID NO: 8100 - DNA, 12 bp, synthetic construct
  source 1..12: mol_type = other DNA
gcggttgctgga

SEQ ID NO: 8101 - DNA, 13 bp, synthetic construct
  source 1..13: mol_type = other DNA
ggcggttgctgga

SEQ ID NO: 8102 - DNA, 14 bp, synthetic construct
  source 1..14: mol_type = other DNA
tggcggttgctgga

SEQ ID NO: 8103 - DNA, 15 bp, synthetic construct
  source 1..15: mol_type = other DNA
ttggcggttgctgga

SEQ ID NO: 8104 - DNA, 16 bp, synthetic construct
  source 1..16: mol_type = other DNA
gttggcggttgctgga

SEQ ID NO: 8105 - DNA, 17 bp, synthetic construct
  source 1..17: mol_type = other DNA
tgttggcggttgctgga

SEQ ID NO: 8106 - DNA, 18 bp, synthetic construct
  source 1..18: mol_type = other DNA
ttgttggcggttgctgga

SEQ ID NO: 8107 - DNA, 19 bp, synthetic construct
  source 1..19: mol_type = other DNA
gttgttggcggttgctgga

SEQ ID NO: 8108 - DNA, 20 bp, synthetic construct
  source 1..20: mol_type = other DNA
agttgttggcggttgctgga

SEQ ID NO: 8109 - DNA, 21 bp, synthetic construct
  source 1..21: mol_type = other DNA
cagttgttggcggttgctgga

SEQ ID NO: 8110 - DNA, 22 bp, synthetic construct
  source 1..22: mol_type = other DNA
acagttgttggcggttgctgga

SEQ ID NO: 8111 - DNA, 23 bp, synthetic construct
  source 1..23: mol_type = other DNA
gacagttgttggcggttgctgga

SEQ ID NO: 8112 - DNA, 24 bp, synthetic construct
  source 1..24: mol_type = other DNA
ggacagttgttggcggttgctgga

SEQ ID NO: 8113 - DNA, 25 bp, synthetic construct
  source 1..25: mol_type = other DNA
aggacagttgttggcggttgctgga

SEQ ID NO: 8114 - DNA, 26 bp, synthetic construct
  source 1..26: mol_type = other DNA
gaggacagttgttggcggttgctgga

SEQ ID NO: 8115 - DNA, 27 bp, synthetic construct
  source 1..27: mol_type = other DNA
agaggacagttgttggcggttgctgga

SEQ ID NO: 8116 - DNA, 28 bp, synthetic construct
  source 1..28: mol_type = other DNA
aagaggacagttgttggcggttgctgga

SEQ ID NO: 8117 - DNA, 29 bp, synthetic construct
  source 1..29: mol_type = other DNA
aaagaggacagttgttggcggttgctgga

SEQ ID NO: 8118 - DNA, 30 bp, synthetic construct
  source 1..30: mol_type = other DNA
gaaagaggacagttgttggcggttgctgga

SEQ ID NO: 8119 - DNA, 31 bp, synthetic construct
  source 1..31: mol_type = other DNA
agaaagaggacagttgttggcggttgctgga

SEQ ID NO: 8120 - DNA, 32 bp, synthetic construct
  source 1..32: mol_type = other DNA
tagaaagaggacagttgttggcggttgctgga

SEQ ID NO: 8121 - DNA, 33 bp, synthetic construct
  source 1..33: mol_type = other DNA
atagaaagaggacagttgttggcggttgctgga

SEQ ID NO: 8122 - DNA, 34 bp, synthetic construct
  source 1..34: mol_type = other DNA
gatagaaagaggacagttgttggcggttgctgga

SEQ ID NO: 8123 - DNA, 35 bp, synthetic construct
  source 1..35: mol_type = other DNA
agatagaaagaggacagttgttggcggttgctgga

SEQ ID NO: 8124 - DNA, 36 bp, synthetic construct
  source 1..36: mol_type = other DNA
aagatagaaagaggacagttgttggcggttgctgga

SEQ ID NO: 8125 - DNA, 37 bp, synthetic construct
  source 1..37: mol_type = other DNA
caagatagaaagaggacagttgttggcggttgctgga

SEQ ID NO: 8126 - DNA, 38 bp, synthetic construct
  source 1..38: mol_type = other DNA
tcaagatagaaagaggacagttgttggcggttgctgga

SEQ ID NO: 8127 - DNA, 39 bp, synthetic construct
  source 1..39: mol_type = other DNA
ttcaagatagaaagaggacagttgttggcggttgctgga

SEQ ID NO: 8128 - DNA, 40 bp, synthetic construct
  source 1..40: mol_type = other DNA
tttcaagatagaaagaggacagttgttggcggttgctgga

SEQ ID NO: 8129 - DNA, 15 bp, synthetic construct
  source 1..15: mol_type = other DNA
cgccaacaattgtcc

SEQ ID NO: 8130 - DNA, 15 bp, synthetic construct
  source 1..15: mol_type = other DNA
cgccaacaactgtcc

SEQ ID NO: 8131 - DNA, 16 bp, synthetic construct
  source 1..16: mol_type = other DNA
ccgccaacaactgtcc

SEQ ID NO: 8132 - DNA, 16 bp, synthetic construct
  source 1..16: mol_type = other DNA
ccgccaacaattgtcc

SEQ ID NO: 8133 - DNA, 17 bp, synthetic construct
  source 1..17: mol_type = other DNA
accgccaacaattgtcc

SEQ ID NO: 8134 - DNA, 17 bp, synthetic construct
  source 1..17: mol_type = other DNA
accgccaacaactgtcc

SEQ ID NO: 8135 - DNA, 18 bp, synthetic construct
  source 1..18: mol_type = other DNA
aaccgccaacaattgtcc

SEQ ID NO: 8136 - DNA, 18 bp, synthetic construct
  source 1..18: mol_type = other DNA
aaccgccaacaactgtcc

SEQ ID NO: 8137 - DNA, 19 bp, synthetic construct
  source 1..19: mol_type = other DNA
caaccgccaacaattgtcc

SEQ ID NO: 8138 - DNA, 19 bp, synthetic construct
  source 1..19: mol_type = other DNA
caaccgccaacaactgtcc

SEQ ID NO: 8139 - DNA, 20 bp, synthetic construct
  source 1..20: mol_type = other DNA
gcaaccgccaacaattgtcc

SEQ ID NO: 8140 - DNA, 20 bp, synthetic construct
  source 1..20: mol_type = other DNA
gcaaccgccaacaactgtcc

SEQ ID NO: 8141 - DNA, 21 bp, synthetic construct
  source 1..21: mol_type = other DNA
agcaaccgccaacaattgtcc

SEQ ID NO: 8142 - DNA, 21 bp, synthetic construct
  source 1..21: mol_type = other DNA
agcaaccgccaacaactgtcc

SEQ ID NO: 8143 - DNA, 22 bp, synthetic construct
  source 1..22: mol_type = other DNA
cagcaaccgccaacaactgtcc

SEQ ID NO: 8144 - DNA, 22 bp, synthetic construct
  source 1..22: mol_type = other DNA
cagcaaccgccaacaattgtcc

SEQ ID NO: 8145 - DNA, 23 bp, synthetic construct
  source 1..23: mol_type = other DNA
ccagcaaccgccaacaactgtcc

SEQ ID NO: 8146 - DNA, 23 bp, synthetic construct
  source 1..23: mol_type = other DNA
ccagcaaccgccaacaattgtcc

SEQ ID NO: 8147 - DNA, 24 bp, synthetic construct
  source 1..24: mol_type = other DNA
tccagcaaccgccaacaactgtcc

SEQ ID NO: 8148 - DNA, 24 bp, synthetic construct
  source 1..24: mol_type = other DNA
tccagcaaccgccaacaattgtcc

SEQ ID NO: 8149 - DNA, 25 bp, synthetic construct
  source 1..25: mol_type = other DNA
atccagcaaccgccaacaactgtcc

SEQ ID NO: 8150 - DNA, 25 bp, synthetic construct
  source 1..25: mol_type = other DNA
atccagcaaccgccaacaattgtcc

SEQ ID NO: 8151 - DNA, 26 bp, synthetic construct
  source 1..26: mol_type = other DNA
gatccagcaaccgccaacaattgtcc

SEQ ID NO: 8152 - DNA, 26 bp, synthetic construct
  source 1..26: mol_type = other DNA
gatccagcaaccgccaacaactgtcc

SEQ ID NO: 8153 - DNA, 27 bp, synthetic construct
  source 1..27: mol_type = other DNA
ggatccagcaaccgccaacaattgtcc

SEQ ID NO: 8154 - DNA, 27 bp, synthetic construct
  source 1..27: mol_type = other DNA
ggatccagcaaccgccaacaactgtcc

SEQ ID NO: 8155 - DNA, 28 bp, synthetic construct
  source 1..28: mol_type = other DNA
tggatccagcaaccgccaacaactgtcc

SEQ ID NO: 8156 - DNA, 28 bp, synthetic construct
  source 1..28: mol_type = other DNA
tggatccagcaaccgccaacaattgtcc

SEQ ID NO: 8157 - DNA, 29 bp, synthetic construct
  source 1..29: mol_type = other DNA
gtggatccagcaaccgccaacaattgtcc

SEQ ID NO: 8158 - DNA, 29 bp, synthetic construct
  source 1..29: mol_type = other DNA
gtggatccagcaaccgccaacaactgtcc

SEQ ID NO: 8159 - DNA, 30 bp, synthetic construct
  source 1..30: mol_type = other DNA
agtggatccagcaaccgccaacaattgtcc

SEQ ID NO: 8160 - DNA, 30 bp, synthetic construct
  source 1..30: mol_type = other DNA
agtggatccagcaaccgccaacaactgtcc

SEQ ID NO: 8161 - DNA, 31 bp, synthetic construct
  source 1..31: mol_type = other DNA
cagtggatccagcaaccgccaacaactgtcc

SEQ ID NO: 8162 - DNA, 31 bp, synthetic construct
  source 1..31: mol_type = other DNA
cagtggatccagcaaccgccaacaattgtcc

SEQ ID NO: 8163 - DNA, 32 bp, synthetic construct
  source 1..32: mol_type = other DNA
ccagtggatccagcaaccgccaacaattgtcc

SEQ ID NO: 8164 - DNA, 32 bp, synthetic construct
  source 1..32: mol_type = other DNA
ccagtggatccagcaaccgccaacaactgtcc

SEQ ID NO: 8165 - DNA, 33 bp, synthetic construct
  source 1..33: mol_type = other DNA
tccagtggatccagcaaccgccaacaattgtcc

SEQ ID NO: 8166 - DNA, 33 bp, synthetic construct
  source 1..33: mol_type = other DNA
tccagtggatccagcaaccgccaacaactgtcc

SEQ ID NO: 8167 - DNA, 34 bp, synthetic construct
  source 1..34: mol_type = other DNA
ctccagtggatccagcaaccgccaacaattgtcc

SEQ ID NO: 8168 - DNA, 34 bp, synthetic construct
  source 1..34: mol_type = other DNA
ctccagtggatccagcaaccgccaacaactgtcc

SEQ ID NO: 8169 - DNA, 35 bp, synthetic construct
  source 1..35: mol_type = other DNA
gctccagtggatccagcaaccgccaacaactgtcc

SEQ ID NO: 8170 - DNA, 35 bp, synthetic construct
  source 1..35: mol_type = other DNA
gctccagtggatccagcaaccgccaacaattgtcc

SEQ ID NO: 8171 - DNA, 36 bp, synthetic construct
  source 1..36: mol_type = other DNA
tgctccagtggatccagcaaccgccaacaactgtcc

SEQ ID NO: 8172 - DNA, 36 bp, synthetic construct
  source 1..36: mol_type = other DNA
tgctccagtggatccagcaaccgccaacaattgtcc

SEQ ID NO: 8173 - DNA, 37 bp, synthetic construct
  source 1..37: mol_type = other DNA
ctgctccagtggatccagcaaccgccaacaattgtcc

SEQ ID NO: 8174 - DNA, 37 bp, synthetic construct
  source 1..37: mol_type = other DNA
ctgctccagtggatccagcaaccgccaacaactgtcc

SEQ ID NO: 8175 - DNA, 38 bp, synthetic construct
  source 1..38: mol_type = other DNA
cctgctccagtggatccagcaaccgccaacaattgtcc

SEQ ID NO: 8176 - DNA, 38 bp, synthetic construct
  source 1..38: mol_type = other DNA
cctgctccagtggatccagcaaccgccaacaactgtcc

SEQ ID NO: 8177 - DNA, 39 bp, synthetic construct
  source 1..39: mol_type = other DNA
gcctgctccagtggatccagcaaccgccaacaactgtcc

SEQ ID NO: 8178 - DNA, 39 bp, synthetic construct
  source 1..39: mol_type = other DNA
gcctgctccagtggatccagcaaccgccaacaattgtcc

SEQ ID NO: 8179 - DNA, 40 bp, synthetic construct
  source 1..40: mol_type = other DNA
tgcctgctccagtggatccagcaaccgccaacaactgtcc

SEQ ID NO: 8180 - DNA, 40 bp, synthetic construct
  source 1..40: mol_type = other DNA
tgcctgctccagtggatccagcaaccgccaacaattgtcc

SEQ ID NO: 8181 - DNA, 14 bp, synthetic construct
  source 1..14: mol_type = other DNA
cgccaacaactgtc

SEQ ID NO: 8182 - DNA, 15 bp, synthetic construct
  source 1..15: mol_type = other DNA
ccgccaacaactgtc

SEQ ID NO: 8183 - DNA, 16 bp, synthetic construct
  source 1..16: mol_type = other DNA
accgccaacaactgtc

SEQ ID NO: 8184 - DNA, 17 bp, synthetic construct
  source 1..17: mol_type = other DNA
aaccgccaacaactgtc

SEQ ID NO: 8185 - DNA, 18 bp, synthetic construct
  source 1..18: mol_type = other DNA
caaccgccaacaactgtc

SEQ ID NO: 8186 - DNA, 19 bp, synthetic construct
  source 1..19: mol_type = other DNA
gcaaccgccaacaactgtc

SEQ ID NO: 8187 - DNA, 20 bp, synthetic construct
  source 1..20: mol_type = other DNA
agcaaccgccaacaactgtc

SEQ ID NO: 8188 - DNA, 21 bp, synthetic construct
  source 1..21: mol_type = other DNA
cagcaaccgccaacaactgtc

SEQ ID NO: 8189 - DNA, 22 bp, synthetic construct
  source 1..22: mol_type = other DNA
ccagcaaccgccaacaactgtc

SEQ ID NO: 8190 - DNA, 23 bp, synthetic construct
  source 1..23: mol_type = other DNA
tccagcaaccgccaacaactgtc

SEQ ID NO: 8191 - DNA, 24 bp, synthetic construct
  source 1..24: mol_type = other DNA
atccagcaaccgccaacaactgtc

SEQ ID NO: 8192 - DNA, 25 bp, synthetic construct
  source 1..25: mol_type = other DNA
gatccagcaaccgccaacaactgtc

SEQ ID NO: 8193 - DNA, 26 bp, synthetic construct
  source 1..26: mol_type = other DNA
ggatccagcaaccgccaacaactgtc

SEQ ID NO: 8194 - DNA, 27 bp, synthetic construct
  source 1..27: mol_type = other DNA
tggatccagcaaccgccaacaactgtc

SEQ ID NO: 8195 - DNA, 28 bp, synthetic construct
  source 1..28: mol_type = other DNA
gtggatccagcaaccgccaacaactgtc

SEQ ID NO: 8196 - DNA, 29 bp, synthetic construct
  source 1..29: mol_type = other DNA
agtggatccagcaaccgccaacaactgtc

SEQ ID NO: 8197 - DNA, 30 bp, synthetic construct
  source 1..30: mol_type = other DNA
cagtggatccagcaaccgccaacaactgtc

SEQ ID NO: 8198 - DNA, 31 bp, synthetic construct
  source 1..31: mol_type = other DNA
ccagtggatccagcaaccgccaacaactgtc

SEQ ID NO: 8199 - DNA, 32 bp, synthetic construct
  source 1..32: mol_type = other DNA
tccagtggatccagcaaccgccaacaactgtc

SEQ ID NO: 8200 - DNA, 33 bp, synthetic construct
  source 1..33: mol_type = other DNA
ctccagtggatccagcaaccgccaacaactgtc

SEQ ID NO: 8201 - DNA, 34 bp, synthetic construct
  source 1..34: mol_type = other DNA
gctccagtggatccagcaaccgccaacaactgtc

SEQ ID NO: 8202 - DNA, 35 bp, synthetic construct
  source 1..35: mol_type = other DNA
tgctccagtggatccagcaaccgccaacaactgtc

SEQ ID NO: 8203 - DNA, 36 bp, synthetic construct
  source 1..36: mol_type = other DNA
ctgctccagtggatccagcaaccgccaacaactgtc

SEQ ID NO: 8204 - DNA, 37 bp, synthetic construct
  source 1..37: mol_type = other DNA
cctgctccagtggatccagcaaccgccaacaactgtc

SEQ ID NO: 8205 - DNA, 38 bp, synthetic construct
  source 1..38: mol_type = other DNA
gcctgctccagtggatccagcaaccgccaacaactgtc

SEQ ID NO: 8206 - DNA, 39 bp, synthetic construct
  source 1..39: mol_type = other DNA
tgcctgctccagtggatccagcaaccgccaacaactgtc

SEQ ID NO: 8207 - DNA, 40 bp, synthetic construct
  source 1..40: mol_type = other DNA
ttgcctgctccagtggatccagcaaccgccaacaactgtc

SEQ ID NO: 8208 - DNA, 29 bp, synthetic construct
  source 1..29: mol_type = other DNA
agatgatattttctttaatggtgccaggc

SEQ ID NO: 8209 - DNA, 30 bp, synthetic construct
  source 1..30: mol_type = other DNA
aagatgatattttctttaatggtgccaggc

SEQ ID NO: 8210 - DNA, 31 bp, synthetic construct
  source 1..31: mol_type = other DNA
aaagatgatattttctttaatggtgccaggc

SEQ ID NO: 8211 - DNA, 32 bp, synthetic construct
  source 1..32: mol_type = other DNA
caaagatgatattttctttaatggtgccaggc

SEQ ID NO: 8212 - DNA, 33 bp, synthetic construct
  source 1..33: mol_type = other DNA
ccaaagatgatattttctttaatggtgccaggc

SEQ ID NO: 8213 - DNA, 34 bp, synthetic construct
  source 1..34: mol_type = other DNA
accaaagatgatattttctttaatggtgccaggc

SEQ ID NO: 8214 - DNA, 35 bp, synthetic construct
  source 1..35: mol_type = other DNA
caccaaagatgatattttctttaatggtgccaggc

SEQ ID NO: 8215 - DNA, 36 bp, synthetic construct
  source 1..36: mol_type = other DNA
acaccaaagatgatattttctttaatggtgccaggc

SEQ ID NO: 8216 - DNA, 37 bp, synthetic construct
  source 1..37: mol_type = other DNA
aacaccaaagatgatattttctttaatggtgccaggc

SEQ ID NO: 8217 - DNA, 38 bp, synthetic construct
  source 1..38: mol_type = other DNA
aaacaccaaagatgatattttctttaatggtgccaggc

SEQ ID NO: 8218 - DNA, 39 bp, synthetic construct
  source 1..39: mol_type = other DNA
gaaacaccaaagatgatattttctttaatggtgccaggc

SEQ ID NO: 8219 - DNA, 40 bp, synthetic construct
  source 1..40: mol_type = other DNA
ggaaacaccaaagatgatattttctttaatggtgccaggc

SEQ ID NO: 8220 - DNA, 28 bp, synthetic construct
  source 1..28: mol_type = other DNA
agatgatattttctttaatggtgccagg

SEQ ID NO: 8221 - DNA, 29 bp, synthetic construct
  source 1..29: mol_type = other DNA
aagatgatattttctttaatggtgccagg

SEQ ID NO: 8222 - DNA, 30 bp, synthetic construct
  source 1..30: mol_type = other DNA
aaagatgatattttctttaatggtgccagg

SEQ ID NO: 8223 - DNA, 31 bp, synthetic construct
  source 1..31: mol_type = other DNA
caaagatgatattttctttaatggtgccagg

SEQ ID NO: 8224 - DNA, 32 bp, synthetic construct
  source 1..32: mol_type = other DNA
ccaaagatgatattttctttaatggtgccagg

SEQ ID NO: 8225 - DNA, 33 bp, synthetic construct
  source 1..33: mol_type = other DNA
accaaagatgatattttctttaatggtgccagg

SEQ ID NO: 8226 - DNA, 34 bp, synthetic construct
  source 1..34: mol_type = other DNA
caccaaagatgatattttctttaatggtgccagg

SEQ ID NO: 8227 - DNA, 35 bp, synthetic construct
  source 1..35: mol_type = other DNA
acaccaaagatgatattttctttaatggtgccagg

SEQ ID NO: 8228 - DNA, 36 bp, synthetic construct
  source 1..36: mol_type = other DNA
aacaccaaagatgatattttctttaatggtgccagg

SEQ ID NO: 8229 - DNA, 37 bp, synthetic construct
  source 1..37: mol_type = other DNA
aaacaccaaagatgatattttctttaatggtgccagg

SEQ ID NO: 8230 - DNA, 38 bp, synthetic construct
  source 1..38: mol_type = other DNA
gaaacaccaaagatgatattttctttaatggtgccagg

SEQ ID NO: 8231 - DNA, 39 bp, synthetic construct
  source 1..39: mol_type = other DNA
ggaaacaccaaagatgatattttctttaatggtgccagg

SEQ ID NO: 8232 - DNA, 40 bp, synthetic construct
  source 1..40: mol_type = other DNA
aggaaacaccaaagatgatattttctttaatggtgccagg

SEQ ID NO: 8233 - DNA, 18 bp, synthetic construct
  source 1..18: mol_type = other DNA
agatgatattttctttaa

SEQ ID NO: 8234 - DNA, 18 bp, synthetic construct
  source 1..18: mol_type = other DNA
agatgatattttccttaa

SEQ ID NO: 8235 - DNA, 19 bp, synthetic construct
  source 1..19: mol_type = other DNA
aagatgatattttctttaa

SEQ ID NO: 8236 - DNA, 19 bp, synthetic construct
  source 1..19: mol_type = other DNA
aagatgatattttccttaa

SEQ ID NO: 8237 - DNA, 20 bp, synthetic construct
  source 1..20: mol_type = other DNA
aaagatgatattttctttaa

SEQ ID NO: 8238 - DNA, 20 bp, synthetic construct
  source 1..20: mol_type = other DNA
aaagatgatattttccttaa

SEQ ID NO: 8239 - DNA, 21 bp, synthetic construct
  source 1..21: mol_type = other DNA
caaagatgatattttctttaa

SEQ ID NO: 8240 - DNA, 21 bp, synthetic construct
  source 1..21: mol_type = other DNA
caaagatgatattttccttaa

SEQ ID NO: 8241 - DNA, 22 bp, synthetic construct
  source 1..22: mol_type = other DNA
ccaaagatgatattttccttaa

SEQ ID NO: 8242 - DNA, 22 bp, synthetic construct
  source 1..22: mol_type = other DNA
ccaaagatgatattttctttaa

SEQ ID NO: 8243 - DNA, 23 bp, synthetic construct
  source 1..23: mol_type = other DNA
accaaagatgatattttccttaa

SEQ ID NO: 8244 - DNA, 23 bp, synthetic construct
  source 1..23: mol_type = other DNA
accaaagatgatattttctttaa

SEQ ID NO: 8245 - DNA, 24 bp, synthetic construct
  source 1..24: mol_type = other DNA
caccaaagatgatattttccttaa

SEQ ID NO: 8246 - DNA, 24 bp, synthetic construct
  source 1..24: mol_type = other DNA
caccaaagatgatattttctttaa

SEQ ID NO: 8247 - DNA, 25 bp, synthetic construct
  source 1..25: mol_type = other DNA
acaccaaagatgatattttctttaa

SEQ ID NO: 8248 - DNA, 25 bp, synthetic construct
  source 1..25: mol_type = other DNA
acaccaaagatgatattttccttaa

SEQ ID NO: 8249 - DNA, 26 bp, synthetic construct
  source 1..26: mol_type = other DNA
aacaccaaagatgatattttctttaa

SEQ ID NO: 8250 - DNA, 26 bp, synthetic construct
  source 1..26: mol_type = other DNA
aacaccaaagatgatattttccttaa

SEQ ID NO: 8251 - DNA, 27 bp, synthetic construct
  source 1..27: mol_type = other DNA
aaacaccaaagatgatattttccttaa

SEQ ID NO: 8252 - DNA, 27 bp, synthetic construct
  source 1..27: mol_type = other DNA
aaacaccaaagatgatattttctttaa

SEQ ID NO: 8253 - DNA, 28 bp, synthetic construct
  source 1..28: mol_type = other DNA
gaaacaccaaagatgatattttccttaa

SEQ ID NO: 8254 - DNA, 28 bp, synthetic construct
  source 1..28: mol_type = other DNA
gaaacaccaaagatgatattttctttaa

SEQ ID NO: 8255 - DNA, 29 bp, synthetic construct
  source 1..29: mol_type = other DNA
ggaaacaccaaagatgatattttctttaa

SEQ ID NO: 8256 - DNA, 29 bp, synthetic construct
  source 1..29: mol_type = other DNA
ggaaacaccaaagatgatattttccttaa

SEQ ID NO: 8257 - DNA, 30 bp, synthetic construct
  source 1..30: mol_type = other DNA
aggaaacaccaaagatgatattttccttaa

SEQ ID NO: 8258 - DNA, 30 bp, synthetic construct
  source 1..30: mol_type = other DNA
aggaaacaccaaagatgatattttctttaa

SEQ ID NO: 8259 - DNA, 31 bp, synthetic construct
  source 1..31: mol_type = other DNA
taggaaacaccaaagatgatattttccttaa

SEQ ID NO: 8260 - DNA, 31 bp, synthetic construct
  source 1..31: mol_type = other DNA
taggaaacaccaaagatgatattttctttaa

SEQ ID NO: 8261 - DNA, 32 bp, synthetic construct
  source 1..32: mol_type = other DNA
ataggaaacaccaaagatgatattttccttaa

SEQ ID NO: 8262 - DNA, 32 bp, synthetic construct
  source 1..32: mol_type = other DNA
ataggaaacaccaaagatgatattttctttaa

SEQ ID NO: 8263 - DNA, 33 bp, synthetic construct
  source 1..33: mol_type = other DNA
cataggaaacaccaaagatgatattttccttaa

SEQ ID NO: 8264 - DNA, 33 bp, synthetic construct
  source 1..33: mol_type = other DNA
cataggaaacaccaaagatgatattttctttaa

SEQ ID NO: 8265 - DNA, 34 bp, synthetic construct
  source 1..34: mol_type = other DNA
tcataggaaacaccaaagatgatattttctttaa

SEQ ID NO: 8266 - DNA, 34 bp, synthetic construct
  source 1..34: mol_type = other DNA
tcataggaaacaccaaagatgatattttccttaa

SEQ ID NO: 8267 - DNA, 35 bp, synthetic construct
  source 1..35: mol_type = other DNA
atcataggaaacaccaaagatgatattttctttaa

SEQ ID NO: 8268 - DNA, 35 bp, synthetic construct
  source 1..35: mol_type = other DNA
atcataggaaacaccaaagatgatattttccttaa

SEQ ID NO: 8269 - DNA, 36 bp, synthetic construct
  source 1..36: mol_type = other DNA
catcataggaaacaccaaagatgatattttctttaa

SEQ ID NO: 8270 - DNA, 36 bp, synthetic construct
  source 1..36: mol_type = other DNA
catcataggaaacaccaaagatgatattttccttaa

SEQ ID NO: 8271 - DNA, 37 bp, synthetic construct
  source 1..37: mol_type = other DNA
tcatcataggaaacaccaaagatgatattttccttaa

SEQ ID NO: 8272 - DNA, 37 bp, synthetic construct
  source 1..37: mol_type = other DNA
tcatcataggaaacaccaaagatgatattttctttaa

SEQ ID NO: 8273 - DNA, 38 bp, synthetic construct
  source 1..38: mol_type = other DNA
ttcatcataggaaacaccaaagatgatattttccttaa

SEQ ID NO: 8274 - DNA, 38 bp, synthetic construct
  source 1..38: mol_type = other DNA
ttcatcataggaaacaccaaagatgatattttctttaa

SEQ ID NO: 8275 - DNA, 39 bp, synthetic construct
  source 1..39: mol_type = other DNA
attcatcataggaaacaccaaagatgatattttccttaa

SEQ ID NO: 8276 - DNA, 39 bp, synthetic construct
  source 1..39: mol_type = other DNA
attcatcataggaaacaccaaagatgatattttctttaa

SEQ ID NO: 8277 - DNA, 40 bp, synthetic construct
  source 1..40: mol_type = other DNA
tattcatcataggaaacaccaaagatgatattttctttaa

SEQ ID NO: 8278 - DNA, 40 bp, synthetic construct
  source 1..40: mol_type = other DNA
tattcatcataggaaacaccaaagatgatattttccttaa

SEQ ID NO: 8279 - DNA, 40 bp, synthetic construct
  source 1..40: mol_type = other DNA
agatgatattttctttaatggtgccaggcataatccagga

SEQ ID NO: 8280 - DNA, 10 bp, synthetic construct
  source 1..10: mol_type = other DNA
ccaaagatga

SEQ ID NO: 8281 - DNA, 11 bp, synthetic construct
  source 1..11: mol_type = other DNA
accaaagatga

SEQ ID NO: 8282 - DNA, 12 bp, synthetic construct
  source 1..12: mol_type = other DNA
caccaaagatga

SEQ ID NO: 8283 - DNA, 13 bp, synthetic construct
  source 1..13: mol_type = other DNA
acaccaaagatga

SEQ ID NO: 8284 - DNA, 14 bp, synthetic construct
  source 1..14: mol_type = other DNA
aacaccaaagatga

SEQ ID NO: 8285 - DNA, 15 bp, synthetic construct
  source 1..15: mol_type = other DNA
aaacaccaaagatga

SEQ ID NO: 8286 - DNA, 16 bp, synthetic construct
  source 1..16: mol_type = other DNA
gaaacaccaaagatga

SEQ ID NO: 8287 - DNA, 17 bp, synthetic construct
  source 1..17: mol_type = other DNA
ggaaacaccaaagatga

SEQ ID NO: 8288 - DNA, 18 bp, synthetic construct
  source 1..18: mol_type = other DNA
aggaaacaccaaagatga

SEQ ID NO: 8289 - DNA, 19 bp, synthetic construct
  source 1..19: mol_type = other DNA
taggaaacaccaaagatga

SEQ ID NO: 8290 - DNA, 20 bp, synthetic construct
  source 1..20: mol_type = other DNA
ataggaaacaccaaagatga

SEQ ID NO: 8291 - DNA, 21 bp, synthetic construct
  source 1..21: mol_type = other DNA
cataggaaacaccaaagatga

SEQ ID NO: 8292 - DNA, 22 bp, synthetic construct
  source 1..22: mol_type = other DNA
tcataggaaacaccaaagatga

SEQ ID NO: 8293 - DNA, 23 bp, synthetic construct
  source 1..23: mol_type = other DNA
atcataggaaacaccaaagatga

SEQ ID NO: 8294 - DNA, 24 bp, synthetic construct
  source 1..24: mol_type = other DNA
catcataggaaacaccaaagatga

SEQ ID NO: 8295 - DNA, 25 bp, synthetic construct
  source 1..25: mol_type = other DNA
tcatcataggaaacaccaaagatga

SEQ ID NO: 8296 - DNA, 26 bp, synthetic construct
  source 1..26: mol_type = other DNA
ttcatcataggaaacaccaaagatga

SEQ ID NO: 8297 - DNA, 27 bp, synthetic construct
  source 1..27: mol_type = other DNA
attcatcataggaaacaccaaagatga

SEQ ID NO: 8298 - DNA, 28 bp, synthetic construct
  source 1..28: mol_type = other DNA
tattcatcataggaaacaccaaagatga

SEQ ID NO: 8299 - DNA, 29 bp, synthetic construct
  source 1..29: mol_type = other DNA
atattcatcataggaaacaccaaagatga

SEQ ID NO: 8300 - DNA, 30 bp, synthetic construct
  source 1..30: mol_type = other DNA
tatattcatcataggaaacaccaaagatga

SEQ ID NO: 8301 - DNA, 31 bp, synthetic construct
  source 1..31: mol_type = other DNA
ctatattcatcataggaaacaccaaagatga

SEQ ID NO: 8302 - DNA, 32 bp, synthetic construct
  source 1..32: mol_type = other DNA
tctatattcatcataggaaacaccaaagatga

SEQ ID NO: 8303 - DNA, 33 bp, synthetic construct
  source 1..33: mol_type = other DNA
atctatattcatcataggaaacaccaaagatga

SEQ ID NO: 8304 - DNA, 34 bp, synthetic construct
  source 1..34: mol_type = other DNA
tatctatattcatcataggaaacaccaaagatga

SEQ ID NO: 8305 - DNA, 35 bp, synthetic construct
  source 1..35: mol_type = other DNA
gtatctatattcatcataggaaacaccaaagatga

SEQ ID NO: 8306 - DNA, 36 bp, synthetic construct
  source 1..36: mol_type = other DNA
tgtatctatattcatcataggaaacaccaaagatga

SEQ ID NO: 8307 - DNA, 37 bp, synthetic construct
  source 1..37: mol_type = other DNA
ctgtatctatattcatcataggaaacaccaaagatga

SEQ ID NO: 8308 - DNA, 38 bp, synthetic construct
  source 1..38: mol_type = other DNA
tctgtatctatattcatcataggaaacaccaaagatga

SEQ ID NO: 8309 - DNA, 39 bp, synthetic construct
  source 1..39: mol_type = other DNA
ttctgtatctatattcatcataggaaacaccaaagatga

SEQ ID NO: 8310 - DNA, 40 bp, synthetic construct
  source 1..40: mol_type = other DNA
cttctgtatctatattcatcataggaaacaccaaagatga

SEQ ID NO: 8311 - DNA, 10 bp, synthetic construct
  source 1..10: mol_type = other DNA
accaaagatg

SEQ ID NO: 8312 - DNA, 11 bp, synthetic construct
  source 1..11: mol_type = other DNA
caccaaagatg

SEQ ID NO: 8313 - DNA, 12 bp, synthetic construct
  source 1..12: mol_type = other DNA
acaccaaagatg

SEQ ID NO: 8314 - DNA, 13 bp, synthetic construct
  source 1..13: mol_type = other DNA
aacaccaaagatg

SEQ ID NO: 8315 - DNA, 14 bp, synthetic construct
  source 1..14: mol_type = other DNA
aaacaccaaagatg

SEQ ID NO: 8316 - DNA, 15 bp, synthetic construct
  source 1..15: mol_type = other DNA
gaaacaccaaagatg

SEQ ID NO: 8317 - DNA, 16 bp, synthetic construct
  source 1..16: mol_type = other DNA
ggaaacaccaaagatg

SEQ ID NO: 8318 - DNA, 17 bp, synthetic construct
  source 1..17: mol_type = other DNA
aggaaacaccaaagatg

SEQ ID NO: 8319 - DNA, 18 bp, synthetic construct
  source 1..18: mol_type = other DNA
taggaaacaccaaagatg

SEQ ID NO: 8320 - DNA, 19 bp, synthetic construct
  source 1..19: mol_type = other DNA
ataggaaacaccaaagatg

SEQ ID NO: 8321 - DNA, 20 bp, synthetic construct
  source 1..20: mol_type = other DNA
cataggaaacaccaaagatg

SEQ ID NO: 8322 - DNA, 21 bp, synthetic construct
  source 1..21: mol_type = other DNA
tcataggaaacaccaaagatg

SEQ ID NO: 8323 - DNA, 22 bp, synthetic construct
  source 1..22: mol_type = other DNA
atcataggaaacaccaaagatg

SEQ ID NO: 8324 - DNA, 23 bp, synthetic construct
  source 1..23: mol_type = other DNA
catcataggaaacaccaaagatg

SEQ ID NO: 8325 - DNA, 24 bp, synthetic construct
  source 1..24: mol_type = other DNA
tcatcataggaaacaccaaagatg

SEQ ID NO: 8326 - DNA, 25 bp, synthetic construct
  source 1..25: mol_type = other DNA
ttcatcataggaaacaccaaagatg

SEQ ID NO: 8327 - DNA, 26 bp, synthetic construct
  source 1..26: mol_type = other DNA
attcatcataggaaacaccaaagatg

SEQ ID NO: 8328 - DNA, 27 bp, synthetic construct
  source 1..27: mol_type = other DNA
tattcatcataggaaacaccaaagatg

SEQ ID NO: 8329 - DNA, 28 bp, synthetic construct
  source 1..28: mol_type = other DNA
atattcatcataggaaacaccaaagatg

SEQ ID NO: 8330 - DNA, 29 bp, synthetic construct
  source 1..29: mol_type = other DNA
tatattcatcataggaaacaccaaagatg

SEQ ID NO: 8331 - DNA, 30 bp, synthetic construct
  source 1..30: mol_type = other DNA
ctatattcatcataggaaacaccaaagatg

SEQ ID NO: 8332 - DNA, 31 bp, synthetic construct
  source 1..31: mol_type = other DNA
tctatattcatcataggaaacaccaaagatg

SEQ ID NO: 8333 - DNA, 32 bp, synthetic construct
  source 1..32: mol_type = other DNA
atctatattcatcataggaaacaccaaagatg

SEQ ID NO: 8334 - DNA, 33 bp, synthetic construct
  source 1..33: mol_type = other DNA
tatctatattcatcataggaaacaccaaagatg

SEQ ID NO: 8335 - DNA, 34 bp, synthetic construct
  source 1..34: mol_type = other DNA
gtatctatattcatcataggaaacaccaaagatg

SEQ ID NO: 8336 - DNA, 35 bp, synthetic construct
  source 1..35: mol_type = other DNA
tgtatctatattcatcataggaaacaccaaagatg

SEQ ID NO: 8337 - DNA, 36 bp, synthetic construct
  source 1..36: mol_type = other DNA
ctgtatctatattcatcataggaaacaccaaagatg

SEQ ID NO: 8338 - DNA, 37 bp, synthetic construct
  source 1..37: mol_type = other DNA
tctgtatctatattcatcataggaaacaccaaagatg

SEQ ID NO: 8339 - DNA, 38 bp, synthetic construct
  source 1..38: mol_type = other DNA
ttctgtatctatattcatcataggaaacaccaaagatg

SEQ ID NO: 8340 - DNA, 39 bp, synthetic construct
  source 1..39: mol_type = other DNA
cttctgtatctatattcatcataggaaacaccaaagatg

SEQ ID NO: 8341 - DNA, 40 bp, synthetic construct
  source 1..40: mol_type = other DNA
gcttctgtatctatattcatcataggaaacaccaaagatg

SEQ ID NO: 8342 - DNA, 10 bp, synthetic construct
  source 1..10: mol_type = other DNA
caccaaagat

SEQ ID NO: 8343 - DNA, 11 bp, synthetic construct
  source 1..11: mol_type = other DNA
acaccaaagat

SEQ ID NO: 8344 - DNA, 12 bp, synthetic construct
  source 1..12: mol_type = other DNA
aacaccaaagat

SEQ ID NO: 8345 - DNA, 13 bp, synthetic construct
  source 1..13: mol_type = other DNA
aaacaccaaagat

SEQ ID NO: 8346 - DNA, 14 bp, synthetic construct
  source 1..14: mol_type = other DNA
gaaacaccaaagat

SEQ ID NO: 8347 - DNA, 15 bp, synthetic construct
  source 1..15: mol_type = other DNA
ggaaacaccaaagat

SEQ ID NO: 8348 - DNA, 16 bp, synthetic construct
  source 1..16: mol_type = other DNA
aggaaacaccaaagat

SEQ ID NO: 8349 - DNA, 17 bp, synthetic construct
  source 1..17: mol_type = other DNA
taggaaacaccaaagat

SEQ ID NO: 8350 - DNA, 18 bp, synthetic construct
  source 1..18: mol_type = other DNA
ataggaaacaccaaagat

SEQ ID NO: 8351 - DNA, 19 bp, synthetic construct
  source 1..19: mol_type = other DNA
cataggaaacaccaaagat

SEQ ID NO: 8352 - DNA, 20 bp, synthetic construct
  source 1..20: mol_type = other DNA
tcataggaaacaccaaagat

SEQ ID NO: 8353 - DNA, 21 bp, synthetic construct
  source 1..21: mol_type = other DNA
atcataggaaacaccaaagat

SEQ ID NO: 8354 - DNA, 22 bp, synthetic construct
  source 1..22: mol_type = other DNA
catcataggaaacaccaaagat

SEQ ID NO: 8355 - DNA, 23 bp, synthetic construct
  source 1..23: mol_type = other DNA
tcatcataggaaacaccaaagat

SEQ ID NO: 8356 - DNA, 24 bp, synthetic construct
  source 1..24: mol_type = other DNA
ttcatcataggaaacaccaaagat

SEQ ID NO: 8357 - DNA, 25 bp, synthetic construct
  source 1..25: mol_type = other DNA
attcatcataggaaacaccaaagat

SEQ ID NO: 8358 - DNA, 26 bp, synthetic construct
  source 1..26: mol_type = other DNA
tattcatcataggaaacaccaaagat

SEQ ID NO: 8359 - DNA, 27 bp, synthetic construct
  source 1..27: mol_type = other DNA
atattcatcataggaaacaccaaagat

SEQ ID NO: 8360 - DNA, 28 bp, synthetic construct
  source 1..28: mol_type = other DNA
tatattcatcataggaaacaccaaagat

SEQ ID NO: 8361 - DNA, 29 bp, synthetic construct
  source 1..29: mol_type = other DNA
ctatattcatcataggaaacaccaaagat

SEQ ID NO: 8362 - DNA, 30 bp, synthetic construct
  source 1..30: mol_type = other DNA
tctatattcatcataggaaacaccaaagat

SEQ ID NO: 8363 - DNA, 31 bp, synthetic construct
  source 1..31: mol_type = other DNA
atctatattcatcataggaaacaccaaagat

SEQ ID NO: 8364 - DNA, 32 bp, synthetic construct
  source 1..32: mol_type = other DNA
tatctatattcatcataggaaacaccaaagat

SEQ ID NO: 8365 - DNA, 33 bp, synthetic construct
  source 1..33: mol_type = other DNA
gtatctatattcatcataggaaacaccaaagat

SEQ ID NO: 8366 - DNA, 34 bp, synthetic construct
  source 1..34: mol_type = other DNA
tgtatctatattcatcataggaaacaccaaagat

SEQ ID NO: 8367 - DNA, 35 bp, synthetic construct
  source 1..35: mol_type = other DNA
ctgtatctatattcatcataggaaacaccaaagat

SEQ ID NO: 8368 - DNA, 36 bp, synthetic construct
  source 1..36: mol_type = other DNA
tctgtatctatattcatcataggaaacaccaaagat

SEQ ID NO: 8369 - DNA, 37 bp, synthetic construct
  source 1..37: mol_type = other DNA
ttctgtatctatattcatcataggaaacaccaaagat

SEQ ID NO: 8370 - DNA, 38 bp, synthetic construct
  source 1..38: mol_type = other DNA
cttctgtatctatattcatcataggaaacaccaaagat

SEQ ID NO: 8371 - DNA, 39 bp, synthetic construct
  source 1..39: mol_type = other DNA
gcttctgtatctatattcatcataggaaacaccaaagat

SEQ ID NO: 8372 - DNA, 40 bp, synthetic construct
  source 1..40: mol_type = other DNA
cgcttctgtatctatattcatcataggaaacaccaaagat

SEQ ID NO: 8373 - DNA, 20 bp, synthetic construct
  source 1..20: mol_type = other DNA
catctttggtgtttcctatg

SEQ ID NO: 8374 - DNA, 20 bp, synthetic construct
  source 1..20: mol_type = other DNA
catctttggtgttagctatg

SEQ ID NO: 8375 - DNA, 21 bp, synthetic construct
  source 1..21: mol_type = other DNA
tcatctttggtgtttcctatg

SEQ ID NO: 8376 - DNA, 21 bp, synthetic construct
  source 1..21: mol_type = other DNA
tcatctttggtgttagctatg

SEQ ID NO: 8377 - DNA, 22 bp, synthetic construct
  source 1..22: mol_type = other DNA
atcatctttggtgtttcctatg

SEQ ID NO: 8378 - DNA, 22 bp, synthetic construct
  source 1..22: mol_type = other DNA
atcatctttggtgttagctatg

SEQ ID NO: 8379 - DNA, 23 bp, synthetic construct
  source 1..23: mol_type = other DNA
tatcatctttggtgttagctatg

SEQ ID NO: 8380 - DNA, 23 bp, synthetic construct
  source 1..23: mol_type = other DNA
tatcatctttggtgtttcctatg

SEQ ID NO: 8381 - DNA, 24 bp, synthetic construct
  source 1..24: mol_type = other DNA
atatcatctttggtgttagctatg

SEQ ID NO: 8382 - DNA, 24 bp, synthetic construct
  source 1..24: mol_type = other DNA
atatcatctttggtgtttcctatg

SEQ ID NO: 8383 - DNA, 25 bp, synthetic construct
  source 1..25: mol_type = other DNA
aatatcatctttggtgtttcctatg

SEQ ID NO: 8384 - DNA, 25 bp, synthetic construct
  source 1..25: mol_type = other DNA
aatatcatctttggtgttagctatg

SEQ ID NO: 8385 - DNA, 26 bp, synthetic construct
  source 1..26: mol_type = other DNA
aaatatcatctttggtgtttcctatg

SEQ ID NO: 8386 - DNA, 26 bp, synthetic construct
  source 1..26: mol_type = other DNA
aaatatcatctttggtgttagctatg

SEQ ID NO: 8387 - DNA, 27 bp, synthetic construct
  source 1..27: mol_type = other DNA
aaaatatcatctttggtgttagctatg

SEQ ID NO: 8388 - DNA, 27 bp, synthetic construct
  source 1..27: mol_type = other DNA
aaaatatcatctttggtgtttcctatg

SEQ ID NO: 8389 - DNA, 28 bp, synthetic construct
  source 1..28: mol_type = other DNA
gaaaatatcatctttggtgtttcctatg

SEQ ID NO: 8390 - DNA, 28 bp, synthetic construct
  source 1..28: mol_type = other DNA
gaaaatatcatctttggtgttagctatg

SEQ ID NO: 8391 - DNA, 29 bp, synthetic construct
  source 1..29: mol_type = other DNA
agaaaatatcatctttggtgtttcctatg

SEQ ID NO: 8392 - DNA, 29 bp, synthetic construct
  source 1..29: mol_type = other DNA
agaaaatatcatctttggtgttagctatg

SEQ ID NO: 8393 - DNA, 30 bp, synthetic construct
  source 1..30: mol_type = other DNA
aagaaaatatcatctttggtgtttcctatg

SEQ ID NO: 8394 - DNA, 30 bp, synthetic construct
  source 1..30: mol_type = other DNA
aagaaaatatcatctttggtgttagctatg

SEQ ID NO: 8395 - DNA, 31 bp, synthetic construct
  source 1..31: mol_type = other DNA
aaagaaaatatcatctttggtgttagctatg

SEQ ID NO: 8396 - DNA, 31 bp, synthetic construct
  source 1..31: mol_type = other DNA
aaagaaaatatcatctttggtgtttcctatg

SEQ ID NO: 8397 - DNA, 32 bp, synthetic construct
  source 1..32: mol_type = other DNA
taaagaaaatatcatctttggtgtttcctatg

SEQ ID NO: 8398 - DNA, 32 bp, synthetic construct
  source 1..32: mol_type = other DNA
taaagaaaatatcatctttggtgttagctatg

SEQ ID NO: 8399 - DNA, 33 bp, synthetic construct
  source 1..33: mol_type = other DNA
ttaaagaaaatatcatctttggtgtttcctatg

SEQ ID NO: 8400 - DNA, 33 bp, synthetic construct
  source 1..33: mol_type = other DNA
ttaaagaaaatatcatctttggtgttagctatg

SEQ ID NO: 8401 - DNA, 34 bp, synthetic construct
  source 1..34: mol_type = other DNA
attaaagaaaatatcatctttggtgttagctatg

SEQ ID NO: 8402 - DNA, 34 bp, synthetic construct
  source 1..34: mol_type = other DNA
attaaagaaaatatcatctttggtgtttcctatg

SEQ ID NO: 8403 - DNA, 35 bp, synthetic construct
  source 1..35: mol_type = other DNA
cattaaagaaaatatcatctttggtgtttcctatg

SEQ ID NO: 8404 - DNA, 35 bp, synthetic construct
  source 1..35: mol_type = other DNA
cattaaagaaaatatcatctttggtgttagctatg

SEQ ID NO: 8405 - DNA, 36 bp, synthetic construct
  source 1..36: mol_type = other DNA
ccattaaagaaaatatcatctttggtgttagctatg

SEQ ID NO: 8406 - DNA, 36 bp, synthetic construct
  source 1..36: mol_type = other DNA
ccattaaagaaaatatcatctttggtgtttcctatg

SEQ ID NO: 8407 - DNA, 37 bp, synthetic construct
  source 1..37: mol_type = other DNA
accattaaagaaaatatcatctttggtgtttcctatg

SEQ ID NO: 8408 - DNA, 37 bp, synthetic construct
  source 1..37: mol_type = other DNA
accattaaagaaaatatcatctttggtgttagctatg

SEQ ID NO: 8409 - DNA, 38 bp, synthetic construct
  source 1..38: mol_type = other DNA
caccattaaagaaaatatcatctttggtgttagctatg

SEQ ID NO: 8410 - DNA, 38 bp, synthetic construct
  source 1..38: mol_type = other DNA
caccattaaagaaaatatcatctttggtgtttcctatg

SEQ ID NO: 8411 - DNA, 39 bp, synthetic construct
  source 1..39: mol_type = other DNA
gcaccattaaagaaaatatcatctttggtgtttcctatg

SEQ ID NO: 8412 - DNA, 39 bp, synthetic construct
  source 1..39: mol_type = other DNA
gcaccattaaagaaaatatcatctttggtgttagctatg

SEQ ID NO: 8413 - DNA, 40 bp, synthetic construct
  source 1..40: mol_type = other DNA
ggcaccattaaagaaaatatcatctttggtgtttcctatg

SEQ ID NO: 8414 - DNA, 40 bp, synthetic construct
  source 1..40: mol_type = other DNA
ggcaccattaaagaaaatatcatctttggtgttagctatg

SEQ ID NO: 8415 - DNA, 38 bp, synthetic construct
  source 1..38: mol_type = other DNA
catctttggtgtttcctatgatgaatatagatacagaa

SEQ ID NO: 8416 - DNA, 39 bp, synthetic construct
  source 1..39: mol_type = other DNA
tcatctttggtgtttcctatgatgaatatagatacagaa

SEQ ID NO: 8417 - DNA, 40 bp, synthetic construct
  source 1..40: mol_type = other DNA
atcatctttggtgtttcctatgatgaatatagatacagaa

SEQ ID NO: 8418 - DNA, 30 bp, synthetic construct
  source 1..30: mol_type = other DNA
agatgatattttctttaatggtgccaggca

SEQ ID NO: 8419 - DNA, 31 bp, synthetic construct
  source 1..31: mol_type = other DNA
aagatgatattttctttaatggtgccaggca

SEQ ID NO: 8420 - DNA, 32 bp, synthetic construct
  source 1..32: mol_type = other DNA
aaagatgatattttctttaatggtgccaggca

SEQ ID NO: 8421 - DNA, 33 bp, synthetic construct
  source 1..33: mol_type = other DNA
caaagatgatattttctttaatggtgccaggca

SEQ ID NO: 8422 - DNA, 34 bp, synthetic construct
  source 1..34: mol_type = other DNA
ccaaagatgatattttctttaatggtgccaggca

SEQ ID NO: 8423 - DNA, 35 bp, synthetic construct
  source 1..35: mol_type = other DNA
accaaagatgatattttctttaatggtgccaggca

SEQ ID NO: 8424 - DNA, 36 bp, synthetic construct
  source 1..36: mol_type = other DNA
caccaaagatgatattttctttaatggtgccaggca

SEQ ID NO: 8425 - DNA, 37 bp, synthetic construct
  source 1..37: mol_type = other DNA
acaccaaagatgatattttctttaatggtgccaggca

SEQ ID NO: 8426 - DNA, 38 bp, synthetic construct
  source 1..38: mol_type = other DNA
aacaccaaagatgatattttctttaatggtgccaggca

SEQ ID NO: 8427 - DNA, 39 bp, synthetic construct
  source 1..39: mol_type = other DNA
aaacaccaaagatgatattttctttaatggtgccaggca

SEQ ID NO: 8428 - DNA, 40 bp, synthetic construct
  source 1..40: mol_type = other DNA
gaaacaccaaagatgatattttctttaatggtgccaggca

SEQ ID NO: 8429 - DNA, 10 bp, synthetic construct
  source 1..10: mol_type = other DNA
atcatctttg

SEQ ID NO: 8430 - DNA, 11 bp, synthetic construct
  source 1..11: mol_type = other DNA
tatcatctttg

SEQ ID NO: 8431 - DNA, 12 bp, synthetic construct
  source 1..12: mol_type = other DNA
atatcatctttg

SEQ ID NO: 8432 - DNA, 13 bp, synthetic construct
  source 1..13: mol_type = other DNA
aatatcatctttg

SEQ ID NO: 8433 - DNA, 14 bp, synthetic construct
  source 1..14: mol_type = other DNA
aaatatcatctttg

SEQ ID NO: 8434 - DNA, 15 bp, synthetic construct
  source 1..15: mol_type = other DNA
aaaatatcatctttg

SEQ ID NO: 8435 - DNA, 16 bp, synthetic construct
  source 1..16: mol_type = other DNA
gaaaatatcatctttg

SEQ ID NO: 8436 - DNA, 17 bp, synthetic construct
  source 1..17: mol_type = other DNA
agaaaatatcatctttg

SEQ ID NO: 8437 - DNA, 18 bp, synthetic construct
  source 1..18: mol_type = other DNA
aagaaaatatcatctttg

SEQ ID NO: 8438 - DNA, 19 bp, synthetic construct
  source 1..19: mol_type = other DNA
aaagaaaatatcatctttg

SEQ ID NO: 8439 - DNA, 20 bp, synthetic construct
  source 1..20: mol_type = other DNA
taaagaaaatatcatctttg

SEQ ID NO: 8440 - DNA, 21 bp, synthetic construct
  source 1..21: mol_type = other DNA
ttaaagaaaatatcatctttg

SEQ ID NO: 8441 - DNA, 22 bp, synthetic construct
  source 1..22: mol_type = other DNA
attaaagaaaatatcatctttg

SEQ ID NO: 8442 - DNA, 23 bp, synthetic construct
  source 1..23: mol_type = other DNA
cattaaagaaaatatcatctttg

SEQ ID NO: 8443 - DNA, 24 bp, synthetic construct
  source 1..24: mol_type = other DNA
ccattaaagaaaatatcatctttg

SEQ ID NO: 8444 - DNA, 25 bp, synthetic construct
  source 1..25: mol_type = other DNA
accattaaagaaaatatcatctttg

SEQ ID NO: 8445 - DNA, 26 bp, synthetic construct
  source 1..26: mol_type = other DNA
caccattaaagaaaatatcatctttg

SEQ ID NO: 8446 - DNA, 27 bp, synthetic construct
  source 1..27: mol_type = other DNA
gcaccattaaagaaaatatcatctttg

SEQ ID NO: 8447 - DNA, 28 bp, synthetic construct
  source 1..28: mol_type = other DNA
ggcaccattaaagaaaatatcatctttg

SEQ ID NO: 8448 - DNA, 29 bp, synthetic construct
  source 1..29: mol_type = other DNA
tggcaccattaaagaaaatatcatctttg

SEQ ID NO: 8449 - DNA, 30 bp, synthetic construct
  source 1..30: mol_type = other DNA
ctggcaccattaaagaaaatatcatctttg

SEQ ID NO: 8450 - DNA, 31 bp, synthetic construct
  source 1..31: mol_type = other DNA
cctggcaccattaaagaaaatatcatctttg

SEQ ID NO: 8451 - DNA, 32 bp, synthetic construct
  source 1..32: mol_type = other DNA
gcctggcaccattaaagaaaatatcatctttg

SEQ ID NO: 8452 - DNA, 33 bp, synthetic construct
  source 1..33: mol_type = other DNA
tgcctggcaccattaaagaaaatatcatctttg

SEQ ID NO: 8453 - DNA, 34 bp, synthetic construct
  source 1..34: mol_type = other DNA
atgcctggcaccattaaagaaaatatcatctttg

SEQ ID NO: 8454 - DNA, 35 bp, synthetic construct
  source 1..35: mol_type = other DNA
tatgcctggcaccattaaagaaaatatcatctttg

SEQ ID NO: 8455 - DNA, 36 bp, synthetic construct
  source 1..36: mol_type = other DNA
ttatgcctggcaccattaaagaaaatatcatctttg

SEQ ID NO: 8456 - DNA, 37 bp, synthetic construct
  source 1..37: mol_type = other DNA
attatgcctggcaccattaaagaaaatatcatctttg

SEQ ID NO: 8457 - DNA, 38 bp, synthetic construct
  source 1..38: mol_type = other DNA
gattatgcctggcaccattaaagaaaatatcatctttg

SEQ ID NO: 8458 - DNA, 39 bp, synthetic construct
  source 1..39: mol_type = other DNA
ggattatgcctggcaccattaaagaaaatatcatctttg

SEQ ID NO: 8459 - DNA, 40 bp, synthetic construct
  source 1..40: mol_type = other DNA
tggattatgcctggcaccattaaagaaaatatcatctttg

SEQ ID NO: 8460 - DNA, 21 bp, synthetic construct
  source 1..21: mol_type = other DNA
catctttggtgtttcttatga

SEQ ID NO: 8461 - DNA, 21 bp, synthetic construct
  source 1..21: mol_type = other DNA
catctttggtgtttcctatga

SEQ ID NO: 8462 - DNA, 22 bp, synthetic construct
  source 1..22: mol_type = other DNA
tcatctttggtgtttcctatga

SEQ ID NO: 8463 - DNA, 22 bp, synthetic construct
  source 1..22: mol_type = other DNA
tcatctttggtgtttcttatga

SEQ ID NO: 8464 - DNA, 23 bp, synthetic construct
  source 1..23: mol_type = other DNA
atcatctttggtgtttcctatga

SEQ ID NO: 8465 - DNA, 23 bp, synthetic construct
  source 1..23: mol_type = other DNA
atcatctttggtgtttcttatga

SEQ ID NO: 8466 - DNA, 24 bp, synthetic construct
  source 1..24: mol_type = other DNA
tatcatctttggtgtttcctatga

SEQ ID NO: 8467 - DNA, 24 bp, synthetic construct
  source 1..24: mol_type = other DNA
tatcatctttggtgtttcttatga

SEQ ID NO: 8468 - DNA, 25 bp, synthetic construct
  source 1..25: mol_type = other DNA
atatcatctttggtgtttcttatga

SEQ ID NO: 8469 - DNA, 25 bp, synthetic construct
  source 1..25: mol_type = other DNA
atatcatctttggtgtttcctatga

SEQ ID NO: 8470 - DNA, 26 bp, synthetic construct
  source 1..26: mol_type = other DNA
aatatcatctttggtgtttcttatga

SEQ ID NO: 8471 - DNA, 26 bp, synthetic construct
  source 1..26: mol_type = other DNA
aatatcatctttggtgtttcctatga

SEQ ID NO: 8472 - DNA, 27 bp, synthetic construct
  source 1..27: mol_type = other DNA
aaatatcatctttggtgtttcttatga

SEQ ID NO: 8473 - DNA, 27 bp, synthetic construct
  source 1..27: mol_type = other DNA
aaatatcatctttggtgtttcctatga

SEQ ID NO: 8474 - DNA, 28 bp, synthetic construct
  source 1..28: mol_type = other DNA
aaaatatcatctttggtgtttcttatga

SEQ ID NO: 8475 - DNA, 28 bp, synthetic construct
  source 1..28: mol_type = other DNA
aaaatatcatctttggtgtttcctatga

SEQ ID NO: 8476 - DNA, 29 bp, synthetic construct
  source 1..29: mol_type = other DNA
gaaaatatcatctttggtgtttcctatga

SEQ ID NO: 8477 - DNA, 29 bp, synthetic construct
  source 1..29: mol_type = other DNA
gaaaatatcatctttggtgtttcttatga

SEQ ID NO: 8478 - DNA, 30 bp, synthetic construct
  source 1..30: mol_type = other DNA
agaaaatatcatctttggtgtttcttatga

SEQ ID NO: 8479 - DNA, 30 bp, synthetic construct
  source 1..30: mol_type = other DNA
agaaaatatcatctttggtgtttcctatga

SEQ ID NO: 8480 - DNA, 31 bp, synthetic construct
  source 1..31: mol_type = other DNA
aagaaaatatcatctttggtgtttcttatga

SEQ ID NO: 8481 - DNA, 31 bp, synthetic construct
  source 1..31: mol_type = other DNA
aagaaaatatcatctttggtgtttcctatga

SEQ ID NO: 8482 - DNA, 32 bp, synthetic construct
  source 1..32: mol_type = other DNA
aaagaaaatatcatctttggtgtttcctatga

SEQ ID NO: 8483 - DNA, 32 bp, synthetic construct
  source 1..32: mol_type = other DNA
aaagaaaatatcatctttggtgtttcttatga

SEQ ID NO: 8484 - DNA, 33 bp, synthetic construct
  source 1..33: mol_type = other DNA
taaagaaaatatcatctttggtgtttcctatga

SEQ ID NO: 8485 - DNA, 33 bp, synthetic construct
  source 1..33: mol_type = other DNA
taaagaaaatatcatctttggtgtttcttatga

SEQ ID NO: 8486 - DNA, 34 bp, synthetic construct
  source 1..34: mol_type = other DNA
ttaaagaaaatatcatctttggtgtttcttatga

SEQ ID NO: 8487 - DNA, 34 bp, synthetic construct
  source 1..34: mol_type = other DNA
ttaaagaaaatatcatctttggtgtttcctatga

SEQ ID NO: 8488 - DNA, 35 bp, synthetic construct
  source 1..35: mol_type = other DNA
attaaagaaaatatcatctttggtgtttcttatga

SEQ ID NO: 8489 - DNA, 35 bp, synthetic construct
  source 1..35: mol_type = other DNA
attaaagaaaatatcatctttggtgtttcctatga

SEQ ID NO: 8490 - DNA, 36 bp, synthetic construct
  source 1..36: mol_type = other DNA
cattaaagaaaatatcatctttggtgtttcctatga

SEQ ID NO: 8491 - DNA, 36 bp, synthetic construct
  source 1..36: mol_type = other DNA
cattaaagaaaatatcatctttggtgtttcttatga

SEQ ID NO: 8492 - DNA, 37 bp, synthetic construct
  source 1..37: mol_type = other DNA
ccattaaagaaaatatcatctttggtgtttcctatga

SEQ ID NO: 8493 - DNA, 37 bp, synthetic construct
  source 1..37: mol_type = other DNA
ccattaaagaaaatatcatctttggtgtttcttatga

SEQ ID NO: 8494 - DNA, 38 bp, synthetic construct
  source 1..38: mol_type = other DNA
accattaaagaaaatatcatctttggtgtttcctatga

SEQ ID NO: 8495 - DNA, 38 bp, synthetic construct
  source 1..38: mol_type = other DNA
accattaaagaaaatatcatctttggtgtttcttatga

SEQ ID NO: 8496 - DNA, 39 bp, synthetic construct
  source 1..39: mol_type = other DNA
caccattaaagaaaatatcatctttggtgtttcctatga

SEQ ID NO: 8497 - DNA, 39 bp, synthetic construct
  source 1..39: mol_type = other DNA
caccattaaagaaaatatcatctttggtgtttcttatga

SEQ ID NO: 8498 - DNA, 40 bp, synthetic construct
  source 1..40: mol_type = other DNA
gcaccattaaagaaaatatcatctttggtgtttcttatga

SEQ ID NO: 8499 - DNA, 40 bp, synthetic construct
  source 1..40: mol_type = other DNA
gcaccattaaagaaaatatcatctttggtgtttcctatga

SEQ ID NO: 8500 - DNA, 19 bp, synthetic construct
  source 1..19: mol_type = other DNA
catctttggtgtttcctat

SEQ ID NO: 8501 - DNA, 20 bp, synthetic construct
  source 1..20: mol_type = other DNA
tcatctttggtgtttcctat

SEQ ID NO: 8502 - DNA, 21 bp, synthetic construct
  source 1..21: mol_type = other DNA
atcatctttggtgtttcctat

SEQ ID NO: 8503 - DNA, 22 bp, synthetic construct
  source 1..22: mol_type = other DNA
tatcatctttggtgtttcctat

SEQ ID NO: 8504 - DNA, 23 bp, synthetic construct
  source 1..23: mol_type = other DNA
atatcatctttggtgtttcctat

SEQ ID NO: 8505 - DNA, 24 bp, synthetic construct
  source 1..24: mol_type = other DNA
aatatcatctttggtgtttcctat

SEQ ID NO: 8506 - DNA, 25 bp, synthetic construct
  source 1..25: mol_type = other DNA
aaatatcatctttggtgtttcctat

SEQ ID NO: 8507 - DNA, 26 bp, synthetic construct
  source 1..26: mol_type = other DNA
aaaatatcatctttggtgtttcctat

SEQ ID NO: 8508 - DNA, 27 bp, synthetic construct
  source 1..27: mol_type = other DNA
gaaaatatcatctttggtgtttcctat

SEQ ID NO: 8509 - DNA, 28 bp, synthetic construct
  source 1..28: mol_type = other DNA
agaaaatatcatctttggtgtttcctat

SEQ ID NO: 8510 - DNA, 29 bp, synthetic construct
  source 1..29: mol_type = other DNA
aagaaaatatcatctttggtgtttcctat

SEQ ID NO: 8511 - DNA, 30 bp, synthetic construct
  source 1..30: mol_type = other DNA
aaagaaaatatcatctttggtgtttcctat

SEQ ID NO: 8512 - DNA, 31 bp, synthetic construct
  source 1..31: mol_type = other DNA
taaagaaaatatcatctttggtgtttcctat

SEQ ID NO: 8513 - DNA, 32 bp, synthetic construct
  source 1..32: mol_type = other DNA
ttaaagaaaatatcatctttggtgtttcctat

SEQ ID NO: 8514 - DNA, 33 bp, synthetic construct
  source 1..33: mol_type = other DNA
attaaagaaaatatcatctttggtgtttcctat

SEQ ID NO: 8515 - DNA, 34 bp, synthetic construct
  source 1..34: mol_type = other DNA
cattaaagaaaatatcatctttggtgtttcctat

SEQ ID NO: 8516 - DNA, 35 bp, synthetic construct
  source 1..35: mol_type = other DNA
ccattaaagaaaatatcatctttggtgtttcctat

SEQ ID NO: 8517 - DNA, 36 bp, synthetic construct
  source 1..36: mol_type = other DNA
accattaaagaaaatatcatctttggtgtttcctat

SEQ ID NO: 8518 - DNA, 37 bp, synthetic construct
  source 1..37: mol_type = other DNA
caccattaaagaaaatatcatctttggtgtttcctat

SEQ ID NO: 8519 - DNA, 38 bp, synthetic construct
  source 1..38: mol_type = other DNA
gcaccattaaagaaaatatcatctttggtgtttcctat

SEQ ID NO: 8520 - DNA, 39 bp, synthetic construct
  source 1..39: mol_type = other DNA
ggcaccattaaagaaaatatcatctttggtgtttcctat

SEQ ID NO: 8521 - DNA, 40 bp, synthetic construct
  source 1..40: mol_type = other DNA
tggcaccattaaagaaaatatcatctttggtgtttcctat

SEQ ID NO: 8522 - DNA, 17 bp, synthetic construct
  source 1..17: mol_type = other DNA
agatgatattttcttta

SEQ ID NO: 8523 - DNA, 18 bp, synthetic construct
  source 1..18: mol_type = other DNA
aagatgatattttcttta

SEQ ID NO: 8524 - DNA, 19 bp, synthetic construct
  source 1..19: mol_type = other DNA
aaagatgatattttcttta

SEQ ID NO: 8525 - DNA, 20 bp, synthetic construct
  source 1..20: mol_type = other DNA
caaagatgatattttcttta

SEQ ID NO: 8526 - DNA, 21 bp, synthetic construct
  source 1..21: mol_type = other DNA
ccaaagatgatattttcttta

SEQ ID NO: 8527 - DNA, 22 bp, synthetic construct
  source 1..22: mol_type = other DNA
accaaagatgatattttcttta

SEQ ID NO: 8528 - DNA, 23 bp, synthetic construct
  source 1..23: mol_type = other DNA
caccaaagatgatattttcttta

SEQ ID NO: 8529 - DNA, 24 bp, synthetic construct
  source 1..24: mol_type = other DNA
acaccaaagatgatattttcttta

SEQ ID NO: 8530 - DNA, 25 bp, synthetic construct
  source 1..25: mol_type = other DNA
aacaccaaagatgatattttcttta

SEQ ID NO: 8531 - DNA, 26 bp, synthetic construct
  source 1..26: mol_type = other DNA
aaacaccaaagatgatattttcttta

SEQ ID NO: 8532 - DNA, 27 bp, synthetic construct
  source 1..27: mol_type = other DNA
gaaacaccaaagatgatattttcttta

SEQ ID NO: 8533 - DNA, 28 bp, synthetic construct
  source 1..28: mol_type = other DNA
ggaaacaccaaagatgatattttcttta

SEQ ID NO: 8534 - DNA, 29 bp, synthetic construct
  source 1..29: mol_type = other DNA
aggaaacaccaaagatgatattttcttta

SEQ ID NO: 8535 - DNA, 30 bp, synthetic construct
  source 1..30: mol_type = other DNA
taggaaacaccaaagatgatattttcttta

SEQ ID NO: 8536 - DNA, 31 bp, synthetic construct
  source 1..31: mol_type = other DNA
ataggaaacaccaaagatgatattttcttta

SEQ ID NO: 8537 - DNA, 32 bp, synthetic construct
  source 1..32: mol_type = other DNA
cataggaaacaccaaagatgatattttcttta

SEQ ID NO: 8538 - DNA, 33 bp, synthetic construct
  source 1..33: mol_type = other DNA
tcataggaaacaccaaagatgatattttcttta

SEQ ID NO: 8539 - DNA, 34 bp, synthetic construct
  source 1..34: mol_type = other DNA
atcataggaaacaccaaagatgatattttcttta

SEQ ID NO: 8540 - DNA, 35 bp, synthetic construct
  source 1..35: mol_type = other DNA
catcataggaaacaccaaagatgatattttcttta

SEQ ID NO: 8541 - DNA, 36 bp, synthetic construct
  source 1..36: mol_type = other DNA
tcatcataggaaacaccaaagatgatattttcttta

SEQ ID NO: 8542 - DNA, 37 bp, synthetic construct
  source 1..37: mol_type = other DNA
ttcatcataggaaacaccaaagatgatattttcttta

SEQ ID NO: 8543 - DNA, 38 bp, synthetic construct
  source 1..38: mol_type = other DNA
attcatcataggaaacaccaaagatgatattttcttta

SEQ ID NO: 8544 - DNA, 39 bp, synthetic construct
  source 1..39: mol_type = other DNA
tattcatcataggaaacaccaaagatgatattttcttta

SEQ ID NO: 8545 - DNA, 40 bp, synthetic construct
  source 1..40: mol_type = other DNA
atattcatcataggaaacaccaaagatgatattttcttta

SEQ ID NO: 8546 - DNA, 10 bp, synthetic construct
  source 1..10: mol_type = other DNA
tcatctttgg

SEQ ID NO: 8547 - DNA, 10 bp, synthetic construct
  source 1..10: mol_type = other DNA
tcatttttgg

SEQ ID NO: 8548 - DNA, 11 bp, synthetic construct
  source 1..11: mol_type = other DNA
atcatttttgg

SEQ ID NO: 8549 - DNA, 11 bp, synthetic construct
  source 1..11: mol_type = other DNA
atcatctttgg

SEQ ID NO: 8550 - DNA, 12 bp, synthetic construct
  source 1..12: mol_type = other DNA
tatcatttttgg

SEQ ID NO: 8551 - DNA, 12 bp, synthetic construct
  source 1..12: mol_type = other DNA
tatcatctttgg

SEQ ID NO: 8552 - DNA, 13 bp, synthetic construct
  source 1..13: mol_type = other DNA
atatcatctttgg

SEQ ID NO: 8553 - DNA, 13 bp, synthetic construct
  source 1..13: mol_type = other DNA
atatcatttttgg

SEQ ID NO: 8554 - DNA, 14 bp, synthetic construct
  source 1..14: mol_type = other DNA
aatatcatttttgg

SEQ ID NO: 8555 - DNA, 14 bp, synthetic construct
  source 1..14: mol_type = other DNA
aatatcatctttgg

SEQ ID NO: 8556 - DNA, 15 bp, synthetic construct
  source 1..15: mol_type = other DNA
aaatatcatttttgg

SEQ ID NO: 8557 - DNA, 15 bp, synthetic construct
  source 1..15: mol_type = other DNA
aaatatcatctttgg

SEQ ID NO: 8558 - DNA, 16 bp, synthetic construct
  source 1..16: mol_type = other DNA
aaaatatcatctttgg

SEQ ID NO: 8559 - DNA, 16 bp, synthetic construct
  source 1..16: mol_type = other DNA
aaaatatcatttttgg

SEQ ID NO: 8560 - DNA, 17 bp, synthetic construct
  source 1..17: mol_type = other DNA
gaaaatatcatctttgg

SEQ ID NO: 8561 - DNA, 17 bp, synthetic construct
  source 1..17: mol_type = other DNA
gaaaatatcatttttgg

SEQ ID NO: 8562 - DNA, 18 bp, synthetic construct
  source 1..18: mol_type = other DNA
agaaaatatcatttttgg

SEQ ID NO: 8563 - DNA, 18 bp, synthetic construct
  source 1..18: mol_type = other DNA
agaaaatatcatctttgg

SEQ ID NO: 8564 - DNA, 19 bp, synthetic construct
  source 1..19: mol_type = other DNA
aagaaaatatcatttttgg

SEQ ID NO: 8565 - DNA, 19 bp, synthetic construct
  source 1..19: mol_type = other DNA
aagaaaatatcatctttgg

SEQ ID NO: 8566 - DNA, 20 bp, synthetic construct
  source 1..20: mol_type = other DNA
aaagaaaatatcatctttgg

SEQ ID NO: 8567 - DNA, 20 bp, synthetic construct
  source 1..20: mol_type = other DNA
aaagaaaatatcatttttgg

SEQ ID NO: 8568 - DNA, 21 bp, synthetic construct
  source 1..21: mol_type = other DNA
taaagaaaatatcatttttgg

SEQ ID NO: 8569 - DNA, 21 bp, synthetic construct
  source 1..21: mol_type = other DNA
taaagaaaatatcatctttgg

SEQ ID NO: 8570 - DNA, 22 bp, synthetic construct
  source 1..22: mol_type = other DNA
ttaaagaaaatatcatttttgg

SEQ ID NO: 8571 - DNA, 22 bp, synthetic construct
  source 1..22: mol_type = other DNA
ttaaagaaaatatcatctttgg

SEQ ID NO: 8572 - DNA, 23 bp, synthetic construct
  source 1..23: mol_type = other DNA
attaaagaaaatatcatttttgg

SEQ ID NO: 8573 - DNA, 23 bp, synthetic construct
  source 1..23: mol_type = other DNA
attaaagaaaatatcatctttgg

SEQ ID NO: 8574 - DNA, 24 bp, synthetic construct
  source 1..24: mol_type = other DNA
cattaaagaaaatatcatttttgg

SEQ ID NO: 8575 - DNA, 24 bp, synthetic construct
  source 1..24: mol_type = other DNA
cattaaagaaaatatcatctttgg

SEQ ID NO: 8576 - DNA, 25 bp, synthetic construct
  source 1..25: mol_type = other DNA
ccattaaagaaaatatcatctttgg

SEQ ID NO: 8577 - DNA, 25 bp, synthetic construct
  source 1..25: mol_type = other DNA
ccattaaagaaaatatcatttttgg

SEQ ID NO: 8578 - DNA, 26 bp, synthetic construct
  source 1..26: mol_type = other DNA
accattaaagaaaatatcatttttgg

SEQ ID NO: 8579 - DNA, 26 bp, synthetic construct
  source 1..26: mol_type = other DNA
accattaaagaaaatatcatctttgg

SEQ ID NO: 8580 - DNA, 27 bp, synthetic construct
  source 1..27: mol_type = other DNA
caccattaaagaaaatatcatttttgg

SEQ ID NO: 8581 - DNA, 27 bp, synthetic construct
  source 1..27: mol_type = other DNA
caccattaaagaaaatatcatctttgg

SEQ ID NO: 8582 - DNA, 28 bp, synthetic construct
  source 1..28: mol_type = other DNA
gcaccattaaagaaaatatcatttttgg

SEQ ID NO: 8583 - DNA, 28 bp, synthetic construct
  source 1..28: mol_type = other DNA
gcaccattaaagaaaatatcatctttgg

SEQ ID NO: 8584 - DNA, 29 bp, synthetic construct
  source 1..29: mol_type = other DNA
ggcaccattaaagaaaatatcatctttgg

SEQ ID NO: 8585 - DNA, 29 bp, synthetic construct
  source 1..29: mol_type = other DNA
ggcaccattaaagaaaatatcatttttgg

SEQ ID NO: 8586 - DNA, 30 bp, synthetic construct
  source 1..30: mol_type = other DNA
tggcaccattaaagaaaatatcatctttgg

SEQ ID NO: 8587 - DNA, 30 bp, synthetic construct
  source 1..30: mol_type = other DNA
tggcaccattaaagaaaatatcatttttgg

SEQ ID NO: 8588 - DNA, 31 bp, synthetic construct
  source 1..31: mol_type = other DNA
ctggcaccattaaagaaaatatcatctttgg

SEQ ID NO: 8589 - DNA, 31 bp, synthetic construct
  source 1..31: mol_type = other DNA
ctggcaccattaaagaaaatatcatttttgg

SEQ ID NO: 8590 - DNA, 32 bp, synthetic construct
  source 1..32: mol_type = other DNA
cctggcaccattaaagaaaatatcatctttgg

SEQ ID NO: 8591 - DNA, 32 bp, synthetic construct
  source 1..32: mol_type = other DNA
cctggcaccattaaagaaaatatcatttttgg

SEQ ID NO: 8592 - DNA, 33 bp, synthetic construct
  source 1..33: mol_type = other DNA
gcctggcaccattaaagaaaatatcatttttgg

SEQ ID NO: 8593 - DNA, 33 bp, synthetic construct
  source 1..33: mol_type = other DNA
gcctggcaccattaaagaaaatatcatctttgg

SEQ ID NO: 8594 - DNA, 34 bp, synthetic construct
  source 1..34: mol_type = other DNA
tgcctggcaccattaaagaaaatatcatctttgg

SEQ ID NO: 8595 - DNA, 34 bp, synthetic construct
  source 1..34: mol_type = other DNA
tgcctggcaccattaaagaaaatatcatttttgg

SEQ ID NO: 8596 - DNA, 35 bp, synthetic construct
  source 1..35: mol_type = other DNA
atgcctggcaccattaaagaaaatatcatttttgg

SEQ ID NO: 8597 - DNA, 35 bp, synthetic construct
  source 1..35: mol_type = other DNA
atgcctggcaccattaaagaaaatatcatctttgg

SEQ ID NO: 8598 - DNA, 36 bp, synthetic construct
  source 1..36: mol_type = other DNA
tatgcctggcaccattaaagaaaatatcatctttgg

SEQ ID NO: 8599 - DNA, 36 bp, synthetic construct
  source 1..36: mol_type = other DNA
tatgcctggcaccattaaagaaaatatcatttttgg

SEQ ID NO: 8600 - DNA, 37 bp, synthetic construct
  source 1..37: mol_type = other DNA
ttatgcctggcaccattaaagaaaatatcatctttgg

SEQ ID NO: 8601 - DNA, 37 bp, synthetic construct
  source 1..37: mol_type = other DNA
ttatgcctggcaccattaaagaaaatatcatttttgg

SEQ ID NO: 8602 - DNA, 38 bp, synthetic construct
  source 1..38: mol_type = other DNA
attatgcctggcaccattaaagaaaatatcatctttgg

SEQ ID NO: 8603 - DNA, 38 bp, synthetic construct
  source 1..38: mol_type = other DNA
attatgcctggcaccattaaagaaaatatcatttttgg

SEQ ID NO: 8604 - DNA, 39 bp, synthetic construct
  source 1..39: mol_type = other DNA
gattatgcctggcaccattaaagaaaatatcatttttgg

SEQ ID NO: 8605 - DNA, 39 bp, synthetic construct
  source 1..39: mol_type = other DNA
gattatgcctggcaccattaaagaaaatatcatctttgg

SEQ ID NO: 8606 - DNA, 40 bp, synthetic construct
  source 1..40: mol_type = other DNA
ggattatgcctggcaccattaaagaaaatatcatctttgg

SEQ ID NO: 8607 - DNA, 40 bp, synthetic construct
  source 1..40: mol_type = other DNA
ggattatgcctggcaccattaaagaaaatatcatttttgg

SEQ ID NO: 8608 - DNA, 33 bp, synthetic construct
  source 1..33: mol_type = other DNA
agatgatattttctttaatggtgccaggcataa

SEQ ID NO: 8609 - DNA, 34 bp, synthetic construct
  source 1..34: mol_type = other DNA
aagatgatattttctttaatggtgccaggcataa

SEQ ID NO: 8610 - DNA, 35 bp, synthetic construct
  source 1..35: mol_type = other DNA
aaagatgatattttctttaatggtgccaggcataa

SEQ ID NO: 8611 - DNA, 36 bp, synthetic construct
  source 1..36: mol_type = other DNA
caaagatgatattttctttaatggtgccaggcataa

SEQ ID NO: 8612 - DNA, 37 bp, synthetic construct
  source 1..37: mol_type = other DNA
ccaaagatgatattttctttaatggtgccaggcataa

SEQ ID NO: 8613 - DNA, 38 bp, synthetic construct
  source 1..38: mol_type = other DNA
accaaagatgatattttctttaatggtgccaggcataa

SEQ ID NO: 8614 - DNA, 39 bp, synthetic construct
  source 1..39: mol_type = other DNA
caccaaagatgatattttctttaatggtgccaggcataa

SEQ ID NO: 8615 - DNA, 40 bp, synthetic construct
  source 1..40: mol_type = other DNA
acaccaaagatgatattttctttaatggtgccaggcataa

SEQ ID NO: 8616 - DNA, 39 bp, synthetic construct
  source 1..39: mol_type = other DNA
agatgatattttctttaatggtgccaggcataatccagg

SEQ ID NO: 8617 - DNA, 40 bp, synthetic construct
  source 1..40: mol_type = other DNA
aagatgatattttctttaatggtgccaggcataatccagg

SEQ ID NO: 8618 - DNA, 31 bp, synthetic construct; identical to SEQ ID NO: 8210
  source 1..31: mol_type = other DNA

SEQ ID NO: 8619 - DNA, 32 bp, synthetic construct; identical to SEQ ID NO: 8211
  source 1..32: mol_type = other DNA

SEQ ID NO: 8620 - DNA, 33 bp, synthetic construct; identical to SEQ ID NO: 8212
  source 1..33: mol_type = other DNA

SEQ ID NO: 8621 - DNA, 34 bp, synthetic construct; identical to SEQ ID NO: 8213
  source 1..34: mol_type = other DNA

SEQ ID NO: 8622 - DNA, 35 bp, synthetic construct; identical to SEQ ID NO: 8214
  source 1..35: mol_type = other DNA

SEQ ID NO: 8623 - DNA, 36 bp, synthetic construct; identical to SEQ ID NO: 8215
  source 1..36: mol_type = other DNA

SEQ ID NO: 8624 - DNA, 37 bp, synthetic construct; identical to SEQ ID NO: 8216
  source 1..37: mol_type = other DNA

SEQ ID NO: 8625 - DNA, 38 bp, synthetic construct; identical to SEQ ID NO: 8217
  source 1..38: mol_type = other DNA

SEQ ID NO: 8626 - DNA, 39 bp, synthetic construct; identical to SEQ ID NO: 8218
  source 1..39: mol_type = other DNA

SEQ ID NO: 8627 - DNA, 40 bp, synthetic construct; identical to SEQ ID NO: 8219
  source 1..40: mol_type = other DNA

SEQ ID NO: 8628 - DNA, 30 bp, synthetic construct; identical to SEQ ID NO: 8222
  source 1..30: mol_type = other DNA

SEQ ID NO: 8629 - DNA, 31 bp, synthetic construct; identical to SEQ ID NO: 8223
  source 1..31: mol_type = other DNA

SEQ ID NO: 8630 - DNA, 32 bp, synthetic construct; identical to SEQ ID NO: 8224
  source 1..32: mol_type = other DNA

SEQ ID NO: 8631 - DNA, 33 bp, synthetic construct; identical to SEQ ID NO: 8225
  source 1..33: mol_type = other DNA

SEQ ID NO: 8632 - DNA, 34 bp, synthetic construct; identical to SEQ ID NO: 8226
  source 1..34: mol_type = other DNA

SEQ ID NO: 8633 - DNA, 35 bp, synthetic construct; identical to SEQ ID NO: 8227
  source 1..35: mol_type = other DNA

SEQ ID NO: 8634 - DNA, 36 bp, synthetic construct; identical to SEQ ID NO: 8228
  source 1..36: mol_type = other DNA

SEQ ID NO: 8635 - DNA, 37 bp, synthetic construct; identical to SEQ ID NO: 8229
  source 1..37: mol_type = other DNA

SEQ ID NO: 8636 - DNA, 38 bp, synthetic construct; identical to SEQ ID NO: 8230
  source 1..38: mol_type = other DNA

SEQ ID NO: 8637 - DNA, 39 bp, synthetic construct; identical to SEQ ID NO: 8231
  source 1..39: mol_type = other DNA

SEQ ID NO: 8638 - DNA, 40 bp, synthetic construct; identical to SEQ ID NO: 8232
  source 1..40: mol_type = other DNA

SEQ ID NO: 8639 - DNA, 10 bp, synthetic construct
  source 1..10: mol_type = other DNA
aacaccaaag

SEQ ID NO: 8640 - DNA, 11 bp, synthetic construct
  source 1..11: mol_type = other DNA
aaacaccaaag

SEQ ID NO: 8641 - DNA, 12 bp, synthetic construct
  source 1..12: mol_type = other DNA
gaaacaccaaag

SEQ ID NO: 8642 - DNA, 13 bp, synthetic construct
  source 1..13: mol_type = other DNA
ggaaacaccaaag

SEQ ID NO: 8643 - DNA, 14 bp, synthetic construct
  source 1..14: mol_type = other DNA
aggaaacaccaaag

SEQ ID NO: 8644 - DNA, 15 bp, synthetic construct
  source 1..15: mol_type = other DNA
taggaaacaccaaag

SEQ ID NO: 8645 - DNA, 16 bp, synthetic construct
  source 1..16: mol_type = other DNA
ataggaaacaccaaag

SEQ ID NO: 8646 - DNA, 17 bp, synthetic construct
  source 1..17: mol_type = other DNA
cataggaaacaccaaag

SEQ ID NO: 8647 - DNA, 18 bp, synthetic construct
  source 1..18: mol_type = other DNA
tcataggaaacaccaaag

SEQ ID NO: 8648 - DNA, 19 bp, synthetic construct
  source 1..19: mol_type = other DNA
atcataggaaacaccaaag

SEQ ID NO: 8649 - DNA, 20 bp, synthetic construct
  source 1..20: mol_type = other DNA
catcataggaaacaccaaag

SEQ ID NO: 8650 - DNA, 21 bp, synthetic construct
  source 1..21: mol_type = other DNA
tcatcataggaaacaccaaag

SEQ ID NO: 8651 - DNA, 22 bp, synthetic construct
  source 1..22: mol_type = other DNA
ttcatcataggaaacaccaaag

SEQ ID NO: 8652 - DNA, 23 bp, synthetic construct
  source 1..23: mol_type = other DNA
attcatcataggaaacaccaaag

SEQ ID NO: 8653 - DNA, 24 bp, synthetic construct
  source 1..24: mol_type = other DNA
tattcatcataggaaacaccaaag

SEQ ID NO: 8654 - DNA, 25 bp, synthetic construct
  source 1..25: mol_type = other DNA
atattcatcataggaaacaccaaag

SEQ ID NO: 8655 - DNA, 26 bp, synthetic construct
  source 1..26: mol_type = other DNA
tatattcatcataggaaacaccaaag

SEQ ID NO: 8656 - DNA, 27 bp, synthetic construct
  source 1..27: mol_type = other DNA
ctatattcatcataggaaacaccaaag

SEQ ID NO: 8657 - DNA, 28 bp, synthetic construct
  source 1..28: mol_type = other DNA
tctatattcatcataggaaacaccaaag

SEQ ID NO: 8658 - DNA, 29 bp, synthetic construct
  source 1..29: mol_type = other DNA
atctatattcatcataggaaacaccaaag

SEQ ID NO: 8659 - DNA, 30 bp, synthetic construct
  source 1..30: mol_type = other DNA
tatctatattcatcataggaaacaccaaag

SEQ ID NO: 8660 - DNA, 31 bp, synthetic construct
  source 1..31: mol_type = other DNA
gtatctatattcatcataggaaacaccaaag

SEQ ID NO: 8661 - DNA, 32 bp, synthetic construct
  source 1..32: mol_type = other DNA
tgtatctatattcatcataggaaacaccaaag

SEQ ID NO: 8662 - DNA, 33 bp, synthetic construct
  source 1..33: mol_type = other DNA
ctgtatctatattcatcataggaaacaccaaag

SEQ ID NO: 8663 - DNA, 34 bp, synthetic construct
  source 1..34: mol_type = other DNA
tctgtatctatattcatcataggaaacaccaaag

SEQ ID NO: 8664 - DNA, 35 bp, synthetic construct
  source 1..35: mol_type = other DNA
ttctgtatctatattcatcataggaaacaccaaag

SEQ ID NO: 8665 - DNA, 36 bp, synthetic construct
  source 1..36: mol_type = other DNA
cttctgtatctatattcatcataggaaacaccaaag

SEQ ID NO: 8666 - DNA, 37 bp, synthetic construct
  source 1..37: mol_type = other DNA
gcttctgtatctatattcatcataggaaacaccaaag

SEQ ID NO: 8667 - DNA, 38 bp, synthetic construct
  source 1..38: mol_type = other DNA
cgcttctgtatctatattcatcataggaaacaccaaag

SEQ ID NO: 8668 - DNA, 39 bp, synthetic construct
  source 1..39: mol_type = other DNA
acgcttctgtatctatattcatcataggaaacaccaaag

SEQ ID NO: 8669 - DNA, 40 bp, synthetic construct
  source 1..40: mol_type = other DNA
gacgcttctgtatctatattcatcataggaaacaccaaag

SEQ ID NO: 8670 - DNA, 20 bp, synthetic construct
  source 1..20: mol_type = other DNA
aaagatgatattttccttaa

SEQ ID NO: 8671 - DNA, 20 bp, synthetic construct
  source 1..20: mol_type = other DNA
aaagatgatattttctttaa

SEQ ID NO: 8672 - DNA, 21 bp, synthetic construct
  source 1..21: mol_type = other DNA
caaagatgatattttctttaa

SEQ ID NO: 8673 - DNA, 21 bp, synthetic construct
  source 1..21: mol_type = other DNA
caaagatgatattttccttaa

SEQ ID NO: 8674 - DNA, 22 bp, synthetic construct
  source 1..22: mol_type = other DNA
ccaaagatgatattttctttaa

SEQ ID NO: 8675 - DNA, 22 bp, synthetic construct
  source 1..22: mol_type = other DNA
ccaaagatgatattttccttaa

SEQ ID NO: 8676 - DNA, 23 bp, synthetic construct
  source 1..23: mol_type = other DNA
accaaagatgatattttccttaa

SEQ ID NO: 8677 - DNA, 23 bp, synthetic construct
  source 1..23: mol_type = other DNA
accaaagatgatattttctttaa

SEQ ID NO: 8678 - DNA, 24 bp, synthetic construct
  source 1..24: mol_type = other DNA
caccaaagatgatattttccttaa

SEQ ID NO: 8679 - DNA, 24 bp, synthetic construct
  source 1..24: mol_type = other DNA
caccaaagatgatattttctttaa

SEQ ID NO: 8680 - DNA, 25 bp, synthetic construct
  source 1..25: mol_type = other DNA
acaccaaagatgatattttccttaa

SEQ ID NO: 8681 - DNA, 25 bp, synthetic construct
  source 1..25: mol_type = other DNA
acaccaaagatgatattttctttaa

SEQ ID NO: 8682 - DNA, 26 bp, synthetic construct
  source 1..26: mol_type = other DNA
aacaccaaagatgatattttctttaa

SEQ ID NO: 8683 - DNA, 26 bp, synthetic construct
  source 1..26: mol_type = other DNA
aacaccaaagatgatattttccttaa

SEQ ID NO: 8684 - DNA, 27 bp, synthetic construct
  source 1..27: mol_type = other DNA
aaacaccaaagatgatattttccttaa

SEQ ID NO: 8685 - DNA, 27 bp, synthetic construct
  source 1..27: mol_type = other DNA
aaacaccaaagatgatattttctttaa

SEQ ID NO: 8686 - DNA, 28 bp, synthetic construct
  source 1..28: mol_type = other DNA
gaaacaccaaagatgatattttccttaa

SEQ ID NO: 8687 - DNA, 28 bp, synthetic construct
  source 1..28: mol_type = other DNA
gaaacaccaaagatgatattttctttaa

SEQ ID NO: 8688 - DNA, 29 bp, synthetic construct
  source 1..29: mol_type = other DNA
ggaaacaccaaagatgatattttctttaa

SEQ ID NO: 8689 - DNA, 29 bp, synthetic construct
  source 1..29: mol_type = other DNA
ggaaacaccaaagatgatattttccttaa

SEQ ID NO: 8690 - DNA, 30 bp, synthetic construct; identical to SEQ ID NO: 8257
  source 1..30: mol_type = other DNA

SEQ ID NO: 8691 - DNA, 30 bp, synthetic construct; identical to SEQ ID NO: 8258
  source 1..30: mol_type = other DNA

SEQ ID NO: 8692 - DNA, 31 bp, synthetic construct; identical to SEQ ID NO: 8259
  source 1..31: mol_type = other DNA

SEQ ID NO: 8693 - DNA, 31 bp, synthetic construct; identical to SEQ ID NO: 8260
  source 1..31: mol_type = other DNA

SEQ ID NO: 8694 - DNA, 32 bp, synthetic construct; identical to SEQ ID NO: 8261
  source 1..32: mol_type = other DNA

SEQ ID NO: 8695 - DNA, 32 bp, synthetic construct; identical to SEQ ID NO: 8262
  source 1..32: mol_type = other DNA

SEQ ID NO: 8696 - DNA, 33 bp, synthetic construct; identical to SEQ ID NO: 8264
  source 1..33: mol_type = other DNA

SEQ ID NO: 8697 - DNA, 33 bp, synthetic construct; identical to SEQ ID NO: 8263
  source 1..33: mol_type = other DNA

SEQ ID NO: 8698 - DNA, 34 bp, synthetic construct; identical to SEQ ID NO: 8265
  source 1..34: mol_type = other DNA

SEQ ID NO: 8699 - DNA, 34 bp, synthetic construct; identical to SEQ ID NO: 8266
  source 1..34: mol_type = other DNA

SEQ ID NO: 8700 - DNA, 35 bp, synthetic construct; identical to SEQ ID NO: 8267
  source 1..35: mol_type = other DNA

SEQ ID NO: 8701 - DNA, 35 bp, synthetic construct; identical to SEQ ID NO: 8268
  source 1..35: mol_type = other DNA

SEQ ID NO: 8702 - DNA, 36 bp, synthetic construct; identical to SEQ ID NO: 8269
  source 1..36: mol_type = other DNA

SEQ ID NO: 8703 - DNA, 36 bp, synthetic construct; identical to SEQ ID NO: 8270
  source 1..36: mol_type = other DNA

SEQ ID NO: 8704 - DNA, 37 bp, synthetic construct; identical to SEQ ID NO: 8271
  source 1..37: mol_type = other DNA

SEQ ID NO: 8705 - DNA, 37 bp, synthetic construct; identical to SEQ ID NO: 8272
  source 1..37: mol_type = other DNA

SEQ ID NO: 8706 - DNA, 38 bp, synthetic construct; identical to SEQ ID NO: 8274
  source 1..38: mol_type = other DNA

SEQ ID NO: 8707 - DNA, 38 bp, synthetic construct; identical to SEQ ID NO: 8273
  source 1..38: mol_type = other DNA

SEQ ID NO: 8708 - DNA, 39 bp, synthetic construct; identical to SEQ ID NO: 8275
  source 1..39: mol_type = other DNA

SEQ ID NO: 8709 - DNA, 39 bp, synthetic construct; identical to SEQ ID NO: 8276
  source 1..39: mol_type = other DNA

SEQ ID NO: 8710 - DNA, 40 bp, synthetic construct; identical to SEQ ID NO: 8278
  source 1..40: mol_type = other DNA

SEQ ID NO: 8711 - DNA, 40 bp, synthetic construct; identical to SEQ ID NO: 8277
  source 1..40: mol_type = other DNA

SEQ ID NO: 8712 - DNA, 10 bp, synthetic construct
  source 1..10: mol_type = other DNA
ccaaagatga

SEQ ID NO: 8713 - DNA, 11 bp, synthetic construct
  source 1..11: mol_type = other DNA
accaaagatga

SEQ ID NO: 8714 - DNA, 12 bp, synthetic construct
  source 1..12: mol_type = other DNA
caccaaagatga

SEQ ID NO: 8715 - DNA, 13 bp, synthetic construct
  source 1..13: mol_type = other DNA
acaccaaagatga

SEQ ID NO: 8716 - DNA, 14 bp, synthetic construct
  source 1..14: mol_type = other DNA
aacaccaaagatga

SEQ ID NO: 8717 - DNA, 15 bp, synthetic construct
  source 1..15: mol_type = other DNA
aaacaccaaagatga

SEQ ID NO: 8718 - DNA, 16 bp, synthetic construct
  source 1..16: mol_type = other DNA
gaaacaccaaagatga

SEQ ID NO: 8719 - DNA, 17 bp, synthetic construct
  source 1..17: mol_type = other DNA
ggaaacaccaaagatga

SEQ ID NO: 8720 - DNA, 18 bp, synthetic construct
  source 1..18: mol_type = other DNA
aggaaacaccaaagatga

SEQ ID NO: 8721 - DNA, 19 bp, synthetic construct
  source 1..19: mol_type = other DNA
taggaaacaccaaagatga

SEQ ID NO: 8722 - DNA, 20 bp, synthetic construct
  source 1..20: mol_type = other DNA
ataggaaacaccaaagatga

SEQ ID NO: 8723 - DNA, 21 bp, synthetic construct
  source 1..21: mol_type = other DNA
cataggaaacaccaaagatga

SEQ ID NO: 8724 - DNA, 22 bp, synthetic construct
  source 1..22: mol_type = other DNA
tcataggaaacaccaaagatga

SEQ ID NO: 8725 - DNA, 23 bp, synthetic construct
  source 1..23: mol_type = other DNA
atcataggaaacaccaaagatga

SEQ ID NO: 8726 - DNA, 24 bp, synthetic construct
  source 1..24: mol_type = other DNA
catcataggaaacaccaaagatga

SEQ ID NO: 8727 - DNA, 25 bp, synthetic construct
  source 1..25: mol_type = other DNA
tcatcataggaaacaccaaagatga

SEQ ID NO: 8728 - DNA, 26 bp, synthetic construct
  source 1..26: mol_type = other DNA
ttcatcataggaaacaccaaagatga

SEQ ID NO: 8729 - DNA, 27 bp, synthetic construct
  source 1..27: mol_type = other DNA
attcatcataggaaacaccaaagatga

SEQ ID NO: 8730 - DNA, 28 bp, synthetic construct
  source 1..28: mol_type = other DNA
tattcatcataggaaacaccaaagatga

SEQ ID NO: 8731 - DNA, 29 bp, synthetic construct
  source 1..29: mol_type = other DNA
atattcatcataggaaacaccaaagatga

SEQ ID NO: 8732 - DNA, 30 bp, synthetic construct; identical to SEQ ID NO: 8300
  source 1..30: mol_type = other DNA

SEQ ID NO: 8733 - DNA, 31 bp, synthetic construct; identical to SEQ ID NO: 8301
  source 1..31: mol_type = other DNA

SEQ ID NO: 8734 - DNA, 32 bp, synthetic construct; identical to SEQ ID NO: 8302
  source 1..32: mol_type = other DNA

SEQ ID NO: 8735 - DNA, 33 bp, synthetic construct; identical to SEQ ID NO: 8303
  source 1..33: mol_type = other DNA

SEQ ID NO: 8736 - DNA, 34 bp, synthetic construct; identical to SEQ ID NO: 8304
  source 1..34: mol_type = other DNA

SEQ ID NO: 8737 - DNA, 35 bp, synthetic construct; identical to SEQ ID NO: 8305
  source 1..35: mol_type = other DNA

SEQ ID NO: 8738 - DNA, 36 bp, synthetic construct; identical to SEQ ID NO: 8306
  source 1..36: mol_type = other DNA

SEQ ID NO: 8739 - DNA, 37 bp, synthetic construct; identical to SEQ ID NO: 8307
  source 1..37: mol_type = other DNA

SEQ ID NO: 8740 - DNA, 38 bp, synthetic construct; identical to SEQ ID NO: 8308
  source 1..38: mol_type = other DNA

SEQ ID NO: 8741 - DNA, 39 bp, synthetic construct; identical to SEQ ID NO: 8309
  source 1..39: mol_type = other DNA

SEQ ID NO: 8742 - DNA, 40 bp, synthetic construct; identical to SEQ ID NO: 8310
  source 1..40: mol_type = other DNA

SEQ ID NO: 8743 - DNA, 10 bp, synthetic construct
  source 1..10: mol_type = other DNA
accaaagatg

SEQ ID NO: 8744 - DNA, 11 bp, synthetic construct
  source 1..11: mol_type = other DNA
caccaaagatg

SEQ ID NO: 8745 - DNA, 12 bp, synthetic construct
  source 1..12: mol_type = other DNA
acaccaaagatg

SEQ ID NO: 8746 - DNA, 13 bp, synthetic construct
  source 1..13: mol_type = other DNA
aacaccaaagatg

SEQ ID NO: 8747 - DNA, 14 bp, synthetic construct
  source 1..14: mol_type = other DNA
aaacaccaaagatg

SEQ ID NO: 8748 - DNA, 15 bp, synthetic construct
  source 1..15: mol_type = other DNA
gaaacaccaaagatg

SEQ ID NO: 8749 - DNA, 16 bp, synthetic construct
  source 1..16: mol_type = other DNA
ggaaacaccaaagatg

SEQ ID NO: 8750 - DNA, 17 bp, synthetic construct
  source 1..17: mol_type = other DNA
aggaaacaccaaagatg

SEQ ID NO: 8751 - DNA, 18 bp, synthetic construct
  source 1..18: mol_type = other DNA
taggaaacaccaaagatg

SEQ ID NO: 8752 - DNA, 19 bp, synthetic construct
  source 1..19: mol_type = other DNA
ataggaaacaccaaagatg

SEQ ID NO: 8753 - DNA, 20 bp, synthetic construct
  source 1..20: mol_type = other DNA
cataggaaacaccaaagatg

SEQ ID NO: 8754 - DNA, 21 bp, synthetic construct
  source 1..21: mol_type = other DNA
tcataggaaacaccaaagatg

SEQ ID NO: 8755 - DNA, 22 bp, synthetic construct
  source 1..22: mol_type = other DNA
atcataggaaacaccaaagatg

SEQ ID NO: 8756 - DNA, 23 bp, synthetic construct
  source 1..23: mol_type = other DNA
catcataggaaacaccaaagatg

SEQ ID NO: 8757 - DNA, 24 bp, synthetic construct
  source 1..24: mol_type = other DNA
tcatcataggaaacaccaaagatg

SEQ ID NO: 8758 - DNA, 25 bp, synthetic construct
  source 1..25: mol_type = other DNA
ttcatcataggaaacaccaaagatg

SEQ ID NO: 8759 - DNA, 26 bp, synthetic construct
  source 1..26: mol_type = other DNA
attcatcataggaaacaccaaagatg

SEQ ID NO: 8760 - DNA, 27 bp, synthetic construct
  source 1..27: mol_type = other DNA
tattcatcataggaaacaccaaagatg

SEQ ID NO: 8761 - DNA, 28 bp, synthetic construct
  source 1..28: mol_type = other DNA
atattcatcataggaaacaccaaagatg

SEQ ID NO: 8762 - DNA, 29 bp, synthetic construct
  source 1..29: mol_type = other DNA
tatattcatcataggaaacaccaaagatg

SEQ ID NO: 8763 - DNA, 30 bp, synthetic construct; identical to SEQ ID NO: 8331
  source 1..30: mol_type = other DNA

SEQ ID NO: 8764 - DNA, 31 bp, synthetic construct; identical to SEQ ID NO: 8332
  source 1..31: mol_type = other DNA

SEQ ID NO: 8765 - DNA, 32 bp, synthetic construct; identical to SEQ ID NO: 8333
  source 1..32: mol_type = other DNA

SEQ ID NO: 8766 - DNA, 33 bp, synthetic construct; identical to SEQ ID NO: 8334
  source 1..33: mol_type = other DNA

SEQ ID NO: 8767 - DNA, 34 bp, synthetic construct; identical to SEQ ID NO: 8335
  source 1..34: mol_type = other DNA

SEQ ID NO: 8768 - DNA, 35 bp, synthetic construct; identical to SEQ ID NO: 8336
  source 1..35: mol_type = other DNA

SEQ ID NO: 8769 - DNA, 36 bp, synthetic construct; identical to SEQ ID NO: 8337
  source 1..36: mol_type = other DNA

SEQ ID NO: 8770 - DNA, 37 bp, synthetic construct; identical to SEQ ID NO: 8338
  source 1..37: mol_type = other DNA

SEQ ID NO: 8771 - DNA, 38 bp, synthetic construct; identical to SEQ ID NO: 8339
  source 1..38: mol_type = other DNA

SEQ ID NO: 8772 - DNA, 39 bp, synthetic construct; identical to SEQ ID NO: 8340
  source 1..39: mol_type = other DNA

SEQ ID NO: 8773 - DNA, 40 bp, synthetic construct; identical to SEQ ID NO: 8341
  source 1..40: mol_type = other DNA

SEQ ID NO: 8774 - DNA, 10 bp, synthetic construct
  source 1..10: mol_type = other DNA
caccaaagat

SEQ ID NO: 8775 - DNA, 11 bp, synthetic construct
  source 1..11: mol_type = other DNA
acaccaaagat

SEQ ID NO: 8776 - DNA, 12 bp, synthetic construct
  source 1..12: mol_type = other DNA
aacaccaaagat

SEQ ID NO: 8777 - DNA, 13 bp, synthetic construct
  source 1..13: mol_type = other DNA
aaacaccaaagat

SEQ ID NO: 8778 - DNA, 14 bp, synthetic construct
  source 1..14: mol_type = other DNA
gaaacaccaaagat

SEQ ID NO: 8779 - DNA, 15 bp, synthetic construct
  source 1..15: mol_type = other DNA
ggaaacaccaaagat

SEQ ID NO: 8780 - DNA, 16 bp, synthetic construct
  source 1..16: mol_type = other DNA
aggaaacaccaaagat

SEQ ID NO: 8781 - DNA, 17 bp, synthetic construct
  source 1..17: mol_type = other DNA
taggaaacaccaaagat

SEQ ID NO: 8782 - DNA, 18 bp, synthetic construct
  source 1..18: mol_type = other DNA
ataggaaacaccaaagat

SEQ ID NO: 8783 - DNA, 19 bp, synthetic construct
  source 1..19: mol_type = other DNA
cataggaaacaccaaagat

SEQ ID NO: 8784 - DNA, 20 bp, synthetic construct
  source 1..20: mol_type = other DNA
tcataggaaacaccaaagat

SEQ ID NO: 8785 - DNA, 21 bp, synthetic construct
  source 1..21: mol_type = other DNA
atcataggaaacaccaaagat

SEQ ID NO: 8786 - DNA, 22 bp, synthetic construct
  source 1..22: mol_type = other DNA
catcataggaaacaccaaagat

SEQ ID NO: 8787 - DNA, 23 bp, synthetic construct
  source 1..23: mol_type = other DNA
tcatcataggaaacaccaaagat

SEQ ID NO: 8788 - DNA, 24 bp, synthetic construct
  source 1..24: mol_type = other DNA
ttcatcataggaaacaccaaagat

SEQ ID NO: 8789 - DNA, 25 bp, synthetic construct
  source 1..25: mol_type = other DNA
attcatcataggaaacaccaaagat

SEQ ID NO: 8790 - DNA, 26 bp, synthetic construct
  source 1..26: mol_type = other DNA
tattcatcataggaaacaccaaagat

SEQ ID NO: 8791 - DNA, 27 bp, synthetic construct
  source 1..27: mol_type = other DNA
atattcatcataggaaacaccaaagat

SEQ ID NO: 8792 - DNA, 28 bp, synthetic construct
  source 1..28: mol_type = other DNA
tatattcatcataggaaacaccaaagat

SEQ ID NO: 8793 - DNA, 29 bp, synthetic construct
  source 1..29: mol_type = other DNA
ctatattcatcataggaaacaccaaagat

SEQ ID NO: 8794 - DNA, 30 bp, synthetic construct; identical to SEQ ID NO: 8362
  source 1..30: mol_type = other DNA

SEQ ID NO: 8795 - DNA, 31 bp, synthetic construct; identical to SEQ ID NO: 8363
  source 1..31: mol_type = other DNA

SEQ ID NO: 8796 - DNA, 32 bp, synthetic construct; identical to SEQ ID NO: 8364
  source 1..32: mol_type = other DNA

SEQ ID NO: 8797 - DNA, 33 bp, synthetic construct; identical to SEQ ID NO: 8365
  source 1..33: mol_type = other DNA

SEQ ID NO: 8798 - DNA, 34 bp, synthetic construct; identical to SEQ ID NO: 8366
  source 1..34: mol_type = other DNA

SEQ ID NO: 8799 - DNA, 35 bp, synthetic construct; identical to SEQ ID NO: 8367
  source 1..35: mol_type = other DNA

SEQ ID NO: 8800 - DNA, 36 bp, synthetic construct; identical to SEQ ID NO: 8368
  source 1..36: mol_type = other DNA

SEQ ID NO: 8801 - DNA, 37 bp, synthetic construct; identical to SEQ ID NO: 8369
  source 1..37: mol_type = other DNA

SEQ ID NO: 8802 - DNA, 38 bp, synthetic construct; identical to SEQ ID NO: 8370
  source 1..38: mol_type = other DNA

SEQ ID NO: 8803 - DNA, 39 bp, synthetic construct; identical to SEQ ID NO: 8371
  source 1..39: mol_type = other DNA

SEQ ID NO: 8804 - DNA, 40 bp, synthetic construct; identical to SEQ ID NO: 8372
  source 1..40: mol_type = other DNA

SEQ ID NO: 8805 - DNA, 18 bp, synthetic construct
  source 1..18: mol_type = other DNA
tctttggtgttagctatg

SEQ ID NO: 8806 - DNA, 18 bp, synthetic construct
  source 1..18: mol_type = other DNA
tctttggtgtttcctatg

SEQ ID NO: 8807 - DNA, 19 bp, synthetic construct
  source 1..19: mol_type = other DNA
atctttggtgtttcctatg

SEQ ID NO: 8808 - DNA, 19 bp, synthetic construct
  source 1..19: mol_type = other DNA
atctttggtgttagctatg

SEQ ID NO: 8809 - DNA, 20 bp, synthetic construct
  source 1..20: mol_type = other DNA
catctttggtgtttcctatg

SEQ ID NO: 8810 - DNA, 20 bp, synthetic construct
  source 1..20: mol_type = other DNA
catctttggtgttagctatg

SEQ ID NO: 8811 - DNA, 21 bp, synthetic construct
  source 1..21: mol_type = other DNA
tcatctttggtgtttcctatg

SEQ ID NO: 8812 - DNA, 21 bp, synthetic construct
  source 1..21: mol_type = other DNA
tcatctttggtgttagctatg

SEQ ID NO: 8813 - DNA, 22 bp, synthetic construct
  source 1..22: mol_type = other DNA
atcatctttggtgtttcctatg

SEQ ID NO: 8814 - DNA, 22 bp, synthetic construct
  source 1..22: mol_type = other DNA
atcatctttggtgttagctatg

SEQ ID NO: 8815 - DNA, 23 bp, synthetic construct
  source 1..23: mol_type = other DNA
tatcatctttggtgtttcctatg

SEQ ID NO: 8816 - DNA, 23 bp, synthetic construct
  source 1..23: mol_type = other DNA
tatcatctttggtgttagctatg

SEQ ID NO: 8817 - DNA, 24 bp, synthetic construct
  source 1..24: mol_type = other DNA
atatcatctttggtgtttcctatg

SEQ ID NO: 8818 - DNA, 24 bp, synthetic construct
  source 1..24: mol_type = other DNA
atatcatctttggtgttagctatg

SEQ ID NO: 8819 - DNA, 25 bp, synthetic construct
  source 1..25: mol_type = other DNA
aatatcatctttggtgtttcctatg

SEQ ID NO: 8820 - DNA, 25 bp, synthetic construct
  source 1..25: mol_type = other DNA
aatatcatctttggtgttagctatg

SEQ ID NO: 8821 - DNA, 26 bp, synthetic construct
  source 1..26: mol_type = other DNA
aaatatcatctttggtgtttcctatg

SEQ ID NO: 8822 - DNA, 26 bp, synthetic construct
  source 1..26: mol_type = other DNA
aaatatcatctttggtgttagctatg

SEQ ID NO: 8823 - DNA, 27 bp, synthetic construct
  source 1..27: mol_type = other DNA
aaaatatcatctttggtgttagctatg

SEQ ID NO: 8824 - DNA, 27 bp, synthetic construct
  source 1..27: mol_type = other DNA
aaaatatcatctttggtgtttcctatg

SEQ ID NO: 8825 - DNA, 28 bp, synthetic construct
  source 1..28: mol_type = other DNA
gaaaatatcatctttggtgttagctatg

SEQ ID NO: 8826 - DNA, 28 bp, synthetic construct
  source 1..28: mol_type = other DNA
gaaaatatcatctttggtgtttcctatg

SEQ ID NO: 8827 - DNA, 29 bp, synthetic construct
  source 1..29: mol_type = other DNA
agaaaatatcatctttggtgttagctatg

SEQ ID NO: 8828 - DNA, 29 bp, synthetic construct
  source 1..29: mol_type = other DNA
agaaaatatcatctttggtgtttcctatg

SEQ ID NO: 8829 - DNA, 30 bp, synthetic construct; identical to SEQ ID NO: 8393
  source 1..30: mol_type = other DNA

SEQ ID NO: 8830 - DNA, 30 bp, synthetic construct; identical to SEQ ID NO: 8394
  source 1..30: mol_type = other DNA

SEQ ID NO: 8831 - DNA, 31 bp, synthetic construct; identical to SEQ ID NO: 8396
  source 1..31: mol_type = other DNA

SEQ ID NO: 8832 - DNA, 31 bp, synthetic construct; identical to SEQ ID NO: 8395
  source 1..31: mol_type = other DNA

SEQ ID NO: 8833 - DNA, 32 bp, synthetic construct; identical to SEQ ID NO: 8397
  source 1..32: mol_type = other DNA

SEQ ID NO: 8834 - DNA, 32 bp, synthetic construct; identical to SEQ ID NO: 8398
  source 1..32: mol_type = other DNA

SEQ ID NO: 8835 - DNA, 33 bp, synthetic construct; identical to SEQ ID NO: 8400
  source 1..33: mol_type = other DNA

SEQ ID NO: 8836 - DNA, 33 bp, synthetic construct; identical to SEQ ID NO: 8399
  source 1..33: mol_type = other DNA

SEQ ID NO: 8837 - DNA, 34 bp, synthetic construct; identical to SEQ ID NO: 8402
  source 1..34: mol_type = other DNA

SEQ ID NO: 8838 - DNA, 34 bp, synthetic construct; identical to SEQ ID NO: 8401
  source 1..34: mol_type = other DNA

SEQ ID NO: 8839 - DNA, 35 bp, synthetic construct; identical to SEQ ID NO: 8403
  source 1..35: mol_type = other DNA

SEQ ID NO: 8840 - DNA, 35 bp, synthetic construct; identical to SEQ ID NO: 8404
  source 1..35: mol_type = other DNA

SEQ ID NO: 8841 - DNA, 36 bp, synthetic construct; identical to SEQ ID NO: 8405
  source 1..36: mol_type = other DNA

SEQ ID NO: 8842 - DNA, 36 bp, synthetic construct; identical to SEQ ID NO: 8406
  source 1..36: mol_type = other DNA

SEQ ID NO: 8843 - DNA, 37 bp, synthetic construct; identical to SEQ ID NO: 8407
  source 1..37: mol_type = other DNA

SEQ ID NO: 8844 - DNA, 37 bp, synthetic construct; identical to SEQ ID NO: 8408
  source 1..37: mol_type = other DNA

SEQ ID NO: 8845 - DNA, 38 bp, synthetic construct; identical to SEQ ID NO: 8409
  source 1..38: mol_type = other DNA

SEQ ID NO: 8846 - DNA, 38 bp, synthetic construct; identical to SEQ ID NO: 8410
  source 1..38: mol_type = other DNA

SEQ ID NO: 8847 - DNA, 39 bp, synthetic construct; identical to SEQ ID NO: 8412
  source 1..39: mol_type = other DNA

SEQ ID NO: 8848 - DNA, 39 bp, synthetic construct; identical to SEQ ID NO: 8411
  source 1..39: mol_type = other DNA

SEQ ID NO: 8849 - DNA, 40 bp, synthetic construct; identical to SEQ ID NO: 8414
  source 1..40: mol_type = other DNA

SEQ ID NO: 8850 - DNA, 40 bp, synthetic construct; identical to SEQ ID NO: 8413
  source 1..40: mol_type = other DNA

SEQ ID NO: 8851 - DNA, 36 bp, synthetic construct
  source 1..36: mol_type = other DNA
tctttggtgtttcctatgatgaatatagatacagaa

SEQ ID NO: 8852 - DNA, 37 bp, synthetic construct
  source 1..37: mol_type = other DNA
atctttggtgtttcctatgatgaatatagatacagaa

SEQ ID NO: 8853 - DNA, 38 bp, synthetic construct; identical to SEQ ID NO: 8415
  source 1..38: mol_type = other DNA

SEQ ID NO: 8854 - DNA, 39 bp, synthetic construct; identical to SEQ ID NO: 8416
  source 1..39: mol_type = other DNA

SEQ ID NO: 8855 - DNA, 40 bp, synthetic construct; identical to SEQ ID NO: 8417
  source 1..40: mol_type = other DNA

SEQ ID NO: 8856 - DNA, 32 bp, synthetic construct; identical to SEQ ID NO: 8420
  source 1..32: mol_type = other DNA

SEQ ID NO: 8857 - DNA, 33 bp, synthetic construct; identical to SEQ ID NO: 8421
  source 1..33: mol_type = other DNA

SEQ ID NO: 8858 - DNA, 34 bp, synthetic construct; identical to SEQ ID NO: 8422
  source 1..34: mol_type = other DNA

SEQ ID NO: 8859 - DNA, 35 bp, synthetic construct; identical to SEQ ID NO: 8423
  source 1..35: mol_type = other DNA

SEQ ID NO: 8860 - DNA, 36 bp, synthetic construct; identical to SEQ ID NO: 8424
  source 1..36: mol_type = other DNA

SEQ ID NO: 8861 - DNA, 37 bp, synthetic construct; identical to SEQ ID NO: 8425
  source 1..37: mol_type = other DNA

SEQ ID NO: 8862 - DNA, 38 bp, synthetic construct; identical to SEQ ID NO: 8426
  source 1..38: mol_type = other DNA

SEQ ID NO: 8863 - DNA, 39 bp, synthetic construct; identical to SEQ ID NO: 8427
  source 1..39: mol_type = other DNA

SEQ ID NO: 8864 - DNA, 40 bp, synthetic construct; identical to SEQ ID NO: 8428
  source 1..40: mol_type = other DNA

SEQ ID NO: 8865 - DNA, 10 bp, synthetic construct
  source 1..10: mol_type = other DNA
atcatctttg

SEQ ID NO: 8866 - DNA, 11 bp, synthetic construct
  source 1..11: mol_type = other DNA
tatcatctttg

SEQ ID NO: 8867 - DNA, 12 bp, synthetic construct
  source 1..12: mol_type = other DNA
atatcatctttg

SEQ ID NO: 8868 - DNA, 13 bp, synthetic construct
  source 1..13: mol_type = other DNA
aatatcatctttg

SEQ ID NO: 8869 - DNA, 14 bp, synthetic construct
  source 1..14: mol_type = other DNA
aaatatcatctttg

SEQ ID NO: 8870 - DNA, 15 bp, synthetic construct
  source 1..15: mol_type = other DNA
aaaatatcatctttg

SEQ ID NO: 8871 - DNA, 16 bp, synthetic construct
  source 1..16: mol_type = other DNA
gaaaatatcatctttg

SEQ ID NO: 8872 - DNA, 17 bp, synthetic construct
  source 1..17: mol_type = other DNA
agaaaatatcatctttg

SEQ ID NO: 8873 - DNA, 18 bp, synthetic construct
  source 1..18: mol_type = other DNA
aagaaaatatcatctttg

SEQ ID NO: 8874 - DNA, 19 bp, synthetic construct
  source 1..19: mol_type = other DNA
aaagaaaatatcatctttg

SEQ ID NO: 8875 - DNA, 20 bp, synthetic construct
  source 1..20: mol_type = other DNA
taaagaaaatatcatctttg

SEQ ID NO: 8876 - DNA, 21 bp, synthetic construct
  source 1..21: mol_type = other DNA
ttaaagaaaatatcatctttg

SEQ ID NO: 8877 - DNA, 22 bp, synthetic construct
  source 1..22: mol_type = other DNA
attaaagaaaatatcatctttg

SEQ ID NO: 8878 - DNA, 23 bp, synthetic construct
  source 1..23: mol_type = other DNA
cattaaagaaaatatcatctttg

SEQ ID NO: 8879 - DNA, 24 bp, synthetic construct
  source 1..24: mol_type = other DNA
ccattaaagaaaatatcatctttg

SEQ ID NO: 8880 - DNA, 25 bp, synthetic construct
  source 1..25: mol_type = other DNA
accattaaagaaaatatcatctttg

SEQ ID NO: 8881 - DNA, 26 bp, synthetic construct
  source 1..26: mol_type = other DNA
caccattaaagaaaatatcatctttg

SEQ ID NO: 8882 - DNA, 27 bp, synthetic construct
  source 1..27: mol_type = other DNA
gcaccattaaagaaaatatcatctttg

SEQ ID NO: 8883 - DNA, 28 bp, synthetic construct
  source 1..28: mol_type = other DNA
ggcaccattaaagaaaatatcatctttg

SEQ ID NO: 8884 - DNA, 29 bp, synthetic construct
  source 1..29: mol_type = other DNA
tggcaccattaaagaaaatatcatctttg

SEQ ID NO: 8885 - DNA, 30 bp, synthetic construct; identical to SEQ ID NO: 8449
  source 1..30: mol_type = other DNA

SEQ ID NO: 8886 - DNA, 31 bp, synthetic construct; identical to SEQ ID NO: 8450
  source 1..31: mol_type = other DNA

SEQ ID NO: 8887 - DNA, 32 bp, synthetic construct; identical to SEQ ID NO: 8451
  source 1..32: mol_type = other DNA

SEQ ID NO: 8888 - DNA, 33 bp, synthetic construct; identical to SEQ ID NO: 8452
  source 1..33: mol_type = other DNA

SEQ ID NO: 8889 - DNA, 34 bp, synthetic construct; identical to SEQ ID NO: 8453
  source 1..34: mol_type = other DNA

SEQ ID NO: 8890 - DNA, 35 bp, synthetic construct; identical to SEQ ID NO: 8454
  source 1..35: mol_type = other DNA

SEQ ID NO: 8891 - DNA, 36 bp, synthetic construct; identical to SEQ ID NO: 8455
  source 1..36: mol_type = other DNA

SEQ ID NO: 8892 - DNA, 37 bp, synthetic construct; identical to SEQ ID NO: 8456
  source 1..37: mol_type = other DNA

SEQ ID NO: 8893 - DNA, 38 bp, synthetic construct; identical to SEQ ID NO: 8457
  source 1..38: mol_type = other DNA

SEQ ID NO: 8894 - DNA, 39 bp, synthetic construct; identical to SEQ ID NO: 8458
  source 1..39: mol_type = other DNA

SEQ ID NO: 8895 - DNA, 40 bp, synthetic construct; identical to SEQ ID NO: 8459
  source 1..40: mol_type = other DNA

SEQ ID NO: 8896 - DNA, 19 bp, synthetic construct
  source 1..19: mol_type = other DNA
tctttggtgtttcctatga

SEQ ID NO: 8897 - DNA, 19 bp, synthetic construct
  source 1..19: mol_type = other DNA
tctttggtgtttcttatga

SEQ ID NO: 8898 - DNA, 20 bp, synthetic construct
  source 1..20: mol_type = other DNA
atctttggtgtttcctatga

SEQ ID NO: 8899 - DNA, 20 bp, synthetic construct
  source 1..20: mol_type = other DNA
atctttggtgtttcttatga

SEQ ID NO: 8900 - DNA, 21 bp, synthetic construct
  source 1..21: mol_type = other DNA
catctttggtgtttcttatga

SEQ ID NO: 8901 - DNA, 21 bp, synthetic construct
  source 1..21: mol_type = other DNA
catctttggtgtttcctatga

SEQ ID NO: 8902 - DNA, 22 bp, synthetic construct
  source 1..22: mol_type = other DNA
tcatctttggtgtttcttatga

SEQ ID NO: 8903 - DNA, 22 bp, synthetic construct
  source 1..22: mol_type = other DNA
tcatctttggtgtttcctatga

SEQ ID NO: 8904 - DNA, 23 bp, synthetic construct
  source 1..23: mol_type = other DNA
atcatctttggtgtttcctatga

SEQ ID NO: 8905 - DNA, 23 bp, synthetic construct
  source 1..23: mol_type = other DNA
atcatctttggtgtttcttatga

SEQ ID NO: 8906 - DNA, 24 bp, synthetic construct
  source 1..24: mol_type = other DNA
tatcatctttggtgtttcctatga

SEQ ID NO: 8907 - DNA, 24 bp, synthetic construct
  source 1..24: mol_type = other DNA
tatcatctttggtgtttcttatga

SEQ ID NO: 8908 - DNA, 25 bp, synthetic construct
  source 1..25: mol_type = other DNA
atatcatctttggtgtttcctatga

SEQ ID NO: 8909 - DNA, 25 bp, synthetic construct
  source 1..25: mol_type = other DNA
atatcatctttggtgtttcttatga

SEQ ID NO: 8910 - DNA, 26 bp, synthetic construct
  source 1..26: mol_type = other DNA
aatatcatctttggtgtttcctatga

SEQ ID NO: 8911 - DNA, 26 bp, synthetic construct
  source 1..26: mol_type = other DNA
aatatcatctttggtgtttcttatga

SEQ ID NO: 8912 - DNA, 27 bp, synthetic construct
  source 1..27: mol_type = other DNA
aaatatcatctttggtgtttcttatga

SEQ ID NO: 8913 - DNA, 27 bp, synthetic construct
  source 1..27: mol_type = other DNA
aaatatcatctttggtgtttcctatga

SEQ ID NO: 8914 - DNA, 28 bp, synthetic construct
  source 1..28: mol_type = other DNA
aaaatatcatctttggtgtttcttatga

SEQ ID NO: 8915 - DNA, 28 bp, synthetic construct
  source 1..28: mol_type = other DNA
aaaatatcatctttggtgtttcctatga

SEQ ID NO: 8916 - DNA, 29 bp, synthetic construct
  source 1..29: mol_type = other DNA
gaaaatatcatctttggtgtttcttatga

SEQ ID NO: 8917 - DNA, 29 bp, synthetic construct
  source 1..29: mol_type = other DNA
gaaaatatcatctttggtgtttcctatga

SEQ ID NO: 8918 - DNA, 30 bp, synthetic construct; identical to SEQ ID NO: 8478
  source 1..30: mol_type = other DNA

SEQ ID NO: 8919 - DNA, 30 bp, synthetic construct; identical to SEQ ID NO: 8479
  source 1..30: mol_type = other DNA

SEQ ID NO: 8920 - DNA, 31 bp, synthetic construct; identical to SEQ ID NO: 8481
  source 1..31: mol_type = other DNA

SEQ ID NO: 8921 - DNA, 31 bp, synthetic construct; identical to SEQ ID NO: 8480
  source 1..31: mol_type = other DNA

SEQ ID NO: 8922 - DNA, 32 bp, synthetic construct; identical to SEQ ID NO: 8483
  source 1..32: mol_type = other DNA

SEQ ID NO: 8923 - DNA, 32 bp, synthetic construct; identical to SEQ ID NO: 8482
  source 1..32: mol_type = other DNA

SEQ ID NO: 8924 - DNA, 33 bp, synthetic construct; identical to SEQ ID NO: 8485
  source 1..33: mol_type = other DNA

SEQ ID NO: 8925 - DNA, 33 bp, synthetic construct; identical to SEQ ID NO: 8484
  source 1..33: mol_type = other DNA

SEQ ID NO: 8926 - DNA, 34 bp, synthetic construct; identical to SEQ ID NO: 8487
  source 1..34: mol_type = other DNA

SEQ ID NO: 8927 - DNA, 34 bp, synthetic construct; identical to SEQ ID NO: 8486
  source 1..34: mol_type = other DNA

SEQ ID NO: 8928 - DNA, 35 bp, synthetic construct; identical to SEQ ID NO: 8488
  source 1..35: mol_type = other DNA

SEQ ID NO: 8929 - DNA, 35 bp, synthetic construct; identical to SEQ ID NO: 8489
  source 1..35: mol_type = other DNA

SEQ ID NO: 8930 - DNA, 36 bp, synthetic construct; identical to SEQ ID NO: 8490
  source 1..36: mol_type = other DNA

SEQ ID NO: 8931 - DNA, 36 bp, synthetic construct; identical to SEQ ID NO: 8491
  source 1..36: mol_type = other DNA

SEQ ID NO: 8932 - DNA, 37 bp, synthetic construct; identical to SEQ ID NO: 8492
  source 1..37: mol_type = other DNA

SEQ ID NO: 8933 - DNA, 37 bp, synthetic construct; identical to SEQ ID NO: 8493
  source 1..37: mol_type = other DNA

SEQ ID NO: 8934 - DNA, 38 bp, synthetic construct; identical to SEQ ID NO: 8494
  source 1..38: mol_type = other DNA

SEQ ID NO: 8935 - DNA, 38 bp, synthetic construct; identical to SEQ ID NO: 8495
  source 1..38: mol_type = other DNA

SEQ ID NO: 8936 - DNA, 39 bp, synthetic construct; identical to SEQ ID NO: 8496
  source 1..39: mol_type = other DNA

SEQ ID NO: 8937 - DNA, 39 bp, synthetic construct; identical to SEQ ID NO: 8497
  source 1..39: mol_type = other DNA

SEQ ID NO: 8938 - DNA, 40 bp, synthetic construct; identical to SEQ ID NO: 8499
  source 1..40: mol_type = other DNA

SEQ ID NO: 8939 - DNA, 40 bp, synthetic construct; identical to SEQ ID NO: 8498
  source 1..40: mol_type = other DNA

SEQ ID NO: 8940 - DNA, 17 bp, synthetic construct
  source 1..17: mol_type = other DNA
tctttggtgtttcctat

SEQ ID NO: 8941 - DNA, 18 bp, synthetic construct
  source 1..18: mol_type = other DNA
atctttggtgtttcctat

SEQ ID NO: 8942 - DNA, 19 bp, synthetic construct
  source 1..19: mol_type = other DNA
catctttggtgtttcctat

SEQ ID NO: 8943 - DNA, 20 bp, synthetic construct
  source 1..20: mol_type = other DNA
tcatctttggtgtttcctat

SEQ ID NO: 8944 - DNA, 21 bp, synthetic construct
  source 1..21: mol_type = other DNA
atcatctttggtgtttcctat

SEQ ID NO: 8945 - DNA, 22 bp, synthetic construct
  source 1..22: mol_type = other DNA
tatcatctttggtgtttcctat

SEQ ID NO: 8946 - DNA, 23 bp, synthetic construct
  source 1..23: mol_type = other DNA
atatcatctttggtgtttcctat

SEQ ID NO: 8947 - DNA, 24 bp, synthetic construct
  source 1..24: mol_type = other DNA
aatatcatctttggtgtttcctat

SEQ ID NO: 8948 - DNA, 25 bp, synthetic construct
  source 1..25: mol_type = other DNA
aaatatcatctttggtgtttcctat

SEQ ID NO: 8949 - DNA, 26 bp, synthetic construct
  source 1..26: mol_type = other DNA
aaaatatcatctttggtgtttcctat

SEQ ID NO: 8950 - DNA, 27 bp, synthetic construct
  source 1..27: mol_type = other DNA
gaaaatatcatctttggtgtttcctat

SEQ ID NO: 8951 - DNA, 28 bp, synthetic construct
  source 1..28: mol_type = other DNA
agaaaatatcatctttggtgtttcctat

SEQ ID NO: 8952 - DNA, 29 bp, synthetic construct
  source 1..29: mol_type = other DNA
aagaaaatatcatctttggtgtttcctat

SEQ ID NO: 8953 - DNA, 30 bp, synthetic construct; identical to SEQ ID NO: 8511
  source 1..30: mol_type = other DNA

SEQ ID NO: 8954 - DNA, 31 bp, synthetic construct; identical to SEQ ID NO: 8512
  source 1..31: mol_type = other DNA

SEQ ID NO: 8955 - DNA, 32 bp, synthetic construct; identical to SEQ ID NO: 8513
  source 1..32: mol_type = other DNA

SEQ ID NO: 8956 - DNA, 33 bp, synthetic construct; identical to SEQ ID NO: 8514
  source 1..33: mol_type = other DNA

SEQ ID NO: 8957 - DNA, 34 bp, synthetic construct; identical to SEQ ID NO: 8515
  source 1..34: mol_type = other DNA

SEQ ID NO: 8958 - DNA, 35 bp, synthetic construct; identical to SEQ ID NO: 8516
  source 1..35: mol_type = other DNA

SEQ ID NO: 8959 - DNA, 36 bp, synthetic construct; identical to SEQ ID NO: 8517
  source 1..36: mol_type = other DNA

SEQ ID NO: 8960 - DNA, 37 bp, synthetic construct; identical to SEQ ID NO: 8518
  source 1..37: mol_type = other DNA

SEQ ID NO: 8961 - DNA, 38 bp, synthetic construct; identical to SEQ ID NO: 8519
  source 1..38: mol_type = other DNA

SEQ ID NO: 8962 - DNA, 39 bp, synthetic construct; identical to SEQ ID NO: 8520
  source 1..39: mol_type = other DNA

SEQ ID NO: 8963 - DNA, 40 bp, synthetic construct; identical to SEQ ID NO: 8521
  source 1..40: mol_type = other DNA

SEQ ID NO: 8964 - DNA, 19 bp, synthetic construct
  source 1..19: mol_type = other DNA
aaagatgatattttcttta

SEQ ID NO: 8965 - DNA, 20 bp, synthetic construct
  source 1..20: mol_type = other DNA
caaagatgatattttcttta

SEQ ID NO: 8966 - DNA, 21 bp, synthetic construct
  source 1..21: mol_type = other DNA
ccaaagatgatattttcttta

SEQ ID NO: 8967 - DNA, 22 bp, synthetic construct
  source 1..22: mol_type = other DNA
accaaagatgatattttcttta

SEQ ID NO: 8968 - DNA, 23 bp, synthetic construct
  source 1..23: mol_type = other DNA
caccaaagatgatattttcttta

SEQ ID NO: 8969 - DNA, 24 bp, synthetic construct
  source 1..24: mol_type = other DNA
acaccaaagatgatattttcttta

SEQ ID NO: 8970 - DNA, 25 bp, synthetic construct
  source 1..25: mol_type = other DNA
aacaccaaagatgatattttcttta

SEQ ID NO: 8971 - DNA, 26 bp, synthetic construct
  source 1..26: mol_type = other DNA
aaacaccaaagatgatattttcttta

SEQ ID NO: 8972 - DNA, 27 bp, synthetic construct
  source 1..27: mol_type = other DNA
gaaacaccaaagatgatattttcttta

SEQ ID NO: 8973 - DNA, 28 bp, synthetic construct
  source 1..28: mol_type = other DNA
ggaaacaccaaagatgatattttcttta

SEQ ID NO: 8974 - DNA, 29 bp, synthetic construct
  source 1..29: mol_type = other DNA
aggaaacaccaaagatgatattttcttta

SEQ ID NO: 8975 - DNA, 30 bp, synthetic construct; identical to SEQ ID NO: 8535
  source 1..30: mol_type = other DNA

SEQ ID NO: 8976 - DNA, 31 bp, synthetic construct; identical to SEQ ID NO: 8536
  source 1..31: mol_type = other DNA

SEQ ID NO: 8977 - DNA, 32 bp, synthetic construct; identical to SEQ ID NO: 8537
  source 1..32: mol_type = other DNA

SEQ ID NO: 8978 - DNA, 33 bp, synthetic construct; identical to SEQ ID NO: 8538
  source 1..33: mol_type = other DNA

SEQ ID NO: 8979 - DNA, 34 bp, synthetic construct; identical to SEQ ID NO: 8539
  source 1..34: mol_type = other DNA

SEQ ID NO: 8980 - DNA, 35 bp, synthetic construct; identical to SEQ ID NO: 8540
  source 1..35: mol_type = other DNA

SEQ ID NO: 8981 - DNA, 36 bp, synthetic construct; identical to SEQ ID NO: 8541
  source 1..36: mol_type = other DNA

SEQ ID NO: 8982 - DNA, 37 bp, synthetic construct; identical to SEQ ID NO: 8542
  source 1..37: mol_type = other DNA

SEQ ID NO: 8983 - DNA, 38 bp, synthetic construct; identical to SEQ ID NO: 8543
  source 1..38: mol_type = other DNA

SEQ ID NO: 8984 - DNA, 39 bp, synthetic construct; identical to SEQ ID NO: 8544
  source 1..39: mol_type = other DNA

SEQ ID NO: 8985 - DNA, 40 bp, synthetic construct; identical to SEQ ID NO: 8545
  source 1..40: mol_type = other DNA

SEQ ID NO: 8986 - DNA, 35 bp, synthetic construct; identical to SEQ ID NO: 8610
  source 1..35: mol_type = other DNA

SEQ ID NO: 8987 - DNA, 36 bp, synthetic construct; identical to SEQ ID NO: 8611
  source 1..36: mol_type = other DNA

SEQ ID NO: 8988 - DNA, 37 bp, synthetic construct; identical to SEQ ID NO: 8612
  source 1..37: mol_type = other DNA

SEQ ID NO: 8989 - DNA, 38 bp, synthetic construct; identical to SEQ ID NO: 8613
  source 1..38: mol_type = other DNA

SEQ ID NO: 8990 - DNA, 39 bp, synthetic construct; identical to SEQ ID NO: 8614
  source 1..39: mol_type = other DNA

SEQ ID NO: 8991 - DNA, 40 bp, synthetic construct; identical to SEQ ID NO: 8615
  source 1..40: mol_type = other DNA

SEQ ID NO: 8992 - DNA, 31 bp, synthetic construct; identical to SEQ ID NO: 8210
  source 1..31: mol_type = other DNA

SEQ ID NO: 8993 - DNA, 32 bp, synthetic construct; identical to SEQ ID NO: 8211
  source 1..32: mol_type = other DNA

SEQ ID NO: 8994 - DNA, 33 bp, synthetic construct; identical to SEQ ID NO: 8212
  source 1..33: mol_type = other DNA

SEQ ID NO: 8995 - DNA, 34 bp, synthetic construct; identical to SEQ ID NO: 8213
  source 1..34: mol_type = other DNA

SEQ ID NO: 8996 - DNA, 35 bp, synthetic construct; identical to SEQ ID NO: 8214
  source 1..35: mol_type = other DNA

SEQ ID NO: 8997 - DNA, 36 bp, synthetic construct; identical to SEQ ID NO: 8215
  source 1..36: mol_type = other DNA

SEQ ID NO: 8998 - DNA, 37 bp, synthetic construct; identical to SEQ ID NO: 8216
  source 1..37: mol_type = other DNA

SEQ ID NO: 8999 - DNA, 38 bp, synthetic construct; identical to SEQ ID NO: 8217
  source 1..38: mol_type = other DNA

SEQ ID NO: 9000 - DNA, 39 bp, synthetic construct; identical to SEQ ID NO: 8218
  source 1..39: mol_type = other DNA

SEQ ID NO: 9001 - DNA, 40 bp, synthetic construct; identical to SEQ ID NO: 8219
  source 1..40: mol_type = other DNA

SEQ ID NO: 9002 - DNA, 30 bp, synthetic construct; identical to SEQ ID NO: 8222
  source 1..30: mol_type = other DNA

SEQ ID NO: 9003 - DNA, 31 bp, synthetic construct; identical to SEQ ID NO: 8223
  source 1..31: mol_type = other DNA

SEQ ID NO: 9004 - DNA, 32 bp, synthetic construct; identical to SEQ ID NO: 8224
  source 1..32: mol_type = other DNA

SEQ ID NO: 9005 - DNA, 33 bp, synthetic construct; identical to SEQ ID NO: 8225
  source 1..33: mol_type = other DNA

SEQ ID NO: 9006 - DNA, 34 bp, synthetic construct; identical to SEQ ID NO: 8226
  source 1..34: mol_type = other DNA

SEQ ID NO: 9007 - DNA, 35 bp, synthetic construct; identical to SEQ ID NO: 8227
  source 1..35: mol_type = other DNA

SEQ ID NO: 9008 - DNA, 36 bp, synthetic construct; identical to SEQ ID NO: 8228
  source 1..36: mol_type = other DNA

SEQ ID NO: 9009 - DNA, 37 bp, synthetic construct; identical to SEQ ID NO: 8229
  source 1..37: mol_type = other DNA

SEQ ID NO: 9010 - DNA, 38 bp, synthetic construct; identical to SEQ ID NO: 8230
  source 1..38: mol_type = other DNA

SEQ ID NO: 9011 - DNA, 39 bp, synthetic construct; identical to SEQ ID NO: 8231
  source 1..39: mol_type = other DNA

SEQ ID NO: 9012 - DNA, 40 bp, synthetic construct; identical to SEQ ID NO: 8232
  source 1..40: mol_type = other DNA

SEQ ID NO: 9013 - DNA, 20 bp, synthetic construct
  source 1..20: mol_type = other DNA
aaagatgatattttccttaa

SEQ ID NO: 9014 - DNA, 20 bp, synthetic construct
  source 1..20: mol_type = other DNA
aaagatgatattttctttaa

SEQ ID NO: 9015 - DNA, 21 bp, synthetic construct
  source 1..21: mol_type = other DNA
caaagatgatattttccttaa

SEQ ID NO: 9016 - DNA, 21 bp, synthetic construct
  source 1..21: mol_type = other DNA
caaagatgatattttctttaa

SEQ ID NO: 9017 - DNA, 22 bp, synthetic construct
  source 1..22: mol_type = other DNA
ccaaagatgatattttccttaa

SEQ ID NO: 9018 - DNA, 22 bp, synthetic construct
  source 1..22: mol_type = other DNA
ccaaagatgatattttctttaa

SEQ ID NO: 9019 - DNA, 23 bp, synthetic construct
  source 1..23: mol_type = other DNA
accaaagatgatattttccttaa

SEQ ID NO: 9020 - DNA, 23 bp, synthetic construct
  source 1..23: mol_type = other DNA
accaaagatgatattttctttaa

SEQ ID NO: 9021 - DNA, 24 bp, synthetic construct
  source 1..24: mol_type = other DNA
caccaaagatgatattttccttaa

SEQ ID NO: 9022 - DNA, 24 bp, synthetic construct
  source 1..24: mol_type = other DNA
caccaaagatgatattttctttaa

SEQ ID NO: 9023 - DNA, 25 bp, synthetic construct
  source 1..25: mol_type = other DNA
acaccaaagatgatattttctttaa

SEQ ID NO: 9024 - DNA, 25 bp, synthetic construct
  source 1..25: mol_type = other DNA
acaccaaagatgatattttccttaa

SEQ ID NO: 9025 - DNA, 26 bp, synthetic construct
  source 1..26: mol_type = other DNA
aacaccaaagatgatattttctttaa

SEQ ID NO: 9026 - DNA, 26 bp, synthetic construct
  source 1..26: mol_type = other DNA
aacaccaaagatgatattttccttaa

SEQ ID NO: 9027 - DNA, 27 bp, synthetic construct
  source 1..27: mol_type = other DNA
aaacaccaaagatgatattttccttaa

SEQ ID NO: 9028 - DNA, 27 bp, synthetic construct
  source 1..27: mol_type = other DNA
aaacaccaaagatgatattttctttaa

SEQ ID NO: 9029 - DNA, 28 bp, synthetic construct
  source 1..28: mol_type = other DNA
gaaacaccaaagatgatattttccttaa

SEQ ID NO: 9030 - DNA, 28 bp, synthetic construct
  source 1..28: mol_type = other DNA
gaaacaccaaagatgatattttctttaa

SEQ ID NO: 9031 - DNA, 29 bp, synthetic construct
  source 1..29: mol_type = other DNA
ggaaacaccaaagatgatattttccttaa

SEQ ID NO: 9032 - DNA, 29 bp, synthetic construct
  source 1..29: mol_type = other DNA
ggaaacaccaaagatgatattttctttaa

SEQ ID NO: 9033 - DNA, 30 bp, synthetic construct; identical to SEQ ID NO: 8257
  source 1..30: mol_type = other DNA

SEQ ID NO: 9034 - DNA, 30 bp, synthetic construct; identical to SEQ ID NO: 8258
  source 1..30: mol_type = other DNA

SEQ ID NO: 9035 - DNA, 31 bp, synthetic construct; identical to SEQ ID NO: 8260
  source 1..31: mol_type = other DNA

SEQ ID NO: 9036 - DNA, 31 bp, synthetic construct; identical to SEQ ID NO: 8259
  source 1..31: mol_type = other DNA

SEQ ID NO: 9037 - DNA, 32 bp, synthetic construct; identical to SEQ ID NO: 8261
  source 1..32: mol_type = other DNA

SEQ ID NO: 9038 - DNA, 32 bp, synthetic construct; identical to SEQ ID NO: 8262
  source 1..32: mol_type = other DNA

SEQ ID NO: 9039 - DNA, 33 bp, synthetic construct; identical to SEQ ID NO: 8263
  source 1..33: mol_type = other DNA

SEQ ID NO: 9040 - DNA, 33 bp, synthetic construct; identical to SEQ ID NO: 8264
  source 1..33: mol_type = other DNA

SEQ ID NO: 9041 - DNA, 34 bp, synthetic construct; identical to SEQ ID NO: 8265
  source 1..34: mol_type = other DNA

SEQ ID NO: 9042 - DNA, 34 bp, synthetic construct; identical to SEQ ID NO: 8266
  source 1..34: mol_type = other DNA

SEQ ID NO: 9043 - DNA, 35 bp, synthetic construct; identical to SEQ ID NO: 8268
  source 1..35: mol_type = other DNA

SEQ ID NO: 9044 - DNA, 35 bp, synthetic construct; identical to SEQ ID NO: 8267
  source 1..35: mol_type = other DNA

SEQ ID NO: 9045 - DNA, 36 bp, synthetic construct; identical to SEQ ID NO: 8270
  source 1..36: mol_type = other DNA

SEQ ID NO: 9046 - DNA, 36 bp, synthetic construct; identical to SEQ ID NO: 8269
  source 1..36: mol_type = other DNA

SEQ ID NO: 9047 - DNA, 37 bp, synthetic construct; identical to SEQ ID NO: 8271
  source 1..37: mol_type = other DNA

SEQ ID NO: 9048 - DNA, 37 bp, synthetic construct; identical to SEQ ID NO: 8272
  source 1..37: mol_type = other DNA

SEQ ID NO: 9049 - DNA, 38 bp, synthetic construct; identical to SEQ ID NO: 8273
  source 1..38: mol_type = other DNA

SEQ ID NO: 9050 - DNA, 38 bp, synthetic construct; identical to SEQ ID NO: 8274
  source 1..38: mol_type = other DNA

SEQ ID NO: 9051 - DNA, 39 bp, synthetic construct; identical to SEQ ID NO: 8276
  source 1..39: mol_type = other DNA

SEQ ID NO: 9052 - DNA, 39 bp, synthetic construct; identical to SEQ ID NO: 8275
  source 1..39: mol_type = other DNA

SEQ ID NO: 9053 - DNA, 40 bp, synthetic construct; identical to SEQ ID NO: 8278
  source 1..40: mol_type = other DNA

SEQ ID NO: 9054 - DNA, 40 bp, synthetic construct; identical to SEQ ID NO: 8277
  source 1..40: mol_type = other DNA

SEQ ID NO: 9055 - DNA, 10 bp, synthetic construct
  source 1..10: mol_type = other DNA
acaccaaaga

SEQ ID NO: 9056 - DNA, 11 bp, synthetic construct
  source 1..11: mol_type = other DNA
aacaccaaaga

SEQ ID NO: 9057 - DNA, 12 bp, synthetic construct
  source 1..12: mol_type = other DNA
aaacaccaaaga

SEQ ID NO: 9058 - DNA, 13 bp, synthetic construct
  source 1..13: mol_type = other DNA
gaaacaccaaaga

SEQ ID NO: 9059 - DNA, 14 bp, synthetic construct
  source 1..14: mol_type = other DNA
ggaaacaccaaaga

SEQ ID NO: 9060 - DNA, 15 bp, synthetic construct
  source 1..15: mol_type = other DNA
aggaaacaccaaaga

SEQ ID NO: 9061 - DNA, 16 bp, synthetic construct
  source 1..16: mol_type = other DNA
taggaaacaccaaaga

SEQ ID NO: 9062 - DNA, 17 bp, synthetic construct
  source 1..17: mol_type = other DNA
ataggaaacaccaaaga

SEQ ID NO: 9063 - DNA, 18 bp, synthetic construct
  source 1..18: mol_type = other DNA
cataggaaacaccaaaga

SEQ ID NO: 9064 - DNA, 19 bp, synthetic construct
  source 1..19: mol_type = other DNA
tcataggaaacaccaaaga

SEQ ID NO: 9065 - DNA, 20 bp, synthetic construct
  source 1..20: mol_type = other DNA
atcataggaaacaccaaaga

SEQ ID NO: 9066 - DNA, 21 bp, synthetic construct
  source 1..21: mol_type = other DNA
catcataggaaacaccaaaga

SEQ ID NO: 9067 - DNA, 22 bp, synthetic construct
  source 1..22: mol_type = other DNA
tcatcataggaaacaccaaaga

SEQ ID NO: 9068 - DNA, 23 bp, synthetic construct
  source 1..23: mol_type = other DNA
ttcatcataggaaacaccaaaga

SEQ ID NO: 9069 - DNA, 24 bp, synthetic construct
  source 1..24: mol_type = other DNA
attcatcataggaaacaccaaaga

SEQ ID NO: 9070 - DNA, 25 bp, synthetic construct
  source 1..25: mol_type = other DNA
tattcatcataggaaacaccaaaga

SEQ ID NO: 9071 - DNA, 26 bp, synthetic construct
  source 1..26: mol_type = other DNA
atattcatcataggaaacaccaaaga

SEQ ID NO: 9072 - DNA, 27 bp, synthetic construct
  source 1..27: mol_type = other DNA
tatattcatcataggaaacaccaaaga

SEQ ID NO: 9073 - DNA, 28 bp, synthetic construct
  source 1..28: mol_type = other DNA
ctatattcatcataggaaacaccaaaga

SEQ ID NO: 9074 - DNA, 29 bp, synthetic construct
  source 1..29: mol_type = other DNA
tctatattcatcataggaaacaccaaaga

SEQ ID NO: 9075 - DNA, 30 bp, synthetic construct
  source 1..30: mol_type = other DNA
atctatattcatcataggaaacaccaaaga

SEQ ID NO: 9076 - DNA, 31 bp, synthetic construct
  source 1..31: mol_type = other DNA
tatctatattcatcataggaaacaccaaaga

SEQ ID NO: 9077 - DNA, 32 bp, synthetic construct
  source 1..32: mol_type = other DNA
gtatctatattcatcataggaaacaccaaaga

SEQ ID NO: 9078 - DNA, 33 bp, synthetic construct
  source 1..33: mol_type = other DNA
tgtatctatattcatcataggaaacaccaaaga

SEQ ID NO: 9079 - DNA, 34 bp, synthetic construct
  source 1..34: mol_type = other DNA
ctgtatctatattcatcataggaaacaccaaaga

SEQ ID NO: 9080 - DNA, 35 bp, synthetic construct
  source 1..35: mol_type = other DNA
tctgtatctatattcatcataggaaacaccaaaga

SEQ ID NO: 9081 - DNA, 36 bp, synthetic construct
  source 1..36: mol_type = other DNA
ttctgtatctatattcatcataggaaacaccaaaga

SEQ ID NO: 9082 - DNA, 37 bp, synthetic construct
  source 1..37: mol_type = other DNA
cttctgtatctatattcatcataggaaacaccaaaga

SEQ ID NO: 9083 - DNA, 38 bp, synthetic construct
  source 1..38: mol_type = other DNA
gcttctgtatctatattcatcataggaaacaccaaaga

SEQ ID NO: 9084 - DNA, 39 bp, synthetic construct
  source 1..39: mol_type = other DNA
cgcttctgtatctatattcatcataggaaacaccaaaga

SEQ ID NO: 9085 - DNA, 40 bp, synthetic construct
  source 1..40: mol_type = other DNA
acgcttctgtatctatattcatcataggaaacaccaaaga

SEQ ID NO: 9086 - DNA, 10 bp, synthetic construct
  source 1..10: mol_type = other DNA
caccaaagat

SEQ ID NO: 9087 - DNA, 11 bp, synthetic construct
  source 1..11: mol_type = other DNA
acaccaaagat

SEQ ID NO: 9088 - DNA, 12 bp, synthetic construct
  source 1..12: mol_type = other DNA
aacaccaaagat

SEQ ID NO: 9089 - DNA, 13 bp, synthetic construct
  source 1..13: mol_type = other DNA
aaacaccaaagat

SEQ ID NO: 9090 - DNA, 14 bp, synthetic construct
  source 1..14: mol_type = other DNA
gaaacaccaaagat

SEQ ID NO: 9091 - DNA, 15 bp, synthetic construct
  source 1..15: mol_type = other DNA
ggaaacaccaaagat

SEQ ID NO: 9092 - DNA, 16 bp, synthetic construct
  source 1..16: mol_type = other DNA
aggaaacaccaaagat

SEQ ID NO: 9093 - DNA, 17 bp, synthetic construct
  source 1..17: mol_type = other DNA
taggaaacaccaaagat

SEQ ID NO: 9094 - DNA, 18 bp, synthetic construct
  source 1..18: mol_type = other DNA
ataggaaacaccaaagat

SEQ ID NO: 9095 - DNA, 19 bp, synthetic construct
  source 1..19: mol_type = other DNA
cataggaaacaccaaagat

SEQ ID NO: 9096 - DNA, 20 bp, synthetic construct
  source 1..20: mol_type = other DNA
tcataggaaacaccaaagat

SEQ ID NO: 9097 - DNA, 21 bp, synthetic construct
  source 1..21: mol_type = other DNA
atcataggaaacaccaaagat

SEQ ID NO: 9098 - DNA, 22 bp, synthetic construct
  source 1..22: mol_type = other DNA
catcataggaaacaccaaagat

SEQ ID NO: 9099 - DNA, 23 bp, synthetic construct
  source 1..23: mol_type = other DNA
tcatcataggaaacaccaaagat

SEQ ID NO: 9100 - DNA, 24 bp, synthetic construct
  source 1..24: mol_type = other DNA
ttcatcataggaaacaccaaagat

SEQ ID NO: 9101 - DNA, 25 bp, synthetic construct
  source 1..25: mol_type = other DNA
attcatcataggaaacaccaaagat

SEQ ID NO: 9102 - DNA, 26 bp, synthetic construct
  source 1..26: mol_type = other DNA
tattcatcataggaaacaccaaagat

SEQ ID NO: 9103 - DNA, 27 bp, synthetic construct
  source 1..27: mol_type = other DNA
atattcatcataggaaacaccaaagat

SEQ ID NO: 9104 - DNA, 28 bp, synthetic construct
  source 1..28: mol_type = other DNA
tatattcatcataggaaacaccaaagat

SEQ ID NO: 9105 - DNA, 29 bp, synthetic construct
  source 1..29: mol_type = other DNA
ctatattcatcataggaaacaccaaagat

SEQ ID NO: 9106 - DNA, 30 bp, synthetic construct; identical to SEQ ID NO: 8362
  source 1..30: mol_type = other DNA

SEQ ID NO: 9107 - DNA, 31 bp, synthetic construct; identical to SEQ ID NO: 8363
  source 1..31: mol_type = other DNA

SEQ ID NO: 9108 - DNA, 32 bp, synthetic construct; identical to SEQ ID NO: 8364
  source 1..32: mol_type = other DNA

SEQ ID NO: 9109 - DNA, 33 bp, synthetic construct; identical to SEQ ID NO: 8365
  source 1..33: mol_type = other DNA

SEQ ID NO: 9110 - DNA, 34 bp, synthetic construct; identical to SEQ ID NO: 8366
  source 1..34: mol_type = other DNA

SEQ ID NO: 9111 - DNA, 35 bp, synthetic construct; identical to SEQ ID NO: 8367
  source 1..35: mol_type = other DNA

SEQ ID NO: 9112 - DNA, 36 bp, synthetic construct; identical to SEQ ID NO: 8368
  source 1..36: mol_type = other DNA

SEQ ID NO: 9113 - DNA, 37 bp, synthetic construct; identical to SEQ ID NO: 8369
  source 1..37: mol_type = other DNA

SEQ ID NO: 9114 - DNA, 38 bp, synthetic construct; identical to SEQ ID NO: 8370
  source 1..38: mol_type = other DNA

SEQ ID NO: 9115 - DNA, 39 bp, synthetic construct; identical to SEQ ID NO: 8371
  source 1..39: mol_type = other DNA

SEQ ID NO: 9116 - DNA, 40 bp, synthetic construct; identical to SEQ ID NO: 8372
  source 1..40: mol_type = other DNA

SEQ ID NO: 9117 - DNA, 16 bp, synthetic construct
  source 1..16: mol_type = other DNA
tttggtgttagctatg

SEQ ID NO: 9118 - DNA, 16 bp, synthetic construct
  source 1..16: mol_type = other DNA
tttggtgtttcctatg

SEQ ID NO: 9119 - DNA, 17 bp, synthetic construct
  source 1..17: mol_type = other DNA
ctttggtgtttcctatg

SEQ ID NO: 9120 - DNA, 17 bp, synthetic construct
  source 1..17: mol_type = other DNA
ctttggtgttagctatg

SEQ ID NO: 9121 - DNA, 18 bp, synthetic construct
  source 1..18: mol_type = other DNA
tctttggtgtttcctatg

SEQ ID NO: 9122 - DNA, 18 bp, synthetic construct
  source 1..18: mol_type = other DNA
tctttggtgttagctatg

SEQ ID NO: 9123 - DNA, 19 bp, synthetic construct
  source 1..19: mol_type = other DNA
atctttggtgtttcctatg

SEQ ID NO: 9124 - DNA, 19 bp, synthetic construct
  source 1..19: mol_type = other DNA
atctttggtgttagctatg

SEQ ID NO: 9125 - DNA, 20 bp, synthetic construct
  source 1..20: mol_type = other DNA
catctttggtgtttcctatg

SEQ ID NO: 9126 - DNA, 20 bp, synthetic construct
  source 1..20: mol_type = other DNA
catctttggtgttagctatg

SEQ ID NO: 9127 - DNA, 21 bp, synthetic construct
  source 1..21: mol_type = other DNA
tcatctttggtgtttcctatg

SEQ ID NO: 9128 - DNA, 21 bp, synthetic construct
  source 1..21: mol_type = other DNA
tcatctttggtgttagctatg

SEQ ID NO: 9129 - DNA, 22 bp, synthetic construct
  source 1..22: mol_type = other DNA
atcatctttggtgtttcctatg

SEQ ID NO: 9130 - DNA, 22 bp, synthetic construct
  source 1..22: mol_type = other DNA
atcatctttggtgttagctatg

SEQ ID NO: 9131 - DNA, 23 bp, synthetic construct
  source 1..23: mol_type = other DNA
tatcatctttggtgttagctatg

SEQ ID NO: 9132 - DNA, 23 bp, synthetic construct
  source 1..23: mol_type = other DNA
tatcatctttggtgtttcctatg

SEQ ID NO: 9133 - DNA, 24 bp, synthetic construct
  source 1..24: mol_type = other DNA
atatcatctttggtgttagctatg

SEQ ID NO: 9134 - DNA, 24 bp, synthetic construct
  source 1..24: mol_type = other DNA
atatcatctttggtgtttcctatg

SEQ ID NO: 9135 - DNA, 25 bp, synthetic construct
  source 1..25: mol_type = other DNA
aatatcatctttggtgtttcctatg

SEQ ID NO: 9136 - DNA, 25 bp, synthetic construct
  source 1..25: mol_type = other DNA
aatatcatctttggtgttagctatg

SEQ ID NO: 9137 - DNA, 26 bp, synthetic construct
  source 1..26: mol_type = other DNA
aaatatcatctttggtgtttcctatg

SEQ ID NO: 9138 - DNA, 26 bp, synthetic construct
  source 1..26: mol_type = other DNA
aaatatcatctttggtgttagctatg

SEQ ID NO: 9139 - DNA, 27 bp, synthetic construct
  source 1..27: mol_type = other DNA
aaaatatcatctttggtgttagctatg

SEQ ID NO: 9140 - DNA, 27 bp, synthetic construct
  source 1..27: mol_type = other DNA
aaaatatcatctttggtgtttcctatg

SEQ ID NO: 9141 - DNA, 28 bp, synthetic construct
  source 1..28: mol_type = other DNA
gaaaatatcatctttggtgttagctatg

SEQ ID NO: 9142 - DNA, 28 bp, synthetic construct
  source 1..28: mol_type = other DNA
gaaaatatcatctttggtgtttcctatg

SEQ ID NO: 9143 - DNA, 29 bp, synthetic construct
  source 1..29: mol_type = other DNA
agaaaatatcatctttggtgttagctatg

SEQ ID NO: 9144 - DNA, 29 bp, synthetic construct
  source 1..29: mol_type = other DNA
agaaaatatcatctttggtgtttcctatg

SEQ ID NO: 9145 - DNA, 30 bp, synthetic construct; identical to SEQ ID NO: 8393
  source 1..30: mol_type = other DNA

SEQ ID NO: 9146 - DNA, 30 bp, synthetic construct; identical to SEQ ID NO: 8394
  source 1..30: mol_type = other DNA

SEQ ID NO: 9147 - DNA, 31 bp, synthetic construct; identical to SEQ ID NO: 8396
  source 1..31: mol_type = other DNA

SEQ ID NO: 9148 - DNA, 31 bp, synthetic construct; identical to SEQ ID NO: 8395
  source 1..31: mol_type = other DNA

SEQ ID NO: 9149 - DNA, 32 bp, synthetic construct; identical to SEQ ID NO: 8398
  source 1..32: mol_type = other DNA

SEQ ID NO: 9150 - DNA, 32 bp, synthetic construct; identical to SEQ ID NO: 8397
  source 1..32: mol_type = other DNA

SEQ ID NO: 9151 - DNA, 33 bp, synthetic construct; identical to SEQ ID NO: 8400
  source 1..33: mol_type = other DNA

SEQ ID NO: 9152 - DNA, 33 bp, synthetic construct; identical to SEQ ID NO: 8399
  source 1..33: mol_type = other DNA

SEQ ID NO: 9153 - DNA, 34 bp, synthetic construct; identical to SEQ ID NO: 8401
  source 1..34: mol_type = other DNA

SEQ ID NO: 9154 - DNA, 34 bp, synthetic construct; identical to SEQ ID NO: 8402
  source 1..34: mol_type = other DNA

SEQ ID NO: 9155 - DNA, 35 bp, synthetic construct; identical to SEQ ID NO: 8404
  source 1..35: mol_type = other DNA

SEQ ID NO: 9156 - DNA, 35 bp, synthetic construct; identical to SEQ ID NO: 8403
  source 1..35: mol_type = other DNA

SEQ ID NO: 9157 - DNA, 36 bp, synthetic construct; identical to SEQ ID NO: 8405
  source 1..36: mol_type = other DNA

SEQ ID NO: 9158 - DNA, 36 bp, synthetic construct; identical to SEQ ID NO: 8406
  source 1..36: mol_type = other DNA

SEQ ID NO: 9159 - DNA, 37 bp, synthetic construct; identical to SEQ ID NO: 8407
  source 1..37: mol_type = other DNA

SEQ ID NO: 9160 - DNA, 37 bp, synthetic construct; identical to SEQ ID NO: 8408
  source 1..37: mol_type = other DNA

SEQ ID NO: 9161 - DNA, 38 bp, synthetic construct; identical to SEQ ID NO: 8409
  source 1..38: mol_type = other DNA

SEQ ID NO: 9162 - DNA, 38 bp, synthetic construct; identical to SEQ ID NO: 8410
  source 1..38: mol_type = other DNA

SEQ ID NO: 9163 - DNA, 39 bp, synthetic construct; identical to SEQ ID NO: 8411
  source 1..39: mol_type = other DNA

SEQ ID NO: 9164 - DNA, 39 bp, synthetic construct; identical to SEQ ID NO: 8412
  source 1..39: mol_type = other DNA

SEQ ID NO: 9165 - DNA, 40 bp, synthetic construct; identical to SEQ ID NO: 8413
  source 1..40: mol_type = other DNA

SEQ ID NO: 9166 - DNA, 40 bp, synthetic construct; identical to SEQ ID NO: 8414
  source 1..40: mol_type = other DNA

SEQ ID NO: 9167 - DNA, 34 bp, synthetic construct
  source 1..34: mol_type = other DNA
tttggtgtttcctatgatgaatatagatacagaa

SEQ ID NO: 9168 - DNA, 35 bp, synthetic construct
  source 1..35: mol_type = other DNA
ctttggtgtttcctatgatgaatatagatacagaa

SEQ ID NO: 9169 - DNA, 36 bp, synthetic construct; identical to SEQ ID NO: 8851
  source 1..36: mol_type = other DNA

SEQ ID NO: 9170 - DNA, 37 bp, synthetic construct; identical to SEQ ID NO: 8852
  source 1..37: mol_type = other DNA

SEQ ID NO: 9171 - DNA, 38 bp, synthetic construct; identical to SEQ ID NO: 8415
  source 1..38: mol_type = other DNA

SEQ ID NO: 9172 - DNA, 39 bp, synthetic construct; identical to SEQ ID NO: 8416
  source 1..39: mol_type = other DNA

SEQ ID NO: 9173 - DNA, 40 bp, synthetic construct; identical to SEQ ID NO: 8417
  source 1..40: mol_type = other DNA

SEQ ID NO: 9174 - DNA, 40 bp, synthetic construct
  source 1..40: mol_type = other DNA
tttggtgtttcctatgatgaatatagatacagaagcgtca

SEQ ID NO: 9175 - DNA, 32 bp, synthetic construct; identical to SEQ ID NO: 8420
  source 1..32: mol_type = other DNA

SEQ ID NO: 9176 - DNA, 33 bp, synthetic construct; identical to SEQ ID NO: 8421
  source 1..33: mol_type = other DNA

SEQ ID NO: 9177 - DNA, 34 bp, synthetic construct; identical to SEQ ID NO: 8422
  source 1..34: mol_type = other DNA

SEQ ID NO: 9178 - DNA, 35 bp, synthetic construct; identical to SEQ ID NO: 8423
  source 1..35: mol_type = other DNA

SEQ ID NO: 9179 - DNA, 36 bp, synthetic construct; identical to SEQ ID NO: 8424
  source 1..36: mol_type = other DNA

SEQ ID NO: 9180 - DNA, 37 bp, synthetic construct; identical to SEQ ID NO: 8425
  source 1..37: mol_type = other DNA

SEQ ID NO: 9181 - DNA, 38 bp, synthetic construct; identical to SEQ ID NO: 8426
  source 1..38: mol_type = other DNA

SEQ ID NO: 9182 - DNA, 39 bp, synthetic construct; identical to SEQ ID NO: 8427
  source 1..39: mol_type = other DNA

SEQ ID NO: 9183 - DNA, 40 bp, synthetic construct; identical to SEQ ID NO: 8428
  source 1..40: mol_type = other DNA

SEQ ID NO: 9184 - DNA, 10 bp, synthetic construct
  source 1..10: mol_type = other DNA
atcatctttg

SEQ ID NO: 9185 - DNA, 11 bp, synthetic construct
  source 1..11: mol_type = other DNA
tatcatctttg

SEQ ID NO: 9186 - DNA, 12 bp, synthetic construct
  source 1..12: mol_type = other DNA
atatcatctttg

SEQ ID NO: 9187 - DNA, 13 bp, synthetic construct
  source 1..13: mol_type = other DNA
aatatcatctttg

SEQ ID NO: 9188 - DNA, 14 bp, synthetic construct
  source 1..14: mol_type = other DNA
aaatatcatctttg

SEQ ID NO: 9189 - DNA, 15 bp, synthetic construct
  source 1..15: mol_type = other DNA
aaaatatcatctttg

SEQ ID NO: 9190 - DNA, 16 bp, synthetic construct
  source 1..16: mol_type = other DNA
gaaaatatcatctttg

SEQ ID NO: 9191 - DNA, 17 bp, synthetic construct
  source 1..17: mol_type = other DNA
agaaaatatcatctttg

SEQ ID NO: 9192 - DNA, 18 bp, synthetic construct
  source 1..18: mol_type = other DNA
aagaaaatatcatctttg

SEQ ID NO: 9193 - DNA, 19 bp, synthetic construct
  source 1..19: mol_type = other DNA
aaagaaaatatcatctttg

SEQ ID NO: 9194 - DNA, 20 bp, synthetic construct
  source 1..20: mol_type = other DNA
taaagaaaatatcatctttg

SEQ ID NO: 9195 - DNA, 21 bp, synthetic construct
  source 1..21: mol_type = other DNA
ttaaagaaaatatcatctttg

SEQ ID NO: 9196 - DNA, 22 bp, synthetic construct
  source 1..22: mol_type = other DNA
attaaagaaaatatcatctttg

SEQ ID NO: 9197 - DNA, 23 bp, synthetic construct
  source 1..23: mol_type = other DNA
cattaaagaaaatatcatctttg

SEQ ID NO: 9198 - DNA, 24 bp, synthetic construct
  source 1..24: mol_type = other DNA
ccattaaagaaaatatcatctttg

SEQ ID NO: 9199 - DNA, 25 bp, synthetic construct
  source 1..25: mol_type = other DNA
accattaaagaaaatatcatctttg

SEQ ID NO: 9200 - DNA, 26 bp, synthetic construct
  source 1..26: mol_type = other DNA
caccattaaagaaaatatcatctttg

SEQ ID NO: 9201 - DNA, 27 bp, synthetic construct
  source 1..27: mol_type = other DNA
gcaccattaaagaaaatatcatctttg

SEQ ID NO: 9202 - DNA, 28 bp, synthetic construct
  source 1..28: mol_type = other DNA
ggcaccattaaagaaaatatcatctttg

SEQ ID NO: 9203 - DNA, 29 bp, synthetic construct
  source 1..29: mol_type = other DNA
tggcaccattaaagaaaatatcatctttg

SEQ ID NO: 9204 - DNA, 30 bp, synthetic construct; identical to SEQ ID NO: 8449
  source 1..30: mol_type = other DNA

SEQ ID NO: 9205 - DNA, 31 bp, synthetic construct; identical to SEQ ID NO: 8450
  source 1..31: mol_type = other DNA

SEQ ID NO: 9206 - DNA, 32 bp, synthetic construct; identical to SEQ ID NO: 8451
  source 1..32: mol_type = other DNA

SEQ ID NO: 9207 - DNA, 33 bp, synthetic construct; identical to SEQ ID NO: 8452
  source 1..33: mol_type = other DNA

SEQ ID NO: 9208 - DNA, 34 bp, synthetic construct; identical to SEQ ID NO: 8453
  source 1..34: mol_type = other DNA

SEQ ID NO: 9209 - DNA, 35 bp, synthetic construct; identical to SEQ ID NO: 8454
  source 1..35: mol_type = other DNA

SEQ ID NO: 9210 - DNA, 36 bp, synthetic construct; identical to SEQ ID NO: 8455
  source 1..36: mol_type = other DNA

SEQ ID NO: 9211 - DNA, 37 bp, synthetic construct; identical to SEQ ID NO: 8456
  source 1..37: mol_type = other DNA

SEQ ID NO: 9212 - DNA, 38 bp, synthetic construct; identical to SEQ ID NO: 8457
  source 1..38: mol_type = other DNA

SEQ ID NO: 9213 - DNA, 39 bp, synthetic construct; identical to SEQ ID NO: 8458
  source 1..39: mol_type = other DNA

SEQ ID NO: 9214 - DNA, 40 bp, synthetic construct; identical to SEQ ID NO: 8459
  source 1..40: mol_type = other DNA

SEQ ID NO: 9215 - DNA, 17 bp, synthetic construct
  source 1..17: mol_type = other DNA
tttggtgtttcttatga

SEQ ID NO: 9216 - DNA, 17 bp, synthetic construct
  source 1..17: mol_type = other DNA
tttggtgtttcctatga

SEQ ID NO: 9217 - DNA, 18 bp, synthetic construct
  source 1..18: mol_type = other DNA
ctttggtgtttcctatga

SEQ ID NO: 9218 - DNA, 18 bp, synthetic construct
  source 1..18: mol_type = other DNA
ctttggtgtttcttatga

SEQ ID NO: 9219 - DNA, 19 bp, synthetic construct
  source 1..19: mol_type = other DNA
tctttggtgtttcttatga

SEQ ID NO: 9220 - DNA, 19 bp, synthetic construct
  source 1..19: mol_type = other DNA
tctttggtgtttcctatga

SEQ ID NO: 9221 - DNA, 20 bp, synthetic construct
  source 1..20: mol_type = other DNA
atctttggtgtttcttatga

SEQ ID NO: 9222 - DNA, 20 bp, synthetic construct
  source 1..20: mol_type = other DNA
atctttggtgtttcctatga

SEQ ID NO: 9223 - DNA, 21 bp, synthetic construct
  source 1..21: mol_type = other DNA
catctttggtgtttcctatga

SEQ ID NO: 9224 - DNA, 21 bp, synthetic construct
  source 1..21: mol_type = other DNA
catctttggtgtttcttatga

SEQ ID NO: 9225 - DNA, 22 bp, synthetic construct
  source 1..22: mol_type = other DNA
tcatctttggtgtttcctatga

SEQ ID NO: 9226 - DNA, 22 bp, synthetic construct
  source 1..22: mol_type = other DNA
tcatctttggtgtttcttatga

SEQ ID NO: 9227 - DNA, 23 bp, synthetic construct
  source 1..23: mol_type = other DNA
atcatctttggtgtttcttatga

SEQ ID NO: 9228 - DNA, 23 bp, synthetic construct
  source 1..23: mol_type = other DNA
atcatctttggtgtttcctatga

SEQ ID NO: 9229 - DNA, 24 bp, synthetic construct
  source 1..24: mol_type = other DNA
tatcatctttggtgtttcctatga

SEQ ID NO: 9230 - DNA, 24 bp, synthetic construct
  source 1..24: mol_type = other DNA
tatcatctttggtgtttcttatga

SEQ ID NO: 9231 - DNA, 25 bp, synthetic construct
  source 1..25: mol_type = other DNA
atatcatctttggtgtttcctatga

SEQ ID NO: 9232 - DNA, 25 bp, synthetic construct
  source 1..25: mol_type = other DNA
atatcatctttggtgtttcttatga

SEQ ID NO: 9233 - DNA, 26 bp, synthetic construct
  source 1..26: mol_type = other DNA
aatatcatctttggtgtttcctatga

SEQ ID NO: 9234 - DNA, 26 bp, synthetic construct
  source 1..26: mol_type = other DNA
aatatcatctttggtgtttcttatga

SEQ ID NO: 9235 - DNA, 27 bp, synthetic construct
  source 1..27: mol_type = other DNA
aaatatcatctttggtgtttcttatga

SEQ ID NO: 9236 - DNA, 27 bp, synthetic construct
  source 1..27: mol_type = other DNA
aaatatcatctttggtgtttcctatga

SEQ ID NO: 9237 - DNA, 28 bp, synthetic construct
  source 1..28: mol_type = other DNA
aaaatatcatctttggtgtttcttatga

SEQ ID NO: 9238 - DNA, 28 bp, synthetic construct
  source 1..28: mol_type = other DNA
aaaatatcatctttggtgtttcctatga

SEQ ID NO: 9239 - DNA, 29 bp, synthetic construct
  source 1..29: mol_type = other DNA
gaaaatatcatctttggtgtttcctatga

SEQ ID NO: 9240 - DNA, 29 bp, synthetic construct
  source 1..29: mol_type = other DNA
gaaaatatcatctttggtgtttcttatga

SEQ ID NO: 9241 - DNA, 30 bp, synthetic construct; identical to SEQ ID NO: 8478
  source 1..30: mol_type = other DNA

SEQ ID NO: 9242 - DNA, 30 bp, synthetic construct; identical to SEQ ID NO: 8479
  source 1..30: mol_type = other DNA

SEQ ID NO: 9243 - DNA, 31 bp, synthetic construct; identical to SEQ ID NO: 8481
  source 1..31: mol_type = other DNA

SEQ ID NO: 9244 - DNA, 31 bp, synthetic construct; identical to SEQ ID NO: 8480
  source 1..31: mol_type = other DNA

SEQ ID NO: 9245 - DNA, 32 bp, synthetic construct; identical to SEQ ID NO: 8483
  source 1..32: mol_type = other DNA

SEQ ID NO: 9246 - DNA, 32 bp, synthetic construct; identical to SEQ ID NO: 8482
  source 1..32: mol_type = other DNA

SEQ ID NO: 9247 - DNA, 33 bp, synthetic construct; identical to SEQ ID NO: 8484
  source 1..33: mol_type = other DNA

SEQ ID NO: 9248 - DNA, 33 bp, synthetic construct; identical to SEQ ID NO: 8485
  source 1..33: mol_type = other DNA

SEQ ID NO: 9249 - DNA, 34 bp, synthetic construct; identical to SEQ ID NO: 8486
  source 1..34: mol_type = other DNA

SEQ ID NO: 9250 - DNA, 34 bp, synthetic construct; identical to SEQ ID NO: 8487
  source 1..34: mol_type = other DNA

SEQ ID NO: 9251 - DNA, 35 bp, synthetic construct; identical to SEQ ID NO: 8488
  source 1..35: mol_type = other DNA

SEQ ID NO: 9252 - DNA, 35 bp, synthetic construct; identical to SEQ ID NO: 8489
  source 1..35: mol_type = other DNA

SEQ ID NO: 9253 - DNA, 36 bp, synthetic construct; identical to SEQ ID NO: 8490
  source 1..36: mol_type = other DNA

SEQ ID NO: 9254 - DNA, 36 bp, synthetic construct; identical to SEQ ID NO: 8491
  source 1..36: mol_type = other DNA

SEQ ID NO: 9255 - DNA, 37 bp, synthetic construct; identical to SEQ ID NO: 8492
  source 1..37: mol_type = other DNA

SEQ ID NO: 9256 - DNA, 37 bp, synthetic construct; identical to SEQ ID NO: 8493
  source 1..37: mol_type = other DNA

SEQ ID NO: 9257 - DNA, 38 bp, synthetic construct; identical to SEQ ID NO: 8495
  source 1..38: mol_type = other DNA

SEQ ID NO: 9258 - DNA, 38 bp, synthetic construct; identical to SEQ ID NO: 8494
  source 1..38: mol_type = other DNA

SEQ ID NO: 9259 - DNA, 39 bp, synthetic construct; identical to SEQ ID NO: 8496
  source 1..39: mol_type = other DNA

SEQ ID NO: 9260 - DNA, 39 bp, synthetic construct; identical to SEQ ID NO: 8497
  source 1..39: mol_type = other DNA

SEQ ID NO: 9261 - DNA, 40 bp, synthetic construct; identical to SEQ ID NO: 8498
  source 1..40: mol_type = other DNA

SEQ ID NO: 9262 - DNA, 40 bp, synthetic construct; identical to SEQ ID NO: 8499
  source 1..40: mol_type = other DNA

SEQ ID NO: 9263 - DNA, 15 bp, synthetic construct
  source 1..15: mol_type = other DNA
tttggtgtttcctat

SEQ ID NO: 9264 - DNA, 16 bp, synthetic construct
  source 1..16: mol_type = other DNA
ctttggtgtttcctat

SEQ ID NO: 9265 - DNA, 17 bp, synthetic construct
  source 1..17: mol_type = other DNA
tctttggtgtttcctat

SEQ ID NO: 9266 - DNA, 18 bp, synthetic construct
  source 1..18: mol_type = other DNA
atctttggtgtttcctat

SEQ ID NO: 9267 - DNA, 19 bp, synthetic construct
  source 1..19: mol_type = other DNA
catctttggtgtttcctat

SEQ ID NO: 9268 - DNA, 20 bp, synthetic construct
  source 1..20: mol_type = other DNA
tcatctttggtgtttcctat

SEQ ID NO: 9269 - DNA, 21 bp, synthetic construct
  source 1..21: mol_type = other DNA
atcatctttggtgtttcctat

SEQ ID NO: 9270 - DNA, 22 bp, synthetic construct
  source 1..22: mol_type = other DNA
tatcatctttggtgtttcctat

SEQ ID NO: 9271 - DNA, 23 bp, synthetic construct
  source 1..23: mol_type = other DNA
atatcatctttggtgtttcctat

SEQ ID NO: 9272 - DNA, 24 bp, synthetic construct
  source 1..24: mol_type = other DNA
aatatcatctttggtgtttcctat

SEQ ID NO: 9273 - DNA, 25 bp, synthetic construct
  source 1..25: mol_type = other DNA
aaatatcatctttggtgtttcctat

SEQ ID NO: 9274 - DNA, 26 bp, synthetic construct
  source 1..26: mol_type = other DNA
aaaatatcatctttggtgtttcctat

SEQ ID NO: 9275 - DNA, 27 bp, synthetic construct
  source 1..27: mol_type = other DNA
gaaaatatcatctttggtgtttcctat

SEQ ID NO: 9276 - DNA, 28 bp, synthetic construct
  source 1..28: mol_type = other DNA
agaaaatatcatctttggtgtttcctat

SEQ ID NO: 9277 - DNA, 29 bp, synthetic construct
  source 1..29: mol_type = other DNA
aagaaaatatcatctttggtgtttcctat

SEQ ID NO: 9278 - DNA, 30 bp, synthetic construct; identical to SEQ ID NO: 8511
  source 1..30: mol_type = other DNA

SEQ ID NO: 9279 - DNA, 31 bp, synthetic construct; identical to SEQ ID NO: 8512
  source 1..31: mol_type = other DNA

SEQ ID NO: 9280 - DNA, 32 bp, synthetic construct; identical to SEQ ID NO: 8513
  source 1..32: mol_type = other DNA

SEQ ID NO: 9281 - DNA, 33 bp, synthetic construct; identical to SEQ ID NO: 8514
  source 1..33: mol_type = other DNA

SEQ ID NO: 9282 - DNA, 34 bp, synthetic construct; identical to SEQ ID NO: 8515
  source 1..34: mol_type = other DNA

SEQ ID NO: 9283 - DNA, 35 bp, synthetic construct; identical to SEQ ID NO: 8516
  source 1..35: mol_type = other DNA

SEQ ID NO: 9284 - DNA, 36 bp, synthetic construct; identical to SEQ ID NO: 8517
  source 1..36: mol_type = other DNA

SEQ ID NO: 9285 - DNA, 37 bp, synthetic construct; identical to SEQ ID NO: 8518
  source 1..37: mol_type = other DNA

SEQ ID NO: 9286 - DNA, 38 bp, synthetic construct; identical to SEQ ID NO: 8519
  source 1..38: mol_type = other DNA

SEQ ID NO: 9287 - DNA, 39 bp, synthetic construct; identical to SEQ ID NO: 8520
  source 1..39: mol_type = other DNA

SEQ ID NO: 9288 - DNA, 40 bp, synthetic construct; identical to SEQ ID NO: 8521
  source 1..40: mol_type = other DNA

SEQ ID NO: 9289 - DNA, 10 bp, synthetic construct
  source 1..10: mol_type = other DNA
aacaccaaag

SEQ ID NO: 9290 - DNA, 11 bp, synthetic construct
  source 1..11: mol_type = other DNA
aaacaccaaag

SEQ ID NO: 9291 - DNA, 12 bp, synthetic construct
  source 1..12: mol_type = other DNA
gaaacaccaaag

SEQ ID NO: 9292 - DNA, 13 bp, synthetic construct
  source 1..13: mol_type = other DNA
ggaaacaccaaag

SEQ ID NO: 9293 - DNA, 14 bp, synthetic construct
  source 1..14: mol_type = other DNA
aggaaacaccaaag

SEQ ID NO: 9294 - DNA, 15 bp, synthetic construct
  source 1..15: mol_type = other DNA
taggaaacaccaaag

SEQ ID NO: 9295 - DNA, 16 bp, synthetic construct
  source 1..16: mol_type = other DNA
ataggaaacaccaaag

SEQ ID NO: 9296 - DNA, 17 bp, synthetic construct
  source 1..17: mol_type = other DNA
cataggaaacaccaaag

SEQ ID NO: 9297 - DNA, 18 bp, synthetic construct
  source 1..18: mol_type = other DNA
tcataggaaacaccaaag

SEQ ID NO: 9298 - DNA, 19 bp, synthetic construct
  source 1..19: mol_type = other DNA
atcataggaaacaccaaag

SEQ ID NO: 9299 - DNA, 20 bp, synthetic construct
  source 1..20: mol_type = other DNA
catcataggaaacaccaaag

SEQ ID NO: 9300 - DNA, 21 bp, synthetic construct
  source 1..21: mol_type = other DNA
tcatcataggaaacaccaaag

SEQ ID NO: 9301 - DNA, 22 bp, synthetic construct
  source 1..22: mol_type = other DNA
ttcatcataggaaacaccaaag

SEQ ID NO: 9302 - DNA, 23 bp, synthetic construct
  source 1..23: mol_type = other DNA
attcatcataggaaacaccaaag

SEQ ID NO: 9303 - DNA, 24 bp, synthetic construct
  source 1..24: mol_type = other DNA
tattcatcataggaaacaccaaag

SEQ ID NO: 9304 - DNA, 25 bp, synthetic construct
  source 1..25: mol_type = other DNA
atattcatcataggaaacaccaaag

SEQ ID NO: 9305 - DNA, 26 bp, synthetic construct
  source 1..26: mol_type = other DNA
tatattcatcataggaaacaccaaag

SEQ ID NO: 9306 - DNA, 27 bp, synthetic construct
  source 1..27: mol_type = other DNA
ctatattcatcataggaaacaccaaag

SEQ ID NO: 9307 - DNA, 28 bp, synthetic construct
  source 1..28: mol_type = other DNA
tctatattcatcataggaaacaccaaag

SEQ ID NO: 9308 - DNA, 29 bp, synthetic construct
  source 1..29: mol_type = other DNA
atctatattcatcataggaaacaccaaag

SEQ ID NO: 9309 - DNA, 30 bp, synthetic construct; identical to SEQ ID NO: 8659
  source 1..30: mol_type = other DNA

SEQ ID NO: 9310 - DNA, 31 bp, synthetic construct; identical to SEQ ID NO: 8660
  source 1..31: mol_type = other DNA

SEQ ID NO: 9311 - DNA, 32 bp, synthetic construct; identical to SEQ ID NO: 8661
  source 1..32: mol_type = other DNA

SEQ ID NO: 9312 - DNA, 33 bp, synthetic construct; identical to SEQ ID NO: 8662
  source 1..33: mol_type = other DNA

SEQ ID NO: 9313 - DNA, 34 bp, synthetic construct; identical to SEQ ID NO: 8663
  source 1..34: mol_type = other DNA

SEQ ID NO: 9314 - DNA, 35 bp, synthetic construct; identical to SEQ ID NO: 8664
  source 1..35: mol_type = other DNA

SEQ ID NO: 9315 - DNA, 36 bp, synthetic construct; identical to SEQ ID NO: 8665
  source 1..36: mol_type = other DNA

SEQ ID NO: 9316 - DNA, 37 bp, synthetic construct; identical to SEQ ID NO: 8666
  source 1..37: mol_type = other DNA

SEQ ID NO: 9317 - DNA, 38 bp, synthetic construct; identical to SEQ ID NO: 8667
  source 1..38: mol_type = other DNA

SEQ ID NO: 9318 - DNA, 39 bp, synthetic construct; identical to SEQ ID NO: 8668
  source 1..39: mol_type = other DNA

SEQ ID NO: 9319 - DNA, 40 bp, synthetic construct; identical to SEQ ID NO: 8669
  source 1..40: mol_type = other DNA

SEQ ID NO: 9320 - DNA, 10 bp, synthetic construct
  source 1..10: mol_type = other DNA
aaacaccaaa

SEQ ID NO: 9321 - DNA, 11 bp, synthetic construct
  source 1..11: mol_type = other DNA
gaaacaccaaa

SEQ ID NO: 9322 - DNA, 12 bp, synthetic construct
  source 1..12: mol_type = other DNA
ggaaacaccaaa

SEQ ID NO: 9323 - DNA, 13 bp, synthetic construct
  source 1..13: mol_type = other DNA
aggaaacaccaaa

SEQ ID NO: 9324 - DNA, 14 bp, synthetic construct
  source 1..14: mol_type = other DNA
taggaaacaccaaa

SEQ ID NO: 9325 - DNA, 15 bp, synthetic construct
  source 1..15: mol_type = other DNA
ataggaaacaccaaa

SEQ ID NO: 9326 - DNA, 16 bp, synthetic construct
  source 1..16: mol_type = other DNA
cataggaaacaccaaa

SEQ ID NO: 9327 - DNA, 17 bp, synthetic construct
  source 1..17: mol_type = other DNA
tcataggaaacaccaaa

SEQ ID NO: 9328 - DNA, 18 bp, synthetic construct
  source 1..18: mol_type = other DNA
atcataggaaacaccaaa

SEQ ID NO: 9329 - DNA, 19 bp, synthetic construct
  source 1..19: mol_type = other DNA
catcataggaaacaccaaa

SEQ ID NO: 9330 - DNA, 20 bp, synthetic construct
  source 1..20: mol_type = other DNA
tcatcataggaaacaccaaa

SEQ ID NO: 9331 - DNA, 21 bp, synthetic construct
  source 1..21: mol_type = other DNA
ttcatcataggaaacaccaaa

SEQ ID NO: 9332 - DNA, 22 bp, synthetic construct
  source 1..22: mol_type = other DNA
attcatcataggaaacaccaaa

SEQ ID NO: 9333 - DNA, 23 bp, synthetic construct
  source 1..23: mol_type = other DNA
tattcatcataggaaacaccaaa

SEQ ID NO: 9334 - DNA, 24 bp, synthetic construct
  source 1..24: mol_type = other DNA
atattcatcataggaaacaccaaa

SEQ ID NO: 9335 - DNA, 25 bp, synthetic construct
  source 1..25: mol_type = other DNA
tatattcatcataggaaacaccaaa

SEQ ID NO: 9336 - DNA, 26 bp, synthetic construct
  source 1..26: mol_type = other DNA
ctatattcatcataggaaacaccaaa

SEQ ID NO: 9337 - DNA, 27 bp, synthetic construct
  source 1..27: mol_type = other DNA
tctatattcatcataggaaacaccaaa

SEQ ID NO: 9338 - DNA, 28 bp, synthetic construct
  source 1..28: mol_type = other DNA
atctatattcatcataggaaacaccaaa

SEQ ID NO: 9339 - DNA, 29 bp, synthetic construct
  source 1..29: mol_type = other DNA
tatctatattcatcataggaaacaccaaa

SEQ ID NO: 9340 - DNA, 30 bp, synthetic construct
  source 1..30: mol_type = other DNA
gtatctatattcatcataggaaacaccaaa

SEQ ID NO: 9341 - DNA, 31 bp, synthetic construct
  source 1..31: mol_type = other DNA
tgtatctatattcatcataggaaacaccaaa

SEQ ID NO: 9342 - DNA, 32 bp, synthetic construct
  source 1..32: mol_type = other DNA
ctgtatctatattcatcataggaaacaccaaa

SEQ ID NO: 9343 - DNA, 33 bp, synthetic construct
  source 1..33: mol_type = other DNA
tctgtatctatattcatcataggaaacaccaaa

SEQ ID NO: 9344 - DNA, 34 bp, synthetic construct
  source 1..34: mol_type = other DNA
ttctgtatctatattcatcataggaaacaccaaa

SEQ ID NO: 9345 - DNA, 35 bp, synthetic construct
  source 1..35: mol_type = other DNA
cttctgtatctatattcatcataggaaacaccaaa

SEQ ID NO: 9346 - DNA, 36 bp, synthetic construct
  source 1..36: mol_type = other DNA
gcttctgtatctatattcatcataggaaacaccaaa

SEQ ID NO: 9347 - DNA, 37 bp, synthetic construct
  source 1..37: mol_type = other DNA
cgcttctgtatctatattcatcataggaaacaccaaa

SEQ ID NO: 9348 - DNA, 38 bp, synthetic construct
  source 1..38: mol_type = other DNA
acgcttctgtatctatattcatcataggaaacaccaaa

SEQ ID NO: 9349 - DNA, 39 bp, synthetic construct
  source 1..39: mol_type = other DNA
gacgcttctgtatctatattcatcataggaaacaccaaa

SEQ ID NO: 9350 - DNA, 40 bp, synthetic construct
  source 1..40: mol_type = other DNA
tgacgcttctgtatctatattcatcataggaaacaccaaa

SEQ ID NO: 9351 - DNA, 19 bp, synthetic construct
  source 1..19: mol_type = other DNA
aaagatgatattttcttta

SEQ ID NO: 9352 - DNA, 20 bp, synthetic construct
  source 1..20: mol_type = other DNA
caaagatgatattttcttta

SEQ ID NO: 9353 - DNA, 21 bp, synthetic construct
  source 1..21: mol_type = other DNA
ccaaagatgatattttcttta

SEQ ID NO: 9354 - DNA, 22 bp, synthetic construct
  source 1..22: mol_type = other DNA
accaaagatgatattttcttta

SEQ ID NO: 9355 - DNA, 23 bp, synthetic construct
  source 1..23: mol_type = other DNA
caccaaagatgatattttcttta

SEQ ID NO: 9356 - DNA, 24 bp, synthetic construct
  source 1..24: mol_type = other DNA
acaccaaagatgatattttcttta

SEQ ID NO: 9357 - DNA, 25 bp, synthetic construct
  source 1..25: mol_type = other DNA
aacaccaaagatgatattttcttta

SEQ ID NO: 9358 - DNA, 26 bp, synthetic construct
  source 1..26: mol_type = other DNA
aaacaccaaagatgatattttcttta

SEQ ID NO: 9359 - DNA, 27 bp, synthetic construct
  source 1..27: mol_type = other DNA
gaaacaccaaagatgatattttcttta

SEQ ID NO: 9360 - DNA, 28 bp, synthetic construct
  source 1..28: mol_type = other DNA
ggaaacaccaaagatgatattttcttta

SEQ ID NO: 9361 - DNA, 29 bp, synthetic construct
  source 1..29: mol_type = other DNA
aggaaacaccaaagatgatattttcttta

SEQ ID NO: 9362 - DNA, 30 bp, synthetic construct; identical to SEQ ID NO: 8535
  source 1..30: mol_type = other DNA

SEQ ID NO: 9363 - DNA, 31 bp, synthetic construct; identical to SEQ ID NO: 8536
  source 1..31: mol_type = other DNA

SEQ ID NO: 9364 - DNA, 32 bp, synthetic construct; identical to SEQ ID NO: 8537
  source 1..32: mol_type = other DNA

SEQ ID NO: 9365 - DNA, 33 bp, synthetic construct; identical to SEQ ID NO: 8538
  source 1..33: mol_type = other DNA

SEQ ID NO: 9366 - DNA, 34 bp, synthetic construct; identical to SEQ ID NO: 8539
  source 1..34: mol_type = other DNA

SEQ ID NO: 9367 - DNA, 35 bp, synthetic construct; identical to SEQ ID NO: 8540
  source 1..35: mol_type = other DNA

SEQ ID NO: 9368 - DNA, 36 bp, synthetic construct; identical to SEQ ID NO: 8541
  source 1..36: mol_type = other DNA

SEQ ID NO: 9369 - DNA, 37 bp, synthetic construct; identical to SEQ ID NO: 8542
  source 1..37: mol_type = other DNA

SEQ ID NO: 9370 - DNA, 38 bp, synthetic construct; identical to SEQ ID NO: 8543
  source 1..38: mol_type = other DNA

SEQ ID NO: 9371 - DNA, 39 bp, synthetic construct; identical to SEQ ID NO: 8544
  source 1..39: mol_type = other DNA

SEQ ID NO: 9372 - DNA, 40 bp, synthetic construct; identical to SEQ ID NO: 8545
  source 1..40: mol_type = other DNA

SEQ ID NO: 9373 - DNA, 10 bp, synthetic construct
  source 1..10: mol_type = other DNA
tcatttttgg

SEQ ID NO: 9374 - DNA, 10 bp, synthetic construct
  source 1..10: mol_type = other DNA
tcatctttgg

SEQ ID NO: 9375 - DNA, 11 bp, synthetic construct
  source 1..11: mol_type = other DNA
atcatttttgg

SEQ ID NO: 9376 - DNA, 11 bp, synthetic construct
  source 1..11: mol_type = other DNA
atcatctttgg

SEQ ID NO: 9377 - DNA, 12 bp, synthetic construct
  source 1..12: mol_type = other DNA
tatcatttttgg

SEQ ID NO: 9378 - DNA, 12 bp, synthetic construct
  source 1..12: mol_type = other DNA
tatcatctttgg

SEQ ID NO: 9379 - DNA, 13 bp, synthetic construct
  source 1..13: mol_type = other DNA
atatcatctttgg

SEQ ID NO: 9380 - DNA, 13 bp, synthetic construct
  source 1..13: mol_type = other DNA
atatcatttttgg

SEQ ID NO: 9381 - DNA, 14 bp, synthetic construct
  source 1..14: mol_type = other DNA
aatatcatttttgg

SEQ ID NO: 9382 - DNA, 14 bp, synthetic construct
  source 1..14: mol_type = other DNA
aatatcatctttgg

SEQ ID NO: 9383 - DNA, 15 bp, synthetic construct
  source 1..15: mol_type = other DNA
aaatatcatctttgg

SEQ ID NO: 9384 - DNA, 15 bp, synthetic construct
  source 1..15: mol_type = other DNA
aaatatcatttttgg

SEQ ID NO: 9385 - DNA, 16 bp, synthetic construct
  source 1..16: mol_type = other DNA
aaaatatcatttttgg

SEQ ID NO: 9386 - DNA, 16 bp, synthetic construct
  source 1..16: mol_type = other DNA
aaaatatcatctttgg

SEQ ID NO: 9387 - DNA, 17 bp, synthetic construct
  source 1..17: mol_type = other DNA
gaaaatatcatttttgg

SEQ ID NO: 9388 - DNA, 17 bp, synthetic construct
  source 1..17: mol_type = other DNA
gaaaatatcatctttgg

SEQ ID NO: 9389 - DNA, 18 bp, synthetic construct
  source 1..18: mol_type = other DNA
agaaaatatcatctttgg

SEQ ID NO: 9390 - DNA, 18 bp, synthetic construct
  source 1..18: mol_type = other DNA
agaaaatatcatttttgg

SEQ ID NO: 9391 - DNA, 19 bp, synthetic construct
  source 1..19: mol_type = other DNA
aagaaaatatcatttttgg

SEQ ID NO: 9392 - DNA, 19 bp, synthetic construct
  source 1..19: mol_type = other DNA
aagaaaatatcatctttgg

SEQ ID NO: 9393 - DNA, 20 bp, synthetic construct
  source 1..20: mol_type = other DNA
aaagaaaatatcatttttgg

SEQ ID NO: 9394 - DNA, 20 bp, synthetic construct
  source 1..20: mol_type = other DNA
aaagaaaatatcatctttgg

SEQ ID NO: 9395 - DNA, 21 bp, synthetic construct
  source 1..21: mol_type = other DNA
taaagaaaatatcatctttgg

SEQ ID NO: 9396 - DNA, 21 bp, synthetic construct
  source 1..21: mol_type = other DNA
taaagaaaatatcatttttgg

SEQ ID NO: 9397 - DNA, 22 bp, synthetic construct
  source 1..22: mol_type = other DNA
ttaaagaaaatatcatctttgg

SEQ ID NO: 9398 - DNA, 22 bp, synthetic construct
  source 1..22: mol_type = other DNA
ttaaagaaaatatcatttttgg

SEQ ID NO: 9399 - DNA, 23 bp, synthetic construct
  source 1..23: mol_type = other DNA
attaaagaaaatatcatttttgg

SEQ ID NO: 9400 - DNA, 23 bp, synthetic construct
  source 1..23: mol_type = other DNA
attaaagaaaatatcatctttgg

SEQ ID NO: 9401 - DNA, 24 bp, synthetic construct
  source 1..24: mol_type = other DNA
cattaaagaaaatatcatttttgg

SEQ ID NO: 9402 - DNA, 24 bp, synthetic construct
  source 1..24: mol_type = other DNA
cattaaagaaaatatcatctttgg

SEQ ID NO: 9403 - DNA, 25 bp, synthetic construct
  source 1..25: mol_type = other DNA
ccattaaagaaaatatcatttttgg

SEQ ID NO: 9404 - DNA, 25 bp, synthetic construct
  source 1..25: mol_type = other DNA
ccattaaagaaaatatcatctttgg

SEQ ID NO: 9405 - DNA, 26 bp, synthetic construct
  source 1..26: mol_type = other DNA
accattaaagaaaatatcatttttgg

SEQ ID NO: 9406 - DNA, 26 bp, synthetic construct
  source 1..26: mol_type = other DNA
accattaaagaaaatatcatctttgg

SEQ ID NO: 9407 - DNA, 27 bp, synthetic construct
  source 1..27: mol_type = other DNA
caccattaaagaaaatatcatctttgg

SEQ ID NO: 9408 - DNA, 27 bp, synthetic construct
  source 1..27: mol_type = other DNA
caccattaaagaaaatatcatttttgg

SEQ ID NO: 9409 - DNA, 28 bp, synthetic construct
  source 1..28: mol_type = other DNA
gcaccattaaagaaaatatcatctttgg

SEQ ID NO: 9410 - DNA, 28 bp, synthetic construct
  source 1..28: mol_type = other DNA
gcaccattaaagaaaatatcatttttgg

SEQ ID NO: 9411 - DNA, 29 bp, synthetic construct
  source 1..29: mol_type = other DNA
ggcaccattaaagaaaatatcatctttgg

SEQ ID NO: 9412 - DNA, 29 bp, synthetic construct
  source 1..29: mol_type = other DNA
ggcaccattaaagaaaatatcatttttgg

SEQ ID NO: 9413 - DNA, 30 bp, synthetic construct; identical to SEQ ID NO: 8586
  source 1..30: mol_type = other DNA

SEQ ID NO: 9414 - DNA, 30 bp, synthetic construct; identical to SEQ ID NO: 8587
  source 1..30: mol_type = other DNA

SEQ ID NO: 9415 - DNA, 31 bp, synthetic construct; identical to SEQ ID NO: 8589
  source 1..31: mol_type = other DNA

SEQ ID NO: 9416 - DNA, 31 bp, synthetic construct; identical to SEQ ID NO: 8588
  source 1..31: mol_type = other DNA

SEQ ID NO: 9417 - DNA, 32 bp, synthetic construct; identical to SEQ ID NO: 8590
  source 1..32: mol_type = other DNA

SEQ ID NO: 9418 - DNA, 32 bp, synthetic construct; identical to SEQ ID NO: 8591
  source 1..32: mol_type = other DNA

SEQ ID NO: 9419 - DNA, 33 bp, synthetic construct; identical to SEQ ID NO: 8592
  source 1..33: mol_type = other DNA

SEQ ID NO: 9420 - DNA, 33 bp, synthetic construct; identical to SEQ ID NO: 8593
  source 1..33: mol_type = other DNA

SEQ ID NO: 9421 - DNA, 34 bp, synthetic construct; identical to SEQ ID NO: 8594
  source 1..34: mol_type = other DNA

SEQ ID NO: 9422 - DNA, 34 bp, synthetic construct; identical to SEQ ID NO: 8595
  source 1..34: mol_type = other DNA

SEQ ID NO: 9423 - DNA, 35 bp, synthetic construct; identical to SEQ ID NO: 8596
  source 1..35: mol_type = other DNA

SEQ ID NO: 9424 - DNA, 35 bp, synthetic construct; identical to SEQ ID NO: 8597
  source 1..35: mol_type = other DNA

SEQ ID NO: 9425 - DNA, 36 bp, synthetic construct; identical to SEQ ID NO: 8599
  source 1..36: mol_type = other DNA

SEQ ID NO: 9426 - DNA, 36 bp, synthetic construct; identical to SEQ ID NO: 8598
  source 1..36: mol_type = other DNA

SEQ ID NO: 9427 - DNA, 37 bp, synthetic construct; identical to SEQ ID NO: 8600
  source 1..37: mol_type = other DNA

SEQ ID NO: 9428 - DNA, 37 bp, synthetic construct; identical to SEQ ID NO: 8601
  source 1..37: mol_type = other DNA

SEQ ID NO: 9429 - DNA, 38 bp, synthetic construct; identical to SEQ ID NO: 8603
  source 1..38: mol_type = other DNA

SEQ ID NO: 9430 - DNA, 38 bp, synthetic construct; identical to SEQ ID NO: 8602
  source 1..38: mol_type = other DNA

SEQ ID NO: 9431 - DNA, 39 bp, synthetic construct; identical to SEQ ID NO: 8605
  source 1..39: mol_type = other DNA

SEQ ID NO: 9432 - DNA, 39 bp, synthetic construct; identical to SEQ ID NO: 8604
  source 1..39: mol_type = other DNA

SEQ ID NO: 9433 - DNA, 40 bp, synthetic construct; identical to SEQ ID NO: 8606
  source 1..40: mol_type = other DNA

SEQ ID NO: 9434 - DNA, 40 bp, synthetic construct; identical to SEQ ID NO: 8607
  source 1..40: mol_type = other DNA

SEQ ID NO: 9435 - DNA, 35 bp, synthetic construct; identical to SEQ ID NO: 8610
  source 1..35: mol_type = other DNA

SEQ ID NO: 9436 - DNA, 36 bp, synthetic construct; identical to SEQ ID NO: 8611
  source 1..36: mol_type = other DNA

SEQ ID NO: 9437 - DNA, 37 bp, synthetic construct; identical to SEQ ID NO: 8612
  source 1..37: mol_type = other DNA

SEQ ID NO: 9438 - DNA, 38 bp, synthetic construct; identical to SEQ ID NO: 8613
  source 1..38: mol_type = other DNA

SEQ ID NO: 9439 - DNA, 39 bp, synthetic construct; identical to SEQ ID NO: 8614
  source 1..39: mol_type = other DNA

SEQ ID NO: 9440 - DNA, 40 bp, synthetic construct; identical to SEQ ID NO: 8615
  source 1..40: mol_type = other DNA

SEQ ID NO: 9441 - DNA, 10 bp, synthetic construct
  source 1..10: mol_type = other DNA
ccttcgccaa

SEQ ID NO: 9442 - DNA, 10 bp, synthetic construct
  source 1..10: mol_type = other DNA
ccttctccaa

SEQ ID NO: 9443 - DNA, 11 bp, synthetic construct
  source 1..11: mol_type = other DNA
accttcgccaa

SEQ ID NO: 9444 - DNA, 11 bp, synthetic construct
  source 1..11: mol_type = other DNA
accttctccaa

SEQ ID NO: 9445 - DNA, 12 bp, synthetic construct
  source 1..12: mol_type = other DNA
caccttcgccaa

SEQ ID NO: 9446 - DNA, 12 bp, synthetic construct
  source 1..12: mol_type = other DNA
caccttctccaa

SEQ ID NO: 9447 - DNA, 13 bp, synthetic construct
  source 1..13: mol_type = other DNA
ccaccttcgccaa

SEQ ID NO: 9448 - DNA, 13 bp, synthetic construct
  source 1..13: mol_type = other DNA
ccaccttctccaa

SEQ ID NO: 9449 - DNA, 14 bp, synthetic construct
  source 1..14: mol_type = other DNA
tccaccttcgccaa

SEQ ID NO: 9450 - DNA, 14 bp, synthetic construct
  source 1..14: mol_type = other DNA
tccaccttctccaa

SEQ ID NO: 9451 - DNA, 15 bp, synthetic construct
  source 1..15: mol_type = other DNA
ttccaccttctccaa

SEQ ID NO: 9452 - DNA, 15 bp, synthetic construct
  source 1..15: mol_type = other DNA
ttccaccttcgccaa

SEQ ID NO: 9453 - DNA, 16 bp, synthetic construct
  source 1..16: mol_type = other DNA
attccaccttctccaa

SEQ ID NO: 9454 - DNA, 16 bp, synthetic construct
  source 1..16: mol_type = other DNA
attccaccttcgccaa

SEQ ID NO: 9455 - DNA, 17 bp, synthetic construct
  source 1..17: mol_type = other DNA
gattccaccttctccaa

SEQ ID NO: 9456 - DNA, 17 bp, synthetic construct
  source 1..17: mol_type = other DNA
gattccaccttcgccaa

SEQ ID NO: 9457 - DNA, 18 bp, synthetic construct
  source 1..18: mol_type = other DNA
tgattccaccttcgccaa

SEQ ID NO: 9458 - DNA, 18 bp, synthetic construct
  source 1..18: mol_type = other DNA
tgattccaccttctccaa

SEQ ID NO: 9459 - DNA, 19 bp, synthetic construct
  source 1..19: mol_type = other DNA
gtgattccaccttctccaa

SEQ ID NO: 9460 - DNA, 19 bp, synthetic construct
  source 1..19: mol_type = other DNA
gtgattccaccttcgccaa

SEQ ID NO: 9461 - DNA, 20 bp, synthetic construct
  source 1..20: mol_type = other DNA
tgtgattccaccttcgccaa

SEQ ID NO: 9462 - DNA, 20 bp, synthetic construct
  source 1..20: mol_type = other DNA
tgtgattccaccttctccaa

SEQ ID NO: 9463 - DNA, 21 bp, synthetic construct
  source 1..21: mol_type = other DNA
gtgtgattccaccttctccaa

SEQ ID NO: 9464 - DNA, 21 bp, synthetic construct
  source 1..21: mol_type = other DNA
gtgtgattccaccttcgccaa

SEQ ID NO: 9465 - DNA, 22 bp, synthetic construct
  source 1..22: mol_type = other DNA
agtgtgattccaccttctccaa

SEQ ID NO: 9466 - DNA, 22 bp, synthetic construct
  source 1..22: mol_type = other DNA
agtgtgattccaccttcgccaa

SEQ ID NO: 9467 - DNA, 23 bp, synthetic construct
  source 1..23: mol_type = other DNA
cagtgtgattccaccttcgccaa

SEQ ID NO: 9468 - DNA, 23 bp, synthetic construct
  source 1..23: mol_type = other DNA
cagtgtgattccaccttctccaa

SEQ ID NO: 9469 - DNA, 24 bp, synthetic construct
  source 1..24: mol_type = other DNA
tcagtgtgattccaccttcgccaa

SEQ ID NO: 9470 - DNA, 24 bp, synthetic construct
  source 1..24: mol_type = other DNA
tcagtgtgattccaccttctccaa

SEQ ID NO: 9471 - DNA, 25 bp, synthetic construct
  source 1..25: mol_type = other DNA
ctcagtgtgattccaccttcgccaa

SEQ ID NO: 9472 - DNA, 25 bp, synthetic construct
  source 1..25: mol_type = other DNA
ctcagtgtgattccaccttctccaa

SEQ ID NO: 9473 - DNA, 26 bp, synthetic construct
  source 1..26: mol_type = other DNA
actcagtgtgattccaccttcgccaa

SEQ ID NO: 9474 - DNA, 26 bp, synthetic construct
  source 1..26: mol_type = other DNA
actcagtgtgattccaccttctccaa

SEQ ID NO: 9475 - DNA, 27 bp, synthetic construct
  source 1..27: mol_type = other DNA
cactcagtgtgattccaccttctccaa

SEQ ID NO: 9476 - DNA, 27 bp, synthetic construct
  source 1..27: mol_type = other DNA
cactcagtgtgattccaccttcgccaa

SEQ ID NO: 9477 - DNA, 28 bp, synthetic construct
  source 1..28: mol_type = other DNA
ccactcagtgtgattccaccttctccaa

SEQ ID NO: 9478 - DNA, 28 bp, synthetic construct
  source 1..28: mol_type = other DNA
ccactcagtgtgattccaccttcgccaa

SEQ ID NO: 9479 - DNA, 29 bp, synthetic construct
  source 1..29: mol_type = other DNA
tccactcagtgtgattccaccttcgccaa

SEQ ID NO: 9480 - DNA, 29 bp, synthetic construct
  source 1..29: mol_type = other DNA
tccactcagtgtgattccaccttctccaa

SEQ ID NO: 9481 - DNA, 30 bp, synthetic construct
  source 1..30: mol_type = other DNA
ctccactcagtgtgattccaccttctccaa

SEQ ID NO: 9482 - DNA, 30 bp, synthetic construct
  source 1..30: mol_type = other DNA
ctccactcagtgtgattccaccttcgccaa

SEQ ID NO: 9483 - DNA, 31 bp, synthetic construct
  source 1..31: mol_type = other DNA
cctccactcagtgtgattccaccttcgccaa

SEQ ID NO: 9484 - DNA, 31 bp, synthetic construct
  source 1..31: mol_type = other DNA
cctccactcagtgtgattccaccttctccaa

SEQ ID NO: 9485 - DNA, 32 bp, synthetic construct
  source 1..32: mol_type = other DNA
acctccactcagtgtgattccaccttctccaa

SEQ ID NO: 9486 - DNA, 32 bp, synthetic construct
  source 1..32: mol_type = other DNA
acctccactcagtgtgattccaccttcgccaa

SEQ ID NO: 9487 - DNA, 33 bp, synthetic construct
  source 1..33: mol_type = other DNA
gacctccactcagtgtgattccaccttcgccaa

SEQ ID NO: 9488 - DNA, 33 bp, synthetic construct
  source 1..33: mol_type = other DNA
gacctccactcagtgtgattccaccttctccaa

SEQ ID NO: 9489 - DNA, 34 bp, synthetic construct
  source 1..34: mol_type = other DNA
tgacctccactcagtgtgattccaccttcgccaa

SEQ ID NO: 9490 - DNA, 34 bp, synthetic construct
  source 1..34: mol_type = other DNA
tgacctccactcagtgtgattccaccttctccaa

SEQ ID NO: 9491 - DNA, 35 bp, synthetic construct
  source 1..35: mol_type = other DNA
ttgacctccactcagtgtgattccaccttctccaa

SEQ ID NO: 9492 - DNA, 35 bp, synthetic construct
  source 1..35: mol_type = other DNA
ttgacctccactcagtgtgattccaccttcgccaa

SEQ ID NO: 9493 - DNA, 36 bp, synthetic construct
  source 1..36: mol_type = other DNA
gttgacctccactcagtgtgattccaccttcgccaa

SEQ ID NO: 9494 - DNA, 36 bp, synthetic construct
  source 1..36: mol_type = other DNA
gttgacctccactcagtgtgattccaccttctccaa

SEQ ID NO: 9495 - DNA, 37 bp, synthetic construct
  source 1..37: mol_type = other DNA
cgttgacctccactcagtgtgattccaccttcgccaa

SEQ ID NO: 9496 - DNA, 37 bp, synthetic construct
  source 1..37: mol_type = other DNA
cgttgacctccactcagtgtgattccaccttctccaa

SEQ ID NO: 9497 - DNA, 38 bp, synthetic construct
  source 1..38: mol_type = other DNA
tcgttgacctccactcagtgtgattccaccttctccaa

SEQ ID NO: 9498 - DNA, 38 bp, synthetic construct
  source 1..38: mol_type = other DNA
tcgttgacctccactcagtgtgattccaccttcgccaa

SEQ ID NO: 9499 - DNA, 39 bp, synthetic construct
  source 1..39: mol_type = other DNA
ctcgttgacctccactcagtgtgattccaccttcgccaa

SEQ ID NO: 9500 - DNA, 39 bp, synthetic construct
  source 1..39: mol_type = other DNA
ctcgttgacctccactcagtgtgattccaccttctccaa

SEQ ID NO: 9501 - DNA, 40 bp, synthetic construct
  source 1..40: mol_type = other DNA
gctcgttgacctccactcagtgtgattccaccttcgccaa

SEQ ID NO: 9502 - DNA, 40 bp, synthetic construct
  source 1..40: mol_type = other DNA
gctcgttgacctccactcagtgtgattccaccttctccaa

SEQ ID NO: 9503 - DNA, 10 bp, synthetic construct
  source 1..10: mol_type = other DNA
accttctcca

SEQ ID NO: 9504 - DNA, 11 bp, synthetic construct
  source 1..11: mol_type = other DNA
caccttctcca

SEQ ID NO: 9505 - DNA, 12 bp, synthetic construct
  source 1..12: mol_type = other DNA
ccaccttctcca

SEQ ID NO: 9506 - DNA, 13 bp, synthetic construct
  source 1..13: mol_type = other DNA
tccaccttctcca

SEQ ID NO: 9507 - DNA, 14 bp, synthetic construct
  source 1..14: mol_type = other DNA
ttccaccttctcca

SEQ ID NO: 9508 - DNA, 15 bp, synthetic construct
  source 1..15: mol_type = other DNA
attccaccttctcca

SEQ ID NO: 9509 - DNA, 16 bp, synthetic construct
  source 1..16: mol_type = other DNA
gattccaccttctcca

SEQ ID NO: 9510 - DNA, 17 bp, synthetic construct
  source 1..17: mol_type = other DNA
tgattccaccttctcca

SEQ ID NO: 9511 - DNA, 18 bp, synthetic construct
  source 1..18: mol_type = other DNA
gtgattccaccttctcca

SEQ ID NO: 9512 - DNA, 19 bp, synthetic construct
  source 1..19: mol_type = other DNA
tgtgattccaccttctcca

SEQ ID NO: 9513 - DNA, 20 bp, synthetic construct
  source 1..20: mol_type = other DNA
gtgtgattccaccttctcca

SEQ ID NO: 9514 - DNA, 21 bp, synthetic construct
  source 1..21: mol_type = other DNA
agtgtgattccaccttctcca

SEQ ID NO: 9515 - DNA, 22 bp, synthetic construct
  source 1..22: mol_type = other DNA
cagtgtgattccaccttctcca

SEQ ID NO: 9516 - DNA, 23 bp, synthetic construct
  source 1..23: mol_type = other DNA
tcagtgtgattccaccttctcca

SEQ ID NO: 9517 - DNA, 24 bp, synthetic construct
  source 1..24: mol_type = other DNA
ctcagtgtgattccaccttctcca

SEQ ID NO: 9518 - DNA, 25 bp, synthetic construct
  source 1..25: mol_type = other DNA
actcagtgtgattccaccttctcca

SEQ ID NO: 9519 - DNA, 26 bp, synthetic construct
  source 1..26: mol_type = other DNA
cactcagtgtgattccaccttctcca

SEQ ID NO: 9520 - DNA, 27 bp, synthetic construct
  source 1..27: mol_type = other DNA
ccactcagtgtgattccaccttctcca

SEQ ID NO: 9521 - DNA, 28 bp, synthetic construct
  source 1..28: mol_type = other DNA
tccactcagtgtgattccaccttctcca

SEQ ID NO: 9522 - DNA, 29 bp, synthetic construct
  source 1..29: mol_type = other DNA
ctccactcagtgtgattccaccttctcca

SEQ ID NO: 9523 - DNA, 30 bp, synthetic construct
  source 1..30: mol_type = other DNA
cctccactcagtgtgattccaccttctcca

SEQ ID NO: 9524 - DNA, 31 bp, synthetic construct
  source 1..31: mol_type = other DNA
acctccactcagtgtgattccaccttctcca

SEQ ID NO: 9525 - DNA, 32 bp, synthetic construct
  source 1..32: mol_type = other DNA
gacctccactcagtgtgattccaccttctcca

SEQ ID NO: 9526 - DNA, 33 bp, synthetic construct
  source 1..33: mol_type = other DNA
tgacctccactcagtgtgattccaccttctcca

SEQ ID NO: 9527 - DNA, 34 bp, synthetic construct
  source 1..34: mol_type = other DNA
ttgacctccactcagtgtgattccaccttctcca

SEQ ID NO: 9528 - DNA, 35 bp, synthetic construct
  source 1..35: mol_type = other DNA
gttgacctccactcagtgtgattccaccttctcca

SEQ ID NO: 9529 - DNA, 36 bp, synthetic construct
  source 1..36: mol_type = other DNA
cgttgacctccactcagtgtgattccaccttctcca

SEQ ID NO: 9530 - DNA, 37 bp, synthetic construct
  source 1..37: mol_type = other DNA
tcgttgacctccactcagtgtgattccaccttctcca

SEQ ID NO: 9531 - DNA, 38 bp, synthetic construct
  source 1..38: mol_type = other DNA
ctcgttgacctccactcagtgtgattccaccttctcca

SEQ ID NO: 9532 - DNA, 39 bp, synthetic construct
  source 1..39: mol_type = other DNA
gctcgttgacctccactcagtgtgattccaccttctcca

SEQ ID NO: 9533 - DNA, 40 bp, synthetic construct
  source 1..40: mol_type = other DNA
tgctcgttgacctccactcagtgtgattccaccttctcca

SEQ ID NO: 9534 - DNA, 27 bp, synthetic construct
  source 1..27: mol_type = other DNA
ccaagaactatattgtctttctctgca

SEQ ID NO: 9535 - DNA, 28 bp, synthetic construct
  source 1..28: mol_type = other DNA
tccaagaactatattgtctttctctgca

SEQ ID NO: 9536 - DNA, 29 bp, synthetic construct
  source 1..29: mol_type = other DNA
ctccaagaactatattgtctttctctgca

SEQ ID NO: 9537 - DNA, 30 bp, synthetic construct
  source 1..30: mol_type = other DNA
tctccaagaactatattgtctttctctgca

SEQ ID NO: 9538 - DNA, 31 bp, synthetic construct
  source 1..31: mol_type = other DNA
ttctccaagaactatattgtctttctctgca

SEQ ID NO: 9539 - DNA, 32 bp, synthetic construct
  source 1..32: mol_type = other DNA
cttctccaagaactatattgtctttctctgca

SEQ ID NO: 9540 - DNA, 33 bp, synthetic construct
  source 1..33: mol_type = other DNA
ccttctccaagaactatattgtctttctctgca

SEQ ID NO: 9541 - DNA, 34 bp, synthetic construct
  source 1..34: mol_type = other DNA
accttctccaagaactatattgtctttctctgca

SEQ ID NO: 9542 - DNA, 35 bp, synthetic construct
  source 1..35: mol_type = other DNA
caccttctccaagaactatattgtctttctctgca

SEQ ID NO: 9543 - DNA, 36 bp, synthetic construct
  source 1..36: mol_type = other DNA
ccaccttctccaagaactatattgtctttctctgca

SEQ ID NO: 9544 - DNA, 37 bp, synthetic construct
  source 1..37: mol_type = other DNA
tccaccttctccaagaactatattgtctttctctgca

SEQ ID NO: 9545 - DNA, 38 bp, synthetic construct
  source 1..38: mol_type = other DNA
ttccaccttctccaagaactatattgtctttctctgca

SEQ ID NO: 9546 - DNA, 39 bp, synthetic construct
  source 1..39: mol_type = other DNA
attccaccttctccaagaactatattgtctttctctgca

SEQ ID NO: 9547 - DNA, 40 bp, synthetic construct
  source 1..40: mol_type = other DNA
gattccaccttctccaagaactatattgtctttctctgca

SEQ ID NO: 9548 - DNA, 22 bp, synthetic construct
  source 1..22: mol_type = other DNA
ccaagaactatattgtccttct

SEQ ID NO: 9549 - DNA, 22 bp, synthetic construct
  source 1..22: mol_type = other DNA
ccaagaactatattgtctttct

SEQ ID NO: 9550 - DNA, 23 bp, synthetic construct
  source 1..23: mol_type = other DNA
tccaagaactatattgtccttct

SEQ ID NO: 9551 - DNA, 23 bp, synthetic construct
  source 1..23: mol_type = other DNA
tccaagaactatattgtctttct

SEQ ID NO: 9552 - DNA, 24 bp, synthetic construct
  source 1..24: mol_type = other DNA
ctccaagaactatattgtccttct

SEQ ID NO: 9553 - DNA, 24 bp, synthetic construct
  source 1..24: mol_type = other DNA
ctccaagaactatattgtctttct

SEQ ID NO: 9554 - DNA, 25 bp, synthetic construct
  source 1..25: mol_type = other DNA
tctccaagaactatattgtctttct

SEQ ID NO: 9555 - DNA, 25 bp, synthetic construct
  source 1..25: mol_type = other DNA
tctccaagaactatattgtccttct

SEQ ID NO: 9556 - DNA, 26 bp, synthetic construct
  source 1..26: mol_type = other DNA
ttctccaagaactatattgtccttct

SEQ ID NO: 9557 - DNA, 26 bp, synthetic construct
  source 1..26: mol_type = other DNA
ttctccaagaactatattgtctttct

SEQ ID NO: 9558 - DNA, 27 bp, synthetic construct
  source 1..27: mol_type = other DNA
cttctccaagaactatattgtctttct

SEQ ID NO: 9559 - DNA, 27 bp, synthetic construct
  source 1..27: mol_type = other DNA
cttctccaagaactatattgtccttct

SEQ ID NO: 9560 - DNA, 28 bp, synthetic construct
  source 1..28: mol_type = other DNA
ccttctccaagaactatattgtccttct

SEQ ID NO: 9561 - DNA, 28 bp, synthetic construct
  source 1..28: mol_type = other DNA
ccttctccaagaactatattgtctttct

SEQ ID NO: 9562 - DNA, 29 bp, synthetic construct
  source 1..29: mol_type = other DNA
accttctccaagaactatattgtccttct

SEQ ID NO: 9563 - DNA, 29 bp, synthetic construct
  source 1..29: mol_type = other DNA
accttctccaagaactatattgtctttct

SEQ ID NO: 9564 - DNA, 30 bp, synthetic construct
  source 1..30: mol_type = other DNA
caccttctccaagaactatattgtccttct

SEQ ID NO: 9565 - DNA, 30 bp, synthetic construct
  source 1..30: mol_type = other DNA
caccttctccaagaactatattgtctttct

SEQ ID NO: 9566 - DNA, 31 bp, synthetic construct
  source 1..31: mol_type = other DNA
ccaccttctccaagaactatattgtccttct

SEQ ID NO: 9567 - DNA, 31 bp, synthetic construct
  source 1..31: mol_type = other DNA
ccaccttctccaagaactatattgtctttct

SEQ ID NO: 9568 - DNA, 32 bp, synthetic construct
  source 1..32: mol_type = other DNA
tccaccttctccaagaactatattgtccttct

SEQ ID NO: 9569 - DNA, 32 bp, synthetic construct
  source 1..32: mol_type = other DNA
tccaccttctccaagaactatattgtctttct

SEQ ID NO: 9570 - DNA, 33 bp, synthetic construct
  source 1..33: mol_type = other DNA
ttccaccttctccaagaactatattgtccttct

SEQ ID NO: 9571 - DNA, 33 bp, synthetic construct
  source 1..33: mol_type = other DNA
ttccaccttctccaagaactatattgtctttct

SEQ ID NO: 9572 - DNA, 34 bp, synthetic construct
  source 1..34: mol_type = other DNA
attccaccttctccaagaactatattgtccttct

SEQ ID NO: 9573 - DNA, 34 bp, synthetic construct
  source 1..34: mol_type = other DNA
attccaccttctccaagaactatattgtctttct

SEQ ID NO: 9574 - DNA, 35 bp, synthetic construct
  source 1..35: mol_type = other DNA
gattccaccttctccaagaactatattgtctttct

SEQ ID NO: 9575 - DNA, 35 bp, synthetic construct
  source 1..35: mol_type = other DNA
gattccaccttctccaagaactatattgtccttct

SEQ ID NO: 9576 - DNA, 36 bp, synthetic construct
  source 1..36: mol_type = other DNA
tgattccaccttctccaagaactatattgtctttct

SEQ ID NO: 9577 - DNA, 36 bp, synthetic construct
  source 1..36: mol_type = other DNA
tgattccaccttctccaagaactatattgtccttct

SEQ ID NO: 9578 - DNA, 37 bp, synthetic construct
  source 1..37: mol_type = other DNA
gtgattccaccttctccaagaactatattgtctttct

SEQ ID NO: 9579 - DNA, 37 bp, synthetic construct
  source 1..37: mol_type = other DNA
gtgattccaccttctccaagaactatattgtccttct

SEQ ID NO: 9580 - DNA, 38 bp, synthetic construct
  source 1..38: mol_type = other DNA
tgtgattccaccttctccaagaactatattgtccttct

SEQ ID NO: 9581 - DNA, 38 bp, synthetic construct
  source 1..38: mol_type = other DNA
tgtgattccaccttctccaagaactatattgtctttct

SEQ ID NO: 9582 - DNA, 39 bp, synthetic construct
  source 1..39: mol_type = other DNA
gtgtgattccaccttctccaagaactatattgtccttct

SEQ ID NO: 9583 - DNA, 39 bp, synthetic construct
  source 1..39: mol_type = other DNA
gtgtgattccaccttctccaagaactatattgtctttct

SEQ ID NO: 9584 - DNA, 40 bp, synthetic construct
  source 1..40: mol_type = other DNA
agtgtgattccaccttctccaagaactatattgtctttct

SEQ ID NO: 9585 - DNA, 40 bp, synthetic construct
  source 1..40: mol_type = other DNA
agtgtgattccaccttctccaagaactatattgtccttct

SEQ ID NO: 9586 - DNA, 20 bp, synthetic construct
  source 1..20: mol_type = other DNA
tggagaaggtggaatcacac

SEQ ID NO: 9587 - DNA, 21 bp, synthetic construct
  source 1..21: mol_type = other DNA
ttggagaaggtggaatcacac

SEQ ID NO: 9588 - DNA, 22 bp, synthetic construct
  source 1..22: mol_type = other DNA
cttggagaaggtggaatcacac

SEQ ID NO: 9589 - DNA, 23 bp, synthetic construct
  source 1..23: mol_type = other DNA
tcttggagaaggtggaatcacac

SEQ ID NO: 9590 - DNA, 24 bp, synthetic construct
  source 1..24: mol_type = other DNA
ttcttggagaaggtggaatcacac

SEQ ID NO: 9591 - DNA, 25 bp, synthetic construct
  source 1..25: mol_type = other DNA
gttcttggagaaggtggaatcacac

SEQ ID NO: 9592 - DNA, 26 bp, synthetic construct
  source 1..26: mol_type = other DNA
agttcttggagaaggtggaatcacac

SEQ ID NO: 9593 - DNA, 27 bp, synthetic construct
  source 1..27: mol_type = other DNA
tagttcttggagaaggtggaatcacac

SEQ ID NO: 9594 - DNA, 28 bp, synthetic construct
  source 1..28: mol_type = other DNA
atagttcttggagaaggtggaatcacac

SEQ ID NO: 9595 - DNA, 29 bp, synthetic construct
  source 1..29: mol_type = other DNA
tatagttcttggagaaggtggaatcacac

SEQ ID NO: 9596 - DNA, 30 bp, synthetic construct
  source 1..30: mol_type = other DNA
atatagttcttggagaaggtggaatcacac

SEQ ID NO: 9597 - DNA, 31 bp, synthetic construct
  source 1..31: mol_type = other DNA
aatatagttcttggagaaggtggaatcacac

SEQ ID NO: 9598 - DNA, 32 bp, synthetic construct
  source 1..32: mol_type = other DNA
caatatagttcttggagaaggtggaatcacac

SEQ ID NO: 9599 - DNA, 33 bp, synthetic construct
  source 1..33: mol_type = other DNA
acaatatagttcttggagaaggtggaatcacac

SEQ ID NO: 9600 - DNA, 34 bp, synthetic construct
  source 1..34: mol_type = other DNA
gacaatatagttcttggagaaggtggaatcacac

SEQ ID NO: 9601 - DNA, 35 bp, synthetic construct
  source 1..35: mol_type = other DNA
agacaatatagttcttggagaaggtggaatcacac

SEQ ID NO: 9602 - DNA, 36 bp, synthetic construct
  source 1..36: mol_type = other DNA
aagacaatatagttcttggagaaggtggaatcacac

SEQ ID NO: 9603 - DNA, 37 bp, synthetic construct
  source 1..37: mol_type = other DNA
aaagacaatatagttcttggagaaggtggaatcacac

SEQ ID NO: 9604 - DNA, 38 bp, synthetic construct
  source 1..38: mol_type = other DNA
gaaagacaatatagttcttggagaaggtggaatcacac

SEQ ID NO: 9605 - DNA, 39 bp, synthetic construct
  source 1..39: mol_type = other DNA
agaaagacaatatagttcttggagaaggtggaatcacac

SEQ ID NO: 9606 - DNA, 40 bp, synthetic construct
  source 1..40: mol_type = other DNA
gagaaagacaatatagttcttggagaaggtggaatcacac

SEQ ID NO: 9607 - DNA, 10 bp, synthetic construct
  source 1..10: mol_type = other DNA
cttctccaag

SEQ ID NO: 9608 - DNA, 11 bp, synthetic construct
  source 1..11: mol_type = other DNA
ccttctccaag

SEQ ID NO: 9609 - DNA, 12 bp, synthetic construct
  source 1..12: mol_type = other DNA
accttctccaag

SEQ ID NO: 9610 - DNA, 13 bp, synthetic construct
  source 1..13: mol_type = other DNA
caccttctccaag

SEQ ID NO: 9611 - DNA, 14 bp, synthetic construct
  source 1..14: mol_type = other DNA
ccaccttctccaag

SEQ ID NO: 9612 - DNA, 15 bp, synthetic construct
  source 1..15: mol_type = other DNA
tccaccttctccaag

SEQ ID NO: 9613 - DNA, 16 bp, synthetic construct
  source 1..16: mol_type = other DNA
ttccaccttctccaag

SEQ ID NO: 9614 - DNA, 17 bp, synthetic construct
  source 1..17: mol_type = other DNA
attccaccttctccaag

SEQ ID NO: 9615 - DNA, 18 bp, synthetic construct
  source 1..18: mol_type = other DNA
gattccaccttctccaag

SEQ ID NO: 9616 - DNA, 19 bp, synthetic construct
  source 1..19: mol_type = other DNA
tgattccaccttctccaag

SEQ ID NO: 9617 - DNA, 20 bp, synthetic construct
  source 1..20: mol_type = other DNA
gtgattccaccttctccaag

SEQ ID NO: 9618 - DNA, 21 bp, synthetic construct
  source 1..21: mol_type = other DNA
tgtgattccaccttctccaag

SEQ ID NO: 9619 - DNA, 22 bp, synthetic construct
  source 1..22: mol_type = other DNA
gtgtgattccaccttctccaag

SEQ ID NO: 9620 - DNA, 23 bp, synthetic construct
  source 1..23: mol_type = other DNA
agtgtgattccaccttctccaag

SEQ ID NO: 9621 - DNA, 24 bp, synthetic construct
  source 1..24: mol_type = other DNA
cagtgtgattccaccttctccaag

SEQ ID NO: 9622 - DNA, 25 bp, synthetic construct
  source 1..25: mol_type = other DNA
tcagtgtgattccaccttctccaag

SEQ ID NO: 9623 - DNA, 26 bp, synthetic construct
  source 1..26: mol_type = other DNA
ctcagtgtgattccaccttctccaag

SEQ ID NO: 9624 - DNA, 27 bp, synthetic construct
  source 1..27: mol_type = other DNA
actcagtgtgattccaccttctccaag

SEQ ID NO: 9625 - DNA, 28 bp, synthetic construct
  source 1..28: mol_type = other DNA
cactcagtgtgattccaccttctccaag

SEQ ID NO: 9626 - DNA, 29 bp, synthetic construct
  source 1..29: mol_type = other DNA
ccactcagtgtgattccaccttctccaag

SEQ ID NO: 9627 - DNA, 30 bp, synthetic construct
  source 1..30: mol_type = other DNA
tccactcagtgtgattccaccttctccaag

SEQ ID NO: 9628 - DNA, 31 bp, synthetic construct
  source 1..31: mol_type = other DNA
ctccactcagtgtgattccaccttctccaag

SEQ ID NO: 9629 - DNA, 32 bp, synthetic construct
  source 1..32: mol_type = other DNA
cctccactcagtgtgattccaccttctccaag

SEQ ID NO: 9630 - DNA, 33 bp, synthetic construct
  source 1..33: mol_type = other DNA
acctccactcagtgtgattccaccttctccaag

SEQ ID NO: 9631 - DNA, 34 bp, synthetic construct
  source 1..34: mol_type = other DNA
gacctccactcagtgtgattccaccttctccaag

SEQ ID NO: 9632 - DNA, 35 bp, synthetic construct
  source 1..35: mol_type = other DNA
tgacctccactcagtgtgattccaccttctccaag

SEQ ID NO: 9633 - DNA, 36 bp, synthetic construct
  source 1..36: mol_type = other DNA
ttgacctccactcagtgtgattccaccttctccaag

SEQ ID NO: 9634 - DNA, 37 bp, synthetic construct
  source 1..37: mol_type = other DNA
gttgacctccactcagtgtgattccaccttctccaag

SEQ ID NO: 9635 - DNA, 38 bp, synthetic construct
  source 1..38: mol_type = other DNA
cgttgacctccactcagtgtgattccaccttctccaag

SEQ ID NO: 9636 - DNA, 39 bp, synthetic construct
  source 1..39: mol_type = other DNA
tcgttgacctccactcagtgtgattccaccttctccaag

SEQ ID NO: 9637 - DNA, 40 bp, synthetic construct
  source 1..40: mol_type = other DNA
ctcgttgacctccactcagtgtgattccaccttctccaag

SEQ ID NO: 9638 - DNA, 25 bp, synthetic construct
  source 1..25: mol_type = other DNA
ccaagaactatattgtctttctctg

SEQ ID NO: 9639 - DNA, 26 bp, synthetic construct
  source 1..26: mol_type = other DNA
tccaagaactatattgtctttctctg

SEQ ID NO: 9640 - DNA, 27 bp, synthetic construct
  source 1..27: mol_type = other DNA
ctccaagaactatattgtctttctctg

SEQ ID NO: 9641 - DNA, 28 bp, synthetic construct
  source 1..28: mol_type = other DNA
tctccaagaactatattgtctttctctg

SEQ ID NO: 9642 - DNA, 29 bp, synthetic construct
  source 1..29: mol_type = other DNA
ttctccaagaactatattgtctttctctg

SEQ ID NO: 9643 - DNA, 30 bp, synthetic construct
  source 1..30: mol_type = other DNA
cttctccaagaactatattgtctttctctg

SEQ ID NO: 9644 - DNA, 31 bp, synthetic construct
  source 1..31: mol_type = other DNA
ccttctccaagaactatattgtctttctctg

SEQ ID NO: 9645 - DNA, 32 bp, synthetic construct
  source 1..32: mol_type = other DNA
accttctccaagaactatattgtctttctctg

SEQ ID NO: 9646 - DNA, 33 bp, synthetic construct
  source 1..33: mol_type = other DNA
caccttctccaagaactatattgtctttctctg

SEQ ID NO: 9647 - DNA, 34 bp, synthetic construct
  source 1..34: mol_type = other DNA
ccaccttctccaagaactatattgtctttctctg

SEQ ID NO: 9648 - DNA, 35 bp, synthetic construct
  source 1..35: mol_type = other DNA
tccaccttctccaagaactatattgtctttctctg

SEQ ID NO: 9649 - DNA, 36 bp, synthetic construct
  source 1..36: mol_type = other DNA
ttccaccttctccaagaactatattgtctttctctg

SEQ ID NO: 9650 - DNA, 37 bp, synthetic construct
  source 1..37: mol_type = other DNA
attccaccttctccaagaactatattgtctttctctg

SEQ ID NO: 9651 - DNA, 38 bp, synthetic construct
  source 1..38: mol_type = other DNA
gattccaccttctccaagaactatattgtctttctctg

SEQ ID NO: 9652 - DNA, 39 bp, synthetic construct
  source 1..39: mol_type = other DNA
tgattccaccttctccaagaactatattgtctttctctg

SEQ ID NO: 9653 - DNA, 40 bp, synthetic construct
  source 1..40: mol_type = other DNA
gtgattccaccttctccaagaactatattgtctttctctg

SEQ ID NO: 9654 - DNA, 22 bp, synthetic construct
  source 1..22: mol_type = other DNA
tggagaaggtggaatcacactg

SEQ ID NO: 9655 - DNA, 23 bp, synthetic construct
  source 1..23: mol_type = other DNA
ttggagaaggtggaatcacactg

SEQ ID NO: 9656 - DNA, 24 bp, synthetic construct
  source 1..24: mol_type = other DNA
cttggagaaggtggaatcacactg

SEQ ID NO: 9657 - DNA, 25 bp, synthetic construct
  source 1..25: mol_type = other DNA
tcttggagaaggtggaatcacactg

SEQ ID NO: 9658 - DNA, 26 bp, synthetic construct
  source 1..26: mol_type = other DNA
ttcttggagaaggtggaatcacactg

SEQ ID NO: 9659 - DNA, 27 bp, synthetic construct
  source 1..27: mol_type = other DNA
gttcttggagaaggtggaatcacactg

SEQ ID NO: 9660 - DNA, 28 bp, synthetic construct
  source 1..28: mol_type = other DNA
agttcttggagaaggtggaatcacactg

SEQ ID NO: 9661 - DNA, 29 bp, synthetic construct
  source 1..29: mol_type = other DNA
tagttcttggagaaggtggaatcacactg

SEQ ID NO: 9662 - DNA, 30 bp, synthetic construct
  source 1..30: mol_type = other DNA
atagttcttggagaaggtggaatcacactg

SEQ ID NO: 9663 - DNA, 31 bp, synthetic construct
  source 1..31: mol_type = other DNA
tatagttcttggagaaggtggaatcacactg

SEQ ID NO: 9664 - DNA, 32 bp, synthetic construct
  source 1..32: mol_type = other DNA
atatagttcttggagaaggtggaatcacactg

SEQ ID NO: 9665 - DNA, 33 bp, synthetic construct
  source 1..33: mol_type = other DNA
aatatagttcttggagaaggtggaatcacactg

SEQ ID NO: 9666 - DNA, 34 bp, synthetic construct
  source 1..34: mol_type = other DNA
caatatagttcttggagaaggtggaatcacactg

SEQ ID NO: 9667 - DNA, 35 bp, synthetic construct
  source 1..35: mol_type = other DNA
acaatatagttcttggagaaggtggaatcacactg

SEQ ID NO: 9668 - DNA, 36 bp, synthetic construct
  source 1..36: mol_type = other DNA
gacaatatagttcttggagaaggtggaatcacactg

SEQ ID NO: 9669 - DNA, 37 bp, synthetic construct
  source 1..37: mol_type = other DNA
agacaatatagttcttggagaaggtggaatcacactg

SEQ ID NO: 9670 - DNA, 38 bp, synthetic construct
  source 1..38: mol_type = other DNA
aagacaatatagttcttggagaaggtggaatcacactg

SEQ ID NO: 9671 - DNA, 39 bp, synthetic construct
  source 1..39: mol_type = other DNA
aaagacaatatagttcttggagaaggtggaatcacactg

SEQ ID NO: 9672 - DNA, 40 bp, synthetic construct
  source 1..40: mol_type = other DNA
gaaagacaatatagttcttggagaaggtggaatcacactg

SEQ ID NO: 9673 - DNA, 26 bp, synthetic construct
  source 1..26: mol_type = other DNA
ccaagaactatattgtctttctctgc

SEQ ID NO: 9674 - DNA, 26 bp, synthetic construct
  source 1..26: mol_type = other DNA
ccaagaactatattgtctttttctgc

SEQ ID NO: 9675 - DNA, 27 bp, synthetic construct
  source 1..27: mol_type = other DNA
tccaagaactatattgtctttctctgc

SEQ ID NO: 9676 - DNA, 27 bp, synthetic construct
  source 1..27: mol_type = other DNA
tccaagaactatattgtctttttctgc

SEQ ID NO: 9677 - DNA, 28 bp, synthetic construct
  source 1..28: mol_type = other DNA
ctccaagaactatattgtctttttctgc

SEQ ID NO: 9678 - DNA, 28 bp, synthetic construct
  source 1..28: mol_type = other DNA
ctccaagaactatattgtctttctctgc

SEQ ID NO: 9679 - DNA, 29 bp, synthetic construct
  source 1..29: mol_type = other DNA
tctccaagaactatattgtctttttctgc

SEQ ID NO: 9680 - DNA, 29 bp, synthetic construct
  source 1..29: mol_type = other DNA
tctccaagaactatattgtctttctctgc

SEQ ID NO: 9681 - DNA, 30 bp, synthetic construct
  source 1..30: mol_type = other DNA
ttctccaagaactatattgtctttttctgc

SEQ ID NO: 9682 - DNA, 30 bp, synthetic construct
  source 1..30: mol_type = other DNA
ttctccaagaactatattgtctttctctgc

SEQ ID NO: 9683 - DNA, 31 bp, synthetic construct
  source 1..31: mol_type = other DNA
cttctccaagaactatattgtctttctctgc

SEQ ID NO: 9684 - DNA, 31 bp, synthetic construct
  source 1..31: mol_type = other DNA
cttctccaagaactatattgtctttttctgc

SEQ ID NO: 9685 - DNA, 32 bp, synthetic construct
  source 1..32: mol_type = other DNA
ccttctccaagaactatattgtctttctctgc

SEQ ID NO: 9686 - DNA, 32 bp, synthetic construct
  source 1..32: mol_type = other DNA
ccttctccaagaactatattgtctttttctgc

SEQ ID NO: 9687 - DNA, 33 bp, synthetic construct
  source 1..33: mol_type = other DNA
accttctccaagaactatattgtctttttctgc

SEQ ID NO: 9688 - DNA, 33 bp, synthetic construct
  source 1..33: mol_type = other DNA
accttctccaagaactatattgtctttctctgc

SEQ ID NO: 9689 - DNA, 34 bp, synthetic construct
  source 1..34: mol_type = other DNA
caccttctccaagaactatattgtctttctctgc

SEQ ID NO: 9690 - DNA, 34 bp, synthetic construct
  source 1..34: mol_type = other DNA
caccttctccaagaactatattgtctttttctgc

SEQ ID NO: 9691 - DNA, 35 bp, synthetic construct
  source 1..35: mol_type = other DNA
ccaccttctccaagaactatattgtctttttctgc

SEQ ID NO: 9692 - DNA, 35 bp, synthetic construct
  source 1..35: mol_type = other DNA
ccaccttctccaagaactatattgtctttctctgc

SEQ ID NO: 9693 - DNA, 36 bp, synthetic construct
  source 1..36: mol_type = other DNA
tccaccttctccaagaactatattgtctttttctgc

SEQ ID NO: 9694 - DNA, 36 bp, synthetic construct
  source 1..36: mol_type = other DNA
tccaccttctccaagaactatattgtctttctctgc

SEQ ID NO: 9695 - DNA, 37 bp, synthetic construct
  source 1..37: mol_type = other DNA
ttccaccttctccaagaactatattgtctttctctgc

SEQ ID NO: 9696 - DNA, 37 bp, synthetic construct
  source 1..37: mol_type = other DNA
ttccaccttctccaagaactatattgtctttttctgc

SEQ ID NO: 9697 - DNA, 38 bp, synthetic construct
  source 1..38: mol_type = other DNA
attccaccttctccaagaactatattgtctttctctgc

SEQ ID NO: 9698 - DNA, 38 bp, synthetic construct
  source 1..38: mol_type = other DNA
attccaccttctccaagaactatattgtctttttctgc

SEQ ID NO: 9699 - DNA, 39 bp, synthetic construct
  source 1..39: mol_type = other DNA
gattccaccttctccaagaactatattgtctttctctgc

SEQ ID NO: 9700 - DNA, 39 bp, synthetic construct
  source 1..39: mol_type = other DNA
gattccaccttctccaagaactatattgtctttttctgc

SEQ ID NO: 9701 - DNA, 40 bp, synthetic construct
  source 1..40: mol_type = other DNA
tgattccaccttctccaagaactatattgtctttctctgc

SEQ ID NO: 9702 - DNA, 40 bp, synthetic construct
  source 1..40: mol_type = other DNA
tgattccaccttctccaagaactatattgtctttttctgc

SEQ ID NO: 9703 - DNA, 10 bp, synthetic construct
  source 1..10: mol_type = other DNA
agttcttgga

SEQ ID NO: 9704 - DNA, 10 bp, synthetic construct
  source 1..10: mol_type = other DNA
agttttggga

SEQ ID NO: 9705 - DNA, 11 bp, synthetic construct
  source 1..11: mol_type = other DNA
tagttcttgga

SEQ ID NO: 9706 - DNA, 11 bp, synthetic construct
  source 1..11: mol_type = other DNA
tagttttggga

SEQ ID NO: 9707 - DNA, 12 bp, synthetic construct
  source 1..12: mol_type = other DNA
atagttcttgga

SEQ ID NO: 9708 - DNA, 12 bp, synthetic construct
  source 1..12: mol_type = other DNA
atagttttggga

SEQ ID NO: 9709 - DNA, 13 bp, synthetic construct
  source 1..13: mol_type = other DNA
tatagttttggga

SEQ ID NO: 9710 - DNA, 13 bp, synthetic construct
  source 1..13: mol_type = other DNA
tatagttcttgga

SEQ ID NO: 9711 - DNA, 14 bp, synthetic construct
  source 1..14: mol_type = other DNA
atatagttttggga

SEQ ID NO: 9712 - DNA, 14 bp, synthetic construct
  source 1..14: mol_type = other DNA
atatagttcttgga

SEQ ID NO: 9713 - DNA, 15 bp, synthetic construct
  source 1..15: mol_type = other DNA
aatatagttttggga

SEQ ID NO: 9714 - DNA, 15 bp, synthetic construct
  source 1..15: mol_type = other DNA
aatatagttcttgga

SEQ ID NO: 9715 - DNA, 16 bp, synthetic construct
  source 1..16: mol_type = other DNA
caatatagttcttgga

SEQ ID NO: 9716 - DNA, 16 bp, synthetic construct
  source 1..16: mol_type = other DNA
caatatagttttggga

SEQ ID NO: 9717 - DNA, 17 bp, synthetic construct
  source 1..17: mol_type = other DNA
acaatatagttcttgga

SEQ ID NO: 9718 - DNA, 17 bp, synthetic construct
  source 1..17: mol_type = other DNA
acaatatagttttggga

SEQ ID NO: 9719 - DNA, 18 bp, synthetic construct
  source 1..18: mol_type = other DNA
gacaatatagttcttgga

SEQ ID NO: 9720 - DNA, 18 bp, synthetic construct
  source 1..18: mol_type = other DNA
gacaatatagttttggga

SEQ ID NO: 9721 - DNA, 19 bp, synthetic construct
  source 1..19: mol_type = other DNA
agacaatatagttcttgga

SEQ ID NO: 9722 - DNA, 19 bp, synthetic construct
  source 1..19: mol_type = other DNA
agacaatatagttttggga

SEQ ID NO: 9723 - DNA, 20 bp, synthetic construct
  source 1..20: mol_type = other DNA
aagacaatatagttcttgga

SEQ ID NO: 9724 - DNA, 20 bp, synthetic construct
  source 1..20: mol_type = other DNA
aagacaatatagttttggga

SEQ ID NO: 9725 - DNA, 21 bp, synthetic construct
  source 1..21: mol_type = other DNA
aaagacaatatagttcttgga

SEQ ID NO: 9726 - DNA, 21 bp, synthetic construct
  source 1..21: mol_type = other DNA
aaagacaatatagttttggga

SEQ ID NO: 9727 - DNA, 22 bp, synthetic construct
  source 1..22: mol_type = other DNA
gaaagacaatatagttcttgga

SEQ ID NO: 9728 - DNA, 22 bp, synthetic construct
  source 1..22: mol_type = other DNA
gaaagacaatatagttttggga

SEQ ID NO: 9729 - DNA, 23 bp, synthetic construct
  source 1..23: mol_type = other DNA
agaaagacaatatagttttggga

SEQ ID NO: 9730 - DNA, 23 bp, synthetic construct
  source 1..23: mol_type = other DNA
agaaagacaatatagttcttgga

SEQ ID NO: 9731 - DNA, 24 bp, synthetic construct
  source 1..24: mol_type = other DNA
gagaaagacaatatagttcttgga

SEQ ID NO: 9732 - DNA, 24 bp, synthetic construct
  source 1..24: mol_type = other DNA
gagaaagacaatatagttttggga

SEQ ID NO: 9733 - DNA, 25 bp, synthetic construct
  source 1..25: mol_type = other DNA
agagaaagacaatatagttttggga

SEQ ID NO: 9734 - DNA, 25 bp, synthetic construct
  source 1..25: mol_type = other DNA
agagaaagacaatatagttcttgga

SEQ ID NO: 9735 - DNA, 26 bp, synthetic construct
  source 1..26: mol_type = other DNA
cagagaaagacaatatagttcttgga

SEQ ID NO: 9736 - DNA, 26 bp, synthetic construct
  source 1..26: mol_type = other DNA
cagagaaagacaatatagttttggga

SEQ ID NO: 9737 - DNA, 27 bp, synthetic construct
  source 1..27: mol_type = other DNA
gcagagaaagacaatatagttttggga

SEQ ID NO: 9738 - DNA, 27 bp, synthetic construct
  source 1..27: mol_type = other DNA
gcagagaaagacaatatagttcttgga

SEQ ID NO: 9739 - DNA, 28 bp, synthetic construct
  source 1..28: mol_type = other DNA
tgcagagaaagacaatatagttcttgga

SEQ ID NO: 9740 - DNA, 28 bp, synthetic construct
  source 1..28: mol_type = other DNA
tgcagagaaagacaatatagttttggga

SEQ ID NO: 9741 - DNA, 29 bp, synthetic construct
  source 1..29: mol_type = other DNA
ttgcagagaaagacaatatagttttggga

SEQ ID NO: 9742 - DNA, 29 bp, synthetic construct
  source 1..29: mol_type = other DNA
ttgcagagaaagacaatatagttcttgga

SEQ ID NO: 9743 - DNA, 30 bp, synthetic construct
  source 1..30: mol_type = other DNA
tttgcagagaaagacaatatagttttggga

SEQ ID NO: 9744 - DNA, 30 bp, synthetic construct
  source 1..30: mol_type = other DNA
tttgcagagaaagacaatatagttcttgga

SEQ ID NO: 9745 - DNA, 31 bp, synthetic construct
  source 1..31: mol_type = other DNA
gtttgcagagaaagacaatatagttcttgga

SEQ ID NO: 9746 - DNA, 31 bp, synthetic construct
  source 1..31: mol_type = other DNA
gtttgcagagaaagacaatatagttttggga

SEQ ID NO: 9747 - DNA, 32 bp, synthetic construct
  source 1..32: mol_type = other DNA
agtttgcagagaaagacaatatagttcttgga

SEQ ID NO: 9748 - DNA, 32 bp, synthetic construct
  source 1..32: mol_type = other DNA
agtttgcagagaaagacaatatagttttggga

SEQ ID NO: 9749 - DNA, 33 bp, synthetic construct
  source 1..33: mol_type = other DNA
aagtttgcagagaaagacaatatagttcttgga

SEQ ID NO: 9750 - DNA, 33 bp, synthetic construct
  source 1..33: mol_type = other DNA
aagtttgcagagaaagacaatatagttttggga

SEQ ID NO: 9751 - DNA, 34 bp, synthetic construct
  source 1..34: mol_type = other DNA
caagtttgcagagaaagacaatatagttttggga

SEQ ID NO: 9752 - DNA, 34 bp, synthetic construct
  source 1..34: mol_type = other DNA
caagtttgcagagaaagacaatatagttcttgga

SEQ ID NO: 9753 - DNA, 35 bp, synthetic construct
  source 1..35: mol_type = other DNA
ccaagtttgcagagaaagacaatatagttttggga

SEQ ID NO: 9754 - DNA, 35 bp, synthetic construct
  source 1..35: mol_type = other DNA
ccaagtttgcagagaaagacaatatagttcttgga

SEQ ID NO: 9755 - DNA, 36 bp, synthetic construct
  source 1..36: mol_type = other DNA
tccaagtttgcagagaaagacaatatagttcttgga

SEQ ID NO: 9756 - DNA, 36 bp, synthetic construct
  source 1..36: mol_type = other DNA
tccaagtttgcagagaaagacaatatagttttggga

SEQ ID NO: 9757 - DNA, 37 bp, synthetic construct
  source 1..37: mol_type = other DNA
ctccaagtttgcagagaaagacaatatagttcttgga

SEQ ID NO: 9758 - DNA, 37 bp, synthetic construct
  source 1..37: mol_type = other DNA
ctccaagtttgcagagaaagacaatatagttttggga

SEQ ID NO: 9759 - DNA, 38 bp, synthetic construct
  source 1..38: mol_type = other DNA
tctccaagtttgcagagaaagacaatatagttcttgga

SEQ ID NO: 9760 - DNA, 38 bp, synthetic construct
  source 1..38: mol_type = other DNA
tctccaagtttgcagagaaagacaatatagttttggga

SEQ ID NO: 9761 - DNA, 39 bp, synthetic construct
  source 1..39: mol_type = other DNA
atctccaagtttgcagagaaagacaatatagttcttgga

SEQ ID NO: 9762 - DNA, 39 bp, synthetic construct
  source 1..39: mol_type = other DNA
atctccaagtttgcagagaaagacaatatagttttggga

SEQ ID NO: 9763 - DNA, 40 bp, synthetic construct
  source 1..40: mol_type = other DNA
catctccaagtttgcagagaaagacaatatagttcttgga

SEQ ID NO: 9764 - DNA, 40 bp, synthetic construct
  source 1..40: mol_type = other DNA
catctccaagtttgcagagaaagacaatatagttttggga

SEQ ID NO: 9765 - DNA, 36 bp, synthetic construct
  source 1..36: mol_type = other DNA
tggagaaggtggaatcacactgagtggaggtcaacg

SEQ ID NO: 9766 - DNA, 37 bp, synthetic construct
  source 1..37: mol_type = other DNA
ttggagaaggtggaatcacactgagtggaggtcaacg

SEQ ID NO: 9767 - DNA, 38 bp, synthetic construct
  source 1..38: mol_type = other DNA
cttggagaaggtggaatcacactgagtggaggtcaacg

SEQ ID NO: 9768 - DNA, 39 bp, synthetic construct
  source 1..39: mol_type = other DNA
tcttggagaaggtggaatcacactgagtggaggtcaacg

SEQ ID NO: 9769 - DNA, 40 bp, synthetic construct
  source 1..40: mol_type = other DNA
ttcttggagaaggtggaatcacactgagtggaggtcaacg

SEQ ID NO: 9770 - DNA, 30 bp, synthetic construct
  source 1..30: mol_type = other DNA
ccaagaactatattgtctttctctgcaaac

SEQ ID NO: 9771 - DNA, 31 bp, synthetic construct
  source 1..31: mol_type = other DNA
tccaagaactatattgtctttctctgcaaac

SEQ ID NO: 9772 - DNA, 32 bp, synthetic construct
  source 1..32: mol_type = other DNA
ctccaagaactatattgtctttctctgcaaac

SEQ ID NO: 9773 - DNA, 33 bp, synthetic construct
  source 1..33: mol_type = other DNA
tctccaagaactatattgtctttctctgcaaac

SEQ ID NO: 9774 - DNA, 34 bp, synthetic construct
  source 1..34: mol_type = other DNA
ttctccaagaactatattgtctttctctgcaaac

SEQ ID NO: 9775 - DNA, 35 bp, synthetic construct
  source 1..35: mol_type = other DNA
cttctccaagaactatattgtctttctctgcaaac

SEQ ID NO: 9776 - DNA, 36 bp, synthetic construct
  source 1..36: mol_type = other DNA
ccttctccaagaactatattgtctttctctgcaaac

SEQ ID NO: 9777 - DNA, 37 bp, synthetic construct
  source 1..37: mol_type = other DNA
accttctccaagaactatattgtctttctctgcaaac

SEQ ID NO: 9778 - DNA, 38 bp, synthetic construct
  source 1..38: mol_type = other DNA
caccttctccaagaactatattgtctttctctgcaaac

SEQ ID NO: 9779 - DNA, 39 bp, synthetic construct
  source 1..39: mol_type = other DNA
ccaccttctccaagaactatattgtctttctctgcaaac

SEQ ID NO: 9780 - DNA, 40 bp, synthetic construct
  source 1..40: mol_type = other DNA
tccaccttctccaagaactatattgtctttctctgcaaac

SEQ ID NO: 9781 - DNA, 28 bp, synthetic construct
  source 1..28: mol_type = other DNA
ccaagaactatattgtctttctctgcaa

SEQ ID NO: 9782 - DNA, 28 bp, synthetic construct
  source 1..28: mol_type = other DNA
ccaagaactatattgtctttctcggcaa

SEQ ID NO: 9783 - DNA, 29 bp, synthetic construct
  source 1..29: mol_type = other DNA
tccaagaactatattgtctttctctgcaa

SEQ ID NO: 9784 - DNA, 29 bp, synthetic construct
  source 1..29: mol_type = other DNA
tccaagaactatattgtctttctcggcaa

SEQ ID NO: 9785 - DNA, 30 bp, synthetic construct
  source 1..30: mol_type = other DNA
ctccaagaactatattgtctttctctgcaa

SEQ ID NO: 9786 - DNA, 30 bp, synthetic construct
  source 1..30: mol_type = other DNA
ctccaagaactatattgtctttctcggcaa

SEQ ID NO: 9787 - DNA, 31 bp, synthetic construct
  source 1..31: mol_type = other DNA
tctccaagaactatattgtctttctcggcaa

SEQ ID NO: 9788 - DNA, 31 bp, synthetic construct
  source 1..31: mol_type = other DNA
tctccaagaactatattgtctttctctgcaa

SEQ ID NO: 9789 - DNA, 32 bp, synthetic construct
  source 1..32: mol_type = other DNA
ttctccaagaactatattgtctttctcggcaa

SEQ ID NO: 9790 - DNA, 32 bp, synthetic construct
  source 1..32: mol_type = other DNA
ttctccaagaactatattgtctttctctgcaa

SEQ ID NO: 9791 - DNA, 33 bp, synthetic construct
  source 1..33: mol_type = other DNA
cttctccaagaactatattgtctttctcggcaa

SEQ ID NO: 9792 - DNA, 33 bp, synthetic construct
  source 1..33: mol_type = other DNA
cttctccaagaactatattgtctttctctgcaa

SEQ ID NO: 9793 - DNA, 34 bp, synthetic construct
  source 1..34: mol_type = other DNA
ccttctccaagaactatattgtctttctctgcaa

SEQ ID NO: 9794 - DNA, 34 bp, synthetic construct
  source 1..34: mol_type = other DNA
ccttctccaagaactatattgtctttctcggcaa

SEQ ID NO: 9795 - DNA, 35 bp, synthetic construct
  source 1..35: mol_type = other DNA
accttctccaagaactatattgtctttctcggcaa

SEQ ID NO: 9796 - DNA, 35 bp, synthetic construct
  source 1..35: mol_type = other DNA
accttctccaagaactatattgtctttctctgcaa

SEQ ID NO: 9797 - DNA, 36 bp, synthetic construct
  source 1..36: mol_type = other DNA
caccttctccaagaactatattgtctttctcggcaa

SEQ ID NO: 9798 - DNA, 36 bp, synthetic construct
  source 1..36: mol_type = other DNA
caccttctccaagaactatattgtctttctctgcaa

SEQ ID NO: 9799 - DNA, 37 bp, synthetic construct
  source 1..37: mol_type = other DNA
ccaccttctccaagaactatattgtctttctcggcaa

SEQ ID NO: 9800 - DNA, 37 bp, synthetic construct
  source 1..37: mol_type = other DNA
ccaccttctccaagaactatattgtctttctctgcaa

SEQ ID NO: 9801 - DNA, 38 bp, synthetic construct
  source 1..38: mol_type = other DNA
tccaccttctccaagaactatattgtctttctcggcaa

SEQ ID NO: 9802 - DNA, 38 bp, synthetic construct
  source 1..38: mol_type = other DNA
tccaccttctccaagaactatattgtctttctctgcaa

SEQ ID NO: 9803 - DNA, 39 bp, synthetic construct
  source 1..39: mol_type = other DNA
ttccaccttctccaagaactatattgtctttctctgcaa

SEQ ID NO: 9804 - DNA, 39 bp, synthetic construct
  source 1..39: mol_type = other DNA
ttccaccttctccaagaactatattgtctttctcggcaa

SEQ ID NO: 9805 - DNA, 40 bp, synthetic construct
  source 1..40: mol_type = other DNA
attccaccttctccaagaactatattgtctttctctgcaa

SEQ ID NO: 9806 - DNA, 40 bp, synthetic construct
  source 1..40: mol_type = other DNA
attccaccttctccaagaactatattgtctttctcggcaa

SEQ ID NO: 9807 - DNA, 21 bp, synthetic construct
  source 1..21: mol_type = other DNA
ccaagaactatattgtctttc

SEQ ID NO: 9808 - DNA, 22 bp, synthetic construct
  source 1..22: mol_type = other DNA
tccaagaactatattgtctttc

SEQ ID NO: 9809 - DNA, 23 bp, synthetic construct
  source 1..23: mol_type = other DNA
ctccaagaactatattgtctttc

SEQ ID NO: 9810 - DNA, 24 bp, synthetic construct
  source 1..24: mol_type = other DNA
tctccaagaactatattgtctttc

SEQ ID NO: 9811 - DNA, 25 bp, synthetic construct
  source 1..25: mol_type = other DNA
ttctccaagaactatattgtctttc

SEQ ID NO: 9812 - DNA, 26 bp, synthetic construct
  source 1..26: mol_type = other DNA
cttctccaagaactatattgtctttc

SEQ ID NO: 9813 - DNA, 27 bp, synthetic construct
  source 1..27: mol_type = other DNA
ccttctccaagaactatattgtctttc

SEQ ID NO: 9814 - DNA, 28 bp, synthetic construct
  source 1..28: mol_type = other DNA
accttctccaagaactatattgtctttc

SEQ ID NO: 9815 - DNA, 29 bp, synthetic construct
  source 1..29: mol_type = other DNA
caccttctccaagaactatattgtctttc

SEQ ID NO: 9816 - DNA, 30 bp, synthetic construct
  source 1..30: mol_type = other DNA
ccaccttctccaagaactatattgtctttc

SEQ ID NO: 9817 - DNA, 31 bp, synthetic construct
  source 1..31: mol_type = other DNA
tccaccttctccaagaactatattgtctttc

SEQ ID NO: 9818 - DNA, 32 bp, synthetic construct
  source 1..32: mol_type = other DNA
ttccaccttctccaagaactatattgtctttc

SEQ ID NO: 9819 - DNA, 33 bp, synthetic construct
  source 1..33: mol_type = other DNA
attccaccttctccaagaactatattgtctttc

SEQ ID NO: 9820 - DNA, 34 bp, synthetic construct
  source 1..34: mol_type = other DNA
gattccaccttctccaagaactatattgtctttc

SEQ ID NO: 9821 - DNA, 35 bp, synthetic construct
  source 1..35: mol_type = other DNA
tgattccaccttctccaagaactatattgtctttc

SEQ ID NO: 9822 - DNA, 36 bp, synthetic construct
  source 1..36: mol_type = other DNA
gtgattccaccttctccaagaactatattgtctttc

SEQ ID NO: 9823 - DNA, 37 bp, synthetic construct
  source 1..37: mol_type = other DNA
tgtgattccaccttctccaagaactatattgtctttc

SEQ ID NO: 9824 - DNA, 38 bp, synthetic construct
  source 1..38: mol_type = other DNA
gtgtgattccaccttctccaagaactatattgtctttc

SEQ ID NO: 9825 - DNA, 39 bp, synthetic construct
  source 1..39: mol_type = other DNA
agtgtgattccaccttctccaagaactatattgtctttc

SEQ ID NO: 9826 - DNA, 40 bp, synthetic construct
  source 1..40: mol_type = other DNA
cagtgtgattccaccttctccaagaactatattgtctttc

SEQ ID NO: 9827 - DNA, 10 bp, synthetic construct
  source 1..10: mol_type = other DNA
tagttcttgg

SEQ ID NO: 9828 - DNA, 11 bp, synthetic construct
  source 1..11: mol_type = other DNA
atagttcttgg

SEQ ID NO: 9829 - DNA, 12 bp, synthetic construct
  source 1..12: mol_type = other DNA
tatagttcttgg

SEQ ID NO: 9830 - DNA, 13 bp, synthetic construct
  source 1..13: mol_type = other DNA
atatagttcttgg

SEQ ID NO: 9831 - DNA, 14 bp, synthetic construct
  source 1..14: mol_type = other DNA
aatatagttcttgg

SEQ ID NO: 9832 - DNA, 15 bp, synthetic construct
  source 1..15: mol_type = other DNA
caatatagttcttgg

SEQ ID NO: 9833 - DNA, 16 bp, synthetic construct
  source 1..16: mol_type = other DNA
acaatatagttcttgg

SEQ ID NO: 9834 - DNA, 17 bp, synthetic construct
  source 1..17: mol_type = other DNA
gacaatatagttcttgg

SEQ ID NO: 9835 - DNA, 18 bp, synthetic construct
  source 1..18: mol_type = other DNA
agacaatatagttcttgg

SEQ ID NO: 9836 - DNA, 19 bp, synthetic construct
  source 1..19: mol_type = other DNA
aagacaatatagttcttgg

SEQ ID NO: 9837 - DNA, 20 bp, synthetic construct
  source 1..20: mol_type = other DNA
aaagacaatatagttcttgg

SEQ ID NO: 9838 - DNA, 21 bp, synthetic construct
  source 1..21: mol_type = other DNA
gaaagacaatatagttcttgg

SEQ ID NO: 9839 - DNA, 22 bp, synthetic construct
  source 1..22: mol_type = other DNA
agaaagacaatatagttcttgg

SEQ ID NO: 9840 - DNA, 23 bp, synthetic construct
  source 1..23: mol_type = other DNA
gagaaagacaatatagttcttgg

SEQ ID NO: 9841 - DNA, 24 bp, synthetic construct
  source 1..24: mol_type = other DNA
agagaaagacaatatagttcttgg

SEQ ID NO: 9842 - DNA, 25 bp, synthetic construct
  source 1..25: mol_type = other DNA
cagagaaagacaatatagttcttgg

SEQ ID NO: 9843 - DNA, 26 bp, synthetic construct
  source 1..26: mol_type = other DNA
gcagagaaagacaatatagttcttgg

SEQ ID NO: 9844 - DNA, 27 bp, synthetic construct
  source 1..27: mol_type = other DNA
tgcagagaaagacaatatagttcttgg

SEQ ID NO: 9845 - DNA, 28 bp, synthetic construct
  source 1..28: mol_type = other DNA
ttgcagagaaagacaatatagttcttgg

SEQ ID NO: 9846 - DNA, 29 bp, synthetic construct
  source 1..29: mol_type = other DNA
tttgcagagaaagacaatatagttcttgg

SEQ ID NO: 9847 - DNA, 30 bp, synthetic construct
  source 1..30: mol_type = other DNA
gtttgcagagaaagacaatatagttcttgg

SEQ ID NO: 9848 - DNA, 31 bp, synthetic construct
  source 1..31: mol_type = other DNA
agtttgcagagaaagacaatatagttcttgg

SEQ ID NO: 9849 - DNA, 32 bp, synthetic construct
  source 1..32: mol_type = other DNA
aagtttgcagagaaagacaatatagttcttgg

SEQ ID NO: 9850 - DNA, 33 bp, synthetic construct
  source 1..33: mol_type = other DNA
caagtttgcagagaaagacaatatagttcttgg

SEQ ID NO: 9851 - DNA, 34 bp, synthetic construct
  source 1..34: mol_type = other DNA
ccaagtttgcagagaaagacaatatagttcttgg

SEQ ID NO: 9852 - DNA, 35 bp, synthetic construct
  source 1..35: mol_type = other DNA
tccaagtttgcagagaaagacaatatagttcttgg

SEQ ID NO: 9853 - DNA, 36 bp, synthetic construct
  source 1..36: mol_type = other DNA
ctccaagtttgcagagaaagacaatatagttcttgg

SEQ ID NO: 9854 - DNA, 37 bp, synthetic construct
  source 1..37: mol_type = other DNA
tctccaagtttgcagagaaagacaatatagttcttgg

SEQ ID NO: 9855 - DNA, 38 bp, synthetic construct
  source 1..38: mol_type = other DNA
atctccaagtttgcagagaaagacaatatagttcttgg

SEQ ID NO: 9856 - DNA, 39 bp, synthetic construct
  source 1..39: mol_type = other DNA
catctccaagtttgcagagaaagacaatatagttcttgg

SEQ ID NO: 9857 - DNA, 40 bp, synthetic construct
  source 1..40: mol_type = other DNA
acatctccaagtttgcagagaaagacaatatagttcttgg

SEQ ID NO: 9858 - DNA, 39 bp, synthetic construct
  source 1..39: mol_type = other DNA
tggagaaggtggaatcacactgagtggaggtcaacgagc

SEQ ID NO: 9859 - DNA, 40 bp, synthetic construct
  source 1..40: mol_type = other DNA
ttggagaaggtggaatcacactgagtggaggtcaacgagc

SEQ ID NO: 9860 - DNA, 25 bp, synthetic construct
  source 1..25: mol_type = other DNA
tggagaaggtggaatcacattgagt

SEQ ID NO: 9861 - DNA, 25 bp, synthetic construct
  source 1..25: mol_type = other DNA
tggagaaggtggaatcacactgagt

SEQ ID NO: 9862 - DNA, 26 bp, synthetic construct
  source 1..26: mol_type = other DNA
ttggagaaggtggaatcacattgagt

SEQ ID NO: 9863 - DNA, 26 bp, synthetic construct
  source 1..26: mol_type = other DNA
ttggagaaggtggaatcacactgagt

SEQ ID NO: 9864 - DNA, 27 bp, synthetic construct
  source 1..27: mol_type = other DNA
cttggagaaggtggaatcacactgagt

SEQ ID NO: 9865 - DNA, 27 bp, synthetic construct
  source 1..27: mol_type = other DNA
cttggagaaggtggaatcacattgagt

SEQ ID NO: 9866 - DNA, 28 bp, synthetic construct
  source 1..28: mol_type = other DNA
tcttggagaaggtggaatcacactgagt

SEQ ID NO: 9867 - DNA, 28 bp, synthetic construct
  source 1..28: mol_type = other DNA
tcttggagaaggtggaatcacattgagt

SEQ ID NO: 9868 - DNA, 29 bp, synthetic construct
  source 1..29: mol_type = other DNA
ttcttggagaaggtggaatcacattgagt

SEQ ID NO: 9869 - DNA, 29 bp, synthetic construct
  source 1..29: mol_type = other DNA
ttcttggagaaggtggaatcacactgagt

SEQ ID NO: 9870 - DNA, 30 bp, synthetic construct
  source 1..30: mol_type = other DNA
gttcttggagaaggtggaatcacactgagt

SEQ ID NO: 9871 - DNA, 30 bp, synthetic construct
  source 1..30: mol_type = other DNA
gttcttggagaaggtggaatcacattgagt

SEQ ID NO: 9872 - DNA, 31 bp, synthetic construct
  source 1..31: mol_type = other DNA
agttcttggagaaggtggaatcacactgagt

SEQ ID NO: 9873 - DNA, 31 bp, synthetic construct
  source 1..31: mol_type = other DNA
agttcttggagaaggtggaatcacattgagt

SEQ ID NO: 9874 - DNA, 32 bp, synthetic construct
  source 1..32: mol_type = other DNA
tagttcttggagaaggtggaatcacattgagt

SEQ ID NO: 9875 - DNA, 32 bp, synthetic construct
  source 1..32: mol_type = other DNA
tagttcttggagaaggtggaatcacactgagt

SEQ ID NO: 9876 - DNA, 33 bp, synthetic construct
  source 1..33: mol_type = other DNA
atagttcttggagaaggtggaatcacactgagt

SEQ ID NO: 9877 - DNA, 33 bp, synthetic construct
  source 1..33: mol_type = other DNA
atagttcttggagaaggtggaatcacattgagt

SEQ ID NO: 9878 - DNA, 34 bp, synthetic construct
  source 1..34: mol_type = other DNA
tatagttcttggagaaggtggaatcacactgagt

SEQ ID NO: 9879 - DNA, 34 bp, synthetic construct
  source 1..34: mol_type = other DNA
tatagttcttggagaaggtggaatcacattgagt

SEQ ID NO: 9880 - DNA, 35 bp, synthetic construct
  source 1..35: mol_type = other DNA
atatagttcttggagaaggtggaatcacattgagt

SEQ ID NO: 9881 - DNA, 35 bp, synthetic construct
  source 1..35: mol_type = other DNA
atatagttcttggagaaggtggaatcacactgagt

SEQ ID NO: 9882 - DNA, 36 bp, synthetic construct
  source 1..36: mol_type = other DNA
aatatagttcttggagaaggtggaatcacactgagt

SEQ ID NO: 9883 - DNA, 36 bp, synthetic construct
  source 1..36: mol_type = other DNA
aatatagttcttggagaaggtggaatcacattgagt

SEQ ID NO: 9884 - DNA, 37 bp, synthetic construct
  source 1..37: mol_type = other DNA
caatatagttcttggagaaggtggaatcacactgagt

SEQ ID NO: 9885 - DNA, 37 bp, synthetic construct
  source 1..37: mol_type = other DNA
caatatagttcttggagaaggtggaatcacattgagt

SEQ ID NO: 9886 - DNA, 38 bp, synthetic construct
  source 1..38: mol_type = other DNA
acaatatagttcttggagaaggtggaatcacactgagt

SEQ ID NO: 9887 - DNA, 38 bp, synthetic construct
  source 1..38: mol_type = other DNA
acaatatagttcttggagaaggtggaatcacattgagt

SEQ ID NO: 9888 - DNA, 39 bp, synthetic construct
  source 1..39: mol_type = other DNA
gacaatatagttcttggagaaggtggaatcacactgagt

SEQ ID NO: 9889 - DNA, 39 bp, synthetic construct
  source 1..39: mol_type = other DNA
gacaatatagttcttggagaaggtggaatcacattgagt

SEQ ID NO: 9890 - DNA, 40 bp, synthetic construct
  source 1..40: mol_type = other DNA
agacaatatagttcttggagaaggtggaatcacactgagt

SEQ ID NO: 9891 - DNA, 40 bp, synthetic construct
  source 1..40: mol_type = other DNA
agacaatatagttcttggagaaggtggaatcacattgagt

SEQ ID NO: 9892 - DNA, 24 bp, synthetic construct
  source 1..24: mol_type = other DNA
tggagaaggtggaatcacactgag

SEQ ID NO: 9893 - DNA, 25 bp, synthetic construct
  source 1..25: mol_type = other DNA
ttggagaaggtggaatcacactgag

SEQ ID NO: 9894 - DNA, 26 bp, synthetic construct
  source 1..26: mol_type = other DNA
cttggagaaggtggaatcacactgag

SEQ ID NO: 9895 - DNA, 27 bp, synthetic construct
  source 1..27: mol_type = other DNA
tcttggagaaggtggaatcacactgag

SEQ ID NO: 9896 - DNA, 28 bp, synthetic construct
  source 1..28: mol_type = other DNA
ttcttggagaaggtggaatcacactgag

SEQ ID NO: 9897 - DNA, 29 bp, synthetic construct
  source 1..29: mol_type = other DNA
gttcttggagaaggtggaatcacactgag

SEQ ID NO: 9898 - DNA, 30 bp, synthetic construct
  source 1..30: mol_type = other DNA
agttcttggagaaggtggaatcacactgag

SEQ ID NO: 9899 - DNA, 31 bp, synthetic construct
  source 1..31: mol_type = other DNA
tagttcttggagaaggtggaatcacactgag

SEQ ID NO: 9900 - DNA, 32 bp, synthetic construct
  source 1..32: mol_type = other DNA
atagttcttggagaaggtggaatcacactgag

SEQ ID NO: 9901 - DNA, 33 bp, synthetic construct
  source 1..33: mol_type = other DNA
tatagttcttggagaaggtggaatcacactgag

SEQ ID NO: 9902 - DNA, 34 bp, synthetic construct
  source 1..34: mol_type = other DNA
atatagttcttggagaaggtggaatcacactgag

SEQ ID NO: 9903 - DNA, 35 bp, synthetic construct
  source 1..35: mol_type = other DNA
aatatagttcttggagaaggtggaatcacactgag

SEQ ID NO: 9904 - DNA, 36 bp, synthetic construct
  source 1..36: mol_type = other DNA
caatatagttcttggagaaggtggaatcacactgag

SEQ ID NO: 9905 - DNA, 37 bp, synthetic construct
  source 1..37: mol_type = other DNA
acaatatagttcttggagaaggtggaatcacactgag

SEQ ID NO: 9906 - DNA, 38 bp, synthetic construct
  source 1..38: mol_type = other DNA
gacaatatagttcttggagaaggtggaatcacactgag

SEQ ID NO: 9907 - DNA, 39 bp, synthetic construct
  source 1..39: mol_type = other DNA
agacaatatagttcttggagaaggtggaatcacactgag

SEQ ID NO: 9908 - DNA, 40 bp, synthetic construct
  source 1..40: mol_type = other DNA
aagacaatatagttcttggagaaggtggaatcacactgag

SEQ ID NO: 9909 - DNA, 35 bp, synthetic construct
  source 1..35: mol_type = other DNA
ccaagaactatattgtctttctctgcaaatttgga

SEQ ID NO: 9910 - DNA, 35 bp, synthetic construct
  source 1..35: mol_type = other DNA
ccaagaactatattgtctttctctgcaaacttgga

SEQ ID NO: 9911 - DNA, 36 bp, synthetic construct
  source 1..36: mol_type = other DNA
tccaagaactatattgtctttctctgcaaacttgga

SEQ ID NO: 9912 - DNA, 36 bp, synthetic construct
  source 1..36: mol_type = other DNA
tccaagaactatattgtctttctctgcaaatttgga

SEQ ID NO: 9913 - DNA, 37 bp, synthetic construct
  source 1..37: mol_type = other DNA
ctccaagaactatattgtctttctctgcaaacttgga

SEQ ID NO: 9914 - DNA, 37 bp, synthetic construct
  source 1..37: mol_type = other DNA
ctccaagaactatattgtctttctctgcaaatttgga

SEQ ID NO: 9915 - DNA, 38 bp, synthetic construct
  source 1..38: mol_type = other DNA
tctccaagaactatattgtctttctctgcaaatttgga

SEQ ID NO: 9916 - DNA, 38 bp, synthetic construct
  source 1..38: mol_type = other DNA
tctccaagaactatattgtctttctctgcaaacttgga

SEQ ID NO: 9917 - DNA, 39 bp, synthetic construct
  source 1..39: mol_type = other DNA
ttctccaagaactatattgtctttctctgcaaatttgga

SEQ ID NO: 9918 - DNA, 39 bp, synthetic construct
  source 1..39: mol_type = other DNA
ttctccaagaactatattgtctttctctgcaaacttgga

SEQ ID NO: 9919 - DNA, 40 bp, synthetic construct
  source 1..40: mol_type = other DNA
cttctccaagaactatattgtctttctctgcaaacttgga

SEQ ID NO: 9920 - DNA, 40 bp, synthetic construct
  source 1..40: mol_type = other DNA
cttctccaagaactatattgtctttctctgcaaatttgga

SEQ ID NO: 9921 - DNA, 34 bp, synthetic construct
  source 1..34: mol_type = other DNA
ccaagaactatattgtctttctctgcaaacttgg

SEQ ID NO: 9922 - DNA, 35 bp, synthetic construct
  source 1..35: mol_type = other DNA
tccaagaactatattgtctttctctgcaaacttgg

SEQ ID NO: 9923 - DNA, 36 bp, synthetic construct
  source 1..36: mol_type = other DNA
ctccaagaactatattgtctttctctgcaaacttgg

SEQ ID NO: 9924 - DNA, 37 bp, synthetic construct
  source 1..37: mol_type = other DNA
tctccaagaactatattgtctttctctgcaaacttgg

SEQ ID NO: 9925 - DNA, 38 bp, synthetic construct
  source 1..38: mol_type = other DNA
ttctccaagaactatattgtctttctctgcaaacttgg

SEQ ID NO: 9926 - DNA, 39 bp, synthetic construct
  source 1..39: mol_type = other DNA
cttctccaagaactatattgtctttctctgcaaacttgg

SEQ ID NO: 9927 - DNA, 40 bp, synthetic construct
  source 1..40: mol_type = other DNA
ccttctccaagaactatattgtctttctctgcaaacttgg

SEQ ID NO: 9928 - DNA, 13 bp, synthetic construct
  source 1..13: mol_type = other DNA
ccaagaactatat

SEQ ID NO: 9929 - DNA, 13 bp, synthetic construct
  source 1..13: mol_type = other DNA
ccaagaacgatat

SEQ ID NO: 9930 - DNA, 14 bp, synthetic construct
  source 1..14: mol_type = other DNA
tccaagaacgatat

SEQ ID NO: 9931 - DNA, 14 bp, synthetic construct
  source 1..14: mol_type = other DNA
tccaagaactatat

SEQ ID NO: 9932 - DNA, 15 bp, synthetic construct
  source 1..15: mol_type = other DNA
ctccaagaacgatat

SEQ ID NO: 9933 - DNA, 15 bp, synthetic construct
  source 1..15: mol_type = other DNA
ctccaagaactatat

SEQ ID NO: 9934 - DNA, 16 bp, synthetic construct
  source 1..16: mol_type = other DNA
tctccaagaactatat

SEQ ID NO: 9935 - DNA, 16 bp, synthetic construct
  source 1..16: mol_type = other DNA
tctccaagaacgatat

SEQ ID NO: 9936 - DNA, 17 bp, synthetic construct
  source 1..17: mol_type = other DNA
ttctccaagaacgatat

SEQ ID NO: 9937 - DNA, 17 bp, synthetic construct
  source 1..17: mol_type = other DNA
ttctccaagaactatat

SEQ ID NO: 9938 - DNA, 18 bp, synthetic construct
  source 1..18: mol_type = other DNA
cttctccaagaactatat

SEQ ID NO: 9939 - DNA, 18 bp, synthetic construct
  source 1..18: mol_type = other DNA
cttctccaagaacgatat

SEQ ID NO: 9940 - DNA, 19 bp, synthetic construct
  source 1..19: mol_type = other DNA
ccttctccaagaactatat

SEQ ID NO: 9941 - DNA, 19 bp, synthetic construct
  source 1..19: mol_type = other DNA
ccttctccaagaacgatat

SEQ ID NO: 9942 - DNA, 20 bp, synthetic construct
  source 1..20: mol_type = other DNA
accttctccaagaacgatat

SEQ ID NO: 9943 - DNA, 20 bp, synthetic construct
  source 1..20: mol_type = other DNA
accttctccaagaactatat

SEQ ID NO: 9944 - DNA, 21 bp, synthetic construct
  source 1..21: mol_type = other DNA
caccttctccaagaactatat

SEQ ID NO: 9945 - DNA, 21 bp, synthetic construct
  source 1..21: mol_type = other DNA
caccttctccaagaacgatat

SEQ ID NO: 9946 - DNA, 22 bp, synthetic construct
  source 1..22: mol_type = other DNA
ccaccttctccaagaactatat

SEQ ID NO: 9947 - DNA, 22 bp, synthetic construct
  source 1..22: mol_type = other DNA
ccaccttctccaagaacgatat

SEQ ID NO: 9948 - DNA, 23 bp, synthetic construct
  source 1..23: mol_type = other DNA
tccaccttctccaagaacgatat

SEQ ID NO: 9949 - DNA, 23 bp, synthetic construct
  source 1..23: mol_type = other DNA
tccaccttctccaagaactatat

SEQ ID NO: 9950 - DNA, 24 bp, synthetic construct
  source 1..24: mol_type = other DNA
ttccaccttctccaagaactatat

SEQ ID NO: 9951 - DNA, 24 bp, synthetic construct
  source 1..24: mol_type = other DNA
ttccaccttctccaagaacgatat

SEQ ID NO: 9952 - DNA, 25 bp, synthetic construct
  source 1..25: mol_type = other DNA
attccaccttctccaagaactatat

SEQ ID NO: 9953 - DNA, 25 bp, synthetic construct
  source 1..25: mol_type = other DNA
attccaccttctccaagaacgatat

SEQ ID NO: 9954 - DNA, 26 bp, synthetic construct
  source 1..26: mol_type = other DNA
gattccaccttctccaagaactatat

SEQ ID NO: 9955 - DNA, 26 bp, synthetic construct
  source 1..26: mol_type = other DNA
gattccaccttctccaagaacgatat

SEQ ID NO: 9956 - DNA, 27 bp, synthetic construct
  source 1..27: mol_type = other DNA
tgattccaccttctccaagaacgatat

SEQ ID NO: 9957 - DNA, 27 bp, synthetic construct
  source 1..27: mol_type = other DNA
tgattccaccttctccaagaactatat

SEQ ID NO: 9958 - DNA, 28 bp, synthetic construct
  source 1..28: mol_type = other DNA
gtgattccaccttctccaagaacgatat

SEQ ID NO: 9959 - DNA, 28 bp, synthetic construct
  source 1..28: mol_type = other DNA
gtgattccaccttctccaagaactatat

SEQ ID NO: 9960 - DNA, 29 bp, synthetic construct
  source 1..29: mol_type = other DNA
tgtgattccaccttctccaagaactatat

SEQ ID NO: 9961 - DNA, 29 bp, synthetic construct
  source 1..29: mol_type = other DNA
tgtgattccaccttctccaagaacgatat

SEQ ID NO: 9962 - DNA, 30 bp, synthetic construct
  source 1..30: mol_type = other DNA
gtgtgattccaccttctccaagaacgatat

SEQ ID NO: 9963 - DNA, 30 bp, synthetic construct
  source 1..30: mol_type = other DNA
gtgtgattccaccttctccaagaactatat

SEQ ID NO: 9964 - DNA, 31 bp, synthetic construct
  source 1..31: mol_type = other DNA
agtgtgattccaccttctccaagaactatat

SEQ ID NO: 9965 - DNA, 31 bp, synthetic construct
  source 1..31: mol_type = other DNA
agtgtgattccaccttctccaagaacgatat

SEQ ID NO: 9966 - DNA, 32 bp, synthetic construct
  source 1..32: mol_type = other DNA
cagtgtgattccaccttctccaagaacgatat

SEQ ID NO: 9967 - DNA, 32 bp, synthetic construct
  source 1..32: mol_type = other DNA
cagtgtgattccaccttctccaagaactatat

SEQ ID NO: 9968 - DNA, 33 bp, synthetic construct
  source 1..33: mol_type = other DNA
tcagtgtgattccaccttctccaagaactatat

SEQ ID NO: 9969 - DNA, 33 bp, synthetic construct
  source 1..33: mol_type = other DNA
tcagtgtgattccaccttctccaagaacgatat

SEQ ID NO: 9970 - DNA, 34 bp, synthetic construct
  source 1..34: mol_type = other DNA
ctcagtgtgattccaccttctccaagaacgatat

SEQ ID NO: 9971 - DNA, 34 bp, synthetic construct
  source 1..34: mol_type = other DNA
ctcagtgtgattccaccttctccaagaactatat

SEQ ID NO: 9972 - DNA, 35 bp, synthetic construct
  source 1..35: mol_type = other DNA
actcagtgtgattccaccttctccaagaacgatat

SEQ ID NO: 9973 - DNA, 35 bp, synthetic construct
  source 1..35: mol_type = other DNA
actcagtgtgattccaccttctccaagaactatat

SEQ ID NO: 9974 - DNA, 36 bp, synthetic construct
  source 1..36: mol_type = other DNA
cactcagtgtgattccaccttctccaagaacgatat

SEQ ID NO: 9975 - DNA, 36 bp, synthetic construct
  source 1..36: mol_type = other DNA
cactcagtgtgattccaccttctccaagaactatat

SEQ ID NO: 9976 - DNA, 37 bp, synthetic construct
  source 1..37: mol_type = other DNA
ccactcagtgtgattccaccttctccaagaacgatat

SEQ ID NO: 9977 - DNA, 37 bp, synthetic construct
  source 1..37: mol_type = other DNA
ccactcagtgtgattccaccttctccaagaactatat

SEQ ID NO: 9978 - DNA, 38 bp, synthetic construct
  source 1..38: mol_type = other DNA
tccactcagtgtgattccaccttctccaagaacgatat

SEQ ID NO: 9979 - DNA, 38 bp, synthetic construct
  source 1..38: mol_type = other DNA
tccactcagtgtgattccaccttctccaagaactatat

SEQ ID NO: 9980 - DNA, 39 bp, synthetic construct
  source 1..39: mol_type = other DNA
ctccactcagtgtgattccaccttctccaagaacgatat

SEQ ID NO: 9981 - DNA, 39 bp, synthetic construct
  source 1..39: mol_type = other DNA
ctccactcagtgtgattccaccttctccaagaactatat

SEQ ID NO: 9982 - DNA, 40 bp, synthetic construct
  source 1..40: mol_type = other DNA
cctccactcagtgtgattccaccttctccaagaactatat

SEQ ID NO: 9983 - DNA, 40 bp, synthetic construct
  source 1..40: mol_type = other DNA
cctccactcagtgtgattccaccttctccaagaacgatat

SEQ ID NO: 9984 - DNA, 12 bp, synthetic construct
  source 1..12: mol_type = other DNA
ccaagaactata

SEQ ID NO: 9985 - DNA, 13 bp, synthetic construct
  source 1..13: mol_type = other DNA
tccaagaactata

SEQ ID NO: 9986 - DNA, 14 bp, synthetic construct
  source 1..14: mol_type = other DNA
ctccaagaactata

SEQ ID NO: 9987 - DNA, 15 bp, synthetic construct
  source 1..15: mol_type = other DNA
tctccaagaactata

SEQ ID NO: 9988 - DNA, 16 bp, synthetic construct
  source 1..16: mol_type = other DNA
ttctccaagaactata

SEQ ID NO: 9989 - DNA, 17 bp, synthetic construct
  source 1..17: mol_type = other DNA
cttctccaagaactata

SEQ ID NO: 9990 - DNA, 18 bp, synthetic construct
  source 1..18: mol_type = other DNA
ccttctccaagaactata

SEQ ID NO: 9991 - DNA, 19 bp, synthetic construct
  source 1..19: mol_type = other DNA
accttctccaagaactata

SEQ ID NO: 9992 - DNA, 20 bp, synthetic construct
  source 1..20: mol_type = other DNA
caccttctccaagaactata

SEQ ID NO: 9993 - DNA, 21 bp, synthetic construct
  source 1..21: mol_type = other DNA
ccaccttctccaagaactata

SEQ ID NO: 9994 - DNA, 22 bp, synthetic construct
  source 1..22: mol_type = other DNA
tccaccttctccaagaactata

SEQ ID NO: 9995 - DNA, 23 bp, synthetic construct
  source 1..23: mol_type = other DNA
ttccaccttctccaagaactata

SEQ ID NO: 9996 - DNA, 24 bp, synthetic construct
  source 1..24: mol_type = other DNA
attccaccttctccaagaactata

SEQ ID NO: 9997 - DNA, 25 bp, synthetic construct
  source 1..25: mol_type = other DNA
gattccaccttctccaagaactata

SEQ ID NO: 9998 - DNA, 26 bp, synthetic construct
  source 1..26: mol_type = other DNA
tgattccaccttctccaagaactata

SEQ ID NO: 9999 - DNA, 27 bp, synthetic construct
  source 1..27: mol_type = other DNA
gtgattccaccttctccaagaactata

SEQ ID NO: 10000 - DNA, 28 bp, synthetic construct
  source 1..28: mol_type = other DNA
tgtgattccaccttctccaagaactata

SEQ ID NO: 10001 - DNA, 29 bp, synthetic construct
  source 1..29: mol_type = other DNA
gtgtgattccaccttctccaagaactata

SEQ ID NO: 10002 - DNA, 30 bp, synthetic construct
  source 1..30: mol_type = other DNA
agtgtgattccaccttctccaagaactata

SEQ ID NO: 10003 - DNA, 31 bp, synthetic construct
  source 1..31: mol_type = other DNA
cagtgtgattccaccttctccaagaactata

SEQ ID NO: 10004 - DNA, 32 bp, synthetic construct
  source 1..32: mol_type = other DNA
tcagtgtgattccaccttctccaagaactata

SEQ ID NO: 10005 - DNA, 33 bp, synthetic construct
  source 1..33: mol_type = other DNA
ctcagtgtgattccaccttctccaagaactata

SEQ ID NO: 10006 - DNA, 34 bp, synthetic construct
  source 1..34: mol_type = other DNA
actcagtgtgattccaccttctccaagaactata

SEQ ID NO: 10007 - DNA, 35 bp, synthetic construct
  source 1..35: mol_type = other DNA
cactcagtgtgattccaccttctccaagaactata

SEQ ID NO: 10008 - DNA, 36 bp, synthetic construct
  source 1..36: mol_type = other DNA
ccactcagtgtgattccaccttctccaagaactata

SEQ ID NO: 10009 - DNA, 37 bp, synthetic construct
  source 1..37: mol_type = other DNA
tccactcagtgtgattccaccttctccaagaactata

SEQ ID NO: 10010 - DNA, 38 bp, synthetic construct
  source 1..38: mol_type = other DNA
ctccactcagtgtgattccaccttctccaagaactata

SEQ ID NO: 10011 - DNA, 39 bp, synthetic construct
  source 1..39: mol_type = other DNA
cctccactcagtgtgattccaccttctccaagaactata

SEQ ID NO: 10012 - DNA, 40 bp, synthetic construct
  source 1..40: mol_type = other DNA
acctccactcagtgtgattccaccttctccaagaactata

SEQ ID NO: 10013 - DNA, 25 bp, synthetic construct
  source 1..25: mol_type = other DNA
ctcagtgtgattccaccttctccaa

SEQ ID NO: 10014 - DNA, 25 bp, synthetic construct
  source 1..25: mol_type = other DNA
ctcagtgtgattccaccttcgccaa

SEQ ID NO: 10015 - DNA, 26 bp, synthetic construct
  source 1..26: mol_type = other DNA
actcagtgtgattccaccttcgccaa

SEQ ID NO: 10016 - DNA, 26 bp, synthetic construct
  source 1..26: mol_type = other DNA
actcagtgtgattccaccttctccaa

SEQ ID NO: 10017 - DNA, 27 bp, synthetic construct
  source 1..27: mol_type = other DNA
cactcagtgtgattccaccttcgccaa

SEQ ID NO: 10018 - DNA, 27 bp, synthetic construct
  source 1..27: mol_type = other DNA
cactcagtgtgattccaccttctccaa

SEQ ID NO: 10019 - DNA, 28 bp, synthetic construct
  source 1..28: mol_type = other DNA
ccactcagtgtgattccaccttcgccaa

SEQ ID NO: 10020 - DNA, 28 bp, synthetic construct
  source 1..28: mol_type = other DNA
ccactcagtgtgattccaccttctccaa

SEQ ID NO: 10021 - DNA, 29 bp, synthetic construct
  source 1..29: mol_type = other DNA
tccactcagtgtgattccaccttctccaa

SEQ ID NO: 10022 - DNA, 29 bp, synthetic construct
  source 1..29: mol_type = other DNA
tccactcagtgtgattccaccttcgccaa

SEQ ID NO: 10023 - DNA, 30 bp, synthetic construct; identical to SEQ ID NO: 9482
  source 1..30: mol_type = other DNA

SEQ ID NO: 10024 - DNA, 30 bp, synthetic construct; identical to SEQ ID NO: 9481
  source 1..30: mol_type = other DNA

SEQ ID NO: 10025 - DNA, 31 bp, synthetic construct; identical to SEQ ID NO: 9484
  source 1..31: mol_type = other DNA

SEQ ID NO: 10026 - DNA, 31 bp, synthetic construct; identical to SEQ ID NO: 9483
  source 1..31: mol_type = other DNA

SEQ ID NO: 10027 - DNA, 32 bp, synthetic construct; identical to SEQ ID NO: 9485
  source 1..32: mol_type = other DNA

SEQ ID NO: 10028 - DNA, 32 bp, synthetic construct; identical to SEQ ID NO: 9486
  source 1..32: mol_type = other DNA

SEQ ID NO: 10029 - DNA, 33 bp, synthetic construct; identical to SEQ ID NO: 9488
  source 1..33: mol_type = other DNA

SEQ ID NO: 10030 - DNA, 33 bp, synthetic construct; identical to SEQ ID NO: 9487
  source 1..33: mol_type = other DNA

SEQ ID NO: 10031 - DNA, 34 bp, synthetic construct; identical to SEQ ID NO: 9489
  source 1..34: mol_type = other DNA

SEQ ID NO: 10032 - DNA, 34 bp, synthetic construct; identical to SEQ ID NO: 9490
  source 1..34: mol_type = other DNA

SEQ ID NO: 10033 - DNA, 35 bp, synthetic construct; identical to SEQ ID NO: 9492
  source 1..35: mol_type = other DNA

SEQ ID NO: 10034 - DNA, 35 bp, synthetic construct; identical to SEQ ID NO: 9491
  source 1..35: mol_type = other DNA

SEQ ID NO: 10035 - DNA, 36 bp, synthetic construct; identical to SEQ ID NO: 9493
  source 1..36: mol_type = other DNA

SEQ ID NO: 10036 - DNA, 36 bp, synthetic construct; identical to SEQ ID NO: 9494
  source 1..36: mol_type = other DNA

SEQ ID NO: 10037 - DNA, 37 bp, synthetic construct; identical to SEQ ID NO: 9496
  source 1..37: mol_type = other DNA

SEQ ID NO: 10038 - DNA, 37 bp, synthetic construct; identical to SEQ ID NO: 9495
  source 1..37: mol_type = other DNA

SEQ ID NO: 10039 - DNA, 38 bp, synthetic construct; identical to SEQ ID NO: 9497
  source 1..38: mol_type = other DNA

SEQ ID NO: 10040 - DNA, 38 bp, synthetic construct; identical to SEQ ID NO: 9498
  source 1..38: mol_type = other DNA

SEQ ID NO: 10041 - DNA, 39 bp, synthetic construct; identical to SEQ ID NO: 9500
  source 1..39: mol_type = other DNA

SEQ ID NO: 10042 - DNA, 39 bp, synthetic construct; identical to SEQ ID NO: 9499
  source 1..39: mol_type = other DNA

SEQ ID NO: 10043 - DNA, 40 bp, synthetic construct; identical to SEQ ID NO: 9501
  source 1..40: mol_type = other DNA

SEQ ID NO: 10044 - DNA, 40 bp, synthetic construct; identical to SEQ ID NO: 9502
  source 1..40: mol_type = other DNA

SEQ ID NO: 10045 - DNA, 24 bp, synthetic construct
  source 1..24: mol_type = other DNA
ctcagtgtgattccaccttctcca

SEQ ID NO: 10046 - DNA, 25 bp, synthetic construct
  source 1..25: mol_type = other DNA
actcagtgtgattccaccttctcca

SEQ ID NO: 10047 - DNA, 26 bp, synthetic construct
  source 1..26: mol_type = other DNA
cactcagtgtgattccaccttctcca

SEQ ID NO: 10048 - DNA, 27 bp, synthetic construct
  source 1..27: mol_type = other DNA
ccactcagtgtgattccaccttctcca

SEQ ID NO: 10049 - DNA, 28 bp, synthetic construct
  source 1..28: mol_type = other DNA
tccactcagtgtgattccaccttctcca

SEQ ID NO: 10050 - DNA, 29 bp, synthetic construct
  source 1..29: mol_type = other DNA
ctccactcagtgtgattccaccttctcca

SEQ ID NO: 10051 - DNA, 30 bp, synthetic construct; identical to SEQ ID NO: 9523
  source 1..30: mol_type = other DNA

SEQ ID NO: 10052 - DNA, 31 bp, synthetic construct; identical to SEQ ID NO: 9524
  source 1..31: mol_type = other DNA

SEQ ID NO: 10053 - DNA, 32 bp, synthetic construct; identical to SEQ ID NO: 9525
  source 1..32: mol_type = other DNA

SEQ ID NO: 10054 - DNA, 33 bp, synthetic construct; identical to SEQ ID NO: 9526
  source 1..33: mol_type = other DNA

SEQ ID NO: 10055 - DNA, 34 bp, synthetic construct; identical to SEQ ID NO: 9527
  source 1..34: mol_type = other DNA

SEQ ID NO: 10056 - DNA, 35 bp, synthetic construct; identical to SEQ ID NO: 9528
  source 1..35: mol_type = other DNA

SEQ ID NO: 10057 - DNA, 36 bp, synthetic construct; identical to SEQ ID NO: 9529
  source 1..36: mol_type = other DNA

SEQ ID NO: 10058 - DNA, 37 bp, synthetic construct; identical to SEQ ID NO: 9530
  source 1..37: mol_type = other DNA

SEQ ID NO: 10059 - DNA, 38 bp, synthetic construct; identical to SEQ ID NO: 9531
  source 1..38: mol_type = other DNA

SEQ ID NO: 10060 - DNA, 39 bp, synthetic construct; identical to SEQ ID NO: 9532
  source 1..39: mol_type = other DNA

SEQ ID NO: 10061 - DNA, 40 bp, synthetic construct; identical to SEQ ID NO: 9533
  source 1..40: mol_type = other DNA

SEQ ID NO: 10062 - DNA, 10 bp, synthetic construct
  source 1..10: mol_type = other DNA
acctccactc

SEQ ID NO: 10063 - DNA, 11 bp, synthetic construct
  source 1..11: mol_type = other DNA
gacctccactc

SEQ ID NO: 10064 - DNA, 12 bp, synthetic construct
  source 1..12: mol_type = other DNA
tgacctccactc

SEQ ID NO: 10065 - DNA, 13 bp, synthetic construct
  source 1..13: mol_type = other DNA
ttgacctccactc

SEQ ID NO: 10066 - DNA, 14 bp, synthetic construct
  source 1..14: mol_type = other DNA
gttgacctccactc

SEQ ID NO: 10067 - DNA, 15 bp, synthetic construct
  source 1..15: mol_type = other DNA
cgttgacctccactc

SEQ ID NO: 10068 - DNA, 16 bp, synthetic construct
  source 1..16: mol_type = other DNA
tcgttgacctccactc

SEQ ID NO: 10069 - DNA, 17 bp, synthetic construct
  source 1..17: mol_type = other DNA
ctcgttgacctccactc

SEQ ID NO: 10070 - DNA, 18 bp, synthetic construct
  source 1..18: mol_type = other DNA
gctcgttgacctccactc

SEQ ID NO: 10071 - DNA, 19 bp, synthetic construct
  source 1..19: mol_type = other DNA
tgctcgttgacctccactc

SEQ ID NO: 10072 - DNA, 20 bp, synthetic construct
  source 1..20: mol_type = other DNA
ttgctcgttgacctccactc

SEQ ID NO: 10073 - DNA, 21 bp, synthetic construct
  source 1..21: mol_type = other DNA
cttgctcgttgacctccactc

SEQ ID NO: 10074 - DNA, 22 bp, synthetic construct
  source 1..22: mol_type = other DNA
tcttgctcgttgacctccactc

SEQ ID NO: 10075 - DNA, 23 bp, synthetic construct
  source 1..23: mol_type = other DNA
ttcttgctcgttgacctccactc

SEQ ID NO: 10076 - DNA, 24 bp, synthetic construct
  source 1..24: mol_type = other DNA
attcttgctcgttgacctccactc

SEQ ID NO: 10077 - DNA, 25 bp, synthetic construct
  source 1..25: mol_type = other DNA
aattcttgctcgttgacctccactc

SEQ ID NO: 10078 - DNA, 26 bp, synthetic construct
  source 1..26: mol_type = other DNA
aaattcttgctcgttgacctccactc

SEQ ID NO: 10079 - DNA, 27 bp, synthetic construct
  source 1..27: mol_type = other DNA
gaaattcttgctcgttgacctccactc

SEQ ID NO: 10080 - DNA, 28 bp, synthetic construct
  source 1..28: mol_type = other DNA
agaaattcttgctcgttgacctccactc

SEQ ID NO: 10081 - DNA, 29 bp, synthetic construct
  source 1..29: mol_type = other DNA
aagaaattcttgctcgttgacctccactc

SEQ ID NO: 10082 - DNA, 30 bp, synthetic construct
  source 1..30: mol_type = other DNA
aaagaaattcttgctcgttgacctccactc

SEQ ID NO: 10083 - DNA, 31 bp, synthetic construct
  source 1..31: mol_type = other DNA
taaagaaattcttgctcgttgacctccactc

SEQ ID NO: 10084 - DNA, 32 bp, synthetic construct
  source 1..32: mol_type = other DNA
ctaaagaaattcttgctcgttgacctccactc

SEQ ID NO: 10085 - DNA, 33 bp, synthetic construct
  source 1..33: mol_type = other DNA
gctaaagaaattcttgctcgttgacctccactc

SEQ ID NO: 10086 - DNA, 34 bp, synthetic construct
  source 1..34: mol_type = other DNA
tgctaaagaaattcttgctcgttgacctccactc

SEQ ID NO: 10087 - DNA, 35 bp, synthetic construct
  source 1..35: mol_type = other DNA
ttgctaaagaaattcttgctcgttgacctccactc

SEQ ID NO: 10088 - DNA, 36 bp, synthetic construct
  source 1..36: mol_type = other DNA
cttgctaaagaaattcttgctcgttgacctccactc

SEQ ID NO: 10089 - DNA, 37 bp, synthetic construct
  source 1..37: mol_type = other DNA
ccttgctaaagaaattcttgctcgttgacctccactc

SEQ ID NO: 10090 - DNA, 38 bp, synthetic construct
  source 1..38: mol_type = other DNA
accttgctaaagaaattcttgctcgttgacctccactc

SEQ ID NO: 10091 - DNA, 39 bp, synthetic construct
  source 1..39: mol_type = other DNA
caccttgctaaagaaattcttgctcgttgacctccactc

SEQ ID NO: 10092 - DNA, 40 bp, synthetic construct
  source 1..40: mol_type = other DNA
tcaccttgctaaagaaattcttgctcgttgacctccactc

SEQ ID NO: 10093 - DNA, 21 bp, synthetic construct
  source 1..21: mol_type = other DNA
ctcagtgtgattccaccttct

SEQ ID NO: 10094 - DNA, 22 bp, synthetic construct
  source 1..22: mol_type = other DNA
actcagtgtgattccaccttct

SEQ ID NO: 10095 - DNA, 23 bp, synthetic construct
  source 1..23: mol_type = other DNA
cactcagtgtgattccaccttct

SEQ ID NO: 10096 - DNA, 24 bp, synthetic construct
  source 1..24: mol_type = other DNA
ccactcagtgtgattccaccttct

SEQ ID NO: 10097 - DNA, 25 bp, synthetic construct
  source 1..25: mol_type = other DNA
tccactcagtgtgattccaccttct

SEQ ID NO: 10098 - DNA, 26 bp, synthetic construct
  source 1..26: mol_type = other DNA
ctccactcagtgtgattccaccttct

SEQ ID NO: 10099 - DNA, 27 bp, synthetic construct
  source 1..27: mol_type = other DNA
cctccactcagtgtgattccaccttct

SEQ ID NO: 10100 - DNA, 28 bp, synthetic construct
  source 1..28: mol_type = other DNA
acctccactcagtgtgattccaccttct

SEQ ID NO: 10101 - DNA, 29 bp, synthetic construct
  source 1..29: mol_type = other DNA
gacctccactcagtgtgattccaccttct

SEQ ID NO: 10102 - DNA, 30 bp, synthetic construct
  source 1..30: mol_type = other DNA
tgacctccactcagtgtgattccaccttct

SEQ ID NO: 10103 - DNA, 31 bp, synthetic construct
  source 1..31: mol_type = other DNA
ttgacctccactcagtgtgattccaccttct

SEQ ID NO: 10104 - DNA, 32 bp, synthetic construct
  source 1..32: mol_type = other DNA
gttgacctccactcagtgtgattccaccttct

SEQ ID NO: 10105 - DNA, 33 bp, synthetic construct
  source 1..33: mol_type = other DNA
cgttgacctccactcagtgtgattccaccttct

SEQ ID NO: 10106 - DNA, 34 bp, synthetic construct
  source 1..34: mol_type = other DNA
tcgttgacctccactcagtgtgattccaccttct

SEQ ID NO: 10107 - DNA, 35 bp, synthetic construct
  source 1..35: mol_type = other DNA
ctcgttgacctccactcagtgtgattccaccttct

SEQ ID NO: 10108 - DNA, 36 bp, synthetic construct
  source 1..36: mol_type = other DNA
gctcgttgacctccactcagtgtgattccaccttct

SEQ ID NO: 10109 - DNA, 37 bp, synthetic construct
  source 1..37: mol_type = other DNA
tgctcgttgacctccactcagtgtgattccaccttct

SEQ ID NO: 10110 - DNA, 38 bp, synthetic construct
  source 1..38: mol_type = other DNA
ttgctcgttgacctccactcagtgtgattccaccttct

SEQ ID NO: 10111 - DNA, 39 bp, synthetic construct
  source 1..39: mol_type = other DNA
cttgctcgttgacctccactcagtgtgattccaccttct

SEQ ID NO: 10112 - DNA, 40 bp, synthetic construct
  source 1..40: mol_type = other DNA
tcttgctcgttgacctccactcagtgtgattccaccttct

SEQ ID NO: 10113 - DNA, 20 bp, synthetic construct
  source 1..20: mol_type = other DNA
ctcagtgtgattccaccttc

SEQ ID NO: 10114 - DNA, 21 bp, synthetic construct
  source 1..21: mol_type = other DNA
actcagtgtgattccaccttc

SEQ ID NO: 10115 - DNA, 22 bp, synthetic construct
  source 1..22: mol_type = other DNA
cactcagtgtgattccaccttc

SEQ ID NO: 10116 - DNA, 23 bp, synthetic construct
  source 1..23: mol_type = other DNA
ccactcagtgtgattccaccttc

SEQ ID NO: 10117 - DNA, 24 bp, synthetic construct
  source 1..24: mol_type = other DNA
tccactcagtgtgattccaccttc

SEQ ID NO: 10118 - DNA, 25 bp, synthetic construct
  source 1..25: mol_type = other DNA
ctccactcagtgtgattccaccttc

SEQ ID NO: 10119 - DNA, 26 bp, synthetic construct
  source 1..26: mol_type = other DNA
cctccactcagtgtgattccaccttc

SEQ ID NO: 10120 - DNA, 27 bp, synthetic construct
  source 1..27: mol_type = other DNA
acctccactcagtgtgattccaccttc

SEQ ID NO: 10121 - DNA, 28 bp, synthetic construct
  source 1..28: mol_type = other DNA
gacctccactcagtgtgattccaccttc

SEQ ID NO: 10122 - DNA, 29 bp, synthetic construct
  source 1..29: mol_type = other DNA
tgacctccactcagtgtgattccaccttc

SEQ ID NO: 10123 - DNA, 30 bp, synthetic construct
  source 1..30: mol_type = other DNA
ttgacctccactcagtgtgattccaccttc

SEQ ID NO: 10124 - DNA, 31 bp, synthetic construct
  source 1..31: mol_type = other DNA
gttgacctccactcagtgtgattccaccttc

SEQ ID NO: 10125 - DNA, 32 bp, synthetic construct
  source 1..32: mol_type = other DNA
cgttgacctccactcagtgtgattccaccttc

SEQ ID NO: 10126 - DNA, 33 bp, synthetic construct
  source 1..33: mol_type = other DNA
tcgttgacctccactcagtgtgattccaccttc

SEQ ID NO: 10127 - DNA, 34 bp, synthetic construct
  source 1..34: mol_type = other DNA
ctcgttgacctccactcagtgtgattccaccttc

SEQ ID NO: 10128 - DNA, 35 bp, synthetic construct
  source 1..35: mol_type = other DNA
gctcgttgacctccactcagtgtgattccaccttc

SEQ ID NO: 10129 - DNA, 36 bp, synthetic construct
  source 1..36: mol_type = other DNA
tgctcgttgacctccactcagtgtgattccaccttc

SEQ ID NO: 10130 - DNA, 37 bp, synthetic construct
  source 1..37: mol_type = other DNA
ttgctcgttgacctccactcagtgtgattccaccttc

SEQ ID NO: 10131 - DNA, 38 bp, synthetic construct
  source 1..38: mol_type = other DNA
cttgctcgttgacctccactcagtgtgattccaccttc

SEQ ID NO: 10132 - DNA, 39 bp, synthetic construct
  source 1..39: mol_type = other DNA
tcttgctcgttgacctccactcagtgtgattccaccttc

SEQ ID NO: 10133 - DNA, 40 bp, synthetic construct
  source 1..40: mol_type = other DNA
ttcttgctcgttgacctccactcagtgtgattccaccttc

SEQ ID NO: 10134 - DNA, 27 bp, synthetic construct
  source 1..27: mol_type = other DNA
ctcagtgtgattccaccttctccaaga

SEQ ID NO: 10135 - DNA, 28 bp, synthetic construct
  source 1..28: mol_type = other DNA
actcagtgtgattccaccttctccaaga

SEQ ID NO: 10136 - DNA, 29 bp, synthetic construct
  source 1..29: mol_type = other DNA
cactcagtgtgattccaccttctccaaga

SEQ ID NO: 10137 - DNA, 30 bp, synthetic construct
  source 1..30: mol_type = other DNA
ccactcagtgtgattccaccttctccaaga

SEQ ID NO: 10138 - DNA, 31 bp, synthetic construct
  source 1..31: mol_type = other DNA
tccactcagtgtgattccaccttctccaaga

SEQ ID NO: 10139 - DNA, 32 bp, synthetic construct
  source 1..32: mol_type = other DNA
ctccactcagtgtgattccaccttctccaaga

SEQ ID NO: 10140 - DNA, 33 bp, synthetic construct
  source 1..33: mol_type = other DNA
cctccactcagtgtgattccaccttctccaaga

SEQ ID NO: 10141 - DNA, 34 bp, synthetic construct
  source 1..34: mol_type = other DNA
acctccactcagtgtgattccaccttctccaaga

SEQ ID NO: 10142 - DNA, 35 bp, synthetic construct
  source 1..35: mol_type = other DNA
gacctccactcagtgtgattccaccttctccaaga

SEQ ID NO: 10143 - DNA, 36 bp, synthetic construct
  source 1..36: mol_type = other DNA
tgacctccactcagtgtgattccaccttctccaaga

SEQ ID NO: 10144 - DNA, 37 bp, synthetic construct
  source 1..37: mol_type = other DNA
ttgacctccactcagtgtgattccaccttctccaaga

SEQ ID NO: 10145 - DNA, 38 bp, synthetic construct
  source 1..38: mol_type = other DNA
gttgacctccactcagtgtgattccaccttctccaaga

SEQ ID NO: 10146 - DNA, 39 bp, synthetic construct
  source 1..39: mol_type = other DNA
cgttgacctccactcagtgtgattccaccttctccaaga

SEQ ID NO: 10147 - DNA, 40 bp, synthetic construct
  source 1..40: mol_type = other DNA
tcgttgacctccactcagtgtgattccaccttctccaaga

SEQ ID NO: 10148 - DNA, 10 bp, synthetic construct
  source 1..10: mol_type = other DNA
cctccactca

SEQ ID NO: 10149 - DNA, 11 bp, synthetic construct
  source 1..11: mol_type = other DNA
acctccactca

SEQ ID NO: 10150 - DNA, 12 bp, synthetic construct
  source 1..12: mol_type = other DNA
gacctccactca

SEQ ID NO: 10151 - DNA, 13 bp, synthetic construct
  source 1..13: mol_type = other DNA
tgacctccactca

SEQ ID NO: 10152 - DNA, 14 bp, synthetic construct
  source 1..14: mol_type = other DNA
ttgacctccactca

SEQ ID NO: 10153 - DNA, 15 bp, synthetic construct
  source 1..15: mol_type = other DNA
gttgacctccactca

SEQ ID NO: 10154 - DNA, 16 bp, synthetic construct
  source 1..16: mol_type = other DNA
cgttgacctccactca

SEQ ID NO: 10155 - DNA, 17 bp, synthetic construct
  source 1..17: mol_type = other DNA
tcgttgacctccactca

SEQ ID NO: 10156 - DNA, 18 bp, synthetic construct
  source 1..18: mol_type = other DNA
ctcgttgacctccactca

SEQ ID NO: 10157 - DNA, 19 bp, synthetic construct
  source 1..19: mol_type = other DNA
gctcgttgacctccactca

SEQ ID NO: 10158 - DNA, 20 bp, synthetic construct
  source 1..20: mol_type = other DNA
tgctcgttgacctccactca

SEQ ID NO: 10159 - DNA, 21 bp, synthetic construct
  source 1..21: mol_type = other DNA
ttgctcgttgacctccactca

SEQ ID NO: 10160 - DNA, 22 bp, synthetic construct
  source 1..22: mol_type = other DNA
cttgctcgttgacctccactca

SEQ ID NO: 10161 - DNA, 23 bp, synthetic construct
  source 1..23: mol_type = other DNA
tcttgctcgttgacctccactca

SEQ ID NO: 10162 - DNA, 24 bp, synthetic construct
  source 1..24: mol_type = other DNA
ttcttgctcgttgacctccactca

SEQ ID NO: 10163 - DNA, 25 bp, synthetic construct
  source 1..25: mol_type = other DNA
attcttgctcgttgacctccactca

SEQ ID NO: 10164 - DNA, 26 bp, synthetic construct
  source 1..26: mol_type = other DNA
aattcttgctcgttgacctccactca

SEQ ID NO: 10165 - DNA, 27 bp, synthetic construct
  source 1..27: mol_type = other DNA
aaattcttgctcgttgacctccactca

SEQ ID NO: 10166 - DNA, 28 bp, synthetic construct
  source 1..28: mol_type = other DNA
gaaattcttgctcgttgacctccactca

SEQ ID NO: 10167 - DNA, 29 bp, synthetic construct
  source 1..29: mol_type = other DNA
agaaattcttgctcgttgacctccactca

SEQ ID NO: 10168 - DNA, 30 bp, synthetic construct
  source 1..30: mol_type = other DNA
aagaaattcttgctcgttgacctccactca

SEQ ID NO: 10169 - DNA, 31 bp, synthetic construct
  source 1..31: mol_type = other DNA
aaagaaattcttgctcgttgacctccactca

SEQ ID NO: 10170 - DNA, 32 bp, synthetic construct
  source 1..32: mol_type = other DNA
taaagaaattcttgctcgttgacctccactca

SEQ ID NO: 10171 - DNA, 33 bp, synthetic construct
  source 1..33: mol_type = other DNA
ctaaagaaattcttgctcgttgacctccactca

SEQ ID NO: 10172 - DNA, 34 bp, synthetic construct
  source 1..34: mol_type = other DNA
gctaaagaaattcttgctcgttgacctccactca

SEQ ID NO: 10173 - DNA, 35 bp, synthetic construct
  source 1..35: mol_type = other DNA
tgctaaagaaattcttgctcgttgacctccactca

SEQ ID NO: 10174 - DNA, 36 bp, synthetic construct
  source 1..36: mol_type = other DNA
ttgctaaagaaattcttgctcgttgacctccactca

SEQ ID NO: 10175 - DNA, 37 bp, synthetic construct
  source 1..37: mol_type = other DNA
cttgctaaagaaattcttgctcgttgacctccactca

SEQ ID NO: 10176 - DNA, 38 bp, synthetic construct
  source 1..38: mol_type = other DNA
ccttgctaaagaaattcttgctcgttgacctccactca

SEQ ID NO: 10177 - DNA, 39 bp, synthetic construct
  source 1..39: mol_type = other DNA
accttgctaaagaaattcttgctcgttgacctccactca

SEQ ID NO: 10178 - DNA, 40 bp, synthetic construct
  source 1..40: mol_type = other DNA
caccttgctaaagaaattcttgctcgttgacctccactca

SEQ ID NO: 10179 - DNA, 28 bp, synthetic construct
  source 1..28: mol_type = other DNA
ctcagtgtgattccaccttctccaagaa

SEQ ID NO: 10180 - DNA, 29 bp, synthetic construct
  source 1..29: mol_type = other DNA
actcagtgtgattccaccttctccaagaa

SEQ ID NO: 10181 - DNA, 30 bp, synthetic construct
  source 1..30: mol_type = other DNA
cactcagtgtgattccaccttctccaagaa

SEQ ID NO: 10182 - DNA, 31 bp, synthetic construct
  source 1..31: mol_type = other DNA
ccactcagtgtgattccaccttctccaagaa

SEQ ID NO: 10183 - DNA, 32 bp, synthetic construct
  source 1..32: mol_type = other DNA
tccactcagtgtgattccaccttctccaagaa

SEQ ID NO: 10184 - DNA, 33 bp, synthetic construct
  source 1..33: mol_type = other DNA
ctccactcagtgtgattccaccttctccaagaa

SEQ ID NO: 10185 - DNA, 34 bp, synthetic construct
  source 1..34: mol_type = other DNA
cctccactcagtgtgattccaccttctccaagaa

SEQ ID NO: 10186 - DNA, 35 bp, synthetic construct
  source 1..35: mol_type = other DNA
acctccactcagtgtgattccaccttctccaagaa

SEQ ID NO: 10187 - DNA, 36 bp, synthetic construct
  source 1..36: mol_type = other DNA
gacctccactcagtgtgattccaccttctccaagaa

SEQ ID NO: 10188 - DNA, 37 bp, synthetic construct
  source 1..37: mol_type = other DNA
tgacctccactcagtgtgattccaccttctccaagaa

SEQ ID NO: 10189 - DNA, 38 bp, synthetic construct
  source 1..38: mol_type = other DNA
ttgacctccactcagtgtgattccaccttctccaagaa

SEQ ID NO: 10190 - DNA, 39 bp, synthetic construct
  source 1..39: mol_type = other DNA
gttgacctccactcagtgtgattccaccttctccaagaa

SEQ ID NO: 10191 - DNA, 40 bp, synthetic construct
  source 1..40: mol_type = other DNA
cgttgacctccactcagtgtgattccaccttctccaagaa

SEQ ID NO: 10192 - DNA, 10 bp, synthetic construct
  source 1..10: mol_type = other DNA
gacctccact

SEQ ID NO: 10193 - DNA, 11 bp, synthetic construct
  source 1..11: mol_type = other DNA
tgacctccact

SEQ ID NO: 10194 - DNA, 12 bp, synthetic construct
  source 1..12: mol_type = other DNA
ttgacctccact

SEQ ID NO: 10195 - DNA, 13 bp, synthetic construct
  source 1..13: mol_type = other DNA
gttgacctccact

SEQ ID NO: 10196 - DNA, 14 bp, synthetic construct
  source 1..14: mol_type = other DNA
cgttgacctccact

SEQ ID NO: 10197 - DNA, 15 bp, synthetic construct
  source 1..15: mol_type = other DNA
tcgttgacctccact

SEQ ID NO: 10198 - DNA, 16 bp, synthetic construct
  source 1..16: mol_type = other DNA
ctcgttgacctccact

SEQ ID NO: 10199 - DNA, 17 bp, synthetic construct
  source 1..17: mol_type = other DNA
gctcgttgacctccact

SEQ ID NO: 10200 - DNA, 18 bp, synthetic construct
  source 1..18: mol_type = other DNA
tgctcgttgacctccact

SEQ ID NO: 10201 - DNA, 19 bp, synthetic construct
  source 1..19: mol_type = other DNA
ttgctcgttgacctccact

SEQ ID NO: 10202 - DNA, 20 bp, synthetic construct
  source 1..20: mol_type = other DNA
cttgctcgttgacctccact

SEQ ID NO: 10203 - DNA, 21 bp, synthetic construct
  source 1..21: mol_type = other DNA
tcttgctcgttgacctccact

SEQ ID NO: 10204 - DNA, 22 bp, synthetic construct
  source 1..22: mol_type = other DNA
ttcttgctcgttgacctccact

SEQ ID NO: 10205 - DNA, 23 bp, synthetic construct
  source 1..23: mol_type = other DNA
attcttgctcgttgacctccact

SEQ ID NO: 10206 - DNA, 24 bp, synthetic construct
  source 1..24: mol_type = other DNA
aattcttgctcgttgacctccact

SEQ ID NO: 10207 - DNA, 25 bp, synthetic construct
  source 1..25: mol_type = other DNA
aaattcttgctcgttgacctccact

SEQ ID NO: 10208 - DNA, 26 bp, synthetic construct
  source 1..26: mol_type = other DNA
gaaattcttgctcgttgacctccact

SEQ ID NO: 10209 - DNA, 27 bp, synthetic construct
  source 1..27: mol_type = other DNA
agaaattcttgctcgttgacctccact

SEQ ID NO: 10210 - DNA, 28 bp, synthetic construct
  source 1..28: mol_type = other DNA
aagaaattcttgctcgttgacctccact

SEQ ID NO: 10211 - DNA, 29 bp, synthetic construct
  source 1..29: mol_type = other DNA
aaagaaattcttgctcgttgacctccact

SEQ ID NO: 10212 - DNA, 30 bp, synthetic construct
  source 1..30: mol_type = other DNA
taaagaaattcttgctcgttgacctccact

SEQ ID NO: 10213 - DNA, 31 bp, synthetic construct
  source 1..31: mol_type = other DNA
ctaaagaaattcttgctcgttgacctccact

SEQ ID NO: 10214 - DNA, 32 bp, synthetic construct
  source 1..32: mol_type = other DNA
gctaaagaaattcttgctcgttgacctccact

SEQ ID NO: 10215 - DNA, 33 bp, synthetic construct
  source 1..33: mol_type = other DNA
tgctaaagaaattcttgctcgttgacctccact

SEQ ID NO: 10216 - DNA, 34 bp, synthetic construct
  source 1..34: mol_type = other DNA
ttgctaaagaaattcttgctcgttgacctccact

SEQ ID NO: 10217 - DNA, 35 bp, synthetic construct
  source 1..35: mol_type = other DNA
cttgctaaagaaattcttgctcgttgacctccact

SEQ ID NO: 10218 - DNA, 36 bp, synthetic construct
  source 1..36: mol_type = other DNA
ccttgctaaagaaattcttgctcgttgacctccact

SEQ ID NO: 10219 - DNA, 37 bp, synthetic construct
  source 1..37: mol_type = other DNA
accttgctaaagaaattcttgctcgttgacctccact

SEQ ID NO: 10220 - DNA, 38 bp, synthetic construct
  source 1..38: mol_type = other DNA
caccttgctaaagaaattcttgctcgttgacctccact

SEQ ID NO: 10221 - DNA, 39 bp, synthetic construct
  source 1..39: mol_type = other DNA
tcaccttgctaaagaaattcttgctcgttgacctccact

SEQ ID NO: 10222 - DNA, 40 bp, synthetic construct
  source 1..40: mol_type = other DNA
ttcaccttgctaaagaaattcttgctcgttgacctccact

SEQ ID NO: 10223 - DNA, 18 bp, synthetic construct
  source 1..18: mol_type = other DNA
ctcagtgtgattccacct

SEQ ID NO: 10224 - DNA, 19 bp, synthetic construct
  source 1..19: mol_type = other DNA
actcagtgtgattccacct

SEQ ID NO: 10225 - DNA, 20 bp, synthetic construct
  source 1..20: mol_type = other DNA
cactcagtgtgattccacct

SEQ ID NO: 10226 - DNA, 21 bp, synthetic construct
  source 1..21: mol_type = other DNA
ccactcagtgtgattccacct

SEQ ID NO: 10227 - DNA, 22 bp, synthetic construct
  source 1..22: mol_type = other DNA
tccactcagtgtgattccacct

SEQ ID NO: 10228 - DNA, 23 bp, synthetic construct
  source 1..23: mol_type = other DNA
ctccactcagtgtgattccacct

SEQ ID NO: 10229 - DNA, 24 bp, synthetic construct
  source 1..24: mol_type = other DNA
cctccactcagtgtgattccacct

SEQ ID NO: 10230 - DNA, 25 bp, synthetic construct
  source 1..25: mol_type = other DNA
acctccactcagtgtgattccacct

SEQ ID NO: 10231 - DNA, 26 bp, synthetic construct
  source 1..26: mol_type = other DNA
gacctccactcagtgtgattccacct

SEQ ID NO: 10232 - DNA, 27 bp, synthetic construct
  source 1..27: mol_type = other DNA
tgacctccactcagtgtgattccacct

SEQ ID NO: 10233 - DNA, 28 bp, synthetic construct
  source 1..28: mol_type = other DNA
ttgacctccactcagtgtgattccacct

SEQ ID NO: 10234 - DNA, 29 bp, synthetic construct
  source 1..29: mol_type = other DNA
gttgacctccactcagtgtgattccacct

SEQ ID NO: 10235 - DNA, 30 bp, synthetic construct
  source 1..30: mol_type = other DNA
cgttgacctccactcagtgtgattccacct

SEQ ID NO: 10236 - DNA, 31 bp, synthetic construct
  source 1..31: mol_type = other DNA
tcgttgacctccactcagtgtgattccacct

SEQ ID NO: 10237 - DNA, 32 bp, synthetic construct
  source 1..32: mol_type = other DNA
ctcgttgacctccactcagtgtgattccacct

SEQ ID NO: 10238 - DNA, 33 bp, synthetic construct
  source 1..33: mol_type = other DNA
gctcgttgacctccactcagtgtgattccacct

SEQ ID NO: 10239 - DNA, 34 bp, synthetic construct
  source 1..34: mol_type = other DNA
tgctcgttgacctccactcagtgtgattccacct

SEQ ID NO: 10240 - DNA, 35 bp, synthetic construct
  source 1..35: mol_type = other DNA
ttgctcgttgacctccactcagtgtgattccacct

SEQ ID NO: 10241 - DNA, 36 bp, synthetic construct
  source 1..36: mol_type = other DNA
cttgctcgttgacctccactcagtgtgattccacct

SEQ ID NO: 10242 - DNA, 37 bp, synthetic construct
  source 1..37: mol_type = other DNA
tcttgctcgttgacctccactcagtgtgattccacct

SEQ ID NO: 10243 - DNA, 38 bp, synthetic construct
  source 1..38: mol_type = other DNA
ttcttgctcgttgacctccactcagtgtgattccacct

SEQ ID NO: 10244 - DNA, 39 bp, synthetic construct
  source 1..39: mol_type = other DNA
attcttgctcgttgacctccactcagtgtgattccacct

SEQ ID NO: 10245 - DNA, 40 bp, synthetic construct
  source 1..40: mol_type = other DNA
aattcttgctcgttgacctccactcagtgtgattccacct

SEQ ID NO: 10246 - DNA, 37 bp, synthetic construct
  source 1..37: mol_type = other DNA
gagtggaggtcaacgagcaagaatttctttagcaagg

SEQ ID NO: 10247 - DNA, 38 bp, synthetic construct
  source 1..38: mol_type = other DNA
tgagtggaggtcaacgagcaagaatttctttagcaagg

SEQ ID NO: 10248 - DNA, 39 bp, synthetic construct
  source 1..39: mol_type = other DNA
ctgagtggaggtcaacgagcaagaatttctttagcaagg

SEQ ID NO: 10249 - DNA, 40 bp, synthetic construct
  source 1..40: mol_type = other DNA
actgagtggaggtcaacgagcaagaatttctttagcaagg

SEQ ID NO: 10250 - DNA, 19 bp, synthetic construct
  source 1..19: mol_type = other DNA
ctcagtgtgattccacctt

SEQ ID NO: 10251 - DNA, 20 bp, synthetic construct
  source 1..20: mol_type = other DNA
actcagtgtgattccacctt

SEQ ID NO: 10252 - DNA, 21 bp, synthetic construct
  source 1..21: mol_type = other DNA
cactcagtgtgattccacctt

SEQ ID NO: 10253 - DNA, 22 bp, synthetic construct
  source 1..22: mol_type = other DNA
ccactcagtgtgattccacctt

SEQ ID NO: 10254 - DNA, 23 bp, synthetic construct
  source 1..23: mol_type = other DNA
tccactcagtgtgattccacctt

SEQ ID NO: 10255 - DNA, 24 bp, synthetic construct
  source 1..24: mol_type = other DNA
ctccactcagtgtgattccacctt

SEQ ID NO: 10256 - DNA, 25 bp, synthetic construct
  source 1..25: mol_type = other DNA
cctccactcagtgtgattccacctt

SEQ ID NO: 10257 - DNA, 26 bp, synthetic construct
  source 1..26: mol_type = other DNA
acctccactcagtgtgattccacctt

SEQ ID NO: 10258 - DNA, 27 bp, synthetic construct
  source 1..27: mol_type = other DNA
gacctccactcagtgtgattccacctt

SEQ ID NO: 10259 - DNA, 28 bp, synthetic construct
  source 1..28: mol_type = other DNA
tgacctccactcagtgtgattccacctt

SEQ ID NO: 10260 - DNA, 29 bp, synthetic construct
  source 1..29: mol_type = other DNA
ttgacctccactcagtgtgattccacctt

SEQ ID NO: 10261 - DNA, 30 bp, synthetic construct
  source 1..30: mol_type = other DNA
gttgacctccactcagtgtgattccacctt

SEQ ID NO: 10262 - DNA, 31 bp, synthetic construct
  source 1..31: mol_type = other DNA
cgttgacctccactcagtgtgattccacctt

SEQ ID NO: 10263 - DNA, 32 bp, synthetic construct
  source 1..32: mol_type = other DNA
tcgttgacctccactcagtgtgattccacctt

SEQ ID NO: 10264 - DNA, 33 bp, synthetic construct
  source 1..33: mol_type = other DNA
ctcgttgacctccactcagtgtgattccacctt

SEQ ID NO: 10265 - DNA, 34 bp, synthetic construct
  source 1..34: mol_type = other DNA
gctcgttgacctccactcagtgtgattccacctt

SEQ ID NO: 10266 - DNA, 35 bp, synthetic construct
  source 1..35: mol_type = other DNA
tgctcgttgacctccactcagtgtgattccacctt

SEQ ID NO: 10267 - DNA, 36 bp, synthetic construct
  source 1..36: mol_type = other DNA
ttgctcgttgacctccactcagtgtgattccacctt

SEQ ID NO: 10268 - DNA, 37 bp, synthetic construct
  source 1..37: mol_type = other DNA
cttgctcgttgacctccactcagtgtgattccacctt

SEQ ID NO: 10269 - DNA, 38 bp, synthetic construct
  source 1..38: mol_type = other DNA
tcttgctcgttgacctccactcagtgtgattccacctt

SEQ ID NO: 10270 - DNA, 39 bp, synthetic construct
  source 1..39: mol_type = other DNA
ttcttgctcgttgacctccactcagtgtgattccacctt

SEQ ID NO: 10271 - DNA, 40 bp, synthetic construct
  source 1..40: mol_type = other DNA
attcttgctcgttgacctccactcagtgtgattccacctt

SEQ ID NO: 10272 - DNA, 22 bp, synthetic construct
  source 1..22: mol_type = other DNA
gagtggaggtcaacgagcaaga

SEQ ID NO: 10273 - DNA, 23 bp, synthetic construct
  source 1..23: mol_type = other DNA
tgagtggaggtcaacgagcaaga

SEQ ID NO: 10274 - DNA, 24 bp, synthetic construct
  source 1..24: mol_type = other DNA
ctgagtggaggtcaacgagcaaga

SEQ ID NO: 10275 - DNA, 25 bp, synthetic construct
  source 1..25: mol_type = other DNA
actgagtggaggtcaacgagcaaga

SEQ ID NO: 10276 - DNA, 26 bp, synthetic construct
  source 1..26: mol_type = other DNA
cactgagtggaggtcaacgagcaaga

SEQ ID NO: 10277 - DNA, 27 bp, synthetic construct
  source 1..27: mol_type = other DNA
acactgagtggaggtcaacgagcaaga

SEQ ID NO: 10278 - DNA, 28 bp, synthetic construct
  source 1..28: mol_type = other DNA
cacactgagtggaggtcaacgagcaaga

SEQ ID NO: 10279 - DNA, 29 bp, synthetic construct
  source 1..29: mol_type = other DNA
tcacactgagtggaggtcaacgagcaaga

SEQ ID NO: 10280 - DNA, 30 bp, synthetic construct
  source 1..30: mol_type = other DNA
atcacactgagtggaggtcaacgagcaaga

SEQ ID NO: 10281 - DNA, 31 bp, synthetic construct
  source 1..31: mol_type = other DNA
aatcacactgagtggaggtcaacgagcaaga

SEQ ID NO: 10282 - DNA, 32 bp, synthetic construct
  source 1..32: mol_type = other DNA
gaatcacactgagtggaggtcaacgagcaaga

SEQ ID NO: 10283 - DNA, 33 bp, synthetic construct
  source 1..33: mol_type = other DNA
ggaatcacactgagtggaggtcaacgagcaaga

SEQ ID NO: 10284 - DNA, 34 bp, synthetic construct
  source 1..34: mol_type = other DNA
tggaatcacactgagtggaggtcaacgagcaaga

SEQ ID NO: 10285 - DNA, 35 bp, synthetic construct
  source 1..35: mol_type = other DNA
gtggaatcacactgagtggaggtcaacgagcaaga

SEQ ID NO: 10286 - DNA, 36 bp, synthetic construct
  source 1..36: mol_type = other DNA
ggtggaatcacactgagtggaggtcaacgagcaaga

SEQ ID NO: 10287 - DNA, 37 bp, synthetic construct
  source 1..37: mol_type = other DNA
aggtggaatcacactgagtggaggtcaacgagcaaga

SEQ ID NO: 10288 - DNA, 38 bp, synthetic construct
  source 1..38: mol_type = other DNA
aaggtggaatcacactgagtggaggtcaacgagcaaga

SEQ ID NO: 10289 - DNA, 39 bp, synthetic construct
  source 1..39: mol_type = other DNA
gaaggtggaatcacactgagtggaggtcaacgagcaaga

SEQ ID NO: 10290 - DNA, 40 bp, synthetic construct
  source 1..40: mol_type = other DNA
agaaggtggaatcacactgagtggaggtcaacgagcaaga

SEQ ID NO: 10291 - DNA, 26 bp, synthetic construct
  source 1..26: mol_type = other DNA
ctcagtgtgattccaccttctccaag

SEQ ID NO: 10292 - DNA, 27 bp, synthetic construct
  source 1..27: mol_type = other DNA
actcagtgtgattccaccttctccaag

SEQ ID NO: 10293 - DNA, 28 bp, synthetic construct
  source 1..28: mol_type = other DNA
cactcagtgtgattccaccttctccaag

SEQ ID NO: 10294 - DNA, 29 bp, synthetic construct
  source 1..29: mol_type = other DNA
ccactcagtgtgattccaccttctccaag

SEQ ID NO: 10295 - DNA, 30 bp, synthetic construct; identical to SEQ ID NO: 9627
  source 1..30: mol_type = other DNA

SEQ ID NO: 10296 - DNA, 31 bp, synthetic construct; identical to SEQ ID NO: 9628
  source 1..31: mol_type = other DNA

SEQ ID NO: 10297 - DNA, 32 bp, synthetic construct; identical to SEQ ID NO: 9629
  source 1..32: mol_type = other DNA

SEQ ID NO: 10298 - DNA, 33 bp, synthetic construct; identical to SEQ ID NO: 9630
  source 1..33: mol_type = other DNA

SEQ ID NO: 10299 - DNA, 34 bp, synthetic construct; identical to SEQ ID NO: 9631
  source 1..34: mol_type = other DNA

SEQ ID NO: 10300 - DNA, 35 bp, synthetic construct; identical to SEQ ID NO: 9632
  source 1..35: mol_type = other DNA

SEQ ID NO: 10301 - DNA, 36 bp, synthetic construct; identical to SEQ ID NO: 9633
  source 1..36: mol_type = other DNA

SEQ ID NO: 10302 - DNA, 37 bp, synthetic construct; identical to SEQ ID NO: 9634
  source 1..37: mol_type = other DNA

SEQ ID NO: 10303 - DNA, 38 bp, synthetic construct; identical to SEQ ID NO: 9635
  source 1..38: mol_type = other DNA

SEQ ID NO: 10304 - DNA, 39 bp, synthetic construct; identical to SEQ ID NO: 9636
  source 1..39: mol_type = other DNA

SEQ ID NO: 10305 - DNA, 40 bp, synthetic construct; identical to SEQ ID NO: 9637
  source 1..40: mol_type = other DNA

SEQ ID NO: 10306 - DNA, 22 bp, synthetic construct
  source 1..22: mol_type = other DNA
ctcagtgtgattccaccctctc

SEQ ID NO: 10307 - DNA, 22 bp, synthetic construct
  source 1..22: mol_type = other DNA
ctcagtgtgattccaccttctc

SEQ ID NO: 10308 - DNA, 23 bp, synthetic construct
  source 1..23: mol_type = other DNA
actcagtgtgattccaccctctc

SEQ ID NO: 10309 - DNA, 23 bp, synthetic construct
  source 1..23: mol_type = other DNA
actcagtgtgattccaccttctc

SEQ ID NO: 10310 - DNA, 24 bp, synthetic construct
  source 1..24: mol_type = other DNA
cactcagtgtgattccaccttctc

SEQ ID NO: 10311 - DNA, 24 bp, synthetic construct
  source 1..24: mol_type = other DNA
cactcagtgtgattccaccctctc

SEQ ID NO: 10312 - DNA, 25 bp, synthetic construct
  source 1..25: mol_type = other DNA
ccactcagtgtgattccaccttctc

SEQ ID NO: 10313 - DNA, 25 bp, synthetic construct
  source 1..25: mol_type = other DNA
ccactcagtgtgattccaccctctc

SEQ ID NO: 10314 - DNA, 26 bp, synthetic construct
  source 1..26: mol_type = other DNA
tccactcagtgtgattccaccttctc

SEQ ID NO: 10315 - DNA, 26 bp, synthetic construct
  source 1..26: mol_type = other DNA
tccactcagtgtgattccaccctctc

SEQ ID NO: 10316 - DNA, 27 bp, synthetic construct
  source 1..27: mol_type = other DNA
ctccactcagtgtgattccaccctctc

SEQ ID NO: 10317 - DNA, 27 bp, synthetic construct
  source 1..27: mol_type = other DNA
ctccactcagtgtgattccaccttctc

SEQ ID NO: 10318 - DNA, 28 bp, synthetic construct
  source 1..28: mol_type = other DNA
cctccactcagtgtgattccaccctctc

SEQ ID NO: 10319 - DNA, 28 bp, synthetic construct
  source 1..28: mol_type = other DNA
cctccactcagtgtgattccaccttctc

SEQ ID NO: 10320 - DNA, 29 bp, synthetic construct
  source 1..29: mol_type = other DNA
acctccactcagtgtgattccaccctctc

SEQ ID NO: 10321 - DNA, 29 bp, synthetic construct
  source 1..29: mol_type = other DNA
acctccactcagtgtgattccaccttctc

SEQ ID NO: 10322 - DNA, 30 bp, synthetic construct
  source 1..30: mol_type = other DNA
gacctccactcagtgtgattccaccttctc

SEQ ID NO: 10323 - DNA, 30 bp, synthetic construct
  source 1..30: mol_type = other DNA
gacctccactcagtgtgattccaccctctc

SEQ ID NO: 10324 - DNA, 31 bp, synthetic construct
  source 1..31: mol_type = other DNA
tgacctccactcagtgtgattccaccctctc

SEQ ID NO: 10325 - DNA, 31 bp, synthetic construct
  source 1..31: mol_type = other DNA
tgacctccactcagtgtgattccaccttctc

SEQ ID NO: 10326 - DNA, 32 bp, synthetic construct
  source 1..32: mol_type = other DNA
ttgacctccactcagtgtgattccaccctctc

SEQ ID NO: 10327 - DNA, 32 bp, synthetic construct
  source 1..32: mol_type = other DNA
ttgacctccactcagtgtgattccaccttctc

SEQ ID NO: 10328 - DNA, 33 bp, synthetic construct
  source 1..33: mol_type = other DNA
gttgacctccactcagtgtgattccaccctctc

SEQ ID NO: 10329 - DNA, 33 bp, synthetic construct
  source 1..33: mol_type = other DNA
gttgacctccactcagtgtgattccaccttctc

SEQ ID NO: 10330 - DNA, 34 bp, synthetic construct
  source 1..34: mol_type = other DNA
cgttgacctccactcagtgtgattccaccttctc

SEQ ID NO: 10331 - DNA, 34 bp, synthetic construct
  source 1..34: mol_type = other DNA
cgttgacctccactcagtgtgattccaccctctc

SEQ ID NO: 10332 - DNA, 35 bp, synthetic construct
  source 1..35: mol_type = other DNA
tcgttgacctccactcagtgtgattccaccttctc

SEQ ID NO: 10333 - DNA, 35 bp, synthetic construct
  source 1..35: mol_type = other DNA
tcgttgacctccactcagtgtgattccaccctctc

SEQ ID NO: 10334 - DNA, 36 bp, synthetic construct
  source 1..36: mol_type = other DNA
ctcgttgacctccactcagtgtgattccaccttctc

SEQ ID NO: 10335 - DNA, 36 bp, synthetic construct
  source 1..36: mol_type = other DNA
ctcgttgacctccactcagtgtgattccaccctctc

SEQ ID NO: 10336 - DNA, 37 bp, synthetic construct
  source 1..37: mol_type = other DNA
gctcgttgacctccactcagtgtgattccaccctctc

SEQ ID NO: 10337 - DNA, 37 bp, synthetic construct
  source 1..37: mol_type = other DNA
gctcgttgacctccactcagtgtgattccaccttctc

SEQ ID NO: 10338 - DNA, 38 bp, synthetic construct
  source 1..38: mol_type = other DNA
tgctcgttgacctccactcagtgtgattccaccctctc

SEQ ID NO: 10339 - DNA, 38 bp, synthetic construct
  source 1..38: mol_type = other DNA
tgctcgttgacctccactcagtgtgattccaccttctc

SEQ ID NO: 10340 - DNA, 39 bp, synthetic construct
  source 1..39: mol_type = other DNA
ttgctcgttgacctccactcagtgtgattccaccctctc

SEQ ID NO: 10341 - DNA, 39 bp, synthetic construct
  source 1..39: mol_type = other DNA
ttgctcgttgacctccactcagtgtgattccaccttctc

SEQ ID NO: 10342 - DNA, 40 bp, synthetic construct
  source 1..40: mol_type = other DNA
cttgctcgttgacctccactcagtgtgattccaccttctc

SEQ ID NO: 10343 - DNA, 40 bp, synthetic construct
  source 1..40: mol_type = other DNA
cttgctcgttgacctccactcagtgtgattccaccctctc

SEQ ID NO: 10344 - DNA, 10 bp, synthetic construct
  source 1..10: mol_type = other DNA
ctccactcag

SEQ ID NO: 10345 - DNA, 11 bp, synthetic construct
  source 1..11: mol_type = other DNA
cctccactcag

SEQ ID NO: 10346 - DNA, 12 bp, synthetic construct
  source 1..12: mol_type = other DNA
acctccactcag

SEQ ID NO: 10347 - DNA, 13 bp, synthetic construct
  source 1..13: mol_type = other DNA
gacctccactcag

SEQ ID NO: 10348 - DNA, 14 bp, synthetic construct
  source 1..14: mol_type = other DNA
tgacctccactcag

SEQ ID NO: 10349 - DNA, 15 bp, synthetic construct
  source 1..15: mol_type = other DNA
ttgacctccactcag

SEQ ID NO: 10350 - DNA, 16 bp, synthetic construct
  source 1..16: mol_type = other DNA
gttgacctccactcag

SEQ ID NO: 10351 - DNA, 17 bp, synthetic construct
  source 1..17: mol_type = other DNA
cgttgacctccactcag

SEQ ID NO: 10352 - DNA, 18 bp, synthetic construct
  source 1..18: mol_type = other DNA
tcgttgacctccactcag

SEQ ID NO: 10353 - DNA, 19 bp, synthetic construct
  source 1..19: mol_type = other DNA
ctcgttgacctccactcag

SEQ ID NO: 10354 - DNA, 20 bp, synthetic construct
  source 1..20: mol_type = other DNA
gctcgttgacctccactcag

SEQ ID NO: 10355 - DNA, 21 bp, synthetic construct
  source 1..21: mol_type = other DNA
tgctcgttgacctccactcag

SEQ ID NO: 10356 - DNA, 22 bp, synthetic construct
  source 1..22: mol_type = other DNA
ttgctcgttgacctccactcag

SEQ ID NO: 10357 - DNA, 23 bp, synthetic construct
  source 1..23: mol_type = other DNA
cttgctcgttgacctccactcag

SEQ ID NO: 10358 - DNA, 24 bp, synthetic construct
  source 1..24: mol_type = other DNA
tcttgctcgttgacctccactcag

SEQ ID NO: 10359 - DNA, 25 bp, synthetic construct
  source 1..25: mol_type = other DNA
ttcttgctcgttgacctccactcag

SEQ ID NO: 10360 - DNA, 26 bp, synthetic construct
  source 1..26: mol_type = other DNA
attcttgctcgttgacctccactcag

SEQ ID NO: 10361 - DNA, 27 bp, synthetic construct
  source 1..27: mol_type = other DNA
aattcttgctcgttgacctccactcag

SEQ ID NO: 10362 - DNA, 28 bp, synthetic construct
  source 1..28: mol_type = other DNA
aaattcttgctcgttgacctccactcag

SEQ ID NO: 10363 - DNA, 29 bp, synthetic construct
  source 1..29: mol_type = other DNA
gaaattcttgctcgttgacctccactcag

SEQ ID NO: 10364 - DNA, 30 bp, synthetic construct
  source 1..30: mol_type = other DNA
agaaattcttgctcgttgacctccactcag

SEQ ID NO: 10365 - DNA, 31 bp, synthetic construct
  source 1..31: mol_type = other DNA
aagaaattcttgctcgttgacctccactcag

SEQ ID NO: 10366 - DNA, 32 bp, synthetic construct
  source 1..32: mol_type = other DNA
aaagaaattcttgctcgttgacctccactcag

SEQ ID NO: 10367 - DNA, 33 bp, synthetic construct
  source 1..33: mol_type = other DNA
taaagaaattcttgctcgttgacctccactcag

SEQ ID NO: 10368 - DNA, 34 bp, synthetic construct
  source 1..34: mol_type = other DNA
ctaaagaaattcttgctcgttgacctccactcag

SEQ ID NO: 10369 - DNA, 35 bp, synthetic construct
  source 1..35: mol_type = other DNA
gctaaagaaattcttgctcgttgacctccactcag

SEQ ID NO: 10370 - DNA, 36 bp, synthetic construct
  source 1..36: mol_type = other DNA
tgctaaagaaattcttgctcgttgacctccactcag

SEQ ID NO: 10371 - DNA, 37 bp, synthetic construct
  source 1..37: mol_type = other DNA
ttgctaaagaaattcttgctcgttgacctccactcag

SEQ ID NO: 10372 - DNA, 38 bp, synthetic construct
  source 1..38: mol_type = other DNA
cttgctaaagaaattcttgctcgttgacctccactcag

SEQ ID NO: 10373 - DNA, 39 bp, synthetic construct
  source 1..39: mol_type = other DNA
ccttgctaaagaaattcttgctcgttgacctccactcag

SEQ ID NO: 10374 - DNA, 40 bp, synthetic construct
  source 1..40: mol_type = other DNA
accttgctaaagaaattcttgctcgttgacctccactcag

SEQ ID NO: 10375 - DNA, 15 bp, synthetic construct
  source 1..15: mol_type = other DNA
gagtggaggtcaacg

SEQ ID NO: 10376 - DNA, 16 bp, synthetic construct
  source 1..16: mol_type = other DNA
tgagtggaggtcaacg

SEQ ID NO: 10377 - DNA, 17 bp, synthetic construct
  source 1..17: mol_type = other DNA
ctgagtggaggtcaacg

SEQ ID NO: 10378 - DNA, 18 bp, synthetic construct
  source 1..18: mol_type = other DNA
actgagtggaggtcaacg

SEQ ID NO: 10379 - DNA, 19 bp, synthetic construct
  source 1..19: mol_type = other DNA
cactgagtggaggtcaacg

SEQ ID NO: 10380 - DNA, 20 bp, synthetic construct
  source 1..20: mol_type = other DNA
acactgagtggaggtcaacg

SEQ ID NO: 10381 - DNA, 21 bp, synthetic construct
  source 1..21: mol_type = other DNA
cacactgagtggaggtcaacg

SEQ ID NO: 10382 - DNA, 22 bp, synthetic construct
  source 1..22: mol_type = other DNA
tcacactgagtggaggtcaacg

SEQ ID NO: 10383 - DNA, 23 bp, synthetic construct
  source 1..23: mol_type = other DNA
atcacactgagtggaggtcaacg

SEQ ID NO: 10384 - DNA, 24 bp, synthetic construct
  source 1..24: mol_type = other DNA
aatcacactgagtggaggtcaacg

SEQ ID NO: 10385 - DNA, 25 bp, synthetic construct
  source 1..25: mol_type = other DNA
gaatcacactgagtggaggtcaacg

SEQ ID NO: 10386 - DNA, 26 bp, synthetic construct
  source 1..26: mol_type = other DNA
ggaatcacactgagtggaggtcaacg

SEQ ID NO: 10387 - DNA, 27 bp, synthetic construct
  source 1..27: mol_type = other DNA
tggaatcacactgagtggaggtcaacg

SEQ ID NO: 10388 - DNA, 28 bp, synthetic construct
  source 1..28: mol_type = other DNA
gtggaatcacactgagtggaggtcaacg

SEQ ID NO: 10389 - DNA, 29 bp, synthetic construct
  source 1..29: mol_type = other DNA
ggtggaatcacactgagtggaggtcaacg

SEQ ID NO: 10390 - DNA, 30 bp, synthetic construct
  source 1..30: mol_type = other DNA
aggtggaatcacactgagtggaggtcaacg

SEQ ID NO: 10391 - DNA, 31 bp, synthetic construct
  source 1..31: mol_type = other DNA
aaggtggaatcacactgagtggaggtcaacg

SEQ ID NO: 10392 - DNA, 32 bp, synthetic construct
  source 1..32: mol_type = other DNA
gaaggtggaatcacactgagtggaggtcaacg

SEQ ID NO: 10393 - DNA, 33 bp, synthetic construct
  source 1..33: mol_type = other DNA
agaaggtggaatcacactgagtggaggtcaacg

SEQ ID NO: 10394 - DNA, 34 bp, synthetic construct
  source 1..34: mol_type = other DNA
gagaaggtggaatcacactgagtggaggtcaacg

SEQ ID NO: 10395 - DNA, 35 bp, synthetic construct
  source 1..35: mol_type = other DNA
ggagaaggtggaatcacactgagtggaggtcaacg

SEQ ID NO: 10396 - DNA, 36 bp, synthetic construct; identical to SEQ ID NO: 9765
  source 1..36: mol_type = other DNA

SEQ ID NO: 10397 - DNA, 37 bp, synthetic construct; identical to SEQ ID NO: 9766
  source 1..37: mol_type = other DNA

SEQ ID NO: 10398 - DNA, 38 bp, synthetic construct; identical to SEQ ID NO: 9767
  source 1..38: mol_type = other DNA

SEQ ID NO: 10399 - DNA, 39 bp, synthetic construct; identical to SEQ ID NO: 9768
  source 1..39: mol_type = other DNA

SEQ ID NO: 10400 - DNA, 40 bp, synthetic construct; identical to SEQ ID NO: 9769
  source 1..40: mol_type = other DNA

SEQ ID NO: 10401 - DNA, 31 bp, synthetic construct
  source 1..31: mol_type = other DNA
gagtggaggtcaacgagcaagaatttcttta

SEQ ID NO: 10402 - DNA, 32 bp, synthetic construct
  source 1..32: mol_type = other DNA
tgagtggaggtcaacgagcaagaatttcttta

SEQ ID NO: 10403 - DNA, 33 bp, synthetic construct
  source 1..33: mol_type = other DNA
ctgagtggaggtcaacgagcaagaatttcttta

SEQ ID NO: 10404 - DNA, 34 bp, synthetic construct
  source 1..34: mol_type = other DNA
actgagtggaggtcaacgagcaagaatttcttta

SEQ ID NO: 10405 - DNA, 35 bp, synthetic construct
  source 1..35: mol_type = other DNA
cactgagtggaggtcaacgagcaagaatttcttta

SEQ ID NO: 10406 - DNA, 36 bp, synthetic construct
  source 1..36: mol_type = other DNA
acactgagtggaggtcaacgagcaagaatttcttta

SEQ ID NO: 10407 - DNA, 37 bp, synthetic construct
  source 1..37: mol_type = other DNA
cacactgagtggaggtcaacgagcaagaatttcttta

SEQ ID NO: 10408 - DNA, 38 bp, synthetic construct
  source 1..38: mol_type = other DNA
tcacactgagtggaggtcaacgagcaagaatttcttta

SEQ ID NO: 10409 - DNA, 39 bp, synthetic construct
  source 1..39: mol_type = other DNA
atcacactgagtggaggtcaacgagcaagaatttcttta

SEQ ID NO: 10410 - DNA, 40 bp, synthetic construct
  source 1..40: mol_type = other DNA
aatcacactgagtggaggtcaacgagcaagaatttcttta

SEQ ID NO: 10411 - DNA, 17 bp, synthetic construct
  source 1..17: mol_type = other DNA
ctcagtgtgattccacc

SEQ ID NO: 10412 - DNA, 18 bp, synthetic construct
  source 1..18: mol_type = other DNA
actcagtgtgattccacc

SEQ ID NO: 10413 - DNA, 19 bp, synthetic construct
  source 1..19: mol_type = other DNA
cactcagtgtgattccacc

SEQ ID NO: 10414 - DNA, 20 bp, synthetic construct
  source 1..20: mol_type = other DNA
ccactcagtgtgattccacc

SEQ ID NO: 10415 - DNA, 21 bp, synthetic construct
  source 1..21: mol_type = other DNA
tccactcagtgtgattccacc

SEQ ID NO: 10416 - DNA, 22 bp, synthetic construct
  source 1..22: mol_type = other DNA
ctccactcagtgtgattccacc

SEQ ID NO: 10417 - DNA, 23 bp, synthetic construct
  source 1..23: mol_type = other DNA
cctccactcagtgtgattccacc

SEQ ID NO: 10418 - DNA, 24 bp, synthetic construct
  source 1..24: mol_type = other DNA
acctccactcagtgtgattccacc

SEQ ID NO: 10419 - DNA, 25 bp, synthetic construct
  source 1..25: mol_type = other DNA
gacctccactcagtgtgattccacc

SEQ ID NO: 10420 - DNA, 26 bp, synthetic construct
  source 1..26: mol_type = other DNA
tgacctccactcagtgtgattccacc

SEQ ID NO: 10421 - DNA, 27 bp, synthetic construct
  source 1..27: mol_type = other DNA
ttgacctccactcagtgtgattccacc

SEQ ID NO: 10422 - DNA, 28 bp, synthetic construct
  source 1..28: mol_type = other DNA
gttgacctccactcagtgtgattccacc

SEQ ID NO: 10423 - DNA, 29 bp, synthetic construct
  source 1..29: mol_type = other DNA
cgttgacctccactcagtgtgattccacc

SEQ ID NO: 10424 - DNA, 30 bp, synthetic construct
  source 1..30: mol_type = other DNA
tcgttgacctccactcagtgtgattccacc

SEQ ID NO: 10425 - DNA, 31 bp, synthetic construct
  source 1..31: mol_type = other DNA
ctcgttgacctccactcagtgtgattccacc

SEQ ID NO: 10426 - DNA, 32 bp, synthetic construct
  source 1..32: mol_type = other DNA
gctcgttgacctccactcagtgtgattccacc

SEQ ID NO: 10427 - DNA, 33 bp, synthetic construct
  source 1..33: mol_type = other DNA
tgctcgttgacctccactcagtgtgattccacc

SEQ ID NO: 10428 - DNA, 34 bp, synthetic construct
  source 1..34: mol_type = other DNA
ttgctcgttgacctccactcagtgtgattccacc

SEQ ID NO: 10429 - DNA, 35 bp, synthetic construct
  source 1..35: mol_type = other DNA
cttgctcgttgacctccactcagtgtgattccacc

SEQ ID NO: 10430 - DNA, 36 bp, synthetic construct
  source 1..36: mol_type = other DNA
tcttgctcgttgacctccactcagtgtgattccacc

SEQ ID NO: 10431 - DNA, 37 bp, synthetic construct
  source 1..37: mol_type = other DNA
ttcttgctcgttgacctccactcagtgtgattccacc

SEQ ID NO: 10432 - DNA, 38 bp, synthetic construct
  source 1..38: mol_type = other DNA
attcttgctcgttgacctccactcagtgtgattccacc

SEQ ID NO: 10433 - DNA, 39 bp, synthetic construct
  source 1..39: mol_type = other DNA
aattcttgctcgttgacctccactcagtgtgattccacc

SEQ ID NO: 10434 - DNA, 40 bp, synthetic construct
  source 1..40: mol_type = other DNA
aaattcttgctcgttgacctccactcagtgtgattccacc

SEQ ID NO: 10435 - DNA, 10 bp, synthetic construct
  source 1..10: mol_type = other DNA
ccactcagtg

SEQ ID NO: 10436 - DNA, 11 bp, synthetic construct
  source 1..11: mol_type = other DNA
tccactcagtg

SEQ ID NO: 10437 - DNA, 12 bp, synthetic construct
  source 1..12: mol_type = other DNA
ctccactcagtg

SEQ ID NO: 10438 - DNA, 13 bp, synthetic construct
  source 1..13: mol_type = other DNA
cctccactcagtg

SEQ ID NO: 10439 - DNA, 14 bp, synthetic construct
  source 1..14: mol_type = other DNA
acctccactcagtg

SEQ ID NO: 10440 - DNA, 15 bp, synthetic construct
  source 1..15: mol_type = other DNA
gacctccactcagtg

SEQ ID NO: 10441 - DNA, 16 bp, synthetic construct
  source 1..16: mol_type = other DNA
tgacctccactcagtg

SEQ ID NO: 10442 - DNA, 17 bp, synthetic construct
  source 1..17: mol_type = other DNA
ttgacctccactcagtg

SEQ ID NO: 10443 - DNA, 18 bp, synthetic construct
  source 1..18: mol_type = other DNA
gttgacctccactcagtg

SEQ ID NO: 10444 - DNA, 19 bp, synthetic construct
  source 1..19: mol_type = other DNA
cgttgacctccactcagtg

SEQ ID NO: 10445 - DNA, 20 bp, synthetic construct
  source 1..20: mol_type = other DNA
tcgttgacctccactcagtg

SEQ ID NO: 10446 - DNA, 21 bp, synthetic construct
  source 1..21: mol_type = other DNA
ctcgttgacctccactcagtg

SEQ ID NO: 10447 - DNA, 22 bp, synthetic construct
  source 1..22: mol_type = other DNA
gctcgttgacctccactcagtg

SEQ ID NO: 10448 - DNA, 23 bp, synthetic construct
  source 1..23: mol_type = other DNA
tgctcgttgacctccactcagtg

SEQ ID NO: 10449 - DNA, 24 bp, synthetic construct
  source 1..24: mol_type = other DNA
ttgctcgttgacctccactcagtg

SEQ ID NO: 10450 - DNA, 25 bp, synthetic construct
  source 1..25: mol_type = other DNA
cttgctcgttgacctccactcagtg

SEQ ID NO: 10451 - DNA, 26 bp, synthetic construct
  source 1..26: mol_type = other DNA
tcttgctcgttgacctccactcagtg

SEQ ID NO: 10452 - DNA, 27 bp, synthetic construct
  source 1..27: mol_type = other DNA
ttcttgctcgttgacctccactcagtg

SEQ ID NO: 10453 - DNA, 28 bp, synthetic construct
  source 1..28: mol_type = other DNA
attcttgctcgttgacctccactcagtg

SEQ ID NO: 10454 - DNA, 29 bp, synthetic construct
  source 1..29: mol_type = other DNA
aattcttgctcgttgacctccactcagtg

SEQ ID NO: 10455 - DNA, 30 bp, synthetic construct
  source 1..30: mol_type = other DNA
aaattcttgctcgttgacctccactcagtg

SEQ ID NO: 10456 - DNA, 31 bp, synthetic construct
  source 1..31: mol_type = other DNA
gaaattcttgctcgttgacctccactcagtg

SEQ ID NO: 10457 - DNA, 32 bp, synthetic construct
  source 1..32: mol_type = other DNA
agaaattcttgctcgttgacctccactcagtg

SEQ ID NO: 10458 - DNA, 33 bp, synthetic construct
  source 1..33: mol_type = other DNA
aagaaattcttgctcgttgacctccactcagtg

SEQ ID NO: 10459 - DNA, 34 bp, synthetic construct
  source 1..34: mol_type = other DNA
aaagaaattcttgctcgttgacctccactcagtg

SEQ ID NO: 10460 - DNA, 35 bp, synthetic construct
  source 1..35: mol_type = other DNA
taaagaaattcttgctcgttgacctccactcagtg

SEQ ID NO: 10461 - DNA, 36 bp, synthetic construct
  source 1..36: mol_type = other DNA
ctaaagaaattcttgctcgttgacctccactcagtg

SEQ ID NO: 10462 - DNA, 37 bp, synthetic construct
  source 1..37: mol_type = other DNA
gctaaagaaattcttgctcgttgacctccactcagtg

SEQ ID NO: 10463 - DNA, 38 bp, synthetic construct
  source 1..38: mol_type = other DNA
tgctaaagaaattcttgctcgttgacctccactcagtg

SEQ ID NO: 10464 - DNA, 39 bp, synthetic construct
  source 1..39: mol_type = other DNA
ttgctaaagaaattcttgctcgttgacctccactcagtg

SEQ ID NO: 10465 - DNA, 40 bp, synthetic construct
  source 1..40: mol_type = other DNA
cttgctaaagaaattcttgctcgttgacctccactcagtg

SEQ ID NO: 10466 - DNA, 32 bp, synthetic construct
  source 1..32: mol_type = other DNA
gagtggaggtcaacgagcaagaattagcttag

SEQ ID NO: 10467 - DNA, 32 bp, synthetic construct
  source 1..32: mol_type = other DNA
gagtggaggtcaacgagcaagaatttctttag

SEQ ID NO: 10468 - DNA, 33 bp, synthetic construct
  source 1..33: mol_type = other DNA
tgagtggaggtcaacgagcaagaattagcttag

SEQ ID NO: 10469 - DNA, 33 bp, synthetic construct
  source 1..33: mol_type = other DNA
tgagtggaggtcaacgagcaagaatttctttag

SEQ ID NO: 10470 - DNA, 34 bp, synthetic construct
  source 1..34: mol_type = other DNA
ctgagtggaggtcaacgagcaagaattagcttag

SEQ ID NO: 10471 - DNA, 34 bp, synthetic construct
  source 1..34: mol_type = other DNA
ctgagtggaggtcaacgagcaagaatttctttag

SEQ ID NO: 10472 - DNA, 35 bp, synthetic construct
  source 1..35: mol_type = other DNA
actgagtggaggtcaacgagcaagaatttctttag

SEQ ID NO: 10473 - DNA, 35 bp, synthetic construct
  source 1..35: mol_type = other DNA
actgagtggaggtcaacgagcaagaattagcttag

SEQ ID NO: 10474 - DNA, 36 bp, synthetic construct
  source 1..36: mol_type = other DNA
cactgagtggaggtcaacgagcaagaatttctttag

SEQ ID NO: 10475 - DNA, 36 bp, synthetic construct
  source 1..36: mol_type = other DNA
cactgagtggaggtcaacgagcaagaattagcttag

SEQ ID NO: 10476 - DNA, 37 bp, synthetic construct
  source 1..37: mol_type = other DNA
acactgagtggaggtcaacgagcaagaattagcttag

SEQ ID NO: 10477 - DNA, 37 bp, synthetic construct
  source 1..37: mol_type = other DNA
acactgagtggaggtcaacgagcaagaatttctttag

SEQ ID NO: 10478 - DNA, 38 bp, synthetic construct
  source 1..38: mol_type = other DNA
cacactgagtggaggtcaacgagcaagaattagcttag

SEQ ID NO: 10479 - DNA, 38 bp, synthetic construct
  source 1..38: mol_type = other DNA
cacactgagtggaggtcaacgagcaagaatttctttag

SEQ ID NO: 10480 - DNA, 39 bp, synthetic construct
  source 1..39: mol_type = other DNA
tcacactgagtggaggtcaacgagcaagaattagcttag

SEQ ID NO: 10481 - DNA, 39 bp, synthetic construct
  source 1..39: mol_type = other DNA
tcacactgagtggaggtcaacgagcaagaatttctttag

SEQ ID NO: 10482 - DNA, 40 bp, synthetic construct
  source 1..40: mol_type = other DNA
atcacactgagtggaggtcaacgagcaagaatttctttag

SEQ ID NO: 10483 - DNA, 40 bp, synthetic construct
  source 1..40: mol_type = other DNA
atcacactgagtggaggtcaacgagcaagaattagcttag

SEQ ID NO: 10484 - DNA, 10 bp, synthetic construct
  source 1..10: mol_type = other DNA
cactgagtgg

SEQ ID NO: 10485 - DNA, 11 bp, synthetic construct
  source 1..11: mol_type = other DNA
acactgagtgg

SEQ ID NO: 10486 - DNA, 12 bp, synthetic construct
  source 1..12: mol_type = other DNA
cacactgagtgg

SEQ ID NO: 10487 - DNA, 13 bp, synthetic construct
  source 1..13: mol_type = other DNA
tcacactgagtgg

SEQ ID NO: 10488 - DNA, 14 bp, synthetic construct
  source 1..14: mol_type = other DNA
atcacactgagtgg

SEQ ID NO: 10489 - DNA, 15 bp, synthetic construct
  source 1..15: mol_type = other DNA
aatcacactgagtgg

SEQ ID NO: 10490 - DNA, 16 bp, synthetic construct
  source 1..16: mol_type = other DNA
gaatcacactgagtgg

SEQ ID NO: 10491 - DNA, 17 bp, synthetic construct
  source 1..17: mol_type = other DNA
ggaatcacactgagtgg

SEQ ID NO: 10492 - DNA, 18 bp, synthetic construct
  source 1..18: mol_type = other DNA
tggaatcacactgagtgg

SEQ ID NO: 10493 - DNA, 19 bp, synthetic construct
  source 1..19: mol_type = other DNA
gtggaatcacactgagtgg

SEQ ID NO: 10494 - DNA, 20 bp, synthetic construct
  source 1..20: mol_type = other DNA
ggtggaatcacactgagtgg

SEQ ID NO: 10495 - DNA, 21 bp, synthetic construct
  source 1..21: mol_type = other DNA
aggtggaatcacactgagtgg

SEQ ID NO: 10496 - DNA, 22 bp, synthetic construct
  source 1..22: mol_type = other DNA
aaggtggaatcacactgagtgg

SEQ ID NO: 10497 - DNA, 23 bp, synthetic construct
  source 1..23: mol_type = other DNA
gaaggtggaatcacactgagtgg

SEQ ID NO: 10498 - DNA, 24 bp, synthetic construct
  source 1..24: mol_type = other DNA
agaaggtggaatcacactgagtgg

SEQ ID NO: 10499 - DNA, 25 bp, synthetic construct
  source 1..25: mol_type = other DNA
gagaaggtggaatcacactgagtgg

SEQ ID NO: 10500 - DNA, 26 bp, synthetic construct
  source 1..26: mol_type = other DNA
ggagaaggtggaatcacactgagtgg

SEQ ID NO: 10501 - DNA, 27 bp, synthetic construct
  source 1..27: mol_type = other DNA
tggagaaggtggaatcacactgagtgg

SEQ ID NO: 10502 - DNA, 28 bp, synthetic construct
  source 1..28: mol_type = other DNA
ttggagaaggtggaatcacactgagtgg

SEQ ID NO: 10503 - DNA, 29 bp, synthetic construct
  source 1..29: mol_type = other DNA
cttggagaaggtggaatcacactgagtgg

SEQ ID NO: 10504 - DNA, 30 bp, synthetic construct
  source 1..30: mol_type = other DNA
tcttggagaaggtggaatcacactgagtgg

SEQ ID NO: 10505 - DNA, 31 bp, synthetic construct
  source 1..31: mol_type = other DNA
ttcttggagaaggtggaatcacactgagtgg

SEQ ID NO: 10506 - DNA, 32 bp, synthetic construct
  source 1..32: mol_type = other DNA
gttcttggagaaggtggaatcacactgagtgg

SEQ ID NO: 10507 - DNA, 33 bp, synthetic construct
  source 1..33: mol_type = other DNA
agttcttggagaaggtggaatcacactgagtgg

SEQ ID NO: 10508 - DNA, 34 bp, synthetic construct
  source 1..34: mol_type = other DNA
tagttcttggagaaggtggaatcacactgagtgg

SEQ ID NO: 10509 - DNA, 35 bp, synthetic construct
  source 1..35: mol_type = other DNA
atagttcttggagaaggtggaatcacactgagtgg

SEQ ID NO: 10510 - DNA, 36 bp, synthetic construct
  source 1..36: mol_type = other DNA
tatagttcttggagaaggtggaatcacactgagtgg

SEQ ID NO: 10511 - DNA, 37 bp, synthetic construct
  source 1..37: mol_type = other DNA
atatagttcttggagaaggtggaatcacactgagtgg

SEQ ID NO: 10512 - DNA, 38 bp, synthetic construct
  source 1..38: mol_type = other DNA
aatatagttcttggagaaggtggaatcacactgagtgg

SEQ ID NO: 10513 - DNA, 39 bp, synthetic construct
  source 1..39: mol_type = other DNA
caatatagttcttggagaaggtggaatcacactgagtgg

SEQ ID NO: 10514 - DNA, 40 bp, synthetic construct
  source 1..40: mol_type = other DNA
acaatatagttcttggagaaggtggaatcacactgagtgg

SEQ ID NO: 10515 - DNA, 18 bp, synthetic construct
  source 1..18: mol_type = other DNA
gagtggaggtcaacgagc

SEQ ID NO: 10516 - DNA, 19 bp, synthetic construct
  source 1..19: mol_type = other DNA
tgagtggaggtcaacgagc

SEQ ID NO: 10517 - DNA, 20 bp, synthetic construct
  source 1..20: mol_type = other DNA
ctgagtggaggtcaacgagc

SEQ ID NO: 10518 - DNA, 21 bp, synthetic construct
  source 1..21: mol_type = other DNA
actgagtggaggtcaacgagc

SEQ ID NO: 10519 - DNA, 22 bp, synthetic construct
  source 1..22: mol_type = other DNA
cactgagtggaggtcaacgagc

SEQ ID NO: 10520 - DNA, 23 bp, synthetic construct
  source 1..23: mol_type = other DNA
acactgagtggaggtcaacgagc

SEQ ID NO: 10521 - DNA, 24 bp, synthetic construct
  source 1..24: mol_type = other DNA
cacactgagtggaggtcaacgagc

SEQ ID NO: 10522 - DNA, 25 bp, synthetic construct
  source 1..25: mol_type = other DNA
tcacactgagtggaggtcaacgagc

SEQ ID NO: 10523 - DNA, 26 bp, synthetic construct
  source 1..26: mol_type = other DNA
atcacactgagtggaggtcaacgagc

SEQ ID NO: 10524 - DNA, 27 bp, synthetic construct
  source 1..27: mol_type = other DNA
aatcacactgagtggaggtcaacgagc

SEQ ID NO: 10525 - DNA, 28 bp, synthetic construct
  source 1..28: mol_type = other DNA
gaatcacactgagtggaggtcaacgagc

SEQ ID NO: 10526 - DNA, 29 bp, synthetic construct
  source 1..29: mol_type = other DNA
ggaatcacactgagtggaggtcaacgagc

SEQ ID NO: 10527 - DNA, 30 bp, synthetic construct
  source 1..30: mol_type = other DNA
tggaatcacactgagtggaggtcaacgagc

SEQ ID NO: 10528 - DNA, 31 bp, synthetic construct
  source 1..31: mol_type = other DNA
gtggaatcacactgagtggaggtcaacgagc

SEQ ID NO: 10529 - DNA, 32 bp, synthetic construct
  source 1..32: mol_type = other DNA
ggtggaatcacactgagtggaggtcaacgagc

SEQ ID NO: 10530 - DNA, 33 bp, synthetic construct
  source 1..33: mol_type = other DNA
aggtggaatcacactgagtggaggtcaacgagc

SEQ ID NO: 10531 - DNA, 34 bp, synthetic construct
  source 1..34: mol_type = other DNA
aaggtggaatcacactgagtggaggtcaacgagc

SEQ ID NO: 10532 - DNA, 35 bp, synthetic construct
  source 1..35: mol_type = other DNA
gaaggtggaatcacactgagtggaggtcaacgagc

SEQ ID NO: 10533 - DNA, 36 bp, synthetic construct
  source 1..36: mol_type = other DNA
agaaggtggaatcacactgagtggaggtcaacgagc

SEQ ID NO: 10534 - DNA, 37 bp, synthetic construct
  source 1..37: mol_type = other DNA
gagaaggtggaatcacactgagtggaggtcaacgagc

SEQ ID NO: 10535 - DNA, 38 bp, synthetic construct
  source 1..38: mol_type = other DNA
ggagaaggtggaatcacactgagtggaggtcaacgagc

SEQ ID NO: 10536 - DNA, 39 bp, synthetic construct; identical to SEQ ID NO: 9858
  source 1..39: mol_type = other DNA

SEQ ID NO: 10537 - DNA, 40 bp, synthetic construct; identical to SEQ ID NO: 9859
  source 1..40: mol_type = other DNA

SEQ ID NO: 10538 - DNA, 10 bp, synthetic construct
  source 1..10: mol_type = other DNA
cacactgagt

SEQ ID NO: 10539 - DNA, 10 bp, synthetic construct
  source 1..10: mol_type = other DNA
cacattgagt

SEQ ID NO: 10540 - DNA, 11 bp, synthetic construct
  source 1..11: mol_type = other DNA
tcacactgagt

SEQ ID NO: 10541 - DNA, 11 bp, synthetic construct
  source 1..11: mol_type = other DNA
tcacattgagt

SEQ ID NO: 10542 - DNA, 12 bp, synthetic construct
  source 1..12: mol_type = other DNA
atcacactgagt

SEQ ID NO: 10543 - DNA, 12 bp, synthetic construct
  source 1..12: mol_type = other DNA
atcacattgagt

SEQ ID NO: 10544 - DNA, 13 bp, synthetic construct
  source 1..13: mol_type = other DNA
aatcacactgagt

SEQ ID NO: 10545 - DNA, 13 bp, synthetic construct
  source 1..13: mol_type = other DNA
aatcacattgagt

SEQ ID NO: 10546 - DNA, 14 bp, synthetic construct
  source 1..14: mol_type = other DNA
gaatcacattgagt

SEQ ID NO: 10547 - DNA, 14 bp, synthetic construct
  source 1..14: mol_type = other DNA
gaatcacactgagt

SEQ ID NO: 10548 - DNA, 15 bp, synthetic construct
  source 1..15: mol_type = other DNA
ggaatcacattgagt

SEQ ID NO: 10549 - DNA, 15 bp, synthetic construct
  source 1..15: mol_type = other DNA
ggaatcacactgagt

SEQ ID NO: 10550 - DNA, 16 bp, synthetic construct
  source 1..16: mol_type = other DNA
tggaatcacactgagt

SEQ ID NO: 10551 - DNA, 16 bp, synthetic construct
  source 1..16: mol_type = other DNA
tggaatcacattgagt

SEQ ID NO: 10552 - DNA, 17 bp, synthetic construct
  source 1..17: mol_type = other DNA
gtggaatcacattgagt

SEQ ID NO: 10553 - DNA, 17 bp, synthetic construct
  source 1..17: mol_type = other DNA
gtggaatcacactgagt

SEQ ID NO: 10554 - DNA, 18 bp, synthetic construct
  source 1..18: mol_type = other DNA
ggtggaatcacattgagt

SEQ ID NO: 10555 - DNA, 18 bp, synthetic construct
  source 1..18: mol_type = other DNA
ggtggaatcacactgagt

SEQ ID NO: 10556 - DNA, 19 bp, synthetic construct
  source 1..19: mol_type = other DNA
aggtggaatcacattgagt

SEQ ID NO: 10557 - DNA, 19 bp, synthetic construct
  source 1..19: mol_type = other DNA
aggtggaatcacactgagt

SEQ ID NO: 10558 - DNA, 20 bp, synthetic construct
  source 1..20: mol_type = other DNA
aaggtggaatcacattgagt

SEQ ID NO: 10559 - DNA, 20 bp, synthetic construct
  source 1..20: mol_type = other DNA
aaggtggaatcacactgagt

SEQ ID NO: 10560 - DNA, 21 bp, synthetic construct
  source 1..21: mol_type = other DNA
gaaggtggaatcacattgagt

SEQ ID NO: 10561 - DNA, 21 bp, synthetic construct
  source 1..21: mol_type = other DNA
gaaggtggaatcacactgagt

SEQ ID NO: 10562 - DNA, 22 bp, synthetic construct
  source 1..22: mol_type = other DNA
agaaggtggaatcacattgagt

SEQ ID NO: 10563 - DNA, 22 bp, synthetic construct
  source 1..22: mol_type = other DNA
agaaggtggaatcacactgagt

SEQ ID NO: 10564 - DNA, 23 bp, synthetic construct
  source 1..23: mol_type = other DNA
gagaaggtggaatcacactgagt

SEQ ID NO: 10565 - DNA, 23 bp, synthetic construct
  source 1..23: mol_type = other DNA
gagaaggtggaatcacattgagt

SEQ ID NO: 10566 - DNA, 24 bp, synthetic construct
  source 1..24: mol_type = other DNA
ggagaaggtggaatcacactgagt

SEQ ID NO: 10567 - DNA, 24 bp, synthetic construct
  source 1..24: mol_type = other DNA
ggagaaggtggaatcacattgagt

SEQ ID NO: 10568 - DNA, 25 bp, synthetic construct
  source 1..25: mol_type = other DNA
tggagaaggtggaatcacactgagt

SEQ ID NO: 10569 - DNA, 25 bp, synthetic construct
  source 1..25: mol_type = other DNA
tggagaaggtggaatcacattgagt

SEQ ID NO: 10570 - DNA, 26 bp, synthetic construct
  source 1..26: mol_type = other DNA
ttggagaaggtggaatcacactgagt

SEQ ID NO: 10571 - DNA, 26 bp, synthetic construct
  source 1..26: mol_type = other DNA
ttggagaaggtggaatcacattgagt

SEQ ID NO: 10572 - DNA, 27 bp, synthetic construct
  source 1..27: mol_type = other DNA
cttggagaaggtggaatcacattgagt

SEQ ID NO: 10573 - DNA, 27 bp, synthetic construct
  source 1..27: mol_type = other DNA
cttggagaaggtggaatcacactgagt

SEQ ID NO: 10574 - DNA, 28 bp, synthetic construct
  source 1..28: mol_type = other DNA
tcttggagaaggtggaatcacattgagt

SEQ ID NO: 10575 - DNA, 28 bp, synthetic construct
  source 1..28: mol_type = other DNA
tcttggagaaggtggaatcacactgagt

SEQ ID NO: 10576 - DNA, 29 bp, synthetic construct
  source 1..29: mol_type = other DNA
ttcttggagaaggtggaatcacactgagt

SEQ ID NO: 10577 - DNA, 29 bp, synthetic construct
  source 1..29: mol_type = other DNA
ttcttggagaaggtggaatcacattgagt

SEQ ID NO: 10578 - DNA, 30 bp, synthetic construct; identical to SEQ ID NO: 9871
  source 1..30: mol_type = other DNA

SEQ ID NO: 10579 - DNA, 30 bp, synthetic construct; identical to SEQ ID NO: 9870
  source 1..30: mol_type = other DNA

SEQ ID NO: 10580 - DNA, 31 bp, synthetic construct; identical to SEQ ID NO: 9873
  source 1..31: mol_type = other DNA

SEQ ID NO: 10581 - DNA, 31 bp, synthetic construct; identical to SEQ ID NO: 9872
  source 1..31: mol_type = other DNA

SEQ ID NO: 10582 - DNA, 32 bp, synthetic construct; identical to SEQ ID NO: 9874
  source 1..32: mol_type = other DNA

SEQ ID NO: 10583 - DNA, 32 bp, synthetic construct; identical to SEQ ID NO: 9875
  source 1..32: mol_type = other DNA

SEQ ID NO: 10584 - DNA, 33 bp, synthetic construct; identical to SEQ ID NO: 9877
  source 1..33: mol_type = other DNA

SEQ ID NO: 10585 - DNA, 33 bp, synthetic construct; identical to SEQ ID NO: 9876
  source 1..33: mol_type = other DNA

SEQ ID NO: 10586 - DNA, 34 bp, synthetic construct; identical to SEQ ID NO: 9879
  source 1..34: mol_type = other DNA

SEQ ID NO: 10587 - DNA, 34 bp, synthetic construct; identical to SEQ ID NO: 9878
  source 1..34: mol_type = other DNA

SEQ ID NO: 10588 - DNA, 35 bp, synthetic construct; identical to SEQ ID NO: 9880
  source 1..35: mol_type = other DNA

SEQ ID NO: 10589 - DNA, 35 bp, synthetic construct; identical to SEQ ID NO: 9881
  source 1..35: mol_type = other DNA

SEQ ID NO: 10590 - DNA, 36 bp, synthetic construct; identical to SEQ ID NO: 9883
  source 1..36: mol_type = other DNA

SEQ ID NO: 10591 - DNA, 36 bp, synthetic construct; identical to SEQ ID NO: 9882
  source 1..36: mol_type = other DNA

SEQ ID NO: 10592 - DNA, 37 bp, synthetic construct; identical to SEQ ID NO: 9884
  source 1..37: mol_type = other DNA

SEQ ID NO: 10593 - DNA, 37 bp, synthetic construct; identical to SEQ ID NO: 9885
  source 1..37: mol_type = other DNA

SEQ ID NO: 10594 - DNA, 38 bp, synthetic construct; identical to SEQ ID NO: 9886
  source 1..38: mol_type = other DNA

SEQ ID NO: 10595 - DNA, 38 bp, synthetic construct; identical to SEQ ID NO: 9887
  source 1..38: mol_type = other DNA

SEQ ID NO: 10596 - DNA, 39 bp, synthetic construct; identical to SEQ ID NO: 9889
  source 1..39: mol_type = other DNA

SEQ ID NO: 10597 - DNA, 39 bp, synthetic construct; identical to SEQ ID NO: 9888
  source 1..39: mol_type = other DNA

SEQ ID NO: 10598 - DNA, 40 bp, synthetic construct; identical to SEQ ID NO: 9891
  source 1..40: mol_type = other DNA

SEQ ID NO: 10599 - DNA, 40 bp, synthetic construct; identical to SEQ ID NO: 9890
  source 1..40: mol_type = other DNA

SEQ ID NO: 10600 - DNA, 10 bp, synthetic construct
  source 1..10: mol_type = other DNA
tcacactgag

SEQ ID NO: 10601 - DNA, 11 bp, synthetic construct
  source 1..11: mol_type = other DNA
atcacactgag

SEQ ID NO: 10602 - DNA, 12 bp, synthetic construct
  source 1..12: mol_type = other DNA
aatcacactgag

SEQ ID NO: 10603 - DNA, 13 bp, synthetic construct
  source 1..13: mol_type = other DNA
gaatcacactgag

SEQ ID NO: 10604 - DNA, 14 bp, synthetic construct
  source 1..14: mol_type = other DNA
ggaatcacactgag

SEQ ID NO: 10605 - DNA, 15 bp, synthetic construct
  source 1..15: mol_type = other DNA
tggaatcacactgag

SEQ ID NO: 10606 - DNA, 16 bp, synthetic construct
  source 1..16: mol_type = other DNA
gtggaatcacactgag

SEQ ID NO: 10607 - DNA, 17 bp, synthetic construct
  source 1..17: mol_type = other DNA
ggtggaatcacactgag

SEQ ID NO: 10608 - DNA, 18 bp, synthetic construct
  source 1..18: mol_type = other DNA
aggtggaatcacactgag

SEQ ID NO: 10609 - DNA, 19 bp, synthetic construct
  source 1..19: mol_type = other DNA
aaggtggaatcacactgag

SEQ ID NO: 10610 - DNA, 20 bp, synthetic construct
  source 1..20: mol_type = other DNA
gaaggtggaatcacactgag

SEQ ID NO: 10611 - DNA, 21 bp, synthetic construct
  source 1..21: mol_type = other DNA
agaaggtggaatcacactgag

SEQ ID NO: 10612 - DNA, 22 bp, synthetic construct
  source 1..22: mol_type = other DNA
gagaaggtggaatcacactgag

SEQ ID NO: 10613 - DNA, 23 bp, synthetic construct
  source 1..23: mol_type = other DNA
ggagaaggtggaatcacactgag

SEQ ID NO: 10614 - DNA, 24 bp, synthetic construct
  source 1..24: mol_type = other DNA
tggagaaggtggaatcacactgag

SEQ ID NO: 10615 - DNA, 25 bp, synthetic construct
  source 1..25: mol_type = other DNA
ttggagaaggtggaatcacactgag

SEQ ID NO: 10616 - DNA, 26 bp, synthetic construct
  source 1..26: mol_type = other DNA
cttggagaaggtggaatcacactgag

SEQ ID NO: 10617 - DNA, 27 bp, synthetic construct
  source 1..27: mol_type = other DNA
tcttggagaaggtggaatcacactgag

SEQ ID NO: 10618 - DNA, 28 bp, synthetic construct
  source 1..28: mol_type = other DNA
ttcttggagaaggtggaatcacactgag

SEQ ID NO: 10619 - DNA, 29 bp, synthetic construct
  source 1..29: mol_type = other DNA
gttcttggagaaggtggaatcacactgag

SEQ ID NO: 10620 - DNA, 30 bp, synthetic construct; identical to SEQ ID NO: 9898
  source 1..30: mol_type = other DNA

SEQ ID NO: 10621 - DNA, 31 bp, synthetic construct; identical to SEQ ID NO: 9899
  source 1..31: mol_type = other DNA

SEQ ID NO: 10622 - DNA, 32 bp, synthetic construct; identical to SEQ ID NO: 9900
  source 1..32: mol_type = other DNA

SEQ ID NO: 10623 - DNA, 33 bp, synthetic construct; identical to SEQ ID NO: 9901
  source 1..33: mol_type = other DNA

SEQ ID NO: 10624 - DNA, 34 bp, synthetic construct; identical to SEQ ID NO: 9902
  source 1..34: mol_type = other DNA

SEQ ID NO: 10625 - DNA, 35 bp, synthetic construct; identical to SEQ ID NO: 9903
  source 1..35: mol_type = other DNA

SEQ ID NO: 10626 - DNA, 36 bp, synthetic construct; identical to SEQ ID NO: 9904
  source 1..36: mol_type = other DNA

SEQ ID NO: 10627 - DNA, 37 bp, synthetic construct; identical to SEQ ID NO: 9905
  source 1..37: mol_type = other DNA

SEQ ID NO: 10628 - DNA, 38 bp, synthetic construct; identical to SEQ ID NO: 9906
  source 1..38: mol_type = other DNA

SEQ ID NO: 10629 - DNA, 39 bp, synthetic construct; identical to SEQ ID NO: 9907
  source 1..39: mol_type = other DNA

SEQ ID NO: 10630 - DNA, 40 bp, synthetic construct; identical to SEQ ID NO: 9908
  source 1..40: mol_type = other DNA

SEQ ID NO: 10631 - DNA, 34 bp, synthetic construct; identical to SEQ ID NO: 9971
  source 1..34: mol_type = other DNA

SEQ ID NO: 10632 - DNA, 34 bp, synthetic construct; identical to SEQ ID NO: 9970
  source 1..34: mol_type = other DNA

SEQ ID NO: 10633 - DNA, 35 bp, synthetic construct; identical to SEQ ID NO: 9972
  source 1..35: mol_type = other DNA

SEQ ID NO: 10634 - DNA, 35 bp, synthetic construct; identical to SEQ ID NO: 9973
  source 1..35: mol_type = other DNA

SEQ ID NO: 10635 - DNA, 36 bp, synthetic construct; identical to SEQ ID NO: 9974
  source 1..36: mol_type = other DNA

SEQ ID NO: 10636 - DNA, 36 bp, synthetic construct; identical to SEQ ID NO: 9975
  source 1..36: mol_type = other DNA

SEQ ID NO: 10637 - DNA, 37 bp, synthetic construct; identical to SEQ ID NO: 9977
  source 1..37: mol_type = other DNA

SEQ ID NO: 10638 - DNA, 37 bp, synthetic construct; identical to SEQ ID NO: 9976
  source 1..37: mol_type = other DNA

SEQ ID NO: 10639 - DNA, 38 bp, synthetic construct; identical to SEQ ID NO: 9979
  source 1..38: mol_type = other DNA

SEQ ID NO: 10640 - DNA, 38 bp, synthetic construct; identical to SEQ ID NO: 9978
  source 1..38: mol_type = other DNA

SEQ ID NO: 10641 - DNA, 39 bp, synthetic construct; identical to SEQ ID NO: 9980
  source 1..39: mol_type = other DNA

SEQ ID NO: 10642 - DNA, 39 bp, synthetic construct; identical to SEQ ID NO: 9981
  source 1..39: mol_type = other DNA

SEQ ID NO: 10643 - DNA, 40 bp, synthetic construct; identical to SEQ ID NO: 9983
  source 1..40: mol_type = other DNA

SEQ ID NO: 10644 - DNA, 40 bp, synthetic construct; identical to SEQ ID NO: 9982
  source 1..40: mol_type = other DNA

SEQ ID NO: 10645 - DNA, 33 bp, synthetic construct; identical to SEQ ID NO: 10005
  source 1..33: mol_type = other DNA

SEQ ID NO: 10646 - DNA, 34 bp, synthetic construct; identical to SEQ ID NO: 10006
  source 1..34: mol_type = other DNA

SEQ ID NO: 10647 - DNA, 35 bp, synthetic construct; identical to SEQ ID NO: 10007
  source 1..35: mol_type = other DNA

SEQ ID NO: 10648 - DNA, 36 bp, synthetic construct; identical to SEQ ID NO: 10008
  source 1..36: mol_type = other DNA

SEQ ID NO: 10649 - DNA, 37 bp, synthetic construct; identical to SEQ ID NO: 10009
  source 1..37: mol_type = other DNA

SEQ ID NO: 10650 - DNA, 38 bp, synthetic construct; identical to SEQ ID NO: 10010
  source 1..38: mol_type = other DNA

SEQ ID NO: 10651 - DNA, 39 bp, synthetic construct; identical to SEQ ID NO: 10011
  source 1..39: mol_type = other DNA

SEQ ID NO: 10652 - DNA, 40 bp, synthetic construct; identical to SEQ ID NO: 10012
  source 1..40: mol_type = other DNA

SEQ ID NO: 10653 - DNA, 26 bp, synthetic construct
  source 1..26: mol_type = other DNA
actcagtgtgattccaccttctccaa

SEQ ID NO: 10654 - DNA, 26 bp, synthetic construct
  source 1..26: mol_type = other DNA
actcagtgtgattccaccttcgccaa

SEQ ID NO: 10655 - DNA, 27 bp, synthetic construct
  source 1..27: mol_type = other DNA
cactcagtgtgattccaccttctccaa

SEQ ID NO: 10656 - DNA, 27 bp, synthetic construct
  source 1..27: mol_type = other DNA
cactcagtgtgattccaccttcgccaa

SEQ ID NO: 10657 - DNA, 28 bp, synthetic construct
  source 1..28: mol_type = other DNA
ccactcagtgtgattccaccttcgccaa

SEQ ID NO: 10658 - DNA, 28 bp, synthetic construct
  source 1..28: mol_type = other DNA
ccactcagtgtgattccaccttctccaa

SEQ ID NO: 10659 - DNA, 29 bp, synthetic construct
  source 1..29: mol_type = other DNA
tccactcagtgtgattccaccttcgccaa

SEQ ID NO: 10660 - DNA, 29 bp, synthetic construct
  source 1..29: mol_type = other DNA
tccactcagtgtgattccaccttctccaa

SEQ ID NO: 10661 - DNA, 30 bp, synthetic construct; identical to SEQ ID NO: 9481
  source 1..30: mol_type = other DNA

SEQ ID NO: 10662 - DNA, 30 bp, synthetic construct; identical to SEQ ID NO: 9482
  source 1..30: mol_type = other DNA

SEQ ID NO: 10663 - DNA, 31 bp, synthetic construct; identical to SEQ ID NO: 9484
  source 1..31: mol_type = other DNA

SEQ ID NO: 10664 - DNA, 31 bp, synthetic construct; identical to SEQ ID NO: 9483
  source 1..31: mol_type = other DNA

SEQ ID NO: 10665 - DNA, 32 bp, synthetic construct; identical to SEQ ID NO: 9485
  source 1..32: mol_type = other DNA

SEQ ID NO: 10666 - DNA, 32 bp, synthetic construct; identical to SEQ ID NO: 9486
  source 1..32: mol_type = other DNA

SEQ ID NO: 10667 - DNA, 33 bp, synthetic construct; identical to SEQ ID NO: 9488
  source 1..33: mol_type = other DNA

SEQ ID NO: 10668 - DNA, 33 bp, synthetic construct; identical to SEQ ID NO: 9487
  source 1..33: mol_type = other DNA

SEQ ID NO: 10669 - DNA, 34 bp, synthetic construct; identical to SEQ ID NO: 9489
  source 1..34: mol_type = other DNA

SEQ ID NO: 10670 - DNA, 34 bp, synthetic construct; identical to SEQ ID NO: 9490
  source 1..34: mol_type = other DNA

SEQ ID NO: 10671 - DNA, 35 bp, synthetic construct; identical to SEQ ID NO: 9491
  source 1..35: mol_type = other DNA

SEQ ID NO: 10672 - DNA, 35 bp, synthetic construct; identical to SEQ ID NO: 9492
  source 1..35: mol_type = other DNA

SEQ ID NO: 10673 - DNA, 36 bp, synthetic construct; identical to SEQ ID NO: 9494
  source 1..36: mol_type = other DNA

SEQ ID NO: 10674 - DNA, 36 bp, synthetic construct; identical to SEQ ID NO: 9493
  source 1..36: mol_type = other DNA

SEQ ID NO: 10675 - DNA, 37 bp, synthetic construct; identical to SEQ ID NO: 9495
  source 1..37: mol_type = other DNA

SEQ ID NO: 10676 - DNA, 37 bp, synthetic construct; identical to SEQ ID NO: 9496
  source 1..37: mol_type = other DNA

SEQ ID NO: 10677 - DNA, 38 bp, synthetic construct; identical to SEQ ID NO: 9498
  source 1..38: mol_type = other DNA

SEQ ID NO: 10678 - DNA, 38 bp, synthetic construct; identical to SEQ ID NO: 9497
  source 1..38: mol_type = other DNA

SEQ ID NO: 10679 - DNA, 39 bp, synthetic construct; identical to SEQ ID NO: 9500
  source 1..39: mol_type = other DNA

SEQ ID NO: 10680 - DNA, 39 bp, synthetic construct; identical to SEQ ID NO: 9499
  source 1..39: mol_type = other DNA

SEQ ID NO: 10681 - DNA, 40 bp, synthetic construct; identical to SEQ ID NO: 9501
  source 1..40: mol_type = other DNA

SEQ ID NO: 10682 - DNA, 40 bp, synthetic construct; identical to SEQ ID NO: 9502
  source 1..40: mol_type = other DNA

SEQ ID NO: 10683 - DNA, 25 bp, synthetic construct
  source 1..25: mol_type = other DNA
actcagtgtgattccaccttctcca

SEQ ID NO: 10684 - DNA, 26 bp, synthetic construct
  source 1..26: mol_type = other DNA
cactcagtgtgattccaccttctcca

SEQ ID NO: 10685 - DNA, 27 bp, synthetic construct
  source 1..27: mol_type = other DNA
ccactcagtgtgattccaccttctcca

SEQ ID NO: 10686 - DNA, 28 bp, synthetic construct
  source 1..28: mol_type = other DNA
tccactcagtgtgattccaccttctcca

SEQ ID NO: 10687 - DNA, 29 bp, synthetic construct
  source 1..29: mol_type = other DNA
ctccactcagtgtgattccaccttctcca

SEQ ID NO: 10688 - DNA, 30 bp, synthetic construct; identical to SEQ ID NO: 9523
  source 1..30: mol_type = other DNA

SEQ ID NO: 10689 - DNA, 31 bp, synthetic construct; identical to SEQ ID NO: 9524
  source 1..31: mol_type = other DNA

SEQ ID NO: 10690 - DNA, 32 bp, synthetic construct; identical to SEQ ID NO: 9525
  source 1..32: mol_type = other DNA

SEQ ID NO: 10691 - DNA, 33 bp, synthetic construct; identical to SEQ ID NO: 9526
  source 1..33: mol_type = other DNA

SEQ ID NO: 10692 - DNA, 34 bp, synthetic construct; identical to SEQ ID NO: 9527
  source 1..34: mol_type = other DNA

SEQ ID NO: 10693 - DNA, 35 bp, synthetic construct; identical to SEQ ID NO: 9528
  source 1..35: mol_type = other DNA

SEQ ID NO: 10694 - DNA, 36 bp, synthetic construct; identical to SEQ ID NO: 9529
  source 1..36: mol_type = other DNA

SEQ ID NO: 10695 - DNA, 37 bp, synthetic construct; identical to SEQ ID NO: 9530
  source 1..37: mol_type = other DNA

SEQ ID NO: 10696 - DNA, 38 bp, synthetic construct; identical to SEQ ID NO: 9531
  source 1..38: mol_type = other DNA

SEQ ID NO: 10697 - DNA, 39 bp, synthetic construct; identical to SEQ ID NO: 9532
  source 1..39: mol_type = other DNA

SEQ ID NO: 10698 - DNA, 40 bp, synthetic construct; identical to SEQ ID NO: 9533
  source 1..40: mol_type = other DNA

SEQ ID NO: 10699 - DNA, 10 bp, synthetic construct
  source 1..10: mol_type = other DNA
acctccactc

SEQ ID NO: 10700 - DNA, 11 bp, synthetic construct
  source 1..11: mol_type = other DNA
gacctccactc

SEQ ID NO: 10701 - DNA, 12 bp, synthetic construct
  source 1..12: mol_type = other DNA
tgacctccactc

SEQ ID NO: 10702 - DNA, 13 bp, synthetic construct
  source 1..13: mol_type = other DNA
ttgacctccactc

SEQ ID NO: 10703 - DNA, 14 bp, synthetic construct
  source 1..14: mol_type = other DNA
gttgacctccactc

SEQ ID NO: 10704 - DNA, 15 bp, synthetic construct
  source 1..15: mol_type = other DNA
cgttgacctccactc

SEQ ID NO: 10705 - DNA, 16 bp, synthetic construct
  source 1..16: mol_type = other DNA
tcgttgacctccactc

SEQ ID NO: 10706 - DNA, 17 bp, synthetic construct
  source 1..17: mol_type = other DNA
ctcgttgacctccactc

SEQ ID NO: 10707 - DNA, 18 bp, synthetic construct
  source 1..18: mol_type = other DNA
gctcgttgacctccactc

SEQ ID NO: 10708 - DNA, 19 bp, synthetic construct
  source 1..19: mol_type = other DNA
tgctcgttgacctccactc

SEQ ID NO: 10709 - DNA, 20 bp, synthetic construct
  source 1..20: mol_type = other DNA
ttgctcgttgacctccactc

SEQ ID NO: 10710 - DNA, 21 bp, synthetic construct
  source 1..21: mol_type = other DNA
cttgctcgttgacctccactc

SEQ ID NO: 10711 - DNA, 22 bp, synthetic construct
  source 1..22: mol_type = other DNA
tcttgctcgttgacctccactc

SEQ ID NO: 10712 - DNA, 23 bp, synthetic construct
  source 1..23: mol_type = other DNA
ttcttgctcgttgacctccactc

SEQ ID NO: 10713 - DNA, 24 bp, synthetic construct
  source 1..24: mol_type = other DNA
attcttgctcgttgacctccactc

SEQ ID NO: 10714 - DNA, 25 bp, synthetic construct
  source 1..25: mol_type = other DNA
aattcttgctcgttgacctccactc

SEQ ID NO: 10715 - DNA, 26 bp, synthetic construct
  source 1..26: mol_type = other DNA
aaattcttgctcgttgacctccactc

SEQ ID NO: 10716 - DNA, 27 bp, synthetic construct
  source 1..27: mol_type = other DNA
gaaattcttgctcgttgacctccactc

SEQ ID NO: 10717 - DNA, 28 bp, synthetic construct
  source 1..28: mol_type = other DNA
agaaattcttgctcgttgacctccactc

SEQ ID NO: 10718 - DNA, 29 bp, synthetic construct
  source 1..29: mol_type = other DNA
aagaaattcttgctcgttgacctccactc

SEQ ID NO: 10719 - DNA, 30 bp, synthetic construct; identical to SEQ ID NO: 10082
  source 1..30: mol_type = other DNA

SEQ ID NO: 10720 - DNA, 31 bp, synthetic construct; identical to SEQ ID NO: 10083
  source 1..31: mol_type = other DNA

SEQ ID NO: 10721 - DNA, 32 bp, synthetic construct; identical to SEQ ID NO: 10084
  source 1..32: mol_type = other DNA

SEQ ID NO: 10722 - DNA, 33 bp, synthetic construct; identical to SEQ ID NO: 10085
  source 1..33: mol_type = other DNA

SEQ ID NO: 10723 - DNA, 34 bp, synthetic construct; identical to SEQ ID NO: 10086
  source 1..34: mol_type = other DNA

SEQ ID NO: 10724 - DNA, 35 bp, synthetic construct; identical to SEQ ID NO: 10087
  source 1..35: mol_type = other DNA

SEQ ID NO: 10725 - DNA, 36 bp, synthetic construct; identical to SEQ ID NO: 10088
  source 1..36: mol_type = other DNA

SEQ ID NO: 10726 - DNA, 37 bp, synthetic construct; identical to SEQ ID NO: 10089
  source 1..37: mol_type = other DNA

SEQ ID NO: 10727 - DNA, 38 bp, synthetic construct; identical to SEQ ID NO: 10090
  source 1..38: mol_type = other DNA

SEQ ID NO: 10728 - DNA, 39 bp, synthetic construct; identical to SEQ ID NO: 10091
  source 1..39: mol_type = other DNA

SEQ ID NO: 10729 - DNA, 40 bp, synthetic construct; identical to SEQ ID NO: 10092
  source 1..40: mol_type = other DNA

SEQ ID NO: 10730 - DNA, 22 bp, synthetic construct
  source 1..22: mol_type = other DNA
actcagtgtgattccaccttct

SEQ ID NO: 10731 - DNA, 23 bp, synthetic construct
  source 1..23: mol_type = other DNA
cactcagtgtgattccaccttct

SEQ ID NO: 10732 - DNA, 24 bp, synthetic construct
  source 1..24: mol_type = other DNA
ccactcagtgtgattccaccttct

SEQ ID NO: 10733 - DNA, 25 bp, synthetic construct
  source 1..25: mol_type = other DNA
tccactcagtgtgattccaccttct

SEQ ID NO: 10734 - DNA, 26 bp, synthetic construct
  source 1..26: mol_type = other DNA
ctccactcagtgtgattccaccttct

SEQ ID NO: 10735 - DNA, 27 bp, synthetic construct
  source 1..27: mol_type = other DNA
cctccactcagtgtgattccaccttct

SEQ ID NO: 10736 - DNA, 28 bp, synthetic construct
  source 1..28: mol_type = other DNA
acctccactcagtgtgattccaccttct

SEQ ID NO: 10737 - DNA, 29 bp, synthetic construct
  source 1..29: mol_type = other DNA
gacctccactcagtgtgattccaccttct

SEQ ID NO: 10738 - DNA, 30 bp, synthetic construct; identical to SEQ ID NO: 10102
  source 1..30: mol_type = other DNA

SEQ ID NO: 10739 - DNA, 31 bp, synthetic construct; identical to SEQ ID NO: 10103
  source 1..31: mol_type = other DNA

SEQ ID NO: 10740 - DNA, 32 bp, synthetic construct; identical to SEQ ID NO: 10104
  source 1..32: mol_type = other DNA

SEQ ID NO: 10741 - DNA, 33 bp, synthetic construct; identical to SEQ ID NO: 10105
  source 1..33: mol_type = other DNA

SEQ ID NO: 10742 - DNA, 34 bp, synthetic construct; identical to SEQ ID NO: 10106
  source 1..34: mol_type = other DNA

SEQ ID NO: 10743 - DNA, 35 bp, synthetic construct; identical to SEQ ID NO: 10107
  source 1..35: mol_type = other DNA

SEQ ID NO: 10744 - DNA, 36 bp, synthetic construct; identical to SEQ ID NO: 10108
  source 1..36: mol_type = other DNA

SEQ ID NO: 10745 - DNA, 37 bp, synthetic construct; identical to SEQ ID NO: 10109
  source 1..37: mol_type = other DNA

SEQ ID NO: 10746 - DNA, 38 bp, synthetic construct; identical to SEQ ID NO: 10110
  source 1..38: mol_type = other DNA

SEQ ID NO: 10747 - DNA, 39 bp, synthetic construct; identical to SEQ ID NO: 10111
  source 1..39: mol_type = other DNA

SEQ ID NO: 10748 - DNA, 40 bp, synthetic construct; identical to SEQ ID NO: 10112
  source 1..40: mol_type = other DNA

SEQ ID NO: 10749 - DNA, 21 bp, synthetic construct
  source 1..21: mol_type = other DNA
actcagtgtgattccaccttc

SEQ ID NO: 10750 - DNA, 22 bp, synthetic construct
  source 1..22: mol_type = other DNA
cactcagtgtgattccaccttc

SEQ ID NO: 10751 - DNA, 23 bp, synthetic construct
  source 1..23: mol_type = other DNA
ccactcagtgtgattccaccttc

SEQ ID NO: 10752 - DNA, 24 bp, synthetic construct
  source 1..24: mol_type = other DNA
tccactcagtgtgattccaccttc

SEQ ID NO: 10753 - DNA, 25 bp, synthetic construct
  source 1..25: mol_type = other DNA
ctccactcagtgtgattccaccttc

SEQ ID NO: 10754 - DNA, 26 bp, synthetic construct
  source 1..26: mol_type = other DNA
cctccactcagtgtgattccaccttc

SEQ ID NO: 10755 - DNA, 27 bp, synthetic construct
  source 1..27: mol_type = other DNA
acctccactcagtgtgattccaccttc

SEQ ID NO: 10756 - DNA, 28 bp, synthetic construct
  source 1..28: mol_type = other DNA
gacctccactcagtgtgattccaccttc

SEQ ID NO: 10757 - DNA, 29 bp, synthetic construct
  source 1..29: mol_type = other DNA
tgacctccactcagtgtgattccaccttc

SEQ ID NO: 10758 - DNA, 30 bp, synthetic construct; identical to SEQ ID NO: 10123
  source 1..30: mol_type = other DNA

SEQ ID NO: 10759 - DNA, 31 bp, synthetic construct; identical to SEQ ID NO: 10124
  source 1..31: mol_type = other DNA

SEQ ID NO: 10760 - DNA, 32 bp, synthetic construct; identical to SEQ ID NO: 10125
  source 1..32: mol_type = other DNA

SEQ ID NO: 10761 - DNA, 33 bp, synthetic construct; identical to SEQ ID NO: 10126
  source 1..33: mol_type = other DNA

SEQ ID NO: 10762 - DNA, 34 bp, synthetic construct; identical to SEQ ID NO: 10127
  source 1..34: mol_type = other DNA

SEQ ID NO: 10763 - DNA, 35 bp, synthetic construct; identical to SEQ ID NO: 10128
  source 1..35: mol_type = other DNA

SEQ ID NO: 10764 - DNA, 36 bp, synthetic construct; identical to SEQ ID NO: 10129
  source 1..36: mol_type = other DNA

SEQ ID NO: 10765 - DNA, 37 bp, synthetic construct; identical to SEQ ID NO: 10130
  source 1..37: mol_type = other DNA

SEQ ID NO: 10766 - DNA, 38 bp, synthetic construct; identical to SEQ ID NO: 10131
  source 1..38: mol_type = other DNA

SEQ ID NO: 10767 - DNA, 39 bp, synthetic construct; identical to SEQ ID NO: 10132
  source 1..39: mol_type = other DNA

SEQ ID NO: 10768 - DNA, 40 bp, synthetic construct; identical to SEQ ID NO: 10133
  source 1..40: mol_type = other DNA

SEQ ID NO: 10769 - DNA, 28 bp, synthetic construct
  source 1..28: mol_type = other DNA
actcagtgtgattccaccttctccaaga

SEQ ID NO: 10770 - DNA, 29 bp, synthetic construct
  source 1..29: mol_type = other DNA
cactcagtgtgattccaccttctccaaga

SEQ ID NO: 10771 - DNA, 30 bp, synthetic construct; identical to SEQ ID NO: 10137
  source 1..30: mol_type = other DNA

SEQ ID NO: 10772 - DNA, 31 bp, synthetic construct; identical to SEQ ID NO: 10138
  source 1..31: mol_type = other DNA

SEQ ID NO: 10773 - DNA, 32 bp, synthetic construct; identical to SEQ ID NO: 10139
  source 1..32: mol_type = other DNA

SEQ ID NO: 10774 - DNA, 33 bp, synthetic construct; identical to SEQ ID NO: 10140
  source 1..33: mol_type = other DNA

SEQ ID NO: 10775 - DNA, 34 bp, synthetic construct; identical to SEQ ID NO: 10141
  source 1..34: mol_type = other DNA

SEQ ID NO: 10776 - DNA, 35 bp, synthetic construct; identical to SEQ ID NO: 10142
  source 1..35: mol_type = other DNA

SEQ ID NO: 10777 - DNA, 36 bp, synthetic construct; identical to SEQ ID NO: 10143
  source 1..36: mol_type = other DNA

SEQ ID NO: 10778 - DNA, 37 bp, synthetic construct; identical to SEQ ID NO: 10144
  source 1..37: mol_type = other DNA

SEQ ID NO: 10779 - DNA, 38 bp, synthetic construct; identical to SEQ ID NO: 10145
  source 1..38: mol_type = other DNA

SEQ ID NO: 10780 - DNA, 39 bp, synthetic construct; identical to SEQ ID NO: 10146
  source 1..39: mol_type = other DNA

SEQ ID NO: 10781 - DNA, 40 bp, synthetic construct; identical to SEQ ID NO: 10147
  source 1..40: mol_type = other DNA

SEQ ID NO: 10782 - DNA, 10 bp, synthetic construct
  source 1..10: mol_type = other DNA
cctccactca

SEQ ID NO: 10783 - DNA, 11 bp, synthetic construct
  source 1..11: mol_type = other DNA
acctccactca

SEQ ID NO: 10784 - DNA, 12 bp, synthetic construct
  source 1..12: mol_type = other DNA
gacctccactca

SEQ ID NO: 10785 - DNA, 13 bp, synthetic construct
  source 1..13: mol_type = other DNA
tgacctccactca

SEQ ID NO: 10786 - DNA, 14 bp, synthetic construct
  source 1..14: mol_type = other DNA
ttgacctccactca

SEQ ID NO: 10787 - DNA, 15 bp, synthetic construct
  source 1..15: mol_type = other DNA
gttgacctccactca

SEQ ID NO: 10788 - DNA, 16 bp, synthetic construct
  source 1..16: mol_type = other DNA
cgttgacctccactca

SEQ ID NO: 10789 - DNA, 17 bp, synthetic construct
  source 1..17: mol_type = other DNA
tcgttgacctccactca

SEQ ID NO: 10790 - DNA, 18 bp, synthetic construct
  source 1..18: mol_type = other DNA
ctcgttgacctccactca

SEQ ID NO: 10791 - DNA, 19 bp, synthetic construct
  source 1..19: mol_type = other DNA
gctcgttgacctccactca

SEQ ID NO: 10792 - DNA, 20 bp, synthetic construct
  source 1..20: mol_type = other DNA
tgctcgttgacctccactca

SEQ ID NO: 10793 - DNA, 21 bp, synthetic construct
  source 1..21: mol_type = other DNA
ttgctcgttgacctccactca

SEQ ID NO: 10794 - DNA, 22 bp, synthetic construct
  source 1..22: mol_type = other DNA
cttgctcgttgacctccactca

SEQ ID NO: 10795 - DNA, 23 bp, synthetic construct
  source 1..23: mol_type = other DNA
tcttgctcgttgacctccactca

SEQ ID NO: 10796 - DNA, 24 bp, synthetic construct
  source 1..24: mol_type = other DNA
ttcttgctcgttgacctccactca

SEQ ID NO: 10797 - DNA, 25 bp, synthetic construct
  source 1..25: mol_type = other DNA
attcttgctcgttgacctccactca

SEQ ID NO: 10798 - DNA, 26 bp, synthetic construct
  source 1..26: mol_type = other DNA
aattcttgctcgttgacctccactca

SEQ ID NO: 10799 - DNA, 27 bp, synthetic construct
  source 1..27: mol_type = other DNA
aaattcttgctcgttgacctccactca

SEQ ID NO: 10800 - DNA, 28 bp, synthetic construct
  source 1..28: mol_type = other DNA
gaaattcttgctcgttgacctccactca

SEQ ID NO: 10801 - DNA, 29 bp, synthetic construct
  source 1..29: mol_type = other DNA
agaaattcttgctcgttgacctccactca

SEQ ID NO: 10802 - DNA, 30 bp, synthetic construct; identical to SEQ ID NO: 10168
  source 1..30: mol_type = other DNA

SEQ ID NO: 10803 - DNA, 31 bp, synthetic construct; identical to SEQ ID NO: 10169
  source 1..31: mol_type = other DNA

SEQ ID NO: 10804 - DNA, 32 bp, synthetic construct; identical to SEQ ID NO: 10170
  source 1..32: mol_type = other DNA

SEQ ID NO: 10805 - DNA, 33 bp, synthetic construct; identical to SEQ ID NO: 10171
  source 1..33: mol_type = other DNA

SEQ ID NO: 10806 - DNA, 34 bp, synthetic construct; identical to SEQ ID NO: 10172
  source 1..34: mol_type = other DNA

SEQ ID NO: 10807 - DNA, 35 bp, synthetic construct; identical to SEQ ID NO: 10173
  source 1..35: mol_type = other DNA

SEQ ID NO: 10808 - DNA, 36 bp, synthetic construct; identical to SEQ ID NO: 10174
  source 1..36: mol_type = other DNA

SEQ ID NO: 10809 - DNA, 37 bp, synthetic construct; identical to SEQ ID NO: 10175
  source 1..37: mol_type = other DNA

SEQ ID NO: 10810 - DNA, 38 bp, synthetic construct; identical to SEQ ID NO: 10176
  source 1..38: mol_type = other DNA

SEQ ID NO: 10811 - DNA, 39 bp, synthetic construct; identical to SEQ ID NO: 10177
  source 1..39: mol_type = other DNA

SEQ ID NO: 10812 - DNA, 40 bp, synthetic construct; identical to SEQ ID NO: 10178
  source 1..40: mol_type = other DNA

SEQ ID NO: 10813 - DNA, 29 bp, synthetic construct
  source 1..29: mol_type = other DNA
actcagtgtgattccaccttctccaagaa

SEQ ID NO: 10814 - DNA, 30 bp, synthetic construct; identical to SEQ ID NO: 10181
  source 1..30: mol_type = other DNA

SEQ ID NO: 10815 - DNA, 31 bp, synthetic construct; identical to SEQ ID NO: 10182
  source 1..31: mol_type = other DNA

SEQ ID NO: 10816 - DNA, 32 bp, synthetic construct; identical to SEQ ID NO: 10183
  source 1..32: mol_type = other DNA

SEQ ID NO: 10817 - DNA, 33 bp, synthetic construct; identical to SEQ ID NO: 10184
  source 1..33: mol_type = other DNA

SEQ ID NO: 10818 - DNA, 34 bp, synthetic construct; identical to SEQ ID NO: 10185
  source 1..34: mol_type = other DNA

SEQ ID NO: 10819 - DNA, 35 bp, synthetic construct; identical to SEQ ID NO: 10186
  source 1..35: mol_type = other DNA

SEQ ID NO: 10820 - DNA, 36 bp, synthetic construct; identical to SEQ ID NO: 10187
  source 1..36: mol_type = other DNA

SEQ ID NO: 10821 - DNA, 37 bp, synthetic construct; identical to SEQ ID NO: 10188
  source 1..37: mol_type = other DNA

SEQ ID NO: 10822 - DNA, 38 bp, synthetic construct; identical to SEQ ID NO: 10189
  source 1..38: mol_type = other DNA

SEQ ID NO: 10823 - DNA, 39 bp, synthetic construct; identical to SEQ ID NO: 10190
  source 1..39: mol_type = other DNA

SEQ ID NO: 10824 - DNA, 40 bp, synthetic construct; identical to SEQ ID NO: 10191
  source 1..40: mol_type = other DNA

SEQ ID NO: 10825 - DNA, 10 bp, synthetic construct
  source 1..10: mol_type = other DNA
gacctccact

SEQ ID NO: 10826 - DNA, 11 bp, synthetic construct
  source 1..11: mol_type = other DNA
tgacctccact

SEQ ID NO: 10827 - DNA, 12 bp, synthetic construct
  source 1..12: mol_type = other DNA
ttgacctccact

SEQ ID NO: 10828 - DNA, 13 bp, synthetic construct
  source 1..13: mol_type = other DNA
gttgacctccact

SEQ ID NO: 10829 - DNA, 14 bp, synthetic construct
  source 1..14: mol_type = other DNA
cgttgacctccact

SEQ ID NO: 10830 - DNA, 15 bp, synthetic construct
  source 1..15: mol_type = other DNA
tcgttgacctccact

SEQ ID NO: 10831 - DNA, 16 bp, synthetic construct
  source 1..16: mol_type = other DNA
ctcgttgacctccact

SEQ ID NO: 10832 - DNA, 17 bp, synthetic construct
  source 1..17: mol_type = other DNA
gctcgttgacctccact

SEQ ID NO: 10833 - DNA, 18 bp, synthetic construct
  source 1..18: mol_type = other DNA
tgctcgttgacctccact

SEQ ID NO: 10834 - DNA, 19 bp, synthetic construct
  source 1..19: mol_type = other DNA
ttgctcgttgacctccact

SEQ ID NO: 10835 - DNA, 20 bp, synthetic construct
  source 1..20: mol_type = other DNA
cttgctcgttgacctccact

SEQ ID NO: 10836 - DNA, 21 bp, synthetic construct
  source 1..21: mol_type = other DNA
tcttgctcgttgacctccact

SEQ ID NO: 10837 - DNA, 22 bp, synthetic construct
  source 1..22: mol_type = other DNA
ttcttgctcgttgacctccact

SEQ ID NO: 10838 - DNA, 23 bp, synthetic construct
  source 1..23: mol_type = other DNA
attcttgctcgttgacctccact

SEQ ID NO: 10839 - DNA, 24 bp, synthetic construct
  source 1..24: mol_type = other DNA
aattcttgctcgttgacctccact

SEQ ID NO: 10840 - DNA, 25 bp, synthetic construct
  source 1..25: mol_type = other DNA
aaattcttgctcgttgacctccact

SEQ ID NO: 10841 - DNA, 26 bp, synthetic construct
  source 1..26: mol_type = other DNA
gaaattcttgctcgttgacctccact

SEQ ID NO: 10842 - DNA, 27 bp, synthetic construct
  source 1..27: mol_type = other DNA
agaaattcttgctcgttgacctccact

SEQ ID NO: 10843 - DNA, 28 bp, synthetic construct
  source 1..28: mol_type = other DNA
aagaaattcttgctcgttgacctccact

SEQ ID NO: 10844 - DNA, 29 bp, synthetic construct
  source 1..29: mol_type = other DNA
aaagaaattcttgctcgttgacctccact

SEQ ID NO: 10845 - DNA, 30 bp, synthetic construct; identical to SEQ ID NO: 10212
  source 1..30: mol_type = other DNA

SEQ ID NO: 10846 - DNA, 31 bp, synthetic construct; identical to SEQ ID NO: 10213
  source 1..31: mol_type = other DNA

SEQ ID NO: 10847 - DNA, 32 bp, synthetic construct; identical to SEQ ID NO: 10214
  source 1..32: mol_type = other DNA

SEQ ID NO: 10848 - DNA, 33 bp, synthetic construct; identical to SEQ ID NO: 10215
  source 1..33: mol_type = other DNA

SEQ ID NO: 10849 - DNA, 34 bp, synthetic construct; identical to SEQ ID NO: 10216
  source 1..34: mol_type = other DNA

SEQ ID NO: 10850 - DNA, 35 bp, synthetic construct; identical to SEQ ID NO: 10217
  source 1..35: mol_type = other DNA

SEQ ID NO: 10851 - DNA, 36 bp, synthetic construct; identical to SEQ ID NO: 10218
  source 1..36: mol_type = other DNA

SEQ ID NO: 10852 - DNA, 37 bp, synthetic construct; identical to SEQ ID NO: 10219
  source 1..37: mol_type = other DNA

SEQ ID NO: 10853 - DNA, 38 bp, synthetic construct; identical to SEQ ID NO: 10220
  source 1..38: mol_type = other DNA

SEQ ID NO: 10854 - DNA, 39 bp, synthetic construct; identical to SEQ ID NO: 10221
  source 1..39: mol_type = other DNA

SEQ ID NO: 10855 - DNA, 40 bp, synthetic construct; identical to SEQ ID NO: 10222
  source 1..40: mol_type = other DNA

SEQ ID NO: 10856 - DNA, 19 bp, synthetic construct
  source 1..19: mol_type = other DNA
actcagtgtgattccacct

SEQ ID NO: 10857 - DNA, 20 bp, synthetic construct
  source 1..20: mol_type = other DNA
cactcagtgtgattccacct

SEQ ID NO: 10858 - DNA, 21 bp, synthetic construct
  source 1..21: mol_type = other DNA
ccactcagtgtgattccacct

SEQ ID NO: 10859 - DNA, 22 bp, synthetic construct
  source 1..22: mol_type = other DNA
tccactcagtgtgattccacct

SEQ ID NO: 10860 - DNA, 23 bp, synthetic construct
  source 1..23: mol_type = other DNA
ctccactcagtgtgattccacct

SEQ ID NO: 10861 - DNA, 24 bp, synthetic construct
  source 1..24: mol_type = other DNA
cctccactcagtgtgattccacct

SEQ ID NO: 10862 - DNA, 25 bp, synthetic construct
  source 1..25: mol_type = other DNA
acctccactcagtgtgattccacct

SEQ ID NO: 10863 - DNA, 26 bp, synthetic construct
  source 1..26: mol_type = other DNA
gacctccactcagtgtgattccacct

SEQ ID NO: 10864 - DNA, 27 bp, synthetic construct
  source 1..27: mol_type = other DNA
tgacctccactcagtgtgattccacct

SEQ ID NO: 10865 - DNA, 28 bp, synthetic construct
  source 1..28: mol_type = other DNA
ttgacctccactcagtgtgattccacct

SEQ ID NO: 10866 - DNA, 29 bp, synthetic construct
  source 1..29: mol_type = other DNA
gttgacctccactcagtgtgattccacct

SEQ ID NO: 10867 - DNA, 30 bp, synthetic construct; identical to SEQ ID NO: 10235
  source 1..30: mol_type = other DNA

SEQ ID NO: 10868 - DNA, 31 bp, synthetic construct; identical to SEQ ID NO: 10236
  source 1..31: mol_type = other DNA

SEQ ID NO: 10869 - DNA, 32 bp, synthetic construct; identical to SEQ ID NO: 10237
  source 1..32: mol_type = other DNA

SEQ ID NO: 10870 - DNA, 33 bp, synthetic construct; identical to SEQ ID NO: 10238
  source 1..33: mol_type = other DNA

SEQ ID NO: 10871 - DNA, 34 bp, synthetic construct; identical to SEQ ID NO: 10239
  source 1..34: mol_type = other DNA

SEQ ID NO: 10872 - DNA, 35 bp, synthetic construct; identical to SEQ ID NO: 10240
  source 1..35: mol_type = other DNA

SEQ ID NO: 10873 - DNA, 36 bp, synthetic construct; identical to SEQ ID NO: 10241
  source 1..36: mol_type = other DNA

SEQ ID NO: 10874 - DNA, 37 bp, synthetic construct; identical to SEQ ID NO: 10242
  source 1..37: mol_type = other DNA

SEQ ID NO: 10875 - DNA, 38 bp, synthetic construct; identical to SEQ ID NO: 10243
  source 1..38: mol_type = other DNA

SEQ ID NO: 10876 - DNA, 39 bp, synthetic construct; identical to SEQ ID NO: 10244
  source 1..39: mol_type = other DNA

SEQ ID NO: 10877 - DNA, 40 bp, synthetic construct; identical to SEQ ID NO: 10245
  source 1..40: mol_type = other DNA

SEQ ID NO: 10878 - DNA, 36 bp, synthetic construct
  source 1..36: mol_type = other DNA
agtggaggtcaacgagcaagaatttctttagcaagg

SEQ ID NO: 10879 - DNA, 37 bp, synthetic construct; identical to SEQ ID NO: 10246
  source 1..37: mol_type = other DNA

SEQ ID NO: 10880 - DNA, 38 bp, synthetic construct; identical to SEQ ID NO: 10247
  source 1..38: mol_type = other DNA

SEQ ID NO: 10881 - DNA, 39 bp, synthetic construct; identical to SEQ ID NO: 10248
  source 1..39: mol_type = other DNA

SEQ ID NO: 10882 - DNA, 40 bp, synthetic construct; identical to SEQ ID NO: 10249
  source 1..40: mol_type = other DNA

SEQ ID NO: 10883 - DNA, 20 bp, synthetic construct
  source 1..20: mol_type = other DNA
actcagtgtgattccacctt

SEQ ID NO: 10884 - DNA, 21 bp, synthetic construct
  source 1..21: mol_type = other DNA
cactcagtgtgattccacctt

SEQ ID NO: 10885 - DNA, 22 bp, synthetic construct
  source 1..22: mol_type = other DNA
ccactcagtgtgattccacctt

SEQ ID NO: 10886 - DNA, 23 bp, synthetic construct
  source 1..23: mol_type = other DNA
tccactcagtgtgattccacctt

SEQ ID NO: 10887 - DNA, 24 bp, synthetic construct
  source 1..24: mol_type = other DNA
ctccactcagtgtgattccacctt

SEQ ID NO: 10888 - DNA, 25 bp, synthetic construct
  source 1..25: mol_type = other DNA
cctccactcagtgtgattccacctt

SEQ ID NO: 10889 - DNA, 26 bp, synthetic construct
  source 1..26: mol_type = other DNA
acctccactcagtgtgattccacctt

SEQ ID NO: 10890 - DNA, 27 bp, synthetic construct
  source 1..27: mol_type = other DNA
gacctccactcagtgtgattccacctt

SEQ ID NO: 10891 - DNA, 28 bp, synthetic construct
  source 1..28: mol_type = other DNA
tgacctccactcagtgtgattccacctt

SEQ ID NO: 10892 - DNA, 29 bp, synthetic construct
  source 1..29: mol_type = other DNA
ttgacctccactcagtgtgattccacctt

SEQ ID NO: 10893 - DNA, 30 bp, synthetic construct; identical to SEQ ID NO: 10261
  source 1..30: mol_type = other DNA

SEQ ID NO: 10894 - DNA, 31 bp, synthetic construct; identical to SEQ ID NO: 10262
  source 1..31: mol_type = other DNA

SEQ ID NO: 10895 - DNA, 32 bp, synthetic construct; identical to SEQ ID NO: 10263
  source 1..32: mol_type = other DNA

SEQ ID NO: 10896 - DNA, 33 bp, synthetic construct; identical to SEQ ID NO: 10264
  source 1..33: mol_type = other DNA

SEQ ID NO: 10897 - DNA, 34 bp, synthetic construct; identical to SEQ ID NO: 10265
  source 1..34: mol_type = other DNA

SEQ ID NO: 10898 - DNA, 35 bp, synthetic construct; identical to SEQ ID NO: 10266
  source 1..35: mol_type = other DNA

SEQ ID NO: 10899 - DNA, 36 bp, synthetic construct; identical to SEQ ID NO: 10267
  source 1..36: mol_type = other DNA

SEQ ID NO: 10900 - DNA, 37 bp, synthetic construct; identical to SEQ ID NO: 10268
  source 1..37: mol_type = other DNA

SEQ ID NO: 10901 - DNA, 38 bp, synthetic construct; identical to SEQ ID NO: 10269
  source 1..38: mol_type = other DNA

SEQ ID NO: 10902 - DNA, 39 bp, synthetic construct; identical to SEQ ID NO: 10270
  source 1..39: mol_type = other DNA

SEQ ID NO: 10903 - DNA, 40 bp, synthetic construct; identical to SEQ ID NO: 10271
  source 1..40: mol_type = other DNA

SEQ ID NO: 10904 - DNA, 21 bp, synthetic construct
  source 1..21: mol_type = other DNA
agtggaggtcaacgagcaaga

SEQ ID NO: 10905 - DNA, 22 bp, synthetic construct
  source 1..22: mol_type = other DNA
gagtggaggtcaacgagcaaga

SEQ ID NO: 10906 - DNA, 23 bp, synthetic construct
  source 1..23: mol_type = other DNA
tgagtggaggtcaacgagcaaga

SEQ ID NO: 10907 - DNA, 24 bp, synthetic construct
  source 1..24: mol_type = other DNA
ctgagtggaggtcaacgagcaaga

SEQ ID NO: 10908 - DNA, 25 bp, synthetic construct
  source 1..25: mol_type = other DNA
actgagtggaggtcaacgagcaaga

SEQ ID NO: 10909 - DNA, 26 bp, synthetic construct
  source 1..26: mol_type = other DNA
cactgagtggaggtcaacgagcaaga

SEQ ID NO: 10910 - DNA, 27 bp, synthetic construct
  source 1..27: mol_type = other DNA
acactgagtggaggtcaacgagcaaga

SEQ ID NO: 10911 - DNA, 28 bp, synthetic construct
  source 1..28: mol_type = other DNA
cacactgagtggaggtcaacgagcaaga

SEQ ID NO: 10912 - DNA, 29 bp, synthetic construct
  source 1..29: mol_type = other DNA
tcacactgagtggaggtcaacgagcaaga

SEQ ID NO: 10913 - DNA, 30 bp, synthetic construct; identical to SEQ ID NO: 10280
  source 1..30: mol_type = other DNA

SEQ ID NO: 10914 - DNA, 31 bp, synthetic construct; identical to SEQ ID NO: 10281
  source 1..31: mol_type = other DNA

SEQ ID NO: 10915 - DNA, 32 bp, synthetic construct; identical to SEQ ID NO: 10282
  source 1..32: mol_type = other DNA

SEQ ID NO: 10916 - DNA, 33 bp, synthetic construct; identical to SEQ ID NO: 10283
  source 1..33: mol_type = other DNA

SEQ ID NO: 10917 - DNA, 34 bp, synthetic construct; identical to SEQ ID NO: 10284
  source 1..34: mol_type = other DNA

SEQ ID NO: 10918 - DNA, 35 bp, synthetic construct; identical to SEQ ID NO: 10285
  source 1..35: mol_type = other DNA

SEQ ID NO: 10919 - DNA, 36 bp, synthetic construct; identical to SEQ ID NO: 10286
  source 1..36: mol_type = other DNA

SEQ ID NO: 10920 - DNA, 37 bp, synthetic construct; identical to SEQ ID NO: 10287
  source 1..37: mol_type = other DNA

SEQ ID NO: 10921 - DNA, 38 bp, synthetic construct; identical to SEQ ID NO: 10288
  source 1..38: mol_type = other DNA

SEQ ID NO: 10922 - DNA, 39 bp, synthetic construct; identical to SEQ ID NO: 10289
  source 1..39: mol_type = other DNA

SEQ ID NO: 10923 - DNA, 40 bp, synthetic construct; identical to SEQ ID NO: 10290
  source 1..40: mol_type = other DNA

SEQ ID NO: 10924 - DNA, 27 bp, synthetic construct
  source 1..27: mol_type = other DNA
actcagtgtgattccaccttctccaag

SEQ ID NO: 10925 - DNA, 28 bp, synthetic construct
  source 1..28: mol_type = other DNA
cactcagtgtgattccaccttctccaag

SEQ ID NO: 10926 - DNA, 29 bp, synthetic construct
  source 1..29: mol_type = other DNA
ccactcagtgtgattccaccttctccaag

SEQ ID NO: 10927 - DNA, 30 bp, synthetic construct; identical to SEQ ID NO: 9627
  source 1..30: mol_type = other DNA

SEQ ID NO: 10928 - DNA, 31 bp, synthetic construct; identical to SEQ ID NO: 9628
  source 1..31: mol_type = other DNA

SEQ ID NO: 10929 - DNA, 32 bp, synthetic construct; identical to SEQ ID NO: 9629
  source 1..32: mol_type = other DNA

SEQ ID NO: 10930 - DNA, 33 bp, synthetic construct; identical to SEQ ID NO: 9630
  source 1..33: mol_type = other DNA

SEQ ID NO: 10931 - DNA, 34 bp, synthetic construct; identical to SEQ ID NO: 9631
  source 1..34: mol_type = other DNA

SEQ ID NO: 10932 - DNA, 35 bp, synthetic construct; identical to SEQ ID NO: 9632
  source 1..35: mol_type = other DNA

SEQ ID NO: 10933 - DNA, 36 bp, synthetic construct; identical to SEQ ID NO: 9633
  source 1..36: mol_type = other DNA

SEQ ID NO: 10934 - DNA, 37 bp, synthetic construct; identical to SEQ ID NO: 9634
  source 1..37: mol_type = other DNA

SEQ ID NO: 10935 - DNA, 38 bp, synthetic construct; identical to SEQ ID NO: 9635
  source 1..38: mol_type = other DNA

SEQ ID NO: 10936 - DNA, 39 bp, synthetic construct; identical to SEQ ID NO: 9636
  source 1..39: mol_type = other DNA

SEQ ID NO: 10937 - DNA, 40 bp, synthetic construct; identical to SEQ ID NO: 9637
  source 1..40: mol_type = other DNA

SEQ ID NO: 10938 - DNA, 23 bp, synthetic construct
  source 1..23: mol_type = other DNA
actcagtgtgattccaccttctc

SEQ ID NO: 10939 - DNA, 23 bp, synthetic construct
  source 1..23: mol_type = other DNA
actcagtgtgattccaccctctc

SEQ ID NO: 10940 - DNA, 24 bp, synthetic construct
  source 1..24: mol_type = other DNA
cactcagtgtgattccaccctctc

SEQ ID NO: 10941 - DNA, 24 bp, synthetic construct
  source 1..24: mol_type = other DNA
cactcagtgtgattccaccttctc

SEQ ID NO: 10942 - DNA, 25 bp, synthetic construct
  source 1..25: mol_type = other DNA
ccactcagtgtgattccaccttctc

SEQ ID NO: 10943 - DNA, 25 bp, synthetic construct
  source 1..25: mol_type = other DNA
ccactcagtgtgattccaccctctc

SEQ ID NO: 10944 - DNA, 26 bp, synthetic construct
  source 1..26: mol_type = other DNA
tccactcagtgtgattccaccttctc

SEQ ID NO: 10945 - DNA, 26 bp, synthetic construct
  source 1..26: mol_type = other DNA
tccactcagtgtgattccaccctctc

SEQ ID NO: 10946 - DNA, 27 bp, synthetic construct
  source 1..27: mol_type = other DNA
ctccactcagtgtgattccaccttctc

SEQ ID NO: 10947 - DNA, 27 bp, synthetic construct
  source 1..27: mol_type = other DNA
ctccactcagtgtgattccaccctctc

SEQ ID NO: 10948 - DNA, 28 bp, synthetic construct
  source 1..28: mol_type = other DNA
cctccactcagtgtgattccaccttctc

SEQ ID NO: 10949 - DNA, 28 bp, synthetic construct
  source 1..28: mol_type = other DNA
cctccactcagtgtgattccaccctctc

SEQ ID NO: 10950 - DNA, 29 bp, synthetic construct
  source 1..29: mol_type = other DNA
acctccactcagtgtgattccaccctctc

SEQ ID NO: 10951 - DNA, 29 bp, synthetic construct
  source 1..29: mol_type = other DNA
acctccactcagtgtgattccaccttctc

SEQ ID NO: 10952 - DNA, 30 bp, synthetic construct; identical to SEQ ID NO: 10323
  source 1..30: mol_type = other DNA

SEQ ID NO: 10953 - DNA, 30 bp, synthetic construct; identical to SEQ ID NO: 10322
  source 1..30: mol_type = other DNA

SEQ ID NO: 10954 - DNA, 31 bp, synthetic construct; identical to SEQ ID NO: 10325
  source 1..31: mol_type = other DNA

SEQ ID NO: 10955 - DNA, 31 bp, synthetic construct; identical to SEQ ID NO: 10324
  source 1..31: mol_type = other DNA

SEQ ID NO: 10956 - DNA, 32 bp, synthetic construct; identical to SEQ ID NO: 10327
  source 1..32: mol_type = other DNA

SEQ ID NO: 10957 - DNA, 32 bp, synthetic construct; identical to SEQ ID NO: 10326
  source 1..32: mol_type = other DNA

SEQ ID NO: 10958 - DNA, 33 bp, synthetic construct; identical to SEQ ID NO: 10328
  source 1..33: mol_type = other DNA

SEQ ID NO: 10959 - DNA, 33 bp, synthetic construct; identical to SEQ ID NO: 10329
  source 1..33: mol_type = other DNA

SEQ ID NO: 10960 - DNA, 34 bp, synthetic construct; identical to SEQ ID NO: 10330
  source 1..34: mol_type = other DNA

SEQ ID NO: 10961 - DNA, 34 bp, synthetic construct; identical to SEQ ID NO: 10331
  source 1..34: mol_type = other DNA

SEQ ID NO: 10962 - DNA, 35 bp, synthetic construct; identical to SEQ ID NO: 10332
  source 1..35: mol_type = other DNA

SEQ ID NO: 10963 - DNA, 35 bp, synthetic construct; identical to SEQ ID NO: 10333
  source 1..35: mol_type = other DNA

SEQ ID NO: 10964 - DNA, 36 bp, synthetic construct; identical to SEQ ID NO: 10335
  source 1..36: mol_type = other DNA

SEQ ID NO: 10965 - DNA, 36 bp, synthetic construct; identical to SEQ ID NO: 10334
  source 1..36: mol_type = other DNA

SEQ ID NO: 10966 - DNA, 37 bp, synthetic construct; identical to SEQ ID NO: 10336
  source 1..37: mol_type = other DNA

SEQ ID NO: 10967 - DNA, 37 bp, synthetic construct; identical to SEQ ID NO: 10337
  source 1..37: mol_type = other DNA

SEQ ID NO: 10968 - DNA, 38 bp, synthetic construct; identical to SEQ ID NO: 10339
  source 1..38: mol_type = other DNA

SEQ ID NO: 10969 - DNA, 38 bp, synthetic construct; identical to SEQ ID NO: 10338
  source 1..38: mol_type = other DNA

SEQ ID NO: 10970 - DNA, 39 bp, synthetic construct; identical to SEQ ID NO: 10341
  source 1..39: mol_type = other DNA

SEQ ID NO: 10971 - DNA, 39 bp, synthetic construct; identical to SEQ ID NO: 10340
  source 1..39: mol_type = other DNA

SEQ ID NO: 10972 - DNA, 40 bp, synthetic construct; identical to SEQ ID NO: 10343
  source 1..40: mol_type = other DNA

SEQ ID NO: 10973 - DNA, 40 bp, synthetic construct; identical to SEQ ID NO: 10342
  source 1..40: mol_type = other DNA

SEQ ID NO: 10974 - DNA, 10 bp, synthetic construct
  source 1..10: mol_type = other DNA
ccactcagtg

SEQ ID NO: 10975 - DNA, 11 bp, synthetic construct
  source 1..11: mol_type = other DNA
tccactcagtg

SEQ ID NO: 10976 - DNA, 12 bp, synthetic construct
  source 1..12: mol_type = other DNA
ctccactcagtg

SEQ ID NO: 10977 - DNA, 13 bp, synthetic construct
  source 1..13: mol_type = other DNA
cctccactcagtg

SEQ ID NO: 10978 - DNA, 14 bp, synthetic construct
  source 1..14: mol_type = other DNA
acctccactcagtg

SEQ ID NO: 10979 - DNA, 15 bp, synthetic construct
  source 1..15: mol_type = other DNA
gacctccactcagtg

SEQ ID NO: 10980 - DNA, 16 bp, synthetic construct
  source 1..16: mol_type = other DNA
tgacctccactcagtg

SEQ ID NO: 10981 - DNA, 17 bp, synthetic construct
  source 1..17: mol_type = other DNA
ttgacctccactcagtg

SEQ ID NO: 10982 - DNA, 18 bp, synthetic construct
  source 1..18: mol_type = other DNA
gttgacctccactcagtg

SEQ ID NO: 10983 - DNA, 19 bp, synthetic construct
  source 1..19: mol_type = other DNA
cgttgacctccactcagtg

SEQ ID NO: 10984 - DNA, 20 bp, synthetic construct
  source 1..20: mol_type = other DNA
tcgttgacctccactcagtg

SEQ ID NO: 10985 - DNA, 21 bp, synthetic construct
  source 1..21: mol_type = other DNA
ctcgttgacctccactcagtg

SEQ ID NO: 10986 - DNA, 22 bp, synthetic construct
  source 1..22: mol_type = other DNA
gctcgttgacctccactcagtg

SEQ ID NO: 10987 - DNA, 23 bp, synthetic construct
  source 1..23: mol_type = other DNA
tgctcgttgacctccactcagtg

SEQ ID NO: 10988 - DNA, 24 bp, synthetic construct
  source 1..24: mol_type = other DNA
ttgctcgttgacctccactcagtg

SEQ ID NO: 10989 - DNA, 25 bp, synthetic construct
  source 1..25: mol_type = other DNA
cttgctcgttgacctccactcagtg

SEQ ID NO: 10990 - DNA, 26 bp, synthetic construct
  source 1..26: mol_type = other DNA
tcttgctcgttgacctccactcagtg

SEQ ID NO: 10991 - DNA, 27 bp, synthetic construct
  source 1..27: mol_type = other DNA
ttcttgctcgttgacctccactcagtg

SEQ ID NO: 10992 - DNA, 28 bp, synthetic construct
  source 1..28: mol_type = other DNA
attcttgctcgttgacctccactcagtg

SEQ ID NO: 10993 - DNA, 29 bp, synthetic construct
  source 1..29: mol_type = other DNA
aattcttgctcgttgacctccactcagtg

SEQ ID NO: 10994 - DNA, 30 bp, synthetic construct; identical to SEQ ID NO: 10455
  source 1..30: mol_type = other DNA

SEQ ID NO: 10995 - DNA, 31 bp, synthetic construct; identical to SEQ ID NO: 10456
  source 1..31: mol_type = other DNA

SEQ ID NO: 10996 - DNA, 32 bp, synthetic construct; identical to SEQ ID NO: 10457
  source 1..32: mol_type = other DNA

SEQ ID NO: 10997 - DNA, 33 bp, synthetic construct; identical to SEQ ID NO: 10458
  source 1..33: mol_type = other DNA

SEQ ID NO: 10998 - DNA, 34 bp, synthetic construct; identical to SEQ ID NO: 10459
  source 1..34: mol_type = other DNA

SEQ ID NO: 10999 - DNA, 35 bp, synthetic construct; identical to SEQ ID NO: 10460
  source 1..35: mol_type = other DNA

SEQ ID NO: 11000 - DNA, 36 bp, synthetic construct; identical to SEQ ID NO: 10461
  source 1..36: mol_type = other DNA

SEQ ID NO: 11001 - DNA, 37 bp, synthetic construct; identical to SEQ ID NO: 10462
  source 1..37: mol_type = other DNA

SEQ ID NO: 11002 - DNA, 38 bp, synthetic construct; identical to SEQ ID NO: 10463
  source 1..38: mol_type = other DNA

SEQ ID NO: 11003 - DNA, 39 bp, synthetic construct; identical to SEQ ID NO: 10464
  source 1..39: mol_type = other DNA

SEQ ID NO: 11004 - DNA, 40 bp, synthetic construct; identical to SEQ ID NO: 10465
  source 1..40: mol_type = other DNA

SEQ ID NO: 11005 - DNA, 10 bp, synthetic construct
  source 1..10: mol_type = other DNA
tgaccgccac

SEQ ID NO: 11006 - DNA, 10 bp, synthetic construct
  source 1..10: mol_type = other DNA
tgacctccac

SEQ ID NO: 11007 - DNA, 11 bp, synthetic construct
  source 1..11: mol_type = other DNA
ttgaccgccac

SEQ ID NO: 11008 - DNA, 11 bp, synthetic construct
  source 1..11: mol_type = other DNA
ttgacctccac

SEQ ID NO: 11009 - DNA, 12 bp, synthetic construct
  source 1..12: mol_type = other DNA
gttgacctccac

SEQ ID NO: 11010 - DNA, 12 bp, synthetic construct
  source 1..12: mol_type = other DNA
gttgaccgccac

SEQ ID NO: 11011 - DNA, 13 bp, synthetic construct
  source 1..13: mol_type = other DNA
cgttgacctccac

SEQ ID NO: 11012 - DNA, 13 bp, synthetic construct
  source 1..13: mol_type = other DNA
cgttgaccgccac

SEQ ID NO: 11013 - DNA, 14 bp, synthetic construct
  source 1..14: mol_type = other DNA
tcgttgacctccac

SEQ ID NO: 11014 - DNA, 14 bp, synthetic construct
  source 1..14: mol_type = other DNA
tcgttgaccgccac

SEQ ID NO: 11015 - DNA, 15 bp, synthetic construct
  source 1..15: mol_type = other DNA
ctcgttgaccgccac

SEQ ID NO: 11016 - DNA, 15 bp, synthetic construct
  source 1..15: mol_type = other DNA
ctcgttgacctccac

SEQ ID NO: 11017 - DNA, 16 bp, synthetic construct
  source 1..16: mol_type = other DNA
gctcgttgacctccac

SEQ ID NO: 11018 - DNA, 16 bp, synthetic construct
  source 1..16: mol_type = other DNA
gctcgttgaccgccac

SEQ ID NO: 11019 - DNA, 17 bp, synthetic construct
  source 1..17: mol_type = other DNA
tgctcgttgaccgccac

SEQ ID NO: 11020 - DNA, 17 bp, synthetic construct
  source 1..17: mol_type = other DNA
tgctcgttgacctccac

SEQ ID NO: 11021 - DNA, 18 bp, synthetic construct
  source 1..18: mol_type = other DNA
ttgctcgttgacctccac

SEQ ID NO: 11022 - DNA, 18 bp, synthetic construct
  source 1..18: mol_type = other DNA
ttgctcgttgaccgccac

SEQ ID NO: 11023 - DNA, 19 bp, synthetic construct
  source 1..19: mol_type = other DNA
cttgctcgttgaccgccac

SEQ ID NO: 11024 - DNA, 19 bp, synthetic construct
  source 1..19: mol_type = other DNA
cttgctcgttgacctccac

SEQ ID NO: 11025 - DNA, 20 bp, synthetic construct
  source 1..20: mol_type = other DNA
tcttgctcgttgacctccac

SEQ ID NO: 11026 - DNA, 20 bp, synthetic construct
  source 1..20: mol_type = other DNA
tcttgctcgttgaccgccac

SEQ ID NO: 11027 - DNA, 21 bp, synthetic construct
  source 1..21: mol_type = other DNA
ttcttgctcgttgacctccac

SEQ ID NO: 11028 - DNA, 21 bp, synthetic construct
  source 1..21: mol_type = other DNA
ttcttgctcgttgaccgccac

SEQ ID NO: 11029 - DNA, 22 bp, synthetic construct
  source 1..22: mol_type = other DNA
attcttgctcgttgaccgccac

SEQ ID NO: 11030 - DNA, 22 bp, synthetic construct
  source 1..22: mol_type = other DNA
attcttgctcgttgacctccac

SEQ ID NO: 11031 - DNA, 23 bp, synthetic construct
  source 1..23: mol_type = other DNA
aattcttgctcgttgacctccac

SEQ ID NO: 11032 - DNA, 23 bp, synthetic construct
  source 1..23: mol_type = other DNA
aattcttgctcgttgaccgccac

SEQ ID NO: 11033 - DNA, 24 bp, synthetic construct
  source 1..24: mol_type = other DNA
aaattcttgctcgttgacctccac

SEQ ID NO: 11034 - DNA, 24 bp, synthetic construct
  source 1..24: mol_type = other DNA
aaattcttgctcgttgaccgccac

SEQ ID NO: 11035 - DNA, 25 bp, synthetic construct
  source 1..25: mol_type = other DNA
gaaattcttgctcgttgacctccac

SEQ ID NO: 11036 - DNA, 25 bp, synthetic construct
  source 1..25: mol_type = other DNA
gaaattcttgctcgttgaccgccac

SEQ ID NO: 11037 - DNA, 26 bp, synthetic construct
  source 1..26: mol_type = other DNA
agaaattcttgctcgttgaccgccac

SEQ ID NO: 11038 - DNA, 26 bp, synthetic construct
  source 1..26: mol_type = other DNA
agaaattcttgctcgttgacctccac

SEQ ID NO: 11039 - DNA, 27 bp, synthetic construct
  source 1..27: mol_type = other DNA
aagaaattcttgctcgttgaccgccac

SEQ ID NO: 11040 - DNA, 27 bp, synthetic construct
  source 1..27: mol_type = other DNA
aagaaattcttgctcgttgacctccac

SEQ ID NO: 11041 - DNA, 28 bp, synthetic construct
  source 1..28: mol_type = other DNA
aaagaaattcttgctcgttgacctccac

SEQ ID NO: 11042 - DNA, 28 bp, synthetic construct
  source 1..28: mol_type = other DNA
aaagaaattcttgctcgttgaccgccac

SEQ ID NO: 11043 - DNA, 29 bp, synthetic construct
  source 1..29: mol_type = other DNA
taaagaaattcttgctcgttgaccgccac

SEQ ID NO: 11044 - DNA, 29 bp, synthetic construct
  source 1..29: mol_type = other DNA
taaagaaattcttgctcgttgacctccac

SEQ ID NO: 11045 - DNA, 30 bp, synthetic construct
  source 1..30: mol_type = other DNA
ctaaagaaattcttgctcgttgacctccac

SEQ ID NO: 11046 - DNA, 30 bp, synthetic construct
  source 1..30: mol_type = other DNA
ctaaagaaattcttgctcgttgaccgccac

SEQ ID NO: 11047 - DNA, 31 bp, synthetic construct
  source 1..31: mol_type = other DNA
gctaaagaaattcttgctcgttgaccgccac

SEQ ID NO: 11048 - DNA, 31 bp, synthetic construct
  source 1..31: mol_type = other DNA
gctaaagaaattcttgctcgttgacctccac

SEQ ID NO: 11049 - DNA, 32 bp, synthetic construct
  source 1..32: mol_type = other DNA
tgctaaagaaattcttgctcgttgacctccac

SEQ ID NO: 11050 - DNA, 32 bp, synthetic construct
  source 1..32: mol_type = other DNA
tgctaaagaaattcttgctcgttgaccgccac

SEQ ID NO: 11051 - DNA, 33 bp, synthetic construct
  source 1..33: mol_type = other DNA
ttgctaaagaaattcttgctcgttgaccgccac

SEQ ID NO: 11052 - DNA, 33 bp, synthetic construct
  source 1..33: mol_type = other DNA
ttgctaaagaaattcttgctcgttgacctccac

SEQ ID NO: 11053 - DNA, 34 bp, synthetic construct
  source 1..34: mol_type = other DNA
cttgctaaagaaattcttgctcgttgaccgccac

SEQ ID NO: 11054 - DNA, 34 bp, synthetic construct
  source 1..34: mol_type = other DNA
cttgctaaagaaattcttgctcgttgacctccac

SEQ ID NO: 11055 - DNA, 35 bp, synthetic construct
  source 1..35: mol_type = other DNA
ccttgctaaagaaattcttgctcgttgaccgccac

SEQ ID NO: 11056 - DNA, 35 bp, synthetic construct
  source 1..35: mol_type = other DNA
ccttgctaaagaaattcttgctcgttgacctccac

SEQ ID NO: 11057 - DNA, 36 bp, synthetic construct
  source 1..36: mol_type = other DNA
accttgctaaagaaattcttgctcgttgaccgccac

SEQ ID NO: 11058 - DNA, 36 bp, synthetic construct
  source 1..36: mol_type = other DNA
accttgctaaagaaattcttgctcgttgacctccac

SEQ ID NO: 11059 - DNA, 37 bp, synthetic construct
  source 1..37: mol_type = other DNA
caccttgctaaagaaattcttgctcgttgacctccac

SEQ ID NO: 11060 - DNA, 37 bp, synthetic construct
  source 1..37: mol_type = other DNA
caccttgctaaagaaattcttgctcgttgaccgccac

SEQ ID NO: 11061 - DNA, 38 bp, synthetic construct
  source 1..38: mol_type = other DNA
tcaccttgctaaagaaattcttgctcgttgaccgccac

SEQ ID NO: 11062 - DNA, 38 bp, synthetic construct
  source 1..38: mol_type = other DNA
tcaccttgctaaagaaattcttgctcgttgacctccac

SEQ ID NO: 11063 - DNA, 39 bp, synthetic construct
  source 1..39: mol_type = other DNA
ttcaccttgctaaagaaattcttgctcgttgacctccac

SEQ ID NO: 11064 - DNA, 39 bp, synthetic construct
  source 1..39: mol_type = other DNA
ttcaccttgctaaagaaattcttgctcgttgaccgccac

SEQ ID NO: 11065 - DNA, 40 bp, synthetic construct
  source 1..40: mol_type = other DNA
attcaccttgctaaagaaattcttgctcgttgacctccac

SEQ ID NO: 11066 - DNA, 40 bp, synthetic construct
  source 1..40: mol_type = other DNA
attcaccttgctaaagaaattcttgctcgttgaccgccac

SEQ ID NO: 11067 - DNA, 14 bp, synthetic construct
  source 1..14: mol_type = other DNA
agtggaggtcaacg

SEQ ID NO: 11068 - DNA, 15 bp, synthetic construct
  source 1..15: mol_type = other DNA
gagtggaggtcaacg

SEQ ID NO: 11069 - DNA, 16 bp, synthetic construct
  source 1..16: mol_type = other DNA
tgagtggaggtcaacg

SEQ ID NO: 11070 - DNA, 17 bp, synthetic construct
  source 1..17: mol_type = other DNA
ctgagtggaggtcaacg

SEQ ID NO: 11071 - DNA, 18 bp, synthetic construct
  source 1..18: mol_type = other DNA
actgagtggaggtcaacg

SEQ ID NO: 11072 - DNA, 19 bp, synthetic construct
  source 1..19: mol_type = other DNA
cactgagtggaggtcaacg

SEQ ID NO: 11073 - DNA, 20 bp, synthetic construct
  source 1..20: mol_type = other DNA
acactgagtggaggtcaacg

SEQ ID NO: 11074 - DNA, 21 bp, synthetic construct
  source 1..21: mol_type = other DNA
cacactgagtggaggtcaacg

SEQ ID NO: 11075 - DNA, 22 bp, synthetic construct
  source 1..22: mol_type = other DNA
tcacactgagtggaggtcaacg

SEQ ID NO: 11076 - DNA, 23 bp, synthetic construct
  source 1..23: mol_type = other DNA
atcacactgagtggaggtcaacg

SEQ ID NO: 11077 - DNA, 24 bp, synthetic construct
  source 1..24: mol_type = other DNA
aatcacactgagtggaggtcaacg

SEQ ID NO: 11078 - DNA, 25 bp, synthetic construct
  source 1..25: mol_type = other DNA
gaatcacactgagtggaggtcaacg

SEQ ID NO: 11079 - DNA, 26 bp, synthetic construct
  source 1..26: mol_type = other DNA
ggaatcacactgagtggaggtcaacg

SEQ ID NO: 11080 - DNA, 27 bp, synthetic construct
  source 1..27: mol_type = other DNA
tggaatcacactgagtggaggtcaacg

SEQ ID NO: 11081 - DNA, 28 bp, synthetic construct
  source 1..28: mol_type = other DNA
gtggaatcacactgagtggaggtcaacg

SEQ ID NO: 11082 - DNA, 29 bp, synthetic construct
  source 1..29: mol_type = other DNA
ggtggaatcacactgagtggaggtcaacg

SEQ ID NO: 11083 - DNA, 30 bp, synthetic construct; identical to SEQ ID NO: 10390
  source 1..30: mol_type = other DNA

SEQ ID NO: 11084 - DNA, 31 bp, synthetic construct; identical to SEQ ID NO: 10391
  source 1..31: mol_type = other DNA

SEQ ID NO: 11085 - DNA, 32 bp, synthetic construct; identical to SEQ ID NO: 10392
  source 1..32: mol_type = other DNA

SEQ ID NO: 11086 - DNA, 33 bp, synthetic construct; identical to SEQ ID NO: 10393
  source 1..33: mol_type = other DNA

SEQ ID NO: 11087 - DNA, 34 bp, synthetic construct; identical to SEQ ID NO: 10394
  source 1..34: mol_type = other DNA

SEQ ID NO: 11088 - DNA, 35 bp, synthetic construct; identical to SEQ ID NO: 10395
  source 1..35: mol_type = other DNA

SEQ ID NO: 11089 - DNA, 36 bp, synthetic construct; identical to SEQ ID NO: 9765
  source 1..36: mol_type = other DNA

SEQ ID NO: 11090 - DNA, 37 bp, synthetic construct; identical to SEQ ID NO: 9766
  source 1..37: mol_type = other DNA

SEQ ID NO: 11091 - DNA, 38 bp, synthetic construct; identical to SEQ ID NO: 9767
  source 1..38: mol_type = other DNA

SEQ ID NO: 11092 - DNA, 39 bp, synthetic construct; identical to SEQ ID NO: 9768
  source 1..39: mol_type = other DNA

SEQ ID NO: 11093 - DNA, 40 bp, synthetic construct; identical to SEQ ID NO: 9769
  source 1..40: mol_type = other DNA

SEQ ID NO: 11094 - DNA, 30 bp, synthetic construct
  source 1..30: mol_type = other DNA
agtggaggtcaacgagcaagaatttcttta

SEQ ID NO: 11095 - DNA, 31 bp, synthetic construct; identical to SEQ ID NO: 10401
  source 1..31: mol_type = other DNA

SEQ ID NO: 11096 - DNA, 32 bp, synthetic construct; identical to SEQ ID NO: 10402
  source 1..32: mol_type = other DNA

SEQ ID NO: 11097 - DNA, 33 bp, synthetic construct; identical to SEQ ID NO: 10403
  source 1..33: mol_type = other DNA

SEQ ID NO: 11098 - DNA, 34 bp, synthetic construct; identical to SEQ ID NO: 10404
  source 1..34: mol_type = other DNA

SEQ ID NO: 11099 - DNA, 35 bp, synthetic construct; identical to SEQ ID NO: 10405
  source 1..35: mol_type = other DNA

SEQ ID NO: 11100 - DNA, 36 bp, synthetic construct; identical to SEQ ID NO: 10406
  source 1..36: mol_type = other DNA

SEQ ID NO: 11101 - DNA, 37 bp, synthetic construct; identical to SEQ ID NO: 10407
  source 1..37: mol_type = other DNA

SEQ ID NO: 11102 - DNA, 38 bp, synthetic construct; identical to SEQ ID NO: 10408
  source 1..38: mol_type = other DNA

SEQ ID NO: 11103 - DNA, 39 bp, synthetic construct; identical to SEQ ID NO: 10409
  source 1..39: mol_type = other DNA

SEQ ID NO: 11104 - DNA, 40 bp, synthetic construct; identical to SEQ ID NO: 10410
  source 1..40: mol_type = other DNA

SEQ ID NO: 11105 - DNA, 18 bp, synthetic construct
  source 1..18: mol_type = other DNA
actcagtgtgattccacc

SEQ ID NO: 11106 - DNA, 19 bp, synthetic construct
  source 1..19: mol_type = other DNA
cactcagtgtgattccacc

SEQ ID NO: 11107 - DNA, 20 bp, synthetic construct
  source 1..20: mol_type = other DNA
ccactcagtgtgattccacc

SEQ ID NO: 11108 - DNA, 21 bp, synthetic construct
  source 1..21: mol_type = other DNA
tccactcagtgtgattccacc

SEQ ID NO: 11109 - DNA, 22 bp, synthetic construct
  source 1..22: mol_type = other DNA
ctccactcagtgtgattccacc

SEQ ID NO: 11110 - DNA, 23 bp, synthetic construct
  source 1..23: mol_type = other DNA
cctccactcagtgtgattccacc

SEQ ID NO: 11111 - DNA, 24 bp, synthetic construct
  source 1..24: mol_type = other DNA
acctccactcagtgtgattccacc

SEQ ID NO: 11112 - DNA, 25 bp, synthetic construct
  source 1..25: mol_type = other DNA
gacctccactcagtgtgattccacc

SEQ ID NO: 11113 - DNA, 26 bp, synthetic construct
  source 1..26: mol_type = other DNA
tgacctccactcagtgtgattccacc

SEQ ID NO: 11114 - DNA, 27 bp, synthetic construct
  source 1..27: mol_type = other DNA
ttgacctccactcagtgtgattccacc

SEQ ID NO: 11115 - DNA, 28 bp, synthetic construct
  source 1..28: mol_type = other DNA
gttgacctccactcagtgtgattccacc

SEQ ID NO: 11116 - DNA, 29 bp, synthetic construct
  source 1..29: mol_type = other DNA
cgttgacctccactcagtgtgattccacc

SEQ ID NO: 11117 - DNA, 30 bp, synthetic construct; identical to SEQ ID NO: 10424
  source 1..30: mol_type = other DNA

SEQ ID NO: 11118 - DNA, 31 bp, synthetic construct; identical to SEQ ID NO: 10425
  source 1..31: mol_type = other DNA

SEQ ID NO: 11119 - DNA, 32 bp, synthetic construct; identical to SEQ ID NO: 10426
  source 1..32: mol_type = other DNA

SEQ ID NO: 11120 - DNA, 33 bp, synthetic construct; identical to SEQ ID NO: 10427
  source 1..33: mol_type = other DNA

SEQ ID NO: 11121 - DNA, 34 bp, synthetic construct; identical to SEQ ID NO: 10428
  source 1..34: mol_type = other DNA

SEQ ID NO: 11122 - DNA, 35 bp, synthetic construct; identical to SEQ ID NO: 10429
  source 1..35: mol_type = other DNA

SEQ ID NO: 11123 - DNA, 36 bp, synthetic construct; identical to SEQ ID NO: 10430
  source 1..36: mol_type = other DNA

SEQ ID NO: 11124 - DNA, 37 bp, synthetic construct; identical to SEQ ID NO: 10431
  source 1..37: mol_type = other DNA

SEQ ID NO: 11125 - DNA, 38 bp, synthetic construct; identical to SEQ ID NO: 10432
  source 1..38: mol_type = other DNA

SEQ ID NO: 11126 - DNA, 39 bp, synthetic construct; identical to SEQ ID NO: 10433
  source 1..39: mol_type = other DNA

SEQ ID NO: 11127 - DNA, 40 bp, synthetic construct; identical to SEQ ID NO: 10434
  source 1..40: mol_type = other DNA

SEQ ID NO: 11128 - DNA, 31 bp, synthetic construct
  source 1..31: mol_type = other DNA
agtggaggtcaacgagcaagaattagcttag

SEQ ID NO: 11129 - DNA, 31 bp, synthetic construct
  source 1..31: mol_type = other DNA
agtggaggtcaacgagcaagaatttctttag

SEQ ID NO: 11130 - DNA, 32 bp, synthetic construct; identical to SEQ ID NO: 10466
  source 1..32: mol_type = other DNA

SEQ ID NO: 11131 - DNA, 32 bp, synthetic construct; identical to SEQ ID NO: 10467
  source 1..32: mol_type = other DNA

SEQ ID NO: 11132 - DNA, 33 bp, synthetic construct; identical to SEQ ID NO: 10469
  source 1..33: mol_type = other DNA

SEQ ID NO: 11133 - DNA, 33 bp, synthetic construct; identical to SEQ ID NO: 10468
  source 1..33: mol_type = other DNA

SEQ ID NO: 11134 - DNA, 34 bp, synthetic construct; identical to SEQ ID NO: 10470
  source 1..34: mol_type = other DNA

SEQ ID NO: 11135 - DNA, 34 bp, synthetic construct; identical to SEQ ID NO: 10471
  source 1..34: mol_type = other DNA

SEQ ID NO: 11136 - DNA, 35 bp, synthetic construct; identical to SEQ ID NO: 10472
  source 1..35: mol_type = other DNA

SEQ ID NO: 11137 - DNA, 35 bp, synthetic construct; identical to SEQ ID NO: 10473
  source 1..35: mol_type = other DNA

SEQ ID NO: 11138 - DNA, 36 bp, synthetic construct; identical to SEQ ID NO: 10474
  source 1..36: mol_type = other DNA

SEQ ID NO: 11139 - DNA, 36 bp, synthetic construct; identical to SEQ ID NO: 10475
  source 1..36: mol_type = other DNA

SEQ ID NO: 11140 - DNA, 37 bp, synthetic construct; identical to SEQ ID NO: 10476
  source 1..37: mol_type = other DNA

SEQ ID NO: 11141 - DNA, 37 bp, synthetic construct; identical to SEQ ID NO: 10477
  source 1..37: mol_type = other DNA

SEQ ID NO: 11142 - DNA, 38 bp, synthetic construct; identical to SEQ ID NO: 10478
  source 1..38: mol_type = other DNA

SEQ ID NO: 11143 - DNA, 38 bp, synthetic construct; identical to SEQ ID NO: 10479
  source 1..38: mol_type = other DNA

SEQ ID NO: 11144 - DNA, 39 bp, synthetic construct; identical to SEQ ID NO: 10480
  source 1..39: mol_type = other DNA

SEQ ID NO: 11145 - DNA, 39 bp, synthetic construct; identical to SEQ ID NO: 10481
  source 1..39: mol_type = other DNA

SEQ ID NO: 11146 - DNA, 40 bp, synthetic construct; identical to SEQ ID NO: 10483
  source 1..40: mol_type = other DNA

SEQ ID NO: 11147 - DNA, 40 bp, synthetic construct; identical to SEQ ID NO: 10482
  source 1..40: mol_type = other DNA

SEQ ID NO: 11148 - DNA, 17 bp, synthetic construct
  source 1..17: mol_type = other DNA
agtggaggtcaacgagc

SEQ ID NO: 11149 - DNA, 18 bp, synthetic construct
  source 1..18: mol_type = other DNA
gagtggaggtcaacgagc

SEQ ID NO: 11150 - DNA, 19 bp, synthetic construct
  source 1..19: mol_type = other DNA
tgagtggaggtcaacgagc

SEQ ID NO: 11151 - DNA, 20 bp, synthetic construct
  source 1..20: mol_type = other DNA
ctgagtggaggtcaacgagc

SEQ ID NO: 11152 - DNA, 21 bp, synthetic construct
  source 1..21: mol_type = other DNA
actgagtggaggtcaacgagc

SEQ ID NO: 11153 - DNA, 22 bp, synthetic construct
  source 1..22: mol_type = other DNA
cactgagtggaggtcaacgagc

SEQ ID NO: 11154 - DNA, 23 bp, synthetic construct
  source 1..23: mol_type = other DNA
acactgagtggaggtcaacgagc

SEQ ID NO: 11155 - DNA, 24 bp, synthetic construct
  source 1..24: mol_type = other DNA
cacactgagtggaggtcaacgagc

SEQ ID NO: 11156 - DNA, 25 bp, synthetic construct
  source 1..25: mol_type = other DNA
tcacactgagtggaggtcaacgagc

SEQ ID NO: 11157 - DNA, 26 bp, synthetic construct
  source 1..26: mol_type = other DNA
atcacactgagtggaggtcaacgagc

SEQ ID NO: 11158 - DNA, 27 bp, synthetic construct
  source 1..27: mol_type = other DNA
aatcacactgagtggaggtcaacgagc

SEQ ID NO: 11159 - DNA, 28 bp, synthetic construct
  source 1..28: mol_type = other DNA
gaatcacactgagtggaggtcaacgagc

SEQ ID NO: 11160 - DNA, 29 bp, synthetic construct
  source 1..29: mol_type = other DNA
ggaatcacactgagtggaggtcaacgagc

SEQ ID NO: 11161 - DNA, 30 bp, synthetic construct; identical to SEQ ID NO: 10527
  source 1..30: mol_type = other DNA

SEQ ID NO: 11162 - DNA, 31 bp, synthetic construct; identical to SEQ ID NO: 10528
  source 1..31: mol_type = other DNA

SEQ ID NO: 11163 - DNA, 32 bp, synthetic construct; identical to SEQ ID NO: 10529
  source 1..32: mol_type = other DNA

SEQ ID NO: 11164 - DNA, 33 bp, synthetic construct; identical to SEQ ID NO: 10530
  source 1..33: mol_type = other DNA

SEQ ID NO: 11165 - DNA, 34 bp, synthetic construct; identical to SEQ ID NO: 10531
  source 1..34: mol_type = other DNA

SEQ ID NO: 11166 - DNA, 35 bp, synthetic construct; identical to SEQ ID NO: 10532
  source 1..35: mol_type = other DNA

SEQ ID NO: 11167 - DNA, 36 bp, synthetic construct; identical to SEQ ID NO: 10533
  source 1..36: mol_type = other DNA

SEQ ID NO: 11168 - DNA, 37 bp, synthetic construct; identical to SEQ ID NO: 10534
  source 1..37: mol_type = other DNA

SEQ ID NO: 11169 - DNA, 38 bp, synthetic construct; identical to SEQ ID NO: 10535
  source 1..38: mol_type = other DNA

SEQ ID NO: 11170 - DNA, 39 bp, synthetic construct; identical to SEQ ID NO: 9858
  source 1..39: mol_type = other DNA

SEQ ID NO: 11171 - DNA, 40 bp, synthetic construct; identical to SEQ ID NO: 9859
  source 1..40: mol_type = other DNA

SEQ ID NO: 11172 - DNA, 10 bp, synthetic construct
  source 1..10: mol_type = other DNA
cacattgagt

SEQ ID NO: 11173 - DNA, 10 bp, synthetic construct
  source 1..10: mol_type = other DNA
cacactgagt

SEQ ID NO: 11174 - DNA, 11 bp, synthetic construct
  source 1..11: mol_type = other DNA
tcacactgagt

SEQ ID NO: 11175 - DNA, 11 bp, synthetic construct
  source 1..11: mol_type = other DNA
tcacattgagt

SEQ ID NO: 11176 - DNA, 12 bp, synthetic construct
  source 1..12: mol_type = other DNA
atcacactgagt

SEQ ID NO: 11177 - DNA, 12 bp, synthetic construct
  source 1..12: mol_type = other DNA
atcacattgagt

SEQ ID NO: 11178 - DNA, 13 bp, synthetic construct
  source 1..13: mol_type = other DNA
aatcacactgagt

SEQ ID NO: 11179 - DNA, 13 bp, synthetic construct
  source 1..13: mol_type = other DNA
aatcacattgagt

SEQ ID NO: 11180 - DNA, 14 bp, synthetic construct
  source 1..14: mol_type = other DNA
gaatcacattgagt

SEQ ID NO: 11181 - DNA, 14 bp, synthetic construct
  source 1..14: mol_type = other DNA
gaatcacactgagt

SEQ ID NO: 11182 - DNA, 15 bp, synthetic construct
  source 1..15: mol_type = other DNA
ggaatcacattgagt

SEQ ID NO: 11183 - DNA, 15 bp, synthetic construct
  source 1..15: mol_type = other DNA
ggaatcacactgagt

SEQ ID NO: 11184 - DNA, 16 bp, synthetic construct
  source 1..16: mol_type = other DNA
tggaatcacactgagt

SEQ ID NO: 11185 - DNA, 16 bp, synthetic construct
  source 1..16: mol_type = other DNA
tggaatcacattgagt

SEQ ID NO: 11186 - DNA, 17 bp, synthetic construct
  source 1..17: mol_type = other DNA
gtggaatcacactgagt

SEQ ID NO: 11187 - DNA, 17 bp, synthetic construct
  source 1..17: mol_type = other DNA
gtggaatcacattgagt

SEQ ID NO: 11188 - DNA, 18 bp, synthetic construct
  source 1..18: mol_type = other DNA
ggtggaatcacactgagt

SEQ ID NO: 11189 - DNA, 18 bp, synthetic construct
  source 1..18: mol_type = other DNA
ggtggaatcacattgagt

SEQ ID NO: 11190 - DNA, 19 bp, synthetic construct
  source 1..19: mol_type = other DNA
aggtggaatcacactgagt

SEQ ID NO: 11191 - DNA, 19 bp, synthetic construct
  source 1..19: mol_type = other DNA
aggtggaatcacattgagt

SEQ ID NO: 11192 - DNA, 20 bp, synthetic construct
  source 1..20: mol_type = other DNA
aaggtggaatcacattgagt

SEQ ID NO: 11193 - DNA, 20 bp, synthetic construct
  source 1..20: mol_type = other DNA
aaggtggaatcacactgagt

SEQ ID NO: 11194 - DNA, 21 bp, synthetic construct
  source 1..21: mol_type = other DNA
gaaggtggaatcacattgagt

SEQ ID NO: 11195 - DNA, 21 bp, synthetic construct
  source 1..21: mol_type = other DNA
gaaggtggaatcacactgagt

SEQ ID NO: 11196 - DNA, 22 bp, synthetic construct
  source 1..22: mol_type = other DNA
agaaggtggaatcacactgagt

SEQ ID NO: 11197 - DNA, 22 bp, synthetic construct
  source 1..22: mol_type = other DNA
agaaggtggaatcacattgagt

SEQ ID NO: 11198 - DNA, 23 bp, synthetic construct
  source 1..23: mol_type = other DNA
gagaaggtggaatcacattgagt

SEQ ID NO: 11199 - DNA, 23 bp, synthetic construct
  source 1..23: mol_type = other DNA
gagaaggtggaatcacactgagt

SEQ ID NO: 11200 - DNA, 24 bp, synthetic construct
  source 1..24: mol_type = other DNA
ggagaaggtggaatcacattgagt

SEQ ID NO: 11201 - DNA, 24 bp, synthetic construct
  source 1..24: mol_type = other DNA
ggagaaggtggaatcacactgagt

SEQ ID NO: 11202 - DNA, 25 bp, synthetic construct
  source 1..25: mol_type = other DNA
tggagaaggtggaatcacattgagt

SEQ ID NO: 11203 - DNA, 25 bp, synthetic construct
  source 1..25: mol_type = other DNA
tggagaaggtggaatcacactgagt

SEQ ID NO: 11204 - DNA, 26 bp, synthetic construct
  source 1..26: mol_type = other DNA
ttggagaaggtggaatcacactgagt

SEQ ID NO: 11205 - DNA, 26 bp, synthetic construct
  source 1..26: mol_type = other DNA
ttggagaaggtggaatcacattgagt

SEQ ID NO: 11206 - DNA, 27 bp, synthetic construct
  source 1..27: mol_type = other DNA
cttggagaaggtggaatcacattgagt

SEQ ID NO: 11207 - DNA, 27 bp, synthetic construct
  source 1..27: mol_type = other DNA
cttggagaaggtggaatcacactgagt

SEQ ID NO: 11208 - DNA, 28 bp, synthetic construct
  source 1..28: mol_type = other DNA
tcttggagaaggtggaatcacattgagt

SEQ ID NO: 11209 - DNA, 28 bp, synthetic construct
  source 1..28: mol_type = other DNA
tcttggagaaggtggaatcacactgagt

SEQ ID NO: 11210 - DNA, 29 bp, synthetic construct
  source 1..29: mol_type = other DNA
ttcttggagaaggtggaatcacactgagt

SEQ ID NO: 11211 - DNA, 29 bp, synthetic construct
  source 1..29: mol_type = other DNA
ttcttggagaaggtggaatcacattgagt

SEQ ID NO: 11212 - DNA, 30 bp, synthetic construct; identical to SEQ ID NO: 9870
  source 1..30: mol_type = other DNA

SEQ ID NO: 11213 - DNA, 30 bp, synthetic construct; identical to SEQ ID NO: 9871
  source 1..30: mol_type = other DNA

SEQ ID NO: 11214 - DNA, 31 bp, synthetic construct; identical to SEQ ID NO: 9873
  source 1..31: mol_type = other DNA

SEQ ID NO: 11215 - DNA, 31 bp, synthetic construct; identical to SEQ ID NO: 9872
  source 1..31: mol_type = other DNA

SEQ ID NO: 11216 - DNA, 32 bp, synthetic construct; identical to SEQ ID NO: 9874
  source 1..32: mol_type = other DNA

SEQ ID NO: 11217 - DNA, 32 bp, synthetic construct; identical to SEQ ID NO: 9875
  source 1..32: mol_type = other DNA

SEQ ID NO: 11218 - DNA, 33 bp, synthetic construct; identical to SEQ ID NO: 9876
  source 1..33: mol_type = other DNA

SEQ ID NO: 11219 - DNA, 33 bp, synthetic construct; identical to SEQ ID NO: 9877
  source 1..33: mol_type = other DNA

SEQ ID NO: 11220 - DNA, 34 bp, synthetic construct; identical to SEQ ID NO: 9879
  source 1..34: mol_type = other DNA

SEQ ID NO: 11221 - DNA, 34 bp, synthetic construct; identical to SEQ ID NO: 9878
  source 1..34: mol_type = other DNA

SEQ ID NO: 11222 - DNA, 35 bp, synthetic construct; identical to SEQ ID NO: 9880
  source 1..35: mol_type = other DNA

SEQ ID NO: 11223 - DNA, 35 bp, synthetic construct; identical to SEQ ID NO: 9881
  source 1..35: mol_type = other DNA

SEQ ID NO: 11224 - DNA, 36 bp, synthetic construct; identical to SEQ ID NO: 9883
  source 1..36: mol_type = other DNA

SEQ ID NO: 11225 - DNA, 36 bp, synthetic construct; identical to SEQ ID NO: 9882
  source 1..36: mol_type = other DNA

SEQ ID NO: 11226 - DNA, 37 bp, synthetic construct; identical to SEQ ID NO: 9884
  source 1..37: mol_type = other DNA

SEQ ID NO: 11227 - DNA, 37 bp, synthetic construct; identical to SEQ ID NO: 9885
  source 1..37: mol_type = other DNA

SEQ ID NO: 11228 - DNA, 38 bp, synthetic construct; identical to SEQ ID NO: 9887
  source 1..38: mol_type = other DNA

SEQ ID NO: 11229 - DNA, 38 bp, synthetic construct; identical to SEQ ID NO: 9886
  source 1..38: mol_type = other DNA

SEQ ID NO: 11230 - DNA, 39 bp, synthetic construct; identical to SEQ ID NO: 9889
  source 1..39: mol_type = other DNA

SEQ ID NO: 11231 - DNA, 39 bp, synthetic construct; identical to SEQ ID NO: 9888
  source 1..39: mol_type = other DNA

SEQ ID NO: 11232 - DNA, 40 bp, synthetic construct; identical to SEQ ID NO: 9890
  source 1..40: mol_type = other DNA

SEQ ID NO: 11233 - DNA, 40 bp, synthetic construct; identical to SEQ ID NO: 9891
  source 1..40: mol_type = other DNA

SEQ ID NO: 11234 - DNA, 10 bp, synthetic construct
  source 1..10: mol_type = other DNA
tcacactgag

SEQ ID NO: 11235 - DNA, 11 bp, synthetic construct
  source 1..11: mol_type = other DNA
atcacactgag

SEQ ID NO: 11236 - DNA, 12 bp, synthetic construct
  source 1..12: mol_type = other DNA
aatcacactgag

SEQ ID NO: 11237 - DNA, 13 bp, synthetic construct
  source 1..13: mol_type = other DNA
gaatcacactgag

SEQ ID NO: 11238 - DNA, 14 bp, synthetic construct
  source 1..14: mol_type = other DNA
ggaatcacactgag

SEQ ID NO: 11239 - DNA, 15 bp, synthetic construct
  source 1..15: mol_type = other DNA
tggaatcacactgag

SEQ ID NO: 11240 - DNA, 16 bp, synthetic construct
  source 1..16: mol_type = other DNA
gtggaatcacactgag

SEQ ID NO: 11241 - DNA, 17 bp, synthetic construct
  source 1..17: mol_type = other DNA
ggtggaatcacactgag

SEQ ID NO: 11242 - DNA, 18 bp, synthetic construct
  source 1..18: mol_type = other DNA
aggtggaatcacactgag

SEQ ID NO: 11243 - DNA, 19 bp, synthetic construct
  source 1..19: mol_type = other DNA
aaggtggaatcacactgag

SEQ ID NO: 11244 - DNA, 20 bp, synthetic construct
  source 1..20: mol_type = other DNA
gaaggtggaatcacactgag

SEQ ID NO: 11245 - DNA, 21 bp, synthetic construct
  source 1..21: mol_type = other DNA
agaaggtggaatcacactgag

SEQ ID NO: 11246 - DNA, 22 bp, synthetic construct
  source 1..22: mol_type = other DNA
gagaaggtggaatcacactgag

SEQ ID NO: 11247 - DNA, 23 bp, synthetic construct
  source 1..23: mol_type = other DNA
ggagaaggtggaatcacactgag

SEQ ID NO: 11248 - DNA, 24 bp, synthetic construct
  source 1..24: mol_type = other DNA
tggagaaggtggaatcacactgag

SEQ ID NO: 11249 - DNA, 25 bp, synthetic construct
  source 1..25: mol_type = other DNA
ttggagaaggtggaatcacactgag

SEQ ID NO: 11250 - DNA, 26 bp, synthetic construct
  source 1..26: mol_type = other DNA
cttggagaaggtggaatcacactgag

SEQ ID NO: 11251 - DNA, 27 bp, synthetic construct
  source 1..27: mol_type = other DNA
tcttggagaaggtggaatcacactgag

SEQ ID NO: 11252 - DNA, 28 bp, synthetic construct
  source 1..28: mol_type = other DNA
ttcttggagaaggtggaatcacactgag

SEQ ID NO: 11253 - DNA, 29 bp, synthetic construct
  source 1..29: mol_type = other DNA
gttcttggagaaggtggaatcacactgag

SEQ ID NO: 11254 - DNA, 30 bp, synthetic construct; identical to SEQ ID NO: 9898
  source 1..30: mol_type = other DNA

SEQ ID NO: 11255 - DNA, 31 bp, synthetic construct; identical to SEQ ID NO: 9899
  source 1..31: mol_type = other DNA

SEQ ID NO: 11256 - DNA, 32 bp, synthetic construct; identical to SEQ ID NO: 9900
  source 1..32: mol_type = other DNA

SEQ ID NO: 11257 - DNA, 33 bp, synthetic construct; identical to SEQ ID NO: 9901
  source 1..33: mol_type = other DNA

SEQ ID NO: 11258 - DNA, 34 bp, synthetic construct; identical to SEQ ID NO: 9902
  source 1..34: mol_type = other DNA

SEQ ID NO: 11259 - DNA, 35 bp, synthetic construct; identical to SEQ ID NO: 9903
  source 1..35: mol_type = other DNA

SEQ ID NO: 11260 - DNA, 36 bp, synthetic construct; identical to SEQ ID NO: 9904
  source 1..36: mol_type = other DNA

SEQ ID NO: 11261 - DNA, 37 bp, synthetic construct; identical to SEQ ID NO: 9905
  source 1..37: mol_type = other DNA

SEQ ID NO: 11262 - DNA, 38 bp, synthetic construct; identical to SEQ ID NO: 9906
  source 1..38: mol_type = other DNA

SEQ ID NO: 11263 - DNA, 39 bp, synthetic construct; identical to SEQ ID NO: 9907
  source 1..39: mol_type = other DNA

SEQ ID NO: 11264 - DNA, 40 bp, synthetic construct; identical to SEQ ID NO: 9908
  source 1..40: mol_type = other DNA

SEQ ID NO: 11265 - DNA, 10 bp, synthetic construct
  source 1..10: mol_type = other DNA
cactcagtgt

SEQ ID NO: 11266 - DNA, 11 bp, synthetic construct
  source 1..11: mol_type = other DNA
ccactcagtgt

SEQ ID NO: 11267 - DNA, 12 bp, synthetic construct
  source 1..12: mol_type = other DNA
tccactcagtgt

SEQ ID NO: 11268 - DNA, 13 bp, synthetic construct
  source 1..13: mol_type = other DNA
ctccactcagtgt

SEQ ID NO: 11269 - DNA, 14 bp, synthetic construct
  source 1..14: mol_type = other DNA
cctccactcagtgt

SEQ ID NO: 11270 - DNA, 15 bp, synthetic construct
  source 1..15: mol_type = other DNA
acctccactcagtgt

SEQ ID NO: 11271 - DNA, 16 bp, synthetic construct
  source 1..16: mol_type = other DNA
gacctccactcagtgt

SEQ ID NO: 11272 - DNA, 17 bp, synthetic construct
  source 1..17: mol_type = other DNA
tgacctccactcagtgt

SEQ ID NO: 11273 - DNA, 18 bp, synthetic construct
  source 1..18: mol_type = other DNA
ttgacctccactcagtgt

SEQ ID NO: 11274 - DNA, 19 bp, synthetic construct
  source 1..19: mol_type = other DNA
gttgacctccactcagtgt

SEQ ID NO: 11275 - DNA, 20 bp, synthetic construct
  source 1..20: mol_type = other DNA
cgttgacctccactcagtgt

SEQ ID NO: 11276 - DNA, 21 bp, synthetic construct
  source 1..21: mol_type = other DNA
tcgttgacctccactcagtgt

SEQ ID NO: 11277 - DNA, 22 bp, synthetic construct
  source 1..22: mol_type = other DNA
ctcgttgacctccactcagtgt

SEQ ID NO: 11278 - DNA, 23 bp, synthetic construct
  source 1..23: mol_type = other DNA
gctcgttgacctccactcagtgt

SEQ ID NO: 11279 - DNA, 24 bp, synthetic construct
  source 1..24: mol_type = other DNA
tgctcgttgacctccactcagtgt

SEQ ID NO: 11280 - DNA, 25 bp, synthetic construct
  source 1..25: mol_type = other DNA
ttgctcgttgacctccactcagtgt

SEQ ID NO: 11281 - DNA, 26 bp, synthetic construct
  source 1..26: mol_type = other DNA
cttgctcgttgacctccactcagtgt

SEQ ID NO: 11282 - DNA, 27 bp, synthetic construct
  source 1..27: mol_type = other DNA
tcttgctcgttgacctccactcagtgt

SEQ ID NO: 11283 - DNA, 28 bp, synthetic construct
  source 1..28: mol_type = other DNA
ttcttgctcgttgacctccactcagtgt

SEQ ID NO: 11284 - DNA, 29 bp, synthetic construct
  source 1..29: mol_type = other DNA
attcttgctcgttgacctccactcagtgt

SEQ ID NO: 11285 - DNA, 30 bp, synthetic construct
  source 1..30: mol_type = other DNA
aattcttgctcgttgacctccactcagtgt

SEQ ID NO: 11286 - DNA, 31 bp, synthetic construct
  source 1..31: mol_type = other DNA
aaattcttgctcgttgacctccactcagtgt

SEQ ID NO: 11287 - DNA, 32 bp, synthetic construct
  source 1..32: mol_type = other DNA
gaaattcttgctcgttgacctccactcagtgt

SEQ ID NO: 11288 - DNA, 33 bp, synthetic construct
  source 1..33: mol_type = other DNA
agaaattcttgctcgttgacctccactcagtgt

SEQ ID NO: 11289 - DNA, 34 bp, synthetic construct
  source 1..34: mol_type = other DNA
aagaaattcttgctcgttgacctccactcagtgt

SEQ ID NO: 11290 - DNA, 35 bp, synthetic construct
  source 1..35: mol_type = other DNA
aaagaaattcttgctcgttgacctccactcagtgt

SEQ ID NO: 11291 - DNA, 36 bp, synthetic construct
  source 1..36: mol_type = other DNA
taaagaaattcttgctcgttgacctccactcagtgt

SEQ ID NO: 11292 - DNA, 37 bp, synthetic construct
  source 1..37: mol_type = other DNA
ctaaagaaattcttgctcgttgacctccactcagtgt

SEQ ID NO: 11293 - DNA, 38 bp, synthetic construct
  source 1..38: mol_type = other DNA
gctaaagaaattcttgctcgttgacctccactcagtgt

SEQ ID NO: 11294 - DNA, 39 bp, synthetic construct
  source 1..39: mol_type = other DNA
tgctaaagaaattcttgctcgttgacctccactcagtgt

SEQ ID NO: 11295 - DNA, 40 bp, synthetic construct
  source 1..40: mol_type = other DNA
ttgctaaagaaattcttgctcgttgacctccactcagtgt

SEQ ID NO: 11296 - DNA, 35 bp, synthetic construct; identical to SEQ ID NO: 9973
  source 1..35: mol_type = other DNA

SEQ ID NO: 11297 - DNA, 35 bp, synthetic construct; identical to SEQ ID NO: 9972
  source 1..35: mol_type = other DNA

SEQ ID NO: 11298 - DNA, 36 bp, synthetic construct; identical to SEQ ID NO: 9975
  source 1..36: mol_type = other DNA

SEQ ID NO: 11299 - DNA, 36 bp, synthetic construct; identical to SEQ ID NO: 9974
  source 1..36: mol_type = other DNA

SEQ ID NO: 11300 - DNA, 37 bp, synthetic construct; identical to SEQ ID NO: 9977
  source 1..37: mol_type = other DNA

SEQ ID NO: 11301 - DNA, 37 bp, synthetic construct; identical to SEQ ID NO: 9976
  source 1..37: mol_type = other DNA

SEQ ID NO: 11302 - DNA, 38 bp, synthetic construct; identical to SEQ ID NO: 9978
  source 1..38: mol_type = other DNA

SEQ ID NO: 11303 - DNA, 38 bp, synthetic construct; identical to SEQ ID NO: 9979
  source 1..38: mol_type = other DNA

SEQ ID NO: 11304 - DNA, 39 bp, synthetic construct; identical to SEQ ID NO: 9980
  source 1..39: mol_type = other DNA

SEQ ID NO: 11305 - DNA, 39 bp, synthetic construct; identical to SEQ ID NO: 9981
  source 1..39: mol_type = other DNA

SEQ ID NO: 11306 - DNA, 40 bp, synthetic construct; identical to SEQ ID NO: 9982
  source 1..40: mol_type = other DNA

SEQ ID NO: 11307 - DNA, 40 bp, synthetic construct; identical to SEQ ID NO: 9983
  source 1..40: mol_type = other DNA

SEQ ID NO: 11308 - DNA, 34 bp, synthetic construct; identical to SEQ ID NO: 10006
  source 1..34: mol_type = other DNA

SEQ ID NO: 11309 - DNA, 35 bp, synthetic construct; identical to SEQ ID NO: 10007
  source 1..35: mol_type = other DNA

SEQ ID NO: 11310 - DNA, 36 bp, synthetic construct; identical to SEQ ID NO: 10008
  source 1..36: mol_type = other DNA

SEQ ID NO: 11311 - DNA, 37 bp, synthetic construct; identical to SEQ ID NO: 10009
  source 1..37: mol_type = other DNA

SEQ ID NO: 11312 - DNA, 38 bp, synthetic construct; identical to SEQ ID NO: 10010
  source 1..38: mol_type = other DNA

SEQ ID NO: 11313 - DNA, 39 bp, synthetic construct; identical to SEQ ID NO: 10011
  source 1..39: mol_type = other DNA

SEQ ID NO: 11314 - DNA, 40 bp, synthetic construct; identical to SEQ ID NO: 10012
  source 1..40: mol_type = other DNA

SEQ ID NO: 11315 - DNA, 27 bp, synthetic construct
  source 1..27: mol_type = other DNA
cactcagtgtgattccaccttctccaa

SEQ ID NO: 11316 - DNA, 27 bp, synthetic construct
  source 1..27: mol_type = other DNA
cactcagtgtgattccaccttcgccaa

SEQ ID NO: 11317 - DNA, 28 bp, synthetic construct
  source 1..28: mol_type = other DNA
ccactcagtgtgattccaccttctccaa

SEQ ID NO: 11318 - DNA, 28 bp, synthetic construct
  source 1..28: mol_type = other DNA
ccactcagtgtgattccaccttcgccaa

SEQ ID NO: 11319 - DNA, 29 bp, synthetic construct
  source 1..29: mol_type = other DNA
tccactcagtgtgattccaccttctccaa

SEQ ID NO: 11320 - DNA, 29 bp, synthetic construct
  source 1..29: mol_type = other DNA
tccactcagtgtgattccaccttcgccaa

SEQ ID NO: 11321 - DNA, 30 bp, synthetic construct; identical to SEQ ID NO: 9482
  source 1..30: mol_type = other DNA

SEQ ID NO: 11322 - DNA, 30 bp, synthetic construct; identical to SEQ ID NO: 9481
  source 1..30: mol_type = other DNA

SEQ ID NO: 11323 - DNA, 31 bp, synthetic construct; identical to SEQ ID NO: 9484
  source 1..31: mol_type = other DNA

SEQ ID NO: 11324 - DNA, 31 bp, synthetic construct; identical to SEQ ID NO: 9483
  source 1..31: mol_type = other DNA

SEQ ID NO: 11325 - DNA, 32 bp, synthetic construct; identical to SEQ ID NO: 9486
  source 1..32: mol_type = other DNA

SEQ ID NO: 11326 - DNA, 32 bp, synthetic construct; identical to SEQ ID NO: 9485
  source 1..32: mol_type = other DNA

SEQ ID NO: 11327 - DNA, 33 bp, synthetic construct; identical to SEQ ID NO: 9487
  source 1..33: mol_type = other DNA

SEQ ID NO: 11328 - DNA, 33 bp, synthetic construct; identical to SEQ ID NO: 9488
  source 1..33: mol_type = other DNA

SEQ ID NO: 11329 - DNA, 34 bp, synthetic construct; identical to SEQ ID NO: 9489
  source 1..34: mol_type = other DNA

SEQ ID NO: 11330 - DNA, 34 bp, synthetic construct; identical to SEQ ID NO: 9490
  source 1..34: mol_type = other DNA

SEQ ID NO: 11331 - DNA, 35 bp, synthetic construct; identical to SEQ ID NO: 9491
  source 1..35: mol_type = other DNA

SEQ ID NO: 11332 - DNA, 35 bp, synthetic construct; identical to SEQ ID NO: 9492
  source 1..35: mol_type = other DNA

SEQ ID NO: 11333 - DNA, 36 bp, synthetic construct; identical to SEQ ID NO: 9493
  source 1..36: mol_type = other DNA

SEQ ID NO: 11334 - DNA, 36 bp, synthetic construct; identical to SEQ ID NO: 9494
  source 1..36: mol_type = other DNA

SEQ ID NO: 11335 - DNA, 37 bp, synthetic construct; identical to SEQ ID NO: 9496
  source 1..37: mol_type = other DNA

SEQ ID NO: 11336 - DNA, 37 bp, synthetic construct; identical to SEQ ID NO: 9495
  source 1..37: mol_type = other DNA

SEQ ID NO: 11337 - DNA, 38 bp, synthetic construct; identical to SEQ ID NO: 9498
  source 1..38: mol_type = other DNA

SEQ ID NO: 11338 - DNA, 38 bp, synthetic construct; identical to SEQ ID NO: 9497
  source 1..38: mol_type = other DNA

SEQ ID NO: 11339 - DNA, 39 bp, synthetic construct; identical to SEQ ID NO: 9499
  source 1..39: mol_type = other DNA

SEQ ID NO: 11340 - DNA, 39 bp, synthetic construct; identical to SEQ ID NO: 9500
  source 1..39: mol_type = other DNA

SEQ ID NO: 11341 - DNA, 40 bp, synthetic construct; identical to SEQ ID NO: 9501
  source 1..40: mol_type = other DNA

SEQ ID NO: 11342 - DNA, 40 bp, synthetic construct; identical to SEQ ID NO: 9502
  source 1..40: mol_type = other DNA

SEQ ID NO: 11343 - DNA, 26 bp, synthetic construct
  source 1..26: mol_type = other DNA
cactcagtgtgattccaccttctcca

SEQ ID NO: 11344 - DNA, 27 bp, synthetic construct
  source 1..27: mol_type = other DNA
ccactcagtgtgattccaccttctcca

SEQ ID NO: 11345 - DNA, 28 bp, synthetic construct
  source 1..28: mol_type = other DNA
tccactcagtgtgattccaccttctcca

SEQ ID NO: 11346 - DNA, 29 bp, synthetic construct
  source 1..29: mol_type = other DNA
ctccactcagtgtgattccaccttctcca

SEQ ID NO: 11347 - DNA, 30 bp, synthetic construct; identical to SEQ ID NO: 9523
  source 1..30: mol_type = other DNA

SEQ ID NO: 11348 - DNA, 31 bp, synthetic construct; identical to SEQ ID NO: 9524
  source 1..31: mol_type = other DNA

SEQ ID NO: 11349 - DNA, 32 bp, synthetic construct; identical to SEQ ID NO: 9525
  source 1..32: mol_type = other DNA

SEQ ID NO: 11350 - DNA, 33 bp, synthetic construct; identical to SEQ ID NO: 9526
  source 1..33: mol_type = other DNA

SEQ ID NO: 11351 - DNA, 34 bp, synthetic construct; identical to SEQ ID NO: 9527
  source 1..34: mol_type = other DNA

SEQ ID NO: 11352 - DNA, 35 bp, synthetic construct; identical to SEQ ID NO: 9528
  source 1..35: mol_type = other DNA

SEQ ID NO: 11353 - DNA, 36 bp, synthetic construct; identical to SEQ ID NO: 9529
  source 1..36: mol_type = other DNA

SEQ ID NO: 11354 - DNA, 37 bp, synthetic construct; identical to SEQ ID NO: 9530
  source 1..37: mol_type = other DNA

SEQ ID NO: 11355 - DNA, 38 bp, synthetic construct; identical to SEQ ID NO: 9531
  source 1..38: mol_type = other DNA

SEQ ID NO: 11356 - DNA, 39 bp, synthetic construct; identical to SEQ ID NO: 9532
  source 1..39: mol_type = other DNA

SEQ ID NO: 11357 - DNA, 40 bp, synthetic construct; identical to SEQ ID NO: 9533
  source 1..40: mol_type = other DNA

SEQ ID NO: 11358 - DNA, 10 bp, synthetic construct
  source 1..10: mol_type = other DNA
acctccactc

SEQ ID NO: 11359 - DNA, 11 bp, synthetic construct
  source 1..11: mol_type = other DNA
gacctccactc

SEQ ID NO: 11360 - DNA, 12 bp, synthetic construct
  source 1..12: mol_type = other DNA
tgacctccactc

SEQ ID NO: 11361 - DNA, 13 bp, synthetic construct
  source 1..13: mol_type = other DNA
ttgacctccactc

SEQ ID NO: 11362 - DNA, 14 bp, synthetic construct
  source 1..14: mol_type = other DNA
gttgacctccactc

SEQ ID NO: 11363 - DNA, 15 bp, synthetic construct
  source 1..15: mol_type = other DNA
cgttgacctccactc

SEQ ID NO: 11364 - DNA, 16 bp, synthetic construct
  source 1..16: mol_type = other DNA
tcgttgacctccactc

SEQ ID NO: 11365 - DNA, 17 bp, synthetic construct
  source 1..17: mol_type = other DNA
ctcgttgacctccactc

SEQ ID NO: 11366 - DNA, 18 bp, synthetic construct
  source 1..18: mol_type = other DNA
gctcgttgacctccactc

SEQ ID NO: 11367 - DNA, 19 bp, synthetic construct
  source 1..19: mol_type = other DNA
tgctcgttgacctccactc

SEQ ID NO: 11368 - DNA, 20 bp, synthetic construct
  source 1..20: mol_type = other DNA
ttgctcgttgacctccactc

SEQ ID NO: 11369 - DNA, 21 bp, synthetic construct
  source 1..21: mol_type = other DNA
cttgctcgttgacctccactc

SEQ ID NO: 11370 - DNA, 22 bp, synthetic construct
  source 1..22: mol_type = other DNA
tcttgctcgttgacctccactc

SEQ ID NO: 11371 - DNA, 23 bp, synthetic construct
  source 1..23: mol_type = other DNA
ttcttgctcgttgacctccactc

SEQ ID NO: 11372 - DNA, 24 bp, synthetic construct
  source 1..24: mol_type = other DNA
attcttgctcgttgacctccactc

SEQ ID NO: 11373 - DNA, 25 bp, synthetic construct
  source 1..25: mol_type = other DNA
aattcttgctcgttgacctccactc

SEQ ID NO: 11374 - DNA, 26 bp, synthetic construct
  source 1..26: mol_type = other DNA
aaattcttgctcgttgacctccactc

SEQ ID NO: 11375 - DNA, 27 bp, synthetic construct
  source 1..27: mol_type = other DNA
gaaattcttgctcgttgacctccactc

SEQ ID NO: 11376 - DNA, 28 bp, synthetic construct
  source 1..28: mol_type = other DNA
agaaattcttgctcgttgacctccactc

SEQ ID NO: 11377 - DNA, 29 bp, synthetic construct
  source 1..29: mol_type = other DNA
aagaaattcttgctcgttgacctccactc

SEQ ID NO: 11378 - DNA, 30 bp, synthetic construct; identical to SEQ ID NO: 10082
  source 1..30: mol_type = other DNA

SEQ ID NO: 11379 - DNA, 31 bp, synthetic construct; identical to SEQ ID NO: 10083
  source 1..31: mol_type = other DNA

SEQ ID NO: 11380 - DNA, 32 bp, synthetic construct; identical to SEQ ID NO: 10084
  source 1..32: mol_type = other DNA

SEQ ID NO: 11381 - DNA, 33 bp, synthetic construct; identical to SEQ ID NO: 10085
  source 1..33: mol_type = other DNA

SEQ ID NO: 11382 - DNA, 34 bp, synthetic construct; identical to SEQ ID NO: 10086
  source 1..34: mol_type = other DNA

SEQ ID NO: 11383 - DNA, 35 bp, synthetic construct; identical to SEQ ID NO: 10087
  source 1..35: mol_type = other DNA

SEQ ID NO: 11384 - DNA, 36 bp, synthetic construct; identical to SEQ ID NO: 10088
  source 1..36: mol_type = other DNA

SEQ ID NO: 11385 - DNA, 37 bp, synthetic construct; identical to SEQ ID NO: 10089
  source 1..37: mol_type = other DNA

SEQ ID NO: 11386 - DNA, 38 bp, synthetic construct; identical to SEQ ID NO: 10090
  source 1..38: mol_type = other DNA

SEQ ID NO: 11387 - DNA, 39 bp, synthetic construct; identical to SEQ ID NO: 10091
  source 1..39: mol_type = other DNA

SEQ ID NO: 11388 - DNA, 40 bp, synthetic construct; identical to SEQ ID NO: 10092
  source 1..40: mol_type = other DNA

SEQ ID NO: 11389 - DNA, 23 bp, synthetic construct
  source 1..23: mol_type = other DNA
cactcagtgtgattccaccttct

SEQ ID NO: 11390 - DNA, 24 bp, synthetic construct
  source 1..24: mol_type = other DNA
ccactcagtgtgattccaccttct

SEQ ID NO: 11391 - DNA, 25 bp, synthetic construct
  source 1..25: mol_type = other DNA
tccactcagtgtgattccaccttct

SEQ ID NO: 11392 - DNA, 26 bp, synthetic construct
  source 1..26: mol_type = other DNA
ctccactcagtgtgattccaccttct

SEQ ID NO: 11393 - DNA, 27 bp, synthetic construct
  source 1..27: mol_type = other DNA
cctccactcagtgtgattccaccttct

SEQ ID NO: 11394 - DNA, 28 bp, synthetic construct
  source 1..28: mol_type = other DNA
acctccactcagtgtgattccaccttct

SEQ ID NO: 11395 - DNA, 29 bp, synthetic construct
  source 1..29: mol_type = other DNA
gacctccactcagtgtgattccaccttct

SEQ ID NO: 11396 - DNA, 30 bp, synthetic construct; identical to SEQ ID NO: 10102
  source 1..30: mol_type = other DNA

SEQ ID NO: 11397 - DNA, 31 bp, synthetic construct; identical to SEQ ID NO: 10103
  source 1..31: mol_type = other DNA

SEQ ID NO: 11398 - DNA, 32 bp, synthetic construct; identical to SEQ ID NO: 10104
  source 1..32: mol_type = other DNA

SEQ ID NO: 11399 - DNA, 33 bp, synthetic construct; identical to SEQ ID NO: 10105
  source 1..33: mol_type = other DNA

SEQ ID NO: 11400 - DNA, 34 bp, synthetic construct; identical to SEQ ID NO: 10106
  source 1..34: mol_type = other DNA

SEQ ID NO: 11401 - DNA, 35 bp, synthetic construct; identical to SEQ ID NO: 10107
  source 1..35: mol_type = other DNA

SEQ ID NO: 11402 - DNA, 36 bp, synthetic construct; identical to SEQ ID NO: 10108
  source 1..36: mol_type = other DNA

SEQ ID NO: 11403 - DNA, 37 bp, synthetic construct; identical to SEQ ID NO: 10109
  source 1..37: mol_type = other DNA

SEQ ID NO: 11404 - DNA, 38 bp, synthetic construct; identical to SEQ ID NO: 10110
  source 1..38: mol_type = other DNA

SEQ ID NO: 11405 - DNA, 39 bp, synthetic construct; identical to SEQ ID NO: 10111
  source 1..39: mol_type = other DNA

SEQ ID NO: 11406 - DNA, 40 bp, synthetic construct; identical to SEQ ID NO: 10112
  source 1..40: mol_type = other DNA

SEQ ID NO: 11407 - DNA, 22 bp, synthetic construct
  source 1..22: mol_type = other DNA
cactcagtgtgattccaccttc

SEQ ID NO: 11408 - DNA, 23 bp, synthetic construct
  source 1..23: mol_type = other DNA
ccactcagtgtgattccaccttc

SEQ ID NO: 11409 - DNA, 24 bp, synthetic construct
  source 1..24: mol_type = other DNA
tccactcagtgtgattccaccttc

SEQ ID NO: 11410 - DNA, 25 bp, synthetic construct
  source 1..25: mol_type = other DNA
ctccactcagtgtgattccaccttc

SEQ ID NO: 11411 - DNA, 26 bp, synthetic construct
  source 1..26: mol_type = other DNA
cctccactcagtgtgattccaccttc

SEQ ID NO: 11412 - DNA, 27 bp, synthetic construct
  source 1..27: mol_type = other DNA
acctccactcagtgtgattccaccttc

SEQ ID NO: 11413 - DNA, 28 bp, synthetic construct
  source 1..28: mol_type = other DNA
gacctccactcagtgtgattccaccttc

SEQ ID NO: 11414 - DNA, 29 bp, synthetic construct
  source 1..29: mol_type = other DNA
tgacctccactcagtgtgattccaccttc

SEQ ID NO: 11415 - DNA, 30 bp, synthetic construct; identical to SEQ ID NO: 10123
  source 1..30: mol_type = other DNA

SEQ ID NO: 11416 - DNA, 31 bp, synthetic construct; identical to SEQ ID NO: 10124
  source 1..31: mol_type = other DNA

SEQ ID NO: 11417 - DNA, 32 bp, synthetic construct; identical to SEQ ID NO: 10125
  source 1..32: mol_type = other DNA

SEQ ID NO: 11418 - DNA, 33 bp, synthetic construct; identical to SEQ ID NO: 10126
  source 1..33: mol_type = other DNA

SEQ ID NO: 11419 - DNA, 34 bp, synthetic construct; identical to SEQ ID NO: 10127
  source 1..34: mol_type = other DNA

SEQ ID NO: 11420 - DNA, 35 bp, synthetic construct; identical to SEQ ID NO: 10128
  source 1..35: mol_type = other DNA

SEQ ID NO: 11421 - DNA, 36 bp, synthetic construct; identical to SEQ ID NO: 10129
  source 1..36: mol_type = other DNA

SEQ ID NO: 11422 - DNA, 37 bp, synthetic construct; identical to SEQ ID NO: 10130
  source 1..37: mol_type = other DNA

SEQ ID NO: 11423 - DNA, 38 bp, synthetic construct; identical to SEQ ID NO: 10131
  source 1..38: mol_type = other DNA

SEQ ID NO: 11424 - DNA, 39 bp, synthetic construct; identical to SEQ ID NO: 10132
  source 1..39: mol_type = other DNA

SEQ ID NO: 11425 - DNA, 40 bp, synthetic construct; identical to SEQ ID NO: 10133
  source 1..40: mol_type = other DNA

SEQ ID NO: 11426 - DNA, 29 bp, synthetic construct
  source 1..29: mol_type = other DNA
cactcagtgtgattccaccttctccaaga

SEQ ID NO: 11427 - DNA, 30 bp, synthetic construct; identical to SEQ ID NO: 10137
  source 1..30: mol_type = other DNA

SEQ ID NO: 11428 - DNA, 31 bp, synthetic construct; identical to SEQ ID NO: 10138
  source 1..31: mol_type = other DNA

SEQ ID NO: 11429 - DNA, 32 bp, synthetic construct; identical to SEQ ID NO: 10139
  source 1..32: mol_type = other DNA

SEQ ID NO: 11430 - DNA, 33 bp, synthetic construct; identical to SEQ ID NO: 10140
  source 1..33: mol_type = other DNA

SEQ ID NO: 11431 - DNA, 34 bp, synthetic construct; identical to SEQ ID NO: 10141
  source 1..34: mol_type = other DNA

SEQ ID NO: 11432 - DNA, 35 bp, synthetic construct; identical to SEQ ID NO: 10142
  source 1..35: mol_type = other DNA

SEQ ID NO: 11433 - DNA, 36 bp, synthetic construct; identical to SEQ ID NO: 10143
  source 1..36: mol_type = other DNA

SEQ ID NO: 11434 - DNA, 37 bp, synthetic construct; identical to SEQ ID NO: 10144
  source 1..37: mol_type = other DNA

SEQ ID NO: 11435 - DNA, 38 bp, synthetic construct; identical to SEQ ID NO: 10145
  source 1..38: mol_type = other DNA

SEQ ID NO: 11436 - DNA, 39 bp, synthetic construct; identical to SEQ ID NO: 10146
  source 1..39: mol_type = other DNA

SEQ ID NO: 11437 - DNA, 40 bp, synthetic construct; identical to SEQ ID NO: 10147
  source 1..40: mol_type = other DNA

SEQ ID NO: 11438 - DNA, 10 bp, synthetic construct
  source 1..10: mol_type = other DNA
ctccactcag

SEQ ID NO: 11439 - DNA, 11 bp, synthetic construct
  source 1..11: mol_type = other DNA
cctccactcag

SEQ ID NO: 11440 - DNA, 12 bp, synthetic construct
  source 1..12: mol_type = other DNA
acctccactcag

SEQ ID NO: 11441 - DNA, 13 bp, synthetic construct
  source 1..13: mol_type = other DNA
gacctccactcag

SEQ ID NO: 11442 - DNA, 14 bp, synthetic construct
  source 1..14: mol_type = other DNA
tgacctccactcag

SEQ ID NO: 11443 - DNA, 15 bp, synthetic construct
  source 1..15: mol_type = other DNA
ttgacctccactcag

SEQ ID NO: 11444 - DNA, 16 bp, synthetic construct
  source 1..16: mol_type = other DNA
gttgacctccactcag

SEQ ID NO: 11445 - DNA, 17 bp, synthetic construct
  source 1..17: mol_type = other DNA
cgttgacctccactcag

SEQ ID NO: 11446 - DNA, 18 bp, synthetic construct
  source 1..18: mol_type = other DNA
tcgttgacctccactcag

SEQ ID NO: 11447 - DNA, 19 bp, synthetic construct
  source 1..19: mol_type = other DNA
ctcgttgacctccactcag

SEQ ID NO: 11448 - DNA, 20 bp, synthetic construct
  source 1..20: mol_type = other DNA
gctcgttgacctccactcag

SEQ ID NO: 11449 - DNA, 21 bp, synthetic construct
  source 1..21: mol_type = other DNA
tgctcgttgacctccactcag

SEQ ID NO: 11450 - DNA, 22 bp, synthetic construct
  source 1..22: mol_type = other DNA
ttgctcgttgacctccactcag

SEQ ID NO: 11451 - DNA, 23 bp, synthetic construct
  source 1..23: mol_type = other DNA
cttgctcgttgacctccactcag

SEQ ID NO: 11452 - DNA, 24 bp, synthetic construct
  source 1..24: mol_type = other DNA
tcttgctcgttgacctccactcag

SEQ ID NO: 11453 - DNA, 25 bp, synthetic construct
  source 1..25: mol_type = other DNA
ttcttgctcgttgacctccactcag

SEQ ID NO: 11454 - DNA, 26 bp, synthetic construct
  source 1..26: mol_type = other DNA
attcttgctcgttgacctccactcag

SEQ ID NO: 11455 - DNA, 27 bp, synthetic construct
  source 1..27: mol_type = other DNA
aattcttgctcgttgacctccactcag

SEQ ID NO: 11456 - DNA, 28 bp, synthetic construct
  source 1..28: mol_type = other DNA
aaattcttgctcgttgacctccactcag

SEQ ID NO: 11457 - DNA, 29 bp, synthetic construct
  source 1..29: mol_type = other DNA
gaaattcttgctcgttgacctccactcag

SEQ ID NO: 11458 - DNA, 30 bp, synthetic construct; identical to SEQ ID NO: 10364
  source 1..30: mol_type = other DNA

SEQ ID NO: 11459 - DNA, 31 bp, synthetic construct; identical to SEQ ID NO: 10365
  source 1..31: mol_type = other DNA

SEQ ID NO: 11460 - DNA, 32 bp, synthetic construct; identical to SEQ ID NO: 10366
  source 1..32: mol_type = other DNA

SEQ ID NO: 11461 - DNA, 33 bp, synthetic construct; identical to SEQ ID NO: 10367
  source 1..33: mol_type = other DNA

SEQ ID NO: 11462 - DNA, 34 bp, synthetic construct; identical to SEQ ID NO: 10368
  source 1..34: mol_type = other DNA

SEQ ID NO: 11463 - DNA, 35 bp, synthetic construct; identical to SEQ ID NO: 10369
  source 1..35: mol_type = other DNA

SEQ ID NO: 11464 - DNA, 36 bp, synthetic construct; identical to SEQ ID NO: 10370
  source 1..36: mol_type = other DNA

SEQ ID NO: 11465 - DNA, 37 bp, synthetic construct; identical to SEQ ID NO: 10371
  source 1..37: mol_type = other DNA

SEQ ID NO: 11466 - DNA, 38 bp, synthetic construct; identical to SEQ ID NO: 10372
  source 1..38: mol_type = other DNA

SEQ ID NO: 11467 - DNA, 39 bp, synthetic construct; identical to SEQ ID NO: 10373
  source 1..39: mol_type = other DNA

SEQ ID NO: 11468 - DNA, 40 bp, synthetic construct; identical to SEQ ID NO: 10374
  source 1..40: mol_type = other DNA

SEQ ID NO: 11469 - DNA, 30 bp, synthetic construct; identical to SEQ ID NO: 10181
  source 1..30: mol_type = other DNA

SEQ ID NO: 11470 - DNA, 31 bp, synthetic construct; identical to SEQ ID NO: 10182
  source 1..31: mol_type = other DNA

SEQ ID NO: 11471 - DNA, 32 bp, synthetic construct; identical to SEQ ID NO: 10183
  source 1..32: mol_type = other DNA

SEQ ID NO: 11472 - DNA, 33 bp, synthetic construct; identical to SEQ ID NO: 10184
  source 1..33: mol_type = other DNA

SEQ ID NO: 11473 - DNA, 34 bp, synthetic construct; identical to SEQ ID NO: 10185
  source 1..34: mol_type = other DNA

SEQ ID NO: 11474 - DNA, 35 bp, synthetic construct; identical to SEQ ID NO: 10186
  source 1..35: mol_type = other DNA

SEQ ID NO: 11475 - DNA, 36 bp, synthetic construct; identical to SEQ ID NO: 10187
  source 1..36: mol_type = other DNA

SEQ ID NO: 11476 - DNA, 37 bp, synthetic construct; identical to SEQ ID NO: 10188
  source 1..37: mol_type = other DNA

SEQ ID NO: 11477 - DNA, 38 bp, synthetic construct; identical to SEQ ID NO: 10189
  source 1..38: mol_type = other DNA

SEQ ID NO: 11478 - DNA, 39 bp, synthetic construct; identical to SEQ ID NO: 10190
  source 1..39: mol_type = other DNA

SEQ ID NO: 11479 - DNA, 40 bp, synthetic construct; identical to SEQ ID NO: 10191
  source 1..40: mol_type = other DNA

SEQ ID NO: 11480 - DNA, 10 bp, synthetic construct
  source 1..10: mol_type = other DNA
gacctccact

SEQ ID NO: 11481 - DNA, 11 bp, synthetic construct
  source 1..11: mol_type = other DNA
tgacctccact

SEQ ID NO: 11482 - DNA, 12 bp, synthetic construct
  source 1..12: mol_type = other DNA
ttgacctccact

SEQ ID NO: 11483 - DNA, 13 bp, synthetic construct
  source 1..13: mol_type = other DNA
gttgacctccact

SEQ ID NO: 11484 - DNA, 14 bp, synthetic construct
  source 1..14: mol_type = other DNA
cgttgacctccact

SEQ ID NO: 11485 - DNA, 15 bp, synthetic construct
  source 1..15: mol_type = other DNA
tcgttgacctccact

SEQ ID NO: 11486 - DNA, 16 bp, synthetic construct
  source 1..16: mol_type = other DNA
ctcgttgacctccact

SEQ ID NO: 11487 - DNA, 17 bp, synthetic construct
  source 1..17: mol_type = other DNA
gctcgttgacctccact

SEQ ID NO: 11488 - DNA, 18 bp, synthetic construct
  source 1..18: mol_type = other DNA
tgctcgttgacctccact

SEQ ID NO: 11489 - DNA, 19 bp, synthetic construct
  source 1..19: mol_type = other DNA
ttgctcgttgacctccact

SEQ ID NO: 11490 - DNA, 20 bp, synthetic construct
  source 1..20: mol_type = other DNA
cttgctcgttgacctccact

SEQ ID NO: 11491 - DNA, 21 bp, synthetic construct
  source 1..21: mol_type = other DNA
tcttgctcgttgacctccact

SEQ ID NO: 11492 - DNA, 22 bp, synthetic construct
  source 1..22: mol_type = other DNA
ttcttgctcgttgacctccact

SEQ ID NO: 11493 - DNA, 23 bp, synthetic construct
  source 1..23: mol_type = other DNA
attcttgctcgttgacctccact

SEQ ID NO: 11494 - DNA, 24 bp, synthetic construct
  source 1..24: mol_type = other DNA
aattcttgctcgttgacctccact

SEQ ID NO: 11495 - DNA, 25 bp, synthetic construct
  source 1..25: mol_type = other DNA
aaattcttgctcgttgacctccact

SEQ ID NO: 11496 - DNA, 26 bp, synthetic construct
  source 1..26: mol_type = other DNA
gaaattcttgctcgttgacctccact

SEQ ID NO: 11497 - DNA, 27 bp, synthetic construct
  source 1..27: mol_type = other DNA
agaaattcttgctcgttgacctccact

SEQ ID NO: 11498 - DNA, 28 bp, synthetic construct
  source 1..28: mol_type = other DNA
aagaaattcttgctcgttgacctccact

SEQ ID NO: 11499 - DNA, 29 bp, synthetic construct
  source 1..29: mol_type = other DNA
aaagaaattcttgctcgttgacctccact

SEQ ID NO: 11500 - DNA, 30 bp, synthetic construct; identical to SEQ ID NO: 10212
  source 1..30: mol_type = other DNA

SEQ ID NO: 11501 - DNA, 31 bp, synthetic construct; identical to SEQ ID NO: 10213
  source 1..31: mol_type = other DNA

SEQ ID NO: 11502 - DNA, 32 bp, synthetic construct; identical to SEQ ID NO: 10214
  source 1..32: mol_type = other DNA

SEQ ID NO: 11503 - DNA, 33 bp, synthetic construct; identical to SEQ ID NO: 10215
  source 1..33: mol_type = other DNA

SEQ ID NO: 11504 - DNA, 34 bp, synthetic construct; identical to SEQ ID NO: 10216
  source 1..34: mol_type = other DNA

SEQ ID NO: 11505 - DNA, 35 bp, synthetic construct; identical to SEQ ID NO: 10217
  source 1..35: mol_type = other DNA

SEQ ID NO: 11506 - DNA, 36 bp, synthetic construct; identical to SEQ ID NO: 10218
  source 1..36: mol_type = other DNA

SEQ ID NO: 11507 - DNA, 37 bp, synthetic construct; identical to SEQ ID NO: 10219
  source 1..37: mol_type = other DNA

SEQ ID NO: 11508 - DNA, 38 bp, synthetic construct; identical to SEQ ID NO: 10220
  source 1..38: mol_type = other DNA

SEQ ID NO: 11509 - DNA, 39 bp, synthetic construct; identical to SEQ ID NO: 10221
  source 1..39: mol_type = other DNA

SEQ ID NO: 11510 - DNA, 40 bp, synthetic construct; identical to SEQ ID NO: 10222
  source 1..40: mol_type = other DNA

SEQ ID NO: 11511 - DNA, 20 bp, synthetic construct
  source 1..20: mol_type = other DNA
cactcagtgtgattccacct

SEQ ID NO: 11512 - DNA, 21 bp, synthetic construct
  source 1..21: mol_type = other DNA
ccactcagtgtgattccacct

SEQ ID NO: 11513 - DNA, 22 bp, synthetic construct
  source 1..22: mol_type = other DNA
tccactcagtgtgattccacct

SEQ ID NO: 11514 - DNA, 23 bp, synthetic construct
  source 1..23: mol_type = other DNA
ctccactcagtgtgattccacct

SEQ ID NO: 11515 - DNA, 24 bp, synthetic construct
  source 1..24: mol_type = other DNA
cctccactcagtgtgattccacct

SEQ ID NO: 11516 - DNA, 25 bp, synthetic construct
  source 1..25: mol_type = other DNA
acctccactcagtgtgattccacct

SEQ ID NO: 11517 - DNA, 26 bp, synthetic construct
  source 1..26: mol_type = other DNA
gacctccactcagtgtgattccacct

SEQ ID NO: 11518 - DNA, 27 bp, synthetic construct
  source 1..27: mol_type = other DNA
tgacctccactcagtgtgattccacct

SEQ ID NO: 11519 - DNA, 28 bp, synthetic construct
  source 1..28: mol_type = other DNA
ttgacctccactcagtgtgattccacct

SEQ ID NO: 11520 - DNA, 29 bp, synthetic construct
  source 1..29: mol_type = other DNA
gttgacctccactcagtgtgattccacct

SEQ ID NO: 11521 - DNA, 30 bp, synthetic construct; identical to SEQ ID NO: 10235
  source 1..30: mol_type = other DNA

SEQ ID NO: 11522 - DNA, 31 bp, synthetic construct; identical to SEQ ID NO: 10236
  source 1..31: mol_type = other DNA

SEQ ID NO: 11523 - DNA, 32 bp, synthetic construct; identical to SEQ ID NO: 10237
  source 1..32: mol_type = other DNA

SEQ ID NO: 11524 - DNA, 33 bp, synthetic construct; identical to SEQ ID NO: 10238
  source 1..33: mol_type = other DNA

SEQ ID NO: 11525 - DNA, 34 bp, synthetic construct; identical to SEQ ID NO: 10239
  source 1..34: mol_type = other DNA

SEQ ID NO: 11526 - DNA, 35 bp, synthetic construct; identical to SEQ ID NO: 10240
  source 1..35: mol_type = other DNA

SEQ ID NO: 11527 - DNA, 36 bp, synthetic construct; identical to SEQ ID NO: 10241
  source 1..36: mol_type = other DNA

SEQ ID NO: 11528 - DNA, 37 bp, synthetic construct; identical to SEQ ID NO: 10242
  source 1..37: mol_type = other DNA

SEQ ID NO: 11529 - DNA, 38 bp, synthetic construct; identical to SEQ ID NO: 10243
  source 1..38: mol_type = other DNA

SEQ ID NO: 11530 - DNA, 39 bp, synthetic construct; identical to SEQ ID NO: 10244
  source 1..39: mol_type = other DNA

SEQ ID NO: 11531 - DNA, 40 bp, synthetic construct; identical to SEQ ID NO: 10245
  source 1..40: mol_type = other DNA

SEQ ID NO: 11532 - DNA, 35 bp, synthetic construct
  source 1..35: mol_type = other DNA
gtggaggtcaacgagcaagaatttctttagcaagg

SEQ ID NO: 11533 - DNA, 36 bp, synthetic construct; identical to SEQ ID NO: 10878
  source 1..36: mol_type = other DNA

SEQ ID NO: 11534 - DNA, 37 bp, synthetic construct; identical to SEQ ID NO: 10246
  source 1..37: mol_type = other DNA

SEQ ID NO: 11535 - DNA, 38 bp, synthetic construct; identical to SEQ ID NO: 10247
  source 1..38: mol_type = other DNA

SEQ ID NO: 11536 - DNA, 39 bp, synthetic construct; identical to SEQ ID NO: 10248
  source 1..39: mol_type = other DNA

SEQ ID NO: 11537 - DNA, 40 bp, synthetic construct; identical to SEQ ID NO: 10249
  source 1..40: mol_type = other DNA

SEQ ID NO: 11538 - DNA, 21 bp, synthetic construct
  source 1..21: mol_type = other DNA
cactcagtgtgattccacctt

SEQ ID NO: 11539 - DNA, 22 bp, synthetic construct
  source 1..22: mol_type = other DNA
ccactcagtgtgattccacctt

SEQ ID NO: 11540 - DNA, 23 bp, synthetic construct
  source 1..23: mol_type = other DNA
tccactcagtgtgattccacctt

SEQ ID NO: 11541 - DNA, 24 bp, synthetic construct
  source 1..24: mol_type = other DNA
ctccactcagtgtgattccacctt

SEQ ID NO: 11542 - DNA, 25 bp, synthetic construct
  source 1..25: mol_type = other DNA
cctccactcagtgtgattccacctt

SEQ ID NO: 11543 - DNA, 26 bp, synthetic construct
  source 1..26: mol_type = other DNA
acctccactcagtgtgattccacctt

SEQ ID NO: 11544 - DNA, 27 bp, synthetic construct
  source 1..27: mol_type = other DNA
gacctccactcagtgtgattccacctt

SEQ ID NO: 11545 - DNA, 28 bp, synthetic construct
  source 1..28: mol_type = other DNA
tgacctccactcagtgtgattccacctt

SEQ ID NO: 11546 - DNA, 29 bp, synthetic construct
  source 1..29: mol_type = other DNA
ttgacctccactcagtgtgattccacctt

SEQ ID NO: 11547 - DNA, 30 bp, synthetic construct; identical to SEQ ID NO: 10261
  source 1..30: mol_type = other DNA

SEQ ID NO: 11548 - DNA, 31 bp, synthetic construct; identical to SEQ ID NO: 10262
  source 1..31: mol_type = other DNA

SEQ ID NO: 11549 - DNA, 32 bp, synthetic construct; identical to SEQ ID NO: 10263
  source 1..32: mol_type = other DNA

SEQ ID NO: 11550 - DNA, 33 bp, synthetic construct; identical to SEQ ID NO: 10264
  source 1..33: mol_type = other DNA

SEQ ID NO: 11551 - DNA, 34 bp, synthetic construct; identical to SEQ ID NO: 10265
  source 1..34: mol_type = other DNA

SEQ ID NO: 11552 - DNA, 35 bp, synthetic construct; identical to SEQ ID NO: 10266
  source 1..35: mol_type = other DNA

SEQ ID NO: 11553 - DNA, 36 bp, synthetic construct; identical to SEQ ID NO: 10267
  source 1..36: mol_type = other DNA

SEQ ID NO: 11554 - DNA, 37 bp, synthetic construct; identical to SEQ ID NO: 10268
  source 1..37: mol_type = other DNA

SEQ ID NO: 11555 - DNA, 38 bp, synthetic construct; identical to SEQ ID NO: 10269
  source 1..38: mol_type = other DNA

SEQ ID NO: 11556 - DNA, 39 bp, synthetic construct; identical to SEQ ID NO: 10270
  source 1..39: mol_type = other DNA

SEQ ID NO: 11557 - DNA, 40 bp, synthetic construct; identical to SEQ ID NO: 10271
  source 1..40: mol_type = other DNA

SEQ ID NO: 11558 - DNA, 20 bp, synthetic construct
  source 1..20: mol_type = other DNA
gtggaggtcaacgagcaaga

SEQ ID NO: 11559 - DNA, 21 bp, synthetic construct
  source 1..21: mol_type = other DNA
agtggaggtcaacgagcaaga

SEQ ID NO: 11560 - DNA, 22 bp, synthetic construct
  source 1..22: mol_type = other DNA
gagtggaggtcaacgagcaaga

SEQ ID NO: 11561 - DNA, 23 bp, synthetic construct
  source 1..23: mol_type = other DNA
tgagtggaggtcaacgagcaaga

SEQ ID NO: 11562 - DNA, 24 bp, synthetic construct
  source 1..24: mol_type = other DNA
ctgagtggaggtcaacgagcaaga

SEQ ID NO: 11563 - DNA, 25 bp, synthetic construct
  source 1..25: mol_type = other DNA
actgagtggaggtcaacgagcaaga

SEQ ID NO: 11564 - DNA, 26 bp, synthetic construct
  source 1..26: mol_type = other DNA
cactgagtggaggtcaacgagcaaga

SEQ ID NO: 11565 - DNA, 27 bp, synthetic construct
  source 1..27: mol_type = other DNA
acactgagtggaggtcaacgagcaaga

SEQ ID NO: 11566 - DNA, 28 bp, synthetic construct
  source 1..28: mol_type = other DNA
cacactgagtggaggtcaacgagcaaga

SEQ ID NO: 11567 - DNA, 29 bp, synthetic construct
  source 1..29: mol_type = other DNA
tcacactgagtggaggtcaacgagcaaga

SEQ ID NO: 11568 - DNA, 30 bp, synthetic construct; identical to SEQ ID NO: 10280
  source 1..30: mol_type = other DNA

SEQ ID NO: 11569 - DNA, 31 bp, synthetic construct; identical to SEQ ID NO: 10281
  source 1..31: mol_type = other DNA

SEQ ID NO: 11570 - DNA, 32 bp, synthetic construct; identical to SEQ ID NO: 10282
  source 1..32: mol_type = other DNA

SEQ ID NO: 11571 - DNA, 33 bp, synthetic construct; identical to SEQ ID NO: 10283
  source 1..33: mol_type = other DNA

SEQ ID NO: 11572 - DNA, 34 bp, synthetic construct; identical to SEQ ID NO: 10284
  source 1..34: mol_type = other DNA

SEQ ID NO: 11573 - DNA, 35 bp, synthetic construct; identical to SEQ ID NO: 10285
  source 1..35: mol_type = other DNA

SEQ ID NO: 11574 - DNA, 36 bp, synthetic construct; identical to SEQ ID NO: 10286
  source 1..36: mol_type = other DNA

SEQ ID NO: 11575 - DNA, 37 bp, synthetic construct; identical to SEQ ID NO: 10287
  source 1..37: mol_type = other DNA

SEQ ID NO: 11576 - DNA, 38 bp, synthetic construct; identical to SEQ ID NO: 10288
  source 1..38: mol_type = other DNA

SEQ ID NO: 11577 - DNA, 39 bp, synthetic construct; identical to SEQ ID NO: 10289
  source 1..39: mol_type = other DNA

SEQ ID NO: 11578 - DNA, 40 bp, synthetic construct; identical to SEQ ID NO: 10290
  source 1..40: mol_type = other DNA

SEQ ID NO: 11579 - DNA, 28 bp, synthetic construct
  source 1..28: mol_type = other DNA
cactcagtgtgattccaccttctccaag

SEQ ID NO: 11580 - DNA, 29 bp, synthetic construct
  source 1..29: mol_type = other DNA
ccactcagtgtgattccaccttctccaag

SEQ ID NO: 11581 - DNA, 30 bp, synthetic construct; identical to SEQ ID NO: 9627
  source 1..30: mol_type = other DNA

SEQ ID NO: 11582 - DNA, 31 bp, synthetic construct; identical to SEQ ID NO: 9628
  source 1..31: mol_type = other DNA

SEQ ID NO: 11583 - DNA, 32 bp, synthetic construct; identical to SEQ ID NO: 9629
  source 1..32: mol_type = other DNA

SEQ ID NO: 11584 - DNA, 33 bp, synthetic construct; identical to SEQ ID NO: 9630
  source 1..33: mol_type = other DNA

SEQ ID NO: 11585 - DNA, 34 bp, synthetic construct; identical to SEQ ID NO: 9631
  source 1..34: mol_type = other DNA

SEQ ID NO: 11586 - DNA, 35 bp, synthetic construct; identical to SEQ ID NO: 9632
  source 1..35: mol_type = other DNA

SEQ ID NO: 11587 - DNA, 36 bp, synthetic construct; identical to SEQ ID NO: 9633
  source 1..36: mol_type = other DNA

SEQ ID NO: 11588 - DNA, 37 bp, synthetic construct; identical to SEQ ID NO: 9634
  source 1..37: mol_type = other DNA

SEQ ID NO: 11589 - DNA, 38 bp, synthetic construct; identical to SEQ ID NO: 9635
  source 1..38: mol_type = other DNA

SEQ ID NO: 11590 - DNA, 39 bp, synthetic construct; identical to SEQ ID NO: 9636
  source 1..39: mol_type = other DNA

SEQ ID NO: 11591 - DNA, 40 bp, synthetic construct; identical to SEQ ID NO: 9637
  source 1..40: mol_type = other DNA

SEQ ID NO: 11592 - DNA, 10 bp, synthetic construct
  source 1..10: mol_type = other DNA
cctccactca

SEQ ID NO: 11593 - DNA, 11 bp, synthetic construct
  source 1..11: mol_type = other DNA
acctccactca

SEQ ID NO: 11594 - DNA, 12 bp, synthetic construct
  source 1..12: mol_type = other DNA
gacctccactca

SEQ ID NO: 11595 - DNA, 13 bp, synthetic construct
  source 1..13: mol_type = other DNA
tgacctccactca

SEQ ID NO: 11596 - DNA, 14 bp, synthetic construct
  source 1..14: mol_type = other DNA
ttgacctccactca

SEQ ID NO: 11597 - DNA, 15 bp, synthetic construct
  source 1..15: mol_type = other DNA
gttgacctccactca

SEQ ID NO: 11598 - DNA, 16 bp, synthetic construct
  source 1..16: mol_type = other DNA
cgttgacctccactca

SEQ ID NO: 11599 - DNA, 17 bp, synthetic construct
  source 1..17: mol_type = other DNA
tcgttgacctccactca

SEQ ID NO: 11600 - DNA, 18 bp, synthetic construct
  source 1..18: mol_type = other DNA
ctcgttgacctccactca

SEQ ID NO: 11601 - DNA, 19 bp, synthetic construct
  source 1..19: mol_type = other DNA
gctcgttgacctccactca

SEQ ID NO: 11602 - DNA, 20 bp, synthetic construct
  source 1..20: mol_type = other DNA
tgctcgttgacctccactca

SEQ ID NO: 11603 - DNA, 21 bp, synthetic construct
  source 1..21: mol_type = other DNA
ttgctcgttgacctccactca

SEQ ID NO: 11604 - DNA, 22 bp, synthetic construct
  source 1..22: mol_type = other DNA
cttgctcgttgacctccactca

SEQ ID NO: 11605 - DNA, 23 bp, synthetic construct
  source 1..23: mol_type = other DNA
tcttgctcgttgacctccactca

SEQ ID NO: 11606 - DNA, 24 bp, synthetic construct
  source 1..24: mol_type = other DNA
ttcttgctcgttgacctccactca

SEQ ID NO: 11607 - DNA, 25 bp, synthetic construct
  source 1..25: mol_type = other DNA
attcttgctcgttgacctccactca

SEQ ID NO: 11608 - DNA, 26 bp, synthetic construct
  source 1..26: mol_type = other DNA
aattcttgctcgttgacctccactca

SEQ ID NO: 11609 - DNA, 27 bp, synthetic construct
  source 1..27: mol_type = other DNA
aaattcttgctcgttgacctccactca

SEQ ID NO: 11610 - DNA, 28 bp, synthetic construct
  source 1..28: mol_type = other DNA
gaaattcttgctcgttgacctccactca

SEQ ID NO: 11611 - DNA, 29 bp, synthetic construct
  source 1..29: mol_type = other DNA
agaaattcttgctcgttgacctccactca

SEQ ID NO: 11612 - DNA, 30 bp, synthetic construct; identical to SEQ ID NO: 10168
  source 1..30: mol_type = other DNA

SEQ ID NO: 11613 - DNA, 31 bp, synthetic construct; identical to SEQ ID NO: 10169
  source 1..31: mol_type = other DNA

SEQ ID NO: 11614 - DNA, 32 bp, synthetic construct; identical to SEQ ID NO: 10170
  source 1..32: mol_type = other DNA

SEQ ID NO: 11615 - DNA, 33 bp, synthetic construct; identical to SEQ ID NO: 10171
  source 1..33: mol_type = other DNA

SEQ ID NO: 11616 - DNA, 34 bp, synthetic construct; identical to SEQ ID NO: 10172
  source 1..34: mol_type = other DNA

SEQ ID NO: 11617 - DNA, 35 bp, synthetic construct; identical to SEQ ID NO: 10173
  source 1..35: mol_type = other DNA

SEQ ID NO: 11618 - DNA, 36 bp, synthetic construct; identical to SEQ ID NO: 10174
  source 1..36: mol_type = other DNA

SEQ ID NO: 11619 - DNA, 37 bp, synthetic construct; identical to SEQ ID NO: 10175
  source 1..37: mol_type = other DNA

SEQ ID NO: 11620 - DNA, 38 bp, synthetic construct; identical to SEQ ID NO: 10176
  source 1..38: mol_type = other DNA

SEQ ID NO: 11621 - DNA, 39 bp, synthetic construct; identical to SEQ ID NO: 10177
  source 1..39: mol_type = other DNA

SEQ ID NO: 11622 - DNA, 40 bp, synthetic construct; identical to SEQ ID NO: 10178
  source 1..40: mol_type = other DNA

SEQ ID NO: 11623 - DNA, 24 bp, synthetic construct
  source 1..24: mol_type = other DNA
cactcagtgtgattccaccctctc

SEQ ID NO: 11624 - DNA, 24 bp, synthetic construct
  source 1..24: mol_type = other DNA
cactcagtgtgattccaccttctc

SEQ ID NO: 11625 - DNA, 25 bp, synthetic construct
  source 1..25: mol_type = other DNA
ccactcagtgtgattccaccctctc

SEQ ID NO: 11626 - DNA, 25 bp, synthetic construct
  source 1..25: mol_type = other DNA
ccactcagtgtgattccaccttctc

SEQ ID NO: 11627 - DNA, 26 bp, synthetic construct
  source 1..26: mol_type = other DNA
tccactcagtgtgattccaccttctc

SEQ ID NO: 11628 - DNA, 26 bp, synthetic construct
  source 1..26: mol_type = other DNA
tccactcagtgtgattccaccctctc

SEQ ID NO: 11629 - DNA, 27 bp, synthetic construct
  source 1..27: mol_type = other DNA
ctccactcagtgtgattccaccctctc

SEQ ID NO: 11630 - DNA, 27 bp, synthetic construct
  source 1..27: mol_type = other DNA
ctccactcagtgtgattccaccttctc

SEQ ID NO: 11631 - DNA, 28 bp, synthetic construct
  source 1..28: mol_type = other DNA
cctccactcagtgtgattccaccttctc

SEQ ID NO: 11632 - DNA, 28 bp, synthetic construct
  source 1..28: mol_type = other DNA
cctccactcagtgtgattccaccctctc

SEQ ID NO: 11633 - DNA, 29 bp, synthetic construct
  source 1..29: mol_type = other DNA
acctccactcagtgtgattccaccttctc

SEQ ID NO: 11634 - DNA, 29 bp, synthetic construct
  source 1..29: mol_type = other DNA
acctccactcagtgtgattccaccctctc

SEQ ID NO: 11635 - DNA, 30 bp, synthetic construct; identical to SEQ ID NO: 10323
  source 1..30: mol_type = other DNA

SEQ ID NO: 11636 - DNA, 30 bp, synthetic construct; identical to SEQ ID NO: 10322
  source 1..30: mol_type = other DNA

SEQ ID NO: 11637 - DNA, 31 bp, synthetic construct; identical to SEQ ID NO: 10324
  source 1..31: mol_type = other DNA

SEQ ID NO: 11638 - DNA, 31 bp, synthetic construct; identical to SEQ ID NO: 10325
  source 1..31: mol_type = other DNA

SEQ ID NO: 11639 - DNA, 32 bp, synthetic construct; identical to SEQ ID NO: 10327
  source 1..32: mol_type = other DNA

SEQ ID NO: 11640 - DNA, 32 bp, synthetic construct; identical to SEQ ID NO: 10326
  source 1..32: mol_type = other DNA

SEQ ID NO: 11641 - DNA, 33 bp, synthetic construct; identical to SEQ ID NO: 10329
  source 1..33: mol_type = other DNA

SEQ ID NO: 11642 - DNA, 33 bp, synthetic construct; identical to SEQ ID NO: 10328
  source 1..33: mol_type = other DNA

SEQ ID NO: 11643 - DNA, 34 bp, synthetic construct; identical to SEQ ID NO: 10330
  source 1..34: mol_type = other DNA

SEQ ID NO: 11644 - DNA, 34 bp, synthetic construct; identical to SEQ ID NO: 10331
  source 1..34: mol_type = other DNA

SEQ ID NO: 11645 - DNA, 35 bp, synthetic construct; identical to SEQ ID NO: 10333
  source 1..35: mol_type = other DNA

SEQ ID NO: 11646 - DNA, 35 bp, synthetic construct; identical to SEQ ID NO: 10332
  source 1..35: mol_type = other DNA

SEQ ID NO: 11647 - DNA, 36 bp, synthetic construct; identical to SEQ ID NO: 10334
  source 1..36: mol_type = other DNA

SEQ ID NO: 11648 - DNA, 36 bp, synthetic construct; identical to SEQ ID NO: 10335
  source 1..36: mol_type = other DNA

SEQ ID NO: 11649 - DNA, 37 bp, synthetic construct; identical to SEQ ID NO: 10337
  source 1..37: mol_type = other DNA

SEQ ID NO: 11650 - DNA, 37 bp, synthetic construct; identical to SEQ ID NO: 10336
  source 1..37: mol_type = other DNA

SEQ ID NO: 11651 - DNA, 38 bp, synthetic construct; identical to SEQ ID NO: 10338
  source 1..38: mol_type = other DNA

SEQ ID NO: 11652 - DNA, 38 bp, synthetic construct; identical to SEQ ID NO: 10339
  source 1..38: mol_type = other DNA

SEQ ID NO: 11653 - DNA, 39 bp, synthetic construct; identical to SEQ ID NO: 10341
  source 1..39: mol_type = other DNA

SEQ ID NO: 11654 - DNA, 39 bp, synthetic construct; identical to SEQ ID NO: 10340
  source 1..39: mol_type = other DNA

SEQ ID NO: 11655 - DNA, 40 bp, synthetic construct; identical to SEQ ID NO: 10343
  source 1..40: mol_type = other DNA

SEQ ID NO: 11656 - DNA, 40 bp, synthetic construct; identical to SEQ ID NO: 10342
  source 1..40: mol_type = other DNA

SEQ ID NO: 11657 - DNA, 10 bp, synthetic construct
  source 1..10: mol_type = other DNA
tccggacagt

SEQ ID NO: 11658 - DNA, 10 bp, synthetic construct
  source 1..10: mol_type = other DNA
tccactcagt

SEQ ID NO: 11659 - DNA, 11 bp, synthetic construct
  source 1..11: mol_type = other DNA
ctccactcagt

SEQ ID NO: 11660 - DNA, 11 bp, synthetic construct
  source 1..11: mol_type = other DNA
ctccggacagt

SEQ ID NO: 11661 - DNA, 12 bp, synthetic construct
  source 1..12: mol_type = other DNA
cctccggacagt

SEQ ID NO: 11662 - DNA, 12 bp, synthetic construct
  source 1..12: mol_type = other DNA
cctccactcagt

SEQ ID NO: 11663 - DNA, 13 bp, synthetic construct
  source 1..13: mol_type = other DNA
acctccactcagt

SEQ ID NO: 11664 - DNA, 13 bp, synthetic construct
  source 1..13: mol_type = other DNA
acctccggacagt

SEQ ID NO: 11665 - DNA, 14 bp, synthetic construct
  source 1..14: mol_type = other DNA
gacctccggacagt

SEQ ID NO: 11666 - DNA, 14 bp, synthetic construct
  source 1..14: mol_type = other DNA
gacctccactcagt

SEQ ID NO: 11667 - DNA, 15 bp, synthetic construct
  source 1..15: mol_type = other DNA
tgacctccactcagt

SEQ ID NO: 11668 - DNA, 15 bp, synthetic construct
  source 1..15: mol_type = other DNA
tgacctccggacagt

SEQ ID NO: 11669 - DNA, 16 bp, synthetic construct
  source 1..16: mol_type = other DNA
ttgacctccggacagt

SEQ ID NO: 11670 - DNA, 16 bp, synthetic construct
  source 1..16: mol_type = other DNA
ttgacctccactcagt

SEQ ID NO: 11671 - DNA, 17 bp, synthetic construct
  source 1..17: mol_type = other DNA
gttgacctccggacagt

SEQ ID NO: 11672 - DNA, 17 bp, synthetic construct
  source 1..17: mol_type = other DNA
gttgacctccactcagt

SEQ ID NO: 11673 - DNA, 18 bp, synthetic construct
  source 1..18: mol_type = other DNA
cgttgacctccggacagt

SEQ ID NO: 11674 - DNA, 18 bp, synthetic construct
  source 1..18: mol_type = other DNA
cgttgacctccactcagt

SEQ ID NO: 11675 - DNA, 19 bp, synthetic construct
  source 1..19: mol_type = other DNA
tcgttgacctccactcagt

SEQ ID NO: 11676 - DNA, 19 bp, synthetic construct
  source 1..19: mol_type = other DNA
tcgttgacctccggacagt

SEQ ID NO: 11677 - DNA, 20 bp, synthetic construct
  source 1..20: mol_type = other DNA
ctcgttgacctccggacagt

SEQ ID NO: 11678 - DNA, 20 bp, synthetic construct
  source 1..20: mol_type = other DNA
ctcgttgacctccactcagt

SEQ ID NO: 11679 - DNA, 21 bp, synthetic construct
  source 1..21: mol_type = other DNA
gctcgttgacctccactcagt

SEQ ID NO: 11680 - DNA, 21 bp, synthetic construct
  source 1..21: mol_type = other DNA
gctcgttgacctccggacagt

SEQ ID NO: 11681 - DNA, 22 bp, synthetic construct
  source 1..22: mol_type = other DNA
tgctcgttgacctccactcagt

SEQ ID NO: 11682 - DNA, 22 bp, synthetic construct
  source 1..22: mol_type = other DNA
tgctcgttgacctccggacagt

SEQ ID NO: 11683 - DNA, 23 bp, synthetic construct
  source 1..23: mol_type = other DNA
ttgctcgttgacctccactcagt

SEQ ID NO: 11684 - DNA, 23 bp, synthetic construct
  source 1..23: mol_type = other DNA
ttgctcgttgacctccggacagt

SEQ ID NO: 11685 - DNA, 24 bp, synthetic construct
  source 1..24: mol_type = other DNA
cttgctcgttgacctccggacagt

SEQ ID NO: 11686 - DNA, 24 bp, synthetic construct
  source 1..24: mol_type = other DNA
cttgctcgttgacctccactcagt

SEQ ID NO: 11687 - DNA, 25 bp, synthetic construct
  source 1..25: mol_type = other DNA
tcttgctcgttgacctccactcagt

SEQ ID NO: 11688 - DNA, 25 bp, synthetic construct
  source 1..25: mol_type = other DNA
tcttgctcgttgacctccggacagt

SEQ ID NO: 11689 - DNA, 26 bp, synthetic construct
  source 1..26: mol_type = other DNA
ttcttgctcgttgacctccactcagt

SEQ ID NO: 11690 - DNA, 26 bp, synthetic construct
  source 1..26: mol_type = other DNA
ttcttgctcgttgacctccggacagt

SEQ ID NO: 11691 - DNA, 27 bp, synthetic construct
  source 1..27: mol_type = other DNA
attcttgctcgttgacctccggacagt

SEQ ID NO: 11692 - DNA, 27 bp, synthetic construct
  source 1..27: mol_type = other DNA
attcttgctcgttgacctccactcagt

SEQ ID NO: 11693 - DNA, 28 bp, synthetic construct
  source 1..28: mol_type = other DNA
aattcttgctcgttgacctccactcagt

SEQ ID NO: 11694 - DNA, 28 bp, synthetic construct
  source 1..28: mol_type = other DNA
aattcttgctcgttgacctccggacagt

SEQ ID NO: 11695 - DNA, 29 bp, synthetic construct
  source 1..29: mol_type = other DNA
aaattcttgctcgttgacctccactcagt

SEQ ID NO: 11696 - DNA, 29 bp, synthetic construct
  source 1..29: mol_type = other DNA
aaattcttgctcgttgacctccggacagt

SEQ ID NO: 11697 - DNA, 30 bp, synthetic construct
  source 1..30: mol_type = other DNA
gaaattcttgctcgttgacctccactcagt

SEQ ID NO: 11698 - DNA, 30 bp, synthetic construct
  source 1..30: mol_type = other DNA
gaaattcttgctcgttgacctccggacagt

SEQ ID NO: 11699 - DNA, 31 bp, synthetic construct
  source 1..31: mol_type = other DNA
agaaattcttgctcgttgacctccactcagt

SEQ ID NO: 11700 - DNA, 31 bp, synthetic construct
  source 1..31: mol_type = other DNA
agaaattcttgctcgttgacctccggacagt

SEQ ID NO: 11701 - DNA, 32 bp, synthetic construct
  source 1..32: mol_type = other DNA
aagaaattcttgctcgttgacctccactcagt

SEQ ID NO: 11702 - DNA, 32 bp, synthetic construct
  source 1..32: mol_type = other DNA
aagaaattcttgctcgttgacctccggacagt

SEQ ID NO: 11703 - DNA, 33 bp, synthetic construct
  source 1..33: mol_type = other DNA
aaagaaattcttgctcgttgacctccggacagt

SEQ ID NO: 11704 - DNA, 33 bp, synthetic construct
  source 1..33: mol_type = other DNA
aaagaaattcttgctcgttgacctccactcagt

SEQ ID NO: 11705 - DNA, 34 bp, synthetic construct
  source 1..34: mol_type = other DNA
taaagaaattcttgctcgttgacctccactcagt

SEQ ID NO: 11706 - DNA, 34 bp, synthetic construct
  source 1..34: mol_type = other DNA
taaagaaattcttgctcgttgacctccggacagt

SEQ ID NO: 11707 - DNA, 35 bp, synthetic construct
  source 1..35: mol_type = other DNA
ctaaagaaattcttgctcgttgacctccactcagt

SEQ ID NO: 11708 - DNA, 35 bp, synthetic construct
  source 1..35: mol_type = other DNA
ctaaagaaattcttgctcgttgacctccggacagt

SEQ ID NO: 11709 - DNA, 36 bp, synthetic construct
  source 1..36: mol_type = other DNA
gctaaagaaattcttgctcgttgacctccggacagt

SEQ ID NO: 11710 - DNA, 36 bp, synthetic construct
  source 1..36: mol_type = other DNA
gctaaagaaattcttgctcgttgacctccactcagt

SEQ ID NO: 11711 - DNA, 37 bp, synthetic construct
  source 1..37: mol_type = other DNA
tgctaaagaaattcttgctcgttgacctccactcagt

SEQ ID NO: 11712 - DNA, 37 bp, synthetic construct
  source 1..37: mol_type = other DNA
tgctaaagaaattcttgctcgttgacctccggacagt

SEQ ID NO: 11713 - DNA, 38 bp, synthetic construct
  source 1..38: mol_type = other DNA
ttgctaaagaaattcttgctcgttgacctccactcagt

SEQ ID NO: 11714 - DNA, 38 bp, synthetic construct
  source 1..38: mol_type = other DNA
ttgctaaagaaattcttgctcgttgacctccggacagt

SEQ ID NO: 11715 - DNA, 39 bp, synthetic construct
  source 1..39: mol_type = other DNA
cttgctaaagaaattcttgctcgttgacctccggacagt

SEQ ID NO: 11716 - DNA, 39 bp, synthetic construct
  source 1..39: mol_type = other DNA
cttgctaaagaaattcttgctcgttgacctccactcagt

SEQ ID NO: 11717 - DNA, 40 bp, synthetic construct
  source 1..40: mol_type = other DNA
ccttgctaaagaaattcttgctcgttgacctccactcagt

SEQ ID NO: 11718 - DNA, 40 bp, synthetic construct
  source 1..40: mol_type = other DNA
ccttgctaaagaaattcttgctcgttgacctccggacagt

SEQ ID NO: 11719 - DNA, 10 bp, synthetic construct
  source 1..10: mol_type = other DNA
ccactcagtg

SEQ ID NO: 11720 - DNA, 11 bp, synthetic construct
  source 1..11: mol_type = other DNA
tccactcagtg

SEQ ID NO: 11721 - DNA, 12 bp, synthetic construct
  source 1..12: mol_type = other DNA
ctccactcagtg

SEQ ID NO: 11722 - DNA, 13 bp, synthetic construct
  source 1..13: mol_type = other DNA
cctccactcagtg

SEQ ID NO: 11723 - DNA, 14 bp, synthetic construct
  source 1..14: mol_type = other DNA
acctccactcagtg

SEQ ID NO: 11724 - DNA, 15 bp, synthetic construct
  source 1..15: mol_type = other DNA
gacctccactcagtg

SEQ ID NO: 11725 - DNA, 16 bp, synthetic construct
  source 1..16: mol_type = other DNA
tgacctccactcagtg

SEQ ID NO: 11726 - DNA, 17 bp, synthetic construct
  source 1..17: mol_type = other DNA
ttgacctccactcagtg

SEQ ID NO: 11727 - DNA, 18 bp, synthetic construct
  source 1..18: mol_type = other DNA
gttgacctccactcagtg

SEQ ID NO: 11728 - DNA, 19 bp, synthetic construct
  source 1..19: mol_type = other DNA
cgttgacctccactcagtg

SEQ ID NO: 11729 - DNA, 20 bp, synthetic construct
  source 1..20: mol_type = other DNA
tcgttgacctccactcagtg

SEQ ID NO: 11730 - DNA, 21 bp, synthetic construct
  source 1..21: mol_type = other DNA
ctcgttgacctccactcagtg

SEQ ID NO: 11731 - DNA, 22 bp, synthetic construct
  source 1..22: mol_type = other DNA
gctcgttgacctccactcagtg

SEQ ID NO: 11732 - DNA, 23 bp, synthetic construct
  source 1..23: mol_type = other DNA
tgctcgttgacctccactcagtg

SEQ ID NO: 11733 - DNA, 24 bp, synthetic construct
  source 1..24: mol_type = other DNA
ttgctcgttgacctccactcagtg

SEQ ID NO: 11734 - DNA, 25 bp, synthetic construct
  source 1..25: mol_type = other DNA
cttgctcgttgacctccactcagtg

SEQ ID NO: 11735 - DNA, 26 bp, synthetic construct
  source 1..26: mol_type = other DNA
tcttgctcgttgacctccactcagtg

SEQ ID NO: 11736 - DNA, 27 bp, synthetic construct
  source 1..27: mol_type = other DNA
ttcttgctcgttgacctccactcagtg

SEQ ID NO: 11737 - DNA, 28 bp, synthetic construct
  source 1..28: mol_type = other DNA
attcttgctcgttgacctccactcagtg

SEQ ID NO: 11738 - DNA, 29 bp, synthetic construct
  source 1..29: mol_type = other DNA
aattcttgctcgttgacctccactcagtg

SEQ ID NO: 11739 - DNA, 30 bp, synthetic construct; identical to SEQ ID NO: 10455
  source 1..30: mol_type = other DNA

SEQ ID NO: 11740 - DNA, 31 bp, synthetic construct; identical to SEQ ID NO: 10456
  source 1..31: mol_type = other DNA

SEQ ID NO: 11741 - DNA, 32 bp, synthetic construct; identical to SEQ ID NO: 10457
  source 1..32: mol_type = other DNA

SEQ ID NO: 11742 - DNA, 33 bp, synthetic construct; identical to SEQ ID NO: 10458
  source 1..33: mol_type = other DNA

SEQ ID NO: 11743 - DNA, 34 bp, synthetic construct; identical to SEQ ID NO: 10459
  source 1..34: mol_type = other DNA

SEQ ID NO: 11744 - DNA, 35 bp, synthetic construct; identical to SEQ ID NO: 10460
  source 1..35: mol_type = other DNA

SEQ ID NO: 11745 - DNA, 36 bp, synthetic construct; identical to SEQ ID NO: 10461
  source 1..36: mol_type = other DNA

SEQ ID NO: 11746 - DNA, 37 bp, synthetic construct; identical to SEQ ID NO: 10462
  source 1..37: mol_type = other DNA

SEQ ID NO: 11747 - DNA, 38 bp, synthetic construct; identical to SEQ ID NO: 10463
  source 1..38: mol_type = other DNA

SEQ ID NO: 11748 - DNA, 39 bp, synthetic construct; identical to SEQ ID NO: 10464
  source 1..39: mol_type = other DNA

SEQ ID NO: 11749 - DNA, 40 bp, synthetic construct; identical to SEQ ID NO: 10465
  source 1..40: mol_type = other DNA

SEQ ID NO: 11750 - DNA, 10 bp, synthetic construct
  source 1..10: mol_type = other DNA
tgacctccac

SEQ ID NO: 11751 - DNA, 10 bp, synthetic construct
  source 1..10: mol_type = other DNA
tgaccgccac

SEQ ID NO: 11752 - DNA, 11 bp, synthetic construct
  source 1..11: mol_type = other DNA
ttgaccgccac

SEQ ID NO: 11753 - DNA, 11 bp, synthetic construct
  source 1..11: mol_type = other DNA
ttgacctccac

SEQ ID NO: 11754 - DNA, 12 bp, synthetic construct
  source 1..12: mol_type = other DNA
gttgacctccac

SEQ ID NO: 11755 - DNA, 12 bp, synthetic construct
  source 1..12: mol_type = other DNA
gttgaccgccac

SEQ ID NO: 11756 - DNA, 13 bp, synthetic construct
  source 1..13: mol_type = other DNA
cgttgacctccac

SEQ ID NO: 11757 - DNA, 13 bp, synthetic construct
  source 1..13: mol_type = other DNA
cgttgaccgccac

SEQ ID NO: 11758 - DNA, 14 bp, synthetic construct
  source 1..14: mol_type = other DNA
tcgttgaccgccac

SEQ ID NO: 11759 - DNA, 14 bp, synthetic construct
  source 1..14: mol_type = other DNA
tcgttgacctccac

SEQ ID NO: 11760 - DNA, 15 bp, synthetic construct
  source 1..15: mol_type = other DNA
ctcgttgaccgccac

SEQ ID NO: 11761 - DNA, 15 bp, synthetic construct
  source 1..15: mol_type = other DNA
ctcgttgacctccac

SEQ ID NO: 11762 - DNA, 16 bp, synthetic construct
  source 1..16: mol_type = other DNA
gctcgttgacctccac

SEQ ID NO: 11763 - DNA, 16 bp, synthetic construct
  source 1..16: mol_type = other DNA
gctcgttgaccgccac

SEQ ID NO: 11764 - DNA, 17 bp, synthetic construct
  source 1..17: mol_type = other DNA
tgctcgttgaccgccac

SEQ ID NO: 11765 - DNA, 17 bp, synthetic construct
  source 1..17: mol_type = other DNA
tgctcgttgacctccac

SEQ ID NO: 11766 - DNA, 18 bp, synthetic construct
  source 1..18: mol_type = other DNA
ttgctcgttgaccgccac

SEQ ID NO: 11767 - DNA, 18 bp, synthetic construct
  source 1..18: mol_type = other DNA
ttgctcgttgacctccac

SEQ ID NO: 11768 - DNA, 19 bp, synthetic construct
  source 1..19: mol_type = other DNA
cttgctcgttgaccgccac

SEQ ID NO: 11769 - DNA, 19 bp, synthetic construct
  source 1..19: mol_type = other DNA
cttgctcgttgacctccac

SEQ ID NO: 11770 - DNA, 20 bp, synthetic construct
  source 1..20: mol_type = other DNA
tcttgctcgttgacctccac

SEQ ID NO: 11771 - DNA, 20 bp, synthetic construct
  source 1..20: mol_type = other DNA
tcttgctcgttgaccgccac

SEQ ID NO: 11772 - DNA, 21 bp, synthetic construct
  source 1..21: mol_type = other DNA
ttcttgctcgttgaccgccac

SEQ ID NO: 11773 - DNA, 21 bp, synthetic construct
  source 1..21: mol_type = other DNA
ttcttgctcgttgacctccac

SEQ ID NO: 11774 - DNA, 22 bp, synthetic construct
  source 1..22: mol_type = other DNA
attcttgctcgttgaccgccac

SEQ ID NO: 11775 - DNA, 22 bp, synthetic construct
  source 1..22: mol_type = other DNA
attcttgctcgttgacctccac

SEQ ID NO: 11776 - DNA, 23 bp, synthetic construct
  source 1..23: mol_type = other DNA
aattcttgctcgttgacctccac

SEQ ID NO: 11777 - DNA, 23 bp, synthetic construct
  source 1..23: mol_type = other DNA
aattcttgctcgttgaccgccac

SEQ ID NO: 11778 - DNA, 24 bp, synthetic construct
  source 1..24: mol_type = other DNA
aaattcttgctcgttgacctccac

SEQ ID NO: 11779 - DNA, 24 bp, synthetic construct
  source 1..24: mol_type = other DNA
aaattcttgctcgttgaccgccac

SEQ ID NO: 11780 - DNA, 25 bp, synthetic construct
  source 1..25: mol_type = other DNA
gaaattcttgctcgttgaccgccac

SEQ ID NO: 11781 - DNA, 25 bp, synthetic construct
  source 1..25: mol_type = other DNA
gaaattcttgctcgttgacctccac

SEQ ID NO: 11782 - DNA, 26 bp, synthetic construct
  source 1..26: mol_type = other DNA
agaaattcttgctcgttgacctccac

SEQ ID NO: 11783 - DNA, 26 bp, synthetic construct
  source 1..26: mol_type = other DNA
agaaattcttgctcgttgaccgccac

SEQ ID NO: 11784 - DNA, 27 bp, synthetic construct
  source 1..27: mol_type = other DNA
aagaaattcttgctcgttgaccgccac

SEQ ID NO: 11785 - DNA, 27 bp, synthetic construct
  source 1..27: mol_type = other DNA
aagaaattcttgctcgttgacctccac

SEQ ID NO: 11786 - DNA, 28 bp, synthetic construct
  source 1..28: mol_type = other DNA
aaagaaattcttgctcgttgaccgccac

SEQ ID NO: 11787 - DNA, 28 bp, synthetic construct
  source 1..28: mol_type = other DNA
aaagaaattcttgctcgttgacctccac

SEQ ID NO: 11788 - DNA, 29 bp, synthetic construct
  source 1..29: mol_type = other DNA
taaagaaattcttgctcgttgaccgccac

SEQ ID NO: 11789 - DNA, 29 bp, synthetic construct
  source 1..29: mol_type = other DNA
taaagaaattcttgctcgttgacctccac

SEQ ID NO: 11790 - DNA, 30 bp, synthetic construct; identical to SEQ ID NO: 11046
  source 1..30: mol_type = other DNA

SEQ ID NO: 11791 - DNA, 30 bp, synthetic construct; identical to SEQ ID NO: 11045
  source 1..30: mol_type = other DNA

SEQ ID NO: 11792 - DNA, 31 bp, synthetic construct; identical to SEQ ID NO: 11048
  source 1..31: mol_type = other DNA

SEQ ID NO: 11793 - DNA, 31 bp, synthetic construct; identical to SEQ ID NO: 11047
  source 1..31: mol_type = other DNA

SEQ ID NO: 11794 - DNA, 32 bp, synthetic construct; identical to SEQ ID NO: 11050
  source 1..32: mol_type = other DNA

SEQ ID NO: 11795 - DNA, 32 bp, synthetic construct; identical to SEQ ID NO: 11049
  source 1..32: mol_type = other DNA

SEQ ID NO: 11796 - DNA, 33 bp, synthetic construct; identical to SEQ ID NO: 11052
  source 1..33: mol_type = other DNA

SEQ ID NO: 11797 - DNA, 33 bp, synthetic construct; identical to SEQ ID NO: 11051
  source 1..33: mol_type = other DNA

SEQ ID NO: 11798 - DNA, 34 bp, synthetic construct; identical to SEQ ID NO: 11054
  source 1..34: mol_type = other DNA

SEQ ID NO: 11799 - DNA, 34 bp, synthetic construct; identical to SEQ ID NO: 11053
  source 1..34: mol_type = other DNA

SEQ ID NO: 11800 - DNA, 35 bp, synthetic construct; identical to SEQ ID NO: 11055
  source 1..35: mol_type = other DNA

SEQ ID NO: 11801 - DNA, 35 bp, synthetic construct; identical to SEQ ID NO: 11056
  source 1..35: mol_type = other DNA

SEQ ID NO: 11802 - DNA, 36 bp, synthetic construct; identical to SEQ ID NO: 11058
  source 1..36: mol_type = other DNA

SEQ ID NO: 11803 - DNA, 36 bp, synthetic construct; identical to SEQ ID NO: 11057
  source 1..36: mol_type = other DNA

SEQ ID NO: 11804 - DNA, 37 bp, synthetic construct; identical to SEQ ID NO: 11060
  source 1..37: mol_type = other DNA

SEQ ID NO: 11805 - DNA, 37 bp, synthetic construct; identical to SEQ ID NO: 11059
  source 1..37: mol_type = other DNA

SEQ ID NO: 11806 - DNA, 38 bp, synthetic construct; identical to SEQ ID NO: 11061
  source 1..38: mol_type = other DNA

SEQ ID NO: 11807 - DNA, 38 bp, synthetic construct; identical to SEQ ID NO: 11062
  source 1..38: mol_type = other DNA

SEQ ID NO: 11808 - DNA, 39 bp, synthetic construct; identical to SEQ ID NO: 11063
  source 1..39: mol_type = other DNA

SEQ ID NO: 11809 - DNA, 39 bp, synthetic construct; identical to SEQ ID NO: 11064
  source 1..39: mol_type = other DNA

SEQ ID NO: 11810 - DNA, 40 bp, synthetic construct; identical to SEQ ID NO: 11066
  source 1..40: mol_type = other DNA

SEQ ID NO: 11811 - DNA, 40 bp, synthetic construct; identical to SEQ ID NO: 11065
  source 1..40: mol_type = other DNA

SEQ ID NO: 11812 - DNA, 10 bp, synthetic construct
  source 1..10: mol_type = other DNA
ttgacctcca

SEQ ID NO: 11813 - DNA, 11 bp, synthetic construct
  source 1..11: mol_type = other DNA
gttgacctcca

SEQ ID NO: 11814 - DNA, 12 bp, synthetic construct
  source 1..12: mol_type = other DNA
cgttgacctcca

SEQ ID NO: 11815 - DNA, 13 bp, synthetic construct
  source 1..13: mol_type = other DNA
tcgttgacctcca

SEQ ID NO: 11816 - DNA, 14 bp, synthetic construct
  source 1..14: mol_type = other DNA
ctcgttgacctcca

SEQ ID NO: 11817 - DNA, 15 bp, synthetic construct
  source 1..15: mol_type = other DNA
gctcgttgacctcca

SEQ ID NO: 11818 - DNA, 16 bp, synthetic construct
  source 1..16: mol_type = other DNA
tgctcgttgacctcca

SEQ ID NO: 11819 - DNA, 17 bp, synthetic construct
  source 1..17: mol_type = other DNA
ttgctcgttgacctcca

SEQ ID NO: 11820 - DNA, 18 bp, synthetic construct
  source 1..18: mol_type = other DNA
cttgctcgttgacctcca

SEQ ID NO: 11821 - DNA, 19 bp, synthetic construct
  source 1..19: mol_type = other DNA
tcttgctcgttgacctcca

SEQ ID NO: 11822 - DNA, 20 bp, synthetic construct
  source 1..20: mol_type = other DNA
ttcttgctcgttgacctcca

SEQ ID NO: 11823 - DNA, 21 bp, synthetic construct
  source 1..21: mol_type = other DNA
attcttgctcgttgacctcca

SEQ ID NO: 11824 - DNA, 22 bp, synthetic construct
  source 1..22: mol_type = other DNA
aattcttgctcgttgacctcca

SEQ ID NO: 11825 - DNA, 23 bp, synthetic construct
  source 1..23: mol_type = other DNA
aaattcttgctcgttgacctcca

SEQ ID NO: 11826 - DNA, 24 bp, synthetic construct
  source 1..24: mol_type = other DNA
gaaattcttgctcgttgacctcca

SEQ ID NO: 11827 - DNA, 25 bp, synthetic construct
  source 1..25: mol_type = other DNA
agaaattcttgctcgttgacctcca

SEQ ID NO: 11828 - DNA, 26 bp, synthetic construct
  source 1..26: mol_type = other DNA
aagaaattcttgctcgttgacctcca

SEQ ID NO: 11829 - DNA, 27 bp, synthetic construct
  source 1..27: mol_type = other DNA
aaagaaattcttgctcgttgacctcca

SEQ ID NO: 11830 - DNA, 28 bp, synthetic construct
  source 1..28: mol_type = other DNA
taaagaaattcttgctcgttgacctcca

SEQ ID NO: 11831 - DNA, 29 bp, synthetic construct
  source 1..29: mol_type = other DNA
ctaaagaaattcttgctcgttgacctcca

SEQ ID NO: 11832 - DNA, 30 bp, synthetic construct
  source 1..30: mol_type = other DNA
gctaaagaaattcttgctcgttgacctcca

SEQ ID NO: 11833 - DNA, 31 bp, synthetic construct
  source 1..31: mol_type = other DNA
tgctaaagaaattcttgctcgttgacctcca

SEQ ID NO: 11834 - DNA, 32 bp, synthetic construct
  source 1..32: mol_type = other DNA
ttgctaaagaaattcttgctcgttgacctcca

SEQ ID NO: 11835 - DNA, 33 bp, synthetic construct
  source 1..33: mol_type = other DNA
cttgctaaagaaattcttgctcgttgacctcca

SEQ ID NO: 11836 - DNA, 34 bp, synthetic construct
  source 1..34: mol_type = other DNA
ccttgctaaagaaattcttgctcgttgacctcca

SEQ ID NO: 11837 - DNA, 35 bp, synthetic construct
  source 1..35: mol_type = other DNA
accttgctaaagaaattcttgctcgttgacctcca

SEQ ID NO: 11838 - DNA, 36 bp, synthetic construct
  source 1..36: mol_type = other DNA
caccttgctaaagaaattcttgctcgttgacctcca

SEQ ID NO: 11839 - DNA, 37 bp, synthetic construct
  source 1..37: mol_type = other DNA
tcaccttgctaaagaaattcttgctcgttgacctcca

SEQ ID NO: 11840 - DNA, 38 bp, synthetic construct
  source 1..38: mol_type = other DNA
ttcaccttgctaaagaaattcttgctcgttgacctcca

SEQ ID NO: 11841 - DNA, 39 bp, synthetic construct
  source 1..39: mol_type = other DNA
attcaccttgctaaagaaattcttgctcgttgacctcca

SEQ ID NO: 11842 - DNA, 40 bp, synthetic construct
  source 1..40: mol_type = other DNA
tattcaccttgctaaagaaattcttgctcgttgacctcca

SEQ ID NO: 11843 - DNA, 13 bp, synthetic construct
  source 1..13: mol_type = other DNA
gtggaggtcaacg

SEQ ID NO: 11844 - DNA, 14 bp, synthetic construct
  source 1..14: mol_type = other DNA
agtggaggtcaacg

SEQ ID NO: 11845 - DNA, 15 bp, synthetic construct
  source 1..15: mol_type = other DNA
gagtggaggtcaacg

SEQ ID NO: 11846 - DNA, 16 bp, synthetic construct
  source 1..16: mol_type = other DNA
tgagtggaggtcaacg

SEQ ID NO: 11847 - DNA, 17 bp, synthetic construct
  source 1..17: mol_type = other DNA
ctgagtggaggtcaacg

SEQ ID NO: 11848 - DNA, 18 bp, synthetic construct
  source 1..18: mol_type = other DNA
actgagtggaggtcaacg

SEQ ID NO: 11849 - DNA, 19 bp, synthetic construct
  source 1..19: mol_type = other DNA
cactgagtggaggtcaacg

SEQ ID NO: 11850 - DNA, 20 bp, synthetic construct
  source 1..20: mol_type = other DNA
acactgagtggaggtcaacg

SEQ ID NO: 11851 - DNA, 21 bp, synthetic construct
  source 1..21: mol_type = other DNA
cacactgagtggaggtcaacg

SEQ ID NO: 11852 - DNA, 22 bp, synthetic construct
  source 1..22: mol_type = other DNA
tcacactgagtggaggtcaacg

SEQ ID NO: 11853 - DNA, 23 bp, synthetic construct
  source 1..23: mol_type = other DNA
atcacactgagtggaggtcaacg

SEQ ID NO: 11854 - DNA, 24 bp, synthetic construct
  source 1..24: mol_type = other DNA
aatcacactgagtggaggtcaacg

SEQ ID NO: 11855 - DNA, 25 bp, synthetic construct
  source 1..25: mol_type = other DNA
gaatcacactgagtggaggtcaacg

SEQ ID NO: 11856 - DNA, 26 bp, synthetic construct
  source 1..26: mol_type = other DNA
ggaatcacactgagtggaggtcaacg

SEQ ID NO: 11857 - DNA, 27 bp, synthetic construct
  source 1..27: mol_type = other DNA
tggaatcacactgagtggaggtcaacg

SEQ ID NO: 11858 - DNA, 28 bp, synthetic construct
  source 1..28: mol_type = other DNA
gtggaatcacactgagtggaggtcaacg

SEQ ID NO: 11859 - DNA, 29 bp, synthetic construct
  source 1..29: mol_type = other DNA
ggtggaatcacactgagtggaggtcaacg

SEQ ID NO: 11860 - DNA, 30 bp, synthetic construct; identical to SEQ ID NO: 10390
  source 1..30: mol_type = other DNA

SEQ ID NO: 11861 - DNA, 31 bp, synthetic construct; identical to SEQ ID NO: 10391
  source 1..31: mol_type = other DNA

SEQ ID NO: 11862 - DNA, 32 bp, synthetic construct; identical to SEQ ID NO: 10392
  source 1..32: mol_type = other DNA

SEQ ID NO: 11863 - DNA, 33 bp, synthetic construct; identical to SEQ ID NO: 10393
  source 1..33: mol_type = other DNA

SEQ ID NO: 11864 - DNA, 34 bp, synthetic construct; identical to SEQ ID NO: 10394
  source 1..34: mol_type = other DNA

SEQ ID NO: 11865 - DNA, 35 bp, synthetic construct; identical to SEQ ID NO: 10395
  source 1..35: mol_type = other DNA

SEQ ID NO: 11866 - DNA, 36 bp, synthetic construct; identical to SEQ ID NO: 9765
  source 1..36: mol_type = other DNA

SEQ ID NO: 11867 - DNA, 37 bp, synthetic construct; identical to SEQ ID NO: 9766
  source 1..37: mol_type = other DNA

SEQ ID NO: 11868 - DNA, 38 bp, synthetic construct; identical to SEQ ID NO: 9767
  source 1..38: mol_type = other DNA

SEQ ID NO: 11869 - DNA, 39 bp, synthetic construct; identical to SEQ ID NO: 9768
  source 1..39: mol_type = other DNA

SEQ ID NO: 11870 - DNA, 40 bp, synthetic construct; identical to SEQ ID NO: 9769
  source 1..40: mol_type = other DNA

SEQ ID NO: 11871 - DNA, 29 bp, synthetic construct
  source 1..29: mol_type = other DNA
gtggaggtcaacgagcaagaatttcttta

SEQ ID NO: 11872 - DNA, 30 bp, synthetic construct; identical to SEQ ID NO: 11094
  source 1..30: mol_type = other DNA

SEQ ID NO: 11873 - DNA, 31 bp, synthetic construct; identical to SEQ ID NO: 10401
  source 1..31: mol_type = other DNA

SEQ ID NO: 11874 - DNA, 32 bp, synthetic construct; identical to SEQ ID NO: 10402
  source 1..32: mol_type = other DNA

SEQ ID NO: 11875 - DNA, 33 bp, synthetic construct; identical to SEQ ID NO: 10403
  source 1..33: mol_type = other DNA

SEQ ID NO: 11876 - DNA, 34 bp, synthetic construct; identical to SEQ ID NO: 10404
  source 1..34: mol_type = other DNA

SEQ ID NO: 11877 - DNA, 35 bp, synthetic construct; identical to SEQ ID NO: 10405
  source 1..35: mol_type = other DNA

SEQ ID NO: 11878 - DNA, 36 bp, synthetic construct; identical to SEQ ID NO: 10406
  source 1..36: mol_type = other DNA

SEQ ID NO: 11879 - DNA, 37 bp, synthetic construct; identical to SEQ ID NO: 10407
  source 1..37: mol_type = other DNA

SEQ ID NO: 11880 - DNA, 38 bp, synthetic construct; identical to SEQ ID NO: 10408
  source 1..38: mol_type = other DNA

SEQ ID NO: 11881 - DNA, 39 bp, synthetic construct; identical to SEQ ID NO: 10409
  source 1..39: mol_type = other DNA

SEQ ID NO: 11882 - DNA, 40 bp, synthetic construct; identical to SEQ ID NO: 10410
  source 1..40: mol_type = other DNA

SEQ ID NO: 11883 - DNA, 19 bp, synthetic construct
  source 1..19: mol_type = other DNA
cactcagtgtgattccacc

SEQ ID NO: 11884 - DNA, 20 bp, synthetic construct
  source 1..20: mol_type = other DNA
ccactcagtgtgattccacc

SEQ ID NO: 11885 - DNA, 21 bp, synthetic construct
  source 1..21: mol_type = other DNA
tccactcagtgtgattccacc

SEQ ID NO: 11886 - DNA, 22 bp, synthetic construct
  source 1..22: mol_type = other DNA
ctccactcagtgtgattccacc

SEQ ID NO: 11887 - DNA, 23 bp, synthetic construct
  source 1..23: mol_type = other DNA
cctccactcagtgtgattccacc

SEQ ID NO: 11888 - DNA, 24 bp, synthetic construct
  source 1..24: mol_type = other DNA
acctccactcagtgtgattccacc

SEQ ID NO: 11889 - DNA, 25 bp, synthetic construct
  source 1..25: mol_type = other DNA
gacctccactcagtgtgattccacc

SEQ ID NO: 11890 - DNA, 26 bp, synthetic construct
  source 1..26: mol_type = other DNA
tgacctccactcagtgtgattccacc

SEQ ID NO: 11891 - DNA, 27 bp, synthetic construct
  source 1..27: mol_type = other DNA
ttgacctccactcagtgtgattccacc

SEQ ID NO: 11892 - DNA, 28 bp, synthetic construct
  source 1..28: mol_type = other DNA
gttgacctccactcagtgtgattccacc

SEQ ID NO: 11893 - DNA, 29 bp, synthetic construct
  source 1..29: mol_type = other DNA
cgttgacctccactcagtgtgattccacc

SEQ ID NO: 11894 - DNA, 30 bp, synthetic construct; identical to SEQ ID NO: 10424
  source 1..30: mol_type = other DNA

SEQ ID NO: 11895 - DNA, 31 bp, synthetic construct; identical to SEQ ID NO: 10425
  source 1..31: mol_type = other DNA

SEQ ID NO: 11896 - DNA, 32 bp, synthetic construct; identical to SEQ ID NO: 10426
  source 1..32: mol_type = other DNA

SEQ ID NO: 11897 - DNA, 33 bp, synthetic construct; identical to SEQ ID NO: 10427
  source 1..33: mol_type = other DNA

SEQ ID NO: 11898 - DNA, 34 bp, synthetic construct; identical to SEQ ID NO: 10428
  source 1..34: mol_type = other DNA

SEQ ID NO: 11899 - DNA, 35 bp, synthetic construct; identical to SEQ ID NO: 10429
  source 1..35: mol_type = other DNA

SEQ ID NO: 11900 - DNA, 36 bp, synthetic construct; identical to SEQ ID NO: 10430
  source 1..36: mol_type = other DNA

SEQ ID NO: 11901 - DNA, 37 bp, synthetic construct; identical to SEQ ID NO: 10431
  source 1..37: mol_type = other DNA

SEQ ID NO: 11902 - DNA, 38 bp, synthetic construct; identical to SEQ ID NO: 10432
  source 1..38: mol_type = other DNA

SEQ ID NO: 11903 - DNA, 39 bp, synthetic construct; identical to SEQ ID NO: 10433
  source 1..39: mol_type = other DNA

SEQ ID NO: 11904 - DNA, 40 bp, synthetic construct; identical to SEQ ID NO: 10434
  source 1..40: mol_type = other DNA

SEQ ID NO: 11905 - DNA, 30 bp, synthetic construct
  source 1..30: mol_type = other DNA
gtggaggtcaacgagcaagaatttctttag

SEQ ID NO: 11906 - DNA, 30 bp, synthetic construct
  source 1..30: mol_type = other DNA
gtggaggtcaacgagcaagaattagcttag

SEQ ID NO: 11907 - DNA, 31 bp, synthetic construct; identical to SEQ ID NO: 11129
  source 1..31: mol_type = other DNA

SEQ ID NO: 11908 - DNA, 31 bp, synthetic construct; identical to SEQ ID NO: 11128
  source 1..31: mol_type = other DNA

SEQ ID NO: 11909 - DNA, 32 bp, synthetic construct; identical to SEQ ID NO: 10467
  source 1..32: mol_type = other DNA

SEQ ID NO: 11910 - DNA, 32 bp, synthetic construct; identical to SEQ ID NO: 10466
  source 1..32: mol_type = other DNA

SEQ ID NO: 11911 - DNA, 33 bp, synthetic construct; identical to SEQ ID NO: 10469
  source 1..33: mol_type = other DNA

SEQ ID NO: 11912 - DNA, 33 bp, synthetic construct; identical to SEQ ID NO: 10468
  source 1..33: mol_type = other DNA

SEQ ID NO: 11913 - DNA, 34 bp, synthetic construct; identical to SEQ ID NO: 10471
  source 1..34: mol_type = other DNA

SEQ ID NO: 11914 - DNA, 34 bp, synthetic construct; identical to SEQ ID NO: 10470
  source 1..34: mol_type = other DNA

SEQ ID NO: 11915 - DNA, 35 bp, synthetic construct; identical to SEQ ID NO: 10473
  source 1..35: mol_type = other DNA

SEQ ID NO: 11916 - DNA, 35 bp, synthetic construct; identical to SEQ ID NO: 10472
  source 1..35: mol_type = other DNA

SEQ ID NO: 11917 - DNA, 36 bp, synthetic construct; identical to SEQ ID NO: 10474
  source 1..36: mol_type = other DNA

SEQ ID NO: 11918 - DNA, 36 bp, synthetic construct; identical to SEQ ID NO: 10475
  source 1..36: mol_type = other DNA

SEQ ID NO: 11919 - DNA, 37 bp, synthetic construct; identical to SEQ ID NO: 10476
  source 1..37: mol_type = other DNA

SEQ ID NO: 11920 - DNA, 37 bp, synthetic construct; identical to SEQ ID NO: 10477
  source 1..37: mol_type = other DNA

SEQ ID NO: 11921 - DNA, 38 bp, synthetic construct; identical to SEQ ID NO: 10479
  source 1..38: mol_type = other DNA

SEQ ID NO: 11922 - DNA, 38 bp, synthetic construct; identical to SEQ ID NO: 10478
  source 1..38: mol_type = other DNA

SEQ ID NO: 11923 - DNA, 39 bp, synthetic construct; identical to SEQ ID NO: 10480
  source 1..39: mol_type = other DNA

SEQ ID NO: 11924 - DNA, 39 bp, synthetic construct; identical to SEQ ID NO: 10481
  source 1..39: mol_type = other DNA

SEQ ID NO: 11925 - DNA, 40 bp, synthetic construct; identical to SEQ ID NO: 10483
  source 1..40: mol_type = other DNA

SEQ ID NO: 11926 - DNA, 40 bp, synthetic construct; identical to SEQ ID NO: 10482
  source 1..40: mol_type = other DNA

SEQ ID NO: 11927 - DNA, 16 bp, synthetic construct
  source 1..16: mol_type = other DNA
gtggaggtcaacgagc

SEQ ID NO: 11928 - DNA, 17 bp, synthetic construct
  source 1..17: mol_type = other DNA
agtggaggtcaacgagc

SEQ ID NO: 11929 - DNA, 18 bp, synthetic construct
  source 1..18: mol_type = other DNA
gagtggaggtcaacgagc

SEQ ID NO: 11930 - DNA, 19 bp, synthetic construct
  source 1..19: mol_type = other DNA
tgagtggaggtcaacgagc

SEQ ID NO: 11931 - DNA, 20 bp, synthetic construct
  source 1..20: mol_type = other DNA
ctgagtggaggtcaacgagc

SEQ ID NO: 11932 - DNA, 21 bp, synthetic construct
  source 1..21: mol_type = other DNA
actgagtggaggtcaacgagc

SEQ ID NO: 11933 - DNA, 22 bp, synthetic construct
  source 1..22: mol_type = other DNA
cactgagtggaggtcaacgagc

SEQ ID NO: 11934 - DNA, 23 bp, synthetic construct
  source 1..23: mol_type = other DNA
acactgagtggaggtcaacgagc

SEQ ID NO: 11935 - DNA, 24 bp, synthetic construct
  source 1..24: mol_type = other DNA
cacactgagtggaggtcaacgagc

SEQ ID NO: 11936 - DNA, 25 bp, synthetic construct
  source 1..25: mol_type = other DNA
tcacactgagtggaggtcaacgagc

SEQ ID NO: 11937 - DNA, 26 bp, synthetic construct
  source 1..26: mol_type = other DNA
atcacactgagtggaggtcaacgagc

SEQ ID NO: 11938 - DNA, 27 bp, synthetic construct
  source 1..27: mol_type = other DNA
aatcacactgagtggaggtcaacgagc

SEQ ID NO: 11939 - DNA, 28 bp, synthetic construct
  source 1..28: mol_type = other DNA
gaatcacactgagtggaggtcaacgagc

SEQ ID NO: 11940 - DNA, 29 bp, synthetic construct
  source 1..29: mol_type = other DNA
ggaatcacactgagtggaggtcaacgagc

SEQ ID NO: 11941 - DNA, 30 bp, synthetic construct; identical to SEQ ID NO: 10527
  source 1..30: mol_type = other DNA

SEQ ID NO: 11942 - DNA, 31 bp, synthetic construct; identical to SEQ ID NO: 10528
  source 1..31: mol_type = other DNA

SEQ ID NO: 11943 - DNA, 32 bp, synthetic construct; identical to SEQ ID NO: 10529
  source 1..32: mol_type = other DNA

SEQ ID NO: 11944 - DNA, 33 bp, synthetic construct; identical to SEQ ID NO: 10530
  source 1..33: mol_type = other DNA

SEQ ID NO: 11945 - DNA, 34 bp, synthetic construct; identical to SEQ ID NO: 10531
  source 1..34: mol_type = other DNA

SEQ ID NO: 11946 - DNA, 35 bp, synthetic construct; identical to SEQ ID NO: 10532
  source 1..35: mol_type = other DNA

SEQ ID NO: 11947 - DNA, 36 bp, synthetic construct; identical to SEQ ID NO: 10533
  source 1..36: mol_type = other DNA

SEQ ID NO: 11948 - DNA, 37 bp, synthetic construct; identical to SEQ ID NO: 10534
  source 1..37: mol_type = other DNA

SEQ ID NO: 11949 - DNA, 38 bp, synthetic construct; identical to SEQ ID NO: 10535
  source 1..38: mol_type = other DNA

SEQ ID NO: 11950 - DNA, 39 bp, synthetic construct; identical to SEQ ID NO: 9858
  source 1..39: mol_type = other DNA

SEQ ID NO: 11951 - DNA, 40 bp, synthetic construct; identical to SEQ ID NO: 9859
  source 1..40: mol_type = other DNA

SEQ ID NO: 11952 - DNA, 10 bp, synthetic construct
  source 1..10: mol_type = other DNA
cacactgagt

SEQ ID NO: 11953 - DNA, 10 bp, synthetic construct
  source 1..10: mol_type = other DNA
cacattgagt

SEQ ID NO: 11954 - DNA, 11 bp, synthetic construct
  source 1..11: mol_type = other DNA
tcacattgagt

SEQ ID NO: 11955 - DNA, 11 bp, synthetic construct
  source 1..11: mol_type = other DNA
tcacactgagt

SEQ ID NO: 11956 - DNA, 12 bp, synthetic construct
  source 1..12: mol_type = other DNA
atcacattgagt

SEQ ID NO: 11957 - DNA, 12 bp, synthetic construct
  source 1..12: mol_type = other DNA
atcacactgagt

SEQ ID NO: 11958 - DNA, 13 bp, synthetic construct
  source 1..13: mol_type = other DNA
aatcacactgagt

SEQ ID NO: 11959 - DNA, 13 bp, synthetic construct
  source 1..13: mol_type = other DNA
aatcacattgagt

SEQ ID NO: 11960 - DNA, 14 bp, synthetic construct
  source 1..14: mol_type = other DNA
gaatcacactgagt

SEQ ID NO: 11961 - DNA, 14 bp, synthetic construct
  source 1..14: mol_type = other DNA
gaatcacattgagt

SEQ ID NO: 11962 - DNA, 15 bp, synthetic construct
  source 1..15: mol_type = other DNA
ggaatcacactgagt

SEQ ID NO: 11963 - DNA, 15 bp, synthetic construct
  source 1..15: mol_type = other DNA
ggaatcacattgagt

SEQ ID NO: 11964 - DNA, 16 bp, synthetic construct
  source 1..16: mol_type = other DNA
tggaatcacactgagt

SEQ ID NO: 11965 - DNA, 16 bp, synthetic construct
  source 1..16: mol_type = other DNA
tggaatcacattgagt

SEQ ID NO: 11966 - DNA, 17 bp, synthetic construct
  source 1..17: mol_type = other DNA
gtggaatcacactgagt

SEQ ID NO: 11967 - DNA, 17 bp, synthetic construct
  source 1..17: mol_type = other DNA
gtggaatcacattgagt

SEQ ID NO: 11968 - DNA, 18 bp, synthetic construct
  source 1..18: mol_type = other DNA
ggtggaatcacactgagt

SEQ ID NO: 11969 - DNA, 18 bp, synthetic construct
  source 1..18: mol_type = other DNA
ggtggaatcacattgagt

SEQ ID NO: 11970 - DNA, 19 bp, synthetic construct
  source 1..19: mol_type = other DNA
aggtggaatcacactgagt

SEQ ID NO: 11971 - DNA, 19 bp, synthetic construct
  source 1..19: mol_type = other DNA
aggtggaatcacattgagt

SEQ ID NO: 11972 - DNA, 20 bp, synthetic construct
  source 1..20: mol_type = other DNA
aaggtggaatcacactgagt

SEQ ID NO: 11973 - DNA, 20 bp, synthetic construct
  source 1..20: mol_type = other DNA
aaggtggaatcacattgagt

SEQ ID NO: 11974 - DNA, 21 bp, synthetic construct
  source 1..21: mol_type = other DNA
gaaggtggaatcacattgagt

SEQ ID NO: 11975 - DNA, 21 bp, synthetic construct
  source 1..21: mol_type = other DNA
gaaggtggaatcacactgagt

SEQ ID NO: 11976 - DNA, 22 bp, synthetic construct
  source 1..22: mol_type = other DNA
agaaggtggaatcacattgagt

SEQ ID NO: 11977 - DNA, 22 bp, synthetic construct
  source 1..22: mol_type = other DNA
agaaggtggaatcacactgagt

SEQ ID NO: 11978 - DNA, 23 bp, synthetic construct
  source 1..23: mol_type = other DNA
gagaaggtggaatcacactgagt

SEQ ID NO: 11979 - DNA, 23 bp, synthetic construct
  source 1..23: mol_type = other DNA
gagaaggtggaatcacattgagt

SEQ ID NO: 11980 - DNA, 24 bp, synthetic construct
  source 1..24: mol_type = other DNA
ggagaaggtggaatcacactgagt

SEQ ID NO: 11981 - DNA, 24 bp, synthetic construct
  source 1..24: mol_type = other DNA
ggagaaggtggaatcacattgagt

SEQ ID NO: 11982 - DNA, 25 bp, synthetic construct
  source 1..25: mol_type = other DNA
tggagaaggtggaatcacattgagt

SEQ ID NO: 11983 - DNA, 25 bp, synthetic construct
  source 1..25: mol_type = other DNA
tggagaaggtggaatcacactgagt

SEQ ID NO: 11984 - DNA, 26 bp, synthetic construct
  source 1..26: mol_type = other DNA
ttggagaaggtggaatcacattgagt

SEQ ID NO: 11985 - DNA, 26 bp, synthetic construct
  source 1..26: mol_type = other DNA
ttggagaaggtggaatcacactgagt

SEQ ID NO: 11986 - DNA, 27 bp, synthetic construct
  source 1..27: mol_type = other DNA
cttggagaaggtggaatcacactgagt

SEQ ID NO: 11987 - DNA, 27 bp, synthetic construct
  source 1..27: mol_type = other DNA
cttggagaaggtggaatcacattgagt

SEQ ID NO: 11988 - DNA, 28 bp, synthetic construct
  source 1..28: mol_type = other DNA
tcttggagaaggtggaatcacattgagt

SEQ ID NO: 11989 - DNA, 28 bp, synthetic construct
  source 1..28: mol_type = other DNA
tcttggagaaggtggaatcacactgagt

SEQ ID NO: 11990 - DNA, 29 bp, synthetic construct
  source 1..29: mol_type = other DNA
ttcttggagaaggtggaatcacattgagt

SEQ ID NO: 11991 - DNA, 29 bp, synthetic construct
  source 1..29: mol_type = other DNA
ttcttggagaaggtggaatcacactgagt

SEQ ID NO: 11992 - DNA, 30 bp, synthetic construct; identical to SEQ ID NO: 9871
  source 1..30: mol_type = other DNA

SEQ ID NO: 11993 - DNA, 30 bp, synthetic construct; identical to SEQ ID NO: 9870
  source 1..30: mol_type = other DNA

SEQ ID NO: 11994 - DNA, 31 bp, synthetic construct; identical to SEQ ID NO: 9873
  source 1..31: mol_type = other DNA

SEQ ID NO: 11995 - DNA, 31 bp, synthetic construct; identical to SEQ ID NO: 9872
  source 1..31: mol_type = other DNA

SEQ ID NO: 11996 - DNA, 32 bp, synthetic construct; identical to SEQ ID NO: 9875
  source 1..32: mol_type = other DNA

SEQ ID NO: 11997 - DNA, 32 bp, synthetic construct; identical to SEQ ID NO: 9874
  source 1..32: mol_type = other DNA

SEQ ID NO: 11998 - DNA, 33 bp, synthetic construct; identical to SEQ ID NO: 9877
  source 1..33: mol_type = other DNA

SEQ ID NO: 11999 - DNA, 33 bp, synthetic construct; identical to SEQ ID NO: 9876
  source 1..33: mol_type = other DNA

SEQ ID NO: 12000 - DNA, 34 bp, synthetic construct; identical to SEQ ID NO: 9879
  source 1..34: mol_type = other DNA

SEQ ID NO: 12001 - DNA, 34 bp, synthetic construct; identical to SEQ ID NO: 9878
  source 1..34: mol_type = other DNA

SEQ ID NO: 12002 - DNA, 35 bp, synthetic construct; identical to SEQ ID NO: 9881
  source 1..35: mol_type = other DNA

SEQ ID NO: 12003 - DNA, 35 bp, synthetic construct; identical to SEQ ID NO: 9880
  source 1..35: mol_type = other DNA

SEQ ID NO: 12004 - DNA, 36 bp, synthetic construct; identical to SEQ ID NO: 9882
  source 1..36: mol_type = other DNA

SEQ ID NO: 12005 - DNA, 36 bp, synthetic construct; identical to SEQ ID NO: 9883
  source 1..36: mol_type = other DNA

SEQ ID NO: 12006 - DNA, 37 bp, synthetic construct; identical to SEQ ID NO: 9884
  source 1..37: mol_type = other DNA

SEQ ID NO: 12007 - DNA, 37 bp, synthetic construct; identical to SEQ ID NO: 9885
  source 1..37: mol_type = other DNA

SEQ ID NO: 12008 - DNA, 38 bp, synthetic construct; identical to SEQ ID NO: 9887
  source 1..38: mol_type = other DNA

SEQ ID NO: 12009 - DNA, 38 bp, synthetic construct; identical to SEQ ID NO: 9886
  source 1..38: mol_type = other DNA

SEQ ID NO: 12010 - DNA, 39 bp, synthetic construct; identical to SEQ ID NO: 9889
  source 1..39: mol_type = other DNA

SEQ ID NO: 12011 - DNA, 39 bp, synthetic construct; identical to SEQ ID NO: 9888
  source 1..39: mol_type = other DNA

SEQ ID NO: 12012 - DNA, 40 bp, synthetic construct; identical to SEQ ID NO: 9890
  source 1..40: mol_type = other DNA

SEQ ID NO: 12013 - DNA, 40 bp, synthetic construct; identical to SEQ ID NO: 9891
  source 1..40: mol_type = other DNA

SEQ ID NO: 12014 - DNA, 36 bp, synthetic construct; identical to SEQ ID NO: 9974
  source 1..36: mol_type = other DNA

SEQ ID NO: 12015 - DNA, 36 bp, synthetic construct; identical to SEQ ID NO: 9975
  source 1..36: mol_type = other DNA

SEQ ID NO: 12016 - DNA, 37 bp, synthetic construct; identical to SEQ ID NO: 9977
  source 1..37: mol_type = other DNA

SEQ ID NO: 12017 - DNA, 37 bp, synthetic construct; identical to SEQ ID NO: 9976
  source 1..37: mol_type = other DNA

SEQ ID NO: 12018 - DNA, 38 bp, synthetic construct; identical to SEQ ID NO: 9979
  source 1..38: mol_type = other DNA

SEQ ID NO: 12019 - DNA, 38 bp, synthetic construct; identical to SEQ ID NO: 9978
  source 1..38: mol_type = other DNA

SEQ ID NO: 12020 - DNA, 39 bp, synthetic construct; identical to SEQ ID NO: 9980
  source 1..39: mol_type = other DNA

SEQ ID NO: 12021 - DNA, 39 bp, synthetic construct; identical to SEQ ID NO: 9981
  source 1..39: mol_type = other DNA

SEQ ID NO: 12022 - DNA, 40 bp, synthetic construct; identical to SEQ ID NO: 9983
  source 1..40: mol_type = other DNA

SEQ ID NO: 12023 - DNA, 40 bp, synthetic construct; identical to SEQ ID NO: 9982
  source 1..40: mol_type = other DNA

SEQ ID NO: 12024 - DNA, 35 bp, synthetic construct; identical to SEQ ID NO: 10007
  source 1..35: mol_type = other DNA

SEQ ID NO: 12025 - DNA, 36 bp, synthetic construct; identical to SEQ ID NO: 10008
  source 1..36: mol_type = other DNA

SEQ ID NO: 12026 - DNA, 37 bp, synthetic construct; identical to SEQ ID NO: 10009
  source 1..37: mol_type = other DNA

SEQ ID NO: 12027 - DNA, 38 bp, synthetic construct; identical to SEQ ID NO: 10010
  source 1..38: mol_type = other DNA

SEQ ID NO: 12028 - DNA, 39 bp, synthetic construct; identical to SEQ ID NO: 10011
  source 1..39: mol_type = other DNA

SEQ ID NO: 12029 - DNA, 40 bp, synthetic construct; identical to SEQ ID NO: 10012
  source 1..40: mol_type = other DNA

SEQ ID NO: 12030 - DNA, 31 bp, synthetic construct; identical to SEQ ID NO: 9484
  source 1..31: mol_type = other DNA

SEQ ID NO: 12031 - DNA, 31 bp, synthetic construct; identical to SEQ ID NO: 9483
  source 1..31: mol_type = other DNA

SEQ ID NO: 12032 - DNA, 32 bp, synthetic construct; identical to SEQ ID NO: 9486
  source 1..32: mol_type = other DNA

SEQ ID NO: 12033 - DNA, 32 bp, synthetic construct; identical to SEQ ID NO: 9485
  source 1..32: mol_type = other DNA

SEQ ID NO: 12034 - DNA, 33 bp, synthetic construct; identical to SEQ ID NO: 9488
  source 1..33: mol_type = other DNA

SEQ ID NO: 12035 - DNA, 33 bp, synthetic construct; identical to SEQ ID NO: 9487
  source 1..33: mol_type = other DNA

SEQ ID NO: 12036 - DNA, 34 bp, synthetic construct; identical to SEQ ID NO: 9490
  source 1..34: mol_type = other DNA

SEQ ID NO: 12037 - DNA, 34 bp, synthetic construct; identical to SEQ ID NO: 9489
  source 1..34: mol_type = other DNA

SEQ ID NO: 12038 - DNA, 35 bp, synthetic construct; identical to SEQ ID NO: 9492
  source 1..35: mol_type = other DNA

SEQ ID NO: 12039 - DNA, 35 bp, synthetic construct; identical to SEQ ID NO: 9491
  source 1..35: mol_type = other DNA

SEQ ID NO: 12040 - DNA, 36 bp, synthetic construct; identical to SEQ ID NO: 9493
  source 1..36: mol_type = other DNA

SEQ ID NO: 12041 - DNA, 36 bp, synthetic construct; identical to SEQ ID NO: 9494
  source 1..36: mol_type = other DNA

SEQ ID NO: 12042 - DNA, 37 bp, synthetic construct; identical to SEQ ID NO: 9496
  source 1..37: mol_type = other DNA

SEQ ID NO: 12043 - DNA, 37 bp, synthetic construct; identical to SEQ ID NO: 9495
  source 1..37: mol_type = other DNA

SEQ ID NO: 12044 - DNA, 38 bp, synthetic construct; identical to SEQ ID NO: 9498
  source 1..38: mol_type = other DNA

SEQ ID NO: 12045 - DNA, 38 bp, synthetic construct; identical to SEQ ID NO: 9497
  source 1..38: mol_type = other DNA

SEQ ID NO: 12046 - DNA, 39 bp, synthetic construct; identical to SEQ ID NO: 9500
  source 1..39: mol_type = other DNA

SEQ ID NO: 12047 - DNA, 39 bp, synthetic construct; identical to SEQ ID NO: 9499
  source 1..39: mol_type = other DNA

SEQ ID NO: 12048 - DNA, 40 bp, synthetic construct; identical to SEQ ID NO: 9501
  source 1..40: mol_type = other DNA

SEQ ID NO: 12049 - DNA, 40 bp, synthetic construct; identical to SEQ ID NO: 9502
  source 1..40: mol_type = other DNA

SEQ ID NO: 12050 - DNA, 30 bp, synthetic construct; identical to SEQ ID NO: 9523
  source 1..30: mol_type = other DNA

SEQ ID NO: 12051 - DNA, 31 bp, synthetic construct; identical to SEQ ID NO: 9524
  source 1..31: mol_type = other DNA

SEQ ID NO: 12052 - DNA, 32 bp, synthetic construct; identical to SEQ ID NO: 9525
  source 1..32: mol_type = other DNA

SEQ ID NO: 12053 - DNA, 33 bp, synthetic construct; identical to SEQ ID NO: 9526
  source 1..33: mol_type = other DNA

SEQ ID NO: 12054 - DNA, 34 bp, synthetic construct; identical to SEQ ID NO: 9527
  source 1..34: mol_type = other DNA

SEQ ID NO: 12055 - DNA, 35 bp, synthetic construct; identical to SEQ ID NO: 9528
  source 1..35: mol_type = other DNA

SEQ ID NO: 12056 - DNA, 36 bp, synthetic construct; identical to SEQ ID NO: 9529
  source 1..36: mol_type = other DNA

SEQ ID NO: 12057 - DNA, 37 bp, synthetic construct; identical to SEQ ID NO: 9530
  source 1..37: mol_type = other DNA

SEQ ID NO: 12058 - DNA, 38 bp, synthetic construct; identical to SEQ ID NO: 9531
  source 1..38: mol_type = other DNA

SEQ ID NO: 12059 - DNA, 39 bp, synthetic construct; identical to SEQ ID NO: 9532
  source 1..39: mol_type = other DNA

SEQ ID NO: 12060 - DNA, 40 bp, synthetic construct; identical to SEQ ID NO: 9533
  source 1..40: mol_type = other DNA

SEQ ID NO: 12061 - DNA, 10 bp, synthetic construct
  source 1..10: mol_type = other DNA
acctccactc

SEQ ID NO: 12062 - DNA, 11 bp, synthetic construct
  source 1..11: mol_type = other DNA
gacctccactc

SEQ ID NO: 12063 - DNA, 12 bp, synthetic construct
  source 1..12: mol_type = other DNA
tgacctccactc

SEQ ID NO: 12064 - DNA, 13 bp, synthetic construct
  source 1..13: mol_type = other DNA
ttgacctccactc

SEQ ID NO: 12065 - DNA, 14 bp, synthetic construct
  source 1..14: mol_type = other DNA
gttgacctccactc

SEQ ID NO: 12066 - DNA, 15 bp, synthetic construct
  source 1..15: mol_type = other DNA
cgttgacctccactc

SEQ ID NO: 12067 - DNA, 16 bp, synthetic construct
  source 1..16: mol_type = other DNA
tcgttgacctccactc

SEQ ID NO: 12068 - DNA, 17 bp, synthetic construct
  source 1..17: mol_type = other DNA
ctcgttgacctccactc

SEQ ID NO: 12069 - DNA, 18 bp, synthetic construct
  source 1..18: mol_type = other DNA
gctcgttgacctccactc

SEQ ID NO: 12070 - DNA, 19 bp, synthetic construct
  source 1..19: mol_type = other DNA
tgctcgttgacctccactc

SEQ ID NO: 12071 - DNA, 20 bp, synthetic construct
  source 1..20: mol_type = other DNA
ttgctcgttgacctccactc

SEQ ID NO: 12072 - DNA, 21 bp, synthetic construct
  source 1..21: mol_type = other DNA
cttgctcgttgacctccactc

SEQ ID NO: 12073 - DNA, 22 bp, synthetic construct
  source 1..22: mol_type = other DNA
tcttgctcgttgacctccactc

SEQ ID NO: 12074 - DNA, 23 bp, synthetic construct
  source 1..23: mol_type = other DNA
ttcttgctcgttgacctccactc

SEQ ID NO: 12075 - DNA, 24 bp, synthetic construct
  source 1..24: mol_type = other DNA
attcttgctcgttgacctccactc

SEQ ID NO: 12076 - DNA, 25 bp, synthetic construct
  source 1..25: mol_type = other DNA
aattcttgctcgttgacctccactc

SEQ ID NO: 12077 - DNA, 26 bp, synthetic construct
  source 1..26: mol_type = other DNA
aaattcttgctcgttgacctccactc

SEQ ID NO: 12078 - DNA, 27 bp, synthetic construct
  source 1..27: mol_type = other DNA
gaaattcttgctcgttgacctccactc

SEQ ID NO: 12079 - DNA, 28 bp, synthetic construct
  source 1..28: mol_type = other DNA
agaaattcttgctcgttgacctccactc

SEQ ID NO: 12080 - DNA, 29 bp, synthetic construct
  source 1..29: mol_type = other DNA
aagaaattcttgctcgttgacctccactc

SEQ ID NO: 12081 - DNA, 30 bp, synthetic construct; identical to SEQ ID NO: 10082
  source 1..30: mol_type = other DNA

SEQ ID NO: 12082 - DNA, 31 bp, synthetic construct; identical to SEQ ID NO: 10083
  source 1..31: mol_type = other DNA

SEQ ID NO: 12083 - DNA, 32 bp, synthetic construct; identical to SEQ ID NO: 10084
  source 1..32: mol_type = other DNA

SEQ ID NO: 12084 - DNA, 33 bp, synthetic construct; identical to SEQ ID NO: 10085
  source 1..33: mol_type = other DNA

SEQ ID NO: 12085 - DNA, 34 bp, synthetic construct; identical to SEQ ID NO: 10086
  source 1..34: mol_type = other DNA

SEQ ID NO: 12086 - DNA, 35 bp, synthetic construct; identical to SEQ ID NO: 10087
  source 1..35: mol_type = other DNA

SEQ ID NO: 12087 - DNA, 36 bp, synthetic construct; identical to SEQ ID NO: 10088
  source 1..36: mol_type = other DNA

SEQ ID NO: 12088 - DNA, 37 bp, synthetic construct; identical to SEQ ID NO: 10089
  source 1..37: mol_type = other DNA

SEQ ID NO: 12089 - DNA, 38 bp, synthetic construct; identical to SEQ ID NO: 10090
  source 1..38: mol_type = other DNA

SEQ ID NO: 12090 - DNA, 39 bp, synthetic construct; identical to SEQ ID NO: 10091
  source 1..39: mol_type = other DNA

SEQ ID NO: 12091 - DNA, 40 bp, synthetic construct; identical to SEQ ID NO: 10092
  source 1..40: mol_type = other DNA

SEQ ID NO: 12092 - DNA, 27 bp, synthetic construct
  source 1..27: mol_type = other DNA
cctccactcagtgtgattccaccttct

SEQ ID NO: 12093 - DNA, 28 bp, synthetic construct
  source 1..28: mol_type = other DNA
acctccactcagtgtgattccaccttct

SEQ ID NO: 12094 - DNA, 29 bp, synthetic construct
  source 1..29: mol_type = other DNA
gacctccactcagtgtgattccaccttct

SEQ ID NO: 12095 - DNA, 30 bp, synthetic construct; identical to SEQ ID NO: 10102
  source 1..30: mol_type = other DNA

SEQ ID NO: 12096 - DNA, 31 bp, synthetic construct; identical to SEQ ID NO: 10103
  source 1..31: mol_type = other DNA

SEQ ID NO: 12097 - DNA, 32 bp, synthetic construct; identical to SEQ ID NO: 10104
  source 1..32: mol_type = other DNA

SEQ ID NO: 12098 - DNA, 33 bp, synthetic construct; identical to SEQ ID NO: 10105
  source 1..33: mol_type = other DNA

SEQ ID NO: 12099 - DNA, 34 bp, synthetic construct; identical to SEQ ID NO: 10106
  source 1..34: mol_type = other DNA

SEQ ID NO: 12100 - DNA, 35 bp, synthetic construct; identical to SEQ ID NO: 10107
  source 1..35: mol_type = other DNA

SEQ ID NO: 12101 - DNA, 36 bp, synthetic construct; identical to SEQ ID NO: 10108
  source 1..36: mol_type = other DNA

SEQ ID NO: 12102 - DNA, 37 bp, synthetic construct; identical to SEQ ID NO: 10109
  source 1..37: mol_type = other DNA

SEQ ID NO: 12103 - DNA, 38 bp, synthetic construct; identical to SEQ ID NO: 10110
  source 1..38: mol_type = other DNA

SEQ ID NO: 12104 - DNA, 39 bp, synthetic construct; identical to SEQ ID NO: 10111
  source 1..39: mol_type = other DNA

SEQ ID NO: 12105 - DNA, 40 bp, synthetic construct; identical to SEQ ID NO: 10112
  source 1..40: mol_type = other DNA

SEQ ID NO: 12106 - DNA, 26 bp, synthetic construct
  source 1..26: mol_type = other DNA
cctccactcagtgtgattccaccttc

SEQ ID NO: 12107 - DNA, 27 bp, synthetic construct
  source 1..27: mol_type = other DNA
acctccactcagtgtgattccaccttc

SEQ ID NO: 12108 - DNA, 28 bp, synthetic construct
  source 1..28: mol_type = other DNA
gacctccactcagtgtgattccaccttc

SEQ ID NO: 12109 - DNA, 29 bp, synthetic construct
  source 1..29: mol_type = other DNA
tgacctccactcagtgtgattccaccttc

SEQ ID NO: 12110 - DNA, 30 bp, synthetic construct; identical to SEQ ID NO: 10123
  source 1..30: mol_type = other DNA

SEQ ID NO: 12111 - DNA, 31 bp, synthetic construct; identical to SEQ ID NO: 10124
  source 1..31: mol_type = other DNA

SEQ ID NO: 12112 - DNA, 32 bp, synthetic construct; identical to SEQ ID NO: 10125
  source 1..32: mol_type = other DNA

SEQ ID NO: 12113 - DNA, 33 bp, synthetic construct; identical to SEQ ID NO: 10126
  source 1..33: mol_type = other DNA

SEQ ID NO: 12114 - DNA, 34 bp, synthetic construct; identical to SEQ ID NO: 10127
  source 1..34: mol_type = other DNA

SEQ ID NO: 12115 - DNA, 35 bp, synthetic construct; identical to SEQ ID NO: 10128
  source 1..35: mol_type = other DNA

SEQ ID NO: 12116 - DNA, 36 bp, synthetic construct; identical to SEQ ID NO: 10129
  source 1..36: mol_type = other DNA

SEQ ID NO: 12117 - DNA, 37 bp, synthetic construct; identical to SEQ ID NO: 10130
  source 1..37: mol_type = other DNA

SEQ ID NO: 12118 - DNA, 38 bp, synthetic construct; identical to SEQ ID NO: 10131
  source 1..38: mol_type = other DNA

SEQ ID NO: 12119 - DNA, 39 bp, synthetic construct; identical to SEQ ID NO: 10132
  source 1..39: mol_type = other DNA

SEQ ID NO: 12120 - DNA, 40 bp, synthetic construct; identical to SEQ ID NO: 10133
  source 1..40: mol_type = other DNA

SEQ ID NO: 12121 - DNA, 33 bp, synthetic construct; identical to SEQ ID NO: 10140
  source 1..33: mol_type = other DNA

SEQ ID NO: 12122 - DNA, 34 bp, synthetic construct; identical to SEQ ID NO: 10141
  source 1..34: mol_type = other DNA

SEQ ID NO: 12123 - DNA, 35 bp, synthetic construct; identical to SEQ ID NO: 10142
  source 1..35: mol_type = other DNA

SEQ ID NO: 12124 - DNA, 36 bp, synthetic construct; identical to SEQ ID NO: 10143
  source 1..36: mol_type = other DNA

SEQ ID NO: 12125 - DNA, 37 bp, synthetic construct; identical to SEQ ID NO: 10144
  source 1..37: mol_type = other DNA

SEQ ID NO: 12126 - DNA, 38 bp, synthetic construct; identical to SEQ ID NO: 10145
  source 1..38: mol_type = other DNA

SEQ ID NO: 12127 - DNA, 39 bp, synthetic construct; identical to SEQ ID NO: 10146
  source 1..39: mol_type = other DNA

SEQ ID NO: 12128 - DNA, 40 bp, synthetic construct; identical to SEQ ID NO: 10147
  source 1..40: mol_type = other DNA

SEQ ID NO: 12129 - DNA, 10 bp, synthetic construct
  source 1..10: mol_type = other DNA
cctccactca

SEQ ID NO: 12130 - DNA, 11 bp, synthetic construct
  source 1..11: mol_type = other DNA
acctccactca

SEQ ID NO: 12131 - DNA, 12 bp, synthetic construct
  source 1..12: mol_type = other DNA
gacctccactca

SEQ ID NO: 12132 - DNA, 13 bp, synthetic construct
  source 1..13: mol_type = other DNA
tgacctccactca

SEQ ID NO: 12133 - DNA, 14 bp, synthetic construct
  source 1..14: mol_type = other DNA
ttgacctccactca

SEQ ID NO: 12134 - DNA, 15 bp, synthetic construct
  source 1..15: mol_type = other DNA
gttgacctccactca

SEQ ID NO: 12135 - DNA, 16 bp, synthetic construct
  source 1..16: mol_type = other DNA
cgttgacctccactca

SEQ ID NO: 12136 - DNA, 17 bp, synthetic construct
  source 1..17: mol_type = other DNA
tcgttgacctccactca

SEQ ID NO: 12137 - DNA, 18 bp, synthetic construct
  source 1..18: mol_type = other DNA
ctcgttgacctccactca

SEQ ID NO: 12138 - DNA, 19 bp, synthetic construct
  source 1..19: mol_type = other DNA
gctcgttgacctccactca

SEQ ID NO: 12139 - DNA, 20 bp, synthetic construct
  source 1..20: mol_type = other DNA
tgctcgttgacctccactca

SEQ ID NO: 12140 - DNA, 21 bp, synthetic construct
  source 1..21: mol_type = other DNA
ttgctcgttgacctccactca

SEQ ID NO: 12141 - DNA, 22 bp, synthetic construct
  source 1..22: mol_type = other DNA
cttgctcgttgacctccactca

SEQ ID NO: 12142 - DNA, 23 bp, synthetic construct
  source 1..23: mol_type = other DNA
tcttgctcgttgacctccactca

SEQ ID NO: 12143 - DNA, 24 bp, synthetic construct
  source 1..24: mol_type = other DNA
ttcttgctcgttgacctccactca

SEQ ID NO: 12144 - DNA, 25 bp, synthetic construct
  source 1..25: mol_type = other DNA
attcttgctcgttgacctccactca

SEQ ID NO: 12145 - DNA, 26 bp, synthetic construct
  source 1..26: mol_type = other DNA
aattcttgctcgttgacctccactca

SEQ ID NO: 12146 - DNA, 27 bp, synthetic construct
  source 1..27: mol_type = other DNA
aaattcttgctcgttgacctccactca

SEQ ID NO: 12147 - DNA, 28 bp, synthetic construct
  source 1..28: mol_type = other DNA
gaaattcttgctcgttgacctccactca

SEQ ID NO: 12148 - DNA, 29 bp, synthetic construct
  source 1..29: mol_type = other DNA
agaaattcttgctcgttgacctccactca

SEQ ID NO: 12149 - DNA, 30 bp, synthetic construct; identical to SEQ ID NO: 10168
  source 1..30: mol_type = other DNA

SEQ ID NO: 12150 - DNA, 31 bp, synthetic construct; identical to SEQ ID NO: 10169
  source 1..31: mol_type = other DNA

SEQ ID NO: 12151 - DNA, 32 bp, synthetic construct; identical to SEQ ID NO: 10170
  source 1..32: mol_type = other DNA

SEQ ID NO: 12152 - DNA, 33 bp, synthetic construct; identical to SEQ ID NO: 10171
  source 1..33: mol_type = other DNA

SEQ ID NO: 12153 - DNA, 34 bp, synthetic construct; identical to SEQ ID NO: 10172
  source 1..34: mol_type = other DNA

SEQ ID NO: 12154 - DNA, 35 bp, synthetic construct; identical to SEQ ID NO: 10173
  source 1..35: mol_type = other DNA

SEQ ID NO: 12155 - DNA, 36 bp, synthetic construct; identical to SEQ ID NO: 10174
  source 1..36: mol_type = other DNA

SEQ ID NO: 12156 - DNA, 37 bp, synthetic construct; identical to SEQ ID NO: 10175
  source 1..37: mol_type = other DNA

SEQ ID NO: 12157 - DNA, 38 bp, synthetic construct; identical to SEQ ID NO: 10176
  source 1..38: mol_type = other DNA

SEQ ID NO: 12158 - DNA, 39 bp, synthetic construct; identical to SEQ ID NO: 10177
  source 1..39: mol_type = other DNA

SEQ ID NO: 12159 - DNA, 40 bp, synthetic construct; identical to SEQ ID NO: 10178
  source 1..40: mol_type = other DNA

SEQ ID NO: 12160 - DNA, 34 bp, synthetic construct; identical to SEQ ID NO: 10185
  source 1..34: mol_type = other DNA

SEQ ID NO: 12161 - DNA, 35 bp, synthetic construct; identical to SEQ ID NO: 10186
  source 1..35: mol_type = other DNA

SEQ ID NO: 12162 - DNA, 36 bp, synthetic construct; identical to SEQ ID NO: 10187
  source 1..36: mol_type = other DNA

SEQ ID NO: 12163 - DNA, 37 bp, synthetic construct; identical to SEQ ID NO: 10188
  source 1..37: mol_type = other DNA

SEQ ID NO: 12164 - DNA, 38 bp, synthetic construct; identical to SEQ ID NO: 10189
  source 1..38: mol_type = other DNA

SEQ ID NO: 12165 - DNA, 39 bp, synthetic construct; identical to SEQ ID NO: 10190
  source 1..39: mol_type = other DNA

SEQ ID NO: 12166 - DNA, 40 bp, synthetic construct; identical to SEQ ID NO: 10191
  source 1..40: mol_type = other DNA

SEQ ID NO: 12167 - DNA, 10 bp, synthetic construct
  source 1..10: mol_type = other DNA
gacctccact

SEQ ID NO: 12168 - DNA, 11 bp, synthetic construct
  source 1..11: mol_type = other DNA
tgacctccact

SEQ ID NO: 12169 - DNA, 12 bp, synthetic construct
  source 1..12: mol_type = other DNA
ttgacctccact

SEQ ID NO: 12170 - DNA, 13 bp, synthetic construct
  source 1..13: mol_type = other DNA
gttgacctccact

SEQ ID NO: 12171 - DNA, 14 bp, synthetic construct
  source 1..14: mol_type = other DNA
cgttgacctccact

SEQ ID NO: 12172 - DNA, 15 bp, synthetic construct
  source 1..15: mol_type = other DNA
tcgttgacctccact

SEQ ID NO: 12173 - DNA, 16 bp, synthetic construct
  source 1..16: mol_type = other DNA
ctcgttgacctccact

SEQ ID NO: 12174 - DNA, 17 bp, synthetic construct
  source 1..17: mol_type = other DNA
gctcgttgacctccact

SEQ ID NO: 12175 - DNA, 18 bp, synthetic construct
  source 1..18: mol_type = other DNA
tgctcgttgacctccact

SEQ ID NO: 12176 - DNA, 19 bp, synthetic construct
  source 1..19: mol_type = other DNA
ttgctcgttgacctccact

SEQ ID NO: 12177 - DNA, 20 bp, synthetic construct
  source 1..20: mol_type = other DNA
cttgctcgttgacctccact

SEQ ID NO: 12178 - DNA, 21 bp, synthetic construct
  source 1..21: mol_type = other DNA
tcttgctcgttgacctccact

SEQ ID NO: 12179 - DNA, 22 bp, synthetic construct
  source 1..22: mol_type = other DNA
ttcttgctcgttgacctccact

SEQ ID NO: 12180 - DNA, 23 bp, synthetic construct
  source 1..23: mol_type = other DNA
attcttgctcgttgacctccact

SEQ ID NO: 12181 - DNA, 24 bp, synthetic construct
  source 1..24: mol_type = other DNA
aattcttgctcgttgacctccact

SEQ ID NO: 12182 - DNA, 25 bp, synthetic construct
  source 1..25: mol_type = other DNA
aaattcttgctcgttgacctccact

SEQ ID NO: 12183 - DNA, 26 bp, synthetic construct
  source 1..26: mol_type = other DNA
gaaattcttgctcgttgacctccact

SEQ ID NO: 12184 - DNA, 27 bp, synthetic construct
  source 1..27: mol_type = other DNA
agaaattcttgctcgttgacctccact

SEQ ID NO: 12185 - DNA, 28 bp, synthetic construct
  source 1..28: mol_type = other DNA
aagaaattcttgctcgttgacctccact

SEQ ID NO: 12186 - DNA, 29 bp, synthetic construct
  source 1..29: mol_type = other DNA
aaagaaattcttgctcgttgacctccact

SEQ ID NO: 12187 - DNA, 30 bp, synthetic construct; identical to SEQ ID NO: 10212
  source 1..30: mol_type = other DNA

SEQ ID NO: 12188 - DNA, 31 bp, synthetic construct; identical to SEQ ID NO: 10213
  source 1..31: mol_type = other DNA

SEQ ID NO: 12189 - DNA, 32 bp, synthetic construct; identical to SEQ ID NO: 10214
  source 1..32: mol_type = other DNA

SEQ ID NO: 12190 - DNA, 33 bp, synthetic construct; identical to SEQ ID NO: 10215
  source 1..33: mol_type = other DNA

SEQ ID NO: 12191 - DNA, 34 bp, synthetic construct; identical to SEQ ID NO: 10216
  source 1..34: mol_type = other DNA

SEQ ID NO: 12192 - DNA, 35 bp, synthetic construct; identical to SEQ ID NO: 10217
  source 1..35: mol_type = other DNA

SEQ ID NO: 12193 - DNA, 36 bp, synthetic construct; identical to SEQ ID NO: 10218
  source 1..36: mol_type = other DNA

SEQ ID NO: 12194 - DNA, 37 bp, synthetic construct; identical to SEQ ID NO: 10219
  source 1..37: mol_type = other DNA

SEQ ID NO: 12195 - DNA, 38 bp, synthetic construct; identical to SEQ ID NO: 10220
  source 1..38: mol_type = other DNA

SEQ ID NO: 12196 - DNA, 39 bp, synthetic construct; identical to SEQ ID NO: 10221
  source 1..39: mol_type = other DNA

SEQ ID NO: 12197 - DNA, 40 bp, synthetic construct; identical to SEQ ID NO: 10222
  source 1..40: mol_type = other DNA

SEQ ID NO: 12198 - DNA, 24 bp, synthetic construct
  source 1..24: mol_type = other DNA
cctccactcagtgtgattccacct

SEQ ID NO: 12199 - DNA, 25 bp, synthetic construct
  source 1..25: mol_type = other DNA
acctccactcagtgtgattccacct

SEQ ID NO: 12200 - DNA, 26 bp, synthetic construct
  source 1..26: mol_type = other DNA
gacctccactcagtgtgattccacct

SEQ ID NO: 12201 - DNA, 27 bp, synthetic construct
  source 1..27: mol_type = other DNA
tgacctccactcagtgtgattccacct

SEQ ID NO: 12202 - DNA, 28 bp, synthetic construct
  source 1..28: mol_type = other DNA
ttgacctccactcagtgtgattccacct

SEQ ID NO: 12203 - DNA, 29 bp, synthetic construct
  source 1..29: mol_type = other DNA
gttgacctccactcagtgtgattccacct

SEQ ID NO: 12204 - DNA, 30 bp, synthetic construct; identical to SEQ ID NO: 10235
  source 1..30: mol_type = other DNA

SEQ ID NO: 12205 - DNA, 31 bp, synthetic construct; identical to SEQ ID NO: 10236
  source 1..31: mol_type = other DNA

SEQ ID NO: 12206 - DNA, 32 bp, synthetic construct; identical to SEQ ID NO: 10237
  source 1..32: mol_type = other DNA

SEQ ID NO: 12207 - DNA, 33 bp, synthetic construct; identical to SEQ ID NO: 10238
  source 1..33: mol_type = other DNA

SEQ ID NO: 12208 - DNA, 34 bp, synthetic construct; identical to SEQ ID NO: 10239
  source 1..34: mol_type = other DNA

SEQ ID NO: 12209 - DNA, 35 bp, synthetic construct; identical to SEQ ID NO: 10240
  source 1..35: mol_type = other DNA

SEQ ID NO: 12210 - DNA, 36 bp, synthetic construct; identical to SEQ ID NO: 10241
  source 1..36: mol_type = other DNA

SEQ ID NO: 12211 - DNA, 37 bp, synthetic construct; identical to SEQ ID NO: 10242
  source 1..37: mol_type = other DNA

SEQ ID NO: 12212 - DNA, 38 bp, synthetic construct; identical to SEQ ID NO: 10243
  source 1..38: mol_type = other DNA

SEQ ID NO: 12213 - DNA, 39 bp, synthetic construct; identical to SEQ ID NO: 10244
  source 1..39: mol_type = other DNA

SEQ ID NO: 12214 - DNA, 40 bp, synthetic construct; identical to SEQ ID NO: 10245
  source 1..40: mol_type = other DNA

SEQ ID NO: 12215 - DNA, 31 bp, synthetic construct
  source 1..31: mol_type = other DNA
aggtcaacgagcaagaatttctttagcaagg

SEQ ID NO: 12216 - DNA, 32 bp, synthetic construct
  source 1..32: mol_type = other DNA
gaggtcaacgagcaagaatttctttagcaagg

SEQ ID NO: 12217 - DNA, 33 bp, synthetic construct
  source 1..33: mol_type = other DNA
ggaggtcaacgagcaagaatttctttagcaagg

SEQ ID NO: 12218 - DNA, 34 bp, synthetic construct
  source 1..34: mol_type = other DNA
tggaggtcaacgagcaagaatttctttagcaagg

SEQ ID NO: 12219 - DNA, 35 bp, synthetic construct; identical to SEQ ID NO: 11532
  source 1..35: mol_type = other DNA

SEQ ID NO: 12220 - DNA, 36 bp, synthetic construct; identical to SEQ ID NO: 10878
  source 1..36: mol_type = other DNA

SEQ ID NO: 12221 - DNA, 37 bp, synthetic construct; identical to SEQ ID NO: 10246
  source 1..37: mol_type = other DNA

SEQ ID NO: 12222 - DNA, 38 bp, synthetic construct; identical to SEQ ID NO: 10247
  source 1..38: mol_type = other DNA

SEQ ID NO: 12223 - DNA, 39 bp, synthetic construct; identical to SEQ ID NO: 10248
  source 1..39: mol_type = other DNA

SEQ ID NO: 12224 - DNA, 40 bp, synthetic construct; identical to SEQ ID NO: 10249
  source 1..40: mol_type = other DNA

SEQ ID NO: 12225 - DNA, 25 bp, synthetic construct
  source 1..25: mol_type = other DNA
cctccactcagtgtgattccacctt

SEQ ID NO: 12226 - DNA, 26 bp, synthetic construct
  source 1..26: mol_type = other DNA
acctccactcagtgtgattccacctt

SEQ ID NO: 12227 - DNA, 27 bp, synthetic construct
  source 1..27: mol_type = other DNA
gacctccactcagtgtgattccacctt

SEQ ID NO: 12228 - DNA, 28 bp, synthetic construct
  source 1..28: mol_type = other DNA
tgacctccactcagtgtgattccacctt

SEQ ID NO: 12229 - DNA, 29 bp, synthetic construct
  source 1..29: mol_type = other DNA
ttgacctccactcagtgtgattccacctt

SEQ ID NO: 12230 - DNA, 30 bp, synthetic construct; identical to SEQ ID NO: 10261
  source 1..30: mol_type = other DNA

SEQ ID NO: 12231 - DNA, 31 bp, synthetic construct; identical to SEQ ID NO: 10262
  source 1..31: mol_type = other DNA

SEQ ID NO: 12232 - DNA, 32 bp, synthetic construct; identical to SEQ ID NO: 10263
  source 1..32: mol_type = other DNA

SEQ ID NO: 12233 - DNA, 33 bp, synthetic construct; identical to SEQ ID NO: 10264
  source 1..33: mol_type = other DNA

SEQ ID NO: 12234 - DNA, 34 bp, synthetic construct; identical to SEQ ID NO: 10265
  source 1..34: mol_type = other DNA

SEQ ID NO: 12235 - DNA, 35 bp, synthetic construct; identical to SEQ ID NO: 10266
  source 1..35: mol_type = other DNA

SEQ ID NO: 12236 - DNA, 36 bp, synthetic construct; identical to SEQ ID NO: 10267
  source 1..36: mol_type = other DNA

SEQ ID NO: 12237 - DNA, 37 bp, synthetic construct; identical to SEQ ID NO: 10268
  source 1..37: mol_type = other DNA

SEQ ID NO: 12238 - DNA, 38 bp, synthetic construct; identical to SEQ ID NO: 10269
  source 1..38: mol_type = other DNA

SEQ ID NO: 12239 - DNA, 39 bp, synthetic construct; identical to SEQ ID NO: 10270
  source 1..39: mol_type = other DNA

SEQ ID NO: 12240 - DNA, 40 bp, synthetic construct; identical to SEQ ID NO: 10271
  source 1..40: mol_type = other DNA

SEQ ID NO: 12241 - DNA, 16 bp, synthetic construct
  source 1..16: mol_type = other DNA
aggtcaacgagcaaga

SEQ ID NO: 12242 - DNA, 17 bp, synthetic construct
  source 1..17: mol_type = other DNA
gaggtcaacgagcaaga

SEQ ID NO: 12243 - DNA, 18 bp, synthetic construct
  source 1..18: mol_type = other DNA
ggaggtcaacgagcaaga

SEQ ID NO: 12244 - DNA, 19 bp, synthetic construct
  source 1..19: mol_type = other DNA
tggaggtcaacgagcaaga

SEQ ID NO: 12245 - DNA, 20 bp, synthetic construct
  source 1..20: mol_type = other DNA
gtggaggtcaacgagcaaga

SEQ ID NO: 12246 - DNA, 21 bp, synthetic construct
  source 1..21: mol_type = other DNA
agtggaggtcaacgagcaaga

SEQ ID NO: 12247 - DNA, 22 bp, synthetic construct
  source 1..22: mol_type = other DNA
gagtggaggtcaacgagcaaga

SEQ ID NO: 12248 - DNA, 23 bp, synthetic construct
  source 1..23: mol_type = other DNA
tgagtggaggtcaacgagcaaga

SEQ ID NO: 12249 - DNA, 24 bp, synthetic construct
  source 1..24: mol_type = other DNA
ctgagtggaggtcaacgagcaaga

SEQ ID NO: 12250 - DNA, 25 bp, synthetic construct
  source 1..25: mol_type = other DNA
actgagtggaggtcaacgagcaaga

SEQ ID NO: 12251 - DNA, 26 bp, synthetic construct
  source 1..26: mol_type = other DNA
cactgagtggaggtcaacgagcaaga

SEQ ID NO: 12252 - DNA, 27 bp, synthetic construct
  source 1..27: mol_type = other DNA
acactgagtggaggtcaacgagcaaga

SEQ ID NO: 12253 - DNA, 28 bp, synthetic construct
  source 1..28: mol_type = other DNA
cacactgagtggaggtcaacgagcaaga

SEQ ID NO: 12254 - DNA, 29 bp, synthetic construct
  source 1..29: mol_type = other DNA
tcacactgagtggaggtcaacgagcaaga

SEQ ID NO: 12255 - DNA, 30 bp, synthetic construct; identical to SEQ ID NO: 10280
  source 1..30: mol_type = other DNA

SEQ ID NO: 12256 - DNA, 31 bp, synthetic construct; identical to SEQ ID NO: 10281
  source 1..31: mol_type = other DNA

SEQ ID NO: 12257 - DNA, 32 bp, synthetic construct; identical to SEQ ID NO: 10282
  source 1..32: mol_type = other DNA

SEQ ID NO: 12258 - DNA, 33 bp, synthetic construct; identical to SEQ ID NO: 10283
  source 1..33: mol_type = other DNA

SEQ ID NO: 12259 - DNA, 34 bp, synthetic construct; identical to SEQ ID NO: 10284
  source 1..34: mol_type = other DNA

SEQ ID NO: 12260 - DNA, 35 bp, synthetic construct; identical to SEQ ID NO: 10285
  source 1..35: mol_type = other DNA

SEQ ID NO: 12261 - DNA, 36 bp, synthetic construct; identical to SEQ ID NO: 10286
  source 1..36: mol_type = other DNA

SEQ ID NO: 12262 - DNA, 37 bp, synthetic construct; identical to SEQ ID NO: 10287
  source 1..37: mol_type = other DNA

SEQ ID NO: 12263 - DNA, 38 bp, synthetic construct; identical to SEQ ID NO: 10288
  source 1..38: mol_type = other DNA

SEQ ID NO: 12264 - DNA, 39 bp, synthetic construct; identical to SEQ ID NO: 10289
  source 1..39: mol_type = other DNA

SEQ ID NO: 12265 - DNA, 40 bp, synthetic construct; identical to SEQ ID NO: 10290
  source 1..40: mol_type = other DNA

SEQ ID NO: 12266 - DNA, 32 bp, synthetic construct; identical to SEQ ID NO: 9629
  source 1..32: mol_type = other DNA

SEQ ID NO: 12267 - DNA, 33 bp, synthetic construct; identical to SEQ ID NO: 9630
  source 1..33: mol_type = other DNA

SEQ ID NO: 12268 - DNA, 34 bp, synthetic construct; identical to SEQ ID NO: 9631
  source 1..34: mol_type = other DNA

SEQ ID NO: 12269 - DNA, 35 bp, synthetic construct; identical to SEQ ID NO: 9632
  source 1..35: mol_type = other DNA

SEQ ID NO: 12270 - DNA, 36 bp, synthetic construct; identical to SEQ ID NO: 9633
  source 1..36: mol_type = other DNA

SEQ ID NO: 12271 - DNA, 37 bp, synthetic construct; identical to SEQ ID NO: 9634
  source 1..37: mol_type = other DNA

SEQ ID NO: 12272 - DNA, 38 bp, synthetic construct; identical to SEQ ID NO: 9635
  source 1..38: mol_type = other DNA

SEQ ID NO: 12273 - DNA, 39 bp, synthetic construct; identical to SEQ ID NO: 9636
  source 1..39: mol_type = other DNA

SEQ ID NO: 12274 - DNA, 40 bp, synthetic construct; identical to SEQ ID NO: 9637
  source 1..40: mol_type = other DNA

SEQ ID NO: 12275 - DNA, 28 bp, synthetic construct
  source 1..28: mol_type = other DNA
cctccactcagtgtgattccaccctctc

SEQ ID NO: 12276 - DNA, 28 bp, synthetic construct
  source 1..28: mol_type = other DNA
cctccactcagtgtgattccaccttctc

SEQ ID NO: 12277 - DNA, 29 bp, synthetic construct
  source 1..29: mol_type = other DNA
acctccactcagtgtgattccaccttctc

SEQ ID NO: 12278 - DNA, 29 bp, synthetic construct
  source 1..29: mol_type = other DNA
acctccactcagtgtgattccaccctctc

SEQ ID NO: 12279 - DNA, 30 bp, synthetic construct; identical to SEQ ID NO: 10322
  source 1..30: mol_type = other DNA

SEQ ID NO: 12280 - DNA, 30 bp, synthetic construct; identical to SEQ ID NO: 10323
  source 1..30: mol_type = other DNA

SEQ ID NO: 12281 - DNA, 31 bp, synthetic construct; identical to SEQ ID NO: 10324
  source 1..31: mol_type = other DNA

SEQ ID NO: 12282 - DNA, 31 bp, synthetic construct; identical to SEQ ID NO: 10325
  source 1..31: mol_type = other DNA

SEQ ID NO: 12283 - DNA, 32 bp, synthetic construct; identical to SEQ ID NO: 10327
  source 1..32: mol_type = other DNA

SEQ ID NO: 12284 - DNA, 32 bp, synthetic construct; identical to SEQ ID NO: 10326
  source 1..32: mol_type = other DNA

SEQ ID NO: 12285 - DNA, 33 bp, synthetic construct; identical to SEQ ID NO: 10328
  source 1..33: mol_type = other DNA

SEQ ID NO: 12286 - DNA, 33 bp, synthetic construct; identical to SEQ ID NO: 10329
  source 1..33: mol_type = other DNA

SEQ ID NO: 12287 - DNA, 34 bp, synthetic construct; identical to SEQ ID NO: 10331
  source 1..34: mol_type = other DNA

SEQ ID NO: 12288 - DNA, 34 bp, synthetic construct; identical to SEQ ID NO: 10330
  source 1..34: mol_type = other DNA

SEQ ID NO: 12289 - DNA, 35 bp, synthetic construct; identical to SEQ ID NO: 10333
  source 1..35: mol_type = other DNA

SEQ ID NO: 12290 - DNA, 35 bp, synthetic construct; identical to SEQ ID NO: 10332
  source 1..35: mol_type = other DNA

SEQ ID NO: 12291 - DNA, 36 bp, synthetic construct; identical to SEQ ID NO: 10335
  source 1..36: mol_type = other DNA

SEQ ID NO: 12292 - DNA, 36 bp, synthetic construct; identical to SEQ ID NO: 10334
  source 1..36: mol_type = other DNA

SEQ ID NO: 12293 - DNA, 37 bp, synthetic construct; identical to SEQ ID NO: 10336
  source 1..37: mol_type = other DNA

SEQ ID NO: 12294 - DNA, 37 bp, synthetic construct; identical to SEQ ID NO: 10337
  source 1..37: mol_type = other DNA

SEQ ID NO: 12295 - DNA, 38 bp, synthetic construct; identical to SEQ ID NO: 10339
  source 1..38: mol_type = other DNA

SEQ ID NO: 12296 - DNA, 38 bp, synthetic construct; identical to SEQ ID NO: 10338
  source 1..38: mol_type = other DNA

SEQ ID NO: 12297 - DNA, 39 bp, synthetic construct; identical to SEQ ID NO: 10340
  source 1..39: mol_type = other DNA

SEQ ID NO: 12298 - DNA, 39 bp, synthetic construct; identical to SEQ ID NO: 10341
  source 1..39: mol_type = other DNA

SEQ ID NO: 12299 - DNA, 40 bp, synthetic construct; identical to SEQ ID NO: 10343
  source 1..40: mol_type = other DNA

SEQ ID NO: 12300 - DNA, 40 bp, synthetic construct; identical to SEQ ID NO: 10342
  source 1..40: mol_type = other DNA

SEQ ID NO: 12301 - DNA, 12 bp, synthetic construct
  source 1..12: mol_type = other DNA
cctccactcagt

SEQ ID NO: 12302 - DNA, 12 bp, synthetic construct
  source 1..12: mol_type = other DNA
cctccggacagt

SEQ ID NO: 12303 - DNA, 13 bp, synthetic construct
  source 1..13: mol_type = other DNA
acctccactcagt

SEQ ID NO: 12304 - DNA, 13 bp, synthetic construct
  source 1..13: mol_type = other DNA
acctccggacagt

SEQ ID NO: 12305 - DNA, 14 bp, synthetic construct
  source 1..14: mol_type = other DNA
gacctccggacagt

SEQ ID NO: 12306 - DNA, 14 bp, synthetic construct
  source 1..14: mol_type = other DNA
gacctccactcagt

SEQ ID NO: 12307 - DNA, 15 bp, synthetic construct
  source 1..15: mol_type = other DNA
tgacctccggacagt

SEQ ID NO: 12308 - DNA, 15 bp, synthetic construct
  source 1..15: mol_type = other DNA
tgacctccactcagt

SEQ ID NO: 12309 - DNA, 16 bp, synthetic construct
  source 1..16: mol_type = other DNA
ttgacctccggacagt

SEQ ID NO: 12310 - DNA, 16 bp, synthetic construct
  source 1..16: mol_type = other DNA
ttgacctccactcagt

SEQ ID NO: 12311 - DNA, 17 bp, synthetic construct
  source 1..17: mol_type = other DNA
gttgacctccggacagt

SEQ ID NO: 12312 - DNA, 17 bp, synthetic construct
  source 1..17: mol_type = other DNA
gttgacctccactcagt

SEQ ID NO: 12313 - DNA, 18 bp, synthetic construct
  source 1..18: mol_type = other DNA
cgttgacctccggacagt

SEQ ID NO: 12314 - DNA, 18 bp, synthetic construct
  source 1..18: mol_type = other DNA
cgttgacctccactcagt

SEQ ID NO: 12315 - DNA, 19 bp, synthetic construct
  source 1..19: mol_type = other DNA
tcgttgacctccactcagt

SEQ ID NO: 12316 - DNA, 19 bp, synthetic construct
  source 1..19: mol_type = other DNA
tcgttgacctccggacagt

SEQ ID NO: 12317 - DNA, 20 bp, synthetic construct
  source 1..20: mol_type = other DNA
ctcgttgacctccggacagt

SEQ ID NO: 12318 - DNA, 20 bp, synthetic construct
  source 1..20: mol_type = other DNA
ctcgttgacctccactcagt

SEQ ID NO: 12319 - DNA, 21 bp, synthetic construct
  source 1..21: mol_type = other DNA
gctcgttgacctccggacagt

SEQ ID NO: 12320 - DNA, 21 bp, synthetic construct
  source 1..21: mol_type = other DNA
gctcgttgacctccactcagt

SEQ ID NO: 12321 - DNA, 22 bp, synthetic construct
  source 1..22: mol_type = other DNA
tgctcgttgacctccggacagt

SEQ ID NO: 12322 - DNA, 22 bp, synthetic construct
  source 1..22: mol_type = other DNA
tgctcgttgacctccactcagt

SEQ ID NO: 12323 - DNA, 23 bp, synthetic construct
  source 1..23: mol_type = other DNA
ttgctcgttgacctccactcagt

SEQ ID NO: 12324 - DNA, 23 bp, synthetic construct
  source 1..23: mol_type = other DNA
ttgctcgttgacctccggacagt

SEQ ID NO: 12325 - DNA, 24 bp, synthetic construct
  source 1..24: mol_type = other DNA
cttgctcgttgacctccactcagt

SEQ ID NO: 12326 - DNA, 24 bp, synthetic construct
  source 1..24: mol_type = other DNA
cttgctcgttgacctccggacagt

SEQ ID NO: 12327 - DNA, 25 bp, synthetic construct
  source 1..25: mol_type = other DNA
tcttgctcgttgacctccactcagt

SEQ ID NO: 12328 - DNA, 25 bp, synthetic construct
  source 1..25: mol_type = other DNA
tcttgctcgttgacctccggacagt

SEQ ID NO: 12329 - DNA, 26 bp, synthetic construct
  source 1..26: mol_type = other DNA
ttcttgctcgttgacctccactcagt

SEQ ID NO: 12330 - DNA, 26 bp, synthetic construct
  source 1..26: mol_type = other DNA
ttcttgctcgttgacctccggacagt

SEQ ID NO: 12331 - DNA, 27 bp, synthetic construct
  source 1..27: mol_type = other DNA
attcttgctcgttgacctccactcagt

SEQ ID NO: 12332 - DNA, 27 bp, synthetic construct
  source 1..27: mol_type = other DNA
attcttgctcgttgacctccggacagt

SEQ ID NO: 12333 - DNA, 28 bp, synthetic construct
  source 1..28: mol_type = other DNA
aattcttgctcgttgacctccggacagt

SEQ ID NO: 12334 - DNA, 28 bp, synthetic construct
  source 1..28: mol_type = other DNA
aattcttgctcgttgacctccactcagt

SEQ ID NO: 12335 - DNA, 29 bp, synthetic construct
  source 1..29: mol_type = other DNA
aaattcttgctcgttgacctccggacagt

SEQ ID NO: 12336 - DNA, 29 bp, synthetic construct
  source 1..29: mol_type = other DNA
aaattcttgctcgttgacctccactcagt

SEQ ID NO: 12337 - DNA, 30 bp, synthetic construct; identical to SEQ ID NO: 11698
  source 1..30: mol_type = other DNA

SEQ ID NO: 12338 - DNA, 30 bp, synthetic construct; identical to SEQ ID NO: 11697
  source 1..30: mol_type = other DNA

SEQ ID NO: 12339 - DNA, 31 bp, synthetic construct; identical to SEQ ID NO: 11700
  source 1..31: mol_type = other DNA

SEQ ID NO: 12340 - DNA, 31 bp, synthetic construct; identical to SEQ ID NO: 11699
  source 1..31: mol_type = other DNA

SEQ ID NO: 12341 - DNA, 32 bp, synthetic construct; identical to SEQ ID NO: 11701
  source 1..32: mol_type = other DNA

SEQ ID NO: 12342 - DNA, 32 bp, synthetic construct; identical to SEQ ID NO: 11702
  source 1..32: mol_type = other DNA

SEQ ID NO: 12343 - DNA, 33 bp, synthetic construct; identical to SEQ ID NO: 11703
  source 1..33: mol_type = other DNA

SEQ ID NO: 12344 - DNA, 33 bp, synthetic construct; identical to SEQ ID NO: 11704
  source 1..33: mol_type = other DNA

SEQ ID NO: 12345 - DNA, 34 bp, synthetic construct; identical to SEQ ID NO: 11706
  source 1..34: mol_type = other DNA

SEQ ID NO: 12346 - DNA, 34 bp, synthetic construct; identical to SEQ ID NO: 11705
  source 1..34: mol_type = other DNA

SEQ ID NO: 12347 - DNA, 35 bp, synthetic construct; identical to SEQ ID NO: 11707
  source 1..35: mol_type = other DNA

SEQ ID NO: 12348 - DNA, 35 bp, synthetic construct; identical to SEQ ID NO: 11708
  source 1..35: mol_type = other DNA

SEQ ID NO: 12349 - DNA, 36 bp, synthetic construct; identical to SEQ ID NO: 11710
  source 1..36: mol_type = other DNA

SEQ ID NO: 12350 - DNA, 36 bp, synthetic construct; identical to SEQ ID NO: 11709
  source 1..36: mol_type = other DNA

SEQ ID NO: 12351 - DNA, 37 bp, synthetic construct; identical to SEQ ID NO: 11712
  source 1..37: mol_type = other DNA

SEQ ID NO: 12352 - DNA, 37 bp, synthetic construct; identical to SEQ ID NO: 11711
  source 1..37: mol_type = other DNA

SEQ ID NO: 12353 - DNA, 38 bp, synthetic construct; identical to SEQ ID NO: 11713
  source 1..38: mol_type = other DNA

SEQ ID NO: 12354 - DNA, 38 bp, synthetic construct; identical to SEQ ID NO: 11714
  source 1..38: mol_type = other DNA

SEQ ID NO: 12355 - DNA, 39 bp, synthetic construct; identical to SEQ ID NO: 11716
  source 1..39: mol_type = other DNA

SEQ ID NO: 12356 - DNA, 39 bp, synthetic construct; identical to SEQ ID NO: 11715
  source 1..39: mol_type = other DNA

SEQ ID NO: 12357 - DNA, 40 bp, synthetic construct; identical to SEQ ID NO: 11717
  source 1..40: mol_type = other DNA

SEQ ID NO: 12358 - DNA, 40 bp, synthetic construct; identical to SEQ ID NO: 11718
  source 1..40: mol_type = other DNA

SEQ ID NO: 12359 - DNA, 11 bp, synthetic construct
  source 1..11: mol_type = other DNA
cctccactcag

SEQ ID NO: 12360 - DNA, 12 bp, synthetic construct
  source 1..12: mol_type = other DNA
acctccactcag

SEQ ID NO: 12361 - DNA, 13 bp, synthetic construct
  source 1..13: mol_type = other DNA
gacctccactcag

SEQ ID NO: 12362 - DNA, 14 bp, synthetic construct
  source 1..14: mol_type = other DNA
tgacctccactcag

SEQ ID NO: 12363 - DNA, 15 bp, synthetic construct
  source 1..15: mol_type = other DNA
ttgacctccactcag

SEQ ID NO: 12364 - DNA, 16 bp, synthetic construct
  source 1..16: mol_type = other DNA
gttgacctccactcag

SEQ ID NO: 12365 - DNA, 17 bp, synthetic construct
  source 1..17: mol_type = other DNA
cgttgacctccactcag

SEQ ID NO: 12366 - DNA, 18 bp, synthetic construct
  source 1..18: mol_type = other DNA
tcgttgacctccactcag

SEQ ID NO: 12367 - DNA, 19 bp, synthetic construct
  source 1..19: mol_type = other DNA
ctcgttgacctccactcag

SEQ ID NO: 12368 - DNA, 20 bp, synthetic construct
  source 1..20: mol_type = other DNA
gctcgttgacctccactcag

SEQ ID NO: 12369 - DNA, 21 bp, synthetic construct
  source 1..21: mol_type = other DNA
tgctcgttgacctccactcag

SEQ ID NO: 12370 - DNA, 22 bp, synthetic construct
  source 1..22: mol_type = other DNA
ttgctcgttgacctccactcag

SEQ ID NO: 12371 - DNA, 23 bp, synthetic construct
  source 1..23: mol_type = other DNA
cttgctcgttgacctccactcag

SEQ ID NO: 12372 - DNA, 24 bp, synthetic construct
  source 1..24: mol_type = other DNA
tcttgctcgttgacctccactcag

SEQ ID NO: 12373 - DNA, 25 bp, synthetic construct
  source 1..25: mol_type = other DNA
ttcttgctcgttgacctccactcag

SEQ ID NO: 12374 - DNA, 26 bp, synthetic construct
  source 1..26: mol_type = other DNA
attcttgctcgttgacctccactcag

SEQ ID NO: 12375 - DNA, 27 bp, synthetic construct
  source 1..27: mol_type = other DNA
aattcttgctcgttgacctccactcag

SEQ ID NO: 12376 - DNA, 28 bp, synthetic construct
  source 1..28: mol_type = other DNA
aaattcttgctcgttgacctccactcag

SEQ ID NO: 12377 - DNA, 29 bp, synthetic construct
  source 1..29: mol_type = other DNA
gaaattcttgctcgttgacctccactcag

SEQ ID NO: 12378 - DNA, 30 bp, synthetic construct; identical to SEQ ID NO: 10364
  source 1..30: mol_type = other DNA

SEQ ID NO: 12379 - DNA, 31 bp, synthetic construct; identical to SEQ ID NO: 10365
  source 1..31: mol_type = other DNA

SEQ ID NO: 12380 - DNA, 32 bp, synthetic construct; identical to SEQ ID NO: 10366
  source 1..32: mol_type = other DNA

SEQ ID NO: 12381 - DNA, 33 bp, synthetic construct; identical to SEQ ID NO: 10367
  source 1..33: mol_type = other DNA

SEQ ID NO: 12382 - DNA, 34 bp, synthetic construct; identical to SEQ ID NO: 10368
  source 1..34: mol_type = other DNA

SEQ ID NO: 12383 - DNA, 35 bp, synthetic construct; identical to SEQ ID NO: 10369
  source 1..35: mol_type = other DNA

SEQ ID NO: 12384 - DNA, 36 bp, synthetic construct; identical to SEQ ID NO: 10370
  source 1..36: mol_type = other DNA

SEQ ID NO: 12385 - DNA, 37 bp, synthetic construct; identical to SEQ ID NO: 10371
  source 1..37: mol_type = other DNA

SEQ ID NO: 12386 - DNA, 38 bp, synthetic construct; identical to SEQ ID NO: 10372
  source 1..38: mol_type = other DNA

SEQ ID NO: 12387 - DNA, 39 bp, synthetic construct; identical to SEQ ID NO: 10373
  source 1..39: mol_type = other DNA

SEQ ID NO: 12388 - DNA, 40 bp, synthetic construct; identical to SEQ ID NO: 10374
  source 1..40: mol_type = other DNA

SEQ ID NO: 12389 - DNA, 13 bp, synthetic construct
  source 1..13: mol_type = other DNA
cctccactcagtg

SEQ ID NO: 12390 - DNA, 14 bp, synthetic construct
  source 1..14: mol_type = other DNA
acctccactcagtg

SEQ ID NO: 12391 - DNA, 15 bp, synthetic construct
  source 1..15: mol_type = other DNA
gacctccactcagtg

SEQ ID NO: 12392 - DNA, 16 bp, synthetic construct
  source 1..16: mol_type = other DNA
tgacctccactcagtg

SEQ ID NO: 12393 - DNA, 17 bp, synthetic construct
  source 1..17: mol_type = other DNA
ttgacctccactcagtg

SEQ ID NO: 12394 - DNA, 18 bp, synthetic construct
  source 1..18: mol_type = other DNA
gttgacctccactcagtg

SEQ ID NO: 12395 - DNA, 19 bp, synthetic construct
  source 1..19: mol_type = other DNA
cgttgacctccactcagtg

SEQ ID NO: 12396 - DNA, 20 bp, synthetic construct
  source 1..20: mol_type = other DNA
tcgttgacctccactcagtg

SEQ ID NO: 12397 - DNA, 21 bp, synthetic construct
  source 1..21: mol_type = other DNA
ctcgttgacctccactcagtg

SEQ ID NO: 12398 - DNA, 22 bp, synthetic construct
  source 1..22: mol_type = other DNA
gctcgttgacctccactcagtg

SEQ ID NO: 12399 - DNA, 23 bp, synthetic construct
  source 1..23: mol_type = other DNA
tgctcgttgacctccactcagtg

SEQ ID NO: 12400 - DNA, 24 bp, synthetic construct
  source 1..24: mol_type = other DNA
ttgctcgttgacctccactcagtg

SEQ ID NO: 12401 - DNA, 25 bp, synthetic construct
  source 1..25: mol_type = other DNA
cttgctcgttgacctccactcagtg

SEQ ID NO: 12402 - DNA, 26 bp, synthetic construct
  source 1..26: mol_type = other DNA
tcttgctcgttgacctccactcagtg

SEQ ID NO: 12403 - DNA, 27 bp, synthetic construct
  source 1..27: mol_type = other DNA
ttcttgctcgttgacctccactcagtg

SEQ ID NO: 12404 - DNA, 28 bp, synthetic construct
  source 1..28: mol_type = other DNA
attcttgctcgttgacctccactcagtg

SEQ ID NO: 12405 - DNA, 29 bp, synthetic construct
  source 1..29: mol_type = other DNA
aattcttgctcgttgacctccactcagtg

SEQ ID NO: 12406 - DNA, 30 bp, synthetic construct; identical to SEQ ID NO: 10455
  source 1..30: mol_type = other DNA

SEQ ID NO: 12407 - DNA, 31 bp, synthetic construct; identical to SEQ ID NO: 10456
  source 1..31: mol_type = other DNA

SEQ ID NO: 12408 - DNA, 32 bp, synthetic construct; identical to SEQ ID NO: 10457
  source 1..32: mol_type = other DNA

SEQ ID NO: 12409 - DNA, 33 bp, synthetic construct; identical to SEQ ID NO: 10458
  source 1..33: mol_type = other DNA

SEQ ID NO: 12410 - DNA, 34 bp, synthetic construct; identical to SEQ ID NO: 10459
  source 1..34: mol_type = other DNA

SEQ ID NO: 12411 - DNA, 35 bp, synthetic construct; identical to SEQ ID NO: 10460
  source 1..35: mol_type = other DNA

SEQ ID NO: 12412 - DNA, 36 bp, synthetic construct; identical to SEQ ID NO: 10461
  source 1..36: mol_type = other DNA

SEQ ID NO: 12413 - DNA, 37 bp, synthetic construct; identical to SEQ ID NO: 10462
  source 1..37: mol_type = other DNA

SEQ ID NO: 12414 - DNA, 38 bp, synthetic construct; identical to SEQ ID NO: 10463
  source 1..38: mol_type = other DNA

SEQ ID NO: 12415 - DNA, 39 bp, synthetic construct; identical to SEQ ID NO: 10464
  source 1..39: mol_type = other DNA

SEQ ID NO: 12416 - DNA, 40 bp, synthetic construct; identical to SEQ ID NO: 10465
  source 1..40: mol_type = other DNA

SEQ ID NO: 12417 - DNA, 10 bp, synthetic construct
  source 1..10: mol_type = other DNA
ttgacctcca

SEQ ID NO: 12418 - DNA, 11 bp, synthetic construct
  source 1..11: mol_type = other DNA
gttgacctcca

SEQ ID NO: 12419 - DNA, 12 bp, synthetic construct
  source 1..12: mol_type = other DNA
cgttgacctcca

SEQ ID NO: 12420 - DNA, 13 bp, synthetic construct
  source 1..13: mol_type = other DNA
tcgttgacctcca

SEQ ID NO: 12421 - DNA, 14 bp, synthetic construct
  source 1..14: mol_type = other DNA
ctcgttgacctcca

SEQ ID NO: 12422 - DNA, 15 bp, synthetic construct
  source 1..15: mol_type = other DNA
gctcgttgacctcca

SEQ ID NO: 12423 - DNA, 16 bp, synthetic construct
  source 1..16: mol_type = other DNA
tgctcgttgacctcca

SEQ ID NO: 12424 - DNA, 17 bp, synthetic construct
  source 1..17: mol_type = other DNA
ttgctcgttgacctcca

SEQ ID NO: 12425 - DNA, 18 bp, synthetic construct
  source 1..18: mol_type = other DNA
cttgctcgttgacctcca

SEQ ID NO: 12426 - DNA, 19 bp, synthetic construct
  source 1..19: mol_type = other DNA
tcttgctcgttgacctcca

SEQ ID NO: 12427 - DNA, 20 bp, synthetic construct
  source 1..20: mol_type = other DNA
ttcttgctcgttgacctcca

SEQ ID NO: 12428 - DNA, 21 bp, synthetic construct
  source 1..21: mol_type = other DNA
attcttgctcgttgacctcca

SEQ ID NO: 12429 - DNA, 22 bp, synthetic construct
  source 1..22: mol_type = other DNA
aattcttgctcgttgacctcca

SEQ ID NO: 12430 - DNA, 23 bp, synthetic construct
  source 1..23: mol_type = other DNA
aaattcttgctcgttgacctcca

SEQ ID NO: 12431 - DNA, 24 bp, synthetic construct
  source 1..24: mol_type = other DNA
gaaattcttgctcgttgacctcca

SEQ ID NO: 12432 - DNA, 25 bp, synthetic construct
  source 1..25: mol_type = other DNA
agaaattcttgctcgttgacctcca

SEQ ID NO: 12433 - DNA, 26 bp, synthetic construct
  source 1..26: mol_type = other DNA
aagaaattcttgctcgttgacctcca

SEQ ID NO: 12434 - DNA, 27 bp, synthetic construct
  source 1..27: mol_type = other DNA
aaagaaattcttgctcgttgacctcca

SEQ ID NO: 12435 - DNA, 28 bp, synthetic construct
  source 1..28: mol_type = other DNA
taaagaaattcttgctcgttgacctcca

SEQ ID NO: 12436 - DNA, 29 bp, synthetic construct
  source 1..29: mol_type = other DNA
ctaaagaaattcttgctcgttgacctcca

SEQ ID NO: 12437 - DNA, 30 bp, synthetic construct; identical to SEQ ID NO: 11832
  source 1..30: mol_type = other DNA

SEQ ID NO: 12438 - DNA, 31 bp, synthetic construct; identical to SEQ ID NO: 11833
  source 1..31: mol_type = other DNA

SEQ ID NO: 12439 - DNA, 32 bp, synthetic construct; identical to SEQ ID NO: 11834
  source 1..32: mol_type = other DNA

SEQ ID NO: 12440 - DNA, 33 bp, synthetic construct; identical to SEQ ID NO: 11835
  source 1..33: mol_type = other DNA

SEQ ID NO: 12441 - DNA, 34 bp, synthetic construct; identical to SEQ ID NO: 11836
  source 1..34: mol_type = other DNA

SEQ ID NO: 12442 - DNA, 35 bp, synthetic construct; identical to SEQ ID NO: 11837
  source 1..35: mol_type = other DNA

SEQ ID NO: 12443 - DNA, 36 bp, synthetic construct; identical to SEQ ID NO: 11838
  source 1..36: mol_type = other DNA

SEQ ID NO: 12444 - DNA, 37 bp, synthetic construct; identical to SEQ ID NO: 11839
  source 1..37: mol_type = other DNA

SEQ ID NO: 12445 - DNA, 38 bp, synthetic construct; identical to SEQ ID NO: 11840
  source 1..38: mol_type = other DNA

SEQ ID NO: 12446 - DNA, 39 bp, synthetic construct; identical to SEQ ID NO: 11841
  source 1..39: mol_type = other DNA

SEQ ID NO: 12447 - DNA, 40 bp, synthetic construct; identical to SEQ ID NO: 11842
  source 1..40: mol_type = other DNA

SEQ ID NO: 12448 - DNA, 10 bp, synthetic construct
  source 1..10: mol_type = other DNA
gttgacctcc

SEQ ID NO: 12449 - DNA, 11 bp, synthetic construct
  source 1..11: mol_type = other DNA
cgttgacctcc

SEQ ID NO: 12450 - DNA, 12 bp, synthetic construct
  source 1..12: mol_type = other DNA
tcgttgacctcc

SEQ ID NO: 12451 - DNA, 13 bp, synthetic construct
  source 1..13: mol_type = other DNA
ctcgttgacctcc

SEQ ID NO: 12452 - DNA, 14 bp, synthetic construct
  source 1..14: mol_type = other DNA
gctcgttgacctcc

SEQ ID NO: 12453 - DNA, 15 bp, synthetic construct
  source 1..15: mol_type = other DNA
tgctcgttgacctcc

SEQ ID NO: 12454 - DNA, 16 bp, synthetic construct
  source 1..16: mol_type = other DNA
ttgctcgttgacctcc

SEQ ID NO: 12455 - DNA, 17 bp, synthetic construct
  source 1..17: mol_type = other DNA
cttgctcgttgacctcc

SEQ ID NO: 12456 - DNA, 18 bp, synthetic construct
  source 1..18: mol_type = other DNA
tcttgctcgttgacctcc

SEQ ID NO: 12457 - DNA, 19 bp, synthetic construct
  source 1..19: mol_type = other DNA
ttcttgctcgttgacctcc

SEQ ID NO: 12458 - DNA, 20 bp, synthetic construct
  source 1..20: mol_type = other DNA
attcttgctcgttgacctcc

SEQ ID NO: 12459 - DNA, 21 bp, synthetic construct
  source 1..21: mol_type = other DNA
aattcttgctcgttgacctcc

SEQ ID NO: 12460 - DNA, 22 bp, synthetic construct
  source 1..22: mol_type = other DNA
aaattcttgctcgttgacctcc

SEQ ID NO: 12461 - DNA, 23 bp, synthetic construct
  source 1..23: mol_type = other DNA
gaaattcttgctcgttgacctcc

SEQ ID NO: 12462 - DNA, 24 bp, synthetic construct
  source 1..24: mol_type = other DNA
agaaattcttgctcgttgacctcc

SEQ ID NO: 12463 - DNA, 25 bp, synthetic construct
  source 1..25: mol_type = other DNA
aagaaattcttgctcgttgacctcc

SEQ ID NO: 12464 - DNA, 26 bp, synthetic construct
  source 1..26: mol_type = other DNA
aaagaaattcttgctcgttgacctcc

SEQ ID NO: 12465 - DNA, 27 bp, synthetic construct
  source 1..27: mol_type = other DNA
taaagaaattcttgctcgttgacctcc

SEQ ID NO: 12466 - DNA, 28 bp, synthetic construct
  source 1..28: mol_type = other DNA
ctaaagaaattcttgctcgttgacctcc

SEQ ID NO: 12467 - DNA, 29 bp, synthetic construct
  source 1..29: mol_type = other DNA
gctaaagaaattcttgctcgttgacctcc

SEQ ID NO: 12468 - DNA, 30 bp, synthetic construct
  source 1..30: mol_type = other DNA
tgctaaagaaattcttgctcgttgacctcc

SEQ ID NO: 12469 - DNA, 31 bp, synthetic construct
  source 1..31: mol_type = other DNA
ttgctaaagaaattcttgctcgttgacctcc

SEQ ID NO: 12470 - DNA, 32 bp, synthetic construct
  source 1..32: mol_type = other DNA
cttgctaaagaaattcttgctcgttgacctcc

SEQ ID NO: 12471 - DNA, 33 bp, synthetic construct
  source 1..33: mol_type = other DNA
ccttgctaaagaaattcttgctcgttgacctcc

SEQ ID NO: 12472 - DNA, 34 bp, synthetic construct
  source 1..34: mol_type = other DNA
accttgctaaagaaattcttgctcgttgacctcc

SEQ ID NO: 12473 - DNA, 35 bp, synthetic construct
  source 1..35: mol_type = other DNA
caccttgctaaagaaattcttgctcgttgacctcc

SEQ ID NO: 12474 - DNA, 36 bp, synthetic construct
  source 1..36: mol_type = other DNA
tcaccttgctaaagaaattcttgctcgttgacctcc

SEQ ID NO: 12475 - DNA, 37 bp, synthetic construct
  source 1..37: mol_type = other DNA
ttcaccttgctaaagaaattcttgctcgttgacctcc

SEQ ID NO: 12476 - DNA, 38 bp, synthetic construct
  source 1..38: mol_type = other DNA
attcaccttgctaaagaaattcttgctcgttgacctcc

SEQ ID NO: 12477 - DNA, 39 bp, synthetic construct
  source 1..39: mol_type = other DNA
tattcaccttgctaaagaaattcttgctcgttgacctcc

SEQ ID NO: 12478 - DNA, 40 bp, synthetic construct
  source 1..40: mol_type = other DNA
ttattcaccttgctaaagaaattcttgctcgttgacctcc

SEQ ID NO: 12479 - DNA, 10 bp, synthetic construct
  source 1..10: mol_type = other DNA
gaggtcaacg

SEQ ID NO: 12480 - DNA, 11 bp, synthetic construct
  source 1..11: mol_type = other DNA
ggaggtcaacg

SEQ ID NO: 12481 - DNA, 12 bp, synthetic construct
  source 1..12: mol_type = other DNA
tggaggtcaacg

SEQ ID NO: 12482 - DNA, 13 bp, synthetic construct
  source 1..13: mol_type = other DNA
gtggaggtcaacg

SEQ ID NO: 12483 - DNA, 14 bp, synthetic construct
  source 1..14: mol_type = other DNA
agtggaggtcaacg

SEQ ID NO: 12484 - DNA, 15 bp, synthetic construct
  source 1..15: mol_type = other DNA
gagtggaggtcaacg

SEQ ID NO: 12485 - DNA, 16 bp, synthetic construct
  source 1..16: mol_type = other DNA
tgagtggaggtcaacg

SEQ ID NO: 12486 - DNA, 17 bp, synthetic construct
  source 1..17: mol_type = other DNA
ctgagtggaggtcaacg

SEQ ID NO: 12487 - DNA, 18 bp, synthetic construct
  source 1..18: mol_type = other DNA
actgagtggaggtcaacg

SEQ ID NO: 12488 - DNA, 19 bp, synthetic construct
  source 1..19: mol_type = other DNA
cactgagtggaggtcaacg

SEQ ID NO: 12489 - DNA, 20 bp, synthetic construct
  source 1..20: mol_type = other DNA
acactgagtggaggtcaacg

SEQ ID NO: 12490 - DNA, 21 bp, synthetic construct
  source 1..21: mol_type = other DNA
cacactgagtggaggtcaacg

SEQ ID NO: 12491 - DNA, 22 bp, synthetic construct
  source 1..22: mol_type = other DNA
tcacactgagtggaggtcaacg

SEQ ID NO: 12492 - DNA, 23 bp, synthetic construct
  source 1..23: mol_type = other DNA
atcacactgagtggaggtcaacg

SEQ ID NO: 12493 - DNA, 24 bp, synthetic construct
  source 1..24: mol_type = other DNA
aatcacactgagtggaggtcaacg

SEQ ID NO: 12494 - DNA, 25 bp, synthetic construct
  source 1..25: mol_type = other DNA
gaatcacactgagtggaggtcaacg

SEQ ID NO: 12495 - DNA, 26 bp, synthetic construct
  source 1..26: mol_type = other DNA
ggaatcacactgagtggaggtcaacg

SEQ ID NO: 12496 - DNA, 27 bp, synthetic construct
  source 1..27: mol_type = other DNA
tggaatcacactgagtggaggtcaacg

SEQ ID NO: 12497 - DNA, 28 bp, synthetic construct
  source 1..28: mol_type = other DNA
gtggaatcacactgagtggaggtcaacg

SEQ ID NO: 12498 - DNA, 29 bp, synthetic construct
  source 1..29: mol_type = other DNA
ggtggaatcacactgagtggaggtcaacg

SEQ ID NO: 12499 - DNA, 30 bp, synthetic construct; identical to SEQ ID NO: 10390
  source 1..30: mol_type = other DNA

SEQ ID NO: 12500 - DNA, 31 bp, synthetic construct; identical to SEQ ID NO: 10391
  source 1..31: mol_type = other DNA

SEQ ID NO: 12501 - DNA, 32 bp, synthetic construct; identical to SEQ ID NO: 10392
  source 1..32: mol_type = other DNA

SEQ ID NO: 12502 - DNA, 33 bp, synthetic construct; identical to SEQ ID NO: 10393
  source 1..33: mol_type = other DNA

SEQ ID NO: 12503 - DNA, 34 bp, synthetic construct; identical to SEQ ID NO: 10394
  source 1..34: mol_type = other DNA

SEQ ID NO: 12504 - DNA, 35 bp, synthetic construct; identical to SEQ ID NO: 10395
  source 1..35: mol_type = other DNA

SEQ ID NO: 12505 - DNA, 36 bp, synthetic construct; identical to SEQ ID NO: 9765
  source 1..36: mol_type = other DNA

SEQ ID NO: 12506 - DNA, 37 bp, synthetic construct; identical to SEQ ID NO: 9766
  source 1..37: mol_type = other DNA

SEQ ID NO: 12507 - DNA, 38 bp, synthetic construct; identical to SEQ ID NO: 9767
  source 1..38: mol_type = other DNA

SEQ ID NO: 12508 - DNA, 39 bp, synthetic construct; identical to SEQ ID NO: 9768
  source 1..39: mol_type = other DNA

SEQ ID NO: 12509 - DNA, 40 bp, synthetic construct; identical to SEQ ID NO: 9769
  source 1..40: mol_type = other DNA

SEQ ID NO: 12510 - DNA, 25 bp, synthetic construct
  source 1..25: mol_type = other DNA
aggtcaacgagcaagaatttcttta

SEQ ID NO: 12511 - DNA, 26 bp, synthetic construct
  source 1..26: mol_type = other DNA
gaggtcaacgagcaagaatttcttta

SEQ ID NO: 12512 - DNA, 27 bp, synthetic construct
  source 1..27: mol_type = other DNA
ggaggtcaacgagcaagaatttcttta

SEQ ID NO: 12513 - DNA, 28 bp, synthetic construct
  source 1..28: mol_type = other DNA
tggaggtcaacgagcaagaatttcttta

SEQ ID NO: 12514 - DNA, 29 bp, synthetic construct
  source 1..29: mol_type = other DNA
gtggaggtcaacgagcaagaatttcttta

SEQ ID NO: 12515 - DNA, 30 bp, synthetic construct; identical to SEQ ID NO: 11094
  source 1..30: mol_type = other DNA

SEQ ID NO: 12516 - DNA, 31 bp, synthetic construct; identical to SEQ ID NO: 10401
  source 1..31: mol_type = other DNA

SEQ ID NO: 12517 - DNA, 32 bp, synthetic construct; identical to SEQ ID NO: 10402
  source 1..32: mol_type = other DNA

SEQ ID NO: 12518 - DNA, 33 bp, synthetic construct; identical to SEQ ID NO: 10403
  source 1..33: mol_type = other DNA

SEQ ID NO: 12519 - DNA, 34 bp, synthetic construct; identical to SEQ ID NO: 10404
  source 1..34: mol_type = other DNA

SEQ ID NO: 12520 - DNA, 35 bp, synthetic construct; identical to SEQ ID NO: 10405
  source 1..35: mol_type = other DNA

SEQ ID NO: 12521 - DNA, 36 bp, synthetic construct; identical to SEQ ID NO: 10406
  source 1..36: mol_type = other DNA

SEQ ID NO: 12522 - DNA, 37 bp, synthetic construct; identical to SEQ ID NO: 10407
  source 1..37: mol_type = other DNA

SEQ ID NO: 12523 - DNA, 38 bp, synthetic construct; identical to SEQ ID NO: 10408
  source 1..38: mol_type = other DNA

SEQ ID NO: 12524 - DNA, 39 bp, synthetic construct; identical to SEQ ID NO: 10409
  source 1..39: mol_type = other DNA

SEQ ID NO: 12525 - DNA, 40 bp, synthetic construct; identical to SEQ ID NO: 10410
  source 1..40: mol_type = other DNA

SEQ ID NO: 12526 - DNA, 23 bp, synthetic construct
  source 1..23: mol_type = other DNA
cctccactcagtgtgattccacc

SEQ ID NO: 12527 - DNA, 24 bp, synthetic construct
  source 1..24: mol_type = other DNA
acctccactcagtgtgattccacc

SEQ ID NO: 12528 - DNA, 25 bp, synthetic construct
  source 1..25: mol_type = other DNA
gacctccactcagtgtgattccacc

SEQ ID NO: 12529 - DNA, 26 bp, synthetic construct
  source 1..26: mol_type = other DNA
tgacctccactcagtgtgattccacc

SEQ ID NO: 12530 - DNA, 27 bp, synthetic construct
  source 1..27: mol_type = other DNA
ttgacctccactcagtgtgattccacc

SEQ ID NO: 12531 - DNA, 28 bp, synthetic construct
  source 1..28: mol_type = other DNA
gttgacctccactcagtgtgattccacc

SEQ ID NO: 12532 - DNA, 29 bp, synthetic construct
  source 1..29: mol_type = other DNA
cgttgacctccactcagtgtgattccacc

SEQ ID NO: 12533 - DNA, 30 bp, synthetic construct; identical to SEQ ID NO: 10424
  source 1..30: mol_type = other DNA

SEQ ID NO: 12534 - DNA, 31 bp, synthetic construct; identical to SEQ ID NO: 10425
  source 1..31: mol_type = other DNA

SEQ ID NO: 12535 - DNA, 32 bp, synthetic construct; identical to SEQ ID NO: 10426
  source 1..32: mol_type = other DNA

SEQ ID NO: 12536 - DNA, 33 bp, synthetic construct; identical to SEQ ID NO: 10427
  source 1..33: mol_type = other DNA

SEQ ID NO: 12537 - DNA, 34 bp, synthetic construct; identical to SEQ ID NO: 10428
  source 1..34: mol_type = other DNA

SEQ ID NO: 12538 - DNA, 35 bp, synthetic construct; identical to SEQ ID NO: 10429
  source 1..35: mol_type = other DNA

SEQ ID NO: 12539 - DNA, 36 bp, synthetic construct; identical to SEQ ID NO: 10430
  source 1..36: mol_type = other DNA

SEQ ID NO: 12540 - DNA, 37 bp, synthetic construct; identical to SEQ ID NO: 10431
  source 1..37: mol_type = other DNA

SEQ ID NO: 12541 - DNA, 38 bp, synthetic construct; identical to SEQ ID NO: 10432
  source 1..38: mol_type = other DNA

SEQ ID NO: 12542 - DNA, 39 bp, synthetic construct; identical to SEQ ID NO: 10433
  source 1..39: mol_type = other DNA

SEQ ID NO: 12543 - DNA, 40 bp, synthetic construct; identical to SEQ ID NO: 10434
  source 1..40: mol_type = other DNA

SEQ ID NO: 12544 - DNA, 26 bp, synthetic construct
  source 1..26: mol_type = other DNA
aggtcaacgagcaagaattagcttag

SEQ ID NO: 12545 - DNA, 26 bp, synthetic construct
  source 1..26: mol_type = other DNA
aggtcaacgagcaagaatttctttag

SEQ ID NO: 12546 - DNA, 27 bp, synthetic construct
  source 1..27: mol_type = other DNA
gaggtcaacgagcaagaattagcttag

SEQ ID NO: 12547 - DNA, 27 bp, synthetic construct
  source 1..27: mol_type = other DNA
gaggtcaacgagcaagaatttctttag

SEQ ID NO: 12548 - DNA, 28 bp, synthetic construct
  source 1..28: mol_type = other DNA
ggaggtcaacgagcaagaatttctttag

SEQ ID NO: 12549 - DNA, 28 bp, synthetic construct
  source 1..28: mol_type = other DNA
ggaggtcaacgagcaagaattagcttag

SEQ ID NO: 12550 - DNA, 29 bp, synthetic construct
  source 1..29: mol_type = other DNA
tggaggtcaacgagcaagaatttctttag

SEQ ID NO: 12551 - DNA, 29 bp, synthetic construct
  source 1..29: mol_type = other DNA
tggaggtcaacgagcaagaattagcttag

SEQ ID NO: 12552 - DNA, 30 bp, synthetic construct; identical to SEQ ID NO: 11905
  source 1..30: mol_type = other DNA

SEQ ID NO: 12553 - DNA, 30 bp, synthetic construct; identical to SEQ ID NO: 11906
  source 1..30: mol_type = other DNA

SEQ ID NO: 12554 - DNA, 31 bp, synthetic construct; identical to SEQ ID NO: 11128
  source 1..31: mol_type = other DNA

SEQ ID NO: 12555 - DNA, 31 bp, synthetic construct; identical to SEQ ID NO: 11129
  source 1..31: mol_type = other DNA

SEQ ID NO: 12556 - DNA, 32 bp, synthetic construct; identical to SEQ ID NO: 10466
  source 1..32: mol_type = other DNA

SEQ ID NO: 12557 - DNA, 32 bp, synthetic construct; identical to SEQ ID NO: 10467
  source 1..32: mol_type = other DNA

SEQ ID NO: 12558 - DNA, 33 bp, synthetic construct; identical to SEQ ID NO: 10468
  source 1..33: mol_type = other DNA

SEQ ID NO: 12559 - DNA, 33 bp, synthetic construct; identical to SEQ ID NO: 10469
  source 1..33: mol_type = other DNA

SEQ ID NO: 12560 - DNA, 34 bp, synthetic construct; identical to SEQ ID NO: 10471
  source 1..34: mol_type = other DNA

SEQ ID NO: 12561 - DNA, 34 bp, synthetic construct; identical to SEQ ID NO: 10470
  source 1..34: mol_type = other DNA

SEQ ID NO: 12562 - DNA, 35 bp, synthetic construct; identical to SEQ ID NO: 10473
  source 1..35: mol_type = other DNA

SEQ ID NO: 12563 - DNA, 35 bp, synthetic construct; identical to SEQ ID NO: 10472
  source 1..35: mol_type = other DNA

SEQ ID NO: 12564 - DNA, 36 bp, synthetic construct; identical to SEQ ID NO: 10474
  source 1..36: mol_type = other DNA

SEQ ID NO: 12565 - DNA, 36 bp, synthetic construct; identical to SEQ ID NO: 10475
  source 1..36: mol_type = other DNA

SEQ ID NO: 12566 - DNA, 37 bp, synthetic construct; identical to SEQ ID NO: 10477
  source 1..37: mol_type = other DNA

SEQ ID NO: 12567 - DNA, 37 bp, synthetic construct; identical to SEQ ID NO: 10476
  source 1..37: mol_type = other DNA

SEQ ID NO: 12568 - DNA, 38 bp, synthetic construct; identical to SEQ ID NO: 10478
  source 1..38: mol_type = other DNA

SEQ ID NO: 12569 - DNA, 38 bp, synthetic construct; identical to SEQ ID NO: 10479
  source 1..38: mol_type = other DNA

SEQ ID NO: 12570 - DNA, 39 bp, synthetic construct; identical to SEQ ID NO: 10480
  source 1..39: mol_type = other DNA

SEQ ID NO: 12571 - DNA, 39 bp, synthetic construct; identical to SEQ ID NO: 10481
  source 1..39: mol_type = other DNA

SEQ ID NO: 12572 - DNA, 40 bp, synthetic construct; identical to SEQ ID NO: 10482
  source 1..40: mol_type = other DNA

SEQ ID NO: 12573 - DNA, 40 bp, synthetic construct; identical to SEQ ID NO: 10483
  source 1..40: mol_type = other DNA

SEQ ID NO: 12574 - DNA, 12 bp, synthetic construct
  source 1..12: mol_type = other DNA
aggtcaacgagc

SEQ ID NO: 12575 - DNA, 13 bp, synthetic construct
  source 1..13: mol_type = other DNA
gaggtcaacgagc

SEQ ID NO: 12576 - DNA, 14 bp, synthetic construct
  source 1..14: mol_type = other DNA
ggaggtcaacgagc

SEQ ID NO: 12577 - DNA, 15 bp, synthetic construct
  source 1..15: mol_type = other DNA
tggaggtcaacgagc

SEQ ID NO: 12578 - DNA, 16 bp, synthetic construct
  source 1..16: mol_type = other DNA
gtggaggtcaacgagc

SEQ ID NO: 12579 - DNA, 17 bp, synthetic construct
  source 1..17: mol_type = other DNA
agtggaggtcaacgagc

SEQ ID NO: 12580 - DNA, 18 bp, synthetic construct
  source 1..18: mol_type = other DNA
gagtggaggtcaacgagc

SEQ ID NO: 12581 - DNA, 19 bp, synthetic construct
  source 1..19: mol_type = other DNA
tgagtggaggtcaacgagc

SEQ ID NO: 12582 - DNA, 20 bp, synthetic construct
  source 1..20: mol_type = other DNA
ctgagtggaggtcaacgagc

SEQ ID NO: 12583 - DNA, 21 bp, synthetic construct
  source 1..21: mol_type = other DNA
actgagtggaggtcaacgagc

SEQ ID NO: 12584 - DNA, 22 bp, synthetic construct
  source 1..22: mol_type = other DNA
cactgagtggaggtcaacgagc

SEQ ID NO: 12585 - DNA, 23 bp, synthetic construct
  source 1..23: mol_type = other DNA
acactgagtggaggtcaacgagc

SEQ ID NO: 12586 - DNA, 24 bp, synthetic construct
  source 1..24: mol_type = other DNA
cacactgagtggaggtcaacgagc

SEQ ID NO: 12587 - DNA, 25 bp, synthetic construct
  source 1..25: mol_type = other DNA
tcacactgagtggaggtcaacgagc

SEQ ID NO: 12588 - DNA, 26 bp, synthetic construct
  source 1..26: mol_type = other DNA
atcacactgagtggaggtcaacgagc

SEQ ID NO: 12589 - DNA, 27 bp, synthetic construct
  source 1..27: mol_type = other DNA
aatcacactgagtggaggtcaacgagc

SEQ ID NO: 12590 - DNA, 28 bp, synthetic construct
  source 1..28: mol_type = other DNA
gaatcacactgagtggaggtcaacgagc

SEQ ID NO: 12591 - DNA, 29 bp, synthetic construct
  source 1..29: mol_type = other DNA
ggaatcacactgagtggaggtcaacgagc

SEQ ID NO: 12592 - DNA, 30 bp, synthetic construct; identical to SEQ ID NO: 10527
  source 1..30: mol_type = other DNA

SEQ ID NO: 12593 - DNA, 31 bp, synthetic construct; identical to SEQ ID NO: 10528
  source 1..31: mol_type = other DNA

SEQ ID NO: 12594 - DNA, 32 bp, synthetic construct; identical to SEQ ID NO: 10529
  source 1..32: mol_type = other DNA

SEQ ID NO: 12595 - DNA, 33 bp, synthetic construct; identical to SEQ ID NO: 10530
  source 1..33: mol_type = other DNA

SEQ ID NO: 12596 - DNA, 34 bp, synthetic construct; identical to SEQ ID NO: 10531
  source 1..34: mol_type = other DNA

SEQ ID NO: 12597 - DNA, 35 bp, synthetic construct; identical to SEQ ID NO: 10532
  source 1..35: mol_type = other DNA

SEQ ID NO: 12598 - DNA, 36 bp, synthetic construct; identical to SEQ ID NO: 10533
  source 1..36: mol_type = other DNA

SEQ ID NO: 12599 - DNA, 37 bp, synthetic construct; identical to SEQ ID NO: 10534
  source 1..37: mol_type = other DNA

SEQ ID NO: 12600 - DNA, 38 bp, synthetic construct; identical to SEQ ID NO: 10535
  source 1..38: mol_type = other DNA

SEQ ID NO: 12601 - DNA, 39 bp, synthetic construct; identical to SEQ ID NO: 9858
  source 1..39: mol_type = other DNA

SEQ ID NO: 12602 - DNA, 40 bp, synthetic construct; identical to SEQ ID NO: 9859
  source 1..40: mol_type = other DNA

SEQ ID NO: 12603 - DNA, 14 bp, synthetic construct
  source 1..14: mol_type = other DNA
cctccactcagtgt

SEQ ID NO: 12604 - DNA, 15 bp, synthetic construct
  source 1..15: mol_type = other DNA
acctccactcagtgt

SEQ ID NO: 12605 - DNA, 16 bp, synthetic construct
  source 1..16: mol_type = other DNA
gacctccactcagtgt

SEQ ID NO: 12606 - DNA, 17 bp, synthetic construct
  source 1..17: mol_type = other DNA
tgacctccactcagtgt

SEQ ID NO: 12607 - DNA, 18 bp, synthetic construct
  source 1..18: mol_type = other DNA
ttgacctccactcagtgt

SEQ ID NO: 12608 - DNA, 19 bp, synthetic construct
  source 1..19: mol_type = other DNA
gttgacctccactcagtgt

SEQ ID NO: 12609 - DNA, 20 bp, synthetic construct
  source 1..20: mol_type = other DNA
cgttgacctccactcagtgt

SEQ ID NO: 12610 - DNA, 21 bp, synthetic construct
  source 1..21: mol_type = other DNA
tcgttgacctccactcagtgt

SEQ ID NO: 12611 - DNA, 22 bp, synthetic construct
  source 1..22: mol_type = other DNA
ctcgttgacctccactcagtgt

SEQ ID NO: 12612 - DNA, 23 bp, synthetic construct
  source 1..23: mol_type = other DNA
gctcgttgacctccactcagtgt

SEQ ID NO: 12613 - DNA, 24 bp, synthetic construct
  source 1..24: mol_type = other DNA
tgctcgttgacctccactcagtgt

SEQ ID NO: 12614 - DNA, 25 bp, synthetic construct
  source 1..25: mol_type = other DNA
ttgctcgttgacctccactcagtgt

SEQ ID NO: 12615 - DNA, 26 bp, synthetic construct
  source 1..26: mol_type = other DNA
cttgctcgttgacctccactcagtgt

SEQ ID NO: 12616 - DNA, 27 bp, synthetic construct
  source 1..27: mol_type = other DNA
tcttgctcgttgacctccactcagtgt

SEQ ID NO: 12617 - DNA, 28 bp, synthetic construct
  source 1..28: mol_type = other DNA
ttcttgctcgttgacctccactcagtgt

SEQ ID NO: 12618 - DNA, 29 bp, synthetic construct
  source 1..29: mol_type = other DNA
attcttgctcgttgacctccactcagtgt

SEQ ID NO: 12619 - DNA, 30 bp, synthetic construct; identical to SEQ ID NO: 11285
  source 1..30: mol_type = other DNA

SEQ ID NO: 12620 - DNA, 31 bp, synthetic construct; identical to SEQ ID NO: 11286
  source 1..31: mol_type = other DNA

SEQ ID NO: 12621 - DNA, 32 bp, synthetic construct; identical to SEQ ID NO: 11287
  source 1..32: mol_type = other DNA

SEQ ID NO: 12622 - DNA, 33 bp, synthetic construct; identical to SEQ ID NO: 11288
  source 1..33: mol_type = other DNA

SEQ ID NO: 12623 - DNA, 34 bp, synthetic construct; identical to SEQ ID NO: 11289
  source 1..34: mol_type = other DNA

SEQ ID NO: 12624 - DNA, 35 bp, synthetic construct; identical to SEQ ID NO: 11290
  source 1..35: mol_type = other DNA

SEQ ID NO: 12625 - DNA, 36 bp, synthetic construct; identical to SEQ ID NO: 11291
  source 1..36: mol_type = other DNA

SEQ ID NO: 12626 - DNA, 37 bp, synthetic construct; identical to SEQ ID NO: 11292
  source 1..37: mol_type = other DNA

SEQ ID NO: 12627 - DNA, 38 bp, synthetic construct; identical to SEQ ID NO: 11293
  source 1..38: mol_type = other DNA

SEQ ID NO: 12628 - DNA, 39 bp, synthetic construct; identical to SEQ ID NO: 11294
  source 1..39: mol_type = other DNA

SEQ ID NO: 12629 - DNA, 40 bp, synthetic construct; identical to SEQ ID NO: 11295
  source 1..40: mol_type = other DNA

SEQ ID NO: 12630 - DNA, 40 bp, synthetic construct; identical to SEQ ID NO: 9983
  source 1..40: mol_type = other DNA

SEQ ID NO: 12631 - DNA, 40 bp, synthetic construct; identical to SEQ ID NO: 9982
  source 1..40: mol_type = other DNA

SEQ ID NO: 12632 - DNA, 39 bp, synthetic construct; identical to SEQ ID NO: 10011
  source 1..39: mol_type = other DNA

SEQ ID NO: 12633 - DNA, 40 bp, synthetic construct; identical to SEQ ID NO: 10012
  source 1..40: mol_type = other DNA

SEQ ID NO: 12634 - DNA, 32 bp, synthetic construct; identical to SEQ ID NO: 9485
  source 1..32: mol_type = other DNA

SEQ ID NO: 12635 - DNA, 32 bp, synthetic construct; identical to SEQ ID NO: 9486
  source 1..32: mol_type = other DNA

SEQ ID NO: 12636 - DNA, 33 bp, synthetic construct; identical to SEQ ID NO: 9488
  source 1..33: mol_type = other DNA

SEQ ID NO: 12637 - DNA, 33 bp, synthetic construct; identical to SEQ ID NO: 9487
  source 1..33: mol_type = other DNA

SEQ ID NO: 12638 - DNA, 34 bp, synthetic construct; identical to SEQ ID NO: 9489
  source 1..34: mol_type = other DNA

SEQ ID NO: 12639 - DNA, 34 bp, synthetic construct; identical to SEQ ID NO: 9490
  source 1..34: mol_type = other DNA

SEQ ID NO: 12640 - DNA, 35 bp, synthetic construct; identical to SEQ ID NO: 9491
  source 1..35: mol_type = other DNA

SEQ ID NO: 12641 - DNA, 35 bp, synthetic construct; identical to SEQ ID NO: 9492
  source 1..35: mol_type = other DNA

SEQ ID NO: 12642 - DNA, 36 bp, synthetic construct; identical to SEQ ID NO: 9493
  source 1..36: mol_type = other DNA

SEQ ID NO: 12643 - DNA, 36 bp, synthetic construct; identical to SEQ ID NO: 9494
  source 1..36: mol_type = other DNA

SEQ ID NO: 12644 - DNA, 37 bp, synthetic construct; identical to SEQ ID NO: 9496
  source 1..37: mol_type = other DNA

SEQ ID NO: 12645 - DNA, 37 bp, synthetic construct; identical to SEQ ID NO: 9495
  source 1..37: mol_type = other DNA

SEQ ID NO: 12646 - DNA, 38 bp, synthetic construct; identical to SEQ ID NO: 9497
  source 1..38: mol_type = other DNA

SEQ ID NO: 12647 - DNA, 38 bp, synthetic construct; identical to SEQ ID NO: 9498
  source 1..38: mol_type = other DNA

SEQ ID NO: 12648 - DNA, 39 bp, synthetic construct; identical to SEQ ID NO: 9499
  source 1..39: mol_type = other DNA

SEQ ID NO: 12649 - DNA, 39 bp, synthetic construct; identical to SEQ ID NO: 9500
  source 1..39: mol_type = other DNA

SEQ ID NO: 12650 - DNA, 40 bp, synthetic construct; identical to SEQ ID NO: 9502
  source 1..40: mol_type = other DNA

SEQ ID NO: 12651 - DNA, 40 bp, synthetic construct; identical to SEQ ID NO: 9501
  source 1..40: mol_type = other DNA

SEQ ID NO: 12652 - DNA, 31 bp, synthetic construct; identical to SEQ ID NO: 9524
  source 1..31: mol_type = other DNA

SEQ ID NO: 12653 - DNA, 32 bp, synthetic construct; identical to SEQ ID NO: 9525
  source 1..32: mol_type = other DNA

SEQ ID NO: 12654 - DNA, 33 bp, synthetic construct; identical to SEQ ID NO: 9526
  source 1..33: mol_type = other DNA

SEQ ID NO: 12655 - DNA, 34 bp, synthetic construct; identical to SEQ ID NO: 9527
  source 1..34: mol_type = other DNA

SEQ ID NO: 12656 - DNA, 35 bp, synthetic construct; identical to SEQ ID NO: 9528
  source 1..35: mol_type = other DNA

SEQ ID NO: 12657 - DNA, 36 bp, synthetic construct; identical to SEQ ID NO: 9529
  source 1..36: mol_type = other DNA

SEQ ID NO: 12658 - DNA, 37 bp, synthetic construct; identical to SEQ ID NO: 9530
  source 1..37: mol_type = other DNA

SEQ ID NO: 12659 - DNA, 38 bp, synthetic construct; identical to SEQ ID NO: 9531
  source 1..38: mol_type = other DNA

SEQ ID NO: 12660 - DNA, 39 bp, synthetic construct; identical to SEQ ID NO: 9532
  source 1..39: mol_type = other DNA

SEQ ID NO: 12661 - DNA, 40 bp, synthetic construct; identical to SEQ ID NO: 9533
  source 1..40: mol_type = other DNA

SEQ ID NO: 12662 - DNA, 10 bp, synthetic construct
  source 1..10: mol_type = other DNA
acctccactc

SEQ ID NO: 12663 - DNA, 11 bp, synthetic construct
  source 1..11: mol_type = other DNA
gacctccactc

SEQ ID NO: 12664 - DNA, 12 bp, synthetic construct
  source 1..12: mol_type = other DNA
tgacctccactc

SEQ ID NO: 12665 - DNA, 13 bp, synthetic construct
  source 1..13: mol_type = other DNA
ttgacctccactc

SEQ ID NO: 12666 - DNA, 14 bp, synthetic construct
  source 1..14: mol_type = other DNA
gttgacctccactc

SEQ ID NO: 12667 - DNA, 15 bp, synthetic construct
  source 1..15: mol_type = other DNA
cgttgacctccactc

SEQ ID NO: 12668 - DNA, 16 bp, synthetic construct
  source 1..16: mol_type = other DNA
tcgttgacctccactc

SEQ ID NO: 12669 - DNA, 17 bp, synthetic construct
  source 1..17: mol_type = other DNA
ctcgttgacctccactc

SEQ ID NO: 12670 - DNA, 18 bp, synthetic construct
  source 1..18: mol_type = other DNA
gctcgttgacctccactc

SEQ ID NO: 12671 - DNA, 19 bp, synthetic construct
  source 1..19: mol_type = other DNA
tgctcgttgacctccactc

SEQ ID NO: 12672 - DNA, 20 bp, synthetic construct
  source 1..20: mol_type = other DNA
ttgctcgttgacctccactc

SEQ ID NO: 12673 - DNA, 21 bp, synthetic construct
  source 1..21: mol_type = other DNA
cttgctcgttgacctccactc

SEQ ID NO: 12674 - DNA, 22 bp, synthetic construct
  source 1..22: mol_type = other DNA
tcttgctcgttgacctccactc

SEQ ID NO: 12675 - DNA, 23 bp, synthetic construct
  source 1..23: mol_type = other DNA
ttcttgctcgttgacctccactc

SEQ ID NO: 12676 - DNA, 24 bp, synthetic construct
  source 1..24: mol_type = other DNA
attcttgctcgttgacctccactc

SEQ ID NO: 12677 - DNA, 25 bp, synthetic construct
  source 1..25: mol_type = other DNA
aattcttgctcgttgacctccactc

SEQ ID NO: 12678 - DNA, 26 bp, synthetic construct
  source 1..26: mol_type = other DNA
aaattcttgctcgttgacctccactc

SEQ ID NO: 12679 - DNA, 27 bp, synthetic construct
  source 1..27: mol_type = other DNA
gaaattcttgctcgttgacctccactc

SEQ ID NO: 12680 - DNA, 28 bp, synthetic construct
  source 1..28: mol_type = other DNA
agaaattcttgctcgttgacctccactc

SEQ ID NO: 12681 - DNA, 29 bp, synthetic construct
  source 1..29: mol_type = other DNA
aagaaattcttgctcgttgacctccactc

SEQ ID NO: 12682 - DNA, 30 bp, synthetic construct; identical to SEQ ID NO: 10082
  source 1..30: mol_type = other DNA

SEQ ID NO: 12683 - DNA, 31 bp, synthetic construct; identical to SEQ ID NO: 10083
  source 1..31: mol_type = other DNA

SEQ ID NO: 12684 - DNA, 32 bp, synthetic construct; identical to SEQ ID NO: 10084
  source 1..32: mol_type = other DNA

SEQ ID NO: 12685 - DNA, 33 bp, synthetic construct; identical to SEQ ID NO: 10085
  source 1..33: mol_type = other DNA

SEQ ID NO: 12686 - DNA, 34 bp, synthetic construct; identical to SEQ ID NO: 10086
  source 1..34: mol_type = other DNA

SEQ ID NO: 12687 - DNA, 35 bp, synthetic construct; identical to SEQ ID NO: 10087
  source 1..35: mol_type = other DNA

SEQ ID NO: 12688 - DNA, 36 bp, synthetic construct; identical to SEQ ID NO: 10088
  source 1..36: mol_type = other DNA

SEQ ID NO: 12689 - DNA, 37 bp, synthetic construct; identical to SEQ ID NO: 10089
  source 1..37: mol_type = other DNA

SEQ ID NO: 12690 - DNA, 38 bp, synthetic construct; identical to SEQ ID NO: 10090
  source 1..38: mol_type = other DNA

SEQ ID NO: 12691 - DNA, 39 bp, synthetic construct; identical to SEQ ID NO: 10091
  source 1..39: mol_type = other DNA

SEQ ID NO: 12692 - DNA, 40 bp, synthetic construct; identical to SEQ ID NO: 10092
  source 1..40: mol_type = other DNA

SEQ ID NO: 12693 - DNA, 28 bp, synthetic construct
  source 1..28: mol_type = other DNA
acctccactcagtgtgattccaccttct

SEQ ID NO: 12694 - DNA, 29 bp, synthetic construct
  source 1..29: mol_type = other DNA
gacctccactcagtgtgattccaccttct

SEQ ID NO: 12695 - DNA, 30 bp, synthetic construct; identical to SEQ ID NO: 10102
  source 1..30: mol_type = other DNA

SEQ ID NO: 12696 - DNA, 31 bp, synthetic construct; identical to SEQ ID NO: 10103
  source 1..31: mol_type = other DNA

SEQ ID NO: 12697 - DNA, 32 bp, synthetic construct; identical to SEQ ID NO: 10104
  source 1..32: mol_type = other DNA

SEQ ID NO: 12698 - DNA, 33 bp, synthetic construct; identical to SEQ ID NO: 10105
  source 1..33: mol_type = other DNA

SEQ ID NO: 12699 - DNA, 34 bp, synthetic construct; identical to SEQ ID NO: 10106
  source 1..34: mol_type = other DNA

SEQ ID NO: 12700 - DNA, 35 bp, synthetic construct; identical to SEQ ID NO: 10107
  source 1..35: mol_type = other DNA

SEQ ID NO: 12701 - DNA, 36 bp, synthetic construct; identical to SEQ ID NO: 10108
  source 1..36: mol_type = other DNA

SEQ ID NO: 12702 - DNA, 37 bp, synthetic construct; identical to SEQ ID NO: 10109
  source 1..37: mol_type = other DNA

SEQ ID NO: 12703 - DNA, 38 bp, synthetic construct; identical to SEQ ID NO: 10110
  source 1..38: mol_type = other DNA

SEQ ID NO: 12704 - DNA, 39 bp, synthetic construct; identical to SEQ ID NO: 10111
  source 1..39: mol_type = other DNA

SEQ ID NO: 12705 - DNA, 40 bp, synthetic construct; identical to SEQ ID NO: 10112
  source 1..40: mol_type = other DNA

SEQ ID NO: 12706 - DNA, 27 bp, synthetic construct
  source 1..27: mol_type = other DNA
acctccactcagtgtgattccaccttc

SEQ ID NO: 12707 - DNA, 28 bp, synthetic construct
  source 1..28: mol_type = other DNA
gacctccactcagtgtgattccaccttc

SEQ ID NO: 12708 - DNA, 29 bp, synthetic construct
  source 1..29: mol_type = other DNA
tgacctccactcagtgtgattccaccttc

SEQ ID NO: 12709 - DNA, 30 bp, synthetic construct; identical to SEQ ID NO: 10123
  source 1..30: mol_type = other DNA

SEQ ID NO: 12710 - DNA, 31 bp, synthetic construct; identical to SEQ ID NO: 10124
  source 1..31: mol_type = other DNA

SEQ ID NO: 12711 - DNA, 32 bp, synthetic construct; identical to SEQ ID NO: 10125
  source 1..32: mol_type = other DNA

SEQ ID NO: 12712 - DNA, 33 bp, synthetic construct; identical to SEQ ID NO: 10126
  source 1..33: mol_type = other DNA

SEQ ID NO: 12713 - DNA, 34 bp, synthetic construct; identical to SEQ ID NO: 10127
  source 1..34: mol_type = other DNA

SEQ ID NO: 12714 - DNA, 35 bp, synthetic construct; identical to SEQ ID NO: 10128
  source 1..35: mol_type = other DNA

SEQ ID NO: 12715 - DNA, 36 bp, synthetic construct; identical to SEQ ID NO: 10129
  source 1..36: mol_type = other DNA

SEQ ID NO: 12716 - DNA, 37 bp, synthetic construct; identical to SEQ ID NO: 10130
  source 1..37: mol_type = other DNA

SEQ ID NO: 12717 - DNA, 38 bp, synthetic construct; identical to SEQ ID NO: 10131
  source 1..38: mol_type = other DNA

SEQ ID NO: 12718 - DNA, 39 bp, synthetic construct; identical to SEQ ID NO: 10132
  source 1..39: mol_type = other DNA

SEQ ID NO: 12719 - DNA, 40 bp, synthetic construct; identical to SEQ ID NO: 10133
  source 1..40: mol_type = other DNA

SEQ ID NO: 12720 - DNA, 34 bp, synthetic construct; identical to SEQ ID NO: 10141
  source 1..34: mol_type = other DNA

SEQ ID NO: 12721 - DNA, 35 bp, synthetic construct; identical to SEQ ID NO: 10142
  source 1..35: mol_type = other DNA

SEQ ID NO: 12722 - DNA, 36 bp, synthetic construct; identical to SEQ ID NO: 10143
  source 1..36: mol_type = other DNA

SEQ ID NO: 12723 - DNA, 37 bp, synthetic construct; identical to SEQ ID NO: 10144
  source 1..37: mol_type = other DNA

SEQ ID NO: 12724 - DNA, 38 bp, synthetic construct; identical to SEQ ID NO: 10145
  source 1..38: mol_type = other DNA

SEQ ID NO: 12725 - DNA, 39 bp, synthetic construct; identical to SEQ ID NO: 10146
  source 1..39: mol_type = other DNA

SEQ ID NO: 12726 - DNA, 40 bp, synthetic construct; identical to SEQ ID NO: 10147
  source 1..40: mol_type = other DNA

SEQ ID NO: 12727 - DNA, 11 bp, synthetic construct
  source 1..11: mol_type = other DNA
acctccactca

SEQ ID NO: 12728 - DNA, 12 bp, synthetic construct
  source 1..12: mol_type = other DNA
gacctccactca

SEQ ID NO: 12729 - DNA, 13 bp, synthetic construct
  source 1..13: mol_type = other DNA
tgacctccactca

SEQ ID NO: 12730 - DNA, 14 bp, synthetic construct
  source 1..14: mol_type = other DNA
ttgacctccactca

SEQ ID NO: 12731 - DNA, 15 bp, synthetic construct
  source 1..15: mol_type = other DNA
gttgacctccactca

SEQ ID NO: 12732 - DNA, 16 bp, synthetic construct
  source 1..16: mol_type = other DNA
cgttgacctccactca

SEQ ID NO: 12733 - DNA, 17 bp, synthetic construct
  source 1..17: mol_type = other DNA
tcgttgacctccactca

SEQ ID NO: 12734 - DNA, 18 bp, synthetic construct
  source 1..18: mol_type = other DNA
ctcgttgacctccactca

SEQ ID NO: 12735 - DNA, 19 bp, synthetic construct
  source 1..19: mol_type = other DNA
gctcgttgacctccactca

SEQ ID NO: 12736 - DNA, 20 bp, synthetic construct
  source 1..20: mol_type = other DNA
tgctcgttgacctccactca

SEQ ID NO: 12737 - DNA, 21 bp, synthetic construct
  source 1..21: mol_type = other DNA
ttgctcgttgacctccactca

SEQ ID NO: 12738 - DNA, 22 bp, synthetic construct
  source 1..22: mol_type = other DNA
cttgctcgttgacctccactca

SEQ ID NO: 12739 - DNA, 23 bp, synthetic construct
  source 1..23: mol_type = other DNA
tcttgctcgttgacctccactca

SEQ ID NO: 12740 - DNA, 24 bp, synthetic construct
  source 1..24: mol_type = other DNA
ttcttgctcgttgacctccactca

SEQ ID NO: 12741 - DNA, 25 bp, synthetic construct
  source 1..25: mol_type = other DNA
attcttgctcgttgacctccactca

SEQ ID NO: 12742 - DNA, 26 bp, synthetic construct
  source 1..26: mol_type = other DNA
aattcttgctcgttgacctccactca

SEQ ID NO: 12743 - DNA, 27 bp, synthetic construct
  source 1..27: mol_type = other DNA
aaattcttgctcgttgacctccactca

SEQ ID NO: 12744 - DNA, 28 bp, synthetic construct
  source 1..28: mol_type = other DNA
gaaattcttgctcgttgacctccactca

SEQ ID NO: 12745 - DNA, 29 bp, synthetic construct
  source 1..29: mol_type = other DNA
agaaattcttgctcgttgacctccactca

SEQ ID NO: 12746 - DNA, 30 bp, synthetic construct; identical to SEQ ID NO: 10168
  source 1..30: mol_type = other DNA

SEQ ID NO: 12747 - DNA, 31 bp, synthetic construct; identical to SEQ ID NO: 10169
  source 1..31: mol_type = other DNA

SEQ ID NO: 12748 - DNA, 32 bp, synthetic construct; identical to SEQ ID NO: 10170
  source 1..32: mol_type = other DNA

SEQ ID NO: 12749 - DNA, 33 bp, synthetic construct; identical to SEQ ID NO: 10171
  source 1..33: mol_type = other DNA

SEQ ID NO: 12750 - DNA, 34 bp, synthetic construct; identical to SEQ ID NO: 10172
  source 1..34: mol_type = other DNA

SEQ ID NO: 12751 - DNA, 35 bp, synthetic construct; identical to SEQ ID NO: 10173
  source 1..35: mol_type = other DNA

SEQ ID NO: 12752 - DNA, 36 bp, synthetic construct; identical to SEQ ID NO: 10174
  source 1..36: mol_type = other DNA

SEQ ID NO: 12753 - DNA, 37 bp, synthetic construct; identical to SEQ ID NO: 10175
  source 1..37: mol_type = other DNA

SEQ ID NO: 12754 - DNA, 38 bp, synthetic construct; identical to SEQ ID NO: 10176
  source 1..38: mol_type = other DNA

SEQ ID NO: 12755 - DNA, 39 bp, synthetic construct; identical to SEQ ID NO: 10177
  source 1..39: mol_type = other DNA

SEQ ID NO: 12756 - DNA, 40 bp, synthetic construct; identical to SEQ ID NO: 10178
  source 1..40: mol_type = other DNA

SEQ ID NO: 12757 - DNA, 35 bp, synthetic construct; identical to SEQ ID NO: 10186
  source 1..35: mol_type = other DNA

SEQ ID NO: 12758 - DNA, 36 bp, synthetic construct; identical to SEQ ID NO: 10187
  source 1..36: mol_type = other DNA

SEQ ID NO: 12759 - DNA, 37 bp, synthetic construct; identical to SEQ ID NO: 10188
  source 1..37: mol_type = other DNA

SEQ ID NO: 12760 - DNA, 38 bp, synthetic construct; identical to SEQ ID NO: 10189
  source 1..38: mol_type = other DNA

SEQ ID NO: 12761 - DNA, 39 bp, synthetic construct; identical to SEQ ID NO: 10190
  source 1..39: mol_type = other DNA

SEQ ID NO: 12762 - DNA, 40 bp, synthetic construct; identical to SEQ ID NO: 10191
  source 1..40: mol_type = other DNA

SEQ ID NO: 12763 - DNA, 10 bp, synthetic construct
  source 1..10: mol_type = other DNA
gacctccact

SEQ ID NO: 12764 - DNA, 11 bp, synthetic construct
  source 1..11: mol_type = other DNA
tgacctccact

SEQ ID NO: 12765 - DNA, 12 bp, synthetic construct
  source 1..12: mol_type = other DNA
ttgacctccact

SEQ ID NO: 12766 - DNA, 13 bp, synthetic construct
  source 1..13: mol_type = other DNA
gttgacctccact

SEQ ID NO: 12767 - DNA, 14 bp, synthetic construct
  source 1..14: mol_type = other DNA
cgttgacctccact

SEQ ID NO: 12768 - DNA, 15 bp, synthetic construct
  source 1..15: mol_type = other DNA
tcgttgacctccact

SEQ ID NO: 12769 - DNA, 16 bp, synthetic construct
  source 1..16: mol_type = other DNA
ctcgttgacctccact

SEQ ID NO: 12770 - DNA, 17 bp, synthetic construct
  source 1..17: mol_type = other DNA
gctcgttgacctccact

SEQ ID NO: 12771 - DNA, 18 bp, synthetic construct
  source 1..18: mol_type = other DNA
tgctcgttgacctccact

SEQ ID NO: 12772 - DNA, 19 bp, synthetic construct
  source 1..19: mol_type = other DNA
ttgctcgttgacctccact

SEQ ID NO: 12773 - DNA, 20 bp, synthetic construct
  source 1..20: mol_type = other DNA
cttgctcgttgacctccact

SEQ ID NO: 12774 - DNA, 21 bp, synthetic construct
  source 1..21: mol_type = other DNA
tcttgctcgttgacctccact

SEQ ID NO: 12775 - DNA, 22 bp, synthetic construct
  source 1..22: mol_type = other DNA
ttcttgctcgttgacctccact

SEQ ID NO: 12776 - DNA, 23 bp, synthetic construct
  source 1..23: mol_type = other DNA
attcttgctcgttgacctccact

SEQ ID NO: 12777 - DNA, 24 bp, synthetic construct
  source 1..24: mol_type = other DNA
aattcttgctcgttgacctccact

SEQ ID NO: 12778 - DNA, 25 bp, synthetic construct
  source 1..25: mol_type = other DNA
aaattcttgctcgttgacctccact

SEQ ID NO: 12779 - DNA, 26 bp, synthetic construct
  source 1..26: mol_type = other DNA
gaaattcttgctcgttgacctccact

SEQ ID NO: 12780 - DNA, 27 bp, synthetic construct
  source 1..27: mol_type = other DNA
agaaattcttgctcgttgacctccact

SEQ ID NO: 12781 - DNA, 28 bp, synthetic construct
  source 1..28: mol_type = other DNA
aagaaattcttgctcgttgacctccact

SEQ ID NO: 12782 - DNA, 29 bp, synthetic construct
  source 1..29: mol_type = other DNA
aaagaaattcttgctcgttgacctccact

SEQ ID NO: 12783 - DNA, 30 bp, synthetic construct; identical to SEQ ID NO: 10212
  source 1..30: mol_type = other DNA

SEQ ID NO: 12784 - DNA, 31 bp, synthetic construct; identical to SEQ ID NO: 10213
  source 1..31: mol_type = other DNA

SEQ ID NO: 12785 - DNA, 32 bp, synthetic construct; identical to SEQ ID NO: 10214
  source 1..32: mol_type = other DNA

SEQ ID NO: 12786 - DNA, 33 bp, synthetic construct; identical to SEQ ID NO: 10215
  source 1..33: mol_type = other DNA

SEQ ID NO: 12787 - DNA, 34 bp, synthetic construct; identical to SEQ ID NO: 10216
  source 1..34: mol_type = other DNA

SEQ ID NO: 12788 - DNA, 35 bp, synthetic construct; identical to SEQ ID NO: 10217
  source 1..35: mol_type = other DNA

SEQ ID NO: 12789 - DNA, 36 bp, synthetic construct; identical to SEQ ID NO: 10218
  source 1..36: mol_type = other DNA

SEQ ID NO: 12790 - DNA, 37 bp, synthetic construct; identical to SEQ ID NO: 10219
  source 1..37: mol_type = other DNA

SEQ ID NO: 12791 - DNA, 38 bp, synthetic construct; identical to SEQ ID NO: 10220
  source 1..38: mol_type = other DNA

SEQ ID NO: 12792 - DNA, 39 bp, synthetic construct; identical to SEQ ID NO: 10221
  source 1..39: mol_type = other DNA

SEQ ID NO: 12793 - DNA, 40 bp, synthetic construct; identical to SEQ ID NO: 10222
  source 1..40: mol_type = other DNA

SEQ ID NO: 12794 - DNA, 25 bp, synthetic construct
  source 1..25: mol_type = other DNA
acctccactcagtgtgattccacct

SEQ ID NO: 12795 - DNA, 26 bp, synthetic construct
  source 1..26: mol_type = other DNA
gacctccactcagtgtgattccacct

SEQ ID NO: 12796 - DNA, 27 bp, synthetic construct
  source 1..27: mol_type = other DNA
tgacctccactcagtgtgattccacct

SEQ ID NO: 12797 - DNA, 28 bp, synthetic construct
  source 1..28: mol_type = other DNA
ttgacctccactcagtgtgattccacct

SEQ ID NO: 12798 - DNA, 29 bp, synthetic construct
  source 1..29: mol_type = other DNA
gttgacctccactcagtgtgattccacct

SEQ ID NO: 12799 - DNA, 30 bp, synthetic construct; identical to SEQ ID NO: 10235
  source 1..30: mol_type = other DNA

SEQ ID NO: 12800 - DNA, 31 bp, synthetic construct; identical to SEQ ID NO: 10236
  source 1..31: mol_type = other DNA

SEQ ID NO: 12801 - DNA, 32 bp, synthetic construct; identical to SEQ ID NO: 10237
  source 1..32: mol_type = other DNA

SEQ ID NO: 12802 - DNA, 33 bp, synthetic construct; identical to SEQ ID NO: 10238
  source 1..33: mol_type = other DNA

SEQ ID NO: 12803 - DNA, 34 bp, synthetic construct; identical to SEQ ID NO: 10239
  source 1..34: mol_type = other DNA

SEQ ID NO: 12804 - DNA, 35 bp, synthetic construct; identical to SEQ ID NO: 10240
  source 1..35: mol_type = other DNA

SEQ ID NO: 12805 - DNA, 36 bp, synthetic construct; identical to SEQ ID NO: 10241
  source 1..36: mol_type = other DNA

SEQ ID NO: 12806 - DNA, 37 bp, synthetic construct; identical to SEQ ID NO: 10242
  source 1..37: mol_type = other DNA

SEQ ID NO: 12807 - DNA, 38 bp, synthetic construct; identical to SEQ ID NO: 10243
  source 1..38: mol_type = other DNA

SEQ ID NO: 12808 - DNA, 39 bp, synthetic construct; identical to SEQ ID NO: 10244
  source 1..39: mol_type = other DNA

SEQ ID NO: 12809 - DNA, 40 bp, synthetic construct; identical to SEQ ID NO: 10245
  source 1..40: mol_type = other DNA

SEQ ID NO: 12810 - DNA, 30 bp, synthetic construct
  source 1..30: mol_type = other DNA
ggtcaacgagcaagaatttctttagcaagg

SEQ ID NO: 12811 - DNA, 31 bp, synthetic construct; identical to SEQ ID NO: 12215
  source 1..31: mol_type = other DNA

SEQ ID NO: 12812 - DNA, 32 bp, synthetic construct; identical to SEQ ID NO: 12216
  source 1..32: mol_type = other DNA

SEQ ID NO: 12813 - DNA, 33 bp, synthetic construct; identical to SEQ ID NO: 12217
  source 1..33: mol_type = other DNA

SEQ ID NO: 12814 - DNA, 34 bp, synthetic construct; identical to SEQ ID NO: 12218
  source 1..34: mol_type = other DNA

SEQ ID NO: 12815 - DNA, 35 bp, synthetic construct; identical to SEQ ID NO: 11532
  source 1..35: mol_type = other DNA

SEQ ID NO: 12816 - DNA, 36 bp, synthetic construct; identical to SEQ ID NO: 10878
  source 1..36: mol_type = other DNA

SEQ ID NO: 12817 - DNA, 37 bp, synthetic construct; identical to SEQ ID NO: 10246
  source 1..37: mol_type = other DNA

SEQ ID NO: 12818 - DNA, 38 bp, synthetic construct; identical to SEQ ID NO: 10247
  source 1..38: mol_type = other DNA

SEQ ID NO: 12819 - DNA, 39 bp, synthetic construct; identical to SEQ ID NO: 10248
  source 1..39: mol_type = other DNA

SEQ ID NO: 12820 - DNA, 40 bp, synthetic construct; identical to SEQ ID NO: 10249
  source 1..40: mol_type = other DNA

SEQ ID NO: 12821 - DNA, 26 bp, synthetic construct
  source 1..26: mol_type = other DNA
acctccactcagtgtgattccacctt

SEQ ID NO: 12822 - DNA, 27 bp, synthetic construct
  source 1..27: mol_type = other DNA
gacctccactcagtgtgattccacctt

SEQ ID NO: 12823 - DNA, 28 bp, synthetic construct
  source 1..28: mol_type = other DNA
tgacctccactcagtgtgattccacctt

SEQ ID NO: 12824 - DNA, 29 bp, synthetic construct
  source 1..29: mol_type = other DNA
ttgacctccactcagtgtgattccacctt

SEQ ID NO: 12825 - DNA, 30 bp, synthetic construct; identical to SEQ ID NO: 10261
  source 1..30: mol_type = other DNA

SEQ ID NO: 12826 - DNA, 31 bp, synthetic construct; identical to SEQ ID NO: 10262
  source 1..31: mol_type = other DNA

SEQ ID NO: 12827 - DNA, 32 bp, synthetic construct; identical to SEQ ID NO: 10263
  source 1..32: mol_type = other DNA

SEQ ID NO: 12828 - DNA, 33 bp, synthetic construct; identical to SEQ ID NO: 10264
  source 1..33: mol_type = other DNA

SEQ ID NO: 12829 - DNA, 34 bp, synthetic construct; identical to SEQ ID NO: 10265
  source 1..34: mol_type = other DNA

SEQ ID NO: 12830 - DNA, 35 bp, synthetic construct; identical to SEQ ID NO: 10266
  source 1..35: mol_type = other DNA

SEQ ID NO: 12831 - DNA, 36 bp, synthetic construct; identical to SEQ ID NO: 10267
  source 1..36: mol_type = other DNA

SEQ ID NO: 12832 - DNA, 37 bp, synthetic construct; identical to SEQ ID NO: 10268
  source 1..37: mol_type = other DNA

SEQ ID NO: 12833 - DNA, 38 bp, synthetic construct; identical to SEQ ID NO: 10269
  source 1..38: mol_type = other DNA

SEQ ID NO: 12834 - DNA, 39 bp, synthetic construct; identical to SEQ ID NO: 10270
  source 1..39: mol_type = other DNA

SEQ ID NO: 12835 - DNA, 40 bp, synthetic construct; identical to SEQ ID NO: 10271
  source 1..40: mol_type = other DNA

SEQ ID NO: 12836 - DNA, 15 bp, synthetic construct
  source 1..15: mol_type = other DNA
ggtcaacgagcaaga

SEQ ID NO: 12837 - DNA, 16 bp, synthetic construct
  source 1..16: mol_type = other DNA
aggtcaacgagcaaga

SEQ ID NO: 12838 - DNA, 17 bp, synthetic construct
  source 1..17: mol_type = other DNA
gaggtcaacgagcaaga

SEQ ID NO: 12839 - DNA, 18 bp, synthetic construct
  source 1..18: mol_type = other DNA
ggaggtcaacgagcaaga

SEQ ID NO: 12840 - DNA, 19 bp, synthetic construct
  source 1..19: mol_type = other DNA
tggaggtcaacgagcaaga

SEQ ID NO: 12841 - DNA, 20 bp, synthetic construct
  source 1..20: mol_type = other DNA
gtggaggtcaacgagcaaga

SEQ ID NO: 12842 - DNA, 21 bp, synthetic construct
  source 1..21: mol_type = other DNA
agtggaggtcaacgagcaaga

SEQ ID NO: 12843 - DNA, 22 bp, synthetic construct
  source 1..22: mol_type = other DNA
gagtggaggtcaacgagcaaga

SEQ ID NO: 12844 - DNA, 23 bp, synthetic construct
  source 1..23: mol_type = other DNA
tgagtggaggtcaacgagcaaga

SEQ ID NO: 12845 - DNA, 24 bp, synthetic construct
  source 1..24: mol_type = other DNA
ctgagtggaggtcaacgagcaaga

SEQ ID NO: 12846 - DNA, 25 bp, synthetic construct
  source 1..25: mol_type = other DNA
actgagtggaggtcaacgagcaaga

SEQ ID NO: 12847 - DNA, 26 bp, synthetic construct
  source 1..26: mol_type = other DNA
cactgagtggaggtcaacgagcaaga

SEQ ID NO: 12848 - DNA, 27 bp, synthetic construct
  source 1..27: mol_type = other DNA
acactgagtggaggtcaacgagcaaga

SEQ ID NO: 12849 - DNA, 28 bp, synthetic construct
  source 1..28: mol_type = other DNA
cacactgagtggaggtcaacgagcaaga

SEQ ID NO: 12850 - DNA, 29 bp, synthetic construct
  source 1..29: mol_type = other DNA
tcacactgagtggaggtcaacgagcaaga

SEQ ID NO: 12851 - DNA, 30 bp, synthetic construct; identical to SEQ ID NO: 10280
  source 1..30: mol_type = other DNA

SEQ ID NO: 12852 - DNA, 31 bp, synthetic construct; identical to SEQ ID NO: 10281
  source 1..31: mol_type = other DNA

SEQ ID NO: 12853 - DNA, 32 bp, synthetic construct; identical to SEQ ID NO: 10282
  source 1..32: mol_type = other DNA

SEQ ID NO: 12854 - DNA, 33 bp, synthetic construct; identical to SEQ ID NO: 10283
  source 1..33: mol_type = other DNA

SEQ ID NO: 12855 - DNA, 34 bp, synthetic construct; identical to SEQ ID NO: 10284
  source 1..34: mol_type = other DNA

SEQ ID NO: 12856 - DNA, 35 bp, synthetic construct; identical to SEQ ID NO: 10285
  source 1..35: mol_type = other DNA

SEQ ID NO: 12857 - DNA, 36 bp, synthetic construct; identical to SEQ ID NO: 10286
  source 1..36: mol_type = other DNA

SEQ ID NO: 12858 - DNA, 37 bp, synthetic construct; identical to SEQ ID NO: 10287
  source 1..37: mol_type = other DNA

SEQ ID NO: 12859 - DNA, 38 bp, synthetic construct; identical to SEQ ID NO: 10288
  source 1..38: mol_type = other DNA

SEQ ID NO: 12860 - DNA, 39 bp, synthetic construct; identical to SEQ ID NO: 10289
  source 1..39: mol_type = other DNA

SEQ ID NO: 12861 - DNA, 40 bp, synthetic construct; identical to SEQ ID NO: 10290
  source 1..40: mol_type = other DNA

SEQ ID NO: 12862 - DNA, 33 bp, synthetic construct; identical to SEQ ID NO: 9630
  source 1..33: mol_type = other DNA

SEQ ID NO: 12863 - DNA, 34 bp, synthetic construct; identical to SEQ ID NO: 9631
  source 1..34: mol_type = other DNA

SEQ ID NO: 12864 - DNA, 35 bp, synthetic construct; identical to SEQ ID NO: 9632
  source 1..35: mol_type = other DNA

SEQ ID NO: 12865 - DNA, 36 bp, synthetic construct; identical to SEQ ID NO: 9633
  source 1..36: mol_type = other DNA

SEQ ID NO: 12866 - DNA, 37 bp, synthetic construct; identical to SEQ ID NO: 9634
  source 1..37: mol_type = other DNA

SEQ ID NO: 12867 - DNA, 38 bp, synthetic construct; identical to SEQ ID NO: 9635
  source 1..38: mol_type = other DNA

SEQ ID NO: 12868 - DNA, 39 bp, synthetic construct; identical to SEQ ID NO: 9636
  source 1..39: mol_type = other DNA

SEQ ID NO: 12869 - DNA, 40 bp, synthetic construct; identical to SEQ ID NO: 9637
  source 1..40: mol_type = other DNA

SEQ ID NO: 12870 - DNA, 29 bp, synthetic construct
  source 1..29: mol_type = other DNA
acctccactcagtgtgattccaccttctc

SEQ ID NO: 12871 - DNA, 29 bp, synthetic construct
  source 1..29: mol_type = other DNA
acctccactcagtgtgattccaccctctc

SEQ ID NO: 12872 - DNA, 30 bp, synthetic construct; identical to SEQ ID NO: 10322
  source 1..30: mol_type = other DNA

SEQ ID NO: 12873 - DNA, 30 bp, synthetic construct; identical to SEQ ID NO: 10323
  source 1..30: mol_type = other DNA

SEQ ID NO: 12874 - DNA, 31 bp, synthetic construct; identical to SEQ ID NO: 10325
  source 1..31: mol_type = other DNA

SEQ ID NO: 12875 - DNA, 31 bp, synthetic construct; identical to SEQ ID NO: 10324
  source 1..31: mol_type = other DNA

SEQ ID NO: 12876 - DNA, 32 bp, synthetic construct; identical to SEQ ID NO: 10326
  source 1..32: mol_type = other DNA

SEQ ID NO: 12877 - DNA, 32 bp, synthetic construct; identical to SEQ ID NO: 10327
  source 1..32: mol_type = other DNA

SEQ ID NO: 12878 - DNA, 33 bp, synthetic construct; identical to SEQ ID NO: 10328
  source 1..33: mol_type = other DNA

SEQ ID NO: 12879 - DNA, 33 bp, synthetic construct; identical to SEQ ID NO: 10329
  source 1..33: mol_type = other DNA

SEQ ID NO: 12880 - DNA, 34 bp, synthetic construct; identical to SEQ ID NO: 10331
  source 1..34: mol_type = other DNA

SEQ ID NO: 12881 - DNA, 34 bp, synthetic construct; identical to SEQ ID NO: 10330
  source 1..34: mol_type = other DNA

SEQ ID NO: 12882 - DNA, 35 bp, synthetic construct; identical to SEQ ID NO: 10332
  source 1..35: mol_type = other DNA

SEQ ID NO: 12883 - DNA, 35 bp, synthetic construct; identical to SEQ ID NO: 10333
  source 1..35: mol_type = other DNA

SEQ ID NO: 12884 - DNA, 36 bp, synthetic construct; identical to SEQ ID NO: 10335
  source 1..36: mol_type = other DNA

SEQ ID NO: 12885 - DNA, 36 bp, synthetic construct; identical to SEQ ID NO: 10334
  source 1..36: mol_type = other DNA

SEQ ID NO: 12886 - DNA, 37 bp, synthetic construct; identical to SEQ ID NO: 10337
  source 1..37: mol_type = other DNA

SEQ ID NO: 12887 - DNA, 37 bp, synthetic construct; identical to SEQ ID NO: 10336
  source 1..37: mol_type = other DNA

SEQ ID NO: 12888 - DNA, 38 bp, synthetic construct; identical to SEQ ID NO: 10339
  source 1..38: mol_type = other DNA

SEQ ID NO: 12889 - DNA, 38 bp, synthetic construct; identical to SEQ ID NO: 10338
  source 1..38: mol_type = other DNA

SEQ ID NO: 12890 - DNA, 39 bp, synthetic construct; identical to SEQ ID NO: 10340
  source 1..39: mol_type = other DNA

SEQ ID NO: 12891 - DNA, 39 bp, synthetic construct; identical to SEQ ID NO: 10341
  source 1..39: mol_type = other DNA

SEQ ID NO: 12892 - DNA, 40 bp, synthetic construct; identical to SEQ ID NO: 10342
  source 1..40: mol_type = other DNA

SEQ ID NO: 12893 - DNA, 40 bp, synthetic construct; identical to SEQ ID NO: 10343
  source 1..40: mol_type = other DNA

SEQ ID NO: 12894 - DNA, 13 bp, synthetic construct
  source 1..13: mol_type = other DNA
acctccactcagt

SEQ ID NO: 12895 - DNA, 13 bp, synthetic construct
  source 1..13: mol_type = other DNA
acctccggacagt

SEQ ID NO: 12896 - DNA, 14 bp, synthetic construct
  source 1..14: mol_type = other DNA
gacctccggacagt

SEQ ID NO: 12897 - DNA, 14 bp, synthetic construct
  source 1..14: mol_type = other DNA
gacctccactcagt

SEQ ID NO: 12898 - DNA, 15 bp, synthetic construct
  source 1..15: mol_type = other DNA
tgacctccggacagt

SEQ ID NO: 12899 - DNA, 15 bp, synthetic construct
  source 1..15: mol_type = other DNA
tgacctccactcagt

SEQ ID NO: 12900 - DNA, 16 bp, synthetic construct
  source 1..16: mol_type = other DNA
ttgacctccggacagt

SEQ ID NO: 12901 - DNA, 16 bp, synthetic construct
  source 1..16: mol_type = other DNA
ttgacctccactcagt

SEQ ID NO: 12902 - DNA, 17 bp, synthetic construct
  source 1..17: mol_type = other DNA
gttgacctccactcagt

SEQ ID NO: 12903 - DNA, 17 bp, synthetic construct
  source 1..17: mol_type = other DNA
gttgacctccggacagt

SEQ ID NO: 12904 - DNA, 18 bp, synthetic construct
  source 1..18: mol_type = other DNA
cgttgacctccggacagt

SEQ ID NO: 12905 - DNA, 18 bp, synthetic construct
  source 1..18: mol_type = other DNA
cgttgacctccactcagt

SEQ ID NO: 12906 - DNA, 19 bp, synthetic construct
  source 1..19: mol_type = other DNA
tcgttgacctccactcagt

SEQ ID NO: 12907 - DNA, 19 bp, synthetic construct
  source 1..19: mol_type = other DNA
tcgttgacctccggacagt

SEQ ID NO: 12908 - DNA, 20 bp, synthetic construct
  source 1..20: mol_type = other DNA
ctcgttgacctccactcagt

SEQ ID NO: 12909 - DNA, 20 bp, synthetic construct
  source 1..20: mol_type = other DNA
ctcgttgacctccggacagt

SEQ ID NO: 12910 - DNA, 21 bp, synthetic construct
  source 1..21: mol_type = other DNA
gctcgttgacctccggacagt

SEQ ID NO: 12911 - DNA, 21 bp, synthetic construct
  source 1..21: mol_type = other DNA
gctcgttgacctccactcagt

SEQ ID NO: 12912 - DNA, 22 bp, synthetic construct
  source 1..22: mol_type = other DNA
tgctcgttgacctccggacagt

SEQ ID NO: 12913 - DNA, 22 bp, synthetic construct
  source 1..22: mol_type = other DNA
tgctcgttgacctccactcagt

SEQ ID NO: 12914 - DNA, 23 bp, synthetic construct
  source 1..23: mol_type = other DNA
ttgctcgttgacctccactcagt

SEQ ID NO: 12915 - DNA, 23 bp, synthetic construct
  source 1..23: mol_type = other DNA
ttgctcgttgacctccggacagt

SEQ ID NO: 12916 - DNA, 24 bp, synthetic construct
  source 1..24: mol_type = other DNA
cttgctcgttgacctccactcagt

SEQ ID NO: 12917 - DNA, 24 bp, synthetic construct
  source 1..24: mol_type = other DNA
cttgctcgttgacctccggacagt

SEQ ID NO: 12918 - DNA, 25 bp, synthetic construct
  source 1..25: mol_type = other DNA
tcttgctcgttgacctccggacagt

SEQ ID NO: 12919 - DNA, 25 bp, synthetic construct
  source 1..25: mol_type = other DNA
tcttgctcgttgacctccactcagt

SEQ ID NO: 12920 - DNA, 26 bp, synthetic construct
  source 1..26: mol_type = other DNA
ttcttgctcgttgacctccactcagt

SEQ ID NO: 12921 - DNA, 26 bp, synthetic construct
  source 1..26: mol_type = other DNA
ttcttgctcgttgacctccggacagt

SEQ ID NO: 12922 - DNA, 27 bp, synthetic construct
  source 1..27: mol_type = other DNA
attcttgctcgttgacctccactcagt

SEQ ID NO: 12923 - DNA, 27 bp, synthetic construct
  source 1..27: mol_type = other DNA
attcttgctcgttgacctccggacagt

SEQ ID NO: 12924 - DNA, 28 bp, synthetic construct
  source 1..28: mol_type = other DNA
aattcttgctcgttgacctccactcagt

SEQ ID NO: 12925 - DNA, 28 bp, synthetic construct
  source 1..28: mol_type = other DNA
aattcttgctcgttgacctccggacagt

SEQ ID NO: 12926 - DNA, 29 bp, synthetic construct
  source 1..29: mol_type = other DNA
aaattcttgctcgttgacctccggacagt

SEQ ID NO: 12927 - DNA, 29 bp, synthetic construct
  source 1..29: mol_type = other DNA
aaattcttgctcgttgacctccactcagt

SEQ ID NO: 12928 - DNA, 30 bp, synthetic construct; identical to SEQ ID NO: 11697
  source 1..30: mol_type = other DNA

SEQ ID NO: 12929 - DNA, 30 bp, synthetic construct; identical to SEQ ID NO: 11698
  source 1..30: mol_type = other DNA

SEQ ID NO: 12930 - DNA, 31 bp, synthetic construct; identical to SEQ ID NO: 11699
  source 1..31: mol_type = other DNA

SEQ ID NO: 12931 - DNA, 31 bp, synthetic construct; identical to SEQ ID NO: 11700
  source 1..31: mol_type = other DNA

SEQ ID NO: 12932 - DNA, 32 bp, synthetic construct; identical to SEQ ID NO: 11701
  source 1..32: mol_type = other DNA

SEQ ID NO: 12933 - DNA, 32 bp, synthetic construct; identical to SEQ ID NO: 11702
  source 1..32: mol_type = other DNA

SEQ ID NO: 12934 - DNA, 33 bp, synthetic construct; identical to SEQ ID NO: 11703
  source 1..33: mol_type = other DNA

SEQ ID NO: 12935 - DNA, 33 bp, synthetic construct; identical to SEQ ID NO: 11704
  source 1..33: mol_type = other DNA

SEQ ID NO: 12936 - DNA, 34 bp, synthetic construct; identical to SEQ ID NO: 11706
  source 1..34: mol_type = other DNA

SEQ ID NO: 12937 - DNA, 34 bp, synthetic construct; identical to SEQ ID NO: 11705
  source 1..34: mol_type = other DNA

SEQ ID NO: 12938 - DNA, 35 bp, synthetic construct; identical to SEQ ID NO: 11707
  source 1..35: mol_type = other DNA

SEQ ID NO: 12939 - DNA, 35 bp, synthetic construct; identical to SEQ ID NO: 11708
  source 1..35: mol_type = other DNA

SEQ ID NO: 12940 - DNA, 36 bp, synthetic construct; identical to SEQ ID NO: 11709
  source 1..36: mol_type = other DNA

SEQ ID NO: 12941 - DNA, 36 bp, synthetic construct; identical to SEQ ID NO: 11710
  source 1..36: mol_type = other DNA

SEQ ID NO: 12942 - DNA, 37 bp, synthetic construct; identical to SEQ ID NO: 11712
  source 1..37: mol_type = other DNA

SEQ ID NO: 12943 - DNA, 37 bp, synthetic construct; identical to SEQ ID NO: 11711
  source 1..37: mol_type = other DNA

SEQ ID NO: 12944 - DNA, 38 bp, synthetic construct; identical to SEQ ID NO: 11714
  source 1..38: mol_type = other DNA

SEQ ID NO: 12945 - DNA, 38 bp, synthetic construct; identical to SEQ ID NO: 11713
  source 1..38: mol_type = other DNA

SEQ ID NO: 12946 - DNA, 39 bp, synthetic construct; identical to SEQ ID NO: 11716
  source 1..39: mol_type = other DNA

SEQ ID NO: 12947 - DNA, 39 bp, synthetic construct; identical to SEQ ID NO: 11715
  source 1..39: mol_type = other DNA

SEQ ID NO: 12948 - DNA, 40 bp, synthetic construct; identical to SEQ ID NO: 11717
  source 1..40: mol_type = other DNA

SEQ ID NO: 12949 - DNA, 40 bp, synthetic construct; identical to SEQ ID NO: 11718
  source 1..40: mol_type = other DNA

SEQ ID NO: 12950 - DNA, 12 bp, synthetic construct
  source 1..12: mol_type = other DNA
acctccactcag

SEQ ID NO: 12951 - DNA, 13 bp, synthetic construct
  source 1..13: mol_type = other DNA
gacctccactcag

SEQ ID NO: 12952 - DNA, 14 bp, synthetic construct
  source 1..14: mol_type = other DNA
tgacctccactcag

SEQ ID NO: 12953 - DNA, 15 bp, synthetic construct
  source 1..15: mol_type = other DNA
ttgacctccactcag

SEQ ID NO: 12954 - DNA, 16 bp, synthetic construct
  source 1..16: mol_type = other DNA
gttgacctccactcag

SEQ ID NO: 12955 - DNA, 17 bp, synthetic construct
  source 1..17: mol_type = other DNA
cgttgacctccactcag

SEQ ID NO: 12956 - DNA, 18 bp, synthetic construct
  source 1..18: mol_type = other DNA
tcgttgacctccactcag

SEQ ID NO: 12957 - DNA, 19 bp, synthetic construct
  source 1..19: mol_type = other DNA
ctcgttgacctccactcag

SEQ ID NO: 12958 - DNA, 20 bp, synthetic construct
  source 1..20: mol_type = other DNA
gctcgttgacctccactcag

SEQ ID NO: 12959 - DNA, 21 bp, synthetic construct
  source 1..21: mol_type = other DNA
tgctcgttgacctccactcag

SEQ ID NO: 12960 - DNA, 22 bp, synthetic construct
  source 1..22: mol_type = other DNA
ttgctcgttgacctccactcag

SEQ ID NO: 12961 - DNA, 23 bp, synthetic construct
  source 1..23: mol_type = other DNA
cttgctcgttgacctccactcag

SEQ ID NO: 12962 - DNA, 24 bp, synthetic construct
  source 1..24: mol_type = other DNA
tcttgctcgttgacctccactcag

SEQ ID NO: 12963 - DNA, 25 bp, synthetic construct
  source 1..25: mol_type = other DNA
ttcttgctcgttgacctccactcag

SEQ ID NO: 12964 - DNA, 26 bp, synthetic construct
  source 1..26: mol_type = other DNA
attcttgctcgttgacctccactcag

SEQ ID NO: 12965 - DNA, 27 bp, synthetic construct
  source 1..27: mol_type = other DNA
aattcttgctcgttgacctccactcag

SEQ ID NO: 12966 - DNA, 28 bp, synthetic construct
  source 1..28: mol_type = other DNA
aaattcttgctcgttgacctccactcag

SEQ ID NO: 12967 - DNA, 29 bp, synthetic construct
  source 1..29: mol_type = other DNA
gaaattcttgctcgttgacctccactcag

SEQ ID NO: 12968 - DNA, 30 bp, synthetic construct; identical to SEQ ID NO: 10364
  source 1..30: mol_type = other DNA

SEQ ID NO: 12969 - DNA, 31 bp, synthetic construct; identical to SEQ ID NO: 10365
  source 1..31: mol_type = other DNA

SEQ ID NO: 12970 - DNA, 32 bp, synthetic construct; identical to SEQ ID NO: 10366
  source 1..32: mol_type = other DNA

SEQ ID NO: 12971 - DNA, 33 bp, synthetic construct; identical to SEQ ID NO: 10367
  source 1..33: mol_type = other DNA

SEQ ID NO: 12972 - DNA, 34 bp, synthetic construct; identical to SEQ ID NO: 10368
  source 1..34: mol_type = other DNA

SEQ ID NO: 12973 - DNA, 35 bp, synthetic construct; identical to SEQ ID NO: 10369
  source 1..35: mol_type = other DNA

SEQ ID NO: 12974 - DNA, 36 bp, synthetic construct; identical to SEQ ID NO: 10370
  source 1..36: mol_type = other DNA

SEQ ID NO: 12975 - DNA, 37 bp, synthetic construct; identical to SEQ ID NO: 10371
  source 1..37: mol_type = other DNA

SEQ ID NO: 12976 - DNA, 38 bp, synthetic construct; identical to SEQ ID NO: 10372
  source 1..38: mol_type = other DNA

SEQ ID NO: 12977 - DNA, 39 bp, synthetic construct; identical to SEQ ID NO: 10373
  source 1..39: mol_type = other DNA

SEQ ID NO: 12978 - DNA, 40 bp, synthetic construct; identical to SEQ ID NO: 10374
  source 1..40: mol_type = other DNA

SEQ ID NO: 12979 - DNA, 14 bp, synthetic construct
  source 1..14: mol_type = other DNA
acctccactcagtg

SEQ ID NO: 12980 - DNA, 15 bp, synthetic construct
  source 1..15: mol_type = other DNA
gacctccactcagtg

SEQ ID NO: 12981 - DNA, 16 bp, synthetic construct
  source 1..16: mol_type = other DNA
tgacctccactcagtg

SEQ ID NO: 12982 - DNA, 17 bp, synthetic construct
  source 1..17: mol_type = other DNA
ttgacctccactcagtg

SEQ ID NO: 12983 - DNA, 18 bp, synthetic construct
  source 1..18: mol_type = other DNA
gttgacctccactcagtg

SEQ ID NO: 12984 - DNA, 19 bp, synthetic construct
  source 1..19: mol_type = other DNA
cgttgacctccactcagtg

SEQ ID NO: 12985 - DNA, 20 bp, synthetic construct
  source 1..20: mol_type = other DNA
tcgttgacctccactcagtg

SEQ ID NO: 12986 - DNA, 21 bp, synthetic construct
  source 1..21: mol_type = other DNA
ctcgttgacctccactcagtg

SEQ ID NO: 12987 - DNA, 22 bp, synthetic construct
  source 1..22: mol_type = other DNA
gctcgttgacctccactcagtg

SEQ ID NO: 12988 - DNA, 23 bp, synthetic construct
  source 1..23: mol_type = other DNA
tgctcgttgacctccactcagtg

SEQ ID NO: 12989 - DNA, 24 bp, synthetic construct
  source 1..24: mol_type = other DNA
ttgctcgttgacctccactcagtg

SEQ ID NO: 12990 - DNA, 25 bp, synthetic construct
  source 1..25: mol_type = other DNA
cttgctcgttgacctccactcagtg

SEQ ID NO: 12991 - DNA, 26 bp, synthetic construct
  source 1..26: mol_type = other DNA
tcttgctcgttgacctccactcagtg

SEQ ID NO: 12992 - DNA, 27 bp, synthetic construct
  source 1..27: mol_type = other DNA
ttcttgctcgttgacctccactcagtg

SEQ ID NO: 12993 - DNA, 28 bp, synthetic construct
  source 1..28: mol_type = other DNA
attcttgctcgttgacctccactcagtg

SEQ ID NO: 12994 - DNA, 29 bp, synthetic construct
  source 1..29: mol_type = other DNA
aattcttgctcgttgacctccactcagtg

SEQ ID NO: 12995 - DNA, 30 bp, synthetic construct; identical to SEQ ID NO: 10455
  source 1..30: mol_type = other DNA

SEQ ID NO: 12996 - DNA, 31 bp, synthetic construct; identical to SEQ ID NO: 10456
  source 1..31: mol_type = other DNA

SEQ ID NO: 12997 - DNA, 32 bp, synthetic construct; identical to SEQ ID NO: 10457
  source 1..32: mol_type = other DNA

SEQ ID NO: 12998 - DNA, 33 bp, synthetic construct; identical to SEQ ID NO: 10458
  source 1..33: mol_type = other DNA

SEQ ID NO: 12999 - DNA, 34 bp, synthetic construct; identical to SEQ ID NO: 10459
  source 1..34: mol_type = other DNA

SEQ ID NO: 13000 - DNA, 35 bp, synthetic construct; identical to SEQ ID NO: 10460
  source 1..35: mol_type = other DNA

SEQ ID NO: 13001 - DNA, 36 bp, synthetic construct; identical to SEQ ID NO: 10461
  source 1..36: mol_type = other DNA

SEQ ID NO: 13002 - DNA, 37 bp, synthetic construct; identical to SEQ ID NO: 10462
  source 1..37: mol_type = other DNA

SEQ ID NO: 13003 - DNA, 38 bp, synthetic construct; identical to SEQ ID NO: 10463
  source 1..38: mol_type = other DNA

SEQ ID NO: 13004 - DNA, 39 bp, synthetic construct; identical to SEQ ID NO: 10464
  source 1..39: mol_type = other DNA

SEQ ID NO: 13005 - DNA, 40 bp, synthetic construct; identical to SEQ ID NO: 10465
  source 1..40: mol_type = other DNA

SEQ ID NO: 13006 - DNA, 10 bp, synthetic construct
  source 1..10: mol_type = other DNA
tgaccgccac

SEQ ID NO: 13007 - DNA, 10 bp, synthetic construct
  source 1..10: mol_type = other DNA
tgacctccac

SEQ ID NO: 13008 - DNA, 11 bp, synthetic construct
  source 1..11: mol_type = other DNA
ttgacctccac

SEQ ID NO: 13009 - DNA, 11 bp, synthetic construct
  source 1..11: mol_type = other DNA
ttgaccgccac

SEQ ID NO: 13010 - DNA, 12 bp, synthetic construct
  source 1..12: mol_type = other DNA
gttgaccgccac

SEQ ID NO: 13011 - DNA, 12 bp, synthetic construct
  source 1..12: mol_type = other DNA
gttgacctccac

SEQ ID NO: 13012 - DNA, 13 bp, synthetic construct
  source 1..13: mol_type = other DNA
cgttgacctccac

SEQ ID NO: 13013 - DNA, 13 bp, synthetic construct
  source 1..13: mol_type = other DNA
cgttgaccgccac

SEQ ID NO: 13014 - DNA, 14 bp, synthetic construct
  source 1..14: mol_type = other DNA
tcgttgaccgccac

SEQ ID NO: 13015 - DNA, 14 bp, synthetic construct
  source 1..14: mol_type = other DNA
tcgttgacctccac

SEQ ID NO: 13016 - DNA, 15 bp, synthetic construct
  source 1..15: mol_type = other DNA
ctcgttgaccgccac

SEQ ID NO: 13017 - DNA, 15 bp, synthetic construct
  source 1..15: mol_type = other DNA
ctcgttgacctccac

SEQ ID NO: 13018 - DNA, 16 bp, synthetic construct
  source 1..16: mol_type = other DNA
gctcgttgaccgccac

SEQ ID NO: 13019 - DNA, 16 bp, synthetic construct
  source 1..16: mol_type = other DNA
gctcgttgacctccac

SEQ ID NO: 13020 - DNA, 17 bp, synthetic construct
  source 1..17: mol_type = other DNA
tgctcgttgacctccac

SEQ ID NO: 13021 - DNA, 17 bp, synthetic construct
  source 1..17: mol_type = other DNA
tgctcgttgaccgccac

SEQ ID NO: 13022 - DNA, 18 bp, synthetic construct
  source 1..18: mol_type = other DNA
ttgctcgttgacctccac

SEQ ID NO: 13023 - DNA, 18 bp, synthetic construct
  source 1..18: mol_type = other DNA
ttgctcgttgaccgccac

SEQ ID NO: 13024 - DNA, 19 bp, synthetic construct
  source 1..19: mol_type = other DNA
cttgctcgttgaccgccac

SEQ ID NO: 13025 - DNA, 19 bp, synthetic construct
  source 1..19: mol_type = other DNA
cttgctcgttgacctccac

SEQ ID NO: 13026 - DNA, 20 bp, synthetic construct
  source 1..20: mol_type = other DNA
tcttgctcgttgaccgccac

SEQ ID NO: 13027 - DNA, 20 bp, synthetic construct
  source 1..20: mol_type = other DNA
tcttgctcgttgacctccac

SEQ ID NO: 13028 - DNA, 21 bp, synthetic construct
  source 1..21: mol_type = other DNA
ttcttgctcgttgaccgccac

SEQ ID NO: 13029 - DNA, 21 bp, synthetic construct
  source 1..21: mol_type = other DNA
ttcttgctcgttgacctccac

SEQ ID NO: 13030 - DNA, 22 bp, synthetic construct
  source 1..22: mol_type = other DNA
attcttgctcgttgacctccac

SEQ ID NO: 13031 - DNA, 22 bp, synthetic construct
  source 1..22: mol_type = other DNA
attcttgctcgttgaccgccac

SEQ ID NO: 13032 - DNA, 23 bp, synthetic construct
  source 1..23: mol_type = other DNA
aattcttgctcgttgacctccac

SEQ ID NO: 13033 - DNA, 23 bp, synthetic construct
  source 1..23: mol_type = other DNA
aattcttgctcgttgaccgccac

SEQ ID NO: 13034 - DNA, 24 bp, synthetic construct
  source 1..24: mol_type = other DNA
aaattcttgctcgttgacctccac

SEQ ID NO: 13035 - DNA, 24 bp, synthetic construct
  source 1..24: mol_type = other DNA
aaattcttgctcgttgaccgccac

SEQ ID NO: 13036 - DNA, 25 bp, synthetic construct
  source 1..25: mol_type = other DNA
gaaattcttgctcgttgaccgccac

SEQ ID NO: 13037 - DNA, 25 bp, synthetic construct
  source 1..25: mol_type = other DNA
gaaattcttgctcgttgacctccac

SEQ ID NO: 13038 - DNA, 26 bp, synthetic construct
  source 1..26: mol_type = other DNA
agaaattcttgctcgttgacctccac

SEQ ID NO: 13039 - DNA, 26 bp, synthetic construct
  source 1..26: mol_type = other DNA
agaaattcttgctcgttgaccgccac

SEQ ID NO: 13040 - DNA, 27 bp, synthetic construct
  source 1..27: mol_type = other DNA
aagaaattcttgctcgttgaccgccac

SEQ ID NO: 13041 - DNA, 27 bp, synthetic construct
  source 1..27: mol_type = other DNA
aagaaattcttgctcgttgacctccac

SEQ ID NO: 13042 - DNA, 28 bp, synthetic construct
  source 1..28: mol_type = other DNA
aaagaaattcttgctcgttgacctccac

SEQ ID NO: 13043 - DNA, 28 bp, synthetic construct
  source 1..28: mol_type = other DNA
aaagaaattcttgctcgttgaccgccac

SEQ ID NO: 13044 - DNA, 29 bp, synthetic construct
  source 1..29: mol_type = other DNA
taaagaaattcttgctcgttgacctccac

SEQ ID NO: 13045 - DNA, 29 bp, synthetic construct
  source 1..29: mol_type = other DNA
taaagaaattcttgctcgttgaccgccac

SEQ ID NO: 13046 - DNA, 30 bp, synthetic construct; identical to SEQ ID NO: 11046
  source 1..30: mol_type = other DNA

SEQ ID NO: 13047 - DNA, 30 bp, synthetic construct; identical to SEQ ID NO: 11045
  source 1..30: mol_type = other DNA

SEQ ID NO: 13048 - DNA, 31 bp, synthetic construct; identical to SEQ ID NO: 11047
  source 1..31: mol_type = other DNA

SEQ ID NO: 13049 - DNA, 31 bp, synthetic construct; identical to SEQ ID NO: 11048
  source 1..31: mol_type = other DNA

SEQ ID NO: 13050 - DNA, 32 bp, synthetic construct; identical to SEQ ID NO: 11050
  source 1..32: mol_type = other DNA

SEQ ID NO: 13051 - DNA, 32 bp, synthetic construct; identical to SEQ ID NO: 11049
  source 1..32: mol_type = other DNA

SEQ ID NO: 13052 - DNA, 33 bp, synthetic construct; identical to SEQ ID NO: 11052
  source 1..33: mol_type = other DNA

SEQ ID NO: 13053 - DNA, 33 bp, synthetic construct; identical to SEQ ID NO: 11051
  source 1..33: mol_type = other DNA

SEQ ID NO: 13054 - DNA, 34 bp, synthetic construct; identical to SEQ ID NO: 11054
  source 1..34: mol_type = other DNA

SEQ ID NO: 13055 - DNA, 34 bp, synthetic construct; identical to SEQ ID NO: 11053
  source 1..34: mol_type = other DNA

SEQ ID NO: 13056 - DNA, 35 bp, synthetic construct; identical to SEQ ID NO: 11055
  source 1..35: mol_type = other DNA

SEQ ID NO: 13057 - DNA, 35 bp, synthetic construct; identical to SEQ ID NO: 11056
  source 1..35: mol_type = other DNA

SEQ ID NO: 13058 - DNA, 36 bp, synthetic construct; identical to SEQ ID NO: 11057
  source 1..36: mol_type = other DNA

SEQ ID NO: 13059 - DNA, 36 bp, synthetic construct; identical to SEQ ID NO: 11058
  source 1..36: mol_type = other DNA

SEQ ID NO: 13060 - DNA, 37 bp, synthetic construct; identical to SEQ ID NO: 11059
  source 1..37: mol_type = other DNA

SEQ ID NO: 13061 - DNA, 37 bp, synthetic construct; identical to SEQ ID NO: 11060
  source 1..37: mol_type = other DNA

SEQ ID NO: 13062 - DNA, 38 bp, synthetic construct; identical to SEQ ID NO: 11061
  source 1..38: mol_type = other DNA

SEQ ID NO: 13063 - DNA, 38 bp, synthetic construct; identical to SEQ ID NO: 11062
  source 1..38: mol_type = other DNA

SEQ ID NO: 13064 - DNA, 39 bp, synthetic construct; identical to SEQ ID NO: 11063
  source 1..39: mol_type = other DNA

SEQ ID NO: 13065 - DNA, 39 bp, synthetic construct; identical to SEQ ID NO: 11064
  source 1..39: mol_type = other DNA

SEQ ID NO: 13066 - DNA, 40 bp, synthetic construct; identical to SEQ ID NO: 11065
  source 1..40: mol_type = other DNA

SEQ ID NO: 13067 - DNA, 40 bp, synthetic construct; identical to SEQ ID NO: 11066
  source 1..40: mol_type = other DNA

SEQ ID NO: 13068 - DNA, 10 bp, synthetic construct
  source 1..10: mol_type = other DNA
ttgacctcca

SEQ ID NO: 13069 - DNA, 11 bp, synthetic construct
  source 1..11: mol_type = other DNA
gttgacctcca

SEQ ID NO: 13070 - DNA, 12 bp, synthetic construct
  source 1..12: mol_type = other DNA
cgttgacctcca

SEQ ID NO: 13071 - DNA, 13 bp, synthetic construct
  source 1..13: mol_type = other DNA
tcgttgacctcca

SEQ ID NO: 13072 - DNA, 14 bp, synthetic construct
  source 1..14: mol_type = other DNA
ctcgttgacctcca

SEQ ID NO: 13073 - DNA, 15 bp, synthetic construct
  source 1..15: mol_type = other DNA
gctcgttgacctcca

SEQ ID NO: 13074 - DNA, 16 bp, synthetic construct
  source 1..16: mol_type = other DNA
tgctcgttgacctcca

SEQ ID NO: 13075 - DNA, 17 bp, synthetic construct
  source 1..17: mol_type = other DNA
ttgctcgttgacctcca

SEQ ID NO: 13076 - DNA, 18 bp, synthetic construct
  source 1..18: mol_type = other DNA
cttgctcgttgacctcca

SEQ ID NO: 13077 - DNA, 19 bp, synthetic construct
  source 1..19: mol_type = other DNA
tcttgctcgttgacctcca

SEQ ID NO: 13078 - DNA, 20 bp, synthetic construct
  source 1..20: mol_type = other DNA
ttcttgctcgttgacctcca

SEQ ID NO: 13079 - DNA, 21 bp, synthetic construct
  source 1..21: mol_type = other DNA
attcttgctcgttgacctcca

SEQ ID NO: 13080 - DNA, 22 bp, synthetic construct
  source 1..22: mol_type = other DNA
aattcttgctcgttgacctcca

SEQ ID NO: 13081 - DNA, 23 bp, synthetic construct
  source 1..23: mol_type = other DNA
aaattcttgctcgttgacctcca

SEQ ID NO: 13082 - DNA, 24 bp, synthetic construct
  source 1..24: mol_type = other DNA
gaaattcttgctcgttgacctcca

SEQ ID NO: 13083 - DNA, 25 bp, synthetic construct
  source 1..25: mol_type = other DNA
agaaattcttgctcgttgacctcca

SEQ ID NO: 13084 - DNA, 26 bp, synthetic construct
  source 1..26: mol_type = other DNA
aagaaattcttgctcgttgacctcca

SEQ ID NO: 13085 - DNA, 27 bp, synthetic construct
  source 1..27: mol_type = other DNA
aaagaaattcttgctcgttgacctcca

SEQ ID NO: 13086 - DNA, 28 bp, synthetic construct
  source 1..28: mol_type = other DNA
taaagaaattcttgctcgttgacctcca

SEQ ID NO: 13087 - DNA, 29 bp, synthetic construct
  source 1..29: mol_type = other DNA
ctaaagaaattcttgctcgttgacctcca

SEQ ID NO: 13088 - DNA, 30 bp, synthetic construct; identical to SEQ ID NO: 11832
  source 1..30: mol_type = other DNA

SEQ ID NO: 13089 - DNA, 31 bp, synthetic construct; identical to SEQ ID NO: 11833
  source 1..31: mol_type = other DNA

SEQ ID NO: 13090 - DNA, 32 bp, synthetic construct; identical to SEQ ID NO: 11834
  source 1..32: mol_type = other DNA

SEQ ID NO: 13091 - DNA, 33 bp, synthetic construct; identical to SEQ ID NO: 11835
  source 1..33: mol_type = other DNA

SEQ ID NO: 13092 - DNA, 34 bp, synthetic construct; identical to SEQ ID NO: 11836
  source 1..34: mol_type = other DNA

SEQ ID NO: 13093 - DNA, 35 bp, synthetic construct; identical to SEQ ID NO: 11837
  source 1..35: mol_type = other DNA

SEQ ID NO: 13094 - DNA, 36 bp, synthetic construct; identical to SEQ ID NO: 11838
  source 1..36: mol_type = other DNA

SEQ ID NO: 13095 - DNA, 37 bp, synthetic construct; identical to SEQ ID NO: 11839
  source 1..37: mol_type = other DNA

SEQ ID NO: 13096 - DNA, 38 bp, synthetic construct; identical to SEQ ID NO: 11840
  source 1..38: mol_type = other DNA

SEQ ID NO: 13097 - DNA, 39 bp, synthetic construct; identical to SEQ ID NO: 11841
  source 1..39: mol_type = other DNA

SEQ ID NO: 13098 - DNA, 40 bp, synthetic construct; identical to SEQ ID NO: 11842
  source 1..40: mol_type = other DNA

SEQ ID NO: 13099 - DNA, 10 bp, synthetic construct
  source 1..10: mol_type = other DNA
gaggtcaacg

SEQ ID NO: 13100 - DNA, 11 bp, synthetic construct
  source 1..11: mol_type = other DNA
ggaggtcaacg

SEQ ID NO: 13101 - DNA, 12 bp, synthetic construct
  source 1..12: mol_type = other DNA
tggaggtcaacg

SEQ ID NO: 13102 - DNA, 13 bp, synthetic construct
  source 1..13: mol_type = other DNA
gtggaggtcaacg

SEQ ID NO: 13103 - DNA, 14 bp, synthetic construct
  source 1..14: mol_type = other DNA
agtggaggtcaacg

SEQ ID NO: 13104 - DNA, 15 bp, synthetic construct
  source 1..15: mol_type = other DNA
gagtggaggtcaacg

SEQ ID NO: 13105 - DNA, 16 bp, synthetic construct
  source 1..16: mol_type = other DNA
tgagtggaggtcaacg

SEQ ID NO: 13106 - DNA, 17 bp, synthetic construct
  source 1..17: mol_type = other DNA
ctgagtggaggtcaacg

SEQ ID NO: 13107 - DNA, 18 bp, synthetic construct
  source 1..18: mol_type = other DNA
actgagtggaggtcaacg

SEQ ID NO: 13108 - DNA, 19 bp, synthetic construct
  source 1..19: mol_type = other DNA
cactgagtggaggtcaacg

SEQ ID NO: 13109 - DNA, 20 bp, synthetic construct
  source 1..20: mol_type = other DNA
acactgagtggaggtcaacg

SEQ ID NO: 13110 - DNA, 21 bp, synthetic construct
  source 1..21: mol_type = other DNA
cacactgagtggaggtcaacg

SEQ ID NO: 13111 - DNA, 22 bp, synthetic construct
  source 1..22: mol_type = other DNA
tcacactgagtggaggtcaacg

SEQ ID NO: 13112 - DNA, 23 bp, synthetic construct
  source 1..23: mol_type = other DNA
atcacactgagtggaggtcaacg

SEQ ID NO: 13113 - DNA, 24 bp, synthetic construct
  source 1..24: mol_type = other DNA
aatcacactgagtggaggtcaacg

SEQ ID NO: 13114 - DNA, 25 bp, synthetic construct
  source 1..25: mol_type = other DNA
gaatcacactgagtggaggtcaacg

SEQ ID NO: 13115 - DNA, 26 bp, synthetic construct
  source 1..26: mol_type = other DNA
ggaatcacactgagtggaggtcaacg

SEQ ID NO: 13116 - DNA, 27 bp, synthetic construct
  source 1..27: mol_type = other DNA
tggaatcacactgagtggaggtcaacg

SEQ ID NO: 13117 - DNA, 28 bp, synthetic construct
  source 1..28: mol_type = other DNA
gtggaatcacactgagtggaggtcaacg

SEQ ID NO: 13118 - DNA, 29 bp, synthetic construct
  source 1..29: mol_type = other DNA
ggtggaatcacactgagtggaggtcaacg

SEQ ID NO: 13119 - DNA, 30 bp, synthetic construct; identical to SEQ ID NO: 10390
  source 1..30: mol_type = other DNA

SEQ ID NO: 13120 - DNA, 31 bp, synthetic construct; identical to SEQ ID NO: 10391
  source 1..31: mol_type = other DNA

SEQ ID NO: 13121 - DNA, 32 bp, synthetic construct; identical to SEQ ID NO: 10392
  source 1..32: mol_type = other DNA

SEQ ID NO: 13122 - DNA, 33 bp, synthetic construct; identical to SEQ ID NO: 10393
  source 1..33: mol_type = other DNA

SEQ ID NO: 13123 - DNA, 34 bp, synthetic construct; identical to SEQ ID NO: 10394
  source 1..34: mol_type = other DNA

SEQ ID NO: 13124 - DNA, 35 bp, synthetic construct; identical to SEQ ID NO: 10395
  source 1..35: mol_type = other DNA

SEQ ID NO: 13125 - DNA, 36 bp, synthetic construct; identical to SEQ ID NO: 9765
  source 1..36: mol_type = other DNA

SEQ ID NO: 13126 - DNA, 37 bp, synthetic construct; identical to SEQ ID NO: 9766
  source 1..37: mol_type = other DNA

SEQ ID NO: 13127 - DNA, 38 bp, synthetic construct; identical to SEQ ID NO: 9767
  source 1..38: mol_type = other DNA

SEQ ID NO: 13128 - DNA, 39 bp, synthetic construct; identical to SEQ ID NO: 9768
  source 1..39: mol_type = other DNA

SEQ ID NO: 13129 - DNA, 40 bp, synthetic construct; identical to SEQ ID NO: 9769
  source 1..40: mol_type = other DNA

SEQ ID NO: 13130 - DNA, 24 bp, synthetic construct
  source 1..24: mol_type = other DNA
ggtcaacgagcaagaatttcttta

SEQ ID NO: 13131 - DNA, 25 bp, synthetic construct
  source 1..25: mol_type = other DNA
aggtcaacgagcaagaatttcttta

SEQ ID NO: 13132 - DNA, 26 bp, synthetic construct
  source 1..26: mol_type = other DNA
gaggtcaacgagcaagaatttcttta

SEQ ID NO: 13133 - DNA, 27 bp, synthetic construct
  source 1..27: mol_type = other DNA
ggaggtcaacgagcaagaatttcttta

SEQ ID NO: 13134 - DNA, 28 bp, synthetic construct
  source 1..28: mol_type = other DNA
tggaggtcaacgagcaagaatttcttta

SEQ ID NO: 13135 - DNA, 29 bp, synthetic construct
  source 1..29: mol_type = other DNA
gtggaggtcaacgagcaagaatttcttta

SEQ ID NO: 13136 - DNA, 30 bp, synthetic construct; identical to SEQ ID NO: 11094
  source 1..30: mol_type = other DNA

SEQ ID NO: 13137 - DNA, 31 bp, synthetic construct; identical to SEQ ID NO: 10401
  source 1..31: mol_type = other DNA

SEQ ID NO: 13138 - DNA, 32 bp, synthetic construct; identical to SEQ ID NO: 10402
  source 1..32: mol_type = other DNA

SEQ ID NO: 13139 - DNA, 33 bp, synthetic construct; identical to SEQ ID NO: 10403
  source 1..33: mol_type = other DNA

SEQ ID NO: 13140 - DNA, 34 bp, synthetic construct; identical to SEQ ID NO: 10404
  source 1..34: mol_type = other DNA

SEQ ID NO: 13141 - DNA, 35 bp, synthetic construct; identical to SEQ ID NO: 10405
  source 1..35: mol_type = other DNA

SEQ ID NO: 13142 - DNA, 36 bp, synthetic construct; identical to SEQ ID NO: 10406
  source 1..36: mol_type = other DNA

SEQ ID NO: 13143 - DNA, 37 bp, synthetic construct; identical to SEQ ID NO: 10407
  source 1..37: mol_type = other DNA

SEQ ID NO: 13144 - DNA, 38 bp, synthetic construct; identical to SEQ ID NO: 10408
  source 1..38: mol_type = other DNA

SEQ ID NO: 13145 - DNA, 39 bp, synthetic construct; identical to SEQ ID NO: 10409
  source 1..39: mol_type = other DNA

SEQ ID NO: 13146 - DNA, 40 bp, synthetic construct; identical to SEQ ID NO: 10410
  source 1..40: mol_type = other DNA

SEQ ID NO: 13147 - DNA, 24 bp, synthetic construct
  source 1..24: mol_type = other DNA
acctccactcagtgtgattccacc

SEQ ID NO: 13148 - DNA, 25 bp, synthetic construct
  source 1..25: mol_type = other DNA
gacctccactcagtgtgattccacc

SEQ ID NO: 13149 - DNA, 26 bp, synthetic construct
  source 1..26: mol_type = other DNA
tgacctccactcagtgtgattccacc

SEQ ID NO: 13150 - DNA, 27 bp, synthetic construct
  source 1..27: mol_type = other DNA
ttgacctccactcagtgtgattccacc

SEQ ID NO: 13151 - DNA, 28 bp, synthetic construct
  source 1..28: mol_type = other DNA
gttgacctccactcagtgtgattccacc

SEQ ID NO: 13152 - DNA, 29 bp, synthetic construct
  source 1..29: mol_type = other DNA
cgttgacctccactcagtgtgattccacc

SEQ ID NO: 13153 - DNA, 30 bp, synthetic construct; identical to SEQ ID NO: 10424
  source 1..30: mol_type = other DNA

SEQ ID NO: 13154 - DNA, 31 bp, synthetic construct; identical to SEQ ID NO: 10425
  source 1..31: mol_type = other DNA

SEQ ID NO: 13155 - DNA, 32 bp, synthetic construct; identical to SEQ ID NO: 10426
  source 1..32: mol_type = other DNA

SEQ ID NO: 13156 - DNA, 33 bp, synthetic construct; identical to SEQ ID NO: 10427
  source 1..33: mol_type = other DNA

SEQ ID NO: 13157 - DNA, 34 bp, synthetic construct; identical to SEQ ID NO: 10428
  source 1..34: mol_type = other DNA

SEQ ID NO: 13158 - DNA, 35 bp, synthetic construct; identical to SEQ ID NO: 10429
  source 1..35: mol_type = other DNA

SEQ ID NO: 13159 - DNA, 36 bp, synthetic construct; identical to SEQ ID NO: 10430
  source 1..36: mol_type = other DNA

SEQ ID NO: 13160 - DNA, 37 bp, synthetic construct; identical to SEQ ID NO: 10431
  source 1..37: mol_type = other DNA

SEQ ID NO: 13161 - DNA, 38 bp, synthetic construct; identical to SEQ ID NO: 10432
  source 1..38: mol_type = other DNA

SEQ ID NO: 13162 - DNA, 39 bp, synthetic construct; identical to SEQ ID NO: 10433
  source 1..39: mol_type = other DNA

SEQ ID NO: 13163 - DNA, 40 bp, synthetic construct; identical to SEQ ID NO: 10434
  source 1..40: mol_type = other DNA

SEQ ID NO: 13164 - DNA, 25 bp, synthetic construct
  source 1..25: mol_type = other DNA
ggtcaacgagcaagaattagcttag

SEQ ID NO: 13165 - DNA, 25 bp, synthetic construct
  source 1..25: mol_type = other DNA
ggtcaacgagcaagaatttctttag

SEQ ID NO: 13166 - DNA, 26 bp, synthetic construct
  source 1..26: mol_type = other DNA
aggtcaacgagcaagaatttctttag

SEQ ID NO: 13167 - DNA, 26 bp, synthetic construct
  source 1..26: mol_type = other DNA
aggtcaacgagcaagaattagcttag

SEQ ID NO: 13168 - DNA, 27 bp, synthetic construct
  source 1..27: mol_type = other DNA
gaggtcaacgagcaagaattagcttag

SEQ ID NO: 13169 - DNA, 27 bp, synthetic construct
  source 1..27: mol_type = other DNA
gaggtcaacgagcaagaatttctttag

SEQ ID NO: 13170 - DNA, 28 bp, synthetic construct
  source 1..28: mol_type = other DNA
ggaggtcaacgagcaagaatttctttag

SEQ ID NO: 13171 - DNA, 28 bp, synthetic construct
  source 1..28: mol_type = other DNA
ggaggtcaacgagcaagaattagcttag

SEQ ID NO: 13172 - DNA, 29 bp, synthetic construct
  source 1..29: mol_type = other DNA
tggaggtcaacgagcaagaatttctttag

SEQ ID NO: 13173 - DNA, 29 bp, synthetic construct
  source 1..29: mol_type = other DNA
tggaggtcaacgagcaagaattagcttag

SEQ ID NO: 13174 - DNA, 30 bp, synthetic construct; identical to SEQ ID NO: 11905
  source 1..30: mol_type = other DNA

SEQ ID NO: 13175 - DNA, 30 bp, synthetic construct; identical to SEQ ID NO: 11906
  source 1..30: mol_type = other DNA

SEQ ID NO: 13176 - DNA, 31 bp, synthetic construct; identical to SEQ ID NO: 11128
  source 1..31: mol_type = other DNA

SEQ ID NO: 13177 - DNA, 31 bp, synthetic construct; identical to SEQ ID NO: 11129
  source 1..31: mol_type = other DNA

SEQ ID NO: 13178 - DNA, 32 bp, synthetic construct; identical to SEQ ID NO: 10467
  source 1..32: mol_type = other DNA

SEQ ID NO: 13179 - DNA, 32 bp, synthetic construct; identical to SEQ ID NO: 10466
  source 1..32: mol_type = other DNA

SEQ ID NO: 13180 - DNA, 33 bp, synthetic construct; identical to SEQ ID NO: 10469
  source 1..33: mol_type = other DNA

SEQ ID NO: 13181 - DNA, 33 bp, synthetic construct; identical to SEQ ID NO: 10468
  source 1..33: mol_type = other DNA

SEQ ID NO: 13182 - DNA, 34 bp, synthetic construct; identical to SEQ ID NO: 10471
  source 1..34: mol_type = other DNA

SEQ ID NO: 13183 - DNA, 34 bp, synthetic construct; identical to SEQ ID NO: 10470
  source 1..34: mol_type = other DNA

SEQ ID NO: 13184 - DNA, 35 bp, synthetic construct; identical to SEQ ID NO: 10473
  source 1..35: mol_type = other DNA

SEQ ID NO: 13185 - DNA, 35 bp, synthetic construct; identical to SEQ ID NO: 10472
  source 1..35: mol_type = other DNA

SEQ ID NO: 13186 - DNA, 36 bp, synthetic construct; identical to SEQ ID NO: 10474
  source 1..36: mol_type = other DNA

SEQ ID NO: 13187 - DNA, 36 bp, synthetic construct; identical to SEQ ID NO: 10475
  source 1..36: mol_type = other DNA

SEQ ID NO: 13188 - DNA, 37 bp, synthetic construct; identical to SEQ ID NO: 10477
  source 1..37: mol_type = other DNA

SEQ ID NO: 13189 - DNA, 37 bp, synthetic construct; identical to SEQ ID NO: 10476
  source 1..37: mol_type = other DNA

SEQ ID NO: 13190 - DNA, 38 bp, synthetic construct; identical to SEQ ID NO: 10479
  source 1..38: mol_type = other DNA

SEQ ID NO: 13191 - DNA, 38 bp, synthetic construct; identical to SEQ ID NO: 10478
  source 1..38: mol_type = other DNA

SEQ ID NO: 13192 - DNA, 39 bp, synthetic construct; identical to SEQ ID NO: 10481
  source 1..39: mol_type = other DNA

SEQ ID NO: 13193 - DNA, 39 bp, synthetic construct; identical to SEQ ID NO: 10480
  source 1..39: mol_type = other DNA

SEQ ID NO: 13194 - DNA, 40 bp, synthetic construct; identical to SEQ ID NO: 10482
  source 1..40: mol_type = other DNA

SEQ ID NO: 13195 - DNA, 40 bp, synthetic construct; identical to SEQ ID NO: 10483
  source 1..40: mol_type = other DNA

SEQ ID NO: 13196 - DNA, 11 bp, synthetic construct
  source 1..11: mol_type = other DNA
ggtcaacgagc

SEQ ID NO: 13197 - DNA, 12 bp, synthetic construct
  source 1..12: mol_type = other DNA
aggtcaacgagc

SEQ ID NO: 13198 - DNA, 13 bp, synthetic construct
  source 1..13: mol_type = other DNA
gaggtcaacgagc

SEQ ID NO: 13199 - DNA, 14 bp, synthetic construct
  source 1..14: mol_type = other DNA
ggaggtcaacgagc

SEQ ID NO: 13200 - DNA, 15 bp, synthetic construct
  source 1..15: mol_type = other DNA
tggaggtcaacgagc

SEQ ID NO: 13201 - DNA, 16 bp, synthetic construct
  source 1..16: mol_type = other DNA
gtggaggtcaacgagc

SEQ ID NO: 13202 - DNA, 17 bp, synthetic construct
  source 1..17: mol_type = other DNA
agtggaggtcaacgagc

SEQ ID NO: 13203 - DNA, 18 bp, synthetic construct
  source 1..18: mol_type = other DNA
gagtggaggtcaacgagc

SEQ ID NO: 13204 - DNA, 19 bp, synthetic construct
  source 1..19: mol_type = other DNA
tgagtggaggtcaacgagc

SEQ ID NO: 13205 - DNA, 20 bp, synthetic construct
  source 1..20: mol_type = other DNA
ctgagtggaggtcaacgagc

SEQ ID NO: 13206 - DNA, 21 bp, synthetic construct
  source 1..21: mol_type = other DNA
actgagtggaggtcaacgagc

SEQ ID NO: 13207 - DNA, 22 bp, synthetic construct
  source 1..22: mol_type = other DNA
cactgagtggaggtcaacgagc

SEQ ID NO: 13208 - DNA, 23 bp, synthetic construct
  source 1..23: mol_type = other DNA
acactgagtggaggtcaacgagc

SEQ ID NO: 13209 - DNA, 24 bp, synthetic construct
  source 1..24: mol_type = other DNA
cacactgagtggaggtcaacgagc

SEQ ID NO: 13210 - DNA, 25 bp, synthetic construct
  source 1..25: mol_type = other DNA
tcacactgagtggaggtcaacgagc

SEQ ID NO: 13211 - DNA, 26 bp, synthetic construct
  source 1..26: mol_type = other DNA
atcacactgagtggaggtcaacgagc

SEQ ID NO: 13212 - DNA, 27 bp, synthetic construct
  source 1..27: mol_type = other DNA
aatcacactgagtggaggtcaacgagc

SEQ ID NO: 13213 - DNA, 28 bp, synthetic construct
  source 1..28: mol_type = other DNA
gaatcacactgagtggaggtcaacgagc

SEQ ID NO: 13214 - DNA, 29 bp, synthetic construct
  source 1..29: mol_type = other DNA
ggaatcacactgagtggaggtcaacgagc

SEQ ID NO: 13215 - DNA, 30 bp, synthetic construct; identical to SEQ ID NO: 10527
  source 1..30: mol_type = other DNA

SEQ ID NO: 13216 - DNA, 31 bp, synthetic construct; identical to SEQ ID NO: 10528
  source 1..31: mol_type = other DNA

SEQ ID NO: 13217 - DNA, 32 bp, synthetic construct; identical to SEQ ID NO: 10529
  source 1..32: mol_type = other DNA

SEQ ID NO: 13218 - DNA, 33 bp, synthetic construct; identical to SEQ ID NO: 10530
  source 1..33: mol_type = other DNA

SEQ ID NO: 13219 - DNA, 34 bp, synthetic construct; identical to SEQ ID NO: 10531
  source 1..34: mol_type = other DNA

SEQ ID NO: 13220 - DNA, 35 bp, synthetic construct; identical to SEQ ID NO: 10532
  source 1..35: mol_type = other DNA

SEQ ID NO: 13221 - DNA, 36 bp, synthetic construct; identical to SEQ ID NO: 10533
  source 1..36: mol_type = other DNA

SEQ ID NO: 13222 - DNA, 37 bp, synthetic construct; identical to SEQ ID NO: 10534
  source 1..37: mol_type = other DNA

SEQ ID NO: 13223 - DNA, 38 bp, synthetic construct; identical to SEQ ID NO: 10535
  source 1..38: mol_type = other DNA

SEQ ID NO: 13224 - DNA, 39 bp, synthetic construct; identical to SEQ ID NO: 9858
  source 1..39: mol_type = other DNA

SEQ ID NO: 13225 - DNA, 40 bp, synthetic construct; identical to SEQ ID NO: 9859
  source 1..40: mol_type = other DNA

SEQ ID NO: 13226 - DNA, 15 bp, synthetic construct
  source 1..15: mol_type = other DNA
acctccactcagtgt

SEQ ID NO: 13227 - DNA, 16 bp, synthetic construct
  source 1..16: mol_type = other DNA
gacctccactcagtgt

SEQ ID NO: 13228 - DNA, 17 bp, synthetic construct
  source 1..17: mol_type = other DNA
tgacctccactcagtgt

SEQ ID NO: 13229 - DNA, 18 bp, synthetic construct
  source 1..18: mol_type = other DNA
ttgacctccactcagtgt

SEQ ID NO: 13230 - DNA, 19 bp, synthetic construct
  source 1..19: mol_type = other DNA
gttgacctccactcagtgt

SEQ ID NO: 13231 - DNA, 20 bp, synthetic construct
  source 1..20: mol_type = other DNA
cgttgacctccactcagtgt

SEQ ID NO: 13232 - DNA, 21 bp, synthetic construct
  source 1..21: mol_type = other DNA
tcgttgacctccactcagtgt

SEQ ID NO: 13233 - DNA, 22 bp, synthetic construct
  source 1..22: mol_type = other DNA
ctcgttgacctccactcagtgt

SEQ ID NO: 13234 - DNA, 23 bp, synthetic construct
  source 1..23: mol_type = other DNA
gctcgttgacctccactcagtgt

SEQ ID NO: 13235 - DNA, 24 bp, synthetic construct
  source 1..24: mol_type = other DNA
tgctcgttgacctccactcagtgt

SEQ ID NO: 13236 - DNA, 25 bp, synthetic construct
  source 1..25: mol_type = other DNA
ttgctcgttgacctccactcagtgt

SEQ ID NO: 13237 - DNA, 26 bp, synthetic construct
  source 1..26: mol_type = other DNA
cttgctcgttgacctccactcagtgt

SEQ ID NO: 13238 - DNA, 27 bp, synthetic construct
  source 1..27: mol_type = other DNA
tcttgctcgttgacctccactcagtgt

SEQ ID NO: 13239 - DNA, 28 bp, synthetic construct
  source 1..28: mol_type = other DNA
ttcttgctcgttgacctccactcagtgt

SEQ ID NO: 13240 - DNA, 29 bp, synthetic construct
  source 1..29: mol_type = other DNA
attcttgctcgttgacctccactcagtgt

SEQ ID NO: 13241 - DNA, 30 bp, synthetic construct; identical to SEQ ID NO: 11285
  source 1..30: mol_type = other DNA

SEQ ID NO: 13242 - DNA, 31 bp, synthetic construct; identical to SEQ ID NO: 11286
  source 1..31: mol_type = other DNA

SEQ ID NO: 13243 - DNA, 32 bp, synthetic construct; identical to SEQ ID NO: 11287
  source 1..32: mol_type = other DNA

SEQ ID NO: 13244 - DNA, 33 bp, synthetic construct; identical to SEQ ID NO: 11288
  source 1..33: mol_type = other DNA

SEQ ID NO: 13245 - DNA, 34 bp, synthetic construct; identical to SEQ ID NO: 11289
  source 1..34: mol_type = other DNA

SEQ ID NO: 13246 - DNA, 35 bp, synthetic construct; identical to SEQ ID NO: 11290
  source 1..35: mol_type = other DNA

SEQ ID NO: 13247 - DNA, 36 bp, synthetic construct; identical to SEQ ID NO: 11291
  source 1..36: mol_type = other DNA

SEQ ID NO: 13248 - DNA, 37 bp, synthetic construct; identical to SEQ ID NO: 11292
  source 1..37: mol_type = other DNA

SEQ ID NO: 13249 - DNA, 38 bp, synthetic construct; identical to SEQ ID NO: 11293
  source 1..38: mol_type = other DNA

SEQ ID NO: 13250 - DNA, 39 bp, synthetic construct; identical to SEQ ID NO: 11294
  source 1..39: mol_type = other DNA

SEQ ID NO: 13251 - DNA, 40 bp, synthetic construct; identical to SEQ ID NO: 11295
  source 1..40: mol_type = other DNA

SEQ ID NO: 13252 - DNA, 40 bp, synthetic construct; identical to SEQ ID NO: 10012
  source 1..40: mol_type = other DNA

SEQ ID NO: 13253 - DNA, 37 bp, synthetic construct; identical to SEQ ID NO: 9495
  source 1..37: mol_type = other DNA

SEQ ID NO: 13254 - DNA, 37 bp, synthetic construct; identical to SEQ ID NO: 9496
  source 1..37: mol_type = other DNA

SEQ ID NO: 13255 - DNA, 38 bp, synthetic construct; identical to SEQ ID NO: 9498
  source 1..38: mol_type = other DNA

SEQ ID NO: 13256 - DNA, 38 bp, synthetic construct; identical to SEQ ID NO: 9497
  source 1..38: mol_type = other DNA

SEQ ID NO: 13257 - DNA, 39 bp, synthetic construct; identical to SEQ ID NO: 9500
  source 1..39: mol_type = other DNA

SEQ ID NO: 13258 - DNA, 39 bp, synthetic construct; identical to SEQ ID NO: 9499
  source 1..39: mol_type = other DNA

SEQ ID NO: 13259 - DNA, 40 bp, synthetic construct; identical to SEQ ID NO: 9502
  source 1..40: mol_type = other DNA

SEQ ID NO: 13260 - DNA, 40 bp, synthetic construct; identical to SEQ ID NO: 9501
  source 1..40: mol_type = other DNA

SEQ ID NO: 13261 - DNA, 36 bp, synthetic construct; identical to SEQ ID NO: 9529
  source 1..36: mol_type = other DNA

SEQ ID NO: 13262 - DNA, 37 bp, synthetic construct; identical to SEQ ID NO: 9530
  source 1..37: mol_type = other DNA

SEQ ID NO: 13263 - DNA, 38 bp, synthetic construct; identical to SEQ ID NO: 9531
  source 1..38: mol_type = other DNA

SEQ ID NO: 13264 - DNA, 39 bp, synthetic construct; identical to SEQ ID NO: 9532
  source 1..39: mol_type = other DNA

SEQ ID NO: 13265 - DNA, 40 bp, synthetic construct; identical to SEQ ID NO: 9533
  source 1..40: mol_type = other DNA

SEQ ID NO: 13266 - DNA, 15 bp, synthetic construct
  source 1..15: mol_type = other DNA
cgttgacctccactc

SEQ ID NO: 13267 - DNA, 16 bp, synthetic construct
  source 1..16: mol_type = other DNA
tcgttgacctccactc

SEQ ID NO: 13268 - DNA, 17 bp, synthetic construct
  source 1..17: mol_type = other DNA
ctcgttgacctccactc

SEQ ID NO: 13269 - DNA, 18 bp, synthetic construct
  source 1..18: mol_type = other DNA
gctcgttgacctccactc

SEQ ID NO: 13270 - DNA, 19 bp, synthetic construct
  source 1..19: mol_type = other DNA
tgctcgttgacctccactc

SEQ ID NO: 13271 - DNA, 20 bp, synthetic construct
  source 1..20: mol_type = other DNA
ttgctcgttgacctccactc

SEQ ID NO: 13272 - DNA, 21 bp, synthetic construct
  source 1..21: mol_type = other DNA
cttgctcgttgacctccactc

SEQ ID NO: 13273 - DNA, 22 bp, synthetic construct
  source 1..22: mol_type = other DNA
tcttgctcgttgacctccactc

SEQ ID NO: 13274 - DNA, 23 bp, synthetic construct
  source 1..23: mol_type = other DNA
ttcttgctcgttgacctccactc

SEQ ID NO: 13275 - DNA, 24 bp, synthetic construct
  source 1..24: mol_type = other DNA
attcttgctcgttgacctccactc

SEQ ID NO: 13276 - DNA, 25 bp, synthetic construct
  source 1..25: mol_type = other DNA
aattcttgctcgttgacctccactc

SEQ ID NO: 13277 - DNA, 26 bp, synthetic construct
  source 1..26: mol_type = other DNA
aaattcttgctcgttgacctccactc

SEQ ID NO: 13278 - DNA, 27 bp, synthetic construct
  source 1..27: mol_type = other DNA
gaaattcttgctcgttgacctccactc

SEQ ID NO: 13279 - DNA, 28 bp, synthetic construct
  source 1..28: mol_type = other DNA
agaaattcttgctcgttgacctccactc

SEQ ID NO: 13280 - DNA, 29 bp, synthetic construct
  source 1..29: mol_type = other DNA
aagaaattcttgctcgttgacctccactc

SEQ ID NO: 13281 - DNA, 30 bp, synthetic construct; identical to SEQ ID NO: 10082
  source 1..30: mol_type = other DNA

SEQ ID NO: 13282 - DNA, 31 bp, synthetic construct; identical to SEQ ID NO: 10083
  source 1..31: mol_type = other DNA

SEQ ID NO: 13283 - DNA, 32 bp, synthetic construct; identical to SEQ ID NO: 10084
  source 1..32: mol_type = other DNA

SEQ ID NO: 13284 - DNA, 33 bp, synthetic construct; identical to SEQ ID NO: 10085
  source 1..33: mol_type = other DNA

SEQ ID NO: 13285 - DNA, 34 bp, synthetic construct; identical to SEQ ID NO: 10086
  source 1..34: mol_type = other DNA

SEQ ID NO: 13286 - DNA, 35 bp, synthetic construct; identical to SEQ ID NO: 10087
  source 1..35: mol_type = other DNA

SEQ ID NO: 13287 - DNA, 36 bp, synthetic construct; identical to SEQ ID NO: 10088
  source 1..36: mol_type = other DNA

SEQ ID NO: 13288 - DNA, 37 bp, synthetic construct; identical to SEQ ID NO: 10089
  source 1..37: mol_type = other DNA

SEQ ID NO: 13289 - DNA, 38 bp, synthetic construct; identical to SEQ ID NO: 10090
  source 1..38: mol_type = other DNA

SEQ ID NO: 13290 - DNA, 39 bp, synthetic construct; identical to SEQ ID NO: 10091
  source 1..39: mol_type = other DNA

SEQ ID NO: 13291 - DNA, 40 bp, synthetic construct; identical to SEQ ID NO: 10092
  source 1..40: mol_type = other DNA

SEQ ID NO: 13292 - DNA, 33 bp, synthetic construct; identical to SEQ ID NO: 10105
  source 1..33: mol_type = other DNA

SEQ ID NO: 13293 - DNA, 34 bp, synthetic construct; identical to SEQ ID NO: 10106
  source 1..34: mol_type = other DNA

SEQ ID NO: 13294 - DNA, 35 bp, synthetic construct; identical to SEQ ID NO: 10107
  source 1..35: mol_type = other DNA

SEQ ID NO: 13295 - DNA, 36 bp, synthetic construct; identical to SEQ ID NO: 10108
  source 1..36: mol_type = other DNA

SEQ ID NO: 13296 - DNA, 37 bp, synthetic construct; identical to SEQ ID NO: 10109
  source 1..37: mol_type = other DNA

SEQ ID NO: 13297 - DNA, 38 bp, synthetic construct; identical to SEQ ID NO: 10110
  source 1..38: mol_type = other DNA

SEQ ID NO: 13298 - DNA, 39 bp, synthetic construct; identical to SEQ ID NO: 10111
  source 1..39: mol_type = other DNA

SEQ ID NO: 13299 - DNA, 40 bp, synthetic construct; identical to SEQ ID NO: 10112
  source 1..40: mol_type = other DNA

SEQ ID NO: 13300 - DNA, 32 bp, synthetic construct; identical to SEQ ID NO: 10125
  source 1..32: mol_type = other DNA

SEQ ID NO: 13301 - DNA, 33 bp, synthetic construct; identical to SEQ ID NO: 10126
  source 1..33: mol_type = other DNA

SEQ ID NO: 13302 - DNA, 34 bp, synthetic construct; identical to SEQ ID NO: 10127
  source 1..34: mol_type = other DNA

SEQ ID NO: 13303 - DNA, 35 bp, synthetic construct; identical to SEQ ID NO: 10128
  source 1..35: mol_type = other DNA

SEQ ID NO: 13304 - DNA, 36 bp, synthetic construct; identical to SEQ ID NO: 10129
  source 1..36: mol_type = other DNA

SEQ ID NO: 13305 - DNA, 37 bp, synthetic construct; identical to SEQ ID NO: 10130
  source 1..37: mol_type = other DNA

SEQ ID NO: 13306 - DNA, 38 bp, synthetic construct; identical to SEQ ID NO: 10131
  source 1..38: mol_type = other DNA

SEQ ID NO: 13307 - DNA, 39 bp, synthetic construct; identical to SEQ ID NO: 10132
  source 1..39: mol_type = other DNA

SEQ ID NO: 13308 - DNA, 40 bp, synthetic construct; identical to SEQ ID NO: 10133
  source 1..40: mol_type = other DNA

SEQ ID NO: 13309 - DNA, 10 bp, synthetic construct
  source 1..10: mol_type = other DNA
cttgcccgtt

SEQ ID NO: 13310 - DNA, 10 bp, synthetic construct
  source 1..10: mol_type = other DNA
cttgctcgtt

SEQ ID NO: 13311 - DNA, 11 bp, synthetic construct
  source 1..11: mol_type = other DNA
tcttgcccgtt

SEQ ID NO: 13312 - DNA, 11 bp, synthetic construct
  source 1..11: mol_type = other DNA
tcttgctcgtt

SEQ ID NO: 13313 - DNA, 12 bp, synthetic construct
  source 1..12: mol_type = other DNA
ttcttgctcgtt

SEQ ID NO: 13314 - DNA, 12 bp, synthetic construct
  source 1..12: mol_type = other DNA
ttcttgcccgtt

SEQ ID NO: 13315 - DNA, 13 bp, synthetic construct
  source 1..13: mol_type = other DNA
attcttgcccgtt

SEQ ID NO: 13316 - DNA, 13 bp, synthetic construct
  source 1..13: mol_type = other DNA
attcttgctcgtt

SEQ ID NO: 13317 - DNA, 14 bp, synthetic construct
  source 1..14: mol_type = other DNA
aattcttgctcgtt

SEQ ID NO: 13318 - DNA, 14 bp, synthetic construct
  source 1..14: mol_type = other DNA
aattcttgcccgtt

SEQ ID NO: 13319 - DNA, 15 bp, synthetic construct
  source 1..15: mol_type = other DNA
aaattcttgctcgtt

SEQ ID NO: 13320 - DNA, 15 bp, synthetic construct
  source 1..15: mol_type = other DNA
aaattcttgcccgtt

SEQ ID NO: 13321 - DNA, 16 bp, synthetic construct
  source 1..16: mol_type = other DNA
gaaattcttgctcgtt

SEQ ID NO: 13322 - DNA, 16 bp, synthetic construct
  source 1..16: mol_type = other DNA
gaaattcttgcccgtt

SEQ ID NO: 13323 - DNA, 17 bp, synthetic construct
  source 1..17: mol_type = other DNA
agaaattcttgctcgtt

SEQ ID NO: 13324 - DNA, 17 bp, synthetic construct
  source 1..17: mol_type = other DNA
agaaattcttgcccgtt

SEQ ID NO: 13325 - DNA, 18 bp, synthetic construct
  source 1..18: mol_type = other DNA
aagaaattcttgcccgtt

SEQ ID NO: 13326 - DNA, 18 bp, synthetic construct
  source 1..18: mol_type = other DNA
aagaaattcttgctcgtt

SEQ ID NO: 13327 - DNA, 19 bp, synthetic construct
  source 1..19: mol_type = other DNA
aaagaaattcttgctcgtt

SEQ ID NO: 13328 - DNA, 19 bp, synthetic construct
  source 1..19: mol_type = other DNA
aaagaaattcttgcccgtt

SEQ ID NO: 13329 - DNA, 20 bp, synthetic construct
  source 1..20: mol_type = other DNA
taaagaaattcttgcccgtt

SEQ ID NO: 13330 - DNA, 20 bp, synthetic construct
  source 1..20: mol_type = other DNA
taaagaaattcttgctcgtt

SEQ ID NO: 13331 - DNA, 21 bp, synthetic construct
  source 1..21: mol_type = other DNA
ctaaagaaattcttgcccgtt

SEQ ID NO: 13332 - DNA, 21 bp, synthetic construct
  source 1..21: mol_type = other DNA
ctaaagaaattcttgctcgtt

SEQ ID NO: 13333 - DNA, 22 bp, synthetic construct
  source 1..22: mol_type = other DNA
gctaaagaaattcttgctcgtt

SEQ ID NO: 13334 - DNA, 22 bp, synthetic construct
  source 1..22: mol_type = other DNA
gctaaagaaattcttgcccgtt

SEQ ID NO: 13335 - DNA, 23 bp, synthetic construct
  source 1..23: mol_type = other DNA
tgctaaagaaattcttgctcgtt

SEQ ID NO: 13336 - DNA, 23 bp, synthetic construct
  source 1..23: mol_type = other DNA
tgctaaagaaattcttgcccgtt

SEQ ID NO: 13337 - DNA, 24 bp, synthetic construct
  source 1..24: mol_type = other DNA
ttgctaaagaaattcttgcccgtt

SEQ ID NO: 13338 - DNA, 24 bp, synthetic construct
  source 1..24: mol_type = other DNA
ttgctaaagaaattcttgctcgtt

SEQ ID NO: 13339 - DNA, 25 bp, synthetic construct
  source 1..25: mol_type = other DNA
cttgctaaagaaattcttgcccgtt

SEQ ID NO: 13340 - DNA, 25 bp, synthetic construct
  source 1..25: mol_type = other DNA
cttgctaaagaaattcttgctcgtt

SEQ ID NO: 13341 - DNA, 26 bp, synthetic construct
  source 1..26: mol_type = other DNA
ccttgctaaagaaattcttgcccgtt

SEQ ID NO: 13342 - DNA, 26 bp, synthetic construct
  source 1..26: mol_type = other DNA
ccttgctaaagaaattcttgctcgtt

SEQ ID NO: 13343 - DNA, 27 bp, synthetic construct
  source 1..27: mol_type = other DNA
accttgctaaagaaattcttgcccgtt

SEQ ID NO: 13344 - DNA, 27 bp, synthetic construct
  source 1..27: mol_type = other DNA
accttgctaaagaaattcttgctcgtt

SEQ ID NO: 13345 - DNA, 28 bp, synthetic construct
  source 1..28: mol_type = other DNA
caccttgctaaagaaattcttgctcgtt

SEQ ID NO: 13346 - DNA, 28 bp, synthetic construct
  source 1..28: mol_type = other DNA
caccttgctaaagaaattcttgcccgtt

SEQ ID NO: 13347 - DNA, 29 bp, synthetic construct
  source 1..29: mol_type = other DNA
tcaccttgctaaagaaattcttgcccgtt

SEQ ID NO: 13348 - DNA, 29 bp, synthetic construct
  source 1..29: mol_type = other DNA
tcaccttgctaaagaaattcttgctcgtt

SEQ ID NO: 13349 - DNA, 30 bp, synthetic construct
  source 1..30: mol_type = other DNA
ttcaccttgctaaagaaattcttgctcgtt

SEQ ID NO: 13350 - DNA, 30 bp, synthetic construct
  source 1..30: mol_type = other DNA
ttcaccttgctaaagaaattcttgcccgtt

SEQ ID NO: 13351 - DNA, 31 bp, synthetic construct
  source 1..31: mol_type = other DNA
attcaccttgctaaagaaattcttgcccgtt

SEQ ID NO: 13352 - DNA, 31 bp, synthetic construct
  source 1..31: mol_type = other DNA
attcaccttgctaaagaaattcttgctcgtt

SEQ ID NO: 13353 - DNA, 32 bp, synthetic construct
  source 1..32: mol_type = other DNA
tattcaccttgctaaagaaattcttgcccgtt

SEQ ID NO: 13354 - DNA, 32 bp, synthetic construct
  source 1..32: mol_type = other DNA
tattcaccttgctaaagaaattcttgctcgtt

SEQ ID NO: 13355 - DNA, 33 bp, synthetic construct
  source 1..33: mol_type = other DNA
ttattcaccttgctaaagaaattcttgcccgtt

SEQ ID NO: 13356 - DNA, 33 bp, synthetic construct
  source 1..33: mol_type = other DNA
ttattcaccttgctaaagaaattcttgctcgtt

SEQ ID NO: 13357 - DNA, 34 bp, synthetic construct
  source 1..34: mol_type = other DNA
gttattcaccttgctaaagaaattcttgctcgtt

SEQ ID NO: 13358 - DNA, 34 bp, synthetic construct
  source 1..34: mol_type = other DNA
gttattcaccttgctaaagaaattcttgcccgtt

SEQ ID NO: 13359 - DNA, 35 bp, synthetic construct
  source 1..35: mol_type = other DNA
agttattcaccttgctaaagaaattcttgctcgtt

SEQ ID NO: 13360 - DNA, 35 bp, synthetic construct
  source 1..35: mol_type = other DNA
agttattcaccttgctaaagaaattcttgcccgtt

SEQ ID NO: 13361 - DNA, 36 bp, synthetic construct
  source 1..36: mol_type = other DNA
tagttattcaccttgctaaagaaattcttgctcgtt

SEQ ID NO: 13362 - DNA, 36 bp, synthetic construct
  source 1..36: mol_type = other DNA
tagttattcaccttgctaaagaaattcttgcccgtt

SEQ ID NO: 13363 - DNA, 37 bp, synthetic construct
  source 1..37: mol_type = other DNA
ttagttattcaccttgctaaagaaattcttgctcgtt

SEQ ID NO: 13364 - DNA, 37 bp, synthetic construct
  source 1..37: mol_type = other DNA
ttagttattcaccttgctaaagaaattcttgcccgtt

SEQ ID NO: 13365 - DNA, 38 bp, synthetic construct
  source 1..38: mol_type = other DNA
attagttattcaccttgctaaagaaattcttgctcgtt

SEQ ID NO: 13366 - DNA, 38 bp, synthetic construct
  source 1..38: mol_type = other DNA
attagttattcaccttgctaaagaaattcttgcccgtt

SEQ ID NO: 13367 - DNA, 39 bp, synthetic construct
  source 1..39: mol_type = other DNA
aattagttattcaccttgctaaagaaattcttgctcgtt

SEQ ID NO: 13368 - DNA, 39 bp, synthetic construct
  source 1..39: mol_type = other DNA
aattagttattcaccttgctaaagaaattcttgcccgtt

SEQ ID NO: 13369 - DNA, 40 bp, synthetic construct
  source 1..40: mol_type = other DNA
taattagttattcaccttgctaaagaaattcttgcccgtt

SEQ ID NO: 13370 - DNA, 40 bp, synthetic construct
  source 1..40: mol_type = other DNA
taattagttattcaccttgctaaagaaattcttgctcgtt

SEQ ID NO: 13371 - DNA, 10 bp, synthetic construct
  source 1..10: mol_type = other DNA
tcttgctcgt

SEQ ID NO: 13372 - DNA, 11 bp, synthetic construct
  source 1..11: mol_type = other DNA
ttcttgctcgt

SEQ ID NO: 13373 - DNA, 12 bp, synthetic construct
  source 1..12: mol_type = other DNA
attcttgctcgt

SEQ ID NO: 13374 - DNA, 13 bp, synthetic construct
  source 1..13: mol_type = other DNA
aattcttgctcgt

SEQ ID NO: 13375 - DNA, 14 bp, synthetic construct
  source 1..14: mol_type = other DNA
aaattcttgctcgt

SEQ ID NO: 13376 - DNA, 15 bp, synthetic construct
  source 1..15: mol_type = other DNA
gaaattcttgctcgt

SEQ ID NO: 13377 - DNA, 16 bp, synthetic construct
  source 1..16: mol_type = other DNA
agaaattcttgctcgt

SEQ ID NO: 13378 - DNA, 17 bp, synthetic construct
  source 1..17: mol_type = other DNA
aagaaattcttgctcgt

SEQ ID NO: 13379 - DNA, 18 bp, synthetic construct
  source 1..18: mol_type = other DNA
aaagaaattcttgctcgt

SEQ ID NO: 13380 - DNA, 19 bp, synthetic construct
  source 1..19: mol_type = other DNA
taaagaaattcttgctcgt

SEQ ID NO: 13381 - DNA, 20 bp, synthetic construct
  source 1..20: mol_type = other DNA
ctaaagaaattcttgctcgt

SEQ ID NO: 13382 - DNA, 21 bp, synthetic construct
  source 1..21: mol_type = other DNA
gctaaagaaattcttgctcgt

SEQ ID NO: 13383 - DNA, 22 bp, synthetic construct
  source 1..22: mol_type = other DNA
tgctaaagaaattcttgctcgt

SEQ ID NO: 13384 - DNA, 23 bp, synthetic construct
  source 1..23: mol_type = other DNA
ttgctaaagaaattcttgctcgt

SEQ ID NO: 13385 - DNA, 24 bp, synthetic construct
  source 1..24: mol_type = other DNA
cttgctaaagaaattcttgctcgt

SEQ ID NO: 13386 - DNA, 25 bp, synthetic construct
  source 1..25: mol_type = other DNA
ccttgctaaagaaattcttgctcgt

SEQ ID NO: 13387 - DNA, 26 bp, synthetic construct
  source 1..26: mol_type = other DNA
accttgctaaagaaattcttgctcgt

SEQ ID NO: 13388 - DNA, 27 bp, synthetic construct
  source 1..27: mol_type = other DNA
caccttgctaaagaaattcttgctcgt

SEQ ID NO: 13389 - DNA, 28 bp, synthetic construct
  source 1..28: mol_type = other DNA
tcaccttgctaaagaaattcttgctcgt

SEQ ID NO: 13390 - DNA, 29 bp, synthetic construct
  source 1..29: mol_type = other DNA
ttcaccttgctaaagaaattcttgctcgt

SEQ ID NO: 13391 - DNA, 30 bp, synthetic construct
  source 1..30: mol_type = other DNA
attcaccttgctaaagaaattcttgctcgt

SEQ ID NO: 13392 - DNA, 31 bp, synthetic construct
  source 1..31: mol_type = other DNA
tattcaccttgctaaagaaattcttgctcgt

SEQ ID NO: 13393 - DNA, 32 bp, synthetic construct
  source 1..32: mol_type = other DNA
ttattcaccttgctaaagaaattcttgctcgt

SEQ ID NO: 13394 - DNA, 33 bp, synthetic construct
  source 1..33: mol_type = other DNA
gttattcaccttgctaaagaaattcttgctcgt

SEQ ID NO: 13395 - DNA, 34 bp, synthetic construct
  source 1..34: mol_type = other DNA
agttattcaccttgctaaagaaattcttgctcgt

SEQ ID NO: 13396 - DNA, 35 bp, synthetic construct
  source 1..35: mol_type = other DNA
tagttattcaccttgctaaagaaattcttgctcgt

SEQ ID NO: 13397 - DNA, 36 bp, synthetic construct
  source 1..36: mol_type = other DNA
ttagttattcaccttgctaaagaaattcttgctcgt

SEQ ID NO: 13398 - DNA, 37 bp, synthetic construct
  source 1..37: mol_type = other DNA
attagttattcaccttgctaaagaaattcttgctcgt

SEQ ID NO: 13399 - DNA, 38 bp, synthetic construct
  source 1..38: mol_type = other DNA
aattagttattcaccttgctaaagaaattcttgctcgt

SEQ ID NO: 13400 - DNA, 39 bp, synthetic construct
  source 1..39: mol_type = other DNA
taattagttattcaccttgctaaagaaattcttgctcgt

SEQ ID NO: 13401 - DNA, 40 bp, synthetic construct
  source 1..40: mol_type = other DNA
ataattagttattcaccttgctaaagaaattcttgctcgt

SEQ ID NO: 13402 - DNA, 39 bp, synthetic construct; identical to SEQ ID NO: 10146
  source 1..39: mol_type = other DNA

SEQ ID NO: 13403 - DNA, 40 bp, synthetic construct; identical to SEQ ID NO: 10147
  source 1..40: mol_type = other DNA

SEQ ID NO: 13404 - DNA, 16 bp, synthetic construct
  source 1..16: mol_type = other DNA
cgttgacctccactca

SEQ ID NO: 13405 - DNA, 17 bp, synthetic construct
  source 1..17: mol_type = other DNA
tcgttgacctccactca

SEQ ID NO: 13406 - DNA, 18 bp, synthetic construct
  source 1..18: mol_type = other DNA
ctcgttgacctccactca

SEQ ID NO: 13407 - DNA, 19 bp, synthetic construct
  source 1..19: mol_type = other DNA
gctcgttgacctccactca

SEQ ID NO: 13408 - DNA, 20 bp, synthetic construct
  source 1..20: mol_type = other DNA
tgctcgttgacctccactca

SEQ ID NO: 13409 - DNA, 21 bp, synthetic construct
  source 1..21: mol_type = other DNA
ttgctcgttgacctccactca

SEQ ID NO: 13410 - DNA, 22 bp, synthetic construct
  source 1..22: mol_type = other DNA
cttgctcgttgacctccactca

SEQ ID NO: 13411 - DNA, 23 bp, synthetic construct
  source 1..23: mol_type = other DNA
tcttgctcgttgacctccactca

SEQ ID NO: 13412 - DNA, 24 bp, synthetic construct
  source 1..24: mol_type = other DNA
ttcttgctcgttgacctccactca

SEQ ID NO: 13413 - DNA, 25 bp, synthetic construct
  source 1..25: mol_type = other DNA
attcttgctcgttgacctccactca

SEQ ID NO: 13414 - DNA, 26 bp, synthetic construct
  source 1..26: mol_type = other DNA
aattcttgctcgttgacctccactca

SEQ ID NO: 13415 - DNA, 27 bp, synthetic construct
  source 1..27: mol_type = other DNA
aaattcttgctcgttgacctccactca

SEQ ID NO: 13416 - DNA, 28 bp, synthetic construct
  source 1..28: mol_type = other DNA
gaaattcttgctcgttgacctccactca

SEQ ID NO: 13417 - DNA, 29 bp, synthetic construct
  source 1..29: mol_type = other DNA
agaaattcttgctcgttgacctccactca

SEQ ID NO: 13418 - DNA, 30 bp, synthetic construct; identical to SEQ ID NO: 10168
  source 1..30: mol_type = other DNA

SEQ ID NO: 13419 - DNA, 31 bp, synthetic construct; identical to SEQ ID NO: 10169
  source 1..31: mol_type = other DNA

SEQ ID NO: 13420 - DNA, 32 bp, synthetic construct; identical to SEQ ID NO: 10170
  source 1..32: mol_type = other DNA

SEQ ID NO: 13421 - DNA, 33 bp, synthetic construct; identical to SEQ ID NO: 10171
  source 1..33: mol_type = other DNA

SEQ ID NO: 13422 - DNA, 34 bp, synthetic construct; identical to SEQ ID NO: 10172
  source 1..34: mol_type = other DNA

SEQ ID NO: 13423 - DNA, 35 bp, synthetic construct; identical to SEQ ID NO: 10173
  source 1..35: mol_type = other DNA

SEQ ID NO: 13424 - DNA, 36 bp, synthetic construct; identical to SEQ ID NO: 10174
  source 1..36: mol_type = other DNA

SEQ ID NO: 13425 - DNA, 37 bp, synthetic construct; identical to SEQ ID NO: 10175
  source 1..37: mol_type = other DNA

SEQ ID NO: 13426 - DNA, 38 bp, synthetic construct; identical to SEQ ID NO: 10176
  source 1..38: mol_type = other DNA

SEQ ID NO: 13427 - DNA, 39 bp, synthetic construct; identical to SEQ ID NO: 10177
  source 1..39: mol_type = other DNA

SEQ ID NO: 13428 - DNA, 40 bp, synthetic construct; identical to SEQ ID NO: 10178
  source 1..40: mol_type = other DNA

SEQ ID NO: 13429 - DNA, 40 bp, synthetic construct; identical to SEQ ID NO: 10191
  source 1..40: mol_type = other DNA

SEQ ID NO: 13430 - DNA, 14 bp, synthetic construct
  source 1..14: mol_type = other DNA
cgttgacctccact

SEQ ID NO: 13431 - DNA, 15 bp, synthetic construct
  source 1..15: mol_type = other DNA
tcgttgacctccact

SEQ ID NO: 13432 - DNA, 16 bp, synthetic construct
  source 1..16: mol_type = other DNA
ctcgttgacctccact

SEQ ID NO: 13433 - DNA, 17 bp, synthetic construct
  source 1..17: mol_type = other DNA
gctcgttgacctccact

SEQ ID NO: 13434 - DNA, 18 bp, synthetic construct
  source 1..18: mol_type = other DNA
tgctcgttgacctccact

SEQ ID NO: 13435 - DNA, 19 bp, synthetic construct
  source 1..19: mol_type = other DNA
ttgctcgttgacctccact

SEQ ID NO: 13436 - DNA, 20 bp, synthetic construct
  source 1..20: mol_type = other DNA
cttgctcgttgacctccact

SEQ ID NO: 13437 - DNA, 21 bp, synthetic construct
  source 1..21: mol_type = other DNA
tcttgctcgttgacctccact

SEQ ID NO: 13438 - DNA, 22 bp, synthetic construct
  source 1..22: mol_type = other DNA
ttcttgctcgttgacctccact

SEQ ID NO: 13439 - DNA, 23 bp, synthetic construct
  source 1..23: mol_type = other DNA
attcttgctcgttgacctccact

SEQ ID NO: 13440 - DNA, 24 bp, synthetic construct
  source 1..24: mol_type = other DNA
aattcttgctcgttgacctccact

SEQ ID NO: 13441 - DNA, 25 bp, synthetic construct
  source 1..25: mol_type = other DNA
aaattcttgctcgttgacctccact

SEQ ID NO: 13442 - DNA, 26 bp, synthetic construct
  source 1..26: mol_type = other DNA
gaaattcttgctcgttgacctccact

SEQ ID NO: 13443 - DNA, 27 bp, synthetic construct
  source 1..27: mol_type = other DNA
agaaattcttgctcgttgacctccact

SEQ ID NO: 13444 - DNA, 28 bp, synthetic construct
  source 1..28: mol_type = other DNA
aagaaattcttgctcgttgacctccact

SEQ ID NO: 13445 - DNA, 29 bp, synthetic construct
  source 1..29: mol_type = other DNA
aaagaaattcttgctcgttgacctccact

SEQ ID NO: 13446 - DNA, 30 bp, synthetic construct; identical to SEQ ID NO: 10212
  source 1..30: mol_type = other DNA

SEQ ID NO: 13447 - DNA, 31 bp, synthetic construct; identical to SEQ ID NO: 10213
  source 1..31: mol_type = other DNA

SEQ ID NO: 13448 - DNA, 32 bp, synthetic construct; identical to SEQ ID NO: 10214
  source 1..32: mol_type = other DNA

SEQ ID NO: 13449 - DNA, 33 bp, synthetic construct; identical to SEQ ID NO: 10215
  source 1..33: mol_type = other DNA

SEQ ID NO: 13450 - DNA, 34 bp, synthetic construct; identical to SEQ ID NO: 10216
  source 1..34: mol_type = other DNA

SEQ ID NO: 13451 - DNA, 35 bp, synthetic construct; identical to SEQ ID NO: 10217
  source 1..35: mol_type = other DNA

SEQ ID NO: 13452 - DNA, 36 bp, synthetic construct; identical to SEQ ID NO: 10218
  source 1..36: mol_type = other DNA

SEQ ID NO: 13453 - DNA, 37 bp, synthetic construct; identical to SEQ ID NO: 10219
  source 1..37: mol_type = other DNA

SEQ ID NO: 13454 - DNA, 38 bp, synthetic construct; identical to SEQ ID NO: 10220
  source 1..38: mol_type = other DNA

SEQ ID NO: 13455 - DNA, 39 bp, synthetic construct; identical to SEQ ID NO: 10221
  source 1..39: mol_type = other DNA

SEQ ID NO: 13456 - DNA, 40 bp, synthetic construct; identical to SEQ ID NO: 10222
  source 1..40: mol_type = other DNA

SEQ ID NO: 13457 - DNA, 30 bp, synthetic construct; identical to SEQ ID NO: 10235
  source 1..30: mol_type = other DNA

SEQ ID NO: 13458 - DNA, 31 bp, synthetic construct; identical to SEQ ID NO: 10236
  source 1..31: mol_type = other DNA

SEQ ID NO: 13459 - DNA, 32 bp, synthetic construct; identical to SEQ ID NO: 10237
  source 1..32: mol_type = other DNA

SEQ ID NO: 13460 - DNA, 33 bp, synthetic construct; identical to SEQ ID NO: 10238
  source 1..33: mol_type = other DNA

SEQ ID NO: 13461 - DNA, 34 bp, synthetic construct; identical to SEQ ID NO: 10239
  source 1..34: mol_type = other DNA

SEQ ID NO: 13462 - DNA, 35 bp, synthetic construct; identical to SEQ ID NO: 10240
  source 1..35: mol_type = other DNA

SEQ ID NO: 13463 - DNA, 36 bp, synthetic construct; identical to SEQ ID NO: 10241
  source 1..36: mol_type = other DNA

SEQ ID NO: 13464 - DNA, 37 bp, synthetic construct; identical to SEQ ID NO: 10242
  source 1..37: mol_type = other DNA

SEQ ID NO: 13465 - DNA, 38 bp, synthetic construct; identical to SEQ ID NO: 10243
  source 1..38: mol_type = other DNA

SEQ ID NO: 13466 - DNA, 39 bp, synthetic construct; identical to SEQ ID NO: 10244
  source 1..39: mol_type = other DNA

SEQ ID NO: 13467 - DNA, 40 bp, synthetic construct; identical to SEQ ID NO: 10245
  source 1..40: mol_type = other DNA

SEQ ID NO: 13468 - DNA, 25 bp, synthetic construct
  source 1..25: mol_type = other DNA
acgagcaagaatttctttagcaagg

SEQ ID NO: 13469 - DNA, 26 bp, synthetic construct
  source 1..26: mol_type = other DNA
aacgagcaagaatttctttagcaagg

SEQ ID NO: 13470 - DNA, 27 bp, synthetic construct
  source 1..27: mol_type = other DNA
caacgagcaagaatttctttagcaagg

SEQ ID NO: 13471 - DNA, 28 bp, synthetic construct
  source 1..28: mol_type = other DNA
tcaacgagcaagaatttctttagcaagg

SEQ ID NO: 13472 - DNA, 29 bp, synthetic construct
  source 1..29: mol_type = other DNA
gtcaacgagcaagaatttctttagcaagg

SEQ ID NO: 13473 - DNA, 30 bp, synthetic construct; identical to SEQ ID NO: 12810
  source 1..30: mol_type = other DNA

SEQ ID NO: 13474 - DNA, 31 bp, synthetic construct; identical to SEQ ID NO: 12215
  source 1..31: mol_type = other DNA

SEQ ID NO: 13475 - DNA, 32 bp, synthetic construct; identical to SEQ ID NO: 12216
  source 1..32: mol_type = other DNA

SEQ ID NO: 13476 - DNA, 33 bp, synthetic construct; identical to SEQ ID NO: 12217
  source 1..33: mol_type = other DNA

SEQ ID NO: 13477 - DNA, 34 bp, synthetic construct; identical to SEQ ID NO: 12218
  source 1..34: mol_type = other DNA

SEQ ID NO: 13478 - DNA, 35 bp, synthetic construct; identical to SEQ ID NO: 11532
  source 1..35: mol_type = other DNA

SEQ ID NO: 13479 - DNA, 36 bp, synthetic construct; identical to SEQ ID NO: 10878
  source 1..36: mol_type = other DNA

SEQ ID NO: 13480 - DNA, 37 bp, synthetic construct; identical to SEQ ID NO: 10246
  source 1..37: mol_type = other DNA

SEQ ID NO: 13481 - DNA, 38 bp, synthetic construct; identical to SEQ ID NO: 10247
  source 1..38: mol_type = other DNA

SEQ ID NO: 13482 - DNA, 39 bp, synthetic construct; identical to SEQ ID NO: 10248
  source 1..39: mol_type = other DNA

SEQ ID NO: 13483 - DNA, 40 bp, synthetic construct; identical to SEQ ID NO: 10249
  source 1..40: mol_type = other DNA

SEQ ID NO: 13484 - DNA, 31 bp, synthetic construct; identical to SEQ ID NO: 10262
  source 1..31: mol_type = other DNA

SEQ ID NO: 13485 - DNA, 32 bp, synthetic construct; identical to SEQ ID NO: 10263
  source 1..32: mol_type = other DNA

SEQ ID NO: 13486 - DNA, 33 bp, synthetic construct; identical to SEQ ID NO: 10264
  source 1..33: mol_type = other DNA

SEQ ID NO: 13487 - DNA, 34 bp, synthetic construct; identical to SEQ ID NO: 10265
  source 1..34: mol_type = other DNA

SEQ ID NO: 13488 - DNA, 35 bp, synthetic construct; identical to SEQ ID NO: 10266
  source 1..35: mol_type = other DNA

SEQ ID NO: 13489 - DNA, 36 bp, synthetic construct; identical to SEQ ID NO: 10267
  source 1..36: mol_type = other DNA

SEQ ID NO: 13490 - DNA, 37 bp, synthetic construct; identical to SEQ ID NO: 10268
  source 1..37: mol_type = other DNA

SEQ ID NO: 13491 - DNA, 38 bp, synthetic construct; identical to SEQ ID NO: 10269
  source 1..38: mol_type = other DNA

SEQ ID NO: 13492 - DNA, 39 bp, synthetic construct; identical to SEQ ID NO: 10270
  source 1..39: mol_type = other DNA

SEQ ID NO: 13493 - DNA, 40 bp, synthetic construct; identical to SEQ ID NO: 10271
  source 1..40: mol_type = other DNA

SEQ ID NO: 13494 - DNA, 10 bp, synthetic construct
  source 1..10: mol_type = other DNA
ttgctcgttg

SEQ ID NO: 13495 - DNA, 11 bp, synthetic construct
  source 1..11: mol_type = other DNA
cttgctcgttg

SEQ ID NO: 13496 - DNA, 12 bp, synthetic construct
  source 1..12: mol_type = other DNA
tcttgctcgttg

SEQ ID NO: 13497 - DNA, 13 bp, synthetic construct
  source 1..13: mol_type = other DNA
ttcttgctcgttg

SEQ ID NO: 13498 - DNA, 14 bp, synthetic construct
  source 1..14: mol_type = other DNA
attcttgctcgttg

SEQ ID NO: 13499 - DNA, 15 bp, synthetic construct
  source 1..15: mol_type = other DNA
aattcttgctcgttg

SEQ ID NO: 13500 - DNA, 16 bp, synthetic construct
  source 1..16: mol_type = other DNA
aaattcttgctcgttg

SEQ ID NO: 13501 - DNA, 17 bp, synthetic construct
  source 1..17: mol_type = other DNA
gaaattcttgctcgttg

SEQ ID NO: 13502 - DNA, 18 bp, synthetic construct
  source 1..18: mol_type = other DNA
agaaattcttgctcgttg

SEQ ID NO: 13503 - DNA, 19 bp, synthetic construct
  source 1..19: mol_type = other DNA
aagaaattcttgctcgttg

SEQ ID NO: 13504 - DNA, 20 bp, synthetic construct
  source 1..20: mol_type = other DNA
aaagaaattcttgctcgttg

SEQ ID NO: 13505 - DNA, 21 bp, synthetic construct
  source 1..21: mol_type = other DNA
taaagaaattcttgctcgttg

SEQ ID NO: 13506 - DNA, 22 bp, synthetic construct
  source 1..22: mol_type = other DNA
ctaaagaaattcttgctcgttg

SEQ ID NO: 13507 - DNA, 23 bp, synthetic construct
  source 1..23: mol_type = other DNA
gctaaagaaattcttgctcgttg

SEQ ID NO: 13508 - DNA, 24 bp, synthetic construct
  source 1..24: mol_type = other DNA
tgctaaagaaattcttgctcgttg

SEQ ID NO: 13509 - DNA, 25 bp, synthetic construct
  source 1..25: mol_type = other DNA
ttgctaaagaaattcttgctcgttg

SEQ ID NO: 13510 - DNA, 26 bp, synthetic construct
  source 1..26: mol_type = other DNA
cttgctaaagaaattcttgctcgttg

SEQ ID NO: 13511 - DNA, 27 bp, synthetic construct
  source 1..27: mol_type = other DNA
ccttgctaaagaaattcttgctcgttg

SEQ ID NO: 13512 - DNA, 28 bp, synthetic construct
  source 1..28: mol_type = other DNA
accttgctaaagaaattcttgctcgttg

SEQ ID NO: 13513 - DNA, 29 bp, synthetic construct
  source 1..29: mol_type = other DNA
caccttgctaaagaaattcttgctcgttg

SEQ ID NO: 13514 - DNA, 30 bp, synthetic construct
  source 1..30: mol_type = other DNA
tcaccttgctaaagaaattcttgctcgttg

SEQ ID NO: 13515 - DNA, 31 bp, synthetic construct
  source 1..31: mol_type = other DNA
ttcaccttgctaaagaaattcttgctcgttg

SEQ ID NO: 13516 - DNA, 32 bp, synthetic construct
  source 1..32: mol_type = other DNA
attcaccttgctaaagaaattcttgctcgttg

SEQ ID NO: 13517 - DNA, 33 bp, synthetic construct
  source 1..33: mol_type = other DNA
tattcaccttgctaaagaaattcttgctcgttg

SEQ ID NO: 13518 - DNA, 34 bp, synthetic construct
  source 1..34: mol_type = other DNA
ttattcaccttgctaaagaaattcttgctcgttg

SEQ ID NO: 13519 - DNA, 35 bp, synthetic construct
  source 1..35: mol_type = other DNA
gttattcaccttgctaaagaaattcttgctcgttg

SEQ ID NO: 13520 - DNA, 36 bp, synthetic construct
  source 1..36: mol_type = other DNA
agttattcaccttgctaaagaaattcttgctcgttg

SEQ ID NO: 13521 - DNA, 37 bp, synthetic construct
  source 1..37: mol_type = other DNA
tagttattcaccttgctaaagaaattcttgctcgttg

SEQ ID NO: 13522 - DNA, 38 bp, synthetic construct
  source 1..38: mol_type = other DNA
ttagttattcaccttgctaaagaaattcttgctcgttg

SEQ ID NO: 13523 - DNA, 39 bp, synthetic construct
  source 1..39: mol_type = other DNA
attagttattcaccttgctaaagaaattcttgctcgttg

SEQ ID NO: 13524 - DNA, 40 bp, synthetic construct
  source 1..40: mol_type = other DNA
aattagttattcaccttgctaaagaaattcttgctcgttg

SEQ ID NO: 13525 - DNA, 10 bp, synthetic construct
  source 1..10: mol_type = other DNA
acgagcaaga

SEQ ID NO: 13526 - DNA, 11 bp, synthetic construct
  source 1..11: mol_type = other DNA
aacgagcaaga

SEQ ID NO: 13527 - DNA, 12 bp, synthetic construct
  source 1..12: mol_type = other DNA
caacgagcaaga

SEQ ID NO: 13528 - DNA, 13 bp, synthetic construct
  source 1..13: mol_type = other DNA
tcaacgagcaaga

SEQ ID NO: 13529 - DNA, 14 bp, synthetic construct
  source 1..14: mol_type = other DNA
gtcaacgagcaaga

SEQ ID NO: 13530 - DNA, 15 bp, synthetic construct
  source 1..15: mol_type = other DNA
ggtcaacgagcaaga

SEQ ID NO: 13531 - DNA, 16 bp, synthetic construct
  source 1..16: mol_type = other DNA
aggtcaacgagcaaga

SEQ ID NO: 13532 - DNA, 17 bp, synthetic construct
  source 1..17: mol_type = other DNA
gaggtcaacgagcaaga

SEQ ID NO: 13533 - DNA, 18 bp, synthetic construct
  source 1..18: mol_type = other DNA
ggaggtcaacgagcaaga

SEQ ID NO: 13534 - DNA, 19 bp, synthetic construct
  source 1..19: mol_type = other DNA
tggaggtcaacgagcaaga

SEQ ID NO: 13535 - DNA, 20 bp, synthetic construct
  source 1..20: mol_type = other DNA
gtggaggtcaacgagcaaga

SEQ ID NO: 13536 - DNA, 21 bp, synthetic construct
  source 1..21: mol_type = other DNA
agtggaggtcaacgagcaaga

SEQ ID NO: 13537 - DNA, 22 bp, synthetic construct
  source 1..22: mol_type = other DNA
gagtggaggtcaacgagcaaga

SEQ ID NO: 13538 - DNA, 23 bp, synthetic construct
  source 1..23: mol_type = other DNA
tgagtggaggtcaacgagcaaga

SEQ ID NO: 13539 - DNA, 24 bp, synthetic construct
  source 1..24: mol_type = other DNA
ctgagtggaggtcaacgagcaaga

SEQ ID NO: 13540 - DNA, 25 bp, synthetic construct
  source 1..25: mol_type = other DNA
actgagtggaggtcaacgagcaaga

SEQ ID NO: 13541 - DNA, 26 bp, synthetic construct
  source 1..26: mol_type = other DNA
cactgagtggaggtcaacgagcaaga

SEQ ID NO: 13542 - DNA, 27 bp, synthetic construct
  source 1..27: mol_type = other DNA
acactgagtggaggtcaacgagcaaga

SEQ ID NO: 13543 - DNA, 28 bp, synthetic construct
  source 1..28: mol_type = other DNA
cacactgagtggaggtcaacgagcaaga

SEQ ID NO: 13544 - DNA, 29 bp, synthetic construct
  source 1..29: mol_type = other DNA
tcacactgagtggaggtcaacgagcaaga

SEQ ID NO: 13545 - DNA, 30 bp, synthetic construct; identical to SEQ ID NO: 10280
  source 1..30: mol_type = other DNA

SEQ ID NO: 13546 - DNA, 31 bp, synthetic construct; identical to SEQ ID NO: 10281
  source 1..31: mol_type = other DNA

SEQ ID NO: 13547 - DNA, 32 bp, synthetic construct; identical to SEQ ID NO: 10282
  source 1..32: mol_type = other DNA

SEQ ID NO: 13548 - DNA, 33 bp, synthetic construct; identical to SEQ ID NO: 10283
  source 1..33: mol_type = other DNA

SEQ ID NO: 13549 - DNA, 34 bp, synthetic construct; identical to SEQ ID NO: 10284
  source 1..34: mol_type = other DNA

SEQ ID NO: 13550 - DNA, 35 bp, synthetic construct; identical to SEQ ID NO: 10285
  source 1..35: mol_type = other DNA

SEQ ID NO: 13551 - DNA, 36 bp, synthetic construct; identical to SEQ ID NO: 10286
  source 1..36: mol_type = other DNA

SEQ ID NO: 13552 - DNA, 37 bp, synthetic construct; identical to SEQ ID NO: 10287
  source 1..37: mol_type = other DNA

SEQ ID NO: 13553 - DNA, 38 bp, synthetic construct; identical to SEQ ID NO: 10288
  source 1..38: mol_type = other DNA

SEQ ID NO: 13554 - DNA, 39 bp, synthetic construct; identical to SEQ ID NO: 10289
  source 1..39: mol_type = other DNA

SEQ ID NO: 13555 - DNA, 40 bp, synthetic construct; identical to SEQ ID NO: 10290
  source 1..40: mol_type = other DNA

SEQ ID NO: 13556 - DNA, 38 bp, synthetic construct; identical to SEQ ID NO: 9635
  source 1..38: mol_type = other DNA

SEQ ID NO: 13557 - DNA, 39 bp, synthetic construct; identical to SEQ ID NO: 9636
  source 1..39: mol_type = other DNA

SEQ ID NO: 13558 - DNA, 40 bp, synthetic construct; identical to SEQ ID NO: 9637
  source 1..40: mol_type = other DNA

SEQ ID NO: 13559 - DNA, 34 bp, synthetic construct; identical to SEQ ID NO: 10330
  source 1..34: mol_type = other DNA

SEQ ID NO: 13560 - DNA, 34 bp, synthetic construct; identical to SEQ ID NO: 10331
  source 1..34: mol_type = other DNA

SEQ ID NO: 13561 - DNA, 35 bp, synthetic construct; identical to SEQ ID NO: 10333
  source 1..35: mol_type = other DNA

SEQ ID NO: 13562 - DNA, 35 bp, synthetic construct; identical to SEQ ID NO: 10332
  source 1..35: mol_type = other DNA

SEQ ID NO: 13563 - DNA, 36 bp, synthetic construct; identical to SEQ ID NO: 10334
  source 1..36: mol_type = other DNA

SEQ ID NO: 13564 - DNA, 36 bp, synthetic construct; identical to SEQ ID NO: 10335
  source 1..36: mol_type = other DNA

SEQ ID NO: 13565 - DNA, 37 bp, synthetic construct; identical to SEQ ID NO: 10336
  source 1..37: mol_type = other DNA

SEQ ID NO: 13566 - DNA, 37 bp, synthetic construct; identical to SEQ ID NO: 10337
  source 1..37: mol_type = other DNA

SEQ ID NO: 13567 - DNA, 38 bp, synthetic construct; identical to SEQ ID NO: 10339
  source 1..38: mol_type = other DNA

SEQ ID NO: 13568 - DNA, 38 bp, synthetic construct; identical to SEQ ID NO: 10338
  source 1..38: mol_type = other DNA

SEQ ID NO: 13569 - DNA, 39 bp, synthetic construct; identical to SEQ ID NO: 10341
  source 1..39: mol_type = other DNA

SEQ ID NO: 13570 - DNA, 39 bp, synthetic construct; identical to SEQ ID NO: 10340
  source 1..39: mol_type = other DNA

SEQ ID NO: 13571 - DNA, 40 bp, synthetic construct; identical to SEQ ID NO: 10343
  source 1..40: mol_type = other DNA

SEQ ID NO: 13572 - DNA, 40 bp, synthetic construct; identical to SEQ ID NO: 10342
  source 1..40: mol_type = other DNA

SEQ ID NO: 13573 - DNA, 18 bp, synthetic construct
  source 1..18: mol_type = other DNA
cgttgacctccactcagt

SEQ ID NO: 13574 - DNA, 18 bp, synthetic construct
  source 1..18: mol_type = other DNA
cgttgacctccggacagt

SEQ ID NO: 13575 - DNA, 19 bp, synthetic construct
  source 1..19: mol_type = other DNA
tcgttgacctccggacagt

SEQ ID NO: 13576 - DNA, 19 bp, synthetic construct
  source 1..19: mol_type = other DNA
tcgttgacctccactcagt

SEQ ID NO: 13577 - DNA, 20 bp, synthetic construct
  source 1..20: mol_type = other DNA
ctcgttgacctccggacagt

SEQ ID NO: 13578 - DNA, 20 bp, synthetic construct
  source 1..20: mol_type = other DNA
ctcgttgacctccactcagt

SEQ ID NO: 13579 - DNA, 21 bp, synthetic construct
  source 1..21: mol_type = other DNA
gctcgttgacctccactcagt

SEQ ID NO: 13580 - DNA, 21 bp, synthetic construct
  source 1..21: mol_type = other DNA
gctcgttgacctccggacagt

SEQ ID NO: 13581 - DNA, 22 bp, synthetic construct
  source 1..22: mol_type = other DNA
tgctcgttgacctccactcagt

SEQ ID NO: 13582 - DNA, 22 bp, synthetic construct
  source 1..22: mol_type = other DNA
tgctcgttgacctccggacagt

SEQ ID NO: 13583 - DNA, 23 bp, synthetic construct
  source 1..23: mol_type = other DNA
ttgctcgttgacctccactcagt

SEQ ID NO: 13584 - DNA, 23 bp, synthetic construct
  source 1..23: mol_type = other DNA
ttgctcgttgacctccggacagt

SEQ ID NO: 13585 - DNA, 24 bp, synthetic construct
  source 1..24: mol_type = other DNA
cttgctcgttgacctccggacagt

SEQ ID NO: 13586 - DNA, 24 bp, synthetic construct
  source 1..24: mol_type = other DNA
cttgctcgttgacctccactcagt

SEQ ID NO: 13587 - DNA, 25 bp, synthetic construct
  source 1..25: mol_type = other DNA
tcttgctcgttgacctccggacagt

SEQ ID NO: 13588 - DNA, 25 bp, synthetic construct
  source 1..25: mol_type = other DNA
tcttgctcgttgacctccactcagt

SEQ ID NO: 13589 - DNA, 26 bp, synthetic construct
  source 1..26: mol_type = other DNA
ttcttgctcgttgacctccactcagt

SEQ ID NO: 13590 - DNA, 26 bp, synthetic construct
  source 1..26: mol_type = other DNA
ttcttgctcgttgacctccggacagt

SEQ ID NO: 13591 - DNA, 27 bp, synthetic construct
  source 1..27: mol_type = other DNA
attcttgctcgttgacctccactcagt

SEQ ID NO: 13592 - DNA, 27 bp, synthetic construct
  source 1..27: mol_type = other DNA
attcttgctcgttgacctccggacagt

SEQ ID NO: 13593 - DNA, 28 bp, synthetic construct
  source 1..28: mol_type = other DNA
aattcttgctcgttgacctccggacagt

SEQ ID NO: 13594 - DNA, 28 bp, synthetic construct
  source 1..28: mol_type = other DNA
aattcttgctcgttgacctccactcagt

SEQ ID NO: 13595 - DNA, 29 bp, synthetic construct
  source 1..29: mol_type = other DNA
aaattcttgctcgttgacctccactcagt

SEQ ID NO: 13596 - DNA, 29 bp, synthetic construct
  source 1..29: mol_type = other DNA
aaattcttgctcgttgacctccggacagt

SEQ ID NO: 13597 - DNA, 30 bp, synthetic construct; identical to SEQ ID NO: 11697
  source 1..30: mol_type = other DNA

SEQ ID NO: 13598 - DNA, 30 bp, synthetic construct; identical to SEQ ID NO: 11698
  source 1..30: mol_type = other DNA

SEQ ID NO: 13599 - DNA, 31 bp, synthetic construct; identical to SEQ ID NO: 11700
  source 1..31: mol_type = other DNA

SEQ ID NO: 13600 - DNA, 31 bp, synthetic construct; identical to SEQ ID NO: 11699
  source 1..31: mol_type = other DNA

SEQ ID NO: 13601 - DNA, 32 bp, synthetic construct; identical to SEQ ID NO: 11702
  source 1..32: mol_type = other DNA

SEQ ID NO: 13602 - DNA, 32 bp, synthetic construct; identical to SEQ ID NO: 11701
  source 1..32: mol_type = other DNA

SEQ ID NO: 13603 - DNA, 33 bp, synthetic construct; identical to SEQ ID NO: 11704
  source 1..33: mol_type = other DNA

SEQ ID NO: 13604 - DNA, 33 bp, synthetic construct; identical to SEQ ID NO: 11703
  source 1..33: mol_type = other DNA

SEQ ID NO: 13605 - DNA, 34 bp, synthetic construct; identical to SEQ ID NO: 11706
  source 1..34: mol_type = other DNA

SEQ ID NO: 13606 - DNA, 34 bp, synthetic construct; identical to SEQ ID NO: 11705
  source 1..34: mol_type = other DNA

SEQ ID NO: 13607 - DNA, 35 bp, synthetic construct; identical to SEQ ID NO: 11708
  source 1..35: mol_type = other DNA

SEQ ID NO: 13608 - DNA, 35 bp, synthetic construct; identical to SEQ ID NO: 11707
  source 1..35: mol_type = other DNA

SEQ ID NO: 13609 - DNA, 36 bp, synthetic construct; identical to SEQ ID NO: 11709
  source 1..36: mol_type = other DNA

SEQ ID NO: 13610 - DNA, 36 bp, synthetic construct; identical to SEQ ID NO: 11710
  source 1..36: mol_type = other DNA

SEQ ID NO: 13611 - DNA, 37 bp, synthetic construct; identical to SEQ ID NO: 11711
  source 1..37: mol_type = other DNA

SEQ ID NO: 13612 - DNA, 37 bp, synthetic construct; identical to SEQ ID NO: 11712
  source 1..37: mol_type = other DNA

SEQ ID NO: 13613 - DNA, 38 bp, synthetic construct; identical to SEQ ID NO: 11714
  source 1..38: mol_type = other DNA

SEQ ID NO: 13614 - DNA, 38 bp, synthetic construct; identical to SEQ ID NO: 11713
  source 1..38: mol_type = other DNA

SEQ ID NO: 13615 - DNA, 39 bp, synthetic construct; identical to SEQ ID NO: 11715
  source 1..39: mol_type = other DNA

SEQ ID NO: 13616 - DNA, 39 bp, synthetic construct; identical to SEQ ID NO: 11716
  source 1..39: mol_type = other DNA

SEQ ID NO: 13617 - DNA, 40 bp, synthetic construct; identical to SEQ ID NO: 11717
  source 1..40: mol_type = other DNA

SEQ ID NO: 13618 - DNA, 40 bp, synthetic construct; identical to SEQ ID NO: 11718
  source 1..40: mol_type = other DNA

SEQ ID NO: 13619 - DNA, 17 bp, synthetic construct
  source 1..17: mol_type = other DNA
cgttgacctccactcag

SEQ ID NO: 13620 - DNA, 18 bp, synthetic construct
  source 1..18: mol_type = other DNA
tcgttgacctccactcag

SEQ ID NO: 13621 - DNA, 19 bp, synthetic construct
  source 1..19: mol_type = other DNA
ctcgttgacctccactcag

SEQ ID NO: 13622 - DNA, 20 bp, synthetic construct
  source 1..20: mol_type = other DNA
gctcgttgacctccactcag

SEQ ID NO: 13623 - DNA, 21 bp, synthetic construct
  source 1..21: mol_type = other DNA
tgctcgttgacctccactcag

SEQ ID NO: 13624 - DNA, 22 bp, synthetic construct
  source 1..22: mol_type = other DNA
ttgctcgttgacctccactcag

SEQ ID NO: 13625 - DNA, 23 bp, synthetic construct
  source 1..23: mol_type = other DNA
cttgctcgttgacctccactcag

SEQ ID NO: 13626 - DNA, 24 bp, synthetic construct
  source 1..24: mol_type = other DNA
tcttgctcgttgacctccactcag

SEQ ID NO: 13627 - DNA, 25 bp, synthetic construct
  source 1..25: mol_type = other DNA
ttcttgctcgttgacctccactcag

SEQ ID NO: 13628 - DNA, 26 bp, synthetic construct
  source 1..26: mol_type = other DNA
attcttgctcgttgacctccactcag

SEQ ID NO: 13629 - DNA, 27 bp, synthetic construct
  source 1..27: mol_type = other DNA
aattcttgctcgttgacctccactcag

SEQ ID NO: 13630 - DNA, 28 bp, synthetic construct
  source 1..28: mol_type = other DNA
aaattcttgctcgttgacctccactcag

SEQ ID NO: 13631 - DNA, 29 bp, synthetic construct
  source 1..29: mol_type = other DNA
gaaattcttgctcgttgacctccactcag

SEQ ID NO: 13632 - DNA, 30 bp, synthetic construct; identical to SEQ ID NO: 10364
  source 1..30: mol_type = other DNA

SEQ ID NO: 13633 - DNA, 31 bp, synthetic construct; identical to SEQ ID NO: 10365
  source 1..31: mol_type = other DNA

SEQ ID NO: 13634 - DNA, 32 bp, synthetic construct; identical to SEQ ID NO: 10366
  source 1..32: mol_type = other DNA

SEQ ID NO: 13635 - DNA, 33 bp, synthetic construct; identical to SEQ ID NO: 10367
  source 1..33: mol_type = other DNA

SEQ ID NO: 13636 - DNA, 34 bp, synthetic construct; identical to SEQ ID NO: 10368
  source 1..34: mol_type = other DNA

SEQ ID NO: 13637 - DNA, 35 bp, synthetic construct; identical to SEQ ID NO: 10369
  source 1..35: mol_type = other DNA

SEQ ID NO: 13638 - DNA, 36 bp, synthetic construct; identical to SEQ ID NO: 10370
  source 1..36: mol_type = other DNA

SEQ ID NO: 13639 - DNA, 37 bp, synthetic construct; identical to SEQ ID NO: 10371
  source 1..37: mol_type = other DNA

SEQ ID NO: 13640 - DNA, 38 bp, synthetic construct; identical to SEQ ID NO: 10372
  source 1..38: mol_type = other DNA

SEQ ID NO: 13641 - DNA, 39 bp, synthetic construct; identical to SEQ ID NO: 10373
  source 1..39: mol_type = other DNA

SEQ ID NO: 13642 - DNA, 40 bp, synthetic construct; identical to SEQ ID NO: 10374
  source 1..40: mol_type = other DNA

SEQ ID NO: 13643 - DNA, 19 bp, synthetic construct
  source 1..19: mol_type = other DNA
cgttgacctccactcagtg

SEQ ID NO: 13644 - DNA, 20 bp, synthetic construct
  source 1..20: mol_type = other DNA
tcgttgacctccactcagtg

SEQ ID NO: 13645 - DNA, 21 bp, synthetic construct
  source 1..21: mol_type = other DNA
ctcgttgacctccactcagtg

SEQ ID NO: 13646 - DNA, 22 bp, synthetic construct
  source 1..22: mol_type = other DNA
gctcgttgacctccactcagtg

SEQ ID NO: 13647 - DNA, 23 bp, synthetic construct
  source 1..23: mol_type = other DNA
tgctcgttgacctccactcagtg

SEQ ID NO: 13648 - DNA, 24 bp, synthetic construct
  source 1..24: mol_type = other DNA
ttgctcgttgacctccactcagtg

SEQ ID NO: 13649 - DNA, 25 bp, synthetic construct
  source 1..25: mol_type = other DNA
cttgctcgttgacctccactcagtg

SEQ ID NO: 13650 - DNA, 26 bp, synthetic construct
  source 1..26: mol_type = other DNA
tcttgctcgttgacctccactcagtg

SEQ ID NO: 13651 - DNA, 27 bp, synthetic construct
  source 1..27: mol_type = other DNA
ttcttgctcgttgacctccactcagtg

SEQ ID NO: 13652 - DNA, 28 bp, synthetic construct
  source 1..28: mol_type = other DNA
attcttgctcgttgacctccactcagtg

SEQ ID NO: 13653 - DNA, 29 bp, synthetic construct
  source 1..29: mol_type = other DNA
aattcttgctcgttgacctccactcagtg

SEQ ID NO: 13654 - DNA, 30 bp, synthetic construct; identical to SEQ ID NO: 10455
  source 1..30: mol_type = other DNA

SEQ ID NO: 13655 - DNA, 31 bp, synthetic construct; identical to SEQ ID NO: 10456
  source 1..31: mol_type = other DNA

SEQ ID NO: 13656 - DNA, 32 bp, synthetic construct; identical to SEQ ID NO: 10457
  source 1..32: mol_type = other DNA

SEQ ID NO: 13657 - DNA, 33 bp, synthetic construct; identical to SEQ ID NO: 10458
  source 1..33: mol_type = other DNA

SEQ ID NO: 13658 - DNA, 34 bp, synthetic construct; identical to SEQ ID NO: 10459
  source 1..34: mol_type = other DNA

SEQ ID NO: 13659 - DNA, 35 bp, synthetic construct; identical to SEQ ID NO: 10460
  source 1..35: mol_type = other DNA

SEQ ID NO: 13660 - DNA, 36 bp, synthetic construct; identical to SEQ ID NO: 10461
  source 1..36: mol_type = other DNA

SEQ ID NO: 13661 - DNA, 37 bp, synthetic construct; identical to SEQ ID NO: 10462
  source 1..37: mol_type = other DNA

SEQ ID NO: 13662 - DNA, 38 bp, synthetic construct; identical to SEQ ID NO: 10463
  source 1..38: mol_type = other DNA

SEQ ID NO: 13663 - DNA, 39 bp, synthetic construct; identical to SEQ ID NO: 10464
  source 1..39: mol_type = other DNA

SEQ ID NO: 13664 - DNA, 40 bp, synthetic construct; identical to SEQ ID NO: 10465
  source 1..40: mol_type = other DNA

SEQ ID NO: 13665 - DNA, 13 bp, synthetic construct
  source 1..13: mol_type = other DNA
cgttgacctccac

SEQ ID NO: 13666 - DNA, 13 bp, synthetic construct
  source 1..13: mol_type = other DNA
cgttgaccgccac

SEQ ID NO: 13667 - DNA, 14 bp, synthetic construct
  source 1..14: mol_type = other DNA
tcgttgaccgccac

SEQ ID NO: 13668 - DNA, 14 bp, synthetic construct
  source 1..14: mol_type = other DNA
tcgttgacctccac

SEQ ID NO: 13669 - DNA, 15 bp, synthetic construct
  source 1..15: mol_type = other DNA
ctcgttgaccgccac

SEQ ID NO: 13670 - DNA, 15 bp, synthetic construct
  source 1..15: mol_type = other DNA
ctcgttgacctccac

SEQ ID NO: 13671 - DNA, 16 bp, synthetic construct
  source 1..16: mol_type = other DNA
gctcgttgaccgccac

SEQ ID NO: 13672 - DNA, 16 bp, synthetic construct
  source 1..16: mol_type = other DNA
gctcgttgacctccac

SEQ ID NO: 13673 - DNA, 17 bp, synthetic construct
  source 1..17: mol_type = other DNA
tgctcgttgaccgccac

SEQ ID NO: 13674 - DNA, 17 bp, synthetic construct
  source 1..17: mol_type = other DNA
tgctcgttgacctccac

SEQ ID NO: 13675 - DNA, 18 bp, synthetic construct
  source 1..18: mol_type = other DNA
ttgctcgttgacctccac

SEQ ID NO: 13676 - DNA, 18 bp, synthetic construct
  source 1..18: mol_type = other DNA
ttgctcgttgaccgccac

SEQ ID NO: 13677 - DNA, 19 bp, synthetic construct
  source 1..19: mol_type = other DNA
cttgctcgttgacctccac

SEQ ID NO: 13678 - DNA, 19 bp, synthetic construct
  source 1..19: mol_type = other DNA
cttgctcgttgaccgccac

SEQ ID NO: 13679 - DNA, 20 bp, synthetic construct
  source 1..20: mol_type = other DNA
tcttgctcgttgaccgccac

SEQ ID NO: 13680 - DNA, 20 bp, synthetic construct
  source 1..20: mol_type = other DNA
tcttgctcgttgacctccac

SEQ ID NO: 13681 - DNA, 21 bp, synthetic construct
  source 1..21: mol_type = other DNA
ttcttgctcgttgaccgccac

SEQ ID NO: 13682 - DNA, 21 bp, synthetic construct
  source 1..21: mol_type = other DNA
ttcttgctcgttgacctccac

SEQ ID NO: 13683 - DNA, 22 bp, synthetic construct
  source 1..22: mol_type = other DNA
attcttgctcgttgacctccac

SEQ ID NO: 13684 - DNA, 22 bp, synthetic construct
  source 1..22: mol_type = other DNA
attcttgctcgttgaccgccac

SEQ ID NO: 13685 - DNA, 23 bp, synthetic construct
  source 1..23: mol_type = other DNA
aattcttgctcgttgaccgccac

SEQ ID NO: 13686 - DNA, 23 bp, synthetic construct
  source 1..23: mol_type = other DNA
aattcttgctcgttgacctccac

SEQ ID NO: 13687 - DNA, 24 bp, synthetic construct
  source 1..24: mol_type = other DNA
aaattcttgctcgttgaccgccac

SEQ ID NO: 13688 - DNA, 24 bp, synthetic construct
  source 1..24: mol_type = other DNA
aaattcttgctcgttgacctccac

SEQ ID NO: 13689 - DNA, 25 bp, synthetic construct
  source 1..25: mol_type = other DNA
gaaattcttgctcgttgaccgccac

SEQ ID NO: 13690 - DNA, 25 bp, synthetic construct
  source 1..25: mol_type = other DNA
gaaattcttgctcgttgacctccac

SEQ ID NO: 13691 - DNA, 26 bp, synthetic construct
  source 1..26: mol_type = other DNA
agaaattcttgctcgttgacctccac

SEQ ID NO: 13692 - DNA, 26 bp, synthetic construct
  source 1..26: mol_type = other DNA
agaaattcttgctcgttgaccgccac

SEQ ID NO: 13693 - DNA, 27 bp, synthetic construct
  source 1..27: mol_type = other DNA
aagaaattcttgctcgttgacctccac

SEQ ID NO: 13694 - DNA, 27 bp, synthetic construct
  source 1..27: mol_type = other DNA
aagaaattcttgctcgttgaccgccac

SEQ ID NO: 13695 - DNA, 28 bp, synthetic construct
  source 1..28: mol_type = other DNA
aaagaaattcttgctcgttgacctccac

SEQ ID NO: 13696 - DNA, 28 bp, synthetic construct
  source 1..28: mol_type = other DNA
aaagaaattcttgctcgttgaccgccac

SEQ ID NO: 13697 - DNA, 29 bp, synthetic construct
  source 1..29: mol_type = other DNA
taaagaaattcttgctcgttgacctccac

SEQ ID NO: 13698 - DNA, 29 bp, synthetic construct
  source 1..29: mol_type = other DNA
taaagaaattcttgctcgttgaccgccac

SEQ ID NO: 13699 - DNA, 30 bp, synthetic construct; identical to SEQ ID NO: 11046
  source 1..30: mol_type = other DNA

SEQ ID NO: 13700 - DNA, 30 bp, synthetic construct; identical to SEQ ID NO: 11045
  source 1..30: mol_type = other DNA

SEQ ID NO: 13701 - DNA, 31 bp, synthetic construct; identical to SEQ ID NO: 11048
  source 1..31: mol_type = other DNA

SEQ ID NO: 13702 - DNA, 31 bp, synthetic construct; identical to SEQ ID NO: 11047
  source 1..31: mol_type = other DNA

SEQ ID NO: 13703 - DNA, 32 bp, synthetic construct; identical to SEQ ID NO: 11049
  source 1..32: mol_type = other DNA

SEQ ID NO: 13704 - DNA, 32 bp, synthetic construct; identical to SEQ ID NO: 11050
  source 1..32: mol_type = other DNA

SEQ ID NO: 13705 - DNA, 33 bp, synthetic construct; identical to SEQ ID NO: 11052
  source 1..33: mol_type = other DNA

SEQ ID NO: 13706 - DNA, 33 bp, synthetic construct; identical to SEQ ID NO: 11051
  source 1..33: mol_type = other DNA

SEQ ID NO: 13707 - DNA, 34 bp, synthetic construct; identical to SEQ ID NO: 11053
  source 1..34: mol_type = other DNA

SEQ ID NO: 13708 - DNA, 34 bp, synthetic construct; identical to SEQ ID NO: 11054
  source 1..34: mol_type = other DNA

SEQ ID NO: 13709 - DNA, 35 bp, synthetic construct; identical to SEQ ID NO: 11056
  source 1..35: mol_type = other DNA

SEQ ID NO: 13710 - DNA, 35 bp, synthetic construct; identical to SEQ ID NO: 11055
  source 1..35: mol_type = other DNA

SEQ ID NO: 13711 - DNA, 36 bp, synthetic construct; identical to SEQ ID NO: 11058
  source 1..36: mol_type = other DNA

SEQ ID NO: 13712 - DNA, 36 bp, synthetic construct; identical to SEQ ID NO: 11057
  source 1..36: mol_type = other DNA

SEQ ID NO: 13713 - DNA, 37 bp, synthetic construct; identical to SEQ ID NO: 11060
  source 1..37: mol_type = other DNA

SEQ ID NO: 13714 - DNA, 37 bp, synthetic construct; identical to SEQ ID NO: 11059
  source 1..37: mol_type = other DNA

SEQ ID NO: 13715 - DNA, 38 bp, synthetic construct; identical to SEQ ID NO: 11062
  source 1..38: mol_type = other DNA

SEQ ID NO: 13716 - DNA, 38 bp, synthetic construct; identical to SEQ ID NO: 11061
  source 1..38: mol_type = other DNA

SEQ ID NO: 13717 - DNA, 39 bp, synthetic construct; identical to SEQ ID NO: 11063
  source 1..39: mol_type = other DNA

SEQ ID NO: 13718 - DNA, 39 bp, synthetic construct; identical to SEQ ID NO: 11064
  source 1..39: mol_type = other DNA

SEQ ID NO: 13719 - DNA, 40 bp, synthetic construct; identical to SEQ ID NO: 11066
  source 1..40: mol_type = other DNA

SEQ ID NO: 13720 - DNA, 40 bp, synthetic construct; identical to SEQ ID NO: 11065
  source 1..40: mol_type = other DNA

SEQ ID NO: 13721 - DNA, 12 bp, synthetic construct
  source 1..12: mol_type = other DNA
cgttgacctcca

SEQ ID NO: 13722 - DNA, 13 bp, synthetic construct
  source 1..13: mol_type = other DNA
tcgttgacctcca

SEQ ID NO: 13723 - DNA, 14 bp, synthetic construct
  source 1..14: mol_type = other DNA
ctcgttgacctcca

SEQ ID NO: 13724 - DNA, 15 bp, synthetic construct
  source 1..15: mol_type = other DNA
gctcgttgacctcca

SEQ ID NO: 13725 - DNA, 16 bp, synthetic construct
  source 1..16: mol_type = other DNA
tgctcgttgacctcca

SEQ ID NO: 13726 - DNA, 17 bp, synthetic construct
  source 1..17: mol_type = other DNA
ttgctcgttgacctcca

SEQ ID NO: 13727 - DNA, 18 bp, synthetic construct
  source 1..18: mol_type = other DNA
cttgctcgttgacctcca

SEQ ID NO: 13728 - DNA, 19 bp, synthetic construct
  source 1..19: mol_type = other DNA
tcttgctcgttgacctcca

SEQ ID NO: 13729 - DNA, 20 bp, synthetic construct
  source 1..20: mol_type = other DNA
ttcttgctcgttgacctcca

SEQ ID NO: 13730 - DNA, 21 bp, synthetic construct
  source 1..21: mol_type = other DNA
attcttgctcgttgacctcca

SEQ ID NO: 13731 - DNA, 22 bp, synthetic construct
  source 1..22: mol_type = other DNA
aattcttgctcgttgacctcca

SEQ ID NO: 13732 - DNA, 23 bp, synthetic construct
  source 1..23: mol_type = other DNA
aaattcttgctcgttgacctcca

SEQ ID NO: 13733 - DNA, 24 bp, synthetic construct
  source 1..24: mol_type = other DNA
gaaattcttgctcgttgacctcca

SEQ ID NO: 13734 - DNA, 25 bp, synthetic construct
  source 1..25: mol_type = other DNA
agaaattcttgctcgttgacctcca

SEQ ID NO: 13735 - DNA, 26 bp, synthetic construct
  source 1..26: mol_type = other DNA
aagaaattcttgctcgttgacctcca

SEQ ID NO: 13736 - DNA, 27 bp, synthetic construct
  source 1..27: mol_type = other DNA
aaagaaattcttgctcgttgacctcca

SEQ ID NO: 13737 - DNA, 28 bp, synthetic construct
  source 1..28: mol_type = other DNA
taaagaaattcttgctcgttgacctcca

SEQ ID NO: 13738 - DNA, 29 bp, synthetic construct
  source 1..29: mol_type = other DNA
ctaaagaaattcttgctcgttgacctcca

SEQ ID NO: 13739 - DNA, 30 bp, synthetic construct; identical to SEQ ID NO: 11832
  source 1..30: mol_type = other DNA

SEQ ID NO: 13740 - DNA, 31 bp, synthetic construct; identical to SEQ ID NO: 11833
  source 1..31: mol_type = other DNA

SEQ ID NO: 13741 - DNA, 32 bp, synthetic construct; identical to SEQ ID NO: 11834
  source 1..32: mol_type = other DNA

SEQ ID NO: 13742 - DNA, 33 bp, synthetic construct; identical to SEQ ID NO: 11835
  source 1..33: mol_type = other DNA

SEQ ID NO: 13743 - DNA, 34 bp, synthetic construct; identical to SEQ ID NO: 11836
  source 1..34: mol_type = other DNA

SEQ ID NO: 13744 - DNA, 35 bp, synthetic construct; identical to SEQ ID NO: 11837
  source 1..35: mol_type = other DNA

SEQ ID NO: 13745 - DNA, 36 bp, synthetic construct; identical to SEQ ID NO: 11838
  source 1..36: mol_type = other DNA

SEQ ID NO: 13746 - DNA, 37 bp, synthetic construct; identical to SEQ ID NO: 11839
  source 1..37: mol_type = other DNA

SEQ ID NO: 13747 - DNA, 38 bp, synthetic construct; identical to SEQ ID NO: 11840
  source 1..38: mol_type = other DNA

SEQ ID NO: 13748 - DNA, 39 bp, synthetic construct; identical to SEQ ID NO: 11841
  source 1..39: mol_type = other DNA

SEQ ID NO: 13749 - DNA, 40 bp, synthetic construct; identical to SEQ ID NO: 11842
  source 1..40: mol_type = other DNA

SEQ ID NO: 13750 - DNA, 11 bp, synthetic construct
  source 1..11: mol_type = other DNA
cgttgacctcc

SEQ ID NO: 13751 - DNA, 12 bp, synthetic construct
  source 1..12: mol_type = other DNA
tcgttgacctcc

SEQ ID NO: 13752 - DNA, 13 bp, synthetic construct
  source 1..13: mol_type = other DNA
ctcgttgacctcc

SEQ ID NO: 13753 - DNA, 14 bp, synthetic construct
  source 1..14: mol_type = other DNA
gctcgttgacctcc

SEQ ID NO: 13754 - DNA, 15 bp, synthetic construct
  source 1..15: mol_type = other DNA
tgctcgttgacctcc

SEQ ID NO: 13755 - DNA, 16 bp, synthetic construct
  source 1..16: mol_type = other DNA
ttgctcgttgacctcc

SEQ ID NO: 13756 - DNA, 17 bp, synthetic construct
  source 1..17: mol_type = other DNA
cttgctcgttgacctcc

SEQ ID NO: 13757 - DNA, 18 bp, synthetic construct
  source 1..18: mol_type = other DNA
tcttgctcgttgacctcc

SEQ ID NO: 13758 - DNA, 19 bp, synthetic construct
  source 1..19: mol_type = other DNA
ttcttgctcgttgacctcc

SEQ ID NO: 13759 - DNA, 20 bp, synthetic construct
  source 1..20: mol_type = other DNA
attcttgctcgttgacctcc

SEQ ID NO: 13760 - DNA, 21 bp, synthetic construct
  source 1..21: mol_type = other DNA
aattcttgctcgttgacctcc

SEQ ID NO: 13761 - DNA, 22 bp, synthetic construct
  source 1..22: mol_type = other DNA
aaattcttgctcgttgacctcc

SEQ ID NO: 13762 - DNA, 23 bp, synthetic construct
  source 1..23: mol_type = other DNA
gaaattcttgctcgttgacctcc

SEQ ID NO: 13763 - DNA, 24 bp, synthetic construct
  source 1..24: mol_type = other DNA
agaaattcttgctcgttgacctcc

SEQ ID NO: 13764 - DNA, 25 bp, synthetic construct
  source 1..25: mol_type = other DNA
aagaaattcttgctcgttgacctcc

SEQ ID NO: 13765 - DNA, 26 bp, synthetic construct
  source 1..26: mol_type = other DNA
aaagaaattcttgctcgttgacctcc

SEQ ID NO: 13766 - DNA, 27 bp, synthetic construct
  source 1..27: mol_type = other DNA
taaagaaattcttgctcgttgacctcc

SEQ ID NO: 13767 - DNA, 28 bp, synthetic construct
  source 1..28: mol_type = other DNA
ctaaagaaattcttgctcgttgacctcc

SEQ ID NO: 13768 - DNA, 29 bp, synthetic construct
  source 1..29: mol_type = other DNA
gctaaagaaattcttgctcgttgacctcc

SEQ ID NO: 13769 - DNA, 30 bp, synthetic construct; identical to SEQ ID NO: 12468
  source 1..30: mol_type = other DNA

SEQ ID NO: 13770 - DNA, 31 bp, synthetic construct; identical to SEQ ID NO: 12469
  source 1..31: mol_type = other DNA

SEQ ID NO: 13771 - DNA, 32 bp, synthetic construct; identical to SEQ ID NO: 12470
  source 1..32: mol_type = other DNA

SEQ ID NO: 13772 - DNA, 33 bp, synthetic construct; identical to SEQ ID NO: 12471
  source 1..33: mol_type = other DNA

SEQ ID NO: 13773 - DNA, 34 bp, synthetic construct; identical to SEQ ID NO: 12472
  source 1..34: mol_type = other DNA

SEQ ID NO: 13774 - DNA, 35 bp, synthetic construct; identical to SEQ ID NO: 12473
  source 1..35: mol_type = other DNA

SEQ ID NO: 13775 - DNA, 36 bp, synthetic construct; identical to SEQ ID NO: 12474
  source 1..36: mol_type = other DNA

SEQ ID NO: 13776 - DNA, 37 bp, synthetic construct; identical to SEQ ID NO: 12475
  source 1..37: mol_type = other DNA

SEQ ID NO: 13777 - DNA, 38 bp, synthetic construct; identical to SEQ ID NO: 12476
  source 1..38: mol_type = other DNA

SEQ ID NO: 13778 - DNA, 39 bp, synthetic construct; identical to SEQ ID NO: 12477
  source 1..39: mol_type = other DNA

SEQ ID NO: 13779 - DNA, 40 bp, synthetic construct; identical to SEQ ID NO: 12478
  source 1..40: mol_type = other DNA

SEQ ID NO: 13780 - DNA, 10 bp, synthetic construct
  source 1..10: mol_type = other DNA
gaggtcaacg

SEQ ID NO: 13781 - DNA, 11 bp, synthetic construct
  source 1..11: mol_type = other DNA
ggaggtcaacg

SEQ ID NO: 13782 - DNA, 12 bp, synthetic construct
  source 1..12: mol_type = other DNA
tggaggtcaacg

SEQ ID NO: 13783 - DNA, 13 bp, synthetic construct
  source 1..13: mol_type = other DNA
gtggaggtcaacg

SEQ ID NO: 13784 - DNA, 14 bp, synthetic construct
  source 1..14: mol_type = other DNA
agtggaggtcaacg

SEQ ID NO: 13785 - DNA, 15 bp, synthetic construct
  source 1..15: mol_type = other DNA
gagtggaggtcaacg

SEQ ID NO: 13786 - DNA, 16 bp, synthetic construct
  source 1..16: mol_type = other DNA
tgagtggaggtcaacg

SEQ ID NO: 13787 - DNA, 17 bp, synthetic construct
  source 1..17: mol_type = other DNA
ctgagtggaggtcaacg

SEQ ID NO: 13788 - DNA, 18 bp, synthetic construct
  source 1..18: mol_type = other DNA
actgagtggaggtcaacg

SEQ ID NO: 13789 - DNA, 19 bp, synthetic construct
  source 1..19: mol_type = other DNA
cactgagtggaggtcaacg

SEQ ID NO: 13790 - DNA, 20 bp, synthetic construct
  source 1..20: mol_type = other DNA
acactgagtggaggtcaacg

SEQ ID NO: 13791 - DNA, 21 bp, synthetic construct
  source 1..21: mol_type = other DNA
cacactgagtggaggtcaacg

SEQ ID NO: 13792 - DNA, 22 bp, synthetic construct
  source 1..22: mol_type = other DNA
tcacactgagtggaggtcaacg

SEQ ID NO: 13793 - DNA, 23 bp, synthetic construct
  source 1..23: mol_type = other DNA
atcacactgagtggaggtcaacg

SEQ ID NO: 13794 - DNA, 24 bp, synthetic construct
  source 1..24: mol_type = other DNA
aatcacactgagtggaggtcaacg

SEQ ID NO: 13795 - DNA, 25 bp, synthetic construct
  source 1..25: mol_type = other DNA
gaatcacactgagtggaggtcaacg

SEQ ID NO: 13796 - DNA, 26 bp, synthetic construct
  source 1..26: mol_type = other DNA
ggaatcacactgagtggaggtcaacg

SEQ ID NO: 13797 - DNA, 27 bp, synthetic construct
  source 1..27: mol_type = other DNA
tggaatcacactgagtggaggtcaacg

SEQ ID NO: 13798 - DNA, 28 bp, synthetic construct
  source 1..28: mol_type = other DNA
gtggaatcacactgagtggaggtcaacg

SEQ ID NO: 13799 - DNA, 29 bp, synthetic construct
  source 1..29: mol_type = other DNA
ggtggaatcacactgagtggaggtcaacg

SEQ ID NO: 13800 - DNA, 30 bp, synthetic construct; identical to SEQ ID NO: 10390
  source 1..30: mol_type = other DNA

SEQ ID NO: 13801 - DNA, 31 bp, synthetic construct; identical to SEQ ID NO: 10391
  source 1..31: mol_type = other DNA

SEQ ID NO: 13802 - DNA, 32 bp, synthetic construct; identical to SEQ ID NO: 10392
  source 1..32: mol_type = other DNA

SEQ ID NO: 13803 - DNA, 33 bp, synthetic construct; identical to SEQ ID NO: 10393
  source 1..33: mol_type = other DNA

SEQ ID NO: 13804 - DNA, 34 bp, synthetic construct; identical to SEQ ID NO: 10394
  source 1..34: mol_type = other DNA

SEQ ID NO: 13805 - DNA, 35 bp, synthetic construct; identical to SEQ ID NO: 10395
  source 1..35: mol_type = other DNA

SEQ ID NO: 13806 - DNA, 36 bp, synthetic construct; identical to SEQ ID NO: 9765
  source 1..36: mol_type = other DNA

SEQ ID NO: 13807 - DNA, 37 bp, synthetic construct; identical to SEQ ID NO: 9766
  source 1..37: mol_type = other DNA

SEQ ID NO: 13808 - DNA, 38 bp, synthetic construct; identical to SEQ ID NO: 9767
  source 1..38: mol_type = other DNA

SEQ ID NO: 13809 - DNA, 39 bp, synthetic construct; identical to SEQ ID NO: 9768
  source 1..39: mol_type = other DNA

SEQ ID NO: 13810 - DNA, 40 bp, synthetic construct; identical to SEQ ID NO: 9769
  source 1..40: mol_type = other DNA

SEQ ID NO: 13811 - DNA, 19 bp, synthetic construct
  source 1..19: mol_type = other DNA
acgagcaagaatttcttta

SEQ ID NO: 13812 - DNA, 20 bp, synthetic construct
  source 1..20: mol_type = other DNA
aacgagcaagaatttcttta

SEQ ID NO: 13813 - DNA, 21 bp, synthetic construct
  source 1..21: mol_type = other DNA
caacgagcaagaatttcttta

SEQ ID NO: 13814 - DNA, 22 bp, synthetic construct
  source 1..22: mol_type = other DNA
tcaacgagcaagaatttcttta

SEQ ID NO: 13815 - DNA, 23 bp, synthetic construct
  source 1..23: mol_type = other DNA
gtcaacgagcaagaatttcttta

SEQ ID NO: 13816 - DNA, 24 bp, synthetic construct
  source 1..24: mol_type = other DNA
ggtcaacgagcaagaatttcttta

SEQ ID NO: 13817 - DNA, 25 bp, synthetic construct
  source 1..25: mol_type = other DNA
aggtcaacgagcaagaatttcttta

SEQ ID NO: 13818 - DNA, 26 bp, synthetic construct
  source 1..26: mol_type = other DNA
gaggtcaacgagcaagaatttcttta

SEQ ID NO: 13819 - DNA, 27 bp, synthetic construct
  source 1..27: mol_type = other DNA
ggaggtcaacgagcaagaatttcttta

SEQ ID NO: 13820 - DNA, 28 bp, synthetic construct
  source 1..28: mol_type = other DNA
tggaggtcaacgagcaagaatttcttta

SEQ ID NO: 13821 - DNA, 29 bp, synthetic construct
  source 1..29: mol_type = other DNA
gtggaggtcaacgagcaagaatttcttta

SEQ ID NO: 13822 - DNA, 30 bp, synthetic construct; identical to SEQ ID NO: 11094
  source 1..30: mol_type = other DNA

SEQ ID NO: 13823 - DNA, 31 bp, synthetic construct; identical to SEQ ID NO: 10401
  source 1..31: mol_type = other DNA

SEQ ID NO: 13824 - DNA, 32 bp, synthetic construct; identical to SEQ ID NO: 10402
  source 1..32: mol_type = other DNA

SEQ ID NO: 13825 - DNA, 33 bp, synthetic construct; identical to SEQ ID NO: 10403
  source 1..33: mol_type = other DNA

SEQ ID NO: 13826 - DNA, 34 bp, synthetic construct; identical to SEQ ID NO: 10404
  source 1..34: mol_type = other DNA

SEQ ID NO: 13827 - DNA, 35 bp, synthetic construct; identical to SEQ ID NO: 10405
  source 1..35: mol_type = other DNA

SEQ ID NO: 13828 - DNA, 36 bp, synthetic construct; identical to SEQ ID NO: 10406
  source 1..36: mol_type = other DNA

SEQ ID NO: 13829 - DNA, 37 bp, synthetic construct; identical to SEQ ID NO: 10407
  source 1..37: mol_type = other DNA

SEQ ID NO: 13830 - DNA, 38 bp, synthetic construct; identical to SEQ ID NO: 10408
  source 1..38: mol_type = other DNA

SEQ ID NO: 13831 - DNA, 39 bp, synthetic construct; identical to SEQ ID NO: 10409
  source 1..39: mol_type = other DNA

SEQ ID NO: 13832 - DNA, 40 bp, synthetic construct; identical to SEQ ID NO: 10410
  source 1..40: mol_type = other DNA

SEQ ID NO: 13833 - DNA, 29 bp, synthetic construct
  source 1..29: mol_type = other DNA
cgttgacctccactcagtgtgattccacc

SEQ ID NO: 13834 - DNA, 30 bp, synthetic construct; identical to SEQ ID NO: 10424
  source 1..30: mol_type = other DNA

SEQ ID NO: 13835 - DNA, 31 bp, synthetic construct; identical to SEQ ID NO: 10425
  source 1..31: mol_type = other DNA

SEQ ID NO: 13836 - DNA, 32 bp, synthetic construct; identical to SEQ ID NO: 10426
  source 1..32: mol_type = other DNA

SEQ ID NO: 13837 - DNA, 33 bp, synthetic construct; identical to SEQ ID NO: 10427
  source 1..33: mol_type = other DNA

SEQ ID NO: 13838 - DNA, 34 bp, synthetic construct; identical to SEQ ID NO: 10428
  source 1..34: mol_type = other DNA

SEQ ID NO: 13839 - DNA, 35 bp, synthetic construct; identical to SEQ ID NO: 10429
  source 1..35: mol_type = other DNA

SEQ ID NO: 13840 - DNA, 36 bp, synthetic construct; identical to SEQ ID NO: 10430
  source 1..36: mol_type = other DNA

SEQ ID NO: 13841 - DNA, 37 bp, synthetic construct; identical to SEQ ID NO: 10431
  source 1..37: mol_type = other DNA

SEQ ID NO: 13842 - DNA, 38 bp, synthetic construct; identical to SEQ ID NO: 10432
  source 1..38: mol_type = other DNA

SEQ ID NO: 13843 - DNA, 39 bp, synthetic construct; identical to SEQ ID NO: 10433
  source 1..39: mol_type = other DNA

SEQ ID NO: 13844 - DNA, 40 bp, synthetic construct; identical to SEQ ID NO: 10434
  source 1..40: mol_type = other DNA

SEQ ID NO: 13845 - DNA, 38 bp, synthetic construct
  source 1..38: mol_type = other DNA
acgagcaagaatttctttagcaaggtgaataaccaatt

SEQ ID NO: 13846 - DNA, 38 bp, synthetic construct
  source 1..38: mol_type = other DNA
acgagcaagaatttctttagcaaggtgaataactaatt

SEQ ID NO: 13847 - DNA, 39 bp, synthetic construct
  source 1..39: mol_type = other DNA
aacgagcaagaatttctttagcaaggtgaataactaatt

SEQ ID NO: 13848 - DNA, 39 bp, synthetic construct
  source 1..39: mol_type = other DNA
aacgagcaagaatttctttagcaaggtgaataaccaatt

SEQ ID NO: 13849 - DNA, 40 bp, synthetic construct
  source 1..40: mol_type = other DNA
caacgagcaagaatttctttagcaaggtgaataactaatt

SEQ ID NO: 13850 - DNA, 40 bp, synthetic construct
  source 1..40: mol_type = other DNA
caacgagcaagaatttctttagcaaggtgaataaccaatt

SEQ ID NO: 13851 - DNA, 37 bp, synthetic construct
  source 1..37: mol_type = other DNA
acgagcaagaatttctttagcaaggtgaataactaat

SEQ ID NO: 13852 - DNA, 38 bp, synthetic construct
  source 1..38: mol_type = other DNA
aacgagcaagaatttctttagcaaggtgaataactaat

SEQ ID NO: 13853 - DNA, 39 bp, synthetic construct
  source 1..39: mol_type = other DNA
caacgagcaagaatttctttagcaaggtgaataactaat

SEQ ID NO: 13854 - DNA, 40 bp, synthetic construct
  source 1..40: mol_type = other DNA
tcaacgagcaagaatttctttagcaaggtgaataactaat

SEQ ID NO: 13855 - DNA, 20 bp, synthetic construct
  source 1..20: mol_type = other DNA
acgagcaagaatttctttag

SEQ ID NO: 13856 - DNA, 20 bp, synthetic construct
  source 1..20: mol_type = other DNA
acgagcaagaattagcttag

SEQ ID NO: 13857 - DNA, 21 bp, synthetic construct
  source 1..21: mol_type = other DNA
aacgagcaagaatttctttag

SEQ ID NO: 13858 - DNA, 21 bp, synthetic construct
  source 1..21: mol_type = other DNA
aacgagcaagaattagcttag

SEQ ID NO: 13859 - DNA, 22 bp, synthetic construct
  source 1..22: mol_type = other DNA
caacgagcaagaattagcttag

SEQ ID NO: 13860 - DNA, 22 bp, synthetic construct
  source 1..22: mol_type = other DNA
caacgagcaagaatttctttag

SEQ ID NO: 13861 - DNA, 23 bp, synthetic construct
  source 1..23: mol_type = other DNA
tcaacgagcaagaattagcttag

SEQ ID NO: 13862 - DNA, 23 bp, synthetic construct
  source 1..23: mol_type = other DNA
tcaacgagcaagaatttctttag

SEQ ID NO: 13863 - DNA, 24 bp, synthetic construct
  source 1..24: mol_type = other DNA
gtcaacgagcaagaatttctttag

SEQ ID NO: 13864 - DNA, 24 bp, synthetic construct
  source 1..24: mol_type = other DNA
gtcaacgagcaagaattagcttag

SEQ ID NO: 13865 - DNA, 25 bp, synthetic construct
  source 1..25: mol_type = other DNA
ggtcaacgagcaagaatttctttag

SEQ ID NO: 13866 - DNA, 25 bp, synthetic construct
  source 1..25: mol_type = other DNA
ggtcaacgagcaagaattagcttag

SEQ ID NO: 13867 - DNA, 26 bp, synthetic construct
  source 1..26: mol_type = other DNA
aggtcaacgagcaagaattagcttag

SEQ ID NO: 13868 - DNA, 26 bp, synthetic construct
  source 1..26: mol_type = other DNA
aggtcaacgagcaagaatttctttag

SEQ ID NO: 13869 - DNA, 27 bp, synthetic construct
  source 1..27: mol_type = other DNA
gaggtcaacgagcaagaattagcttag

SEQ ID NO: 13870 - DNA, 27 bp, synthetic construct
  source 1..27: mol_type = other DNA
gaggtcaacgagcaagaatttctttag

SEQ ID NO: 13871 - DNA, 28 bp, synthetic construct
  source 1..28: mol_type = other DNA
ggaggtcaacgagcaagaatttctttag

SEQ ID NO: 13872 - DNA, 28 bp, synthetic construct
  source 1..28: mol_type = other DNA
ggaggtcaacgagcaagaattagcttag

SEQ ID NO: 13873 - DNA, 29 bp, synthetic construct
  source 1..29: mol_type = other DNA
tggaggtcaacgagcaagaattagcttag

SEQ ID NO: 13874 - DNA, 29 bp, synthetic construct
  source 1..29: mol_type = other DNA
tggaggtcaacgagcaagaatttctttag

SEQ ID NO: 13875 - DNA, 30 bp, synthetic construct; identical to SEQ ID NO: 11905
  source 1..30: mol_type = other DNA

SEQ ID NO: 13876 - DNA, 30 bp, synthetic construct; identical to SEQ ID NO: 11906
  source 1..30: mol_type = other DNA

SEQ ID NO: 13877 - DNA, 31 bp, synthetic construct; identical to SEQ ID NO: 11129
  source 1..31: mol_type = other DNA

SEQ ID NO: 13878 - DNA, 31 bp, synthetic construct; identical to SEQ ID NO: 11128
  source 1..31: mol_type = other DNA

SEQ ID NO: 13879 - DNA, 32 bp, synthetic construct; identical to SEQ ID NO: 10466
  source 1..32: mol_type = other DNA

SEQ ID NO: 13880 - DNA, 32 bp, synthetic construct; identical to SEQ ID NO: 10467
  source 1..32: mol_type = other DNA

SEQ ID NO: 13881 - DNA, 33 bp, synthetic construct; identical to SEQ ID NO: 10469
  source 1..33: mol_type = other DNA

SEQ ID NO: 13882 - DNA, 33 bp, synthetic construct; identical to SEQ ID NO: 10468
  source 1..33: mol_type = other DNA

SEQ ID NO: 13883 - DNA, 34 bp, synthetic construct; identical to SEQ ID NO: 10470
  source 1..34: mol_type = other DNA

SEQ ID NO: 13884 - DNA, 34 bp, synthetic construct; identical to SEQ ID NO: 10471
  source 1..34: mol_type = other DNA

SEQ ID NO: 13885 - DNA, 35 bp, synthetic construct; identical to SEQ ID NO: 10473
  source 1..35: mol_type = other DNA

SEQ ID NO: 13886 - DNA, 35 bp, synthetic construct; identical to SEQ ID NO: 10472
  source 1..35: mol_type = other DNA

SEQ ID NO: 13887 - DNA, 36 bp, synthetic construct; identical to SEQ ID NO: 10475
  source 1..36: mol_type = other DNA

SEQ ID NO: 13888 - DNA, 36 bp, synthetic construct; identical to SEQ ID NO: 10474
  source 1..36: mol_type = other DNA

SEQ ID NO: 13889 - DNA, 37 bp, synthetic construct; identical to SEQ ID NO: 10477
  source 1..37: mol_type = other DNA

SEQ ID NO: 13890 - DNA, 37 bp, synthetic construct; identical to SEQ ID NO: 10476
  source 1..37: mol_type = other DNA

SEQ ID NO: 13891 - DNA, 38 bp, synthetic construct; identical to SEQ ID NO: 10478
  source 1..38: mol_type = other DNA

SEQ ID NO: 13892 - DNA, 38 bp, synthetic construct; identical to SEQ ID NO: 10479
  source 1..38: mol_type = other DNA

SEQ ID NO: 13893 - DNA, 39 bp, synthetic construct; identical to SEQ ID NO: 10481
  source 1..39: mol_type = other DNA

SEQ ID NO: 13894 - DNA, 39 bp, synthetic construct; identical to SEQ ID NO: 10480
  source 1..39: mol_type = other DNA

SEQ ID NO: 13895 - DNA, 40 bp, synthetic construct; identical to SEQ ID NO: 10483
  source 1..40: mol_type = other DNA

SEQ ID NO: 13896 - DNA, 40 bp, synthetic construct; identical to SEQ ID NO: 10482
  source 1..40: mol_type = other DNA

SEQ ID NO: 13897 - DNA, 20 bp, synthetic construct
  source 1..20: mol_type = other DNA
cgttgacctccactcagtgt

SEQ ID NO: 13898 - DNA, 21 bp, synthetic construct
  source 1..21: mol_type = other DNA
tcgttgacctccactcagtgt

SEQ ID NO: 13899 - DNA, 22 bp, synthetic construct
  source 1..22: mol_type = other DNA
ctcgttgacctccactcagtgt

SEQ ID NO: 13900 - DNA, 23 bp, synthetic construct
  source 1..23: mol_type = other DNA
gctcgttgacctccactcagtgt

SEQ ID NO: 13901 - DNA, 24 bp, synthetic construct
  source 1..24: mol_type = other DNA
tgctcgttgacctccactcagtgt

SEQ ID NO: 13902 - DNA, 25 bp, synthetic construct
  source 1..25: mol_type = other DNA
ttgctcgttgacctccactcagtgt

SEQ ID NO: 13903 - DNA, 26 bp, synthetic construct
  source 1..26: mol_type = other DNA
cttgctcgttgacctccactcagtgt

SEQ ID NO: 13904 - DNA, 27 bp, synthetic construct
  source 1..27: mol_type = other DNA
tcttgctcgttgacctccactcagtgt

SEQ ID NO: 13905 - DNA, 28 bp, synthetic construct
  source 1..28: mol_type = other DNA
ttcttgctcgttgacctccactcagtgt

SEQ ID NO: 13906 - DNA, 29 bp, synthetic construct
  source 1..29: mol_type = other DNA
attcttgctcgttgacctccactcagtgt

SEQ ID NO: 13907 - DNA, 30 bp, synthetic construct; identical to SEQ ID NO: 11285
  source 1..30: mol_type = other DNA

SEQ ID NO: 13908 - DNA, 31 bp, synthetic construct; identical to SEQ ID NO: 11286
  source 1..31: mol_type = other DNA

SEQ ID NO: 13909 - DNA, 32 bp, synthetic construct; identical to SEQ ID NO: 11287
  source 1..32: mol_type = other DNA

SEQ ID NO: 13910 - DNA, 33 bp, synthetic construct; identical to SEQ ID NO: 11288
  source 1..33: mol_type = other DNA

SEQ ID NO: 13911 - DNA, 34 bp, synthetic construct; identical to SEQ ID NO: 11289
  source 1..34: mol_type = other DNA

SEQ ID NO: 13912 - DNA, 35 bp, synthetic construct; identical to SEQ ID NO: 11290
  source 1..35: mol_type = other DNA

SEQ ID NO: 13913 - DNA, 36 bp, synthetic construct; identical to SEQ ID NO: 11291
  source 1..36: mol_type = other DNA

SEQ ID NO: 13914 - DNA, 37 bp, synthetic construct; identical to SEQ ID NO: 11292
  source 1..37: mol_type = other DNA

SEQ ID NO: 13915 - DNA, 38 bp, synthetic construct; identical to SEQ ID NO: 11293
  source 1..38: mol_type = other DNA

SEQ ID NO: 13916 - DNA, 39 bp, synthetic construct; identical to SEQ ID NO: 11294
  source 1..39: mol_type = other DNA

SEQ ID NO: 13917 - DNA, 40 bp, synthetic construct; identical to SEQ ID NO: 11295
  source 1..40: mol_type = other DNA

SEQ ID NO: 13918 - DNA, 10 bp, synthetic construct
  source 1..10: mol_type = other DNA
ttattcacct

SEQ ID NO: 13919 - DNA, 11 bp, synthetic construct
  source 1..11: mol_type = other DNA
gttattcacct

SEQ ID NO: 13920 - DNA, 12 bp, synthetic construct
  source 1..12: mol_type = other DNA
agttattcacct

SEQ ID NO: 13921 - DNA, 13 bp, synthetic construct
  source 1..13: mol_type = other DNA
tagttattcacct

SEQ ID NO: 13922 - DNA, 14 bp, synthetic construct
  source 1..14: mol_type = other DNA
ttagttattcacct

SEQ ID NO: 13923 - DNA, 15 bp, synthetic construct
  source 1..15: mol_type = other DNA
attagttattcacct

SEQ ID NO: 13924 - DNA, 16 bp, synthetic construct
  source 1..16: mol_type = other DNA
aattagttattcacct

SEQ ID NO: 13925 - DNA, 17 bp, synthetic construct
  source 1..17: mol_type = other DNA
taattagttattcacct

SEQ ID NO: 13926 - DNA, 18 bp, synthetic construct
  source 1..18: mol_type = other DNA
ataattagttattcacct

SEQ ID NO: 13927 - DNA, 19 bp, synthetic construct
  source 1..19: mol_type = other DNA
aataattagttattcacct

SEQ ID NO: 13928 - DNA, 20 bp, synthetic construct
  source 1..20: mol_type = other DNA
caataattagttattcacct

SEQ ID NO: 13929 - DNA, 21 bp, synthetic construct
  source 1..21: mol_type = other DNA
ccaataattagttattcacct

SEQ ID NO: 13930 - DNA, 22 bp, synthetic construct
  source 1..22: mol_type = other DNA
accaataattagttattcacct

SEQ ID NO: 13931 - DNA, 23 bp, synthetic construct
  source 1..23: mol_type = other DNA
gaccaataattagttattcacct

SEQ ID NO: 13932 - DNA, 24 bp, synthetic construct
  source 1..24: mol_type = other DNA
agaccaataattagttattcacct

SEQ ID NO: 13933 - DNA, 25 bp, synthetic construct
  source 1..25: mol_type = other DNA
tagaccaataattagttattcacct

SEQ ID NO: 13934 - DNA, 26 bp, synthetic construct
  source 1..26: mol_type = other DNA
ctagaccaataattagttattcacct

SEQ ID NO: 13935 - DNA, 27 bp, synthetic construct
  source 1..27: mol_type = other DNA
gctagaccaataattagttattcacct

SEQ ID NO: 13936 - DNA, 28 bp, synthetic construct
  source 1..28: mol_type = other DNA
tgctagaccaataattagttattcacct

SEQ ID NO: 13937 - DNA, 29 bp, synthetic construct
  source 1..29: mol_type = other DNA
ttgctagaccaataattagttattcacct

SEQ ID NO: 13938 - DNA, 30 bp, synthetic construct
  source 1..30: mol_type = other DNA
cttgctagaccaataattagttattcacct

SEQ ID NO: 13939 - DNA, 31 bp, synthetic construct
  source 1..31: mol_type = other DNA
gcttgctagaccaataattagttattcacct

SEQ ID NO: 13940 - DNA, 32 bp, synthetic construct
  source 1..32: mol_type = other DNA
tgcttgctagaccaataattagttattcacct

SEQ ID NO: 13941 - DNA, 33 bp, synthetic construct
  source 1..33: mol_type = other DNA
atgcttgctagaccaataattagttattcacct

SEQ ID NO: 13942 - DNA, 34 bp, synthetic construct
  source 1..34: mol_type = other DNA
aatgcttgctagaccaataattagttattcacct

SEQ ID NO: 13943 - DNA, 35 bp, synthetic construct
  source 1..35: mol_type = other DNA
aaatgcttgctagaccaataattagttattcacct

SEQ ID NO: 13944 - DNA, 36 bp, synthetic construct
  source 1..36: mol_type = other DNA
caaatgcttgctagaccaataattagttattcacct

SEQ ID NO: 13945 - DNA, 37 bp, synthetic construct
  source 1..37: mol_type = other DNA
gcaaatgcttgctagaccaataattagttattcacct

SEQ ID NO: 13946 - DNA, 38 bp, synthetic construct
  source 1..38: mol_type = other DNA
agcaaatgcttgctagaccaataattagttattcacct

SEQ ID NO: 13947 - DNA, 39 bp, synthetic construct
  source 1..39: mol_type = other DNA
cagcaaatgcttgctagaccaataattagttattcacct

SEQ ID NO: 13948 - DNA, 40 bp, synthetic construct
  source 1..40: mol_type = other DNA
acagcaaatgcttgctagaccaataattagttattcacct

SEQ ID NO: 13949 - DNA, 37 bp, synthetic construct; identical to SEQ ID NO: 10089
  source 1..37: mol_type = other DNA

SEQ ID NO: 13950 - DNA, 38 bp, synthetic construct; identical to SEQ ID NO: 10090
  source 1..38: mol_type = other DNA

SEQ ID NO: 13951 - DNA, 39 bp, synthetic construct; identical to SEQ ID NO: 10091
  source 1..39: mol_type = other DNA

SEQ ID NO: 13952 - DNA, 40 bp, synthetic construct; identical to SEQ ID NO: 10092
  source 1..40: mol_type = other DNA

SEQ ID NO: 13953 - DNA, 26 bp, synthetic construct
  source 1..26: mol_type = other DNA
ccttgctaaagaaattcttgctcgtt

SEQ ID NO: 13954 - DNA, 26 bp, synthetic construct
  source 1..26: mol_type = other DNA
ccttgctaaagaaattcttgcccgtt

SEQ ID NO: 13955 - DNA, 27 bp, synthetic construct
  source 1..27: mol_type = other DNA
accttgctaaagaaattcttgctcgtt

SEQ ID NO: 13956 - DNA, 27 bp, synthetic construct
  source 1..27: mol_type = other DNA
accttgctaaagaaattcttgcccgtt

SEQ ID NO: 13957 - DNA, 28 bp, synthetic construct
  source 1..28: mol_type = other DNA
caccttgctaaagaaattcttgcccgtt

SEQ ID NO: 13958 - DNA, 28 bp, synthetic construct
  source 1..28: mol_type = other DNA
caccttgctaaagaaattcttgctcgtt

SEQ ID NO: 13959 - DNA, 29 bp, synthetic construct
  source 1..29: mol_type = other DNA
tcaccttgctaaagaaattcttgcccgtt

SEQ ID NO: 13960 - DNA, 29 bp, synthetic construct
  source 1..29: mol_type = other DNA
tcaccttgctaaagaaattcttgctcgtt

SEQ ID NO: 13961 - DNA, 30 bp, synthetic construct; identical to SEQ ID NO: 13349
  source 1..30: mol_type = other DNA

SEQ ID NO: 13962 - DNA, 30 bp, synthetic construct; identical to SEQ ID NO: 13350
  source 1..30: mol_type = other DNA

SEQ ID NO: 13963 - DNA, 31 bp, synthetic construct; identical to SEQ ID NO: 13352
  source 1..31: mol_type = other DNA

SEQ ID NO: 13964 - DNA, 31 bp, synthetic construct; identical to SEQ ID NO: 13351
  source 1..31: mol_type = other DNA

SEQ ID NO: 13965 - DNA, 32 bp, synthetic construct; identical to SEQ ID NO: 13354
  source 1..32: mol_type = other DNA

SEQ ID NO: 13966 - DNA, 32 bp, synthetic construct; identical to SEQ ID NO: 13353
  source 1..32: mol_type = other DNA

SEQ ID NO: 13967 - DNA, 33 bp, synthetic construct; identical to SEQ ID NO: 13356
  source 1..33: mol_type = other DNA

SEQ ID NO: 13968 - DNA, 33 bp, synthetic construct; identical to SEQ ID NO: 13355
  source 1..33: mol_type = other DNA

SEQ ID NO: 13969 - DNA, 34 bp, synthetic construct; identical to SEQ ID NO: 13357
  source 1..34: mol_type = other DNA

SEQ ID NO: 13970 - DNA, 34 bp, synthetic construct; identical to SEQ ID NO: 13358
  source 1..34: mol_type = other DNA

SEQ ID NO: 13971 - DNA, 35 bp, synthetic construct; identical to SEQ ID NO: 13360
  source 1..35: mol_type = other DNA

SEQ ID NO: 13972 - DNA, 35 bp, synthetic construct; identical to SEQ ID NO: 13359
  source 1..35: mol_type = other DNA

SEQ ID NO: 13973 - DNA, 36 bp, synthetic construct; identical to SEQ ID NO: 13362
  source 1..36: mol_type = other DNA

SEQ ID NO: 13974 - DNA, 36 bp, synthetic construct; identical to SEQ ID NO: 13361
  source 1..36: mol_type = other DNA

SEQ ID NO: 13975 - DNA, 37 bp, synthetic construct; identical to SEQ ID NO: 13363
  source 1..37: mol_type = other DNA

SEQ ID NO: 13976 - DNA, 37 bp, synthetic construct; identical to SEQ ID NO: 13364
  source 1..37: mol_type = other DNA

SEQ ID NO: 13977 - DNA, 38 bp, synthetic construct; identical to SEQ ID NO: 13365
  source 1..38: mol_type = other DNA

SEQ ID NO: 13978 - DNA, 38 bp, synthetic construct; identical to SEQ ID NO: 13366
  source 1..38: mol_type = other DNA

SEQ ID NO: 13979 - DNA, 39 bp, synthetic construct; identical to SEQ ID NO: 13368
  source 1..39: mol_type = other DNA

SEQ ID NO: 13980 - DNA, 39 bp, synthetic construct; identical to SEQ ID NO: 13367
  source 1..39: mol_type = other DNA

SEQ ID NO: 13981 - DNA, 40 bp, synthetic construct; identical to SEQ ID NO: 13370
  source 1..40: mol_type = other DNA

SEQ ID NO: 13982 - DNA, 40 bp, synthetic construct; identical to SEQ ID NO: 13369
  source 1..40: mol_type = other DNA

SEQ ID NO: 13983 - DNA, 25 bp, synthetic construct
  source 1..25: mol_type = other DNA
ccttgctaaagaaattcttgctcgt

SEQ ID NO: 13984 - DNA, 26 bp, synthetic construct
  source 1..26: mol_type = other DNA
accttgctaaagaaattcttgctcgt

SEQ ID NO: 13985 - DNA, 27 bp, synthetic construct
  source 1..27: mol_type = other DNA
caccttgctaaagaaattcttgctcgt

SEQ ID NO: 13986 - DNA, 28 bp, synthetic construct
  source 1..28: mol_type = other DNA
tcaccttgctaaagaaattcttgctcgt

SEQ ID NO: 13987 - DNA, 29 bp, synthetic construct
  source 1..29: mol_type = other DNA
ttcaccttgctaaagaaattcttgctcgt

SEQ ID NO: 13988 - DNA, 30 bp, synthetic construct; identical to SEQ ID NO: 13391
  source 1..30: mol_type = other DNA

SEQ ID NO: 13989 - DNA, 31 bp, synthetic construct; identical to SEQ ID NO: 13392
  source 1..31: mol_type = other DNA

SEQ ID NO: 13990 - DNA, 32 bp, synthetic construct; identical to SEQ ID NO: 13393
  source 1..32: mol_type = other DNA

SEQ ID NO: 13991 - DNA, 33 bp, synthetic construct; identical to SEQ ID NO: 13394
  source 1..33: mol_type = other DNA

SEQ ID NO: 13992 - DNA, 34 bp, synthetic construct; identical to SEQ ID NO: 13395
  source 1..34: mol_type = other DNA

SEQ ID NO: 13993 - DNA, 35 bp, synthetic construct; identical to SEQ ID NO: 13396
  source 1..35: mol_type = other DNA

SEQ ID NO: 13994 - DNA, 36 bp, synthetic construct; identical to SEQ ID NO: 13397
  source 1..36: mol_type = other DNA

SEQ ID NO: 13995 - DNA, 37 bp, synthetic construct; identical to SEQ ID NO: 13398
  source 1..37: mol_type = other DNA

SEQ ID NO: 13996 - DNA, 38 bp, synthetic construct; identical to SEQ ID NO: 13399
  source 1..38: mol_type = other DNA

SEQ ID NO: 13997 - DNA, 39 bp, synthetic construct; identical to SEQ ID NO: 13400
  source 1..39: mol_type = other DNA

SEQ ID NO: 13998 - DNA, 40 bp, synthetic construct; identical to SEQ ID NO: 13401
  source 1..40: mol_type = other DNA

SEQ ID NO: 13999 - DNA, 38 bp, synthetic construct; identical to SEQ ID NO: 10176
  source 1..38: mol_type = other DNA

SEQ ID NO: 14000 - DNA, 39 bp, synthetic construct; identical to SEQ ID NO: 10177
  source 1..39: mol_type = other DNA

SEQ ID NO: 14001 - DNA, 40 bp, synthetic construct; identical to SEQ ID NO: 10178
  source 1..40: mol_type = other DNA

SEQ ID NO: 14002 - DNA, 10 bp, synthetic construct
  source 1..10: mol_type = other DNA
attcaccttg

SEQ ID NO: 14003 - DNA, 11 bp, synthetic construct
  source 1..11: mol_type = other DNA
tattcaccttg

SEQ ID NO: 14004 - DNA, 12 bp, synthetic construct
  source 1..12: mol_type = other DNA
ttattcaccttg

SEQ ID NO: 14005 - DNA, 13 bp, synthetic construct
  source 1..13: mol_type = other DNA
gttattcaccttg

SEQ ID NO: 14006 - DNA, 14 bp, synthetic construct
  source 1..14: mol_type = other DNA
agttattcaccttg

SEQ ID NO: 14007 - DNA, 15 bp, synthetic construct
  source 1..15: mol_type = other DNA
tagttattcaccttg

SEQ ID NO: 14008 - DNA, 16 bp, synthetic construct
  source 1..16: mol_type = other DNA
ttagttattcaccttg

SEQ ID NO: 14009 - DNA, 17 bp, synthetic construct
  source 1..17: mol_type = other DNA
attagttattcaccttg

SEQ ID NO: 14010 - DNA, 18 bp, synthetic construct
  source 1..18: mol_type = other DNA
aattagttattcaccttg

SEQ ID NO: 14011 - DNA, 19 bp, synthetic construct
  source 1..19: mol_type = other DNA
taattagttattcaccttg

SEQ ID NO: 14012 - DNA, 20 bp, synthetic construct
  source 1..20: mol_type = other DNA
ataattagttattcaccttg

SEQ ID NO: 14013 - DNA, 21 bp, synthetic construct
  source 1..21: mol_type = other DNA
aataattagttattcaccttg

SEQ ID NO: 14014 - DNA, 22 bp, synthetic construct
  source 1..22: mol_type = other DNA
caataattagttattcaccttg

SEQ ID NO: 14015 - DNA, 23 bp, synthetic construct
  source 1..23: mol_type = other DNA
ccaataattagttattcaccttg

SEQ ID NO: 14016 - DNA, 24 bp, synthetic construct
  source 1..24: mol_type = other DNA
accaataattagttattcaccttg

SEQ ID NO: 14017 - DNA, 25 bp, synthetic construct
  source 1..25: mol_type = other DNA
gaccaataattagttattcaccttg

SEQ ID NO: 14018 - DNA, 26 bp, synthetic construct
  source 1..26: mol_type = other DNA
agaccaataattagttattcaccttg

SEQ ID NO: 14019 - DNA, 27 bp, synthetic construct
  source 1..27: mol_type = other DNA
tagaccaataattagttattcaccttg

SEQ ID NO: 14020 - DNA, 28 bp, synthetic construct
  source 1..28: mol_type = other DNA
ctagaccaataattagttattcaccttg

SEQ ID NO: 14021 - DNA, 29 bp, synthetic construct
  source 1..29: mol_type = other DNA
gctagaccaataattagttattcaccttg

SEQ ID NO: 14022 - DNA, 30 bp, synthetic construct
  source 1..30: mol_type = other DNA
tgctagaccaataattagttattcaccttg

SEQ ID NO: 14023 - DNA, 31 bp, synthetic construct
  source 1..31: mol_type = other DNA
ttgctagaccaataattagttattcaccttg

SEQ ID NO: 14024 - DNA, 32 bp, synthetic construct
  source 1..32: mol_type = other DNA
cttgctagaccaataattagttattcaccttg

SEQ ID NO: 14025 - DNA, 33 bp, synthetic construct
  source 1..33: mol_type = other DNA
gcttgctagaccaataattagttattcaccttg

SEQ ID NO: 14026 - DNA, 34 bp, synthetic construct
  source 1..34: mol_type = other DNA
tgcttgctagaccaataattagttattcaccttg

SEQ ID NO: 14027 - DNA, 35 bp, synthetic construct
  source 1..35: mol_type = other DNA
atgcttgctagaccaataattagttattcaccttg

SEQ ID NO: 14028 - DNA, 36 bp, synthetic construct
  source 1..36: mol_type = other DNA
aatgcttgctagaccaataattagttattcaccttg

SEQ ID NO: 14029 - DNA, 37 bp, synthetic construct
  source 1..37: mol_type = other DNA
aaatgcttgctagaccaataattagttattcaccttg

SEQ ID NO: 14030 - DNA, 38 bp, synthetic construct
  source 1..38: mol_type = other DNA
caaatgcttgctagaccaataattagttattcaccttg

SEQ ID NO: 14031 - DNA, 39 bp, synthetic construct
  source 1..39: mol_type = other DNA
gcaaatgcttgctagaccaataattagttattcaccttg

SEQ ID NO: 14032 - DNA, 40 bp, synthetic construct
  source 1..40: mol_type = other DNA
agcaaatgcttgctagaccaataattagttattcaccttg

SEQ ID NO: 14033 - DNA, 36 bp, synthetic construct; identical to SEQ ID NO: 10218
  source 1..36: mol_type = other DNA

SEQ ID NO: 14034 - DNA, 37 bp, synthetic construct; identical to SEQ ID NO: 10219
  source 1..37: mol_type = other DNA

SEQ ID NO: 14035 - DNA, 38 bp, synthetic construct; identical to SEQ ID NO: 10220
  source 1..38: mol_type = other DNA

SEQ ID NO: 14036 - DNA, 39 bp, synthetic construct; identical to SEQ ID NO: 10221
  source 1..39: mol_type = other DNA

SEQ ID NO: 14037 - DNA, 40 bp, synthetic construct; identical to SEQ ID NO: 10222
  source 1..40: mol_type = other DNA

SEQ ID NO: 14038 - DNA, 28 bp, synthetic construct
  source 1..28: mol_type = other DNA
aggtgaataactaattattggagcagca

SEQ ID NO: 14039 - DNA, 28 bp, synthetic construct
  source 1..28: mol_type = other DNA
aggtgaataactaattattggtctagca

SEQ ID NO: 14040 - DNA, 29 bp, synthetic construct
  source 1..29: mol_type = other DNA
aaggtgaataactaattattggtctagca

SEQ ID NO: 14041 - DNA, 29 bp, synthetic construct
  source 1..29: mol_type = other DNA
aaggtgaataactaattattggagcagca

SEQ ID NO: 14042 - DNA, 30 bp, synthetic construct
  source 1..30: mol_type = other DNA
caaggtgaataactaattattggagcagca

SEQ ID NO: 14043 - DNA, 30 bp, synthetic construct
  source 1..30: mol_type = other DNA
caaggtgaataactaattattggtctagca

SEQ ID NO: 14044 - DNA, 31 bp, synthetic construct
  source 1..31: mol_type = other DNA
gcaaggtgaataactaattattggagcagca

SEQ ID NO: 14045 - DNA, 31 bp, synthetic construct
  source 1..31: mol_type = other DNA
gcaaggtgaataactaattattggtctagca

SEQ ID NO: 14046 - DNA, 32 bp, synthetic construct
  source 1..32: mol_type = other DNA
agcaaggtgaataactaattattggtctagca

SEQ ID NO: 14047 - DNA, 32 bp, synthetic construct
  source 1..32: mol_type = other DNA
agcaaggtgaataactaattattggagcagca

SEQ ID NO: 14048 - DNA, 33 bp, synthetic construct
  source 1..33: mol_type = other DNA
tagcaaggtgaataactaattattggagcagca

SEQ ID NO: 14049 - DNA, 33 bp, synthetic construct
  source 1..33: mol_type = other DNA
tagcaaggtgaataactaattattggtctagca

SEQ ID NO: 14050 - DNA, 34 bp, synthetic construct
  source 1..34: mol_type = other DNA
ttagcaaggtgaataactaattattggtctagca

SEQ ID NO: 14051 - DNA, 34 bp, synthetic construct
  source 1..34: mol_type = other DNA
ttagcaaggtgaataactaattattggagcagca

SEQ ID NO: 14052 - DNA, 35 bp, synthetic construct
  source 1..35: mol_type = other DNA
tttagcaaggtgaataactaattattggagcagca

SEQ ID NO: 14053 - DNA, 35 bp, synthetic construct
  source 1..35: mol_type = other DNA
tttagcaaggtgaataactaattattggtctagca

SEQ ID NO: 14054 - DNA, 36 bp, synthetic construct
  source 1..36: mol_type = other DNA
ctttagcaaggtgaataactaattattggagcagca

SEQ ID NO: 14055 - DNA, 36 bp, synthetic construct
  source 1..36: mol_type = other DNA
ctttagcaaggtgaataactaattattggtctagca

SEQ ID NO: 14056 - DNA, 37 bp, synthetic construct
  source 1..37: mol_type = other DNA
tctttagcaaggtgaataactaattattggagcagca

SEQ ID NO: 14057 - DNA, 37 bp, synthetic construct
  source 1..37: mol_type = other DNA
tctttagcaaggtgaataactaattattggtctagca

SEQ ID NO: 14058 - DNA, 38 bp, synthetic construct
  source 1..38: mol_type = other DNA
ttctttagcaaggtgaataactaattattggtctagca

SEQ ID NO: 14059 - DNA, 38 bp, synthetic construct
  source 1..38: mol_type = other DNA
ttctttagcaaggtgaataactaattattggagcagca

SEQ ID NO: 14060 - DNA, 39 bp, synthetic construct
  source 1..39: mol_type = other DNA
tttctttagcaaggtgaataactaattattggtctagca

SEQ ID NO: 14061 - DNA, 39 bp, synthetic construct
  source 1..39: mol_type = other DNA
tttctttagcaaggtgaataactaattattggagcagca

SEQ ID NO: 14062 - DNA, 40 bp, synthetic construct
  source 1..40: mol_type = other DNA
atttctttagcaaggtgaataactaattattggtctagca

SEQ ID NO: 14063 - DNA, 40 bp, synthetic construct
  source 1..40: mol_type = other DNA
atttctttagcaaggtgaataactaattattggagcagca

SEQ ID NO: 14064 - DNA, 11 bp, synthetic construct
  source 1..11: mol_type = other DNA
ccttgccagag

SEQ ID NO: 14065 - DNA, 11 bp, synthetic construct
  source 1..11: mol_type = other DNA
ccttgctaaag

SEQ ID NO: 14066 - DNA, 12 bp, synthetic construct
  source 1..12: mol_type = other DNA
accttgctaaag

SEQ ID NO: 14067 - DNA, 12 bp, synthetic construct
  source 1..12: mol_type = other DNA
accttgccagag

SEQ ID NO: 14068 - DNA, 13 bp, synthetic construct
  source 1..13: mol_type = other DNA
caccttgccagag

SEQ ID NO: 14069 - DNA, 13 bp, synthetic construct
  source 1..13: mol_type = other DNA
caccttgctaaag

SEQ ID NO: 14070 - DNA, 14 bp, synthetic construct
  source 1..14: mol_type = other DNA
tcaccttgctaaag

SEQ ID NO: 14071 - DNA, 14 bp, synthetic construct
  source 1..14: mol_type = other DNA
tcaccttgccagag

SEQ ID NO: 14072 - DNA, 15 bp, synthetic construct
  source 1..15: mol_type = other DNA
ttcaccttgccagag

SEQ ID NO: 14073 - DNA, 15 bp, synthetic construct
  source 1..15: mol_type = other DNA
ttcaccttgctaaag

SEQ ID NO: 14074 - DNA, 16 bp, synthetic construct
  source 1..16: mol_type = other DNA
attcaccttgctaaag

SEQ ID NO: 14075 - DNA, 16 bp, synthetic construct
  source 1..16: mol_type = other DNA
attcaccttgccagag

SEQ ID NO: 14076 - DNA, 17 bp, synthetic construct
  source 1..17: mol_type = other DNA
tattcaccttgctaaag

SEQ ID NO: 14077 - DNA, 17 bp, synthetic construct
  source 1..17: mol_type = other DNA
tattcaccttgccagag

SEQ ID NO: 14078 - DNA, 18 bp, synthetic construct
  source 1..18: mol_type = other DNA
ttattcaccttgccagag

SEQ ID NO: 14079 - DNA, 18 bp, synthetic construct
  source 1..18: mol_type = other DNA
ttattcaccttgctaaag

SEQ ID NO: 14080 - DNA, 19 bp, synthetic construct
  source 1..19: mol_type = other DNA
gttattcaccttgccagag

SEQ ID NO: 14081 - DNA, 19 bp, synthetic construct
  source 1..19: mol_type = other DNA
gttattcaccttgctaaag

SEQ ID NO: 14082 - DNA, 20 bp, synthetic construct
  source 1..20: mol_type = other DNA
agttattcaccttgctaaag

SEQ ID NO: 14083 - DNA, 20 bp, synthetic construct
  source 1..20: mol_type = other DNA
agttattcaccttgccagag

SEQ ID NO: 14084 - DNA, 21 bp, synthetic construct
  source 1..21: mol_type = other DNA
tagttattcaccttgctaaag

SEQ ID NO: 14085 - DNA, 21 bp, synthetic construct
  source 1..21: mol_type = other DNA
tagttattcaccttgccagag

SEQ ID NO: 14086 - DNA, 22 bp, synthetic construct
  source 1..22: mol_type = other DNA
ttagttattcaccttgctaaag

SEQ ID NO: 14087 - DNA, 22 bp, synthetic construct
  source 1..22: mol_type = other DNA
ttagttattcaccttgccagag

SEQ ID NO: 14088 - DNA, 23 bp, synthetic construct
  source 1..23: mol_type = other DNA
attagttattcaccttgctaaag

SEQ ID NO: 14089 - DNA, 23 bp, synthetic construct
  source 1..23: mol_type = other DNA
attagttattcaccttgccagag

SEQ ID NO: 14090 - DNA, 24 bp, synthetic construct
  source 1..24: mol_type = other DNA
aattagttattcaccttgccagag

SEQ ID NO: 14091 - DNA, 24 bp, synthetic construct
  source 1..24: mol_type = other DNA
aattagttattcaccttgctaaag

SEQ ID NO: 14092 - DNA, 25 bp, synthetic construct
  source 1..25: mol_type = other DNA
taattagttattcaccttgctaaag

SEQ ID NO: 14093 - DNA, 25 bp, synthetic construct
  source 1..25: mol_type = other DNA
taattagttattcaccttgccagag

SEQ ID NO: 14094 - DNA, 26 bp, synthetic construct
  source 1..26: mol_type = other DNA
ataattagttattcaccttgctaaag

SEQ ID NO: 14095 - DNA, 26 bp, synthetic construct
  source 1..26: mol_type = other DNA
ataattagttattcaccttgccagag

SEQ ID NO: 14096 - DNA, 27 bp, synthetic construct
  source 1..27: mol_type = other DNA
aataattagttattcaccttgccagag

SEQ ID NO: 14097 - DNA, 27 bp, synthetic construct
  source 1..27: mol_type = other DNA
aataattagttattcaccttgctaaag

SEQ ID NO: 14098 - DNA, 28 bp, synthetic construct
  source 1..28: mol_type = other DNA
caataattagttattcaccttgccagag

SEQ ID NO: 14099 - DNA, 28 bp, synthetic construct
  source 1..28: mol_type = other DNA
caataattagttattcaccttgctaaag

SEQ ID NO: 14100 - DNA, 29 bp, synthetic construct
  source 1..29: mol_type = other DNA
ccaataattagttattcaccttgccagag

SEQ ID NO: 14101 - DNA, 29 bp, synthetic construct
  source 1..29: mol_type = other DNA
ccaataattagttattcaccttgctaaag

SEQ ID NO: 14102 - DNA, 30 bp, synthetic construct
  source 1..30: mol_type = other DNA
accaataattagttattcaccttgccagag

SEQ ID NO: 14103 - DNA, 30 bp, synthetic construct
  source 1..30: mol_type = other DNA
accaataattagttattcaccttgctaaag

SEQ ID NO: 14104 - DNA, 31 bp, synthetic construct
  source 1..31: mol_type = other DNA
gaccaataattagttattcaccttgctaaag

SEQ ID NO: 14105 - DNA, 31 bp, synthetic construct
  source 1..31: mol_type = other DNA
gaccaataattagttattcaccttgccagag

SEQ ID NO: 14106 - DNA, 32 bp, synthetic construct
  source 1..32: mol_type = other DNA
agaccaataattagttattcaccttgctaaag

SEQ ID NO: 14107 - DNA, 32 bp, synthetic construct
  source 1..32: mol_type = other DNA
agaccaataattagttattcaccttgccagag

SEQ ID NO: 14108 - DNA, 33 bp, synthetic construct
  source 1..33: mol_type = other DNA
tagaccaataattagttattcaccttgccagag

SEQ ID NO: 14109 - DNA, 33 bp, synthetic construct
  source 1..33: mol_type = other DNA
tagaccaataattagttattcaccttgctaaag

SEQ ID NO: 14110 - DNA, 34 bp, synthetic construct
  source 1..34: mol_type = other DNA
ctagaccaataattagttattcaccttgctaaag

SEQ ID NO: 14111 - DNA, 34 bp, synthetic construct
  source 1..34: mol_type = other DNA
ctagaccaataattagttattcaccttgccagag

SEQ ID NO: 14112 - DNA, 35 bp, synthetic construct
  source 1..35: mol_type = other DNA
gctagaccaataattagttattcaccttgccagag

SEQ ID NO: 14113 - DNA, 35 bp, synthetic construct
  source 1..35: mol_type = other DNA
gctagaccaataattagttattcaccttgctaaag

SEQ ID NO: 14114 - DNA, 36 bp, synthetic construct
  source 1..36: mol_type = other DNA
tgctagaccaataattagttattcaccttgctaaag

SEQ ID NO: 14115 - DNA, 36 bp, synthetic construct
  source 1..36: mol_type = other DNA
tgctagaccaataattagttattcaccttgccagag

SEQ ID NO: 14116 - DNA, 37 bp, synthetic construct
  source 1..37: mol_type = other DNA
ttgctagaccaataattagttattcaccttgccagag

SEQ ID NO: 14117 - DNA, 37 bp, synthetic construct
  source 1..37: mol_type = other DNA
ttgctagaccaataattagttattcaccttgctaaag

SEQ ID NO: 14118 - DNA, 38 bp, synthetic construct
  source 1..38: mol_type = other DNA
cttgctagaccaataattagttattcaccttgctaaag

SEQ ID NO: 14119 - DNA, 38 bp, synthetic construct
  source 1..38: mol_type = other DNA
cttgctagaccaataattagttattcaccttgccagag

SEQ ID NO: 14120 - DNA, 39 bp, synthetic construct
  source 1..39: mol_type = other DNA
gcttgctagaccaataattagttattcaccttgctaaag

SEQ ID NO: 14121 - DNA, 39 bp, synthetic construct
  source 1..39: mol_type = other DNA
gcttgctagaccaataattagttattcaccttgccagag

SEQ ID NO: 14122 - DNA, 40 bp, synthetic construct
  source 1..40: mol_type = other DNA
tgcttgctagaccaataattagttattcaccttgctaaag

SEQ ID NO: 14123 - DNA, 40 bp, synthetic construct
  source 1..40: mol_type = other DNA
tgcttgctagaccaataattagttattcaccttgccagag

SEQ ID NO: 14124 - DNA, 10 bp, synthetic construct
  source 1..10: mol_type = other DNA
ccttgctaaa

SEQ ID NO: 14125 - DNA, 11 bp, synthetic construct
  source 1..11: mol_type = other DNA
accttgctaaa

SEQ ID NO: 14126 - DNA, 12 bp, synthetic construct
  source 1..12: mol_type = other DNA
caccttgctaaa

SEQ ID NO: 14127 - DNA, 13 bp, synthetic construct
  source 1..13: mol_type = other DNA
tcaccttgctaaa

SEQ ID NO: 14128 - DNA, 14 bp, synthetic construct
  source 1..14: mol_type = other DNA
ttcaccttgctaaa

SEQ ID NO: 14129 - DNA, 15 bp, synthetic construct
  source 1..15: mol_type = other DNA
attcaccttgctaaa

SEQ ID NO: 14130 - DNA, 16 bp, synthetic construct
  source 1..16: mol_type = other DNA
tattcaccttgctaaa

SEQ ID NO: 14131 - DNA, 17 bp, synthetic construct
  source 1..17: mol_type = other DNA
ttattcaccttgctaaa

SEQ ID NO: 14132 - DNA, 18 bp, synthetic construct
  source 1..18: mol_type = other DNA
gttattcaccttgctaaa

SEQ ID NO: 14133 - DNA, 19 bp, synthetic construct
  source 1..19: mol_type = other DNA
agttattcaccttgctaaa

SEQ ID NO: 14134 - DNA, 20 bp, synthetic construct
  source 1..20: mol_type = other DNA
tagttattcaccttgctaaa

SEQ ID NO: 14135 - DNA, 21 bp, synthetic construct
  source 1..21: mol_type = other DNA
ttagttattcaccttgctaaa

SEQ ID NO: 14136 - DNA, 22 bp, synthetic construct
  source 1..22: mol_type = other DNA
attagttattcaccttgctaaa

SEQ ID NO: 14137 - DNA, 23 bp, synthetic construct
  source 1..23: mol_type = other DNA
aattagttattcaccttgctaaa

SEQ ID NO: 14138 - DNA, 24 bp, synthetic construct
  source 1..24: mol_type = other DNA
taattagttattcaccttgctaaa

SEQ ID NO: 14139 - DNA, 25 bp, synthetic construct
  source 1..25: mol_type = other DNA
ataattagttattcaccttgctaaa

SEQ ID NO: 14140 - DNA, 26 bp, synthetic construct
  source 1..26: mol_type = other DNA
aataattagttattcaccttgctaaa

SEQ ID NO: 14141 - DNA, 27 bp, synthetic construct
  source 1..27: mol_type = other DNA
caataattagttattcaccttgctaaa

SEQ ID NO: 14142 - DNA, 28 bp, synthetic construct
  source 1..28: mol_type = other DNA
ccaataattagttattcaccttgctaaa

SEQ ID NO: 14143 - DNA, 29 bp, synthetic construct
  source 1..29: mol_type = other DNA
accaataattagttattcaccttgctaaa

SEQ ID NO: 14144 - DNA, 30 bp, synthetic construct
  source 1..30: mol_type = other DNA
gaccaataattagttattcaccttgctaaa

SEQ ID NO: 14145 - DNA, 31 bp, synthetic construct
  source 1..31: mol_type = other DNA
agaccaataattagttattcaccttgctaaa

SEQ ID NO: 14146 - DNA, 32 bp, synthetic construct
  source 1..32: mol_type = other DNA
tagaccaataattagttattcaccttgctaaa

SEQ ID NO: 14147 - DNA, 33 bp, synthetic construct
  source 1..33: mol_type = other DNA
ctagaccaataattagttattcaccttgctaaa

SEQ ID NO: 14148 - DNA, 34 bp, synthetic construct
  source 1..34: mol_type = other DNA
gctagaccaataattagttattcaccttgctaaa

SEQ ID NO: 14149 - DNA, 35 bp, synthetic construct
  source 1..35: mol_type = other DNA
tgctagaccaataattagttattcaccttgctaaa

SEQ ID NO: 14150 - DNA, 36 bp, synthetic construct
  source 1..36: mol_type = other DNA
ttgctagaccaataattagttattcaccttgctaaa

SEQ ID NO: 14151 - DNA, 37 bp, synthetic construct
  source 1..37: mol_type = other DNA
cttgctagaccaataattagttattcaccttgctaaa

SEQ ID NO: 14152 - DNA, 38 bp, synthetic construct
  source 1..38: mol_type = other DNA
gcttgctagaccaataattagttattcaccttgctaaa

SEQ ID NO: 14153 - DNA, 39 bp, synthetic construct
  source 1..39: mol_type = other DNA
tgcttgctagaccaataattagttattcaccttgctaaa

SEQ ID NO: 14154 - DNA, 40 bp, synthetic construct
  source 1..40: mol_type = other DNA
atgcttgctagaccaataattagttattcaccttgctaaa

SEQ ID NO: 14155 - DNA, 10 bp, synthetic construct
  source 1..10: mol_type = other DNA
tttagcaagg

SEQ ID NO: 14156 - DNA, 11 bp, synthetic construct
  source 1..11: mol_type = other DNA
ctttagcaagg

SEQ ID NO: 14157 - DNA, 12 bp, synthetic construct
  source 1..12: mol_type = other DNA
tctttagcaagg

SEQ ID NO: 14158 - DNA, 13 bp, synthetic construct
  source 1..13: mol_type = other DNA
ttctttagcaagg

SEQ ID NO: 14159 - DNA, 14 bp, synthetic construct
  source 1..14: mol_type = other DNA
tttctttagcaagg

SEQ ID NO: 14160 - DNA, 15 bp, synthetic construct
  source 1..15: mol_type = other DNA
atttctttagcaagg

SEQ ID NO: 14161 - DNA, 16 bp, synthetic construct
  source 1..16: mol_type = other DNA
aatttctttagcaagg

SEQ ID NO: 14162 - DNA, 17 bp, synthetic construct
  source 1..17: mol_type = other DNA
gaatttctttagcaagg

SEQ ID NO: 14163 - DNA, 18 bp, synthetic construct
  source 1..18: mol_type = other DNA
agaatttctttagcaagg

SEQ ID NO: 14164 - DNA, 19 bp, synthetic construct
  source 1..19: mol_type = other DNA
aagaatttctttagcaagg

SEQ ID NO: 14165 - DNA, 20 bp, synthetic construct
  source 1..20: mol_type = other DNA
caagaatttctttagcaagg

SEQ ID NO: 14166 - DNA, 21 bp, synthetic construct
  source 1..21: mol_type = other DNA
gcaagaatttctttagcaagg

SEQ ID NO: 14167 - DNA, 22 bp, synthetic construct
  source 1..22: mol_type = other DNA
agcaagaatttctttagcaagg

SEQ ID NO: 14168 - DNA, 23 bp, synthetic construct
  source 1..23: mol_type = other DNA
gagcaagaatttctttagcaagg

SEQ ID NO: 14169 - DNA, 24 bp, synthetic construct
  source 1..24: mol_type = other DNA
cgagcaagaatttctttagcaagg

SEQ ID NO: 14170 - DNA, 25 bp, synthetic construct
  source 1..25: mol_type = other DNA
acgagcaagaatttctttagcaagg

SEQ ID NO: 14171 - DNA, 26 bp, synthetic construct
  source 1..26: mol_type = other DNA
aacgagcaagaatttctttagcaagg

SEQ ID NO: 14172 - DNA, 27 bp, synthetic construct
  source 1..27: mol_type = other DNA
caacgagcaagaatttctttagcaagg

SEQ ID NO: 14173 - DNA, 28 bp, synthetic construct
  source 1..28: mol_type = other DNA
tcaacgagcaagaatttctttagcaagg

SEQ ID NO: 14174 - DNA, 29 bp, synthetic construct
  source 1..29: mol_type = other DNA
gtcaacgagcaagaatttctttagcaagg

SEQ ID NO: 14175 - DNA, 30 bp, synthetic construct; identical to SEQ ID NO: 12810
  source 1..30: mol_type = other DNA

SEQ ID NO: 14176 - DNA, 31 bp, synthetic construct; identical to SEQ ID NO: 12215
  source 1..31: mol_type = other DNA

SEQ ID NO: 14177 - DNA, 32 bp, synthetic construct; identical to SEQ ID NO: 12216
  source 1..32: mol_type = other DNA

SEQ ID NO: 14178 - DNA, 33 bp, synthetic construct; identical to SEQ ID NO: 12217
  source 1..33: mol_type = other DNA

SEQ ID NO: 14179 - DNA, 34 bp, synthetic construct; identical to SEQ ID NO: 12218
  source 1..34: mol_type = other DNA

SEQ ID NO: 14180 - DNA, 35 bp, synthetic construct; identical to SEQ ID NO: 11532
  source 1..35: mol_type = other DNA

SEQ ID NO: 14181 - DNA, 36 bp, synthetic construct; identical to SEQ ID NO: 10878
  source 1..36: mol_type = other DNA

SEQ ID NO: 14182 - DNA, 37 bp, synthetic construct; identical to SEQ ID NO: 10246
  source 1..37: mol_type = other DNA

SEQ ID NO: 14183 - DNA, 38 bp, synthetic construct; identical to SEQ ID NO: 10247
  source 1..38: mol_type = other DNA

SEQ ID NO: 14184 - DNA, 39 bp, synthetic construct; identical to SEQ ID NO: 10248
  source 1..39: mol_type = other DNA

SEQ ID NO: 14185 - DNA, 40 bp, synthetic construct; identical to SEQ ID NO: 10249
  source 1..40: mol_type = other DNA

SEQ ID NO: 14186 - DNA, 27 bp, synthetic construct
  source 1..27: mol_type = other DNA
ccttgctaaagaaattcttgctcgttg

SEQ ID NO: 14187 - DNA, 28 bp, synthetic construct
  source 1..28: mol_type = other DNA
accttgctaaagaaattcttgctcgttg

SEQ ID NO: 14188 - DNA, 29 bp, synthetic construct
  source 1..29: mol_type = other DNA
caccttgctaaagaaattcttgctcgttg

SEQ ID NO: 14189 - DNA, 30 bp, synthetic construct; identical to SEQ ID NO: 13514
  source 1..30: mol_type = other DNA

SEQ ID NO: 14190 - DNA, 31 bp, synthetic construct; identical to SEQ ID NO: 13515
  source 1..31: mol_type = other DNA

SEQ ID NO: 14191 - DNA, 32 bp, synthetic construct; identical to SEQ ID NO: 13516
  source 1..32: mol_type = other DNA

SEQ ID NO: 14192 - DNA, 33 bp, synthetic construct; identical to SEQ ID NO: 13517
  source 1..33: mol_type = other DNA

SEQ ID NO: 14193 - DNA, 34 bp, synthetic construct; identical to SEQ ID NO: 13518
  source 1..34: mol_type = other DNA

SEQ ID NO: 14194 - DNA, 35 bp, synthetic construct; identical to SEQ ID NO: 13519
  source 1..35: mol_type = other DNA

SEQ ID NO: 14195 - DNA, 36 bp, synthetic construct; identical to SEQ ID NO: 13520
  source 1..36: mol_type = other DNA

SEQ ID NO: 14196 - DNA, 37 bp, synthetic construct; identical to SEQ ID NO: 13521
  source 1..37: mol_type = other DNA

SEQ ID NO: 14197 - DNA, 38 bp, synthetic construct; identical to SEQ ID NO: 13522
  source 1..38: mol_type = other DNA

SEQ ID NO: 14198 - DNA, 39 bp, synthetic construct; identical to SEQ ID NO: 13523
  source 1..39: mol_type = other DNA

SEQ ID NO: 14199 - DNA, 40 bp, synthetic construct; identical to SEQ ID NO: 13524
  source 1..40: mol_type = other DNA

SEQ ID NO: 14200 - DNA, 10 bp, synthetic construct
  source 1..10: mol_type = other DNA
agcaaggtga

SEQ ID NO: 14201 - DNA, 11 bp, synthetic construct
  source 1..11: mol_type = other DNA
tagcaaggtga

SEQ ID NO: 14202 - DNA, 12 bp, synthetic construct
  source 1..12: mol_type = other DNA
ttagcaaggtga

SEQ ID NO: 14203 - DNA, 13 bp, synthetic construct
  source 1..13: mol_type = other DNA
tttagcaaggtga

SEQ ID NO: 14204 - DNA, 14 bp, synthetic construct
  source 1..14: mol_type = other DNA
ctttagcaaggtga

SEQ ID NO: 14205 - DNA, 15 bp, synthetic construct
  source 1..15: mol_type = other DNA
tctttagcaaggtga

SEQ ID NO: 14206 - DNA, 16 bp, synthetic construct
  source 1..16: mol_type = other DNA
ttctttagcaaggtga

SEQ ID NO: 14207 - DNA, 17 bp, synthetic construct
  source 1..17: mol_type = other DNA
tttctttagcaaggtga

SEQ ID NO: 14208 - DNA, 18 bp, synthetic construct
  source 1..18: mol_type = other DNA
atttctttagcaaggtga

SEQ ID NO: 14209 - DNA, 19 bp, synthetic construct
  source 1..19: mol_type = other DNA
aatttctttagcaaggtga

SEQ ID NO: 14210 - DNA, 20 bp, synthetic construct
  source 1..20: mol_type = other DNA
gaatttctttagcaaggtga

SEQ ID NO: 14211 - DNA, 21 bp, synthetic construct
  source 1..21: mol_type = other DNA
agaatttctttagcaaggtga

SEQ ID NO: 14212 - DNA, 22 bp, synthetic construct
  source 1..22: mol_type = other DNA
aagaatttctttagcaaggtga

SEQ ID NO: 14213 - DNA, 23 bp, synthetic construct
  source 1..23: mol_type = other DNA
caagaatttctttagcaaggtga

SEQ ID NO: 14214 - DNA, 24 bp, synthetic construct
  source 1..24: mol_type = other DNA
gcaagaatttctttagcaaggtga

SEQ ID NO: 14215 - DNA, 25 bp, synthetic construct
  source 1..25: mol_type = other DNA
agcaagaatttctttagcaaggtga

SEQ ID NO: 14216 - DNA, 26 bp, synthetic construct
  source 1..26: mol_type = other DNA
gagcaagaatttctttagcaaggtga

SEQ ID NO: 14217 - DNA, 27 bp, synthetic construct
  source 1..27: mol_type = other DNA
cgagcaagaatttctttagcaaggtga

SEQ ID NO: 14218 - DNA, 28 bp, synthetic construct
  source 1..28: mol_type = other DNA
acgagcaagaatttctttagcaaggtga

SEQ ID NO: 14219 - DNA, 29 bp, synthetic construct
  source 1..29: mol_type = other DNA
aacgagcaagaatttctttagcaaggtga

SEQ ID NO: 14220 - DNA, 30 bp, synthetic construct
  source 1..30: mol_type = other DNA
caacgagcaagaatttctttagcaaggtga

SEQ ID NO: 14221 - DNA, 31 bp, synthetic construct
  source 1..31: mol_type = other DNA
tcaacgagcaagaatttctttagcaaggtga

SEQ ID NO: 14222 - DNA, 32 bp, synthetic construct
  source 1..32: mol_type = other DNA
gtcaacgagcaagaatttctttagcaaggtga

SEQ ID NO: 14223 - DNA, 33 bp, synthetic construct
  source 1..33: mol_type = other DNA
ggtcaacgagcaagaatttctttagcaaggtga

SEQ ID NO: 14224 - DNA, 34 bp, synthetic construct
  source 1..34: mol_type = other DNA
aggtcaacgagcaagaatttctttagcaaggtga

SEQ ID NO: 14225 - DNA, 35 bp, synthetic construct
  source 1..35: mol_type = other DNA
gaggtcaacgagcaagaatttctttagcaaggtga

SEQ ID NO: 14226 - DNA, 36 bp, synthetic construct
  source 1..36: mol_type = other DNA
ggaggtcaacgagcaagaatttctttagcaaggtga

SEQ ID NO: 14227 - DNA, 37 bp, synthetic construct
  source 1..37: mol_type = other DNA
tggaggtcaacgagcaagaatttctttagcaaggtga

SEQ ID NO: 14228 - DNA, 38 bp, synthetic construct
  source 1..38: mol_type = other DNA
gtggaggtcaacgagcaagaatttctttagcaaggtga

SEQ ID NO: 14229 - DNA, 39 bp, synthetic construct
  source 1..39: mol_type = other DNA
agtggaggtcaacgagcaagaatttctttagcaaggtga

SEQ ID NO: 14230 - DNA, 40 bp, synthetic construct
  source 1..40: mol_type = other DNA
gagtggaggtcaacgagcaagaatttctttagcaaggtga

SEQ ID NO: 14231 - DNA, 40 bp, synthetic construct; identical to SEQ ID NO: 11717
  source 1..40: mol_type = other DNA

SEQ ID NO: 14232 - DNA, 40 bp, synthetic construct; identical to SEQ ID NO: 11718
  source 1..40: mol_type = other DNA

SEQ ID NO: 14233 - DNA, 39 bp, synthetic construct; identical to SEQ ID NO: 10373
  source 1..39: mol_type = other DNA

SEQ ID NO: 14234 - DNA, 40 bp, synthetic construct; identical to SEQ ID NO: 10374
  source 1..40: mol_type = other DNA

SEQ ID NO: 14235 - DNA, 21 bp, synthetic construct
  source 1..21: mol_type = other DNA
ccttgctaaagaaattcttgc

SEQ ID NO: 14236 - DNA, 22 bp, synthetic construct
  source 1..22: mol_type = other DNA
accttgctaaagaaattcttgc

SEQ ID NO: 14237 - DNA, 23 bp, synthetic construct
  source 1..23: mol_type = other DNA
caccttgctaaagaaattcttgc

SEQ ID NO: 14238 - DNA, 24 bp, synthetic construct
  source 1..24: mol_type = other DNA
tcaccttgctaaagaaattcttgc

SEQ ID NO: 14239 - DNA, 25 bp, synthetic construct
  source 1..25: mol_type = other DNA
ttcaccttgctaaagaaattcttgc

SEQ ID NO: 14240 - DNA, 26 bp, synthetic construct
  source 1..26: mol_type = other DNA
attcaccttgctaaagaaattcttgc

SEQ ID NO: 14241 - DNA, 27 bp, synthetic construct
  source 1..27: mol_type = other DNA
tattcaccttgctaaagaaattcttgc

SEQ ID NO: 14242 - DNA, 28 bp, synthetic construct
  source 1..28: mol_type = other DNA
ttattcaccttgctaaagaaattcttgc

SEQ ID NO: 14243 - DNA, 29 bp, synthetic construct
  source 1..29: mol_type = other DNA
gttattcaccttgctaaagaaattcttgc

SEQ ID NO: 14244 - DNA, 30 bp, synthetic construct
  source 1..30: mol_type = other DNA
agttattcaccttgctaaagaaattcttgc

SEQ ID NO: 14245 - DNA, 31 bp, synthetic construct
  source 1..31: mol_type = other DNA
tagttattcaccttgctaaagaaattcttgc

SEQ ID NO: 14246 - DNA, 32 bp, synthetic construct
  source 1..32: mol_type = other DNA
ttagttattcaccttgctaaagaaattcttgc

SEQ ID NO: 14247 - DNA, 33 bp, synthetic construct
  source 1..33: mol_type = other DNA
attagttattcaccttgctaaagaaattcttgc

SEQ ID NO: 14248 - DNA, 34 bp, synthetic construct
  source 1..34: mol_type = other DNA
aattagttattcaccttgctaaagaaattcttgc

SEQ ID NO: 14249 - DNA, 35 bp, synthetic construct
  source 1..35: mol_type = other DNA
taattagttattcaccttgctaaagaaattcttgc

SEQ ID NO: 14250 - DNA, 36 bp, synthetic construct
  source 1..36: mol_type = other DNA
ataattagttattcaccttgctaaagaaattcttgc

SEQ ID NO: 14251 - DNA, 37 bp, synthetic construct
  source 1..37: mol_type = other DNA
aataattagttattcaccttgctaaagaaattcttgc

SEQ ID NO: 14252 - DNA, 38 bp, synthetic construct
  source 1..38: mol_type = other DNA
caataattagttattcaccttgctaaagaaattcttgc

SEQ ID NO: 14253 - DNA, 39 bp, synthetic construct
  source 1..39: mol_type = other DNA
ccaataattagttattcaccttgctaaagaaattcttgc

SEQ ID NO: 14254 - DNA, 40 bp, synthetic construct
  source 1..40: mol_type = other DNA
accaataattagttattcaccttgctaaagaaattcttgc

SEQ ID NO: 14255 - DNA, 10 bp, synthetic construct
  source 1..10: mol_type = other DNA
tattcacctt

SEQ ID NO: 14256 - DNA, 11 bp, synthetic construct
  source 1..11: mol_type = other DNA
ttattcacctt

SEQ ID NO: 14257 - DNA, 12 bp, synthetic construct
  source 1..12: mol_type = other DNA
gttattcacctt

SEQ ID NO: 14258 - DNA, 13 bp, synthetic construct
  source 1..13: mol_type = other DNA
agttattcacctt

SEQ ID NO: 14259 - DNA, 14 bp, synthetic construct
  source 1..14: mol_type = other DNA
tagttattcacctt

SEQ ID NO: 14260 - DNA, 15 bp, synthetic construct
  source 1..15: mol_type = other DNA
ttagttattcacctt

SEQ ID NO: 14261 - DNA, 16 bp, synthetic construct
  source 1..16: mol_type = other DNA
attagttattcacctt

SEQ ID NO: 14262 - DNA, 17 bp, synthetic construct
  source 1..17: mol_type = other DNA
aattagttattcacctt

SEQ ID NO: 14263 - DNA, 18 bp, synthetic construct
  source 1..18: mol_type = other DNA
taattagttattcacctt

SEQ ID NO: 14264 - DNA, 19 bp, synthetic construct
  source 1..19: mol_type = other DNA
ataattagttattcacctt

SEQ ID NO: 14265 - DNA, 20 bp, synthetic construct
  source 1..20: mol_type = other DNA
aataattagttattcacctt

SEQ ID NO: 14266 - DNA, 21 bp, synthetic construct
  source 1..21: mol_type = other DNA
caataattagttattcacctt

SEQ ID NO: 14267 - DNA, 22 bp, synthetic construct
  source 1..22: mol_type = other DNA
ccaataattagttattcacctt

SEQ ID NO: 14268 - DNA, 23 bp, synthetic construct
  source 1..23: mol_type = other DNA
accaataattagttattcacctt

SEQ ID NO: 14269 - DNA, 24 bp, synthetic construct
  source 1..24: mol_type = other DNA
gaccaataattagttattcacctt

SEQ ID NO: 14270 - DNA, 25 bp, synthetic construct
  source 1..25: mol_type = other DNA
agaccaataattagttattcacctt

SEQ ID NO: 14271 - DNA, 26 bp, synthetic construct
  source 1..26: mol_type = other DNA
tagaccaataattagttattcacctt

SEQ ID NO: 14272 - DNA, 27 bp, synthetic construct
  source 1..27: mol_type = other DNA
ctagaccaataattagttattcacctt

SEQ ID NO: 14273 - DNA, 28 bp, synthetic construct
  source 1..28: mol_type = other DNA
gctagaccaataattagttattcacctt

SEQ ID NO: 14274 - DNA, 29 bp, synthetic construct
  source 1..29: mol_type = other DNA
tgctagaccaataattagttattcacctt

SEQ ID NO: 14275 - DNA, 30 bp, synthetic construct
  source 1..30: mol_type = other DNA
ttgctagaccaataattagttattcacctt

SEQ ID NO: 14276 - DNA, 31 bp, synthetic construct
  source 1..31: mol_type = other DNA
cttgctagaccaataattagttattcacctt

SEQ ID NO: 14277 - DNA, 32 bp, synthetic construct
  source 1..32: mol_type = other DNA
gcttgctagaccaataattagttattcacctt

SEQ ID NO: 14278 - DNA, 33 bp, synthetic construct
  source 1..33: mol_type = other DNA
tgcttgctagaccaataattagttattcacctt

SEQ ID NO: 14279 - DNA, 34 bp, synthetic construct
  source 1..34: mol_type = other DNA
atgcttgctagaccaataattagttattcacctt

SEQ ID NO: 14280 - DNA, 35 bp, synthetic construct
  source 1..35: mol_type = other DNA
aatgcttgctagaccaataattagttattcacctt

SEQ ID NO: 14281 - DNA, 36 bp, synthetic construct
  source 1..36: mol_type = other DNA
aaatgcttgctagaccaataattagttattcacctt

SEQ ID NO: 14282 - DNA, 37 bp, synthetic construct
  source 1..37: mol_type = other DNA
caaatgcttgctagaccaataattagttattcacctt

SEQ ID NO: 14283 - DNA, 38 bp, synthetic construct
  source 1..38: mol_type = other DNA
gcaaatgcttgctagaccaataattagttattcacctt

SEQ ID NO: 14284 - DNA, 39 bp, synthetic construct
  source 1..39: mol_type = other DNA
agcaaatgcttgctagaccaataattagttattcacctt

SEQ ID NO: 14285 - DNA, 40 bp, synthetic construct
  source 1..40: mol_type = other DNA
cagcaaatgcttgctagaccaataattagttattcacctt

SEQ ID NO: 14286 - DNA, 35 bp, synthetic construct; identical to SEQ ID NO: 11056
  source 1..35: mol_type = other DNA

SEQ ID NO: 14287 - DNA, 35 bp, synthetic construct; identical to SEQ ID NO: 11055
  source 1..35: mol_type = other DNA

SEQ ID NO: 14288 - DNA, 36 bp, synthetic construct; identical to SEQ ID NO: 11057
  source 1..36: mol_type = other DNA

SEQ ID NO: 14289 - DNA, 36 bp, synthetic construct; identical to SEQ ID NO: 11058
  source 1..36: mol_type = other DNA

SEQ ID NO: 14290 - DNA, 37 bp, synthetic construct; identical to SEQ ID NO: 11060
  source 1..37: mol_type = other DNA

SEQ ID NO: 14291 - DNA, 37 bp, synthetic construct; identical to SEQ ID NO: 11059
  source 1..37: mol_type = other DNA

SEQ ID NO: 14292 - DNA, 38 bp, synthetic construct; identical to SEQ ID NO: 11061
  source 1..38: mol_type = other DNA

SEQ ID NO: 14293 - DNA, 38 bp, synthetic construct; identical to SEQ ID NO: 11062
  source 1..38: mol_type = other DNA

SEQ ID NO: 14294 - DNA, 39 bp, synthetic construct; identical to SEQ ID NO: 11063
  source 1..39: mol_type = other DNA

SEQ ID NO: 14295 - DNA, 39 bp, synthetic construct; identical to SEQ ID NO: 11064
  source 1..39: mol_type = other DNA

SEQ ID NO: 14296 - DNA, 40 bp, synthetic construct; identical to SEQ ID NO: 11065
  source 1..40: mol_type = other DNA

SEQ ID NO: 14297 - DNA, 40 bp, synthetic construct; identical to SEQ ID NO: 11066
  source 1..40: mol_type = other DNA

SEQ ID NO: 14298 - DNA, 34 bp, synthetic construct; identical to SEQ ID NO: 11836
  source 1..34: mol_type = other DNA

SEQ ID NO: 14299 - DNA, 35 bp, synthetic construct; identical to SEQ ID NO: 11837
  source 1..35: mol_type = other DNA

SEQ ID NO: 14300 - DNA, 36 bp, synthetic construct; identical to SEQ ID NO: 11838
  source 1..36: mol_type = other DNA

SEQ ID NO: 14301 - DNA, 37 bp, synthetic construct; identical to SEQ ID NO: 11839
  source 1..37: mol_type = other DNA

SEQ ID NO: 14302 - DNA, 38 bp, synthetic construct; identical to SEQ ID NO: 11840
  source 1..38: mol_type = other DNA

SEQ ID NO: 14303 - DNA, 39 bp, synthetic construct; identical to SEQ ID NO: 11841
  source 1..39: mol_type = other DNA

SEQ ID NO: 14304 - DNA, 40 bp, synthetic construct; identical to SEQ ID NO: 11842
  source 1..40: mol_type = other DNA

SEQ ID NO: 14305 - DNA, 33 bp, synthetic construct; identical to SEQ ID NO: 12471
  source 1..33: mol_type = other DNA

SEQ ID NO: 14306 - DNA, 34 bp, synthetic construct; identical to SEQ ID NO: 12472
  source 1..34: mol_type = other DNA

SEQ ID NO: 14307 - DNA, 35 bp, synthetic construct; identical to SEQ ID NO: 12473
  source 1..35: mol_type = other DNA

SEQ ID NO: 14308 - DNA, 36 bp, synthetic construct; identical to SEQ ID NO: 12474
  source 1..36: mol_type = other DNA

SEQ ID NO: 14309 - DNA, 37 bp, synthetic construct; identical to SEQ ID NO: 12475
  source 1..37: mol_type = other DNA

SEQ ID NO: 14310 - DNA, 38 bp, synthetic construct; identical to SEQ ID NO: 12476
  source 1..38: mol_type = other DNA

SEQ ID NO: 14311 - DNA, 39 bp, synthetic construct; identical to SEQ ID NO: 12477
  source 1..39: mol_type = other DNA

SEQ ID NO: 14312 - DNA, 40 bp, synthetic construct; identical to SEQ ID NO: 12478
  source 1..40: mol_type = other DNA

SEQ ID NO: 14313 - DNA, 35 bp, synthetic construct
  source 1..35: mol_type = other DNA
aggtgaataactaattattggtctagcaagcattt

SEQ ID NO: 14314 - DNA, 36 bp, synthetic construct
  source 1..36: mol_type = other DNA
aaggtgaataactaattattggtctagcaagcattt

SEQ ID NO: 14315 - DNA, 37 bp, synthetic construct
  source 1..37: mol_type = other DNA
caaggtgaataactaattattggtctagcaagcattt

SEQ ID NO: 14316 - DNA, 38 bp, synthetic construct
  source 1..38: mol_type = other DNA
gcaaggtgaataactaattattggtctagcaagcattt

SEQ ID NO: 14317 - DNA, 39 bp, synthetic construct
  source 1..39: mol_type = other DNA
agcaaggtgaataactaattattggtctagcaagcattt

SEQ ID NO: 14318 - DNA, 40 bp, synthetic construct
  source 1..40: mol_type = other DNA
tagcaaggtgaataactaattattggtctagcaagcattt

SEQ ID NO: 14319 - DNA, 31 bp, synthetic construct
  source 1..31: mol_type = other DNA
aggtgaataactaattattggtctagcaagc

SEQ ID NO: 14320 - DNA, 32 bp, synthetic construct
  source 1..32: mol_type = other DNA
aaggtgaataactaattattggtctagcaagc

SEQ ID NO: 14321 - DNA, 33 bp, synthetic construct
  source 1..33: mol_type = other DNA
caaggtgaataactaattattggtctagcaagc

SEQ ID NO: 14322 - DNA, 34 bp, synthetic construct
  source 1..34: mol_type = other DNA
gcaaggtgaataactaattattggtctagcaagc

SEQ ID NO: 14323 - DNA, 35 bp, synthetic construct
  source 1..35: mol_type = other DNA
agcaaggtgaataactaattattggtctagcaagc

SEQ ID NO: 14324 - DNA, 36 bp, synthetic construct
  source 1..36: mol_type = other DNA
tagcaaggtgaataactaattattggtctagcaagc

SEQ ID NO: 14325 - DNA, 37 bp, synthetic construct
  source 1..37: mol_type = other DNA
ttagcaaggtgaataactaattattggtctagcaagc

SEQ ID NO: 14326 - DNA, 38 bp, synthetic construct
  source 1..38: mol_type = other DNA
tttagcaaggtgaataactaattattggtctagcaagc

SEQ ID NO: 14327 - DNA, 39 bp, synthetic construct
  source 1..39: mol_type = other DNA
ctttagcaaggtgaataactaattattggtctagcaagc

SEQ ID NO: 14328 - DNA, 40 bp, synthetic construct
  source 1..40: mol_type = other DNA
tctttagcaaggtgaataactaattattggtctagcaagc

SEQ ID NO: 14329 - DNA, 22 bp, synthetic construct
  source 1..22: mol_type = other DNA
ccttgctaaagaaatccgtgct

SEQ ID NO: 14330 - DNA, 22 bp, synthetic construct
  source 1..22: mol_type = other DNA
ccttgctaaagaaattcttgct

SEQ ID NO: 14331 - DNA, 23 bp, synthetic construct
  source 1..23: mol_type = other DNA
accttgctaaagaaattcttgct

SEQ ID NO: 14332 - DNA, 23 bp, synthetic construct
  source 1..23: mol_type = other DNA
accttgctaaagaaatccgtgct

SEQ ID NO: 14333 - DNA, 24 bp, synthetic construct
  source 1..24: mol_type = other DNA
caccttgctaaagaaatccgtgct

SEQ ID NO: 14334 - DNA, 24 bp, synthetic construct
  source 1..24: mol_type = other DNA
caccttgctaaagaaattcttgct

SEQ ID NO: 14335 - DNA, 25 bp, synthetic construct
  source 1..25: mol_type = other DNA
tcaccttgctaaagaaatccgtgct

SEQ ID NO: 14336 - DNA, 25 bp, synthetic construct
  source 1..25: mol_type = other DNA
tcaccttgctaaagaaattcttgct

SEQ ID NO: 14337 - DNA, 26 bp, synthetic construct
  source 1..26: mol_type = other DNA
ttcaccttgctaaagaaattcttgct

SEQ ID NO: 14338 - DNA, 26 bp, synthetic construct
  source 1..26: mol_type = other DNA
ttcaccttgctaaagaaatccgtgct

SEQ ID NO: 14339 - DNA, 27 bp, synthetic construct
  source 1..27: mol_type = other DNA
attcaccttgctaaagaaatccgtgct

SEQ ID NO: 14340 - DNA, 27 bp, synthetic construct
  source 1..27: mol_type = other DNA
attcaccttgctaaagaaattcttgct

SEQ ID NO: 14341 - DNA, 28 bp, synthetic construct
  source 1..28: mol_type = other DNA
tattcaccttgctaaagaaattcttgct

SEQ ID NO: 14342 - DNA, 28 bp, synthetic construct
  source 1..28: mol_type = other DNA
tattcaccttgctaaagaaatccgtgct

SEQ ID NO: 14343 - DNA, 29 bp, synthetic construct
  source 1..29: mol_type = other DNA
ttattcaccttgctaaagaaattcttgct

SEQ ID NO: 14344 - DNA, 29 bp, synthetic construct
  source 1..29: mol_type = other DNA
ttattcaccttgctaaagaaatccgtgct

SEQ ID NO: 14345 - DNA, 30 bp, synthetic construct
  source 1..30: mol_type = other DNA
gttattcaccttgctaaagaaatccgtgct

SEQ ID NO: 14346 - DNA, 30 bp, synthetic construct
  source 1..30: mol_type = other DNA
gttattcaccttgctaaagaaattcttgct

SEQ ID NO: 14347 - DNA, 31 bp, synthetic construct
  source 1..31: mol_type = other DNA
agttattcaccttgctaaagaaattcttgct

SEQ ID NO: 14348 - DNA, 31 bp, synthetic construct
  source 1..31: mol_type = other DNA
agttattcaccttgctaaagaaatccgtgct

SEQ ID NO: 14349 - DNA, 32 bp, synthetic construct
  source 1..32: mol_type = other DNA
tagttattcaccttgctaaagaaatccgtgct

SEQ ID NO: 14350 - DNA, 32 bp, synthetic construct
  source 1..32: mol_type = other DNA
tagttattcaccttgctaaagaaattcttgct

SEQ ID NO: 14351 - DNA, 33 bp, synthetic construct
  source 1..33: mol_type = other DNA
ttagttattcaccttgctaaagaaattcttgct

SEQ ID NO: 14352 - DNA, 33 bp, synthetic construct
  source 1..33: mol_type = other DNA
ttagttattcaccttgctaaagaaatccgtgct

SEQ ID NO: 14353 - DNA, 34 bp, synthetic construct
  source 1..34: mol_type = other DNA
attagttattcaccttgctaaagaaatccgtgct

SEQ ID NO: 14354 - DNA, 34 bp, synthetic construct
  source 1..34: mol_type = other DNA
attagttattcaccttgctaaagaaattcttgct

SEQ ID NO: 14355 - DNA, 35 bp, synthetic construct
  source 1..35: mol_type = other DNA
aattagttattcaccttgctaaagaaattcttgct

SEQ ID NO: 14356 - DNA, 35 bp, synthetic construct
  source 1..35: mol_type = other DNA
aattagttattcaccttgctaaagaaatccgtgct

SEQ ID NO: 14357 - DNA, 36 bp, synthetic construct
  source 1..36: mol_type = other DNA
taattagttattcaccttgctaaagaaatccgtgct

SEQ ID NO: 14358 - DNA, 36 bp, synthetic construct
  source 1..36: mol_type = other DNA
taattagttattcaccttgctaaagaaattcttgct

SEQ ID NO: 14359 - DNA, 37 bp, synthetic construct
  source 1..37: mol_type = other DNA
ataattagttattcaccttgctaaagaaattcttgct

SEQ ID NO: 14360 - DNA, 37 bp, synthetic construct
  source 1..37: mol_type = other DNA
ataattagttattcaccttgctaaagaaatccgtgct

SEQ ID NO: 14361 - DNA, 38 bp, synthetic construct
  source 1..38: mol_type = other DNA
aataattagttattcaccttgctaaagaaattcttgct

SEQ ID NO: 14362 - DNA, 38 bp, synthetic construct
  source 1..38: mol_type = other DNA
aataattagttattcaccttgctaaagaaatccgtgct

SEQ ID NO: 14363 - DNA, 39 bp, synthetic construct
  source 1..39: mol_type = other DNA
caataattagttattcaccttgctaaagaaattcttgct

SEQ ID NO: 14364 - DNA, 39 bp, synthetic construct
  source 1..39: mol_type = other DNA
caataattagttattcaccttgctaaagaaatccgtgct

SEQ ID NO: 14365 - DNA, 40 bp, synthetic construct
  source 1..40: mol_type = other DNA
ccaataattagttattcaccttgctaaagaaatccgtgct

SEQ ID NO: 14366 - DNA, 40 bp, synthetic construct
  source 1..40: mol_type = other DNA
ccaataattagttattcaccttgctaaagaaattcttgct

SEQ ID NO: 14367 - DNA, 16 bp, synthetic construct
  source 1..16: mol_type = other DNA
aggtgaataaccaatt

SEQ ID NO: 14368 - DNA, 16 bp, synthetic construct
  source 1..16: mol_type = other DNA
aggtgaataactaatt

SEQ ID NO: 14369 - DNA, 17 bp, synthetic construct
  source 1..17: mol_type = other DNA
aaggtgaataactaatt

SEQ ID NO: 14370 - DNA, 17 bp, synthetic construct
  source 1..17: mol_type = other DNA
aaggtgaataaccaatt

SEQ ID NO: 14371 - DNA, 18 bp, synthetic construct
  source 1..18: mol_type = other DNA
caaggtgaataactaatt

SEQ ID NO: 14372 - DNA, 18 bp, synthetic construct
  source 1..18: mol_type = other DNA
caaggtgaataaccaatt

SEQ ID NO: 14373 - DNA, 19 bp, synthetic construct
  source 1..19: mol_type = other DNA
gcaaggtgaataaccaatt

SEQ ID NO: 14374 - DNA, 19 bp, synthetic construct
  source 1..19: mol_type = other DNA
gcaaggtgaataactaatt

SEQ ID NO: 14375 - DNA, 20 bp, synthetic construct
  source 1..20: mol_type = other DNA
agcaaggtgaataactaatt

SEQ ID NO: 14376 - DNA, 20 bp, synthetic construct
  source 1..20: mol_type = other DNA
agcaaggtgaataaccaatt

SEQ ID NO: 14377 - DNA, 21 bp, synthetic construct
  source 1..21: mol_type = other DNA
tagcaaggtgaataaccaatt

SEQ ID NO: 14378 - DNA, 21 bp, synthetic construct
  source 1..21: mol_type = other DNA
tagcaaggtgaataactaatt

SEQ ID NO: 14379 - DNA, 22 bp, synthetic construct
  source 1..22: mol_type = other DNA
ttagcaaggtgaataaccaatt

SEQ ID NO: 14380 - DNA, 22 bp, synthetic construct
  source 1..22: mol_type = other DNA
ttagcaaggtgaataactaatt

SEQ ID NO: 14381 - DNA, 23 bp, synthetic construct
  source 1..23: mol_type = other DNA
tttagcaaggtgaataactaatt

SEQ ID NO: 14382 - DNA, 23 bp, synthetic construct
  source 1..23: mol_type = other DNA
tttagcaaggtgaataaccaatt

SEQ ID NO: 14383 - DNA, 24 bp, synthetic construct
  source 1..24: mol_type = other DNA
ctttagcaaggtgaataactaatt

SEQ ID NO: 14384 - DNA, 24 bp, synthetic construct
  source 1..24: mol_type = other DNA
ctttagcaaggtgaataaccaatt

SEQ ID NO: 14385 - DNA, 25 bp, synthetic construct
  source 1..25: mol_type = other DNA
tctttagcaaggtgaataaccaatt

SEQ ID NO: 14386 - DNA, 25 bp, synthetic construct
  source 1..25: mol_type = other DNA
tctttagcaaggtgaataactaatt

SEQ ID NO: 14387 - DNA, 26 bp, synthetic construct
  source 1..26: mol_type = other DNA
ttctttagcaaggtgaataaccaatt

SEQ ID NO: 14388 - DNA, 26 bp, synthetic construct
  source 1..26: mol_type = other DNA
ttctttagcaaggtgaataactaatt

SEQ ID NO: 14389 - DNA, 27 bp, synthetic construct
  source 1..27: mol_type = other DNA
tttctttagcaaggtgaataaccaatt

SEQ ID NO: 14390 - DNA, 27 bp, synthetic construct
  source 1..27: mol_type = other DNA
tttctttagcaaggtgaataactaatt

SEQ ID NO: 14391 - DNA, 28 bp, synthetic construct
  source 1..28: mol_type = other DNA
atttctttagcaaggtgaataaccaatt

SEQ ID NO: 14392 - DNA, 28 bp, synthetic construct
  source 1..28: mol_type = other DNA
atttctttagcaaggtgaataactaatt

SEQ ID NO: 14393 - DNA, 29 bp, synthetic construct
  source 1..29: mol_type = other DNA
aatttctttagcaaggtgaataaccaatt

SEQ ID NO: 14394 - DNA, 29 bp, synthetic construct
  source 1..29: mol_type = other DNA
aatttctttagcaaggtgaataactaatt

SEQ ID NO: 14395 - DNA, 30 bp, synthetic construct
  source 1..30: mol_type = other DNA
gaatttctttagcaaggtgaataaccaatt

SEQ ID NO: 14396 - DNA, 30 bp, synthetic construct
  source 1..30: mol_type = other DNA
gaatttctttagcaaggtgaataactaatt

SEQ ID NO: 14397 - DNA, 31 bp, synthetic construct
  source 1..31: mol_type = other DNA
agaatttctttagcaaggtgaataactaatt

SEQ ID NO: 14398 - DNA, 31 bp, synthetic construct
  source 1..31: mol_type = other DNA
agaatttctttagcaaggtgaataaccaatt

SEQ ID NO: 14399 - DNA, 32 bp, synthetic construct
  source 1..32: mol_type = other DNA
aagaatttctttagcaaggtgaataaccaatt

SEQ ID NO: 14400 - DNA, 32 bp, synthetic construct
  source 1..32: mol_type = other DNA
aagaatttctttagcaaggtgaataactaatt

SEQ ID NO: 14401 - DNA, 33 bp, synthetic construct
  source 1..33: mol_type = other DNA
caagaatttctttagcaaggtgaataaccaatt

SEQ ID NO: 14402 - DNA, 33 bp, synthetic construct
  source 1..33: mol_type = other DNA
caagaatttctttagcaaggtgaataactaatt

SEQ ID NO: 14403 - DNA, 34 bp, synthetic construct
  source 1..34: mol_type = other DNA
gcaagaatttctttagcaaggtgaataactaatt

SEQ ID NO: 14404 - DNA, 34 bp, synthetic construct
  source 1..34: mol_type = other DNA
gcaagaatttctttagcaaggtgaataaccaatt

SEQ ID NO: 14405 - DNA, 35 bp, synthetic construct
  source 1..35: mol_type = other DNA
agcaagaatttctttagcaaggtgaataactaatt

SEQ ID NO: 14406 - DNA, 35 bp, synthetic construct
  source 1..35: mol_type = other DNA
agcaagaatttctttagcaaggtgaataaccaatt

SEQ ID NO: 14407 - DNA, 36 bp, synthetic construct
  source 1..36: mol_type = other DNA
gagcaagaatttctttagcaaggtgaataactaatt

SEQ ID NO: 14408 - DNA, 36 bp, synthetic construct
  source 1..36: mol_type = other DNA
gagcaagaatttctttagcaaggtgaataaccaatt

SEQ ID NO: 14409 - DNA, 37 bp, synthetic construct
  source 1..37: mol_type = other DNA
cgagcaagaatttctttagcaaggtgaataactaatt

SEQ ID NO: 14410 - DNA, 37 bp, synthetic construct
  source 1..37: mol_type = other DNA
cgagcaagaatttctttagcaaggtgaataaccaatt

SEQ ID NO: 14411 - DNA, 38 bp, synthetic construct; identical to SEQ ID NO: 13845
  source 1..38: mol_type = other DNA

SEQ ID NO: 14412 - DNA, 38 bp, synthetic construct; identical to SEQ ID NO: 13846
  source 1..38: mol_type = other DNA

SEQ ID NO: 14413 - DNA, 39 bp, synthetic construct; identical to SEQ ID NO: 13847
  source 1..39: mol_type = other DNA

SEQ ID NO: 14414 - DNA, 39 bp, synthetic construct; identical to SEQ ID NO: 13848
  source 1..39: mol_type = other DNA

SEQ ID NO: 14415 - DNA, 40 bp, synthetic construct; identical to SEQ ID NO: 13849
  source 1..40: mol_type = other DNA

SEQ ID NO: 14416 - DNA, 40 bp, synthetic construct; identical to SEQ ID NO: 13850
  source 1..40: mol_type = other DNA

SEQ ID NO: 14417 - DNA, 15 bp, synthetic construct
  source 1..15: mol_type = other DNA
aggtgaataactaat

SEQ ID NO: 14418 - DNA, 16 bp, synthetic construct
  source 1..16: mol_type = other DNA
aaggtgaataactaat

SEQ ID NO: 14419 - DNA, 17 bp, synthetic construct
  source 1..17: mol_type = other DNA
caaggtgaataactaat

SEQ ID NO: 14420 - DNA, 18 bp, synthetic construct
  source 1..18: mol_type = other DNA
gcaaggtgaataactaat

SEQ ID NO: 14421 - DNA, 19 bp, synthetic construct
  source 1..19: mol_type = other DNA
agcaaggtgaataactaat

SEQ ID NO: 14422 - DNA, 20 bp, synthetic construct
  source 1..20: mol_type = other DNA
tagcaaggtgaataactaat

SEQ ID NO: 14423 - DNA, 21 bp, synthetic construct
  source 1..21: mol_type = other DNA
ttagcaaggtgaataactaat

SEQ ID NO: 14424 - DNA, 22 bp, synthetic construct
  source 1..22: mol_type = other DNA
tttagcaaggtgaataactaat

SEQ ID NO: 14425 - DNA, 23 bp, synthetic construct
  source 1..23: mol_type = other DNA
ctttagcaaggtgaataactaat

SEQ ID NO: 14426 - DNA, 24 bp, synthetic construct
  source 1..24: mol_type = other DNA
tctttagcaaggtgaataactaat

SEQ ID NO: 14427 - DNA, 25 bp, synthetic construct
  source 1..25: mol_type = other DNA
ttctttagcaaggtgaataactaat

SEQ ID NO: 14428 - DNA, 26 bp, synthetic construct
  source 1..26: mol_type = other DNA
tttctttagcaaggtgaataactaat

SEQ ID NO: 14429 - DNA, 27 bp, synthetic construct
  source 1..27: mol_type = other DNA
atttctttagcaaggtgaataactaat

SEQ ID NO: 14430 - DNA, 28 bp, synthetic construct
  source 1..28: mol_type = other DNA
aatttctttagcaaggtgaataactaat

SEQ ID NO: 14431 - DNA, 29 bp, synthetic construct
  source 1..29: mol_type = other DNA
gaatttctttagcaaggtgaataactaat

SEQ ID NO: 14432 - DNA, 30 bp, synthetic construct
  source 1..30: mol_type = other DNA
agaatttctttagcaaggtgaataactaat

SEQ ID NO: 14433 - DNA, 31 bp, synthetic construct
  source 1..31: mol_type = other DNA
aagaatttctttagcaaggtgaataactaat

SEQ ID NO: 14434 - DNA, 32 bp, synthetic construct
  source 1..32: mol_type = other DNA
caagaatttctttagcaaggtgaataactaat

SEQ ID NO: 14435 - DNA, 33 bp, synthetic construct
  source 1..33: mol_type = other DNA
gcaagaatttctttagcaaggtgaataactaat

SEQ ID NO: 14436 - DNA, 34 bp, synthetic construct
  source 1..34: mol_type = other DNA
agcaagaatttctttagcaaggtgaataactaat

SEQ ID NO: 14437 - DNA, 35 bp, synthetic construct
  source 1..35: mol_type = other DNA
gagcaagaatttctttagcaaggtgaataactaat

SEQ ID NO: 14438 - DNA, 36 bp, synthetic construct
  source 1..36: mol_type = other DNA
cgagcaagaatttctttagcaaggtgaataactaat

SEQ ID NO: 14439 - DNA, 37 bp, synthetic construct; identical to SEQ ID NO: 13851
  source 1..37: mol_type = other DNA

SEQ ID NO: 14440 - DNA, 38 bp, synthetic construct; identical to SEQ ID NO: 13852
  source 1..38: mol_type = other DNA

SEQ ID NO: 14441 - DNA, 39 bp, synthetic construct; identical to SEQ ID NO: 13853
  source 1..39: mol_type = other DNA

SEQ ID NO: 14442 - DNA, 40 bp, synthetic construct; identical to SEQ ID NO: 13854
  source 1..40: mol_type = other DNA

SEQ ID NO: 14443 - DNA, 27 bp, synthetic construct
  source 1..27: mol_type = other DNA
aggtgaataactaattattggtctagc

SEQ ID NO: 14444 - DNA, 28 bp, synthetic construct
  source 1..28: mol_type = other DNA
aaggtgaataactaattattggtctagc

SEQ ID NO: 14445 - DNA, 29 bp, synthetic construct
  source 1..29: mol_type = other DNA
caaggtgaataactaattattggtctagc

SEQ ID NO: 14446 - DNA, 30 bp, synthetic construct
  source 1..30: mol_type = other DNA
gcaaggtgaataactaattattggtctagc

SEQ ID NO: 14447 - DNA, 31 bp, synthetic construct
  source 1..31: mol_type = other DNA
agcaaggtgaataactaattattggtctagc

SEQ ID NO: 14448 - DNA, 32 bp, synthetic construct
  source 1..32: mol_type = other DNA
tagcaaggtgaataactaattattggtctagc

SEQ ID NO: 14449 - DNA, 33 bp, synthetic construct
  source 1..33: mol_type = other DNA
ttagcaaggtgaataactaattattggtctagc

SEQ ID NO: 14450 - DNA, 34 bp, synthetic construct
  source 1..34: mol_type = other DNA
tttagcaaggtgaataactaattattggtctagc

SEQ ID NO: 14451 - DNA, 35 bp, synthetic construct
  source 1..35: mol_type = other DNA
ctttagcaaggtgaataactaattattggtctagc

SEQ ID NO: 14452 - DNA, 36 bp, synthetic construct
  source 1..36: mol_type = other DNA
tctttagcaaggtgaataactaattattggtctagc

SEQ ID NO: 14453 - DNA, 37 bp, synthetic construct
  source 1..37: mol_type = other DNA
ttctttagcaaggtgaataactaattattggtctagc

SEQ ID NO: 14454 - DNA, 38 bp, synthetic construct
  source 1..38: mol_type = other DNA
tttctttagcaaggtgaataactaattattggtctagc

SEQ ID NO: 14455 - DNA, 39 bp, synthetic construct
  source 1..39: mol_type = other DNA
atttctttagcaaggtgaataactaattattggtctagc

SEQ ID NO: 14456 - DNA, 40 bp, synthetic construct
  source 1..40: mol_type = other DNA
aatttctttagcaaggtgaataactaattattggtctagc

SEQ ID NO: 14457 - DNA, 13 bp, synthetic construct
  source 1..13: mol_type = other DNA
aaacaaagcttta

SEQ ID NO: 14458 - DNA, 13 bp, synthetic construct
  source 1..13: mol_type = other DNA
aaacaatctttta

SEQ ID NO: 14459 - DNA, 14 bp, synthetic construct
  source 1..14: mol_type = other DNA
aaaacaatctttta

SEQ ID NO: 14460 - DNA, 14 bp, synthetic construct
  source 1..14: mol_type = other DNA
aaaacaaagcttta

SEQ ID NO: 14461 - DNA, 15 bp, synthetic construct
  source 1..15: mol_type = other DNA
aaaaacaatctttta

SEQ ID NO: 14462 - DNA, 15 bp, synthetic construct
  source 1..15: mol_type = other DNA
aaaaacaaagcttta

SEQ ID NO: 14463 - DNA, 16 bp, synthetic construct
  source 1..16: mol_type = other DNA
aaaaaacaaagcttta

SEQ ID NO: 14464 - DNA, 16 bp, synthetic construct
  source 1..16: mol_type = other DNA
aaaaaacaatctttta

SEQ ID NO: 14465 - DNA, 17 bp, synthetic construct
  source 1..17: mol_type = other DNA
aaaaaaacaatctttta

SEQ ID NO: 14466 - DNA, 17 bp, synthetic construct
  source 1..17: mol_type = other DNA
aaaaaaacaaagcttta

SEQ ID NO: 14467 - DNA, 18 bp, synthetic construct
  source 1..18: mol_type = other DNA
caaaaaaacaaagcttta

SEQ ID NO: 14468 - DNA, 18 bp, synthetic construct
  source 1..18: mol_type = other DNA
caaaaaaacaatctttta

SEQ ID NO: 14469 - DNA, 19 bp, synthetic construct
  source 1..19: mol_type = other DNA
acaaaaaaacaatctttta

SEQ ID NO: 14470 - DNA, 19 bp, synthetic construct
  source 1..19: mol_type = other DNA
acaaaaaaacaaagcttta

SEQ ID NO: 14471 - DNA, 20 bp, synthetic construct
  source 1..20: mol_type = other DNA
aacaaaaaaacaaagcttta

SEQ ID NO: 14472 - DNA, 20 bp, synthetic construct
  source 1..20: mol_type = other DNA
aacaaaaaaacaatctttta

SEQ ID NO: 14473 - DNA, 21 bp, synthetic construct
  source 1..21: mol_type = other DNA
aaacaaaaaaacaaagcttta

SEQ ID NO: 14474 - DNA, 21 bp, synthetic construct
  source 1..21: mol_type = other DNA
aaacaaaaaaacaatctttta

SEQ ID NO: 14475 - DNA, 22 bp, synthetic construct
  source 1..22: mol_type = other DNA
gaaacaaaaaaacaatctttta

SEQ ID NO: 14476 - DNA, 22 bp, synthetic construct
  source 1..22: mol_type = other DNA
gaaacaaaaaaacaaagcttta

SEQ ID NO: 14477 - DNA, 23 bp, synthetic construct
  source 1..23: mol_type = other DNA
agaaacaaaaaaacaatctttta

SEQ ID NO: 14478 - DNA, 23 bp, synthetic construct
  source 1..23: mol_type = other DNA
agaaacaaaaaaacaaagcttta

SEQ ID NO: 14479 - DNA, 24 bp, synthetic construct
  source 1..24: mol_type = other DNA
cagaaacaaaaaaacaaagcttta

SEQ ID NO: 14480 - DNA, 24 bp, synthetic construct
  source 1..24: mol_type = other DNA
cagaaacaaaaaaacaatctttta

SEQ ID NO: 14481 - DNA, 25 bp, synthetic construct
  source 1..25: mol_type = other DNA
acagaaacaaaaaaacaaagcttta

SEQ ID NO: 14482 - DNA, 25 bp, synthetic construct
  source 1..25: mol_type = other DNA
acagaaacaaaaaaacaatctttta

SEQ ID NO: 14483 - DNA, 26 bp, synthetic construct
  source 1..26: mol_type = other DNA
gacagaaacaaaaaaacaaagcttta

SEQ ID NO: 14484 - DNA, 26 bp, synthetic construct
  source 1..26: mol_type = other DNA
gacagaaacaaaaaaacaatctttta

SEQ ID NO: 14485 - DNA, 27 bp, synthetic construct
  source 1..27: mol_type = other DNA
ggacagaaacaaaaaaacaatctttta

SEQ ID NO: 14486 - DNA, 27 bp, synthetic construct
  source 1..27: mol_type = other DNA
ggacagaaacaaaaaaacaaagcttta

SEQ ID NO: 14487 - DNA, 28 bp, synthetic construct
  source 1..28: mol_type = other DNA
tggacagaaacaaaaaaacaatctttta

SEQ ID NO: 14488 - DNA, 28 bp, synthetic construct
  source 1..28: mol_type = other DNA
tggacagaaacaaaaaaacaaagcttta

SEQ ID NO: 14489 - DNA, 29 bp, synthetic construct
  source 1..29: mol_type = other DNA
ctggacagaaacaaaaaaacaaagcttta

SEQ ID NO: 14490 - DNA, 29 bp, synthetic construct
  source 1..29: mol_type = other DNA
ctggacagaaacaaaaaaacaatctttta

SEQ ID NO: 14491 - DNA, 30 bp, synthetic construct
  source 1..30: mol_type = other DNA
cctggacagaaacaaaaaaacaatctttta

SEQ ID NO: 14492 - DNA, 30 bp, synthetic construct
  source 1..30: mol_type = other DNA
cctggacagaaacaaaaaaacaaagcttta

SEQ ID NO: 14493 - DNA, 31 bp, synthetic construct
  source 1..31: mol_type = other DNA
tcctggacagaaacaaaaaaacaatctttta

SEQ ID NO: 14494 - DNA, 31 bp, synthetic construct
  source 1..31: mol_type = other DNA
tcctggacagaaacaaaaaaacaaagcttta

SEQ ID NO: 14495 - DNA, 32 bp, synthetic construct
  source 1..32: mol_type = other DNA
ctcctggacagaaacaaaaaaacaaagcttta

SEQ ID NO: 14496 - DNA, 32 bp, synthetic construct
  source 1..32: mol_type = other DNA
ctcctggacagaaacaaaaaaacaatctttta

SEQ ID NO: 14497 - DNA, 33 bp, synthetic construct
  source 1..33: mol_type = other DNA
tctcctggacagaaacaaaaaaacaatctttta

SEQ ID NO: 14498 - DNA, 33 bp, synthetic construct
  source 1..33: mol_type = other DNA
tctcctggacagaaacaaaaaaacaaagcttta

SEQ ID NO: 14499 - DNA, 34 bp, synthetic construct
  source 1..34: mol_type = other DNA
gtctcctggacagaaacaaaaaaacaatctttta

SEQ ID NO: 14500 - DNA, 34 bp, synthetic construct
  source 1..34: mol_type = other DNA
gtctcctggacagaaacaaaaaaacaaagcttta

SEQ ID NO: 14501 - DNA, 35 bp, synthetic construct
  source 1..35: mol_type = other DNA
tgtctcctggacagaaacaaaaaaacaatctttta

SEQ ID NO: 14502 - DNA, 35 bp, synthetic construct
  source 1..35: mol_type = other DNA
tgtctcctggacagaaacaaaaaaacaaagcttta

SEQ ID NO: 14503 - DNA, 36 bp, synthetic construct
  source 1..36: mol_type = other DNA
ctgtctcctggacagaaacaaaaaaacaatctttta

SEQ ID NO: 14504 - DNA, 36 bp, synthetic construct
  source 1..36: mol_type = other DNA
ctgtctcctggacagaaacaaaaaaacaaagcttta

SEQ ID NO: 14505 - DNA, 37 bp, synthetic construct
  source 1..37: mol_type = other DNA
cctgtctcctggacagaaacaaaaaaacaatctttta

SEQ ID NO: 14506 - DNA, 37 bp, synthetic construct
  source 1..37: mol_type = other DNA
cctgtctcctggacagaaacaaaaaaacaaagcttta

SEQ ID NO: 14507 - DNA, 38 bp, synthetic construct
  source 1..38: mol_type = other DNA
tcctgtctcctggacagaaacaaaaaaacaaagcttta

SEQ ID NO: 14508 - DNA, 38 bp, synthetic construct
  source 1..38: mol_type = other DNA
tcctgtctcctggacagaaacaaaaaaacaatctttta

SEQ ID NO: 14509 - DNA, 39 bp, synthetic construct
  source 1..39: mol_type = other DNA
ctcctgtctcctggacagaaacaaaaaaacaatctttta

SEQ ID NO: 14510 - DNA, 39 bp, synthetic construct
  source 1..39: mol_type = other DNA
ctcctgtctcctggacagaaacaaaaaaacaaagcttta

SEQ ID NO: 14511 - DNA, 40 bp, synthetic construct
  source 1..40: mol_type = other DNA
gctcctgtctcctggacagaaacaaaaaaacaaagcttta

SEQ ID NO: 14512 - DNA, 40 bp, synthetic construct
  source 1..40: mol_type = other DNA
gctcctgtctcctggacagaaacaaaaaaacaatctttta

SEQ ID NO: 14513 - DNA, 40 bp, synthetic construct
  source 1..40: mol_type = other DNA
gtttttttgtttctgtccaggagacaggagcatctccttc

SEQ ID NO: 14514 - DNA, 38 bp, synthetic construct
  source 1..38: mol_type = other DNA
gtttttttgtttctgtccaggagacaggagcatctcct

SEQ ID NO: 14515 - DNA, 39 bp, synthetic construct
  source 1..39: mol_type = other DNA
tgtttttttgtttctgtccaggagacaggagcatctcct

SEQ ID NO: 14516 - DNA, 40 bp, synthetic construct
  source 1..40: mol_type = other DNA
ttgtttttttgtttctgtccaggagacaggagcatctcct

SEQ ID NO: 14517 - DNA, 12 bp, synthetic construct
  source 1..12: mol_type = other DNA
aaacaatctttt

SEQ ID NO: 14518 - DNA, 13 bp, synthetic construct
  source 1..13: mol_type = other DNA
aaaacaatctttt

SEQ ID NO: 14519 - DNA, 14 bp, synthetic construct
  source 1..14: mol_type = other DNA
aaaaacaatctttt

SEQ ID NO: 14520 - DNA, 15 bp, synthetic construct
  source 1..15: mol_type = other DNA
aaaaaacaatctttt

SEQ ID NO: 14521 - DNA, 16 bp, synthetic construct
  source 1..16: mol_type = other DNA
aaaaaaacaatctttt

SEQ ID NO: 14522 - DNA, 17 bp, synthetic construct
  source 1..17: mol_type = other DNA
caaaaaaacaatctttt

SEQ ID NO: 14523 - DNA, 18 bp, synthetic construct
  source 1..18: mol_type = other DNA
acaaaaaaacaatctttt

SEQ ID NO: 14524 - DNA, 19 bp, synthetic construct
  source 1..19: mol_type = other DNA
aacaaaaaaacaatctttt

SEQ ID NO: 14525 - DNA, 20 bp, synthetic construct
  source 1..20: mol_type = other DNA
aaacaaaaaaacaatctttt

SEQ ID NO: 14526 - DNA, 21 bp, synthetic construct
  source 1..21: mol_type = other DNA
gaaacaaaaaaacaatctttt

SEQ ID NO: 14527 - DNA, 22 bp, synthetic construct
  source 1..22: mol_type = other DNA
agaaacaaaaaaacaatctttt

SEQ ID NO: 14528 - DNA, 23 bp, synthetic construct
  source 1..23: mol_type = other DNA
cagaaacaaaaaaacaatctttt

SEQ ID NO: 14529 - DNA, 24 bp, synthetic construct
  source 1..24: mol_type = other DNA
acagaaacaaaaaaacaatctttt

SEQ ID NO: 14530 - DNA, 25 bp, synthetic construct
  source 1..25: mol_type = other DNA
gacagaaacaaaaaaacaatctttt

SEQ ID NO: 14531 - DNA, 26 bp, synthetic construct
  source 1..26: mol_type = other DNA
ggacagaaacaaaaaaacaatctttt

SEQ ID NO: 14532 - DNA, 27 bp, synthetic construct
  source 1..27: mol_type = other DNA
tggacagaaacaaaaaaacaatctttt

SEQ ID NO: 14533 - DNA, 28 bp, synthetic construct
  source 1..28: mol_type = other DNA
ctggacagaaacaaaaaaacaatctttt

SEQ ID NO: 14534 - DNA, 29 bp, synthetic construct
  source 1..29: mol_type = other DNA
cctggacagaaacaaaaaaacaatctttt

SEQ ID NO: 14535 - DNA, 30 bp, synthetic construct
  source 1..30: mol_type = other DNA
tcctggacagaaacaaaaaaacaatctttt

SEQ ID NO: 14536 - DNA, 31 bp, synthetic construct
  source 1..31: mol_type = other DNA
ctcctggacagaaacaaaaaaacaatctttt

SEQ ID NO: 14537 - DNA, 32 bp, synthetic construct
  source 1..32: mol_type = other DNA
tctcctggacagaaacaaaaaaacaatctttt

SEQ ID NO: 14538 - DNA, 33 bp, synthetic construct
  source 1..33: mol_type = other DNA
gtctcctggacagaaacaaaaaaacaatctttt

SEQ ID NO: 14539 - DNA, 34 bp, synthetic construct
  source 1..34: mol_type = other DNA
tgtctcctggacagaaacaaaaaaacaatctttt

SEQ ID NO: 14540 - DNA, 35 bp, synthetic construct
  source 1..35: mol_type = other DNA
ctgtctcctggacagaaacaaaaaaacaatctttt

SEQ ID NO: 14541 - DNA, 36 bp, synthetic construct
  source 1..36: mol_type = other DNA
cctgtctcctggacagaaacaaaaaaacaatctttt

SEQ ID NO: 14542 - DNA, 37 bp, synthetic construct
  source 1..37: mol_type = other DNA
tcctgtctcctggacagaaacaaaaaaacaatctttt

SEQ ID NO: 14543 - DNA, 38 bp, synthetic construct
  source 1..38: mol_type = other DNA
ctcctgtctcctggacagaaacaaaaaaacaatctttt

SEQ ID NO: 14544 - DNA, 39 bp, synthetic construct
  source 1..39: mol_type = other DNA
gctcctgtctcctggacagaaacaaaaaaacaatctttt

SEQ ID NO: 14545 - DNA, 40 bp, synthetic construct
  source 1..40: mol_type = other DNA
tgctcctgtctcctggacagaaacaaaaaaacaatctttt

SEQ ID NO: 14546 - DNA, 22 bp, synthetic construct
  source 1..22: mol_type = other DNA
gtttttttgtttctgtccagga

SEQ ID NO: 14547 - DNA, 23 bp, synthetic construct
  source 1..23: mol_type = other DNA
tgtttttttgtttctgtccagga

SEQ ID NO: 14548 - DNA, 24 bp, synthetic construct
  source 1..24: mol_type = other DNA
ttgtttttttgtttctgtccagga

SEQ ID NO: 14549 - DNA, 25 bp, synthetic construct
  source 1..25: mol_type = other DNA
attgtttttttgtttctgtccagga

SEQ ID NO: 14550 - DNA, 26 bp, synthetic construct
  source 1..26: mol_type = other DNA
gattgtttttttgtttctgtccagga

SEQ ID NO: 14551 - DNA, 27 bp, synthetic construct
  source 1..27: mol_type = other DNA
agattgtttttttgtttctgtccagga

SEQ ID NO: 14552 - DNA, 28 bp, synthetic construct
  source 1..28: mol_type = other DNA
aagattgtttttttgtttctgtccagga

SEQ ID NO: 14553 - DNA, 29 bp, synthetic construct
  source 1..29: mol_type = other DNA
aaagattgtttttttgtttctgtccagga

SEQ ID NO: 14554 - DNA, 30 bp, synthetic construct
  source 1..30: mol_type = other DNA
aaaagattgtttttttgtttctgtccagga

SEQ ID NO: 14555 - DNA, 31 bp, synthetic construct
  source 1..31: mol_type = other DNA
taaaagattgtttttttgtttctgtccagga

SEQ ID NO: 14556 - DNA, 32 bp, synthetic construct
  source 1..32: mol_type = other DNA
ttaaaagattgtttttttgtttctgtccagga

SEQ ID NO: 14557 - DNA, 33 bp, synthetic construct
  source 1..33: mol_type = other DNA
tttaaaagattgtttttttgtttctgtccagga

SEQ ID NO: 14558 - DNA, 34 bp, synthetic construct
  source 1..34: mol_type = other DNA
gtttaaaagattgtttttttgtttctgtccagga

SEQ ID NO: 14559 - DNA, 35 bp, synthetic construct
  source 1..35: mol_type = other DNA
tgtttaaaagattgtttttttgtttctgtccagga

SEQ ID NO: 14560 - DNA, 36 bp, synthetic construct
  source 1..36: mol_type = other DNA
ctgtttaaaagattgtttttttgtttctgtccagga

SEQ ID NO: 14561 - DNA, 37 bp, synthetic construct
  source 1..37: mol_type = other DNA
tctgtttaaaagattgtttttttgtttctgtccagga

SEQ ID NO: 14562 - DNA, 38 bp, synthetic construct
  source 1..38: mol_type = other DNA
gtctgtttaaaagattgtttttttgtttctgtccagga

SEQ ID NO: 14563 - DNA, 39 bp, synthetic construct
  source 1..39: mol_type = other DNA
agtctgtttaaaagattgtttttttgtttctgtccagga

SEQ ID NO: 14564 - DNA, 40 bp, synthetic construct
  source 1..40: mol_type = other DNA
cagtctgtttaaaagattgtttttttgtttctgtccagga

SEQ ID NO: 14565 - DNA, 17 bp, synthetic construct
  source 1..17: mol_type = other DNA
gtttttttgtttctgtc

SEQ ID NO: 14566 - DNA, 18 bp, synthetic construct
  source 1..18: mol_type = other DNA
tgtttttttgtttctgtc

SEQ ID NO: 14567 - DNA, 19 bp, synthetic construct
  source 1..19: mol_type = other DNA
ttgtttttttgtttctgtc

SEQ ID NO: 14568 - DNA, 20 bp, synthetic construct
  source 1..20: mol_type = other DNA
attgtttttttgtttctgtc

SEQ ID NO: 14569 - DNA, 21 bp, synthetic construct
  source 1..21: mol_type = other DNA
gattgtttttttgtttctgtc

SEQ ID NO: 14570 - DNA, 22 bp, synthetic construct
  source 1..22: mol_type = other DNA
agattgtttttttgtttctgtc

SEQ ID NO: 14571 - DNA, 23 bp, synthetic construct
  source 1..23: mol_type = other DNA
aagattgtttttttgtttctgtc

SEQ ID NO: 14572 - DNA, 24 bp, synthetic construct
  source 1..24: mol_type = other DNA
aaagattgtttttttgtttctgtc

SEQ ID NO: 14573 - DNA, 25 bp, synthetic construct
  source 1..25: mol_type = other DNA
aaaagattgtttttttgtttctgtc

SEQ ID NO: 14574 - DNA, 26 bp, synthetic construct
  source 1..26: mol_type = other DNA
taaaagattgtttttttgtttctgtc

SEQ ID NO: 14575 - DNA, 27 bp, synthetic construct
  source 1..27: mol_type = other DNA
ttaaaagattgtttttttgtttctgtc

SEQ ID NO: 14576 - DNA, 28 bp, synthetic construct
  source 1..28: mol_type = other DNA
tttaaaagattgtttttttgtttctgtc

SEQ ID NO: 14577 - DNA, 29 bp, synthetic construct
  source 1..29: mol_type = other DNA
gtttaaaagattgtttttttgtttctgtc

SEQ ID NO: 14578 - DNA, 30 bp, synthetic construct
  source 1..30: mol_type = other DNA
tgtttaaaagattgtttttttgtttctgtc

SEQ ID NO: 14579 - DNA, 31 bp, synthetic construct
  source 1..31: mol_type = other DNA
ctgtttaaaagattgtttttttgtttctgtc

SEQ ID NO: 14580 - DNA, 32 bp, synthetic construct
  source 1..32: mol_type = other DNA
tctgtttaaaagattgtttttttgtttctgtc

SEQ ID NO: 14581 - DNA, 33 bp, synthetic construct
  source 1..33: mol_type = other DNA
gtctgtttaaaagattgtttttttgtttctgtc

SEQ ID NO: 14582 - DNA, 34 bp, synthetic construct
  source 1..34: mol_type = other DNA
agtctgtttaaaagattgtttttttgtttctgtc

SEQ ID NO: 14583 - DNA, 35 bp, synthetic construct
  source 1..35: mol_type = other DNA
cagtctgtttaaaagattgtttttttgtttctgtc

SEQ ID NO: 14584 - DNA, 36 bp, synthetic construct
  source 1..36: mol_type = other DNA
ccagtctgtttaaaagattgtttttttgtttctgtc

SEQ ID NO: 14585 - DNA, 37 bp, synthetic construct
  source 1..37: mol_type = other DNA
tccagtctgtttaaaagattgtttttttgtttctgtc

SEQ ID NO: 14586 - DNA, 38 bp, synthetic construct
  source 1..38: mol_type = other DNA
ctccagtctgtttaaaagattgtttttttgtttctgtc

SEQ ID NO: 14587 - DNA, 39 bp, synthetic construct
  source 1..39: mol_type = other DNA
tctccagtctgtttaaaagattgtttttttgtttctgtc

SEQ ID NO: 14588 - DNA, 40 bp, synthetic construct
  source 1..40: mol_type = other DNA
ctctccagtctgtttaaaagattgtttttttgtttctgtc

SEQ ID NO: 14589 - DNA, 39 bp, synthetic construct
  source 1..39: mol_type = other DNA
gtttttttgtttctgtccaggagacaggagcatcgcctt

SEQ ID NO: 14590 - DNA, 39 bp, synthetic construct
  source 1..39: mol_type = other DNA
gtttttttgtttctgtccaggagacaggagcatctcctt

SEQ ID NO: 14591 - DNA, 40 bp, synthetic construct
  source 1..40: mol_type = other DNA
tgtttttttgtttctgtccaggagacaggagcatctcctt

SEQ ID NO: 14592 - DNA, 40 bp, synthetic construct
  source 1..40: mol_type = other DNA
tgtttttttgtttctgtccaggagacaggagcatcgcctt

SEQ ID NO: 14593 - DNA, 35 bp, synthetic construct
  source 1..35: mol_type = other DNA
gtttttttgtttctgtccaggagacaggagcatct

SEQ ID NO: 14594 - DNA, 36 bp, synthetic construct
  source 1..36: mol_type = other DNA
tgtttttttgtttctgtccaggagacaggagcatct

SEQ ID NO: 14595 - DNA, 37 bp, synthetic construct
  source 1..37: mol_type = other DNA
ttgtttttttgtttctgtccaggagacaggagcatct

SEQ ID NO: 14596 - DNA, 38 bp, synthetic construct
  source 1..38: mol_type = other DNA
attgtttttttgtttctgtccaggagacaggagcatct

SEQ ID NO: 14597 - DNA, 39 bp, synthetic construct
  source 1..39: mol_type = other DNA
gattgtttttttgtttctgtccaggagacaggagcatct

SEQ ID NO: 14598 - DNA, 40 bp, synthetic construct
  source 1..40: mol_type = other DNA
agattgtttttttgtttctgtccaggagacaggagcatct

SEQ ID NO: 14599 - DNA, 10 bp, synthetic construct
  source 1..10: mol_type = other DNA
aaaaacaatc

SEQ ID NO: 14600 - DNA, 11 bp, synthetic construct
  source 1..11: mol_type = other DNA
aaaaaacaatc

SEQ ID NO: 14601 - DNA, 12 bp, synthetic construct
  source 1..12: mol_type = other DNA
aaaaaaacaatc

SEQ ID NO: 14602 - DNA, 13 bp, synthetic construct
  source 1..13: mol_type = other DNA
caaaaaaacaatc

SEQ ID NO: 14603 - DNA, 14 bp, synthetic construct
  source 1..14: mol_type = other DNA
acaaaaaaacaatc

SEQ ID NO: 14604 - DNA, 15 bp, synthetic construct
  source 1..15: mol_type = other DNA
aacaaaaaaacaatc

SEQ ID NO: 14605 - DNA, 16 bp, synthetic construct
  source 1..16: mol_type = other DNA
aaacaaaaaaacaatc

SEQ ID NO: 14606 - DNA, 17 bp, synthetic construct
  source 1..17: mol_type = other DNA
gaaacaaaaaaacaatc

SEQ ID NO: 14607 - DNA, 18 bp, synthetic construct
  source 1..18: mol_type = other DNA
agaaacaaaaaaacaatc

SEQ ID NO: 14608 - DNA, 19 bp, synthetic construct
  source 1..19: mol_type = other DNA
cagaaacaaaaaaacaatc

SEQ ID NO: 14609 - DNA, 20 bp, synthetic construct
  source 1..20: mol_type = other DNA
acagaaacaaaaaaacaatc

SEQ ID NO: 14610 - DNA, 21 bp, synthetic construct
  source 1..21: mol_type = other DNA
gacagaaacaaaaaaacaatc

SEQ ID NO: 14611 - DNA, 22 bp, synthetic construct
  source 1..22: mol_type = other DNA
ggacagaaacaaaaaaacaatc

SEQ ID NO: 14612 - DNA, 23 bp, synthetic construct
  source 1..23: mol_type = other DNA
tggacagaaacaaaaaaacaatc

SEQ ID NO: 14613 - DNA, 24 bp, synthetic construct
  source 1..24: mol_type = other DNA
ctggacagaaacaaaaaaacaatc

SEQ ID NO: 14614 - DNA, 25 bp, synthetic construct
  source 1..25: mol_type = other DNA
cctggacagaaacaaaaaaacaatc

SEQ ID NO: 14615 - DNA, 26 bp, synthetic construct
  source 1..26: mol_type = other DNA
tcctggacagaaacaaaaaaacaatc

SEQ ID NO: 14616 - DNA, 27 bp, synthetic construct
  source 1..27: mol_type = other DNA
ctcctggacagaaacaaaaaaacaatc

SEQ ID NO: 14617 - DNA, 28 bp, synthetic construct
  source 1..28: mol_type = other DNA
tctcctggacagaaacaaaaaaacaatc

SEQ ID NO: 14618 - DNA, 29 bp, synthetic construct
  source 1..29: mol_type = other DNA
gtctcctggacagaaacaaaaaaacaatc

SEQ ID NO: 14619 - DNA, 30 bp, synthetic construct
  source 1..30: mol_type = other DNA
tgtctcctggacagaaacaaaaaaacaatc

SEQ ID NO: 14620 - DNA, 31 bp, synthetic construct
  source 1..31: mol_type = other DNA
ctgtctcctggacagaaacaaaaaaacaatc

SEQ ID NO: 14621 - DNA, 32 bp, synthetic construct
  source 1..32: mol_type = other DNA
cctgtctcctggacagaaacaaaaaaacaatc

SEQ ID NO: 14622 - DNA, 33 bp, synthetic construct
  source 1..33: mol_type = other DNA
tcctgtctcctggacagaaacaaaaaaacaatc

SEQ ID NO: 14623 - DNA, 34 bp, synthetic construct
  source 1..34: mol_type = other DNA
ctcctgtctcctggacagaaacaaaaaaacaatc

SEQ ID NO: 14624 - DNA, 35 bp, synthetic construct
  source 1..35: mol_type = other DNA
gctcctgtctcctggacagaaacaaaaaaacaatc

SEQ ID NO: 14625 - DNA, 36 bp, synthetic construct
  source 1..36: mol_type = other DNA
tgctcctgtctcctggacagaaacaaaaaaacaatc

SEQ ID NO: 14626 - DNA, 37 bp, synthetic construct
  source 1..37: mol_type = other DNA
atgctcctgtctcctggacagaaacaaaaaaacaatc

SEQ ID NO: 14627 - DNA, 38 bp, synthetic construct
  source 1..38: mol_type = other DNA
gatgctcctgtctcctggacagaaacaaaaaaacaatc

SEQ ID NO: 14628 - DNA, 39 bp, synthetic construct
  source 1..39: mol_type = other DNA
agatgctcctgtctcctggacagaaacaaaaaaacaatc

SEQ ID NO: 14629 - DNA, 40 bp, synthetic construct
  source 1..40: mol_type = other DNA
gagatgctcctgtctcctggacagaaacaaaaaaacaatc

SEQ ID NO: 14630 - DNA, 25 bp, synthetic construct
  source 1..25: mol_type = other DNA
aaacaatcttttaaacagaccggag

SEQ ID NO: 14631 - DNA, 25 bp, synthetic construct
  source 1..25: mol_type = other DNA
aaacaatcttttaaacagactggag

SEQ ID NO: 14632 - DNA, 26 bp, synthetic construct
  source 1..26: mol_type = other DNA
aaaacaatcttttaaacagactggag

SEQ ID NO: 14633 - DNA, 26 bp, synthetic construct
  source 1..26: mol_type = other DNA
aaaacaatcttttaaacagaccggag

SEQ ID NO: 14634 - DNA, 27 bp, synthetic construct
  source 1..27: mol_type = other DNA
aaaaacaatcttttaaacagactggag

SEQ ID NO: 14635 - DNA, 27 bp, synthetic construct
  source 1..27: mol_type = other DNA
aaaaacaatcttttaaacagaccggag

SEQ ID NO: 14636 - DNA, 28 bp, synthetic construct
  source 1..28: mol_type = other DNA
aaaaaacaatcttttaaacagactggag

SEQ ID NO: 14637 - DNA, 28 bp, synthetic construct
  source 1..28: mol_type = other DNA
aaaaaacaatcttttaaacagaccggag

SEQ ID NO: 14638 - DNA, 29 bp, synthetic construct
  source 1..29: mol_type = other DNA
aaaaaaacaatcttttaaacagaccggag

SEQ ID NO: 14639 - DNA, 29 bp, synthetic construct
  source 1..29: mol_type = other DNA
aaaaaaacaatcttttaaacagactggag

SEQ ID NO: 14640 - DNA, 30 bp, synthetic construct
  source 1..30: mol_type = other DNA
caaaaaaacaatcttttaaacagaccggag

SEQ ID NO: 14641 - DNA, 30 bp, synthetic construct
  source 1..30: mol_type = other DNA
caaaaaaacaatcttttaaacagactggag

SEQ ID NO: 14642 - DNA, 31 bp, synthetic construct
  source 1..31: mol_type = other DNA
acaaaaaaacaatcttttaaacagaccggag

SEQ ID NO: 14643 - DNA, 31 bp, synthetic construct
  source 1..31: mol_type = other DNA
acaaaaaaacaatcttttaaacagactggag

SEQ ID NO: 14644 - DNA, 32 bp, synthetic construct
  source 1..32: mol_type = other DNA
aacaaaaaaacaatcttttaaacagaccggag

SEQ ID NO: 14645 - DNA, 32 bp, synthetic construct
  source 1..32: mol_type = other DNA
aacaaaaaaacaatcttttaaacagactggag

SEQ ID NO: 14646 - DNA, 33 bp, synthetic construct
  source 1..33: mol_type = other DNA
aaacaaaaaaacaatcttttaaacagaccggag

SEQ ID NO: 14647 - DNA, 33 bp, synthetic construct
  source 1..33: mol_type = other DNA
aaacaaaaaaacaatcttttaaacagactggag

SEQ ID NO: 14648 - DNA, 34 bp, synthetic construct
  source 1..34: mol_type = other DNA
gaaacaaaaaaacaatcttttaaacagaccggag

SEQ ID NO: 14649 - DNA, 34 bp, synthetic construct
  source 1..34: mol_type = other DNA
gaaacaaaaaaacaatcttttaaacagactggag

SEQ ID NO: 14650 - DNA, 35 bp, synthetic construct
  source 1..35: mol_type = other DNA
agaaacaaaaaaacaatcttttaaacagactggag

SEQ ID NO: 14651 - DNA, 35 bp, synthetic construct
  source 1..35: mol_type = other DNA
agaaacaaaaaaacaatcttttaaacagaccggag

SEQ ID NO: 14652 - DNA, 36 bp, synthetic construct
  source 1..36: mol_type = other DNA
cagaaacaaaaaaacaatcttttaaacagaccggag

SEQ ID NO: 14653 - DNA, 36 bp, synthetic construct
  source 1..36: mol_type = other DNA
cagaaacaaaaaaacaatcttttaaacagactggag

SEQ ID NO: 14654 - DNA, 37 bp, synthetic construct
  source 1..37: mol_type = other DNA
acagaaacaaaaaaacaatcttttaaacagactggag

SEQ ID NO: 14655 - DNA, 37 bp, synthetic construct
  source 1..37: mol_type = other DNA
acagaaacaaaaaaacaatcttttaaacagaccggag

SEQ ID NO: 14656 - DNA, 38 bp, synthetic construct
  source 1..38: mol_type = other DNA
gacagaaacaaaaaaacaatcttttaaacagaccggag

SEQ ID NO: 14657 - DNA, 38 bp, synthetic construct
  source 1..38: mol_type = other DNA
gacagaaacaaaaaaacaatcttttaaacagactggag

SEQ ID NO: 14658 - DNA, 39 bp, synthetic construct
  source 1..39: mol_type = other DNA
ggacagaaacaaaaaaacaatcttttaaacagaccggag

SEQ ID NO: 14659 - DNA, 39 bp, synthetic construct
  source 1..39: mol_type = other DNA
ggacagaaacaaaaaaacaatcttttaaacagactggag

SEQ ID NO: 14660 - DNA, 40 bp, synthetic construct
  source 1..40: mol_type = other DNA
tggacagaaacaaaaaaacaatcttttaaacagactggag

SEQ ID NO: 14661 - DNA, 40 bp, synthetic construct
  source 1..40: mol_type = other DNA
tggacagaaacaaaaaaacaatcttttaaacagaccggag

SEQ ID NO: 14662 - DNA, 24 bp, synthetic construct
  source 1..24: mol_type = other DNA
aaacaatcttttaaacagactgga

SEQ ID NO: 14663 - DNA, 25 bp, synthetic construct
  source 1..25: mol_type = other DNA
aaaacaatcttttaaacagactgga

SEQ ID NO: 14664 - DNA, 26 bp, synthetic construct
  source 1..26: mol_type = other DNA
aaaaacaatcttttaaacagactgga

SEQ ID NO: 14665 - DNA, 27 bp, synthetic construct
  source 1..27: mol_type = other DNA
aaaaaacaatcttttaaacagactgga

SEQ ID NO: 14666 - DNA, 28 bp, synthetic construct
  source 1..28: mol_type = other DNA
aaaaaaacaatcttttaaacagactgga

SEQ ID NO: 14667 - DNA, 29 bp, synthetic construct
  source 1..29: mol_type = other DNA
caaaaaaacaatcttttaaacagactgga

SEQ ID NO: 14668 - DNA, 30 bp, synthetic construct
  source 1..30: mol_type = other DNA
acaaaaaaacaatcttttaaacagactgga

SEQ ID NO: 14669 - DNA, 31 bp, synthetic construct
  source 1..31: mol_type = other DNA
aacaaaaaaacaatcttttaaacagactgga

SEQ ID NO: 14670 - DNA, 32 bp, synthetic construct
  source 1..32: mol_type = other DNA
aaacaaaaaaacaatcttttaaacagactgga

SEQ ID NO: 14671 - DNA, 33 bp, synthetic construct
  source 1..33: mol_type = other DNA
gaaacaaaaaaacaatcttttaaacagactgga

SEQ ID NO: 14672 - DNA, 34 bp, synthetic construct
  source 1..34: mol_type = other DNA
agaaacaaaaaaacaatcttttaaacagactgga

SEQ ID NO: 14673 - DNA, 35 bp, synthetic construct
  source 1..35: mol_type = other DNA
cagaaacaaaaaaacaatcttttaaacagactgga

SEQ ID NO: 14674 - DNA, 36 bp, synthetic construct
  source 1..36: mol_type = other DNA
acagaaacaaaaaaacaatcttttaaacagactgga

SEQ ID NO: 14675 - DNA, 37 bp, synthetic construct
  source 1..37: mol_type = other DNA
gacagaaacaaaaaaacaatcttttaaacagactgga

SEQ ID NO: 14676 - DNA, 38 bp, synthetic construct
  source 1..38: mol_type = other DNA
ggacagaaacaaaaaaacaatcttttaaacagactgga

SEQ ID NO: 14677 - DNA, 39 bp, synthetic construct
  source 1..39: mol_type = other DNA
tggacagaaacaaaaaaacaatcttttaaacagactgga

SEQ ID NO: 14678 - DNA, 40 bp, synthetic construct
  source 1..40: mol_type = other DNA
ctggacagaaacaaaaaaacaatcttttaaacagactgga

SEQ ID NO: 14679 - DNA, 23 bp, synthetic construct
  source 1..23: mol_type = other DNA
gtttttttgtttctgtccaggag

SEQ ID NO: 14680 - DNA, 24 bp, synthetic construct
  source 1..24: mol_type = other DNA
tgtttttttgtttctgtccaggag

SEQ ID NO: 14681 - DNA, 25 bp, synthetic construct
  source 1..25: mol_type = other DNA
ttgtttttttgtttctgtccaggag

SEQ ID NO: 14682 - DNA, 26 bp, synthetic construct
  source 1..26: mol_type = other DNA
attgtttttttgtttctgtccaggag

SEQ ID NO: 14683 - DNA, 27 bp, synthetic construct
  source 1..27: mol_type = other DNA
gattgtttttttgtttctgtccaggag

SEQ ID NO: 14684 - DNA, 28 bp, synthetic construct
  source 1..28: mol_type = other DNA
agattgtttttttgtttctgtccaggag

SEQ ID NO: 14685 - DNA, 29 bp, synthetic construct
  source 1..29: mol_type = other DNA
aagattgtttttttgtttctgtccaggag

SEQ ID NO: 14686 - DNA, 30 bp, synthetic construct
  source 1..30: mol_type = other DNA
aaagattgtttttttgtttctgtccaggag

SEQ ID NO: 14687 - DNA, 31 bp, synthetic construct
  source 1..31: mol_type = other DNA
aaaagattgtttttttgtttctgtccaggag

SEQ ID NO: 14688 - DNA, 32 bp, synthetic construct
  source 1..32: mol_type = other DNA
taaaagattgtttttttgtttctgtccaggag

SEQ ID NO: 14689 - DNA, 33 bp, synthetic construct
  source 1..33: mol_type = other DNA
ttaaaagattgtttttttgtttctgtccaggag

SEQ ID NO: 14690 - DNA, 34 bp, synthetic construct
  source 1..34: mol_type = other DNA
tttaaaagattgtttttttgtttctgtccaggag

SEQ ID NO: 14691 - DNA, 35 bp, synthetic construct
  source 1..35: mol_type = other DNA
gtttaaaagattgtttttttgtttctgtccaggag

SEQ ID NO: 14692 - DNA, 36 bp, synthetic construct
  source 1..36: mol_type = other DNA
tgtttaaaagattgtttttttgtttctgtccaggag

SEQ ID NO: 14693 - DNA, 37 bp, synthetic construct
  source 1..37: mol_type = other DNA
ctgtttaaaagattgtttttttgtttctgtccaggag

SEQ ID NO: 14694 - DNA, 38 bp, synthetic construct
  source 1..38: mol_type = other DNA
tctgtttaaaagattgtttttttgtttctgtccaggag

SEQ ID NO: 14695 - DNA, 39 bp, synthetic construct
  source 1..39: mol_type = other DNA
gtctgtttaaaagattgtttttttgtttctgtccaggag

SEQ ID NO: 14696 - DNA, 40 bp, synthetic construct
  source 1..40: mol_type = other DNA
agtctgtttaaaagattgtttttttgtttctgtccaggag

SEQ ID NO: 14697 - DNA, 18 bp, synthetic construct
  source 1..18: mol_type = other DNA
gtttttttgtttctgtcc

SEQ ID NO: 14698 - DNA, 18 bp, synthetic construct
  source 1..18: mol_type = other DNA
gtttttttgtttcggtcc

SEQ ID NO: 14699 - DNA, 19 bp, synthetic construct
  source 1..19: mol_type = other DNA
tgtttttttgtttcggtcc

SEQ ID NO: 14700 - DNA, 19 bp, synthetic construct
  source 1..19: mol_type = other DNA
tgtttttttgtttctgtcc

SEQ ID NO: 14701 - DNA, 20 bp, synthetic construct
  source 1..20: mol_type = other DNA
ttgtttttttgtttcggtcc

SEQ ID NO: 14702 - DNA, 20 bp, synthetic construct
  source 1..20: mol_type = other DNA
ttgtttttttgtttctgtcc

SEQ ID NO: 14703 - DNA, 21 bp, synthetic construct
  source 1..21: mol_type = other DNA
attgtttttttgtttcggtcc

SEQ ID NO: 14704 - DNA, 21 bp, synthetic construct
  source 1..21: mol_type = other DNA
attgtttttttgtttctgtcc

SEQ ID NO: 14705 - DNA, 22 bp, synthetic construct
  source 1..22: mol_type = other DNA
gattgtttttttgtttctgtcc

SEQ ID NO: 14706 - DNA, 22 bp, synthetic construct
  source 1..22: mol_type = other DNA
gattgtttttttgtttcggtcc

SEQ ID NO: 14707 - DNA, 23 bp, synthetic construct
  source 1..23: mol_type = other DNA
agattgtttttttgtttcggtcc

SEQ ID NO: 14708 - DNA, 23 bp, synthetic construct
  source 1..23: mol_type = other DNA
agattgtttttttgtttctgtcc

SEQ ID NO: 14709 - DNA, 24 bp, synthetic construct
  source 1..24: mol_type = other DNA
aagattgtttttttgtttcggtcc

SEQ ID NO: 14710 - DNA, 24 bp, synthetic construct
  source 1..24: mol_type = other DNA
aagattgtttttttgtttctgtcc

SEQ ID NO: 14711 - DNA, 25 bp, synthetic construct
  source 1..25: mol_type = other DNA
aaagattgtttttttgtttctgtcc

SEQ ID NO: 14712 - DNA, 25 bp, synthetic construct
  source 1..25: mol_type = other DNA
aaagattgtttttttgtttcggtcc

SEQ ID NO: 14713 - DNA, 26 bp, synthetic construct
  source 1..26: mol_type = other DNA
aaaagattgtttttttgtttctgtcc

SEQ ID NO: 14714 - DNA, 26 bp, synthetic construct
  source 1..26: mol_type = other DNA
aaaagattgtttttttgtttcggtcc

SEQ ID NO: 14715 - DNA, 27 bp, synthetic construct
  source 1..27: mol_type = other DNA
taaaagattgtttttttgtttctgtcc

SEQ ID NO: 14716 - DNA, 27 bp, synthetic construct
  source 1..27: mol_type = other DNA
taaaagattgtttttttgtttcggtcc

SEQ ID NO: 14717 - DNA, 28 bp, synthetic construct
  source 1..28: mol_type = other DNA
ttaaaagattgtttttttgtttcggtcc

SEQ ID NO: 14718 - DNA, 28 bp, synthetic construct
  source 1..28: mol_type = other DNA
ttaaaagattgtttttttgtttctgtcc

SEQ ID NO: 14719 - DNA, 29 bp, synthetic construct
  source 1..29: mol_type = other DNA
tttaaaagattgtttttttgtttcggtcc

SEQ ID NO: 14720 - DNA, 29 bp, synthetic construct
  source 1..29: mol_type = other DNA
tttaaaagattgtttttttgtttctgtcc

SEQ ID NO: 14721 - DNA, 30 bp, synthetic construct
  source 1..30: mol_type = other DNA
gtttaaaagattgtttttttgtttcggtcc

SEQ ID NO: 14722 - DNA, 30 bp, synthetic construct
  source 1..30: mol_type = other DNA
gtttaaaagattgtttttttgtttctgtcc

SEQ ID NO: 14723 - DNA, 31 bp, synthetic construct
  source 1..31: mol_type = other DNA
tgtttaaaagattgtttttttgtttctgtcc

SEQ ID NO: 14724 - DNA, 31 bp, synthetic construct
  source 1..31: mol_type = other DNA
tgtttaaaagattgtttttttgtttcggtcc

SEQ ID NO: 14725 - DNA, 32 bp, synthetic construct
  source 1..32: mol_type = other DNA
ctgtttaaaagattgtttttttgtttcggtcc

SEQ ID NO: 14726 - DNA, 32 bp, synthetic construct
  source 1..32: mol_type = other DNA
ctgtttaaaagattgtttttttgtttctgtcc

SEQ ID NO: 14727 - DNA, 33 bp, synthetic construct
  source 1..33: mol_type = other DNA
tctgtttaaaagattgtttttttgtttcggtcc

SEQ ID NO: 14728 - DNA, 33 bp, synthetic construct
  source 1..33: mol_type = other DNA
tctgtttaaaagattgtttttttgtttctgtcc

SEQ ID NO: 14729 - DNA, 34 bp, synthetic construct
  source 1..34: mol_type = other DNA
gtctgtttaaaagattgtttttttgtttctgtcc

SEQ ID NO: 14730 - DNA, 34 bp, synthetic construct
  source 1..34: mol_type = other DNA
gtctgtttaaaagattgtttttttgtttcggtcc

SEQ ID NO: 14731 - DNA, 35 bp, synthetic construct
  source 1..35: mol_type = other DNA
agtctgtttaaaagattgtttttttgtttctgtcc

SEQ ID NO: 14732 - DNA, 35 bp, synthetic construct
  source 1..35: mol_type = other DNA
agtctgtttaaaagattgtttttttgtttcggtcc

SEQ ID NO: 14733 - DNA, 36 bp, synthetic construct
  source 1..36: mol_type = other DNA
cagtctgtttaaaagattgtttttttgtttcggtcc

SEQ ID NO: 14734 - DNA, 36 bp, synthetic construct
  source 1..36: mol_type = other DNA
cagtctgtttaaaagattgtttttttgtttctgtcc

SEQ ID NO: 14735 - DNA, 37 bp, synthetic construct
  source 1..37: mol_type = other DNA
ccagtctgtttaaaagattgtttttttgtttctgtcc

SEQ ID NO: 14736 - DNA, 37 bp, synthetic construct
  source 1..37: mol_type = other DNA
ccagtctgtttaaaagattgtttttttgtttcggtcc

SEQ ID NO: 14737 - DNA, 38 bp, synthetic construct
  source 1..38: mol_type = other DNA
tccagtctgtttaaaagattgtttttttgtttcggtcc

SEQ ID NO: 14738 - DNA, 38 bp, synthetic construct
  source 1..38: mol_type = other DNA
tccagtctgtttaaaagattgtttttttgtttctgtcc

SEQ ID NO: 14739 - DNA, 39 bp, synthetic construct
  source 1..39: mol_type = other DNA
ctccagtctgtttaaaagattgtttttttgtttcggtcc

SEQ ID NO: 14740 - DNA, 39 bp, synthetic construct
  source 1..39: mol_type = other DNA
ctccagtctgtttaaaagattgtttttttgtttctgtcc

SEQ ID NO: 14741 - DNA, 40 bp, synthetic construct
  source 1..40: mol_type = other DNA
tctccagtctgtttaaaagattgtttttttgtttctgtcc

SEQ ID NO: 14742 - DNA, 40 bp, synthetic construct
  source 1..40: mol_type = other DNA
tctccagtctgtttaaaagattgtttttttgtttcggtcc

SEQ ID NO: 14743 - DNA, 21 bp, synthetic construct
  source 1..21: mol_type = other DNA
gtttttttgtttctgtccagg

SEQ ID NO: 14744 - DNA, 22 bp, synthetic construct
  source 1..22: mol_type = other DNA
tgtttttttgtttctgtccagg

SEQ ID NO: 14745 - DNA, 23 bp, synthetic construct
  source 1..23: mol_type = other DNA
ttgtttttttgtttctgtccagg

SEQ ID NO: 14746 - DNA, 24 bp, synthetic construct
  source 1..24: mol_type = other DNA
attgtttttttgtttctgtccagg

SEQ ID NO: 14747 - DNA, 25 bp, synthetic construct
  source 1..25: mol_type = other DNA
gattgtttttttgtttctgtccagg

SEQ ID NO: 14748 - DNA, 26 bp, synthetic construct
  source 1..26: mol_type = other DNA
agattgtttttttgtttctgtccagg

SEQ ID NO: 14749 - DNA, 27 bp, synthetic construct
  source 1..27: mol_type = other DNA
aagattgtttttttgtttctgtccagg

SEQ ID NO: 14750 - DNA, 28 bp, synthetic construct
  source 1..28: mol_type = other DNA
aaagattgtttttttgtttctgtccagg

SEQ ID NO: 14751 - DNA, 29 bp, synthetic construct
  source 1..29: mol_type = other DNA
aaaagattgtttttttgtttctgtccagg

SEQ ID NO: 14752 - DNA, 30 bp, synthetic construct
  source 1..30: mol_type = other DNA
taaaagattgtttttttgtttctgtccagg

SEQ ID NO: 14753 - DNA, 31 bp, synthetic construct
  source 1..31: mol_type = other DNA
ttaaaagattgtttttttgtttctgtccagg

SEQ ID NO: 14754 - DNA, 32 bp, synthetic construct
  source 1..32: mol_type = other DNA
tttaaaagattgtttttttgtttctgtccagg

SEQ ID NO: 14755 - DNA, 33 bp, synthetic construct
  source 1..33: mol_type = other DNA
gtttaaaagattgtttttttgtttctgtccagg

SEQ ID NO: 14756 - DNA, 34 bp, synthetic construct
  source 1..34: mol_type = other DNA
tgtttaaaagattgtttttttgtttctgtccagg

SEQ ID NO: 14757 - DNA, 35 bp, synthetic construct
  source 1..35: mol_type = other DNA
ctgtttaaaagattgtttttttgtttctgtccagg

SEQ ID NO: 14758 - DNA, 36 bp, synthetic construct
  source 1..36: mol_type = other DNA
tctgtttaaaagattgtttttttgtttctgtccagg

SEQ ID NO: 14759 - DNA, 37 bp, synthetic construct
  source 1..37: mol_type = other DNA
gtctgtttaaaagattgtttttttgtttctgtccagg

SEQ ID NO: 14760 - DNA, 38 bp, synthetic construct
  source 1..38: mol_type = other DNA
agtctgtttaaaagattgtttttttgtttctgtccagg

SEQ ID NO: 14761 - DNA, 39 bp, synthetic construct
  source 1..39: mol_type = other DNA
cagtctgtttaaaagattgtttttttgtttctgtccagg

SEQ ID NO: 14762 - DNA, 40 bp, synthetic construct
  source 1..40: mol_type = other DNA
ccagtctgtttaaaagattgtttttttgtttctgtccagg

SEQ ID NO: 14763 - DNA, 29 bp, synthetic construct
  source 1..29: mol_type = other DNA
gtttttttgtttctgtccaggagacagga

SEQ ID NO: 14764 - DNA, 30 bp, synthetic construct
  source 1..30: mol_type = other DNA
tgtttttttgtttctgtccaggagacagga

SEQ ID NO: 14765 - DNA, 31 bp, synthetic construct
  source 1..31: mol_type = other DNA
ttgtttttttgtttctgtccaggagacagga

SEQ ID NO: 14766 - DNA, 32 bp, synthetic construct
  source 1..32: mol_type = other DNA
attgtttttttgtttctgtccaggagacagga

SEQ ID NO: 14767 - DNA, 33 bp, synthetic construct
  source 1..33: mol_type = other DNA
gattgtttttttgtttctgtccaggagacagga

SEQ ID NO: 14768 - DNA, 34 bp, synthetic construct
  source 1..34: mol_type = other DNA
agattgtttttttgtttctgtccaggagacagga

SEQ ID NO: 14769 - DNA, 35 bp, synthetic construct
  source 1..35: mol_type = other DNA
aagattgtttttttgtttctgtccaggagacagga

SEQ ID NO: 14770 - DNA, 36 bp, synthetic construct
  source 1..36: mol_type = other DNA
aaagattgtttttttgtttctgtccaggagacagga

SEQ ID NO: 14771 - DNA, 37 bp, synthetic construct
  source 1..37: mol_type = other DNA
aaaagattgtttttttgtttctgtccaggagacagga

SEQ ID NO: 14772 - DNA, 38 bp, synthetic construct
  source 1..38: mol_type = other DNA
taaaagattgtttttttgtttctgtccaggagacagga

SEQ ID NO: 14773 - DNA, 39 bp, synthetic construct
  source 1..39: mol_type = other DNA
ttaaaagattgtttttttgtttctgtccaggagacagga

SEQ ID NO: 14774 - DNA, 40 bp, synthetic construct
  source 1..40: mol_type = other DNA
tttaaaagattgtttttttgtttctgtccaggagacagga

SEQ ID NO: 14775 - DNA, 10 bp, synthetic construct
  source 1..10: mol_type = other DNA
ttgttttttt

SEQ ID NO: 14776 - DNA, 11 bp, synthetic construct
  source 1..11: mol_type = other DNA
attgttttttt

SEQ ID NO: 14777 - DNA, 12 bp, synthetic construct
  source 1..12: mol_type = other DNA
gattgttttttt

SEQ ID NO: 14778 - DNA, 13 bp, synthetic construct
  source 1..13: mol_type = other DNA
agattgttttttt

SEQ ID NO: 14779 - DNA, 14 bp, synthetic construct
  source 1..14: mol_type = other DNA
aagattgttttttt

SEQ ID NO: 14780 - DNA, 15 bp, synthetic construct
  source 1..15: mol_type = other DNA
aaagattgttttttt

SEQ ID NO: 14781 - DNA, 16 bp, synthetic construct
  source 1..16: mol_type = other DNA
aaaagattgttttttt

SEQ ID NO: 14782 - DNA, 17 bp, synthetic construct
  source 1..17: mol_type = other DNA
taaaagattgttttttt

SEQ ID NO: 14783 - DNA, 18 bp, synthetic construct
  source 1..18: mol_type = other DNA
ttaaaagattgttttttt

SEQ ID NO: 14784 - DNA, 19 bp, synthetic construct
  source 1..19: mol_type = other DNA
tttaaaagattgttttttt

SEQ ID NO: 14785 - DNA, 20 bp, synthetic construct
  source 1..20: mol_type = other DNA
gtttaaaagattgttttttt

SEQ ID NO: 14786 - DNA, 21 bp, synthetic construct
  source 1..21: mol_type = other DNA
tgtttaaaagattgttttttt

SEQ ID NO: 14787 - DNA, 22 bp, synthetic construct
  source 1..22: mol_type = other DNA
ctgtttaaaagattgttttttt

SEQ ID NO: 14788 - DNA, 23 bp, synthetic construct
  source 1..23: mol_type = other DNA
tctgtttaaaagattgttttttt

SEQ ID NO: 14789 - DNA, 24 bp, synthetic construct
  source 1..24: mol_type = other DNA
gtctgtttaaaagattgttttttt

SEQ ID NO: 14790 - DNA, 25 bp, synthetic construct
  source 1..25: mol_type = other DNA
agtctgtttaaaagattgttttttt

SEQ ID NO: 14791 - DNA, 26 bp, synthetic construct
  source 1..26: mol_type = other DNA
cagtctgtttaaaagattgttttttt

SEQ ID NO: 14792 - DNA, 27 bp, synthetic construct
  source 1..27: mol_type = other DNA
ccagtctgtttaaaagattgttttttt

SEQ ID NO: 14793 - DNA, 28 bp, synthetic construct
  source 1..28: mol_type = other DNA
tccagtctgtttaaaagattgttttttt

SEQ ID NO: 14794 - DNA, 29 bp, synthetic construct
  source 1..29: mol_type = other DNA
ctccagtctgtttaaaagattgttttttt

SEQ ID NO: 14795 - DNA, 30 bp, synthetic construct
  source 1..30: mol_type = other DNA
tctccagtctgtttaaaagattgttttttt

SEQ ID NO: 14796 - DNA, 31 bp, synthetic construct
  source 1..31: mol_type = other DNA
ctctccagtctgtttaaaagattgttttttt

SEQ ID NO: 14797 - DNA, 32 bp, synthetic construct
  source 1..32: mol_type = other DNA
actctccagtctgtttaaaagattgttttttt

SEQ ID NO: 14798 - DNA, 33 bp, synthetic construct
  source 1..33: mol_type = other DNA
aactctccagtctgtttaaaagattgttttttt

SEQ ID NO: 14799 - DNA, 34 bp, synthetic construct
  source 1..34: mol_type = other DNA
aaactctccagtctgtttaaaagattgttttttt

SEQ ID NO: 14800 - DNA, 35 bp, synthetic construct
  source 1..35: mol_type = other DNA
caaactctccagtctgtttaaaagattgttttttt

SEQ ID NO: 14801 - DNA, 36 bp, synthetic construct
  source 1..36: mol_type = other DNA
ccaaactctccagtctgtttaaaagattgttttttt

SEQ ID NO: 14802 - DNA, 37 bp, synthetic construct
  source 1..37: mol_type = other DNA
cccaaactctccagtctgtttaaaagattgttttttt

SEQ ID NO: 14803 - DNA, 38 bp, synthetic construct
  source 1..38: mol_type = other DNA
ccccaaactctccagtctgtttaaaagattgttttttt

SEQ ID NO: 14804 - DNA, 39 bp, synthetic construct
  source 1..39: mol_type = other DNA
tccccaaactctccagtctgtttaaaagattgttttttt

SEQ ID NO: 14805 - DNA, 40 bp, synthetic construct
  source 1..40: mol_type = other DNA
ttccccaaactctccagtctgtttaaaagattgttttttt

SEQ ID NO: 14806 - DNA, 10 bp, synthetic construct
  source 1..10: mol_type = other DNA
attgtttttt

SEQ ID NO: 14807 - DNA, 11 bp, synthetic construct
  source 1..11: mol_type = other DNA
gattgtttttt

SEQ ID NO: 14808 - DNA, 12 bp, synthetic construct
  source 1..12: mol_type = other DNA
agattgtttttt

SEQ ID NO: 14809 - DNA, 13 bp, synthetic construct
  source 1..13: mol_type = other DNA
aagattgtttttt

SEQ ID NO: 14810 - DNA, 14 bp, synthetic construct
  source 1..14: mol_type = other DNA
aaagattgtttttt

SEQ ID NO: 14811 - DNA, 15 bp, synthetic construct
  source 1..15: mol_type = other DNA
aaaagattgtttttt

SEQ ID NO: 14812 - DNA, 16 bp, synthetic construct
  source 1..16: mol_type = other DNA
taaaagattgtttttt

SEQ ID NO: 14813 - DNA, 17 bp, synthetic construct
  source 1..17: mol_type = other DNA
ttaaaagattgtttttt

SEQ ID NO: 14814 - DNA, 18 bp, synthetic construct
  source 1..18: mol_type = other DNA
tttaaaagattgtttttt

SEQ ID NO: 14815 - DNA, 19 bp, synthetic construct
  source 1..19: mol_type = other DNA
gtttaaaagattgtttttt

SEQ ID NO: 14816 - DNA, 20 bp, synthetic construct
  source 1..20: mol_type = other DNA
tgtttaaaagattgtttttt

SEQ ID NO: 14817 - DNA, 21 bp, synthetic construct
  source 1..21: mol_type = other DNA
ctgtttaaaagattgtttttt

SEQ ID NO: 14818 - DNA, 22 bp, synthetic construct
  source 1..22: mol_type = other DNA
tctgtttaaaagattgtttttt

SEQ ID NO: 14819 - DNA, 23 bp, synthetic construct
  source 1..23: mol_type = other DNA
gtctgtttaaaagattgtttttt

SEQ ID NO: 14820 - DNA, 24 bp, synthetic construct
  source 1..24: mol_type = other DNA
agtctgtttaaaagattgtttttt

SEQ ID NO: 14821 - DNA, 25 bp, synthetic construct
  source 1..25: mol_type = other DNA
cagtctgtttaaaagattgtttttt

SEQ ID NO: 14822 - DNA, 26 bp, synthetic construct
  source 1..26: mol_type = other DNA
ccagtctgtttaaaagattgtttttt

SEQ ID NO: 14823 - DNA, 27 bp, synthetic construct
  source 1..27: mol_type = other DNA
tccagtctgtttaaaagattgtttttt

SEQ ID NO: 14824 - DNA, 28 bp, synthetic construct
  source 1..28: mol_type = other DNA
ctccagtctgtttaaaagattgtttttt

SEQ ID NO: 14825 - DNA, 29 bp, synthetic construct
  source 1..29: mol_type = other DNA
tctccagtctgtttaaaagattgtttttt

SEQ ID NO: 14826 - DNA, 30 bp, synthetic construct
  source 1..30: mol_type = other DNA
ctctccagtctgtttaaaagattgtttttt

SEQ ID NO: 14827 - DNA, 31 bp, synthetic construct
  source 1..31: mol_type = other DNA
actctccagtctgtttaaaagattgtttttt

SEQ ID NO: 14828 - DNA, 32 bp, synthetic construct
  source 1..32: mol_type = other DNA
aactctccagtctgtttaaaagattgtttttt

SEQ ID NO: 14829 - DNA, 33 bp, synthetic construct
  source 1..33: mol_type = other DNA
aaactctccagtctgtttaaaagattgtttttt

SEQ ID NO: 14830 - DNA, 34 bp, synthetic construct
  source 1..34: mol_type = other DNA
caaactctccagtctgtttaaaagattgtttttt

SEQ ID NO: 14831 - DNA, 35 bp, synthetic construct
  source 1..35: mol_type = other DNA
ccaaactctccagtctgtttaaaagattgtttttt

SEQ ID NO: 14832 - DNA, 36 bp, synthetic construct
  source 1..36: mol_type = other DNA
cccaaactctccagtctgtttaaaagattgtttttt

SEQ ID NO: 14833 - DNA, 37 bp, synthetic construct
  source 1..37: mol_type = other DNA
ccccaaactctccagtctgtttaaaagattgtttttt

SEQ ID NO: 14834 - DNA, 38 bp, synthetic construct
  source 1..38: mol_type = other DNA
tccccaaactctccagtctgtttaaaagattgtttttt

SEQ ID NO: 14835 - DNA, 39 bp, synthetic construct
  source 1..39: mol_type = other DNA
ttccccaaactctccagtctgtttaaaagattgtttttt

SEQ ID NO: 14836 - DNA, 40 bp, synthetic construct
  source 1..40: mol_type = other DNA
tttccccaaactctccagtctgtttaaaagattgtttttt

SEQ ID NO: 14837 - DNA, 20 bp, synthetic construct
  source 1..20: mol_type = other DNA
aaacaatcttttaaacagac

SEQ ID NO: 14838 - DNA, 21 bp, synthetic construct
  source 1..21: mol_type = other DNA
aaaacaatcttttaaacagac

SEQ ID NO: 14839 - DNA, 22 bp, synthetic construct
  source 1..22: mol_type = other DNA
aaaaacaatcttttaaacagac

SEQ ID NO: 14840 - DNA, 23 bp, synthetic construct
  source 1..23: mol_type = other DNA
aaaaaacaatcttttaaacagac

SEQ ID NO: 14841 - DNA, 24 bp, synthetic construct
  source 1..24: mol_type = other DNA
aaaaaaacaatcttttaaacagac

SEQ ID NO: 14842 - DNA, 25 bp, synthetic construct
  source 1..25: mol_type = other DNA
caaaaaaacaatcttttaaacagac

SEQ ID NO: 14843 - DNA, 26 bp, synthetic construct
  source 1..26: mol_type = other DNA
acaaaaaaacaatcttttaaacagac

SEQ ID NO: 14844 - DNA, 27 bp, synthetic construct
  source 1..27: mol_type = other DNA
aacaaaaaaacaatcttttaaacagac

SEQ ID NO: 14845 - DNA, 28 bp, synthetic construct
  source 1..28: mol_type = other DNA
aaacaaaaaaacaatcttttaaacagac

SEQ ID NO: 14846 - DNA, 29 bp, synthetic construct
  source 1..29: mol_type = other DNA
gaaacaaaaaaacaatcttttaaacagac

SEQ ID NO: 14847 - DNA, 30 bp, synthetic construct
  source 1..30: mol_type = other DNA
agaaacaaaaaaacaatcttttaaacagac

SEQ ID NO: 14848 - DNA, 31 bp, synthetic construct
  source 1..31: mol_type = other DNA
cagaaacaaaaaaacaatcttttaaacagac

SEQ ID NO: 14849 - DNA, 32 bp, synthetic construct
  source 1..32: mol_type = other DNA
acagaaacaaaaaaacaatcttttaaacagac

SEQ ID NO: 14850 - DNA, 33 bp, synthetic construct
  source 1..33: mol_type = other DNA
gacagaaacaaaaaaacaatcttttaaacagac

SEQ ID NO: 14851 - DNA, 34 bp, synthetic construct
  source 1..34: mol_type = other DNA
ggacagaaacaaaaaaacaatcttttaaacagac

SEQ ID NO: 14852 - DNA, 35 bp, synthetic construct
  source 1..35: mol_type = other DNA
tggacagaaacaaaaaaacaatcttttaaacagac

SEQ ID NO: 14853 - DNA, 36 bp, synthetic construct
  source 1..36: mol_type = other DNA
ctggacagaaacaaaaaaacaatcttttaaacagac

SEQ ID NO: 14854 - DNA, 37 bp, synthetic construct
  source 1..37: mol_type = other DNA
cctggacagaaacaaaaaaacaatcttttaaacagac

SEQ ID NO: 14855 - DNA, 38 bp, synthetic construct
  source 1..38: mol_type = other DNA
tcctggacagaaacaaaaaaacaatcttttaaacagac

SEQ ID NO: 14856 - DNA, 39 bp, synthetic construct
  source 1..39: mol_type = other DNA
ctcctggacagaaacaaaaaaacaatcttttaaacagac

SEQ ID NO: 14857 - DNA, 40 bp, synthetic construct
  source 1..40: mol_type = other DNA
tctcctggacagaaacaaaaaaacaatcttttaaacagac

SEQ ID NO: 14858 - DNA, 12 bp, synthetic construct
  source 1..12: mol_type = other DNA
aacaaagcttta

SEQ ID NO: 14859 - DNA, 12 bp, synthetic construct
  source 1..12: mol_type = other DNA
aacaatctttta

SEQ ID NO: 14860 - DNA, 13 bp, synthetic construct
  source 1..13: mol_type = other DNA
aaacaatctttta

SEQ ID NO: 14861 - DNA, 13 bp, synthetic construct
  source 1..13: mol_type = other DNA
aaacaaagcttta

SEQ ID NO: 14862 - DNA, 14 bp, synthetic construct
  source 1..14: mol_type = other DNA
aaaacaatctttta

SEQ ID NO: 14863 - DNA, 14 bp, synthetic construct
  source 1..14: mol_type = other DNA
aaaacaaagcttta

SEQ ID NO: 14864 - DNA, 15 bp, synthetic construct
  source 1..15: mol_type = other DNA
aaaaacaaagcttta

SEQ ID NO: 14865 - DNA, 15 bp, synthetic construct
  source 1..15: mol_type = other DNA
aaaaacaatctttta

SEQ ID NO: 14866 - DNA, 16 bp, synthetic construct
  source 1..16: mol_type = other DNA
aaaaaacaatctttta

SEQ ID NO: 14867 - DNA, 16 bp, synthetic construct
  source 1..16: mol_type = other DNA
aaaaaacaaagcttta

SEQ ID NO: 14868 - DNA, 17 bp, synthetic construct
  source 1..17: mol_type = other DNA
aaaaaaacaatctttta

SEQ ID NO: 14869 - DNA, 17 bp, synthetic construct
  source 1..17: mol_type = other DNA
aaaaaaacaaagcttta

SEQ ID NO: 14870 - DNA, 18 bp, synthetic construct
  source 1..18: mol_type = other DNA
caaaaaaacaatctttta

SEQ ID NO: 14871 - DNA, 18 bp, synthetic construct
  source 1..18: mol_type = other DNA
caaaaaaacaaagcttta

SEQ ID NO: 14872 - DNA, 19 bp, synthetic construct
  source 1..19: mol_type = other DNA
acaaaaaaacaatctttta

SEQ ID NO: 14873 - DNA, 19 bp, synthetic construct
  source 1..19: mol_type = other DNA
acaaaaaaacaaagcttta

SEQ ID NO: 14874 - DNA, 20 bp, synthetic construct
  source 1..20: mol_type = other DNA
aacaaaaaaacaatctttta

SEQ ID NO: 14875 - DNA, 20 bp, synthetic construct
  source 1..20: mol_type = other DNA
aacaaaaaaacaaagcttta

SEQ ID NO: 14876 - DNA, 21 bp, synthetic construct
  source 1..21: mol_type = other DNA
aaacaaaaaaacaaagcttta

SEQ ID NO: 14877 - DNA, 21 bp, synthetic construct
  source 1..21: mol_type = other DNA
aaacaaaaaaacaatctttta

SEQ ID NO: 14878 - DNA, 22 bp, synthetic construct
  source 1..22: mol_type = other DNA
gaaacaaaaaaacaatctttta

SEQ ID NO: 14879 - DNA, 22 bp, synthetic construct
  source 1..22: mol_type = other DNA
gaaacaaaaaaacaaagcttta

SEQ ID NO: 14880 - DNA, 23 bp, synthetic construct
  source 1..23: mol_type = other DNA
agaaacaaaaaaacaaagcttta

SEQ ID NO: 14881 - DNA, 23 bp, synthetic construct
  source 1..23: mol_type = other DNA
agaaacaaaaaaacaatctttta

SEQ ID NO: 14882 - DNA, 24 bp, synthetic construct
  source 1..24: mol_type = other DNA
cagaaacaaaaaaacaatctttta

SEQ ID NO: 14883 - DNA, 24 bp, synthetic construct
  source 1..24: mol_type = other DNA
cagaaacaaaaaaacaaagcttta

SEQ ID NO: 14884 - DNA, 25 bp, synthetic construct
  source 1..25: mol_type = other DNA
acagaaacaaaaaaacaatctttta

SEQ ID NO: 14885 - DNA, 25 bp, synthetic construct
  source 1..25: mol_type = other DNA
acagaaacaaaaaaacaaagcttta

SEQ ID NO: 14886 - DNA, 26 bp, synthetic construct
  source 1..26: mol_type = other DNA
gacagaaacaaaaaaacaaagcttta

SEQ ID NO: 14887 - DNA, 26 bp, synthetic construct
  source 1..26: mol_type = other DNA
gacagaaacaaaaaaacaatctttta

SEQ ID NO: 14888 - DNA, 27 bp, synthetic construct
  source 1..27: mol_type = other DNA
ggacagaaacaaaaaaacaatctttta

SEQ ID NO: 14889 - DNA, 27 bp, synthetic construct
  source 1..27: mol_type = other DNA
ggacagaaacaaaaaaacaaagcttta

SEQ ID NO: 14890 - DNA, 28 bp, synthetic construct
  source 1..28: mol_type = other DNA
tggacagaaacaaaaaaacaaagcttta

SEQ ID NO: 14891 - DNA, 28 bp, synthetic construct
  source 1..28: mol_type = other DNA
tggacagaaacaaaaaaacaatctttta

SEQ ID NO: 14892 - DNA, 29 bp, synthetic construct
  source 1..29: mol_type = other DNA
ctggacagaaacaaaaaaacaatctttta

SEQ ID NO: 14893 - DNA, 29 bp, synthetic construct
  source 1..29: mol_type = other DNA
ctggacagaaacaaaaaaacaaagcttta

SEQ ID NO: 14894 - DNA, 30 bp, synthetic construct; identical to SEQ ID NO: 14491
  source 1..30: mol_type = other DNA

SEQ ID NO: 14895 - DNA, 30 bp, synthetic construct; identical to SEQ ID NO: 14492
  source 1..30: mol_type = other DNA

SEQ ID NO: 14896 - DNA, 31 bp, synthetic construct; identical to SEQ ID NO: 14493
  source 1..31: mol_type = other DNA

SEQ ID NO: 14897 - DNA, 31 bp, synthetic construct; identical to SEQ ID NO: 14494
  source 1..31: mol_type = other DNA

SEQ ID NO: 14898 - DNA, 32 bp, synthetic construct; identical to SEQ ID NO: 14496
  source 1..32: mol_type = other DNA

SEQ ID NO: 14899 - DNA, 32 bp, synthetic construct; identical to SEQ ID NO: 14495
  source 1..32: mol_type = other DNA

SEQ ID NO: 14900 - DNA, 33 bp, synthetic construct; identical to SEQ ID NO: 14498
  source 1..33: mol_type = other DNA

SEQ ID NO: 14901 - DNA, 33 bp, synthetic construct; identical to SEQ ID NO: 14497
  source 1..33: mol_type = other DNA

SEQ ID NO: 14902 - DNA, 34 bp, synthetic construct; identical to SEQ ID NO: 14500
  source 1..34: mol_type = other DNA

SEQ ID NO: 14903 - DNA, 34 bp, synthetic construct; identical to SEQ ID NO: 14499
  source 1..34: mol_type = other DNA

SEQ ID NO: 14904 - DNA, 35 bp, synthetic construct; identical to SEQ ID NO: 14501
  source 1..35: mol_type = other DNA

SEQ ID NO: 14905 - DNA, 35 bp, synthetic construct; identical to SEQ ID NO: 14502
  source 1..35: mol_type = other DNA

SEQ ID NO: 14906 - DNA, 36 bp, synthetic construct; identical to SEQ ID NO: 14504
  source 1..36: mol_type = other DNA

SEQ ID NO: 14907 - DNA, 36 bp, synthetic construct; identical to SEQ ID NO: 14503
  source 1..36: mol_type = other DNA

SEQ ID NO: 14908 - DNA, 37 bp, synthetic construct; identical to SEQ ID NO: 14506
  source 1..37: mol_type = other DNA

SEQ ID NO: 14909 - DNA, 37 bp, synthetic construct; identical to SEQ ID NO: 14505
  source 1..37: mol_type = other DNA

SEQ ID NO: 14910 - DNA, 38 bp, synthetic construct; identical to SEQ ID NO: 14507
  source 1..38: mol_type = other DNA

SEQ ID NO: 14911 - DNA, 38 bp, synthetic construct; identical to SEQ ID NO: 14508
  source 1..38: mol_type = other DNA

SEQ ID NO: 14912 - DNA, 39 bp, synthetic construct; identical to SEQ ID NO: 14510
  source 1..39: mol_type = other DNA

SEQ ID NO: 14913 - DNA, 39 bp, synthetic construct; identical to SEQ ID NO: 14509
  source 1..39: mol_type = other DNA

SEQ ID NO: 14914 - DNA, 40 bp, synthetic construct; identical to SEQ ID NO: 14511
  source 1..40: mol_type = other DNA

SEQ ID NO: 14915 - DNA, 40 bp, synthetic construct; identical to SEQ ID NO: 14512
  source 1..40: mol_type = other DNA

SEQ ID NO: 14916 - DNA, 40 bp, synthetic construct; identical to SEQ ID NO: 14513
  source 1..40: mol_type = other DNA

SEQ ID NO: 14917 - DNA, 38 bp, synthetic construct; identical to SEQ ID NO: 14514
  source 1..38: mol_type = other DNA

SEQ ID NO: 14918 - DNA, 39 bp, synthetic construct; identical to SEQ ID NO: 14515
  source 1..39: mol_type = other DNA

SEQ ID NO: 14919 - DNA, 40 bp, synthetic construct; identical to SEQ ID NO: 14516
  source 1..40: mol_type = other DNA

SEQ ID NO: 14920 - DNA, 11 bp, synthetic construct
  source 1..11: mol_type = other DNA
aacaatctttt

SEQ ID NO: 14921 - DNA, 12 bp, synthetic construct
  source 1..12: mol_type = other DNA
aaacaatctttt

SEQ ID NO: 14922 - DNA, 13 bp, synthetic construct
  source 1..13: mol_type = other DNA
aaaacaatctttt

SEQ ID NO: 14923 - DNA, 14 bp, synthetic construct
  source 1..14: mol_type = other DNA
aaaaacaatctttt

SEQ ID NO: 14924 - DNA, 15 bp, synthetic construct
  source 1..15: mol_type = other DNA
aaaaaacaatctttt

SEQ ID NO: 14925 - DNA, 16 bp, synthetic construct
  source 1..16: mol_type = other DNA
aaaaaaacaatctttt

SEQ ID NO: 14926 - DNA, 17 bp, synthetic construct
  source 1..17: mol_type = other DNA
caaaaaaacaatctttt

SEQ ID NO: 14927 - DNA, 18 bp, synthetic construct
  source 1..18: mol_type = other DNA
acaaaaaaacaatctttt

SEQ ID NO: 14928 - DNA, 19 bp, synthetic construct
  source 1..19: mol_type = other DNA
aacaaaaaaacaatctttt

SEQ ID NO: 14929 - DNA, 20 bp, synthetic construct
  source 1..20: mol_type = other DNA
aaacaaaaaaacaatctttt

SEQ ID NO: 14930 - DNA, 21 bp, synthetic construct
  source 1..21: mol_type = other DNA
gaaacaaaaaaacaatctttt

SEQ ID NO: 14931 - DNA, 22 bp, synthetic construct
  source 1..22: mol_type = other DNA
agaaacaaaaaaacaatctttt

SEQ ID NO: 14932 - DNA, 23 bp, synthetic construct
  source 1..23: mol_type = other DNA
cagaaacaaaaaaacaatctttt

SEQ ID NO: 14933 - DNA, 24 bp, synthetic construct
  source 1..24: mol_type = other DNA
acagaaacaaaaaaacaatctttt

SEQ ID NO: 14934 - DNA, 25 bp, synthetic construct
  source 1..25: mol_type = other DNA
gacagaaacaaaaaaacaatctttt

SEQ ID NO: 14935 - DNA, 26 bp, synthetic construct
  source 1..26: mol_type = other DNA
ggacagaaacaaaaaaacaatctttt

SEQ ID NO: 14936 - DNA, 27 bp, synthetic construct
  source 1..27: mol_type = other DNA
tggacagaaacaaaaaaacaatctttt

SEQ ID NO: 14937 - DNA, 28 bp, synthetic construct
  source 1..28: mol_type = other DNA
ctggacagaaacaaaaaaacaatctttt

SEQ ID NO: 14938 - DNA, 29 bp, synthetic construct
  source 1..29: mol_type = other DNA
cctggacagaaacaaaaaaacaatctttt

SEQ ID NO: 14939 - DNA, 30 bp, synthetic construct; identical to SEQ ID NO: 14535
  source 1..30: mol_type = other DNA

SEQ ID NO: 14940 - DNA, 31 bp, synthetic construct; identical to SEQ ID NO: 14536
  source 1..31: mol_type = other DNA

SEQ ID NO: 14941 - DNA, 32 bp, synthetic construct; identical to SEQ ID NO: 14537
  source 1..32: mol_type = other DNA

SEQ ID NO: 14942 - DNA, 33 bp, synthetic construct; identical to SEQ ID NO: 14538
  source 1..33: mol_type = other DNA

SEQ ID NO: 14943 - DNA, 34 bp, synthetic construct; identical to SEQ ID NO: 14539
  source 1..34: mol_type = other DNA

SEQ ID NO: 14944 - DNA, 35 bp, synthetic construct; identical to SEQ ID NO: 14540
  source 1..35: mol_type = other DNA

SEQ ID NO: 14945 - DNA, 36 bp, synthetic construct; identical to SEQ ID NO: 14541
  source 1..36: mol_type = other DNA

SEQ ID NO: 14946 - DNA, 37 bp, synthetic construct; identical to SEQ ID NO: 14542
  source 1..37: mol_type = other DNA

SEQ ID NO: 14947 - DNA, 38 bp, synthetic construct; identical to SEQ ID NO: 14543
  source 1..38: mol_type = other DNA

SEQ ID NO: 14948 - DNA, 39 bp, synthetic construct; identical to SEQ ID NO: 14544
  source 1..39: mol_type = other DNA

SEQ ID NO: 14949 - DNA, 40 bp, synthetic construct; identical to SEQ ID NO: 14545
  source 1..40: mol_type = other DNA

SEQ ID NO: 14950 - DNA, 22 bp, synthetic construct
  source 1..22: mol_type = other DNA
gtttttttgtttctgtccagga

SEQ ID NO: 14951 - DNA, 23 bp, synthetic construct
  source 1..23: mol_type = other DNA
tgtttttttgtttctgtccagga

SEQ ID NO: 14952 - DNA, 24 bp, synthetic construct
  source 1..24: mol_type = other DNA
ttgtttttttgtttctgtccagga

SEQ ID NO: 14953 - DNA, 25 bp, synthetic construct
  source 1..25: mol_type = other DNA
attgtttttttgtttctgtccagga

SEQ ID NO: 14954 - DNA, 26 bp, synthetic construct
  source 1..26: mol_type = other DNA
gattgtttttttgtttctgtccagga

SEQ ID NO: 14955 - DNA, 27 bp, synthetic construct
  source 1..27: mol_type = other DNA
agattgtttttttgtttctgtccagga

SEQ ID NO: 14956 - DNA, 28 bp, synthetic construct
  source 1..28: mol_type = other DNA
aagattgtttttttgtttctgtccagga

SEQ ID NO: 14957 - DNA, 29 bp, synthetic construct
  source 1..29: mol_type = other DNA
aaagattgtttttttgtttctgtccagga

SEQ ID NO: 14958 - DNA, 30 bp, synthetic construct; identical to SEQ ID NO: 14554
  source 1..30: mol_type = other DNA

SEQ ID NO: 14959 - DNA, 31 bp, synthetic construct; identical to SEQ ID NO: 14555
  source 1..31: mol_type = other DNA

SEQ ID NO: 14960 - DNA, 32 bp, synthetic construct; identical to SEQ ID NO: 14556
  source 1..32: mol_type = other DNA

SEQ ID NO: 14961 - DNA, 33 bp, synthetic construct; identical to SEQ ID NO: 14557
  source 1..33: mol_type = other DNA

SEQ ID NO: 14962 - DNA, 34 bp, synthetic construct; identical to SEQ ID NO: 14558
  source 1..34: mol_type = other DNA

SEQ ID NO: 14963 - DNA, 35 bp, synthetic construct; identical to SEQ ID NO: 14559
  source 1..35: mol_type = other DNA

SEQ ID NO: 14964 - DNA, 36 bp, synthetic construct; identical to SEQ ID NO: 14560
  source 1..36: mol_type = other DNA

SEQ ID NO: 14965 - DNA, 37 bp, synthetic construct; identical to SEQ ID NO: 14561
  source 1..37: mol_type = other DNA

SEQ ID NO: 14966 - DNA, 38 bp, synthetic construct; identical to SEQ ID NO: 14562
  source 1..38: mol_type = other DNA

SEQ ID NO: 14967 - DNA, 39 bp, synthetic construct; identical to SEQ ID NO: 14563
  source 1..39: mol_type = other DNA

SEQ ID NO: 14968 - DNA, 40 bp, synthetic construct; identical to SEQ ID NO: 14564
  source 1..40: mol_type = other DNA

SEQ ID NO: 14969 - DNA, 17 bp, synthetic construct
  source 1..17: mol_type = other DNA
gtttttttgtttctgtc

SEQ ID NO: 14970 - DNA, 18 bp, synthetic construct
  source 1..18: mol_type = other DNA
tgtttttttgtttctgtc

SEQ ID NO: 14971 - DNA, 19 bp, synthetic construct
  source 1..19: mol_type = other DNA
ttgtttttttgtttctgtc

SEQ ID NO: 14972 - DNA, 20 bp, synthetic construct
  source 1..20: mol_type = other DNA
attgtttttttgtttctgtc

SEQ ID NO: 14973 - DNA, 21 bp, synthetic construct
  source 1..21: mol_type = other DNA
gattgtttttttgtttctgtc

SEQ ID NO: 14974 - DNA, 22 bp, synthetic construct
  source 1..22: mol_type = other DNA
agattgtttttttgtttctgtc

SEQ ID NO: 14975 - DNA, 23 bp, synthetic construct
  source 1..23: mol_type = other DNA
aagattgtttttttgtttctgtc

SEQ ID NO: 14976 - DNA, 24 bp, synthetic construct
  source 1..24: mol_type = other DNA
aaagattgtttttttgtttctgtc

SEQ ID NO: 14977 - DNA, 25 bp, synthetic construct
  source 1..25: mol_type = other DNA
aaaagattgtttttttgtttctgtc

SEQ ID NO: 14978 - DNA, 26 bp, synthetic construct
  source 1..26: mol_type = other DNA
taaaagattgtttttttgtttctgtc

SEQ ID NO: 14979 - DNA, 27 bp, synthetic construct
  source 1..27: mol_type = other DNA
ttaaaagattgtttttttgtttctgtc

SEQ ID NO: 14980 - DNA, 28 bp, synthetic construct
  source 1..28: mol_type = other DNA
tttaaaagattgtttttttgtttctgtc

SEQ ID NO: 14981 - DNA, 29 bp, synthetic construct
  source 1..29: mol_type = other DNA
gtttaaaagattgtttttttgtttctgtc

SEQ ID NO: 14982 - DNA, 30 bp, synthetic construct; identical to SEQ ID NO: 14578
  source 1..30: mol_type = other DNA

SEQ ID NO: 14983 - DNA, 31 bp, synthetic construct; identical to SEQ ID NO: 14579
  source 1..31: mol_type = other DNA

SEQ ID NO: 14984 - DNA, 32 bp, synthetic construct; identical to SEQ ID NO: 14580
  source 1..32: mol_type = other DNA

SEQ ID NO: 14985 - DNA, 33 bp, synthetic construct; identical to SEQ ID NO: 14581
  source 1..33: mol_type = other DNA

SEQ ID NO: 14986 - DNA, 34 bp, synthetic construct; identical to SEQ ID NO: 14582
  source 1..34: mol_type = other DNA

SEQ ID NO: 14987 - DNA, 35 bp, synthetic construct; identical to SEQ ID NO: 14583
  source 1..35: mol_type = other DNA

SEQ ID NO: 14988 - DNA, 36 bp, synthetic construct; identical to SEQ ID NO: 14584
  source 1..36: mol_type = other DNA

SEQ ID NO: 14989 - DNA, 37 bp, synthetic construct; identical to SEQ ID NO: 14585
  source 1..37: mol_type = other DNA

SEQ ID NO: 14990 - DNA, 38 bp, synthetic construct; identical to SEQ ID NO: 14586
  source 1..38: mol_type = other DNA

SEQ ID NO: 14991 - DNA, 39 bp, synthetic construct; identical to SEQ ID NO: 14587
  source 1..39: mol_type = other DNA

SEQ ID NO: 14992 - DNA, 40 bp, synthetic construct; identical to SEQ ID NO: 14588
  source 1..40: mol_type = other DNA

SEQ ID NO: 14993 - DNA, 39 bp, synthetic construct; identical to SEQ ID NO: 14590
  source 1..39: mol_type = other DNA

SEQ ID NO: 14994 - DNA, 39 bp, synthetic construct; identical to SEQ ID NO: 14589
  source 1..39: mol_type = other DNA

SEQ ID NO: 14995 - DNA, 40 bp, synthetic construct; identical to SEQ ID NO: 14591
  source 1..40: mol_type = other DNA

SEQ ID NO: 14996 - DNA, 40 bp, synthetic construct; identical to SEQ ID NO: 14592
  source 1..40: mol_type = other DNA

SEQ ID NO: 14997 - DNA, 35 bp, synthetic construct; identical to SEQ ID NO: 14593
  source 1..35: mol_type = other DNA

SEQ ID NO: 14998 - DNA, 36 bp, synthetic construct; identical to SEQ ID NO: 14594
  source 1..36: mol_type = other DNA

SEQ ID NO: 14999 - DNA, 37 bp, synthetic construct; identical to SEQ ID NO: 14595
  source 1..37: mol_type = other DNA

SEQ ID NO: 15000 - DNA, 38 bp, synthetic construct; identical to SEQ ID NO: 14596
  source 1..38: mol_type = other DNA

SEQ ID NO: 15001 - DNA, 39 bp, synthetic construct; identical to SEQ ID NO: 14597
  source 1..39: mol_type = other DNA

SEQ ID NO: 15002 - DNA, 40 bp, synthetic construct; identical to SEQ ID NO: 14598
  source 1..40: mol_type = other DNA

SEQ ID NO: 15003 - DNA, 10 bp, synthetic construct
  source 1..10: mol_type = other DNA
aaaaacaatc

SEQ ID NO: 15004 - DNA, 11 bp, synthetic construct
  source 1..11: mol_type = other DNA
aaaaaacaatc

SEQ ID NO: 15005 - DNA, 12 bp, synthetic construct
  source 1..12: mol_type = other DNA
aaaaaaacaatc

SEQ ID NO: 15006 - DNA, 13 bp, synthetic construct
  source 1..13: mol_type = other DNA
caaaaaaacaatc

SEQ ID NO: 15007 - DNA, 14 bp, synthetic construct
  source 1..14: mol_type = other DNA
acaaaaaaacaatc

SEQ ID NO: 15008 - DNA, 15 bp, synthetic construct
  source 1..15: mol_type = other DNA
aacaaaaaaacaatc

SEQ ID NO: 15009 - DNA, 16 bp, synthetic construct
  source 1..16: mol_type = other DNA
aaacaaaaaaacaatc

SEQ ID NO: 15010 - DNA, 17 bp, synthetic construct
  source 1..17: mol_type = other DNA
gaaacaaaaaaacaatc

SEQ ID NO: 15011 - DNA, 18 bp, synthetic construct
  source 1..18: mol_type = other DNA
agaaacaaaaaaacaatc

SEQ ID NO: 15012 - DNA, 19 bp, synthetic construct
  source 1..19: mol_type = other DNA
cagaaacaaaaaaacaatc

SEQ ID NO: 15013 - DNA, 20 bp, synthetic construct
  source 1..20: mol_type = other DNA
acagaaacaaaaaaacaatc

SEQ ID NO: 15014 - DNA, 21 bp, synthetic construct
  source 1..21: mol_type = other DNA
gacagaaacaaaaaaacaatc

SEQ ID NO: 15015 - DNA, 22 bp, synthetic construct
  source 1..22: mol_type = other DNA
ggacagaaacaaaaaaacaatc

SEQ ID NO: 15016 - DNA, 23 bp, synthetic construct
  source 1..23: mol_type = other DNA
tggacagaaacaaaaaaacaatc

SEQ ID NO: 15017 - DNA, 24 bp, synthetic construct
  source 1..24: mol_type = other DNA
ctggacagaaacaaaaaaacaatc

SEQ ID NO: 15018 - DNA, 25 bp, synthetic construct
  source 1..25: mol_type = other DNA
cctggacagaaacaaaaaaacaatc

SEQ ID NO: 15019 - DNA, 26 bp, synthetic construct
  source 1..26: mol_type = other DNA
tcctggacagaaacaaaaaaacaatc

SEQ ID NO: 15020 - DNA, 27 bp, synthetic construct
  source 1..27: mol_type = other DNA
ctcctggacagaaacaaaaaaacaatc

SEQ ID NO: 15021 - DNA, 28 bp, synthetic construct
  source 1..28: mol_type = other DNA
tctcctggacagaaacaaaaaaacaatc

SEQ ID NO: 15022 - DNA, 29 bp, synthetic construct
  source 1..29: mol_type = other DNA
gtctcctggacagaaacaaaaaaacaatc

SEQ ID NO: 15023 - DNA, 30 bp, synthetic construct; identical to SEQ ID NO: 14619
  source 1..30: mol_type = other DNA

SEQ ID NO: 15024 - DNA, 31 bp, synthetic construct; identical to SEQ ID NO: 14620
  source 1..31: mol_type = other DNA

SEQ ID NO: 15025 - DNA, 32 bp, synthetic construct; identical to SEQ ID NO: 14621
  source 1..32: mol_type = other DNA

SEQ ID NO: 15026 - DNA, 33 bp, synthetic construct; identical to SEQ ID NO: 14622
  source 1..33: mol_type = other DNA

SEQ ID NO: 15027 - DNA, 34 bp, synthetic construct; identical to SEQ ID NO: 14623
  source 1..34: mol_type = other DNA

SEQ ID NO: 15028 - DNA, 35 bp, synthetic construct; identical to SEQ ID NO: 14624
  source 1..35: mol_type = other DNA

SEQ ID NO: 15029 - DNA, 36 bp, synthetic construct; identical to SEQ ID NO: 14625
  source 1..36: mol_type = other DNA

SEQ ID NO: 15030 - DNA, 37 bp, synthetic construct; identical to SEQ ID NO: 14626
  source 1..37: mol_type = other DNA

SEQ ID NO: 15031 - DNA, 38 bp, synthetic construct; identical to SEQ ID NO: 14627
  source 1..38: mol_type = other DNA

SEQ ID NO: 15032 - DNA, 39 bp, synthetic construct; identical to SEQ ID NO: 14628
  source 1..39: mol_type = other DNA

SEQ ID NO: 15033 - DNA, 40 bp, synthetic construct; identical to SEQ ID NO: 14629
  source 1..40: mol_type = other DNA

SEQ ID NO: 15034 - DNA, 24 bp, synthetic construct
  source 1..24: mol_type = other DNA
aacaatcttttaaacagactggag

SEQ ID NO: 15035 - DNA, 24 bp, synthetic construct
  source 1..24: mol_type = other DNA
aacaatcttttaaacagaccggag

SEQ ID NO: 15036 - DNA, 25 bp, synthetic construct
  source 1..25: mol_type = other DNA
aaacaatcttttaaacagaccggag

SEQ ID NO: 15037 - DNA, 25 bp, synthetic construct
  source 1..25: mol_type = other DNA
aaacaatcttttaaacagactggag

SEQ ID NO: 15038 - DNA, 26 bp, synthetic construct
  source 1..26: mol_type = other DNA
aaaacaatcttttaaacagactggag

SEQ ID NO: 15039 - DNA, 26 bp, synthetic construct
  source 1..26: mol_type = other DNA
aaaacaatcttttaaacagaccggag

SEQ ID NO: 15040 - DNA, 27 bp, synthetic construct
  source 1..27: mol_type = other DNA
aaaaacaatcttttaaacagactggag

SEQ ID NO: 15041 - DNA, 27 bp, synthetic construct
  source 1..27: mol_type = other DNA
aaaaacaatcttttaaacagaccggag

SEQ ID NO: 15042 - DNA, 28 bp, synthetic construct
  source 1..28: mol_type = other DNA
aaaaaacaatcttttaaacagactggag

SEQ ID NO: 15043 - DNA, 28 bp, synthetic construct
  source 1..28: mol_type = other DNA
aaaaaacaatcttttaaacagaccggag

SEQ ID NO: 15044 - DNA, 29 bp, synthetic construct
  source 1..29: mol_type = other DNA
aaaaaaacaatcttttaaacagaccggag

SEQ ID NO: 15045 - DNA, 29 bp, synthetic construct
  source 1..29: mol_type = other DNA
aaaaaaacaatcttttaaacagactggag

SEQ ID NO: 15046 - DNA, 30 bp, synthetic construct; identical to SEQ ID NO: 14641
  source 1..30: mol_type = other DNA

SEQ ID NO: 15047 - DNA, 30 bp, synthetic construct; identical to SEQ ID NO: 14640
  source 1..30: mol_type = other DNA

SEQ ID NO: 15048 - DNA, 31 bp, synthetic construct; identical to SEQ ID NO: 14643
  source 1..31: mol_type = other DNA

SEQ ID NO: 15049 - DNA, 31 bp, synthetic construct; identical to SEQ ID NO: 14642
  source 1..31: mol_type = other DNA

SEQ ID NO: 15050 - DNA, 32 bp, synthetic construct; identical to SEQ ID NO: 14645
  source 1..32: mol_type = other DNA

SEQ ID NO: 15051 - DNA, 32 bp, synthetic construct; identical to SEQ ID NO: 14644
  source 1..32: mol_type = other DNA

SEQ ID NO: 15052 - DNA, 33 bp, synthetic construct; identical to SEQ ID NO: 14646
  source 1..33: mol_type = other DNA

SEQ ID NO: 15053 - DNA, 33 bp, synthetic construct; identical to SEQ ID NO: 14647
  source 1..33: mol_type = other DNA

SEQ ID NO: 15054 - DNA, 34 bp, synthetic construct; identical to SEQ ID NO: 14648
  source 1..34: mol_type = other DNA

SEQ ID NO: 15055 - DNA, 34 bp, synthetic construct; identical to SEQ ID NO: 14649
  source 1..34: mol_type = other DNA

SEQ ID NO: 15056 - DNA, 35 bp, synthetic construct; identical to SEQ ID NO: 14650
  source 1..35: mol_type = other DNA

SEQ ID NO: 15057 - DNA, 35 bp, synthetic construct; identical to SEQ ID NO: 14651
  source 1..35: mol_type = other DNA

SEQ ID NO: 15058 - DNA, 36 bp, synthetic construct; identical to SEQ ID NO: 14653
  source 1..36: mol_type = other DNA

SEQ ID NO: 15059 - DNA, 36 bp, synthetic construct; identical to SEQ ID NO: 14652
  source 1..36: mol_type = other DNA

SEQ ID NO: 15060 - DNA, 37 bp, synthetic construct; identical to SEQ ID NO: 14654
  source 1..37: mol_type = other DNA

SEQ ID NO: 15061 - DNA, 37 bp, synthetic construct; identical to SEQ ID NO: 14655
  source 1..37: mol_type = other DNA

SEQ ID NO: 15062 - DNA, 38 bp, synthetic construct; identical to SEQ ID NO: 14657
  source 1..38: mol_type = other DNA

SEQ ID NO: 15063 - DNA, 38 bp, synthetic construct; identical to SEQ ID NO: 14656
  source 1..38: mol_type = other DNA

SEQ ID NO: 15064 - DNA, 39 bp, synthetic construct; identical to SEQ ID NO: 14659
  source 1..39: mol_type = other DNA

SEQ ID NO: 15065 - DNA, 39 bp, synthetic construct; identical to SEQ ID NO: 14658
  source 1..39: mol_type = other DNA

SEQ ID NO: 15066 - DNA, 40 bp, synthetic construct; identical to SEQ ID NO: 14661
  source 1..40: mol_type = other DNA

SEQ ID NO: 15067 - DNA, 40 bp, synthetic construct; identical to SEQ ID NO: 14660
  source 1..40: mol_type = other DNA

SEQ ID NO: 15068 - DNA, 23 bp, synthetic construct
  source 1..23: mol_type = other DNA
aacaatcttttaaacagactgga

SEQ ID NO: 15069 - DNA, 24 bp, synthetic construct
  source 1..24: mol_type = other DNA
aaacaatcttttaaacagactgga

SEQ ID NO: 15070 - DNA, 25 bp, synthetic construct
  source 1..25: mol_type = other DNA
aaaacaatcttttaaacagactgga

SEQ ID NO: 15071 - DNA, 26 bp, synthetic construct
  source 1..26: mol_type = other DNA
aaaaacaatcttttaaacagactgga

SEQ ID NO: 15072 - DNA, 27 bp, synthetic construct
  source 1..27: mol_type = other DNA
aaaaaacaatcttttaaacagactgga

SEQ ID NO: 15073 - DNA, 28 bp, synthetic construct
  source 1..28: mol_type = other DNA
aaaaaaacaatcttttaaacagactgga

SEQ ID NO: 15074 - DNA, 29 bp, synthetic construct
  source 1..29: mol_type = other DNA
caaaaaaacaatcttttaaacagactgga

SEQ ID NO: 15075 - DNA, 30 bp, synthetic construct; identical to SEQ ID NO: 14668
  source 1..30: mol_type = other DNA

SEQ ID NO: 15076 - DNA, 31 bp, synthetic construct; identical to SEQ ID NO: 14669
  source 1..31: mol_type = other DNA

SEQ ID NO: 15077 - DNA, 32 bp, synthetic construct; identical to SEQ ID NO: 14670
  source 1..32: mol_type = other DNA

SEQ ID NO: 15078 - DNA, 33 bp, synthetic construct; identical to SEQ ID NO: 14671
  source 1..33: mol_type = other DNA

SEQ ID NO: 15079 - DNA, 34 bp, synthetic construct; identical to SEQ ID NO: 14672
  source 1..34: mol_type = other DNA

SEQ ID NO: 15080 - DNA, 35 bp, synthetic construct; identical to SEQ ID NO: 14673
  source 1..35: mol_type = other DNA

SEQ ID NO: 15081 - DNA, 36 bp, synthetic construct; identical to SEQ ID NO: 14674
  source 1..36: mol_type = other DNA

SEQ ID NO: 15082 - DNA, 37 bp, synthetic construct; identical to SEQ ID NO: 14675
  source 1..37: mol_type = other DNA

SEQ ID NO: 15083 - DNA, 38 bp, synthetic construct; identical to SEQ ID NO: 14676
  source 1..38: mol_type = other DNA

SEQ ID NO: 15084 - DNA, 39 bp, synthetic construct; identical to SEQ ID NO: 14677
  source 1..39: mol_type = other DNA

SEQ ID NO: 15085 - DNA, 40 bp, synthetic construct; identical to SEQ ID NO: 14678
  source 1..40: mol_type = other DNA

SEQ ID NO: 15086 - DNA, 23 bp, synthetic construct
  source 1..23: mol_type = other DNA
gtttttttgtttctgtccaggag

SEQ ID NO: 15087 - DNA, 24 bp, synthetic construct
  source 1..24: mol_type = other DNA
tgtttttttgtttctgtccaggag

SEQ ID NO: 15088 - DNA, 25 bp, synthetic construct
  source 1..25: mol_type = other DNA
ttgtttttttgtttctgtccaggag

SEQ ID NO: 15089 - DNA, 26 bp, synthetic construct
  source 1..26: mol_type = other DNA
attgtttttttgtttctgtccaggag

SEQ ID NO: 15090 - DNA, 27 bp, synthetic construct
  source 1..27: mol_type = other DNA
gattgtttttttgtttctgtccaggag

SEQ ID NO: 15091 - DNA, 28 bp, synthetic construct
  source 1..28: mol_type = other DNA
agattgtttttttgtttctgtccaggag

SEQ ID NO: 15092 - DNA, 29 bp, synthetic construct
  source 1..29: mol_type = other DNA
aagattgtttttttgtttctgtccaggag

SEQ ID NO: 15093 - DNA, 30 bp, synthetic construct; identical to SEQ ID NO: 14686
  source 1..30: mol_type = other DNA

SEQ ID NO: 15094 - DNA, 31 bp, synthetic construct; identical to SEQ ID NO: 14687
  source 1..31: mol_type = other DNA

SEQ ID NO: 15095 - DNA, 32 bp, synthetic construct; identical to SEQ ID NO: 14688
  source 1..32: mol_type = other DNA

SEQ ID NO: 15096 - DNA, 33 bp, synthetic construct; identical to SEQ ID NO: 14689
  source 1..33: mol_type = other DNA

SEQ ID NO: 15097 - DNA, 34 bp, synthetic construct; identical to SEQ ID NO: 14690
  source 1..34: mol_type = other DNA

SEQ ID NO: 15098 - DNA, 35 bp, synthetic construct; identical to SEQ ID NO: 14691
  source 1..35: mol_type = other DNA

SEQ ID NO: 15099 - DNA, 36 bp, synthetic construct; identical to SEQ ID NO: 14692
  source 1..36: mol_type = other DNA

SEQ ID NO: 15100 - DNA, 37 bp, synthetic construct; identical to SEQ ID NO: 14693
  source 1..37: mol_type = other DNA

SEQ ID NO: 15101 - DNA, 38 bp, synthetic construct; identical to SEQ ID NO: 14694
  source 1..38: mol_type = other DNA

SEQ ID NO: 15102 - DNA, 39 bp, synthetic construct; identical to SEQ ID NO: 14695
  source 1..39: mol_type = other DNA

SEQ ID NO: 15103 - DNA, 40 bp, synthetic construct; identical to SEQ ID NO: 14696
  source 1..40: mol_type = other DNA

SEQ ID NO: 15104 - DNA, 18 bp, synthetic construct
  source 1..18: mol_type = other DNA
gtttttttgtttcggtcc

SEQ ID NO: 15105 - DNA, 18 bp, synthetic construct
  source 1..18: mol_type = other DNA
gtttttttgtttctgtcc

SEQ ID NO: 15106 - DNA, 19 bp, synthetic construct
  source 1..19: mol_type = other DNA
tgtttttttgtttcggtcc

SEQ ID NO: 15107 - DNA, 19 bp, synthetic construct
  source 1..19: mol_type = other DNA
tgtttttttgtttctgtcc

SEQ ID NO: 15108 - DNA, 20 bp, synthetic construct
  source 1..20: mol_type = other DNA
ttgtttttttgtttctgtcc

SEQ ID NO: 15109 - DNA, 20 bp, synthetic construct
  source 1..20: mol_type = other DNA
ttgtttttttgtttcggtcc

SEQ ID NO: 15110 - DNA, 21 bp, synthetic construct
  source 1..21: mol_type = other DNA
attgtttttttgtttctgtcc

SEQ ID NO: 15111 - DNA, 21 bp, synthetic construct
  source 1..21: mol_type = other DNA
attgtttttttgtttcggtcc

SEQ ID NO: 15112 - DNA, 22 bp, synthetic construct
  source 1..22: mol_type = other DNA
gattgtttttttgtttcggtcc

SEQ ID NO: 15113 - DNA, 22 bp, synthetic construct
  source 1..22: mol_type = other DNA
gattgtttttttgtttctgtcc

SEQ ID NO: 15114 - DNA, 23 bp, synthetic construct
  source 1..23: mol_type = other DNA
agattgtttttttgtttctgtcc

SEQ ID NO: 15115 - DNA, 23 bp, synthetic construct
  source 1..23: mol_type = other DNA
agattgtttttttgtttcggtcc

SEQ ID NO: 15116 - DNA, 24 bp, synthetic construct
  source 1..24: mol_type = other DNA
aagattgtttttttgtttcggtcc

SEQ ID NO: 15117 - DNA, 24 bp, synthetic construct
  source 1..24: mol_type = other DNA
aagattgtttttttgtttctgtcc

SEQ ID NO: 15118 - DNA, 25 bp, synthetic construct
  source 1..25: mol_type = other DNA
aaagattgtttttttgtttctgtcc

SEQ ID NO: 15119 - DNA, 25 bp, synthetic construct
  source 1..25: mol_type = other DNA
aaagattgtttttttgtttcggtcc

SEQ ID NO: 15120 - DNA, 26 bp, synthetic construct
  source 1..26: mol_type = other DNA
aaaagattgtttttttgtttcggtcc

SEQ ID NO: 15121 - DNA, 26 bp, synthetic construct
  source 1..26: mol_type = other DNA
aaaagattgtttttttgtttctgtcc

SEQ ID NO: 15122 - DNA, 27 bp, synthetic construct
  source 1..27: mol_type = other DNA
taaaagattgtttttttgtttcggtcc

SEQ ID NO: 15123 - DNA, 27 bp, synthetic construct
  source 1..27: mol_type = other DNA
taaaagattgtttttttgtttctgtcc

SEQ ID NO: 15124 - DNA, 28 bp, synthetic construct
  source 1..28: mol_type = other DNA
ttaaaagattgtttttttgtttctgtcc

SEQ ID NO: 15125 - DNA, 28 bp, synthetic construct
  source 1..28: mol_type = other DNA
ttaaaagattgtttttttgtttcggtcc

SEQ ID NO: 15126 - DNA, 29 bp, synthetic construct
  source 1..29: mol_type = other DNA
tttaaaagattgtttttttgtttctgtcc

SEQ ID NO: 15127 - DNA, 29 bp, synthetic construct
  source 1..29: mol_type = other DNA
tttaaaagattgtttttttgtttcggtcc

SEQ ID NO: 15128 - DNA, 30 bp, synthetic construct; identical to SEQ ID NO: 14721
  source 1..30: mol_type = other DNA

SEQ ID NO: 15129 - DNA, 30 bp, synthetic construct; identical to SEQ ID NO: 14722
  source 1..30: mol_type = other DNA

SEQ ID NO: 15130 - DNA, 31 bp, synthetic construct; identical to SEQ ID NO: 14723
  source 1..31: mol_type = other DNA

SEQ ID NO: 15131 - DNA, 31 bp, synthetic construct; identical to SEQ ID NO: 14724
  source 1..31: mol_type = other DNA

SEQ ID NO: 15132 - DNA, 32 bp, synthetic construct; identical to SEQ ID NO: 14725
  source 1..32: mol_type = other DNA

SEQ ID NO: 15133 - DNA, 32 bp, synthetic construct; identical to SEQ ID NO: 14726
  source 1..32: mol_type = other DNA

SEQ ID NO: 15134 - DNA, 33 bp, synthetic construct; identical to SEQ ID NO: 14727
  source 1..33: mol_type = other DNA

SEQ ID NO: 15135 - DNA, 33 bp, synthetic construct; identical to SEQ ID NO: 14728
  source 1..33: mol_type = other DNA

SEQ ID NO: 15136 - DNA, 34 bp, synthetic construct; identical to SEQ ID NO: 14729
  source 1..34: mol_type = other DNA

SEQ ID NO: 15137 - DNA, 34 bp, synthetic construct; identical to SEQ ID NO: 14730
  source 1..34: mol_type = other DNA

SEQ ID NO: 15138 - DNA, 35 bp, synthetic construct; identical to SEQ ID NO: 14731
  source 1..35: mol_type = other DNA

SEQ ID NO: 15139 - DNA, 35 bp, synthetic construct; identical to SEQ ID NO: 14732
  source 1..35: mol_type = other DNA

SEQ ID NO: 15140 - DNA, 36 bp, synthetic construct; identical to SEQ ID NO: 14734
  source 1..36: mol_type = other DNA

SEQ ID NO: 15141 - DNA, 36 bp, synthetic construct; identical to SEQ ID NO: 14733
  source 1..36: mol_type = other DNA

SEQ ID NO: 15142 - DNA, 37 bp, synthetic construct; identical to SEQ ID NO: 14735
  source 1..37: mol_type = other DNA

SEQ ID NO: 15143 - DNA, 37 bp, synthetic construct; identical to SEQ ID NO: 14736
  source 1..37: mol_type = other DNA

SEQ ID NO: 15144 - DNA, 38 bp, synthetic construct; identical to SEQ ID NO: 14738
  source 1..38: mol_type = other DNA

SEQ ID NO: 15145 - DNA, 38 bp, synthetic construct; identical to SEQ ID NO: 14737
  source 1..38: mol_type = other DNA

SEQ ID NO: 15146 - DNA, 39 bp, synthetic construct; identical to SEQ ID NO: 14740
  source 1..39: mol_type = other DNA

SEQ ID NO: 15147 - DNA, 39 bp, synthetic construct; identical to SEQ ID NO: 14739
  source 1..39: mol_type = other DNA

SEQ ID NO: 15148 - DNA, 40 bp, synthetic construct; identical to SEQ ID NO: 14742
  source 1..40: mol_type = other DNA

SEQ ID NO: 15149 - DNA, 40 bp, synthetic construct; identical to SEQ ID NO: 14741
  source 1..40: mol_type = other DNA

SEQ ID NO: 15150 - DNA, 21 bp, synthetic construct
  source 1..21: mol_type = other DNA
gtttttttgtttctgtccagg

SEQ ID NO: 15151 - DNA, 22 bp, synthetic construct
  source 1..22: mol_type = other DNA
tgtttttttgtttctgtccagg

SEQ ID NO: 15152 - DNA, 23 bp, synthetic construct
  source 1..23: mol_type = other DNA
ttgtttttttgtttctgtccagg

SEQ ID NO: 15153 - DNA, 24 bp, synthetic construct
  source 1..24: mol_type = other DNA
attgtttttttgtttctgtccagg

SEQ ID NO: 15154 - DNA, 25 bp, synthetic construct
  source 1..25: mol_type = other DNA
gattgtttttttgtttctgtccagg

SEQ ID NO: 15155 - DNA, 26 bp, synthetic construct
  source 1..26: mol_type = other DNA
agattgtttttttgtttctgtccagg

SEQ ID NO: 15156 - DNA, 27 bp, synthetic construct
  source 1..27: mol_type = other DNA
aagattgtttttttgtttctgtccagg

SEQ ID NO: 15157 - DNA, 28 bp, synthetic construct
  source 1..28: mol_type = other DNA
aaagattgtttttttgtttctgtccagg

SEQ ID NO: 15158 - DNA, 29 bp, synthetic construct
  source 1..29: mol_type = other DNA
aaaagattgtttttttgtttctgtccagg

SEQ ID NO: 15159 - DNA, 30 bp, synthetic construct; identical to SEQ ID NO: 14752
  source 1..30: mol_type = other DNA

SEQ ID NO: 15160 - DNA, 31 bp, synthetic construct; identical to SEQ ID NO: 14753
  source 1..31: mol_type = other DNA

SEQ ID NO: 15161 - DNA, 32 bp, synthetic construct; identical to SEQ ID NO: 14754
  source 1..32: mol_type = other DNA

SEQ ID NO: 15162 - DNA, 33 bp, synthetic construct; identical to SEQ ID NO: 14755
  source 1..33: mol_type = other DNA

SEQ ID NO: 15163 - DNA, 34 bp, synthetic construct; identical to SEQ ID NO: 14756
  source 1..34: mol_type = other DNA

SEQ ID NO: 15164 - DNA, 35 bp, synthetic construct; identical to SEQ ID NO: 14757
  source 1..35: mol_type = other DNA

SEQ ID NO: 15165 - DNA, 36 bp, synthetic construct; identical to SEQ ID NO: 14758
  source 1..36: mol_type = other DNA

SEQ ID NO: 15166 - DNA, 37 bp, synthetic construct; identical to SEQ ID NO: 14759
  source 1..37: mol_type = other DNA

SEQ ID NO: 15167 - DNA, 38 bp, synthetic construct; identical to SEQ ID NO: 14760
  source 1..38: mol_type = other DNA

SEQ ID NO: 15168 - DNA, 39 bp, synthetic construct; identical to SEQ ID NO: 14761
  source 1..39: mol_type = other DNA

SEQ ID NO: 15169 - DNA, 40 bp, synthetic construct; identical to SEQ ID NO: 14762
  source 1..40: mol_type = other DNA

SEQ ID NO: 15170 - DNA, 29 bp, synthetic construct
  source 1..29: mol_type = other DNA
gtttttttgtttctgtccaggagacagga

SEQ ID NO: 15171 - DNA, 30 bp, synthetic construct; identical to SEQ ID NO: 14764
  source 1..30: mol_type = other DNA

SEQ ID NO: 15172 - DNA, 31 bp, synthetic construct; identical to SEQ ID NO: 14765
  source 1..31: mol_type = other DNA

SEQ ID NO: 15173 - DNA, 32 bp, synthetic construct; identical to SEQ ID NO: 14766
  source 1..32: mol_type = other DNA

SEQ ID NO: 15174 - DNA, 33 bp, synthetic construct; identical to SEQ ID NO: 14767
  source 1..33: mol_type = other DNA

SEQ ID NO: 15175 - DNA, 34 bp, synthetic construct; identical to SEQ ID NO: 14768
  source 1..34: mol_type = other DNA

SEQ ID NO: 15176 - DNA, 35 bp, synthetic construct; identical to SEQ ID NO: 14769
  source 1..35: mol_type = other DNA

SEQ ID NO: 15177 - DNA, 36 bp, synthetic construct; identical to SEQ ID NO: 14770
  source 1..36: mol_type = other DNA

SEQ ID NO: 15178 - DNA, 37 bp, synthetic construct; identical to SEQ ID NO: 14771
  source 1..37: mol_type = other DNA

SEQ ID NO: 15179 - DNA, 38 bp, synthetic construct; identical to SEQ ID NO: 14772
  source 1..38: mol_type = other DNA

SEQ ID NO: 15180 - DNA, 39 bp, synthetic construct; identical to SEQ ID NO: 14773
  source 1..39: mol_type = other DNA

SEQ ID NO: 15181 - DNA, 40 bp, synthetic construct; identical to SEQ ID NO: 14774
  source 1..40: mol_type = other DNA

SEQ ID NO: 15182 - DNA, 19 bp, synthetic construct
  source 1..19: mol_type = other DNA
aacaatcttttaaacagac

SEQ ID NO: 15183 - DNA, 20 bp, synthetic construct
  source 1..20: mol_type = other DNA
aaacaatcttttaaacagac

SEQ ID NO: 15184 - DNA, 21 bp, synthetic construct
  source 1..21: mol_type = other DNA
aaaacaatcttttaaacagac

SEQ ID NO: 15185 - DNA, 22 bp, synthetic construct
  source 1..22: mol_type = other DNA
aaaaacaatcttttaaacagac

SEQ ID NO: 15186 - DNA, 23 bp, synthetic construct
  source 1..23: mol_type = other DNA
aaaaaacaatcttttaaacagac

SEQ ID NO: 15187 - DNA, 24 bp, synthetic construct
  source 1..24: mol_type = other DNA
aaaaaaacaatcttttaaacagac

SEQ ID NO: 15188 - DNA, 25 bp, synthetic construct
  source 1..25: mol_type = other DNA
caaaaaaacaatcttttaaacagac

SEQ ID NO: 15189 - DNA, 26 bp, synthetic construct
  source 1..26: mol_type = other DNA
acaaaaaaacaatcttttaaacagac

SEQ ID NO: 15190 - DNA, 27 bp, synthetic construct
  source 1..27: mol_type = other DNA
aacaaaaaaacaatcttttaaacagac

SEQ ID NO: 15191 - DNA, 28 bp, synthetic construct
  source 1..28: mol_type = other DNA
aaacaaaaaaacaatcttttaaacagac

SEQ ID NO: 15192 - DNA, 29 bp, synthetic construct
  source 1..29: mol_type = other DNA
gaaacaaaaaaacaatcttttaaacagac

SEQ ID NO: 15193 - DNA, 30 bp, synthetic construct; identical to SEQ ID NO: 14847
  source 1..30: mol_type = other DNA

SEQ ID NO: 15194 - DNA, 31 bp, synthetic construct; identical to SEQ ID NO: 14848
  source 1..31: mol_type = other DNA

SEQ ID NO: 15195 - DNA, 32 bp, synthetic construct; identical to SEQ ID NO: 14849
  source 1..32: mol_type = other DNA

SEQ ID NO: 15196 - DNA, 33 bp, synthetic construct; identical to SEQ ID NO: 14850
  source 1..33: mol_type = other DNA

SEQ ID NO: 15197 - DNA, 34 bp, synthetic construct; identical to SEQ ID NO: 14851
  source 1..34: mol_type = other DNA

SEQ ID NO: 15198 - DNA, 35 bp, synthetic construct; identical to SEQ ID NO: 14852
  source 1..35: mol_type = other DNA

SEQ ID NO: 15199 - DNA, 36 bp, synthetic construct; identical to SEQ ID NO: 14853
  source 1..36: mol_type = other DNA

SEQ ID NO: 15200 - DNA, 37 bp, synthetic construct; identical to SEQ ID NO: 14854
  source 1..37: mol_type = other DNA

SEQ ID NO: 15201 - DNA, 38 bp, synthetic construct; identical to SEQ ID NO: 14855
  source 1..38: mol_type = other DNA

SEQ ID NO: 15202 - DNA, 39 bp, synthetic construct; identical to SEQ ID NO: 14856
  source 1..39: mol_type = other DNA

SEQ ID NO: 15203 - DNA, 40 bp, synthetic construct; identical to SEQ ID NO: 14857
  source 1..40: mol_type = other DNA

SEQ ID NO: 15204 - DNA, 27 bp, synthetic construct
  source 1..27: mol_type = other DNA
agatgtggatagcttggtaagtcttat

SEQ ID NO: 15205 - DNA, 28 bp, synthetic construct
  source 1..28: mol_type = other DNA
tagatgtggatagcttggtaagtcttat

SEQ ID NO: 15206 - DNA, 29 bp, synthetic construct
  source 1..29: mol_type = other DNA
atagatgtggatagcttggtaagtcttat

SEQ ID NO: 15207 - DNA, 30 bp, synthetic construct
  source 1..30: mol_type = other DNA
catagatgtggatagcttggtaagtcttat

SEQ ID NO: 15208 - DNA, 31 bp, synthetic construct
  source 1..31: mol_type = other DNA
gcatagatgtggatagcttggtaagtcttat

SEQ ID NO: 15209 - DNA, 32 bp, synthetic construct
  source 1..32: mol_type = other DNA
agcatagatgtggatagcttggtaagtcttat

SEQ ID NO: 15210 - DNA, 33 bp, synthetic construct
  source 1..33: mol_type = other DNA
cagcatagatgtggatagcttggtaagtcttat

SEQ ID NO: 15211 - DNA, 34 bp, synthetic construct
  source 1..34: mol_type = other DNA
ccagcatagatgtggatagcttggtaagtcttat

SEQ ID NO: 15212 - DNA, 35 bp, synthetic construct
  source 1..35: mol_type = other DNA
tccagcatagatgtggatagcttggtaagtcttat

SEQ ID NO: 15213 - DNA, 36 bp, synthetic construct
  source 1..36: mol_type = other DNA
ctccagcatagatgtggatagcttggtaagtcttat

SEQ ID NO: 15214 - DNA, 37 bp, synthetic construct
  source 1..37: mol_type = other DNA
actccagcatagatgtggatagcttggtaagtcttat

SEQ ID NO: 15215 - DNA, 38 bp, synthetic construct
  source 1..38: mol_type = other DNA
aactccagcatagatgtggatagcttggtaagtcttat

SEQ ID NO: 15216 - DNA, 39 bp, synthetic construct
  source 1..39: mol_type = other DNA
aaactccagcatagatgtggatagcttggtaagtcttat

SEQ ID NO: 15217 - DNA, 40 bp, synthetic construct
  source 1..40: mol_type = other DNA
taaactccagcatagatgtggatagcttggtaagtcttat

SEQ ID NO: 15218 - DNA, 18 bp, synthetic construct
  source 1..18: mol_type = other DNA
agatgtggattctttggt

SEQ ID NO: 15219 - DNA, 18 bp, synthetic construct
  source 1..18: mol_type = other DNA
agatgtggatagcttggt

SEQ ID NO: 15220 - DNA, 19 bp, synthetic construct
  source 1..19: mol_type = other DNA
tagatgtggattctttggt

SEQ ID NO: 15221 - DNA, 19 bp, synthetic construct
  source 1..19: mol_type = other DNA
tagatgtggatagcttggt

SEQ ID NO: 15222 - DNA, 20 bp, synthetic construct
  source 1..20: mol_type = other DNA
atagatgtggattctttggt

SEQ ID NO: 15223 - DNA, 20 bp, synthetic construct
  source 1..20: mol_type = other DNA
atagatgtggatagcttggt

SEQ ID NO: 15224 - DNA, 21 bp, synthetic construct
  source 1..21: mol_type = other DNA
catagatgtggatagcttggt

SEQ ID NO: 15225 - DNA, 21 bp, synthetic construct
  source 1..21: mol_type = other DNA
catagatgtggattctttggt

SEQ ID NO: 15226 - DNA, 22 bp, synthetic construct
  source 1..22: mol_type = other DNA
gcatagatgtggattctttggt

SEQ ID NO: 15227 - DNA, 22 bp, synthetic construct
  source 1..22: mol_type = other DNA
gcatagatgtggatagcttggt

SEQ ID NO: 15228 - DNA, 23 bp, synthetic construct
  source 1..23: mol_type = other DNA
agcatagatgtggatagcttggt

SEQ ID NO: 15229 - DNA, 23 bp, synthetic construct
  source 1..23: mol_type = other DNA
agcatagatgtggattctttggt

SEQ ID NO: 15230 - DNA, 24 bp, synthetic construct
  source 1..24: mol_type = other DNA
cagcatagatgtggatagcttggt

SEQ ID NO: 15231 - DNA, 24 bp, synthetic construct
  source 1..24: mol_type = other DNA
cagcatagatgtggattctttggt

SEQ ID NO: 15232 - DNA, 25 bp, synthetic construct
  source 1..25: mol_type = other DNA
ccagcatagatgtggattctttggt

SEQ ID NO: 15233 - DNA, 25 bp, synthetic construct
  source 1..25: mol_type = other DNA
ccagcatagatgtggatagcttggt

SEQ ID NO: 15234 - DNA, 26 bp, synthetic construct
  source 1..26: mol_type = other DNA
tccagcatagatgtggatagcttggt

SEQ ID NO: 15235 - DNA, 26 bp, synthetic construct
  source 1..26: mol_type = other DNA
tccagcatagatgtggattctttggt

SEQ ID NO: 15236 - DNA, 27 bp, synthetic construct
  source 1..27: mol_type = other DNA
ctccagcatagatgtggatagcttggt

SEQ ID NO: 15237 - DNA, 27 bp, synthetic construct
  source 1..27: mol_type = other DNA
ctccagcatagatgtggattctttggt

SEQ ID NO: 15238 - DNA, 28 bp, synthetic construct
  source 1..28: mol_type = other DNA
actccagcatagatgtggattctttggt

SEQ ID NO: 15239 - DNA, 28 bp, synthetic construct
  source 1..28: mol_type = other DNA
actccagcatagatgtggatagcttggt

SEQ ID NO: 15240 - DNA, 29 bp, synthetic construct
  source 1..29: mol_type = other DNA
aactccagcatagatgtggatagcttggt

SEQ ID NO: 15241 - DNA, 29 bp, synthetic construct
  source 1..29: mol_type = other DNA
aactccagcatagatgtggattctttggt

SEQ ID NO: 15242 - DNA, 30 bp, synthetic construct
  source 1..30: mol_type = other DNA
aaactccagcatagatgtggattctttggt

SEQ ID NO: 15243 - DNA, 30 bp, synthetic construct
  source 1..30: mol_type = other DNA
aaactccagcatagatgtggatagcttggt

SEQ ID NO: 15244 - DNA, 31 bp, synthetic construct
  source 1..31: mol_type = other DNA
taaactccagcatagatgtggattctttggt

SEQ ID NO: 15245 - DNA, 31 bp, synthetic construct
  source 1..31: mol_type = other DNA
taaactccagcatagatgtggatagcttggt

SEQ ID NO: 15246 - DNA, 32 bp, synthetic construct
  source 1..32: mol_type = other DNA
gtaaactccagcatagatgtggatagcttggt

SEQ ID NO: 15247 - DNA, 32 bp, synthetic construct
  source 1..32: mol_type = other DNA
gtaaactccagcatagatgtggattctttggt

SEQ ID NO: 15248 - DNA, 33 bp, synthetic construct
  source 1..33: mol_type = other DNA
tgtaaactccagcatagatgtggattctttggt

SEQ ID NO: 15249 - DNA, 33 bp, synthetic construct
  source 1..33: mol_type = other DNA
tgtaaactccagcatagatgtggatagcttggt

SEQ ID NO: 15250 - DNA, 34 bp, synthetic construct
  source 1..34: mol_type = other DNA
ctgtaaactccagcatagatgtggatagcttggt

SEQ ID NO: 15251 - DNA, 34 bp, synthetic construct
  source 1..34: mol_type = other DNA
ctgtaaactccagcatagatgtggattctttggt

SEQ ID NO: 15252 - DNA, 35 bp, synthetic construct
  source 1..35: mol_type = other DNA
gctgtaaactccagcatagatgtggattctttggt

SEQ ID NO: 15253 - DNA, 35 bp, synthetic construct
  source 1..35: mol_type = other DNA
gctgtaaactccagcatagatgtggatagcttggt

SEQ ID NO: 15254 - DNA, 36 bp, synthetic construct
  source 1..36: mol_type = other DNA
ggctgtaaactccagcatagatgtggattctttggt

SEQ ID NO: 15255 - DNA, 36 bp, synthetic construct
  source 1..36: mol_type = other DNA
ggctgtaaactccagcatagatgtggatagcttggt

SEQ ID NO: 15256 - DNA, 37 bp, synthetic construct
  source 1..37: mol_type = other DNA
gggctgtaaactccagcatagatgtggatagcttggt

SEQ ID NO: 15257 - DNA, 37 bp, synthetic construct
  source 1..37: mol_type = other DNA
gggctgtaaactccagcatagatgtggattctttggt

SEQ ID NO: 15258 - DNA, 38 bp, synthetic construct
  source 1..38: mol_type = other DNA
tgggctgtaaactccagcatagatgtggattctttggt

SEQ ID NO: 15259 - DNA, 38 bp, synthetic construct
  source 1..38: mol_type = other DNA
tgggctgtaaactccagcatagatgtggatagcttggt

SEQ ID NO: 15260 - DNA, 39 bp, synthetic construct
  source 1..39: mol_type = other DNA
gtgggctgtaaactccagcatagatgtggattctttggt

SEQ ID NO: 15261 - DNA, 39 bp, synthetic construct
  source 1..39: mol_type = other DNA
gtgggctgtaaactccagcatagatgtggatagcttggt

SEQ ID NO: 15262 - DNA, 40 bp, synthetic construct
  source 1..40: mol_type = other DNA
agtgggctgtaaactccagcatagatgtggatagcttggt

SEQ ID NO: 15263 - DNA, 40 bp, synthetic construct
  source 1..40: mol_type = other DNA
agtgggctgtaaactccagcatagatgtggattctttggt

SEQ ID NO: 15264 - DNA, 17 bp, synthetic construct
  source 1..17: mol_type = other DNA
agatgtggatagcttgg

SEQ ID NO: 15265 - DNA, 18 bp, synthetic construct
  source 1..18: mol_type = other DNA
tagatgtggatagcttgg

SEQ ID NO: 15266 - DNA, 19 bp, synthetic construct
  source 1..19: mol_type = other DNA
atagatgtggatagcttgg

SEQ ID NO: 15267 - DNA, 20 bp, synthetic construct
  source 1..20: mol_type = other DNA
catagatgtggatagcttgg

SEQ ID NO: 15268 - DNA, 21 bp, synthetic construct
  source 1..21: mol_type = other DNA
gcatagatgtggatagcttgg

SEQ ID NO: 15269 - DNA, 22 bp, synthetic construct
  source 1..22: mol_type = other DNA
agcatagatgtggatagcttgg

SEQ ID NO: 15270 - DNA, 23 bp, synthetic construct
  source 1..23: mol_type = other DNA
cagcatagatgtggatagcttgg

SEQ ID NO: 15271 - DNA, 24 bp, synthetic construct
  source 1..24: mol_type = other DNA
ccagcatagatgtggatagcttgg

SEQ ID NO: 15272 - DNA, 25 bp, synthetic construct
  source 1..25: mol_type = other DNA
tccagcatagatgtggatagcttgg

SEQ ID NO: 15273 - DNA, 26 bp, synthetic construct
  source 1..26: mol_type = other DNA
ctccagcatagatgtggatagcttgg

SEQ ID NO: 15274 - DNA, 27 bp, synthetic construct
  source 1..27: mol_type = other DNA
actccagcatagatgtggatagcttgg

SEQ ID NO: 15275 - DNA, 28 bp, synthetic construct
  source 1..28: mol_type = other DNA
aactccagcatagatgtggatagcttgg

SEQ ID NO: 15276 - DNA, 29 bp, synthetic construct
  source 1..29: mol_type = other DNA
aaactccagcatagatgtggatagcttgg

SEQ ID NO: 15277 - DNA, 30 bp, synthetic construct
  source 1..30: mol_type = other DNA
taaactccagcatagatgtggatagcttgg

SEQ ID NO: 15278 - DNA, 31 bp, synthetic construct
  source 1..31: mol_type = other DNA
gtaaactccagcatagatgtggatagcttgg

SEQ ID NO: 15279 - DNA, 32 bp, synthetic construct
  source 1..32: mol_type = other DNA
tgtaaactccagcatagatgtggatagcttgg

SEQ ID NO: 15280 - DNA, 33 bp, synthetic construct
  source 1..33: mol_type = other DNA
ctgtaaactccagcatagatgtggatagcttgg

SEQ ID NO: 15281 - DNA, 34 bp, synthetic construct
  source 1..34: mol_type = other DNA
gctgtaaactccagcatagatgtggatagcttgg

SEQ ID NO: 15282 - DNA, 35 bp, synthetic construct
  source 1..35: mol_type = other DNA
ggctgtaaactccagcatagatgtggatagcttgg

SEQ ID NO: 15283 - DNA, 36 bp, synthetic construct
  source 1..36: mol_type = other DNA
gggctgtaaactccagcatagatgtggatagcttgg

SEQ ID NO: 15284 - DNA, 37 bp, synthetic construct
  source 1..37: mol_type = other DNA
tgggctgtaaactccagcatagatgtggatagcttgg

SEQ ID NO: 15285 - DNA, 38 bp, synthetic construct
  source 1..38: mol_type = other DNA
gtgggctgtaaactccagcatagatgtggatagcttgg

SEQ ID NO: 15286 - DNA, 39 bp, synthetic construct
  source 1..39: mol_type = other DNA
agtgggctgtaaactccagcatagatgtggatagcttgg

SEQ ID NO: 15287 - DNA, 40 bp, synthetic construct
  source 1..40: mol_type = other DNA
cagtgggctgtaaactccagcatagatgtggatagcttgg

SEQ ID NO: 15288 - DNA, 27 bp, synthetic construct
  source 1..27: mol_type = other DNA
tctatgctggagtttacagcccactgc

SEQ ID NO: 15289 - DNA, 28 bp, synthetic construct
  source 1..28: mol_type = other DNA
atctatgctggagtttacagcccactgc

SEQ ID NO: 15290 - DNA, 29 bp, synthetic construct
  source 1..29: mol_type = other DNA
catctatgctggagtttacagcccactgc

SEQ ID NO: 15291 - DNA, 30 bp, synthetic construct
  source 1..30: mol_type = other DNA
acatctatgctggagtttacagcccactgc

SEQ ID NO: 15292 - DNA, 31 bp, synthetic construct
  source 1..31: mol_type = other DNA
cacatctatgctggagtttacagcccactgc

SEQ ID NO: 15293 - DNA, 32 bp, synthetic construct
  source 1..32: mol_type = other DNA
ccacatctatgctggagtttacagcccactgc

SEQ ID NO: 15294 - DNA, 33 bp, synthetic construct
  source 1..33: mol_type = other DNA
tccacatctatgctggagtttacagcccactgc

SEQ ID NO: 15295 - DNA, 34 bp, synthetic construct
  source 1..34: mol_type = other DNA
atccacatctatgctggagtttacagcccactgc

SEQ ID NO: 15296 - DNA, 35 bp, synthetic construct
  source 1..35: mol_type = other DNA
tatccacatctatgctggagtttacagcccactgc

SEQ ID NO: 15297 - DNA, 36 bp, synthetic construct
  source 1..36: mol_type = other DNA
ctatccacatctatgctggagtttacagcccactgc

SEQ ID NO: 15298 - DNA, 37 bp, synthetic construct
  source 1..37: mol_type = other DNA
gctatccacatctatgctggagtttacagcccactgc

SEQ ID NO: 15299 - DNA, 38 bp, synthetic construct
  source 1..38: mol_type = other DNA
agctatccacatctatgctggagtttacagcccactgc

SEQ ID NO: 15300 - DNA, 39 bp, synthetic construct
  source 1..39: mol_type = other DNA
aagctatccacatctatgctggagtttacagcccactgc

SEQ ID NO: 15301 - DNA, 40 bp, synthetic construct
  source 1..40: mol_type = other DNA
caagctatccacatctatgctggagtttacagcccactgc

SEQ ID NO: 15302 - DNA, 40 bp, synthetic construct
  source 1..40: mol_type = other DNA
tctatgctggagtttacagcccactgcaatgtactcatga

SEQ ID NO: 15303 - DNA, 25 bp, synthetic construct
  source 1..25: mol_type = other DNA
tctatgctggagtttacagcccact

SEQ ID NO: 15304 - DNA, 26 bp, synthetic construct
  source 1..26: mol_type = other DNA
atctatgctggagtttacagcccact

SEQ ID NO: 15305 - DNA, 27 bp, synthetic construct
  source 1..27: mol_type = other DNA
catctatgctggagtttacagcccact

SEQ ID NO: 15306 - DNA, 28 bp, synthetic construct
  source 1..28: mol_type = other DNA
acatctatgctggagtttacagcccact

SEQ ID NO: 15307 - DNA, 29 bp, synthetic construct
  source 1..29: mol_type = other DNA
cacatctatgctggagtttacagcccact

SEQ ID NO: 15308 - DNA, 30 bp, synthetic construct
  source 1..30: mol_type = other DNA
ccacatctatgctggagtttacagcccact

SEQ ID NO: 15309 - DNA, 31 bp, synthetic construct
  source 1..31: mol_type = other DNA
tccacatctatgctggagtttacagcccact

SEQ ID NO: 15310 - DNA, 32 bp, synthetic construct
  source 1..32: mol_type = other DNA
atccacatctatgctggagtttacagcccact

SEQ ID NO: 15311 - DNA, 33 bp, synthetic construct
  source 1..33: mol_type = other DNA
tatccacatctatgctggagtttacagcccact

SEQ ID NO: 15312 - DNA, 34 bp, synthetic construct
  source 1..34: mol_type = other DNA
ctatccacatctatgctggagtttacagcccact

SEQ ID NO: 15313 - DNA, 35 bp, synthetic construct
  source 1..35: mol_type = other DNA
gctatccacatctatgctggagtttacagcccact

SEQ ID NO: 15314 - DNA, 36 bp, synthetic construct
  source 1..36: mol_type = other DNA
agctatccacatctatgctggagtttacagcccact

SEQ ID NO: 15315 - DNA, 37 bp, synthetic construct
  source 1..37: mol_type = other DNA
aagctatccacatctatgctggagtttacagcccact

SEQ ID NO: 15316 - DNA, 38 bp, synthetic construct
  source 1..38: mol_type = other DNA
caagctatccacatctatgctggagtttacagcccact

SEQ ID NO: 15317 - DNA, 39 bp, synthetic construct
  source 1..39: mol_type = other DNA
ccaagctatccacatctatgctggagtttacagcccact

SEQ ID NO: 15318 - DNA, 40 bp, synthetic construct
  source 1..40: mol_type = other DNA
accaagctatccacatctatgctggagtttacagcccact

SEQ ID NO: 15319 - DNA, 24 bp, synthetic construct
  source 1..24: mol_type = other DNA
tctatgctggagtttacagcccac

SEQ ID NO: 15320 - DNA, 25 bp, synthetic construct
  source 1..25: mol_type = other DNA
atctatgctggagtttacagcccac

SEQ ID NO: 15321 - DNA, 26 bp, synthetic construct
  source 1..26: mol_type = other DNA
catctatgctggagtttacagcccac

SEQ ID NO: 15322 - DNA, 27 bp, synthetic construct
  source 1..27: mol_type = other DNA
acatctatgctggagtttacagcccac

SEQ ID NO: 15323 - DNA, 28 bp, synthetic construct
  source 1..28: mol_type = other DNA
cacatctatgctggagtttacagcccac

SEQ ID NO: 15324 - DNA, 29 bp, synthetic construct
  source 1..29: mol_type = other DNA
ccacatctatgctggagtttacagcccac

SEQ ID NO: 15325 - DNA, 30 bp, synthetic construct
  source 1..30: mol_type = other DNA
tccacatctatgctggagtttacagcccac

SEQ ID NO: 15326 - DNA, 31 bp, synthetic construct
  source 1..31: mol_type = other DNA
atccacatctatgctggagtttacagcccac

SEQ ID NO: 15327 - DNA, 32 bp, synthetic construct
  source 1..32: mol_type = other DNA
tatccacatctatgctggagtttacagcccac

SEQ ID NO: 15328 - DNA, 33 bp, synthetic construct
  source 1..33: mol_type = other DNA
ctatccacatctatgctggagtttacagcccac

SEQ ID NO: 15329 - DNA, 34 bp, synthetic construct
  source 1..34: mol_type = other DNA
gctatccacatctatgctggagtttacagcccac

SEQ ID NO: 15330 - DNA, 35 bp, synthetic construct
  source 1..35: mol_type = other DNA
agctatccacatctatgctggagtttacagcccac

SEQ ID NO: 15331 - DNA, 36 bp, synthetic construct
  source 1..36: mol_type = other DNA
aagctatccacatctatgctggagtttacagcccac

SEQ ID NO: 15332 - DNA, 37 bp, synthetic construct
  source 1..37: mol_type = other DNA
caagctatccacatctatgctggagtttacagcccac

SEQ ID NO: 15333 - DNA, 38 bp, synthetic construct
  source 1..38: mol_type = other DNA
ccaagctatccacatctatgctggagtttacagcccac

SEQ ID NO: 15334 - DNA, 39 bp, synthetic construct
  source 1..39: mol_type = other DNA
accaagctatccacatctatgctggagtttacagcccac

SEQ ID NO: 15335 - DNA, 40 bp, synthetic construct
  source 1..40: mol_type = other DNA
taccaagctatccacatctatgctggagtttacagcccac

SEQ ID NO: 15336 - DNA, 21 bp, synthetic construct
  source 1..21: mol_type = other DNA
tctatgctggagtttacagcc

SEQ ID NO: 15337 - DNA, 22 bp, synthetic construct
  source 1..22: mol_type = other DNA
atctatgctggagtttacagcc

SEQ ID NO: 15338 - DNA, 23 bp, synthetic construct
  source 1..23: mol_type = other DNA
catctatgctggagtttacagcc

SEQ ID NO: 15339 - DNA, 24 bp, synthetic construct
  source 1..24: mol_type = other DNA
acatctatgctggagtttacagcc

SEQ ID NO: 15340 - DNA, 25 bp, synthetic construct
  source 1..25: mol_type = other DNA
cacatctatgctggagtttacagcc

SEQ ID NO: 15341 - DNA, 26 bp, synthetic construct
  source 1..26: mol_type = other DNA
ccacatctatgctggagtttacagcc

SEQ ID NO: 15342 - DNA, 27 bp, synthetic construct
  source 1..27: mol_type = other DNA
tccacatctatgctggagtttacagcc

SEQ ID NO: 15343 - DNA, 28 bp, synthetic construct
  source 1..28: mol_type = other DNA
atccacatctatgctggagtttacagcc

SEQ ID NO: 15344 - DNA, 29 bp, synthetic construct
  source 1..29: mol_type = other DNA
tatccacatctatgctggagtttacagcc

SEQ ID NO: 15345 - DNA, 30 bp, synthetic construct
  source 1..30: mol_type = other DNA
ctatccacatctatgctggagtttacagcc

SEQ ID NO: 15346 - DNA, 31 bp, synthetic construct
  source 1..31: mol_type = other DNA
gctatccacatctatgctggagtttacagcc

SEQ ID NO: 15347 - DNA, 32 bp, synthetic construct
  source 1..32: mol_type = other DNA
agctatccacatctatgctggagtttacagcc

SEQ ID NO: 15348 - DNA, 33 bp, synthetic construct
  source 1..33: mol_type = other DNA
aagctatccacatctatgctggagtttacagcc

SEQ ID NO: 15349 - DNA, 34 bp, synthetic construct
  source 1..34: mol_type = other DNA
caagctatccacatctatgctggagtttacagcc

SEQ ID NO: 15350 - DNA, 35 bp, synthetic construct
  source 1..35: mol_type = other DNA
ccaagctatccacatctatgctggagtttacagcc

SEQ ID NO: 15351 - DNA, 36 bp, synthetic construct
  source 1..36: mol_type = other DNA
accaagctatccacatctatgctggagtttacagcc

SEQ ID NO: 15352 - DNA, 37 bp, synthetic construct
  source 1..37: mol_type = other DNA
taccaagctatccacatctatgctggagtttacagcc

SEQ ID NO: 15353 - DNA, 38 bp, synthetic construct
  source 1..38: mol_type = other DNA
ttaccaagctatccacatctatgctggagtttacagcc

SEQ ID NO: 15354 - DNA, 39 bp, synthetic construct
  source 1..39: mol_type = other DNA
cttaccaagctatccacatctatgctggagtttacagcc

SEQ ID NO: 15355 - DNA, 40 bp, synthetic construct
  source 1..40: mol_type = other DNA
acttaccaagctatccacatctatgctggagtttacagcc

SEQ ID NO: 15356 - DNA, 31 bp, synthetic construct
  source 1..31: mol_type = other DNA
tctatgctggagtttacagcccactgcaatg

SEQ ID NO: 15357 - DNA, 32 bp, synthetic construct
  source 1..32: mol_type = other DNA
atctatgctggagtttacagcccactgcaatg

SEQ ID NO: 15358 - DNA, 33 bp, synthetic construct
  source 1..33: mol_type = other DNA
catctatgctggagtttacagcccactgcaatg

SEQ ID NO: 15359 - DNA, 34 bp, synthetic construct
  source 1..34: mol_type = other DNA
acatctatgctggagtttacagcccactgcaatg

SEQ ID NO: 15360 - DNA, 35 bp, synthetic construct
  source 1..35: mol_type = other DNA
cacatctatgctggagtttacagcccactgcaatg

SEQ ID NO: 15361 - DNA, 36 bp, synthetic construct
  source 1..36: mol_type = other DNA
ccacatctatgctggagtttacagcccactgcaatg

SEQ ID NO: 15362 - DNA, 37 bp, synthetic construct
  source 1..37: mol_type = other DNA
tccacatctatgctggagtttacagcccactgcaatg

SEQ ID NO: 15363 - DNA, 38 bp, synthetic construct
  source 1..38: mol_type = other DNA
atccacatctatgctggagtttacagcccactgcaatg

SEQ ID NO: 15364 - DNA, 39 bp, synthetic construct
  source 1..39: mol_type = other DNA
tatccacatctatgctggagtttacagcccactgcaatg

SEQ ID NO: 15365 - DNA, 40 bp, synthetic construct
  source 1..40: mol_type = other DNA
ctatccacatctatgctggagtttacagcccactgcaatg

SEQ ID NO: 15366 - DNA, 10 bp, synthetic construct
  source 1..10: mol_type = other DNA
tatccacatc

SEQ ID NO: 15367 - DNA, 11 bp, synthetic construct
  source 1..11: mol_type = other DNA
ctatccacatc

SEQ ID NO: 15368 - DNA, 12 bp, synthetic construct
  source 1..12: mol_type = other DNA
gctatccacatc

SEQ ID NO: 15369 - DNA, 13 bp, synthetic construct
  source 1..13: mol_type = other DNA
agctatccacatc

SEQ ID NO: 15370 - DNA, 14 bp, synthetic construct
  source 1..14: mol_type = other DNA
aagctatccacatc

SEQ ID NO: 15371 - DNA, 15 bp, synthetic construct
  source 1..15: mol_type = other DNA
caagctatccacatc

SEQ ID NO: 15372 - DNA, 16 bp, synthetic construct
  source 1..16: mol_type = other DNA
ccaagctatccacatc

SEQ ID NO: 15373 - DNA, 17 bp, synthetic construct
  source 1..17: mol_type = other DNA
accaagctatccacatc

SEQ ID NO: 15374 - DNA, 18 bp, synthetic construct
  source 1..18: mol_type = other DNA
taccaagctatccacatc

SEQ ID NO: 15375 - DNA, 19 bp, synthetic construct
  source 1..19: mol_type = other DNA
ttaccaagctatccacatc

SEQ ID NO: 15376 - DNA, 20 bp, synthetic construct
  source 1..20: mol_type = other DNA
cttaccaagctatccacatc

SEQ ID NO: 15377 - DNA, 21 bp, synthetic construct
  source 1..21: mol_type = other DNA
acttaccaagctatccacatc

SEQ ID NO: 15378 - DNA, 22 bp, synthetic construct
  source 1..22: mol_type = other DNA
gacttaccaagctatccacatc

SEQ ID NO: 15379 - DNA, 23 bp, synthetic construct
  source 1..23: mol_type = other DNA
agacttaccaagctatccacatc

SEQ ID NO: 15380 - DNA, 24 bp, synthetic construct
  source 1..24: mol_type = other DNA
aagacttaccaagctatccacatc

SEQ ID NO: 15381 - DNA, 25 bp, synthetic construct
  source 1..25: mol_type = other DNA
taagacttaccaagctatccacatc

SEQ ID NO: 15382 - DNA, 26 bp, synthetic construct
  source 1..26: mol_type = other DNA
ataagacttaccaagctatccacatc

SEQ ID NO: 15383 - DNA, 27 bp, synthetic construct
  source 1..27: mol_type = other DNA
gataagacttaccaagctatccacatc

SEQ ID NO: 15384 - DNA, 28 bp, synthetic construct
  source 1..28: mol_type = other DNA
tgataagacttaccaagctatccacatc

SEQ ID NO: 15385 - DNA, 29 bp, synthetic construct
  source 1..29: mol_type = other DNA
atgataagacttaccaagctatccacatc

SEQ ID NO: 15386 - DNA, 30 bp, synthetic construct
  source 1..30: mol_type = other DNA
gatgataagacttaccaagctatccacatc

SEQ ID NO: 15387 - DNA, 31 bp, synthetic construct
  source 1..31: mol_type = other DNA
agatgataagacttaccaagctatccacatc

SEQ ID NO: 15388 - DNA, 32 bp, synthetic construct
  source 1..32: mol_type = other DNA
aagatgataagacttaccaagctatccacatc

SEQ ID NO: 15389 - DNA, 33 bp, synthetic construct
  source 1..33: mol_type = other DNA
aaagatgataagacttaccaagctatccacatc

SEQ ID NO: 15390 - DNA, 34 bp, synthetic construct
  source 1..34: mol_type = other DNA
aaaagatgataagacttaccaagctatccacatc

SEQ ID NO: 15391 - DNA, 35 bp, synthetic construct
  source 1..35: mol_type = other DNA
aaaaagatgataagacttaccaagctatccacatc

SEQ ID NO: 15392 - DNA, 36 bp, synthetic construct
  source 1..36: mol_type = other DNA
taaaaagatgataagacttaccaagctatccacatc

SEQ ID NO: 15393 - DNA, 37 bp, synthetic construct
  source 1..37: mol_type = other DNA
ttaaaaagatgataagacttaccaagctatccacatc

SEQ ID NO: 15394 - DNA, 38 bp, synthetic construct
  source 1..38: mol_type = other DNA
gttaaaaagatgataagacttaccaagctatccacatc

SEQ ID NO: 15395 - DNA, 39 bp, synthetic construct
  source 1..39: mol_type = other DNA
agttaaaaagatgataagacttaccaagctatccacatc

SEQ ID NO: 15396 - DNA, 40 bp, synthetic construct
  source 1..40: mol_type = other DNA
aagttaaaaagatgataagacttaccaagctatccacatc

SEQ ID NO: 15397 - DNA, 39 bp, synthetic construct
  source 1..39: mol_type = other DNA
tctatgctggagtttacagcccactgcaatgtactcatg

SEQ ID NO: 15398 - DNA, 39 bp, synthetic construct
  source 1..39: mol_type = other DNA
tctatgctggagtttacagcccactgcaatgtggacatg

SEQ ID NO: 15399 - DNA, 40 bp, synthetic construct
  source 1..40: mol_type = other DNA
atctatgctggagtttacagcccactgcaatgtactcatg

SEQ ID NO: 15400 - DNA, 40 bp, synthetic construct
  source 1..40: mol_type = other DNA
atctatgctggagtttacagcccactgcaatgtggacatg

SEQ ID NO: 15401 - DNA, 38 bp, synthetic construct
  source 1..38: mol_type = other DNA
tctatgctggagtttacagcccactgcaatgtactcat

SEQ ID NO: 15402 - DNA, 39 bp, synthetic construct
  source 1..39: mol_type = other DNA
atctatgctggagtttacagcccactgcaatgtactcat

SEQ ID NO: 15403 - DNA, 40 bp, synthetic construct
  source 1..40: mol_type = other DNA
catctatgctggagtttacagcccactgcaatgtactcat

SEQ ID NO: 15404 - DNA, 29 bp, synthetic construct
  source 1..29: mol_type = other DNA
tctatgctggagtttacagcccactgcaa

SEQ ID NO: 15405 - DNA, 29 bp, synthetic construct
  source 1..29: mol_type = other DNA
tctatgctggagtttacagcccattgcaa

SEQ ID NO: 15406 - DNA, 30 bp, synthetic construct
  source 1..30: mol_type = other DNA
atctatgctggagtttacagcccattgcaa

SEQ ID NO: 15407 - DNA, 30 bp, synthetic construct
  source 1..30: mol_type = other DNA
atctatgctggagtttacagcccactgcaa

SEQ ID NO: 15408 - DNA, 31 bp, synthetic construct
  source 1..31: mol_type = other DNA
catctatgctggagtttacagcccattgcaa

SEQ ID NO: 15409 - DNA, 31 bp, synthetic construct
  source 1..31: mol_type = other DNA
catctatgctggagtttacagcccactgcaa

SEQ ID NO: 15410 - DNA, 32 bp, synthetic construct
  source 1..32: mol_type = other DNA
acatctatgctggagtttacagcccactgcaa

SEQ ID NO: 15411 - DNA, 32 bp, synthetic construct
  source 1..32: mol_type = other DNA
acatctatgctggagtttacagcccattgcaa

SEQ ID NO: 15412 - DNA, 33 bp, synthetic construct
  source 1..33: mol_type = other DNA
cacatctatgctggagtttacagcccattgcaa

SEQ ID NO: 15413 - DNA, 33 bp, synthetic construct
  source 1..33: mol_type = other DNA
cacatctatgctggagtttacagcccactgcaa

SEQ ID NO: 15414 - DNA, 34 bp, synthetic construct
  source 1..34: mol_type = other DNA
ccacatctatgctggagtttacagcccattgcaa

SEQ ID NO: 15415 - DNA, 34 bp, synthetic construct
  source 1..34: mol_type = other DNA
ccacatctatgctggagtttacagcccactgcaa

SEQ ID NO: 15416 - DNA, 35 bp, synthetic construct
  source 1..35: mol_type = other DNA
tccacatctatgctggagtttacagcccactgcaa

SEQ ID NO: 15417 - DNA, 35 bp, synthetic construct
  source 1..35: mol_type = other DNA
tccacatctatgctggagtttacagcccattgcaa

SEQ ID NO: 15418 - DNA, 36 bp, synthetic construct
  source 1..36: mol_type = other DNA
atccacatctatgctggagtttacagcccactgcaa

SEQ ID NO: 15419 - DNA, 36 bp, synthetic construct
  source 1..36: mol_type = other DNA
atccacatctatgctggagtttacagcccattgcaa

SEQ ID NO: 15420 - DNA, 37 bp, synthetic construct
  source 1..37: mol_type = other DNA
tatccacatctatgctggagtttacagcccattgcaa

SEQ ID NO: 15421 - DNA, 37 bp, synthetic construct
  source 1..37: mol_type = other DNA
tatccacatctatgctggagtttacagcccactgcaa

SEQ ID NO: 15422 - DNA, 38 bp, synthetic construct
  source 1..38: mol_type = other DNA
ctatccacatctatgctggagtttacagcccattgcaa

SEQ ID NO: 15423 - DNA, 38 bp, synthetic construct
  source 1..38: mol_type = other DNA
ctatccacatctatgctggagtttacagcccactgcaa

SEQ ID NO: 15424 - DNA, 39 bp, synthetic construct
  source 1..39: mol_type = other DNA
gctatccacatctatgctggagtttacagcccactgcaa

SEQ ID NO: 15425 - DNA, 39 bp, synthetic construct
  source 1..39: mol_type = other DNA
gctatccacatctatgctggagtttacagcccattgcaa

SEQ ID NO: 15426 - DNA, 40 bp, synthetic construct
  source 1..40: mol_type = other DNA
agctatccacatctatgctggagtttacagcccactgcaa

SEQ ID NO: 15427 - DNA, 40 bp, synthetic construct
  source 1..40: mol_type = other DNA
agctatccacatctatgctggagtttacagcccattgcaa

SEQ ID NO: 15428 - DNA, 28 bp, synthetic construct
  source 1..28: mol_type = other DNA
tctatgctggagtttacagcccactgca

SEQ ID NO: 15429 - DNA, 29 bp, synthetic construct
  source 1..29: mol_type = other DNA
atctatgctggagtttacagcccactgca

SEQ ID NO: 15430 - DNA, 30 bp, synthetic construct
  source 1..30: mol_type = other DNA
catctatgctggagtttacagcccactgca

SEQ ID NO: 15431 - DNA, 31 bp, synthetic construct
  source 1..31: mol_type = other DNA
acatctatgctggagtttacagcccactgca

SEQ ID NO: 15432 - DNA, 32 bp, synthetic construct
  source 1..32: mol_type = other DNA
cacatctatgctggagtttacagcccactgca

SEQ ID NO: 15433 - DNA, 33 bp, synthetic construct
  source 1..33: mol_type = other DNA
ccacatctatgctggagtttacagcccactgca

SEQ ID NO: 15434 - DNA, 34 bp, synthetic construct
  source 1..34: mol_type = other DNA
tccacatctatgctggagtttacagcccactgca

SEQ ID NO: 15435 - DNA, 35 bp, synthetic construct
  source 1..35: mol_type = other DNA
atccacatctatgctggagtttacagcccactgca

SEQ ID NO: 15436 - DNA, 36 bp, synthetic construct
  source 1..36: mol_type = other DNA
tatccacatctatgctggagtttacagcccactgca

SEQ ID NO: 15437 - DNA, 37 bp, synthetic construct
  source 1..37: mol_type = other DNA
ctatccacatctatgctggagtttacagcccactgca

SEQ ID NO: 15438 - DNA, 38 bp, synthetic construct
  source 1..38: mol_type = other DNA
gctatccacatctatgctggagtttacagcccactgca

SEQ ID NO: 15439 - DNA, 39 bp, synthetic construct
  source 1..39: mol_type = other DNA
agctatccacatctatgctggagtttacagcccactgca

SEQ ID NO: 15440 - DNA, 40 bp, synthetic construct
  source 1..40: mol_type = other DNA
aagctatccacatctatgctggagtttacagcccactgca

SEQ ID NO: 15441 - DNA, 10 bp, synthetic construct
  source 1..10: mol_type = other DNA
gcatagatgt

SEQ ID NO: 15442 - DNA, 11 bp, synthetic construct
  source 1..11: mol_type = other DNA
agcatagatgt

SEQ ID NO: 15443 - DNA, 12 bp, synthetic construct
  source 1..12: mol_type = other DNA
cagcatagatgt

SEQ ID NO: 15444 - DNA, 13 bp, synthetic construct
  source 1..13: mol_type = other DNA
ccagcatagatgt

SEQ ID NO: 15445 - DNA, 14 bp, synthetic construct
  source 1..14: mol_type = other DNA
tccagcatagatgt

SEQ ID NO: 15446 - DNA, 15 bp, synthetic construct
  source 1..15: mol_type = other DNA
ctccagcatagatgt

SEQ ID NO: 15447 - DNA, 16 bp, synthetic construct
  source 1..16: mol_type = other DNA
actccagcatagatgt

SEQ ID NO: 15448 - DNA, 17 bp, synthetic construct
  source 1..17: mol_type = other DNA
aactccagcatagatgt

SEQ ID NO: 15449 - DNA, 18 bp, synthetic construct
  source 1..18: mol_type = other DNA
aaactccagcatagatgt

SEQ ID NO: 15450 - DNA, 19 bp, synthetic construct
  source 1..19: mol_type = other DNA
taaactccagcatagatgt

SEQ ID NO: 15451 - DNA, 20 bp, synthetic construct
  source 1..20: mol_type = other DNA
gtaaactccagcatagatgt

SEQ ID NO: 15452 - DNA, 21 bp, synthetic construct
  source 1..21: mol_type = other DNA
tgtaaactccagcatagatgt

SEQ ID NO: 15453 - DNA, 22 bp, synthetic construct
  source 1..22: mol_type = other DNA
ctgtaaactccagcatagatgt

SEQ ID NO: 15454 - DNA, 23 bp, synthetic construct
  source 1..23: mol_type = other DNA
gctgtaaactccagcatagatgt

SEQ ID NO: 15455 - DNA, 24 bp, synthetic construct
  source 1..24: mol_type = other DNA
ggctgtaaactccagcatagatgt

SEQ ID NO: 15456 - DNA, 25 bp, synthetic construct
  source 1..25: mol_type = other DNA
gggctgtaaactccagcatagatgt

SEQ ID NO: 15457 - DNA, 26 bp, synthetic construct
  source 1..26: mol_type = other DNA
tgggctgtaaactccagcatagatgt

SEQ ID NO: 15458 - DNA, 27 bp, synthetic construct
  source 1..27: mol_type = other DNA
gtgggctgtaaactccagcatagatgt

SEQ ID NO: 15459 - DNA, 28 bp, synthetic construct
  source 1..28: mol_type = other DNA
agtgggctgtaaactccagcatagatgt

SEQ ID NO: 15460 - DNA, 29 bp, synthetic construct
  source 1..29: mol_type = other DNA
cagtgggctgtaaactccagcatagatgt

SEQ ID NO: 15461 - DNA, 30 bp, synthetic construct
  source 1..30: mol_type = other DNA
gcagtgggctgtaaactccagcatagatgt

SEQ ID NO: 15462 - DNA, 31 bp, synthetic construct
  source 1..31: mol_type = other DNA
tgcagtgggctgtaaactccagcatagatgt

SEQ ID NO: 15463 - DNA, 32 bp, synthetic construct
  source 1..32: mol_type = other DNA
ttgcagtgggctgtaaactccagcatagatgt

SEQ ID NO: 15464 - DNA, 33 bp, synthetic construct
  source 1..33: mol_type = other DNA
attgcagtgggctgtaaactccagcatagatgt

SEQ ID NO: 15465 - DNA, 34 bp, synthetic construct
  source 1..34: mol_type = other DNA
cattgcagtgggctgtaaactccagcatagatgt

SEQ ID NO: 15466 - DNA, 35 bp, synthetic construct
  source 1..35: mol_type = other DNA
acattgcagtgggctgtaaactccagcatagatgt

SEQ ID NO: 15467 - DNA, 36 bp, synthetic construct
  source 1..36: mol_type = other DNA
tacattgcagtgggctgtaaactccagcatagatgt

SEQ ID NO: 15468 - DNA, 37 bp, synthetic construct
  source 1..37: mol_type = other DNA
gtacattgcagtgggctgtaaactccagcatagatgt

SEQ ID NO: 15469 - DNA, 38 bp, synthetic construct
  source 1..38: mol_type = other DNA
agtacattgcagtgggctgtaaactccagcatagatgt

SEQ ID NO: 15470 - DNA, 39 bp, synthetic construct
  source 1..39: mol_type = other DNA
gagtacattgcagtgggctgtaaactccagcatagatgt

SEQ ID NO: 15471 - DNA, 40 bp, synthetic construct
  source 1..40: mol_type = other DNA
tgagtacattgcagtgggctgtaaactccagcatagatgt

SEQ ID NO: 15472 - DNA, 10 bp, synthetic construct
  source 1..10: mol_type = other DNA
atccacatct

SEQ ID NO: 15473 - DNA, 11 bp, synthetic construct
  source 1..11: mol_type = other DNA
tatccacatct

SEQ ID NO: 15474 - DNA, 12 bp, synthetic construct
  source 1..12: mol_type = other DNA
ctatccacatct

SEQ ID NO: 15475 - DNA, 13 bp, synthetic construct
  source 1..13: mol_type = other DNA
gctatccacatct

SEQ ID NO: 15476 - DNA, 14 bp, synthetic construct
  source 1..14: mol_type = other DNA
agctatccacatct

SEQ ID NO: 15477 - DNA, 15 bp, synthetic construct
  source 1..15: mol_type = other DNA
aagctatccacatct

SEQ ID NO: 15478 - DNA, 16 bp, synthetic construct
  source 1..16: mol_type = other DNA
caagctatccacatct

SEQ ID NO: 15479 - DNA, 17 bp, synthetic construct
  source 1..17: mol_type = other DNA
ccaagctatccacatct

SEQ ID NO: 15480 - DNA, 18 bp, synthetic construct
  source 1..18: mol_type = other DNA
accaagctatccacatct

SEQ ID NO: 15481 - DNA, 19 bp, synthetic construct
  source 1..19: mol_type = other DNA
taccaagctatccacatct

SEQ ID NO: 15482 - DNA, 20 bp, synthetic construct
  source 1..20: mol_type = other DNA
ttaccaagctatccacatct

SEQ ID NO: 15483 - DNA, 21 bp, synthetic construct
  source 1..21: mol_type = other DNA
cttaccaagctatccacatct

SEQ ID NO: 15484 - DNA, 22 bp, synthetic construct
  source 1..22: mol_type = other DNA
acttaccaagctatccacatct

SEQ ID NO: 15485 - DNA, 23 bp, synthetic construct
  source 1..23: mol_type = other DNA
gacttaccaagctatccacatct

SEQ ID NO: 15486 - DNA, 24 bp, synthetic construct
  source 1..24: mol_type = other DNA
agacttaccaagctatccacatct

SEQ ID NO: 15487 - DNA, 25 bp, synthetic construct
  source 1..25: mol_type = other DNA
aagacttaccaagctatccacatct

SEQ ID NO: 15488 - DNA, 26 bp, synthetic construct
  source 1..26: mol_type = other DNA
taagacttaccaagctatccacatct

SEQ ID NO: 15489 - DNA, 27 bp, synthetic construct
  source 1..27: mol_type = other DNA
ataagacttaccaagctatccacatct

SEQ ID NO: 15490 - DNA, 28 bp, synthetic construct
  source 1..28: mol_type = other DNA
gataagacttaccaagctatccacatct

SEQ ID NO: 15491 - DNA, 29 bp, synthetic construct
  source 1..29: mol_type = other DNA
tgataagacttaccaagctatccacatct

SEQ ID NO: 15492 - DNA, 30 bp, synthetic construct
  source 1..30: mol_type = other DNA
atgataagacttaccaagctatccacatct

SEQ ID NO: 15493 - DNA, 31 bp, synthetic construct
  source 1..31: mol_type = other DNA
gatgataagacttaccaagctatccacatct

SEQ ID NO: 15494 - DNA, 32 bp, synthetic construct
  source 1..32: mol_type = other DNA
agatgataagacttaccaagctatccacatct

SEQ ID NO: 15495 - DNA, 33 bp, synthetic construct
  source 1..33: mol_type = other DNA
aagatgataagacttaccaagctatccacatct

SEQ ID NO: 15496 - DNA, 34 bp, synthetic construct
  source 1..34: mol_type = other DNA
aaagatgataagacttaccaagctatccacatct

SEQ ID NO: 15497 - DNA, 35 bp, synthetic construct
  source 1..35: mol_type = other DNA
aaaagatgataagacttaccaagctatccacatct

SEQ ID NO: 15498 - DNA, 36 bp, synthetic construct
  source 1..36: mol_type = other DNA
aaaaagatgataagacttaccaagctatccacatct

SEQ ID NO: 15499 - DNA, 37 bp, synthetic construct
  source 1..37: mol_type = other DNA
taaaaagatgataagacttaccaagctatccacatct

SEQ ID NO: 15500 - DNA, 38 bp, synthetic construct
  source 1..38: mol_type = other DNA
ttaaaaagatgataagacttaccaagctatccacatct

SEQ ID NO: 15501 - DNA, 39 bp, synthetic construct
  source 1..39: mol_type = other DNA
gttaaaaagatgataagacttaccaagctatccacatct

SEQ ID NO: 15502 - DNA, 40 bp, synthetic construct
  source 1..40: mol_type = other DNA
agttaaaaagatgataagacttaccaagctatccacatct

SEQ ID NO: 15503 - DNA, 28 bp, synthetic construct
  source 1..28: mol_type = other DNA
agatgtggatagcttggtaagtcttatc

SEQ ID NO: 15504 - DNA, 28 bp, synthetic construct
  source 1..28: mol_type = other DNA
agatgtggatagcttggtaagtttgatc

SEQ ID NO: 15505 - DNA, 29 bp, synthetic construct
  source 1..29: mol_type = other DNA
tagatgtggatagcttggtaagtttgatc

SEQ ID NO: 15506 - DNA, 29 bp, synthetic construct
  source 1..29: mol_type = other DNA
tagatgtggatagcttggtaagtcttatc

SEQ ID NO: 15507 - DNA, 30 bp, synthetic construct
  source 1..30: mol_type = other DNA
atagatgtggatagcttggtaagtttgatc

SEQ ID NO: 15508 - DNA, 30 bp, synthetic construct
  source 1..30: mol_type = other DNA
atagatgtggatagcttggtaagtcttatc

SEQ ID NO: 15509 - DNA, 31 bp, synthetic construct
  source 1..31: mol_type = other DNA
catagatgtggatagcttggtaagtttgatc

SEQ ID NO: 15510 - DNA, 31 bp, synthetic construct
  source 1..31: mol_type = other DNA
catagatgtggatagcttggtaagtcttatc

SEQ ID NO: 15511 - DNA, 32 bp, synthetic construct
  source 1..32: mol_type = other DNA
gcatagatgtggatagcttggtaagtttgatc

SEQ ID NO: 15512 - DNA, 32 bp, synthetic construct
  source 1..32: mol_type = other DNA
gcatagatgtggatagcttggtaagtcttatc

SEQ ID NO: 15513 - DNA, 33 bp, synthetic construct
  source 1..33: mol_type = other DNA
agcatagatgtggatagcttggtaagtttgatc

SEQ ID NO: 15514 - DNA, 33 bp, synthetic construct
  source 1..33: mol_type = other DNA
agcatagatgtggatagcttggtaagtcttatc

SEQ ID NO: 15515 - DNA, 34 bp, synthetic construct
  source 1..34: mol_type = other DNA
cagcatagatgtggatagcttggtaagtcttatc

SEQ ID NO: 15516 - DNA, 34 bp, synthetic construct
  source 1..34: mol_type = other DNA
cagcatagatgtggatagcttggtaagtttgatc

SEQ ID NO: 15517 - DNA, 35 bp, synthetic construct
  source 1..35: mol_type = other DNA
ccagcatagatgtggatagcttggtaagtttgatc

SEQ ID NO: 15518 - DNA, 35 bp, synthetic construct
  source 1..35: mol_type = other DNA
ccagcatagatgtggatagcttggtaagtcttatc

SEQ ID NO: 15519 - DNA, 36 bp, synthetic construct
  source 1..36: mol_type = other DNA
tccagcatagatgtggatagcttggtaagtttgatc

SEQ ID NO: 15520 - DNA, 36 bp, synthetic construct
  source 1..36: mol_type = other DNA
tccagcatagatgtggatagcttggtaagtcttatc

SEQ ID NO: 15521 - DNA, 37 bp, synthetic construct
  source 1..37: mol_type = other DNA
ctccagcatagatgtggatagcttggtaagtcttatc

SEQ ID NO: 15522 - DNA, 37 bp, synthetic construct
  source 1..37: mol_type = other DNA
ctccagcatagatgtggatagcttggtaagtttgatc

SEQ ID NO: 15523 - DNA, 38 bp, synthetic construct
  source 1..38: mol_type = other DNA
actccagcatagatgtggatagcttggtaagtttgatc

SEQ ID NO: 15524 - DNA, 38 bp, synthetic construct
  source 1..38: mol_type = other DNA
actccagcatagatgtggatagcttggtaagtcttatc

SEQ ID NO: 15525 - DNA, 39 bp, synthetic construct
  source 1..39: mol_type = other DNA
aactccagcatagatgtggatagcttggtaagtcttatc

SEQ ID NO: 15526 - DNA, 39 bp, synthetic construct
  source 1..39: mol_type = other DNA
aactccagcatagatgtggatagcttggtaagtttgatc

SEQ ID NO: 15527 - DNA, 40 bp, synthetic construct
  source 1..40: mol_type = other DNA
aaactccagcatagatgtggatagcttggtaagtcttatc

SEQ ID NO: 15528 - DNA, 40 bp, synthetic construct
  source 1..40: mol_type = other DNA
aaactccagcatagatgtggatagcttggtaagtttgatc

SEQ ID NO: 15529 - DNA, 10 bp, synthetic construct
  source 1..10: mol_type = other DNA
tccagcatag

SEQ ID NO: 15530 - DNA, 11 bp, synthetic construct
  source 1..11: mol_type = other DNA
ctccagcatag

SEQ ID NO: 15531 - DNA, 12 bp, synthetic construct
  source 1..12: mol_type = other DNA
actccagcatag

SEQ ID NO: 15532 - DNA, 13 bp, synthetic construct
  source 1..13: mol_type = other DNA
aactccagcatag

SEQ ID NO: 15533 - DNA, 14 bp, synthetic construct
  source 1..14: mol_type = other DNA
aaactccagcatag

SEQ ID NO: 15534 - DNA, 15 bp, synthetic construct
  source 1..15: mol_type = other DNA
taaactccagcatag

SEQ ID NO: 15535 - DNA, 16 bp, synthetic construct
  source 1..16: mol_type = other DNA
gtaaactccagcatag

SEQ ID NO: 15536 - DNA, 17 bp, synthetic construct
  source 1..17: mol_type = other DNA
tgtaaactccagcatag

SEQ ID NO: 15537 - DNA, 18 bp, synthetic construct
  source 1..18: mol_type = other DNA
ctgtaaactccagcatag

SEQ ID NO: 15538 - DNA, 19 bp, synthetic construct
  source 1..19: mol_type = other DNA
gctgtaaactccagcatag

SEQ ID NO: 15539 - DNA, 20 bp, synthetic construct
  source 1..20: mol_type = other DNA
ggctgtaaactccagcatag

SEQ ID NO: 15540 - DNA, 21 bp, synthetic construct
  source 1..21: mol_type = other DNA
gggctgtaaactccagcatag

SEQ ID NO: 15541 - DNA, 22 bp, synthetic construct
  source 1..22: mol_type = other DNA
tgggctgtaaactccagcatag

SEQ ID NO: 15542 - DNA, 23 bp, synthetic construct
  source 1..23: mol_type = other DNA
gtgggctgtaaactccagcatag

SEQ ID NO: 15543 - DNA, 24 bp, synthetic construct
  source 1..24: mol_type = other DNA
agtgggctgtaaactccagcatag

SEQ ID NO: 15544 - DNA, 25 bp, synthetic construct
  source 1..25: mol_type = other DNA
cagtgggctgtaaactccagcatag

SEQ ID NO: 15545 - DNA, 26 bp, synthetic construct
  source 1..26: mol_type = other DNA
gcagtgggctgtaaactccagcatag

SEQ ID NO: 15546 - DNA, 27 bp, synthetic construct
  source 1..27: mol_type = other DNA
tgcagtgggctgtaaactccagcatag

SEQ ID NO: 15547 - DNA, 28 bp, synthetic construct
  source 1..28: mol_type = other DNA
ttgcagtgggctgtaaactccagcatag

SEQ ID NO: 15548 - DNA, 29 bp, synthetic construct
  source 1..29: mol_type = other DNA
attgcagtgggctgtaaactccagcatag

SEQ ID NO: 15549 - DNA, 30 bp, synthetic construct
  source 1..30: mol_type = other DNA
cattgcagtgggctgtaaactccagcatag

SEQ ID NO: 15550 - DNA, 31 bp, synthetic construct
  source 1..31: mol_type = other DNA
acattgcagtgggctgtaaactccagcatag

SEQ ID NO: 15551 - DNA, 32 bp, synthetic construct
  source 1..32: mol_type = other DNA
tacattgcagtgggctgtaaactccagcatag

SEQ ID NO: 15552 - DNA, 33 bp, synthetic construct
  source 1..33: mol_type = other DNA
gtacattgcagtgggctgtaaactccagcatag

SEQ ID NO: 15553 - DNA, 34 bp, synthetic construct
  source 1..34: mol_type = other DNA
agtacattgcagtgggctgtaaactccagcatag

SEQ ID NO: 15554 - DNA, 35 bp, synthetic construct
  source 1..35: mol_type = other DNA
gagtacattgcagtgggctgtaaactccagcatag

SEQ ID NO: 15555 - DNA, 36 bp, synthetic construct
  source 1..36: mol_type = other DNA
tgagtacattgcagtgggctgtaaactccagcatag

SEQ ID NO: 15556 - DNA, 37 bp, synthetic construct
  source 1..37: mol_type = other DNA
atgagtacattgcagtgggctgtaaactccagcatag

SEQ ID NO: 15557 - DNA, 38 bp, synthetic construct
  source 1..38: mol_type = other DNA
catgagtacattgcagtgggctgtaaactccagcatag

SEQ ID NO: 15558 - DNA, 39 bp, synthetic construct
  source 1..39: mol_type = other DNA
tcatgagtacattgcagtgggctgtaaactccagcatag

SEQ ID NO: 15559 - DNA, 40 bp, synthetic construct
  source 1..40: mol_type = other DNA
atcatgagtacattgcagtgggctgtaaactccagcatag

SEQ ID NO: 15560 - DNA, 26 bp, synthetic construct
  source 1..26: mol_type = other DNA
tctatgctggagtttacagcccactg

SEQ ID NO: 15561 - DNA, 27 bp, synthetic construct
  source 1..27: mol_type = other DNA
atctatgctggagtttacagcccactg

SEQ ID NO: 15562 - DNA, 28 bp, synthetic construct
  source 1..28: mol_type = other DNA
catctatgctggagtttacagcccactg

SEQ ID NO: 15563 - DNA, 29 bp, synthetic construct
  source 1..29: mol_type = other DNA
acatctatgctggagtttacagcccactg

SEQ ID NO: 15564 - DNA, 30 bp, synthetic construct
  source 1..30: mol_type = other DNA
cacatctatgctggagtttacagcccactg

SEQ ID NO: 15565 - DNA, 31 bp, synthetic construct
  source 1..31: mol_type = other DNA
ccacatctatgctggagtttacagcccactg

SEQ ID NO: 15566 - DNA, 32 bp, synthetic construct
  source 1..32: mol_type = other DNA
tccacatctatgctggagtttacagcccactg

SEQ ID NO: 15567 - DNA, 33 bp, synthetic construct
  source 1..33: mol_type = other DNA
atccacatctatgctggagtttacagcccactg

SEQ ID NO: 15568 - DNA, 34 bp, synthetic construct
  source 1..34: mol_type = other DNA
tatccacatctatgctggagtttacagcccactg

SEQ ID NO: 15569 - DNA, 35 bp, synthetic construct
  source 1..35: mol_type = other DNA
ctatccacatctatgctggagtttacagcccactg

SEQ ID NO: 15570 - DNA, 36 bp, synthetic construct
  source 1..36: mol_type = other DNA
gctatccacatctatgctggagtttacagcccactg

SEQ ID NO: 15571 - DNA, 37 bp, synthetic construct
  source 1..37: mol_type = other DNA
agctatccacatctatgctggagtttacagcccactg

SEQ ID NO: 15572 - DNA, 38 bp, synthetic construct
  source 1..38: mol_type = other DNA
aagctatccacatctatgctggagtttacagcccactg

SEQ ID NO: 15573 - DNA, 39 bp, synthetic construct
  source 1..39: mol_type = other DNA
caagctatccacatctatgctggagtttacagcccactg

SEQ ID NO: 15574 - DNA, 40 bp, synthetic construct
  source 1..40: mol_type = other DNA
ccaagctatccacatctatgctggagtttacagcccactg

SEQ ID NO: 15575 - DNA, 12 bp, synthetic construct
  source 1..12: mol_type = other DNA
tctatgctggag

SEQ ID NO: 15576 - DNA, 12 bp, synthetic construct
  source 1..12: mol_type = other DNA
tctatggaggag

SEQ ID NO: 15577 - DNA, 13 bp, synthetic construct
  source 1..13: mol_type = other DNA
atctatgctggag

SEQ ID NO: 15578 - DNA, 13 bp, synthetic construct
  source 1..13: mol_type = other DNA
atctatggaggag

SEQ ID NO: 15579 - DNA, 14 bp, synthetic construct
  source 1..14: mol_type = other DNA
catctatgctggag

SEQ ID NO: 15580 - DNA, 14 bp, synthetic construct
  source 1..14: mol_type = other DNA
catctatggaggag

SEQ ID NO: 15581 - DNA, 15 bp, synthetic construct
  source 1..15: mol_type = other DNA
acatctatgctggag

SEQ ID NO: 15582 - DNA, 15 bp, synthetic construct
  source 1..15: mol_type = other DNA
acatctatggaggag

SEQ ID NO: 15583 - DNA, 16 bp, synthetic construct
  source 1..16: mol_type = other DNA
cacatctatgctggag

SEQ ID NO: 15584 - DNA, 16 bp, synthetic construct
  source 1..16: mol_type = other DNA
cacatctatggaggag

SEQ ID NO: 15585 - DNA, 17 bp, synthetic construct
  source 1..17: mol_type = other DNA
ccacatctatggaggag

SEQ ID NO: 15586 - DNA, 17 bp, synthetic construct
  source 1..17: mol_type = other DNA
ccacatctatgctggag

SEQ ID NO: 15587 - DNA, 18 bp, synthetic construct
  source 1..18: mol_type = other DNA
tccacatctatgctggag

SEQ ID NO: 15588 - DNA, 18 bp, synthetic construct
  source 1..18: mol_type = other DNA
tccacatctatggaggag

SEQ ID NO: 15589 - DNA, 19 bp, synthetic construct
  source 1..19: mol_type = other DNA
atccacatctatggaggag

SEQ ID NO: 15590 - DNA, 19 bp, synthetic construct
  source 1..19: mol_type = other DNA
atccacatctatgctggag

SEQ ID NO: 15591 - DNA, 20 bp, synthetic construct
  source 1..20: mol_type = other DNA
tatccacatctatggaggag

SEQ ID NO: 15592 - DNA, 20 bp, synthetic construct
  source 1..20: mol_type = other DNA
tatccacatctatgctggag

SEQ ID NO: 15593 - DNA, 21 bp, synthetic construct
  source 1..21: mol_type = other DNA
ctatccacatctatggaggag

SEQ ID NO: 15594 - DNA, 21 bp, synthetic construct
  source 1..21: mol_type = other DNA
ctatccacatctatgctggag

SEQ ID NO: 15595 - DNA, 22 bp, synthetic construct
  source 1..22: mol_type = other DNA
gctatccacatctatgctggag

SEQ ID NO: 15596 - DNA, 22 bp, synthetic construct
  source 1..22: mol_type = other DNA
gctatccacatctatggaggag

SEQ ID NO: 15597 - DNA, 23 bp, synthetic construct
  source 1..23: mol_type = other DNA
agctatccacatctatggaggag

SEQ ID NO: 15598 - DNA, 23 bp, synthetic construct
  source 1..23: mol_type = other DNA
agctatccacatctatgctggag

SEQ ID NO: 15599 - DNA, 24 bp, synthetic construct
  source 1..24: mol_type = other DNA
aagctatccacatctatgctggag

SEQ ID NO: 15600 - DNA, 24 bp, synthetic construct
  source 1..24: mol_type = other DNA
aagctatccacatctatggaggag

SEQ ID NO: 15601 - DNA, 25 bp, synthetic construct
  source 1..25: mol_type = other DNA
caagctatccacatctatgctggag

SEQ ID NO: 15602 - DNA, 25 bp, synthetic construct
  source 1..25: mol_type = other DNA
caagctatccacatctatggaggag

SEQ ID NO: 15603 - DNA, 26 bp, synthetic construct
  source 1..26: mol_type = other DNA
ccaagctatccacatctatgctggag

SEQ ID NO: 15604 - DNA, 26 bp, synthetic construct
  source 1..26: mol_type = other DNA
ccaagctatccacatctatggaggag

SEQ ID NO: 15605 - DNA, 27 bp, synthetic construct
  source 1..27: mol_type = other DNA
accaagctatccacatctatggaggag

SEQ ID NO: 15606 - DNA, 27 bp, synthetic construct
  source 1..27: mol_type = other DNA
accaagctatccacatctatgctggag

SEQ ID NO: 15607 - DNA, 28 bp, synthetic construct
  source 1..28: mol_type = other DNA
taccaagctatccacatctatggaggag

SEQ ID NO: 15608 - DNA, 28 bp, synthetic construct
  source 1..28: mol_type = other DNA
taccaagctatccacatctatgctggag

SEQ ID NO: 15609 - DNA, 29 bp, synthetic construct
  source 1..29: mol_type = other DNA
ttaccaagctatccacatctatggaggag

SEQ ID NO: 15610 - DNA, 29 bp, synthetic construct
  source 1..29: mol_type = other DNA
ttaccaagctatccacatctatgctggag

SEQ ID NO: 15611 - DNA, 30 bp, synthetic construct
  source 1..30: mol_type = other DNA
cttaccaagctatccacatctatggaggag

SEQ ID NO: 15612 - DNA, 30 bp, synthetic construct
  source 1..30: mol_type = other DNA
cttaccaagctatccacatctatgctggag

SEQ ID NO: 15613 - DNA, 31 bp, synthetic construct
  source 1..31: mol_type = other DNA
acttaccaagctatccacatctatggaggag

SEQ ID NO: 15614 - DNA, 31 bp, synthetic construct
  source 1..31: mol_type = other DNA
acttaccaagctatccacatctatgctggag

SEQ ID NO: 15615 - DNA, 32 bp, synthetic construct
  source 1..32: mol_type = other DNA
gacttaccaagctatccacatctatgctggag

SEQ ID NO: 15616 - DNA, 32 bp, synthetic construct
  source 1..32: mol_type = other DNA
gacttaccaagctatccacatctatggaggag

SEQ ID NO: 15617 - DNA, 33 bp, synthetic construct
  source 1..33: mol_type = other DNA
agacttaccaagctatccacatctatgctggag

SEQ ID NO: 15618 - DNA, 33 bp, synthetic construct
  source 1..33: mol_type = other DNA
agacttaccaagctatccacatctatggaggag

SEQ ID NO: 15619 - DNA, 34 bp, synthetic construct
  source 1..34: mol_type = other DNA
aagacttaccaagctatccacatctatggaggag

SEQ ID NO: 15620 - DNA, 34 bp, synthetic construct
  source 1..34: mol_type = other DNA
aagacttaccaagctatccacatctatgctggag

SEQ ID NO: 15621 - DNA, 35 bp, synthetic construct
  source 1..35: mol_type = other DNA
taagacttaccaagctatccacatctatgctggag

SEQ ID NO: 15622 - DNA, 35 bp, synthetic construct
  source 1..35: mol_type = other DNA
taagacttaccaagctatccacatctatggaggag

SEQ ID NO: 15623 - DNA, 36 bp, synthetic construct
  source 1..36: mol_type = other DNA
ataagacttaccaagctatccacatctatggaggag

SEQ ID NO: 15624 - DNA, 36 bp, synthetic construct
  source 1..36: mol_type = other DNA
ataagacttaccaagctatccacatctatgctggag

SEQ ID NO: 15625 - DNA, 37 bp, synthetic construct
  source 1..37: mol_type = other DNA
gataagacttaccaagctatccacatctatgctggag

SEQ ID NO: 15626 - DNA, 37 bp, synthetic construct
  source 1..37: mol_type = other DNA
gataagacttaccaagctatccacatctatggaggag

SEQ ID NO: 15627 - DNA, 38 bp, synthetic construct
  source 1..38: mol_type = other DNA
tgataagacttaccaagctatccacatctatgctggag

SEQ ID NO: 15628 - DNA, 38 bp, synthetic construct
  source 1..38: mol_type = other DNA
tgataagacttaccaagctatccacatctatggaggag

SEQ ID NO: 15629 - DNA, 39 bp, synthetic construct
  source 1..39: mol_type = other DNA
atgataagacttaccaagctatccacatctatggaggag

SEQ ID NO: 15630 - DNA, 39 bp, synthetic construct
  source 1..39: mol_type = other DNA
atgataagacttaccaagctatccacatctatgctggag

SEQ ID NO: 15631 - DNA, 40 bp, synthetic construct
  source 1..40: mol_type = other DNA
gatgataagacttaccaagctatccacatctatggaggag

SEQ ID NO: 15632 - DNA, 40 bp, synthetic construct
  source 1..40: mol_type = other DNA
gatgataagacttaccaagctatccacatctatgctggag

SEQ ID NO: 15633 - DNA, 11 bp, synthetic construct
  source 1..11: mol_type = other DNA
tctatgctgga

SEQ ID NO: 15634 - DNA, 12 bp, synthetic construct
  source 1..12: mol_type = other DNA
atctatgctgga

SEQ ID NO: 15635 - DNA, 13 bp, synthetic construct
  source 1..13: mol_type = other DNA
catctatgctgga

SEQ ID NO: 15636 - DNA, 14 bp, synthetic construct
  source 1..14: mol_type = other DNA
acatctatgctgga

SEQ ID NO: 15637 - DNA, 15 bp, synthetic construct
  source 1..15: mol_type = other DNA
cacatctatgctgga

SEQ ID NO: 15638 - DNA, 16 bp, synthetic construct
  source 1..16: mol_type = other DNA
ccacatctatgctgga

SEQ ID NO: 15639 - DNA, 17 bp, synthetic construct
  source 1..17: mol_type = other DNA
tccacatctatgctgga

SEQ ID NO: 15640 - DNA, 18 bp, synthetic construct
  source 1..18: mol_type = other DNA
atccacatctatgctgga

SEQ ID NO: 15641 - DNA, 19 bp, synthetic construct
  source 1..19: mol_type = other DNA
tatccacatctatgctgga

SEQ ID NO: 15642 - DNA, 20 bp, synthetic construct
  source 1..20: mol_type = other DNA
ctatccacatctatgctgga

SEQ ID NO: 15643 - DNA, 21 bp, synthetic construct
  source 1..21: mol_type = other DNA
gctatccacatctatgctgga

SEQ ID NO: 15644 - DNA, 22 bp, synthetic construct
  source 1..22: mol_type = other DNA
agctatccacatctatgctgga

SEQ ID NO: 15645 - DNA, 23 bp, synthetic construct
  source 1..23: mol_type = other DNA
aagctatccacatctatgctgga

SEQ ID NO: 15646 - DNA, 24 bp, synthetic construct
  source 1..24: mol_type = other DNA
caagctatccacatctatgctgga

SEQ ID NO: 15647 - DNA, 25 bp, synthetic construct
  source 1..25: mol_type = other DNA
ccaagctatccacatctatgctgga

SEQ ID NO: 15648 - DNA, 26 bp, synthetic construct
  source 1..26: mol_type = other DNA
accaagctatccacatctatgctgga

SEQ ID NO: 15649 - DNA, 27 bp, synthetic construct
  source 1..27: mol_type = other DNA
taccaagctatccacatctatgctgga

SEQ ID NO: 15650 - DNA, 28 bp, synthetic construct
  source 1..28: mol_type = other DNA
ttaccaagctatccacatctatgctgga

SEQ ID NO: 15651 - DNA, 29 bp, synthetic construct
  source 1..29: mol_type = other DNA
cttaccaagctatccacatctatgctgga

SEQ ID NO: 15652 - DNA, 30 bp, synthetic construct
  source 1..30: mol_type = other DNA
acttaccaagctatccacatctatgctgga

SEQ ID NO: 15653 - DNA, 31 bp, synthetic construct
  source 1..31: mol_type = other DNA
gacttaccaagctatccacatctatgctgga

SEQ ID NO: 15654 - DNA, 32 bp, synthetic construct
  source 1..32: mol_type = other DNA
agacttaccaagctatccacatctatgctgga

SEQ ID NO: 15655 - DNA, 33 bp, synthetic construct
  source 1..33: mol_type = other DNA
aagacttaccaagctatccacatctatgctgga

SEQ ID NO: 15656 - DNA, 34 bp, synthetic construct
  source 1..34: mol_type = other DNA
taagacttaccaagctatccacatctatgctgga

SEQ ID NO: 15657 - DNA, 35 bp, synthetic construct
  source 1..35: mol_type = other DNA
ataagacttaccaagctatccacatctatgctgga

SEQ ID NO: 15658 - DNA, 36 bp, synthetic construct
  source 1..36: mol_type = other DNA
gataagacttaccaagctatccacatctatgctgga

SEQ ID NO: 15659 - DNA, 37 bp, synthetic construct
  source 1..37: mol_type = other DNA
tgataagacttaccaagctatccacatctatgctgga

SEQ ID NO: 15660 - DNA, 38 bp, synthetic construct
  source 1..38: mol_type = other DNA
atgataagacttaccaagctatccacatctatgctgga

SEQ ID NO: 15661 - DNA, 39 bp, synthetic construct
  source 1..39: mol_type = other DNA
gatgataagacttaccaagctatccacatctatgctgga

SEQ ID NO: 15662 - DNA, 40 bp, synthetic construct
  source 1..40: mol_type = other DNA
agatgataagacttaccaagctatccacatctatgctgga

SEQ ID NO: 15663 - DNA, 32 bp, synthetic construct
  source 1..32: mol_type = other DNA
agatgtggatagcttggtaagtcttatcatct

SEQ ID NO: 15664 - DNA, 33 bp, synthetic construct
  source 1..33: mol_type = other DNA
tagatgtggatagcttggtaagtcttatcatct

SEQ ID NO: 15665 - DNA, 34 bp, synthetic construct
  source 1..34: mol_type = other DNA
atagatgtggatagcttggtaagtcttatcatct

SEQ ID NO: 15666 - DNA, 35 bp, synthetic construct
  source 1..35: mol_type = other DNA
catagatgtggatagcttggtaagtcttatcatct

SEQ ID NO: 15667 - DNA, 36 bp, synthetic construct
  source 1..36: mol_type = other DNA
gcatagatgtggatagcttggtaagtcttatcatct

SEQ ID NO: 15668 - DNA, 37 bp, synthetic construct
  source 1..37: mol_type = other DNA
agcatagatgtggatagcttggtaagtcttatcatct

SEQ ID NO: 15669 - DNA, 38 bp, synthetic construct
  source 1..38: mol_type = other DNA
cagcatagatgtggatagcttggtaagtcttatcatct

SEQ ID NO: 15670 - DNA, 39 bp, synthetic construct
  source 1..39: mol_type = other DNA
ccagcatagatgtggatagcttggtaagtcttatcatct

SEQ ID NO: 15671 - DNA, 40 bp, synthetic construct
  source 1..40: mol_type = other DNA
tccagcatagatgtggatagcttggtaagtcttatcatct

SEQ ID NO: 15672 - DNA, 35 bp, synthetic construct
  source 1..35: mol_type = other DNA
agatgtggatagcttggtaagtcttatcatctttt

SEQ ID NO: 15673 - DNA, 36 bp, synthetic construct
  source 1..36: mol_type = other DNA
tagatgtggatagcttggtaagtcttatcatctttt

SEQ ID NO: 15674 - DNA, 37 bp, synthetic construct
  source 1..37: mol_type = other DNA
atagatgtggatagcttggtaagtcttatcatctttt

SEQ ID NO: 15675 - DNA, 38 bp, synthetic construct
  source 1..38: mol_type = other DNA
catagatgtggatagcttggtaagtcttatcatctttt

SEQ ID NO: 15676 - DNA, 39 bp, synthetic construct
  source 1..39: mol_type = other DNA
gcatagatgtggatagcttggtaagtcttatcatctttt

SEQ ID NO: 15677 - DNA, 40 bp, synthetic construct
  source 1..40: mol_type = other DNA
agcatagatgtggatagcttggtaagtcttatcatctttt

SEQ ID NO: 15678 - DNA, 36 bp, synthetic construct
  source 1..36: mol_type = other DNA
agatgtggatagcttggtaagtcttatcattttttt

SEQ ID NO: 15679 - DNA, 36 bp, synthetic construct
  source 1..36: mol_type = other DNA
agatgtggatagcttggtaagtcttatcatcttttt

SEQ ID NO: 15680 - DNA, 37 bp, synthetic construct
  source 1..37: mol_type = other DNA
tagatgtggatagcttggtaagtcttatcattttttt

SEQ ID NO: 15681 - DNA, 37 bp, synthetic construct
  source 1..37: mol_type = other DNA
tagatgtggatagcttggtaagtcttatcatcttttt

SEQ ID NO: 15682 - DNA, 38 bp, synthetic construct
  source 1..38: mol_type = other DNA
atagatgtggatagcttggtaagtcttatcattttttt

SEQ ID NO: 15683 - DNA, 38 bp, synthetic construct
  source 1..38: mol_type = other DNA
atagatgtggatagcttggtaagtcttatcatcttttt

SEQ ID NO: 15684 - DNA, 39 bp, synthetic construct
  source 1..39: mol_type = other DNA
catagatgtggatagcttggtaagtcttatcatcttttt

SEQ ID NO: 15685 - DNA, 39 bp, synthetic construct
  source 1..39: mol_type = other DNA
catagatgtggatagcttggtaagtcttatcattttttt

SEQ ID NO: 15686 - DNA, 40 bp, synthetic construct
  source 1..40: mol_type = other DNA
gcatagatgtggatagcttggtaagtcttatcatcttttt

SEQ ID NO: 15687 - DNA, 40 bp, synthetic construct
  source 1..40: mol_type = other DNA
gcatagatgtggatagcttggtaagtcttatcattttttt

SEQ ID NO: 15688 - DNA, 11 bp, synthetic construct
  source 1..11: mol_type = other DNA
gcgaagcgtga

SEQ ID NO: 15689 - DNA, 11 bp, synthetic construct
  source 1..11: mol_type = other DNA
gcgatctgtga

SEQ ID NO: 15690 - DNA, 12 bp, synthetic construct
  source 1..12: mol_type = other DNA
tgcgaagcgtga

SEQ ID NO: 15691 - DNA, 12 bp, synthetic construct
  source 1..12: mol_type = other DNA
tgcgatctgtga

SEQ ID NO: 15692 - DNA, 13 bp, synthetic construct
  source 1..13: mol_type = other DNA
atgcgatctgtga

SEQ ID NO: 15693 - DNA, 13 bp, synthetic construct
  source 1..13: mol_type = other DNA
atgcgaagcgtga

SEQ ID NO: 15694 - DNA, 14 bp, synthetic construct
  source 1..14: mol_type = other DNA
gatgcgatctgtga

SEQ ID NO: 15695 - DNA, 14 bp, synthetic construct
  source 1..14: mol_type = other DNA
gatgcgaagcgtga

SEQ ID NO: 15696 - DNA, 15 bp, synthetic construct
  source 1..15: mol_type = other DNA
agatgcgatctgtga

SEQ ID NO: 15697 - DNA, 15 bp, synthetic construct
  source 1..15: mol_type = other DNA
agatgcgaagcgtga

SEQ ID NO: 15698 - DNA, 16 bp, synthetic construct
  source 1..16: mol_type = other DNA
cagatgcgaagcgtga

SEQ ID NO: 15699 - DNA, 16 bp, synthetic construct
  source 1..16: mol_type = other DNA
cagatgcgatctgtga

SEQ ID NO: 15700 - DNA, 17 bp, synthetic construct
  source 1..17: mol_type = other DNA
tcagatgcgatctgtga

SEQ ID NO: 15701 - DNA, 17 bp, synthetic construct
  source 1..17: mol_type = other DNA
tcagatgcgaagcgtga

SEQ ID NO: 15702 - DNA, 18 bp, synthetic construct
  source 1..18: mol_type = other DNA
ttcagatgcgatctgtga

SEQ ID NO: 15703 - DNA, 18 bp, synthetic construct
  source 1..18: mol_type = other DNA
ttcagatgcgaagcgtga

SEQ ID NO: 15704 - DNA, 19 bp, synthetic construct
  source 1..19: mol_type = other DNA
tttcagatgcgatctgtga

SEQ ID NO: 15705 - DNA, 19 bp, synthetic construct
  source 1..19: mol_type = other DNA
tttcagatgcgaagcgtga

SEQ ID NO: 15706 - DNA, 20 bp, synthetic construct
  source 1..20: mol_type = other DNA
atttcagatgcgatctgtga

SEQ ID NO: 15707 - DNA, 20 bp, synthetic construct
  source 1..20: mol_type = other DNA
atttcagatgcgaagcgtga

SEQ ID NO: 15708 - DNA, 21 bp, synthetic construct
  source 1..21: mol_type = other DNA
tatttcagatgcgatctgtga

SEQ ID NO: 15709 - DNA, 21 bp, synthetic construct
  source 1..21: mol_type = other DNA
tatttcagatgcgaagcgtga

SEQ ID NO: 15710 - DNA, 22 bp, synthetic construct
  source 1..22: mol_type = other DNA
ttatttcagatgcgatctgtga

SEQ ID NO: 15711 - DNA, 22 bp, synthetic construct
  source 1..22: mol_type = other DNA
ttatttcagatgcgaagcgtga

SEQ ID NO: 15712 - DNA, 23 bp, synthetic construct
  source 1..23: mol_type = other DNA
tttatttcagatgcgatctgtga

SEQ ID NO: 15713 - DNA, 23 bp, synthetic construct
  source 1..23: mol_type = other DNA
tttatttcagatgcgaagcgtga

SEQ ID NO: 15714 - DNA, 24 bp, synthetic construct
  source 1..24: mol_type = other DNA
ttttatttcagatgcgaagcgtga

SEQ ID NO: 15715 - DNA, 24 bp, synthetic construct
  source 1..24: mol_type = other DNA
ttttatttcagatgcgatctgtga

SEQ ID NO: 15716 - DNA, 25 bp, synthetic construct
  source 1..25: mol_type = other DNA
tttttatttcagatgcgaagcgtga

SEQ ID NO: 15717 - DNA, 25 bp, synthetic construct
  source 1..25: mol_type = other DNA
tttttatttcagatgcgatctgtga

SEQ ID NO: 15718 - DNA, 26 bp, synthetic construct
  source 1..26: mol_type = other DNA
atttttatttcagatgcgaagcgtga

SEQ ID NO: 15719 - DNA, 26 bp, synthetic construct
  source 1..26: mol_type = other DNA
atttttatttcagatgcgatctgtga

SEQ ID NO: 15720 - DNA, 27 bp, synthetic construct
  source 1..27: mol_type = other DNA
tatttttatttcagatgcgaagcgtga

SEQ ID NO: 15721 - DNA, 27 bp, synthetic construct
  source 1..27: mol_type = other DNA
tatttttatttcagatgcgatctgtga

SEQ ID NO: 15722 - DNA, 28 bp, synthetic construct
  source 1..28: mol_type = other DNA
ttatttttatttcagatgcgatctgtga

SEQ ID NO: 15723 - DNA, 28 bp, synthetic construct
  source 1..28: mol_type = other DNA
ttatttttatttcagatgcgaagcgtga

SEQ ID NO: 15724 - DNA, 29 bp, synthetic construct
  source 1..29: mol_type = other DNA
gttatttttatttcagatgcgatctgtga

SEQ ID NO: 15725 - DNA, 29 bp, synthetic construct
  source 1..29: mol_type = other DNA
gttatttttatttcagatgcgaagcgtga

SEQ ID NO: 15726 - DNA, 30 bp, synthetic construct
  source 1..30: mol_type = other DNA
tgttatttttatttcagatgcgaagcgtga

SEQ ID NO: 15727 - DNA, 30 bp, synthetic construct
  source 1..30: mol_type = other DNA
tgttatttttatttcagatgcgatctgtga

SEQ ID NO: 15728 - DNA, 31 bp, synthetic construct
  source 1..31: mol_type = other DNA
ttgttatttttatttcagatgcgatctgtga

SEQ ID NO: 15729 - DNA, 31 bp, synthetic construct
  source 1..31: mol_type = other DNA
ttgttatttttatttcagatgcgaagcgtga

SEQ ID NO: 15730 - DNA, 32 bp, synthetic construct
  source 1..32: mol_type = other DNA
gttgttatttttatttcagatgcgatctgtga

SEQ ID NO: 15731 - DNA, 32 bp, synthetic construct
  source 1..32: mol_type = other DNA
gttgttatttttatttcagatgcgaagcgtga

SEQ ID NO: 15732 - DNA, 33 bp, synthetic construct
  source 1..33: mol_type = other DNA
tgttgttatttttatttcagatgcgatctgtga

SEQ ID NO: 15733 - DNA, 33 bp, synthetic construct
  source 1..33: mol_type = other DNA
tgttgttatttttatttcagatgcgaagcgtga

SEQ ID NO: 15734 - DNA, 34 bp, synthetic construct
  source 1..34: mol_type = other DNA
atgttgttatttttatttcagatgcgatctgtga

SEQ ID NO: 15735 - DNA, 34 bp, synthetic construct
  source 1..34: mol_type = other DNA
atgttgttatttttatttcagatgcgaagcgtga

SEQ ID NO: 15736 - DNA, 35 bp, synthetic construct
  source 1..35: mol_type = other DNA
aatgttgttatttttatttcagatgcgaagcgtga

SEQ ID NO: 15737 - DNA, 35 bp, synthetic construct
  source 1..35: mol_type = other DNA
aatgttgttatttttatttcagatgcgatctgtga

SEQ ID NO: 15738 - DNA, 36 bp, synthetic construct
  source 1..36: mol_type = other DNA
aaatgttgttatttttatttcagatgcgatctgtga

SEQ ID NO: 15739 - DNA, 36 bp, synthetic construct
  source 1..36: mol_type = other DNA
aaatgttgttatttttatttcagatgcgaagcgtga

SEQ ID NO: 15740 - DNA, 37 bp, synthetic construct
  source 1..37: mol_type = other DNA
aaaatgttgttatttttatttcagatgcgatctgtga

SEQ ID NO: 15741 - DNA, 37 bp, synthetic construct
  source 1..37: mol_type = other DNA
aaaatgttgttatttttatttcagatgcgaagcgtga

SEQ ID NO: 15742 - DNA, 38 bp, synthetic construct
  source 1..38: mol_type = other DNA
aaaaatgttgttatttttatttcagatgcgaagcgtga

SEQ ID NO: 15743 - DNA, 38 bp, synthetic construct
  source 1..38: mol_type = other DNA
aaaaatgttgttatttttatttcagatgcgatctgtga

SEQ ID NO: 15744 - DNA, 39 bp, synthetic construct
  source 1..39: mol_type = other DNA
caaaaatgttgttatttttatttcagatgcgatctgtga

SEQ ID NO: 15745 - DNA, 39 bp, synthetic construct
  source 1..39: mol_type = other DNA
caaaaatgttgttatttttatttcagatgcgaagcgtga

SEQ ID NO: 15746 - DNA, 40 bp, synthetic construct
  source 1..40: mol_type = other DNA
acaaaaatgttgttatttttatttcagatgcgaagcgtga

SEQ ID NO: 15747 - DNA, 40 bp, synthetic construct
  source 1..40: mol_type = other DNA
acaaaaatgttgttatttttatttcagatgcgatctgtga

SEQ ID NO: 15748 - DNA, 11 bp, synthetic construct
  source 1..11: mol_type = other DNA
cgcatctgaaa

SEQ ID NO: 15749 - DNA, 11 bp, synthetic construct
  source 1..11: mol_type = other DNA
cgcatttgaaa

SEQ ID NO: 15750 - DNA, 12 bp, synthetic construct
  source 1..12: mol_type = other DNA
tcgcatctgaaa

SEQ ID NO: 15751 - DNA, 12 bp, synthetic construct
  source 1..12: mol_type = other DNA
tcgcatttgaaa

SEQ ID NO: 15752 - DNA, 13 bp, synthetic construct
  source 1..13: mol_type = other DNA
atcgcatttgaaa

SEQ ID NO: 15753 - DNA, 13 bp, synthetic construct
  source 1..13: mol_type = other DNA
atcgcatctgaaa

SEQ ID NO: 15754 - DNA, 14 bp, synthetic construct
  source 1..14: mol_type = other DNA
gatcgcatttgaaa

SEQ ID NO: 15755 - DNA, 14 bp, synthetic construct
  source 1..14: mol_type = other DNA
gatcgcatctgaaa

SEQ ID NO: 15756 - DNA, 15 bp, synthetic construct
  source 1..15: mol_type = other DNA
agatcgcatctgaaa

SEQ ID NO: 15757 - DNA, 15 bp, synthetic construct
  source 1..15: mol_type = other DNA
agatcgcatttgaaa

SEQ ID NO: 15758 - DNA, 16 bp, synthetic construct
  source 1..16: mol_type = other DNA
cagatcgcatttgaaa

SEQ ID NO: 15759 - DNA, 16 bp, synthetic construct
  source 1..16: mol_type = other DNA
cagatcgcatctgaaa

SEQ ID NO: 15760 - DNA, 17 bp, synthetic construct
  source 1..17: mol_type = other DNA
acagatcgcatctgaaa

SEQ ID NO: 15761 - DNA, 17 bp, synthetic construct
  source 1..17: mol_type = other DNA
acagatcgcatttgaaa

SEQ ID NO: 15762 - DNA, 18 bp, synthetic construct
  source 1..18: mol_type = other DNA
cacagatcgcatttgaaa

SEQ ID NO: 15763 - DNA, 18 bp, synthetic construct
  source 1..18: mol_type = other DNA
cacagatcgcatctgaaa

SEQ ID NO: 15764 - DNA, 19 bp, synthetic construct
  source 1..19: mol_type = other DNA
tcacagatcgcatctgaaa

SEQ ID NO: 15765 - DNA, 19 bp, synthetic construct
  source 1..19: mol_type = other DNA
tcacagatcgcatttgaaa

SEQ ID NO: 15766 - DNA, 20 bp, synthetic construct
  source 1..20: mol_type = other DNA
ctcacagatcgcatttgaaa

SEQ ID NO: 15767 - DNA, 20 bp, synthetic construct
  source 1..20: mol_type = other DNA
ctcacagatcgcatctgaaa

SEQ ID NO: 15768 - DNA, 21 bp, synthetic construct
  source 1..21: mol_type = other DNA
gctcacagatcgcatctgaaa

SEQ ID NO: 15769 - DNA, 21 bp, synthetic construct
  source 1..21: mol_type = other DNA
gctcacagatcgcatttgaaa

SEQ ID NO: 15770 - DNA, 22 bp, synthetic construct
  source 1..22: mol_type = other DNA
ggctcacagatcgcatttgaaa

SEQ ID NO: 15771 - DNA, 22 bp, synthetic construct
  source 1..22: mol_type = other DNA
ggctcacagatcgcatctgaaa

SEQ ID NO: 15772 - DNA, 23 bp, synthetic construct
  source 1..23: mol_type = other DNA
cggctcacagatcgcatttgaaa

SEQ ID NO: 15773 - DNA, 23 bp, synthetic construct
  source 1..23: mol_type = other DNA
cggctcacagatcgcatctgaaa

SEQ ID NO: 15774 - DNA, 24 bp, synthetic construct
  source 1..24: mol_type = other DNA
tcggctcacagatcgcatctgaaa

SEQ ID NO: 15775 - DNA, 24 bp, synthetic construct
  source 1..24: mol_type = other DNA
tcggctcacagatcgcatttgaaa

SEQ ID NO: 15776 - DNA, 25 bp, synthetic construct
  source 1..25: mol_type = other DNA
ctcggctcacagatcgcatttgaaa

SEQ ID NO: 15777 - DNA, 25 bp, synthetic construct
  source 1..25: mol_type = other DNA
ctcggctcacagatcgcatctgaaa

SEQ ID NO: 15778 - DNA, 26 bp, synthetic construct
  source 1..26: mol_type = other DNA
actcggctcacagatcgcatctgaaa

SEQ ID NO: 15779 - DNA, 26 bp, synthetic construct
  source 1..26: mol_type = other DNA
actcggctcacagatcgcatttgaaa

SEQ ID NO: 15780 - DNA, 27 bp, synthetic construct
  source 1..27: mol_type = other DNA
gactcggctcacagatcgcatctgaaa

SEQ ID NO: 15781 - DNA, 27 bp, synthetic construct
  source 1..27: mol_type = other DNA
gactcggctcacagatcgcatttgaaa

SEQ ID NO: 15782 - DNA, 28 bp, synthetic construct
  source 1..28: mol_type = other DNA
agactcggctcacagatcgcatctgaaa

SEQ ID NO: 15783 - DNA, 28 bp, synthetic construct
  source 1..28: mol_type = other DNA
agactcggctcacagatcgcatttgaaa

SEQ ID NO: 15784 - DNA, 29 bp, synthetic construct
  source 1..29: mol_type = other DNA
aagactcggctcacagatcgcatttgaaa

SEQ ID NO: 15785 - DNA, 29 bp, synthetic construct
  source 1..29: mol_type = other DNA
aagactcggctcacagatcgcatctgaaa

SEQ ID NO: 15786 - DNA, 30 bp, synthetic construct
  source 1..30: mol_type = other DNA
aaagactcggctcacagatcgcatctgaaa

SEQ ID NO: 15787 - DNA, 30 bp, synthetic construct
  source 1..30: mol_type = other DNA
aaagactcggctcacagatcgcatttgaaa

SEQ ID NO: 15788 - DNA, 31 bp, synthetic construct
  source 1..31: mol_type = other DNA
taaagactcggctcacagatcgcatttgaaa

SEQ ID NO: 15789 - DNA, 31 bp, synthetic construct
  source 1..31: mol_type = other DNA
taaagactcggctcacagatcgcatctgaaa

SEQ ID NO: 15790 - DNA, 32 bp, synthetic construct
  source 1..32: mol_type = other DNA
ttaaagactcggctcacagatcgcatctgaaa

SEQ ID NO: 15791 - DNA, 32 bp, synthetic construct
  source 1..32: mol_type = other DNA
ttaaagactcggctcacagatcgcatttgaaa

SEQ ID NO: 15792 - DNA, 33 bp, synthetic construct
  source 1..33: mol_type = other DNA
cttaaagactcggctcacagatcgcatctgaaa

SEQ ID NO: 15793 - DNA, 33 bp, synthetic construct
  source 1..33: mol_type = other DNA
cttaaagactcggctcacagatcgcatttgaaa

SEQ ID NO: 15794 - DNA, 34 bp, synthetic construct
  source 1..34: mol_type = other DNA
acttaaagactcggctcacagatcgcatttgaaa

SEQ ID NO: 15795 - DNA, 34 bp, synthetic construct
  source 1..34: mol_type = other DNA
acttaaagactcggctcacagatcgcatctgaaa

SEQ ID NO: 15796 - DNA, 35 bp, synthetic construct
  source 1..35: mol_type = other DNA
aacttaaagactcggctcacagatcgcatctgaaa

SEQ ID NO: 15797 - DNA, 35 bp, synthetic construct
  source 1..35: mol_type = other DNA
aacttaaagactcggctcacagatcgcatttgaaa

SEQ ID NO: 15798 - DNA, 36 bp, synthetic construct
  source 1..36: mol_type = other DNA
gaacttaaagactcggctcacagatcgcatctgaaa

SEQ ID NO: 15799 - DNA, 36 bp, synthetic construct
  source 1..36: mol_type = other DNA
gaacttaaagactcggctcacagatcgcatttgaaa

SEQ ID NO: 15800 - DNA, 37 bp, synthetic construct
  source 1..37: mol_type = other DNA
tgaacttaaagactcggctcacagatcgcatctgaaa

SEQ ID NO: 15801 - DNA, 37 bp, synthetic construct
  source 1..37: mol_type = other DNA
tgaacttaaagactcggctcacagatcgcatttgaaa

SEQ ID NO: 15802 - DNA, 38 bp, synthetic construct
  source 1..38: mol_type = other DNA
atgaacttaaagactcggctcacagatcgcatctgaaa

SEQ ID NO: 15803 - DNA, 38 bp, synthetic construct
  source 1..38: mol_type = other DNA
atgaacttaaagactcggctcacagatcgcatttgaaa

SEQ ID NO: 15804 - DNA, 39 bp, synthetic construct
  source 1..39: mol_type = other DNA
aatgaacttaaagactcggctcacagatcgcatctgaaa

SEQ ID NO: 15805 - DNA, 39 bp, synthetic construct
  source 1..39: mol_type = other DNA
aatgaacttaaagactcggctcacagatcgcatttgaaa

SEQ ID NO: 15806 - DNA, 40 bp, synthetic construct
  source 1..40: mol_type = other DNA
caatgaacttaaagactcggctcacagatcgcatttgaaa

SEQ ID NO: 15807 - DNA, 40 bp, synthetic construct
  source 1..40: mol_type = other DNA
caatgaacttaaagactcggctcacagatcgcatctgaaa

SEQ ID NO: 15808 - DNA, 10 bp, synthetic construct
  source 1..10: mol_type = other DNA
gcgatctgtg

SEQ ID NO: 15809 - DNA, 11 bp, synthetic construct
  source 1..11: mol_type = other DNA
tgcgatctgtg

SEQ ID NO: 15810 - DNA, 12 bp, synthetic construct
  source 1..12: mol_type = other DNA
atgcgatctgtg

SEQ ID NO: 15811 - DNA, 13 bp, synthetic construct
  source 1..13: mol_type = other DNA
gatgcgatctgtg

SEQ ID NO: 15812 - DNA, 14 bp, synthetic construct
  source 1..14: mol_type = other DNA
agatgcgatctgtg

SEQ ID NO: 15813 - DNA, 15 bp, synthetic construct
  source 1..15: mol_type = other DNA
cagatgcgatctgtg

SEQ ID NO: 15814 - DNA, 16 bp, synthetic construct
  source 1..16: mol_type = other DNA
tcagatgcgatctgtg

SEQ ID NO: 15815 - DNA, 17 bp, synthetic construct
  source 1..17: mol_type = other DNA
ttcagatgcgatctgtg

SEQ ID NO: 15816 - DNA, 18 bp, synthetic construct
  source 1..18: mol_type = other DNA
tttcagatgcgatctgtg

SEQ ID NO: 15817 - DNA, 19 bp, synthetic construct
  source 1..19: mol_type = other DNA
atttcagatgcgatctgtg

SEQ ID NO: 15818 - DNA, 20 bp, synthetic construct
  source 1..20: mol_type = other DNA
tatttcagatgcgatctgtg

SEQ ID NO: 15819 - DNA, 21 bp, synthetic construct
  source 1..21: mol_type = other DNA
ttatttcagatgcgatctgtg

SEQ ID NO: 15820 - DNA, 22 bp, synthetic construct
  source 1..22: mol_type = other DNA
tttatttcagatgcgatctgtg

SEQ ID NO: 15821 - DNA, 23 bp, synthetic construct
  source 1..23: mol_type = other DNA
ttttatttcagatgcgatctgtg

SEQ ID NO: 15822 - DNA, 24 bp, synthetic construct
  source 1..24: mol_type = other DNA
tttttatttcagatgcgatctgtg

SEQ ID NO: 15823 - DNA, 25 bp, synthetic construct
  source 1..25: mol_type = other DNA
atttttatttcagatgcgatctgtg

SEQ ID NO: 15824 - DNA, 26 bp, synthetic construct
  source 1..26: mol_type = other DNA
tatttttatttcagatgcgatctgtg

SEQ ID NO: 15825 - DNA, 27 bp, synthetic construct
  source 1..27: mol_type = other DNA
ttatttttatttcagatgcgatctgtg

SEQ ID NO: 15826 - DNA, 28 bp, synthetic construct
  source 1..28: mol_type = other DNA
gttatttttatttcagatgcgatctgtg

SEQ ID NO: 15827 - DNA, 29 bp, synthetic construct
  source 1..29: mol_type = other DNA
tgttatttttatttcagatgcgatctgtg

SEQ ID NO: 15828 - DNA, 30 bp, synthetic construct
  source 1..30: mol_type = other DNA
ttgttatttttatttcagatgcgatctgtg

SEQ ID NO: 15829 - DNA, 31 bp, synthetic construct
  source 1..31: mol_type = other DNA
gttgttatttttatttcagatgcgatctgtg

SEQ ID NO: 15830 - DNA, 32 bp, synthetic construct
  source 1..32: mol_type = other DNA
tgttgttatttttatttcagatgcgatctgtg

SEQ ID NO: 15831 - DNA, 33 bp, synthetic construct
  source 1..33: mol_type = other DNA
atgttgttatttttatttcagatgcgatctgtg

SEQ ID NO: 15832 - DNA, 34 bp, synthetic construct
  source 1..34: mol_type = other DNA
aatgttgttatttttatttcagatgcgatctgtg

SEQ ID NO: 15833 - DNA, 35 bp, synthetic construct
  source 1..35: mol_type = other DNA
aaatgttgttatttttatttcagatgcgatctgtg

SEQ ID NO: 15834 - DNA, 36 bp, synthetic construct
  source 1..36: mol_type = other DNA
aaaatgttgttatttttatttcagatgcgatctgtg

SEQ ID NO: 15835 - DNA, 37 bp, synthetic construct
  source 1..37: mol_type = other DNA
aaaaatgttgttatttttatttcagatgcgatctgtg

SEQ ID NO: 15836 - DNA, 38 bp, synthetic construct
  source 1..38: mol_type = other DNA
caaaaatgttgttatttttatttcagatgcgatctgtg

SEQ ID NO: 15837 - DNA, 39 bp, synthetic construct
  source 1..39: mol_type = other DNA
acaaaaatgttgttatttttatttcagatgcgatctgtg

SEQ ID NO: 15838 - DNA, 40 bp, synthetic construct
  source 1..40: mol_type = other DNA
aacaaaaatgttgttatttttatttcagatgcgatctgtg

SEQ ID NO: 15839 - DNA, 38 bp, synthetic construct
  source 1..38: mol_type = other DNA
gcgatctgtgagccgagtctttaagttcattgacatgc

SEQ ID NO: 15840 - DNA, 39 bp, synthetic construct
  source 1..39: mol_type = other DNA
tgcgatctgtgagccgagtctttaagttcattgacatgc

SEQ ID NO: 15841 - DNA, 40 bp, synthetic construct
  source 1..40: mol_type = other DNA
atgcgatctgtgagccgagtctttaagttcattgacatgc

SEQ ID NO: 15842 - DNA, 19 bp, synthetic construct
  source 1..19: mol_type = other DNA
gcgatctgtgagccgagtc

SEQ ID NO: 15843 - DNA, 20 bp, synthetic construct
  source 1..20: mol_type = other DNA
tgcgatctgtgagccgagtc

SEQ ID NO: 15844 - DNA, 21 bp, synthetic construct
  source 1..21: mol_type = other DNA
atgcgatctgtgagccgagtc

SEQ ID NO: 15845 - DNA, 22 bp, synthetic construct
  source 1..22: mol_type = other DNA
gatgcgatctgtgagccgagtc

SEQ ID NO: 15846 - DNA, 23 bp, synthetic construct
  source 1..23: mol_type = other DNA
agatgcgatctgtgagccgagtc

SEQ ID NO: 15847 - DNA, 24 bp, synthetic construct
  source 1..24: mol_type = other DNA
cagatgcgatctgtgagccgagtc

SEQ ID NO: 15848 - DNA, 25 bp, synthetic construct
  source 1..25: mol_type = other DNA
tcagatgcgatctgtgagccgagtc

SEQ ID NO: 15849 - DNA, 26 bp, synthetic construct
  source 1..26: mol_type = other DNA
ttcagatgcgatctgtgagccgagtc

SEQ ID NO: 15850 - DNA, 27 bp, synthetic construct
  source 1..27: mol_type = other DNA
tttcagatgcgatctgtgagccgagtc

SEQ ID NO: 15851 - DNA, 28 bp, synthetic construct
  source 1..28: mol_type = other DNA
atttcagatgcgatctgtgagccgagtc

SEQ ID NO: 15852 - DNA, 29 bp, synthetic construct
  source 1..29: mol_type = other DNA
tatttcagatgcgatctgtgagccgagtc

SEQ ID NO: 15853 - DNA, 30 bp, synthetic construct
  source 1..30: mol_type = other DNA
ttatttcagatgcgatctgtgagccgagtc

SEQ ID NO: 15854 - DNA, 31 bp, synthetic construct
  source 1..31: mol_type = other DNA
tttatttcagatgcgatctgtgagccgagtc

SEQ ID NO: 15855 - DNA, 32 bp, synthetic construct
  source 1..32: mol_type = other DNA
ttttatttcagatgcgatctgtgagccgagtc

SEQ ID NO: 15856 - DNA, 33 bp, synthetic construct
  source 1..33: mol_type = other DNA
tttttatttcagatgcgatctgtgagccgagtc

SEQ ID NO: 15857 - DNA, 34 bp, synthetic construct
  source 1..34: mol_type = other DNA
atttttatttcagatgcgatctgtgagccgagtc

SEQ ID NO: 15858 - DNA, 35 bp, synthetic construct
  source 1..35: mol_type = other DNA
tatttttatttcagatgcgatctgtgagccgagtc

SEQ ID NO: 15859 - DNA, 36 bp, synthetic construct
  source 1..36: mol_type = other DNA
ttatttttatttcagatgcgatctgtgagccgagtc

SEQ ID NO: 15860 - DNA, 37 bp, synthetic construct
  source 1..37: mol_type = other DNA
gttatttttatttcagatgcgatctgtgagccgagtc

SEQ ID NO: 15861 - DNA, 38 bp, synthetic construct
  source 1..38: mol_type = other DNA
tgttatttttatttcagatgcgatctgtgagccgagtc

SEQ ID NO: 15862 - DNA, 39 bp, synthetic construct
  source 1..39: mol_type = other DNA
ttgttatttttatttcagatgcgatctgtgagccgagtc

SEQ ID NO: 15863 - DNA, 40 bp, synthetic construct
  source 1..40: mol_type = other DNA
gttgttatttttatttcagatgcgatctgtgagccgagtc

SEQ ID NO: 15864 - DNA, 10 bp, synthetic construct
  source 1..10: mol_type = other DNA
cgcatctgaa

SEQ ID NO: 15865 - DNA, 11 bp, synthetic construct
  source 1..11: mol_type = other DNA
tcgcatctgaa

SEQ ID NO: 15866 - DNA, 12 bp, synthetic construct
  source 1..12: mol_type = other DNA
atcgcatctgaa

SEQ ID NO: 15867 - DNA, 13 bp, synthetic construct
  source 1..13: mol_type = other DNA
gatcgcatctgaa

SEQ ID NO: 15868 - DNA, 14 bp, synthetic construct
  source 1..14: mol_type = other DNA
agatcgcatctgaa

SEQ ID NO: 15869 - DNA, 15 bp, synthetic construct
  source 1..15: mol_type = other DNA
cagatcgcatctgaa

SEQ ID NO: 15870 - DNA, 16 bp, synthetic construct
  source 1..16: mol_type = other DNA
acagatcgcatctgaa

SEQ ID NO: 15871 - DNA, 17 bp, synthetic construct
  source 1..17: mol_type = other DNA
cacagatcgcatctgaa

SEQ ID NO: 15872 - DNA, 18 bp, synthetic construct
  source 1..18: mol_type = other DNA
tcacagatcgcatctgaa

SEQ ID NO: 15873 - DNA, 19 bp, synthetic construct
  source 1..19: mol_type = other DNA
ctcacagatcgcatctgaa

SEQ ID NO: 15874 - DNA, 20 bp, synthetic construct
  source 1..20: mol_type = other DNA
gctcacagatcgcatctgaa

SEQ ID NO: 15875 - DNA, 21 bp, synthetic construct
  source 1..21: mol_type = other DNA
ggctcacagatcgcatctgaa

SEQ ID NO: 15876 - DNA, 22 bp, synthetic construct
  source 1..22: mol_type = other DNA
cggctcacagatcgcatctgaa

SEQ ID NO: 15877 - DNA, 23 bp, synthetic construct
  source 1..23: mol_type = other DNA
tcggctcacagatcgcatctgaa

SEQ ID NO: 15878 - DNA, 24 bp, synthetic construct
  source 1..24: mol_type = other DNA
ctcggctcacagatcgcatctgaa

SEQ ID NO: 15879 - DNA, 25 bp, synthetic construct
  source 1..25: mol_type = other DNA
actcggctcacagatcgcatctgaa

SEQ ID NO: 15880 - DNA, 26 bp, synthetic construct
  source 1..26: mol_type = other DNA
gactcggctcacagatcgcatctgaa

SEQ ID NO: 15881 - DNA, 27 bp, synthetic construct
  source 1..27: mol_type = other DNA
agactcggctcacagatcgcatctgaa

SEQ ID NO: 15882 - DNA, 28 bp, synthetic construct
  source 1..28: mol_type = other DNA
aagactcggctcacagatcgcatctgaa

SEQ ID NO: 15883 - DNA, 29 bp, synthetic construct
  source 1..29: mol_type = other DNA
aaagactcggctcacagatcgcatctgaa

SEQ ID NO: 15884 - DNA, 30 bp, synthetic construct
  source 1..30: mol_type = other DNA
taaagactcggctcacagatcgcatctgaa

SEQ ID NO: 15885 - DNA, 31 bp, synthetic construct
  source 1..31: mol_type = other DNA
ttaaagactcggctcacagatcgcatctgaa

SEQ ID NO: 15886 - DNA, 32 bp, synthetic construct
  source 1..32: mol_type = other DNA
cttaaagactcggctcacagatcgcatctgaa

SEQ ID NO: 15887 - DNA, 33 bp, synthetic construct
  source 1..33: mol_type = other DNA
acttaaagactcggctcacagatcgcatctgaa

SEQ ID NO: 15888 - DNA, 34 bp, synthetic construct
  source 1..34: mol_type = other DNA
aacttaaagactcggctcacagatcgcatctgaa

SEQ ID NO: 15889 - DNA, 35 bp, synthetic construct
  source 1..35: mol_type = other DNA
gaacttaaagactcggctcacagatcgcatctgaa

SEQ ID NO: 15890 - DNA, 36 bp, synthetic construct
  source 1..36: mol_type = other DNA
tgaacttaaagactcggctcacagatcgcatctgaa

SEQ ID NO: 15891 - DNA, 37 bp, synthetic construct
  source 1..37: mol_type = other DNA
atgaacttaaagactcggctcacagatcgcatctgaa

SEQ ID NO: 15892 - DNA, 38 bp, synthetic construct
  source 1..38: mol_type = other DNA
aatgaacttaaagactcggctcacagatcgcatctgaa

SEQ ID NO: 15893 - DNA, 39 bp, synthetic construct
  source 1..39: mol_type = other DNA
caatgaacttaaagactcggctcacagatcgcatctgaa

SEQ ID NO: 15894 - DNA, 40 bp, synthetic construct
  source 1..40: mol_type = other DNA
tcaatgaacttaaagactcggctcacagatcgcatctgaa

SEQ ID NO: 15895 - DNA, 25 bp, synthetic construct
  source 1..25: mol_type = other DNA
cgcatctgaaataaaaataacaaca

SEQ ID NO: 15896 - DNA, 26 bp, synthetic construct
  source 1..26: mol_type = other DNA
tcgcatctgaaataaaaataacaaca

SEQ ID NO: 15897 - DNA, 27 bp, synthetic construct
  source 1..27: mol_type = other DNA
atcgcatctgaaataaaaataacaaca

SEQ ID NO: 15898 - DNA, 28 bp, synthetic construct
  source 1..28: mol_type = other DNA
gatcgcatctgaaataaaaataacaaca

SEQ ID NO: 15899 - DNA, 29 bp, synthetic construct
  source 1..29: mol_type = other DNA
agatcgcatctgaaataaaaataacaaca

SEQ ID NO: 15900 - DNA, 30 bp, synthetic construct
  source 1..30: mol_type = other DNA
cagatcgcatctgaaataaaaataacaaca

SEQ ID NO: 15901 - DNA, 31 bp, synthetic construct
  source 1..31: mol_type = other DNA
acagatcgcatctgaaataaaaataacaaca

SEQ ID NO: 15902 - DNA, 32 bp, synthetic construct
  source 1..32: mol_type = other DNA
cacagatcgcatctgaaataaaaataacaaca

SEQ ID NO: 15903 - DNA, 33 bp, synthetic construct
  source 1..33: mol_type = other DNA
tcacagatcgcatctgaaataaaaataacaaca

SEQ ID NO: 15904 - DNA, 34 bp, synthetic construct
  source 1..34: mol_type = other DNA
ctcacagatcgcatctgaaataaaaataacaaca

SEQ ID NO: 15905 - DNA, 35 bp, synthetic construct
  source 1..35: mol_type = other DNA
gctcacagatcgcatctgaaataaaaataacaaca

SEQ ID NO: 15906 - DNA, 36 bp, synthetic construct
  source 1..36: mol_type = other DNA
ggctcacagatcgcatctgaaataaaaataacaaca

SEQ ID NO: 15907 - DNA, 37 bp, synthetic construct
  source 1..37: mol_type = other DNA
cggctcacagatcgcatctgaaataaaaataacaaca

SEQ ID NO: 15908 - DNA, 38 bp, synthetic construct
  source 1..38: mol_type = other DNA
tcggctcacagatcgcatctgaaataaaaataacaaca

SEQ ID NO: 15909 - DNA, 39 bp, synthetic construct
  source 1..39: mol_type = other DNA
ctcggctcacagatcgcatctgaaataaaaataacaaca

SEQ ID NO: 15910 - DNA, 40 bp, synthetic construct
  source 1..40: mol_type = other DNA
actcggctcacagatcgcatctgaaataaaaataacaaca

SEQ ID NO: 15911 - DNA, 32 bp, synthetic construct
  source 1..32: mol_type = other DNA
gcgatctgtgagccgagtctttaagttcattg

SEQ ID NO: 15912 - DNA, 33 bp, synthetic construct
  source 1..33: mol_type = other DNA
tgcgatctgtgagccgagtctttaagttcattg

SEQ ID NO: 15913 - DNA, 34 bp, synthetic construct
  source 1..34: mol_type = other DNA
atgcgatctgtgagccgagtctttaagttcattg

SEQ ID NO: 15914 - DNA, 35 bp, synthetic construct
  source 1..35: mol_type = other DNA
gatgcgatctgtgagccgagtctttaagttcattg

SEQ ID NO: 15915 - DNA, 36 bp, synthetic construct
  source 1..36: mol_type = other DNA
agatgcgatctgtgagccgagtctttaagttcattg

SEQ ID NO: 15916 - DNA, 37 bp, synthetic construct
  source 1..37: mol_type = other DNA
cagatgcgatctgtgagccgagtctttaagttcattg

SEQ ID NO: 15917 - DNA, 38 bp, synthetic construct
  source 1..38: mol_type = other DNA
tcagatgcgatctgtgagccgagtctttaagttcattg

SEQ ID NO: 15918 - DNA, 39 bp, synthetic construct
  source 1..39: mol_type = other DNA
ttcagatgcgatctgtgagccgagtctttaagttcattg

SEQ ID NO: 15919 - DNA, 40 bp, synthetic construct
  source 1..40: mol_type = other DNA
tttcagatgcgatctgtgagccgagtctttaagttcattg

SEQ ID NO: 15920 - DNA, 28 bp, synthetic construct
  source 1..28: mol_type = other DNA
cgcatctgaaataaaaataacaacattt

SEQ ID NO: 15921 - DNA, 29 bp, synthetic construct
  source 1..29: mol_type = other DNA
tcgcatctgaaataaaaataacaacattt

SEQ ID NO: 15922 - DNA, 30 bp, synthetic construct
  source 1..30: mol_type = other DNA
atcgcatctgaaataaaaataacaacattt

SEQ ID NO: 15923 - DNA, 31 bp, synthetic construct
  source 1..31: mol_type = other DNA
gatcgcatctgaaataaaaataacaacattt

SEQ ID NO: 15924 - DNA, 32 bp, synthetic construct
  source 1..32: mol_type = other DNA
agatcgcatctgaaataaaaataacaacattt

SEQ ID NO: 15925 - DNA, 33 bp, synthetic construct
  source 1..33: mol_type = other DNA
cagatcgcatctgaaataaaaataacaacattt

SEQ ID NO: 15926 - DNA, 34 bp, synthetic construct
  source 1..34: mol_type = other DNA
acagatcgcatctgaaataaaaataacaacattt

SEQ ID NO: 15927 - DNA, 35 bp, synthetic construct
  source 1..35: mol_type = other DNA
cacagatcgcatctgaaataaaaataacaacattt

SEQ ID NO: 15928 - DNA, 36 bp, synthetic construct
  source 1..36: mol_type = other DNA
tcacagatcgcatctgaaataaaaataacaacattt

SEQ ID NO: 15929 - DNA, 37 bp, synthetic construct
  source 1..37: mol_type = other DNA
ctcacagatcgcatctgaaataaaaataacaacattt

SEQ ID NO: 15930 - DNA, 38 bp, synthetic construct
  source 1..38: mol_type = other DNA
gctcacagatcgcatctgaaataaaaataacaacattt

SEQ ID NO: 15931 - DNA, 39 bp, synthetic construct
  source 1..39: mol_type = other DNA
ggctcacagatcgcatctgaaataaaaataacaacattt

SEQ ID NO: 15932 - DNA, 40 bp, synthetic construct
  source 1..40: mol_type = other DNA
cggctcacagatcgcatctgaaataaaaataacaacattt

SEQ ID NO: 15933 - DNA, 23 bp, synthetic construct
  source 1..23: mol_type = other DNA
gcgatctgtgagccgagtcttta

SEQ ID NO: 15934 - DNA, 24 bp, synthetic construct
  source 1..24: mol_type = other DNA
tgcgatctgtgagccgagtcttta

SEQ ID NO: 15935 - DNA, 25 bp, synthetic construct
  source 1..25: mol_type = other DNA
atgcgatctgtgagccgagtcttta

SEQ ID NO: 15936 - DNA, 26 bp, synthetic construct
  source 1..26: mol_type = other DNA
gatgcgatctgtgagccgagtcttta

SEQ ID NO: 15937 - DNA, 27 bp, synthetic construct
  source 1..27: mol_type = other DNA
agatgcgatctgtgagccgagtcttta

SEQ ID NO: 15938 - DNA, 28 bp, synthetic construct
  source 1..28: mol_type = other DNA
cagatgcgatctgtgagccgagtcttta

SEQ ID NO: 15939 - DNA, 29 bp, synthetic construct
  source 1..29: mol_type = other DNA
tcagatgcgatctgtgagccgagtcttta

SEQ ID NO: 15940 - DNA, 30 bp, synthetic construct
  source 1..30: mol_type = other DNA
ttcagatgcgatctgtgagccgagtcttta

SEQ ID NO: 15941 - DNA, 31 bp, synthetic construct
  source 1..31: mol_type = other DNA
tttcagatgcgatctgtgagccgagtcttta

SEQ ID NO: 15942 - DNA, 32 bp, synthetic construct
  source 1..32: mol_type = other DNA
atttcagatgcgatctgtgagccgagtcttta

SEQ ID NO: 15943 - DNA, 33 bp, synthetic construct
  source 1..33: mol_type = other DNA
tatttcagatgcgatctgtgagccgagtcttta

SEQ ID NO: 15944 - DNA, 34 bp, synthetic construct
  source 1..34: mol_type = other DNA
ttatttcagatgcgatctgtgagccgagtcttta

SEQ ID NO: 15945 - DNA, 35 bp, synthetic construct
  source 1..35: mol_type = other DNA
tttatttcagatgcgatctgtgagccgagtcttta

SEQ ID NO: 15946 - DNA, 36 bp, synthetic construct
  source 1..36: mol_type = other DNA
ttttatttcagatgcgatctgtgagccgagtcttta

SEQ ID NO: 15947 - DNA, 37 bp, synthetic construct
  source 1..37: mol_type = other DNA
tttttatttcagatgcgatctgtgagccgagtcttta

SEQ ID NO: 15948 - DNA, 38 bp, synthetic construct
  source 1..38: mol_type = other DNA
atttttatttcagatgcgatctgtgagccgagtcttta

SEQ ID NO: 15949 - DNA, 39 bp, synthetic construct
  source 1..39: mol_type = other DNA
tatttttatttcagatgcgatctgtgagccgagtcttta

SEQ ID NO: 15950 - DNA, 40 bp, synthetic construct
  source 1..40: mol_type = other DNA
ttatttttatttcagatgcgatctgtgagccgagtcttta

SEQ ID NO: 15951 - DNA, 18 bp, synthetic construct
  source 1..18: mol_type = other DNA
gcgatctgtgtctcgagt

SEQ ID NO: 15952 - DNA, 18 bp, synthetic construct
  source 1..18: mol_type = other DNA
gcgatctgtgagccgagt

SEQ ID NO: 15953 - DNA, 19 bp, synthetic construct
  source 1..19: mol_type = other DNA
tgcgatctgtgtctcgagt

SEQ ID NO: 15954 - DNA, 19 bp, synthetic construct
  source 1..19: mol_type = other DNA
tgcgatctgtgagccgagt

SEQ ID NO: 15955 - DNA, 20 bp, synthetic construct
  source 1..20: mol_type = other DNA
atgcgatctgtgagccgagt

SEQ ID NO: 15956 - DNA, 20 bp, synthetic construct
  source 1..20: mol_type = other DNA
atgcgatctgtgtctcgagt

SEQ ID NO: 15957 - DNA, 21 bp, synthetic construct
  source 1..21: mol_type = other DNA
gatgcgatctgtgtctcgagt

SEQ ID NO: 15958 - DNA, 21 bp, synthetic construct
  source 1..21: mol_type = other DNA
gatgcgatctgtgagccgagt

SEQ ID NO: 15959 - DNA, 22 bp, synthetic construct
  source 1..22: mol_type = other DNA
agatgcgatctgtgtctcgagt

SEQ ID NO: 15960 - DNA, 22 bp, synthetic construct
  source 1..22: mol_type = other DNA
agatgcgatctgtgagccgagt

SEQ ID NO: 15961 - DNA, 23 bp, synthetic construct
  source 1..23: mol_type = other DNA
cagatgcgatctgtgagccgagt

SEQ ID NO: 15962 - DNA, 23 bp, synthetic construct
  source 1..23: mol_type = other DNA
cagatgcgatctgtgtctcgagt

SEQ ID NO: 15963 - DNA, 24 bp, synthetic construct
  source 1..24: mol_type = other DNA
tcagatgcgatctgtgtctcgagt

SEQ ID NO: 15964 - DNA, 24 bp, synthetic construct
  source 1..24: mol_type = other DNA
tcagatgcgatctgtgagccgagt

SEQ ID NO: 15965 - DNA, 25 bp, synthetic construct
  source 1..25: mol_type = other DNA
ttcagatgcgatctgtgtctcgagt

SEQ ID NO: 15966 - DNA, 25 bp, synthetic construct
  source 1..25: mol_type = other DNA
ttcagatgcgatctgtgagccgagt

SEQ ID NO: 15967 - DNA, 26 bp, synthetic construct
  source 1..26: mol_type = other DNA
tttcagatgcgatctgtgagccgagt

SEQ ID NO: 15968 - DNA, 26 bp, synthetic construct
  source 1..26: mol_type = other DNA
tttcagatgcgatctgtgtctcgagt

SEQ ID NO: 15969 - DNA, 27 bp, synthetic construct
  source 1..27: mol_type = other DNA
atttcagatgcgatctgtgagccgagt

SEQ ID NO: 15970 - DNA, 27 bp, synthetic construct
  source 1..27: mol_type = other DNA
atttcagatgcgatctgtgtctcgagt

SEQ ID NO: 15971 - DNA, 28 bp, synthetic construct
  source 1..28: mol_type = other DNA
tatttcagatgcgatctgtgagccgagt

SEQ ID NO: 15972 - DNA, 28 bp, synthetic construct
  source 1..28: mol_type = other DNA
tatttcagatgcgatctgtgtctcgagt

SEQ ID NO: 15973 - DNA, 29 bp, synthetic construct
  source 1..29: mol_type = other DNA
ttatttcagatgcgatctgtgagccgagt

SEQ ID NO: 15974 - DNA, 29 bp, synthetic construct
  source 1..29: mol_type = other DNA
ttatttcagatgcgatctgtgtctcgagt

SEQ ID NO: 15975 - DNA, 30 bp, synthetic construct
  source 1..30: mol_type = other DNA
tttatttcagatgcgatctgtgagccgagt

SEQ ID NO: 15976 - DNA, 30 bp, synthetic construct
  source 1..30: mol_type = other DNA
tttatttcagatgcgatctgtgtctcgagt

SEQ ID NO: 15977 - DNA, 31 bp, synthetic construct
  source 1..31: mol_type = other DNA
ttttatttcagatgcgatctgtgtctcgagt

SEQ ID NO: 15978 - DNA, 31 bp, synthetic construct
  source 1..31: mol_type = other DNA
ttttatttcagatgcgatctgtgagccgagt

SEQ ID NO: 15979 - DNA, 32 bp, synthetic construct
  source 1..32: mol_type = other DNA
tttttatttcagatgcgatctgtgtctcgagt

SEQ ID NO: 15980 - DNA, 32 bp, synthetic construct
  source 1..32: mol_type = other DNA
tttttatttcagatgcgatctgtgagccgagt

SEQ ID NO: 15981 - DNA, 33 bp, synthetic construct
  source 1..33: mol_type = other DNA
atttttatttcagatgcgatctgtgtctcgagt

SEQ ID NO: 15982 - DNA, 33 bp, synthetic construct
  source 1..33: mol_type = other DNA
atttttatttcagatgcgatctgtgagccgagt

SEQ ID NO: 15983 - DNA, 34 bp, synthetic construct
  source 1..34: mol_type = other DNA
tatttttatttcagatgcgatctgtgtctcgagt

SEQ ID NO: 15984 - DNA, 34 bp, synthetic construct
  source 1..34: mol_type = other DNA
tatttttatttcagatgcgatctgtgagccgagt

SEQ ID NO: 15985 - DNA, 35 bp, synthetic construct
  source 1..35: mol_type = other DNA
ttatttttatttcagatgcgatctgtgtctcgagt

SEQ ID NO: 15986 - DNA, 35 bp, synthetic construct
  source 1..35: mol_type = other DNA
ttatttttatttcagatgcgatctgtgagccgagt

SEQ ID NO: 15987 - DNA, 36 bp, synthetic construct
  source 1..36: mol_type = other DNA
gttatttttatttcagatgcgatctgtgtctcgagt

SEQ ID NO: 15988 - DNA, 36 bp, synthetic construct
  source 1..36: mol_type = other DNA
gttatttttatttcagatgcgatctgtgagccgagt

SEQ ID NO: 15989 - DNA, 37 bp, synthetic construct
  source 1..37: mol_type = other DNA
tgttatttttatttcagatgcgatctgtgagccgagt

SEQ ID NO: 15990 - DNA, 37 bp, synthetic construct
  source 1..37: mol_type = other DNA
tgttatttttatttcagatgcgatctgtgtctcgagt

SEQ ID NO: 15991 - DNA, 38 bp, synthetic construct
  source 1..38: mol_type = other DNA
ttgttatttttatttcagatgcgatctgtgtctcgagt

SEQ ID NO: 15992 - DNA, 38 bp, synthetic construct
  source 1..38: mol_type = other DNA
ttgttatttttatttcagatgcgatctgtgagccgagt

SEQ ID NO: 15993 - DNA, 39 bp, synthetic construct
  source 1..39: mol_type = other DNA
gttgttatttttatttcagatgcgatctgtgagccgagt

SEQ ID NO: 15994 - DNA, 39 bp, synthetic construct
  source 1..39: mol_type = other DNA
gttgttatttttatttcagatgcgatctgtgtctcgagt

SEQ ID NO: 15995 - DNA, 40 bp, synthetic construct
  source 1..40: mol_type = other DNA
tgttgttatttttatttcagatgcgatctgtgagccgagt

SEQ ID NO: 15996 - DNA, 40 bp, synthetic construct
  source 1..40: mol_type = other DNA
tgttgttatttttatttcagatgcgatctgtgtctcgagt

SEQ ID NO: 15997 - DNA, 17 bp, synthetic construct
  source 1..17: mol_type = other DNA
gcgatctgtgagccgag

SEQ ID NO: 15998 - DNA, 18 bp, synthetic construct
  source 1..18: mol_type = other DNA
tgcgatctgtgagccgag

SEQ ID NO: 15999 - DNA, 19 bp, synthetic construct
  source 1..19: mol_type = other DNA
atgcgatctgtgagccgag

SEQ ID NO: 16000 - DNA, 20 bp, synthetic construct
  source 1..20: mol_type = other DNA
gatgcgatctgtgagccgag

SEQ ID NO: 16001 - DNA, 21 bp, synthetic construct
  source 1..21: mol_type = other DNA
agatgcgatctgtgagccgag

SEQ ID NO: 16002 - DNA, 22 bp, synthetic construct
  source 1..22: mol_type = other DNA
cagatgcgatctgtgagccgag

SEQ ID NO: 16003 - DNA, 23 bp, synthetic construct
  source 1..23: mol_type = other DNA
tcagatgcgatctgtgagccgag

SEQ ID NO: 16004 - DNA, 24 bp, synthetic construct
  source 1..24: mol_type = other DNA
ttcagatgcgatctgtgagccgag

SEQ ID NO: 16005 - DNA, 25 bp, synthetic construct
  source 1..25: mol_type = other DNA
tttcagatgcgatctgtgagccgag

SEQ ID NO: 16006 - DNA, 26 bp, synthetic construct
  source 1..26: mol_type = other DNA
atttcagatgcgatctgtgagccgag

SEQ ID NO: 16007 - DNA, 27 bp, synthetic construct
  source 1..27: mol_type = other DNA
tatttcagatgcgatctgtgagccgag

SEQ ID NO: 16008 - DNA, 28 bp, synthetic construct
  source 1..28: mol_type = other DNA
ttatttcagatgcgatctgtgagccgag

SEQ ID NO: 16009 - DNA, 29 bp, synthetic construct
  source 1..29: mol_type = other DNA
tttatttcagatgcgatctgtgagccgag

SEQ ID NO: 16010 - DNA, 30 bp, synthetic construct
  source 1..30: mol_type = other DNA
ttttatttcagatgcgatctgtgagccgag

SEQ ID NO: 16011 - DNA, 31 bp, synthetic construct
  source 1..31: mol_type = other DNA
tttttatttcagatgcgatctgtgagccgag

SEQ ID NO: 16012 - DNA, 32 bp, synthetic construct
  source 1..32: mol_type = other DNA
atttttatttcagatgcgatctgtgagccgag

SEQ ID NO: 16013 - DNA, 33 bp, synthetic construct
  source 1..33: mol_type = other DNA
tatttttatttcagatgcgatctgtgagccgag

SEQ ID NO: 16014 - DNA, 34 bp, synthetic construct
  source 1..34: mol_type = other DNA
ttatttttatttcagatgcgatctgtgagccgag

SEQ ID NO: 16015 - DNA, 35 bp, synthetic construct
  source 1..35: mol_type = other DNA
gttatttttatttcagatgcgatctgtgagccgag

SEQ ID NO: 16016 - DNA, 36 bp, synthetic construct
  source 1..36: mol_type = other DNA
tgttatttttatttcagatgcgatctgtgagccgag

SEQ ID NO: 16017 - DNA, 37 bp, synthetic construct
  source 1..37: mol_type = other DNA
ttgttatttttatttcagatgcgatctgtgagccgag

SEQ ID NO: 16018 - DNA, 38 bp, synthetic construct
  source 1..38: mol_type = other DNA
gttgttatttttatttcagatgcgatctgtgagccgag

SEQ ID NO: 16019 - DNA, 39 bp, synthetic construct
  source 1..39: mol_type = other DNA
tgttgttatttttatttcagatgcgatctgtgagccgag

SEQ ID NO: 16020 - DNA, 40 bp, synthetic construct
  source 1..40: mol_type = other DNA
atgttgttatttttatttcagatgcgatctgtgagccgag

SEQ ID NO: 16021 - DNA, 10 bp, synthetic construct
  source 1..10: mol_type = other DNA
cagatcgcat

SEQ ID NO: 16022 - DNA, 11 bp, synthetic construct
  source 1..11: mol_type = other DNA
acagatcgcat

SEQ ID NO: 16023 - DNA, 12 bp, synthetic construct
  source 1..12: mol_type = other DNA
cacagatcgcat

SEQ ID NO: 16024 - DNA, 13 bp, synthetic construct
  source 1..13: mol_type = other DNA
tcacagatcgcat

SEQ ID NO: 16025 - DNA, 14 bp, synthetic construct
  source 1..14: mol_type = other DNA
ctcacagatcgcat

SEQ ID NO: 16026 - DNA, 15 bp, synthetic construct
  source 1..15: mol_type = other DNA
gctcacagatcgcat

SEQ ID NO: 16027 - DNA, 16 bp, synthetic construct
  source 1..16: mol_type = other DNA
ggctcacagatcgcat

SEQ ID NO: 16028 - DNA, 17 bp, synthetic construct
  source 1..17: mol_type = other DNA
cggctcacagatcgcat

SEQ ID NO: 16029 - DNA, 18 bp, synthetic construct
  source 1..18: mol_type = other DNA
tcggctcacagatcgcat

SEQ ID NO: 16030 - DNA, 19 bp, synthetic construct
  source 1..19: mol_type = other DNA
ctcggctcacagatcgcat

SEQ ID NO: 16031 - DNA, 20 bp, synthetic construct
  source 1..20: mol_type = other DNA
actcggctcacagatcgcat

SEQ ID NO: 16032 - DNA, 21 bp, synthetic construct
  source 1..21: mol_type = other DNA
gactcggctcacagatcgcat

SEQ ID NO: 16033 - DNA, 22 bp, synthetic construct
  source 1..22: mol_type = other DNA
agactcggctcacagatcgcat

SEQ ID NO: 16034 - DNA, 23 bp, synthetic construct
  source 1..23: mol_type = other DNA
aagactcggctcacagatcgcat

SEQ ID NO: 16035 - DNA, 24 bp, synthetic construct
  source 1..24: mol_type = other DNA
aaagactcggctcacagatcgcat

SEQ ID NO: 16036 - DNA, 25 bp, synthetic construct
  source 1..25: mol_type = other DNA
taaagactcggctcacagatcgcat

SEQ ID NO: 16037 - DNA, 26 bp, synthetic construct
  source 1..26: mol_type = other DNA
ttaaagactcggctcacagatcgcat

SEQ ID NO: 16038 - DNA, 27 bp, synthetic construct
  source 1..27: mol_type = other DNA
cttaaagactcggctcacagatcgcat

SEQ ID NO: 16039 - DNA, 28 bp, synthetic construct
  source 1..28: mol_type = other DNA
acttaaagactcggctcacagatcgcat

SEQ ID NO: 16040 - DNA, 29 bp, synthetic construct
  source 1..29: mol_type = other DNA
aacttaaagactcggctcacagatcgcat

SEQ ID NO: 16041 - DNA, 30 bp, synthetic construct
  source 1..30: mol_type = other DNA
gaacttaaagactcggctcacagatcgcat

SEQ ID NO: 16042 - DNA, 31 bp, synthetic construct
  source 1..31: mol_type = other DNA
tgaacttaaagactcggctcacagatcgcat

SEQ ID NO: 16043 - DNA, 32 bp, synthetic construct
  source 1..32: mol_type = other DNA
atgaacttaaagactcggctcacagatcgcat

SEQ ID NO: 16044 - DNA, 33 bp, synthetic construct
  source 1..33: mol_type = other DNA
aatgaacttaaagactcggctcacagatcgcat

SEQ ID NO: 16045 - DNA, 34 bp, synthetic construct
  source 1..34: mol_type = other DNA
caatgaacttaaagactcggctcacagatcgcat

SEQ ID NO: 16046 - DNA, 35 bp, synthetic construct
  source 1..35: mol_type = other DNA
tcaatgaacttaaagactcggctcacagatcgcat

SEQ ID NO: 16047 - DNA, 36 bp, synthetic construct
  source 1..36: mol_type = other DNA
gtcaatgaacttaaagactcggctcacagatcgcat

SEQ ID NO: 16048 - DNA, 37 bp, synthetic construct
  source 1..37: mol_type = other DNA
tgtcaatgaacttaaagactcggctcacagatcgcat

SEQ ID NO: 16049 - DNA, 38 bp, synthetic construct
  source 1..38: mol_type = other DNA
atgtcaatgaacttaaagactcggctcacagatcgcat

SEQ ID NO: 16050 - DNA, 39 bp, synthetic construct
  source 1..39: mol_type = other DNA
catgtcaatgaacttaaagactcggctcacagatcgcat

SEQ ID NO: 16051 - DNA, 40 bp, synthetic construct
  source 1..40: mol_type = other DNA
gcatgtcaatgaacttaaagactcggctcacagatcgcat

SEQ ID NO: 16052 - DNA, 10 bp, synthetic construct
  source 1..10: mol_type = other DNA
gatcgcatct

SEQ ID NO: 16053 - DNA, 11 bp, synthetic construct
  source 1..11: mol_type = other DNA
agatcgcatct

SEQ ID NO: 16054 - DNA, 12 bp, synthetic construct
  source 1..12: mol_type = other DNA
cagatcgcatct

SEQ ID NO: 16055 - DNA, 13 bp, synthetic construct
  source 1..13: mol_type = other DNA
acagatcgcatct

SEQ ID NO: 16056 - DNA, 14 bp, synthetic construct
  source 1..14: mol_type = other DNA
cacagatcgcatct

SEQ ID NO: 16057 - DNA, 15 bp, synthetic construct
  source 1..15: mol_type = other DNA
tcacagatcgcatct

SEQ ID NO: 16058 - DNA, 16 bp, synthetic construct
  source 1..16: mol_type = other DNA
ctcacagatcgcatct

SEQ ID NO: 16059 - DNA, 17 bp, synthetic construct
  source 1..17: mol_type = other DNA
gctcacagatcgcatct

SEQ ID NO: 16060 - DNA, 18 bp, synthetic construct
  source 1..18: mol_type = other DNA
ggctcacagatcgcatct

SEQ ID NO: 16061 - DNA, 19 bp, synthetic construct
  source 1..19: mol_type = other DNA
cggctcacagatcgcatct

SEQ ID NO: 16062 - DNA, 20 bp, synthetic construct
  source 1..20: mol_type = other DNA
tcggctcacagatcgcatct

SEQ ID NO: 16063 - DNA, 21 bp, synthetic construct
  source 1..21: mol_type = other DNA
ctcggctcacagatcgcatct

SEQ ID NO: 16064 - DNA, 22 bp, synthetic construct
  source 1..22: mol_type = other DNA
actcggctcacagatcgcatct

SEQ ID NO: 16065 - DNA, 23 bp, synthetic construct
  source 1..23: mol_type = other DNA
gactcggctcacagatcgcatct

SEQ ID NO: 16066 - DNA, 24 bp, synthetic construct
  source 1..24: mol_type = other DNA
agactcggctcacagatcgcatct

SEQ ID NO: 16067 - DNA, 25 bp, synthetic construct
  source 1..25: mol_type = other DNA
aagactcggctcacagatcgcatct

SEQ ID NO: 16068 - DNA, 26 bp, synthetic construct
  source 1..26: mol_type = other DNA
aaagactcggctcacagatcgcatct

SEQ ID NO: 16069 - DNA, 27 bp, synthetic construct
  source 1..27: mol_type = other DNA
taaagactcggctcacagatcgcatct

SEQ ID NO: 16070 - DNA, 28 bp, synthetic construct
  source 1..28: mol_type = other DNA
ttaaagactcggctcacagatcgcatct

SEQ ID NO: 16071 - DNA, 29 bp, synthetic construct
  source 1..29: mol_type = other DNA
cttaaagactcggctcacagatcgcatct

SEQ ID NO: 16072 - DNA, 30 bp, synthetic construct
  source 1..30: mol_type = other DNA
acttaaagactcggctcacagatcgcatct

SEQ ID NO: 16073 - DNA, 31 bp, synthetic construct
  source 1..31: mol_type = other DNA
aacttaaagactcggctcacagatcgcatct

SEQ ID NO: 16074 - DNA, 32 bp, synthetic construct
  source 1..32: mol_type = other DNA
gaacttaaagactcggctcacagatcgcatct

SEQ ID NO: 16075 - DNA, 33 bp, synthetic construct
  source 1..33: mol_type = other DNA
tgaacttaaagactcggctcacagatcgcatct

SEQ ID NO: 16076 - DNA, 34 bp, synthetic construct
  source 1..34: mol_type = other DNA
atgaacttaaagactcggctcacagatcgcatct

SEQ ID NO: 16077 - DNA, 35 bp, synthetic construct
  source 1..35: mol_type = other DNA
aatgaacttaaagactcggctcacagatcgcatct

SEQ ID NO: 16078 - DNA, 36 bp, synthetic construct
  source 1..36: mol_type = other DNA
caatgaacttaaagactcggctcacagatcgcatct

SEQ ID NO: 16079 - DNA, 37 bp, synthetic construct
  source 1..37: mol_type = other DNA
tcaatgaacttaaagactcggctcacagatcgcatct

SEQ ID NO: 16080 - DNA, 38 bp, synthetic construct
  source 1..38: mol_type = other DNA
gtcaatgaacttaaagactcggctcacagatcgcatct

SEQ ID NO: 16081 - DNA, 39 bp, synthetic construct
  source 1..39: mol_type = other DNA
tgtcaatgaacttaaagactcggctcacagatcgcatct

SEQ ID NO: 16082 - DNA, 40 bp, synthetic construct
  source 1..40: mol_type = other DNA
atgtcaatgaacttaaagactcggctcacagatcgcatct

SEQ ID NO: 16083 - DNA, 24 bp, synthetic construct
  source 1..24: mol_type = other DNA
gcgatctgtgagccgagtctttaa

SEQ ID NO: 16084 - DNA, 24 bp, synthetic construct
  source 1..24: mol_type = other DNA
gcgatctgtgagccgagtgtttaa

SEQ ID NO: 16085 - DNA, 25 bp, synthetic construct
  source 1..25: mol_type = other DNA
tgcgatctgtgagccgagtctttaa

SEQ ID NO: 16086 - DNA, 25 bp, synthetic construct
  source 1..25: mol_type = other DNA
tgcgatctgtgagccgagtgtttaa

SEQ ID NO: 16087 - DNA, 26 bp, synthetic construct
  source 1..26: mol_type = other DNA
atgcgatctgtgagccgagtctttaa

SEQ ID NO: 16088 - DNA, 26 bp, synthetic construct
  source 1..26: mol_type = other DNA
atgcgatctgtgagccgagtgtttaa

SEQ ID NO: 16089 - DNA, 27 bp, synthetic construct
  source 1..27: mol_type = other DNA
gatgcgatctgtgagccgagtgtttaa

SEQ ID NO: 16090 - DNA, 27 bp, synthetic construct
  source 1..27: mol_type = other DNA
gatgcgatctgtgagccgagtctttaa

SEQ ID NO: 16091 - DNA, 28 bp, synthetic construct
  source 1..28: mol_type = other DNA
agatgcgatctgtgagccgagtctttaa

SEQ ID NO: 16092 - DNA, 28 bp, synthetic construct
  source 1..28: mol_type = other DNA
agatgcgatctgtgagccgagtgtttaa

SEQ ID NO: 16093 - DNA, 29 bp, synthetic construct
  source 1..29: mol_type = other DNA
cagatgcgatctgtgagccgagtctttaa

SEQ ID NO: 16094 - DNA, 29 bp, synthetic construct
  source 1..29: mol_type = other DNA
cagatgcgatctgtgagccgagtgtttaa

SEQ ID NO: 16095 - DNA, 30 bp, synthetic construct
  source 1..30: mol_type = other DNA
tcagatgcgatctgtgagccgagtctttaa

SEQ ID NO: 16096 - DNA, 30 bp, synthetic construct
  source 1..30: mol_type = other DNA
tcagatgcgatctgtgagccgagtgtttaa

SEQ ID NO: 16097 - DNA, 31 bp, synthetic construct
  source 1..31: mol_type = other DNA
ttcagatgcgatctgtgagccgagtgtttaa

SEQ ID NO: 16098 - DNA, 31 bp, synthetic construct
  source 1..31: mol_type = other DNA
ttcagatgcgatctgtgagccgagtctttaa

SEQ ID NO: 16099 - DNA, 32 bp, synthetic construct
  source 1..32: mol_type = other DNA
tttcagatgcgatctgtgagccgagtgtttaa

SEQ ID NO: 16100 - DNA, 32 bp, synthetic construct
  source 1..32: mol_type = other DNA
tttcagatgcgatctgtgagccgagtctttaa

SEQ ID NO: 16101 - DNA, 33 bp, synthetic construct
  source 1..33: mol_type = other DNA
atttcagatgcgatctgtgagccgagtgtttaa

SEQ ID NO: 16102 - DNA, 33 bp, synthetic construct
  source 1..33: mol_type = other DNA
atttcagatgcgatctgtgagccgagtctttaa

SEQ ID NO: 16103 - DNA, 34 bp, synthetic construct
  source 1..34: mol_type = other DNA
tatttcagatgcgatctgtgagccgagtctttaa

SEQ ID NO: 16104 - DNA, 34 bp, synthetic construct
  source 1..34: mol_type = other DNA
tatttcagatgcgatctgtgagccgagtgtttaa

SEQ ID NO: 16105 - DNA, 35 bp, synthetic construct
  source 1..35: mol_type = other DNA
ttatttcagatgcgatctgtgagccgagtgtttaa

SEQ ID NO: 16106 - DNA, 35 bp, synthetic construct
  source 1..35: mol_type = other DNA
ttatttcagatgcgatctgtgagccgagtctttaa

SEQ ID NO: 16107 - DNA, 36 bp, synthetic construct
  source 1..36: mol_type = other DNA
tttatttcagatgcgatctgtgagccgagtgtttaa

SEQ ID NO: 16108 - DNA, 36 bp, synthetic construct
  source 1..36: mol_type = other DNA
tttatttcagatgcgatctgtgagccgagtctttaa

SEQ ID NO: 16109 - DNA, 37 bp, synthetic construct
  source 1..37: mol_type = other DNA
ttttatttcagatgcgatctgtgagccgagtctttaa

SEQ ID NO: 16110 - DNA, 37 bp, synthetic construct
  source 1..37: mol_type = other DNA
ttttatttcagatgcgatctgtgagccgagtgtttaa

SEQ ID NO: 16111 - DNA, 38 bp, synthetic construct
  source 1..38: mol_type = other DNA
tttttatttcagatgcgatctgtgagccgagtctttaa

SEQ ID NO: 16112 - DNA, 38 bp, synthetic construct
  source 1..38: mol_type = other DNA
tttttatttcagatgcgatctgtgagccgagtgtttaa

SEQ ID NO: 16113 - DNA, 39 bp, synthetic construct
  source 1..39: mol_type = other DNA
atttttatttcagatgcgatctgtgagccgagtgtttaa

SEQ ID NO: 16114 - DNA, 39 bp, synthetic construct
  source 1..39: mol_type = other DNA
atttttatttcagatgcgatctgtgagccgagtctttaa

SEQ ID NO: 16115 - DNA, 40 bp, synthetic construct
  source 1..40: mol_type = other DNA
tatttttatttcagatgcgatctgtgagccgagtctttaa

SEQ ID NO: 16116 - DNA, 40 bp, synthetic construct
  source 1..40: mol_type = other DNA
tatttttatttcagatgcgatctgtgagccgagtgtttaa

SEQ ID NO: 16117 - DNA, 23 bp, synthetic construct
  source 1..23: mol_type = other DNA
cggctcacagatcgcatttgaaa

SEQ ID NO: 16118 - DNA, 23 bp, synthetic construct
  source 1..23: mol_type = other DNA
cggctcacagatcgcatctgaaa

SEQ ID NO: 16119 - DNA, 24 bp, synthetic construct
  source 1..24: mol_type = other DNA
tcggctcacagatcgcatttgaaa

SEQ ID NO: 16120 - DNA, 24 bp, synthetic construct
  source 1..24: mol_type = other DNA
tcggctcacagatcgcatctgaaa

SEQ ID NO: 16121 - DNA, 25 bp, synthetic construct
  source 1..25: mol_type = other DNA
ctcggctcacagatcgcatctgaaa

SEQ ID NO: 16122 - DNA, 25 bp, synthetic construct
  source 1..25: mol_type = other DNA
ctcggctcacagatcgcatttgaaa

SEQ ID NO: 16123 - DNA, 26 bp, synthetic construct
  source 1..26: mol_type = other DNA
actcggctcacagatcgcatctgaaa

SEQ ID NO: 16124 - DNA, 26 bp, synthetic construct
  source 1..26: mol_type = other DNA
actcggctcacagatcgcatttgaaa

SEQ ID NO: 16125 - DNA, 27 bp, synthetic construct
  source 1..27: mol_type = other DNA
gactcggctcacagatcgcatttgaaa

SEQ ID NO: 16126 - DNA, 27 bp, synthetic construct
  source 1..27: mol_type = other DNA
gactcggctcacagatcgcatctgaaa

SEQ ID NO: 16127 - DNA, 28 bp, synthetic construct
  source 1..28: mol_type = other DNA
agactcggctcacagatcgcatctgaaa

SEQ ID NO: 16128 - DNA, 28 bp, synthetic construct
  source 1..28: mol_type = other DNA
agactcggctcacagatcgcatttgaaa

SEQ ID NO: 16129 - DNA, 29 bp, synthetic construct
  source 1..29: mol_type = other DNA
aagactcggctcacagatcgcatctgaaa

SEQ ID NO: 16130 - DNA, 29 bp, synthetic construct
  source 1..29: mol_type = other DNA
aagactcggctcacagatcgcatttgaaa

SEQ ID NO: 16131 - DNA, 30 bp, synthetic construct; identical to SEQ ID NO: 15787
  source 1..30: mol_type = other DNA

SEQ ID NO: 16132 - DNA, 30 bp, synthetic construct; identical to SEQ ID NO: 15786
  source 1..30: mol_type = other DNA

SEQ ID NO: 16133 - DNA, 31 bp, synthetic construct; identical to SEQ ID NO: 15789
  source 1..31: mol_type = other DNA

SEQ ID NO: 16134 - DNA, 31 bp, synthetic construct; identical to SEQ ID NO: 15788
  source 1..31: mol_type = other DNA

SEQ ID NO: 16135 - DNA, 32 bp, synthetic construct; identical to SEQ ID NO: 15791
  source 1..32: mol_type = other DNA

SEQ ID NO: 16136 - DNA, 32 bp, synthetic construct; identical to SEQ ID NO: 15790
  source 1..32: mol_type = other DNA

SEQ ID NO: 16137 - DNA, 33 bp, synthetic construct; identical to SEQ ID NO: 15793
  source 1..33: mol_type = other DNA

SEQ ID NO: 16138 - DNA, 33 bp, synthetic construct; identical to SEQ ID NO: 15792
  source 1..33: mol_type = other DNA

SEQ ID NO: 16139 - DNA, 34 bp, synthetic construct; identical to SEQ ID NO: 15794
  source 1..34: mol_type = other DNA

SEQ ID NO: 16140 - DNA, 34 bp, synthetic construct; identical to SEQ ID NO: 15795
  source 1..34: mol_type = other DNA

SEQ ID NO: 16141 - DNA, 35 bp, synthetic construct; identical to SEQ ID NO: 15797
  source 1..35: mol_type = other DNA

SEQ ID NO: 16142 - DNA, 35 bp, synthetic construct; identical to SEQ ID NO: 15796
  source 1..35: mol_type = other DNA

SEQ ID NO: 16143 - DNA, 36 bp, synthetic construct; identical to SEQ ID NO: 15799
  source 1..36: mol_type = other DNA

SEQ ID NO: 16144 - DNA, 36 bp, synthetic construct; identical to SEQ ID NO: 15798
  source 1..36: mol_type = other DNA

SEQ ID NO: 16145 - DNA, 37 bp, synthetic construct; identical to SEQ ID NO: 15801
  source 1..37: mol_type = other DNA

SEQ ID NO: 16146 - DNA, 37 bp, synthetic construct; identical to SEQ ID NO: 15800
  source 1..37: mol_type = other DNA

SEQ ID NO: 16147 - DNA, 38 bp, synthetic construct; identical to SEQ ID NO: 15803
  source 1..38: mol_type = other DNA

SEQ ID NO: 16148 - DNA, 38 bp, synthetic construct; identical to SEQ ID NO: 15802
  source 1..38: mol_type = other DNA

SEQ ID NO: 16149 - DNA, 39 bp, synthetic construct; identical to SEQ ID NO: 15804
  source 1..39: mol_type = other DNA

SEQ ID NO: 16150 - DNA, 39 bp, synthetic construct; identical to SEQ ID NO: 15805
  source 1..39: mol_type = other DNA

SEQ ID NO: 16151 - DNA, 40 bp, synthetic construct; identical to SEQ ID NO: 15807
  source 1..40: mol_type = other DNA

SEQ ID NO: 16152 - DNA, 40 bp, synthetic construct; identical to SEQ ID NO: 15806
  source 1..40: mol_type = other DNA

SEQ ID NO: 16153 - DNA, 26 bp, synthetic construct
  source 1..26: mol_type = other DNA
ccgagtctttaagttcattgacatgc

SEQ ID NO: 16154 - DNA, 27 bp, synthetic construct
  source 1..27: mol_type = other DNA
gccgagtctttaagttcattgacatgc

SEQ ID NO: 16155 - DNA, 28 bp, synthetic construct
  source 1..28: mol_type = other DNA
agccgagtctttaagttcattgacatgc

SEQ ID NO: 16156 - DNA, 29 bp, synthetic construct
  source 1..29: mol_type = other DNA
gagccgagtctttaagttcattgacatgc

SEQ ID NO: 16157 - DNA, 30 bp, synthetic construct
  source 1..30: mol_type = other DNA
tgagccgagtctttaagttcattgacatgc

SEQ ID NO: 16158 - DNA, 31 bp, synthetic construct
  source 1..31: mol_type = other DNA
gtgagccgagtctttaagttcattgacatgc

SEQ ID NO: 16159 - DNA, 32 bp, synthetic construct
  source 1..32: mol_type = other DNA
tgtgagccgagtctttaagttcattgacatgc

SEQ ID NO: 16160 - DNA, 33 bp, synthetic construct
  source 1..33: mol_type = other DNA
ctgtgagccgagtctttaagttcattgacatgc

SEQ ID NO: 16161 - DNA, 34 bp, synthetic construct
  source 1..34: mol_type = other DNA
tctgtgagccgagtctttaagttcattgacatgc

SEQ ID NO: 16162 - DNA, 35 bp, synthetic construct
  source 1..35: mol_type = other DNA
atctgtgagccgagtctttaagttcattgacatgc

SEQ ID NO: 16163 - DNA, 36 bp, synthetic construct
  source 1..36: mol_type = other DNA
gatctgtgagccgagtctttaagttcattgacatgc

SEQ ID NO: 16164 - DNA, 37 bp, synthetic construct
  source 1..37: mol_type = other DNA
cgatctgtgagccgagtctttaagttcattgacatgc

SEQ ID NO: 16165 - DNA, 38 bp, synthetic construct; identical to SEQ ID NO: 15839
  source 1..38: mol_type = other DNA

SEQ ID NO: 16166 - DNA, 39 bp, synthetic construct; identical to SEQ ID NO: 15840
  source 1..39: mol_type = other DNA

SEQ ID NO: 16167 - DNA, 40 bp, synthetic construct; identical to SEQ ID NO: 15841
  source 1..40: mol_type = other DNA

SEQ ID NO: 16168 - DNA, 22 bp, synthetic construct
  source 1..22: mol_type = other DNA
cggctcacagatcgcatctgaa

SEQ ID NO: 16169 - DNA, 23 bp, synthetic construct
  source 1..23: mol_type = other DNA
tcggctcacagatcgcatctgaa

SEQ ID NO: 16170 - DNA, 24 bp, synthetic construct
  source 1..24: mol_type = other DNA
ctcggctcacagatcgcatctgaa

SEQ ID NO: 16171 - DNA, 25 bp, synthetic construct
  source 1..25: mol_type = other DNA
actcggctcacagatcgcatctgaa

SEQ ID NO: 16172 - DNA, 26 bp, synthetic construct
  source 1..26: mol_type = other DNA
gactcggctcacagatcgcatctgaa

SEQ ID NO: 16173 - DNA, 27 bp, synthetic construct
  source 1..27: mol_type = other DNA
agactcggctcacagatcgcatctgaa

SEQ ID NO: 16174 - DNA, 28 bp, synthetic construct
  source 1..28: mol_type = other DNA
aagactcggctcacagatcgcatctgaa

SEQ ID NO: 16175 - DNA, 29 bp, synthetic construct
  source 1..29: mol_type = other DNA
aaagactcggctcacagatcgcatctgaa

SEQ ID NO: 16176 - DNA, 30 bp, synthetic construct; identical to SEQ ID NO: 15884
  source 1..30: mol_type = other DNA

SEQ ID NO: 16177 - DNA, 31 bp, synthetic construct; identical to SEQ ID NO: 15885
  source 1..31: mol_type = other DNA

SEQ ID NO: 16178 - DNA, 32 bp, synthetic construct; identical to SEQ ID NO: 15886
  source 1..32: mol_type = other DNA

SEQ ID NO: 16179 - DNA, 33 bp, synthetic construct; identical to SEQ ID NO: 15887
  source 1..33: mol_type = other DNA

SEQ ID NO: 16180 - DNA, 34 bp, synthetic construct; identical to SEQ ID NO: 15888
  source 1..34: mol_type = other DNA

SEQ ID NO: 16181 - DNA, 35 bp, synthetic construct; identical to SEQ ID NO: 15889
  source 1..35: mol_type = other DNA

SEQ ID NO: 16182 - DNA, 36 bp, synthetic construct; identical to SEQ ID NO: 15890
  source 1..36: mol_type = other DNA

SEQ ID NO: 16183 - DNA, 37 bp, synthetic construct; identical to SEQ ID NO: 15891
  source 1..37: mol_type = other DNA

SEQ ID NO: 16184 - DNA, 38 bp, synthetic construct; identical to SEQ ID NO: 15892
  source 1..38: mol_type = other DNA

SEQ ID NO: 16185 - DNA, 39 bp, synthetic construct; identical to SEQ ID NO: 15893
  source 1..39: mol_type = other DNA

SEQ ID NO: 16186 - DNA, 40 bp, synthetic construct; identical to SEQ ID NO: 15894
  source 1..40: mol_type = other DNA

SEQ ID NO: 16187 - DNA, 37 bp, synthetic construct; identical to SEQ ID NO: 15907
  source 1..37: mol_type = other DNA

SEQ ID NO: 16188 - DNA, 38 bp, synthetic construct; identical to SEQ ID NO: 15908
  source 1..38: mol_type = other DNA

SEQ ID NO: 16189 - DNA, 39 bp, synthetic construct; identical to SEQ ID NO: 15909
  source 1..39: mol_type = other DNA

SEQ ID NO: 16190 - DNA, 40 bp, synthetic construct; identical to SEQ ID NO: 15910
  source 1..40: mol_type = other DNA

SEQ ID NO: 16191 - DNA, 10 bp, synthetic construct
  source 1..10: mol_type = other DNA
aagacccggc

SEQ ID NO: 16192 - DNA, 10 bp, synthetic construct
  source 1..10: mol_type = other DNA
aagactcggc

SEQ ID NO: 16193 - DNA, 11 bp, synthetic construct
  source 1..11: mol_type = other DNA
aaagacccggc

SEQ ID NO: 16194 - DNA, 11 bp, synthetic construct
  source 1..11: mol_type = other DNA
aaagactcggc

SEQ ID NO: 16195 - DNA, 12 bp, synthetic construct
  source 1..12: mol_type = other DNA
taaagactcggc

SEQ ID NO: 16196 - DNA, 12 bp, synthetic construct
  source 1..12: mol_type = other DNA
taaagacccggc

SEQ ID NO: 16197 - DNA, 13 bp, synthetic construct
  source 1..13: mol_type = other DNA
ttaaagactcggc

SEQ ID NO: 16198 - DNA, 13 bp, synthetic construct
  source 1..13: mol_type = other DNA
ttaaagacccggc

SEQ ID NO: 16199 - DNA, 14 bp, synthetic construct
  source 1..14: mol_type = other DNA
cttaaagacccggc

SEQ ID NO: 16200 - DNA, 14 bp, synthetic construct
  source 1..14: mol_type = other DNA
cttaaagactcggc

SEQ ID NO: 16201 - DNA, 15 bp, synthetic construct
  source 1..15: mol_type = other DNA
acttaaagacccggc

SEQ ID NO: 16202 - DNA, 15 bp, synthetic construct
  source 1..15: mol_type = other DNA
acttaaagactcggc

SEQ ID NO: 16203 - DNA, 16 bp, synthetic construct
  source 1..16: mol_type = other DNA
aacttaaagacccggc

SEQ ID NO: 16204 - DNA, 16 bp, synthetic construct
  source 1..16: mol_type = other DNA
aacttaaagactcggc

SEQ ID NO: 16205 - DNA, 17 bp, synthetic construct
  source 1..17: mol_type = other DNA
gaacttaaagactcggc

SEQ ID NO: 16206 - DNA, 17 bp, synthetic construct
  source 1..17: mol_type = other DNA
gaacttaaagacccggc

SEQ ID NO: 16207 - DNA, 18 bp, synthetic construct
  source 1..18: mol_type = other DNA
tgaacttaaagacccggc

SEQ ID NO: 16208 - DNA, 18 bp, synthetic construct
  source 1..18: mol_type = other DNA
tgaacttaaagactcggc

SEQ ID NO: 16209 - DNA, 19 bp, synthetic construct
  source 1..19: mol_type = other DNA
atgaacttaaagactcggc

SEQ ID NO: 16210 - DNA, 19 bp, synthetic construct
  source 1..19: mol_type = other DNA
atgaacttaaagacccggc

SEQ ID NO: 16211 - DNA, 20 bp, synthetic construct
  source 1..20: mol_type = other DNA
aatgaacttaaagactcggc

SEQ ID NO: 16212 - DNA, 20 bp, synthetic construct
  source 1..20: mol_type = other DNA
aatgaacttaaagacccggc

SEQ ID NO: 16213 - DNA, 21 bp, synthetic construct
  source 1..21: mol_type = other DNA
caatgaacttaaagactcggc

SEQ ID NO: 16214 - DNA, 21 bp, synthetic construct
  source 1..21: mol_type = other DNA
caatgaacttaaagacccggc

SEQ ID NO: 16215 - DNA, 22 bp, synthetic construct
  source 1..22: mol_type = other DNA
tcaatgaacttaaagacccggc

SEQ ID NO: 16216 - DNA, 22 bp, synthetic construct
  source 1..22: mol_type = other DNA
tcaatgaacttaaagactcggc

SEQ ID NO: 16217 - DNA, 23 bp, synthetic construct
  source 1..23: mol_type = other DNA
gtcaatgaacttaaagactcggc

SEQ ID NO: 16218 - DNA, 23 bp, synthetic construct
  source 1..23: mol_type = other DNA
gtcaatgaacttaaagacccggc

SEQ ID NO: 16219 - DNA, 24 bp, synthetic construct
  source 1..24: mol_type = other DNA
tgtcaatgaacttaaagacccggc

SEQ ID NO: 16220 - DNA, 24 bp, synthetic construct
  source 1..24: mol_type = other DNA
tgtcaatgaacttaaagactcggc

SEQ ID NO: 16221 - DNA, 25 bp, synthetic construct
  source 1..25: mol_type = other DNA
atgtcaatgaacttaaagacccggc

SEQ ID NO: 16222 - DNA, 25 bp, synthetic construct
  source 1..25: mol_type = other DNA
atgtcaatgaacttaaagactcggc

SEQ ID NO: 16223 - DNA, 26 bp, synthetic construct
  source 1..26: mol_type = other DNA
catgtcaatgaacttaaagactcggc

SEQ ID NO: 16224 - DNA, 26 bp, synthetic construct
  source 1..26: mol_type = other DNA
catgtcaatgaacttaaagacccggc

SEQ ID NO: 16225 - DNA, 27 bp, synthetic construct
  source 1..27: mol_type = other DNA
gcatgtcaatgaacttaaagactcggc

SEQ ID NO: 16226 - DNA, 27 bp, synthetic construct
  source 1..27: mol_type = other DNA
gcatgtcaatgaacttaaagacccggc

SEQ ID NO: 16227 - DNA, 28 bp, synthetic construct
  source 1..28: mol_type = other DNA
ggcatgtcaatgaacttaaagacccggc

SEQ ID NO: 16228 - DNA, 28 bp, synthetic construct
  source 1..28: mol_type = other DNA
ggcatgtcaatgaacttaaagactcggc

SEQ ID NO: 16229 - DNA, 29 bp, synthetic construct
  source 1..29: mol_type = other DNA
tggcatgtcaatgaacttaaagacccggc

SEQ ID NO: 16230 - DNA, 29 bp, synthetic construct
  source 1..29: mol_type = other DNA
tggcatgtcaatgaacttaaagactcggc

SEQ ID NO: 16231 - DNA, 30 bp, synthetic construct
  source 1..30: mol_type = other DNA
ttggcatgtcaatgaacttaaagactcggc

SEQ ID NO: 16232 - DNA, 30 bp, synthetic construct
  source 1..30: mol_type = other DNA
ttggcatgtcaatgaacttaaagacccggc

SEQ ID NO: 16233 - DNA, 31 bp, synthetic construct
  source 1..31: mol_type = other DNA
gttggcatgtcaatgaacttaaagactcggc

SEQ ID NO: 16234 - DNA, 31 bp, synthetic construct
  source 1..31: mol_type = other DNA
gttggcatgtcaatgaacttaaagacccggc

SEQ ID NO: 16235 - DNA, 32 bp, synthetic construct
  source 1..32: mol_type = other DNA
tgttggcatgtcaatgaacttaaagactcggc

SEQ ID NO: 16236 - DNA, 32 bp, synthetic construct
  source 1..32: mol_type = other DNA
tgttggcatgtcaatgaacttaaagacccggc

SEQ ID NO: 16237 - DNA, 33 bp, synthetic construct
  source 1..33: mol_type = other DNA
ctgttggcatgtcaatgaacttaaagactcggc

SEQ ID NO: 16238 - DNA, 33 bp, synthetic construct
  source 1..33: mol_type = other DNA
ctgttggcatgtcaatgaacttaaagacccggc

SEQ ID NO: 16239 - DNA, 34 bp, synthetic construct
  source 1..34: mol_type = other DNA
tctgttggcatgtcaatgaacttaaagactcggc

SEQ ID NO: 16240 - DNA, 34 bp, synthetic construct
  source 1..34: mol_type = other DNA
tctgttggcatgtcaatgaacttaaagacccggc

SEQ ID NO: 16241 - DNA, 35 bp, synthetic construct
  source 1..35: mol_type = other DNA
ttctgttggcatgtcaatgaacttaaagacccggc

SEQ ID NO: 16242 - DNA, 35 bp, synthetic construct
  source 1..35: mol_type = other DNA
ttctgttggcatgtcaatgaacttaaagactcggc

SEQ ID NO: 16243 - DNA, 36 bp, synthetic construct
  source 1..36: mol_type = other DNA
cttctgttggcatgtcaatgaacttaaagactcggc

SEQ ID NO: 16244 - DNA, 36 bp, synthetic construct
  source 1..36: mol_type = other DNA
cttctgttggcatgtcaatgaacttaaagacccggc

SEQ ID NO: 16245 - DNA, 37 bp, synthetic construct
  source 1..37: mol_type = other DNA
ccttctgttggcatgtcaatgaacttaaagacccggc

SEQ ID NO: 16246 - DNA, 37 bp, synthetic construct
  source 1..37: mol_type = other DNA
ccttctgttggcatgtcaatgaacttaaagactcggc

SEQ ID NO: 16247 - DNA, 38 bp, synthetic construct
  source 1..38: mol_type = other DNA
accttctgttggcatgtcaatgaacttaaagactcggc

SEQ ID NO: 16248 - DNA, 38 bp, synthetic construct
  source 1..38: mol_type = other DNA
accttctgttggcatgtcaatgaacttaaagacccggc

SEQ ID NO: 16249 - DNA, 39 bp, synthetic construct
  source 1..39: mol_type = other DNA
taccttctgttggcatgtcaatgaacttaaagactcggc

SEQ ID NO: 16250 - DNA, 39 bp, synthetic construct
  source 1..39: mol_type = other DNA
taccttctgttggcatgtcaatgaacttaaagacccggc

SEQ ID NO: 16251 - DNA, 40 bp, synthetic construct
  source 1..40: mol_type = other DNA
ttaccttctgttggcatgtcaatgaacttaaagactcggc

SEQ ID NO: 16252 - DNA, 40 bp, synthetic construct
  source 1..40: mol_type = other DNA
ttaccttctgttggcatgtcaatgaacttaaagacccggc

SEQ ID NO: 16253 - DNA, 10 bp, synthetic construct
  source 1..10: mol_type = other DNA
aaagactcgg

SEQ ID NO: 16254 - DNA, 11 bp, synthetic construct
  source 1..11: mol_type = other DNA
taaagactcgg

SEQ ID NO: 16255 - DNA, 12 bp, synthetic construct
  source 1..12: mol_type = other DNA
ttaaagactcgg

SEQ ID NO: 16256 - DNA, 13 bp, synthetic construct
  source 1..13: mol_type = other DNA
cttaaagactcgg

SEQ ID NO: 16257 - DNA, 14 bp, synthetic construct
  source 1..14: mol_type = other DNA
acttaaagactcgg

SEQ ID NO: 16258 - DNA, 15 bp, synthetic construct
  source 1..15: mol_type = other DNA
aacttaaagactcgg

SEQ ID NO: 16259 - DNA, 16 bp, synthetic construct
  source 1..16: mol_type = other DNA
gaacttaaagactcgg

SEQ ID NO: 16260 - DNA, 17 bp, synthetic construct
  source 1..17: mol_type = other DNA
tgaacttaaagactcgg

SEQ ID NO: 16261 - DNA, 18 bp, synthetic construct
  source 1..18: mol_type = other DNA
atgaacttaaagactcgg

SEQ ID NO: 16262 - DNA, 19 bp, synthetic construct
  source 1..19: mol_type = other DNA
aatgaacttaaagactcgg

SEQ ID NO: 16263 - DNA, 20 bp, synthetic construct
  source 1..20: mol_type = other DNA
caatgaacttaaagactcgg

SEQ ID NO: 16264 - DNA, 21 bp, synthetic construct
  source 1..21: mol_type = other DNA
tcaatgaacttaaagactcgg

SEQ ID NO: 16265 - DNA, 22 bp, synthetic construct
  source 1..22: mol_type = other DNA
gtcaatgaacttaaagactcgg

SEQ ID NO: 16266 - DNA, 23 bp, synthetic construct
  source 1..23: mol_type = other DNA
tgtcaatgaacttaaagactcgg

SEQ ID NO: 16267 - DNA, 24 bp, synthetic construct
  source 1..24: mol_type = other DNA
atgtcaatgaacttaaagactcgg

SEQ ID NO: 16268 - DNA, 25 bp, synthetic construct
  source 1..25: mol_type = other DNA
catgtcaatgaacttaaagactcgg

SEQ ID NO: 16269 - DNA, 26 bp, synthetic construct
  source 1..26: mol_type = other DNA
gcatgtcaatgaacttaaagactcgg

SEQ ID NO: 16270 - DNA, 27 bp, synthetic construct
  source 1..27: mol_type = other DNA
ggcatgtcaatgaacttaaagactcgg

SEQ ID NO: 16271 - DNA, 28 bp, synthetic construct
  source 1..28: mol_type = other DNA
tggcatgtcaatgaacttaaagactcgg

SEQ ID NO: 16272 - DNA, 29 bp, synthetic construct
  source 1..29: mol_type = other DNA
ttggcatgtcaatgaacttaaagactcgg

SEQ ID NO: 16273 - DNA, 30 bp, synthetic construct
  source 1..30: mol_type = other DNA
gttggcatgtcaatgaacttaaagactcgg

SEQ ID NO: 16274 - DNA, 31 bp, synthetic construct
  source 1..31: mol_type = other DNA
tgttggcatgtcaatgaacttaaagactcgg

SEQ ID NO: 16275 - DNA, 32 bp, synthetic construct
  source 1..32: mol_type = other DNA
ctgttggcatgtcaatgaacttaaagactcgg

SEQ ID NO: 16276 - DNA, 33 bp, synthetic construct
  source 1..33: mol_type = other DNA
tctgttggcatgtcaatgaacttaaagactcgg

SEQ ID NO: 16277 - DNA, 34 bp, synthetic construct
  source 1..34: mol_type = other DNA
ttctgttggcatgtcaatgaacttaaagactcgg

SEQ ID NO: 16278 - DNA, 35 bp, synthetic construct
  source 1..35: mol_type = other DNA
cttctgttggcatgtcaatgaacttaaagactcgg

SEQ ID NO: 16279 - DNA, 36 bp, synthetic construct
  source 1..36: mol_type = other DNA
ccttctgttggcatgtcaatgaacttaaagactcgg

SEQ ID NO: 16280 - DNA, 37 bp, synthetic construct
  source 1..37: mol_type = other DNA
accttctgttggcatgtcaatgaacttaaagactcgg

SEQ ID NO: 16281 - DNA, 38 bp, synthetic construct
  source 1..38: mol_type = other DNA
taccttctgttggcatgtcaatgaacttaaagactcgg

SEQ ID NO: 16282 - DNA, 39 bp, synthetic construct
  source 1..39: mol_type = other DNA
ttaccttctgttggcatgtcaatgaacttaaagactcgg

SEQ ID NO: 16283 - DNA, 40 bp, synthetic construct
  source 1..40: mol_type = other DNA
tttaccttctgttggcatgtcaatgaacttaaagactcgg

SEQ ID NO: 16284 - DNA, 20 bp, synthetic construct
  source 1..20: mol_type = other DNA
ccgagtctttaagttcattg

SEQ ID NO: 16285 - DNA, 21 bp, synthetic construct
  source 1..21: mol_type = other DNA
gccgagtctttaagttcattg

SEQ ID NO: 16286 - DNA, 22 bp, synthetic construct
  source 1..22: mol_type = other DNA
agccgagtctttaagttcattg

SEQ ID NO: 16287 - DNA, 23 bp, synthetic construct
  source 1..23: mol_type = other DNA
gagccgagtctttaagttcattg

SEQ ID NO: 16288 - DNA, 24 bp, synthetic construct
  source 1..24: mol_type = other DNA
tgagccgagtctttaagttcattg

SEQ ID NO: 16289 - DNA, 25 bp, synthetic construct
  source 1..25: mol_type = other DNA
gtgagccgagtctttaagttcattg

SEQ ID NO: 16290 - DNA, 26 bp, synthetic construct
  source 1..26: mol_type = other DNA
tgtgagccgagtctttaagttcattg

SEQ ID NO: 16291 - DNA, 27 bp, synthetic construct
  source 1..27: mol_type = other DNA
ctgtgagccgagtctttaagttcattg

SEQ ID NO: 16292 - DNA, 28 bp, synthetic construct
  source 1..28: mol_type = other DNA
tctgtgagccgagtctttaagttcattg

SEQ ID NO: 16293 - DNA, 29 bp, synthetic construct
  source 1..29: mol_type = other DNA
atctgtgagccgagtctttaagttcattg

SEQ ID NO: 16294 - DNA, 30 bp, synthetic construct
  source 1..30: mol_type = other DNA
gatctgtgagccgagtctttaagttcattg

SEQ ID NO: 16295 - DNA, 31 bp, synthetic construct
  source 1..31: mol_type = other DNA
cgatctgtgagccgagtctttaagttcattg

SEQ ID NO: 16296 - DNA, 32 bp, synthetic construct; identical to SEQ ID NO: 15911
  source 1..32: mol_type = other DNA

SEQ ID NO: 16297 - DNA, 33 bp, synthetic construct; identical to SEQ ID NO: 15912
  source 1..33: mol_type = other DNA

SEQ ID NO: 16298 - DNA, 34 bp, synthetic construct; identical to SEQ ID NO: 15913
  source 1..34: mol_type = other DNA

SEQ ID NO: 16299 - DNA, 35 bp, synthetic construct; identical to SEQ ID NO: 15914
  source 1..35: mol_type = other DNA

SEQ ID NO: 16300 - DNA, 36 bp, synthetic construct; identical to SEQ ID NO: 15915
  source 1..36: mol_type = other DNA

SEQ ID NO: 16301 - DNA, 37 bp, synthetic construct; identical to SEQ ID NO: 15916
  source 1..37: mol_type = other DNA

SEQ ID NO: 16302 - DNA, 38 bp, synthetic construct; identical to SEQ ID NO: 15917
  source 1..38: mol_type = other DNA

SEQ ID NO: 16303 - DNA, 39 bp, synthetic construct; identical to SEQ ID NO: 15918
  source 1..39: mol_type = other DNA

SEQ ID NO: 16304 - DNA, 40 bp, synthetic construct; identical to SEQ ID NO: 15919
  source 1..40: mol_type = other DNA

SEQ ID NO: 16305 - DNA, 32 bp, synthetic construct
  source 1..32: mol_type = other DNA
ccgagtctttaagttcattgacatgccaacag

SEQ ID NO: 16306 - DNA, 33 bp, synthetic construct
  source 1..33: mol_type = other DNA
gccgagtctttaagttcattgacatgccaacag

SEQ ID NO: 16307 - DNA, 34 bp, synthetic construct
  source 1..34: mol_type = other DNA
agccgagtctttaagttcattgacatgccaacag

SEQ ID NO: 16308 - DNA, 35 bp, synthetic construct
  source 1..35: mol_type = other DNA
gagccgagtctttaagttcattgacatgccaacag

SEQ ID NO: 16309 - DNA, 36 bp, synthetic construct
  source 1..36: mol_type = other DNA
tgagccgagtctttaagttcattgacatgccaacag

SEQ ID NO: 16310 - DNA, 37 bp, synthetic construct
  source 1..37: mol_type = other DNA
gtgagccgagtctttaagttcattgacatgccaacag

SEQ ID NO: 16311 - DNA, 38 bp, synthetic construct
  source 1..38: mol_type = other DNA
tgtgagccgagtctttaagttcattgacatgccaacag

SEQ ID NO: 16312 - DNA, 39 bp, synthetic construct
  source 1..39: mol_type = other DNA
ctgtgagccgagtctttaagttcattgacatgccaacag

SEQ ID NO: 16313 - DNA, 40 bp, synthetic construct
  source 1..40: mol_type = other DNA
tctgtgagccgagtctttaagttcattgacatgccaacag

SEQ ID NO: 16314 - DNA, 34 bp, synthetic construct
  source 1..34: mol_type = other DNA
ccgagtctttaagttcattgacatgccaacagaa

SEQ ID NO: 16315 - DNA, 35 bp, synthetic construct
  source 1..35: mol_type = other DNA
gccgagtctttaagttcattgacatgccaacagaa

SEQ ID NO: 16316 - DNA, 36 bp, synthetic construct
  source 1..36: mol_type = other DNA
agccgagtctttaagttcattgacatgccaacagaa

SEQ ID NO: 16317 - DNA, 37 bp, synthetic construct
  source 1..37: mol_type = other DNA
gagccgagtctttaagttcattgacatgccaacagaa

SEQ ID NO: 16318 - DNA, 38 bp, synthetic construct
  source 1..38: mol_type = other DNA
tgagccgagtctttaagttcattgacatgccaacagaa

SEQ ID NO: 16319 - DNA, 39 bp, synthetic construct
  source 1..39: mol_type = other DNA
gtgagccgagtctttaagttcattgacatgccaacagaa

SEQ ID NO: 16320 - DNA, 40 bp, synthetic construct
  source 1..40: mol_type = other DNA
tgtgagccgagtctttaagttcattgacatgccaacagaa

SEQ ID NO: 16321 - DNA, 40 bp, synthetic construct; identical to SEQ ID NO: 15932
  source 1..40: mol_type = other DNA

SEQ ID NO: 16322 - DNA, 11 bp, synthetic construct
  source 1..11: mol_type = other DNA
ccgagtcttta

SEQ ID NO: 16323 - DNA, 12 bp, synthetic construct
  source 1..12: mol_type = other DNA
gccgagtcttta

SEQ ID NO: 16324 - DNA, 13 bp, synthetic construct
  source 1..13: mol_type = other DNA
agccgagtcttta

SEQ ID NO: 16325 - DNA, 14 bp, synthetic construct
  source 1..14: mol_type = other DNA
gagccgagtcttta

SEQ ID NO: 16326 - DNA, 15 bp, synthetic construct
  source 1..15: mol_type = other DNA
tgagccgagtcttta

SEQ ID NO: 16327 - DNA, 16 bp, synthetic construct
  source 1..16: mol_type = other DNA
gtgagccgagtcttta

SEQ ID NO: 16328 - DNA, 17 bp, synthetic construct
  source 1..17: mol_type = other DNA
tgtgagccgagtcttta

SEQ ID NO: 16329 - DNA, 18 bp, synthetic construct
  source 1..18: mol_type = other DNA
ctgtgagccgagtcttta

SEQ ID NO: 16330 - DNA, 19 bp, synthetic construct
  source 1..19: mol_type = other DNA
tctgtgagccgagtcttta

SEQ ID NO: 16331 - DNA, 20 bp, synthetic construct
  source 1..20: mol_type = other DNA
atctgtgagccgagtcttta

SEQ ID NO: 16332 - DNA, 21 bp, synthetic construct
  source 1..21: mol_type = other DNA
gatctgtgagccgagtcttta

SEQ ID NO: 16333 - DNA, 22 bp, synthetic construct
  source 1..22: mol_type = other DNA
cgatctgtgagccgagtcttta

SEQ ID NO: 16334 - DNA, 23 bp, synthetic construct
  source 1..23: mol_type = other DNA
gcgatctgtgagccgagtcttta

SEQ ID NO: 16335 - DNA, 24 bp, synthetic construct
  source 1..24: mol_type = other DNA
tgcgatctgtgagccgagtcttta

SEQ ID NO: 16336 - DNA, 25 bp, synthetic construct
  source 1..25: mol_type = other DNA
atgcgatctgtgagccgagtcttta

SEQ ID NO: 16337 - DNA, 26 bp, synthetic construct
  source 1..26: mol_type = other DNA
gatgcgatctgtgagccgagtcttta

SEQ ID NO: 16338 - DNA, 27 bp, synthetic construct
  source 1..27: mol_type = other DNA
agatgcgatctgtgagccgagtcttta

SEQ ID NO: 16339 - DNA, 28 bp, synthetic construct
  source 1..28: mol_type = other DNA
cagatgcgatctgtgagccgagtcttta

SEQ ID NO: 16340 - DNA, 29 bp, synthetic construct
  source 1..29: mol_type = other DNA
tcagatgcgatctgtgagccgagtcttta

SEQ ID NO: 16341 - DNA, 30 bp, synthetic construct; identical to SEQ ID NO: 15940
  source 1..30: mol_type = other DNA

SEQ ID NO: 16342 - DNA, 31 bp, synthetic construct; identical to SEQ ID NO: 15941
  source 1..31: mol_type = other DNA

SEQ ID NO: 16343 - DNA, 32 bp, synthetic construct; identical to SEQ ID NO: 15942
  source 1..32: mol_type = other DNA

SEQ ID NO: 16344 - DNA, 33 bp, synthetic construct; identical to SEQ ID NO: 15943
  source 1..33: mol_type = other DNA

SEQ ID NO: 16345 - DNA, 34 bp, synthetic construct; identical to SEQ ID NO: 15944
  source 1..34: mol_type = other DNA

SEQ ID NO: 16346 - DNA, 35 bp, synthetic construct; identical to SEQ ID NO: 15945
  source 1..35: mol_type = other DNA

SEQ ID NO: 16347 - DNA, 36 bp, synthetic construct; identical to SEQ ID NO: 15946
  source 1..36: mol_type = other DNA

SEQ ID NO: 16348 - DNA, 37 bp, synthetic construct; identical to SEQ ID NO: 15947
  source 1..37: mol_type = other DNA

SEQ ID NO: 16349 - DNA, 38 bp, synthetic construct; identical to SEQ ID NO: 15948
  source 1..38: mol_type = other DNA

SEQ ID NO: 16350 - DNA, 39 bp, synthetic construct; identical to SEQ ID NO: 15949
  source 1..39: mol_type = other DNA

SEQ ID NO: 16351 - DNA, 40 bp, synthetic construct; identical to SEQ ID NO: 15950
  source 1..40: mol_type = other DNA

SEQ ID NO: 16352 - DNA, 10 bp, synthetic construct
  source 1..10: mol_type = other DNA
tgagccgagt

SEQ ID NO: 16353 - DNA, 11 bp, synthetic construct
  source 1..11: mol_type = other DNA
gtgagccgagt

SEQ ID NO: 16354 - DNA, 12 bp, synthetic construct
  source 1..12: mol_type = other DNA
tgtgagccgagt

SEQ ID NO: 16355 - DNA, 13 bp, synthetic construct
  source 1..13: mol_type = other DNA
ctgtgagccgagt

SEQ ID NO: 16356 - DNA, 14 bp, synthetic construct
  source 1..14: mol_type = other DNA
tctgtgagccgagt

SEQ ID NO: 16357 - DNA, 15 bp, synthetic construct
  source 1..15: mol_type = other DNA
atctgtgagccgagt

SEQ ID NO: 16358 - DNA, 16 bp, synthetic construct
  source 1..16: mol_type = other DNA
gatctgtgagccgagt

SEQ ID NO: 16359 - DNA, 17 bp, synthetic construct
  source 1..17: mol_type = other DNA
cgatctgtgagccgagt

SEQ ID NO: 16360 - DNA, 18 bp, synthetic construct
  source 1..18: mol_type = other DNA
gcgatctgtgagccgagt

SEQ ID NO: 16361 - DNA, 19 bp, synthetic construct
  source 1..19: mol_type = other DNA
tgcgatctgtgagccgagt

SEQ ID NO: 16362 - DNA, 20 bp, synthetic construct
  source 1..20: mol_type = other DNA
atgcgatctgtgagccgagt

SEQ ID NO: 16363 - DNA, 21 bp, synthetic construct
  source 1..21: mol_type = other DNA
gatgcgatctgtgagccgagt

SEQ ID NO: 16364 - DNA, 22 bp, synthetic construct
  source 1..22: mol_type = other DNA
agatgcgatctgtgagccgagt

SEQ ID NO: 16365 - DNA, 23 bp, synthetic construct
  source 1..23: mol_type = other DNA
cagatgcgatctgtgagccgagt

SEQ ID NO: 16366 - DNA, 24 bp, synthetic construct
  source 1..24: mol_type = other DNA
tcagatgcgatctgtgagccgagt

SEQ ID NO: 16367 - DNA, 25 bp, synthetic construct
  source 1..25: mol_type = other DNA
ttcagatgcgatctgtgagccgagt

SEQ ID NO: 16368 - DNA, 26 bp, synthetic construct
  source 1..26: mol_type = other DNA
tttcagatgcgatctgtgagccgagt

SEQ ID NO: 16369 - DNA, 27 bp, synthetic construct
  source 1..27: mol_type = other DNA
atttcagatgcgatctgtgagccgagt

SEQ ID NO: 16370 - DNA, 28 bp, synthetic construct
  source 1..28: mol_type = other DNA
tatttcagatgcgatctgtgagccgagt

SEQ ID NO: 16371 - DNA, 29 bp, synthetic construct
  source 1..29: mol_type = other DNA
ttatttcagatgcgatctgtgagccgagt

SEQ ID NO: 16372 - DNA, 30 bp, synthetic construct; identical to SEQ ID NO: 15975
  source 1..30: mol_type = other DNA

SEQ ID NO: 16373 - DNA, 31 bp, synthetic construct; identical to SEQ ID NO: 15978
  source 1..31: mol_type = other DNA

SEQ ID NO: 16374 - DNA, 32 bp, synthetic construct; identical to SEQ ID NO: 15980
  source 1..32: mol_type = other DNA

SEQ ID NO: 16375 - DNA, 33 bp, synthetic construct; identical to SEQ ID NO: 15982
  source 1..33: mol_type = other DNA

SEQ ID NO: 16376 - DNA, 34 bp, synthetic construct; identical to SEQ ID NO: 15984
  source 1..34: mol_type = other DNA

SEQ ID NO: 16377 - DNA, 35 bp, synthetic construct; identical to SEQ ID NO: 15986
  source 1..35: mol_type = other DNA

SEQ ID NO: 16378 - DNA, 36 bp, synthetic construct; identical to SEQ ID NO: 15988
  source 1..36: mol_type = other DNA

SEQ ID NO: 16379 - DNA, 37 bp, synthetic construct; identical to SEQ ID NO: 15989
  source 1..37: mol_type = other DNA

SEQ ID NO: 16380 - DNA, 38 bp, synthetic construct; identical to SEQ ID NO: 15992
  source 1..38: mol_type = other DNA

SEQ ID NO: 16381 - DNA, 39 bp, synthetic construct; identical to SEQ ID NO: 15993
  source 1..39: mol_type = other DNA

SEQ ID NO: 16382 - DNA, 40 bp, synthetic construct; identical to SEQ ID NO: 15995
  source 1..40: mol_type = other DNA

SEQ ID NO: 16383 - DNA, 10 bp, synthetic construct
  source 1..10: mol_type = other DNA
gtgagccgag

SEQ ID NO: 16384 - DNA, 11 bp, synthetic construct
  source 1..11: mol_type = other DNA
tgtgagccgag

SEQ ID NO: 16385 - DNA, 12 bp, synthetic construct
  source 1..12: mol_type = other DNA
ctgtgagccgag

SEQ ID NO: 16386 - DNA, 13 bp, synthetic construct
  source 1..13: mol_type = other DNA
tctgtgagccgag

SEQ ID NO: 16387 - DNA, 14 bp, synthetic construct
  source 1..14: mol_type = other DNA
atctgtgagccgag

SEQ ID NO: 16388 - DNA, 15 bp, synthetic construct
  source 1..15: mol_type = other DNA
gatctgtgagccgag

SEQ ID NO: 16389 - DNA, 16 bp, synthetic construct
  source 1..16: mol_type = other DNA
cgatctgtgagccgag

SEQ ID NO: 16390 - DNA, 17 bp, synthetic construct
  source 1..17: mol_type = other DNA
gcgatctgtgagccgag

SEQ ID NO: 16391 - DNA, 18 bp, synthetic construct
  source 1..18: mol_type = other DNA
tgcgatctgtgagccgag

SEQ ID NO: 16392 - DNA, 19 bp, synthetic construct
  source 1..19: mol_type = other DNA
atgcgatctgtgagccgag

SEQ ID NO: 16393 - DNA, 20 bp, synthetic construct
  source 1..20: mol_type = other DNA
gatgcgatctgtgagccgag

SEQ ID NO: 16394 - DNA, 21 bp, synthetic construct
  source 1..21: mol_type = other DNA
agatgcgatctgtgagccgag

SEQ ID NO: 16395 - DNA, 22 bp, synthetic construct
  source 1..22: mol_type = other DNA
cagatgcgatctgtgagccgag

SEQ ID NO: 16396 - DNA, 23 bp, synthetic construct
  source 1..23: mol_type = other DNA
tcagatgcgatctgtgagccgag

SEQ ID NO: 16397 - DNA, 24 bp, synthetic construct
  source 1..24: mol_type = other DNA
ttcagatgcgatctgtgagccgag

SEQ ID NO: 16398 - DNA, 25 bp, synthetic construct
  source 1..25: mol_type = other DNA
tttcagatgcgatctgtgagccgag

SEQ ID NO: 16399 - DNA, 26 bp, synthetic construct
  source 1..26: mol_type = other DNA
atttcagatgcgatctgtgagccgag

SEQ ID NO: 16400 - DNA, 27 bp, synthetic construct
  source 1..27: mol_type = other DNA
tatttcagatgcgatctgtgagccgag

SEQ ID NO: 16401 - DNA, 28 bp, synthetic construct
  source 1..28: mol_type = other DNA
ttatttcagatgcgatctgtgagccgag

SEQ ID NO: 16402 - DNA, 29 bp, synthetic construct
  source 1..29: mol_type = other DNA
tttatttcagatgcgatctgtgagccgag

SEQ ID NO: 16403 - DNA, 30 bp, synthetic construct; identical to SEQ ID NO: 16010
  source 1..30: mol_type = other DNA

SEQ ID NO: 16404 - DNA, 31 bp, synthetic construct; identical to SEQ ID NO: 16011
  source 1..31: mol_type = other DNA

SEQ ID NO: 16405 - DNA, 32 bp, synthetic construct; identical to SEQ ID NO: 16012
  source 1..32: mol_type = other DNA

SEQ ID NO: 16406 - DNA, 33 bp, synthetic construct; identical to SEQ ID NO: 16013
  source 1..33: mol_type = other DNA

SEQ ID NO: 16407 - DNA, 34 bp, synthetic construct; identical to SEQ ID NO: 16014
  source 1..34: mol_type = other DNA

SEQ ID NO: 16408 - DNA, 35 bp, synthetic construct; identical to SEQ ID NO: 16015
  source 1..35: mol_type = other DNA

SEQ ID NO: 16409 - DNA, 36 bp, synthetic construct; identical to SEQ ID NO: 16016
  source 1..36: mol_type = other DNA

SEQ ID NO: 16410 - DNA, 37 bp, synthetic construct; identical to SEQ ID NO: 16017
  source 1..37: mol_type = other DNA

SEQ ID NO: 16411 - DNA, 38 bp, synthetic construct; identical to SEQ ID NO: 16018
  source 1..38: mol_type = other DNA

SEQ ID NO: 16412 - DNA, 39 bp, synthetic construct; identical to SEQ ID NO: 16019
  source 1..39: mol_type = other DNA

SEQ ID NO: 16413 - DNA, 40 bp, synthetic construct; identical to SEQ ID NO: 16020
  source 1..40: mol_type = other DNA

SEQ ID NO: 16414 - DNA, 17 bp, synthetic construct
  source 1..17: mol_type = other DNA
cggctcacagatcgcat

SEQ ID NO: 16415 - DNA, 18 bp, synthetic construct
  source 1..18: mol_type = other DNA
tcggctcacagatcgcat

SEQ ID NO: 16416 - DNA, 19 bp, synthetic construct
  source 1..19: mol_type = other DNA
ctcggctcacagatcgcat

SEQ ID NO: 16417 - DNA, 20 bp, synthetic construct
  source 1..20: mol_type = other DNA
actcggctcacagatcgcat

SEQ ID NO: 16418 - DNA, 21 bp, synthetic construct
  source 1..21: mol_type = other DNA
gactcggctcacagatcgcat

SEQ ID NO: 16419 - DNA, 22 bp, synthetic construct
  source 1..22: mol_type = other DNA
agactcggctcacagatcgcat

SEQ ID NO: 16420 - DNA, 23 bp, synthetic construct
  source 1..23: mol_type = other DNA
aagactcggctcacagatcgcat

SEQ ID NO: 16421 - DNA, 24 bp, synthetic construct
  source 1..24: mol_type = other DNA
aaagactcggctcacagatcgcat

SEQ ID NO: 16422 - DNA, 25 bp, synthetic construct
  source 1..25: mol_type = other DNA
taaagactcggctcacagatcgcat

SEQ ID NO: 16423 - DNA, 26 bp, synthetic construct
  source 1..26: mol_type = other DNA
ttaaagactcggctcacagatcgcat

SEQ ID NO: 16424 - DNA, 27 bp, synthetic construct
  source 1..27: mol_type = other DNA
cttaaagactcggctcacagatcgcat

SEQ ID NO: 16425 - DNA, 28 bp, synthetic construct
  source 1..28: mol_type = other DNA
acttaaagactcggctcacagatcgcat

SEQ ID NO: 16426 - DNA, 29 bp, synthetic construct
  source 1..29: mol_type = other DNA
aacttaaagactcggctcacagatcgcat

SEQ ID NO: 16427 - DNA, 30 bp, synthetic construct; identical to SEQ ID NO: 16041
  source 1..30: mol_type = other DNA

SEQ ID NO: 16428 - DNA, 31 bp, synthetic construct; identical to SEQ ID NO: 16042
  source 1..31: mol_type = other DNA

SEQ ID NO: 16429 - DNA, 32 bp, synthetic construct; identical to SEQ ID NO: 16043
  source 1..32: mol_type = other DNA

SEQ ID NO: 16430 - DNA, 33 bp, synthetic construct; identical to SEQ ID NO: 16044
  source 1..33: mol_type = other DNA

SEQ ID NO: 16431 - DNA, 34 bp, synthetic construct; identical to SEQ ID NO: 16045
  source 1..34: mol_type = other DNA

SEQ ID NO: 16432 - DNA, 35 bp, synthetic construct; identical to SEQ ID NO: 16046
  source 1..35: mol_type = other DNA

SEQ ID NO: 16433 - DNA, 36 bp, synthetic construct; identical to SEQ ID NO: 16047
  source 1..36: mol_type = other DNA

SEQ ID NO: 16434 - DNA, 37 bp, synthetic construct; identical to SEQ ID NO: 16048
  source 1..37: mol_type = other DNA

SEQ ID NO: 16435 - DNA, 38 bp, synthetic construct; identical to SEQ ID NO: 16049
  source 1..38: mol_type = other DNA

SEQ ID NO: 16436 - DNA, 39 bp, synthetic construct; identical to SEQ ID NO: 16050
  source 1..39: mol_type = other DNA

SEQ ID NO: 16437 - DNA, 40 bp, synthetic construct; identical to SEQ ID NO: 16051
  source 1..40: mol_type = other DNA

SEQ ID NO: 16438 - DNA, 19 bp, synthetic construct
  source 1..19: mol_type = other DNA
cggctcacagatcgcatct

SEQ ID NO: 16439 - DNA, 20 bp, synthetic construct
  source 1..20: mol_type = other DNA
tcggctcacagatcgcatct

SEQ ID NO: 16440 - DNA, 21 bp, synthetic construct
  source 1..21: mol_type = other DNA
ctcggctcacagatcgcatct

SEQ ID NO: 16441 - DNA, 22 bp, synthetic construct
  source 1..22: mol_type = other DNA
actcggctcacagatcgcatct

SEQ ID NO: 16442 - DNA, 23 bp, synthetic construct
  source 1..23: mol_type = other DNA
gactcggctcacagatcgcatct

SEQ ID NO: 16443 - DNA, 24 bp, synthetic construct
  source 1..24: mol_type = other DNA
agactcggctcacagatcgcatct

SEQ ID NO: 16444 - DNA, 25 bp, synthetic construct
  source 1..25: mol_type = other DNA
aagactcggctcacagatcgcatct

SEQ ID NO: 16445 - DNA, 26 bp, synthetic construct
  source 1..26: mol_type = other DNA
aaagactcggctcacagatcgcatct

SEQ ID NO: 16446 - DNA, 27 bp, synthetic construct
  source 1..27: mol_type = other DNA
taaagactcggctcacagatcgcatct

SEQ ID NO: 16447 - DNA, 28 bp, synthetic construct
  source 1..28: mol_type = other DNA
ttaaagactcggctcacagatcgcatct

SEQ ID NO: 16448 - DNA, 29 bp, synthetic construct
  source 1..29: mol_type = other DNA
cttaaagactcggctcacagatcgcatct

SEQ ID NO: 16449 - DNA, 30 bp, synthetic construct; identical to SEQ ID NO: 16072
  source 1..30: mol_type = other DNA

SEQ ID NO: 16450 - DNA, 31 bp, synthetic construct; identical to SEQ ID NO: 16073
  source 1..31: mol_type = other DNA

SEQ ID NO: 16451 - DNA, 32 bp, synthetic construct; identical to SEQ ID NO: 16074
  source 1..32: mol_type = other DNA

SEQ ID NO: 16452 - DNA, 33 bp, synthetic construct; identical to SEQ ID NO: 16075
  source 1..33: mol_type = other DNA

SEQ ID NO: 16453 - DNA, 34 bp, synthetic construct; identical to SEQ ID NO: 16076
  source 1..34: mol_type = other DNA

SEQ ID NO: 16454 - DNA, 35 bp, synthetic construct; identical to SEQ ID NO: 16077
  source 1..35: mol_type = other DNA

SEQ ID NO: 16455 - DNA, 36 bp, synthetic construct; identical to SEQ ID NO: 16078
  source 1..36: mol_type = other DNA

SEQ ID NO: 16456 - DNA, 37 bp, synthetic construct; identical to SEQ ID NO: 16079
  source 1..37: mol_type = other DNA

SEQ ID NO: 16457 - DNA, 38 bp, synthetic construct; identical to SEQ ID NO: 16080
  source 1..38: mol_type = other DNA

SEQ ID NO: 16458 - DNA, 39 bp, synthetic construct; identical to SEQ ID NO: 16081
  source 1..39: mol_type = other DNA

SEQ ID NO: 16459 - DNA, 40 bp, synthetic construct; identical to SEQ ID NO: 16082
  source 1..40: mol_type = other DNA

SEQ ID NO: 16460 - DNA, 10 bp, synthetic construct
  source 1..10: mol_type = other DNA
tcggctcaca

SEQ ID NO: 16461 - DNA, 10 bp, synthetic construct
  source 1..10: mol_type = other DNA
tcgggacaca

SEQ ID NO: 16462 - DNA, 11 bp, synthetic construct
  source 1..11: mol_type = other DNA
ctcggctcaca

SEQ ID NO: 16463 - DNA, 11 bp, synthetic construct
  source 1..11: mol_type = other DNA
ctcgggacaca

SEQ ID NO: 16464 - DNA, 12 bp, synthetic construct
  source 1..12: mol_type = other DNA
actcgggacaca

SEQ ID NO: 16465 - DNA, 12 bp, synthetic construct
  source 1..12: mol_type = other DNA
actcggctcaca

SEQ ID NO: 16466 - DNA, 13 bp, synthetic construct
  source 1..13: mol_type = other DNA
gactcggctcaca

SEQ ID NO: 16467 - DNA, 13 bp, synthetic construct
  source 1..13: mol_type = other DNA
gactcgggacaca

SEQ ID NO: 16468 - DNA, 14 bp, synthetic construct
  source 1..14: mol_type = other DNA
agactcggctcaca

SEQ ID NO: 16469 - DNA, 14 bp, synthetic construct
  source 1..14: mol_type = other DNA
agactcgggacaca

SEQ ID NO: 16470 - DNA, 15 bp, synthetic construct
  source 1..15: mol_type = other DNA
aagactcgggacaca

SEQ ID NO: 16471 - DNA, 15 bp, synthetic construct
  source 1..15: mol_type = other DNA
aagactcggctcaca

SEQ ID NO: 16472 - DNA, 16 bp, synthetic construct
  source 1..16: mol_type = other DNA
aaagactcgggacaca

SEQ ID NO: 16473 - DNA, 16 bp, synthetic construct
  source 1..16: mol_type = other DNA
aaagactcggctcaca

SEQ ID NO: 16474 - DNA, 17 bp, synthetic construct
  source 1..17: mol_type = other DNA
taaagactcgggacaca

SEQ ID NO: 16475 - DNA, 17 bp, synthetic construct
  source 1..17: mol_type = other DNA
taaagactcggctcaca

SEQ ID NO: 16476 - DNA, 18 bp, synthetic construct
  source 1..18: mol_type = other DNA
ttaaagactcgggacaca

SEQ ID NO: 16477 - DNA, 18 bp, synthetic construct
  source 1..18: mol_type = other DNA
ttaaagactcggctcaca

SEQ ID NO: 16478 - DNA, 19 bp, synthetic construct
  source 1..19: mol_type = other DNA
cttaaagactcggctcaca

SEQ ID NO: 16479 - DNA, 19 bp, synthetic construct
  source 1..19: mol_type = other DNA
cttaaagactcgggacaca

SEQ ID NO: 16480 - DNA, 20 bp, synthetic construct
  source 1..20: mol_type = other DNA
acttaaagactcgggacaca

SEQ ID NO: 16481 - DNA, 20 bp, synthetic construct
  source 1..20: mol_type = other DNA
acttaaagactcggctcaca

SEQ ID NO: 16482 - DNA, 21 bp, synthetic construct
  source 1..21: mol_type = other DNA
aacttaaagactcggctcaca

SEQ ID NO: 16483 - DNA, 21 bp, synthetic construct
  source 1..21: mol_type = other DNA
aacttaaagactcgggacaca

SEQ ID NO: 16484 - DNA, 22 bp, synthetic construct
  source 1..22: mol_type = other DNA
gaacttaaagactcgggacaca

SEQ ID NO: 16485 - DNA, 22 bp, synthetic construct
  source 1..22: mol_type = other DNA
gaacttaaagactcggctcaca

SEQ ID NO: 16486 - DNA, 23 bp, synthetic construct
  source 1..23: mol_type = other DNA
tgaacttaaagactcgggacaca

SEQ ID NO: 16487 - DNA, 23 bp, synthetic construct
  source 1..23: mol_type = other DNA
tgaacttaaagactcggctcaca

SEQ ID NO: 16488 - DNA, 24 bp, synthetic construct
  source 1..24: mol_type = other DNA
atgaacttaaagactcggctcaca

SEQ ID NO: 16489 - DNA, 24 bp, synthetic construct
  source 1..24: mol_type = other DNA
atgaacttaaagactcgggacaca

SEQ ID NO: 16490 - DNA, 25 bp, synthetic construct
  source 1..25: mol_type = other DNA
aatgaacttaaagactcgggacaca

SEQ ID NO: 16491 - DNA, 25 bp, synthetic construct
  source 1..25: mol_type = other DNA
aatgaacttaaagactcggctcaca

SEQ ID NO: 16492 - DNA, 26 bp, synthetic construct
  source 1..26: mol_type = other DNA
caatgaacttaaagactcggctcaca

SEQ ID NO: 16493 - DNA, 26 bp, synthetic construct
  source 1..26: mol_type = other DNA
caatgaacttaaagactcgggacaca

SEQ ID NO: 16494 - DNA, 27 bp, synthetic construct
  source 1..27: mol_type = other DNA
tcaatgaacttaaagactcgggacaca

SEQ ID NO: 16495 - DNA, 27 bp, synthetic construct
  source 1..27: mol_type = other DNA
tcaatgaacttaaagactcggctcaca

SEQ ID NO: 16496 - DNA, 28 bp, synthetic construct
  source 1..28: mol_type = other DNA
gtcaatgaacttaaagactcggctcaca

SEQ ID NO: 16497 - DNA, 28 bp, synthetic construct
  source 1..28: mol_type = other DNA
gtcaatgaacttaaagactcgggacaca

SEQ ID NO: 16498 - DNA, 29 bp, synthetic construct
  source 1..29: mol_type = other DNA
tgtcaatgaacttaaagactcgggacaca

SEQ ID NO: 16499 - DNA, 29 bp, synthetic construct
  source 1..29: mol_type = other DNA
tgtcaatgaacttaaagactcggctcaca

SEQ ID NO: 16500 - DNA, 30 bp, synthetic construct
  source 1..30: mol_type = other DNA
atgtcaatgaacttaaagactcgggacaca

SEQ ID NO: 16501 - DNA, 30 bp, synthetic construct
  source 1..30: mol_type = other DNA
atgtcaatgaacttaaagactcggctcaca

SEQ ID NO: 16502 - DNA, 31 bp, synthetic construct
  source 1..31: mol_type = other DNA
catgtcaatgaacttaaagactcggctcaca

SEQ ID NO: 16503 - DNA, 31 bp, synthetic construct
  source 1..31: mol_type = other DNA
catgtcaatgaacttaaagactcgggacaca

SEQ ID NO: 16504 - DNA, 32 bp, synthetic construct
  source 1..32: mol_type = other DNA
gcatgtcaatgaacttaaagactcgggacaca

SEQ ID NO: 16505 - DNA, 32 bp, synthetic construct
  source 1..32: mol_type = other DNA
gcatgtcaatgaacttaaagactcggctcaca

SEQ ID NO: 16506 - DNA, 33 bp, synthetic construct
  source 1..33: mol_type = other DNA
ggcatgtcaatgaacttaaagactcggctcaca

SEQ ID NO: 16507 - DNA, 33 bp, synthetic construct
  source 1..33: mol_type = other DNA
ggcatgtcaatgaacttaaagactcgggacaca

SEQ ID NO: 16508 - DNA, 34 bp, synthetic construct
  source 1..34: mol_type = other DNA
tggcatgtcaatgaacttaaagactcggctcaca

SEQ ID NO: 16509 - DNA, 34 bp, synthetic construct
  source 1..34: mol_type = other DNA
tggcatgtcaatgaacttaaagactcgggacaca

SEQ ID NO: 16510 - DNA, 35 bp, synthetic construct
  source 1..35: mol_type = other DNA
ttggcatgtcaatgaacttaaagactcggctcaca

SEQ ID NO: 16511 - DNA, 35 bp, synthetic construct
  source 1..35: mol_type = other DNA
ttggcatgtcaatgaacttaaagactcgggacaca

SEQ ID NO: 16512 - DNA, 36 bp, synthetic construct
  source 1..36: mol_type = other DNA
gttggcatgtcaatgaacttaaagactcggctcaca

SEQ ID NO: 16513 - DNA, 36 bp, synthetic construct
  source 1..36: mol_type = other DNA
gttggcatgtcaatgaacttaaagactcgggacaca

SEQ ID NO: 16514 - DNA, 37 bp, synthetic construct
  source 1..37: mol_type = other DNA
tgttggcatgtcaatgaacttaaagactcgggacaca

SEQ ID NO: 16515 - DNA, 37 bp, synthetic construct
  source 1..37: mol_type = other DNA
tgttggcatgtcaatgaacttaaagactcggctcaca

SEQ ID NO: 16516 - DNA, 38 bp, synthetic construct
  source 1..38: mol_type = other DNA
ctgttggcatgtcaatgaacttaaagactcgggacaca

SEQ ID NO: 16517 - DNA, 38 bp, synthetic construct
  source 1..38: mol_type = other DNA
ctgttggcatgtcaatgaacttaaagactcggctcaca

SEQ ID NO: 16518 - DNA, 39 bp, synthetic construct
  source 1..39: mol_type = other DNA
tctgttggcatgtcaatgaacttaaagactcgggacaca

SEQ ID NO: 16519 - DNA, 39 bp, synthetic construct
  source 1..39: mol_type = other DNA
tctgttggcatgtcaatgaacttaaagactcggctcaca

SEQ ID NO: 16520 - DNA, 40 bp, synthetic construct
  source 1..40: mol_type = other DNA
ttctgttggcatgtcaatgaacttaaagactcggctcaca

SEQ ID NO: 16521 - DNA, 40 bp, synthetic construct
  source 1..40: mol_type = other DNA
ttctgttggcatgtcaatgaacttaaagactcgggacaca

SEQ ID NO: 16522 - DNA, 10 bp, synthetic construct
  source 1..10: mol_type = other DNA
ctcggctcac

SEQ ID NO: 16523 - DNA, 11 bp, synthetic construct
  source 1..11: mol_type = other DNA
actcggctcac

SEQ ID NO: 16524 - DNA, 12 bp, synthetic construct
  source 1..12: mol_type = other DNA
gactcggctcac

SEQ ID NO: 16525 - DNA, 13 bp, synthetic construct
  source 1..13: mol_type = other DNA
agactcggctcac

SEQ ID NO: 16526 - DNA, 14 bp, synthetic construct
  source 1..14: mol_type = other DNA
aagactcggctcac

SEQ ID NO: 16527 - DNA, 15 bp, synthetic construct
  source 1..15: mol_type = other DNA
aaagactcggctcac

SEQ ID NO: 16528 - DNA, 16 bp, synthetic construct
  source 1..16: mol_type = other DNA
taaagactcggctcac

SEQ ID NO: 16529 - DNA, 17 bp, synthetic construct
  source 1..17: mol_type = other DNA
ttaaagactcggctcac

SEQ ID NO: 16530 - DNA, 18 bp, synthetic construct
  source 1..18: mol_type = other DNA
cttaaagactcggctcac

SEQ ID NO: 16531 - DNA, 19 bp, synthetic construct
  source 1..19: mol_type = other DNA
acttaaagactcggctcac

SEQ ID NO: 16532 - DNA, 20 bp, synthetic construct
  source 1..20: mol_type = other DNA
aacttaaagactcggctcac

SEQ ID NO: 16533 - DNA, 21 bp, synthetic construct
  source 1..21: mol_type = other DNA
gaacttaaagactcggctcac

SEQ ID NO: 16534 - DNA, 22 bp, synthetic construct
  source 1..22: mol_type = other DNA
tgaacttaaagactcggctcac

SEQ ID NO: 16535 - DNA, 23 bp, synthetic construct
  source 1..23: mol_type = other DNA
atgaacttaaagactcggctcac

SEQ ID NO: 16536 - DNA, 24 bp, synthetic construct
  source 1..24: mol_type = other DNA
aatgaacttaaagactcggctcac

SEQ ID NO: 16537 - DNA, 25 bp, synthetic construct
  source 1..25: mol_type = other DNA
caatgaacttaaagactcggctcac

SEQ ID NO: 16538 - DNA, 26 bp, synthetic construct
  source 1..26: mol_type = other DNA
tcaatgaacttaaagactcggctcac

SEQ ID NO: 16539 - DNA, 27 bp, synthetic construct
  source 1..27: mol_type = other DNA
gtcaatgaacttaaagactcggctcac

SEQ ID NO: 16540 - DNA, 28 bp, synthetic construct
  source 1..28: mol_type = other DNA
tgtcaatgaacttaaagactcggctcac

SEQ ID NO: 16541 - DNA, 29 bp, synthetic construct
  source 1..29: mol_type = other DNA
atgtcaatgaacttaaagactcggctcac

SEQ ID NO: 16542 - DNA, 30 bp, synthetic construct
  source 1..30: mol_type = other DNA
catgtcaatgaacttaaagactcggctcac

SEQ ID NO: 16543 - DNA, 31 bp, synthetic construct
  source 1..31: mol_type = other DNA
gcatgtcaatgaacttaaagactcggctcac

SEQ ID NO: 16544 - DNA, 32 bp, synthetic construct
  source 1..32: mol_type = other DNA
ggcatgtcaatgaacttaaagactcggctcac

SEQ ID NO: 16545 - DNA, 33 bp, synthetic construct
  source 1..33: mol_type = other DNA
tggcatgtcaatgaacttaaagactcggctcac

SEQ ID NO: 16546 - DNA, 34 bp, synthetic construct
  source 1..34: mol_type = other DNA
ttggcatgtcaatgaacttaaagactcggctcac

SEQ ID NO: 16547 - DNA, 35 bp, synthetic construct
  source 1..35: mol_type = other DNA
gttggcatgtcaatgaacttaaagactcggctcac

SEQ ID NO: 16548 - DNA, 36 bp, synthetic construct
  source 1..36: mol_type = other DNA
tgttggcatgtcaatgaacttaaagactcggctcac

SEQ ID NO: 16549 - DNA, 37 bp, synthetic construct
  source 1..37: mol_type = other DNA
ctgttggcatgtcaatgaacttaaagactcggctcac

SEQ ID NO: 16550 - DNA, 38 bp, synthetic construct
  source 1..38: mol_type = other DNA
tctgttggcatgtcaatgaacttaaagactcggctcac

SEQ ID NO: 16551 - DNA, 39 bp, synthetic construct
  source 1..39: mol_type = other DNA
ttctgttggcatgtcaatgaacttaaagactcggctcac

SEQ ID NO: 16552 - DNA, 40 bp, synthetic construct
  source 1..40: mol_type = other DNA
cttctgttggcatgtcaatgaacttaaagactcggctcac

SEQ ID NO: 16553 - DNA, 10 bp, synthetic construct
  source 1..10: mol_type = other DNA
agactcggct

SEQ ID NO: 16554 - DNA, 11 bp, synthetic construct
  source 1..11: mol_type = other DNA
aagactcggct

SEQ ID NO: 16555 - DNA, 12 bp, synthetic construct
  source 1..12: mol_type = other DNA
aaagactcggct

SEQ ID NO: 16556 - DNA, 13 bp, synthetic construct
  source 1..13: mol_type = other DNA
taaagactcggct

SEQ ID NO: 16557 - DNA, 14 bp, synthetic construct
  source 1..14: mol_type = other DNA
ttaaagactcggct

SEQ ID NO: 16558 - DNA, 15 bp, synthetic construct
  source 1..15: mol_type = other DNA
cttaaagactcggct

SEQ ID NO: 16559 - DNA, 16 bp, synthetic construct
  source 1..16: mol_type = other DNA
acttaaagactcggct

SEQ ID NO: 16560 - DNA, 17 bp, synthetic construct
  source 1..17: mol_type = other DNA
aacttaaagactcggct

SEQ ID NO: 16561 - DNA, 18 bp, synthetic construct
  source 1..18: mol_type = other DNA
gaacttaaagactcggct

SEQ ID NO: 16562 - DNA, 19 bp, synthetic construct
  source 1..19: mol_type = other DNA
tgaacttaaagactcggct

SEQ ID NO: 16563 - DNA, 20 bp, synthetic construct
  source 1..20: mol_type = other DNA
atgaacttaaagactcggct

SEQ ID NO: 16564 - DNA, 21 bp, synthetic construct
  source 1..21: mol_type = other DNA
aatgaacttaaagactcggct

SEQ ID NO: 16565 - DNA, 22 bp, synthetic construct
  source 1..22: mol_type = other DNA
caatgaacttaaagactcggct

SEQ ID NO: 16566 - DNA, 23 bp, synthetic construct
  source 1..23: mol_type = other DNA
tcaatgaacttaaagactcggct

SEQ ID NO: 16567 - DNA, 24 bp, synthetic construct
  source 1..24: mol_type = other DNA
gtcaatgaacttaaagactcggct

SEQ ID NO: 16568 - DNA, 25 bp, synthetic construct
  source 1..25: mol_type = other DNA
tgtcaatgaacttaaagactcggct

SEQ ID NO: 16569 - DNA, 26 bp, synthetic construct
  source 1..26: mol_type = other DNA
atgtcaatgaacttaaagactcggct

SEQ ID NO: 16570 - DNA, 27 bp, synthetic construct
  source 1..27: mol_type = other DNA
catgtcaatgaacttaaagactcggct

SEQ ID NO: 16571 - DNA, 28 bp, synthetic construct
  source 1..28: mol_type = other DNA
gcatgtcaatgaacttaaagactcggct

SEQ ID NO: 16572 - DNA, 29 bp, synthetic construct
  source 1..29: mol_type = other DNA
ggcatgtcaatgaacttaaagactcggct

SEQ ID NO: 16573 - DNA, 30 bp, synthetic construct
  source 1..30: mol_type = other DNA
tggcatgtcaatgaacttaaagactcggct

SEQ ID NO: 16574 - DNA, 31 bp, synthetic construct
  source 1..31: mol_type = other DNA
ttggcatgtcaatgaacttaaagactcggct

SEQ ID NO: 16575 - DNA, 32 bp, synthetic construct
  source 1..32: mol_type = other DNA
gttggcatgtcaatgaacttaaagactcggct

SEQ ID NO: 16576 - DNA, 33 bp, synthetic construct
  source 1..33: mol_type = other DNA
tgttggcatgtcaatgaacttaaagactcggct

SEQ ID NO: 16577 - DNA, 34 bp, synthetic construct
  source 1..34: mol_type = other DNA
ctgttggcatgtcaatgaacttaaagactcggct

SEQ ID NO: 16578 - DNA, 35 bp, synthetic construct
  source 1..35: mol_type = other DNA
tctgttggcatgtcaatgaacttaaagactcggct

SEQ ID NO: 16579 - DNA, 36 bp, synthetic construct
  source 1..36: mol_type = other DNA
ttctgttggcatgtcaatgaacttaaagactcggct

SEQ ID NO: 16580 - DNA, 37 bp, synthetic construct
  source 1..37: mol_type = other DNA
cttctgttggcatgtcaatgaacttaaagactcggct

SEQ ID NO: 16581 - DNA, 38 bp, synthetic construct
  source 1..38: mol_type = other DNA
ccttctgttggcatgtcaatgaacttaaagactcggct

SEQ ID NO: 16582 - DNA, 39 bp, synthetic construct
  source 1..39: mol_type = other DNA
accttctgttggcatgtcaatgaacttaaagactcggct

SEQ ID NO: 16583 - DNA, 40 bp, synthetic construct
  source 1..40: mol_type = other DNA
taccttctgttggcatgtcaatgaacttaaagactcggct

SEQ ID NO: 16584 - DNA, 12 bp, synthetic construct
  source 1..12: mol_type = other DNA
ccgagtctttaa

SEQ ID NO: 16585 - DNA, 12 bp, synthetic construct
  source 1..12: mol_type = other DNA
ccgagtgtttaa

SEQ ID NO: 16586 - DNA, 13 bp, synthetic construct
  source 1..13: mol_type = other DNA
gccgagtgtttaa

SEQ ID NO: 16587 - DNA, 13 bp, synthetic construct
  source 1..13: mol_type = other DNA
gccgagtctttaa

SEQ ID NO: 16588 - DNA, 14 bp, synthetic construct
  source 1..14: mol_type = other DNA
agccgagtgtttaa

SEQ ID NO: 16589 - DNA, 14 bp, synthetic construct
  source 1..14: mol_type = other DNA
agccgagtctttaa

SEQ ID NO: 16590 - DNA, 15 bp, synthetic construct
  source 1..15: mol_type = other DNA
gagccgagtgtttaa

SEQ ID NO: 16591 - DNA, 15 bp, synthetic construct
  source 1..15: mol_type = other DNA
gagccgagtctttaa

SEQ ID NO: 16592 - DNA, 16 bp, synthetic construct
  source 1..16: mol_type = other DNA
tgagccgagtctttaa

SEQ ID NO: 16593 - DNA, 16 bp, synthetic construct
  source 1..16: mol_type = other DNA
tgagccgagtgtttaa

SEQ ID NO: 16594 - DNA, 17 bp, synthetic construct
  source 1..17: mol_type = other DNA
gtgagccgagtgtttaa

SEQ ID NO: 16595 - DNA, 17 bp, synthetic construct
  source 1..17: mol_type = other DNA
gtgagccgagtctttaa

SEQ ID NO: 16596 - DNA, 18 bp, synthetic construct
  source 1..18: mol_type = other DNA
tgtgagccgagtctttaa

SEQ ID NO: 16597 - DNA, 18 bp, synthetic construct
  source 1..18: mol_type = other DNA
tgtgagccgagtgtttaa

SEQ ID NO: 16598 - DNA, 19 bp, synthetic construct
  source 1..19: mol_type = other DNA
ctgtgagccgagtgtttaa

SEQ ID NO: 16599 - DNA, 19 bp, synthetic construct
  source 1..19: mol_type = other DNA
ctgtgagccgagtctttaa

SEQ ID NO: 16600 - DNA, 20 bp, synthetic construct
  source 1..20: mol_type = other DNA
tctgtgagccgagtctttaa

SEQ ID NO: 16601 - DNA, 20 bp, synthetic construct
  source 1..20: mol_type = other DNA
tctgtgagccgagtgtttaa

SEQ ID NO: 16602 - DNA, 21 bp, synthetic construct
  source 1..21: mol_type = other DNA
atctgtgagccgagtgtttaa

SEQ ID NO: 16603 - DNA, 21 bp, synthetic construct
  source 1..21: mol_type = other DNA
atctgtgagccgagtctttaa

SEQ ID NO: 16604 - DNA, 22 bp, synthetic construct
  source 1..22: mol_type = other DNA
gatctgtgagccgagtgtttaa

SEQ ID NO: 16605 - DNA, 22 bp, synthetic construct
  source 1..22: mol_type = other DNA
gatctgtgagccgagtctttaa

SEQ ID NO: 16606 - DNA, 23 bp, synthetic construct
  source 1..23: mol_type = other DNA
cgatctgtgagccgagtctttaa

SEQ ID NO: 16607 - DNA, 23 bp, synthetic construct
  source 1..23: mol_type = other DNA
cgatctgtgagccgagtgtttaa

SEQ ID NO: 16608 - DNA, 24 bp, synthetic construct
  source 1..24: mol_type = other DNA
gcgatctgtgagccgagtgtttaa

SEQ ID NO: 16609 - DNA, 24 bp, synthetic construct
  source 1..24: mol_type = other DNA
gcgatctgtgagccgagtctttaa

SEQ ID NO: 16610 - DNA, 25 bp, synthetic construct
  source 1..25: mol_type = other DNA
tgcgatctgtgagccgagtctttaa

SEQ ID NO: 16611 - DNA, 25 bp, synthetic construct
  source 1..25: mol_type = other DNA
tgcgatctgtgagccgagtgtttaa

SEQ ID NO: 16612 - DNA, 26 bp, synthetic construct
  source 1..26: mol_type = other DNA
atgcgatctgtgagccgagtctttaa

SEQ ID NO: 16613 - DNA, 26 bp, synthetic construct
  source 1..26: mol_type = other DNA
atgcgatctgtgagccgagtgtttaa

SEQ ID NO: 16614 - DNA, 27 bp, synthetic construct
  source 1..27: mol_type = other DNA
gatgcgatctgtgagccgagtctttaa

SEQ ID NO: 16615 - DNA, 27 bp, synthetic construct
  source 1..27: mol_type = other DNA
gatgcgatctgtgagccgagtgtttaa

SEQ ID NO: 16616 - DNA, 28 bp, synthetic construct
  source 1..28: mol_type = other DNA
agatgcgatctgtgagccgagtgtttaa

SEQ ID NO: 16617 - DNA, 28 bp, synthetic construct
  source 1..28: mol_type = other DNA
agatgcgatctgtgagccgagtctttaa

SEQ ID NO: 16618 - DNA, 29 bp, synthetic construct
  source 1..29: mol_type = other DNA
cagatgcgatctgtgagccgagtgtttaa

SEQ ID NO: 16619 - DNA, 29 bp, synthetic construct
  source 1..29: mol_type = other DNA
cagatgcgatctgtgagccgagtctttaa

SEQ ID NO: 16620 - DNA, 30 bp, synthetic construct; identical to SEQ ID NO: 16096
  source 1..30: mol_type = other DNA

SEQ ID NO: 16621 - DNA, 30 bp, synthetic construct; identical to SEQ ID NO: 16095
  source 1..30: mol_type = other DNA

SEQ ID NO: 16622 - DNA, 31 bp, synthetic construct; identical to SEQ ID NO: 16097
  source 1..31: mol_type = other DNA

SEQ ID NO: 16623 - DNA, 31 bp, synthetic construct; identical to SEQ ID NO: 16098
  source 1..31: mol_type = other DNA

SEQ ID NO: 16624 - DNA, 32 bp, synthetic construct; identical to SEQ ID NO: 16100
  source 1..32: mol_type = other DNA

SEQ ID NO: 16625 - DNA, 32 bp, synthetic construct; identical to SEQ ID NO: 16099
  source 1..32: mol_type = other DNA

SEQ ID NO: 16626 - DNA, 33 bp, synthetic construct; identical to SEQ ID NO: 16102
  source 1..33: mol_type = other DNA

SEQ ID NO: 16627 - DNA, 33 bp, synthetic construct; identical to SEQ ID NO: 16101
  source 1..33: mol_type = other DNA

SEQ ID NO: 16628 - DNA, 34 bp, synthetic construct; identical to SEQ ID NO: 16103
  source 1..34: mol_type = other DNA

SEQ ID NO: 16629 - DNA, 34 bp, synthetic construct; identical to SEQ ID NO: 16104
  source 1..34: mol_type = other DNA

SEQ ID NO: 16630 - DNA, 35 bp, synthetic construct; identical to SEQ ID NO: 16106
  source 1..35: mol_type = other DNA

SEQ ID NO: 16631 - DNA, 35 bp, synthetic construct; identical to SEQ ID NO: 16105
  source 1..35: mol_type = other DNA

SEQ ID NO: 16632 - DNA, 36 bp, synthetic construct; identical to SEQ ID NO: 16108
  source 1..36: mol_type = other DNA

SEQ ID NO: 16633 - DNA, 36 bp, synthetic construct; identical to SEQ ID NO: 16107
  source 1..36: mol_type = other DNA

SEQ ID NO: 16634 - DNA, 37 bp, synthetic construct; identical to SEQ ID NO: 16110
  source 1..37: mol_type = other DNA

SEQ ID NO: 16635 - DNA, 37 bp, synthetic construct; identical to SEQ ID NO: 16109
  source 1..37: mol_type = other DNA

SEQ ID NO: 16636 - DNA, 38 bp, synthetic construct; identical to SEQ ID NO: 16112
  source 1..38: mol_type = other DNA

SEQ ID NO: 16637 - DNA, 38 bp, synthetic construct; identical to SEQ ID NO: 16111
  source 1..38: mol_type = other DNA

SEQ ID NO: 16638 - DNA, 39 bp, synthetic construct; identical to SEQ ID NO: 16113
  source 1..39: mol_type = other DNA

SEQ ID NO: 16639 - DNA, 39 bp, synthetic construct; identical to SEQ ID NO: 16114
  source 1..39: mol_type = other DNA

SEQ ID NO: 16640 - DNA, 40 bp, synthetic construct; identical to SEQ ID NO: 16115
  source 1..40: mol_type = other DNA

SEQ ID NO: 16641 - DNA, 40 bp, synthetic construct; identical to SEQ ID NO: 16116
  source 1..40: mol_type = other DNA

SEQ ID NO: 16642 - DNA, 31 bp, synthetic construct
  source 1..31: mol_type = other DNA
ccgagtctttaagttcattgacatgccaaca

SEQ ID NO: 16643 - DNA, 32 bp, synthetic construct
  source 1..32: mol_type = other DNA
gccgagtctttaagttcattgacatgccaaca

SEQ ID NO: 16644 - DNA, 33 bp, synthetic construct
  source 1..33: mol_type = other DNA
agccgagtctttaagttcattgacatgccaaca

SEQ ID NO: 16645 - DNA, 34 bp, synthetic construct
  source 1..34: mol_type = other DNA
gagccgagtctttaagttcattgacatgccaaca

SEQ ID NO: 16646 - DNA, 35 bp, synthetic construct
  source 1..35: mol_type = other DNA
tgagccgagtctttaagttcattgacatgccaaca

SEQ ID NO: 16647 - DNA, 36 bp, synthetic construct
  source 1..36: mol_type = other DNA
gtgagccgagtctttaagttcattgacatgccaaca

SEQ ID NO: 16648 - DNA, 37 bp, synthetic construct
  source 1..37: mol_type = other DNA
tgtgagccgagtctttaagttcattgacatgccaaca

SEQ ID NO: 16649 - DNA, 38 bp, synthetic construct
  source 1..38: mol_type = other DNA
ctgtgagccgagtctttaagttcattgacatgccaaca

SEQ ID NO: 16650 - DNA, 39 bp, synthetic construct
  source 1..39: mol_type = other DNA
tctgtgagccgagtctttaagttcattgacatgccaaca

SEQ ID NO: 16651 - DNA, 40 bp, synthetic construct
  source 1..40: mol_type = other DNA
atctgtgagccgagtctttaagttcattgacatgccaaca

SEQ ID NO: 16652 - DNA, 30 bp, synthetic construct
  source 1..30: mol_type = other DNA
ccgagtctttaagttcattgacatgccaac

SEQ ID NO: 16653 - DNA, 31 bp, synthetic construct
  source 1..31: mol_type = other DNA
gccgagtctttaagttcattgacatgccaac

SEQ ID NO: 16654 - DNA, 32 bp, synthetic construct
  source 1..32: mol_type = other DNA
agccgagtctttaagttcattgacatgccaac

SEQ ID NO: 16655 - DNA, 33 bp, synthetic construct
  source 1..33: mol_type = other DNA
gagccgagtctttaagttcattgacatgccaac

SEQ ID NO: 16656 - DNA, 34 bp, synthetic construct
  source 1..34: mol_type = other DNA
tgagccgagtctttaagttcattgacatgccaac

SEQ ID NO: 16657 - DNA, 35 bp, synthetic construct
  source 1..35: mol_type = other DNA
gtgagccgagtctttaagttcattgacatgccaac

SEQ ID NO: 16658 - DNA, 36 bp, synthetic construct
  source 1..36: mol_type = other DNA
tgtgagccgagtctttaagttcattgacatgccaac

SEQ ID NO: 16659 - DNA, 37 bp, synthetic construct
  source 1..37: mol_type = other DNA
ctgtgagccgagtctttaagttcattgacatgccaac

SEQ ID NO: 16660 - DNA, 38 bp, synthetic construct
  source 1..38: mol_type = other DNA
tctgtgagccgagtctttaagttcattgacatgccaac

SEQ ID NO: 16661 - DNA, 39 bp, synthetic construct
  source 1..39: mol_type = other DNA
atctgtgagccgagtctttaagttcattgacatgccaac

SEQ ID NO: 16662 - DNA, 40 bp, synthetic construct
  source 1..40: mol_type = other DNA
gatctgtgagccgagtctttaagttcattgacatgccaac

SEQ ID NO: 16663 - DNA, 10 bp, synthetic construct
  source 1..10: mol_type = other DNA
cggctcacag

SEQ ID NO: 16664 - DNA, 11 bp, synthetic construct
  source 1..11: mol_type = other DNA
tcggctcacag

SEQ ID NO: 16665 - DNA, 12 bp, synthetic construct
  source 1..12: mol_type = other DNA
ctcggctcacag

SEQ ID NO: 16666 - DNA, 13 bp, synthetic construct
  source 1..13: mol_type = other DNA
actcggctcacag

SEQ ID NO: 16667 - DNA, 14 bp, synthetic construct
  source 1..14: mol_type = other DNA
gactcggctcacag

SEQ ID NO: 16668 - DNA, 15 bp, synthetic construct
  source 1..15: mol_type = other DNA
agactcggctcacag

SEQ ID NO: 16669 - DNA, 16 bp, synthetic construct
  source 1..16: mol_type = other DNA
aagactcggctcacag

SEQ ID NO: 16670 - DNA, 17 bp, synthetic construct
  source 1..17: mol_type = other DNA
aaagactcggctcacag

SEQ ID NO: 16671 - DNA, 18 bp, synthetic construct
  source 1..18: mol_type = other DNA
taaagactcggctcacag

SEQ ID NO: 16672 - DNA, 19 bp, synthetic construct
  source 1..19: mol_type = other DNA
ttaaagactcggctcacag

SEQ ID NO: 16673 - DNA, 20 bp, synthetic construct
  source 1..20: mol_type = other DNA
cttaaagactcggctcacag

SEQ ID NO: 16674 - DNA, 21 bp, synthetic construct
  source 1..21: mol_type = other DNA
acttaaagactcggctcacag

SEQ ID NO: 16675 - DNA, 22 bp, synthetic construct
  source 1..22: mol_type = other DNA
aacttaaagactcggctcacag

SEQ ID NO: 16676 - DNA, 23 bp, synthetic construct
  source 1..23: mol_type = other DNA
gaacttaaagactcggctcacag

SEQ ID NO: 16677 - DNA, 24 bp, synthetic construct
  source 1..24: mol_type = other DNA
tgaacttaaagactcggctcacag

SEQ ID NO: 16678 - DNA, 25 bp, synthetic construct
  source 1..25: mol_type = other DNA
atgaacttaaagactcggctcacag

SEQ ID NO: 16679 - DNA, 26 bp, synthetic construct
  source 1..26: mol_type = other DNA
aatgaacttaaagactcggctcacag

SEQ ID NO: 16680 - DNA, 27 bp, synthetic construct
  source 1..27: mol_type = other DNA
caatgaacttaaagactcggctcacag

SEQ ID NO: 16681 - DNA, 28 bp, synthetic construct
  source 1..28: mol_type = other DNA
tcaatgaacttaaagactcggctcacag

SEQ ID NO: 16682 - DNA, 29 bp, synthetic construct
  source 1..29: mol_type = other DNA
gtcaatgaacttaaagactcggctcacag

SEQ ID NO: 16683 - DNA, 30 bp, synthetic construct
  source 1..30: mol_type = other DNA
tgtcaatgaacttaaagactcggctcacag

SEQ ID NO: 16684 - DNA, 31 bp, synthetic construct
  source 1..31: mol_type = other DNA
atgtcaatgaacttaaagactcggctcacag

SEQ ID NO: 16685 - DNA, 32 bp, synthetic construct
  source 1..32: mol_type = other DNA
catgtcaatgaacttaaagactcggctcacag

SEQ ID NO: 16686 - DNA, 33 bp, synthetic construct
  source 1..33: mol_type = other DNA
gcatgtcaatgaacttaaagactcggctcacag

SEQ ID NO: 16687 - DNA, 34 bp, synthetic construct
  source 1..34: mol_type = other DNA
ggcatgtcaatgaacttaaagactcggctcacag

SEQ ID NO: 16688 - DNA, 35 bp, synthetic construct
  source 1..35: mol_type = other DNA
tggcatgtcaatgaacttaaagactcggctcacag

SEQ ID NO: 16689 - DNA, 36 bp, synthetic construct
  source 1..36: mol_type = other DNA
ttggcatgtcaatgaacttaaagactcggctcacag

SEQ ID NO: 16690 - DNA, 37 bp, synthetic construct
  source 1..37: mol_type = other DNA
gttggcatgtcaatgaacttaaagactcggctcacag

SEQ ID NO: 16691 - DNA, 38 bp, synthetic construct
  source 1..38: mol_type = other DNA
tgttggcatgtcaatgaacttaaagactcggctcacag

SEQ ID NO: 16692 - DNA, 39 bp, synthetic construct
  source 1..39: mol_type = other DNA
ctgttggcatgtcaatgaacttaaagactcggctcacag

SEQ ID NO: 16693 - DNA, 40 bp, synthetic construct
  source 1..40: mol_type = other DNA
tctgttggcatgtcaatgaacttaaagactcggctcacag

SEQ ID NO: 16694 - DNA, 10 bp, synthetic construct
  source 1..10: mol_type = other DNA
gactcggctc

SEQ ID NO: 16695 - DNA, 11 bp, synthetic construct
  source 1..11: mol_type = other DNA
agactcggctc

SEQ ID NO: 16696 - DNA, 12 bp, synthetic construct
  source 1..12: mol_type = other DNA
aagactcggctc

SEQ ID NO: 16697 - DNA, 13 bp, synthetic construct
  source 1..13: mol_type = other DNA
aaagactcggctc

SEQ ID NO: 16698 - DNA, 14 bp, synthetic construct
  source 1..14: mol_type = other DNA
taaagactcggctc

SEQ ID NO: 16699 - DNA, 15 bp, synthetic construct
  source 1..15: mol_type = other DNA
ttaaagactcggctc

SEQ ID NO: 16700 - DNA, 16 bp, synthetic construct
  source 1..16: mol_type = other DNA
cttaaagactcggctc

SEQ ID NO: 16701 - DNA, 17 bp, synthetic construct
  source 1..17: mol_type = other DNA
acttaaagactcggctc

SEQ ID NO: 16702 - DNA, 18 bp, synthetic construct
  source 1..18: mol_type = other DNA
aacttaaagactcggctc

SEQ ID NO: 16703 - DNA, 19 bp, synthetic construct
  source 1..19: mol_type = other DNA
gaacttaaagactcggctc

SEQ ID NO: 16704 - DNA, 20 bp, synthetic construct
  source 1..20: mol_type = other DNA
tgaacttaaagactcggctc

SEQ ID NO: 16705 - DNA, 21 bp, synthetic construct
  source 1..21: mol_type = other DNA
atgaacttaaagactcggctc

SEQ ID NO: 16706 - DNA, 22 bp, synthetic construct
  source 1..22: mol_type = other DNA
aatgaacttaaagactcggctc

SEQ ID NO: 16707 - DNA, 23 bp, synthetic construct
  source 1..23: mol_type = other DNA
caatgaacttaaagactcggctc

SEQ ID NO: 16708 - DNA, 24 bp, synthetic construct
  source 1..24: mol_type = other DNA
tcaatgaacttaaagactcggctc

SEQ ID NO: 16709 - DNA, 25 bp, synthetic construct
  source 1..25: mol_type = other DNA
gtcaatgaacttaaagactcggctc

SEQ ID NO: 16710 - DNA, 26 bp, synthetic construct
  source 1..26: mol_type = other DNA
tgtcaatgaacttaaagactcggctc

SEQ ID NO: 16711 - DNA, 27 bp, synthetic construct
  source 1..27: mol_type = other DNA
atgtcaatgaacttaaagactcggctc

SEQ ID NO: 16712 - DNA, 28 bp, synthetic construct
  source 1..28: mol_type = other DNA
catgtcaatgaacttaaagactcggctc

SEQ ID NO: 16713 - DNA, 29 bp, synthetic construct
  source 1..29: mol_type = other DNA
gcatgtcaatgaacttaaagactcggctc

SEQ ID NO: 16714 - DNA, 30 bp, synthetic construct
  source 1..30: mol_type = other DNA
ggcatgtcaatgaacttaaagactcggctc

SEQ ID NO: 16715 - DNA, 31 bp, synthetic construct
  source 1..31: mol_type = other DNA
tggcatgtcaatgaacttaaagactcggctc

SEQ ID NO: 16716 - DNA, 32 bp, synthetic construct
  source 1..32: mol_type = other DNA
ttggcatgtcaatgaacttaaagactcggctc

SEQ ID NO: 16717 - DNA, 33 bp, synthetic construct
  source 1..33: mol_type = other DNA
gttggcatgtcaatgaacttaaagactcggctc

SEQ ID NO: 16718 - DNA, 34 bp, synthetic construct
  source 1..34: mol_type = other DNA
tgttggcatgtcaatgaacttaaagactcggctc

SEQ ID NO: 16719 - DNA, 35 bp, synthetic construct
  source 1..35: mol_type = other DNA
ctgttggcatgtcaatgaacttaaagactcggctc

SEQ ID NO: 16720 - DNA, 36 bp, synthetic construct
  source 1..36: mol_type = other DNA
tctgttggcatgtcaatgaacttaaagactcggctc

SEQ ID NO: 16721 - DNA, 37 bp, synthetic construct
  source 1..37: mol_type = other DNA
ttctgttggcatgtcaatgaacttaaagactcggctc

SEQ ID NO: 16722 - DNA, 38 bp, synthetic construct
  source 1..38: mol_type = other DNA
cttctgttggcatgtcaatgaacttaaagactcggctc

SEQ ID NO: 16723 - DNA, 39 bp, synthetic construct
  source 1..39: mol_type = other DNA
ccttctgttggcatgtcaatgaacttaaagactcggctc

SEQ ID NO: 16724 - DNA, 40 bp, synthetic construct
  source 1..40: mol_type = other DNA
accttctgttggcatgtcaatgaacttaaagactcggctc

SEQ ID NO: 16725 - DNA, 12 bp, synthetic construct
  source 1..12: mol_type = other DNA
cggctcacagat

SEQ ID NO: 16726 - DNA, 13 bp, synthetic construct
  source 1..13: mol_type = other DNA
tcggctcacagat

SEQ ID NO: 16727 - DNA, 14 bp, synthetic construct
  source 1..14: mol_type = other DNA
ctcggctcacagat

SEQ ID NO: 16728 - DNA, 15 bp, synthetic construct
  source 1..15: mol_type = other DNA
actcggctcacagat

SEQ ID NO: 16729 - DNA, 16 bp, synthetic construct
  source 1..16: mol_type = other DNA
gactcggctcacagat

SEQ ID NO: 16730 - DNA, 17 bp, synthetic construct
  source 1..17: mol_type = other DNA
agactcggctcacagat

SEQ ID NO: 16731 - DNA, 18 bp, synthetic construct
  source 1..18: mol_type = other DNA
aagactcggctcacagat

SEQ ID NO: 16732 - DNA, 19 bp, synthetic construct
  source 1..19: mol_type = other DNA
aaagactcggctcacagat

SEQ ID NO: 16733 - DNA, 20 bp, synthetic construct
  source 1..20: mol_type = other DNA
taaagactcggctcacagat

SEQ ID NO: 16734 - DNA, 21 bp, synthetic construct
  source 1..21: mol_type = other DNA
ttaaagactcggctcacagat

SEQ ID NO: 16735 - DNA, 22 bp, synthetic construct
  source 1..22: mol_type = other DNA
cttaaagactcggctcacagat

SEQ ID NO: 16736 - DNA, 23 bp, synthetic construct
  source 1..23: mol_type = other DNA
acttaaagactcggctcacagat

SEQ ID NO: 16737 - DNA, 24 bp, synthetic construct
  source 1..24: mol_type = other DNA
aacttaaagactcggctcacagat

SEQ ID NO: 16738 - DNA, 25 bp, synthetic construct
  source 1..25: mol_type = other DNA
gaacttaaagactcggctcacagat

SEQ ID NO: 16739 - DNA, 26 bp, synthetic construct
  source 1..26: mol_type = other DNA
tgaacttaaagactcggctcacagat

SEQ ID NO: 16740 - DNA, 27 bp, synthetic construct
  source 1..27: mol_type = other DNA
atgaacttaaagactcggctcacagat

SEQ ID NO: 16741 - DNA, 28 bp, synthetic construct
  source 1..28: mol_type = other DNA
aatgaacttaaagactcggctcacagat

SEQ ID NO: 16742 - DNA, 29 bp, synthetic construct
  source 1..29: mol_type = other DNA
caatgaacttaaagactcggctcacagat

SEQ ID NO: 16743 - DNA, 30 bp, synthetic construct
  source 1..30: mol_type = other DNA
tcaatgaacttaaagactcggctcacagat

SEQ ID NO: 16744 - DNA, 31 bp, synthetic construct
  source 1..31: mol_type = other DNA
gtcaatgaacttaaagactcggctcacagat

SEQ ID NO: 16745 - DNA, 32 bp, synthetic construct
  source 1..32: mol_type = other DNA
tgtcaatgaacttaaagactcggctcacagat

SEQ ID NO: 16746 - DNA, 33 bp, synthetic construct
  source 1..33: mol_type = other DNA
atgtcaatgaacttaaagactcggctcacagat

SEQ ID NO: 16747 - DNA, 34 bp, synthetic construct
  source 1..34: mol_type = other DNA
catgtcaatgaacttaaagactcggctcacagat

SEQ ID NO: 16748 - DNA, 35 bp, synthetic construct
  source 1..35: mol_type = other DNA
gcatgtcaatgaacttaaagactcggctcacagat

SEQ ID NO: 16749 - DNA, 36 bp, synthetic construct
  source 1..36: mol_type = other DNA
ggcatgtcaatgaacttaaagactcggctcacagat

SEQ ID NO: 16750 - DNA, 37 bp, synthetic construct
  source 1..37: mol_type = other DNA
tggcatgtcaatgaacttaaagactcggctcacagat

SEQ ID NO: 16751 - DNA, 38 bp, synthetic construct
  source 1..38: mol_type = other DNA
ttggcatgtcaatgaacttaaagactcggctcacagat

SEQ ID NO: 16752 - DNA, 39 bp, synthetic construct
  source 1..39: mol_type = other DNA
gttggcatgtcaatgaacttaaagactcggctcacagat

SEQ ID NO: 16753 - DNA, 40 bp, synthetic construct
  source 1..40: mol_type = other DNA
tgttggcatgtcaatgaacttaaagactcggctcacagat

SEQ ID NO: 16754 - DNA, 24 bp, synthetic construct
  source 1..24: mol_type = other DNA
tcggctcacagatcgcatttgaaa

SEQ ID NO: 16755 - DNA, 24 bp, synthetic construct
  source 1..24: mol_type = other DNA
tcggctcacagatcgcatctgaaa

SEQ ID NO: 16756 - DNA, 25 bp, synthetic construct
  source 1..25: mol_type = other DNA
ctcggctcacagatcgcatctgaaa

SEQ ID NO: 16757 - DNA, 25 bp, synthetic construct
  source 1..25: mol_type = other DNA
ctcggctcacagatcgcatttgaaa

SEQ ID NO: 16758 - DNA, 26 bp, synthetic construct
  source 1..26: mol_type = other DNA
actcggctcacagatcgcatctgaaa

SEQ ID NO: 16759 - DNA, 26 bp, synthetic construct
  source 1..26: mol_type = other DNA
actcggctcacagatcgcatttgaaa

SEQ ID NO: 16760 - DNA, 27 bp, synthetic construct
  source 1..27: mol_type = other DNA
gactcggctcacagatcgcatctgaaa

SEQ ID NO: 16761 - DNA, 27 bp, synthetic construct
  source 1..27: mol_type = other DNA
gactcggctcacagatcgcatttgaaa

SEQ ID NO: 16762 - DNA, 28 bp, synthetic construct
  source 1..28: mol_type = other DNA
agactcggctcacagatcgcatttgaaa

SEQ ID NO: 16763 - DNA, 28 bp, synthetic construct
  source 1..28: mol_type = other DNA
agactcggctcacagatcgcatctgaaa

SEQ ID NO: 16764 - DNA, 29 bp, synthetic construct
  source 1..29: mol_type = other DNA
aagactcggctcacagatcgcatctgaaa

SEQ ID NO: 16765 - DNA, 29 bp, synthetic construct
  source 1..29: mol_type = other DNA
aagactcggctcacagatcgcatttgaaa

SEQ ID NO: 16766 - DNA, 30 bp, synthetic construct; identical to SEQ ID NO: 15787
  source 1..30: mol_type = other DNA

SEQ ID NO: 16767 - DNA, 30 bp, synthetic construct; identical to SEQ ID NO: 15786
  source 1..30: mol_type = other DNA

SEQ ID NO: 16768 - DNA, 31 bp, synthetic construct; identical to SEQ ID NO: 15788
  source 1..31: mol_type = other DNA

SEQ ID NO: 16769 - DNA, 31 bp, synthetic construct; identical to SEQ ID NO: 15789
  source 1..31: mol_type = other DNA

SEQ ID NO: 16770 - DNA, 32 bp, synthetic construct; identical to SEQ ID NO: 15791
  source 1..32: mol_type = other DNA

SEQ ID NO: 16771 - DNA, 32 bp, synthetic construct; identical to SEQ ID NO: 15790
  source 1..32: mol_type = other DNA

SEQ ID NO: 16772 - DNA, 33 bp, synthetic construct; identical to SEQ ID NO: 15793
  source 1..33: mol_type = other DNA

SEQ ID NO: 16773 - DNA, 33 bp, synthetic construct; identical to SEQ ID NO: 15792
  source 1..33: mol_type = other DNA

SEQ ID NO: 16774 - DNA, 34 bp, synthetic construct; identical to SEQ ID NO: 15794
  source 1..34: mol_type = other DNA

SEQ ID NO: 16775 - DNA, 34 bp, synthetic construct; identical to SEQ ID NO: 15795
  source 1..34: mol_type = other DNA

SEQ ID NO: 16776 - DNA, 35 bp, synthetic construct; identical to SEQ ID NO: 15797
  source 1..35: mol_type = other DNA

SEQ ID NO: 16777 - DNA, 35 bp, synthetic construct; identical to SEQ ID NO: 15796
  source 1..35: mol_type = other DNA

SEQ ID NO: 16778 - DNA, 36 bp, synthetic construct; identical to SEQ ID NO: 15799
  source 1..36: mol_type = other DNA

SEQ ID NO: 16779 - DNA, 36 bp, synthetic construct; identical to SEQ ID NO: 15798
  source 1..36: mol_type = other DNA

SEQ ID NO: 16780 - DNA, 37 bp, synthetic construct; identical to SEQ ID NO: 15801
  source 1..37: mol_type = other DNA

SEQ ID NO: 16781 - DNA, 37 bp, synthetic construct; identical to SEQ ID NO: 15800
  source 1..37: mol_type = other DNA

SEQ ID NO: 16782 - DNA, 38 bp, synthetic construct; identical to SEQ ID NO: 15802
  source 1..38: mol_type = other DNA

SEQ ID NO: 16783 - DNA, 38 bp, synthetic construct; identical to SEQ ID NO: 15803
  source 1..38: mol_type = other DNA

SEQ ID NO: 16784 - DNA, 39 bp, synthetic construct; identical to SEQ ID NO: 15804
  source 1..39: mol_type = other DNA

SEQ ID NO: 16785 - DNA, 39 bp, synthetic construct; identical to SEQ ID NO: 15805
  source 1..39: mol_type = other DNA

SEQ ID NO: 16786 - DNA, 40 bp, synthetic construct; identical to SEQ ID NO: 15807
  source 1..40: mol_type = other DNA

SEQ ID NO: 16787 - DNA, 40 bp, synthetic construct; identical to SEQ ID NO: 15806
  source 1..40: mol_type = other DNA

SEQ ID NO: 16788 - DNA, 25 bp, synthetic construct
  source 1..25: mol_type = other DNA
cgagtctttaagttcattgacatgc

SEQ ID NO: 16789 - DNA, 26 bp, synthetic construct
  source 1..26: mol_type = other DNA
ccgagtctttaagttcattgacatgc

SEQ ID NO: 16790 - DNA, 27 bp, synthetic construct
  source 1..27: mol_type = other DNA
gccgagtctttaagttcattgacatgc

SEQ ID NO: 16791 - DNA, 28 bp, synthetic construct
  source 1..28: mol_type = other DNA
agccgagtctttaagttcattgacatgc

SEQ ID NO: 16792 - DNA, 29 bp, synthetic construct
  source 1..29: mol_type = other DNA
gagccgagtctttaagttcattgacatgc

SEQ ID NO: 16793 - DNA, 30 bp, synthetic construct; identical to SEQ ID NO: 16157
  source 1..30: mol_type = other DNA

SEQ ID NO: 16794 - DNA, 31 bp, synthetic construct; identical to SEQ ID NO: 16158
  source 1..31: mol_type = other DNA

SEQ ID NO: 16795 - DNA, 32 bp, synthetic construct; identical to SEQ ID NO: 16159
  source 1..32: mol_type = other DNA

SEQ ID NO: 16796 - DNA, 33 bp, synthetic construct; identical to SEQ ID NO: 16160
  source 1..33: mol_type = other DNA

SEQ ID NO: 16797 - DNA, 34 bp, synthetic construct; identical to SEQ ID NO: 16161
  source 1..34: mol_type = other DNA

SEQ ID NO: 16798 - DNA, 35 bp, synthetic construct; identical to SEQ ID NO: 16162
  source 1..35: mol_type = other DNA

SEQ ID NO: 16799 - DNA, 36 bp, synthetic construct; identical to SEQ ID NO: 16163
  source 1..36: mol_type = other DNA

SEQ ID NO: 16800 - DNA, 37 bp, synthetic construct; identical to SEQ ID NO: 16164
  source 1..37: mol_type = other DNA

SEQ ID NO: 16801 - DNA, 38 bp, synthetic construct; identical to SEQ ID NO: 15839
  source 1..38: mol_type = other DNA

SEQ ID NO: 16802 - DNA, 39 bp, synthetic construct; identical to SEQ ID NO: 15840
  source 1..39: mol_type = other DNA

SEQ ID NO: 16803 - DNA, 40 bp, synthetic construct; identical to SEQ ID NO: 15841
  source 1..40: mol_type = other DNA

SEQ ID NO: 16804 - DNA, 23 bp, synthetic construct
  source 1..23: mol_type = other DNA
tcggctcacagatcgcatctgaa

SEQ ID NO: 16805 - DNA, 24 bp, synthetic construct
  source 1..24: mol_type = other DNA
ctcggctcacagatcgcatctgaa

SEQ ID NO: 16806 - DNA, 25 bp, synthetic construct
  source 1..25: mol_type = other DNA
actcggctcacagatcgcatctgaa

SEQ ID NO: 16807 - DNA, 26 bp, synthetic construct
  source 1..26: mol_type = other DNA
gactcggctcacagatcgcatctgaa

SEQ ID NO: 16808 - DNA, 27 bp, synthetic construct
  source 1..27: mol_type = other DNA
agactcggctcacagatcgcatctgaa

SEQ ID NO: 16809 - DNA, 28 bp, synthetic construct
  source 1..28: mol_type = other DNA
aagactcggctcacagatcgcatctgaa

SEQ ID NO: 16810 - DNA, 29 bp, synthetic construct
  source 1..29: mol_type = other DNA
aaagactcggctcacagatcgcatctgaa

SEQ ID NO: 16811 - DNA, 30 bp, synthetic construct; identical to SEQ ID NO: 15884
  source 1..30: mol_type = other DNA

SEQ ID NO: 16812 - DNA, 31 bp, synthetic construct; identical to SEQ ID NO: 15885
  source 1..31: mol_type = other DNA

SEQ ID NO: 16813 - DNA, 32 bp, synthetic construct; identical to SEQ ID NO: 15886
  source 1..32: mol_type = other DNA

SEQ ID NO: 16814 - DNA, 33 bp, synthetic construct; identical to SEQ ID NO: 15887
  source 1..33: mol_type = other DNA

SEQ ID NO: 16815 - DNA, 34 bp, synthetic construct; identical to SEQ ID NO: 15888
  source 1..34: mol_type = other DNA

SEQ ID NO: 16816 - DNA, 35 bp, synthetic construct; identical to SEQ ID NO: 15889
  source 1..35: mol_type = other DNA

SEQ ID NO: 16817 - DNA, 36 bp, synthetic construct; identical to SEQ ID NO: 15890
  source 1..36: mol_type = other DNA

SEQ ID NO: 16818 - DNA, 37 bp, synthetic construct; identical to SEQ ID NO: 15891
  source 1..37: mol_type = other DNA

SEQ ID NO: 16819 - DNA, 38 bp, synthetic construct; identical to SEQ ID NO: 15892
  source 1..38: mol_type = other DNA

SEQ ID NO: 16820 - DNA, 39 bp, synthetic construct; identical to SEQ ID NO: 15893
  source 1..39: mol_type = other DNA

SEQ ID NO: 16821 - DNA, 40 bp, synthetic construct; identical to SEQ ID NO: 15894
  source 1..40: mol_type = other DNA

SEQ ID NO: 16822 - DNA, 38 bp, synthetic construct; identical to SEQ ID NO: 15908
  source 1..38: mol_type = other DNA

SEQ ID NO: 16823 - DNA, 39 bp, synthetic construct; identical to SEQ ID NO: 15909
  source 1..39: mol_type = other DNA

SEQ ID NO: 16824 - DNA, 40 bp, synthetic construct; identical to SEQ ID NO: 15910
  source 1..40: mol_type = other DNA

SEQ ID NO: 16825 - DNA, 10 bp, synthetic construct
  source 1..10: mol_type = other DNA
aagactcggc

SEQ ID NO: 16826 - DNA, 11 bp, synthetic construct
  source 1..11: mol_type = other DNA
aaagactcggc

SEQ ID NO: 16827 - DNA, 12 bp, synthetic construct
  source 1..12: mol_type = other DNA
taaagactcggc

SEQ ID NO: 16828 - DNA, 13 bp, synthetic construct
  source 1..13: mol_type = other DNA
ttaaagactcggc

SEQ ID NO: 16829 - DNA, 14 bp, synthetic construct
  source 1..14: mol_type = other DNA
cttaaagactcggc

SEQ ID NO: 16830 - DNA, 15 bp, synthetic construct
  source 1..15: mol_type = other DNA
acttaaagactcggc

SEQ ID NO: 16831 - DNA, 16 bp, synthetic construct
  source 1..16: mol_type = other DNA
aacttaaagactcggc

SEQ ID NO: 16832 - DNA, 17 bp, synthetic construct
  source 1..17: mol_type = other DNA
gaacttaaagactcggc

SEQ ID NO: 16833 - DNA, 18 bp, synthetic construct
  source 1..18: mol_type = other DNA
tgaacttaaagactcggc

SEQ ID NO: 16834 - DNA, 19 bp, synthetic construct
  source 1..19: mol_type = other DNA
atgaacttaaagactcggc

SEQ ID NO: 16835 - DNA, 20 bp, synthetic construct
  source 1..20: mol_type = other DNA
aatgaacttaaagactcggc

SEQ ID NO: 16836 - DNA, 21 bp, synthetic construct
  source 1..21: mol_type = other DNA
caatgaacttaaagactcggc

SEQ ID NO: 16837 - DNA, 22 bp, synthetic construct
  source 1..22: mol_type = other DNA
tcaatgaacttaaagactcggc

SEQ ID NO: 16838 - DNA, 23 bp, synthetic construct
  source 1..23: mol_type = other DNA
gtcaatgaacttaaagactcggc

SEQ ID NO: 16839 - DNA, 24 bp, synthetic construct
  source 1..24: mol_type = other DNA
tgtcaatgaacttaaagactcggc

SEQ ID NO: 16840 - DNA, 25 bp, synthetic construct
  source 1..25: mol_type = other DNA
atgtcaatgaacttaaagactcggc

SEQ ID NO: 16841 - DNA, 26 bp, synthetic construct
  source 1..26: mol_type = other DNA
catgtcaatgaacttaaagactcggc

SEQ ID NO: 16842 - DNA, 27 bp, synthetic construct
  source 1..27: mol_type = other DNA
gcatgtcaatgaacttaaagactcggc

SEQ ID NO: 16843 - DNA, 28 bp, synthetic construct
  source 1..28: mol_type = other DNA
ggcatgtcaatgaacttaaagactcggc

SEQ ID NO: 16844 - DNA, 29 bp, synthetic construct
  source 1..29: mol_type = other DNA
tggcatgtcaatgaacttaaagactcggc

SEQ ID NO: 16845 - DNA, 30 bp, synthetic construct; identical to SEQ ID NO: 16231
  source 1..30: mol_type = other DNA

SEQ ID NO: 16846 - DNA, 31 bp, synthetic construct; identical to SEQ ID NO: 16233
  source 1..31: mol_type = other DNA

SEQ ID NO: 16847 - DNA, 32 bp, synthetic construct; identical to SEQ ID NO: 16235
  source 1..32: mol_type = other DNA

SEQ ID NO: 16848 - DNA, 33 bp, synthetic construct; identical to SEQ ID NO: 16237
  source 1..33: mol_type = other DNA

SEQ ID NO: 16849 - DNA, 34 bp, synthetic construct; identical to SEQ ID NO: 16239
  source 1..34: mol_type = other DNA

SEQ ID NO: 16850 - DNA, 35 bp, synthetic construct; identical to SEQ ID NO: 16242
  source 1..35: mol_type = other DNA

SEQ ID NO: 16851 - DNA, 36 bp, synthetic construct; identical to SEQ ID NO: 16243
  source 1..36: mol_type = other DNA

SEQ ID NO: 16852 - DNA, 37 bp, synthetic construct; identical to SEQ ID NO: 16246
  source 1..37: mol_type = other DNA

SEQ ID NO: 16853 - DNA, 38 bp, synthetic construct; identical to SEQ ID NO: 16247
  source 1..38: mol_type = other DNA

SEQ ID NO: 16854 - DNA, 39 bp, synthetic construct; identical to SEQ ID NO: 16249
  source 1..39: mol_type = other DNA

SEQ ID NO: 16855 - DNA, 40 bp, synthetic construct; identical to SEQ ID NO: 16251
  source 1..40: mol_type = other DNA

SEQ ID NO: 16856 - DNA, 10 bp, synthetic construct
  source 1..10: mol_type = other DNA
aaagactcgg

SEQ ID NO: 16857 - DNA, 11 bp, synthetic construct
  source 1..11: mol_type = other DNA
taaagactcgg

SEQ ID NO: 16858 - DNA, 12 bp, synthetic construct
  source 1..12: mol_type = other DNA
ttaaagactcgg

SEQ ID NO: 16859 - DNA, 13 bp, synthetic construct
  source 1..13: mol_type = other DNA
cttaaagactcgg

SEQ ID NO: 16860 - DNA, 14 bp, synthetic construct
  source 1..14: mol_type = other DNA
acttaaagactcgg

SEQ ID NO: 16861 - DNA, 15 bp, synthetic construct
  source 1..15: mol_type = other DNA
aacttaaagactcgg

SEQ ID NO: 16862 - DNA, 16 bp, synthetic construct
  source 1..16: mol_type = other DNA
gaacttaaagactcgg

SEQ ID NO: 16863 - DNA, 17 bp, synthetic construct
  source 1..17: mol_type = other DNA
tgaacttaaagactcgg

SEQ ID NO: 16864 - DNA, 18 bp, synthetic construct
  source 1..18: mol_type = other DNA
atgaacttaaagactcgg

SEQ ID NO: 16865 - DNA, 19 bp, synthetic construct
  source 1..19: mol_type = other DNA
aatgaacttaaagactcgg

SEQ ID NO: 16866 - DNA, 20 bp, synthetic construct
  source 1..20: mol_type = other DNA
caatgaacttaaagactcgg

SEQ ID NO: 16867 - DNA, 21 bp, synthetic construct
  source 1..21: mol_type = other DNA
tcaatgaacttaaagactcgg

SEQ ID NO: 16868 - DNA, 22 bp, synthetic construct
  source 1..22: mol_type = other DNA
gtcaatgaacttaaagactcgg

SEQ ID NO: 16869 - DNA, 23 bp, synthetic construct
  source 1..23: mol_type = other DNA
tgtcaatgaacttaaagactcgg

SEQ ID NO: 16870 - DNA, 24 bp, synthetic construct
  source 1..24: mol_type = other DNA
atgtcaatgaacttaaagactcgg

SEQ ID NO: 16871 - DNA, 25 bp, synthetic construct
  source 1..25: mol_type = other DNA
catgtcaatgaacttaaagactcgg

SEQ ID NO: 16872 - DNA, 26 bp, synthetic construct
  source 1..26: mol_type = other DNA
gcatgtcaatgaacttaaagactcgg

SEQ ID NO: 16873 - DNA, 27 bp, synthetic construct
  source 1..27: mol_type = other DNA
ggcatgtcaatgaacttaaagactcgg

SEQ ID NO: 16874 - DNA, 28 bp, synthetic construct
  source 1..28: mol_type = other DNA
tggcatgtcaatgaacttaaagactcgg

SEQ ID NO: 16875 - DNA, 29 bp, synthetic construct
  source 1..29: mol_type = other DNA
ttggcatgtcaatgaacttaaagactcgg

SEQ ID NO: 16876 - DNA, 30 bp, synthetic construct; identical to SEQ ID NO: 16273
  source 1..30: mol_type = other DNA

SEQ ID NO: 16877 - DNA, 31 bp, synthetic construct; identical to SEQ ID NO: 16274
  source 1..31: mol_type = other DNA

SEQ ID NO: 16878 - DNA, 32 bp, synthetic construct; identical to SEQ ID NO: 16275
  source 1..32: mol_type = other DNA

SEQ ID NO: 16879 - DNA, 33 bp, synthetic construct; identical to SEQ ID NO: 16276
  source 1..33: mol_type = other DNA

SEQ ID NO: 16880 - DNA, 34 bp, synthetic construct; identical to SEQ ID NO: 16277
  source 1..34: mol_type = other DNA

SEQ ID NO: 16881 - DNA, 35 bp, synthetic construct; identical to SEQ ID NO: 16278
  source 1..35: mol_type = other DNA

SEQ ID NO: 16882 - DNA, 36 bp, synthetic construct; identical to SEQ ID NO: 16279
  source 1..36: mol_type = other DNA

SEQ ID NO: 16883 - DNA, 37 bp, synthetic construct; identical to SEQ ID NO: 16280
  source 1..37: mol_type = other DNA

SEQ ID NO: 16884 - DNA, 38 bp, synthetic construct; identical to SEQ ID NO: 16281
  source 1..38: mol_type = other DNA

SEQ ID NO: 16885 - DNA, 39 bp, synthetic construct; identical to SEQ ID NO: 16282
  source 1..39: mol_type = other DNA

SEQ ID NO: 16886 - DNA, 40 bp, synthetic construct; identical to SEQ ID NO: 16283
  source 1..40: mol_type = other DNA

SEQ ID NO: 16887 - DNA, 19 bp, synthetic construct
  source 1..19: mol_type = other DNA
cgagtctttaagttcattg

SEQ ID NO: 16888 - DNA, 20 bp, synthetic construct
  source 1..20: mol_type = other DNA
ccgagtctttaagttcattg

SEQ ID NO: 16889 - DNA, 21 bp, synthetic construct
  source 1..21: mol_type = other DNA
gccgagtctttaagttcattg

SEQ ID NO: 16890 - DNA, 22 bp, synthetic construct
  source 1..22: mol_type = other DNA
agccgagtctttaagttcattg

SEQ ID NO: 16891 - DNA, 23 bp, synthetic construct
  source 1..23: mol_type = other DNA
gagccgagtctttaagttcattg

SEQ ID NO: 16892 - DNA, 24 bp, synthetic construct
  source 1..24: mol_type = other DNA
tgagccgagtctttaagttcattg

SEQ ID NO: 16893 - DNA, 25 bp, synthetic construct
  source 1..25: mol_type = other DNA
gtgagccgagtctttaagttcattg

SEQ ID NO: 16894 - DNA, 26 bp, synthetic construct
  source 1..26: mol_type = other DNA
tgtgagccgagtctttaagttcattg

SEQ ID NO: 16895 - DNA, 27 bp, synthetic construct
  source 1..27: mol_type = other DNA
ctgtgagccgagtctttaagttcattg

SEQ ID NO: 16896 - DNA, 28 bp, synthetic construct
  source 1..28: mol_type = other DNA
tctgtgagccgagtctttaagttcattg

SEQ ID NO: 16897 - DNA, 29 bp, synthetic construct
  source 1..29: mol_type = other DNA
atctgtgagccgagtctttaagttcattg

SEQ ID NO: 16898 - DNA, 30 bp, synthetic construct; identical to SEQ ID NO: 16294
  source 1..30: mol_type = other DNA

SEQ ID NO: 16899 - DNA, 31 bp, synthetic construct; identical to SEQ ID NO: 16295
  source 1..31: mol_type = other DNA

SEQ ID NO: 16900 - DNA, 32 bp, synthetic construct; identical to SEQ ID NO: 15911
  source 1..32: mol_type = other DNA

SEQ ID NO: 16901 - DNA, 33 bp, synthetic construct; identical to SEQ ID NO: 15912
  source 1..33: mol_type = other DNA

SEQ ID NO: 16902 - DNA, 34 bp, synthetic construct; identical to SEQ ID NO: 15913
  source 1..34: mol_type = other DNA

SEQ ID NO: 16903 - DNA, 35 bp, synthetic construct; identical to SEQ ID NO: 15914
  source 1..35: mol_type = other DNA

SEQ ID NO: 16904 - DNA, 36 bp, synthetic construct; identical to SEQ ID NO: 15915
  source 1..36: mol_type = other DNA

SEQ ID NO: 16905 - DNA, 37 bp, synthetic construct; identical to SEQ ID NO: 15916
  source 1..37: mol_type = other DNA

SEQ ID NO: 16906 - DNA, 38 bp, synthetic construct; identical to SEQ ID NO: 15917
  source 1..38: mol_type = other DNA

SEQ ID NO: 16907 - DNA, 39 bp, synthetic construct; identical to SEQ ID NO: 15918
  source 1..39: mol_type = other DNA

SEQ ID NO: 16908 - DNA, 40 bp, synthetic construct; identical to SEQ ID NO: 15919
  source 1..40: mol_type = other DNA

SEQ ID NO: 16909 - DNA, 31 bp, synthetic construct
  source 1..31: mol_type = other DNA
cgagtctttaagttcattgacatgccaacag

SEQ ID NO: 16910 - DNA, 32 bp, synthetic construct; identical to SEQ ID NO: 16305
  source 1..32: mol_type = other DNA

SEQ ID NO: 16911 - DNA, 33 bp, synthetic construct; identical to SEQ ID NO: 16306
  source 1..33: mol_type = other DNA

SEQ ID NO: 16912 - DNA, 34 bp, synthetic construct; identical to SEQ ID NO: 16307
  source 1..34: mol_type = other DNA

SEQ ID NO: 16913 - DNA, 35 bp, synthetic construct; identical to SEQ ID NO: 16308
  source 1..35: mol_type = other DNA

SEQ ID NO: 16914 - DNA, 36 bp, synthetic construct; identical to SEQ ID NO: 16309
  source 1..36: mol_type = other DNA

SEQ ID NO: 16915 - DNA, 37 bp, synthetic construct; identical to SEQ ID NO: 16310
  source 1..37: mol_type = other DNA

SEQ ID NO: 16916 - DNA, 38 bp, synthetic construct; identical to SEQ ID NO: 16311
  source 1..38: mol_type = other DNA

SEQ ID NO: 16917 - DNA, 39 bp, synthetic construct; identical to SEQ ID NO: 16312
  source 1..39: mol_type = other DNA

SEQ ID NO: 16918 - DNA, 40 bp, synthetic construct; identical to SEQ ID NO: 16313
  source 1..40: mol_type = other DNA

SEQ ID NO: 16919 - DNA, 33 bp, synthetic construct
  source 1..33: mol_type = other DNA
cgagtctttaagttcattgacatgccaacagaa

SEQ ID NO: 16920 - DNA, 34 bp, synthetic construct; identical to SEQ ID NO: 16314
  source 1..34: mol_type = other DNA

SEQ ID NO: 16921 - DNA, 35 bp, synthetic construct; identical to SEQ ID NO: 16315
  source 1..35: mol_type = other DNA

SEQ ID NO: 16922 - DNA, 36 bp, synthetic construct; identical to SEQ ID NO: 16316
  source 1..36: mol_type = other DNA

SEQ ID NO: 16923 - DNA, 37 bp, synthetic construct; identical to SEQ ID NO: 16317
  source 1..37: mol_type = other DNA

SEQ ID NO: 16924 - DNA, 38 bp, synthetic construct; identical to SEQ ID NO: 16318
  source 1..38: mol_type = other DNA

SEQ ID NO: 16925 - DNA, 39 bp, synthetic construct; identical to SEQ ID NO: 16319
  source 1..39: mol_type = other DNA

SEQ ID NO: 16926 - DNA, 40 bp, synthetic construct; identical to SEQ ID NO: 16320
  source 1..40: mol_type = other DNA

SEQ ID NO: 16927 - DNA, 10 bp, synthetic construct
  source 1..10: mol_type = other DNA
cgagtcttta

SEQ ID NO: 16928 - DNA, 11 bp, synthetic construct
  source 1..11: mol_type = other DNA
ccgagtcttta

SEQ ID NO: 16929 - DNA, 12 bp, synthetic construct
  source 1..12: mol_type = other DNA
gccgagtcttta

SEQ ID NO: 16930 - DNA, 13 bp, synthetic construct
  source 1..13: mol_type = other DNA
agccgagtcttta

SEQ ID NO: 16931 - DNA, 14 bp, synthetic construct
  source 1..14: mol_type = other DNA
gagccgagtcttta

SEQ ID NO: 16932 - DNA, 15 bp, synthetic construct
  source 1..15: mol_type = other DNA
tgagccgagtcttta

SEQ ID NO: 16933 - DNA, 16 bp, synthetic construct
  source 1..16: mol_type = other DNA
gtgagccgagtcttta

SEQ ID NO: 16934 - DNA, 17 bp, synthetic construct
  source 1..17: mol_type = other DNA
tgtgagccgagtcttta

SEQ ID NO: 16935 - DNA, 18 bp, synthetic construct
  source 1..18: mol_type = other DNA
ctgtgagccgagtcttta

SEQ ID NO: 16936 - DNA, 19 bp, synthetic construct
  source 1..19: mol_type = other DNA
tctgtgagccgagtcttta

SEQ ID NO: 16937 - DNA, 20 bp, synthetic construct
  source 1..20: mol_type = other DNA
atctgtgagccgagtcttta

SEQ ID NO: 16938 - DNA, 21 bp, synthetic construct
  source 1..21: mol_type = other DNA
gatctgtgagccgagtcttta

SEQ ID NO: 16939 - DNA, 22 bp, synthetic construct
  source 1..22: mol_type = other DNA
cgatctgtgagccgagtcttta

SEQ ID NO: 16940 - DNA, 23 bp, synthetic construct
  source 1..23: mol_type = other DNA
gcgatctgtgagccgagtcttta

SEQ ID NO: 16941 - DNA, 24 bp, synthetic construct
  source 1..24: mol_type = other DNA
tgcgatctgtgagccgagtcttta

SEQ ID NO: 16942 - DNA, 25 bp, synthetic construct
  source 1..25: mol_type = other DNA
atgcgatctgtgagccgagtcttta

SEQ ID NO: 16943 - DNA, 26 bp, synthetic construct
  source 1..26: mol_type = other DNA
gatgcgatctgtgagccgagtcttta

SEQ ID NO: 16944 - DNA, 27 bp, synthetic construct
  source 1..27: mol_type = other DNA
agatgcgatctgtgagccgagtcttta

SEQ ID NO: 16945 - DNA, 28 bp, synthetic construct
  source 1..28: mol_type = other DNA
cagatgcgatctgtgagccgagtcttta

SEQ ID NO: 16946 - DNA, 29 bp, synthetic construct
  source 1..29: mol_type = other DNA
tcagatgcgatctgtgagccgagtcttta

SEQ ID NO: 16947 - DNA, 30 bp, synthetic construct; identical to SEQ ID NO: 15940
  source 1..30: mol_type = other DNA

SEQ ID NO: 16948 - DNA, 31 bp, synthetic construct; identical to SEQ ID NO: 15941
  source 1..31: mol_type = other DNA

SEQ ID NO: 16949 - DNA, 32 bp, synthetic construct; identical to SEQ ID NO: 15942
  source 1..32: mol_type = other DNA

SEQ ID NO: 16950 - DNA, 33 bp, synthetic construct; identical to SEQ ID NO: 15943
  source 1..33: mol_type = other DNA

SEQ ID NO: 16951 - DNA, 34 bp, synthetic construct; identical to SEQ ID NO: 15944
  source 1..34: mol_type = other DNA

SEQ ID NO: 16952 - DNA, 35 bp, synthetic construct; identical to SEQ ID NO: 15945
  source 1..35: mol_type = other DNA

SEQ ID NO: 16953 - DNA, 36 bp, synthetic construct; identical to SEQ ID NO: 15946
  source 1..36: mol_type = other DNA

SEQ ID NO: 16954 - DNA, 37 bp, synthetic construct; identical to SEQ ID NO: 15947
  source 1..37: mol_type = other DNA

SEQ ID NO: 16955 - DNA, 38 bp, synthetic construct; identical to SEQ ID NO: 15948
  source 1..38: mol_type = other DNA

SEQ ID NO: 16956 - DNA, 39 bp, synthetic construct; identical to SEQ ID NO: 15949
  source 1..39: mol_type = other DNA

SEQ ID NO: 16957 - DNA, 40 bp, synthetic construct; identical to SEQ ID NO: 15950
  source 1..40: mol_type = other DNA

SEQ ID NO: 16958 - DNA, 10 bp, synthetic construct
  source 1..10: mol_type = other DNA
tgagccgagt

SEQ ID NO: 16959 - DNA, 10 bp, synthetic construct
  source 1..10: mol_type = other DNA
tgtctcgagt

SEQ ID NO: 16960 - DNA, 11 bp, synthetic construct
  source 1..11: mol_type = other DNA
gtgagccgagt

SEQ ID NO: 16961 - DNA, 11 bp, synthetic construct
  source 1..11: mol_type = other DNA
gtgtctcgagt

SEQ ID NO: 16962 - DNA, 12 bp, synthetic construct
  source 1..12: mol_type = other DNA
tgtgagccgagt

SEQ ID NO: 16963 - DNA, 12 bp, synthetic construct
  source 1..12: mol_type = other DNA
tgtgtctcgagt

SEQ ID NO: 16964 - DNA, 13 bp, synthetic construct
  source 1..13: mol_type = other DNA
ctgtgtctcgagt

SEQ ID NO: 16965 - DNA, 13 bp, synthetic construct
  source 1..13: mol_type = other DNA
ctgtgagccgagt

SEQ ID NO: 16966 - DNA, 14 bp, synthetic construct
  source 1..14: mol_type = other DNA
tctgtgagccgagt

SEQ ID NO: 16967 - DNA, 14 bp, synthetic construct
  source 1..14: mol_type = other DNA
tctgtgtctcgagt

SEQ ID NO: 16968 - DNA, 15 bp, synthetic construct
  source 1..15: mol_type = other DNA
atctgtgagccgagt

SEQ ID NO: 16969 - DNA, 15 bp, synthetic construct
  source 1..15: mol_type = other DNA
atctgtgtctcgagt

SEQ ID NO: 16970 - DNA, 16 bp, synthetic construct
  source 1..16: mol_type = other DNA
gatctgtgtctcgagt

SEQ ID NO: 16971 - DNA, 16 bp, synthetic construct
  source 1..16: mol_type = other DNA
gatctgtgagccgagt

SEQ ID NO: 16972 - DNA, 17 bp, synthetic construct
  source 1..17: mol_type = other DNA
cgatctgtgtctcgagt

SEQ ID NO: 16973 - DNA, 17 bp, synthetic construct
  source 1..17: mol_type = other DNA
cgatctgtgagccgagt

SEQ ID NO: 16974 - DNA, 18 bp, synthetic construct
  source 1..18: mol_type = other DNA
gcgatctgtgagccgagt

SEQ ID NO: 16975 - DNA, 18 bp, synthetic construct
  source 1..18: mol_type = other DNA
gcgatctgtgtctcgagt

SEQ ID NO: 16976 - DNA, 19 bp, synthetic construct
  source 1..19: mol_type = other DNA
tgcgatctgtgagccgagt

SEQ ID NO: 16977 - DNA, 19 bp, synthetic construct
  source 1..19: mol_type = other DNA
tgcgatctgtgtctcgagt

SEQ ID NO: 16978 - DNA, 20 bp, synthetic construct
  source 1..20: mol_type = other DNA
atgcgatctgtgtctcgagt

SEQ ID NO: 16979 - DNA, 20 bp, synthetic construct
  source 1..20: mol_type = other DNA
atgcgatctgtgagccgagt

SEQ ID NO: 16980 - DNA, 21 bp, synthetic construct
  source 1..21: mol_type = other DNA
gatgcgatctgtgtctcgagt

SEQ ID NO: 16981 - DNA, 21 bp, synthetic construct
  source 1..21: mol_type = other DNA
gatgcgatctgtgagccgagt

SEQ ID NO: 16982 - DNA, 22 bp, synthetic construct
  source 1..22: mol_type = other DNA
agatgcgatctgtgagccgagt

SEQ ID NO: 16983 - DNA, 22 bp, synthetic construct
  source 1..22: mol_type = other DNA
agatgcgatctgtgtctcgagt

SEQ ID NO: 16984 - DNA, 23 bp, synthetic construct
  source 1..23: mol_type = other DNA
cagatgcgatctgtgagccgagt

SEQ ID NO: 16985 - DNA, 23 bp, synthetic construct
  source 1..23: mol_type = other DNA
cagatgcgatctgtgtctcgagt

SEQ ID NO: 16986 - DNA, 24 bp, synthetic construct
  source 1..24: mol_type = other DNA
tcagatgcgatctgtgtctcgagt

SEQ ID NO: 16987 - DNA, 24 bp, synthetic construct
  source 1..24: mol_type = other DNA
tcagatgcgatctgtgagccgagt

SEQ ID NO: 16988 - DNA, 25 bp, synthetic construct
  source 1..25: mol_type = other DNA
ttcagatgcgatctgtgagccgagt

SEQ ID NO: 16989 - DNA, 25 bp, synthetic construct
  source 1..25: mol_type = other DNA
ttcagatgcgatctgtgtctcgagt

SEQ ID NO: 16990 - DNA, 26 bp, synthetic construct
  source 1..26: mol_type = other DNA
tttcagatgcgatctgtgtctcgagt

SEQ ID NO: 16991 - DNA, 26 bp, synthetic construct
  source 1..26: mol_type = other DNA
tttcagatgcgatctgtgagccgagt

SEQ ID NO: 16992 - DNA, 27 bp, synthetic construct
  source 1..27: mol_type = other DNA
atttcagatgcgatctgtgagccgagt

SEQ ID NO: 16993 - DNA, 27 bp, synthetic construct
  source 1..27: mol_type = other DNA
atttcagatgcgatctgtgtctcgagt

SEQ ID NO: 16994 - DNA, 28 bp, synthetic construct
  source 1..28: mol_type = other DNA
tatttcagatgcgatctgtgagccgagt

SEQ ID NO: 16995 - DNA, 28 bp, synthetic construct
  source 1..28: mol_type = other DNA
tatttcagatgcgatctgtgtctcgagt

SEQ ID NO: 16996 - DNA, 29 bp, synthetic construct
  source 1..29: mol_type = other DNA
ttatttcagatgcgatctgtgtctcgagt

SEQ ID NO: 16997 - DNA, 29 bp, synthetic construct
  source 1..29: mol_type = other DNA
ttatttcagatgcgatctgtgagccgagt

SEQ ID NO: 16998 - DNA, 30 bp, synthetic construct; identical to SEQ ID NO: 15976
  source 1..30: mol_type = other DNA

SEQ ID NO: 16999 - DNA, 30 bp, synthetic construct; identical to SEQ ID NO: 15975
  source 1..30: mol_type = other DNA

SEQ ID NO: 17000 - DNA, 31 bp, synthetic construct; identical to SEQ ID NO: 15978
  source 1..31: mol_type = other DNA

SEQ ID NO: 17001 - DNA, 31 bp, synthetic construct; identical to SEQ ID NO: 15977
  source 1..31: mol_type = other DNA

SEQ ID NO: 17002 - DNA, 32 bp, synthetic construct; identical to SEQ ID NO: 15980
  source 1..32: mol_type = other DNA

SEQ ID NO: 17003 - DNA, 32 bp, synthetic construct; identical to SEQ ID NO: 15979
  source 1..32: mol_type = other DNA

SEQ ID NO: 17004 - DNA, 33 bp, synthetic construct; identical to SEQ ID NO: 15982
  source 1..33: mol_type = other DNA

SEQ ID NO: 17005 - DNA, 33 bp, synthetic construct; identical to SEQ ID NO: 15981
  source 1..33: mol_type = other DNA

SEQ ID NO: 17006 - DNA, 34 bp, synthetic construct; identical to SEQ ID NO: 15983
  source 1..34: mol_type = other DNA

SEQ ID NO: 17007 - DNA, 34 bp, synthetic construct; identical to SEQ ID NO: 15984
  source 1..34: mol_type = other DNA

SEQ ID NO: 17008 - DNA, 35 bp, synthetic construct; identical to SEQ ID NO: 15985
  source 1..35: mol_type = other DNA

SEQ ID NO: 17009 - DNA, 35 bp, synthetic construct; identical to SEQ ID NO: 15986
  source 1..35: mol_type = other DNA

SEQ ID NO: 17010 - DNA, 36 bp, synthetic construct; identical to SEQ ID NO: 15987
  source 1..36: mol_type = other DNA

SEQ ID NO: 17011 - DNA, 36 bp, synthetic construct; identical to SEQ ID NO: 15988
  source 1..36: mol_type = other DNA

SEQ ID NO: 17012 - DNA, 37 bp, synthetic construct; identical to SEQ ID NO: 15989
  source 1..37: mol_type = other DNA

SEQ ID NO: 17013 - DNA, 37 bp, synthetic construct; identical to SEQ ID NO: 15990
  source 1..37: mol_type = other DNA

SEQ ID NO: 17014 - DNA, 38 bp, synthetic construct; identical to SEQ ID NO: 15992
  source 1..38: mol_type = other DNA

SEQ ID NO: 17015 - DNA, 38 bp, synthetic construct; identical to SEQ ID NO: 15991
  source 1..38: mol_type = other DNA

SEQ ID NO: 17016 - DNA, 39 bp, synthetic construct; identical to SEQ ID NO: 15993
  source 1..39: mol_type = other DNA

SEQ ID NO: 17017 - DNA, 39 bp, synthetic construct; identical to SEQ ID NO: 15994
  source 1..39: mol_type = other DNA

SEQ ID NO: 17018 - DNA, 40 bp, synthetic construct; identical to SEQ ID NO: 15995
  source 1..40: mol_type = other DNA

SEQ ID NO: 17019 - DNA, 40 bp, synthetic construct; identical to SEQ ID NO: 15996
  source 1..40: mol_type = other DNA

SEQ ID NO: 17020 - DNA, 10 bp, synthetic construct
  source 1..10: mol_type = other DNA
gtgagccgag

SEQ ID NO: 17021 - DNA, 11 bp, synthetic construct
  source 1..11: mol_type = other DNA
tgtgagccgag

SEQ ID NO: 17022 - DNA, 12 bp, synthetic construct
  source 1..12: mol_type = other DNA
ctgtgagccgag

SEQ ID NO: 17023 - DNA, 13 bp, synthetic construct
  source 1..13: mol_type = other DNA
tctgtgagccgag

SEQ ID NO: 17024 - DNA, 14 bp, synthetic construct
  source 1..14: mol_type = other DNA
atctgtgagccgag

SEQ ID NO: 17025 - DNA, 15 bp, synthetic construct
  source 1..15: mol_type = other DNA
gatctgtgagccgag

SEQ ID NO: 17026 - DNA, 16 bp, synthetic construct
  source 1..16: mol_type = other DNA
cgatctgtgagccgag

SEQ ID NO: 17027 - DNA, 17 bp, synthetic construct
  source 1..17: mol_type = other DNA
gcgatctgtgagccgag

SEQ ID NO: 17028 - DNA, 18 bp, synthetic construct
  source 1..18: mol_type = other DNA
tgcgatctgtgagccgag

SEQ ID NO: 17029 - DNA, 19 bp, synthetic construct
  source 1..19: mol_type = other DNA
atgcgatctgtgagccgag

SEQ ID NO: 17030 - DNA, 20 bp, synthetic construct
  source 1..20: mol_type = other DNA
gatgcgatctgtgagccgag

SEQ ID NO: 17031 - DNA, 21 bp, synthetic construct
  source 1..21: mol_type = other DNA
agatgcgatctgtgagccgag

SEQ ID NO: 17032 - DNA, 22 bp, synthetic construct
  source 1..22: mol_type = other DNA
cagatgcgatctgtgagccgag

SEQ ID NO: 17033 - DNA, 23 bp, synthetic construct
  source 1..23: mol_type = other DNA
tcagatgcgatctgtgagccgag

SEQ ID NO: 17034 - DNA, 24 bp, synthetic construct
  source 1..24: mol_type = other DNA
ttcagatgcgatctgtgagccgag

SEQ ID NO: 17035 - DNA, 25 bp, synthetic construct
  source 1..25: mol_type = other DNA
tttcagatgcgatctgtgagccgag

SEQ ID NO: 17036 - DNA, 26 bp, synthetic construct
  source 1..26: mol_type = other DNA
atttcagatgcgatctgtgagccgag

SEQ ID NO: 17037 - DNA, 27 bp, synthetic construct
  source 1..27: mol_type = other DNA
tatttcagatgcgatctgtgagccgag

SEQ ID NO: 17038 - DNA, 28 bp, synthetic construct
  source 1..28: mol_type = other DNA
ttatttcagatgcgatctgtgagccgag

SEQ ID NO: 17039 - DNA, 29 bp, synthetic construct
  source 1..29: mol_type = other DNA
tttatttcagatgcgatctgtgagccgag

SEQ ID NO: 17040 - DNA, 30 bp, synthetic construct; identical to SEQ ID NO: 16010
  source 1..30: mol_type = other DNA

SEQ ID NO: 17041 - DNA, 31 bp, synthetic construct; identical to SEQ ID NO: 16011
  source 1..31: mol_type = other DNA

SEQ ID NO: 17042 - DNA, 32 bp, synthetic construct; identical to SEQ ID NO: 16012
  source 1..32: mol_type = other DNA

SEQ ID NO: 17043 - DNA, 33 bp, synthetic construct; identical to SEQ ID NO: 16013
  source 1..33: mol_type = other DNA

SEQ ID NO: 17044 - DNA, 34 bp, synthetic construct; identical to SEQ ID NO: 16014
  source 1..34: mol_type = other DNA

SEQ ID NO: 17045 - DNA, 35 bp, synthetic construct; identical to SEQ ID NO: 16015
  source 1..35: mol_type = other DNA

SEQ ID NO: 17046 - DNA, 36 bp, synthetic construct; identical to SEQ ID NO: 16016
  source 1..36: mol_type = other DNA

SEQ ID NO: 17047 - DNA, 37 bp, synthetic construct; identical to SEQ ID NO: 16017
  source 1..37: mol_type = other DNA

SEQ ID NO: 17048 - DNA, 38 bp, synthetic construct; identical to SEQ ID NO: 16018
  source 1..38: mol_type = other DNA

SEQ ID NO: 17049 - DNA, 39 bp, synthetic construct; identical to SEQ ID NO: 16019
  source 1..39: mol_type = other DNA

SEQ ID NO: 17050 - DNA, 40 bp, synthetic construct; identical to SEQ ID NO: 16020
  source 1..40: mol_type = other DNA

SEQ ID NO: 17051 - DNA, 18 bp, synthetic construct
  source 1..18: mol_type = other DNA
tcggctcacagatcgcat

SEQ ID NO: 17052 - DNA, 19 bp, synthetic construct
  source 1..19: mol_type = other DNA
ctcggctcacagatcgcat

SEQ ID NO: 17053 - DNA, 20 bp, synthetic construct
  source 1..20: mol_type = other DNA
actcggctcacagatcgcat

SEQ ID NO: 17054 - DNA, 21 bp, synthetic construct
  source 1..21: mol_type = other DNA
gactcggctcacagatcgcat

SEQ ID NO: 17055 - DNA, 22 bp, synthetic construct
  source 1..22: mol_type = other DNA
agactcggctcacagatcgcat

SEQ ID NO: 17056 - DNA, 23 bp, synthetic construct
  source 1..23: mol_type = other DNA
aagactcggctcacagatcgcat

SEQ ID NO: 17057 - DNA, 24 bp, synthetic construct
  source 1..24: mol_type = other DNA
aaagactcggctcacagatcgcat

SEQ ID NO: 17058 - DNA, 25 bp, synthetic construct
  source 1..25: mol_type = other DNA
taaagactcggctcacagatcgcat

SEQ ID NO: 17059 - DNA, 26 bp, synthetic construct
  source 1..26: mol_type = other DNA
ttaaagactcggctcacagatcgcat

SEQ ID NO: 17060 - DNA, 27 bp, synthetic construct
  source 1..27: mol_type = other DNA
cttaaagactcggctcacagatcgcat

SEQ ID NO: 17061 - DNA, 28 bp, synthetic construct
  source 1..28: mol_type = other DNA
acttaaagactcggctcacagatcgcat

SEQ ID NO: 17062 - DNA, 29 bp, synthetic construct
  source 1..29: mol_type = other DNA
aacttaaagactcggctcacagatcgcat

SEQ ID NO: 17063 - DNA, 30 bp, synthetic construct; identical to SEQ ID NO: 16041
  source 1..30: mol_type = other DNA

SEQ ID NO: 17064 - DNA, 31 bp, synthetic construct; identical to SEQ ID NO: 16042
  source 1..31: mol_type = other DNA

SEQ ID NO: 17065 - DNA, 32 bp, synthetic construct; identical to SEQ ID NO: 16043
  source 1..32: mol_type = other DNA

SEQ ID NO: 17066 - DNA, 33 bp, synthetic construct; identical to SEQ ID NO: 16044
  source 1..33: mol_type = other DNA

SEQ ID NO: 17067 - DNA, 34 bp, synthetic construct; identical to SEQ ID NO: 16045
  source 1..34: mol_type = other DNA

SEQ ID NO: 17068 - DNA, 35 bp, synthetic construct; identical to SEQ ID NO: 16046
  source 1..35: mol_type = other DNA

SEQ ID NO: 17069 - DNA, 36 bp, synthetic construct; identical to SEQ ID NO: 16047
  source 1..36: mol_type = other DNA

SEQ ID NO: 17070 - DNA, 37 bp, synthetic construct; identical to SEQ ID NO: 16048
  source 1..37: mol_type = other DNA

SEQ ID NO: 17071 - DNA, 38 bp, synthetic construct; identical to SEQ ID NO: 16049
  source 1..38: mol_type = other DNA

SEQ ID NO: 17072 - DNA, 39 bp, synthetic construct; identical to SEQ ID NO: 16050
  source 1..39: mol_type = other DNA

SEQ ID NO: 17073 - DNA, 40 bp, synthetic construct; identical to SEQ ID NO: 16051
  source 1..40: mol_type = other DNA

SEQ ID NO: 17074 - DNA, 20 bp, synthetic construct
  source 1..20: mol_type = other DNA
tcggctcacagatcgcatct

SEQ ID NO: 17075 - DNA, 21 bp, synthetic construct
  source 1..21: mol_type = other DNA
ctcggctcacagatcgcatct

SEQ ID NO: 17076 - DNA, 22 bp, synthetic construct
  source 1..22: mol_type = other DNA
actcggctcacagatcgcatct

SEQ ID NO: 17077 - DNA, 23 bp, synthetic construct
  source 1..23: mol_type = other DNA
gactcggctcacagatcgcatct

SEQ ID NO: 17078 - DNA, 24 bp, synthetic construct
  source 1..24: mol_type = other DNA
agactcggctcacagatcgcatct

SEQ ID NO: 17079 - DNA, 25 bp, synthetic construct
  source 1..25: mol_type = other DNA
aagactcggctcacagatcgcatct

SEQ ID NO: 17080 - DNA, 26 bp, synthetic construct
  source 1..26: mol_type = other DNA
aaagactcggctcacagatcgcatct

SEQ ID NO: 17081 - DNA, 27 bp, synthetic construct
  source 1..27: mol_type = other DNA
taaagactcggctcacagatcgcatct

SEQ ID NO: 17082 - DNA, 28 bp, synthetic construct
  source 1..28: mol_type = other DNA
ttaaagactcggctcacagatcgcatct

SEQ ID NO: 17083 - DNA, 29 bp, synthetic construct
  source 1..29: mol_type = other DNA
cttaaagactcggctcacagatcgcatct

SEQ ID NO: 17084 - DNA, 30 bp, synthetic construct; identical to SEQ ID NO: 16072
  source 1..30: mol_type = other DNA

SEQ ID NO: 17085 - DNA, 31 bp, synthetic construct; identical to SEQ ID NO: 16073
  source 1..31: mol_type = other DNA

SEQ ID NO: 17086 - DNA, 32 bp, synthetic construct; identical to SEQ ID NO: 16074
  source 1..32: mol_type = other DNA

SEQ ID NO: 17087 - DNA, 33 bp, synthetic construct; identical to SEQ ID NO: 16075
  source 1..33: mol_type = other DNA

SEQ ID NO: 17088 - DNA, 34 bp, synthetic construct; identical to SEQ ID NO: 16076
  source 1..34: mol_type = other DNA

SEQ ID NO: 17089 - DNA, 35 bp, synthetic construct; identical to SEQ ID NO: 16077
  source 1..35: mol_type = other DNA

SEQ ID NO: 17090 - DNA, 36 bp, synthetic construct; identical to SEQ ID NO: 16078
  source 1..36: mol_type = other DNA

SEQ ID NO: 17091 - DNA, 37 bp, synthetic construct; identical to SEQ ID NO: 16079
  source 1..37: mol_type = other DNA

SEQ ID NO: 17092 - DNA, 38 bp, synthetic construct; identical to SEQ ID NO: 16080
  source 1..38: mol_type = other DNA

SEQ ID NO: 17093 - DNA, 39 bp, synthetic construct; identical to SEQ ID NO: 16081
  source 1..39: mol_type = other DNA

SEQ ID NO: 17094 - DNA, 40 bp, synthetic construct; identical to SEQ ID NO: 16082
  source 1..40: mol_type = other DNA

SEQ ID NO: 17095 - DNA, 10 bp, synthetic construct
  source 1..10: mol_type = other DNA
tcgggacaca

SEQ ID NO: 17096 - DNA, 10 bp, synthetic construct
  source 1..10: mol_type = other DNA
tcggctcaca

SEQ ID NO: 17097 - DNA, 11 bp, synthetic construct
  source 1..11: mol_type = other DNA
ctcggctcaca

SEQ ID NO: 17098 - DNA, 11 bp, synthetic construct
  source 1..11: mol_type = other DNA
ctcgggacaca

SEQ ID NO: 17099 - DNA, 12 bp, synthetic construct
  source 1..12: mol_type = other DNA
actcggctcaca

SEQ ID NO: 17100 - DNA, 12 bp, synthetic construct
  source 1..12: mol_type = other DNA
actcgggacaca

SEQ ID NO: 17101 - DNA, 13 bp, synthetic construct
  source 1..13: mol_type = other DNA
gactcggctcaca

SEQ ID NO: 17102 - DNA, 13 bp, synthetic construct
  source 1..13: mol_type = other DNA
gactcgggacaca

SEQ ID NO: 17103 - DNA, 14 bp, synthetic construct
  source 1..14: mol_type = other DNA
agactcgggacaca

SEQ ID NO: 17104 - DNA, 14 bp, synthetic construct
  source 1..14: mol_type = other DNA
agactcggctcaca

SEQ ID NO: 17105 - DNA, 15 bp, synthetic construct
  source 1..15: mol_type = other DNA
aagactcgggacaca

SEQ ID NO: 17106 - DNA, 15 bp, synthetic construct
  source 1..15: mol_type = other DNA
aagactcggctcaca

SEQ ID NO: 17107 - DNA, 16 bp, synthetic construct
  source 1..16: mol_type = other DNA
aaagactcggctcaca

SEQ ID NO: 17108 - DNA, 16 bp, synthetic construct
  source 1..16: mol_type = other DNA
aaagactcgggacaca

SEQ ID NO: 17109 - DNA, 17 bp, synthetic construct
  source 1..17: mol_type = other DNA
taaagactcggctcaca

SEQ ID NO: 17110 - DNA, 17 bp, synthetic construct
  source 1..17: mol_type = other DNA
taaagactcgggacaca

SEQ ID NO: 17111 - DNA, 18 bp, synthetic construct
  source 1..18: mol_type = other DNA
ttaaagactcgggacaca

SEQ ID NO: 17112 - DNA, 18 bp, synthetic construct
  source 1..18: mol_type = other DNA
ttaaagactcggctcaca

SEQ ID NO: 17113 - DNA, 19 bp, synthetic construct
  source 1..19: mol_type = other DNA
cttaaagactcgggacaca

SEQ ID NO: 17114 - DNA, 19 bp, synthetic construct
  source 1..19: mol_type = other DNA
cttaaagactcggctcaca

SEQ ID NO: 17115 - DNA, 20 bp, synthetic construct
  source 1..20: mol_type = other DNA
acttaaagactcgggacaca

SEQ ID NO: 17116 - DNA, 20 bp, synthetic construct
  source 1..20: mol_type = other DNA
acttaaagactcggctcaca

SEQ ID NO: 17117 - DNA, 21 bp, synthetic construct
  source 1..21: mol_type = other DNA
aacttaaagactcggctcaca

SEQ ID NO: 17118 - DNA, 21 bp, synthetic construct
  source 1..21: mol_type = other DNA
aacttaaagactcgggacaca

SEQ ID NO: 17119 - DNA, 22 bp, synthetic construct
  source 1..22: mol_type = other DNA
gaacttaaagactcggctcaca

SEQ ID NO: 17120 - DNA, 22 bp, synthetic construct
  source 1..22: mol_type = other DNA
gaacttaaagactcgggacaca

SEQ ID NO: 17121 - DNA, 23 bp, synthetic construct
  source 1..23: mol_type = other DNA
tgaacttaaagactcggctcaca

SEQ ID NO: 17122 - DNA, 23 bp, synthetic construct
  source 1..23: mol_type = other DNA
tgaacttaaagactcgggacaca

SEQ ID NO: 17123 - DNA, 24 bp, synthetic construct
  source 1..24: mol_type = other DNA
atgaacttaaagactcggctcaca

SEQ ID NO: 17124 - DNA, 24 bp, synthetic construct
  source 1..24: mol_type = other DNA
atgaacttaaagactcgggacaca

SEQ ID NO: 17125 - DNA, 25 bp, synthetic construct
  source 1..25: mol_type = other DNA
aatgaacttaaagactcggctcaca

SEQ ID NO: 17126 - DNA, 25 bp, synthetic construct
  source 1..25: mol_type = other DNA
aatgaacttaaagactcgggacaca

SEQ ID NO: 17127 - DNA, 26 bp, synthetic construct
  source 1..26: mol_type = other DNA
caatgaacttaaagactcgggacaca

SEQ ID NO: 17128 - DNA, 26 bp, synthetic construct
  source 1..26: mol_type = other DNA
caatgaacttaaagactcggctcaca

SEQ ID NO: 17129 - DNA, 27 bp, synthetic construct
  source 1..27: mol_type = other DNA
tcaatgaacttaaagactcggctcaca

SEQ ID NO: 17130 - DNA, 27 bp, synthetic construct
  source 1..27: mol_type = other DNA
tcaatgaacttaaagactcgggacaca

SEQ ID NO: 17131 - DNA, 28 bp, synthetic construct
  source 1..28: mol_type = other DNA
gtcaatgaacttaaagactcgggacaca

SEQ ID NO: 17132 - DNA, 28 bp, synthetic construct
  source 1..28: mol_type = other DNA
gtcaatgaacttaaagactcggctcaca

SEQ ID NO: 17133 - DNA, 29 bp, synthetic construct
  source 1..29: mol_type = other DNA
tgtcaatgaacttaaagactcgggacaca

SEQ ID NO: 17134 - DNA, 29 bp, synthetic construct
  source 1..29: mol_type = other DNA
tgtcaatgaacttaaagactcggctcaca

SEQ ID NO: 17135 - DNA, 30 bp, synthetic construct; identical to SEQ ID NO: 16500
  source 1..30: mol_type = other DNA

SEQ ID NO: 17136 - DNA, 30 bp, synthetic construct; identical to SEQ ID NO: 16501
  source 1..30: mol_type = other DNA

SEQ ID NO: 17137 - DNA, 31 bp, synthetic construct; identical to SEQ ID NO: 16502
  source 1..31: mol_type = other DNA

SEQ ID NO: 17138 - DNA, 31 bp, synthetic construct; identical to SEQ ID NO: 16503
  source 1..31: mol_type = other DNA

SEQ ID NO: 17139 - DNA, 32 bp, synthetic construct; identical to SEQ ID NO: 16505
  source 1..32: mol_type = other DNA

SEQ ID NO: 17140 - DNA, 32 bp, synthetic construct; identical to SEQ ID NO: 16504
  source 1..32: mol_type = other DNA

SEQ ID NO: 17141 - DNA, 33 bp, synthetic construct; identical to SEQ ID NO: 16506
  source 1..33: mol_type = other DNA

SEQ ID NO: 17142 - DNA, 33 bp, synthetic construct; identical to SEQ ID NO: 16507
  source 1..33: mol_type = other DNA

SEQ ID NO: 17143 - DNA, 34 bp, synthetic construct; identical to SEQ ID NO: 16509
  source 1..34: mol_type = other DNA

SEQ ID NO: 17144 - DNA, 34 bp, synthetic construct; identical to SEQ ID NO: 16508
  source 1..34: mol_type = other DNA

SEQ ID NO: 17145 - DNA, 35 bp, synthetic construct; identical to SEQ ID NO: 16510
  source 1..35: mol_type = other DNA

SEQ ID NO: 17146 - DNA, 35 bp, synthetic construct; identical to SEQ ID NO: 16511
  source 1..35: mol_type = other DNA

SEQ ID NO: 17147 - DNA, 36 bp, synthetic construct; identical to SEQ ID NO: 16513
  source 1..36: mol_type = other DNA

SEQ ID NO: 17148 - DNA, 36 bp, synthetic construct; identical to SEQ ID NO: 16512
  source 1..36: mol_type = other DNA

SEQ ID NO: 17149 - DNA, 37 bp, synthetic construct; identical to SEQ ID NO: 16514
  source 1..37: mol_type = other DNA

SEQ ID NO: 17150 - DNA, 37 bp, synthetic construct; identical to SEQ ID NO: 16515
  source 1..37: mol_type = other DNA

SEQ ID NO: 17151 - DNA, 38 bp, synthetic construct; identical to SEQ ID NO: 16516
  source 1..38: mol_type = other DNA

SEQ ID NO: 17152 - DNA, 38 bp, synthetic construct; identical to SEQ ID NO: 16517
  source 1..38: mol_type = other DNA

SEQ ID NO: 17153 - DNA, 39 bp, synthetic construct; identical to SEQ ID NO: 16518
  source 1..39: mol_type = other DNA

SEQ ID NO: 17154 - DNA, 39 bp, synthetic construct; identical to SEQ ID NO: 16519
  source 1..39: mol_type = other DNA

SEQ ID NO: 17155 - DNA, 40 bp, synthetic construct; identical to SEQ ID NO: 16521
  source 1..40: mol_type = other DNA

SEQ ID NO: 17156 - DNA, 40 bp, synthetic construct; identical to SEQ ID NO: 16520
  source 1..40: mol_type = other DNA

SEQ ID NO: 17157 - DNA, 10 bp, synthetic construct
  source 1..10: mol_type = other DNA
ctcggctcac

SEQ ID NO: 17158 - DNA, 11 bp, synthetic construct
  source 1..11: mol_type = other DNA
actcggctcac

SEQ ID NO: 17159 - DNA, 12 bp, synthetic construct
  source 1..12: mol_type = other DNA
gactcggctcac

SEQ ID NO: 17160 - DNA, 13 bp, synthetic construct
  source 1..13: mol_type = other DNA
agactcggctcac

SEQ ID NO: 17161 - DNA, 14 bp, synthetic construct
  source 1..14: mol_type = other DNA
aagactcggctcac

SEQ ID NO: 17162 - DNA, 15 bp, synthetic construct
  source 1..15: mol_type = other DNA
aaagactcggctcac

SEQ ID NO: 17163 - DNA, 16 bp, synthetic construct
  source 1..16: mol_type = other DNA
taaagactcggctcac

SEQ ID NO: 17164 - DNA, 17 bp, synthetic construct
  source 1..17: mol_type = other DNA
ttaaagactcggctcac

SEQ ID NO: 17165 - DNA, 18 bp, synthetic construct
  source 1..18: mol_type = other DNA
cttaaagactcggctcac

SEQ ID NO: 17166 - DNA, 19 bp, synthetic construct
  source 1..19: mol_type = other DNA
acttaaagactcggctcac

SEQ ID NO: 17167 - DNA, 20 bp, synthetic construct
  source 1..20: mol_type = other DNA
aacttaaagactcggctcac

SEQ ID NO: 17168 - DNA, 21 bp, synthetic construct
  source 1..21: mol_type = other DNA
gaacttaaagactcggctcac

SEQ ID NO: 17169 - DNA, 22 bp, synthetic construct
  source 1..22: mol_type = other DNA
tgaacttaaagactcggctcac

SEQ ID NO: 17170 - DNA, 23 bp, synthetic construct
  source 1..23: mol_type = other DNA
atgaacttaaagactcggctcac

SEQ ID NO: 17171 - DNA, 24 bp, synthetic construct
  source 1..24: mol_type = other DNA
aatgaacttaaagactcggctcac

SEQ ID NO: 17172 - DNA, 25 bp, synthetic construct
  source 1..25: mol_type = other DNA
caatgaacttaaagactcggctcac

SEQ ID NO: 17173 - DNA, 26 bp, synthetic construct
  source 1..26: mol_type = other DNA
tcaatgaacttaaagactcggctcac

SEQ ID NO: 17174 - DNA, 27 bp, synthetic construct
  source 1..27: mol_type = other DNA
gtcaatgaacttaaagactcggctcac

SEQ ID NO: 17175 - DNA, 28 bp, synthetic construct
  source 1..28: mol_type = other DNA
tgtcaatgaacttaaagactcggctcac

SEQ ID NO: 17176 - DNA, 29 bp, synthetic construct
  source 1..29: mol_type = other DNA
atgtcaatgaacttaaagactcggctcac

SEQ ID NO: 17177 - DNA, 30 bp, synthetic construct; identical to SEQ ID NO: 16542
  source 1..30: mol_type = other DNA

SEQ ID NO: 17178 - DNA, 31 bp, synthetic construct; identical to SEQ ID NO: 16543
  source 1..31: mol_type = other DNA

SEQ ID NO: 17179 - DNA, 32 bp, synthetic construct; identical to SEQ ID NO: 16544
  source 1..32: mol_type = other DNA

SEQ ID NO: 17180 - DNA, 33 bp, synthetic construct; identical to SEQ ID NO: 16545
  source 1..33: mol_type = other DNA

SEQ ID NO: 17181 - DNA, 34 bp, synthetic construct; identical to SEQ ID NO: 16546
  source 1..34: mol_type = other DNA

SEQ ID NO: 17182 - DNA, 35 bp, synthetic construct; identical to SEQ ID NO: 16547
  source 1..35: mol_type = other DNA

SEQ ID NO: 17183 - DNA, 36 bp, synthetic construct; identical to SEQ ID NO: 16548
  source 1..36: mol_type = other DNA

SEQ ID NO: 17184 - DNA, 37 bp, synthetic construct; identical to SEQ ID NO: 16549
  source 1..37: mol_type = other DNA

SEQ ID NO: 17185 - DNA, 38 bp, synthetic construct; identical to SEQ ID NO: 16550
  source 1..38: mol_type = other DNA

SEQ ID NO: 17186 - DNA, 39 bp, synthetic construct; identical to SEQ ID NO: 16551
  source 1..39: mol_type = other DNA

SEQ ID NO: 17187 - DNA, 40 bp, synthetic construct; identical to SEQ ID NO: 16552
  source 1..40: mol_type = other DNA

SEQ ID NO: 17188 - DNA, 11 bp, synthetic construct
  source 1..11: mol_type = other DNA
cgagtctttaa

SEQ ID NO: 17189 - DNA, 11 bp, synthetic construct
  source 1..11: mol_type = other DNA
cgagtgtttaa

SEQ ID NO: 17190 - DNA, 12 bp, synthetic construct
  source 1..12: mol_type = other DNA
ccgagtgtttaa

SEQ ID NO: 17191 - DNA, 12 bp, synthetic construct
  source 1..12: mol_type = other DNA
ccgagtctttaa

SEQ ID NO: 17192 - DNA, 13 bp, synthetic construct
  source 1..13: mol_type = other DNA
gccgagtgtttaa

SEQ ID NO: 17193 - DNA, 13 bp, synthetic construct
  source 1..13: mol_type = other DNA
gccgagtctttaa

SEQ ID NO: 17194 - DNA, 14 bp, synthetic construct
  source 1..14: mol_type = other DNA
agccgagtgtttaa

SEQ ID NO: 17195 - DNA, 14 bp, synthetic construct
  source 1..14: mol_type = other DNA
agccgagtctttaa

SEQ ID NO: 17196 - DNA, 15 bp, synthetic construct
  source 1..15: mol_type = other DNA
gagccgagtctttaa

SEQ ID NO: 17197 - DNA, 15 bp, synthetic construct
  source 1..15: mol_type = other DNA
gagccgagtgtttaa

SEQ ID NO: 17198 - DNA, 16 bp, synthetic construct
  source 1..16: mol_type = other DNA
tgagccgagtctttaa

SEQ ID NO: 17199 - DNA, 16 bp, synthetic construct
  source 1..16: mol_type = other DNA
tgagccgagtgtttaa

SEQ ID NO: 17200 - DNA, 17 bp, synthetic construct
  source 1..17: mol_type = other DNA
gtgagccgagtgtttaa

SEQ ID NO: 17201 - DNA, 17 bp, synthetic construct
  source 1..17: mol_type = other DNA
gtgagccgagtctttaa

SEQ ID NO: 17202 - DNA, 18 bp, synthetic construct
  source 1..18: mol_type = other DNA
tgtgagccgagtgtttaa

SEQ ID NO: 17203 - DNA, 18 bp, synthetic construct
  source 1..18: mol_type = other DNA
tgtgagccgagtctttaa

SEQ ID NO: 17204 - DNA, 19 bp, synthetic construct
  source 1..19: mol_type = other DNA
ctgtgagccgagtctttaa

SEQ ID NO: 17205 - DNA, 19 bp, synthetic construct
  source 1..19: mol_type = other DNA
ctgtgagccgagtgtttaa

SEQ ID NO: 17206 - DNA, 20 bp, synthetic construct
  source 1..20: mol_type = other DNA
tctgtgagccgagtgtttaa

SEQ ID NO: 17207 - DNA, 20 bp, synthetic construct
  source 1..20: mol_type = other DNA
tctgtgagccgagtctttaa

SEQ ID NO: 17208 - DNA, 21 bp, synthetic construct
  source 1..21: mol_type = other DNA
atctgtgagccgagtgtttaa

SEQ ID NO: 17209 - DNA, 21 bp, synthetic construct
  source 1..21: mol_type = other DNA
atctgtgagccgagtctttaa

SEQ ID NO: 17210 - DNA, 22 bp, synthetic construct
  source 1..22: mol_type = other DNA
gatctgtgagccgagtgtttaa

SEQ ID NO: 17211 - DNA, 22 bp, synthetic construct
  source 1..22: mol_type = other DNA
gatctgtgagccgagtctttaa

SEQ ID NO: 17212 - DNA, 23 bp, synthetic construct
  source 1..23: mol_type = other DNA
cgatctgtgagccgagtgtttaa

SEQ ID NO: 17213 - DNA, 23 bp, synthetic construct
  source 1..23: mol_type = other DNA
cgatctgtgagccgagtctttaa

SEQ ID NO: 17214 - DNA, 24 bp, synthetic construct
  source 1..24: mol_type = other DNA
gcgatctgtgagccgagtgtttaa

SEQ ID NO: 17215 - DNA, 24 bp, synthetic construct
  source 1..24: mol_type = other DNA
gcgatctgtgagccgagtctttaa

SEQ ID NO: 17216 - DNA, 25 bp, synthetic construct
  source 1..25: mol_type = other DNA
tgcgatctgtgagccgagtctttaa

SEQ ID NO: 17217 - DNA, 25 bp, synthetic construct
  source 1..25: mol_type = other DNA
tgcgatctgtgagccgagtgtttaa

SEQ ID NO: 17218 - DNA, 26 bp, synthetic construct
  source 1..26: mol_type = other DNA
atgcgatctgtgagccgagtctttaa

SEQ ID NO: 17219 - DNA, 26 bp, synthetic construct
  source 1..26: mol_type = other DNA
atgcgatctgtgagccgagtgtttaa

SEQ ID NO: 17220 - DNA, 27 bp, synthetic construct
  source 1..27: mol_type = other DNA
gatgcgatctgtgagccgagtctttaa

SEQ ID NO: 17221 - DNA, 27 bp, synthetic construct
  source 1..27: mol_type = other DNA
gatgcgatctgtgagccgagtgtttaa

SEQ ID NO: 17222 - DNA, 28 bp, synthetic construct
  source 1..28: mol_type = other DNA
agatgcgatctgtgagccgagtctttaa

SEQ ID NO: 17223 - DNA, 28 bp, synthetic construct
  source 1..28: mol_type = other DNA
agatgcgatctgtgagccgagtgtttaa

SEQ ID NO: 17224 - DNA, 29 bp, synthetic construct
  source 1..29: mol_type = other DNA
cagatgcgatctgtgagccgagtctttaa

SEQ ID NO: 17225 - DNA, 29 bp, synthetic construct
  source 1..29: mol_type = other DNA
cagatgcgatctgtgagccgagtgtttaa

SEQ ID NO: 17226 - DNA, 30 bp, synthetic construct; identical to SEQ ID NO: 16095
  source 1..30: mol_type = other DNA

SEQ ID NO: 17227 - DNA, 30 bp, synthetic construct; identical to SEQ ID NO: 16096
  source 1..30: mol_type = other DNA

SEQ ID NO: 17228 - DNA, 31 bp, synthetic construct; identical to SEQ ID NO: 16097
  source 1..31: mol_type = other DNA

SEQ ID NO: 17229 - DNA, 31 bp, synthetic construct; identical to SEQ ID NO: 16098
  source 1..31: mol_type = other DNA

SEQ ID NO: 17230 - DNA, 32 bp, synthetic construct; identical to SEQ ID NO: 16099
  source 1..32: mol_type = other DNA

SEQ ID NO: 17231 - DNA, 32 bp, synthetic construct; identical to SEQ ID NO: 16100
  source 1..32: mol_type = other DNA

SEQ ID NO: 17232 - DNA, 33 bp, synthetic construct; identical to SEQ ID NO: 16102
  source 1..33: mol_type = other DNA

SEQ ID NO: 17233 - DNA, 33 bp, synthetic construct; identical to SEQ ID NO: 16101
  source 1..33: mol_type = other DNA

SEQ ID NO: 17234 - DNA, 34 bp, synthetic construct; identical to SEQ ID NO: 16104
  source 1..34: mol_type = other DNA

SEQ ID NO: 17235 - DNA, 34 bp, synthetic construct; identical to SEQ ID NO: 16103
  source 1..34: mol_type = other DNA

SEQ ID NO: 17236 - DNA, 35 bp, synthetic construct; identical to SEQ ID NO: 16105
  source 1..35: mol_type = other DNA

SEQ ID NO: 17237 - DNA, 35 bp, synthetic construct; identical to SEQ ID NO: 16106
  source 1..35: mol_type = other DNA

SEQ ID NO: 17238 - DNA, 36 bp, synthetic construct; identical to SEQ ID NO: 16107
  source 1..36: mol_type = other DNA

SEQ ID NO: 17239 - DNA, 36 bp, synthetic construct; identical to SEQ ID NO: 16108
  source 1..36: mol_type = other DNA

SEQ ID NO: 17240 - DNA, 37 bp, synthetic construct; identical to SEQ ID NO: 16110
  source 1..37: mol_type = other DNA

SEQ ID NO: 17241 - DNA, 37 bp, synthetic construct; identical to SEQ ID NO: 16109
  source 1..37: mol_type = other DNA

SEQ ID NO: 17242 - DNA, 38 bp, synthetic construct; identical to SEQ ID NO: 16111
  source 1..38: mol_type = other DNA

SEQ ID NO: 17243 - DNA, 38 bp, synthetic construct; identical to SEQ ID NO: 16112
  source 1..38: mol_type = other DNA

SEQ ID NO: 17244 - DNA, 39 bp, synthetic construct; identical to SEQ ID NO: 16114
  source 1..39: mol_type = other DNA

SEQ ID NO: 17245 - DNA, 39 bp, synthetic construct; identical to SEQ ID NO: 16113
  source 1..39: mol_type = other DNA

SEQ ID NO: 17246 - DNA, 40 bp, synthetic construct; identical to SEQ ID NO: 16116
  source 1..40: mol_type = other DNA

SEQ ID NO: 17247 - DNA, 40 bp, synthetic construct; identical to SEQ ID NO: 16115
  source 1..40: mol_type = other DNA

SEQ ID NO: 17248 - DNA, 30 bp, synthetic construct
  source 1..30: mol_type = other DNA
cgagtctttaagttcattgacatgccaaca

SEQ ID NO: 17249 - DNA, 31 bp, synthetic construct; identical to SEQ ID NO: 16642
  source 1..31: mol_type = other DNA

SEQ ID NO: 17250 - DNA, 32 bp, synthetic construct; identical to SEQ ID NO: 16643
  source 1..32: mol_type = other DNA

SEQ ID NO: 17251 - DNA, 33 bp, synthetic construct; identical to SEQ ID NO: 16644
  source 1..33: mol_type = other DNA

SEQ ID NO: 17252 - DNA, 34 bp, synthetic construct; identical to SEQ ID NO: 16645
  source 1..34: mol_type = other DNA

SEQ ID NO: 17253 - DNA, 35 bp, synthetic construct; identical to SEQ ID NO: 16646
  source 1..35: mol_type = other DNA

SEQ ID NO: 17254 - DNA, 36 bp, synthetic construct; identical to SEQ ID NO: 16647
  source 1..36: mol_type = other DNA

SEQ ID NO: 17255 - DNA, 37 bp, synthetic construct; identical to SEQ ID NO: 16648
  source 1..37: mol_type = other DNA

SEQ ID NO: 17256 - DNA, 38 bp, synthetic construct; identical to SEQ ID NO: 16649
  source 1..38: mol_type = other DNA

SEQ ID NO: 17257 - DNA, 39 bp, synthetic construct; identical to SEQ ID NO: 16650
  source 1..39: mol_type = other DNA

SEQ ID NO: 17258 - DNA, 40 bp, synthetic construct; identical to SEQ ID NO: 16651
  source 1..40: mol_type = other DNA

SEQ ID NO: 17259 - DNA, 29 bp, synthetic construct
  source 1..29: mol_type = other DNA
cgagtctttaagttcattgacatgccaac

SEQ ID NO: 17260 - DNA, 30 bp, synthetic construct; identical to SEQ ID NO: 16652
  source 1..30: mol_type = other DNA

SEQ ID NO: 17261 - DNA, 31 bp, synthetic construct; identical to SEQ ID NO: 16653
  source 1..31: mol_type = other DNA

SEQ ID NO: 17262 - DNA, 32 bp, synthetic construct; identical to SEQ ID NO: 16654
  source 1..32: mol_type = other DNA

SEQ ID NO: 17263 - DNA, 33 bp, synthetic construct; identical to SEQ ID NO: 16655
  source 1..33: mol_type = other DNA

SEQ ID NO: 17264 - DNA, 34 bp, synthetic construct; identical to SEQ ID NO: 16656
  source 1..34: mol_type = other DNA

SEQ ID NO: 17265 - DNA, 35 bp, synthetic construct; identical to SEQ ID NO: 16657
  source 1..35: mol_type = other DNA

SEQ ID NO: 17266 - DNA, 36 bp, synthetic construct; identical to SEQ ID NO: 16658
  source 1..36: mol_type = other DNA

SEQ ID NO: 17267 - DNA, 37 bp, synthetic construct; identical to SEQ ID NO: 16659
  source 1..37: mol_type = other DNA

SEQ ID NO: 17268 - DNA, 38 bp, synthetic construct; identical to SEQ ID NO: 16660
  source 1..38: mol_type = other DNA

SEQ ID NO: 17269 - DNA, 39 bp, synthetic construct; identical to SEQ ID NO: 16661
  source 1..39: mol_type = other DNA

SEQ ID NO: 17270 - DNA, 40 bp, synthetic construct; identical to SEQ ID NO: 16662
  source 1..40: mol_type = other DNA

SEQ ID NO: 17271 - DNA, 10 bp, synthetic construct
  source 1..10: mol_type = other DNA
gagccgagtc

SEQ ID NO: 17272 - DNA, 11 bp, synthetic construct
  source 1..11: mol_type = other DNA
tgagccgagtc

SEQ ID NO: 17273 - DNA, 12 bp, synthetic construct
  source 1..12: mol_type = other DNA
gtgagccgagtc

SEQ ID NO: 17274 - DNA, 13 bp, synthetic construct
  source 1..13: mol_type = other DNA
tgtgagccgagtc

SEQ ID NO: 17275 - DNA, 14 bp, synthetic construct
  source 1..14: mol_type = other DNA
ctgtgagccgagtc

SEQ ID NO: 17276 - DNA, 15 bp, synthetic construct
  source 1..15: mol_type = other DNA
tctgtgagccgagtc

SEQ ID NO: 17277 - DNA, 16 bp, synthetic construct
  source 1..16: mol_type = other DNA
atctgtgagccgagtc

SEQ ID NO: 17278 - DNA, 17 bp, synthetic construct
  source 1..17: mol_type = other DNA
gatctgtgagccgagtc

SEQ ID NO: 17279 - DNA, 18 bp, synthetic construct
  source 1..18: mol_type = other DNA
cgatctgtgagccgagtc

SEQ ID NO: 17280 - DNA, 19 bp, synthetic construct
  source 1..19: mol_type = other DNA
gcgatctgtgagccgagtc

SEQ ID NO: 17281 - DNA, 20 bp, synthetic construct
  source 1..20: mol_type = other DNA
tgcgatctgtgagccgagtc

SEQ ID NO: 17282 - DNA, 21 bp, synthetic construct
  source 1..21: mol_type = other DNA
atgcgatctgtgagccgagtc

SEQ ID NO: 17283 - DNA, 22 bp, synthetic construct
  source 1..22: mol_type = other DNA
gatgcgatctgtgagccgagtc

SEQ ID NO: 17284 - DNA, 23 bp, synthetic construct
  source 1..23: mol_type = other DNA
agatgcgatctgtgagccgagtc

SEQ ID NO: 17285 - DNA, 24 bp, synthetic construct
  source 1..24: mol_type = other DNA
cagatgcgatctgtgagccgagtc

SEQ ID NO: 17286 - DNA, 25 bp, synthetic construct
  source 1..25: mol_type = other DNA
tcagatgcgatctgtgagccgagtc

SEQ ID NO: 17287 - DNA, 26 bp, synthetic construct
  source 1..26: mol_type = other DNA
ttcagatgcgatctgtgagccgagtc

SEQ ID NO: 17288 - DNA, 27 bp, synthetic construct
  source 1..27: mol_type = other DNA
tttcagatgcgatctgtgagccgagtc

SEQ ID NO: 17289 - DNA, 28 bp, synthetic construct
  source 1..28: mol_type = other DNA
atttcagatgcgatctgtgagccgagtc

SEQ ID NO: 17290 - DNA, 29 bp, synthetic construct
  source 1..29: mol_type = other DNA
tatttcagatgcgatctgtgagccgagtc

SEQ ID NO: 17291 - DNA, 30 bp, synthetic construct; identical to SEQ ID NO: 15853
  source 1..30: mol_type = other DNA

SEQ ID NO: 17292 - DNA, 31 bp, synthetic construct; identical to SEQ ID NO: 15854
  source 1..31: mol_type = other DNA

SEQ ID NO: 17293 - DNA, 32 bp, synthetic construct; identical to SEQ ID NO: 15855
  source 1..32: mol_type = other DNA

SEQ ID NO: 17294 - DNA, 33 bp, synthetic construct; identical to SEQ ID NO: 15856
  source 1..33: mol_type = other DNA

SEQ ID NO: 17295 - DNA, 34 bp, synthetic construct; identical to SEQ ID NO: 15857
  source 1..34: mol_type = other DNA

SEQ ID NO: 17296 - DNA, 35 bp, synthetic construct; identical to SEQ ID NO: 15858
  source 1..35: mol_type = other DNA

SEQ ID NO: 17297 - DNA, 36 bp, synthetic construct; identical to SEQ ID NO: 15859
  source 1..36: mol_type = other DNA

SEQ ID NO: 17298 - DNA, 37 bp, synthetic construct; identical to SEQ ID NO: 15860
  source 1..37: mol_type = other DNA

SEQ ID NO: 17299 - DNA, 38 bp, synthetic construct; identical to SEQ ID NO: 15861
  source 1..38: mol_type = other DNA

SEQ ID NO: 17300 - DNA, 39 bp, synthetic construct; identical to SEQ ID NO: 15862
  source 1..39: mol_type = other DNA

SEQ ID NO: 17301 - DNA, 40 bp, synthetic construct; identical to SEQ ID NO: 15863
  source 1..40: mol_type = other DNA

SEQ ID NO: 17302 - DNA, 11 bp, synthetic construct
  source 1..11: mol_type = other DNA
tcggctcacag

SEQ ID NO: 17303 - DNA, 12 bp, synthetic construct
  source 1..12: mol_type = other DNA
ctcggctcacag

SEQ ID NO: 17304 - DNA, 13 bp, synthetic construct
  source 1..13: mol_type = other DNA
actcggctcacag

SEQ ID NO: 17305 - DNA, 14 bp, synthetic construct
  source 1..14: mol_type = other DNA
gactcggctcacag

SEQ ID NO: 17306 - DNA, 15 bp, synthetic construct
  source 1..15: mol_type = other DNA
agactcggctcacag

SEQ ID NO: 17307 - DNA, 16 bp, synthetic construct
  source 1..16: mol_type = other DNA
aagactcggctcacag

SEQ ID NO: 17308 - DNA, 17 bp, synthetic construct
  source 1..17: mol_type = other DNA
aaagactcggctcacag

SEQ ID NO: 17309 - DNA, 18 bp, synthetic construct
  source 1..18: mol_type = other DNA
taaagactcggctcacag

SEQ ID NO: 17310 - DNA, 19 bp, synthetic construct
  source 1..19: mol_type = other DNA
ttaaagactcggctcacag

SEQ ID NO: 17311 - DNA, 20 bp, synthetic construct
  source 1..20: mol_type = other DNA
cttaaagactcggctcacag

SEQ ID NO: 17312 - DNA, 21 bp, synthetic construct
  source 1..21: mol_type = other DNA
acttaaagactcggctcacag

SEQ ID NO: 17313 - DNA, 22 bp, synthetic construct
  source 1..22: mol_type = other DNA
aacttaaagactcggctcacag

SEQ ID NO: 17314 - DNA, 23 bp, synthetic construct
  source 1..23: mol_type = other DNA
gaacttaaagactcggctcacag

SEQ ID NO: 17315 - DNA, 24 bp, synthetic construct
  source 1..24: mol_type = other DNA
tgaacttaaagactcggctcacag

SEQ ID NO: 17316 - DNA, 25 bp, synthetic construct
  source 1..25: mol_type = other DNA
atgaacttaaagactcggctcacag

SEQ ID NO: 17317 - DNA, 26 bp, synthetic construct
  source 1..26: mol_type = other DNA
aatgaacttaaagactcggctcacag

SEQ ID NO: 17318 - DNA, 27 bp, synthetic construct
  source 1..27: mol_type = other DNA
caatgaacttaaagactcggctcacag

SEQ ID NO: 17319 - DNA, 28 bp, synthetic construct
  source 1..28: mol_type = other DNA
tcaatgaacttaaagactcggctcacag

SEQ ID NO: 17320 - DNA, 29 bp, synthetic construct
  source 1..29: mol_type = other DNA
gtcaatgaacttaaagactcggctcacag

SEQ ID NO: 17321 - DNA, 30 bp, synthetic construct; identical to SEQ ID NO: 16683
  source 1..30: mol_type = other DNA

SEQ ID NO: 17322 - DNA, 31 bp, synthetic construct; identical to SEQ ID NO: 16684
  source 1..31: mol_type = other DNA

SEQ ID NO: 17323 - DNA, 32 bp, synthetic construct; identical to SEQ ID NO: 16685
  source 1..32: mol_type = other DNA

SEQ ID NO: 17324 - DNA, 33 bp, synthetic construct; identical to SEQ ID NO: 16686
  source 1..33: mol_type = other DNA

SEQ ID NO: 17325 - DNA, 34 bp, synthetic construct; identical to SEQ ID NO: 16687
  source 1..34: mol_type = other DNA

SEQ ID NO: 17326 - DNA, 35 bp, synthetic construct; identical to SEQ ID NO: 16688
  source 1..35: mol_type = other DNA

SEQ ID NO: 17327 - DNA, 36 bp, synthetic construct; identical to SEQ ID NO: 16689
  source 1..36: mol_type = other DNA

SEQ ID NO: 17328 - DNA, 37 bp, synthetic construct; identical to SEQ ID NO: 16690
  source 1..37: mol_type = other DNA

SEQ ID NO: 17329 - DNA, 38 bp, synthetic construct; identical to SEQ ID NO: 16691
  source 1..38: mol_type = other DNA

SEQ ID NO: 17330 - DNA, 39 bp, synthetic construct; identical to SEQ ID NO: 16692
  source 1..39: mol_type = other DNA

SEQ ID NO: 17331 - DNA, 40 bp, synthetic construct; identical to SEQ ID NO: 16693
  source 1..40: mol_type = other DNA

SEQ ID NO: 17332 - DNA, 13 bp, synthetic construct
  source 1..13: mol_type = other DNA
tcggctcacagat

SEQ ID NO: 17333 - DNA, 14 bp, synthetic construct
  source 1..14: mol_type = other DNA
ctcggctcacagat

SEQ ID NO: 17334 - DNA, 15 bp, synthetic construct
  source 1..15: mol_type = other DNA
actcggctcacagat

SEQ ID NO: 17335 - DNA, 16 bp, synthetic construct
  source 1..16: mol_type = other DNA
gactcggctcacagat

SEQ ID NO: 17336 - DNA, 17 bp, synthetic construct
  source 1..17: mol_type = other DNA
agactcggctcacagat

SEQ ID NO: 17337 - DNA, 18 bp, synthetic construct
  source 1..18: mol_type = other DNA
aagactcggctcacagat

SEQ ID NO: 17338 - DNA, 19 bp, synthetic construct
  source 1..19: mol_type = other DNA
aaagactcggctcacagat

SEQ ID NO: 17339 - DNA, 20 bp, synthetic construct
  source 1..20: mol_type = other DNA
taaagactcggctcacagat

SEQ ID NO: 17340 - DNA, 21 bp, synthetic construct
  source 1..21: mol_type = other DNA
ttaaagactcggctcacagat

SEQ ID NO: 17341 - DNA, 22 bp, synthetic construct
  source 1..22: mol_type = other DNA
cttaaagactcggctcacagat

SEQ ID NO: 17342 - DNA, 23 bp, synthetic construct
  source 1..23: mol_type = other DNA
acttaaagactcggctcacagat

SEQ ID NO: 17343 - DNA, 24 bp, synthetic construct
  source 1..24: mol_type = other DNA
aacttaaagactcggctcacagat

SEQ ID NO: 17344 - DNA, 25 bp, synthetic construct
  source 1..25: mol_type = other DNA
gaacttaaagactcggctcacagat

SEQ ID NO: 17345 - DNA, 26 bp, synthetic construct
  source 1..26: mol_type = other DNA
tgaacttaaagactcggctcacagat

SEQ ID NO: 17346 - DNA, 27 bp, synthetic construct
  source 1..27: mol_type = other DNA
atgaacttaaagactcggctcacagat

SEQ ID NO: 17347 - DNA, 28 bp, synthetic construct
  source 1..28: mol_type = other DNA
aatgaacttaaagactcggctcacagat

SEQ ID NO: 17348 - DNA, 29 bp, synthetic construct
  source 1..29: mol_type = other DNA
caatgaacttaaagactcggctcacagat

SEQ ID NO: 17349 - DNA, 30 bp, synthetic construct; identical to SEQ ID NO: 16743
  source 1..30: mol_type = other DNA

SEQ ID NO: 17350 - DNA, 31 bp, synthetic construct; identical to SEQ ID NO: 16744
  source 1..31: mol_type = other DNA

SEQ ID NO: 17351 - DNA, 32 bp, synthetic construct; identical to SEQ ID NO: 16745
  source 1..32: mol_type = other DNA

SEQ ID NO: 17352 - DNA, 33 bp, synthetic construct; identical to SEQ ID NO: 16746
  source 1..33: mol_type = other DNA

SEQ ID NO: 17353 - DNA, 34 bp, synthetic construct; identical to SEQ ID NO: 16747
  source 1..34: mol_type = other DNA

SEQ ID NO: 17354 - DNA, 35 bp, synthetic construct; identical to SEQ ID NO: 16748
  source 1..35: mol_type = other DNA

SEQ ID NO: 17355 - DNA, 36 bp, synthetic construct; identical to SEQ ID NO: 16749
  source 1..36: mol_type = other DNA

SEQ ID NO: 17356 - DNA, 37 bp, synthetic construct; identical to SEQ ID NO: 16750
  source 1..37: mol_type = other DNA

SEQ ID NO: 17357 - DNA, 38 bp, synthetic construct; identical to SEQ ID NO: 16751
  source 1..38: mol_type = other DNA

SEQ ID NO: 17358 - DNA, 39 bp, synthetic construct; identical to SEQ ID NO: 16752
  source 1..39: mol_type = other DNA

SEQ ID NO: 17359 - DNA, 40 bp, synthetic construct; identical to SEQ ID NO: 16753
  source 1..40: mol_type = other DNA

SEQ ID NO: 17360 - DNA, 21 bp, synthetic construct
  source 1..21: mol_type = other DNA
tggtaggtttaccttcggttg

SEQ ID NO: 17361 - DNA, 21 bp, synthetic construct
  source 1..21: mol_type = other DNA
tggtaggtttaccttctgttg

SEQ ID NO: 17362 - DNA, 22 bp, synthetic construct
  source 1..22: mol_type = other DNA
ttggtaggtttaccttctgttg

SEQ ID NO: 17363 - DNA, 22 bp, synthetic construct
  source 1..22: mol_type = other DNA
ttggtaggtttaccttcggttg

SEQ ID NO: 17364 - DNA, 23 bp, synthetic construct
  source 1..23: mol_type = other DNA
cttggtaggtttaccttcggttg

SEQ ID NO: 17365 - DNA, 23 bp, synthetic construct
  source 1..23: mol_type = other DNA
cttggtaggtttaccttctgttg

SEQ ID NO: 17366 - DNA, 24 bp, synthetic construct
  source 1..24: mol_type = other DNA
acttggtaggtttaccttcggttg

SEQ ID NO: 17367 - DNA, 24 bp, synthetic construct
  source 1..24: mol_type = other DNA
acttggtaggtttaccttctgttg

SEQ ID NO: 17368 - DNA, 25 bp, synthetic construct
  source 1..25: mol_type = other DNA
gacttggtaggtttaccttcggttg

SEQ ID NO: 17369 - DNA, 25 bp, synthetic construct
  source 1..25: mol_type = other DNA
gacttggtaggtttaccttctgttg

SEQ ID NO: 17370 - DNA, 26 bp, synthetic construct
  source 1..26: mol_type = other DNA
tgacttggtaggtttaccttcggttg

SEQ ID NO: 17371 - DNA, 26 bp, synthetic construct
  source 1..26: mol_type = other DNA
tgacttggtaggtttaccttctgttg

SEQ ID NO: 17372 - DNA, 27 bp, synthetic construct
  source 1..27: mol_type = other DNA
ttgacttggtaggtttaccttctgttg

SEQ ID NO: 17373 - DNA, 27 bp, synthetic construct
  source 1..27: mol_type = other DNA
ttgacttggtaggtttaccttcggttg

SEQ ID NO: 17374 - DNA, 28 bp, synthetic construct
  source 1..28: mol_type = other DNA
gttgacttggtaggtttaccttctgttg

SEQ ID NO: 17375 - DNA, 28 bp, synthetic construct
  source 1..28: mol_type = other DNA
gttgacttggtaggtttaccttcggttg

SEQ ID NO: 17376 - DNA, 29 bp, synthetic construct
  source 1..29: mol_type = other DNA
ggttgacttggtaggtttaccttctgttg

SEQ ID NO: 17377 - DNA, 29 bp, synthetic construct
  source 1..29: mol_type = other DNA
ggttgacttggtaggtttaccttcggttg

SEQ ID NO: 17378 - DNA, 30 bp, synthetic construct
  source 1..30: mol_type = other DNA
tggttgacttggtaggtttaccttcggttg

SEQ ID NO: 17379 - DNA, 30 bp, synthetic construct
  source 1..30: mol_type = other DNA
tggttgacttggtaggtttaccttctgttg

SEQ ID NO: 17380 - DNA, 31 bp, synthetic construct
  source 1..31: mol_type = other DNA
ttggttgacttggtaggtttaccttctgttg

SEQ ID NO: 17381 - DNA, 31 bp, synthetic construct
  source 1..31: mol_type = other DNA
ttggttgacttggtaggtttaccttcggttg

SEQ ID NO: 17382 - DNA, 32 bp, synthetic construct
  source 1..32: mol_type = other DNA
tttggttgacttggtaggtttaccttcggttg

SEQ ID NO: 17383 - DNA, 32 bp, synthetic construct
  source 1..32: mol_type = other DNA
tttggttgacttggtaggtttaccttctgttg

SEQ ID NO: 17384 - DNA, 33 bp, synthetic construct
  source 1..33: mol_type = other DNA
gtttggttgacttggtaggtttaccttcggttg

SEQ ID NO: 17385 - DNA, 33 bp, synthetic construct
  source 1..33: mol_type = other DNA
gtttggttgacttggtaggtttaccttctgttg

SEQ ID NO: 17386 - DNA, 34 bp, synthetic construct
  source 1..34: mol_type = other DNA
ggtttggttgacttggtaggtttaccttcggttg

SEQ ID NO: 17387 - DNA, 34 bp, synthetic construct
  source 1..34: mol_type = other DNA
ggtttggttgacttggtaggtttaccttctgttg

SEQ ID NO: 17388 - DNA, 35 bp, synthetic construct
  source 1..35: mol_type = other DNA
tggtttggttgacttggtaggtttaccttcggttg

SEQ ID NO: 17389 - DNA, 35 bp, synthetic construct
  source 1..35: mol_type = other DNA
tggtttggttgacttggtaggtttaccttctgttg

SEQ ID NO: 17390 - DNA, 36 bp, synthetic construct
  source 1..36: mol_type = other DNA
atggtttggttgacttggtaggtttaccttctgttg

SEQ ID NO: 17391 - DNA, 36 bp, synthetic construct
  source 1..36: mol_type = other DNA
atggtttggttgacttggtaggtttaccttcggttg

SEQ ID NO: 17392 - DNA, 37 bp, synthetic construct
  source 1..37: mol_type = other DNA
tatggtttggttgacttggtaggtttaccttctgttg

SEQ ID NO: 17393 - DNA, 37 bp, synthetic construct
  source 1..37: mol_type = other DNA
tatggtttggttgacttggtaggtttaccttcggttg

SEQ ID NO: 17394 - DNA, 38 bp, synthetic construct
  source 1..38: mol_type = other DNA
gtatggtttggttgacttggtaggtttaccttctgttg

SEQ ID NO: 17395 - DNA, 38 bp, synthetic construct
  source 1..38: mol_type = other DNA
gtatggtttggttgacttggtaggtttaccttcggttg

SEQ ID NO: 17396 - DNA, 39 bp, synthetic construct
  source 1..39: mol_type = other DNA
tgtatggtttggttgacttggtaggtttaccttctgttg

SEQ ID NO: 17397 - DNA, 39 bp, synthetic construct
  source 1..39: mol_type = other DNA
tgtatggtttggttgacttggtaggtttaccttcggttg

SEQ ID NO: 17398 - DNA, 40 bp, synthetic construct
  source 1..40: mol_type = other DNA
ttgtatggtttggttgacttggtaggtttaccttcggttg

SEQ ID NO: 17399 - DNA, 40 bp, synthetic construct
  source 1..40: mol_type = other DNA
ttgtatggtttggttgacttggtaggtttaccttctgttg

SEQ ID NO: 17400 - DNA, 34 bp, synthetic construct
  source 1..34: mol_type = other DNA
ccaagtcaaccaaaccatacaagaatgggcaact

SEQ ID NO: 17401 - DNA, 34 bp, synthetic construct
  source 1..34: mol_type = other DNA
ccaagtcaaccaaaccatacaagaatggccaact

SEQ ID NO: 17402 - DNA, 35 bp, synthetic construct
  source 1..35: mol_type = other DNA
accaagtcaaccaaaccatacaagaatggccaact

SEQ ID NO: 17403 - DNA, 35 bp, synthetic construct
  source 1..35: mol_type = other DNA
accaagtcaaccaaaccatacaagaatgggcaact

SEQ ID NO: 17404 - DNA, 36 bp, synthetic construct
  source 1..36: mol_type = other DNA
taccaagtcaaccaaaccatacaagaatgggcaact

SEQ ID NO: 17405 - DNA, 36 bp, synthetic construct
  source 1..36: mol_type = other DNA
taccaagtcaaccaaaccatacaagaatggccaact

SEQ ID NO: 17406 - DNA, 37 bp, synthetic construct
  source 1..37: mol_type = other DNA
ctaccaagtcaaccaaaccatacaagaatgggcaact

SEQ ID NO: 17407 - DNA, 37 bp, synthetic construct
  source 1..37: mol_type = other DNA
ctaccaagtcaaccaaaccatacaagaatggccaact

SEQ ID NO: 17408 - DNA, 38 bp, synthetic construct
  source 1..38: mol_type = other DNA
cctaccaagtcaaccaaaccatacaagaatgggcaact

SEQ ID NO: 17409 - DNA, 38 bp, synthetic construct
  source 1..38: mol_type = other DNA
cctaccaagtcaaccaaaccatacaagaatggccaact

SEQ ID NO: 17410 - DNA, 39 bp, synthetic construct
  source 1..39: mol_type = other DNA
acctaccaagtcaaccaaaccatacaagaatgggcaact

SEQ ID NO: 17411 - DNA, 39 bp, synthetic construct
  source 1..39: mol_type = other DNA
acctaccaagtcaaccaaaccatacaagaatggccaact

SEQ ID NO: 17412 - DNA, 40 bp, synthetic construct
  source 1..40: mol_type = other DNA
aacctaccaagtcaaccaaaccatacaagaatggccaact

SEQ ID NO: 17413 - DNA, 40 bp, synthetic construct
  source 1..40: mol_type = other DNA
aacctaccaagtcaaccaaaccatacaagaatgggcaact

SEQ ID NO: 17414 - DNA, 33 bp, synthetic construct
  source 1..33: mol_type = other DNA
ccaagtcaaccaaaccatacaagaatggccaac

SEQ ID NO: 17415 - DNA, 34 bp, synthetic construct
  source 1..34: mol_type = other DNA
accaagtcaaccaaaccatacaagaatggccaac

SEQ ID NO: 17416 - DNA, 35 bp, synthetic construct
  source 1..35: mol_type = other DNA
taccaagtcaaccaaaccatacaagaatggccaac

SEQ ID NO: 17417 - DNA, 36 bp, synthetic construct
  source 1..36: mol_type = other DNA
ctaccaagtcaaccaaaccatacaagaatggccaac

SEQ ID NO: 17418 - DNA, 37 bp, synthetic construct
  source 1..37: mol_type = other DNA
cctaccaagtcaaccaaaccatacaagaatggccaac

SEQ ID NO: 17419 - DNA, 38 bp, synthetic construct
  source 1..38: mol_type = other DNA
acctaccaagtcaaccaaaccatacaagaatggccaac

SEQ ID NO: 17420 - DNA, 39 bp, synthetic construct
  source 1..39: mol_type = other DNA
aacctaccaagtcaaccaaaccatacaagaatggccaac

SEQ ID NO: 17421 - DNA, 40 bp, synthetic construct
  source 1..40: mol_type = other DNA
aaacctaccaagtcaaccaaaccatacaagaatggccaac

SEQ ID NO: 17422 - DNA, 20 bp, synthetic construct
  source 1..20: mol_type = other DNA
ccaagtcaaccaaaccatac

SEQ ID NO: 17423 - DNA, 21 bp, synthetic construct
  source 1..21: mol_type = other DNA
accaagtcaaccaaaccatac

SEQ ID NO: 17424 - DNA, 22 bp, synthetic construct
  source 1..22: mol_type = other DNA
taccaagtcaaccaaaccatac

SEQ ID NO: 17425 - DNA, 23 bp, synthetic construct
  source 1..23: mol_type = other DNA
ctaccaagtcaaccaaaccatac

SEQ ID NO: 17426 - DNA, 24 bp, synthetic construct
  source 1..24: mol_type = other DNA
cctaccaagtcaaccaaaccatac

SEQ ID NO: 17427 - DNA, 25 bp, synthetic construct
  source 1..25: mol_type = other DNA
acctaccaagtcaaccaaaccatac

SEQ ID NO: 17428 - DNA, 26 bp, synthetic construct
  source 1..26: mol_type = other DNA
aacctaccaagtcaaccaaaccatac

SEQ ID NO: 17429 - DNA, 27 bp, synthetic construct
  source 1..27: mol_type = other DNA
aaacctaccaagtcaaccaaaccatac

SEQ ID NO: 17430 - DNA, 28 bp, synthetic construct
  source 1..28: mol_type = other DNA
taaacctaccaagtcaaccaaaccatac

SEQ ID NO: 17431 - DNA, 29 bp, synthetic construct
  source 1..29: mol_type = other DNA
gtaaacctaccaagtcaaccaaaccatac

SEQ ID NO: 17432 - DNA, 30 bp, synthetic construct
  source 1..30: mol_type = other DNA
ggtaaacctaccaagtcaaccaaaccatac

SEQ ID NO: 17433 - DNA, 31 bp, synthetic construct
  source 1..31: mol_type = other DNA
aggtaaacctaccaagtcaaccaaaccatac

SEQ ID NO: 17434 - DNA, 32 bp, synthetic construct
  source 1..32: mol_type = other DNA
aaggtaaacctaccaagtcaaccaaaccatac

SEQ ID NO: 17435 - DNA, 33 bp, synthetic construct
  source 1..33: mol_type = other DNA
gaaggtaaacctaccaagtcaaccaaaccatac

SEQ ID NO: 17436 - DNA, 34 bp, synthetic construct
  source 1..34: mol_type = other DNA
agaaggtaaacctaccaagtcaaccaaaccatac

SEQ ID NO: 17437 - DNA, 35 bp, synthetic construct
  source 1..35: mol_type = other DNA
cagaaggtaaacctaccaagtcaaccaaaccatac

SEQ ID NO: 17438 - DNA, 36 bp, synthetic construct
  source 1..36: mol_type = other DNA
acagaaggtaaacctaccaagtcaaccaaaccatac

SEQ ID NO: 17439 - DNA, 37 bp, synthetic construct
  source 1..37: mol_type = other DNA
aacagaaggtaaacctaccaagtcaaccaaaccatac

SEQ ID NO: 17440 - DNA, 38 bp, synthetic construct
  source 1..38: mol_type = other DNA
caacagaaggtaaacctaccaagtcaaccaaaccatac

SEQ ID NO: 17441 - DNA, 39 bp, synthetic construct
  source 1..39: mol_type = other DNA
ccaacagaaggtaaacctaccaagtcaaccaaaccatac

SEQ ID NO: 17442 - DNA, 40 bp, synthetic construct
  source 1..40: mol_type = other DNA
gccaacagaaggtaaacctaccaagtcaaccaaaccatac

SEQ ID NO: 17443 - DNA, 19 bp, synthetic construct
  source 1..19: mol_type = other DNA
ccaagtcaaccaaaccata

SEQ ID NO: 17444 - DNA, 20 bp, synthetic construct
  source 1..20: mol_type = other DNA
accaagtcaaccaaaccata

SEQ ID NO: 17445 - DNA, 21 bp, synthetic construct
  source 1..21: mol_type = other DNA
taccaagtcaaccaaaccata

SEQ ID NO: 17446 - DNA, 22 bp, synthetic construct
  source 1..22: mol_type = other DNA
ctaccaagtcaaccaaaccata

SEQ ID NO: 17447 - DNA, 23 bp, synthetic construct
  source 1..23: mol_type = other DNA
cctaccaagtcaaccaaaccata

SEQ ID NO: 17448 - DNA, 24 bp, synthetic construct
  source 1..24: mol_type = other DNA
acctaccaagtcaaccaaaccata

SEQ ID NO: 17449 - DNA, 25 bp, synthetic construct
  source 1..25: mol_type = other DNA
aacctaccaagtcaaccaaaccata

SEQ ID NO: 17450 - DNA, 26 bp, synthetic construct
  source 1..26: mol_type = other DNA
aaacctaccaagtcaaccaaaccata

SEQ ID NO: 17451 - DNA, 27 bp, synthetic construct
  source 1..27: mol_type = other DNA
taaacctaccaagtcaaccaaaccata

SEQ ID NO: 17452 - DNA, 28 bp, synthetic construct
  source 1..28: mol_type = other DNA
gtaaacctaccaagtcaaccaaaccata

SEQ ID NO: 17453 - DNA, 29 bp, synthetic construct
  source 1..29: mol_type = other DNA
ggtaaacctaccaagtcaaccaaaccata

SEQ ID NO: 17454 - DNA, 30 bp, synthetic construct
  source 1..30: mol_type = other DNA
aggtaaacctaccaagtcaaccaaaccata

SEQ ID NO: 17455 - DNA, 31 bp, synthetic construct
  source 1..31: mol_type = other DNA
aaggtaaacctaccaagtcaaccaaaccata

SEQ ID NO: 17456 - DNA, 32 bp, synthetic construct
  source 1..32: mol_type = other DNA
gaaggtaaacctaccaagtcaaccaaaccata

SEQ ID NO: 17457 - DNA, 33 bp, synthetic construct
  source 1..33: mol_type = other DNA
agaaggtaaacctaccaagtcaaccaaaccata

SEQ ID NO: 17458 - DNA, 34 bp, synthetic construct
  source 1..34: mol_type = other DNA
cagaaggtaaacctaccaagtcaaccaaaccata

SEQ ID NO: 17459 - DNA, 35 bp, synthetic construct
  source 1..35: mol_type = other DNA
acagaaggtaaacctaccaagtcaaccaaaccata

SEQ ID NO: 17460 - DNA, 36 bp, synthetic construct
  source 1..36: mol_type = other DNA
aacagaaggtaaacctaccaagtcaaccaaaccata

SEQ ID NO: 17461 - DNA, 37 bp, synthetic construct
  source 1..37: mol_type = other DNA
caacagaaggtaaacctaccaagtcaaccaaaccata

SEQ ID NO: 17462 - DNA, 38 bp, synthetic construct
  source 1..38: mol_type = other DNA
ccaacagaaggtaaacctaccaagtcaaccaaaccata

SEQ ID NO: 17463 - DNA, 39 bp, synthetic construct
  source 1..39: mol_type = other DNA
gccaacagaaggtaaacctaccaagtcaaccaaaccata

SEQ ID NO: 17464 - DNA, 40 bp, synthetic construct
  source 1..40: mol_type = other DNA
tgccaacagaaggtaaacctaccaagtcaaccaaaccata

SEQ ID NO: 17465 - DNA, 27 bp, synthetic construct
  source 1..27: mol_type = other DNA
tggtaggtttaccttctgttggcatgt

SEQ ID NO: 17466 - DNA, 28 bp, synthetic construct
  source 1..28: mol_type = other DNA
ttggtaggtttaccttctgttggcatgt

SEQ ID NO: 17467 - DNA, 29 bp, synthetic construct
  source 1..29: mol_type = other DNA
cttggtaggtttaccttctgttggcatgt

SEQ ID NO: 17468 - DNA, 30 bp, synthetic construct
  source 1..30: mol_type = other DNA
acttggtaggtttaccttctgttggcatgt

SEQ ID NO: 17469 - DNA, 31 bp, synthetic construct
  source 1..31: mol_type = other DNA
gacttggtaggtttaccttctgttggcatgt

SEQ ID NO: 17470 - DNA, 32 bp, synthetic construct
  source 1..32: mol_type = other DNA
tgacttggtaggtttaccttctgttggcatgt

SEQ ID NO: 17471 - DNA, 33 bp, synthetic construct
  source 1..33: mol_type = other DNA
ttgacttggtaggtttaccttctgttggcatgt

SEQ ID NO: 17472 - DNA, 34 bp, synthetic construct
  source 1..34: mol_type = other DNA
gttgacttggtaggtttaccttctgttggcatgt

SEQ ID NO: 17473 - DNA, 35 bp, synthetic construct
  source 1..35: mol_type = other DNA
ggttgacttggtaggtttaccttctgttggcatgt

SEQ ID NO: 17474 - DNA, 36 bp, synthetic construct
  source 1..36: mol_type = other DNA
tggttgacttggtaggtttaccttctgttggcatgt

SEQ ID NO: 17475 - DNA, 37 bp, synthetic construct
  source 1..37: mol_type = other DNA
ttggttgacttggtaggtttaccttctgttggcatgt

SEQ ID NO: 17476 - DNA, 38 bp, synthetic construct
  source 1..38: mol_type = other DNA
tttggttgacttggtaggtttaccttctgttggcatgt

SEQ ID NO: 17477 - DNA, 39 bp, synthetic construct
  source 1..39: mol_type = other DNA
gtttggttgacttggtaggtttaccttctgttggcatgt

SEQ ID NO: 17478 - DNA, 40 bp, synthetic construct
  source 1..40: mol_type = other DNA
ggtttggttgacttggtaggtttaccttctgttggcatgt

SEQ ID NO: 17479 - DNA, 20 bp, synthetic construct
  source 1..20: mol_type = other DNA
tggtaggtttaccttctgtt

SEQ ID NO: 17480 - DNA, 21 bp, synthetic construct
  source 1..21: mol_type = other DNA
ttggtaggtttaccttctgtt

SEQ ID NO: 17481 - DNA, 22 bp, synthetic construct
  source 1..22: mol_type = other DNA
cttggtaggtttaccttctgtt

SEQ ID NO: 17482 - DNA, 23 bp, synthetic construct
  source 1..23: mol_type = other DNA
acttggtaggtttaccttctgtt

SEQ ID NO: 17483 - DNA, 24 bp, synthetic construct
  source 1..24: mol_type = other DNA
gacttggtaggtttaccttctgtt

SEQ ID NO: 17484 - DNA, 25 bp, synthetic construct
  source 1..25: mol_type = other DNA
tgacttggtaggtttaccttctgtt

SEQ ID NO: 17485 - DNA, 26 bp, synthetic construct
  source 1..26: mol_type = other DNA
ttgacttggtaggtttaccttctgtt

SEQ ID NO: 17486 - DNA, 27 bp, synthetic construct
  source 1..27: mol_type = other DNA
gttgacttggtaggtttaccttctgtt

SEQ ID NO: 17487 - DNA, 28 bp, synthetic construct
  source 1..28: mol_type = other DNA
ggttgacttggtaggtttaccttctgtt

SEQ ID NO: 17488 - DNA, 29 bp, synthetic construct
  source 1..29: mol_type = other DNA
tggttgacttggtaggtttaccttctgtt

SEQ ID NO: 17489 - DNA, 30 bp, synthetic construct
  source 1..30: mol_type = other DNA
ttggttgacttggtaggtttaccttctgtt

SEQ ID NO: 17490 - DNA, 31 bp, synthetic construct
  source 1..31: mol_type = other DNA
tttggttgacttggtaggtttaccttctgtt

SEQ ID NO: 17491 - DNA, 32 bp, synthetic construct
  source 1..32: mol_type = other DNA
gtttggttgacttggtaggtttaccttctgtt

SEQ ID NO: 17492 - DNA, 33 bp, synthetic construct
  source 1..33: mol_type = other DNA
ggtttggttgacttggtaggtttaccttctgtt

SEQ ID NO: 17493 - DNA, 34 bp, synthetic construct
  source 1..34: mol_type = other DNA
tggtttggttgacttggtaggtttaccttctgtt

SEQ ID NO: 17494 - DNA, 35 bp, synthetic construct
  source 1..35: mol_type = other DNA
atggtttggttgacttggtaggtttaccttctgtt

SEQ ID NO: 17495 - DNA, 36 bp, synthetic construct
  source 1..36: mol_type = other DNA
tatggtttggttgacttggtaggtttaccttctgtt

SEQ ID NO: 17496 - DNA, 37 bp, synthetic construct
  source 1..37: mol_type = other DNA
gtatggtttggttgacttggtaggtttaccttctgtt

SEQ ID NO: 17497 - DNA, 38 bp, synthetic construct
  source 1..38: mol_type = other DNA
tgtatggtttggttgacttggtaggtttaccttctgtt

SEQ ID NO: 17498 - DNA, 39 bp, synthetic construct
  source 1..39: mol_type = other DNA
ttgtatggtttggttgacttggtaggtttaccttctgtt

SEQ ID NO: 17499 - DNA, 40 bp, synthetic construct
  source 1..40: mol_type = other DNA
cttgtatggtttggttgacttggtaggtttaccttctgtt

SEQ ID NO: 17500 - DNA, 35 bp, synthetic construct
  source 1..35: mol_type = other DNA
ccaagtcaaccaaaccatacaagaatggccaactc

SEQ ID NO: 17501 - DNA, 36 bp, synthetic construct
  source 1..36: mol_type = other DNA
accaagtcaaccaaaccatacaagaatggccaactc

SEQ ID NO: 17502 - DNA, 37 bp, synthetic construct
  source 1..37: mol_type = other DNA
taccaagtcaaccaaaccatacaagaatggccaactc

SEQ ID NO: 17503 - DNA, 38 bp, synthetic construct
  source 1..38: mol_type = other DNA
ctaccaagtcaaccaaaccatacaagaatggccaactc

SEQ ID NO: 17504 - DNA, 39 bp, synthetic construct
  source 1..39: mol_type = other DNA
cctaccaagtcaaccaaaccatacaagaatggccaactc

SEQ ID NO: 17505 - DNA, 40 bp, synthetic construct
  source 1..40: mol_type = other DNA
acctaccaagtcaaccaaaccatacaagaatggccaactc

SEQ ID NO: 17506 - DNA, 40 bp, synthetic construct
  source 1..40: mol_type = other DNA
tggtaggtttaccttctgttggcatgtcaatgaatttaaa

SEQ ID NO: 17507 - DNA, 40 bp, synthetic construct
  source 1..40: mol_type = other DNA
tggtaggtttaccttctgttggcatgtcaatgaacttaaa

SEQ ID NO: 17508 - DNA, 39 bp, synthetic construct
  source 1..39: mol_type = other DNA
tggtaggtttaccttctgttggcatgtcaatgaacttaa

SEQ ID NO: 17509 - DNA, 40 bp, synthetic construct
  source 1..40: mol_type = other DNA
ttggtaggtttaccttctgttggcatgtcaatgaacttaa

SEQ ID NO: 17510 - DNA, 10 bp, synthetic construct
  source 1..10: mol_type = other DNA
tgacttggta

SEQ ID NO: 17511 - DNA, 11 bp, synthetic construct
  source 1..11: mol_type = other DNA
ttgacttggta

SEQ ID NO: 17512 - DNA, 12 bp, synthetic construct
  source 1..12: mol_type = other DNA
gttgacttggta

SEQ ID NO: 17513 - DNA, 13 bp, synthetic construct
  source 1..13: mol_type = other DNA
ggttgacttggta

SEQ ID NO: 17514 - DNA, 14 bp, synthetic construct
  source 1..14: mol_type = other DNA
tggttgacttggta

SEQ ID NO: 17515 - DNA, 15 bp, synthetic construct
  source 1..15: mol_type = other DNA
ttggttgacttggta

SEQ ID NO: 17516 - DNA, 16 bp, synthetic construct
  source 1..16: mol_type = other DNA
tttggttgacttggta

SEQ ID NO: 17517 - DNA, 17 bp, synthetic construct
  source 1..17: mol_type = other DNA
gtttggttgacttggta

SEQ ID NO: 17518 - DNA, 18 bp, synthetic construct
  source 1..18: mol_type = other DNA
ggtttggttgacttggta

SEQ ID NO: 17519 - DNA, 19 bp, synthetic construct
  source 1..19: mol_type = other DNA
tggtttggttgacttggta

SEQ ID NO: 17520 - DNA, 20 bp, synthetic construct
  source 1..20: mol_type = other DNA
atggtttggttgacttggta

SEQ ID NO: 17521 - DNA, 21 bp, synthetic construct
  source 1..21: mol_type = other DNA
tatggtttggttgacttggta

SEQ ID NO: 17522 - DNA, 22 bp, synthetic construct
  source 1..22: mol_type = other DNA
gtatggtttggttgacttggta

SEQ ID NO: 17523 - DNA, 23 bp, synthetic construct
  source 1..23: mol_type = other DNA
tgtatggtttggttgacttggta

SEQ ID NO: 17524 - DNA, 24 bp, synthetic construct
  source 1..24: mol_type = other DNA
ttgtatggtttggttgacttggta

SEQ ID NO: 17525 - DNA, 25 bp, synthetic construct
  source 1..25: mol_type = other DNA
cttgtatggtttggttgacttggta

SEQ ID NO: 17526 - DNA, 26 bp, synthetic construct
  source 1..26: mol_type = other DNA
tcttgtatggtttggttgacttggta

SEQ ID NO: 17527 - DNA, 27 bp, synthetic construct
  source 1..27: mol_type = other DNA
ttcttgtatggtttggttgacttggta

SEQ ID NO: 17528 - DNA, 28 bp, synthetic construct
  source 1..28: mol_type = other DNA
attcttgtatggtttggttgacttggta

SEQ ID NO: 17529 - DNA, 29 bp, synthetic construct
  source 1..29: mol_type = other DNA
cattcttgtatggtttggttgacttggta

SEQ ID NO: 17530 - DNA, 30 bp, synthetic construct
  source 1..30: mol_type = other DNA
ccattcttgtatggtttggttgacttggta

SEQ ID NO: 17531 - DNA, 31 bp, synthetic construct
  source 1..31: mol_type = other DNA
gccattcttgtatggtttggttgacttggta

SEQ ID NO: 17532 - DNA, 32 bp, synthetic construct
  source 1..32: mol_type = other DNA
ggccattcttgtatggtttggttgacttggta

SEQ ID NO: 17533 - DNA, 33 bp, synthetic construct
  source 1..33: mol_type = other DNA
tggccattcttgtatggtttggttgacttggta

SEQ ID NO: 17534 - DNA, 34 bp, synthetic construct
  source 1..34: mol_type = other DNA
ttggccattcttgtatggtttggttgacttggta

SEQ ID NO: 17535 - DNA, 35 bp, synthetic construct
  source 1..35: mol_type = other DNA
gttggccattcttgtatggtttggttgacttggta

SEQ ID NO: 17536 - DNA, 36 bp, synthetic construct
  source 1..36: mol_type = other DNA
agttggccattcttgtatggtttggttgacttggta

SEQ ID NO: 17537 - DNA, 37 bp, synthetic construct
  source 1..37: mol_type = other DNA
gagttggccattcttgtatggtttggttgacttggta

SEQ ID NO: 17538 - DNA, 38 bp, synthetic construct
  source 1..38: mol_type = other DNA
agagttggccattcttgtatggtttggttgacttggta

SEQ ID NO: 17539 - DNA, 39 bp, synthetic construct
  source 1..39: mol_type = other DNA
gagagttggccattcttgtatggtttggttgacttggta

SEQ ID NO: 17540 - DNA, 40 bp, synthetic construct
  source 1..40: mol_type = other DNA
cgagagttggccattcttgtatggtttggttgacttggta

SEQ ID NO: 17541 - DNA, 10 bp, synthetic construct
  source 1..10: mol_type = other DNA
ttgacttggt

SEQ ID NO: 17542 - DNA, 11 bp, synthetic construct
  source 1..11: mol_type = other DNA
gttgacttggt

SEQ ID NO: 17543 - DNA, 12 bp, synthetic construct
  source 1..12: mol_type = other DNA
ggttgacttggt

SEQ ID NO: 17544 - DNA, 13 bp, synthetic construct
  source 1..13: mol_type = other DNA
tggttgacttggt

SEQ ID NO: 17545 - DNA, 14 bp, synthetic construct
  source 1..14: mol_type = other DNA
ttggttgacttggt

SEQ ID NO: 17546 - DNA, 15 bp, synthetic construct
  source 1..15: mol_type = other DNA
tttggttgacttggt

SEQ ID NO: 17547 - DNA, 16 bp, synthetic construct
  source 1..16: mol_type = other DNA
gtttggttgacttggt

SEQ ID NO: 17548 - DNA, 17 bp, synthetic construct
  source 1..17: mol_type = other DNA
ggtttggttgacttggt

SEQ ID NO: 17549 - DNA, 18 bp, synthetic construct
  source 1..18: mol_type = other DNA
tggtttggttgacttggt

SEQ ID NO: 17550 - DNA, 19 bp, synthetic construct
  source 1..19: mol_type = other DNA
atggtttggttgacttggt

SEQ ID NO: 17551 - DNA, 20 bp, synthetic construct
  source 1..20: mol_type = other DNA
tatggtttggttgacttggt

SEQ ID NO: 17552 - DNA, 21 bp, synthetic construct
  source 1..21: mol_type = other DNA
gtatggtttggttgacttggt

SEQ ID NO: 17553 - DNA, 22 bp, synthetic construct
  source 1..22: mol_type = other DNA
tgtatggtttggttgacttggt

SEQ ID NO: 17554 - DNA, 23 bp, synthetic construct
  source 1..23: mol_type = other DNA
ttgtatggtttggttgacttggt

SEQ ID NO: 17555 - DNA, 24 bp, synthetic construct
  source 1..24: mol_type = other DNA
cttgtatggtttggttgacttggt

SEQ ID NO: 17556 - DNA, 25 bp, synthetic construct
  source 1..25: mol_type = other DNA
tcttgtatggtttggttgacttggt

SEQ ID NO: 17557 - DNA, 26 bp, synthetic construct
  source 1..26: mol_type = other DNA
ttcttgtatggtttggttgacttggt

SEQ ID NO: 17558 - DNA, 27 bp, synthetic construct
  source 1..27: mol_type = other DNA
attcttgtatggtttggttgacttggt

SEQ ID NO: 17559 - DNA, 28 bp, synthetic construct
  source 1..28: mol_type = other DNA
cattcttgtatggtttggttgacttggt

SEQ ID NO: 17560 - DNA, 29 bp, synthetic construct
  source 1..29: mol_type = other DNA
ccattcttgtatggtttggttgacttggt

SEQ ID NO: 17561 - DNA, 30 bp, synthetic construct
  source 1..30: mol_type = other DNA
gccattcttgtatggtttggttgacttggt

SEQ ID NO: 17562 - DNA, 31 bp, synthetic construct
  source 1..31: mol_type = other DNA
ggccattcttgtatggtttggttgacttggt

SEQ ID NO: 17563 - DNA, 32 bp, synthetic construct
  source 1..32: mol_type = other DNA
tggccattcttgtatggtttggttgacttggt

SEQ ID NO: 17564 - DNA, 33 bp, synthetic construct
  source 1..33: mol_type = other DNA
ttggccattcttgtatggtttggttgacttggt

SEQ ID NO: 17565 - DNA, 34 bp, synthetic construct
  source 1..34: mol_type = other DNA
gttggccattcttgtatggtttggttgacttggt

SEQ ID NO: 17566 - DNA, 35 bp, synthetic construct
  source 1..35: mol_type = other DNA
agttggccattcttgtatggtttggttgacttggt

SEQ ID NO: 17567 - DNA, 36 bp, synthetic construct
  source 1..36: mol_type = other DNA
gagttggccattcttgtatggtttggttgacttggt

SEQ ID NO: 17568 - DNA, 37 bp, synthetic construct
  source 1..37: mol_type = other DNA
agagttggccattcttgtatggtttggttgacttggt

SEQ ID NO: 17569 - DNA, 38 bp, synthetic construct
  source 1..38: mol_type = other DNA
gagagttggccattcttgtatggtttggttgacttggt

SEQ ID NO: 17570 - DNA, 39 bp, synthetic construct
  source 1..39: mol_type = other DNA
cgagagttggccattcttgtatggtttggttgacttggt

SEQ ID NO: 17571 - DNA, 40 bp, synthetic construct
  source 1..40: mol_type = other DNA
tcgagagttggccattcttgtatggtttggttgacttggt

SEQ ID NO: 17572 - DNA, 38 bp, synthetic construct
  source 1..38: mol_type = other DNA
ccaagtcaaccaaaccatacaagaatggccaattgtcg

SEQ ID NO: 17573 - DNA, 38 bp, synthetic construct
  source 1..38: mol_type = other DNA
ccaagtcaaccaaaccatacaagaatggccaactctcg

SEQ ID NO: 17574 - DNA, 39 bp, synthetic construct
  source 1..39: mol_type = other DNA
accaagtcaaccaaaccatacaagaatggccaattgtcg

SEQ ID NO: 17575 - DNA, 39 bp, synthetic construct
  source 1..39: mol_type = other DNA
accaagtcaaccaaaccatacaagaatggccaactctcg

SEQ ID NO: 17576 - DNA, 40 bp, synthetic construct
  source 1..40: mol_type = other DNA
taccaagtcaaccaaaccatacaagaatggccaactctcg

SEQ ID NO: 17577 - DNA, 40 bp, synthetic construct
  source 1..40: mol_type = other DNA
taccaagtcaaccaaaccatacaagaatggccaattgtcg

SEQ ID NO: 17578 - DNA, 37 bp, synthetic construct
  source 1..37: mol_type = other DNA
ccaagtcaaccaaaccatacaagaatggccaactctc

SEQ ID NO: 17579 - DNA, 38 bp, synthetic construct
  source 1..38: mol_type = other DNA
accaagtcaaccaaaccatacaagaatggccaactctc

SEQ ID NO: 17580 - DNA, 39 bp, synthetic construct
  source 1..39: mol_type = other DNA
taccaagtcaaccaaaccatacaagaatggccaactctc

SEQ ID NO: 17581 - DNA, 40 bp, synthetic construct
  source 1..40: mol_type = other DNA
ctaccaagtcaaccaaaccatacaagaatggccaactctc

SEQ ID NO: 17582 - DNA, 11 bp, synthetic construct
  source 1..11: mol_type = other DNA
ccaagtcaacc

SEQ ID NO: 17583 - DNA, 12 bp, synthetic construct
  source 1..12: mol_type = other DNA
accaagtcaacc

SEQ ID NO: 17584 - DNA, 13 bp, synthetic construct
  source 1..13: mol_type = other DNA
taccaagtcaacc

SEQ ID NO: 17585 - DNA, 14 bp, synthetic construct
  source 1..14: mol_type = other DNA
ctaccaagtcaacc

SEQ ID NO: 17586 - DNA, 15 bp, synthetic construct
  source 1..15: mol_type = other DNA
cctaccaagtcaacc

SEQ ID NO: 17587 - DNA, 16 bp, synthetic construct
  source 1..16: mol_type = other DNA
acctaccaagtcaacc

SEQ ID NO: 17588 - DNA, 17 bp, synthetic construct
  source 1..17: mol_type = other DNA
aacctaccaagtcaacc

SEQ ID NO: 17589 - DNA, 18 bp, synthetic construct
  source 1..18: mol_type = other DNA
aaacctaccaagtcaacc

SEQ ID NO: 17590 - DNA, 19 bp, synthetic construct
  source 1..19: mol_type = other DNA
taaacctaccaagtcaacc

SEQ ID NO: 17591 - DNA, 20 bp, synthetic construct
  source 1..20: mol_type = other DNA
gtaaacctaccaagtcaacc

SEQ ID NO: 17592 - DNA, 21 bp, synthetic construct
  source 1..21: mol_type = other DNA
ggtaaacctaccaagtcaacc

SEQ ID NO: 17593 - DNA, 22 bp, synthetic construct
  source 1..22: mol_type = other DNA
aggtaaacctaccaagtcaacc

SEQ ID NO: 17594 - DNA, 23 bp, synthetic construct
  source 1..23: mol_type = other DNA
aaggtaaacctaccaagtcaacc

SEQ ID NO: 17595 - DNA, 24 bp, synthetic construct
  source 1..24: mol_type = other DNA
gaaggtaaacctaccaagtcaacc

SEQ ID NO: 17596 - DNA, 25 bp, synthetic construct
  source 1..25: mol_type = other DNA
agaaggtaaacctaccaagtcaacc

SEQ ID NO: 17597 - DNA, 26 bp, synthetic construct
  source 1..26: mol_type = other DNA
cagaaggtaaacctaccaagtcaacc

SEQ ID NO: 17598 - DNA, 27 bp, synthetic construct
  source 1..27: mol_type = other DNA
acagaaggtaaacctaccaagtcaacc

SEQ ID NO: 17599 - DNA, 28 bp, synthetic construct
  source 1..28: mol_type = other DNA
aacagaaggtaaacctaccaagtcaacc

SEQ ID NO: 17600 - DNA, 29 bp, synthetic construct
  source 1..29: mol_type = other DNA
caacagaaggtaaacctaccaagtcaacc

SEQ ID NO: 17601 - DNA, 30 bp, synthetic construct
  source 1..30: mol_type = other DNA
ccaacagaaggtaaacctaccaagtcaacc

SEQ ID NO: 17602 - DNA, 31 bp, synthetic construct
  source 1..31: mol_type = other DNA
gccaacagaaggtaaacctaccaagtcaacc

SEQ ID NO: 17603 - DNA, 32 bp, synthetic construct
  source 1..32: mol_type = other DNA
tgccaacagaaggtaaacctaccaagtcaacc

SEQ ID NO: 17604 - DNA, 33 bp, synthetic construct
  source 1..33: mol_type = other DNA
atgccaacagaaggtaaacctaccaagtcaacc

SEQ ID NO: 17605 - DNA, 34 bp, synthetic construct
  source 1..34: mol_type = other DNA
catgccaacagaaggtaaacctaccaagtcaacc

SEQ ID NO: 17606 - DNA, 35 bp, synthetic construct
  source 1..35: mol_type = other DNA
acatgccaacagaaggtaaacctaccaagtcaacc

SEQ ID NO: 17607 - DNA, 36 bp, synthetic construct
  source 1..36: mol_type = other DNA
gacatgccaacagaaggtaaacctaccaagtcaacc

SEQ ID NO: 17608 - DNA, 37 bp, synthetic construct
  source 1..37: mol_type = other DNA
tgacatgccaacagaaggtaaacctaccaagtcaacc

SEQ ID NO: 17609 - DNA, 38 bp, synthetic construct
  source 1..38: mol_type = other DNA
ttgacatgccaacagaaggtaaacctaccaagtcaacc

SEQ ID NO: 17610 - DNA, 39 bp, synthetic construct
  source 1..39: mol_type = other DNA
attgacatgccaacagaaggtaaacctaccaagtcaacc

SEQ ID NO: 17611 - DNA, 40 bp, synthetic construct
  source 1..40: mol_type = other DNA
cattgacatgccaacagaaggtaaacctaccaagtcaacc

SEQ ID NO: 17612 - DNA, 21 bp, synthetic construct
  source 1..21: mol_type = other DNA
ccaagtcaaccaaaccataca

SEQ ID NO: 17613 - DNA, 22 bp, synthetic construct
  source 1..22: mol_type = other DNA
accaagtcaaccaaaccataca

SEQ ID NO: 17614 - DNA, 23 bp, synthetic construct
  source 1..23: mol_type = other DNA
taccaagtcaaccaaaccataca

SEQ ID NO: 17615 - DNA, 24 bp, synthetic construct
  source 1..24: mol_type = other DNA
ctaccaagtcaaccaaaccataca

SEQ ID NO: 17616 - DNA, 25 bp, synthetic construct
  source 1..25: mol_type = other DNA
cctaccaagtcaaccaaaccataca

SEQ ID NO: 17617 - DNA, 26 bp, synthetic construct
  source 1..26: mol_type = other DNA
acctaccaagtcaaccaaaccataca

SEQ ID NO: 17618 - DNA, 27 bp, synthetic construct
  source 1..27: mol_type = other DNA
aacctaccaagtcaaccaaaccataca

SEQ ID NO: 17619 - DNA, 28 bp, synthetic construct
  source 1..28: mol_type = other DNA
aaacctaccaagtcaaccaaaccataca

SEQ ID NO: 17620 - DNA, 29 bp, synthetic construct
  source 1..29: mol_type = other DNA
taaacctaccaagtcaaccaaaccataca

SEQ ID NO: 17621 - DNA, 30 bp, synthetic construct
  source 1..30: mol_type = other DNA
gtaaacctaccaagtcaaccaaaccataca

SEQ ID NO: 17622 - DNA, 31 bp, synthetic construct
  source 1..31: mol_type = other DNA
ggtaaacctaccaagtcaaccaaaccataca

SEQ ID NO: 17623 - DNA, 32 bp, synthetic construct
  source 1..32: mol_type = other DNA
aggtaaacctaccaagtcaaccaaaccataca

SEQ ID NO: 17624 - DNA, 33 bp, synthetic construct
  source 1..33: mol_type = other DNA
aaggtaaacctaccaagtcaaccaaaccataca

SEQ ID NO: 17625 - DNA, 34 bp, synthetic construct
  source 1..34: mol_type = other DNA
gaaggtaaacctaccaagtcaaccaaaccataca

SEQ ID NO: 17626 - DNA, 35 bp, synthetic construct
  source 1..35: mol_type = other DNA
agaaggtaaacctaccaagtcaaccaaaccataca

SEQ ID NO: 17627 - DNA, 36 bp, synthetic construct
  source 1..36: mol_type = other DNA
cagaaggtaaacctaccaagtcaaccaaaccataca

SEQ ID NO: 17628 - DNA, 37 bp, synthetic construct
  source 1..37: mol_type = other DNA
acagaaggtaaacctaccaagtcaaccaaaccataca

SEQ ID NO: 17629 - DNA, 38 bp, synthetic construct
  source 1..38: mol_type = other DNA
aacagaaggtaaacctaccaagtcaaccaaaccataca

SEQ ID NO: 17630 - DNA, 39 bp, synthetic construct
  source 1..39: mol_type = other DNA
caacagaaggtaaacctaccaagtcaaccaaaccataca

SEQ ID NO: 17631 - DNA, 40 bp, synthetic construct
  source 1..40: mol_type = other DNA
ccaacagaaggtaaacctaccaagtcaaccaaaccataca

SEQ ID NO: 17632 - DNA, 40 bp, synthetic construct
  source 1..40: mol_type = other DNA
ccaagtcaaccaaaccatacaagaatggccaactctcgaa

SEQ ID NO: 17633 - DNA, 40 bp, synthetic construct
  source 1..40: mol_type = other DNA
ccaagtcaaccaaaccatacaagaatggccaactgtcgaa

SEQ ID NO: 17634 - DNA, 10 bp, synthetic construct
  source 1..10: mol_type = other DNA
cctaccaagt

SEQ ID NO: 17635 - DNA, 11 bp, synthetic construct
  source 1..11: mol_type = other DNA
acctaccaagt

SEQ ID NO: 17636 - DNA, 12 bp, synthetic construct
  source 1..12: mol_type = other DNA
aacctaccaagt

SEQ ID NO: 17637 - DNA, 13 bp, synthetic construct
  source 1..13: mol_type = other DNA
aaacctaccaagt

SEQ ID NO: 17638 - DNA, 14 bp, synthetic construct
  source 1..14: mol_type = other DNA
taaacctaccaagt

SEQ ID NO: 17639 - DNA, 15 bp, synthetic construct
  source 1..15: mol_type = other DNA
gtaaacctaccaagt

SEQ ID NO: 17640 - DNA, 16 bp, synthetic construct
  source 1..16: mol_type = other DNA
ggtaaacctaccaagt

SEQ ID NO: 17641 - DNA, 17 bp, synthetic construct
  source 1..17: mol_type = other DNA
aggtaaacctaccaagt

SEQ ID NO: 17642 - DNA, 18 bp, synthetic construct
  source 1..18: mol_type = other DNA
aaggtaaacctaccaagt

SEQ ID NO: 17643 - DNA, 19 bp, synthetic construct
  source 1..19: mol_type = other DNA
gaaggtaaacctaccaagt

SEQ ID NO: 17644 - DNA, 20 bp, synthetic construct
  source 1..20: mol_type = other DNA
agaaggtaaacctaccaagt

SEQ ID NO: 17645 - DNA, 21 bp, synthetic construct
  source 1..21: mol_type = other DNA
cagaaggtaaacctaccaagt

SEQ ID NO: 17646 - DNA, 22 bp, synthetic construct
  source 1..22: mol_type = other DNA
acagaaggtaaacctaccaagt

SEQ ID NO: 17647 - DNA, 23 bp, synthetic construct
  source 1..23: mol_type = other DNA
aacagaaggtaaacctaccaagt

SEQ ID NO: 17648 - DNA, 24 bp, synthetic construct
  source 1..24: mol_type = other DNA
caacagaaggtaaacctaccaagt

SEQ ID NO: 17649 - DNA, 25 bp, synthetic construct
  source 1..25: mol_type = other DNA
ccaacagaaggtaaacctaccaagt

SEQ ID NO: 17650 - DNA, 26 bp, synthetic construct
  source 1..26: mol_type = other DNA
gccaacagaaggtaaacctaccaagt

SEQ ID NO: 17651 - DNA, 27 bp, synthetic construct
  source 1..27: mol_type = other DNA
tgccaacagaaggtaaacctaccaagt

SEQ ID NO: 17652 - DNA, 28 bp, synthetic construct
  source 1..28: mol_type = other DNA
atgccaacagaaggtaaacctaccaagt

SEQ ID NO: 17653 - DNA, 29 bp, synthetic construct
  source 1..29: mol_type = other DNA
catgccaacagaaggtaaacctaccaagt

SEQ ID NO: 17654 - DNA, 30 bp, synthetic construct
  source 1..30: mol_type = other DNA
acatgccaacagaaggtaaacctaccaagt

SEQ ID NO: 17655 - DNA, 31 bp, synthetic construct
  source 1..31: mol_type = other DNA
gacatgccaacagaaggtaaacctaccaagt

SEQ ID NO: 17656 - DNA, 32 bp, synthetic construct
  source 1..32: mol_type = other DNA
tgacatgccaacagaaggtaaacctaccaagt

SEQ ID NO: 17657 - DNA, 33 bp, synthetic construct
  source 1..33: mol_type = other DNA
ttgacatgccaacagaaggtaaacctaccaagt

SEQ ID NO: 17658 - DNA, 34 bp, synthetic construct
  source 1..34: mol_type = other DNA
attgacatgccaacagaaggtaaacctaccaagt

SEQ ID NO: 17659 - DNA, 35 bp, synthetic construct
  source 1..35: mol_type = other DNA
cattgacatgccaacagaaggtaaacctaccaagt

SEQ ID NO: 17660 - DNA, 36 bp, synthetic construct
  source 1..36: mol_type = other DNA
tcattgacatgccaacagaaggtaaacctaccaagt

SEQ ID NO: 17661 - DNA, 37 bp, synthetic construct
  source 1..37: mol_type = other DNA
ttcattgacatgccaacagaaggtaaacctaccaagt

SEQ ID NO: 17662 - DNA, 38 bp, synthetic construct
  source 1..38: mol_type = other DNA
gttcattgacatgccaacagaaggtaaacctaccaagt

SEQ ID NO: 17663 - DNA, 39 bp, synthetic construct
  source 1..39: mol_type = other DNA
agttcattgacatgccaacagaaggtaaacctaccaagt

SEQ ID NO: 17664 - DNA, 40 bp, synthetic construct
  source 1..40: mol_type = other DNA
aagttcattgacatgccaacagaaggtaaacctaccaagt

SEQ ID NO: 17665 - DNA, 32 bp, synthetic construct
  source 1..32: mol_type = other DNA
tggtaggtttaccttctgttggcatgtcaatg

SEQ ID NO: 17666 - DNA, 33 bp, synthetic construct
  source 1..33: mol_type = other DNA
ttggtaggtttaccttctgttggcatgtcaatg

SEQ ID NO: 17667 - DNA, 34 bp, synthetic construct
  source 1..34: mol_type = other DNA
cttggtaggtttaccttctgttggcatgtcaatg

SEQ ID NO: 17668 - DNA, 35 bp, synthetic construct
  source 1..35: mol_type = other DNA
acttggtaggtttaccttctgttggcatgtcaatg

SEQ ID NO: 17669 - DNA, 36 bp, synthetic construct
  source 1..36: mol_type = other DNA
gacttggtaggtttaccttctgttggcatgtcaatg

SEQ ID NO: 17670 - DNA, 37 bp, synthetic construct
  source 1..37: mol_type = other DNA
tgacttggtaggtttaccttctgttggcatgtcaatg

SEQ ID NO: 17671 - DNA, 38 bp, synthetic construct
  source 1..38: mol_type = other DNA
ttgacttggtaggtttaccttctgttggcatgtcaatg

SEQ ID NO: 17672 - DNA, 39 bp, synthetic construct
  source 1..39: mol_type = other DNA
gttgacttggtaggtttaccttctgttggcatgtcaatg

SEQ ID NO: 17673 - DNA, 40 bp, synthetic construct
  source 1..40: mol_type = other DNA
ggttgacttggtaggtttaccttctgttggcatgtcaatg

SEQ ID NO: 17674 - DNA, 10 bp, synthetic construct
  source 1..10: mol_type = other DNA
aacctaccaa

SEQ ID NO: 17675 - DNA, 11 bp, synthetic construct
  source 1..11: mol_type = other DNA
aaacctaccaa

SEQ ID NO: 17676 - DNA, 12 bp, synthetic construct
  source 1..12: mol_type = other DNA
taaacctaccaa

SEQ ID NO: 17677 - DNA, 13 bp, synthetic construct
  source 1..13: mol_type = other DNA
gtaaacctaccaa

SEQ ID NO: 17678 - DNA, 14 bp, synthetic construct
  source 1..14: mol_type = other DNA
ggtaaacctaccaa

SEQ ID NO: 17679 - DNA, 15 bp, synthetic construct
  source 1..15: mol_type = other DNA
aggtaaacctaccaa

SEQ ID NO: 17680 - DNA, 16 bp, synthetic construct
  source 1..16: mol_type = other DNA
aaggtaaacctaccaa

SEQ ID NO: 17681 - DNA, 17 bp, synthetic construct
  source 1..17: mol_type = other DNA
gaaggtaaacctaccaa

SEQ ID NO: 17682 - DNA, 18 bp, synthetic construct
  source 1..18: mol_type = other DNA
agaaggtaaacctaccaa

SEQ ID NO: 17683 - DNA, 19 bp, synthetic construct
  source 1..19: mol_type = other DNA
cagaaggtaaacctaccaa

SEQ ID NO: 17684 - DNA, 20 bp, synthetic construct
  source 1..20: mol_type = other DNA
acagaaggtaaacctaccaa

SEQ ID NO: 17685 - DNA, 21 bp, synthetic construct
  source 1..21: mol_type = other DNA
aacagaaggtaaacctaccaa

SEQ ID NO: 17686 - DNA, 22 bp, synthetic construct
  source 1..22: mol_type = other DNA
caacagaaggtaaacctaccaa

SEQ ID NO: 17687 - DNA, 23 bp, synthetic construct
  source 1..23: mol_type = other DNA
ccaacagaaggtaaacctaccaa

SEQ ID NO: 17688 - DNA, 24 bp, synthetic construct
  source 1..24: mol_type = other DNA
gccaacagaaggtaaacctaccaa

SEQ ID NO: 17689 - DNA, 25 bp, synthetic construct
  source 1..25: mol_type = other DNA
tgccaacagaaggtaaacctaccaa

SEQ ID NO: 17690 - DNA, 26 bp, synthetic construct
  source 1..26: mol_type = other DNA
atgccaacagaaggtaaacctaccaa

SEQ ID NO: 17691 - DNA, 27 bp, synthetic construct
  source 1..27: mol_type = other DNA
catgccaacagaaggtaaacctaccaa

SEQ ID NO: 17692 - DNA, 28 bp, synthetic construct
  source 1..28: mol_type = other DNA
acatgccaacagaaggtaaacctaccaa

SEQ ID NO: 17693 - DNA, 29 bp, synthetic construct
  source 1..29: mol_type = other DNA
gacatgccaacagaaggtaaacctaccaa

SEQ ID NO: 17694 - DNA, 30 bp, synthetic construct
  source 1..30: mol_type = other DNA
tgacatgccaacagaaggtaaacctaccaa

SEQ ID NO: 17695 - DNA, 31 bp, synthetic construct
  source 1..31: mol_type = other DNA
ttgacatgccaacagaaggtaaacctaccaa

SEQ ID NO: 17696 - DNA, 32 bp, synthetic construct
  source 1..32: mol_type = other DNA
attgacatgccaacagaaggtaaacctaccaa

SEQ ID NO: 17697 - DNA, 33 bp, synthetic construct
  source 1..33: mol_type = other DNA
cattgacatgccaacagaaggtaaacctaccaa

SEQ ID NO: 17698 - DNA, 34 bp, synthetic construct
  source 1..34: mol_type = other DNA
tcattgacatgccaacagaaggtaaacctaccaa

SEQ ID NO: 17699 - DNA, 35 bp, synthetic construct
  source 1..35: mol_type = other DNA
ttcattgacatgccaacagaaggtaaacctaccaa

SEQ ID NO: 17700 - DNA, 36 bp, synthetic construct
  source 1..36: mol_type = other DNA
gttcattgacatgccaacagaaggtaaacctaccaa

SEQ ID NO: 17701 - DNA, 37 bp, synthetic construct
  source 1..37: mol_type = other DNA
agttcattgacatgccaacagaaggtaaacctaccaa

SEQ ID NO: 17702 - DNA, 38 bp, synthetic construct
  source 1..38: mol_type = other DNA
aagttcattgacatgccaacagaaggtaaacctaccaa

SEQ ID NO: 17703 - DNA, 39 bp, synthetic construct
  source 1..39: mol_type = other DNA
taagttcattgacatgccaacagaaggtaaacctaccaa

SEQ ID NO: 17704 - DNA, 40 bp, synthetic construct
  source 1..40: mol_type = other DNA
ttaagttcattgacatgccaacagaaggtaaacctaccaa

SEQ ID NO: 17705 - DNA, 16 bp, synthetic construct
  source 1..16: mol_type = other DNA
ccaagtcaaccaaacc

SEQ ID NO: 17706 - DNA, 17 bp, synthetic construct
  source 1..17: mol_type = other DNA
accaagtcaaccaaacc

SEQ ID NO: 17707 - DNA, 18 bp, synthetic construct
  source 1..18: mol_type = other DNA
taccaagtcaaccaaacc

SEQ ID NO: 17708 - DNA, 19 bp, synthetic construct
  source 1..19: mol_type = other DNA
ctaccaagtcaaccaaacc

SEQ ID NO: 17709 - DNA, 20 bp, synthetic construct
  source 1..20: mol_type = other DNA
cctaccaagtcaaccaaacc

SEQ ID NO: 17710 - DNA, 21 bp, synthetic construct
  source 1..21: mol_type = other DNA
acctaccaagtcaaccaaacc

SEQ ID NO: 17711 - DNA, 22 bp, synthetic construct
  source 1..22: mol_type = other DNA
aacctaccaagtcaaccaaacc

SEQ ID NO: 17712 - DNA, 23 bp, synthetic construct
  source 1..23: mol_type = other DNA
aaacctaccaagtcaaccaaacc

SEQ ID NO: 17713 - DNA, 24 bp, synthetic construct
  source 1..24: mol_type = other DNA
taaacctaccaagtcaaccaaacc

SEQ ID NO: 17714 - DNA, 25 bp, synthetic construct
  source 1..25: mol_type = other DNA
gtaaacctaccaagtcaaccaaacc

SEQ ID NO: 17715 - DNA, 26 bp, synthetic construct
  source 1..26: mol_type = other DNA
ggtaaacctaccaagtcaaccaaacc

SEQ ID NO: 17716 - DNA, 27 bp, synthetic construct
  source 1..27: mol_type = other DNA
aggtaaacctaccaagtcaaccaaacc

SEQ ID NO: 17717 - DNA, 28 bp, synthetic construct
  source 1..28: mol_type = other DNA
aaggtaaacctaccaagtcaaccaaacc

SEQ ID NO: 17718 - DNA, 29 bp, synthetic construct
  source 1..29: mol_type = other DNA
gaaggtaaacctaccaagtcaaccaaacc

SEQ ID NO: 17719 - DNA, 30 bp, synthetic construct
  source 1..30: mol_type = other DNA
agaaggtaaacctaccaagtcaaccaaacc

SEQ ID NO: 17720 - DNA, 31 bp, synthetic construct
  source 1..31: mol_type = other DNA
cagaaggtaaacctaccaagtcaaccaaacc

SEQ ID NO: 17721 - DNA, 32 bp, synthetic construct
  source 1..32: mol_type = other DNA
acagaaggtaaacctaccaagtcaaccaaacc

SEQ ID NO: 17722 - DNA, 33 bp, synthetic construct
  source 1..33: mol_type = other DNA
aacagaaggtaaacctaccaagtcaaccaaacc

SEQ ID NO: 17723 - DNA, 34 bp, synthetic construct
  source 1..34: mol_type = other DNA
caacagaaggtaaacctaccaagtcaaccaaacc

SEQ ID NO: 17724 - DNA, 35 bp, synthetic construct
  source 1..35: mol_type = other DNA
ccaacagaaggtaaacctaccaagtcaaccaaacc

SEQ ID NO: 17725 - DNA, 36 bp, synthetic construct
  source 1..36: mol_type = other DNA
gccaacagaaggtaaacctaccaagtcaaccaaacc

SEQ ID NO: 17726 - DNA, 37 bp, synthetic construct
  source 1..37: mol_type = other DNA
tgccaacagaaggtaaacctaccaagtcaaccaaacc

SEQ ID NO: 17727 - DNA, 38 bp, synthetic construct
  source 1..38: mol_type = other DNA
atgccaacagaaggtaaacctaccaagtcaaccaaacc

SEQ ID NO: 17728 - DNA, 39 bp, synthetic construct
  source 1..39: mol_type = other DNA
catgccaacagaaggtaaacctaccaagtcaaccaaacc

SEQ ID NO: 17729 - DNA, 40 bp, synthetic construct
  source 1..40: mol_type = other DNA
acatgccaacagaaggtaaacctaccaagtcaaccaaacc

SEQ ID NO: 17730 - DNA, 10 bp, synthetic construct
  source 1..10: mol_type = other DNA
aaacctacca

SEQ ID NO: 17731 - DNA, 11 bp, synthetic construct
  source 1..11: mol_type = other DNA
taaacctacca

SEQ ID NO: 17732 - DNA, 12 bp, synthetic construct
  source 1..12: mol_type = other DNA
gtaaacctacca

SEQ ID NO: 17733 - DNA, 13 bp, synthetic construct
  source 1..13: mol_type = other DNA
ggtaaacctacca

SEQ ID NO: 17734 - DNA, 14 bp, synthetic construct
  source 1..14: mol_type = other DNA
aggtaaacctacca

SEQ ID NO: 17735 - DNA, 15 bp, synthetic construct
  source 1..15: mol_type = other DNA
aaggtaaacctacca

SEQ ID NO: 17736 - DNA, 16 bp, synthetic construct
  source 1..16: mol_type = other DNA
gaaggtaaacctacca

SEQ ID NO: 17737 - DNA, 17 bp, synthetic construct
  source 1..17: mol_type = other DNA
agaaggtaaacctacca

SEQ ID NO: 17738 - DNA, 18 bp, synthetic construct
  source 1..18: mol_type = other DNA
cagaaggtaaacctacca

SEQ ID NO: 17739 - DNA, 19 bp, synthetic construct
  source 1..19: mol_type = other DNA
acagaaggtaaacctacca

SEQ ID NO: 17740 - DNA, 20 bp, synthetic construct
  source 1..20: mol_type = other DNA
aacagaaggtaaacctacca

SEQ ID NO: 17741 - DNA, 21 bp, synthetic construct
  source 1..21: mol_type = other DNA
caacagaaggtaaacctacca

SEQ ID NO: 17742 - DNA, 22 bp, synthetic construct
  source 1..22: mol_type = other DNA
ccaacagaaggtaaacctacca

SEQ ID NO: 17743 - DNA, 23 bp, synthetic construct
  source 1..23: mol_type = other DNA
gccaacagaaggtaaacctacca

SEQ ID NO: 17744 - DNA, 24 bp, synthetic construct
  source 1..24: mol_type = other DNA
tgccaacagaaggtaaacctacca

SEQ ID NO: 17745 - DNA, 25 bp, synthetic construct
  source 1..25: mol_type = other DNA
atgccaacagaaggtaaacctacca

SEQ ID NO: 17746 - DNA, 26 bp, synthetic construct
  source 1..26: mol_type = other DNA
catgccaacagaaggtaaacctacca

SEQ ID NO: 17747 - DNA, 27 bp, synthetic construct
  source 1..27: mol_type = other DNA
acatgccaacagaaggtaaacctacca

SEQ ID NO: 17748 - DNA, 28 bp, synthetic construct
  source 1..28: mol_type = other DNA
gacatgccaacagaaggtaaacctacca

SEQ ID NO: 17749 - DNA, 29 bp, synthetic construct
  source 1..29: mol_type = other DNA
tgacatgccaacagaaggtaaacctacca

SEQ ID NO: 17750 - DNA, 30 bp, synthetic construct
  source 1..30: mol_type = other DNA
ttgacatgccaacagaaggtaaacctacca

SEQ ID NO: 17751 - DNA, 31 bp, synthetic construct
  source 1..31: mol_type = other DNA
attgacatgccaacagaaggtaaacctacca

SEQ ID NO: 17752 - DNA, 32 bp, synthetic construct
  source 1..32: mol_type = other DNA
cattgacatgccaacagaaggtaaacctacca

SEQ ID NO: 17753 - DNA, 33 bp, synthetic construct
  source 1..33: mol_type = other DNA
tcattgacatgccaacagaaggtaaacctacca

SEQ ID NO: 17754 - DNA, 34 bp, synthetic construct
  source 1..34: mol_type = other DNA
ttcattgacatgccaacagaaggtaaacctacca

SEQ ID NO: 17755 - DNA, 35 bp, synthetic construct
  source 1..35: mol_type = other DNA
gttcattgacatgccaacagaaggtaaacctacca

SEQ ID NO: 17756 - DNA, 36 bp, synthetic construct
  source 1..36: mol_type = other DNA
agttcattgacatgccaacagaaggtaaacctacca

SEQ ID NO: 17757 - DNA, 37 bp, synthetic construct
  source 1..37: mol_type = other DNA
aagttcattgacatgccaacagaaggtaaacctacca

SEQ ID NO: 17758 - DNA, 38 bp, synthetic construct
  source 1..38: mol_type = other DNA
taagttcattgacatgccaacagaaggtaaacctacca

SEQ ID NO: 17759 - DNA, 39 bp, synthetic construct
  source 1..39: mol_type = other DNA
ttaagttcattgacatgccaacagaaggtaaacctacca

SEQ ID NO: 17760 - DNA, 40 bp, synthetic construct
  source 1..40: mol_type = other DNA
tttaagttcattgacatgccaacagaaggtaaacctacca

SEQ ID NO: 17761 - DNA, 10 bp, synthetic construct
  source 1..10: mol_type = other DNA
taaacctacc

SEQ ID NO: 17762 - DNA, 11 bp, synthetic construct
  source 1..11: mol_type = other DNA
gtaaacctacc

SEQ ID NO: 17763 - DNA, 12 bp, synthetic construct
  source 1..12: mol_type = other DNA
ggtaaacctacc

SEQ ID NO: 17764 - DNA, 13 bp, synthetic construct
  source 1..13: mol_type = other DNA
aggtaaacctacc

SEQ ID NO: 17765 - DNA, 14 bp, synthetic construct
  source 1..14: mol_type = other DNA
aaggtaaacctacc

SEQ ID NO: 17766 - DNA, 15 bp, synthetic construct
  source 1..15: mol_type = other DNA
gaaggtaaacctacc

SEQ ID NO: 17767 - DNA, 16 bp, synthetic construct
  source 1..16: mol_type = other DNA
agaaggtaaacctacc

SEQ ID NO: 17768 - DNA, 17 bp, synthetic construct
  source 1..17: mol_type = other DNA
cagaaggtaaacctacc

SEQ ID NO: 17769 - DNA, 18 bp, synthetic construct
  source 1..18: mol_type = other DNA
acagaaggtaaacctacc

SEQ ID NO: 17770 - DNA, 19 bp, synthetic construct
  source 1..19: mol_type = other DNA
aacagaaggtaaacctacc

SEQ ID NO: 17771 - DNA, 20 bp, synthetic construct
  source 1..20: mol_type = other DNA
caacagaaggtaaacctacc

SEQ ID NO: 17772 - DNA, 21 bp, synthetic construct
  source 1..21: mol_type = other DNA
ccaacagaaggtaaacctacc

SEQ ID NO: 17773 - DNA, 22 bp, synthetic construct
  source 1..22: mol_type = other DNA
gccaacagaaggtaaacctacc

SEQ ID NO: 17774 - DNA, 23 bp, synthetic construct
  source 1..23: mol_type = other DNA
tgccaacagaaggtaaacctacc

SEQ ID NO: 17775 - DNA, 24 bp, synthetic construct
  source 1..24: mol_type = other DNA
atgccaacagaaggtaaacctacc

SEQ ID NO: 17776 - DNA, 25 bp, synthetic construct
  source 1..25: mol_type = other DNA
catgccaacagaaggtaaacctacc

SEQ ID NO: 17777 - DNA, 26 bp, synthetic construct
  source 1..26: mol_type = other DNA
acatgccaacagaaggtaaacctacc

SEQ ID NO: 17778 - DNA, 27 bp, synthetic construct
  source 1..27: mol_type = other DNA
gacatgccaacagaaggtaaacctacc

SEQ ID NO: 17779 - DNA, 28 bp, synthetic construct
  source 1..28: mol_type = other DNA
tgacatgccaacagaaggtaaacctacc

SEQ ID NO: 17780 - DNA, 29 bp, synthetic construct
  source 1..29: mol_type = other DNA
ttgacatgccaacagaaggtaaacctacc

SEQ ID NO: 17781 - DNA, 30 bp, synthetic construct
  source 1..30: mol_type = other DNA
attgacatgccaacagaaggtaaacctacc

SEQ ID NO: 17782 - DNA, 31 bp, synthetic construct
  source 1..31: mol_type = other DNA
cattgacatgccaacagaaggtaaacctacc

SEQ ID NO: 17783 - DNA, 32 bp, synthetic construct
  source 1..32: mol_type = other DNA
tcattgacatgccaacagaaggtaaacctacc

SEQ ID NO: 17784 - DNA, 33 bp, synthetic construct
  source 1..33: mol_type = other DNA
ttcattgacatgccaacagaaggtaaacctacc

SEQ ID NO: 17785 - DNA, 34 bp, synthetic construct
  source 1..34: mol_type = other DNA
gttcattgacatgccaacagaaggtaaacctacc

SEQ ID NO: 17786 - DNA, 35 bp, synthetic construct
  source 1..35: mol_type = other DNA
agttcattgacatgccaacagaaggtaaacctacc

SEQ ID NO: 17787 - DNA, 36 bp, synthetic construct
  source 1..36: mol_type = other DNA
aagttcattgacatgccaacagaaggtaaacctacc

SEQ ID NO: 17788 - DNA, 37 bp, synthetic construct
  source 1..37: mol_type = other DNA
taagttcattgacatgccaacagaaggtaaacctacc

SEQ ID NO: 17789 - DNA, 38 bp, synthetic construct
  source 1..38: mol_type = other DNA
ttaagttcattgacatgccaacagaaggtaaacctacc

SEQ ID NO: 17790 - DNA, 39 bp, synthetic construct
  source 1..39: mol_type = other DNA
tttaagttcattgacatgccaacagaaggtaaacctacc

SEQ ID NO: 17791 - DNA, 40 bp, synthetic construct
  source 1..40: mol_type = other DNA
ctttaagttcattgacatgccaacagaaggtaaacctacc

SEQ ID NO: 17792 - DNA, 39 bp, synthetic construct
  source 1..39: mol_type = other DNA
ccaagtcaaccaaaccatacaagaatggccaactctcga

SEQ ID NO: 17793 - DNA, 40 bp, synthetic construct
  source 1..40: mol_type = other DNA
accaagtcaaccaaaccatacaagaatggccaactctcga

SEQ ID NO: 17794 - DNA, 17 bp, synthetic construct
  source 1..17: mol_type = other DNA
tggtaggtttaccttct

SEQ ID NO: 17795 - DNA, 18 bp, synthetic construct
  source 1..18: mol_type = other DNA
ttggtaggtttaccttct

SEQ ID NO: 17796 - DNA, 19 bp, synthetic construct
  source 1..19: mol_type = other DNA
cttggtaggtttaccttct

SEQ ID NO: 17797 - DNA, 20 bp, synthetic construct
  source 1..20: mol_type = other DNA
acttggtaggtttaccttct

SEQ ID NO: 17798 - DNA, 21 bp, synthetic construct
  source 1..21: mol_type = other DNA
gacttggtaggtttaccttct

SEQ ID NO: 17799 - DNA, 22 bp, synthetic construct
  source 1..22: mol_type = other DNA
tgacttggtaggtttaccttct

SEQ ID NO: 17800 - DNA, 23 bp, synthetic construct
  source 1..23: mol_type = other DNA
ttgacttggtaggtttaccttct

SEQ ID NO: 17801 - DNA, 24 bp, synthetic construct
  source 1..24: mol_type = other DNA
gttgacttggtaggtttaccttct

SEQ ID NO: 17802 - DNA, 25 bp, synthetic construct
  source 1..25: mol_type = other DNA
ggttgacttggtaggtttaccttct

SEQ ID NO: 17803 - DNA, 26 bp, synthetic construct
  source 1..26: mol_type = other DNA
tggttgacttggtaggtttaccttct

SEQ ID NO: 17804 - DNA, 27 bp, synthetic construct
  source 1..27: mol_type = other DNA
ttggttgacttggtaggtttaccttct

SEQ ID NO: 17805 - DNA, 28 bp, synthetic construct
  source 1..28: mol_type = other DNA
tttggttgacttggtaggtttaccttct

SEQ ID NO: 17806 - DNA, 29 bp, synthetic construct
  source 1..29: mol_type = other DNA
gtttggttgacttggtaggtttaccttct

SEQ ID NO: 17807 - DNA, 30 bp, synthetic construct
  source 1..30: mol_type = other DNA
ggtttggttgacttggtaggtttaccttct

SEQ ID NO: 17808 - DNA, 31 bp, synthetic construct
  source 1..31: mol_type = other DNA
tggtttggttgacttggtaggtttaccttct

SEQ ID NO: 17809 - DNA, 32 bp, synthetic construct
  source 1..32: mol_type = other DNA
atggtttggttgacttggtaggtttaccttct

SEQ ID NO: 17810 - DNA, 33 bp, synthetic construct
  source 1..33: mol_type = other DNA
tatggtttggttgacttggtaggtttaccttct

SEQ ID NO: 17811 - DNA, 34 bp, synthetic construct
  source 1..34: mol_type = other DNA
gtatggtttggttgacttggtaggtttaccttct

SEQ ID NO: 17812 - DNA, 35 bp, synthetic construct
  source 1..35: mol_type = other DNA
tgtatggtttggttgacttggtaggtttaccttct

SEQ ID NO: 17813 - DNA, 36 bp, synthetic construct
  source 1..36: mol_type = other DNA
ttgtatggtttggttgacttggtaggtttaccttct

SEQ ID NO: 17814 - DNA, 37 bp, synthetic construct
  source 1..37: mol_type = other DNA
cttgtatggtttggttgacttggtaggtttaccttct

SEQ ID NO: 17815 - DNA, 38 bp, synthetic construct
  source 1..38: mol_type = other DNA
tcttgtatggtttggttgacttggtaggtttaccttct

SEQ ID NO: 17816 - DNA, 39 bp, synthetic construct
  source 1..39: mol_type = other DNA
ttcttgtatggtttggttgacttggtaggtttaccttct

SEQ ID NO: 17817 - DNA, 40 bp, synthetic construct
  source 1..40: mol_type = other DNA
attcttgtatggtttggttgacttggtaggtttaccttct

SEQ ID NO: 17818 - DNA, 16 bp, synthetic construct
  source 1..16: mol_type = other DNA
tggtaggtttaccttc

SEQ ID NO: 17819 - DNA, 17 bp, synthetic construct
  source 1..17: mol_type = other DNA
ttggtaggtttaccttc

SEQ ID NO: 17820 - DNA, 18 bp, synthetic construct
  source 1..18: mol_type = other DNA
cttggtaggtttaccttc

SEQ ID NO: 17821 - DNA, 19 bp, synthetic construct
  source 1..19: mol_type = other DNA
acttggtaggtttaccttc

SEQ ID NO: 17822 - DNA, 20 bp, synthetic construct
  source 1..20: mol_type = other DNA
gacttggtaggtttaccttc

SEQ ID NO: 17823 - DNA, 21 bp, synthetic construct
  source 1..21: mol_type = other DNA
tgacttggtaggtttaccttc

SEQ ID NO: 17824 - DNA, 22 bp, synthetic construct
  source 1..22: mol_type = other DNA
ttgacttggtaggtttaccttc

SEQ ID NO: 17825 - DNA, 23 bp, synthetic construct
  source 1..23: mol_type = other DNA
gttgacttggtaggtttaccttc

SEQ ID NO: 17826 - DNA, 24 bp, synthetic construct
  source 1..24: mol_type = other DNA
ggttgacttggtaggtttaccttc

SEQ ID NO: 17827 - DNA, 25 bp, synthetic construct
  source 1..25: mol_type = other DNA
tggttgacttggtaggtttaccttc

SEQ ID NO: 17828 - DNA, 26 bp, synthetic construct
  source 1..26: mol_type = other DNA
ttggttgacttggtaggtttaccttc

SEQ ID NO: 17829 - DNA, 27 bp, synthetic construct
  source 1..27: mol_type = other DNA
tttggttgacttggtaggtttaccttc

SEQ ID NO: 17830 - DNA, 28 bp, synthetic construct
  source 1..28: mol_type = other DNA
gtttggttgacttggtaggtttaccttc

SEQ ID NO: 17831 - DNA, 29 bp, synthetic construct
  source 1..29: mol_type = other DNA
ggtttggttgacttggtaggtttaccttc

SEQ ID NO: 17832 - DNA, 30 bp, synthetic construct
  source 1..30: mol_type = other DNA
tggtttggttgacttggtaggtttaccttc

SEQ ID NO: 17833 - DNA, 31 bp, synthetic construct
  source 1..31: mol_type = other DNA
atggtttggttgacttggtaggtttaccttc

SEQ ID NO: 17834 - DNA, 32 bp, synthetic construct
  source 1..32: mol_type = other DNA
tatggtttggttgacttggtaggtttaccttc

SEQ ID NO: 17835 - DNA, 33 bp, synthetic construct
  source 1..33: mol_type = other DNA
gtatggtttggttgacttggtaggtttaccttc

SEQ ID NO: 17836 - DNA, 34 bp, synthetic construct
  source 1..34: mol_type = other DNA
tgtatggtttggttgacttggtaggtttaccttc

SEQ ID NO: 17837 - DNA, 35 bp, synthetic construct
  source 1..35: mol_type = other DNA
ttgtatggtttggttgacttggtaggtttaccttc

SEQ ID NO: 17838 - DNA, 36 bp, synthetic construct
  source 1..36: mol_type = other DNA
cttgtatggtttggttgacttggtaggtttaccttc

SEQ ID NO: 17839 - DNA, 37 bp, synthetic construct
  source 1..37: mol_type = other DNA
tcttgtatggtttggttgacttggtaggtttaccttc

SEQ ID NO: 17840 - DNA, 38 bp, synthetic construct
  source 1..38: mol_type = other DNA
ttcttgtatggtttggttgacttggtaggtttaccttc

SEQ ID NO: 17841 - DNA, 39 bp, synthetic construct
  source 1..39: mol_type = other DNA
attcttgtatggtttggttgacttggtaggtttaccttc

SEQ ID NO: 17842 - DNA, 40 bp, synthetic construct
  source 1..40: mol_type = other DNA
cattcttgtatggtttggttgacttggtaggtttaccttc

SEQ ID NO: 17843 - DNA, 15 bp, synthetic construct
  source 1..15: mol_type = other DNA
ccaagtcaacaaaac

SEQ ID NO: 17844 - DNA, 15 bp, synthetic construct
  source 1..15: mol_type = other DNA
ccaagtcaaccaaac

SEQ ID NO: 17845 - DNA, 16 bp, synthetic construct
  source 1..16: mol_type = other DNA
accaagtcaacaaaac

SEQ ID NO: 17846 - DNA, 16 bp, synthetic construct
  source 1..16: mol_type = other DNA
accaagtcaaccaaac

SEQ ID NO: 17847 - DNA, 17 bp, synthetic construct
  source 1..17: mol_type = other DNA
taccaagtcaaccaaac

SEQ ID NO: 17848 - DNA, 17 bp, synthetic construct
  source 1..17: mol_type = other DNA
taccaagtcaacaaaac

SEQ ID NO: 17849 - DNA, 18 bp, synthetic construct
  source 1..18: mol_type = other DNA
ctaccaagtcaaccaaac

SEQ ID NO: 17850 - DNA, 18 bp, synthetic construct
  source 1..18: mol_type = other DNA
ctaccaagtcaacaaaac

SEQ ID NO: 17851 - DNA, 19 bp, synthetic construct
  source 1..19: mol_type = other DNA
cctaccaagtcaaccaaac

SEQ ID NO: 17852 - DNA, 19 bp, synthetic construct
  source 1..19: mol_type = other DNA
cctaccaagtcaacaaaac

SEQ ID NO: 17853 - DNA, 20 bp, synthetic construct
  source 1..20: mol_type = other DNA
acctaccaagtcaaccaaac

SEQ ID NO: 17854 - DNA, 20 bp, synthetic construct
  source 1..20: mol_type = other DNA
acctaccaagtcaacaaaac

SEQ ID NO: 17855 - DNA, 21 bp, synthetic construct
  source 1..21: mol_type = other DNA
aacctaccaagtcaacaaaac

SEQ ID NO: 17856 - DNA, 21 bp, synthetic construct
  source 1..21: mol_type = other DNA
aacctaccaagtcaaccaaac

SEQ ID NO: 17857 - DNA, 22 bp, synthetic construct
  source 1..22: mol_type = other DNA
aaacctaccaagtcaaccaaac

SEQ ID NO: 17858 - DNA, 22 bp, synthetic construct
  source 1..22: mol_type = other DNA
aaacctaccaagtcaacaaaac

SEQ ID NO: 17859 - DNA, 23 bp, synthetic construct
  source 1..23: mol_type = other DNA
taaacctaccaagtcaacaaaac

SEQ ID NO: 17860 - DNA, 23 bp, synthetic construct
  source 1..23: mol_type = other DNA
taaacctaccaagtcaaccaaac

SEQ ID NO: 17861 - DNA, 24 bp, synthetic construct
  source 1..24: mol_type = other DNA
gtaaacctaccaagtcaaccaaac

SEQ ID NO: 17862 - DNA, 24 bp, synthetic construct
  source 1..24: mol_type = other DNA
gtaaacctaccaagtcaacaaaac

SEQ ID NO: 17863 - DNA, 25 bp, synthetic construct
  source 1..25: mol_type = other DNA
ggtaaacctaccaagtcaaccaaac

SEQ ID NO: 17864 - DNA, 25 bp, synthetic construct
  source 1..25: mol_type = other DNA
ggtaaacctaccaagtcaacaaaac

SEQ ID NO: 17865 - DNA, 26 bp, synthetic construct
  source 1..26: mol_type = other DNA
aggtaaacctaccaagtcaacaaaac

SEQ ID NO: 17866 - DNA, 26 bp, synthetic construct
  source 1..26: mol_type = other DNA
aggtaaacctaccaagtcaaccaaac

SEQ ID NO: 17867 - DNA, 27 bp, synthetic construct
  source 1..27: mol_type = other DNA
aaggtaaacctaccaagtcaaccaaac

SEQ ID NO: 17868 - DNA, 27 bp, synthetic construct
  source 1..27: mol_type = other DNA
aaggtaaacctaccaagtcaacaaaac

SEQ ID NO: 17869 - DNA, 28 bp, synthetic construct
  source 1..28: mol_type = other DNA
gaaggtaaacctaccaagtcaaccaaac

SEQ ID NO: 17870 - DNA, 28 bp, synthetic construct
  source 1..28: mol_type = other DNA
gaaggtaaacctaccaagtcaacaaaac

SEQ ID NO: 17871 - DNA, 29 bp, synthetic construct
  source 1..29: mol_type = other DNA
agaaggtaaacctaccaagtcaacaaaac

SEQ ID NO: 17872 - DNA, 29 bp, synthetic construct
  source 1..29: mol_type = other DNA
agaaggtaaacctaccaagtcaaccaaac

SEQ ID NO: 17873 - DNA, 30 bp, synthetic construct
  source 1..30: mol_type = other DNA
cagaaggtaaacctaccaagtcaacaaaac

SEQ ID NO: 17874 - DNA, 30 bp, synthetic construct
  source 1..30: mol_type = other DNA
cagaaggtaaacctaccaagtcaaccaaac

SEQ ID NO: 17875 - DNA, 31 bp, synthetic construct
  source 1..31: mol_type = other DNA
acagaaggtaaacctaccaagtcaaccaaac

SEQ ID NO: 17876 - DNA, 31 bp, synthetic construct
  source 1..31: mol_type = other DNA
acagaaggtaaacctaccaagtcaacaaaac

SEQ ID NO: 17877 - DNA, 32 bp, synthetic construct
  source 1..32: mol_type = other DNA
aacagaaggtaaacctaccaagtcaacaaaac

SEQ ID NO: 17878 - DNA, 32 bp, synthetic construct
  source 1..32: mol_type = other DNA
aacagaaggtaaacctaccaagtcaaccaaac

SEQ ID NO: 17879 - DNA, 33 bp, synthetic construct
  source 1..33: mol_type = other DNA
caacagaaggtaaacctaccaagtcaacaaaac

SEQ ID NO: 17880 - DNA, 33 bp, synthetic construct
  source 1..33: mol_type = other DNA
caacagaaggtaaacctaccaagtcaaccaaac

SEQ ID NO: 17881 - DNA, 34 bp, synthetic construct
  source 1..34: mol_type = other DNA
ccaacagaaggtaaacctaccaagtcaaccaaac

SEQ ID NO: 17882 - DNA, 34 bp, synthetic construct
  source 1..34: mol_type = other DNA
ccaacagaaggtaaacctaccaagtcaacaaaac

SEQ ID NO: 17883 - DNA, 35 bp, synthetic construct
  source 1..35: mol_type = other DNA
gccaacagaaggtaaacctaccaagtcaacaaaac

SEQ ID NO: 17884 - DNA, 35 bp, synthetic construct
  source 1..35: mol_type = other DNA
gccaacagaaggtaaacctaccaagtcaaccaaac

SEQ ID NO: 17885 - DNA, 36 bp, synthetic construct
  source 1..36: mol_type = other DNA
tgccaacagaaggtaaacctaccaagtcaaccaaac

SEQ ID NO: 17886 - DNA, 36 bp, synthetic construct
  source 1..36: mol_type = other DNA
tgccaacagaaggtaaacctaccaagtcaacaaaac

SEQ ID NO: 17887 - DNA, 37 bp, synthetic construct
  source 1..37: mol_type = other DNA
atgccaacagaaggtaaacctaccaagtcaaccaaac

SEQ ID NO: 17888 - DNA, 37 bp, synthetic construct
  source 1..37: mol_type = other DNA
atgccaacagaaggtaaacctaccaagtcaacaaaac

SEQ ID NO: 17889 - DNA, 38 bp, synthetic construct
  source 1..38: mol_type = other DNA
catgccaacagaaggtaaacctaccaagtcaaccaaac

SEQ ID NO: 17890 - DNA, 38 bp, synthetic construct
  source 1..38: mol_type = other DNA
catgccaacagaaggtaaacctaccaagtcaacaaaac

SEQ ID NO: 17891 - DNA, 39 bp, synthetic construct
  source 1..39: mol_type = other DNA
acatgccaacagaaggtaaacctaccaagtcaacaaaac

SEQ ID NO: 17892 - DNA, 39 bp, synthetic construct
  source 1..39: mol_type = other DNA
acatgccaacagaaggtaaacctaccaagtcaaccaaac

SEQ ID NO: 17893 - DNA, 40 bp, synthetic construct
  source 1..40: mol_type = other DNA
gacatgccaacagaaggtaaacctaccaagtcaaccaaac

SEQ ID NO: 17894 - DNA, 40 bp, synthetic construct
  source 1..40: mol_type = other DNA
gacatgccaacagaaggtaaacctaccaagtcaacaaaac

SEQ ID NO: 17895 - DNA, 14 bp, synthetic construct
  source 1..14: mol_type = other DNA
ccaagtcaaccaaa

SEQ ID NO: 17896 - DNA, 15 bp, synthetic construct
  source 1..15: mol_type = other DNA
accaagtcaaccaaa

SEQ ID NO: 17897 - DNA, 16 bp, synthetic construct
  source 1..16: mol_type = other DNA
taccaagtcaaccaaa

SEQ ID NO: 17898 - DNA, 17 bp, synthetic construct
  source 1..17: mol_type = other DNA
ctaccaagtcaaccaaa

SEQ ID NO: 17899 - DNA, 18 bp, synthetic construct
  source 1..18: mol_type = other DNA
cctaccaagtcaaccaaa

SEQ ID NO: 17900 - DNA, 19 bp, synthetic construct
  source 1..19: mol_type = other DNA
acctaccaagtcaaccaaa

SEQ ID NO: 17901 - DNA, 20 bp, synthetic construct
  source 1..20: mol_type = other DNA
aacctaccaagtcaaccaaa

SEQ ID NO: 17902 - DNA, 21 bp, synthetic construct
  source 1..21: mol_type = other DNA
aaacctaccaagtcaaccaaa

SEQ ID NO: 17903 - DNA, 22 bp, synthetic construct
  source 1..22: mol_type = other DNA
taaacctaccaagtcaaccaaa

SEQ ID NO: 17904 - DNA, 23 bp, synthetic construct
  source 1..23: mol_type = other DNA
gtaaacctaccaagtcaaccaaa

SEQ ID NO: 17905 - DNA, 24 bp, synthetic construct
  source 1..24: mol_type = other DNA
ggtaaacctaccaagtcaaccaaa

SEQ ID NO: 17906 - DNA, 25 bp, synthetic construct
  source 1..25: mol_type = other DNA
aggtaaacctaccaagtcaaccaaa

SEQ ID NO: 17907 - DNA, 26 bp, synthetic construct
  source 1..26: mol_type = other DNA
aaggtaaacctaccaagtcaaccaaa

SEQ ID NO: 17908 - DNA, 27 bp, synthetic construct
  source 1..27: mol_type = other DNA
gaaggtaaacctaccaagtcaaccaaa

SEQ ID NO: 17909 - DNA, 28 bp, synthetic construct
  source 1..28: mol_type = other DNA
agaaggtaaacctaccaagtcaaccaaa

SEQ ID NO: 17910 - DNA, 29 bp, synthetic construct
  source 1..29: mol_type = other DNA
cagaaggtaaacctaccaagtcaaccaaa

SEQ ID NO: 17911 - DNA, 30 bp, synthetic construct
  source 1..30: mol_type = other DNA
acagaaggtaaacctaccaagtcaaccaaa

SEQ ID NO: 17912 - DNA, 31 bp, synthetic construct
  source 1..31: mol_type = other DNA
aacagaaggtaaacctaccaagtcaaccaaa

SEQ ID NO: 17913 - DNA, 32 bp, synthetic construct
  source 1..32: mol_type = other DNA
caacagaaggtaaacctaccaagtcaaccaaa

SEQ ID NO: 17914 - DNA, 33 bp, synthetic construct
  source 1..33: mol_type = other DNA
ccaacagaaggtaaacctaccaagtcaaccaaa

SEQ ID NO: 17915 - DNA, 34 bp, synthetic construct
  source 1..34: mol_type = other DNA
gccaacagaaggtaaacctaccaagtcaaccaaa

SEQ ID NO: 17916 - DNA, 35 bp, synthetic construct
  source 1..35: mol_type = other DNA
tgccaacagaaggtaaacctaccaagtcaaccaaa

SEQ ID NO: 17917 - DNA, 36 bp, synthetic construct
  source 1..36: mol_type = other DNA
atgccaacagaaggtaaacctaccaagtcaaccaaa

SEQ ID NO: 17918 - DNA, 37 bp, synthetic construct
  source 1..37: mol_type = other DNA
catgccaacagaaggtaaacctaccaagtcaaccaaa

SEQ ID NO: 17919 - DNA, 38 bp, synthetic construct
  source 1..38: mol_type = other DNA
acatgccaacagaaggtaaacctaccaagtcaaccaaa

SEQ ID NO: 17920 - DNA, 39 bp, synthetic construct
  source 1..39: mol_type = other DNA
gacatgccaacagaaggtaaacctaccaagtcaaccaaa

SEQ ID NO: 17921 - DNA, 40 bp, synthetic construct
  source 1..40: mol_type = other DNA
tgacatgccaacagaaggtaaacctaccaagtcaaccaaa

SEQ ID NO: 17922 - DNA, 18 bp, synthetic construct
  source 1..18: mol_type = other DNA
tggtaggtttaccctctg

SEQ ID NO: 17923 - DNA, 18 bp, synthetic construct
  source 1..18: mol_type = other DNA
tggtaggtttaccttctg

SEQ ID NO: 17924 - DNA, 19 bp, synthetic construct
  source 1..19: mol_type = other DNA
ttggtaggtttaccctctg

SEQ ID NO: 17925 - DNA, 19 bp, synthetic construct
  source 1..19: mol_type = other DNA
ttggtaggtttaccttctg

SEQ ID NO: 17926 - DNA, 20 bp, synthetic construct
  source 1..20: mol_type = other DNA
cttggtaggtttaccttctg

SEQ ID NO: 17927 - DNA, 20 bp, synthetic construct
  source 1..20: mol_type = other DNA
cttggtaggtttaccctctg

SEQ ID NO: 17928 - DNA, 21 bp, synthetic construct
  source 1..21: mol_type = other DNA
acttggtaggtttaccctctg

SEQ ID NO: 17929 - DNA, 21 bp, synthetic construct
  source 1..21: mol_type = other DNA
acttggtaggtttaccttctg

SEQ ID NO: 17930 - DNA, 22 bp, synthetic construct
  source 1..22: mol_type = other DNA
gacttggtaggtttaccttctg

SEQ ID NO: 17931 - DNA, 22 bp, synthetic construct
  source 1..22: mol_type = other DNA
gacttggtaggtttaccctctg

SEQ ID NO: 17932 - DNA, 23 bp, synthetic construct
  source 1..23: mol_type = other DNA
tgacttggtaggtttaccctctg

SEQ ID NO: 17933 - DNA, 23 bp, synthetic construct
  source 1..23: mol_type = other DNA
tgacttggtaggtttaccttctg

SEQ ID NO: 17934 - DNA, 24 bp, synthetic construct
  source 1..24: mol_type = other DNA
ttgacttggtaggtttaccctctg

SEQ ID NO: 17935 - DNA, 24 bp, synthetic construct
  source 1..24: mol_type = other DNA
ttgacttggtaggtttaccttctg

SEQ ID NO: 17936 - DNA, 25 bp, synthetic construct
  source 1..25: mol_type = other DNA
gttgacttggtaggtttaccttctg

SEQ ID NO: 17937 - DNA, 25 bp, synthetic construct
  source 1..25: mol_type = other DNA
gttgacttggtaggtttaccctctg

SEQ ID NO: 17938 - DNA, 26 bp, synthetic construct
  source 1..26: mol_type = other DNA
ggttgacttggtaggtttaccctctg

SEQ ID NO: 17939 - DNA, 26 bp, synthetic construct
  source 1..26: mol_type = other DNA
ggttgacttggtaggtttaccttctg

SEQ ID NO: 17940 - DNA, 27 bp, synthetic construct
  source 1..27: mol_type = other DNA
tggttgacttggtaggtttaccttctg

SEQ ID NO: 17941 - DNA, 27 bp, synthetic construct
  source 1..27: mol_type = other DNA
tggttgacttggtaggtttaccctctg

SEQ ID NO: 17942 - DNA, 28 bp, synthetic construct
  source 1..28: mol_type = other DNA
ttggttgacttggtaggtttaccctctg

SEQ ID NO: 17943 - DNA, 28 bp, synthetic construct
  source 1..28: mol_type = other DNA
ttggttgacttggtaggtttaccttctg

SEQ ID NO: 17944 - DNA, 29 bp, synthetic construct
  source 1..29: mol_type = other DNA
tttggttgacttggtaggtttaccctctg

SEQ ID NO: 17945 - DNA, 29 bp, synthetic construct
  source 1..29: mol_type = other DNA
tttggttgacttggtaggtttaccttctg

SEQ ID NO: 17946 - DNA, 30 bp, synthetic construct
  source 1..30: mol_type = other DNA
gtttggttgacttggtaggtttaccctctg

SEQ ID NO: 17947 - DNA, 30 bp, synthetic construct
  source 1..30: mol_type = other DNA
gtttggttgacttggtaggtttaccttctg

SEQ ID NO: 17948 - DNA, 31 bp, synthetic construct
  source 1..31: mol_type = other DNA
ggtttggttgacttggtaggtttaccttctg

SEQ ID NO: 17949 - DNA, 31 bp, synthetic construct
  source 1..31: mol_type = other DNA
ggtttggttgacttggtaggtttaccctctg

SEQ ID NO: 17950 - DNA, 32 bp, synthetic construct
  source 1..32: mol_type = other DNA
tggtttggttgacttggtaggtttaccctctg

SEQ ID NO: 17951 - DNA, 32 bp, synthetic construct
  source 1..32: mol_type = other DNA
tggtttggttgacttggtaggtttaccttctg

SEQ ID NO: 17952 - DNA, 33 bp, synthetic construct
  source 1..33: mol_type = other DNA
atggtttggttgacttggtaggtttaccctctg

SEQ ID NO: 17953 - DNA, 33 bp, synthetic construct
  source 1..33: mol_type = other DNA
atggtttggttgacttggtaggtttaccttctg

SEQ ID NO: 17954 - DNA, 34 bp, synthetic construct
  source 1..34: mol_type = other DNA
tatggtttggttgacttggtaggtttaccctctg

SEQ ID NO: 17955 - DNA, 34 bp, synthetic construct
  source 1..34: mol_type = other DNA
tatggtttggttgacttggtaggtttaccttctg

SEQ ID NO: 17956 - DNA, 35 bp, synthetic construct
  source 1..35: mol_type = other DNA
gtatggtttggttgacttggtaggtttaccctctg

SEQ ID NO: 17957 - DNA, 35 bp, synthetic construct
  source 1..35: mol_type = other DNA
gtatggtttggttgacttggtaggtttaccttctg

SEQ ID NO: 17958 - DNA, 36 bp, synthetic construct
  source 1..36: mol_type = other DNA
tgtatggtttggttgacttggtaggtttaccctctg

SEQ ID NO: 17959 - DNA, 36 bp, synthetic construct
  source 1..36: mol_type = other DNA
tgtatggtttggttgacttggtaggtttaccttctg

SEQ ID NO: 17960 - DNA, 37 bp, synthetic construct
  source 1..37: mol_type = other DNA
ttgtatggtttggttgacttggtaggtttaccctctg

SEQ ID NO: 17961 - DNA, 37 bp, synthetic construct
  source 1..37: mol_type = other DNA
ttgtatggtttggttgacttggtaggtttaccttctg

SEQ ID NO: 17962 - DNA, 38 bp, synthetic construct
  source 1..38: mol_type = other DNA
cttgtatggtttggttgacttggtaggtttaccttctg

SEQ ID NO: 17963 - DNA, 38 bp, synthetic construct
  source 1..38: mol_type = other DNA
cttgtatggtttggttgacttggtaggtttaccctctg

SEQ ID NO: 17964 - DNA, 39 bp, synthetic construct
  source 1..39: mol_type = other DNA
tcttgtatggtttggttgacttggtaggtttaccctctg

SEQ ID NO: 17965 - DNA, 39 bp, synthetic construct
  source 1..39: mol_type = other DNA
tcttgtatggtttggttgacttggtaggtttaccttctg

SEQ ID NO: 17966 - DNA, 40 bp, synthetic construct
  source 1..40: mol_type = other DNA
ttcttgtatggtttggttgacttggtaggtttaccctctg

SEQ ID NO: 17967 - DNA, 40 bp, synthetic construct
  source 1..40: mol_type = other DNA
ttcttgtatggtttggttgacttggtaggtttaccttctg

SEQ ID NO: 17968 - DNA, 24 bp, synthetic construct
  source 1..24: mol_type = other DNA
ccaagtcaaccaaaccatacaaga

SEQ ID NO: 17969 - DNA, 25 bp, synthetic construct
  source 1..25: mol_type = other DNA
accaagtcaaccaaaccatacaaga

SEQ ID NO: 17970 - DNA, 26 bp, synthetic construct
  source 1..26: mol_type = other DNA
taccaagtcaaccaaaccatacaaga

SEQ ID NO: 17971 - DNA, 27 bp, synthetic construct
  source 1..27: mol_type = other DNA
ctaccaagtcaaccaaaccatacaaga

SEQ ID NO: 17972 - DNA, 28 bp, synthetic construct
  source 1..28: mol_type = other DNA
cctaccaagtcaaccaaaccatacaaga

SEQ ID NO: 17973 - DNA, 29 bp, synthetic construct
  source 1..29: mol_type = other DNA
acctaccaagtcaaccaaaccatacaaga

SEQ ID NO: 17974 - DNA, 30 bp, synthetic construct
  source 1..30: mol_type = other DNA
aacctaccaagtcaaccaaaccatacaaga

SEQ ID NO: 17975 - DNA, 31 bp, synthetic construct
  source 1..31: mol_type = other DNA
aaacctaccaagtcaaccaaaccatacaaga

SEQ ID NO: 17976 - DNA, 32 bp, synthetic construct
  source 1..32: mol_type = other DNA
taaacctaccaagtcaaccaaaccatacaaga

SEQ ID NO: 17977 - DNA, 33 bp, synthetic construct
  source 1..33: mol_type = other DNA
gtaaacctaccaagtcaaccaaaccatacaaga

SEQ ID NO: 17978 - DNA, 34 bp, synthetic construct
  source 1..34: mol_type = other DNA
ggtaaacctaccaagtcaaccaaaccatacaaga

SEQ ID NO: 17979 - DNA, 35 bp, synthetic construct
  source 1..35: mol_type = other DNA
aggtaaacctaccaagtcaaccaaaccatacaaga

SEQ ID NO: 17980 - DNA, 36 bp, synthetic construct
  source 1..36: mol_type = other DNA
aaggtaaacctaccaagtcaaccaaaccatacaaga

SEQ ID NO: 17981 - DNA, 37 bp, synthetic construct
  source 1..37: mol_type = other DNA
gaaggtaaacctaccaagtcaaccaaaccatacaaga

SEQ ID NO: 17982 - DNA, 38 bp, synthetic construct
  source 1..38: mol_type = other DNA
agaaggtaaacctaccaagtcaaccaaaccatacaaga

SEQ ID NO: 17983 - DNA, 39 bp, synthetic construct
  source 1..39: mol_type = other DNA
cagaaggtaaacctaccaagtcaaccaaaccatacaaga

SEQ ID NO: 17984 - DNA, 40 bp, synthetic construct
  source 1..40: mol_type = other DNA
acagaaggtaaacctaccaagtcaaccaaaccatacaaga

SEQ ID NO: 17985 - DNA, 33 bp, synthetic construct
  source 1..33: mol_type = other DNA
tgagactactgaacactgaaggagaaatccaga

SEQ ID NO: 17986 - DNA, 34 bp, synthetic construct
  source 1..34: mol_type = other DNA
ttgagactactgaacactgaaggagaaatccaga

SEQ ID NO: 17987 - DNA, 35 bp, synthetic construct
  source 1..35: mol_type = other DNA
tttgagactactgaacactgaaggagaaatccaga

SEQ ID NO: 17988 - DNA, 36 bp, synthetic construct
  source 1..36: mol_type = other DNA
ttttgagactactgaacactgaaggagaaatccaga

SEQ ID NO: 17989 - DNA, 37 bp, synthetic construct
  source 1..37: mol_type = other DNA
tttttgagactactgaacactgaaggagaaatccaga

SEQ ID NO: 17990 - DNA, 38 bp, synthetic construct
  source 1..38: mol_type = other DNA
ttttttgagactactgaacactgaaggagaaatccaga

SEQ ID NO: 17991 - DNA, 39 bp, synthetic construct
  source 1..39: mol_type = other DNA
cttttttgagactactgaacactgaaggagaaatccaga

SEQ ID NO: 17992 - DNA, 40 bp, synthetic construct
  source 1..40: mol_type = other DNA
gcttttttgagactactgaacactgaaggagaaatccaga

SEQ ID NO: 17993 - DNA, 34 bp, synthetic construct
  source 1..34: mol_type = other DNA
tgagactactgaacactgaaggagaaatccagat

SEQ ID NO: 17994 - DNA, 34 bp, synthetic construct
  source 1..34: mol_type = other DNA
tgagactactgaacactgaaggagaaattcagat

SEQ ID NO: 17995 - DNA, 35 bp, synthetic construct
  source 1..35: mol_type = other DNA
ttgagactactgaacactgaaggagaaattcagat

SEQ ID NO: 17996 - DNA, 35 bp, synthetic construct
  source 1..35: mol_type = other DNA
ttgagactactgaacactgaaggagaaatccagat

SEQ ID NO: 17997 - DNA, 36 bp, synthetic construct
  source 1..36: mol_type = other DNA
tttgagactactgaacactgaaggagaaatccagat

SEQ ID NO: 17998 - DNA, 36 bp, synthetic construct
  source 1..36: mol_type = other DNA
tttgagactactgaacactgaaggagaaattcagat

SEQ ID NO: 17999 - DNA, 37 bp, synthetic construct
  source 1..37: mol_type = other DNA
ttttgagactactgaacactgaaggagaaattcagat

SEQ ID NO: 18000 - DNA, 37 bp, synthetic construct
  source 1..37: mol_type = other DNA
ttttgagactactgaacactgaaggagaaatccagat

SEQ ID NO: 18001 - DNA, 38 bp, synthetic construct
  source 1..38: mol_type = other DNA
tttttgagactactgaacactgaaggagaaatccagat

SEQ ID NO: 18002 - DNA, 38 bp, synthetic construct
  source 1..38: mol_type = other DNA
tttttgagactactgaacactgaaggagaaattcagat

SEQ ID NO: 18003 - DNA, 39 bp, synthetic construct
  source 1..39: mol_type = other DNA
ttttttgagactactgaacactgaaggagaaatccagat

SEQ ID NO: 18004 - DNA, 39 bp, synthetic construct
  source 1..39: mol_type = other DNA
ttttttgagactactgaacactgaaggagaaattcagat

SEQ ID NO: 18005 - DNA, 40 bp, synthetic construct
  source 1..40: mol_type = other DNA
cttttttgagactactgaacactgaaggagaaattcagat

SEQ ID NO: 18006 - DNA, 40 bp, synthetic construct
  source 1..40: mol_type = other DNA
cttttttgagactactgaacactgaaggagaaatccagat

SEQ ID NO: 18007 - DNA, 35 bp, synthetic construct
  source 1..35: mol_type = other DNA
caaaaaagctgataacaaagtactcttccctgatc

SEQ ID NO: 18008 - DNA, 35 bp, synthetic construct
  source 1..35: mol_type = other DNA
caaaaaagctgataacaaagtactcttcccgcttc

SEQ ID NO: 18009 - DNA, 36 bp, synthetic construct
  source 1..36: mol_type = other DNA
tcaaaaaagctgataacaaagtactcttcccgcttc

SEQ ID NO: 18010 - DNA, 36 bp, synthetic construct
  source 1..36: mol_type = other DNA
tcaaaaaagctgataacaaagtactcttccctgatc

SEQ ID NO: 18011 - DNA, 37 bp, synthetic construct
  source 1..37: mol_type = other DNA
ctcaaaaaagctgataacaaagtactcttccctgatc

SEQ ID NO: 18012 - DNA, 37 bp, synthetic construct
  source 1..37: mol_type = other DNA
ctcaaaaaagctgataacaaagtactcttcccgcttc

SEQ ID NO: 18013 - DNA, 38 bp, synthetic construct
  source 1..38: mol_type = other DNA
tctcaaaaaagctgataacaaagtactcttcccgcttc

SEQ ID NO: 18014 - DNA, 38 bp, synthetic construct
  source 1..38: mol_type = other DNA
tctcaaaaaagctgataacaaagtactcttccctgatc

SEQ ID NO: 18015 - DNA, 39 bp, synthetic construct
  source 1..39: mol_type = other DNA
gtctcaaaaaagctgataacaaagtactcttccctgatc

SEQ ID NO: 18016 - DNA, 39 bp, synthetic construct
  source 1..39: mol_type = other DNA
gtctcaaaaaagctgataacaaagtactcttcccgcttc

SEQ ID NO: 18017 - DNA, 40 bp, synthetic construct
  source 1..40: mol_type = other DNA
agtctcaaaaaagctgataacaaagtactcttcccgcttc

SEQ ID NO: 18018 - DNA, 40 bp, synthetic construct
  source 1..40: mol_type = other DNA
agtctcaaaaaagctgataacaaagtactcttccctgatc

SEQ ID NO: 18019 - DNA, 33 bp, synthetic construct
  source 1..33: mol_type = other DNA
caaaaaagctgataacaaagtactcttgcctga

SEQ ID NO: 18020 - DNA, 33 bp, synthetic construct
  source 1..33: mol_type = other DNA
caaaaaagctgataacaaagtactcttccctga

SEQ ID NO: 18021 - DNA, 34 bp, synthetic construct
  source 1..34: mol_type = other DNA
tcaaaaaagctgataacaaagtactcttccctga

SEQ ID NO: 18022 - DNA, 34 bp, synthetic construct
  source 1..34: mol_type = other DNA
tcaaaaaagctgataacaaagtactcttgcctga

SEQ ID NO: 18023 - DNA, 35 bp, synthetic construct
  source 1..35: mol_type = other DNA
ctcaaaaaagctgataacaaagtactcttgcctga

SEQ ID NO: 18024 - DNA, 35 bp, synthetic construct
  source 1..35: mol_type = other DNA
ctcaaaaaagctgataacaaagtactcttccctga

SEQ ID NO: 18025 - DNA, 36 bp, synthetic construct
  source 1..36: mol_type = other DNA
tctcaaaaaagctgataacaaagtactcttccctga

SEQ ID NO: 18026 - DNA, 36 bp, synthetic construct
  source 1..36: mol_type = other DNA
tctcaaaaaagctgataacaaagtactcttgcctga

SEQ ID NO: 18027 - DNA, 37 bp, synthetic construct
  source 1..37: mol_type = other DNA
gtctcaaaaaagctgataacaaagtactcttgcctga

SEQ ID NO: 18028 - DNA, 37 bp, synthetic construct
  source 1..37: mol_type = other DNA
gtctcaaaaaagctgataacaaagtactcttccctga

SEQ ID NO: 18029 - DNA, 38 bp, synthetic construct
  source 1..38: mol_type = other DNA
agtctcaaaaaagctgataacaaagtactcttccctga

SEQ ID NO: 18030 - DNA, 38 bp, synthetic construct
  source 1..38: mol_type = other DNA
agtctcaaaaaagctgataacaaagtactcttgcctga

SEQ ID NO: 18031 - DNA, 39 bp, synthetic construct
  source 1..39: mol_type = other DNA
tagtctcaaaaaagctgataacaaagtactcttccctga

SEQ ID NO: 18032 - DNA, 39 bp, synthetic construct
  source 1..39: mol_type = other DNA
tagtctcaaaaaagctgataacaaagtactcttgcctga

SEQ ID NO: 18033 - DNA, 40 bp, synthetic construct
  source 1..40: mol_type = other DNA
gtagtctcaaaaaagctgataacaaagtactcttgcctga

SEQ ID NO: 18034 - DNA, 40 bp, synthetic construct
  source 1..40: mol_type = other DNA
gtagtctcaaaaaagctgataacaaagtactcttccctga

SEQ ID NO: 18035 - DNA, 10 bp, synthetic construct
  source 1..10: mol_type = other DNA
tagtctcaaa

SEQ ID NO: 18036 - DNA, 11 bp, synthetic construct
  source 1..11: mol_type = other DNA
gtagtctcaaa

SEQ ID NO: 18037 - DNA, 12 bp, synthetic construct
  source 1..12: mol_type = other DNA
agtagtctcaaa

SEQ ID NO: 18038 - DNA, 13 bp, synthetic construct
  source 1..13: mol_type = other DNA
cagtagtctcaaa

SEQ ID NO: 18039 - DNA, 14 bp, synthetic construct
  source 1..14: mol_type = other DNA
tcagtagtctcaaa

SEQ ID NO: 18040 - DNA, 15 bp, synthetic construct
  source 1..15: mol_type = other DNA
ttcagtagtctcaaa

SEQ ID NO: 18041 - DNA, 16 bp, synthetic construct
  source 1..16: mol_type = other DNA
gttcagtagtctcaaa

SEQ ID NO: 18042 - DNA, 17 bp, synthetic construct
  source 1..17: mol_type = other DNA
tgttcagtagtctcaaa

SEQ ID NO: 18043 - DNA, 18 bp, synthetic construct
  source 1..18: mol_type = other DNA
gtgttcagtagtctcaaa

SEQ ID NO: 18044 - DNA, 19 bp, synthetic construct
  source 1..19: mol_type = other DNA
agtgttcagtagtctcaaa

SEQ ID NO: 18045 - DNA, 20 bp, synthetic construct
  source 1..20: mol_type = other DNA
cagtgttcagtagtctcaaa

SEQ ID NO: 18046 - DNA, 21 bp, synthetic construct
  source 1..21: mol_type = other DNA
tcagtgttcagtagtctcaaa

SEQ ID NO: 18047 - DNA, 22 bp, synthetic construct
  source 1..22: mol_type = other DNA
ttcagtgttcagtagtctcaaa

SEQ ID NO: 18048 - DNA, 23 bp, synthetic construct
  source 1..23: mol_type = other DNA
cttcagtgttcagtagtctcaaa

SEQ ID NO: 18049 - DNA, 24 bp, synthetic construct
  source 1..24: mol_type = other DNA
ccttcagtgttcagtagtctcaaa

SEQ ID NO: 18050 - DNA, 25 bp, synthetic construct
  source 1..25: mol_type = other DNA
tccttcagtgttcagtagtctcaaa

SEQ ID NO: 18051 - DNA, 26 bp, synthetic construct
  source 1..26: mol_type = other DNA
ctccttcagtgttcagtagtctcaaa

SEQ ID NO: 18052 - DNA, 27 bp, synthetic construct
  source 1..27: mol_type = other DNA
tctccttcagtgttcagtagtctcaaa

SEQ ID NO: 18053 - DNA, 28 bp, synthetic construct
  source 1..28: mol_type = other DNA
ttctccttcagtgttcagtagtctcaaa

SEQ ID NO: 18054 - DNA, 29 bp, synthetic construct
  source 1..29: mol_type = other DNA
tttctccttcagtgttcagtagtctcaaa

SEQ ID NO: 18055 - DNA, 30 bp, synthetic construct
  source 1..30: mol_type = other DNA
atttctccttcagtgttcagtagtctcaaa

SEQ ID NO: 18056 - DNA, 31 bp, synthetic construct
  source 1..31: mol_type = other DNA
gatttctccttcagtgttcagtagtctcaaa

SEQ ID NO: 18057 - DNA, 32 bp, synthetic construct
  source 1..32: mol_type = other DNA
ggatttctccttcagtgttcagtagtctcaaa

SEQ ID NO: 18058 - DNA, 33 bp, synthetic construct
  source 1..33: mol_type = other DNA
tggatttctccttcagtgttcagtagtctcaaa

SEQ ID NO: 18059 - DNA, 34 bp, synthetic construct
  source 1..34: mol_type = other DNA
ctggatttctccttcagtgttcagtagtctcaaa

SEQ ID NO: 18060 - DNA, 35 bp, synthetic construct
  source 1..35: mol_type = other DNA
tctggatttctccttcagtgttcagtagtctcaaa

SEQ ID NO: 18061 - DNA, 36 bp, synthetic construct
  source 1..36: mol_type = other DNA
atctggatttctccttcagtgttcagtagtctcaaa

SEQ ID NO: 18062 - DNA, 37 bp, synthetic construct
  source 1..37: mol_type = other DNA
gatctggatttctccttcagtgttcagtagtctcaaa

SEQ ID NO: 18063 - DNA, 38 bp, synthetic construct
  source 1..38: mol_type = other DNA
cgatctggatttctccttcagtgttcagtagtctcaaa

SEQ ID NO: 18064 - DNA, 39 bp, synthetic construct
  source 1..39: mol_type = other DNA
tcgatctggatttctccttcagtgttcagtagtctcaaa

SEQ ID NO: 18065 - DNA, 40 bp, synthetic construct
  source 1..40: mol_type = other DNA
atcgatctggatttctccttcagtgttcagtagtctcaaa

SEQ ID NO: 18066 - DNA, 28 bp, synthetic construct
  source 1..28: mol_type = other DNA
caaaaaagctgataacaaagtggacttc

SEQ ID NO: 18067 - DNA, 28 bp, synthetic construct
  source 1..28: mol_type = other DNA
caaaaaagctgataacaaagtactcttc

SEQ ID NO: 18068 - DNA, 29 bp, synthetic construct
  source 1..29: mol_type = other DNA
tcaaaaaagctgataacaaagtggacttc

SEQ ID NO: 18069 - DNA, 29 bp, synthetic construct
  source 1..29: mol_type = other DNA
tcaaaaaagctgataacaaagtactcttc

SEQ ID NO: 18070 - DNA, 30 bp, synthetic construct
  source 1..30: mol_type = other DNA
ctcaaaaaagctgataacaaagtactcttc

SEQ ID NO: 18071 - DNA, 30 bp, synthetic construct
  source 1..30: mol_type = other DNA
ctcaaaaaagctgataacaaagtggacttc

SEQ ID NO: 18072 - DNA, 31 bp, synthetic construct
  source 1..31: mol_type = other DNA
tctcaaaaaagctgataacaaagtggacttc

SEQ ID NO: 18073 - DNA, 31 bp, synthetic construct
  source 1..31: mol_type = other DNA
tctcaaaaaagctgataacaaagtactcttc

SEQ ID NO: 18074 - DNA, 32 bp, synthetic construct
  source 1..32: mol_type = other DNA
gtctcaaaaaagctgataacaaagtggacttc

SEQ ID NO: 18075 - DNA, 32 bp, synthetic construct
  source 1..32: mol_type = other DNA
gtctcaaaaaagctgataacaaagtactcttc

SEQ ID NO: 18076 - DNA, 33 bp, synthetic construct
  source 1..33: mol_type = other DNA
agtctcaaaaaagctgataacaaagtggacttc

SEQ ID NO: 18077 - DNA, 33 bp, synthetic construct
  source 1..33: mol_type = other DNA
agtctcaaaaaagctgataacaaagtactcttc

SEQ ID NO: 18078 - DNA, 34 bp, synthetic construct
  source 1..34: mol_type = other DNA
tagtctcaaaaaagctgataacaaagtactcttc

SEQ ID NO: 18079 - DNA, 34 bp, synthetic construct
  source 1..34: mol_type = other DNA
tagtctcaaaaaagctgataacaaagtggacttc

SEQ ID NO: 18080 - DNA, 35 bp, synthetic construct
  source 1..35: mol_type = other DNA
gtagtctcaaaaaagctgataacaaagtactcttc

SEQ ID NO: 18081 - DNA, 35 bp, synthetic construct
  source 1..35: mol_type = other DNA
gtagtctcaaaaaagctgataacaaagtggacttc

SEQ ID NO: 18082 - DNA, 36 bp, synthetic construct
  source 1..36: mol_type = other DNA
agtagtctcaaaaaagctgataacaaagtggacttc

SEQ ID NO: 18083 - DNA, 36 bp, synthetic construct
  source 1..36: mol_type = other DNA
agtagtctcaaaaaagctgataacaaagtactcttc

SEQ ID NO: 18084 - DNA, 37 bp, synthetic construct
  source 1..37: mol_type = other DNA
cagtagtctcaaaaaagctgataacaaagtactcttc

SEQ ID NO: 18085 - DNA, 37 bp, synthetic construct
  source 1..37: mol_type = other DNA
cagtagtctcaaaaaagctgataacaaagtggacttc

SEQ ID NO: 18086 - DNA, 38 bp, synthetic construct
  source 1..38: mol_type = other DNA
tcagtagtctcaaaaaagctgataacaaagtggacttc

SEQ ID NO: 18087 - DNA, 38 bp, synthetic construct
  source 1..38: mol_type = other DNA
tcagtagtctcaaaaaagctgataacaaagtactcttc

SEQ ID NO: 18088 - DNA, 39 bp, synthetic construct
  source 1..39: mol_type = other DNA
ttcagtagtctcaaaaaagctgataacaaagtggacttc

SEQ ID NO: 18089 - DNA, 39 bp, synthetic construct
  source 1..39: mol_type = other DNA
ttcagtagtctcaaaaaagctgataacaaagtactcttc

SEQ ID NO: 18090 - DNA, 40 bp, synthetic construct
  source 1..40: mol_type = other DNA
gttcagtagtctcaaaaaagctgataacaaagtactcttc

SEQ ID NO: 18091 - DNA, 40 bp, synthetic construct
  source 1..40: mol_type = other DNA
gttcagtagtctcaaaaaagctgataacaaagtggacttc

SEQ ID NO: 18092 - DNA, 27 bp, synthetic construct
  source 1..27: mol_type = other DNA
caaaaaagctgataacaaagtactctt

SEQ ID NO: 18093 - DNA, 28 bp, synthetic construct
  source 1..28: mol_type = other DNA
tcaaaaaagctgataacaaagtactctt

SEQ ID NO: 18094 - DNA, 29 bp, synthetic construct
  source 1..29: mol_type = other DNA
ctcaaaaaagctgataacaaagtactctt

SEQ ID NO: 18095 - DNA, 30 bp, synthetic construct
  source 1..30: mol_type = other DNA
tctcaaaaaagctgataacaaagtactctt

SEQ ID NO: 18096 - DNA, 31 bp, synthetic construct
  source 1..31: mol_type = other DNA
gtctcaaaaaagctgataacaaagtactctt

SEQ ID NO: 18097 - DNA, 32 bp, synthetic construct
  source 1..32: mol_type = other DNA
agtctcaaaaaagctgataacaaagtactctt

SEQ ID NO: 18098 - DNA, 33 bp, synthetic construct
  source 1..33: mol_type = other DNA
tagtctcaaaaaagctgataacaaagtactctt

SEQ ID NO: 18099 - DNA, 34 bp, synthetic construct
  source 1..34: mol_type = other DNA
gtagtctcaaaaaagctgataacaaagtactctt

SEQ ID NO: 18100 - DNA, 35 bp, synthetic construct
  source 1..35: mol_type = other DNA
agtagtctcaaaaaagctgataacaaagtactctt

SEQ ID NO: 18101 - DNA, 36 bp, synthetic construct
  source 1..36: mol_type = other DNA
cagtagtctcaaaaaagctgataacaaagtactctt

SEQ ID NO: 18102 - DNA, 37 bp, synthetic construct
  source 1..37: mol_type = other DNA
tcagtagtctcaaaaaagctgataacaaagtactctt

SEQ ID NO: 18103 - DNA, 38 bp, synthetic construct
  source 1..38: mol_type = other DNA
ttcagtagtctcaaaaaagctgataacaaagtactctt

SEQ ID NO: 18104 - DNA, 39 bp, synthetic construct
  source 1..39: mol_type = other DNA
gttcagtagtctcaaaaaagctgataacaaagtactctt

SEQ ID NO: 18105 - DNA, 40 bp, synthetic construct
  source 1..40: mol_type = other DNA
tgttcagtagtctcaaaaaagctgataacaaagtactctt

SEQ ID NO: 18106 - DNA, 39 bp, synthetic construct
  source 1..39: mol_type = other DNA
tgagactactgaacactgaaggagaaatccagatcgatg

SEQ ID NO: 18107 - DNA, 40 bp, synthetic construct
  source 1..40: mol_type = other DNA
ttgagactactgaacactgaaggagaaatccagatcgatg

SEQ ID NO: 18108 - DNA, 18 bp, synthetic construct
  source 1..18: mol_type = other DNA
tgagactactgaacactg

SEQ ID NO: 18109 - DNA, 19 bp, synthetic construct
  source 1..19: mol_type = other DNA
ttgagactactgaacactg

SEQ ID NO: 18110 - DNA, 20 bp, synthetic construct
  source 1..20: mol_type = other DNA
tttgagactactgaacactg

SEQ ID NO: 18111 - DNA, 21 bp, synthetic construct
  source 1..21: mol_type = other DNA
ttttgagactactgaacactg

SEQ ID NO: 18112 - DNA, 22 bp, synthetic construct
  source 1..22: mol_type = other DNA
tttttgagactactgaacactg

SEQ ID NO: 18113 - DNA, 23 bp, synthetic construct
  source 1..23: mol_type = other DNA
ttttttgagactactgaacactg

SEQ ID NO: 18114 - DNA, 24 bp, synthetic construct
  source 1..24: mol_type = other DNA
cttttttgagactactgaacactg

SEQ ID NO: 18115 - DNA, 25 bp, synthetic construct
  source 1..25: mol_type = other DNA
gcttttttgagactactgaacactg

SEQ ID NO: 18116 - DNA, 26 bp, synthetic construct
  source 1..26: mol_type = other DNA
agcttttttgagactactgaacactg

SEQ ID NO: 18117 - DNA, 27 bp, synthetic construct
  source 1..27: mol_type = other DNA
cagcttttttgagactactgaacactg

SEQ ID NO: 18118 - DNA, 28 bp, synthetic construct
  source 1..28: mol_type = other DNA
tcagcttttttgagactactgaacactg

SEQ ID NO: 18119 - DNA, 29 bp, synthetic construct
  source 1..29: mol_type = other DNA
atcagcttttttgagactactgaacactg

SEQ ID NO: 18120 - DNA, 30 bp, synthetic construct
  source 1..30: mol_type = other DNA
tatcagcttttttgagactactgaacactg

SEQ ID NO: 18121 - DNA, 31 bp, synthetic construct
  source 1..31: mol_type = other DNA
ttatcagcttttttgagactactgaacactg

SEQ ID NO: 18122 - DNA, 32 bp, synthetic construct
  source 1..32: mol_type = other DNA
gttatcagcttttttgagactactgaacactg

SEQ ID NO: 18123 - DNA, 33 bp, synthetic construct
  source 1..33: mol_type = other DNA
tgttatcagcttttttgagactactgaacactg

SEQ ID NO: 18124 - DNA, 34 bp, synthetic construct
  source 1..34: mol_type = other DNA
ttgttatcagcttttttgagactactgaacactg

SEQ ID NO: 18125 - DNA, 35 bp, synthetic construct
  source 1..35: mol_type = other DNA
tttgttatcagcttttttgagactactgaacactg

SEQ ID NO: 18126 - DNA, 36 bp, synthetic construct
  source 1..36: mol_type = other DNA
ctttgttatcagcttttttgagactactgaacactg

SEQ ID NO: 18127 - DNA, 37 bp, synthetic construct
  source 1..37: mol_type = other DNA
actttgttatcagcttttttgagactactgaacactg

SEQ ID NO: 18128 - DNA, 38 bp, synthetic construct
  source 1..38: mol_type = other DNA
tactttgttatcagcttttttgagactactgaacactg

SEQ ID NO: 18129 - DNA, 39 bp, synthetic construct
  source 1..39: mol_type = other DNA
gtactttgttatcagcttttttgagactactgaacactg

SEQ ID NO: 18130 - DNA, 40 bp, synthetic construct
  source 1..40: mol_type = other DNA
agtactttgttatcagcttttttgagactactgaacactg

SEQ ID NO: 18131 - DNA, 29 bp, synthetic construct
  source 1..29: mol_type = other DNA
caaaaaagctgataacaaagtactcttcc

SEQ ID NO: 18132 - DNA, 30 bp, synthetic construct
  source 1..30: mol_type = other DNA
tcaaaaaagctgataacaaagtactcttcc

SEQ ID NO: 18133 - DNA, 31 bp, synthetic construct
  source 1..31: mol_type = other DNA
ctcaaaaaagctgataacaaagtactcttcc

SEQ ID NO: 18134 - DNA, 32 bp, synthetic construct
  source 1..32: mol_type = other DNA
tctcaaaaaagctgataacaaagtactcttcc

SEQ ID NO: 18135 - DNA, 33 bp, synthetic construct
  source 1..33: mol_type = other DNA
gtctcaaaaaagctgataacaaagtactcttcc

SEQ ID NO: 18136 - DNA, 34 bp, synthetic construct
  source 1..34: mol_type = other DNA
agtctcaaaaaagctgataacaaagtactcttcc

SEQ ID NO: 18137 - DNA, 35 bp, synthetic construct
  source 1..35: mol_type = other DNA
tagtctcaaaaaagctgataacaaagtactcttcc

SEQ ID NO: 18138 - DNA, 36 bp, synthetic construct
  source 1..36: mol_type = other DNA
gtagtctcaaaaaagctgataacaaagtactcttcc

SEQ ID NO: 18139 - DNA, 37 bp, synthetic construct
  source 1..37: mol_type = other DNA
agtagtctcaaaaaagctgataacaaagtactcttcc

SEQ ID NO: 18140 - DNA, 38 bp, synthetic construct
  source 1..38: mol_type = other DNA
cagtagtctcaaaaaagctgataacaaagtactcttcc

SEQ ID NO: 18141 - DNA, 39 bp, synthetic construct
  source 1..39: mol_type = other DNA
tcagtagtctcaaaaaagctgataacaaagtactcttcc

SEQ ID NO: 18142 - DNA, 40 bp, synthetic construct
  source 1..40: mol_type = other DNA
ttcagtagtctcaaaaaagctgataacaaagtactcttcc

SEQ ID NO: 18143 - DNA, 14 bp, synthetic construct
  source 1..14: mol_type = other DNA
tgagactattgaac

SEQ ID NO: 18144 - DNA, 14 bp, synthetic construct
  source 1..14: mol_type = other DNA
tgagactactgaac

SEQ ID NO: 18145 - DNA, 15 bp, synthetic construct
  source 1..15: mol_type = other DNA
ttgagactattgaac

SEQ ID NO: 18146 - DNA, 15 bp, synthetic construct
  source 1..15: mol_type = other DNA
ttgagactactgaac

SEQ ID NO: 18147 - DNA, 16 bp, synthetic construct
  source 1..16: mol_type = other DNA
tttgagactattgaac

SEQ ID NO: 18148 - DNA, 16 bp, synthetic construct
  source 1..16: mol_type = other DNA
tttgagactactgaac

SEQ ID NO: 18149 - DNA, 17 bp, synthetic construct
  source 1..17: mol_type = other DNA
ttttgagactactgaac

SEQ ID NO: 18150 - DNA, 17 bp, synthetic construct
  source 1..17: mol_type = other DNA
ttttgagactattgaac

SEQ ID NO: 18151 - DNA, 18 bp, synthetic construct
  source 1..18: mol_type = other DNA
tttttgagactattgaac

SEQ ID NO: 18152 - DNA, 18 bp, synthetic construct
  source 1..18: mol_type = other DNA
tttttgagactactgaac

SEQ ID NO: 18153 - DNA, 19 bp, synthetic construct
  source 1..19: mol_type = other DNA
ttttttgagactattgaac

SEQ ID NO: 18154 - DNA, 19 bp, synthetic construct
  source 1..19: mol_type = other DNA
ttttttgagactactgaac

SEQ ID NO: 18155 - DNA, 20 bp, synthetic construct
  source 1..20: mol_type = other DNA
cttttttgagactattgaac

SEQ ID NO: 18156 - DNA, 20 bp, synthetic construct
  source 1..20: mol_type = other DNA
cttttttgagactactgaac

SEQ ID NO: 18157 - DNA, 21 bp, synthetic construct
  source 1..21: mol_type = other DNA
gcttttttgagactattgaac

SEQ ID NO: 18158 - DNA, 21 bp, synthetic construct
  source 1..21: mol_type = other DNA
gcttttttgagactactgaac

SEQ ID NO: 18159 - DNA, 22 bp, synthetic construct
  source 1..22: mol_type = other DNA
agcttttttgagactactgaac

SEQ ID NO: 18160 - DNA, 22 bp, synthetic construct
  source 1..22: mol_type = other DNA
agcttttttgagactattgaac

SEQ ID NO: 18161 - DNA, 23 bp, synthetic construct
  source 1..23: mol_type = other DNA
cagcttttttgagactactgaac

SEQ ID NO: 18162 - DNA, 23 bp, synthetic construct
  source 1..23: mol_type = other DNA
cagcttttttgagactattgaac

SEQ ID NO: 18163 - DNA, 24 bp, synthetic construct
  source 1..24: mol_type = other DNA
tcagcttttttgagactattgaac

SEQ ID NO: 18164 - DNA, 24 bp, synthetic construct
  source 1..24: mol_type = other DNA
tcagcttttttgagactactgaac

SEQ ID NO: 18165 - DNA, 25 bp, synthetic construct
  source 1..25: mol_type = other DNA
atcagcttttttgagactattgaac

SEQ ID NO: 18166 - DNA, 25 bp, synthetic construct
  source 1..25: mol_type = other DNA
atcagcttttttgagactactgaac

SEQ ID NO: 18167 - DNA, 26 bp, synthetic construct
  source 1..26: mol_type = other DNA
tatcagcttttttgagactactgaac

SEQ ID NO: 18168 - DNA, 26 bp, synthetic construct
  source 1..26: mol_type = other DNA
tatcagcttttttgagactattgaac

SEQ ID NO: 18169 - DNA, 27 bp, synthetic construct
  source 1..27: mol_type = other DNA
ttatcagcttttttgagactactgaac

SEQ ID NO: 18170 - DNA, 27 bp, synthetic construct
  source 1..27: mol_type = other DNA
ttatcagcttttttgagactattgaac

SEQ ID NO: 18171 - DNA, 28 bp, synthetic construct
  source 1..28: mol_type = other DNA
gttatcagcttttttgagactattgaac

SEQ ID NO: 18172 - DNA, 28 bp, synthetic construct
  source 1..28: mol_type = other DNA
gttatcagcttttttgagactactgaac

SEQ ID NO: 18173 - DNA, 29 bp, synthetic construct
  source 1..29: mol_type = other DNA
tgttatcagcttttttgagactattgaac

SEQ ID NO: 18174 - DNA, 29 bp, synthetic construct
  source 1..29: mol_type = other DNA
tgttatcagcttttttgagactactgaac

SEQ ID NO: 18175 - DNA, 30 bp, synthetic construct
  source 1..30: mol_type = other DNA
ttgttatcagcttttttgagactattgaac

SEQ ID NO: 18176 - DNA, 30 bp, synthetic construct
  source 1..30: mol_type = other DNA
ttgttatcagcttttttgagactactgaac

SEQ ID NO: 18177 - DNA, 31 bp, synthetic construct
  source 1..31: mol_type = other DNA
tttgttatcagcttttttgagactactgaac

SEQ ID NO: 18178 - DNA, 31 bp, synthetic construct
  source 1..31: mol_type = other DNA
tttgttatcagcttttttgagactattgaac

SEQ ID NO: 18179 - DNA, 32 bp, synthetic construct
  source 1..32: mol_type = other DNA
ctttgttatcagcttttttgagactactgaac

SEQ ID NO: 18180 - DNA, 32 bp, synthetic construct
  source 1..32: mol_type = other DNA
ctttgttatcagcttttttgagactattgaac

SEQ ID NO: 18181 - DNA, 33 bp, synthetic construct
  source 1..33: mol_type = other DNA
actttgttatcagcttttttgagactattgaac

SEQ ID NO: 18182 - DNA, 33 bp, synthetic construct
  source 1..33: mol_type = other DNA
actttgttatcagcttttttgagactactgaac

SEQ ID NO: 18183 - DNA, 34 bp, synthetic construct
  source 1..34: mol_type = other DNA
tactttgttatcagcttttttgagactactgaac

SEQ ID NO: 18184 - DNA, 34 bp, synthetic construct
  source 1..34: mol_type = other DNA
tactttgttatcagcttttttgagactattgaac

SEQ ID NO: 18185 - DNA, 35 bp, synthetic construct
  source 1..35: mol_type = other DNA
gtactttgttatcagcttttttgagactactgaac

SEQ ID NO: 18186 - DNA, 35 bp, synthetic construct
  source 1..35: mol_type = other DNA
gtactttgttatcagcttttttgagactattgaac

SEQ ID NO: 18187 - DNA, 36 bp, synthetic construct
  source 1..36: mol_type = other DNA
agtactttgttatcagcttttttgagactattgaac

SEQ ID NO: 18188 - DNA, 36 bp, synthetic construct
  source 1..36: mol_type = other DNA
agtactttgttatcagcttttttgagactactgaac

SEQ ID NO: 18189 - DNA, 37 bp, synthetic construct
  source 1..37: mol_type = other DNA
gagtactttgttatcagcttttttgagactactgaac

SEQ ID NO: 18190 - DNA, 37 bp, synthetic construct
  source 1..37: mol_type = other DNA
gagtactttgttatcagcttttttgagactattgaac

SEQ ID NO: 18191 - DNA, 38 bp, synthetic construct
  source 1..38: mol_type = other DNA
agagtactttgttatcagcttttttgagactattgaac

SEQ ID NO: 18192 - DNA, 38 bp, synthetic construct
  source 1..38: mol_type = other DNA
agagtactttgttatcagcttttttgagactactgaac

SEQ ID NO: 18193 - DNA, 39 bp, synthetic construct
  source 1..39: mol_type = other DNA
aagagtactttgttatcagcttttttgagactattgaac

SEQ ID NO: 18194 - DNA, 39 bp, synthetic construct
  source 1..39: mol_type = other DNA
aagagtactttgttatcagcttttttgagactactgaac

SEQ ID NO: 18195 - DNA, 40 bp, synthetic construct
  source 1..40: mol_type = other DNA
gaagagtactttgttatcagcttttttgagactattgaac

SEQ ID NO: 18196 - DNA, 40 bp, synthetic construct
  source 1..40: mol_type = other DNA
gaagagtactttgttatcagcttttttgagactactgaac

SEQ ID NO: 18197 - DNA, 13 bp, synthetic construct
  source 1..13: mol_type = other DNA
tgagactactgaa

SEQ ID NO: 18198 - DNA, 14 bp, synthetic construct
  source 1..14: mol_type = other DNA
ttgagactactgaa

SEQ ID NO: 18199 - DNA, 15 bp, synthetic construct
  source 1..15: mol_type = other DNA
tttgagactactgaa

SEQ ID NO: 18200 - DNA, 16 bp, synthetic construct
  source 1..16: mol_type = other DNA
ttttgagactactgaa

SEQ ID NO: 18201 - DNA, 17 bp, synthetic construct
  source 1..17: mol_type = other DNA
tttttgagactactgaa

SEQ ID NO: 18202 - DNA, 18 bp, synthetic construct
  source 1..18: mol_type = other DNA
ttttttgagactactgaa

SEQ ID NO: 18203 - DNA, 19 bp, synthetic construct
  source 1..19: mol_type = other DNA
cttttttgagactactgaa

SEQ ID NO: 18204 - DNA, 20 bp, synthetic construct
  source 1..20: mol_type = other DNA
gcttttttgagactactgaa

SEQ ID NO: 18205 - DNA, 21 bp, synthetic construct
  source 1..21: mol_type = other DNA
agcttttttgagactactgaa

SEQ ID NO: 18206 - DNA, 22 bp, synthetic construct
  source 1..22: mol_type = other DNA
cagcttttttgagactactgaa

SEQ ID NO: 18207 - DNA, 23 bp, synthetic construct
  source 1..23: mol_type = other DNA
tcagcttttttgagactactgaa

SEQ ID NO: 18208 - DNA, 24 bp, synthetic construct
  source 1..24: mol_type = other DNA
atcagcttttttgagactactgaa

SEQ ID NO: 18209 - DNA, 25 bp, synthetic construct
  source 1..25: mol_type = other DNA
tatcagcttttttgagactactgaa

SEQ ID NO: 18210 - DNA, 26 bp, synthetic construct
  source 1..26: mol_type = other DNA
ttatcagcttttttgagactactgaa

SEQ ID NO: 18211 - DNA, 27 bp, synthetic construct
  source 1..27: mol_type = other DNA
gttatcagcttttttgagactactgaa

SEQ ID NO: 18212 - DNA, 28 bp, synthetic construct
  source 1..28: mol_type = other DNA
tgttatcagcttttttgagactactgaa

SEQ ID NO: 18213 - DNA, 29 bp, synthetic construct
  source 1..29: mol_type = other DNA
ttgttatcagcttttttgagactactgaa

SEQ ID NO: 18214 - DNA, 30 bp, synthetic construct
  source 1..30: mol_type = other DNA
tttgttatcagcttttttgagactactgaa

SEQ ID NO: 18215 - DNA, 31 bp, synthetic construct
  source 1..31: mol_type = other DNA
ctttgttatcagcttttttgagactactgaa

SEQ ID NO: 18216 - DNA, 32 bp, synthetic construct
  source 1..32: mol_type = other DNA
actttgttatcagcttttttgagactactgaa

SEQ ID NO: 18217 - DNA, 33 bp, synthetic construct
  source 1..33: mol_type = other DNA
tactttgttatcagcttttttgagactactgaa

SEQ ID NO: 18218 - DNA, 34 bp, synthetic construct
  source 1..34: mol_type = other DNA
gtactttgttatcagcttttttgagactactgaa

SEQ ID NO: 18219 - DNA, 35 bp, synthetic construct
  source 1..35: mol_type = other DNA
agtactttgttatcagcttttttgagactactgaa

SEQ ID NO: 18220 - DNA, 36 bp, synthetic construct
  source 1..36: mol_type = other DNA
gagtactttgttatcagcttttttgagactactgaa

SEQ ID NO: 18221 - DNA, 37 bp, synthetic construct
  source 1..37: mol_type = other DNA
agagtactttgttatcagcttttttgagactactgaa

SEQ ID NO: 18222 - DNA, 38 bp, synthetic construct
  source 1..38: mol_type = other DNA
aagagtactttgttatcagcttttttgagactactgaa

SEQ ID NO: 18223 - DNA, 39 bp, synthetic construct
  source 1..39: mol_type = other DNA
gaagagtactttgttatcagcttttttgagactactgaa

SEQ ID NO: 18224 - DNA, 40 bp, synthetic construct
  source 1..40: mol_type = other DNA
ggaagagtactttgttatcagcttttttgagactactgaa

SEQ ID NO: 18225 - DNA, 30 bp, synthetic construct
  source 1..30: mol_type = other DNA
caaaaaagctgataacaaagtactcttccc

SEQ ID NO: 18226 - DNA, 30 bp, synthetic construct
  source 1..30: mol_type = other DNA
caaaaaagctgataacaaagtacttttccc

SEQ ID NO: 18227 - DNA, 31 bp, synthetic construct
  source 1..31: mol_type = other DNA
tcaaaaaagctgataacaaagtacttttccc

SEQ ID NO: 18228 - DNA, 31 bp, synthetic construct
  source 1..31: mol_type = other DNA
tcaaaaaagctgataacaaagtactcttccc

SEQ ID NO: 18229 - DNA, 32 bp, synthetic construct
  source 1..32: mol_type = other DNA
ctcaaaaaagctgataacaaagtactcttccc

SEQ ID NO: 18230 - DNA, 32 bp, synthetic construct
  source 1..32: mol_type = other DNA
ctcaaaaaagctgataacaaagtacttttccc

SEQ ID NO: 18231 - DNA, 33 bp, synthetic construct
  source 1..33: mol_type = other DNA
tctcaaaaaagctgataacaaagtacttttccc

SEQ ID NO: 18232 - DNA, 33 bp, synthetic construct
  source 1..33: mol_type = other DNA
tctcaaaaaagctgataacaaagtactcttccc

SEQ ID NO: 18233 - DNA, 34 bp, synthetic construct
  source 1..34: mol_type = other DNA
gtctcaaaaaagctgataacaaagtacttttccc

SEQ ID NO: 18234 - DNA, 34 bp, synthetic construct
  source 1..34: mol_type = other DNA
gtctcaaaaaagctgataacaaagtactcttccc

SEQ ID NO: 18235 - DNA, 35 bp, synthetic construct
  source 1..35: mol_type = other DNA
agtctcaaaaaagctgataacaaagtacttttccc

SEQ ID NO: 18236 - DNA, 35 bp, synthetic construct
  source 1..35: mol_type = other DNA
agtctcaaaaaagctgataacaaagtactcttccc

SEQ ID NO: 18237 - DNA, 36 bp, synthetic construct
  source 1..36: mol_type = other DNA
tagtctcaaaaaagctgataacaaagtacttttccc

SEQ ID NO: 18238 - DNA, 36 bp, synthetic construct
  source 1..36: mol_type = other DNA
tagtctcaaaaaagctgataacaaagtactcttccc

SEQ ID NO: 18239 - DNA, 37 bp, synthetic construct
  source 1..37: mol_type = other DNA
gtagtctcaaaaaagctgataacaaagtacttttccc

SEQ ID NO: 18240 - DNA, 37 bp, synthetic construct
  source 1..37: mol_type = other DNA
gtagtctcaaaaaagctgataacaaagtactcttccc

SEQ ID NO: 18241 - DNA, 38 bp, synthetic construct
  source 1..38: mol_type = other DNA
agtagtctcaaaaaagctgataacaaagtactcttccc

SEQ ID NO: 18242 - DNA, 38 bp, synthetic construct
  source 1..38: mol_type = other DNA
agtagtctcaaaaaagctgataacaaagtacttttccc

SEQ ID NO: 18243 - DNA, 39 bp, synthetic construct
  source 1..39: mol_type = other DNA
cagtagtctcaaaaaagctgataacaaagtactcttccc

SEQ ID NO: 18244 - DNA, 39 bp, synthetic construct
  source 1..39: mol_type = other DNA
cagtagtctcaaaaaagctgataacaaagtacttttccc

SEQ ID NO: 18245 - DNA, 40 bp, synthetic construct
  source 1..40: mol_type = other DNA
tcagtagtctcaaaaaagctgataacaaagtactcttccc

SEQ ID NO: 18246 - DNA, 40 bp, synthetic construct
  source 1..40: mol_type = other DNA
tcagtagtctcaaaaaagctgataacaaagtacttttccc

SEQ ID NO: 18247 - DNA, 14 bp, synthetic construct
  source 1..14: mol_type = other DNA
caaaaaagcgctta

SEQ ID NO: 18248 - DNA, 14 bp, synthetic construct
  source 1..14: mol_type = other DNA
caaaaaagctgata

SEQ ID NO: 18249 - DNA, 15 bp, synthetic construct
  source 1..15: mol_type = other DNA
tcaaaaaagctgata

SEQ ID NO: 18250 - DNA, 15 bp, synthetic construct
  source 1..15: mol_type = other DNA
tcaaaaaagcgctta

SEQ ID NO: 18251 - DNA, 16 bp, synthetic construct
  source 1..16: mol_type = other DNA
ctcaaaaaagcgctta

SEQ ID NO: 18252 - DNA, 16 bp, synthetic construct
  source 1..16: mol_type = other DNA
ctcaaaaaagctgata

SEQ ID NO: 18253 - DNA, 17 bp, synthetic construct
  source 1..17: mol_type = other DNA
tctcaaaaaagctgata

SEQ ID NO: 18254 - DNA, 17 bp, synthetic construct
  source 1..17: mol_type = other DNA
tctcaaaaaagcgctta

SEQ ID NO: 18255 - DNA, 18 bp, synthetic construct
  source 1..18: mol_type = other DNA
gtctcaaaaaagctgata

SEQ ID NO: 18256 - DNA, 18 bp, synthetic construct
  source 1..18: mol_type = other DNA
gtctcaaaaaagcgctta

SEQ ID NO: 18257 - DNA, 19 bp, synthetic construct
  source 1..19: mol_type = other DNA
agtctcaaaaaagcgctta

SEQ ID NO: 18258 - DNA, 19 bp, synthetic construct
  source 1..19: mol_type = other DNA
agtctcaaaaaagctgata

SEQ ID NO: 18259 - DNA, 20 bp, synthetic construct
  source 1..20: mol_type = other DNA
tagtctcaaaaaagctgata

SEQ ID NO: 18260 - DNA, 20 bp, synthetic construct
  source 1..20: mol_type = other DNA
tagtctcaaaaaagcgctta

SEQ ID NO: 18261 - DNA, 21 bp, synthetic construct
  source 1..21: mol_type = other DNA
gtagtctcaaaaaagctgata

SEQ ID NO: 18262 - DNA, 21 bp, synthetic construct
  source 1..21: mol_type = other DNA
gtagtctcaaaaaagcgctta

SEQ ID NO: 18263 - DNA, 22 bp, synthetic construct
  source 1..22: mol_type = other DNA
agtagtctcaaaaaagctgata

SEQ ID NO: 18264 - DNA, 22 bp, synthetic construct
  source 1..22: mol_type = other DNA
agtagtctcaaaaaagcgctta

SEQ ID NO: 18265 - DNA, 23 bp, synthetic construct
  source 1..23: mol_type = other DNA
cagtagtctcaaaaaagctgata

SEQ ID NO: 18266 - DNA, 23 bp, synthetic construct
  source 1..23: mol_type = other DNA
cagtagtctcaaaaaagcgctta

SEQ ID NO: 18267 - DNA, 24 bp, synthetic construct
  source 1..24: mol_type = other DNA
tcagtagtctcaaaaaagctgata

SEQ ID NO: 18268 - DNA, 24 bp, synthetic construct
  source 1..24: mol_type = other DNA
tcagtagtctcaaaaaagcgctta

SEQ ID NO: 18269 - DNA, 25 bp, synthetic construct
  source 1..25: mol_type = other DNA
ttcagtagtctcaaaaaagctgata

SEQ ID NO: 18270 - DNA, 25 bp, synthetic construct
  source 1..25: mol_type = other DNA
ttcagtagtctcaaaaaagcgctta

SEQ ID NO: 18271 - DNA, 26 bp, synthetic construct
  source 1..26: mol_type = other DNA
gttcagtagtctcaaaaaagcgctta

SEQ ID NO: 18272 - DNA, 26 bp, synthetic construct
  source 1..26: mol_type = other DNA
gttcagtagtctcaaaaaagctgata

SEQ ID NO: 18273 - DNA, 27 bp, synthetic construct
  source 1..27: mol_type = other DNA
tgttcagtagtctcaaaaaagctgata

SEQ ID NO: 18274 - DNA, 27 bp, synthetic construct
  source 1..27: mol_type = other DNA
tgttcagtagtctcaaaaaagcgctta

SEQ ID NO: 18275 - DNA, 28 bp, synthetic construct
  source 1..28: mol_type = other DNA
gtgttcagtagtctcaaaaaagctgata

SEQ ID NO: 18276 - DNA, 28 bp, synthetic construct
  source 1..28: mol_type = other DNA
gtgttcagtagtctcaaaaaagcgctta

SEQ ID NO: 18277 - DNA, 29 bp, synthetic construct
  source 1..29: mol_type = other DNA
agtgttcagtagtctcaaaaaagcgctta

SEQ ID NO: 18278 - DNA, 29 bp, synthetic construct
  source 1..29: mol_type = other DNA
agtgttcagtagtctcaaaaaagctgata

SEQ ID NO: 18279 - DNA, 30 bp, synthetic construct
  source 1..30: mol_type = other DNA
cagtgttcagtagtctcaaaaaagctgata

SEQ ID NO: 18280 - DNA, 30 bp, synthetic construct
  source 1..30: mol_type = other DNA
cagtgttcagtagtctcaaaaaagcgctta

SEQ ID NO: 18281 - DNA, 31 bp, synthetic construct
  source 1..31: mol_type = other DNA
tcagtgttcagtagtctcaaaaaagcgctta

SEQ ID NO: 18282 - DNA, 31 bp, synthetic construct
  source 1..31: mol_type = other DNA
tcagtgttcagtagtctcaaaaaagctgata

SEQ ID NO: 18283 - DNA, 32 bp, synthetic construct
  source 1..32: mol_type = other DNA
ttcagtgttcagtagtctcaaaaaagcgctta

SEQ ID NO: 18284 - DNA, 32 bp, synthetic construct
  source 1..32: mol_type = other DNA
ttcagtgttcagtagtctcaaaaaagctgata

SEQ ID NO: 18285 - DNA, 33 bp, synthetic construct
  source 1..33: mol_type = other DNA
cttcagtgttcagtagtctcaaaaaagctgata

SEQ ID NO: 18286 - DNA, 33 bp, synthetic construct
  source 1..33: mol_type = other DNA
cttcagtgttcagtagtctcaaaaaagcgctta

SEQ ID NO: 18287 - DNA, 34 bp, synthetic construct
  source 1..34: mol_type = other DNA
ccttcagtgttcagtagtctcaaaaaagctgata

SEQ ID NO: 18288 - DNA, 34 bp, synthetic construct
  source 1..34: mol_type = other DNA
ccttcagtgttcagtagtctcaaaaaagcgctta

SEQ ID NO: 18289 - DNA, 35 bp, synthetic construct
  source 1..35: mol_type = other DNA
tccttcagtgttcagtagtctcaaaaaagctgata

SEQ ID NO: 18290 - DNA, 35 bp, synthetic construct
  source 1..35: mol_type = other DNA
tccttcagtgttcagtagtctcaaaaaagcgctta

SEQ ID NO: 18291 - DNA, 36 bp, synthetic construct
  source 1..36: mol_type = other DNA
ctccttcagtgttcagtagtctcaaaaaagcgctta

SEQ ID NO: 18292 - DNA, 36 bp, synthetic construct
  source 1..36: mol_type = other DNA
ctccttcagtgttcagtagtctcaaaaaagctgata

SEQ ID NO: 18293 - DNA, 37 bp, synthetic construct
  source 1..37: mol_type = other DNA
tctccttcagtgttcagtagtctcaaaaaagcgctta

SEQ ID NO: 18294 - DNA, 37 bp, synthetic construct
  source 1..37: mol_type = other DNA
tctccttcagtgttcagtagtctcaaaaaagctgata

SEQ ID NO: 18295 - DNA, 38 bp, synthetic construct
  source 1..38: mol_type = other DNA
ttctccttcagtgttcagtagtctcaaaaaagcgctta

SEQ ID NO: 18296 - DNA, 38 bp, synthetic construct
  source 1..38: mol_type = other DNA
ttctccttcagtgttcagtagtctcaaaaaagctgata

SEQ ID NO: 18297 - DNA, 39 bp, synthetic construct
  source 1..39: mol_type = other DNA
tttctccttcagtgttcagtagtctcaaaaaagctgata

SEQ ID NO: 18298 - DNA, 39 bp, synthetic construct
  source 1..39: mol_type = other DNA
tttctccttcagtgttcagtagtctcaaaaaagcgctta

SEQ ID NO: 18299 - DNA, 40 bp, synthetic construct
  source 1..40: mol_type = other DNA
atttctccttcagtgttcagtagtctcaaaaaagcgctta

SEQ ID NO: 18300 - DNA, 40 bp, synthetic construct
  source 1..40: mol_type = other DNA
atttctccttcagtgttcagtagtctcaaaaaagctgata

SEQ ID NO: 18301 - DNA, 13 bp, synthetic construct
  source 1..13: mol_type = other DNA
caaaaaagctgat

SEQ ID NO: 18302 - DNA, 14 bp, synthetic construct
  source 1..14: mol_type = other DNA
tcaaaaaagctgat

SEQ ID NO: 18303 - DNA, 15 bp, synthetic construct
  source 1..15: mol_type = other DNA
ctcaaaaaagctgat

SEQ ID NO: 18304 - DNA, 16 bp, synthetic construct
  source 1..16: mol_type = other DNA
tctcaaaaaagctgat

SEQ ID NO: 18305 - DNA, 17 bp, synthetic construct
  source 1..17: mol_type = other DNA
gtctcaaaaaagctgat

SEQ ID NO: 18306 - DNA, 18 bp, synthetic construct
  source 1..18: mol_type = other DNA
agtctcaaaaaagctgat

SEQ ID NO: 18307 - DNA, 19 bp, synthetic construct
  source 1..19: mol_type = other DNA
tagtctcaaaaaagctgat

SEQ ID NO: 18308 - DNA, 20 bp, synthetic construct
  source 1..20: mol_type = other DNA
gtagtctcaaaaaagctgat

SEQ ID NO: 18309 - DNA, 21 bp, synthetic construct
  source 1..21: mol_type = other DNA
agtagtctcaaaaaagctgat

SEQ ID NO: 18310 - DNA, 22 bp, synthetic construct
  source 1..22: mol_type = other DNA
cagtagtctcaaaaaagctgat

SEQ ID NO: 18311 - DNA, 23 bp, synthetic construct
  source 1..23: mol_type = other DNA
tcagtagtctcaaaaaagctgat

SEQ ID NO: 18312 - DNA, 24 bp, synthetic construct
  source 1..24: mol_type = other DNA
ttcagtagtctcaaaaaagctgat

SEQ ID NO: 18313 - DNA, 25 bp, synthetic construct
  source 1..25: mol_type = other DNA
gttcagtagtctcaaaaaagctgat

SEQ ID NO: 18314 - DNA, 26 bp, synthetic construct
  source 1..26: mol_type = other DNA
tgttcagtagtctcaaaaaagctgat

SEQ ID NO: 18315 - DNA, 27 bp, synthetic construct
  source 1..27: mol_type = other DNA
gtgttcagtagtctcaaaaaagctgat

SEQ ID NO: 18316 - DNA, 28 bp, synthetic construct
  source 1..28: mol_type = other DNA
agtgttcagtagtctcaaaaaagctgat

SEQ ID NO: 18317 - DNA, 29 bp, synthetic construct
  source 1..29: mol_type = other DNA
cagtgttcagtagtctcaaaaaagctgat

SEQ ID NO: 18318 - DNA, 30 bp, synthetic construct
  source 1..30: mol_type = other DNA
tcagtgttcagtagtctcaaaaaagctgat

SEQ ID NO: 18319 - DNA, 31 bp, synthetic construct
  source 1..31: mol_type = other DNA
ttcagtgttcagtagtctcaaaaaagctgat

SEQ ID NO: 18320 - DNA, 32 bp, synthetic construct
  source 1..32: mol_type = other DNA
cttcagtgttcagtagtctcaaaaaagctgat

SEQ ID NO: 18321 - DNA, 33 bp, synthetic construct
  source 1..33: mol_type = other DNA
ccttcagtgttcagtagtctcaaaaaagctgat

SEQ ID NO: 18322 - DNA, 34 bp, synthetic construct
  source 1..34: mol_type = other DNA
tccttcagtgttcagtagtctcaaaaaagctgat

SEQ ID NO: 18323 - DNA, 35 bp, synthetic construct
  source 1..35: mol_type = other DNA
ctccttcagtgttcagtagtctcaaaaaagctgat

SEQ ID NO: 18324 - DNA, 36 bp, synthetic construct
  source 1..36: mol_type = other DNA
tctccttcagtgttcagtagtctcaaaaaagctgat

SEQ ID NO: 18325 - DNA, 37 bp, synthetic construct
  source 1..37: mol_type = other DNA
ttctccttcagtgttcagtagtctcaaaaaagctgat

SEQ ID NO: 18326 - DNA, 38 bp, synthetic construct
  source 1..38: mol_type = other DNA
tttctccttcagtgttcagtagtctcaaaaaagctgat

SEQ ID NO: 18327 - DNA, 39 bp, synthetic construct
  source 1..39: mol_type = other DNA
atttctccttcagtgttcagtagtctcaaaaaagctgat

SEQ ID NO: 18328 - DNA, 40 bp, synthetic construct
  source 1..40: mol_type = other DNA
gatttctccttcagtgttcagtagtctcaaaaaagctgat

SEQ ID NO: 18329 - DNA, 39 bp, synthetic construct
  source 1..39: mol_type = other DNA
caaaaaagctgataacaaagtactcttccctgatccagt

SEQ ID NO: 18330 - DNA, 40 bp, synthetic construct
  source 1..40: mol_type = other DNA
tcaaaaaagctgataacaaagtactcttccctgatccagt

SEQ ID NO: 18331 - DNA, 35 bp, synthetic construct
  source 1..35: mol_type = other DNA
tgagactactgaacactgaaggagaaatccagatc

SEQ ID NO: 18332 - DNA, 36 bp, synthetic construct
  source 1..36: mol_type = other DNA
ttgagactactgaacactgaaggagaaatccagatc

SEQ ID NO: 18333 - DNA, 37 bp, synthetic construct
  source 1..37: mol_type = other DNA
tttgagactactgaacactgaaggagaaatccagatc

SEQ ID NO: 18334 - DNA, 38 bp, synthetic construct
  source 1..38: mol_type = other DNA
ttttgagactactgaacactgaaggagaaatccagatc

SEQ ID NO: 18335 - DNA, 39 bp, synthetic construct
  source 1..39: mol_type = other DNA
tttttgagactactgaacactgaaggagaaatccagatc

SEQ ID NO: 18336 - DNA, 40 bp, synthetic construct
  source 1..40: mol_type = other DNA
ttttttgagactactgaacactgaaggagaaatccagatc

SEQ ID NO: 18337 - DNA, 21 bp, synthetic construct
  source 1..21: mol_type = other DNA
tgagactactgaacactgaag

SEQ ID NO: 18338 - DNA, 21 bp, synthetic construct
  source 1..21: mol_type = other DNA
tgagactactgaacaccgaag

SEQ ID NO: 18339 - DNA, 22 bp, synthetic construct
  source 1..22: mol_type = other DNA
ttgagactactgaacaccgaag

SEQ ID NO: 18340 - DNA, 22 bp, synthetic construct
  source 1..22: mol_type = other DNA
ttgagactactgaacactgaag

SEQ ID NO: 18341 - DNA, 23 bp, synthetic construct
  source 1..23: mol_type = other DNA
tttgagactactgaacaccgaag

SEQ ID NO: 18342 - DNA, 23 bp, synthetic construct
  source 1..23: mol_type = other DNA
tttgagactactgaacactgaag

SEQ ID NO: 18343 - DNA, 24 bp, synthetic construct
  source 1..24: mol_type = other DNA
ttttgagactactgaacaccgaag

SEQ ID NO: 18344 - DNA, 24 bp, synthetic construct
  source 1..24: mol_type = other DNA
ttttgagactactgaacactgaag

SEQ ID NO: 18345 - DNA, 25 bp, synthetic construct
  source 1..25: mol_type = other DNA
tttttgagactactgaacaccgaag

SEQ ID NO: 18346 - DNA, 25 bp, synthetic construct
  source 1..25: mol_type = other DNA
tttttgagactactgaacactgaag

SEQ ID NO: 18347 - DNA, 26 bp, synthetic construct
  source 1..26: mol_type = other DNA
ttttttgagactactgaacaccgaag

SEQ ID NO: 18348 - DNA, 26 bp, synthetic construct
  source 1..26: mol_type = other DNA
ttttttgagactactgaacactgaag

SEQ ID NO: 18349 - DNA, 27 bp, synthetic construct
  source 1..27: mol_type = other DNA
cttttttgagactactgaacactgaag

SEQ ID NO: 18350 - DNA, 27 bp, synthetic construct
  source 1..27: mol_type = other DNA
cttttttgagactactgaacaccgaag

SEQ ID NO: 18351 - DNA, 28 bp, synthetic construct
  source 1..28: mol_type = other DNA
gcttttttgagactactgaacactgaag

SEQ ID NO: 18352 - DNA, 28 bp, synthetic construct
  source 1..28: mol_type = other DNA
gcttttttgagactactgaacaccgaag

SEQ ID NO: 18353 - DNA, 29 bp, synthetic construct
  source 1..29: mol_type = other DNA
agcttttttgagactactgaacactgaag

SEQ ID NO: 18354 - DNA, 29 bp, synthetic construct
  source 1..29: mol_type = other DNA
agcttttttgagactactgaacaccgaag

SEQ ID NO: 18355 - DNA, 30 bp, synthetic construct
  source 1..30: mol_type = other DNA
cagcttttttgagactactgaacactgaag

SEQ ID NO: 18356 - DNA, 30 bp, synthetic construct
  source 1..30: mol_type = other DNA
cagcttttttgagactactgaacaccgaag

SEQ ID NO: 18357 - DNA, 31 bp, synthetic construct
  source 1..31: mol_type = other DNA
tcagcttttttgagactactgaacactgaag

SEQ ID NO: 18358 - DNA, 31 bp, synthetic construct
  source 1..31: mol_type = other DNA
tcagcttttttgagactactgaacaccgaag

SEQ ID NO: 18359 - DNA, 32 bp, synthetic construct
  source 1..32: mol_type = other DNA
atcagcttttttgagactactgaacaccgaag

SEQ ID NO: 18360 - DNA, 32 bp, synthetic construct
  source 1..32: mol_type = other DNA
atcagcttttttgagactactgaacactgaag

SEQ ID NO: 18361 - DNA, 33 bp, synthetic construct
  source 1..33: mol_type = other DNA
tatcagcttttttgagactactgaacactgaag

SEQ ID NO: 18362 - DNA, 33 bp, synthetic construct
  source 1..33: mol_type = other DNA
tatcagcttttttgagactactgaacaccgaag

SEQ ID NO: 18363 - DNA, 34 bp, synthetic construct
  source 1..34: mol_type = other DNA
ttatcagcttttttgagactactgaacaccgaag

SEQ ID NO: 18364 - DNA, 34 bp, synthetic construct
  source 1..34: mol_type = other DNA
ttatcagcttttttgagactactgaacactgaag

SEQ ID NO: 18365 - DNA, 35 bp, synthetic construct
  source 1..35: mol_type = other DNA
gttatcagcttttttgagactactgaacactgaag

SEQ ID NO: 18366 - DNA, 35 bp, synthetic construct
  source 1..35: mol_type = other DNA
gttatcagcttttttgagactactgaacaccgaag

SEQ ID NO: 18367 - DNA, 36 bp, synthetic construct
  source 1..36: mol_type = other DNA
tgttatcagcttttttgagactactgaacaccgaag

SEQ ID NO: 18368 - DNA, 36 bp, synthetic construct
  source 1..36: mol_type = other DNA
tgttatcagcttttttgagactactgaacactgaag

SEQ ID NO: 18369 - DNA, 37 bp, synthetic construct
  source 1..37: mol_type = other DNA
ttgttatcagcttttttgagactactgaacactgaag

SEQ ID NO: 18370 - DNA, 37 bp, synthetic construct
  source 1..37: mol_type = other DNA
ttgttatcagcttttttgagactactgaacaccgaag

SEQ ID NO: 18371 - DNA, 38 bp, synthetic construct
  source 1..38: mol_type = other DNA
tttgttatcagcttttttgagactactgaacactgaag

SEQ ID NO: 18372 - DNA, 38 bp, synthetic construct
  source 1..38: mol_type = other DNA
tttgttatcagcttttttgagactactgaacaccgaag

SEQ ID NO: 18373 - DNA, 39 bp, synthetic construct
  source 1..39: mol_type = other DNA
ctttgttatcagcttttttgagactactgaacactgaag

SEQ ID NO: 18374 - DNA, 39 bp, synthetic construct
  source 1..39: mol_type = other DNA
ctttgttatcagcttttttgagactactgaacaccgaag

SEQ ID NO: 18375 - DNA, 40 bp, synthetic construct
  source 1..40: mol_type = other DNA
actttgttatcagcttttttgagactactgaacaccgaag

SEQ ID NO: 18376 - DNA, 40 bp, synthetic construct
  source 1..40: mol_type = other DNA
actttgttatcagcttttttgagactactgaacactgaag

SEQ ID NO: 18377 - DNA, 20 bp, synthetic construct
  source 1..20: mol_type = other DNA
tgagactactgaacactgaa

SEQ ID NO: 18378 - DNA, 21 bp, synthetic construct
  source 1..21: mol_type = other DNA
ttgagactactgaacactgaa

SEQ ID NO: 18379 - DNA, 22 bp, synthetic construct
  source 1..22: mol_type = other DNA
tttgagactactgaacactgaa

SEQ ID NO: 18380 - DNA, 23 bp, synthetic construct
  source 1..23: mol_type = other DNA
ttttgagactactgaacactgaa

SEQ ID NO: 18381 - DNA, 24 bp, synthetic construct
  source 1..24: mol_type = other DNA
tttttgagactactgaacactgaa

SEQ ID NO: 18382 - DNA, 25 bp, synthetic construct
  source 1..25: mol_type = other DNA
ttttttgagactactgaacactgaa

SEQ ID NO: 18383 - DNA, 26 bp, synthetic construct
  source 1..26: mol_type = other DNA
cttttttgagactactgaacactgaa

SEQ ID NO: 18384 - DNA, 27 bp, synthetic construct
  source 1..27: mol_type = other DNA
gcttttttgagactactgaacactgaa

SEQ ID NO: 18385 - DNA, 28 bp, synthetic construct
  source 1..28: mol_type = other DNA
agcttttttgagactactgaacactgaa

SEQ ID NO: 18386 - DNA, 29 bp, synthetic construct
  source 1..29: mol_type = other DNA
cagcttttttgagactactgaacactgaa

SEQ ID NO: 18387 - DNA, 30 bp, synthetic construct
  source 1..30: mol_type = other DNA
tcagcttttttgagactactgaacactgaa

SEQ ID NO: 18388 - DNA, 31 bp, synthetic construct
  source 1..31: mol_type = other DNA
atcagcttttttgagactactgaacactgaa

SEQ ID NO: 18389 - DNA, 32 bp, synthetic construct
  source 1..32: mol_type = other DNA
tatcagcttttttgagactactgaacactgaa

SEQ ID NO: 18390 - DNA, 33 bp, synthetic construct
  source 1..33: mol_type = other DNA
ttatcagcttttttgagactactgaacactgaa

SEQ ID NO: 18391 - DNA, 34 bp, synthetic construct
  source 1..34: mol_type = other DNA
gttatcagcttttttgagactactgaacactgaa

SEQ ID NO: 18392 - DNA, 35 bp, synthetic construct
  source 1..35: mol_type = other DNA
tgttatcagcttttttgagactactgaacactgaa

SEQ ID NO: 18393 - DNA, 36 bp, synthetic construct
  source 1..36: mol_type = other DNA
ttgttatcagcttttttgagactactgaacactgaa

SEQ ID NO: 18394 - DNA, 37 bp, synthetic construct
  source 1..37: mol_type = other DNA
tttgttatcagcttttttgagactactgaacactgaa

SEQ ID NO: 18395 - DNA, 38 bp, synthetic construct
  source 1..38: mol_type = other DNA
ctttgttatcagcttttttgagactactgaacactgaa

SEQ ID NO: 18396 - DNA, 39 bp, synthetic construct
  source 1..39: mol_type = other DNA
actttgttatcagcttttttgagactactgaacactgaa

SEQ ID NO: 18397 - DNA, 40 bp, synthetic construct
  source 1..40: mol_type = other DNA
tactttgttatcagcttttttgagactactgaacactgaa

SEQ ID NO: 18398 - DNA, 34 bp, synthetic construct
  source 1..34: mol_type = other DNA
caaaaaagctgataacaaagtactcttccctgat

SEQ ID NO: 18399 - DNA, 35 bp, synthetic construct
  source 1..35: mol_type = other DNA
tcaaaaaagctgataacaaagtactcttccctgat

SEQ ID NO: 18400 - DNA, 36 bp, synthetic construct
  source 1..36: mol_type = other DNA
ctcaaaaaagctgataacaaagtactcttccctgat

SEQ ID NO: 18401 - DNA, 37 bp, synthetic construct
  source 1..37: mol_type = other DNA
tctcaaaaaagctgataacaaagtactcttccctgat

SEQ ID NO: 18402 - DNA, 38 bp, synthetic construct
  source 1..38: mol_type = other DNA
gtctcaaaaaagctgataacaaagtactcttccctgat

SEQ ID NO: 18403 - DNA, 39 bp, synthetic construct
  source 1..39: mol_type = other DNA
agtctcaaaaaagctgataacaaagtactcttccctgat

SEQ ID NO: 18404 - DNA, 40 bp, synthetic construct
  source 1..40: mol_type = other DNA
tagtctcaaaaaagctgataacaaagtactcttccctgat

SEQ ID NO: 18405 - DNA, 20 bp, synthetic construct
  source 1..20: mol_type = other DNA
caaaaaagctgataacaaag

SEQ ID NO: 18406 - DNA, 21 bp, synthetic construct
  source 1..21: mol_type = other DNA
tcaaaaaagctgataacaaag

SEQ ID NO: 18407 - DNA, 22 bp, synthetic construct
  source 1..22: mol_type = other DNA
ctcaaaaaagctgataacaaag

SEQ ID NO: 18408 - DNA, 23 bp, synthetic construct
  source 1..23: mol_type = other DNA
tctcaaaaaagctgataacaaag

SEQ ID NO: 18409 - DNA, 24 bp, synthetic construct
  source 1..24: mol_type = other DNA
gtctcaaaaaagctgataacaaag

SEQ ID NO: 18410 - DNA, 25 bp, synthetic construct
  source 1..25: mol_type = other DNA
agtctcaaaaaagctgataacaaag

SEQ ID NO: 18411 - DNA, 26 bp, synthetic construct
  source 1..26: mol_type = other DNA
tagtctcaaaaaagctgataacaaag

SEQ ID NO: 18412 - DNA, 27 bp, synthetic construct
  source 1..27: mol_type = other DNA
gtagtctcaaaaaagctgataacaaag

SEQ ID NO: 18413 - DNA, 28 bp, synthetic construct
  source 1..28: mol_type = other DNA
agtagtctcaaaaaagctgataacaaag

SEQ ID NO: 18414 - DNA, 29 bp, synthetic construct
  source 1..29: mol_type = other DNA
cagtagtctcaaaaaagctgataacaaag

SEQ ID NO: 18415 - DNA, 30 bp, synthetic construct
  source 1..30: mol_type = other DNA
tcagtagtctcaaaaaagctgataacaaag

SEQ ID NO: 18416 - DNA, 31 bp, synthetic construct
  source 1..31: mol_type = other DNA
ttcagtagtctcaaaaaagctgataacaaag

SEQ ID NO: 18417 - DNA, 32 bp, synthetic construct
  source 1..32: mol_type = other DNA
gttcagtagtctcaaaaaagctgataacaaag

SEQ ID NO: 18418 - DNA, 33 bp, synthetic construct
  source 1..33: mol_type = other DNA
tgttcagtagtctcaaaaaagctgataacaaag

SEQ ID NO: 18419 - DNA, 34 bp, synthetic construct
  source 1..34: mol_type = other DNA
gtgttcagtagtctcaaaaaagctgataacaaag

SEQ ID NO: 18420 - DNA, 35 bp, synthetic construct
  source 1..35: mol_type = other DNA
agtgttcagtagtctcaaaaaagctgataacaaag

SEQ ID NO: 18421 - DNA, 36 bp, synthetic construct
  source 1..36: mol_type = other DNA
cagtgttcagtagtctcaaaaaagctgataacaaag

SEQ ID NO: 18422 - DNA, 37 bp, synthetic construct
  source 1..37: mol_type = other DNA
tcagtgttcagtagtctcaaaaaagctgataacaaag

SEQ ID NO: 18423 - DNA, 38 bp, synthetic construct
  source 1..38: mol_type = other DNA
ttcagtgttcagtagtctcaaaaaagctgataacaaag

SEQ ID NO: 18424 - DNA, 39 bp, synthetic construct
  source 1..39: mol_type = other DNA
cttcagtgttcagtagtctcaaaaaagctgataacaaag

SEQ ID NO: 18425 - DNA, 40 bp, synthetic construct
  source 1..40: mol_type = other DNA
ccttcagtgttcagtagtctcaaaaaagctgataacaaag

SEQ ID NO: 18426 - DNA, 40 bp, synthetic construct
  source 1..40: mol_type = other DNA
caaaaaagctgataacaaagtactcttccctgatccagtt

SEQ ID NO: 18427 - DNA, 32 bp, synthetic construct
  source 1..32: mol_type = other DNA
caaaaaagctgataacaaagtactcttccctg

SEQ ID NO: 18428 - DNA, 33 bp, synthetic construct
  source 1..33: mol_type = other DNA
tcaaaaaagctgataacaaagtactcttccctg

SEQ ID NO: 18429 - DNA, 34 bp, synthetic construct
  source 1..34: mol_type = other DNA
ctcaaaaaagctgataacaaagtactcttccctg

SEQ ID NO: 18430 - DNA, 35 bp, synthetic construct
  source 1..35: mol_type = other DNA
tctcaaaaaagctgataacaaagtactcttccctg

SEQ ID NO: 18431 - DNA, 36 bp, synthetic construct
  source 1..36: mol_type = other DNA
gtctcaaaaaagctgataacaaagtactcttccctg

SEQ ID NO: 18432 - DNA, 37 bp, synthetic construct
  source 1..37: mol_type = other DNA
agtctcaaaaaagctgataacaaagtactcttccctg

SEQ ID NO: 18433 - DNA, 38 bp, synthetic construct
  source 1..38: mol_type = other DNA
tagtctcaaaaaagctgataacaaagtactcttccctg

SEQ ID NO: 18434 - DNA, 39 bp, synthetic construct
  source 1..39: mol_type = other DNA
gtagtctcaaaaaagctgataacaaagtactcttccctg

SEQ ID NO: 18435 - DNA, 40 bp, synthetic construct
  source 1..40: mol_type = other DNA
agtagtctcaaaaaagctgataacaaagtactcttccctg

SEQ ID NO: 18436 - DNA, 10 bp, synthetic construct
  source 1..10: mol_type = other DNA
agtagtctca

SEQ ID NO: 18437 - DNA, 11 bp, synthetic construct
  source 1..11: mol_type = other DNA
cagtagtctca

SEQ ID NO: 18438 - DNA, 12 bp, synthetic construct
  source 1..12: mol_type = other DNA
tcagtagtctca

SEQ ID NO: 18439 - DNA, 13 bp, synthetic construct
  source 1..13: mol_type = other DNA
ttcagtagtctca

SEQ ID NO: 18440 - DNA, 14 bp, synthetic construct
  source 1..14: mol_type = other DNA
gttcagtagtctca

SEQ ID NO: 18441 - DNA, 15 bp, synthetic construct
  source 1..15: mol_type = other DNA
tgttcagtagtctca

SEQ ID NO: 18442 - DNA, 16 bp, synthetic construct
  source 1..16: mol_type = other DNA
gtgttcagtagtctca

SEQ ID NO: 18443 - DNA, 17 bp, synthetic construct
  source 1..17: mol_type = other DNA
agtgttcagtagtctca

SEQ ID NO: 18444 - DNA, 18 bp, synthetic construct
  source 1..18: mol_type = other DNA
cagtgttcagtagtctca

SEQ ID NO: 18445 - DNA, 19 bp, synthetic construct
  source 1..19: mol_type = other DNA
tcagtgttcagtagtctca

SEQ ID NO: 18446 - DNA, 20 bp, synthetic construct
  source 1..20: mol_type = other DNA
ttcagtgttcagtagtctca

SEQ ID NO: 18447 - DNA, 21 bp, synthetic construct
  source 1..21: mol_type = other DNA
cttcagtgttcagtagtctca

SEQ ID NO: 18448 - DNA, 22 bp, synthetic construct
  source 1..22: mol_type = other DNA
ccttcagtgttcagtagtctca

SEQ ID NO: 18449 - DNA, 23 bp, synthetic construct
  source 1..23: mol_type = other DNA
tccttcagtgttcagtagtctca

SEQ ID NO: 18450 - DNA, 24 bp, synthetic construct
  source 1..24: mol_type = other DNA
ctccttcagtgttcagtagtctca

SEQ ID NO: 18451 - DNA, 25 bp, synthetic construct
  source 1..25: mol_type = other DNA
tctccttcagtgttcagtagtctca

SEQ ID NO: 18452 - DNA, 26 bp, synthetic construct
  source 1..26: mol_type = other DNA
ttctccttcagtgttcagtagtctca

SEQ ID NO: 18453 - DNA, 27 bp, synthetic construct
  source 1..27: mol_type = other DNA
tttctccttcagtgttcagtagtctca

SEQ ID NO: 18454 - DNA, 28 bp, synthetic construct
  source 1..28: mol_type = other DNA
atttctccttcagtgttcagtagtctca

SEQ ID NO: 18455 - DNA, 29 bp, synthetic construct
  source 1..29: mol_type = other DNA
gatttctccttcagtgttcagtagtctca

SEQ ID NO: 18456 - DNA, 30 bp, synthetic construct
  source 1..30: mol_type = other DNA
ggatttctccttcagtgttcagtagtctca

SEQ ID NO: 18457 - DNA, 31 bp, synthetic construct
  source 1..31: mol_type = other DNA
tggatttctccttcagtgttcagtagtctca

SEQ ID NO: 18458 - DNA, 32 bp, synthetic construct
  source 1..32: mol_type = other DNA
ctggatttctccttcagtgttcagtagtctca

SEQ ID NO: 18459 - DNA, 33 bp, synthetic construct
  source 1..33: mol_type = other DNA
tctggatttctccttcagtgttcagtagtctca

SEQ ID NO: 18460 - DNA, 34 bp, synthetic construct
  source 1..34: mol_type = other DNA
atctggatttctccttcagtgttcagtagtctca

SEQ ID NO: 18461 - DNA, 35 bp, synthetic construct
  source 1..35: mol_type = other DNA
gatctggatttctccttcagtgttcagtagtctca

SEQ ID NO: 18462 - DNA, 36 bp, synthetic construct
  source 1..36: mol_type = other DNA
cgatctggatttctccttcagtgttcagtagtctca

SEQ ID NO: 18463 - DNA, 37 bp, synthetic construct
  source 1..37: mol_type = other DNA
tcgatctggatttctccttcagtgttcagtagtctca

SEQ ID NO: 18464 - DNA, 38 bp, synthetic construct
  source 1..38: mol_type = other DNA
atcgatctggatttctccttcagtgttcagtagtctca

SEQ ID NO: 18465 - DNA, 39 bp, synthetic construct
  source 1..39: mol_type = other DNA
catcgatctggatttctccttcagtgttcagtagtctca

SEQ ID NO: 18466 - DNA, 40 bp, synthetic construct
  source 1..40: mol_type = other DNA
ccatcgatctggatttctccttcagtgttcagtagtctca

SEQ ID NO: 18467 - DNA, 11 bp, synthetic construct
  source 1..11: mol_type = other DNA
tgagactactg

SEQ ID NO: 18468 - DNA, 11 bp, synthetic construct
  source 1..11: mol_type = other DNA
tgagattgctg

SEQ ID NO: 18469 - DNA, 12 bp, synthetic construct
  source 1..12: mol_type = other DNA
ttgagactactg

SEQ ID NO: 18470 - DNA, 12 bp, synthetic construct
  source 1..12: mol_type = other DNA
ttgagattgctg

SEQ ID NO: 18471 - DNA, 13 bp, synthetic construct
  source 1..13: mol_type = other DNA
tttgagattgctg

SEQ ID NO: 18472 - DNA, 13 bp, synthetic construct
  source 1..13: mol_type = other DNA
tttgagactactg

SEQ ID NO: 18473 - DNA, 14 bp, synthetic construct
  source 1..14: mol_type = other DNA
ttttgagactactg

SEQ ID NO: 18474 - DNA, 14 bp, synthetic construct
  source 1..14: mol_type = other DNA
ttttgagattgctg

SEQ ID NO: 18475 - DNA, 15 bp, synthetic construct
  source 1..15: mol_type = other DNA
tttttgagactactg

SEQ ID NO: 18476 - DNA, 15 bp, synthetic construct
  source 1..15: mol_type = other DNA
tttttgagattgctg

SEQ ID NO: 18477 - DNA, 16 bp, synthetic construct
  source 1..16: mol_type = other DNA
ttttttgagattgctg

SEQ ID NO: 18478 - DNA, 16 bp, synthetic construct
  source 1..16: mol_type = other DNA
ttttttgagactactg

SEQ ID NO: 18479 - DNA, 17 bp, synthetic construct
  source 1..17: mol_type = other DNA
cttttttgagattgctg

SEQ ID NO: 18480 - DNA, 17 bp, synthetic construct
  source 1..17: mol_type = other DNA
cttttttgagactactg

SEQ ID NO: 18481 - DNA, 18 bp, synthetic construct
  source 1..18: mol_type = other DNA
gcttttttgagactactg

SEQ ID NO: 18482 - DNA, 18 bp, synthetic construct
  source 1..18: mol_type = other DNA
gcttttttgagattgctg

SEQ ID NO: 18483 - DNA, 19 bp, synthetic construct
  source 1..19: mol_type = other DNA
agcttttttgagactactg

SEQ ID NO: 18484 - DNA, 19 bp, synthetic construct
  source 1..19: mol_type = other DNA
agcttttttgagattgctg

SEQ ID NO: 18485 - DNA, 20 bp, synthetic construct
  source 1..20: mol_type = other DNA
cagcttttttgagactactg

SEQ ID NO: 18486 - DNA, 20 bp, synthetic construct
  source 1..20: mol_type = other DNA
cagcttttttgagattgctg

SEQ ID NO: 18487 - DNA, 21 bp, synthetic construct
  source 1..21: mol_type = other DNA
tcagcttttttgagactactg

SEQ ID NO: 18488 - DNA, 21 bp, synthetic construct
  source 1..21: mol_type = other DNA
tcagcttttttgagattgctg

SEQ ID NO: 18489 - DNA, 22 bp, synthetic construct
  source 1..22: mol_type = other DNA
atcagcttttttgagactactg

SEQ ID NO: 18490 - DNA, 22 bp, synthetic construct
  source 1..22: mol_type = other DNA
atcagcttttttgagattgctg

SEQ ID NO: 18491 - DNA, 23 bp, synthetic construct
  source 1..23: mol_type = other DNA
tatcagcttttttgagactactg

SEQ ID NO: 18492 - DNA, 23 bp, synthetic construct
  source 1..23: mol_type = other DNA
tatcagcttttttgagattgctg

SEQ ID NO: 18493 - DNA, 24 bp, synthetic construct
  source 1..24: mol_type = other DNA
ttatcagcttttttgagattgctg

SEQ ID NO: 18494 - DNA, 24 bp, synthetic construct
  source 1..24: mol_type = other DNA
ttatcagcttttttgagactactg

SEQ ID NO: 18495 - DNA, 25 bp, synthetic construct
  source 1..25: mol_type = other DNA
gttatcagcttttttgagactactg

SEQ ID NO: 18496 - DNA, 25 bp, synthetic construct
  source 1..25: mol_type = other DNA
gttatcagcttttttgagattgctg

SEQ ID NO: 18497 - DNA, 26 bp, synthetic construct
  source 1..26: mol_type = other DNA
tgttatcagcttttttgagattgctg

SEQ ID NO: 18498 - DNA, 26 bp, synthetic construct
  source 1..26: mol_type = other DNA
tgttatcagcttttttgagactactg

SEQ ID NO: 18499 - DNA, 27 bp, synthetic construct
  source 1..27: mol_type = other DNA
ttgttatcagcttttttgagattgctg

SEQ ID NO: 18500 - DNA, 27 bp, synthetic construct
  source 1..27: mol_type = other DNA
ttgttatcagcttttttgagactactg

SEQ ID NO: 18501 - DNA, 28 bp, synthetic construct
  source 1..28: mol_type = other DNA
tttgttatcagcttttttgagactactg

SEQ ID NO: 18502 - DNA, 28 bp, synthetic construct
  source 1..28: mol_type = other DNA
tttgttatcagcttttttgagattgctg

SEQ ID NO: 18503 - DNA, 29 bp, synthetic construct
  source 1..29: mol_type = other DNA
ctttgttatcagcttttttgagattgctg

SEQ ID NO: 18504 - DNA, 29 bp, synthetic construct
  source 1..29: mol_type = other DNA
ctttgttatcagcttttttgagactactg

SEQ ID NO: 18505 - DNA, 30 bp, synthetic construct
  source 1..30: mol_type = other DNA
actttgttatcagcttttttgagattgctg

SEQ ID NO: 18506 - DNA, 30 bp, synthetic construct
  source 1..30: mol_type = other DNA
actttgttatcagcttttttgagactactg

SEQ ID NO: 18507 - DNA, 31 bp, synthetic construct
  source 1..31: mol_type = other DNA
tactttgttatcagcttttttgagattgctg

SEQ ID NO: 18508 - DNA, 31 bp, synthetic construct
  source 1..31: mol_type = other DNA
tactttgttatcagcttttttgagactactg

SEQ ID NO: 18509 - DNA, 32 bp, synthetic construct
  source 1..32: mol_type = other DNA
gtactttgttatcagcttttttgagactactg

SEQ ID NO: 18510 - DNA, 32 bp, synthetic construct
  source 1..32: mol_type = other DNA
gtactttgttatcagcttttttgagattgctg

SEQ ID NO: 18511 - DNA, 33 bp, synthetic construct
  source 1..33: mol_type = other DNA
agtactttgttatcagcttttttgagactactg

SEQ ID NO: 18512 - DNA, 33 bp, synthetic construct
  source 1..33: mol_type = other DNA
agtactttgttatcagcttttttgagattgctg

SEQ ID NO: 18513 - DNA, 34 bp, synthetic construct
  source 1..34: mol_type = other DNA
gagtactttgttatcagcttttttgagattgctg

SEQ ID NO: 18514 - DNA, 34 bp, synthetic construct
  source 1..34: mol_type = other DNA
gagtactttgttatcagcttttttgagactactg

SEQ ID NO: 18515 - DNA, 35 bp, synthetic construct
  source 1..35: mol_type = other DNA
agagtactttgttatcagcttttttgagactactg

SEQ ID NO: 18516 - DNA, 35 bp, synthetic construct
  source 1..35: mol_type = other DNA
agagtactttgttatcagcttttttgagattgctg

SEQ ID NO: 18517 - DNA, 36 bp, synthetic construct
  source 1..36: mol_type = other DNA
aagagtactttgttatcagcttttttgagattgctg

SEQ ID NO: 18518 - DNA, 36 bp, synthetic construct
  source 1..36: mol_type = other DNA
aagagtactttgttatcagcttttttgagactactg

SEQ ID NO: 18519 - DNA, 37 bp, synthetic construct
  source 1..37: mol_type = other DNA
gaagagtactttgttatcagcttttttgagattgctg

SEQ ID NO: 18520 - DNA, 37 bp, synthetic construct
  source 1..37: mol_type = other DNA
gaagagtactttgttatcagcttttttgagactactg

SEQ ID NO: 18521 - DNA, 38 bp, synthetic construct
  source 1..38: mol_type = other DNA
ggaagagtactttgttatcagcttttttgagattgctg

SEQ ID NO: 18522 - DNA, 38 bp, synthetic construct
  source 1..38: mol_type = other DNA
ggaagagtactttgttatcagcttttttgagactactg

SEQ ID NO: 18523 - DNA, 39 bp, synthetic construct
  source 1..39: mol_type = other DNA
gggaagagtactttgttatcagcttttttgagactactg

SEQ ID NO: 18524 - DNA, 39 bp, synthetic construct
  source 1..39: mol_type = other DNA
gggaagagtactttgttatcagcttttttgagattgctg

SEQ ID NO: 18525 - DNA, 40 bp, synthetic construct
  source 1..40: mol_type = other DNA
agggaagagtactttgttatcagcttttttgagattgctg

SEQ ID NO: 18526 - DNA, 40 bp, synthetic construct
  source 1..40: mol_type = other DNA
agggaagagtactttgttatcagcttttttgagactactg

SEQ ID NO: 18527 - DNA, 10 bp, synthetic construct
  source 1..10: mol_type = other DNA
tgagactact

SEQ ID NO: 18528 - DNA, 11 bp, synthetic construct
  source 1..11: mol_type = other DNA
ttgagactact

SEQ ID NO: 18529 - DNA, 12 bp, synthetic construct
  source 1..12: mol_type = other DNA
tttgagactact

SEQ ID NO: 18530 - DNA, 13 bp, synthetic construct
  source 1..13: mol_type = other DNA
ttttgagactact

SEQ ID NO: 18531 - DNA, 14 bp, synthetic construct
  source 1..14: mol_type = other DNA
tttttgagactact

SEQ ID NO: 18532 - DNA, 15 bp, synthetic construct
  source 1..15: mol_type = other DNA
ttttttgagactact

SEQ ID NO: 18533 - DNA, 16 bp, synthetic construct
  source 1..16: mol_type = other DNA
cttttttgagactact

SEQ ID NO: 18534 - DNA, 17 bp, synthetic construct
  source 1..17: mol_type = other DNA
gcttttttgagactact

SEQ ID NO: 18535 - DNA, 18 bp, synthetic construct
  source 1..18: mol_type = other DNA
agcttttttgagactact

SEQ ID NO: 18536 - DNA, 19 bp, synthetic construct
  source 1..19: mol_type = other DNA
cagcttttttgagactact

SEQ ID NO: 18537 - DNA, 20 bp, synthetic construct
  source 1..20: mol_type = other DNA
tcagcttttttgagactact

SEQ ID NO: 18538 - DNA, 21 bp, synthetic construct
  source 1..21: mol_type = other DNA
atcagcttttttgagactact

SEQ ID NO: 18539 - DNA, 22 bp, synthetic construct
  source 1..22: mol_type = other DNA
tatcagcttttttgagactact

SEQ ID NO: 18540 - DNA, 23 bp, synthetic construct
  source 1..23: mol_type = other DNA
ttatcagcttttttgagactact

SEQ ID NO: 18541 - DNA, 24 bp, synthetic construct
  source 1..24: mol_type = other DNA
gttatcagcttttttgagactact

SEQ ID NO: 18542 - DNA, 25 bp, synthetic construct
  source 1..25: mol_type = other DNA
tgttatcagcttttttgagactact

SEQ ID NO: 18543 - DNA, 26 bp, synthetic construct
  source 1..26: mol_type = other DNA
ttgttatcagcttttttgagactact

SEQ ID NO: 18544 - DNA, 27 bp, synthetic construct
  source 1..27: mol_type = other DNA
tttgttatcagcttttttgagactact

SEQ ID NO: 18545 - DNA, 28 bp, synthetic construct
  source 1..28: mol_type = other DNA
ctttgttatcagcttttttgagactact

SEQ ID NO: 18546 - DNA, 29 bp, synthetic construct
  source 1..29: mol_type = other DNA
actttgttatcagcttttttgagactact

SEQ ID NO: 18547 - DNA, 30 bp, synthetic construct
  source 1..30: mol_type = other DNA
tactttgttatcagcttttttgagactact

SEQ ID NO: 18548 - DNA, 31 bp, synthetic construct
  source 1..31: mol_type = other DNA
gtactttgttatcagcttttttgagactact

SEQ ID NO: 18549 - DNA, 32 bp, synthetic construct
  source 1..32: mol_type = other DNA
agtactttgttatcagcttttttgagactact

SEQ ID NO: 18550 - DNA, 33 bp, synthetic construct
  source 1..33: mol_type = other DNA
gagtactttgttatcagcttttttgagactact

SEQ ID NO: 18551 - DNA, 34 bp, synthetic construct
  source 1..34: mol_type = other DNA
agagtactttgttatcagcttttttgagactact

SEQ ID NO: 18552 - DNA, 35 bp, synthetic construct
  source 1..35: mol_type = other DNA
aagagtactttgttatcagcttttttgagactact

SEQ ID NO: 18553 - DNA, 36 bp, synthetic construct
  source 1..36: mol_type = other DNA
gaagagtactttgttatcagcttttttgagactact

SEQ ID NO: 18554 - DNA, 37 bp, synthetic construct
  source 1..37: mol_type = other DNA
ggaagagtactttgttatcagcttttttgagactact

SEQ ID NO: 18555 - DNA, 38 bp, synthetic construct
  source 1..38: mol_type = other DNA
gggaagagtactttgttatcagcttttttgagactact

SEQ ID NO: 18556 - DNA, 39 bp, synthetic construct
  source 1..39: mol_type = other DNA
agggaagagtactttgttatcagcttttttgagactact

SEQ ID NO: 18557 - DNA, 40 bp, synthetic construct
  source 1..40: mol_type = other DNA
cagggaagagtactttgttatcagcttttttgagactact

SEQ ID NO: 18558 - DNA, 10 bp, synthetic construct
  source 1..10: mol_type = other DNA
gtagtctcaa

SEQ ID NO: 18559 - DNA, 11 bp, synthetic construct
  source 1..11: mol_type = other DNA
agtagtctcaa

SEQ ID NO: 18560 - DNA, 12 bp, synthetic construct
  source 1..12: mol_type = other DNA
cagtagtctcaa

SEQ ID NO: 18561 - DNA, 13 bp, synthetic construct
  source 1..13: mol_type = other DNA
tcagtagtctcaa

SEQ ID NO: 18562 - DNA, 14 bp, synthetic construct
  source 1..14: mol_type = other DNA
ttcagtagtctcaa

SEQ ID NO: 18563 - DNA, 15 bp, synthetic construct
  source 1..15: mol_type = other DNA
gttcagtagtctcaa

SEQ ID NO: 18564 - DNA, 16 bp, synthetic construct
  source 1..16: mol_type = other DNA
tgttcagtagtctcaa

SEQ ID NO: 18565 - DNA, 17 bp, synthetic construct
  source 1..17: mol_type = other DNA
gtgttcagtagtctcaa

SEQ ID NO: 18566 - DNA, 18 bp, synthetic construct
  source 1..18: mol_type = other DNA
agtgttcagtagtctcaa

SEQ ID NO: 18567 - DNA, 19 bp, synthetic construct
  source 1..19: mol_type = other DNA
cagtgttcagtagtctcaa

SEQ ID NO: 18568 - DNA, 20 bp, synthetic construct
  source 1..20: mol_type = other DNA
tcagtgttcagtagtctcaa

SEQ ID NO: 18569 - DNA, 21 bp, synthetic construct
  source 1..21: mol_type = other DNA
ttcagtgttcagtagtctcaa

SEQ ID NO: 18570 - DNA, 22 bp, synthetic construct
  source 1..22: mol_type = other DNA
cttcagtgttcagtagtctcaa

SEQ ID NO: 18571 - DNA, 23 bp, synthetic construct
  source 1..23: mol_type = other DNA
ccttcagtgttcagtagtctcaa

SEQ ID NO: 18572 - DNA, 24 bp, synthetic construct
  source 1..24: mol_type = other DNA
tccttcagtgttcagtagtctcaa

SEQ ID NO: 18573 - DNA, 25 bp, synthetic construct
  source 1..25: mol_type = other DNA
ctccttcagtgttcagtagtctcaa

SEQ ID NO: 18574 - DNA, 26 bp, synthetic construct
  source 1..26: mol_type = other DNA
tctccttcagtgttcagtagtctcaa

SEQ ID NO: 18575 - DNA, 27 bp, synthetic construct
  source 1..27: mol_type = other DNA
ttctccttcagtgttcagtagtctcaa

SEQ ID NO: 18576 - DNA, 28 bp, synthetic construct
  source 1..28: mol_type = other DNA
tttctccttcagtgttcagtagtctcaa

SEQ ID NO: 18577 - DNA, 29 bp, synthetic construct
  source 1..29: mol_type = other DNA
atttctccttcagtgttcagtagtctcaa

SEQ ID NO: 18578 - DNA, 30 bp, synthetic construct
  source 1..30: mol_type = other DNA
gatttctccttcagtgttcagtagtctcaa

SEQ ID NO: 18579 - DNA, 31 bp, synthetic construct
  source 1..31: mol_type = other DNA
ggatttctccttcagtgttcagtagtctcaa

SEQ ID NO: 18580 - DNA, 32 bp, synthetic construct
  source 1..32: mol_type = other DNA
tggatttctccttcagtgttcagtagtctcaa

SEQ ID NO: 18581 - DNA, 33 bp, synthetic construct
  source 1..33: mol_type = other DNA
ctggatttctccttcagtgttcagtagtctcaa

SEQ ID NO: 18582 - DNA, 34 bp, synthetic construct
  source 1..34: mol_type = other DNA
tctggatttctccttcagtgttcagtagtctcaa

SEQ ID NO: 18583 - DNA, 35 bp, synthetic construct
  source 1..35: mol_type = other DNA
atctggatttctccttcagtgttcagtagtctcaa

SEQ ID NO: 18584 - DNA, 36 bp, synthetic construct
  source 1..36: mol_type = other DNA
gatctggatttctccttcagtgttcagtagtctcaa

SEQ ID NO: 18585 - DNA, 37 bp, synthetic construct
  source 1..37: mol_type = other DNA
cgatctggatttctccttcagtgttcagtagtctcaa

SEQ ID NO: 18586 - DNA, 38 bp, synthetic construct
  source 1..38: mol_type = other DNA
tcgatctggatttctccttcagtgttcagtagtctcaa

SEQ ID NO: 18587 - DNA, 39 bp, synthetic construct
  source 1..39: mol_type = other DNA
atcgatctggatttctccttcagtgttcagtagtctcaa

SEQ ID NO: 18588 - DNA, 40 bp, synthetic construct
  source 1..40: mol_type = other DNA
catcgatctggatttctccttcagtgttcagtagtctcaa

SEQ ID NO: 18589 - DNA, 40 bp, synthetic construct
  source 1..40: mol_type = other DNA
tccactgttgcaaagttattgaatcccaagacacaccatc

SEQ ID NO: 18590 - DNA, 29 bp, synthetic construct
  source 1..29: mol_type = other DNA
ggaggaaagcctttggagtgataccacag

SEQ ID NO: 18591 - DNA, 30 bp, synthetic construct
  source 1..30: mol_type = other DNA
tggaggaaagcctttggagtgataccacag

SEQ ID NO: 18592 - DNA, 31 bp, synthetic construct
  source 1..31: mol_type = other DNA
gtggaggaaagcctttggagtgataccacag

SEQ ID NO: 18593 - DNA, 32 bp, synthetic construct
  source 1..32: mol_type = other DNA
agtggaggaaagcctttggagtgataccacag

SEQ ID NO: 18594 - DNA, 33 bp, synthetic construct
  source 1..33: mol_type = other DNA
cagtggaggaaagcctttggagtgataccacag

SEQ ID NO: 18595 - DNA, 34 bp, synthetic construct
  source 1..34: mol_type = other DNA
acagtggaggaaagcctttggagtgataccacag

SEQ ID NO: 18596 - DNA, 35 bp, synthetic construct
  source 1..35: mol_type = other DNA
aacagtggaggaaagcctttggagtgataccacag

SEQ ID NO: 18597 - DNA, 36 bp, synthetic construct
  source 1..36: mol_type = other DNA
caacagtggaggaaagcctttggagtgataccacag

SEQ ID NO: 18598 - DNA, 37 bp, synthetic construct
  source 1..37: mol_type = other DNA
gcaacagtggaggaaagcctttggagtgataccacag

SEQ ID NO: 18599 - DNA, 38 bp, synthetic construct
  source 1..38: mol_type = other DNA
tgcaacagtggaggaaagcctttggagtgataccacag

SEQ ID NO: 18600 - DNA, 39 bp, synthetic construct
  source 1..39: mol_type = other DNA
ttgcaacagtggaggaaagcctttggagtgataccacag

SEQ ID NO: 18601 - DNA, 40 bp, synthetic construct
  source 1..40: mol_type = other DNA
tttgcaacagtggaggaaagcctttggagtgataccacag

SEQ ID NO: 18602 - DNA, 28 bp, synthetic construct
  source 1..28: mol_type = other DNA
ggaggaaagcctttggagtgataccaca

SEQ ID NO: 18603 - DNA, 29 bp, synthetic construct
  source 1..29: mol_type = other DNA
tggaggaaagcctttggagtgataccaca

SEQ ID NO: 18604 - DNA, 30 bp, synthetic construct
  source 1..30: mol_type = other DNA
gtggaggaaagcctttggagtgataccaca

SEQ ID NO: 18605 - DNA, 31 bp, synthetic construct
  source 1..31: mol_type = other DNA
agtggaggaaagcctttggagtgataccaca

SEQ ID NO: 18606 - DNA, 32 bp, synthetic construct
  source 1..32: mol_type = other DNA
cagtggaggaaagcctttggagtgataccaca

SEQ ID NO: 18607 - DNA, 33 bp, synthetic construct
  source 1..33: mol_type = other DNA
acagtggaggaaagcctttggagtgataccaca

SEQ ID NO: 18608 - DNA, 34 bp, synthetic construct
  source 1..34: mol_type = other DNA
aacagtggaggaaagcctttggagtgataccaca

SEQ ID NO: 18609 - DNA, 35 bp, synthetic construct
  source 1..35: mol_type = other DNA
caacagtggaggaaagcctttggagtgataccaca

SEQ ID NO: 18610 - DNA, 36 bp, synthetic construct
  source 1..36: mol_type = other DNA
gcaacagtggaggaaagcctttggagtgataccaca

SEQ ID NO: 18611 - DNA, 37 bp, synthetic construct
  source 1..37: mol_type = other DNA
tgcaacagtggaggaaagcctttggagtgataccaca

SEQ ID NO: 18612 - DNA, 38 bp, synthetic construct
  source 1..38: mol_type = other DNA
ttgcaacagtggaggaaagcctttggagtgataccaca

SEQ ID NO: 18613 - DNA, 39 bp, synthetic construct
  source 1..39: mol_type = other DNA
tttgcaacagtggaggaaagcctttggagtgataccaca

SEQ ID NO: 18614 - DNA, 40 bp, synthetic construct
  source 1..40: mol_type = other DNA
ctttgcaacagtggaggaaagcctttggagtgataccaca

SEQ ID NO: 18615 - DNA, 10 bp, synthetic construct
  source 1..10: mol_type = other DNA
cttttctcca

SEQ ID NO: 18616 - DNA, 10 bp, synthetic construct
  source 1..10: mol_type = other DNA
ctttcctcca

SEQ ID NO: 18617 - DNA, 11 bp, synthetic construct
  source 1..11: mol_type = other DNA
gcttttctcca

SEQ ID NO: 18618 - DNA, 11 bp, synthetic construct
  source 1..11: mol_type = other DNA
gctttcctcca

SEQ ID NO: 18619 - DNA, 12 bp, synthetic construct
  source 1..12: mol_type = other DNA
ggcttttctcca

SEQ ID NO: 18620 - DNA, 12 bp, synthetic construct
  source 1..12: mol_type = other DNA
ggctttcctcca

SEQ ID NO: 18621 - DNA, 13 bp, synthetic construct
  source 1..13: mol_type = other DNA
aggcttttctcca

SEQ ID NO: 18622 - DNA, 13 bp, synthetic construct
  source 1..13: mol_type = other DNA
aggctttcctcca

SEQ ID NO: 18623 - DNA, 14 bp, synthetic construct
  source 1..14: mol_type = other DNA
aaggctttcctcca

SEQ ID NO: 18624 - DNA, 14 bp, synthetic construct
  source 1..14: mol_type = other DNA
aaggcttttctcca

SEQ ID NO: 18625 - DNA, 15 bp, synthetic construct
  source 1..15: mol_type = other DNA
aaaggcttttctcca

SEQ ID NO: 18626 - DNA, 15 bp, synthetic construct
  source 1..15: mol_type = other DNA
aaaggctttcctcca

SEQ ID NO: 18627 - DNA, 16 bp, synthetic construct
  source 1..16: mol_type = other DNA
caaaggctttcctcca

SEQ ID NO: 18628 - DNA, 16 bp, synthetic construct
  source 1..16: mol_type = other DNA
caaaggcttttctcca

SEQ ID NO: 18629 - DNA, 17 bp, synthetic construct
  source 1..17: mol_type = other DNA
ccaaaggcttttctcca

SEQ ID NO: 18630 - DNA, 17 bp, synthetic construct
  source 1..17: mol_type = other DNA
ccaaaggctttcctcca

SEQ ID NO: 18631 - DNA, 18 bp, synthetic construct
  source 1..18: mol_type = other DNA
tccaaaggctttcctcca

SEQ ID NO: 18632 - DNA, 18 bp, synthetic construct
  source 1..18: mol_type = other DNA
tccaaaggcttttctcca

SEQ ID NO: 18633 - DNA, 19 bp, synthetic construct
  source 1..19: mol_type = other DNA
ctccaaaggctttcctcca

SEQ ID NO: 18634 - DNA, 19 bp, synthetic construct
  source 1..19: mol_type = other DNA
ctccaaaggcttttctcca

SEQ ID NO: 18635 - DNA, 20 bp, synthetic construct
  source 1..20: mol_type = other DNA
actccaaaggcttttctcca

SEQ ID NO: 18636 - DNA, 20 bp, synthetic construct
  source 1..20: mol_type = other DNA
actccaaaggctttcctcca

SEQ ID NO: 18637 - DNA, 21 bp, synthetic construct
  source 1..21: mol_type = other DNA
cactccaaaggcttttctcca

SEQ ID NO: 18638 - DNA, 21 bp, synthetic construct
  source 1..21: mol_type = other DNA
cactccaaaggctttcctcca

SEQ ID NO: 18639 - DNA, 22 bp, synthetic construct
  source 1..22: mol_type = other DNA
tcactccaaaggctttcctcca

SEQ ID NO: 18640 - DNA, 22 bp, synthetic construct
  source 1..22: mol_type = other DNA
tcactccaaaggcttttctcca

SEQ ID NO: 18641 - DNA, 23 bp, synthetic construct
  source 1..23: mol_type = other DNA
atcactccaaaggctttcctcca

SEQ ID NO: 18642 - DNA, 23 bp, synthetic construct
  source 1..23: mol_type = other DNA
atcactccaaaggcttttctcca

SEQ ID NO: 18643 - DNA, 24 bp, synthetic construct
  source 1..24: mol_type = other DNA
tatcactccaaaggcttttctcca

SEQ ID NO: 18644 - DNA, 24 bp, synthetic construct
  source 1..24: mol_type = other DNA
tatcactccaaaggctttcctcca

SEQ ID NO: 18645 - DNA, 25 bp, synthetic construct
  source 1..25: mol_type = other DNA
gtatcactccaaaggcttttctcca

SEQ ID NO: 18646 - DNA, 25 bp, synthetic construct
  source 1..25: mol_type = other DNA
gtatcactccaaaggctttcctcca

SEQ ID NO: 18647 - DNA, 26 bp, synthetic construct
  source 1..26: mol_type = other DNA
ggtatcactccaaaggctttcctcca

SEQ ID NO: 18648 - DNA, 26 bp, synthetic construct
  source 1..26: mol_type = other DNA
ggtatcactccaaaggcttttctcca

SEQ ID NO: 18649 - DNA, 27 bp, synthetic construct
  source 1..27: mol_type = other DNA
tggtatcactccaaaggcttttctcca

SEQ ID NO: 18650 - DNA, 27 bp, synthetic construct
  source 1..27: mol_type = other DNA
tggtatcactccaaaggctttcctcca

SEQ ID NO: 18651 - DNA, 28 bp, synthetic construct
  source 1..28: mol_type = other DNA
gtggtatcactccaaaggctttcctcca

SEQ ID NO: 18652 - DNA, 28 bp, synthetic construct
  source 1..28: mol_type = other DNA
gtggtatcactccaaaggcttttctcca

SEQ ID NO: 18653 - DNA, 29 bp, synthetic construct
  source 1..29: mol_type = other DNA
tgtggtatcactccaaaggcttttctcca

SEQ ID NO: 18654 - DNA, 29 bp, synthetic construct
  source 1..29: mol_type = other DNA
tgtggtatcactccaaaggctttcctcca

SEQ ID NO: 18655 - DNA, 30 bp, synthetic construct
  source 1..30: mol_type = other DNA
ctgtggtatcactccaaaggcttttctcca

SEQ ID NO: 18656 - DNA, 30 bp, synthetic construct
  source 1..30: mol_type = other DNA
ctgtggtatcactccaaaggctttcctcca

SEQ ID NO: 18657 - DNA, 31 bp, synthetic construct
  source 1..31: mol_type = other DNA
cctgtggtatcactccaaaggctttcctcca

SEQ ID NO: 18658 - DNA, 31 bp, synthetic construct
  source 1..31: mol_type = other DNA
cctgtggtatcactccaaaggcttttctcca

SEQ ID NO: 18659 - DNA, 32 bp, synthetic construct
  source 1..32: mol_type = other DNA
acctgtggtatcactccaaaggctttcctcca

SEQ ID NO: 18660 - DNA, 32 bp, synthetic construct
  source 1..32: mol_type = other DNA
acctgtggtatcactccaaaggcttttctcca

SEQ ID NO: 18661 - DNA, 33 bp, synthetic construct
  source 1..33: mol_type = other DNA
cacctgtggtatcactccaaaggctttcctcca

SEQ ID NO: 18662 - DNA, 33 bp, synthetic construct
  source 1..33: mol_type = other DNA
cacctgtggtatcactccaaaggcttttctcca

SEQ ID NO: 18663 - DNA, 34 bp, synthetic construct
  source 1..34: mol_type = other DNA
tcacctgtggtatcactccaaaggctttcctcca

SEQ ID NO: 18664 - DNA, 34 bp, synthetic construct
  source 1..34: mol_type = other DNA
tcacctgtggtatcactccaaaggcttttctcca

SEQ ID NO: 18665 - DNA, 35 bp, synthetic construct
  source 1..35: mol_type = other DNA
ctcacctgtggtatcactccaaaggctttcctcca

SEQ ID NO: 18666 - DNA, 35 bp, synthetic construct
  source 1..35: mol_type = other DNA
ctcacctgtggtatcactccaaaggcttttctcca

SEQ ID NO: 18667 - DNA, 36 bp, synthetic construct
  source 1..36: mol_type = other DNA
gctcacctgtggtatcactccaaaggcttttctcca

SEQ ID NO: 18668 - DNA, 36 bp, synthetic construct
  source 1..36: mol_type = other DNA
gctcacctgtggtatcactccaaaggctttcctcca

SEQ ID NO: 18669 - DNA, 37 bp, synthetic construct
  source 1..37: mol_type = other DNA
tgctcacctgtggtatcactccaaaggctttcctcca

SEQ ID NO: 18670 - DNA, 37 bp, synthetic construct
  source 1..37: mol_type = other DNA
tgctcacctgtggtatcactccaaaggcttttctcca

SEQ ID NO: 18671 - DNA, 38 bp, synthetic construct
  source 1..38: mol_type = other DNA
ttgctcacctgtggtatcactccaaaggctttcctcca

SEQ ID NO: 18672 - DNA, 38 bp, synthetic construct
  source 1..38: mol_type = other DNA
ttgctcacctgtggtatcactccaaaggcttttctcca

SEQ ID NO: 18673 - DNA, 39 bp, synthetic construct
  source 1..39: mol_type = other DNA
tttgctcacctgtggtatcactccaaaggcttttctcca

SEQ ID NO: 18674 - DNA, 39 bp, synthetic construct
  source 1..39: mol_type = other DNA
tttgctcacctgtggtatcactccaaaggctttcctcca

SEQ ID NO: 18675 - DNA, 40 bp, synthetic construct
  source 1..40: mol_type = other DNA
ttttgctcacctgtggtatcactccaaaggctttcctcca

SEQ ID NO: 18676 - DNA, 40 bp, synthetic construct
  source 1..40: mol_type = other DNA
ttttgctcacctgtggtatcactccaaaggcttttctcca

SEQ ID NO: 18677 - DNA, 15 bp, synthetic construct
  source 1..15: mol_type = other DNA
ggaggaaagcctttg

SEQ ID NO: 18678 - DNA, 15 bp, synthetic construct
  source 1..15: mol_type = other DNA
ggaggaaagcttttg

SEQ ID NO: 18679 - DNA, 16 bp, synthetic construct
  source 1..16: mol_type = other DNA
tggaggaaagcctttg

SEQ ID NO: 18680 - DNA, 16 bp, synthetic construct
  source 1..16: mol_type = other DNA
tggaggaaagcttttg

SEQ ID NO: 18681 - DNA, 17 bp, synthetic construct
  source 1..17: mol_type = other DNA
gtggaggaaagcctttg

SEQ ID NO: 18682 - DNA, 17 bp, synthetic construct
  source 1..17: mol_type = other DNA
gtggaggaaagcttttg

SEQ ID NO: 18683 - DNA, 18 bp, synthetic construct
  source 1..18: mol_type = other DNA
agtggaggaaagcttttg

SEQ ID NO: 18684 - DNA, 18 bp, synthetic construct
  source 1..18: mol_type = other DNA
agtggaggaaagcctttg

SEQ ID NO: 18685 - DNA, 19 bp, synthetic construct
  source 1..19: mol_type = other DNA
cagtggaggaaagcttttg

SEQ ID NO: 18686 - DNA, 19 bp, synthetic construct
  source 1..19: mol_type = other DNA
cagtggaggaaagcctttg

SEQ ID NO: 18687 - DNA, 20 bp, synthetic construct
  source 1..20: mol_type = other DNA
acagtggaggaaagcttttg

SEQ ID NO: 18688 - DNA, 20 bp, synthetic construct
  source 1..20: mol_type = other DNA
acagtggaggaaagcctttg

SEQ ID NO: 18689 - DNA, 21 bp, synthetic construct
  source 1..21: mol_type = other DNA
aacagtggaggaaagcctttg

SEQ ID NO: 18690 - DNA, 21 bp, synthetic construct
  source 1..21: mol_type = other DNA
aacagtggaggaaagcttttg

SEQ ID NO: 18691 - DNA, 22 bp, synthetic construct
  source 1..22: mol_type = other DNA
caacagtggaggaaagcctttg

SEQ ID NO: 18692 - DNA, 22 bp, synthetic construct
  source 1..22: mol_type = other DNA
caacagtggaggaaagcttttg

SEQ ID NO: 18693 - DNA, 23 bp, synthetic construct
  source 1..23: mol_type = other DNA
gcaacagtggaggaaagcttttg

SEQ ID NO: 18694 - DNA, 23 bp, synthetic construct
  source 1..23: mol_type = other DNA
gcaacagtggaggaaagcctttg

SEQ ID NO: 18695 - DNA, 24 bp, synthetic construct
  source 1..24: mol_type = other DNA
tgcaacagtggaggaaagcttttg

SEQ ID NO: 18696 - DNA, 24 bp, synthetic construct
  source 1..24: mol_type = other DNA
tgcaacagtggaggaaagcctttg

SEQ ID NO: 18697 - DNA, 25 bp, synthetic construct
  source 1..25: mol_type = other DNA
ttgcaacagtggaggaaagcctttg

SEQ ID NO: 18698 - DNA, 25 bp, synthetic construct
  source 1..25: mol_type = other DNA
ttgcaacagtggaggaaagcttttg

SEQ ID NO: 18699 - DNA, 26 bp, synthetic construct
  source 1..26: mol_type = other DNA
tttgcaacagtggaggaaagcctttg

SEQ ID NO: 18700 - DNA, 26 bp, synthetic construct
  source 1..26: mol_type = other DNA
tttgcaacagtggaggaaagcttttg

SEQ ID NO: 18701 - DNA, 27 bp, synthetic construct
  source 1..27: mol_type = other DNA
ctttgcaacagtggaggaaagcttttg

SEQ ID NO: 18702 - DNA, 27 bp, synthetic construct
  source 1..27: mol_type = other DNA
ctttgcaacagtggaggaaagcctttg

SEQ ID NO: 18703 - DNA, 28 bp, synthetic construct
  source 1..28: mol_type = other DNA
actttgcaacagtggaggaaagcttttg

SEQ ID NO: 18704 - DNA, 28 bp, synthetic construct
  source 1..28: mol_type = other DNA
actttgcaacagtggaggaaagcctttg

SEQ ID NO: 18705 - DNA, 29 bp, synthetic construct
  source 1..29: mol_type = other DNA
aactttgcaacagtggaggaaagcttttg

SEQ ID NO: 18706 - DNA, 29 bp, synthetic construct
  source 1..29: mol_type = other DNA
aactttgcaacagtggaggaaagcctttg

SEQ ID NO: 18707 - DNA, 30 bp, synthetic construct
  source 1..30: mol_type = other DNA
taactttgcaacagtggaggaaagcctttg

SEQ ID NO: 18708 - DNA, 30 bp, synthetic construct
  source 1..30: mol_type = other DNA
taactttgcaacagtggaggaaagcttttg

SEQ ID NO: 18709 - DNA, 31 bp, synthetic construct
  source 1..31: mol_type = other DNA
ataactttgcaacagtggaggaaagcttttg

SEQ ID NO: 18710 - DNA, 31 bp, synthetic construct
  source 1..31: mol_type = other DNA
ataactttgcaacagtggaggaaagcctttg

SEQ ID NO: 18711 - DNA, 32 bp, synthetic construct
  source 1..32: mol_type = other DNA
aataactttgcaacagtggaggaaagcctttg

SEQ ID NO: 18712 - DNA, 32 bp, synthetic construct
  source 1..32: mol_type = other DNA
aataactttgcaacagtggaggaaagcttttg

SEQ ID NO: 18713 - DNA, 33 bp, synthetic construct
  source 1..33: mol_type = other DNA
caataactttgcaacagtggaggaaagcttttg

SEQ ID NO: 18714 - DNA, 33 bp, synthetic construct
  source 1..33: mol_type = other DNA
caataactttgcaacagtggaggaaagcctttg

SEQ ID NO: 18715 - DNA, 34 bp, synthetic construct
  source 1..34: mol_type = other DNA
tcaataactttgcaacagtggaggaaagcctttg

SEQ ID NO: 18716 - DNA, 34 bp, synthetic construct
  source 1..34: mol_type = other DNA
tcaataactttgcaacagtggaggaaagcttttg

SEQ ID NO: 18717 - DNA, 35 bp, synthetic construct
  source 1..35: mol_type = other DNA
ttcaataactttgcaacagtggaggaaagcctttg

SEQ ID NO: 18718 - DNA, 35 bp, synthetic construct
  source 1..35: mol_type = other DNA
ttcaataactttgcaacagtggaggaaagcttttg

SEQ ID NO: 18719 - DNA, 36 bp, synthetic construct
  source 1..36: mol_type = other DNA
attcaataactttgcaacagtggaggaaagcttttg

SEQ ID NO: 18720 - DNA, 36 bp, synthetic construct
  source 1..36: mol_type = other DNA
attcaataactttgcaacagtggaggaaagcctttg

SEQ ID NO: 18721 - DNA, 37 bp, synthetic construct
  source 1..37: mol_type = other DNA
gattcaataactttgcaacagtggaggaaagcctttg

SEQ ID NO: 18722 - DNA, 37 bp, synthetic construct
  source 1..37: mol_type = other DNA
gattcaataactttgcaacagtggaggaaagcttttg

SEQ ID NO: 18723 - DNA, 38 bp, synthetic construct
  source 1..38: mol_type = other DNA
ggattcaataactttgcaacagtggaggaaagcttttg

SEQ ID NO: 18724 - DNA, 38 bp, synthetic construct
  source 1..38: mol_type = other DNA
ggattcaataactttgcaacagtggaggaaagcctttg

SEQ ID NO: 18725 - DNA, 39 bp, synthetic construct
  source 1..39: mol_type = other DNA
gggattcaataactttgcaacagtggaggaaagcttttg

SEQ ID NO: 18726 - DNA, 39 bp, synthetic construct
  source 1..39: mol_type = other DNA
gggattcaataactttgcaacagtggaggaaagcctttg

SEQ ID NO: 18727 - DNA, 40 bp, synthetic construct
  source 1..40: mol_type = other DNA
tgggattcaataactttgcaacagtggaggaaagcttttg

SEQ ID NO: 18728 - DNA, 40 bp, synthetic construct
  source 1..40: mol_type = other DNA
tgggattcaataactttgcaacagtggaggaaagcctttg

SEQ ID NO: 18729 - DNA, 14 bp, synthetic construct
  source 1..14: mol_type = other DNA
ggaggaaagccttt

SEQ ID NO: 18730 - DNA, 15 bp, synthetic construct
  source 1..15: mol_type = other DNA
tggaggaaagccttt

SEQ ID NO: 18731 - DNA, 16 bp, synthetic construct
  source 1..16: mol_type = other DNA
gtggaggaaagccttt

SEQ ID NO: 18732 - DNA, 17 bp, synthetic construct
  source 1..17: mol_type = other DNA
agtggaggaaagccttt

SEQ ID NO: 18733 - DNA, 18 bp, synthetic construct
  source 1..18: mol_type = other DNA
cagtggaggaaagccttt

SEQ ID NO: 18734 - DNA, 19 bp, synthetic construct
  source 1..19: mol_type = other DNA
acagtggaggaaagccttt

SEQ ID NO: 18735 - DNA, 20 bp, synthetic construct
  source 1..20: mol_type = other DNA
aacagtggaggaaagccttt

SEQ ID NO: 18736 - DNA, 21 bp, synthetic construct
  source 1..21: mol_type = other DNA
caacagtggaggaaagccttt

SEQ ID NO: 18737 - DNA, 22 bp, synthetic construct
  source 1..22: mol_type = other DNA
gcaacagtggaggaaagccttt

SEQ ID NO: 18738 - DNA, 23 bp, synthetic construct
  source 1..23: mol_type = other DNA
tgcaacagtggaggaaagccttt

SEQ ID NO: 18739 - DNA, 24 bp, synthetic construct
  source 1..24: mol_type = other DNA
ttgcaacagtggaggaaagccttt

SEQ ID NO: 18740 - DNA, 25 bp, synthetic construct
  source 1..25: mol_type = other DNA
tttgcaacagtggaggaaagccttt

SEQ ID NO: 18741 - DNA, 26 bp, synthetic construct
  source 1..26: mol_type = other DNA
ctttgcaacagtggaggaaagccttt

SEQ ID NO: 18742 - DNA, 27 bp, synthetic construct
  source 1..27: mol_type = other DNA
actttgcaacagtggaggaaagccttt

SEQ ID NO: 18743 - DNA, 28 bp, synthetic construct
  source 1..28: mol_type = other DNA
aactttgcaacagtggaggaaagccttt

SEQ ID NO: 18744 - DNA, 29 bp, synthetic construct
  source 1..29: mol_type = other DNA
taactttgcaacagtggaggaaagccttt

SEQ ID NO: 18745 - DNA, 30 bp, synthetic construct
  source 1..30: mol_type = other DNA
ataactttgcaacagtggaggaaagccttt

SEQ ID NO: 18746 - DNA, 31 bp, synthetic construct
  source 1..31: mol_type = other DNA
aataactttgcaacagtggaggaaagccttt

SEQ ID NO: 18747 - DNA, 32 bp, synthetic construct
  source 1..32: mol_type = other DNA
caataactttgcaacagtggaggaaagccttt

SEQ ID NO: 18748 - DNA, 33 bp, synthetic construct
  source 1..33: mol_type = other DNA
tcaataactttgcaacagtggaggaaagccttt

SEQ ID NO: 18749 - DNA, 34 bp, synthetic construct
  source 1..34: mol_type = other DNA
ttcaataactttgcaacagtggaggaaagccttt

SEQ ID NO: 18750 - DNA, 35 bp, synthetic construct
  source 1..35: mol_type = other DNA
attcaataactttgcaacagtggaggaaagccttt

SEQ ID NO: 18751 - DNA, 36 bp, synthetic construct
  source 1..36: mol_type = other DNA
gattcaataactttgcaacagtggaggaaagccttt

SEQ ID NO: 18752 - DNA, 37 bp, synthetic construct
  source 1..37: mol_type = other DNA
ggattcaataactttgcaacagtggaggaaagccttt

SEQ ID NO: 18753 - DNA, 38 bp, synthetic construct
  source 1..38: mol_type = other DNA
gggattcaataactttgcaacagtggaggaaagccttt

SEQ ID NO: 18754 - DNA, 39 bp, synthetic construct
  source 1..39: mol_type = other DNA
tgggattcaataactttgcaacagtggaggaaagccttt

SEQ ID NO: 18755 - DNA, 40 bp, synthetic construct
  source 1..40: mol_type = other DNA
ttgggattcaataactttgcaacagtggaggaaagccttt

SEQ ID NO: 18756 - DNA, 36 bp, synthetic construct
  source 1..36: mol_type = other DNA
tccactgttgcaaagttattgaatcccaagacacac

SEQ ID NO: 18757 - DNA, 37 bp, synthetic construct
  source 1..37: mol_type = other DNA
ctccactgttgcaaagttattgaatcccaagacacac

SEQ ID NO: 18758 - DNA, 38 bp, synthetic construct
  source 1..38: mol_type = other DNA
cctccactgttgcaaagttattgaatcccaagacacac

SEQ ID NO: 18759 - DNA, 39 bp, synthetic construct
  source 1..39: mol_type = other DNA
tcctccactgttgcaaagttattgaatcccaagacacac

SEQ ID NO: 18760 - DNA, 40 bp, synthetic construct
  source 1..40: mol_type = other DNA
ttcctccactgttgcaaagttattgaatcccaagacacac

SEQ ID NO: 18761 - DNA, 29 bp, synthetic construct
  source 1..29: mol_type = other DNA
tccactgttgcaaagttattgaatcccaa

SEQ ID NO: 18762 - DNA, 30 bp, synthetic construct
  source 1..30: mol_type = other DNA
ctccactgttgcaaagttattgaatcccaa

SEQ ID NO: 18763 - DNA, 31 bp, synthetic construct
  source 1..31: mol_type = other DNA
cctccactgttgcaaagttattgaatcccaa

SEQ ID NO: 18764 - DNA, 32 bp, synthetic construct
  source 1..32: mol_type = other DNA
tcctccactgttgcaaagttattgaatcccaa

SEQ ID NO: 18765 - DNA, 33 bp, synthetic construct
  source 1..33: mol_type = other DNA
ttcctccactgttgcaaagttattgaatcccaa

SEQ ID NO: 18766 - DNA, 34 bp, synthetic construct
  source 1..34: mol_type = other DNA
tttcctccactgttgcaaagttattgaatcccaa

SEQ ID NO: 18767 - DNA, 35 bp, synthetic construct
  source 1..35: mol_type = other DNA
ctttcctccactgttgcaaagttattgaatcccaa

SEQ ID NO: 18768 - DNA, 36 bp, synthetic construct
  source 1..36: mol_type = other DNA
gctttcctccactgttgcaaagttattgaatcccaa

SEQ ID NO: 18769 - DNA, 37 bp, synthetic construct
  source 1..37: mol_type = other DNA
ggctttcctccactgttgcaaagttattgaatcccaa

SEQ ID NO: 18770 - DNA, 38 bp, synthetic construct
  source 1..38: mol_type = other DNA
aggctttcctccactgttgcaaagttattgaatcccaa

SEQ ID NO: 18771 - DNA, 39 bp, synthetic construct
  source 1..39: mol_type = other DNA
aaggctttcctccactgttgcaaagttattgaatcccaa

SEQ ID NO: 18772 - DNA, 40 bp, synthetic construct
  source 1..40: mol_type = other DNA
aaaggctttcctccactgttgcaaagttattgaatcccaa

SEQ ID NO: 18773 - DNA, 10 bp, synthetic construct
  source 1..10: mol_type = other DNA
gctttcctcc

SEQ ID NO: 18774 - DNA, 11 bp, synthetic construct
  source 1..11: mol_type = other DNA
ggctttcctcc

SEQ ID NO: 18775 - DNA, 12 bp, synthetic construct
  source 1..12: mol_type = other DNA
aggctttcctcc

SEQ ID NO: 18776 - DNA, 13 bp, synthetic construct
  source 1..13: mol_type = other DNA
aaggctttcctcc

SEQ ID NO: 18777 - DNA, 14 bp, synthetic construct
  source 1..14: mol_type = other DNA
aaaggctttcctcc

SEQ ID NO: 18778 - DNA, 15 bp, synthetic construct
  source 1..15: mol_type = other DNA
caaaggctttcctcc

SEQ ID NO: 18779 - DNA, 16 bp, synthetic construct
  source 1..16: mol_type = other DNA
ccaaaggctttcctcc

SEQ ID NO: 18780 - DNA, 17 bp, synthetic construct
  source 1..17: mol_type = other DNA
tccaaaggctttcctcc

SEQ ID NO: 18781 - DNA, 18 bp, synthetic construct
  source 1..18: mol_type = other DNA
ctccaaaggctttcctcc

SEQ ID NO: 18782 - DNA, 19 bp, synthetic construct
  source 1..19: mol_type = other DNA
actccaaaggctttcctcc

SEQ ID NO: 18783 - DNA, 20 bp, synthetic construct
  source 1..20: mol_type = other DNA
cactccaaaggctttcctcc

SEQ ID NO: 18784 - DNA, 21 bp, synthetic construct
  source 1..21: mol_type = other DNA
tcactccaaaggctttcctcc

SEQ ID NO: 18785 - DNA, 22 bp, synthetic construct
  source 1..22: mol_type = other DNA
atcactccaaaggctttcctcc

SEQ ID NO: 18786 - DNA, 23 bp, synthetic construct
  source 1..23: mol_type = other DNA
tatcactccaaaggctttcctcc

SEQ ID NO: 18787 - DNA, 24 bp, synthetic construct
  source 1..24: mol_type = other DNA
gtatcactccaaaggctttcctcc

SEQ ID NO: 18788 - DNA, 25 bp, synthetic construct
  source 1..25: mol_type = other DNA
ggtatcactccaaaggctttcctcc

SEQ ID NO: 18789 - DNA, 26 bp, synthetic construct
  source 1..26: mol_type = other DNA
tggtatcactccaaaggctttcctcc

SEQ ID NO: 18790 - DNA, 27 bp, synthetic construct
  source 1..27: mol_type = other DNA
gtggtatcactccaaaggctttcctcc

SEQ ID NO: 18791 - DNA, 28 bp, synthetic construct
  source 1..28: mol_type = other DNA
tgtggtatcactccaaaggctttcctcc

SEQ ID NO: 18792 - DNA, 29 bp, synthetic construct
  source 1..29: mol_type = other DNA
ctgtggtatcactccaaaggctttcctcc

SEQ ID NO: 18793 - DNA, 30 bp, synthetic construct
  source 1..30: mol_type = other DNA
cctgtggtatcactccaaaggctttcctcc

SEQ ID NO: 18794 - DNA, 31 bp, synthetic construct
  source 1..31: mol_type = other DNA
acctgtggtatcactccaaaggctttcctcc

SEQ ID NO: 18795 - DNA, 32 bp, synthetic construct
  source 1..32: mol_type = other DNA
cacctgtggtatcactccaaaggctttcctcc

SEQ ID NO: 18796 - DNA, 33 bp, synthetic construct
  source 1..33: mol_type = other DNA
tcacctgtggtatcactccaaaggctttcctcc

SEQ ID NO: 18797 - DNA, 34 bp, synthetic construct
  source 1..34: mol_type = other DNA
ctcacctgtggtatcactccaaaggctttcctcc

SEQ ID NO: 18798 - DNA, 35 bp, synthetic construct
  source 1..35: mol_type = other DNA
gctcacctgtggtatcactccaaaggctttcctcc

SEQ ID NO: 18799 - DNA, 36 bp, synthetic construct
  source 1..36: mol_type = other DNA
tgctcacctgtggtatcactccaaaggctttcctcc

SEQ ID NO: 18800 - DNA, 37 bp, synthetic construct
  source 1..37: mol_type = other DNA
ttgctcacctgtggtatcactccaaaggctttcctcc

SEQ ID NO: 18801 - DNA, 38 bp, synthetic construct
  source 1..38: mol_type = other DNA
tttgctcacctgtggtatcactccaaaggctttcctcc

SEQ ID NO: 18802 - DNA, 39 bp, synthetic construct
  source 1..39: mol_type = other DNA
ttttgctcacctgtggtatcactccaaaggctttcctcc

SEQ ID NO: 18803 - DNA, 40 bp, synthetic construct
  source 1..40: mol_type = other DNA
cttttgctcacctgtggtatcactccaaaggctttcctcc

SEQ ID NO: 18804 - DNA, 32 bp, synthetic construct
  source 1..32: mol_type = other DNA
tccactgttgcaaagttattgaatcccaagac

SEQ ID NO: 18805 - DNA, 33 bp, synthetic construct
  source 1..33: mol_type = other DNA
ctccactgttgcaaagttattgaatcccaagac

SEQ ID NO: 18806 - DNA, 34 bp, synthetic construct
  source 1..34: mol_type = other DNA
cctccactgttgcaaagttattgaatcccaagac

SEQ ID NO: 18807 - DNA, 35 bp, synthetic construct
  source 1..35: mol_type = other DNA
tcctccactgttgcaaagttattgaatcccaagac

SEQ ID NO: 18808 - DNA, 36 bp, synthetic construct
  source 1..36: mol_type = other DNA
ttcctccactgttgcaaagttattgaatcccaagac

SEQ ID NO: 18809 - DNA, 37 bp, synthetic construct
  source 1..37: mol_type = other DNA
tttcctccactgttgcaaagttattgaatcccaagac

SEQ ID NO: 18810 - DNA, 38 bp, synthetic construct
  source 1..38: mol_type = other DNA
ctttcctccactgttgcaaagttattgaatcccaagac

SEQ ID NO: 18811 - DNA, 39 bp, synthetic construct
  source 1..39: mol_type = other DNA
gctttcctccactgttgcaaagttattgaatcccaagac

SEQ ID NO: 18812 - DNA, 40 bp, synthetic construct
  source 1..40: mol_type = other DNA
ggctttcctccactgttgcaaagttattgaatcccaagac

SEQ ID NO: 18813 - DNA, 10 bp, synthetic construct
  source 1..10: mol_type = other DNA
tttcctccac

SEQ ID NO: 18814 - DNA, 10 bp, synthetic construct
  source 1..10: mol_type = other DNA
tttccgccac

SEQ ID NO: 18815 - DNA, 11 bp, synthetic construct
  source 1..11: mol_type = other DNA
ctttccgccac

SEQ ID NO: 18816 - DNA, 11 bp, synthetic construct
  source 1..11: mol_type = other DNA
ctttcctccac

SEQ ID NO: 18817 - DNA, 12 bp, synthetic construct
  source 1..12: mol_type = other DNA
gctttcctccac

SEQ ID NO: 18818 - DNA, 12 bp, synthetic construct
  source 1..12: mol_type = other DNA
gctttccgccac

SEQ ID NO: 18819 - DNA, 13 bp, synthetic construct
  source 1..13: mol_type = other DNA
ggctttcctccac

SEQ ID NO: 18820 - DNA, 13 bp, synthetic construct
  source 1..13: mol_type = other DNA
ggctttccgccac

SEQ ID NO: 18821 - DNA, 14 bp, synthetic construct
  source 1..14: mol_type = other DNA
aggctttccgccac

SEQ ID NO: 18822 - DNA, 14 bp, synthetic construct
  source 1..14: mol_type = other DNA
aggctttcctccac

SEQ ID NO: 18823 - DNA, 15 bp, synthetic construct
  source 1..15: mol_type = other DNA
aaggctttcctccac

SEQ ID NO: 18824 - DNA, 15 bp, synthetic construct
  source 1..15: mol_type = other DNA
aaggctttccgccac

SEQ ID NO: 18825 - DNA, 16 bp, synthetic construct
  source 1..16: mol_type = other DNA
aaaggctttccgccac

SEQ ID NO: 18826 - DNA, 16 bp, synthetic construct
  source 1..16: mol_type = other DNA
aaaggctttcctccac

SEQ ID NO: 18827 - DNA, 17 bp, synthetic construct
  source 1..17: mol_type = other DNA
caaaggctttccgccac

SEQ ID NO: 18828 - DNA, 17 bp, synthetic construct
  source 1..17: mol_type = other DNA
caaaggctttcctccac

SEQ ID NO: 18829 - DNA, 18 bp, synthetic construct
  source 1..18: mol_type = other DNA
ccaaaggctttcctccac

SEQ ID NO: 18830 - DNA, 18 bp, synthetic construct
  source 1..18: mol_type = other DNA
ccaaaggctttccgccac

SEQ ID NO: 18831 - DNA, 19 bp, synthetic construct
  source 1..19: mol_type = other DNA
tccaaaggctttcctccac

SEQ ID NO: 18832 - DNA, 19 bp, synthetic construct
  source 1..19: mol_type = other DNA
tccaaaggctttccgccac

SEQ ID NO: 18833 - DNA, 20 bp, synthetic construct
  source 1..20: mol_type = other DNA
ctccaaaggctttccgccac

SEQ ID NO: 18834 - DNA, 20 bp, synthetic construct
  source 1..20: mol_type = other DNA
ctccaaaggctttcctccac

SEQ ID NO: 18835 - DNA, 21 bp, synthetic construct
  source 1..21: mol_type = other DNA
actccaaaggctttccgccac

SEQ ID NO: 18836 - DNA, 21 bp, synthetic construct
  source 1..21: mol_type = other DNA
actccaaaggctttcctccac

SEQ ID NO: 18837 - DNA, 22 bp, synthetic construct
  source 1..22: mol_type = other DNA
cactccaaaggctttcctccac

SEQ ID NO: 18838 - DNA, 22 bp, synthetic construct
  source 1..22: mol_type = other DNA
cactccaaaggctttccgccac

SEQ ID NO: 18839 - DNA, 23 bp, synthetic construct
  source 1..23: mol_type = other DNA
tcactccaaaggctttccgccac

SEQ ID NO: 18840 - DNA, 23 bp, synthetic construct
  source 1..23: mol_type = other DNA
tcactccaaaggctttcctccac

SEQ ID NO: 18841 - DNA, 24 bp, synthetic construct
  source 1..24: mol_type = other DNA
atcactccaaaggctttcctccac

SEQ ID NO: 18842 - DNA, 24 bp, synthetic construct
  source 1..24: mol_type = other DNA
atcactccaaaggctttccgccac

SEQ ID NO: 18843 - DNA, 25 bp, synthetic construct
  source 1..25: mol_type = other DNA
tatcactccaaaggctttcctccac

SEQ ID NO: 18844 - DNA, 25 bp, synthetic construct
  source 1..25: mol_type = other DNA
tatcactccaaaggctttccgccac

SEQ ID NO: 18845 - DNA, 26 bp, synthetic construct
  source 1..26: mol_type = other DNA
gtatcactccaaaggctttcctccac

SEQ ID NO: 18846 - DNA, 26 bp, synthetic construct
  source 1..26: mol_type = other DNA
gtatcactccaaaggctttccgccac

SEQ ID NO: 18847 - DNA, 27 bp, synthetic construct
  source 1..27: mol_type = other DNA
ggtatcactccaaaggctttccgccac

SEQ ID NO: 18848 - DNA, 27 bp, synthetic construct
  source 1..27: mol_type = other DNA
ggtatcactccaaaggctttcctccac

SEQ ID NO: 18849 - DNA, 28 bp, synthetic construct
  source 1..28: mol_type = other DNA
tggtatcactccaaaggctttccgccac

SEQ ID NO: 18850 - DNA, 28 bp, synthetic construct
  source 1..28: mol_type = other DNA
tggtatcactccaaaggctttcctccac

SEQ ID NO: 18851 - DNA, 29 bp, synthetic construct
  source 1..29: mol_type = other DNA
gtggtatcactccaaaggctttccgccac

SEQ ID NO: 18852 - DNA, 29 bp, synthetic construct
  source 1..29: mol_type = other DNA
gtggtatcactccaaaggctttcctccac

SEQ ID NO: 18853 - DNA, 30 bp, synthetic construct
  source 1..30: mol_type = other DNA
tgtggtatcactccaaaggctttccgccac

SEQ ID NO: 18854 - DNA, 30 bp, synthetic construct
  source 1..30: mol_type = other DNA
tgtggtatcactccaaaggctttcctccac

SEQ ID NO: 18855 - DNA, 31 bp, synthetic construct
  source 1..31: mol_type = other DNA
ctgtggtatcactccaaaggctttcctccac

SEQ ID NO: 18856 - DNA, 31 bp, synthetic construct
  source 1..31: mol_type = other DNA
ctgtggtatcactccaaaggctttccgccac

SEQ ID NO: 18857 - DNA, 32 bp, synthetic construct
  source 1..32: mol_type = other DNA
cctgtggtatcactccaaaggctttcctccac

SEQ ID NO: 18858 - DNA, 32 bp, synthetic construct
  source 1..32: mol_type = other DNA
cctgtggtatcactccaaaggctttccgccac

SEQ ID NO: 18859 - DNA, 33 bp, synthetic construct
  source 1..33: mol_type = other DNA
acctgtggtatcactccaaaggctttcctccac

SEQ ID NO: 18860 - DNA, 33 bp, synthetic construct
  source 1..33: mol_type = other DNA
acctgtggtatcactccaaaggctttccgccac

SEQ ID NO: 18861 - DNA, 34 bp, synthetic construct
  source 1..34: mol_type = other DNA
cacctgtggtatcactccaaaggctttcctccac

SEQ ID NO: 18862 - DNA, 34 bp, synthetic construct
  source 1..34: mol_type = other DNA
cacctgtggtatcactccaaaggctttccgccac

SEQ ID NO: 18863 - DNA, 35 bp, synthetic construct
  source 1..35: mol_type = other DNA
tcacctgtggtatcactccaaaggctttccgccac

SEQ ID NO: 18864 - DNA, 35 bp, synthetic construct
  source 1..35: mol_type = other DNA
tcacctgtggtatcactccaaaggctttcctccac

SEQ ID NO: 18865 - DNA, 36 bp, synthetic construct
  source 1..36: mol_type = other DNA
ctcacctgtggtatcactccaaaggctttccgccac

SEQ ID NO: 18866 - DNA, 36 bp, synthetic construct
  source 1..36: mol_type = other DNA
ctcacctgtggtatcactccaaaggctttcctccac

SEQ ID NO: 18867 - DNA, 37 bp, synthetic construct
  source 1..37: mol_type = other DNA
gctcacctgtggtatcactccaaaggctttcctccac

SEQ ID NO: 18868 - DNA, 37 bp, synthetic construct
  source 1..37: mol_type = other DNA
gctcacctgtggtatcactccaaaggctttccgccac

SEQ ID NO: 18869 - DNA, 38 bp, synthetic construct
  source 1..38: mol_type = other DNA
tgctcacctgtggtatcactccaaaggctttccgccac

SEQ ID NO: 18870 - DNA, 38 bp, synthetic construct
  source 1..38: mol_type = other DNA
tgctcacctgtggtatcactccaaaggctttcctccac

SEQ ID NO: 18871 - DNA, 39 bp, synthetic construct
  source 1..39: mol_type = other DNA
ttgctcacctgtggtatcactccaaaggctttcctccac

SEQ ID NO: 18872 - DNA, 39 bp, synthetic construct
  source 1..39: mol_type = other DNA
ttgctcacctgtggtatcactccaaaggctttccgccac

SEQ ID NO: 18873 - DNA, 40 bp, synthetic construct
  source 1..40: mol_type = other DNA
tttgctcacctgtggtatcactccaaaggctttcctccac

SEQ ID NO: 18874 - DNA, 40 bp, synthetic construct
  source 1..40: mol_type = other DNA
tttgctcacctgtggtatcactccaaaggctttccgccac

SEQ ID NO: 18875 - DNA, 16 bp, synthetic construct
  source 1..16: mol_type = other DNA
ggaggaaagcctttgg

SEQ ID NO: 18876 - DNA, 16 bp, synthetic construct
  source 1..16: mol_type = other DNA
ggaggaaagcttttgg

SEQ ID NO: 18877 - DNA, 17 bp, synthetic construct
  source 1..17: mol_type = other DNA
tggaggaaagcctttgg

SEQ ID NO: 18878 - DNA, 17 bp, synthetic construct
  source 1..17: mol_type = other DNA
tggaggaaagcttttgg

SEQ ID NO: 18879 - DNA, 18 bp, synthetic construct
  source 1..18: mol_type = other DNA
gtggaggaaagcttttgg

SEQ ID NO: 18880 - DNA, 18 bp, synthetic construct
  source 1..18: mol_type = other DNA
gtggaggaaagcctttgg

SEQ ID NO: 18881 - DNA, 19 bp, synthetic construct
  source 1..19: mol_type = other DNA
agtggaggaaagcctttgg

SEQ ID NO: 18882 - DNA, 19 bp, synthetic construct
  source 1..19: mol_type = other DNA
agtggaggaaagcttttgg

SEQ ID NO: 18883 - DNA, 20 bp, synthetic construct
  source 1..20: mol_type = other DNA
cagtggaggaaagcctttgg

SEQ ID NO: 18884 - DNA, 20 bp, synthetic construct
  source 1..20: mol_type = other DNA
cagtggaggaaagcttttgg

SEQ ID NO: 18885 - DNA, 21 bp, synthetic construct
  source 1..21: mol_type = other DNA
acagtggaggaaagcttttgg

SEQ ID NO: 18886 - DNA, 21 bp, synthetic construct
  source 1..21: mol_type = other DNA
acagtggaggaaagcctttgg

SEQ ID NO: 18887 - DNA, 22 bp, synthetic construct
  source 1..22: mol_type = other DNA
aacagtggaggaaagcctttgg

SEQ ID NO: 18888 - DNA, 22 bp, synthetic construct
  source 1..22: mol_type = other DNA
aacagtggaggaaagcttttgg

SEQ ID NO: 18889 - DNA, 23 bp, synthetic construct
  source 1..23: mol_type = other DNA
caacagtggaggaaagcttttgg

SEQ ID NO: 18890 - DNA, 23 bp, synthetic construct
  source 1..23: mol_type = other DNA
caacagtggaggaaagcctttgg

SEQ ID NO: 18891 - DNA, 24 bp, synthetic construct
  source 1..24: mol_type = other DNA
gcaacagtggaggaaagcttttgg

SEQ ID NO: 18892 - DNA, 24 bp, synthetic construct
  source 1..24: mol_type = other DNA
gcaacagtggaggaaagcctttgg

SEQ ID NO: 18893 - DNA, 25 bp, synthetic construct
  source 1..25: mol_type = other DNA
tgcaacagtggaggaaagcttttgg

SEQ ID NO: 18894 - DNA, 25 bp, synthetic construct
  source 1..25: mol_type = other DNA
tgcaacagtggaggaaagcctttgg

SEQ ID NO: 18895 - DNA, 26 bp, synthetic construct
  source 1..26: mol_type = other DNA
ttgcaacagtggaggaaagcttttgg

SEQ ID NO: 18896 - DNA, 26 bp, synthetic construct
  source 1..26: mol_type = other DNA
ttgcaacagtggaggaaagcctttgg

SEQ ID NO: 18897 - DNA, 27 bp, synthetic construct
  source 1..27: mol_type = other DNA
tttgcaacagtggaggaaagcttttgg

SEQ ID NO: 18898 - DNA, 27 bp, synthetic construct
  source 1..27: mol_type = other DNA
tttgcaacagtggaggaaagcctttgg

SEQ ID NO: 18899 - DNA, 28 bp, synthetic construct
  source 1..28: mol_type = other DNA
ctttgcaacagtggaggaaagcttttgg

SEQ ID NO: 18900 - DNA, 28 bp, synthetic construct
  source 1..28: mol_type = other DNA
ctttgcaacagtggaggaaagcctttgg

SEQ ID NO: 18901 - DNA, 29 bp, synthetic construct
  source 1..29: mol_type = other DNA
actttgcaacagtggaggaaagcttttgg

SEQ ID NO: 18902 - DNA, 29 bp, synthetic construct
  source 1..29: mol_type = other DNA
actttgcaacagtggaggaaagcctttgg

SEQ ID NO: 18903 - DNA, 30 bp, synthetic construct
  source 1..30: mol_type = other DNA
aactttgcaacagtggaggaaagcctttgg

SEQ ID NO: 18904 - DNA, 30 bp, synthetic construct
  source 1..30: mol_type = other DNA
aactttgcaacagtggaggaaagcttttgg

SEQ ID NO: 18905 - DNA, 31 bp, synthetic construct
  source 1..31: mol_type = other DNA
taactttgcaacagtggaggaaagcctttgg

SEQ ID NO: 18906 - DNA, 31 bp, synthetic construct
  source 1..31: mol_type = other DNA
taactttgcaacagtggaggaaagcttttgg

SEQ ID NO: 18907 - DNA, 32 bp, synthetic construct
  source 1..32: mol_type = other DNA
ataactttgcaacagtggaggaaagcttttgg

SEQ ID NO: 18908 - DNA, 32 bp, synthetic construct
  source 1..32: mol_type = other DNA
ataactttgcaacagtggaggaaagcctttgg

SEQ ID NO: 18909 - DNA, 33 bp, synthetic construct
  source 1..33: mol_type = other DNA
aataactttgcaacagtggaggaaagcttttgg

SEQ ID NO: 18910 - DNA, 33 bp, synthetic construct
  source 1..33: mol_type = other DNA
aataactttgcaacagtggaggaaagcctttgg

SEQ ID NO: 18911 - DNA, 34 bp, synthetic construct
  source 1..34: mol_type = other DNA
caataactttgcaacagtggaggaaagcctttgg

SEQ ID NO: 18912 - DNA, 34 bp, synthetic construct
  source 1..34: mol_type = other DNA
caataactttgcaacagtggaggaaagcttttgg

SEQ ID NO: 18913 - DNA, 35 bp, synthetic construct
  source 1..35: mol_type = other DNA
tcaataactttgcaacagtggaggaaagcctttgg

SEQ ID NO: 18914 - DNA, 35 bp, synthetic construct
  source 1..35: mol_type = other DNA
tcaataactttgcaacagtggaggaaagcttttgg

SEQ ID NO: 18915 - DNA, 36 bp, synthetic construct
  source 1..36: mol_type = other DNA
ttcaataactttgcaacagtggaggaaagcttttgg

SEQ ID NO: 18916 - DNA, 36 bp, synthetic construct
  source 1..36: mol_type = other DNA
ttcaataactttgcaacagtggaggaaagcctttgg

SEQ ID NO: 18917 - DNA, 37 bp, synthetic construct
  source 1..37: mol_type = other DNA
attcaataactttgcaacagtggaggaaagcctttgg

SEQ ID NO: 18918 - DNA, 37 bp, synthetic construct
  source 1..37: mol_type = other DNA
attcaataactttgcaacagtggaggaaagcttttgg

SEQ ID NO: 18919 - DNA, 38 bp, synthetic construct
  source 1..38: mol_type = other DNA
gattcaataactttgcaacagtggaggaaagcttttgg

SEQ ID NO: 18920 - DNA, 38 bp, synthetic construct
  source 1..38: mol_type = other DNA
gattcaataactttgcaacagtggaggaaagcctttgg

SEQ ID NO: 18921 - DNA, 39 bp, synthetic construct
  source 1..39: mol_type = other DNA
ggattcaataactttgcaacagtggaggaaagcttttgg

SEQ ID NO: 18922 - DNA, 39 bp, synthetic construct
  source 1..39: mol_type = other DNA
ggattcaataactttgcaacagtggaggaaagcctttgg

SEQ ID NO: 18923 - DNA, 40 bp, synthetic construct
  source 1..40: mol_type = other DNA
gggattcaataactttgcaacagtggaggaaagcttttgg

SEQ ID NO: 18924 - DNA, 40 bp, synthetic construct
  source 1..40: mol_type = other DNA
gggattcaataactttgcaacagtggaggaaagcctttgg

SEQ ID NO: 18925 - DNA, 30 bp, synthetic construct
  source 1..30: mol_type = other DNA
tccactgttgcaaagttattgaatcccaag

SEQ ID NO: 18926 - DNA, 31 bp, synthetic construct
  source 1..31: mol_type = other DNA
ctccactgttgcaaagttattgaatcccaag

SEQ ID NO: 18927 - DNA, 32 bp, synthetic construct
  source 1..32: mol_type = other DNA
cctccactgttgcaaagttattgaatcccaag

SEQ ID NO: 18928 - DNA, 33 bp, synthetic construct
  source 1..33: mol_type = other DNA
tcctccactgttgcaaagttattgaatcccaag

SEQ ID NO: 18929 - DNA, 34 bp, synthetic construct
  source 1..34: mol_type = other DNA
ttcctccactgttgcaaagttattgaatcccaag

SEQ ID NO: 18930 - DNA, 35 bp, synthetic construct
  source 1..35: mol_type = other DNA
tttcctccactgttgcaaagttattgaatcccaag

SEQ ID NO: 18931 - DNA, 36 bp, synthetic construct
  source 1..36: mol_type = other DNA
ctttcctccactgttgcaaagttattgaatcccaag

SEQ ID NO: 18932 - DNA, 37 bp, synthetic construct
  source 1..37: mol_type = other DNA
gctttcctccactgttgcaaagttattgaatcccaag

SEQ ID NO: 18933 - DNA, 38 bp, synthetic construct
  source 1..38: mol_type = other DNA
ggctttcctccactgttgcaaagttattgaatcccaag

SEQ ID NO: 18934 - DNA, 39 bp, synthetic construct
  source 1..39: mol_type = other DNA
aggctttcctccactgttgcaaagttattgaatcccaag

SEQ ID NO: 18935 - DNA, 40 bp, synthetic construct
  source 1..40: mol_type = other DNA
aaggctttcctccactgttgcaaagttattgaatcccaag

SEQ ID NO: 18936 - DNA, 31 bp, synthetic construct
  source 1..31: mol_type = other DNA
tccactgttgcaaagttattgaatcccaaga

SEQ ID NO: 18937 - DNA, 32 bp, synthetic construct
  source 1..32: mol_type = other DNA
ctccactgttgcaaagttattgaatcccaaga

SEQ ID NO: 18938 - DNA, 33 bp, synthetic construct
  source 1..33: mol_type = other DNA
cctccactgttgcaaagttattgaatcccaaga

SEQ ID NO: 18939 - DNA, 34 bp, synthetic construct
  source 1..34: mol_type = other DNA
tcctccactgttgcaaagttattgaatcccaaga

SEQ ID NO: 18940 - DNA, 35 bp, synthetic construct
  source 1..35: mol_type = other DNA
ttcctccactgttgcaaagttattgaatcccaaga

SEQ ID NO: 18941 - DNA, 36 bp, synthetic construct
  source 1..36: mol_type = other DNA
tttcctccactgttgcaaagttattgaatcccaaga

SEQ ID NO: 18942 - DNA, 37 bp, synthetic construct
  source 1..37: mol_type = other DNA
ctttcctccactgttgcaaagttattgaatcccaaga

SEQ ID NO: 18943 - DNA, 38 bp, synthetic construct
  source 1..38: mol_type = other DNA
gctttcctccactgttgcaaagttattgaatcccaaga

SEQ ID NO: 18944 - DNA, 39 bp, synthetic construct
  source 1..39: mol_type = other DNA
ggctttcctccactgttgcaaagttattgaatcccaaga

SEQ ID NO: 18945 - DNA, 40 bp, synthetic construct
  source 1..40: mol_type = other DNA
aggctttcctccactgttgcaaagttattgaatcccaaga

SEQ ID NO: 18946 - DNA, 30 bp, synthetic construct
  source 1..30: mol_type = other DNA
ggaggaaagcctttggagtgataccacagg

SEQ ID NO: 18947 - DNA, 31 bp, synthetic construct
  source 1..31: mol_type = other DNA
tggaggaaagcctttggagtgataccacagg

SEQ ID NO: 18948 - DNA, 32 bp, synthetic construct
  source 1..32: mol_type = other DNA
gtggaggaaagcctttggagtgataccacagg

SEQ ID NO: 18949 - DNA, 33 bp, synthetic construct
  source 1..33: mol_type = other DNA
agtggaggaaagcctttggagtgataccacagg

SEQ ID NO: 18950 - DNA, 34 bp, synthetic construct
  source 1..34: mol_type = other DNA
cagtggaggaaagcctttggagtgataccacagg

SEQ ID NO: 18951 - DNA, 35 bp, synthetic construct
  source 1..35: mol_type = other DNA
acagtggaggaaagcctttggagtgataccacagg

SEQ ID NO: 18952 - DNA, 36 bp, synthetic construct
  source 1..36: mol_type = other DNA
aacagtggaggaaagcctttggagtgataccacagg

SEQ ID NO: 18953 - DNA, 37 bp, synthetic construct
  source 1..37: mol_type = other DNA
caacagtggaggaaagcctttggagtgataccacagg

SEQ ID NO: 18954 - DNA, 38 bp, synthetic construct
  source 1..38: mol_type = other DNA
gcaacagtggaggaaagcctttggagtgataccacagg

SEQ ID NO: 18955 - DNA, 39 bp, synthetic construct
  source 1..39: mol_type = other DNA
tgcaacagtggaggaaagcctttggagtgataccacagg

SEQ ID NO: 18956 - DNA, 40 bp, synthetic construct
  source 1..40: mol_type = other DNA
ttgcaacagtggaggaaagcctttggagtgataccacagg

SEQ ID NO: 18957 - DNA, 31 bp, synthetic construct
  source 1..31: mol_type = other DNA
ggaggaaagcctttggagtgataccacaggt

SEQ ID NO: 18958 - DNA, 32 bp, synthetic construct
  source 1..32: mol_type = other DNA
tggaggaaagcctttggagtgataccacaggt

SEQ ID NO: 18959 - DNA, 33 bp, synthetic construct
  source 1..33: mol_type = other DNA
gtggaggaaagcctttggagtgataccacaggt

SEQ ID NO: 18960 - DNA, 34 bp, synthetic construct
  source 1..34: mol_type = other DNA
agtggaggaaagcctttggagtgataccacaggt

SEQ ID NO: 18961 - DNA, 35 bp, synthetic construct
  source 1..35: mol_type = other DNA
cagtggaggaaagcctttggagtgataccacaggt

SEQ ID NO: 18962 - DNA, 36 bp, synthetic construct
  source 1..36: mol_type = other DNA
acagtggaggaaagcctttggagtgataccacaggt

SEQ ID NO: 18963 - DNA, 37 bp, synthetic construct
  source 1..37: mol_type = other DNA
aacagtggaggaaagcctttggagtgataccacaggt

SEQ ID NO: 18964 - DNA, 38 bp, synthetic construct
  source 1..38: mol_type = other DNA
caacagtggaggaaagcctttggagtgataccacaggt

SEQ ID NO: 18965 - DNA, 39 bp, synthetic construct
  source 1..39: mol_type = other DNA
gcaacagtggaggaaagcctttggagtgataccacaggt

SEQ ID NO: 18966 - DNA, 40 bp, synthetic construct
  source 1..40: mol_type = other DNA
tgcaacagtggaggaaagcctttggagtgataccacaggt

SEQ ID NO: 18967 - DNA, 38 bp, synthetic construct
  source 1..38: mol_type = other DNA
tccactgttgcaaagttattgaatcccaagacacacca

SEQ ID NO: 18968 - DNA, 39 bp, synthetic construct
  source 1..39: mol_type = other DNA
ctccactgttgcaaagttattgaatcccaagacacacca

SEQ ID NO: 18969 - DNA, 40 bp, synthetic construct
  source 1..40: mol_type = other DNA
cctccactgttgcaaagttattgaatcccaagacacacca

SEQ ID NO: 18970 - DNA, 10 bp, synthetic construct
  source 1..10: mol_type = other DNA
tccattgttg

SEQ ID NO: 18971 - DNA, 10 bp, synthetic construct
  source 1..10: mol_type = other DNA
tccactgttg

SEQ ID NO: 18972 - DNA, 11 bp, synthetic construct
  source 1..11: mol_type = other DNA
ctccattgttg

SEQ ID NO: 18973 - DNA, 11 bp, synthetic construct
  source 1..11: mol_type = other DNA
ctccactgttg

SEQ ID NO: 18974 - DNA, 12 bp, synthetic construct
  source 1..12: mol_type = other DNA
cctccactgttg

SEQ ID NO: 18975 - DNA, 12 bp, synthetic construct
  source 1..12: mol_type = other DNA
cctccattgttg

SEQ ID NO: 18976 - DNA, 13 bp, synthetic construct
  source 1..13: mol_type = other DNA
tcctccattgttg

SEQ ID NO: 18977 - DNA, 13 bp, synthetic construct
  source 1..13: mol_type = other DNA
tcctccactgttg

SEQ ID NO: 18978 - DNA, 14 bp, synthetic construct
  source 1..14: mol_type = other DNA
ttcctccattgttg

SEQ ID NO: 18979 - DNA, 14 bp, synthetic construct
  source 1..14: mol_type = other DNA
ttcctccactgttg

SEQ ID NO: 18980 - DNA, 15 bp, synthetic construct
  source 1..15: mol_type = other DNA
tttcctccattgttg

SEQ ID NO: 18981 - DNA, 15 bp, synthetic construct
  source 1..15: mol_type = other DNA
tttcctccactgttg

SEQ ID NO: 18982 - DNA, 16 bp, synthetic construct
  source 1..16: mol_type = other DNA
ctttcctccactgttg

SEQ ID NO: 18983 - DNA, 16 bp, synthetic construct
  source 1..16: mol_type = other DNA
ctttcctccattgttg

SEQ ID NO: 18984 - DNA, 17 bp, synthetic construct
  source 1..17: mol_type = other DNA
gctttcctccattgttg

SEQ ID NO: 18985 - DNA, 17 bp, synthetic construct
  source 1..17: mol_type = other DNA
gctttcctccactgttg

SEQ ID NO: 18986 - DNA, 18 bp, synthetic construct
  source 1..18: mol_type = other DNA
ggctttcctccattgttg

SEQ ID NO: 18987 - DNA, 18 bp, synthetic construct
  source 1..18: mol_type = other DNA
ggctttcctccactgttg

SEQ ID NO: 18988 - DNA, 19 bp, synthetic construct
  source 1..19: mol_type = other DNA
aggctttcctccactgttg

SEQ ID NO: 18989 - DNA, 19 bp, synthetic construct
  source 1..19: mol_type = other DNA
aggctttcctccattgttg

SEQ ID NO: 18990 - DNA, 20 bp, synthetic construct
  source 1..20: mol_type = other DNA
aaggctttcctccactgttg

SEQ ID NO: 18991 - DNA, 20 bp, synthetic construct
  source 1..20: mol_type = other DNA
aaggctttcctccattgttg

SEQ ID NO: 18992 - DNA, 21 bp, synthetic construct
  source 1..21: mol_type = other DNA
aaaggctttcctccattgttg

SEQ ID NO: 18993 - DNA, 21 bp, synthetic construct
  source 1..21: mol_type = other DNA
aaaggctttcctccactgttg

SEQ ID NO: 18994 - DNA, 22 bp, synthetic construct
  source 1..22: mol_type = other DNA
caaaggctttcctccactgttg

SEQ ID NO: 18995 - DNA, 22 bp, synthetic construct
  source 1..22: mol_type = other DNA
caaaggctttcctccattgttg

SEQ ID NO: 18996 - DNA, 23 bp, synthetic construct
  source 1..23: mol_type = other DNA
ccaaaggctttcctccactgttg

SEQ ID NO: 18997 - DNA, 23 bp, synthetic construct
  source 1..23: mol_type = other DNA
ccaaaggctttcctccattgttg

SEQ ID NO: 18998 - DNA, 24 bp, synthetic construct
  source 1..24: mol_type = other DNA
tccaaaggctttcctccactgttg

SEQ ID NO: 18999 - DNA, 24 bp, synthetic construct
  source 1..24: mol_type = other DNA
tccaaaggctttcctccattgttg

SEQ ID NO: 19000 - DNA, 25 bp, synthetic construct
  source 1..25: mol_type = other DNA
ctccaaaggctttcctccattgttg

SEQ ID NO: 19001 - DNA, 25 bp, synthetic construct
  source 1..25: mol_type = other DNA
ctccaaaggctttcctccactgttg

SEQ ID NO: 19002 - DNA, 26 bp, synthetic construct
  source 1..26: mol_type = other DNA
actccaaaggctttcctccactgttg

SEQ ID NO: 19003 - DNA, 26 bp, synthetic construct
  source 1..26: mol_type = other DNA
actccaaaggctttcctccattgttg

SEQ ID NO: 19004 - DNA, 27 bp, synthetic construct
  source 1..27: mol_type = other DNA
cactccaaaggctttcctccattgttg

SEQ ID NO: 19005 - DNA, 27 bp, synthetic construct
  source 1..27: mol_type = other DNA
cactccaaaggctttcctccactgttg

SEQ ID NO: 19006 - DNA, 28 bp, synthetic construct
  source 1..28: mol_type = other DNA
tcactccaaaggctttcctccattgttg

SEQ ID NO: 19007 - DNA, 28 bp, synthetic construct
  source 1..28: mol_type = other DNA
tcactccaaaggctttcctccactgttg

SEQ ID NO: 19008 - DNA, 29 bp, synthetic construct
  source 1..29: mol_type = other DNA
atcactccaaaggctttcctccattgttg

SEQ ID NO: 19009 - DNA, 29 bp, synthetic construct
  source 1..29: mol_type = other DNA
atcactccaaaggctttcctccactgttg

SEQ ID NO: 19010 - DNA, 30 bp, synthetic construct
  source 1..30: mol_type = other DNA
tatcactccaaaggctttcctccactgttg

SEQ ID NO: 19011 - DNA, 30 bp, synthetic construct
  source 1..30: mol_type = other DNA
tatcactccaaaggctttcctccattgttg

SEQ ID NO: 19012 - DNA, 31 bp, synthetic construct
  source 1..31: mol_type = other DNA
gtatcactccaaaggctttcctccattgttg

SEQ ID NO: 19013 - DNA, 31 bp, synthetic construct
  source 1..31: mol_type = other DNA
gtatcactccaaaggctttcctccactgttg

SEQ ID NO: 19014 - DNA, 32 bp, synthetic construct
  source 1..32: mol_type = other DNA
ggtatcactccaaaggctttcctccactgttg

SEQ ID NO: 19015 - DNA, 32 bp, synthetic construct
  source 1..32: mol_type = other DNA
ggtatcactccaaaggctttcctccattgttg

SEQ ID NO: 19016 - DNA, 33 bp, synthetic construct
  source 1..33: mol_type = other DNA
tggtatcactccaaaggctttcctccattgttg

SEQ ID NO: 19017 - DNA, 33 bp, synthetic construct
  source 1..33: mol_type = other DNA
tggtatcactccaaaggctttcctccactgttg

SEQ ID NO: 19018 - DNA, 34 bp, synthetic construct
  source 1..34: mol_type = other DNA
gtggtatcactccaaaggctttcctccactgttg

SEQ ID NO: 19019 - DNA, 34 bp, synthetic construct
  source 1..34: mol_type = other DNA
gtggtatcactccaaaggctttcctccattgttg

SEQ ID NO: 19020 - DNA, 35 bp, synthetic construct
  source 1..35: mol_type = other DNA
tgtggtatcactccaaaggctttcctccactgttg

SEQ ID NO: 19021 - DNA, 35 bp, synthetic construct
  source 1..35: mol_type = other DNA
tgtggtatcactccaaaggctttcctccattgttg

SEQ ID NO: 19022 - DNA, 36 bp, synthetic construct
  source 1..36: mol_type = other DNA
ctgtggtatcactccaaaggctttcctccattgttg

SEQ ID NO: 19023 - DNA, 36 bp, synthetic construct
  source 1..36: mol_type = other DNA
ctgtggtatcactccaaaggctttcctccactgttg

SEQ ID NO: 19024 - DNA, 37 bp, synthetic construct
  source 1..37: mol_type = other DNA
cctgtggtatcactccaaaggctttcctccattgttg

SEQ ID NO: 19025 - DNA, 37 bp, synthetic construct
  source 1..37: mol_type = other DNA
cctgtggtatcactccaaaggctttcctccactgttg

SEQ ID NO: 19026 - DNA, 38 bp, synthetic construct
  source 1..38: mol_type = other DNA
acctgtggtatcactccaaaggctttcctccattgttg

SEQ ID NO: 19027 - DNA, 38 bp, synthetic construct
  source 1..38: mol_type = other DNA
acctgtggtatcactccaaaggctttcctccactgttg

SEQ ID NO: 19028 - DNA, 39 bp, synthetic construct
  source 1..39: mol_type = other DNA
cacctgtggtatcactccaaaggctttcctccattgttg

SEQ ID NO: 19029 - DNA, 39 bp, synthetic construct
  source 1..39: mol_type = other DNA
cacctgtggtatcactccaaaggctttcctccactgttg

SEQ ID NO: 19030 - DNA, 40 bp, synthetic construct
  source 1..40: mol_type = other DNA
tcacctgtggtatcactccaaaggctttcctccattgttg

SEQ ID NO: 19031 - DNA, 40 bp, synthetic construct
  source 1..40: mol_type = other DNA
tcacctgtggtatcactccaaaggctttcctccactgttg

SEQ ID NO: 19032 - DNA, 10 bp, synthetic construct
  source 1..10: mol_type = other DNA
ctccactgtt

SEQ ID NO: 19033 - DNA, 11 bp, synthetic construct
  source 1..11: mol_type = other DNA
cctccactgtt

SEQ ID NO: 19034 - DNA, 12 bp, synthetic construct
  source 1..12: mol_type = other DNA
tcctccactgtt

SEQ ID NO: 19035 - DNA, 13 bp, synthetic construct
  source 1..13: mol_type = other DNA
ttcctccactgtt

SEQ ID NO: 19036 - DNA, 14 bp, synthetic construct
  source 1..14: mol_type = other DNA
tttcctccactgtt

SEQ ID NO: 19037 - DNA, 15 bp, synthetic construct
  source 1..15: mol_type = other DNA
ctttcctccactgtt

SEQ ID NO: 19038 - DNA, 16 bp, synthetic construct
  source 1..16: mol_type = other DNA
gctttcctccactgtt

SEQ ID NO: 19039 - DNA, 17 bp, synthetic construct
  source 1..17: mol_type = other DNA
ggctttcctccactgtt

SEQ ID NO: 19040 - DNA, 18 bp, synthetic construct
  source 1..18: mol_type = other DNA
aggctttcctccactgtt

SEQ ID NO: 19041 - DNA, 19 bp, synthetic construct
  source 1..19: mol_type = other DNA
aaggctttcctccactgtt

SEQ ID NO: 19042 - DNA, 20 bp, synthetic construct
  source 1..20: mol_type = other DNA
aaaggctttcctccactgtt

SEQ ID NO: 19043 - DNA, 21 bp, synthetic construct
  source 1..21: mol_type = other DNA
caaaggctttcctccactgtt

SEQ ID NO: 19044 - DNA, 22 bp, synthetic construct
  source 1..22: mol_type = other DNA
ccaaaggctttcctccactgtt

SEQ ID NO: 19045 - DNA, 23 bp, synthetic construct
  source 1..23: mol_type = other DNA
tccaaaggctttcctccactgtt

SEQ ID NO: 19046 - DNA, 24 bp, synthetic construct
  source 1..24: mol_type = other DNA
ctccaaaggctttcctccactgtt

SEQ ID NO: 19047 - DNA, 25 bp, synthetic construct
  source 1..25: mol_type = other DNA
actccaaaggctttcctccactgtt

SEQ ID NO: 19048 - DNA, 26 bp, synthetic construct
  source 1..26: mol_type = other DNA
cactccaaaggctttcctccactgtt

SEQ ID NO: 19049 - DNA, 27 bp, synthetic construct
  source 1..27: mol_type = other DNA
tcactccaaaggctttcctccactgtt

SEQ ID NO: 19050 - DNA, 28 bp, synthetic construct
  source 1..28: mol_type = other DNA
atcactccaaaggctttcctccactgtt

SEQ ID NO: 19051 - DNA, 29 bp, synthetic construct
  source 1..29: mol_type = other DNA
tatcactccaaaggctttcctccactgtt

SEQ ID NO: 19052 - DNA, 30 bp, synthetic construct
  source 1..30: mol_type = other DNA
gtatcactccaaaggctttcctccactgtt

SEQ ID NO: 19053 - DNA, 31 bp, synthetic construct
  source 1..31: mol_type = other DNA
ggtatcactccaaaggctttcctccactgtt

SEQ ID NO: 19054 - DNA, 32 bp, synthetic construct
  source 1..32: mol_type = other DNA
tggtatcactccaaaggctttcctccactgtt

SEQ ID NO: 19055 - DNA, 33 bp, synthetic construct
  source 1..33: mol_type = other DNA
gtggtatcactccaaaggctttcctccactgtt

SEQ ID NO: 19056 - DNA, 34 bp, synthetic construct
  source 1..34: mol_type = other DNA
tgtggtatcactccaaaggctttcctccactgtt

SEQ ID NO: 19057 - DNA, 35 bp, synthetic construct
  source 1..35: mol_type = other DNA
ctgtggtatcactccaaaggctttcctccactgtt

SEQ ID NO: 19058 - DNA, 36 bp, synthetic construct
  source 1..36: mol_type = other DNA
cctgtggtatcactccaaaggctttcctccactgtt

SEQ ID NO: 19059 - DNA, 37 bp, synthetic construct
  source 1..37: mol_type = other DNA
acctgtggtatcactccaaaggctttcctccactgtt

SEQ ID NO: 19060 - DNA, 38 bp, synthetic construct
  source 1..38: mol_type = other DNA
cacctgtggtatcactccaaaggctttcctccactgtt

SEQ ID NO: 19061 - DNA, 39 bp, synthetic construct
  source 1..39: mol_type = other DNA
tcacctgtggtatcactccaaaggctttcctccactgtt

SEQ ID NO: 19062 - DNA, 40 bp, synthetic construct
  source 1..40: mol_type = other DNA
ctcacctgtggtatcactccaaaggctttcctccactgtt

SEQ ID NO: 19063 - DNA, 15 bp, synthetic construct
  source 1..15: mol_type = other DNA
tccactgttgcaaag

SEQ ID NO: 19064 - DNA, 16 bp, synthetic construct
  source 1..16: mol_type = other DNA
ctccactgttgcaaag

SEQ ID NO: 19065 - DNA, 17 bp, synthetic construct
  source 1..17: mol_type = other DNA
cctccactgttgcaaag

SEQ ID NO: 19066 - DNA, 18 bp, synthetic construct
  source 1..18: mol_type = other DNA
tcctccactgttgcaaag

SEQ ID NO: 19067 - DNA, 19 bp, synthetic construct
  source 1..19: mol_type = other DNA
ttcctccactgttgcaaag

SEQ ID NO: 19068 - DNA, 20 bp, synthetic construct
  source 1..20: mol_type = other DNA
tttcctccactgttgcaaag

SEQ ID NO: 19069 - DNA, 21 bp, synthetic construct
  source 1..21: mol_type = other DNA
ctttcctccactgttgcaaag

SEQ ID NO: 19070 - DNA, 22 bp, synthetic construct
  source 1..22: mol_type = other DNA
gctttcctccactgttgcaaag

SEQ ID NO: 19071 - DNA, 23 bp, synthetic construct
  source 1..23: mol_type = other DNA
ggctttcctccactgttgcaaag

SEQ ID NO: 19072 - DNA, 24 bp, synthetic construct
  source 1..24: mol_type = other DNA
aggctttcctccactgttgcaaag

SEQ ID NO: 19073 - DNA, 25 bp, synthetic construct
  source 1..25: mol_type = other DNA
aaggctttcctccactgttgcaaag

SEQ ID NO: 19074 - DNA, 26 bp, synthetic construct
  source 1..26: mol_type = other DNA
aaaggctttcctccactgttgcaaag

SEQ ID NO: 19075 - DNA, 27 bp, synthetic construct
  source 1..27: mol_type = other DNA
caaaggctttcctccactgttgcaaag

SEQ ID NO: 19076 - DNA, 28 bp, synthetic construct
  source 1..28: mol_type = other DNA
ccaaaggctttcctccactgttgcaaag

SEQ ID NO: 19077 - DNA, 29 bp, synthetic construct
  source 1..29: mol_type = other DNA
tccaaaggctttcctccactgttgcaaag

SEQ ID NO: 19078 - DNA, 30 bp, synthetic construct
  source 1..30: mol_type = other DNA
ctccaaaggctttcctccactgttgcaaag

SEQ ID NO: 19079 - DNA, 31 bp, synthetic construct
  source 1..31: mol_type = other DNA
actccaaaggctttcctccactgttgcaaag

SEQ ID NO: 19080 - DNA, 32 bp, synthetic construct
  source 1..32: mol_type = other DNA
cactccaaaggctttcctccactgttgcaaag

SEQ ID NO: 19081 - DNA, 33 bp, synthetic construct
  source 1..33: mol_type = other DNA
tcactccaaaggctttcctccactgttgcaaag

SEQ ID NO: 19082 - DNA, 34 bp, synthetic construct
  source 1..34: mol_type = other DNA
atcactccaaaggctttcctccactgttgcaaag

SEQ ID NO: 19083 - DNA, 35 bp, synthetic construct
  source 1..35: mol_type = other DNA
tatcactccaaaggctttcctccactgttgcaaag

SEQ ID NO: 19084 - DNA, 36 bp, synthetic construct
  source 1..36: mol_type = other DNA
gtatcactccaaaggctttcctccactgttgcaaag

SEQ ID NO: 19085 - DNA, 37 bp, synthetic construct
  source 1..37: mol_type = other DNA
ggtatcactccaaaggctttcctccactgttgcaaag

SEQ ID NO: 19086 - DNA, 38 bp, synthetic construct
  source 1..38: mol_type = other DNA
tggtatcactccaaaggctttcctccactgttgcaaag

SEQ ID NO: 19087 - DNA, 39 bp, synthetic construct
  source 1..39: mol_type = other DNA
gtggtatcactccaaaggctttcctccactgttgcaaag

SEQ ID NO: 19088 - DNA, 40 bp, synthetic construct
  source 1..40: mol_type = other DNA
tgtggtatcactccaaaggctttcctccactgttgcaaag

SEQ ID NO: 19089 - DNA, 10 bp, synthetic construct
  source 1..10: mol_type = other DNA
tcctccactg

SEQ ID NO: 19090 - DNA, 11 bp, synthetic construct
  source 1..11: mol_type = other DNA
ttcctccactg

SEQ ID NO: 19091 - DNA, 12 bp, synthetic construct
  source 1..12: mol_type = other DNA
tttcctccactg

SEQ ID NO: 19092 - DNA, 13 bp, synthetic construct
  source 1..13: mol_type = other DNA
ctttcctccactg

SEQ ID NO: 19093 - DNA, 14 bp, synthetic construct
  source 1..14: mol_type = other DNA
gctttcctccactg

SEQ ID NO: 19094 - DNA, 15 bp, synthetic construct
  source 1..15: mol_type = other DNA
ggctttcctccactg

SEQ ID NO: 19095 - DNA, 16 bp, synthetic construct
  source 1..16: mol_type = other DNA
aggctttcctccactg

SEQ ID NO: 19096 - DNA, 17 bp, synthetic construct
  source 1..17: mol_type = other DNA
aaggctttcctccactg

SEQ ID NO: 19097 - DNA, 18 bp, synthetic construct
  source 1..18: mol_type = other DNA
aaaggctttcctccactg

SEQ ID NO: 19098 - DNA, 19 bp, synthetic construct
  source 1..19: mol_type = other DNA
caaaggctttcctccactg

SEQ ID NO: 19099 - DNA, 20 bp, synthetic construct
  source 1..20: mol_type = other DNA
ccaaaggctttcctccactg

SEQ ID NO: 19100 - DNA, 21 bp, synthetic construct
  source 1..21: mol_type = other DNA
tccaaaggctttcctccactg

SEQ ID NO: 19101 - DNA, 22 bp, synthetic construct
  source 1..22: mol_type = other DNA
ctccaaaggctttcctccactg

SEQ ID NO: 19102 - DNA, 23 bp, synthetic construct
  source 1..23: mol_type = other DNA
actccaaaggctttcctccactg

SEQ ID NO: 19103 - DNA, 24 bp, synthetic construct
  source 1..24: mol_type = other DNA
cactccaaaggctttcctccactg

SEQ ID NO: 19104 - DNA, 25 bp, synthetic construct
  source 1..25: mol_type = other DNA
tcactccaaaggctttcctccactg

SEQ ID NO: 19105 - DNA, 26 bp, synthetic construct
  source 1..26: mol_type = other DNA
atcactccaaaggctttcctccactg

SEQ ID NO: 19106 - DNA, 27 bp, synthetic construct
  source 1..27: mol_type = other DNA
tatcactccaaaggctttcctccactg

SEQ ID NO: 19107 - DNA, 28 bp, synthetic construct
  source 1..28: mol_type = other DNA
gtatcactccaaaggctttcctccactg

SEQ ID NO: 19108 - DNA, 29 bp, synthetic construct
  source 1..29: mol_type = other DNA
ggtatcactccaaaggctttcctccactg

SEQ ID NO: 19109 - DNA, 30 bp, synthetic construct
  source 1..30: mol_type = other DNA
tggtatcactccaaaggctttcctccactg

SEQ ID NO: 19110 - DNA, 31 bp, synthetic construct
  source 1..31: mol_type = other DNA
gtggtatcactccaaaggctttcctccactg

SEQ ID NO: 19111 - DNA, 32 bp, synthetic construct
  source 1..32: mol_type = other DNA
tgtggtatcactccaaaggctttcctccactg

SEQ ID NO: 19112 - DNA, 33 bp, synthetic construct
  source 1..33: mol_type = other DNA
ctgtggtatcactccaaaggctttcctccactg

SEQ ID NO: 19113 - DNA, 34 bp, synthetic construct
  source 1..34: mol_type = other DNA
cctgtggtatcactccaaaggctttcctccactg

SEQ ID NO: 19114 - DNA, 35 bp, synthetic construct
  source 1..35: mol_type = other DNA
acctgtggtatcactccaaaggctttcctccactg

SEQ ID NO: 19115 - DNA, 36 bp, synthetic construct
  source 1..36: mol_type = other DNA
cacctgtggtatcactccaaaggctttcctccactg

SEQ ID NO: 19116 - DNA, 37 bp, synthetic construct
  source 1..37: mol_type = other DNA
tcacctgtggtatcactccaaaggctttcctccactg

SEQ ID NO: 19117 - DNA, 38 bp, synthetic construct
  source 1..38: mol_type = other DNA
ctcacctgtggtatcactccaaaggctttcctccactg

SEQ ID NO: 19118 - DNA, 39 bp, synthetic construct
  source 1..39: mol_type = other DNA
gctcacctgtggtatcactccaaaggctttcctccactg

SEQ ID NO: 19119 - DNA, 40 bp, synthetic construct
  source 1..40: mol_type = other DNA
tgctcacctgtggtatcactccaaaggctttcctccactg

SEQ ID NO: 19120 - DNA, 39 bp, synthetic construct
  source 1..39: mol_type = other DNA
ggaggaaagcctttggagtgataccacaggtgagcaaaa

SEQ ID NO: 19121 - DNA, 40 bp, synthetic construct
  source 1..40: mol_type = other DNA
tggaggaaagcctttggagtgataccacaggtgagcaaaa

SEQ ID NO: 19122 - DNA, 23 bp, synthetic construct
  source 1..23: mol_type = other DNA
agttttttctaaatgttccagaa

SEQ ID NO: 19123 - DNA, 24 bp, synthetic construct
  source 1..24: mol_type = other DNA
aagttttttctaaatgttccagaa

SEQ ID NO: 19124 - DNA, 25 bp, synthetic construct
  source 1..25: mol_type = other DNA
caagttttttctaaatgttccagaa

SEQ ID NO: 19125 - DNA, 26 bp, synthetic construct
  source 1..26: mol_type = other DNA
ccaagttttttctaaatgttccagaa

SEQ ID NO: 19126 - DNA, 27 bp, synthetic construct
  source 1..27: mol_type = other DNA
tccaagttttttctaaatgttccagaa

SEQ ID NO: 19127 - DNA, 28 bp, synthetic construct
  source 1..28: mol_type = other DNA
atccaagttttttctaaatgttccagaa

SEQ ID NO: 19128 - DNA, 29 bp, synthetic construct
  source 1..29: mol_type = other DNA
gatccaagttttttctaaatgttccagaa

SEQ ID NO: 19129 - DNA, 30 bp, synthetic construct
  source 1..30: mol_type = other DNA
ggatccaagttttttctaaatgttccagaa

SEQ ID NO: 19130 - DNA, 31 bp, synthetic construct
  source 1..31: mol_type = other DNA
gggatccaagttttttctaaatgttccagaa

SEQ ID NO: 19131 - DNA, 32 bp, synthetic construct
  source 1..32: mol_type = other DNA
agggatccaagttttttctaaatgttccagaa

SEQ ID NO: 19132 - DNA, 33 bp, synthetic construct
  source 1..33: mol_type = other DNA
tagggatccaagttttttctaaatgttccagaa

SEQ ID NO: 19133 - DNA, 34 bp, synthetic construct
  source 1..34: mol_type = other DNA
atagggatccaagttttttctaaatgttccagaa

SEQ ID NO: 19134 - DNA, 35 bp, synthetic construct
  source 1..35: mol_type = other DNA
catagggatccaagttttttctaaatgttccagaa

SEQ ID NO: 19135 - DNA, 36 bp, synthetic construct
  source 1..36: mol_type = other DNA
tcatagggatccaagttttttctaaatgttccagaa

SEQ ID NO: 19136 - DNA, 37 bp, synthetic construct
  source 1..37: mol_type = other DNA
ttcatagggatccaagttttttctaaatgttccagaa

SEQ ID NO: 19137 - DNA, 38 bp, synthetic construct
  source 1..38: mol_type = other DNA
gttcatagggatccaagttttttctaaatgttccagaa

SEQ ID NO: 19138 - DNA, 39 bp, synthetic construct
  source 1..39: mol_type = other DNA
tgttcatagggatccaagttttttctaaatgttccagaa

SEQ ID NO: 19139 - DNA, 40 bp, synthetic construct
  source 1..40: mol_type = other DNA
ctgttcatagggatccaagttttttctaaatgttccagaa

SEQ ID NO: 19140 - DNA, 24 bp, synthetic construct
  source 1..24: mol_type = other DNA
agttttttctaaatgttccagaaa

SEQ ID NO: 19141 - DNA, 25 bp, synthetic construct
  source 1..25: mol_type = other DNA
aagttttttctaaatgttccagaaa

SEQ ID NO: 19142 - DNA, 26 bp, synthetic construct
  source 1..26: mol_type = other DNA
caagttttttctaaatgttccagaaa

SEQ ID NO: 19143 - DNA, 27 bp, synthetic construct
  source 1..27: mol_type = other DNA
ccaagttttttctaaatgttccagaaa

SEQ ID NO: 19144 - DNA, 28 bp, synthetic construct
  source 1..28: mol_type = other DNA
tccaagttttttctaaatgttccagaaa

SEQ ID NO: 19145 - DNA, 29 bp, synthetic construct
  source 1..29: mol_type = other DNA
atccaagttttttctaaatgttccagaaa

SEQ ID NO: 19146 - DNA, 30 bp, synthetic construct
  source 1..30: mol_type = other DNA
gatccaagttttttctaaatgttccagaaa

SEQ ID NO: 19147 - DNA, 31 bp, synthetic construct
  source 1..31: mol_type = other DNA
ggatccaagttttttctaaatgttccagaaa

SEQ ID NO: 19148 - DNA, 32 bp, synthetic construct
  source 1..32: mol_type = other DNA
gggatccaagttttttctaaatgttccagaaa

SEQ ID NO: 19149 - DNA, 33 bp, synthetic construct
  source 1..33: mol_type = other DNA
agggatccaagttttttctaaatgttccagaaa

SEQ ID NO: 19150 - DNA, 34 bp, synthetic construct
  source 1..34: mol_type = other DNA
tagggatccaagttttttctaaatgttccagaaa

SEQ ID NO: 19151 - DNA, 35 bp, synthetic construct
  source 1..35: mol_type = other DNA
atagggatccaagttttttctaaatgttccagaaa

SEQ ID NO: 19152 - DNA, 36 bp, synthetic construct
  source 1..36: mol_type = other DNA
catagggatccaagttttttctaaatgttccagaaa

SEQ ID NO: 19153 - DNA, 37 bp, synthetic construct
  source 1..37: mol_type = other DNA
tcatagggatccaagttttttctaaatgttccagaaa

SEQ ID NO: 19154 - DNA, 38 bp, synthetic construct
  source 1..38: mol_type = other DNA
ttcatagggatccaagttttttctaaatgttccagaaa

SEQ ID NO: 19155 - DNA, 39 bp, synthetic construct
  source 1..39: mol_type = other DNA
gttcatagggatccaagttttttctaaatgttccagaaa

SEQ ID NO: 19156 - DNA, 40 bp, synthetic construct
  source 1..40: mol_type = other DNA
tgttcatagggatccaagttttttctaaatgttccagaaa

SEQ ID NO: 19157 - DNA, 22 bp, synthetic construct
  source 1..22: mol_type = other DNA
acttggatccctatgaacagtg

SEQ ID NO: 19158 - DNA, 23 bp, synthetic construct
  source 1..23: mol_type = other DNA
aacttggatccctatgaacagtg

SEQ ID NO: 19159 - DNA, 24 bp, synthetic construct
  source 1..24: mol_type = other DNA
aaacttggatccctatgaacagtg

SEQ ID NO: 19160 - DNA, 25 bp, synthetic construct
  source 1..25: mol_type = other DNA
aaaacttggatccctatgaacagtg

SEQ ID NO: 19161 - DNA, 26 bp, synthetic construct
  source 1..26: mol_type = other DNA
aaaaacttggatccctatgaacagtg

SEQ ID NO: 19162 - DNA, 27 bp, synthetic construct
  source 1..27: mol_type = other DNA
aaaaaacttggatccctatgaacagtg

SEQ ID NO: 19163 - DNA, 28 bp, synthetic construct
  source 1..28: mol_type = other DNA
gaaaaaacttggatccctatgaacagtg

SEQ ID NO: 19164 - DNA, 29 bp, synthetic construct
  source 1..29: mol_type = other DNA
agaaaaaacttggatccctatgaacagtg

SEQ ID NO: 19165 - DNA, 30 bp, synthetic construct
  source 1..30: mol_type = other DNA
tagaaaaaacttggatccctatgaacagtg

SEQ ID NO: 19166 - DNA, 31 bp, synthetic construct
  source 1..31: mol_type = other DNA
ttagaaaaaacttggatccctatgaacagtg

SEQ ID NO: 19167 - DNA, 32 bp, synthetic construct
  source 1..32: mol_type = other DNA
tttagaaaaaacttggatccctatgaacagtg

SEQ ID NO: 19168 - DNA, 33 bp, synthetic construct
  source 1..33: mol_type = other DNA
atttagaaaaaacttggatccctatgaacagtg

SEQ ID NO: 19169 - DNA, 34 bp, synthetic construct
  source 1..34: mol_type = other DNA
catttagaaaaaacttggatccctatgaacagtg

SEQ ID NO: 19170 - DNA, 35 bp, synthetic construct
  source 1..35: mol_type = other DNA
acatttagaaaaaacttggatccctatgaacagtg

SEQ ID NO: 19171 - DNA, 36 bp, synthetic construct
  source 1..36: mol_type = other DNA
aacatttagaaaaaacttggatccctatgaacagtg

SEQ ID NO: 19172 - DNA, 37 bp, synthetic construct
  source 1..37: mol_type = other DNA
gaacatttagaaaaaacttggatccctatgaacagtg

SEQ ID NO: 19173 - DNA, 38 bp, synthetic construct
  source 1..38: mol_type = other DNA
ggaacatttagaaaaaacttggatccctatgaacagtg

SEQ ID NO: 19174 - DNA, 39 bp, synthetic construct
  source 1..39: mol_type = other DNA
tggaacatttagaaaaaacttggatccctatgaacagtg

SEQ ID NO: 19175 - DNA, 40 bp, synthetic construct
  source 1..40: mol_type = other DNA
ctggaacatttagaaaaaacttggatccctatgaacagtg

SEQ ID NO: 19176 - DNA, 13 bp, synthetic construct
  source 1..13: mol_type = other DNA
acttggatcccta

SEQ ID NO: 19177 - DNA, 14 bp, synthetic construct
  source 1..14: mol_type = other DNA
aacttggatcccta

SEQ ID NO: 19178 - DNA, 15 bp, synthetic construct
  source 1..15: mol_type = other DNA
aaacttggatcccta

SEQ ID NO: 19179 - DNA, 16 bp, synthetic construct
  source 1..16: mol_type = other DNA
aaaacttggatcccta

SEQ ID NO: 19180 - DNA, 17 bp, synthetic construct
  source 1..17: mol_type = other DNA
aaaaacttggatcccta

SEQ ID NO: 19181 - DNA, 18 bp, synthetic construct
  source 1..18: mol_type = other DNA
aaaaaacttggatcccta

SEQ ID NO: 19182 - DNA, 19 bp, synthetic construct
  source 1..19: mol_type = other DNA
gaaaaaacttggatcccta

SEQ ID NO: 19183 - DNA, 20 bp, synthetic construct
  source 1..20: mol_type = other DNA
agaaaaaacttggatcccta

SEQ ID NO: 19184 - DNA, 21 bp, synthetic construct
  source 1..21: mol_type = other DNA
tagaaaaaacttggatcccta

SEQ ID NO: 19185 - DNA, 22 bp, synthetic construct
  source 1..22: mol_type = other DNA
ttagaaaaaacttggatcccta

SEQ ID NO: 19186 - DNA, 23 bp, synthetic construct
  source 1..23: mol_type = other DNA
tttagaaaaaacttggatcccta

SEQ ID NO: 19187 - DNA, 24 bp, synthetic construct
  source 1..24: mol_type = other DNA
atttagaaaaaacttggatcccta

SEQ ID NO: 19188 - DNA, 25 bp, synthetic construct
  source 1..25: mol_type = other DNA
catttagaaaaaacttggatcccta

SEQ ID NO: 19189 - DNA, 26 bp, synthetic construct
  source 1..26: mol_type = other DNA
acatttagaaaaaacttggatcccta

SEQ ID NO: 19190 - DNA, 27 bp, synthetic construct
  source 1..27: mol_type = other DNA
aacatttagaaaaaacttggatcccta

SEQ ID NO: 19191 - DNA, 28 bp, synthetic construct
  source 1..28: mol_type = other DNA
gaacatttagaaaaaacttggatcccta

SEQ ID NO: 19192 - DNA, 29 bp, synthetic construct
  source 1..29: mol_type = other DNA
ggaacatttagaaaaaacttggatcccta

SEQ ID NO: 19193 - DNA, 30 bp, synthetic construct
  source 1..30: mol_type = other DNA
tggaacatttagaaaaaacttggatcccta

SEQ ID NO: 19194 - DNA, 31 bp, synthetic construct
  source 1..31: mol_type = other DNA
ctggaacatttagaaaaaacttggatcccta

SEQ ID NO: 19195 - DNA, 32 bp, synthetic construct
  source 1..32: mol_type = other DNA
tctggaacatttagaaaaaacttggatcccta

SEQ ID NO: 19196 - DNA, 33 bp, synthetic construct
  source 1..33: mol_type = other DNA
ttctggaacatttagaaaaaacttggatcccta

SEQ ID NO: 19197 - DNA, 34 bp, synthetic construct
  source 1..34: mol_type = other DNA
tttctggaacatttagaaaaaacttggatcccta

SEQ ID NO: 19198 - DNA, 35 bp, synthetic construct
  source 1..35: mol_type = other DNA
ttttctggaacatttagaaaaaacttggatcccta

SEQ ID NO: 19199 - DNA, 36 bp, synthetic construct
  source 1..36: mol_type = other DNA
tttttctggaacatttagaaaaaacttggatcccta

SEQ ID NO: 19200 - DNA, 37 bp, synthetic construct
  source 1..37: mol_type = other DNA
ttttttctggaacatttagaaaaaacttggatcccta

SEQ ID NO: 19201 - DNA, 38 bp, synthetic construct
  source 1..38: mol_type = other DNA
attttttctggaacatttagaaaaaacttggatcccta

SEQ ID NO: 19202 - DNA, 39 bp, synthetic construct
  source 1..39: mol_type = other DNA
tattttttctggaacatttagaaaaaacttggatcccta

SEQ ID NO: 19203 - DNA, 40 bp, synthetic construct
  source 1..40: mol_type = other DNA
ttattttttctggaacatttagaaaaaacttggatcccta

SEQ ID NO: 19204 - DNA, 10 bp, synthetic construct
  source 1..10: mol_type = other DNA
gatccaagtt

SEQ ID NO: 19205 - DNA, 11 bp, synthetic construct
  source 1..11: mol_type = other DNA
ggatccaagtt

SEQ ID NO: 19206 - DNA, 12 bp, synthetic construct
  source 1..12: mol_type = other DNA
gggatccaagtt

SEQ ID NO: 19207 - DNA, 13 bp, synthetic construct
  source 1..13: mol_type = other DNA
agggatccaagtt

SEQ ID NO: 19208 - DNA, 14 bp, synthetic construct
  source 1..14: mol_type = other DNA
tagggatccaagtt

SEQ ID NO: 19209 - DNA, 15 bp, synthetic construct
  source 1..15: mol_type = other DNA
atagggatccaagtt

SEQ ID NO: 19210 - DNA, 16 bp, synthetic construct
  source 1..16: mol_type = other DNA
catagggatccaagtt

SEQ ID NO: 19211 - DNA, 17 bp, synthetic construct
  source 1..17: mol_type = other DNA
tcatagggatccaagtt

SEQ ID NO: 19212 - DNA, 18 bp, synthetic construct
  source 1..18: mol_type = other DNA
ttcatagggatccaagtt

SEQ ID NO: 19213 - DNA, 19 bp, synthetic construct
  source 1..19: mol_type = other DNA
gttcatagggatccaagtt

SEQ ID NO: 19214 - DNA, 20 bp, synthetic construct
  source 1..20: mol_type = other DNA
tgttcatagggatccaagtt

SEQ ID NO: 19215 - DNA, 21 bp, synthetic construct
  source 1..21: mol_type = other DNA
ctgttcatagggatccaagtt

SEQ ID NO: 19216 - DNA, 22 bp, synthetic construct
  source 1..22: mol_type = other DNA
actgttcatagggatccaagtt

SEQ ID NO: 19217 - DNA, 23 bp, synthetic construct
  source 1..23: mol_type = other DNA
cactgttcatagggatccaagtt

SEQ ID NO: 19218 - DNA, 24 bp, synthetic construct
  source 1..24: mol_type = other DNA
ccactgttcatagggatccaagtt

SEQ ID NO: 19219 - DNA, 25 bp, synthetic construct
  source 1..25: mol_type = other DNA
tccactgttcatagggatccaagtt

SEQ ID NO: 19220 - DNA, 26 bp, synthetic construct
  source 1..26: mol_type = other DNA
ctccactgttcatagggatccaagtt

SEQ ID NO: 19221 - DNA, 27 bp, synthetic construct
  source 1..27: mol_type = other DNA
actccactgttcatagggatccaagtt

SEQ ID NO: 19222 - DNA, 28 bp, synthetic construct
  source 1..28: mol_type = other DNA
cactccactgttcatagggatccaagtt

SEQ ID NO: 19223 - DNA, 29 bp, synthetic construct
  source 1..29: mol_type = other DNA
tcactccactgttcatagggatccaagtt

SEQ ID NO: 19224 - DNA, 30 bp, synthetic construct
  source 1..30: mol_type = other DNA
atcactccactgttcatagggatccaagtt

SEQ ID NO: 19225 - DNA, 31 bp, synthetic construct
  source 1..31: mol_type = other DNA
gatcactccactgttcatagggatccaagtt

SEQ ID NO: 19226 - DNA, 32 bp, synthetic construct
  source 1..32: mol_type = other DNA
tgatcactccactgttcatagggatccaagtt

SEQ ID NO: 19227 - DNA, 33 bp, synthetic construct
  source 1..33: mol_type = other DNA
ttgatcactccactgttcatagggatccaagtt

SEQ ID NO: 19228 - DNA, 34 bp, synthetic construct
  source 1..34: mol_type = other DNA
cttgatcactccactgttcatagggatccaagtt

SEQ ID NO: 19229 - DNA, 35 bp, synthetic construct
  source 1..35: mol_type = other DNA
tcttgatcactccactgttcatagggatccaagtt

SEQ ID NO: 19230 - DNA, 36 bp, synthetic construct
  source 1..36: mol_type = other DNA
ttcttgatcactccactgttcatagggatccaagtt

SEQ ID NO: 19231 - DNA, 37 bp, synthetic construct
  source 1..37: mol_type = other DNA
tttcttgatcactccactgttcatagggatccaagtt

SEQ ID NO: 19232 - DNA, 38 bp, synthetic construct
  source 1..38: mol_type = other DNA
atttcttgatcactccactgttcatagggatccaagtt

SEQ ID NO: 19233 - DNA, 39 bp, synthetic construct
  source 1..39: mol_type = other DNA
tatttcttgatcactccactgttcatagggatccaagtt

SEQ ID NO: 19234 - DNA, 40 bp, synthetic construct
  source 1..40: mol_type = other DNA
atatttcttgatcactccactgttcatagggatccaagtt

SEQ ID NO: 19235 - DNA, 22 bp, synthetic construct
  source 1..22: mol_type = other DNA
agttttttctaaatgttccaga

SEQ ID NO: 19236 - DNA, 23 bp, synthetic construct
  source 1..23: mol_type = other DNA
aagttttttctaaatgttccaga

SEQ ID NO: 19237 - DNA, 24 bp, synthetic construct
  source 1..24: mol_type = other DNA
caagttttttctaaatgttccaga

SEQ ID NO: 19238 - DNA, 25 bp, synthetic construct
  source 1..25: mol_type = other DNA
ccaagttttttctaaatgttccaga

SEQ ID NO: 19239 - DNA, 26 bp, synthetic construct
  source 1..26: mol_type = other DNA
tccaagttttttctaaatgttccaga

SEQ ID NO: 19240 - DNA, 27 bp, synthetic construct
  source 1..27: mol_type = other DNA
atccaagttttttctaaatgttccaga

SEQ ID NO: 19241 - DNA, 28 bp, synthetic construct
  source 1..28: mol_type = other DNA
gatccaagttttttctaaatgttccaga

SEQ ID NO: 19242 - DNA, 29 bp, synthetic construct
  source 1..29: mol_type = other DNA
ggatccaagttttttctaaatgttccaga

SEQ ID NO: 19243 - DNA, 30 bp, synthetic construct
  source 1..30: mol_type = other DNA
gggatccaagttttttctaaatgttccaga

SEQ ID NO: 19244 - DNA, 31 bp, synthetic construct
  source 1..31: mol_type = other DNA
agggatccaagttttttctaaatgttccaga

SEQ ID NO: 19245 - DNA, 32 bp, synthetic construct
  source 1..32: mol_type = other DNA
tagggatccaagttttttctaaatgttccaga

SEQ ID NO: 19246 - DNA, 33 bp, synthetic construct
  source 1..33: mol_type = other DNA
atagggatccaagttttttctaaatgttccaga

SEQ ID NO: 19247 - DNA, 34 bp, synthetic construct
  source 1..34: mol_type = other DNA
catagggatccaagttttttctaaatgttccaga

SEQ ID NO: 19248 - DNA, 35 bp, synthetic construct
  source 1..35: mol_type = other DNA
tcatagggatccaagttttttctaaatgttccaga

SEQ ID NO: 19249 - DNA, 36 bp, synthetic construct
  source 1..36: mol_type = other DNA
ttcatagggatccaagttttttctaaatgttccaga

SEQ ID NO: 19250 - DNA, 37 bp, synthetic construct
  source 1..37: mol_type = other DNA
gttcatagggatccaagttttttctaaatgttccaga

SEQ ID NO: 19251 - DNA, 38 bp, synthetic construct
  source 1..38: mol_type = other DNA
tgttcatagggatccaagttttttctaaatgttccaga

SEQ ID NO: 19252 - DNA, 39 bp, synthetic construct
  source 1..39: mol_type = other DNA
ctgttcatagggatccaagttttttctaaatgttccaga

SEQ ID NO: 19253 - DNA, 40 bp, synthetic construct
  source 1..40: mol_type = other DNA
actgttcatagggatccaagttttttctaaatgttccaga

SEQ ID NO: 19254 - DNA, 10 bp, synthetic construct
  source 1..10: mol_type = other DNA
gggatccaag

SEQ ID NO: 19255 - DNA, 11 bp, synthetic construct
  source 1..11: mol_type = other DNA
agggatccaag

SEQ ID NO: 19256 - DNA, 12 bp, synthetic construct
  source 1..12: mol_type = other DNA
tagggatccaag

SEQ ID NO: 19257 - DNA, 13 bp, synthetic construct
  source 1..13: mol_type = other DNA
atagggatccaag

SEQ ID NO: 19258 - DNA, 14 bp, synthetic construct
  source 1..14: mol_type = other DNA
catagggatccaag

SEQ ID NO: 19259 - DNA, 15 bp, synthetic construct
  source 1..15: mol_type = other DNA
tcatagggatccaag

SEQ ID NO: 19260 - DNA, 16 bp, synthetic construct
  source 1..16: mol_type = other DNA
ttcatagggatccaag

SEQ ID NO: 19261 - DNA, 17 bp, synthetic construct
  source 1..17: mol_type = other DNA
gttcatagggatccaag

SEQ ID NO: 19262 - DNA, 18 bp, synthetic construct
  source 1..18: mol_type = other DNA
tgttcatagggatccaag

SEQ ID NO: 19263 - DNA, 19 bp, synthetic construct
  source 1..19: mol_type = other DNA
ctgttcatagggatccaag

SEQ ID NO: 19264 - DNA, 20 bp, synthetic construct
  source 1..20: mol_type = other DNA
actgttcatagggatccaag

SEQ ID NO: 19265 - DNA, 21 bp, synthetic construct
  source 1..21: mol_type = other DNA
cactgttcatagggatccaag

SEQ ID NO: 19266 - DNA, 22 bp, synthetic construct
  source 1..22: mol_type = other DNA
ccactgttcatagggatccaag

SEQ ID NO: 19267 - DNA, 23 bp, synthetic construct
  source 1..23: mol_type = other DNA
tccactgttcatagggatccaag

SEQ ID NO: 19268 - DNA, 24 bp, synthetic construct
  source 1..24: mol_type = other DNA
ctccactgttcatagggatccaag

SEQ ID NO: 19269 - DNA, 25 bp, synthetic construct
  source 1..25: mol_type = other DNA
actccactgttcatagggatccaag

SEQ ID NO: 19270 - DNA, 26 bp, synthetic construct
  source 1..26: mol_type = other DNA
cactccactgttcatagggatccaag

SEQ ID NO: 19271 - DNA, 27 bp, synthetic construct
  source 1..27: mol_type = other DNA
tcactccactgttcatagggatccaag

SEQ ID NO: 19272 - DNA, 28 bp, synthetic construct
  source 1..28: mol_type = other DNA
atcactccactgttcatagggatccaag

SEQ ID NO: 19273 - DNA, 29 bp, synthetic construct
  source 1..29: mol_type = other DNA
gatcactccactgttcatagggatccaag

SEQ ID NO: 19274 - DNA, 30 bp, synthetic construct
  source 1..30: mol_type = other DNA
tgatcactccactgttcatagggatccaag

SEQ ID NO: 19275 - DNA, 31 bp, synthetic construct
  source 1..31: mol_type = other DNA
ttgatcactccactgttcatagggatccaag

SEQ ID NO: 19276 - DNA, 32 bp, synthetic construct
  source 1..32: mol_type = other DNA
cttgatcactccactgttcatagggatccaag

SEQ ID NO: 19277 - DNA, 33 bp, synthetic construct
  source 1..33: mol_type = other DNA
tcttgatcactccactgttcatagggatccaag

SEQ ID NO: 19278 - DNA, 34 bp, synthetic construct
  source 1..34: mol_type = other DNA
ttcttgatcactccactgttcatagggatccaag

SEQ ID NO: 19279 - DNA, 35 bp, synthetic construct
  source 1..35: mol_type = other DNA
tttcttgatcactccactgttcatagggatccaag

SEQ ID NO: 19280 - DNA, 36 bp, synthetic construct
  source 1..36: mol_type = other DNA
atttcttgatcactccactgttcatagggatccaag

SEQ ID NO: 19281 - DNA, 37 bp, synthetic construct
  source 1..37: mol_type = other DNA
tatttcttgatcactccactgttcatagggatccaag

SEQ ID NO: 19282 - DNA, 38 bp, synthetic construct
  source 1..38: mol_type = other DNA
atatttcttgatcactccactgttcatagggatccaag

SEQ ID NO: 19283 - DNA, 39 bp, synthetic construct
  source 1..39: mol_type = other DNA
catatttcttgatcactccactgttcatagggatccaag

SEQ ID NO: 19284 - DNA, 40 bp, synthetic construct
  source 1..40: mol_type = other DNA
ccatatttcttgatcactccactgttcatagggatccaag

SEQ ID NO: 19285 - DNA, 14 bp, synthetic construct
  source 1..14: mol_type = other DNA
acttggatccctat

SEQ ID NO: 19286 - DNA, 15 bp, synthetic construct
  source 1..15: mol_type = other DNA
aacttggatccctat

SEQ ID NO: 19287 - DNA, 16 bp, synthetic construct
  source 1..16: mol_type = other DNA
aaacttggatccctat

SEQ ID NO: 19288 - DNA, 17 bp, synthetic construct
  source 1..17: mol_type = other DNA
aaaacttggatccctat

SEQ ID NO: 19289 - DNA, 18 bp, synthetic construct
  source 1..18: mol_type = other DNA
aaaaacttggatccctat

SEQ ID NO: 19290 - DNA, 19 bp, synthetic construct
  source 1..19: mol_type = other DNA
aaaaaacttggatccctat

SEQ ID NO: 19291 - DNA, 20 bp, synthetic construct
  source 1..20: mol_type = other DNA
gaaaaaacttggatccctat

SEQ ID NO: 19292 - DNA, 21 bp, synthetic construct
  source 1..21: mol_type = other DNA
agaaaaaacttggatccctat

SEQ ID NO: 19293 - DNA, 22 bp, synthetic construct
  source 1..22: mol_type = other DNA
tagaaaaaacttggatccctat

SEQ ID NO: 19294 - DNA, 23 bp, synthetic construct
  source 1..23: mol_type = other DNA
ttagaaaaaacttggatccctat

SEQ ID NO: 19295 - DNA, 24 bp, synthetic construct
  source 1..24: mol_type = other DNA
tttagaaaaaacttggatccctat

SEQ ID NO: 19296 - DNA, 25 bp, synthetic construct
  source 1..25: mol_type = other DNA
atttagaaaaaacttggatccctat

SEQ ID NO: 19297 - DNA, 26 bp, synthetic construct
  source 1..26: mol_type = other DNA
catttagaaaaaacttggatccctat

SEQ ID NO: 19298 - DNA, 27 bp, synthetic construct
  source 1..27: mol_type = other DNA
acatttagaaaaaacttggatccctat

SEQ ID NO: 19299 - DNA, 28 bp, synthetic construct
  source 1..28: mol_type = other DNA
aacatttagaaaaaacttggatccctat

SEQ ID NO: 19300 - DNA, 29 bp, synthetic construct
  source 1..29: mol_type = other DNA
gaacatttagaaaaaacttggatccctat

SEQ ID NO: 19301 - DNA, 30 bp, synthetic construct
  source 1..30: mol_type = other DNA
ggaacatttagaaaaaacttggatccctat

SEQ ID NO: 19302 - DNA, 31 bp, synthetic construct
  source 1..31: mol_type = other DNA
tggaacatttagaaaaaacttggatccctat

SEQ ID NO: 19303 - DNA, 32 bp, synthetic construct
  source 1..32: mol_type = other DNA
ctggaacatttagaaaaaacttggatccctat

SEQ ID NO: 19304 - DNA, 33 bp, synthetic construct
  source 1..33: mol_type = other DNA
tctggaacatttagaaaaaacttggatccctat

SEQ ID NO: 19305 - DNA, 34 bp, synthetic construct
  source 1..34: mol_type = other DNA
ttctggaacatttagaaaaaacttggatccctat

SEQ ID NO: 19306 - DNA, 35 bp, synthetic construct
  source 1..35: mol_type = other DNA
tttctggaacatttagaaaaaacttggatccctat

SEQ ID NO: 19307 - DNA, 36 bp, synthetic construct
  source 1..36: mol_type = other DNA
ttttctggaacatttagaaaaaacttggatccctat

SEQ ID NO: 19308 - DNA, 37 bp, synthetic construct
  source 1..37: mol_type = other DNA
tttttctggaacatttagaaaaaacttggatccctat

SEQ ID NO: 19309 - DNA, 38 bp, synthetic construct
  source 1..38: mol_type = other DNA
ttttttctggaacatttagaaaaaacttggatccctat

SEQ ID NO: 19310 - DNA, 39 bp, synthetic construct
  source 1..39: mol_type = other DNA
attttttctggaacatttagaaaaaacttggatccctat

SEQ ID NO: 19311 - DNA, 40 bp, synthetic construct
  source 1..40: mol_type = other DNA
tattttttctggaacatttagaaaaaacttggatccctat

SEQ ID NO: 19312 - DNA, 10 bp, synthetic construct
  source 1..10: mol_type = other DNA
ggatccaagt

SEQ ID NO: 19313 - DNA, 10 bp, synthetic construct
  source 1..10: mol_type = other DNA
ggatcgaggt

SEQ ID NO: 19314 - DNA, 11 bp, synthetic construct
  source 1..11: mol_type = other DNA
gggatcgaggt

SEQ ID NO: 19315 - DNA, 11 bp, synthetic construct
  source 1..11: mol_type = other DNA
gggatccaagt

SEQ ID NO: 19316 - DNA, 12 bp, synthetic construct
  source 1..12: mol_type = other DNA
agggatccaagt

SEQ ID NO: 19317 - DNA, 12 bp, synthetic construct
  source 1..12: mol_type = other DNA
agggatcgaggt

SEQ ID NO: 19318 - DNA, 13 bp, synthetic construct
  source 1..13: mol_type = other DNA
tagggatccaagt

SEQ ID NO: 19319 - DNA, 13 bp, synthetic construct
  source 1..13: mol_type = other DNA
tagggatcgaggt

SEQ ID NO: 19320 - DNA, 14 bp, synthetic construct
  source 1..14: mol_type = other DNA
atagggatcgaggt

SEQ ID NO: 19321 - DNA, 14 bp, synthetic construct
  source 1..14: mol_type = other DNA
atagggatccaagt

SEQ ID NO: 19322 - DNA, 15 bp, synthetic construct
  source 1..15: mol_type = other DNA
catagggatcgaggt

SEQ ID NO: 19323 - DNA, 15 bp, synthetic construct
  source 1..15: mol_type = other DNA
catagggatccaagt

SEQ ID NO: 19324 - DNA, 16 bp, synthetic construct
  source 1..16: mol_type = other DNA
tcatagggatcgaggt

SEQ ID NO: 19325 - DNA, 16 bp, synthetic construct
  source 1..16: mol_type = other DNA
tcatagggatccaagt

SEQ ID NO: 19326 - DNA, 17 bp, synthetic construct
  source 1..17: mol_type = other DNA
ttcatagggatccaagt

SEQ ID NO: 19327 - DNA, 17 bp, synthetic construct
  source 1..17: mol_type = other DNA
ttcatagggatcgaggt

SEQ ID NO: 19328 - DNA, 18 bp, synthetic construct
  source 1..18: mol_type = other DNA
gttcatagggatccaagt

SEQ ID NO: 19329 - DNA, 18 bp, synthetic construct
  source 1..18: mol_type = other DNA
gttcatagggatcgaggt

SEQ ID NO: 19330 - DNA, 19 bp, synthetic construct
  source 1..19: mol_type = other DNA
tgttcatagggatcgaggt

SEQ ID NO: 19331 - DNA, 19 bp, synthetic construct
  source 1..19: mol_type = other DNA
tgttcatagggatccaagt

SEQ ID NO: 19332 - DNA, 20 bp, synthetic construct
  source 1..20: mol_type = other DNA
ctgttcatagggatccaagt

SEQ ID NO: 19333 - DNA, 20 bp, synthetic construct
  source 1..20: mol_type = other DNA
ctgttcatagggatcgaggt

SEQ ID NO: 19334 - DNA, 21 bp, synthetic construct
  source 1..21: mol_type = other DNA
actgttcatagggatccaagt

SEQ ID NO: 19335 - DNA, 21 bp, synthetic construct
  source 1..21: mol_type = other DNA
actgttcatagggatcgaggt

SEQ ID NO: 19336 - DNA, 22 bp, synthetic construct
  source 1..22: mol_type = other DNA
cactgttcatagggatccaagt

SEQ ID NO: 19337 - DNA, 22 bp, synthetic construct
  source 1..22: mol_type = other DNA
cactgttcatagggatcgaggt

SEQ ID NO: 19338 - DNA, 23 bp, synthetic construct
  source 1..23: mol_type = other DNA
ccactgttcatagggatccaagt

SEQ ID NO: 19339 - DNA, 23 bp, synthetic construct
  source 1..23: mol_type = other DNA
ccactgttcatagggatcgaggt

SEQ ID NO: 19340 - DNA, 24 bp, synthetic construct
  source 1..24: mol_type = other DNA
tccactgttcatagggatcgaggt

SEQ ID NO: 19341 - DNA, 24 bp, synthetic construct
  source 1..24: mol_type = other DNA
tccactgttcatagggatccaagt

SEQ ID NO: 19342 - DNA, 25 bp, synthetic construct
  source 1..25: mol_type = other DNA
ctccactgttcatagggatccaagt

SEQ ID NO: 19343 - DNA, 25 bp, synthetic construct
  source 1..25: mol_type = other DNA
ctccactgttcatagggatcgaggt

SEQ ID NO: 19344 - DNA, 26 bp, synthetic construct
  source 1..26: mol_type = other DNA
actccactgttcatagggatcgaggt

SEQ ID NO: 19345 - DNA, 26 bp, synthetic construct
  source 1..26: mol_type = other DNA
actccactgttcatagggatccaagt

SEQ ID NO: 19346 - DNA, 27 bp, synthetic construct
  source 1..27: mol_type = other DNA
cactccactgttcatagggatccaagt

SEQ ID NO: 19347 - DNA, 27 bp, synthetic construct
  source 1..27: mol_type = other DNA
cactccactgttcatagggatcgaggt

SEQ ID NO: 19348 - DNA, 28 bp, synthetic construct
  source 1..28: mol_type = other DNA
tcactccactgttcatagggatccaagt

SEQ ID NO: 19349 - DNA, 28 bp, synthetic construct
  source 1..28: mol_type = other DNA
tcactccactgttcatagggatcgaggt

SEQ ID NO: 19350 - DNA, 29 bp, synthetic construct
  source 1..29: mol_type = other DNA
atcactccactgttcatagggatcgaggt

SEQ ID NO: 19351 - DNA, 29 bp, synthetic construct
  source 1..29: mol_type = other DNA
atcactccactgttcatagggatccaagt

SEQ ID NO: 19352 - DNA, 30 bp, synthetic construct
  source 1..30: mol_type = other DNA
gatcactccactgttcatagggatccaagt

SEQ ID NO: 19353 - DNA, 30 bp, synthetic construct
  source 1..30: mol_type = other DNA
gatcactccactgttcatagggatcgaggt

SEQ ID NO: 19354 - DNA, 31 bp, synthetic construct
  source 1..31: mol_type = other DNA
tgatcactccactgttcatagggatcgaggt

SEQ ID NO: 19355 - DNA, 31 bp, synthetic construct
  source 1..31: mol_type = other DNA
tgatcactccactgttcatagggatccaagt

SEQ ID NO: 19356 - DNA, 32 bp, synthetic construct
  source 1..32: mol_type = other DNA
ttgatcactccactgttcatagggatccaagt

SEQ ID NO: 19357 - DNA, 32 bp, synthetic construct
  source 1..32: mol_type = other DNA
ttgatcactccactgttcatagggatcgaggt

SEQ ID NO: 19358 - DNA, 33 bp, synthetic construct
  source 1..33: mol_type = other DNA
cttgatcactccactgttcatagggatccaagt

SEQ ID NO: 19359 - DNA, 33 bp, synthetic construct
  source 1..33: mol_type = other DNA
cttgatcactccactgttcatagggatcgaggt

SEQ ID NO: 19360 - DNA, 34 bp, synthetic construct
  source 1..34: mol_type = other DNA
tcttgatcactccactgttcatagggatcgaggt

SEQ ID NO: 19361 - DNA, 34 bp, synthetic construct
  source 1..34: mol_type = other DNA
tcttgatcactccactgttcatagggatccaagt

SEQ ID NO: 19362 - DNA, 35 bp, synthetic construct
  source 1..35: mol_type = other DNA
ttcttgatcactccactgttcatagggatccaagt

SEQ ID NO: 19363 - DNA, 35 bp, synthetic construct
  source 1..35: mol_type = other DNA
ttcttgatcactccactgttcatagggatcgaggt

SEQ ID NO: 19364 - DNA, 36 bp, synthetic construct
  source 1..36: mol_type = other DNA
tttcttgatcactccactgttcatagggatccaagt

SEQ ID NO: 19365 - DNA, 36 bp, synthetic construct
  source 1..36: mol_type = other DNA
tttcttgatcactccactgttcatagggatcgaggt

SEQ ID NO: 19366 - DNA, 37 bp, synthetic construct
  source 1..37: mol_type = other DNA
atttcttgatcactccactgttcatagggatcgaggt

SEQ ID NO: 19367 - DNA, 37 bp, synthetic construct
  source 1..37: mol_type = other DNA
atttcttgatcactccactgttcatagggatccaagt

SEQ ID NO: 19368 - DNA, 38 bp, synthetic construct
  source 1..38: mol_type = other DNA
tatttcttgatcactccactgttcatagggatccaagt

SEQ ID NO: 19369 - DNA, 38 bp, synthetic construct
  source 1..38: mol_type = other DNA
tatttcttgatcactccactgttcatagggatcgaggt

SEQ ID NO: 19370 - DNA, 39 bp, synthetic construct
  source 1..39: mol_type = other DNA
atatttcttgatcactccactgttcatagggatccaagt

SEQ ID NO: 19371 - DNA, 39 bp, synthetic construct
  source 1..39: mol_type = other DNA
atatttcttgatcactccactgttcatagggatcgaggt

SEQ ID NO: 19372 - DNA, 40 bp, synthetic construct
  source 1..40: mol_type = other DNA
catatttcttgatcactccactgttcatagggatccaagt

SEQ ID NO: 19373 - DNA, 40 bp, synthetic construct
  source 1..40: mol_type = other DNA
catatttcttgatcactccactgttcatagggatcgaggt

SEQ ID NO: 19374 - DNA, 13 bp, synthetic construct
  source 1..13: mol_type = other DNA
agttttttctaaa

SEQ ID NO: 19375 - DNA, 14 bp, synthetic construct
  source 1..14: mol_type = other DNA
aagttttttctaaa

SEQ ID NO: 19376 - DNA, 15 bp, synthetic construct
  source 1..15: mol_type = other DNA
caagttttttctaaa

SEQ ID NO: 19377 - DNA, 16 bp, synthetic construct
  source 1..16: mol_type = other DNA
ccaagttttttctaaa

SEQ ID NO: 19378 - DNA, 17 bp, synthetic construct
  source 1..17: mol_type = other DNA
tccaagttttttctaaa

SEQ ID NO: 19379 - DNA, 18 bp, synthetic construct
  source 1..18: mol_type = other DNA
atccaagttttttctaaa

SEQ ID NO: 19380 - DNA, 19 bp, synthetic construct
  source 1..19: mol_type = other DNA
gatccaagttttttctaaa

SEQ ID NO: 19381 - DNA, 20 bp, synthetic construct
  source 1..20: mol_type = other DNA
ggatccaagttttttctaaa

SEQ ID NO: 19382 - DNA, 21 bp, synthetic construct
  source 1..21: mol_type = other DNA
gggatccaagttttttctaaa

SEQ ID NO: 19383 - DNA, 22 bp, synthetic construct
  source 1..22: mol_type = other DNA
agggatccaagttttttctaaa

SEQ ID NO: 19384 - DNA, 23 bp, synthetic construct
  source 1..23: mol_type = other DNA
tagggatccaagttttttctaaa

SEQ ID NO: 19385 - DNA, 24 bp, synthetic construct
  source 1..24: mol_type = other DNA
atagggatccaagttttttctaaa

SEQ ID NO: 19386 - DNA, 25 bp, synthetic construct
  source 1..25: mol_type = other DNA
catagggatccaagttttttctaaa

SEQ ID NO: 19387 - DNA, 26 bp, synthetic construct
  source 1..26: mol_type = other DNA
tcatagggatccaagttttttctaaa

SEQ ID NO: 19388 - DNA, 27 bp, synthetic construct
  source 1..27: mol_type = other DNA
ttcatagggatccaagttttttctaaa

SEQ ID NO: 19389 - DNA, 28 bp, synthetic construct
  source 1..28: mol_type = other DNA
gttcatagggatccaagttttttctaaa

SEQ ID NO: 19390 - DNA, 29 bp, synthetic construct
  source 1..29: mol_type = other DNA
tgttcatagggatccaagttttttctaaa

SEQ ID NO: 19391 - DNA, 30 bp, synthetic construct
  source 1..30: mol_type = other DNA
ctgttcatagggatccaagttttttctaaa

SEQ ID NO: 19392 - DNA, 31 bp, synthetic construct
  source 1..31: mol_type = other DNA
actgttcatagggatccaagttttttctaaa

SEQ ID NO: 19393 - DNA, 32 bp, synthetic construct
  source 1..32: mol_type = other DNA
cactgttcatagggatccaagttttttctaaa

SEQ ID NO: 19394 - DNA, 33 bp, synthetic construct
  source 1..33: mol_type = other DNA
ccactgttcatagggatccaagttttttctaaa

SEQ ID NO: 19395 - DNA, 34 bp, synthetic construct
  source 1..34: mol_type = other DNA
tccactgttcatagggatccaagttttttctaaa

SEQ ID NO: 19396 - DNA, 35 bp, synthetic construct
  source 1..35: mol_type = other DNA
ctccactgttcatagggatccaagttttttctaaa

SEQ ID NO: 19397 - DNA, 36 bp, synthetic construct
  source 1..36: mol_type = other DNA
actccactgttcatagggatccaagttttttctaaa

SEQ ID NO: 19398 - DNA, 37 bp, synthetic construct
  source 1..37: mol_type = other DNA
cactccactgttcatagggatccaagttttttctaaa

SEQ ID NO: 19399 - DNA, 38 bp, synthetic construct
  source 1..38: mol_type = other DNA
tcactccactgttcatagggatccaagttttttctaaa

SEQ ID NO: 19400 - DNA, 39 bp, synthetic construct
  source 1..39: mol_type = other DNA
atcactccactgttcatagggatccaagttttttctaaa

SEQ ID NO: 19401 - DNA, 40 bp, synthetic construct
  source 1..40: mol_type = other DNA
gatcactccactgttcatagggatccaagttttttctaaa

SEQ ID NO: 19402 - DNA, 15 bp, synthetic construct
  source 1..15: mol_type = other DNA
acttggatccctatg

SEQ ID NO: 19403 - DNA, 15 bp, synthetic construct
  source 1..15: mol_type = other DNA
acttggatccttatg

SEQ ID NO: 19404 - DNA, 16 bp, synthetic construct
  source 1..16: mol_type = other DNA
aacttggatccctatg

SEQ ID NO: 19405 - DNA, 16 bp, synthetic construct
  source 1..16: mol_type = other DNA
aacttggatccttatg

SEQ ID NO: 19406 - DNA, 17 bp, synthetic construct
  source 1..17: mol_type = other DNA
aaacttggatccttatg

SEQ ID NO: 19407 - DNA, 17 bp, synthetic construct
  source 1..17: mol_type = other DNA
aaacttggatccctatg

SEQ ID NO: 19408 - DNA, 18 bp, synthetic construct
  source 1..18: mol_type = other DNA
aaaacttggatccttatg

SEQ ID NO: 19409 - DNA, 18 bp, synthetic construct
  source 1..18: mol_type = other DNA
aaaacttggatccctatg

SEQ ID NO: 19410 - DNA, 19 bp, synthetic construct
  source 1..19: mol_type = other DNA
aaaaacttggatccttatg

SEQ ID NO: 19411 - DNA, 19 bp, synthetic construct
  source 1..19: mol_type = other DNA
aaaaacttggatccctatg

SEQ ID NO: 19412 - DNA, 20 bp, synthetic construct
  source 1..20: mol_type = other DNA
aaaaaacttggatccttatg

SEQ ID NO: 19413 - DNA, 20 bp, synthetic construct
  source 1..20: mol_type = other DNA
aaaaaacttggatccctatg

SEQ ID NO: 19414 - DNA, 21 bp, synthetic construct
  source 1..21: mol_type = other DNA
gaaaaaacttggatccttatg

SEQ ID NO: 19415 - DNA, 21 bp, synthetic construct
  source 1..21: mol_type = other DNA
gaaaaaacttggatccctatg

SEQ ID NO: 19416 - DNA, 22 bp, synthetic construct
  source 1..22: mol_type = other DNA
agaaaaaacttggatccctatg

SEQ ID NO: 19417 - DNA, 22 bp, synthetic construct
  source 1..22: mol_type = other DNA
agaaaaaacttggatccttatg

SEQ ID NO: 19418 - DNA, 23 bp, synthetic construct
  source 1..23: mol_type = other DNA
tagaaaaaacttggatccctatg

SEQ ID NO: 19419 - DNA, 23 bp, synthetic construct
  source 1..23: mol_type = other DNA
tagaaaaaacttggatccttatg

SEQ ID NO: 19420 - DNA, 24 bp, synthetic construct
  source 1..24: mol_type = other DNA
ttagaaaaaacttggatccttatg

SEQ ID NO: 19421 - DNA, 24 bp, synthetic construct
  source 1..24: mol_type = other DNA
ttagaaaaaacttggatccctatg

SEQ ID NO: 19422 - DNA, 25 bp, synthetic construct
  source 1..25: mol_type = other DNA
tttagaaaaaacttggatccctatg

SEQ ID NO: 19423 - DNA, 25 bp, synthetic construct
  source 1..25: mol_type = other DNA
tttagaaaaaacttggatccttatg

SEQ ID NO: 19424 - DNA, 26 bp, synthetic construct
  source 1..26: mol_type = other DNA
atttagaaaaaacttggatccttatg

SEQ ID NO: 19425 - DNA, 26 bp, synthetic construct
  source 1..26: mol_type = other DNA
atttagaaaaaacttggatccctatg

SEQ ID NO: 19426 - DNA, 27 bp, synthetic construct
  source 1..27: mol_type = other DNA
catttagaaaaaacttggatccctatg

SEQ ID NO: 19427 - DNA, 27 bp, synthetic construct
  source 1..27: mol_type = other DNA
catttagaaaaaacttggatccttatg

SEQ ID NO: 19428 - DNA, 28 bp, synthetic construct
  source 1..28: mol_type = other DNA
acatttagaaaaaacttggatccttatg

SEQ ID NO: 19429 - DNA, 28 bp, synthetic construct
  source 1..28: mol_type = other DNA
acatttagaaaaaacttggatccctatg

SEQ ID NO: 19430 - DNA, 29 bp, synthetic construct
  source 1..29: mol_type = other DNA
aacatttagaaaaaacttggatccttatg

SEQ ID NO: 19431 - DNA, 29 bp, synthetic construct
  source 1..29: mol_type = other DNA
aacatttagaaaaaacttggatccctatg

SEQ ID NO: 19432 - DNA, 30 bp, synthetic construct
  source 1..30: mol_type = other DNA
gaacatttagaaaaaacttggatccctatg

SEQ ID NO: 19433 - DNA, 30 bp, synthetic construct
  source 1..30: mol_type = other DNA
gaacatttagaaaaaacttggatccttatg

SEQ ID NO: 19434 - DNA, 31 bp, synthetic construct
  source 1..31: mol_type = other DNA
ggaacatttagaaaaaacttggatccttatg

SEQ ID NO: 19435 - DNA, 31 bp, synthetic construct
  source 1..31: mol_type = other DNA
ggaacatttagaaaaaacttggatccctatg

SEQ ID NO: 19436 - DNA, 32 bp, synthetic construct
  source 1..32: mol_type = other DNA
tggaacatttagaaaaaacttggatccctatg

SEQ ID NO: 19437 - DNA, 32 bp, synthetic construct
  source 1..32: mol_type = other DNA
tggaacatttagaaaaaacttggatccttatg

SEQ ID NO: 19438 - DNA, 33 bp, synthetic construct
  source 1..33: mol_type = other DNA
ctggaacatttagaaaaaacttggatccttatg

SEQ ID NO: 19439 - DNA, 33 bp, synthetic construct
  source 1..33: mol_type = other DNA
ctggaacatttagaaaaaacttggatccctatg

SEQ ID NO: 19440 - DNA, 34 bp, synthetic construct
  source 1..34: mol_type = other DNA
tctggaacatttagaaaaaacttggatccttatg

SEQ ID NO: 19441 - DNA, 34 bp, synthetic construct
  source 1..34: mol_type = other DNA
tctggaacatttagaaaaaacttggatccctatg

SEQ ID NO: 19442 - DNA, 35 bp, synthetic construct
  source 1..35: mol_type = other DNA
ttctggaacatttagaaaaaacttggatccttatg

SEQ ID NO: 19443 - DNA, 35 bp, synthetic construct
  source 1..35: mol_type = other DNA
ttctggaacatttagaaaaaacttggatccctatg

SEQ ID NO: 19444 - DNA, 36 bp, synthetic construct
  source 1..36: mol_type = other DNA
tttctggaacatttagaaaaaacttggatccttatg

SEQ ID NO: 19445 - DNA, 36 bp, synthetic construct
  source 1..36: mol_type = other DNA
tttctggaacatttagaaaaaacttggatccctatg

SEQ ID NO: 19446 - DNA, 37 bp, synthetic construct
  source 1..37: mol_type = other DNA
ttttctggaacatttagaaaaaacttggatccctatg

SEQ ID NO: 19447 - DNA, 37 bp, synthetic construct
  source 1..37: mol_type = other DNA
ttttctggaacatttagaaaaaacttggatccttatg

SEQ ID NO: 19448 - DNA, 38 bp, synthetic construct
  source 1..38: mol_type = other DNA
tttttctggaacatttagaaaaaacttggatccttatg

SEQ ID NO: 19449 - DNA, 38 bp, synthetic construct
  source 1..38: mol_type = other DNA
tttttctggaacatttagaaaaaacttggatccctatg

SEQ ID NO: 19450 - DNA, 39 bp, synthetic construct
  source 1..39: mol_type = other DNA
ttttttctggaacatttagaaaaaacttggatccttatg

SEQ ID NO: 19451 - DNA, 39 bp, synthetic construct
  source 1..39: mol_type = other DNA
ttttttctggaacatttagaaaaaacttggatccctatg

SEQ ID NO: 19452 - DNA, 40 bp, synthetic construct
  source 1..40: mol_type = other DNA
attttttctggaacatttagaaaaaacttggatccctatg

SEQ ID NO: 19453 - DNA, 40 bp, synthetic construct
  source 1..40: mol_type = other DNA
attttttctggaacatttagaaaaaacttggatccttatg

SEQ ID NO: 19454 - DNA, 34 bp, synthetic construct
  source 1..34: mol_type = other DNA
acttggatccctatgaacagtggagtgatcaaga

SEQ ID NO: 19455 - DNA, 35 bp, synthetic construct
  source 1..35: mol_type = other DNA
aacttggatccctatgaacagtggagtgatcaaga

SEQ ID NO: 19456 - DNA, 36 bp, synthetic construct
  source 1..36: mol_type = other DNA
aaacttggatccctatgaacagtggagtgatcaaga

SEQ ID NO: 19457 - DNA, 37 bp, synthetic construct
  source 1..37: mol_type = other DNA
aaaacttggatccctatgaacagtggagtgatcaaga

SEQ ID NO: 19458 - DNA, 38 bp, synthetic construct
  source 1..38: mol_type = other DNA
aaaaacttggatccctatgaacagtggagtgatcaaga

SEQ ID NO: 19459 - DNA, 39 bp, synthetic construct
  source 1..39: mol_type = other DNA
aaaaaacttggatccctatgaacagtggagtgatcaaga

SEQ ID NO: 19460 - DNA, 40 bp, synthetic construct
  source 1..40: mol_type = other DNA
gaaaaaacttggatccctatgaacagtggagtgatcaaga

SEQ ID NO: 19461 - DNA, 14 bp, synthetic construct
  source 1..14: mol_type = other DNA
agttttttctaaat

SEQ ID NO: 19462 - DNA, 14 bp, synthetic construct
  source 1..14: mol_type = other DNA
agtttttccgaaat

SEQ ID NO: 19463 - DNA, 15 bp, synthetic construct
  source 1..15: mol_type = other DNA
aagtttttccgaaat

SEQ ID NO: 19464 - DNA, 15 bp, synthetic construct
  source 1..15: mol_type = other DNA
aagttttttctaaat

SEQ ID NO: 19465 - DNA, 16 bp, synthetic construct
  source 1..16: mol_type = other DNA
caagttttttctaaat

SEQ ID NO: 19466 - DNA, 16 bp, synthetic construct
  source 1..16: mol_type = other DNA
caagtttttccgaaat

SEQ ID NO: 19467 - DNA, 17 bp, synthetic construct
  source 1..17: mol_type = other DNA
ccaagttttttctaaat

SEQ ID NO: 19468 - DNA, 17 bp, synthetic construct
  source 1..17: mol_type = other DNA
ccaagtttttccgaaat

SEQ ID NO: 19469 - DNA, 18 bp, synthetic construct
  source 1..18: mol_type = other DNA
tccaagtttttccgaaat

SEQ ID NO: 19470 - DNA, 18 bp, synthetic construct
  source 1..18: mol_type = other DNA
tccaagttttttctaaat

SEQ ID NO: 19471 - DNA, 19 bp, synthetic construct
  source 1..19: mol_type = other DNA
atccaagtttttccgaaat

SEQ ID NO: 19472 - DNA, 19 bp, synthetic construct
  source 1..19: mol_type = other DNA
atccaagttttttctaaat

SEQ ID NO: 19473 - DNA, 20 bp, synthetic construct
  source 1..20: mol_type = other DNA
gatccaagtttttccgaaat

SEQ ID NO: 19474 - DNA, 20 bp, synthetic construct
  source 1..20: mol_type = other DNA
gatccaagttttttctaaat

SEQ ID NO: 19475 - DNA, 21 bp, synthetic construct
  source 1..21: mol_type = other DNA
ggatccaagtttttccgaaat

SEQ ID NO: 19476 - DNA, 21 bp, synthetic construct
  source 1..21: mol_type = other DNA
ggatccaagttttttctaaat

SEQ ID NO: 19477 - DNA, 22 bp, synthetic construct
  source 1..22: mol_type = other DNA
gggatccaagttttttctaaat

SEQ ID NO: 19478 - DNA, 22 bp, synthetic construct
  source 1..22: mol_type = other DNA
gggatccaagtttttccgaaat

SEQ ID NO: 19479 - DNA, 23 bp, synthetic construct
  source 1..23: mol_type = other DNA
agggatccaagtttttccgaaat

SEQ ID NO: 19480 - DNA, 23 bp, synthetic construct
  source 1..23: mol_type = other DNA
agggatccaagttttttctaaat

SEQ ID NO: 19481 - DNA, 24 bp, synthetic construct
  source 1..24: mol_type = other DNA
tagggatccaagttttttctaaat

SEQ ID NO: 19482 - DNA, 24 bp, synthetic construct
  source 1..24: mol_type = other DNA
tagggatccaagtttttccgaaat

SEQ ID NO: 19483 - DNA, 25 bp, synthetic construct
  source 1..25: mol_type = other DNA
atagggatccaagtttttccgaaat

SEQ ID NO: 19484 - DNA, 25 bp, synthetic construct
  source 1..25: mol_type = other DNA
atagggatccaagttttttctaaat

SEQ ID NO: 19485 - DNA, 26 bp, synthetic construct
  source 1..26: mol_type = other DNA
catagggatccaagtttttccgaaat

SEQ ID NO: 19486 - DNA, 26 bp, synthetic construct
  source 1..26: mol_type = other DNA
catagggatccaagttttttctaaat

SEQ ID NO: 19487 - DNA, 27 bp, synthetic construct
  source 1..27: mol_type = other DNA
tcatagggatccaagtttttccgaaat

SEQ ID NO: 19488 - DNA, 27 bp, synthetic construct
  source 1..27: mol_type = other DNA
tcatagggatccaagttttttctaaat

SEQ ID NO: 19489 - DNA, 28 bp, synthetic construct
  source 1..28: mol_type = other DNA
ttcatagggatccaagttttttctaaat

SEQ ID NO: 19490 - DNA, 28 bp, synthetic construct
  source 1..28: mol_type = other DNA
ttcatagggatccaagtttttccgaaat

SEQ ID NO: 19491 - DNA, 29 bp, synthetic construct
  source 1..29: mol_type = other DNA
gttcatagggatccaagttttttctaaat

SEQ ID NO: 19492 - DNA, 29 bp, synthetic construct
  source 1..29: mol_type = other DNA
gttcatagggatccaagtttttccgaaat

SEQ ID NO: 19493 - DNA, 30 bp, synthetic construct
  source 1..30: mol_type = other DNA
tgttcatagggatccaagttttttctaaat

SEQ ID NO: 19494 - DNA, 30 bp, synthetic construct
  source 1..30: mol_type = other DNA
tgttcatagggatccaagtttttccgaaat

SEQ ID NO: 19495 - DNA, 31 bp, synthetic construct
  source 1..31: mol_type = other DNA
ctgttcatagggatccaagtttttccgaaat

SEQ ID NO: 19496 - DNA, 31 bp, synthetic construct
  source 1..31: mol_type = other DNA
ctgttcatagggatccaagttttttctaaat

SEQ ID NO: 19497 - DNA, 32 bp, synthetic construct
  source 1..32: mol_type = other DNA
actgttcatagggatccaagtttttccgaaat

SEQ ID NO: 19498 - DNA, 32 bp, synthetic construct
  source 1..32: mol_type = other DNA
actgttcatagggatccaagttttttctaaat

SEQ ID NO: 19499 - DNA, 33 bp, synthetic construct
  source 1..33: mol_type = other DNA
cactgttcatagggatccaagtttttccgaaat

SEQ ID NO: 19500 - DNA, 33 bp, synthetic construct
  source 1..33: mol_type = other DNA
cactgttcatagggatccaagttttttctaaat

SEQ ID NO: 19501 - DNA, 34 bp, synthetic construct
  source 1..34: mol_type = other DNA
ccactgttcatagggatccaagttttttctaaat

SEQ ID NO: 19502 - DNA, 34 bp, synthetic construct
  source 1..34: mol_type = other DNA
ccactgttcatagggatccaagtttttccgaaat

SEQ ID NO: 19503 - DNA, 35 bp, synthetic construct
  source 1..35: mol_type = other DNA
tccactgttcatagggatccaagtttttccgaaat

SEQ ID NO: 19504 - DNA, 35 bp, synthetic construct
  source 1..35: mol_type = other DNA
tccactgttcatagggatccaagttttttctaaat

SEQ ID NO: 19505 - DNA, 36 bp, synthetic construct
  source 1..36: mol_type = other DNA
ctccactgttcatagggatccaagtttttccgaaat

SEQ ID NO: 19506 - DNA, 36 bp, synthetic construct
  source 1..36: mol_type = other DNA
ctccactgttcatagggatccaagttttttctaaat

SEQ ID NO: 19507 - DNA, 37 bp, synthetic construct
  source 1..37: mol_type = other DNA
actccactgttcatagggatccaagtttttccgaaat

SEQ ID NO: 19508 - DNA, 37 bp, synthetic construct
  source 1..37: mol_type = other DNA
actccactgttcatagggatccaagttttttctaaat

SEQ ID NO: 19509 - DNA, 38 bp, synthetic construct
  source 1..38: mol_type = other DNA
cactccactgttcatagggatccaagtttttccgaaat

SEQ ID NO: 19510 - DNA, 38 bp, synthetic construct
  source 1..38: mol_type = other DNA
cactccactgttcatagggatccaagttttttctaaat

SEQ ID NO: 19511 - DNA, 39 bp, synthetic construct
  source 1..39: mol_type = other DNA
tcactccactgttcatagggatccaagttttttctaaat

SEQ ID NO: 19512 - DNA, 39 bp, synthetic construct
  source 1..39: mol_type = other DNA
tcactccactgttcatagggatccaagtttttccgaaat

SEQ ID NO: 19513 - DNA, 40 bp, synthetic construct
  source 1..40: mol_type = other DNA
atcactccactgttcatagggatccaagttttttctaaat

SEQ ID NO: 19514 - DNA, 40 bp, synthetic construct
  source 1..40: mol_type = other DNA
atcactccactgttcatagggatccaagtttttccgaaat

SEQ ID NO: 19515 - DNA, 10 bp, synthetic construct
  source 1..10: mol_type = other DNA
ccaagttttt

SEQ ID NO: 19516 - DNA, 11 bp, synthetic construct
  source 1..11: mol_type = other DNA
tccaagttttt

SEQ ID NO: 19517 - DNA, 12 bp, synthetic construct
  source 1..12: mol_type = other DNA
atccaagttttt

SEQ ID NO: 19518 - DNA, 13 bp, synthetic construct
  source 1..13: mol_type = other DNA
gatccaagttttt

SEQ ID NO: 19519 - DNA, 14 bp, synthetic construct
  source 1..14: mol_type = other DNA
ggatccaagttttt

SEQ ID NO: 19520 - DNA, 15 bp, synthetic construct
  source 1..15: mol_type = other DNA
gggatccaagttttt

SEQ ID NO: 19521 - DNA, 16 bp, synthetic construct
  source 1..16: mol_type = other DNA
agggatccaagttttt

SEQ ID NO: 19522 - DNA, 17 bp, synthetic construct
  source 1..17: mol_type = other DNA
tagggatccaagttttt

SEQ ID NO: 19523 - DNA, 18 bp, synthetic construct
  source 1..18: mol_type = other DNA
atagggatccaagttttt

SEQ ID NO: 19524 - DNA, 19 bp, synthetic construct
  source 1..19: mol_type = other DNA
catagggatccaagttttt

SEQ ID NO: 19525 - DNA, 20 bp, synthetic construct
  source 1..20: mol_type = other DNA
tcatagggatccaagttttt

SEQ ID NO: 19526 - DNA, 21 bp, synthetic construct
  source 1..21: mol_type = other DNA
ttcatagggatccaagttttt

SEQ ID NO: 19527 - DNA, 22 bp, synthetic construct
  source 1..22: mol_type = other DNA
gttcatagggatccaagttttt

SEQ ID NO: 19528 - DNA, 23 bp, synthetic construct
  source 1..23: mol_type = other DNA
tgttcatagggatccaagttttt

SEQ ID NO: 19529 - DNA, 24 bp, synthetic construct
  source 1..24: mol_type = other DNA
ctgttcatagggatccaagttttt

SEQ ID NO: 19530 - DNA, 25 bp, synthetic construct
  source 1..25: mol_type = other DNA
actgttcatagggatccaagttttt

SEQ ID NO: 19531 - DNA, 26 bp, synthetic construct
  source 1..26: mol_type = other DNA
cactgttcatagggatccaagttttt

SEQ ID NO: 19532 - DNA, 27 bp, synthetic construct
  source 1..27: mol_type = other DNA
ccactgttcatagggatccaagttttt

SEQ ID NO: 19533 - DNA, 28 bp, synthetic construct
  source 1..28: mol_type = other DNA
tccactgttcatagggatccaagttttt

SEQ ID NO: 19534 - DNA, 29 bp, synthetic construct
  source 1..29: mol_type = other DNA
ctccactgttcatagggatccaagttttt

SEQ ID NO: 19535 - DNA, 30 bp, synthetic construct
  source 1..30: mol_type = other DNA
actccactgttcatagggatccaagttttt

SEQ ID NO: 19536 - DNA, 31 bp, synthetic construct
  source 1..31: mol_type = other DNA
cactccactgttcatagggatccaagttttt

SEQ ID NO: 19537 - DNA, 32 bp, synthetic construct
  source 1..32: mol_type = other DNA
tcactccactgttcatagggatccaagttttt

SEQ ID NO: 19538 - DNA, 33 bp, synthetic construct
  source 1..33: mol_type = other DNA
atcactccactgttcatagggatccaagttttt

SEQ ID NO: 19539 - DNA, 34 bp, synthetic construct
  source 1..34: mol_type = other DNA
gatcactccactgttcatagggatccaagttttt

SEQ ID NO: 19540 - DNA, 35 bp, synthetic construct
  source 1..35: mol_type = other DNA
tgatcactccactgttcatagggatccaagttttt

SEQ ID NO: 19541 - DNA, 36 bp, synthetic construct
  source 1..36: mol_type = other DNA
ttgatcactccactgttcatagggatccaagttttt

SEQ ID NO: 19542 - DNA, 37 bp, synthetic construct
  source 1..37: mol_type = other DNA
cttgatcactccactgttcatagggatccaagttttt

SEQ ID NO: 19543 - DNA, 38 bp, synthetic construct
  source 1..38: mol_type = other DNA
tcttgatcactccactgttcatagggatccaagttttt

SEQ ID NO: 19544 - DNA, 39 bp, synthetic construct
  source 1..39: mol_type = other DNA
ttcttgatcactccactgttcatagggatccaagttttt

SEQ ID NO: 19545 - DNA, 40 bp, synthetic construct
  source 1..40: mol_type = other DNA
tttcttgatcactccactgttcatagggatccaagttttt

SEQ ID NO: 19546 - DNA, 10 bp, synthetic construct
  source 1..10: mol_type = other DNA
tccaagtttt

SEQ ID NO: 19547 - DNA, 11 bp, synthetic construct
  source 1..11: mol_type = other DNA
atccaagtttt

SEQ ID NO: 19548 - DNA, 12 bp, synthetic construct
  source 1..12: mol_type = other DNA
gatccaagtttt

SEQ ID NO: 19549 - DNA, 13 bp, synthetic construct
  source 1..13: mol_type = other DNA
ggatccaagtttt

SEQ ID NO: 19550 - DNA, 14 bp, synthetic construct
  source 1..14: mol_type = other DNA
gggatccaagtttt

SEQ ID NO: 19551 - DNA, 15 bp, synthetic construct
  source 1..15: mol_type = other DNA
agggatccaagtttt

SEQ ID NO: 19552 - DNA, 16 bp, synthetic construct
  source 1..16: mol_type = other DNA
tagggatccaagtttt

SEQ ID NO: 19553 - DNA, 17 bp, synthetic construct
  source 1..17: mol_type = other DNA
atagggatccaagtttt

SEQ ID NO: 19554 - DNA, 18 bp, synthetic construct
  source 1..18: mol_type = other DNA
catagggatccaagtttt

SEQ ID NO: 19555 - DNA, 19 bp, synthetic construct
  source 1..19: mol_type = other DNA
tcatagggatccaagtttt

SEQ ID NO: 19556 - DNA, 20 bp, synthetic construct
  source 1..20: mol_type = other DNA
ttcatagggatccaagtttt

SEQ ID NO: 19557 - DNA, 21 bp, synthetic construct
  source 1..21: mol_type = other DNA
gttcatagggatccaagtttt

SEQ ID NO: 19558 - DNA, 22 bp, synthetic construct
  source 1..22: mol_type = other DNA
tgttcatagggatccaagtttt

SEQ ID NO: 19559 - DNA, 23 bp, synthetic construct
  source 1..23: mol_type = other DNA
ctgttcatagggatccaagtttt

SEQ ID NO: 19560 - DNA, 24 bp, synthetic construct
  source 1..24: mol_type = other DNA
actgttcatagggatccaagtttt

SEQ ID NO: 19561 - DNA, 25 bp, synthetic construct
  source 1..25: mol_type = other DNA
cactgttcatagggatccaagtttt

SEQ ID NO: 19562 - DNA, 26 bp, synthetic construct
  source 1..26: mol_type = other DNA
ccactgttcatagggatccaagtttt

SEQ ID NO: 19563 - DNA, 27 bp, synthetic construct
  source 1..27: mol_type = other DNA
tccactgttcatagggatccaagtttt

SEQ ID NO: 19564 - DNA, 28 bp, synthetic construct
  source 1..28: mol_type = other DNA
ctccactgttcatagggatccaagtttt

SEQ ID NO: 19565 - DNA, 29 bp, synthetic construct
  source 1..29: mol_type = other DNA
actccactgttcatagggatccaagtttt

SEQ ID NO: 19566 - DNA, 30 bp, synthetic construct
  source 1..30: mol_type = other DNA
cactccactgttcatagggatccaagtttt

SEQ ID NO: 19567 - DNA, 31 bp, synthetic construct
  source 1..31: mol_type = other DNA
tcactccactgttcatagggatccaagtttt

SEQ ID NO: 19568 - DNA, 32 bp, synthetic construct
  source 1..32: mol_type = other DNA
atcactccactgttcatagggatccaagtttt

SEQ ID NO: 19569 - DNA, 33 bp, synthetic construct
  source 1..33: mol_type = other DNA
gatcactccactgttcatagggatccaagtttt

SEQ ID NO: 19570 - DNA, 34 bp, synthetic construct
  source 1..34: mol_type = other DNA
tgatcactccactgttcatagggatccaagtttt

SEQ ID NO: 19571 - DNA, 35 bp, synthetic construct
  source 1..35: mol_type = other DNA
ttgatcactccactgttcatagggatccaagtttt

SEQ ID NO: 19572 - DNA, 36 bp, synthetic construct
  source 1..36: mol_type = other DNA
cttgatcactccactgttcatagggatccaagtttt

SEQ ID NO: 19573 - DNA, 37 bp, synthetic construct
  source 1..37: mol_type = other DNA
tcttgatcactccactgttcatagggatccaagtttt

SEQ ID NO: 19574 - DNA, 38 bp, synthetic construct
  source 1..38: mol_type = other DNA
ttcttgatcactccactgttcatagggatccaagtttt

SEQ ID NO: 19575 - DNA, 39 bp, synthetic construct
  source 1..39: mol_type = other DNA
tttcttgatcactccactgttcatagggatccaagtttt

SEQ ID NO: 19576 - DNA, 40 bp, synthetic construct
  source 1..40: mol_type = other DNA
atttcttgatcactccactgttcatagggatccaagtttt

SEQ ID NO: 19577 - DNA, 16 bp, synthetic construct
  source 1..16: mol_type = other DNA
acttggatccctatga

SEQ ID NO: 19578 - DNA, 16 bp, synthetic construct
  source 1..16: mol_type = other DNA
acttggatccttatga

SEQ ID NO: 19579 - DNA, 17 bp, synthetic construct
  source 1..17: mol_type = other DNA
aacttggatccctatga

SEQ ID NO: 19580 - DNA, 17 bp, synthetic construct
  source 1..17: mol_type = other DNA
aacttggatccttatga

SEQ ID NO: 19581 - DNA, 18 bp, synthetic construct
  source 1..18: mol_type = other DNA
aaacttggatccttatga

SEQ ID NO: 19582 - DNA, 18 bp, synthetic construct
  source 1..18: mol_type = other DNA
aaacttggatccctatga

SEQ ID NO: 19583 - DNA, 19 bp, synthetic construct
  source 1..19: mol_type = other DNA
aaaacttggatccttatga

SEQ ID NO: 19584 - DNA, 19 bp, synthetic construct
  source 1..19: mol_type = other DNA
aaaacttggatccctatga

SEQ ID NO: 19585 - DNA, 20 bp, synthetic construct
  source 1..20: mol_type = other DNA
aaaaacttggatccctatga

SEQ ID NO: 19586 - DNA, 20 bp, synthetic construct
  source 1..20: mol_type = other DNA
aaaaacttggatccttatga

SEQ ID NO: 19587 - DNA, 21 bp, synthetic construct
  source 1..21: mol_type = other DNA
aaaaaacttggatccttatga

SEQ ID NO: 19588 - DNA, 21 bp, synthetic construct
  source 1..21: mol_type = other DNA
aaaaaacttggatccctatga

SEQ ID NO: 19589 - DNA, 22 bp, synthetic construct
  source 1..22: mol_type = other DNA
gaaaaaacttggatccttatga

SEQ ID NO: 19590 - DNA, 22 bp, synthetic construct
  source 1..22: mol_type = other DNA
gaaaaaacttggatccctatga

SEQ ID NO: 19591 - DNA, 23 bp, synthetic construct
  source 1..23: mol_type = other DNA
agaaaaaacttggatccttatga

SEQ ID NO: 19592 - DNA, 23 bp, synthetic construct
  source 1..23: mol_type = other DNA
agaaaaaacttggatccctatga

SEQ ID NO: 19593 - DNA, 24 bp, synthetic construct
  source 1..24: mol_type = other DNA
tagaaaaaacttggatccctatga

SEQ ID NO: 19594 - DNA, 24 bp, synthetic construct
  source 1..24: mol_type = other DNA
tagaaaaaacttggatccttatga

SEQ ID NO: 19595 - DNA, 25 bp, synthetic construct
  source 1..25: mol_type = other DNA
ttagaaaaaacttggatccttatga

SEQ ID NO: 19596 - DNA, 25 bp, synthetic construct
  source 1..25: mol_type = other DNA
ttagaaaaaacttggatccctatga

SEQ ID NO: 19597 - DNA, 26 bp, synthetic construct
  source 1..26: mol_type = other DNA
tttagaaaaaacttggatccttatga

SEQ ID NO: 19598 - DNA, 26 bp, synthetic construct
  source 1..26: mol_type = other DNA
tttagaaaaaacttggatccctatga

SEQ ID NO: 19599 - DNA, 27 bp, synthetic construct
  source 1..27: mol_type = other DNA
atttagaaaaaacttggatccttatga

SEQ ID NO: 19600 - DNA, 27 bp, synthetic construct
  source 1..27: mol_type = other DNA
atttagaaaaaacttggatccctatga

SEQ ID NO: 19601 - DNA, 28 bp, synthetic construct
  source 1..28: mol_type = other DNA
catttagaaaaaacttggatccttatga

SEQ ID NO: 19602 - DNA, 28 bp, synthetic construct
  source 1..28: mol_type = other DNA
catttagaaaaaacttggatccctatga

SEQ ID NO: 19603 - DNA, 29 bp, synthetic construct
  source 1..29: mol_type = other DNA
acatttagaaaaaacttggatccctatga

SEQ ID NO: 19604 - DNA, 29 bp, synthetic construct
  source 1..29: mol_type = other DNA
acatttagaaaaaacttggatccttatga

SEQ ID NO: 19605 - DNA, 30 bp, synthetic construct
  source 1..30: mol_type = other DNA
aacatttagaaaaaacttggatccctatga

SEQ ID NO: 19606 - DNA, 30 bp, synthetic construct
  source 1..30: mol_type = other DNA
aacatttagaaaaaacttggatccttatga

SEQ ID NO: 19607 - DNA, 31 bp, synthetic construct
  source 1..31: mol_type = other DNA
gaacatttagaaaaaacttggatccctatga

SEQ ID NO: 19608 - DNA, 31 bp, synthetic construct
  source 1..31: mol_type = other DNA
gaacatttagaaaaaacttggatccttatga

SEQ ID NO: 19609 - DNA, 32 bp, synthetic construct
  source 1..32: mol_type = other DNA
ggaacatttagaaaaaacttggatccctatga

SEQ ID NO: 19610 - DNA, 32 bp, synthetic construct
  source 1..32: mol_type = other DNA
ggaacatttagaaaaaacttggatccttatga

SEQ ID NO: 19611 - DNA, 33 bp, synthetic construct
  source 1..33: mol_type = other DNA
tggaacatttagaaaaaacttggatccttatga

SEQ ID NO: 19612 - DNA, 33 bp, synthetic construct
  source 1..33: mol_type = other DNA
tggaacatttagaaaaaacttggatccctatga

SEQ ID NO: 19613 - DNA, 34 bp, synthetic construct
  source 1..34: mol_type = other DNA
ctggaacatttagaaaaaacttggatccttatga

SEQ ID NO: 19614 - DNA, 34 bp, synthetic construct
  source 1..34: mol_type = other DNA
ctggaacatttagaaaaaacttggatccctatga

SEQ ID NO: 19615 - DNA, 35 bp, synthetic construct
  source 1..35: mol_type = other DNA
tctggaacatttagaaaaaacttggatccttatga

SEQ ID NO: 19616 - DNA, 35 bp, synthetic construct
  source 1..35: mol_type = other DNA
tctggaacatttagaaaaaacttggatccctatga

SEQ ID NO: 19617 - DNA, 36 bp, synthetic construct
  source 1..36: mol_type = other DNA
ttctggaacatttagaaaaaacttggatccctatga

SEQ ID NO: 19618 - DNA, 36 bp, synthetic construct
  source 1..36: mol_type = other DNA
ttctggaacatttagaaaaaacttggatccttatga

SEQ ID NO: 19619 - DNA, 37 bp, synthetic construct
  source 1..37: mol_type = other DNA
tttctggaacatttagaaaaaacttggatccttatga

SEQ ID NO: 19620 - DNA, 37 bp, synthetic construct
  source 1..37: mol_type = other DNA
tttctggaacatttagaaaaaacttggatccctatga

SEQ ID NO: 19621 - DNA, 38 bp, synthetic construct
  source 1..38: mol_type = other DNA
ttttctggaacatttagaaaaaacttggatccttatga

SEQ ID NO: 19622 - DNA, 38 bp, synthetic construct
  source 1..38: mol_type = other DNA
ttttctggaacatttagaaaaaacttggatccctatga

SEQ ID NO: 19623 - DNA, 39 bp, synthetic construct
  source 1..39: mol_type = other DNA
tttttctggaacatttagaaaaaacttggatccctatga

SEQ ID NO: 19624 - DNA, 39 bp, synthetic construct
  source 1..39: mol_type = other DNA
tttttctggaacatttagaaaaaacttggatccttatga

SEQ ID NO: 19625 - DNA, 40 bp, synthetic construct
  source 1..40: mol_type = other DNA
ttttttctggaacatttagaaaaaacttggatccctatga

SEQ ID NO: 19626 - DNA, 40 bp, synthetic construct
  source 1..40: mol_type = other DNA
ttttttctggaacatttagaaaaaacttggatccttatga

SEQ ID NO: 19627 - DNA, 39 bp, synthetic construct
  source 1..39: mol_type = other DNA
agttttttctaaatgttccagaaaaaataaatactttct

SEQ ID NO: 19628 - DNA, 39 bp, synthetic construct
  source 1..39: mol_type = other DNA
agttttttctaaatgttccagaaaaaataaataccttct

SEQ ID NO: 19629 - DNA, 40 bp, synthetic construct
  source 1..40: mol_type = other DNA
aagttttttctaaatgttccagaaaaaataaataccttct

SEQ ID NO: 19630 - DNA, 40 bp, synthetic construct
  source 1..40: mol_type = other DNA
aagttttttctaaatgttccagaaaaaataaatactttct

SEQ ID NO: 19631 - DNA, 38 bp, synthetic construct
  source 1..38: mol_type = other DNA
agttttttctaaatgttccagaaaaaataaatactttc

SEQ ID NO: 19632 - DNA, 39 bp, synthetic construct
  source 1..39: mol_type = other DNA
aagttttttctaaatgttccagaaaaaataaatactttc

SEQ ID NO: 19633 - DNA, 40 bp, synthetic construct
  source 1..40: mol_type = other DNA
caagttttttctaaatgttccagaaaaaataaatactttc

SEQ ID NO: 19634 - DNA, 19 bp, synthetic construct
  source 1..19: mol_type = other DNA
tcatttttgtgattatgaa

SEQ ID NO: 19635 - DNA, 19 bp, synthetic construct
  source 1..19: mol_type = other DNA
gactacgaaatctggtgaa

SEQ ID NO: 19636 - DNA, 19 bp, synthetic construct
  source 1..19: mol_type = other DNA
gaataggtgtaaaaatata

SEQ ID NO: 19637 - DNA, 19 bp, synthetic construct
  source 1..19: mol_type = other DNA
gaatccaactccaaacact

SEQ ID NO: 19638 - DNA, 20 bp, synthetic construct
  source 1..20: mol_type = other DNA
ttcatttttgtgattatgaa

SEQ ID NO: 19639 - DNA, 20 bp, synthetic construct
  source 1..20: mol_type = other DNA
agactacgaaatctggtgaa

SEQ ID NO: 19640 - DNA, 20 bp, synthetic construct
  source 1..20: mol_type = other DNA
tgaataggtgtaaaaatata

SEQ ID NO: 19641 - DNA, 20 bp, synthetic construct
  source 1..20: mol_type = other DNA
tgaatccaactccaaacact

SEQ ID NO: 19642 - DNA, 20 bp, synthetic construct
  source 1..20: mol_type = other DNA
gcatgtgcaaatattttagt

SEQ ID NO: 19643 - DNA, 20 bp, synthetic construct
  source 1..20: mol_type = other DNA
gttgcatgtgcaaatatttt

SEQ ID NO: 19644 - DNA, 20 bp, synthetic construct
  source 1..20: mol_type = other DNA
tgggaccaataagttgcatg

SEQ ID NO: 19645 - DNA, 20 bp, synthetic construct
  source 1..20: mol_type = other DNA
agtgggaccaataagttgca

SEQ ID NO: 19646 - DNA, 20 bp, synthetic construct
  source 1..20: mol_type = other DNA
aaaaagtgggaccaataagt

SEQ ID NO: 19647 - DNA, 20 bp, synthetic construct
  source 1..20: mol_type = other DNA
aataaaaagtgggaccaata

SEQ ID NO: 19648 - DNA, 20 bp, synthetic construct
  source 1..20: mol_type = other DNA
ctgcaaaagaataaaaagtg

SEQ ID NO: 19649 - DNA, 20 bp, synthetic construct
  source 1..20: mol_type = other DNA
tctgcaaaagaataaaaagt

SEQ ID NO: 19650 - DNA, 20 bp, synthetic construct
  source 1..20: mol_type = other DNA
ctctgcaaaagaataaaaag

SEQ ID NO: 19651 - DNA, 20 bp, synthetic construct
  source 1..20: mol_type = other DNA
ttctctgcaaaagaataaaa

SEQ ID NO: 19652 - DNA, 20 bp, synthetic construct
  source 1..20: mol_type = other DNA
tctatcccattctctgcaaa

SEQ ID NO: 19653 - DNA, 20 bp, synthetic construct
  source 1..20: mol_type = other DNA
cagctctctatcccattctc

SEQ ID NO: 19654 - DNA, 20 bp, synthetic construct
  source 1..20: mol_type = other DNA
taggatttttctttgaagcc

SEQ ID NO: 19655 - DNA, 20 bp, synthetic construct
  source 1..20: mol_type = other DNA
agtttaggatttttctttga

SEQ ID NO: 19656 - DNA, 20 bp, synthetic construct
  source 1..20: mol_type = other DNA
atgagtttaggatttttctt

SEQ ID NO: 19657 - DNA, 20 bp, synthetic construct
  source 1..20: mol_type = other DNA
gaagggcattaatgagttta

SEQ ID NO: 19658 - DNA, 20 bp, synthetic construct
  source 1..20: mol_type = other DNA
cgaagggcattaatgagttt

SEQ ID NO: 19659 - DNA, 20 bp, synthetic construct
  source 1..20: mol_type = other DNA
atcgccgaagggcattaatg

SEQ ID NO: 19660 - DNA, 20 bp, synthetic construct
  source 1..20: mol_type = other DNA
acatcgccgaagggcattaa

SEQ ID NO: 19661 - DNA, 19 bp, synthetic construct
  source 1..19: mol_type = other DNA
tgcaaaagaataaaaagtg

SEQ ID NO: 19662 - DNA, 19 bp, synthetic construct
  source 1..19: mol_type = other DNA
ctatcccattctctgcaaa

SEQ ID NO: 19663 - DNA, 19 bp, synthetic construct
  source 1..19: mol_type = other DNA
tgagtttaggatttttctt

SEQ ID NO: 19664 - DNA, 19 bp, synthetic construct
  source 1..19: mol_type = other DNA
aagggcattaatgagttta

SEQ ID NO: 19665 - DNA, 19 bp, synthetic construct
  source 1..19: mol_type = other DNA
catcgccgaagggcattaa

SEQ ID NO: 19666 - DNA, 20 bp, synthetic construct
  source 1..20: mol_type = other DNA
cagaaaaaacatcgccgaag

SEQ ID NO: 19667 - DNA, 20 bp, synthetic construct
  source 1..20: mol_type = other DNA
ccagaaaaaacatcgccgaa

SEQ ID NO: 19668 - DNA, 20 bp, synthetic construct
  source 1..20: mol_type = other DNA
tccagaaaaaacatcgccga

SEQ ID NO: 19669 - DNA, 20 bp, synthetic construct
  source 1..20: mol_type = other DNA
atctccagaaaaaacatcgc

SEQ ID NO: 19670 - DNA, 20 bp, synthetic construct
  source 1..20: mol_type = other DNA
taaatctccagaaaaaacat

SEQ ID NO: 19671 - DNA, 20 bp, synthetic construct
  source 1..20: mol_type = other DNA
tccatagaacataaatctcc

SEQ ID NO: 19672 - DNA, 20 bp, synthetic construct
  source 1..20: mol_type = other DNA
tctcatttgtacattcatta

SEQ ID NO: 19673 - DNA, 20 bp, synthetic construct
  source 1..20: mol_type = other DNA
cacataactatattcatttt

SEQ ID NO: 19674 - DNA, 20 bp, synthetic construct
  source 1..20: mol_type = other DNA
cataactatattcatttttg

SEQ ID NO: 19675 - DNA, 20 bp, synthetic construct
  source 1..20: mol_type = other DNA
tatattcatttttgtgatta

SEQ ID NO: 19676 - DNA, 20 bp, synthetic construct
  source 1..20: mol_type = other DNA
tcatttttgtgattatgaaa

SEQ ID NO: 19677 - DNA, 20 bp, synthetic construct
  source 1..20: mol_type = other DNA
ttgtgattatgaaaagacta

SEQ ID NO: 19678 - DNA, 20 bp, synthetic construct
  source 1..20: mol_type = other DNA
tatgaaaagactacgaaatc

SEQ ID NO: 19679 - DNA, 20 bp, synthetic construct
  source 1..20: mol_type = other DNA
atgaaaagactacgaaatct

SEQ ID NO: 19680 - DNA, 20 bp, synthetic construct
  source 1..20: mol_type = other DNA
gaaaagactacgaaatctgg

SEQ ID NO: 19681 - DNA, 20 bp, synthetic construct
  source 1..20: mol_type = other DNA
gactacgaaatctggtgaat

SEQ ID NO: 19682 - DNA, 20 bp, synthetic construct
  source 1..20: mol_type = other DNA
actacgaaatctggtgaata

SEQ ID NO: 19683 - DNA, 20 bp, synthetic construct
  source 1..20: mol_type = other DNA
tacgaaatctggtgaatagg

SEQ ID NO: 19684 - DNA, 20 bp, synthetic construct
  source 1..20: mol_type = other DNA
gaataggtgtaaaaatataa

SEQ ID NO: 19685 - DNA, 20 bp, synthetic construct
  source 1..20: mol_type = other DNA
aataggtgtaaaaatataaa

SEQ ID NO: 19686 - DNA, 20 bp, synthetic construct
  source 1..20: mol_type = other DNA
aggtgtaaaaatataaagga

SEQ ID NO: 19687 - DNA, 20 bp, synthetic construct
  source 1..20: mol_type = other DNA
gaatccaactccaaacacta

SEQ ID NO: 19688 - DNA, 19 bp, synthetic construct
  source 1..19: mol_type = other DNA
ataactatattcatttttg

SEQ ID NO: 19689 - DNA, 19 bp, synthetic construct
  source 1..19: mol_type = other DNA
atattcatttttgtgatta

SEQ ID NO: 19690 - DNA, 19 bp, synthetic construct
  source 1..19: mol_type = other DNA
catttttgtgattatgaaa

SEQ ID NO: 19691 - DNA, 19 bp, synthetic construct
  source 1..19: mol_type = other DNA
tgtgattatgaaaagacta

SEQ ID NO: 19692 - DNA, 19 bp, synthetic construct
  source 1..19: mol_type = other DNA
aaaagactacgaaatctgg

SEQ ID NO: 19693 - DNA, 19 bp, synthetic construct
  source 1..19: mol_type = other DNA
ataggtgtaaaaatataaa

SEQ ID NO: 19694 - DNA, 19 bp, synthetic construct
  source 1..19: mol_type = other DNA
ggtgtaaaaatataaagga

SEQ ID NO: 19695 - DNA, 19 bp, synthetic construct
  source 1..19: mol_type = other DNA
aatccaactccaaacacta

SEQ ID NO: 19696 - DNA, 22 bp, synthetic construct
  source 1..22: mol_type = other DNA
ttctctgcaaaagaataaaaag

SEQ ID NO: 19697 - DNA, 22 bp, synthetic construct
  source 1..22: mol_type = other DNA
attctctgcaaaagaataaaaa

SEQ ID NO: 19698 - DNA, 22 bp, synthetic construct
  source 1..22: mol_type = other DNA
cgccgaagggcattaatgagtt

SEQ ID NO: 19699 - DNA, 20 bp, synthetic construct
  source 1..20: mol_type = other DNA
tctctgcaaaagaataaaaa

SEQ ID NO: 19700 - DNA, 20 bp, synthetic construct
  source 1..20: mol_type = other DNA
ccgaagggcattaatgagtt

SEQ ID NO: 19701 - DNA, 21 bp, synthetic construct
  source 1..21: mol_type = other DNA
tctctgcaaaagaataaaaag

SEQ ID NO: 19702 - DNA, 21 bp, synthetic construct
  source 1..21: mol_type = other DNA
ttctctgcaaaagaataaaaa

SEQ ID NO: 19703 - DNA, 21 bp, synthetic construct
  source 1..21: mol_type = other DNA
gccgaagggcattaatgagtt

SEQ ID NO: 19704 - DNA, 19 bp, synthetic construct
  source 1..19: mol_type = other DNA
tatggaatttttttatatt

SEQ ID NO: 19705 - DNA, 19 bp, synthetic construct
  source 1..19: mol_type = other DNA
tttttttatatttaggggt

SEQ ID NO: 19706 - DNA, 19 bp, synthetic construct
  source 1..19: mol_type = other DNA
tatggaatctttttatatt

SEQ ID NO: 19707 - DNA, 19 bp, synthetic construct
  source 1..19: mol_type = other DNA
tctttttatatttaggggt

SEQ ID NO: 19708 - DNA, 20 bp, synthetic construct
  source 1..20: mol_type = other DNA
ctatggaatttttttatatt

SEQ ID NO: 19709 - DNA, 20 bp, synthetic construct
  source 1..20: mol_type = other DNA
atttttttatatttaggggt

SEQ ID NO: 19710 - DNA, 20 bp, synthetic construct
  source 1..20: mol_type = other DNA
ctatggaatctttttatatt

SEQ ID NO: 19711 - DNA, 20 bp, synthetic construct
  source 1..20: mol_type = other DNA
atctttttatatttaggggt

SEQ ID NO: 19712 - DNA, 19 bp, synthetic construct
  source 1..19: mol_type = other DNA
ctgcaaaagaataaaaagt

SEQ ID NO: 19713 - DNA, 19 bp, synthetic construct
  source 1..19: mol_type = other DNA
tctgcaaaagaataaaaag

SEQ ID NO: 19714 - DNA, 19 bp, synthetic construct
  source 1..19: mol_type = other DNA
gaagggcattaatgagttt

SEQ ID NO: 19715 - DNA, 19 bp, synthetic construct
  source 1..19: mol_type = other DNA
cagaaaaaacatcgccgaa

SEQ ID NO: 19716 - DNA, 19 bp, synthetic construct
  source 1..19: mol_type = other DNA
ccagaaaaaacatcgccga

SEQ ID NO: 19717 - DNA, 20 bp, synthetic construct
  source 1..20: mol_type = other DNA
tatggaatctttttatattt

SEQ ID NO: 19718 - DNA, 20 bp, synthetic construct
  source 1..20: mol_type = other DNA
atggaatctttttatattta

SEQ ID NO: 19719 - DNA, 20 bp, synthetic construct
  source 1..20: mol_type = other DNA
tggaatctttttatatttag

SEQ ID NO: 19720 - DNA, 20 bp, synthetic construct
  source 1..20: mol_type = other DNA
ggaatctttttatatttagg

SEQ ID NO: 19721 - DNA, 20 bp, synthetic construct
  source 1..20: mol_type = other DNA
tctttttatatttaggggta

SEQ ID NO: 19722 - DNA, 20 bp, synthetic construct
  source 1..20: mol_type = other DNA
ctttttatatttaggggtaa

SEQ ID NO: 19723 - DNA, 20 bp, synthetic construct
  source 1..20: mol_type = other DNA
ttaggggtaaggatctcatt

SEQ ID NO: 19724 - DNA, 19 bp, synthetic construct
  source 1..19: mol_type = other DNA
tttttatatttaggggtaa

SEQ ID NO: 19725 - DNA, 19 bp, synthetic construct
  source 1..19: mol_type = other DNA
tctccagaaaaaacatcgc

SEQ ID NO: 19726 - DNA, 22 bp, synthetic construct
  source 1..22: mol_type = other DNA
tctccagaaaaaacatcgccga

SEQ ID NO: 19727 - DNA, 22 bp, synthetic construct
  source 1..22: mol_type = other DNA
atctccagaaaaaacatcgccg

SEQ ID NO: 19728 - DNA, 20 bp, synthetic construct
  source 1..20: mol_type = other DNA
ctccagaaaaaacatcgccg

SEQ ID NO: 19729 - DNA, 21 bp, synthetic construct
  source 1..21: mol_type = other DNA
ctccagaaaaaacatcgccga

SEQ ID NO: 19730 - DNA, 21 bp, synthetic construct
  source 1..21: mol_type = other DNA
tctccagaaaaaacatcgccg

SEQ ID NO: 19731 - DNA, 20 bp, synthetic construct
  source 1..20: mol_type = other DNA
ctaagggcattaatgagttt

SEQ ID NO: 19732 - DNA, 19 bp, synthetic construct
  source 1..19: mol_type = other DNA
taagggcattaatgagttt

SEQ ID NO: 19733 - DNA, 20 bp, synthetic construct
  source 1..20: mol_type = other DNA
ttatggaatctttttatatt

SEQ ID NO: 19734 - DNA, 19 bp, synthetic construct
  source 1..19: mol_type = other DNA
ccatagaacataaatctcc

SEQ ID NO: 19735 - DNA, 20 bp, synthetic construct
  source 1..20: mol_type = other DNA
agttgcatgtgcaaatattt

SEQ ID NO: 19736 - DNA, 20 bp, synthetic construct
  source 1..20: mol_type = other DNA
gaataaaaagtgggaccaat

SEQ ID NO: 19737 - DNA, 20 bp, synthetic construct
  source 1..20: mol_type = other DNA
attctctgcaaaagaataaa

SEQ ID NO: 19738 - DNA, 20 bp, synthetic construct
  source 1..20: mol_type = other DNA
ctctatcccattctctgcaa

SEQ ID NO: 19739 - DNA, 20 bp, synthetic construct
  source 1..20: mol_type = other DNA
ttaggatttttctttgaagc

SEQ ID NO: 19740 - DNA, 20 bp, synthetic construct
  source 1..20: mol_type = other DNA
gagtttaggatttttctttg

SEQ ID NO: 19741 - DNA, 20 bp, synthetic construct
  source 1..20: mol_type = other DNA
catcgccgaagggcattaat

SEQ ID NO: 19742 - DNA, 20 bp, synthetic construct
  source 1..20: mol_type = other DNA
cgccagaaaaaacatcgccg

SEQ ID NO: 19743 - DNA, 19 bp, synthetic construct
  source 1..19: mol_type = other DNA
gttgcatgtgcaaatattt

SEQ ID NO: 19744 - DNA, 19 bp, synthetic construct
  source 1..19: mol_type = other DNA
aataaaaagtgggaccaat

SEQ ID NO: 19745 - DNA, 19 bp, synthetic construct
  source 1..19: mol_type = other DNA
ttctctgcaaaagaataaa

SEQ ID NO: 19746 - DNA, 19 bp, synthetic construct
  source 1..19: mol_type = other DNA
tctatcccattctctgcaa

SEQ ID NO: 19747 - DNA, 19 bp, synthetic construct
  source 1..19: mol_type = other DNA
taggatttttctttgaagc

SEQ ID NO: 19748 - DNA, 19 bp, synthetic construct
  source 1..19: mol_type = other DNA
agtttaggatttttctttg

SEQ ID NO: 19749 - DNA, 19 bp, synthetic construct
  source 1..19: mol_type = other DNA
cgaagggcattaatgagtt

SEQ ID NO: 19750 - DNA, 19 bp, synthetic construct
  source 1..19: mol_type = other DNA
atcgccgaagggcattaat

SEQ ID NO: 19751 - DNA, 19 bp, synthetic construct
  source 1..19: mol_type = other DNA
gccagaaaaaacatcgccg

SEQ ID NO: 19752 - DNA, 19 bp, synthetic construct
  source 1..19: mol_type = other DNA
tccagaaaaaacatcgccg

SEQ ID NO: 19753 - DNA, 19 bp, synthetic construct
  source 1..19: mol_type = other DNA
tctttttatatttaggggt

SEQ ID NO: 19754 - DNA, 20 bp, synthetic construct
  source 1..20: mol_type = other DNA
atctttttatatttaggggt

SEQ ID NO: 19755 - DNA, 20 bp, synthetic construct
  source 1..20: mol_type = other DNA
tccatagaacataaatctcc

SEQ ID NO: 19756 - DNA, 19 bp, synthetic construct
  source 1..19: mol_type = other DNA
ccatagaacataaatctcc

SEQ ID NO: 19757 - DNA, 20 bp, synthetic construct
  source 1..20: mol_type = other DNA
tatggaatctttttatattt

SEQ ID NO: 19758 - DNA, 20 bp, synthetic construct
  source 1..20: mol_type = other DNA
atggaatctttttatattta

SEQ ID NO: 19759 - DNA, 20 bp, synthetic construct
  source 1..20: mol_type = other DNA
tggaatctttttatatttag

SEQ ID NO: 19760 - DNA, 20 bp, synthetic construct
  source 1..20: mol_type = other DNA
ggaatctttttatatttagg

SEQ ID NO: 19761 - DNA, 20 bp, synthetic construct
  source 1..20: mol_type = other DNA
tctttttatatttaggggta

SEQ ID NO: 19762 - DNA, 20 bp, synthetic construct
  source 1..20: mol_type = other DNA
ctttttatatttaggggtaa

SEQ ID NO: 19763 - DNA, 19 bp, synthetic construct
  source 1..19: mol_type = other DNA
tttttatatttaggggtaa

SEQ ID NO: 19764 - DNA, 20 bp, synthetic construct
  source 1..20: mol_type = other DNA
aacatcgccgaagggcatta

SEQ ID NO: 19765 - DNA, 21 bp, synthetic construct
  source 1..21: mol_type = other DNA
tctctatcccattctctgcaa

SEQ ID NO: 19766 - DNA, 21 bp, synthetic construct
  source 1..21: mol_type = other DNA
aaacatcgccgaagggcatta

SEQ ID NO: 19767 - DNA, 22 bp, synthetic construct
  source 1..22: mol_type = other DNA
ctctctatcccattctctgcaa

SEQ ID NO: 19768 - DNA, 22 bp, synthetic construct
  source 1..22: mol_type = other DNA
aaaacatcgccgaagggcatta

SEQ ID NO: 19769 - DNA, 20 bp, synthetic construct
  source 1..20: mol_type = other DNA
tttatctaggcataggctta

SEQ ID NO: 19770 - DNA, 20 bp, synthetic construct
  source 1..20: mol_type = other DNA
ggcttatgccttctctttat

SEQ ID NO: 19771 - DNA, 20 bp, synthetic construct
  source 1..20: mol_type = other DNA
cttatgccttctctttattg

SEQ ID NO: 19772 - DNA, 20 bp, synthetic construct
  source 1..20: mol_type = other DNA
tatgccttctctttattgtg

SEQ ID NO: 19773 - DNA, 20 bp, synthetic construct
  source 1..20: mol_type = other DNA
atgccttctctttattgtga

SEQ ID NO: 19774 - DNA, 20 bp, synthetic construct
  source 1..20: mol_type = other DNA
tctctttattgtgaggacac

SEQ ID NO: 19775 - DNA, 20 bp, synthetic construct
  source 1..20: mol_type = other DNA
aggacactgctcctacaccc

SEQ ID NO: 19776 - DNA, 20 bp, synthetic construct
  source 1..20: mol_type = other DNA
ctcctacacccagccatttt

SEQ ID NO: 19777 - DNA, 20 bp, synthetic construct
  source 1..20: mol_type = other DNA
tcctacacccagccattttt

SEQ ID NO: 19778 - DNA, 20 bp, synthetic construct
  source 1..20: mol_type = other DNA
atttttggccttcatcacat

SEQ ID NO: 19779 - DNA, 20 bp, synthetic construct
  source 1..20: mol_type = other DNA
tttttggccttcatcacatt

SEQ ID NO: 19780 - DNA, 20 bp, synthetic construct
  source 1..20: mol_type = other DNA
tggccttcatcacattggaa

SEQ ID NO: 19781 - DNA, 20 bp, synthetic construct
  source 1..20: mol_type = other DNA
ccttcatcacattggaatgc

SEQ ID NO: 19782 - DNA, 20 bp, synthetic construct
  source 1..20: mol_type = other DNA
tcatcacattggaatgcaga

SEQ ID NO: 19783 - DNA, 20 bp, synthetic construct
  source 1..20: mol_type = other DNA
atcacattggaatgcagatg

SEQ ID NO: 19784 - DNA, 20 bp, synthetic construct
  source 1..20: mol_type = other DNA
attggaatgcagatgagaat

SEQ ID NO: 19785 - DNA, 20 bp, synthetic construct
  source 1..20: mol_type = other DNA
aatgcagatgagaatagcta

SEQ ID NO: 19786 - DNA, 20 bp, synthetic construct
  source 1..20: mol_type = other DNA
agatgagaatagctatgttt

SEQ ID NO: 19787 - DNA, 20 bp, synthetic construct
  source 1..20: mol_type = other DNA
gagaatagctatgtttagtt

SEQ ID NO: 19788 - DNA, 20 bp, synthetic construct
  source 1..20: mol_type = other DNA
tatgtttagtttgatttata

SEQ ID NO: 19789 - DNA, 20 bp, synthetic construct
  source 1..20: mol_type = other DNA
gtttagtttgatttataaga

SEQ ID NO: 19790 - DNA, 20 bp, synthetic construct
  source 1..20: mol_type = other DNA
tttagtttgatttataagaa

SEQ ID NO: 19791 - DNA, 20 bp, synthetic construct
  source 1..20: mol_type = other DNA
cgctctatcgcgatttatct

SEQ ID NO: 19792 - DNA, 20 bp, synthetic construct
  source 1..20: mol_type = other DNA
gctctatcgcgatttatcta

SEQ ID NO: 19793 - DNA, 20 bp, synthetic construct
  source 1..20: mol_type = other DNA
atcgcgatttatctaggcat

SEQ ID NO: 19794 - DNA, 20 bp, synthetic construct
  source 1..20: mol_type = other DNA
tcgcgatttatctaggcata

SEQ ID NO: 19795 - DNA, 19 bp, synthetic construct
  source 1..19: mol_type = other DNA
ttatgccttctctttattg

SEQ ID NO: 19796 - DNA, 19 bp, synthetic construct
  source 1..19: mol_type = other DNA
tgccttctctttattgtga

SEQ ID NO: 19797 - DNA, 19 bp, synthetic construct
  source 1..19: mol_type = other DNA
ttttggccttcatcacatt

SEQ ID NO: 19798 - DNA, 19 bp, synthetic construct
  source 1..19: mol_type = other DNA
cttcatcacattggaatgc

SEQ ID NO: 19799 - DNA, 19 bp, synthetic construct
  source 1..19: mol_type = other DNA
catcacattggaatgcaga

SEQ ID NO: 19800 - DNA, 19 bp, synthetic construct
  source 1..19: mol_type = other DNA
tcacattggaatgcagatg

SEQ ID NO: 19801 - DNA, 19 bp, synthetic construct
  source 1..19: mol_type = other DNA
agaatagctatgtttagtt

SEQ ID NO: 19802 - DNA, 19 bp, synthetic construct
  source 1..19: mol_type = other DNA
atgtttagtttgatttata

SEQ ID NO: 19803 - DNA, 20 bp, synthetic construct
  source 1..20: mol_type = other DNA
atttctcataaaataccctg

SEQ ID NO: 19804 - DNA, 20 bp, synthetic construct
  source 1..20: mol_type = other DNA
ttatttctcataaaataccc

SEQ ID NO: 19805 - DNA, 20 bp, synthetic construct
  source 1..20: mol_type = other DNA
ctacaaaaggggaaaaacag

SEQ ID NO: 19806 - DNA, 20 bp, synthetic construct
  source 1..20: mol_type = other DNA
tcctacaaaaggggaaaaac

SEQ ID NO: 19807 - DNA, 20 bp, synthetic construct
  source 1..20: mol_type = other DNA
tggtgacttcctacaaaagg

SEQ ID NO: 19808 - DNA, 20 bp, synthetic construct
  source 1..20: mol_type = other DNA
ttggtgacttcctacaaaag

SEQ ID NO: 19809 - DNA, 20 bp, synthetic construct
  source 1..20: mol_type = other DNA
tttggtgacttcctacaaaa

SEQ ID NO: 19810 - DNA, 20 bp, synthetic construct
  source 1..20: mol_type = other DNA
ctttggtgacttcctacaaa

SEQ ID NO: 19811 - DNA, 20 bp, synthetic construct
  source 1..20: mol_type = other DNA
gagaggctgtactgctttgg

SEQ ID NO: 19812 - DNA, 20 bp, synthetic construct
  source 1..20: mol_type = other DNA
aagagaggctgtactgcttt

SEQ ID NO: 19813 - DNA, 20 bp, synthetic construct
  source 1..20: mol_type = other DNA
taagagaggctgtactgctt

SEQ ID NO: 19814 - DNA, 20 bp, synthetic construct
  source 1..20: mol_type = other DNA
cccagtaagagaggctgtac

SEQ ID NO: 19815 - DNA, 20 bp, synthetic construct
  source 1..20: mol_type = other DNA
ttcttcccagtaagagaggc

SEQ ID NO: 19816 - DNA, 20 bp, synthetic construct
  source 1..20: mol_type = other DNA
tgattcttcccagtaagaga

SEQ ID NO: 19817 - DNA, 20 bp, synthetic construct
  source 1..20: mol_type = other DNA
atgattcttcccagtaagag

SEQ ID NO: 19818 - DNA, 20 bp, synthetic construct
  source 1..20: mol_type = other DNA
ctatgattcttcccagtaag

SEQ ID NO: 19819 - DNA, 20 bp, synthetic construct
  source 1..20: mol_type = other DNA
agctatgattcttcccagta

SEQ ID NO: 19820 - DNA, 20 bp, synthetic construct
  source 1..20: mol_type = other DNA
aggaagctatgattcttccc

SEQ ID NO: 19821 - DNA, 20 bp, synthetic construct
  source 1..20: mol_type = other DNA
atccgggtcataggaagcta

SEQ ID NO: 19822 - DNA, 20 bp, synthetic construct
  source 1..20: mol_type = other DNA
ttgttatccgggtcatagga

SEQ ID NO: 19823 - DNA, 20 bp, synthetic construct
  source 1..20: mol_type = other DNA
tccttgttatccgggtcata

SEQ ID NO: 19824 - DNA, 19 bp, synthetic construct
  source 1..19: mol_type = other DNA
tggtgacttcctacaaaag

SEQ ID NO: 19825 - DNA, 19 bp, synthetic construct
  source 1..19: mol_type = other DNA
ttggtgacttcctacaaaa

SEQ ID NO: 19826 - DNA, 19 bp, synthetic construct
  source 1..19: mol_type = other DNA
tttggtgacttcctacaaa

SEQ ID NO: 19827 - DNA, 19 bp, synthetic construct
  source 1..19: mol_type = other DNA
aagagaggctgtactgctt

SEQ ID NO: 19828 - DNA, 19 bp, synthetic construct
  source 1..19: mol_type = other DNA
tgattcttcccagtaagag

SEQ ID NO: 19829 - DNA, 19 bp, synthetic construct
  source 1..19: mol_type = other DNA
tacaaaaggggaaaaacag

SEQ ID NO: 19830 - DNA, 19 bp, synthetic construct
  source 1..19: mol_type = other DNA
cctacaaaaggggaaaaac

SEQ ID NO: 19831 - DNA, 19 bp, synthetic construct
  source 1..19: mol_type = other DNA
ggtgacttcctacaaaagg

SEQ ID NO: 19832 - DNA, 19 bp, synthetic construct
  source 1..19: mol_type = other DNA
agaggctgtactgctttgg

SEQ ID NO: 19833 - DNA, 19 bp, synthetic construct
  source 1..19: mol_type = other DNA
tatgattcttcccagtaag

SEQ ID NO: 19834 - DNA, 19 bp, synthetic construct
  source 1..19: mol_type = other DNA
gctatgattcttcccagta

SEQ ID NO: 19835 - DNA, 19 bp, synthetic construct
  source 1..19: mol_type = other DNA
tccgggtcataggaagcta

SEQ ID NO: 19836 - DNA, 19 bp, synthetic construct
  source 1..19: mol_type = other DNA
ccttgttatccgggtcata

SEQ ID NO: 19837 - DNA, 20 bp, synthetic construct
  source 1..20: mol_type = other DNA
ctccttgttatccgggtcat

SEQ ID NO: 19838 - DNA, 20 bp, synthetic construct
  source 1..20: mol_type = other DNA
gcgttcctccttgttatccg

SEQ ID NO: 19839 - DNA, 20 bp, synthetic construct
  source 1..20: mol_type = other DNA
agcgttcctccttgttatcc

SEQ ID NO: 19840 - DNA, 20 bp, synthetic construct
  source 1..20: mol_type = other DNA
gagcgttcctccttgttatc

SEQ ID NO: 19841 - DNA, 19 bp, synthetic construct
  source 1..19: mol_type = other DNA
cgcagcatcgcgatttatc

SEQ ID NO: 19842 - DNA, 19 bp, synthetic construct
  source 1..19: mol_type = other DNA
atcgcgatttatctaggca

SEQ ID NO: 19843 - DNA, 19 bp, synthetic construct
  source 1..19: mol_type = other DNA
tatgccttctctttattgt

SEQ ID NO: 19844 - DNA, 19 bp, synthetic construct
  source 1..19: mol_type = other DNA
aggacactgctcctacacc

SEQ ID NO: 19845 - DNA, 19 bp, synthetic construct
  source 1..19: mol_type = other DNA
ccttcatcacattggaatg

SEQ ID NO: 19846 - DNA, 19 bp, synthetic construct
  source 1..19: mol_type = other DNA
atcacattggaatgcagat

SEQ ID NO: 19847 - DNA, 19 bp, synthetic construct
  source 1..19: mol_type = other DNA
attggaatgcagatgagaa

SEQ ID NO: 19848 - DNA, 19 bp, synthetic construct
  source 1..19: mol_type = other DNA
agatgagaatagctatgtt

SEQ ID NO: 19849 - DNA, 19 bp, synthetic construct
  source 1..19: mol_type = other DNA
cgctctatcgcgatttatc

SEQ ID NO: 19850 - DNA, 20 bp, synthetic construct
  source 1..20: mol_type = other DNA
acgcagcatcgcgatttatc

SEQ ID NO: 19851 - DNA, 20 bp, synthetic construct
  source 1..20: mol_type = other DNA
catcgcgatttatctaggca

SEQ ID NO: 19852 - DNA, 20 bp, synthetic construct
  source 1..20: mol_type = other DNA
ttatgccttctctttattgt

SEQ ID NO: 19853 - DNA, 20 bp, synthetic construct
  source 1..20: mol_type = other DNA
gaggacactgctcctacacc

SEQ ID NO: 19854 - DNA, 20 bp, synthetic construct
  source 1..20: mol_type = other DNA
gccttcatcacattggaatg

SEQ ID NO: 19855 - DNA, 20 bp, synthetic construct
  source 1..20: mol_type = other DNA
catcacattggaatgcagat

SEQ ID NO: 19856 - DNA, 20 bp, synthetic construct
  source 1..20: mol_type = other DNA
cattggaatgcagatgagaa

SEQ ID NO: 19857 - DNA, 20 bp, synthetic construct
  source 1..20: mol_type = other DNA
cagatgagaatagctatgtt

SEQ ID NO: 19858 - DNA, 20 bp, synthetic construct
  source 1..20: mol_type = other DNA
acgctctatcgcgatttatc

SEQ ID NO: 19859 - DNA, 20 bp, synthetic construct
  source 1..20: mol_type = other DNA
tatcgcgatttatctaggca

SEQ ID NO: 19860 - DNA, 19 bp, synthetic construct
  source 1..19: mol_type = other DNA
tatgtttagtttgatttat

SEQ ID NO: 19861 - DNA, 19 bp, synthetic construct
  source 1..19: mol_type = other DNA
gtttagtttgatttataag

SEQ ID NO: 19862 - DNA, 20 bp, synthetic construct
  source 1..20: mol_type = other DNA
ctatgtttagtttgatttat

SEQ ID NO: 19863 - DNA, 20 bp, synthetic construct
  source 1..20: mol_type = other DNA
tgtttagtttgatttataag

SEQ ID NO: 19864 - DNA, 22 bp, synthetic construct
  source 1..22: mol_type = other DNA
gaacgctctatcgcgatttatc

SEQ ID NO: 19865 - DNA, 22 bp, synthetic construct
  source 1..22: mol_type = other DNA
tctatcgcgatttatctaggca

SEQ ID NO: 19866 - DNA, 22 bp, synthetic construct
  source 1..22: mol_type = other DNA
gcttatgccttctctttattgt

SEQ ID NO: 19867 - DNA, 22 bp, synthetic construct
  source 1..22: mol_type = other DNA
ctgctcctacacccagccattt

SEQ ID NO: 19868 - DNA, 22 bp, synthetic construct
  source 1..22: mol_type = other DNA
gccatttttggccttcatcaca

SEQ ID NO: 19869 - DNA, 19 bp, synthetic construct
  source 1..19: mol_type = other DNA
gctctatcgcgatttatct

SEQ ID NO: 19870 - DNA, 19 bp, synthetic construct
  source 1..19: mol_type = other DNA
tcgcgatttatctaggcat

SEQ ID NO: 19871 - DNA, 19 bp, synthetic construct
  source 1..19: mol_type = other DNA
atgccttctctttattgtg

SEQ ID NO: 19872 - DNA, 19 bp, synthetic construct
  source 1..19: mol_type = other DNA
tcctacacccagccatttt

SEQ ID NO: 19873 - DNA, 19 bp, synthetic construct
  source 1..19: mol_type = other DNA
tttttggccttcatcacat

SEQ ID NO: 19874 - DNA, 20 bp, synthetic construct
  source 1..20: mol_type = other DNA
gctcctacacccagccattt

SEQ ID NO: 19875 - DNA, 20 bp, synthetic construct
  source 1..20: mol_type = other DNA
catttttggccttcatcaca

SEQ ID NO: 19876 - DNA, 21 bp, synthetic construct
  source 1..21: mol_type = other DNA
aacgctctatcgcgatttatc

SEQ ID NO: 19877 - DNA, 21 bp, synthetic construct
  source 1..21: mol_type = other DNA
ctatcgcgatttatctaggca

SEQ ID NO: 19878 - DNA, 21 bp, synthetic construct
  source 1..21: mol_type = other DNA
cttatgccttctctttattgt

SEQ ID NO: 19879 - DNA, 21 bp, synthetic construct
  source 1..21: mol_type = other DNA
tgctcctacacccagccattt

SEQ ID NO: 19880 - DNA, 21 bp, synthetic construct
  source 1..21: mol_type = other DNA
ccatttttggccttcatcaca

SEQ ID NO: 19881 - DNA, 19 bp, synthetic construct
  source 1..19: mol_type = other DNA
tttctcataaaataccctg

SEQ ID NO: 19882 - DNA, 19 bp, synthetic construct
  source 1..19: mol_type = other DNA
tatttctcataaaataccc

SEQ ID NO: 19883 - DNA, 20 bp, synthetic construct
  source 1..20: mol_type = other DNA
caaggaggaacgctctatcg

SEQ ID NO: 19884 - DNA, 20 bp, synthetic construct
  source 1..20: mol_type = other DNA
tatttctcataaaataccct

SEQ ID NO: 19885 - DNA, 20 bp, synthetic construct
  source 1..20: mol_type = other DNA
cctacaaaaggggaaaaaca

SEQ ID NO: 19886 - DNA, 20 bp, synthetic construct
  source 1..20: mol_type = other DNA
ttcctacaaaaggggaaaaa

SEQ ID NO: 19887 - DNA, 20 bp, synthetic construct
  source 1..20: mol_type = other DNA
gctttggtgacttcctacaa

SEQ ID NO: 19888 - DNA, 20 bp, synthetic construct
  source 1..20: mol_type = other DNA
tatgattcttcccagtaaga

SEQ ID NO: 19889 - DNA, 20 bp, synthetic construct
  source 1..20: mol_type = other DNA
gctatgattcttcccagtaa

SEQ ID NO: 19890 - DNA, 20 bp, synthetic construct
  source 1..20: mol_type = other DNA
aagctatgattcttcccagt

SEQ ID NO: 19891 - DNA, 20 bp, synthetic construct
  source 1..20: mol_type = other DNA
taggaagctatgattcttcc

SEQ ID NO: 19892 - DNA, 20 bp, synthetic construct
  source 1..20: mol_type = other DNA
cttgttatccgggtcatagg

SEQ ID NO: 19893 - DNA, 20 bp, synthetic construct
  source 1..20: mol_type = other DNA
cttccttgttatccgggtca

SEQ ID NO: 19894 - DNA, 20 bp, synthetic construct
  source 1..20: mol_type = other DNA
cctccttgttatccgggtca

SEQ ID NO: 19895 - DNA, 20 bp, synthetic construct
  source 1..20: mol_type = other DNA
gtaagagaggctgtactgct

SEQ ID NO: 19896 - DNA, 20 bp, synthetic construct
  source 1..20: mol_type = other DNA
agagcgttcctccttgttat

SEQ ID NO: 19897 - DNA, 19 bp, synthetic construct
  source 1..19: mol_type = other DNA
atttctcataaaataccct

SEQ ID NO: 19898 - DNA, 19 bp, synthetic construct
  source 1..19: mol_type = other DNA
ctacaaaaggggaaaaaca

SEQ ID NO: 19899 - DNA, 19 bp, synthetic construct
  source 1..19: mol_type = other DNA
tcctacaaaaggggaaaaa

SEQ ID NO: 19900 - DNA, 19 bp, synthetic construct
  source 1..19: mol_type = other DNA
ctttggtgacttcctacaa

SEQ ID NO: 19901 - DNA, 19 bp, synthetic construct
  source 1..19: mol_type = other DNA
atgattcttcccagtaaga

SEQ ID NO: 19902 - DNA, 19 bp, synthetic construct
  source 1..19: mol_type = other DNA
ctatgattcttcccagtaa

SEQ ID NO: 19903 - DNA, 19 bp, synthetic construct
  source 1..19: mol_type = other DNA
agctatgattcttcccagt

SEQ ID NO: 19904 - DNA, 19 bp, synthetic construct
  source 1..19: mol_type = other DNA
aggaagctatgattcttcc

SEQ ID NO: 19905 - DNA, 19 bp, synthetic construct
  source 1..19: mol_type = other DNA
ttgttatccgggtcatagg

SEQ ID NO: 19906 - DNA, 19 bp, synthetic construct
  source 1..19: mol_type = other DNA
ttccttgttatccgggtca

SEQ ID NO: 19907 - DNA, 19 bp, synthetic construct
  source 1..19: mol_type = other DNA
ctccttgttatccgggtca

SEQ ID NO: 19908 - DNA, 21 bp, synthetic construct
  source 1..21: mol_type = other DNA
ctttggtgacttcctacaaaa

SEQ ID NO: 19909 - DNA, 21 bp, synthetic construct
  source 1..21: mol_type = other DNA
gctttggtgacttcctacaaa

SEQ ID NO: 19910 - DNA, 21 bp, synthetic construct
  source 1..21: mol_type = other DNA
tgctttggtgacttcctacaa

SEQ ID NO: 19911 - DNA, 21 bp, synthetic construct
  source 1..21: mol_type = other DNA
agtaagagaggctgtactgct

SEQ ID NO: 19912 - DNA, 21 bp, synthetic construct
  source 1..21: mol_type = other DNA
ctatgattcttcccagtaaga

SEQ ID NO: 19913 - DNA, 21 bp, synthetic construct
  source 1..21: mol_type = other DNA
tcctccttgttatccgggtca

SEQ ID NO: 19914 - DNA, 21 bp, synthetic construct
  source 1..21: mol_type = other DNA
agagcgttcctccttgttatc

SEQ ID NO: 19915 - DNA, 21 bp, synthetic construct
  source 1..21: mol_type = other DNA
tagagcgttcctccttgttat

SEQ ID NO: 19916 - DNA, 22 bp, synthetic construct
  source 1..22: mol_type = other DNA
gctttggtgacttcctacaaaa

SEQ ID NO: 19917 - DNA, 22 bp, synthetic construct
  source 1..22: mol_type = other DNA
tgctttggtgacttcctacaaa

SEQ ID NO: 19918 - DNA, 22 bp, synthetic construct
  source 1..22: mol_type = other DNA
ctgctttggtgacttcctacaa

SEQ ID NO: 19919 - DNA, 22 bp, synthetic construct
  source 1..22: mol_type = other DNA
cagtaagagaggctgtactgct

SEQ ID NO: 19920 - DNA, 22 bp, synthetic construct
  source 1..22: mol_type = other DNA
gctatgattcttcccagtaaga

SEQ ID NO: 19921 - DNA, 22 bp, synthetic construct
  source 1..22: mol_type = other DNA
ttcctccttgttatccgggtca

SEQ ID NO: 19922 - DNA, 22 bp, synthetic construct
  source 1..22: mol_type = other DNA
tagagcgttcctccttgttatc

SEQ ID NO: 19923 - DNA, 22 bp, synthetic construct
  source 1..22: mol_type = other DNA
atagagcgttcctccttgttat

SEQ ID NO: 19924 - DNA, 19 bp, synthetic construct
  source 1..19: mol_type = other DNA
atgattcttcccagtaaga

SEQ ID NO: 19925 - DNA, 19 bp, synthetic construct
  source 1..19: mol_type = other DNA
cgatgattcttcccagtaa

SEQ ID NO: 19926 - DNA, 19 bp, synthetic construct
  source 1..19: mol_type = other DNA
agcgatgattcttcccagt

SEQ ID NO: 19927 - DNA, 19 bp, synthetic construct
  source 1..19: mol_type = other DNA
aggaagcgatgattcttcc

SEQ ID NO: 19928 - DNA, 20 bp, synthetic construct
  source 1..20: mol_type = other DNA
gatgattcttcccagtaaga

SEQ ID NO: 19929 - DNA, 20 bp, synthetic construct
  source 1..20: mol_type = other DNA
gcgatgattcttcccagtaa

SEQ ID NO: 19930 - DNA, 20 bp, synthetic construct
  source 1..20: mol_type = other DNA
aagcgatgattcttcccagt

SEQ ID NO: 19931 - DNA, 20 bp, synthetic construct
  source 1..20: mol_type = other DNA
taggaagcgatgattcttcc

SEQ ID NO: 19932 - DNA, 22 bp, synthetic construct
  source 1..22: mol_type = other DNA
tttatttctcataaaataccct

SEQ ID NO: 19933 - DNA, 21 bp, synthetic construct
  source 1..21: mol_type = other DNA
ttatttctcataaaataccct

SEQ ID NO: 19934 - DNA, 21 bp, synthetic construct
  source 1..21: mol_type = other DNA
catttttggccttcatcacat

SEQ ID NO: 19935 - DNA, 21 bp, synthetic construct
  source 1..21: mol_type = other DNA
tcatcacattggaatgcagat

SEQ ID NO: 19936 - DNA, 19 bp, synthetic construct
  source 1..19: mol_type = other DNA
cggtctatcgcgatttatc

(The sequence listing continues in the following parts.)

1. A prime editing guide RNA (PEgRNA) comprising:
a spacer that is complementary to a search target sequence on a first strand of a CFTR gene,
an editing template that comprises a region of complementarity to an editing target sequence on a second strand of the CFTR gene, and
a gRNA core that associates with a prime editor comprising a DNA binding domain and a DNA polymerase domain,
wherein the first strand and the second strand are complementary to each other, and
a) wherein the editing target sequence is in an exon selected from the group consisting of: exon 1, exon 2, exon 3, exon 4, exon 5, exon 6, exon 7, exon 8, exon 9, exon 10, exon 12, exon 13, exon 14, exon 15, exon 16, exon 17, exon 18, exon 19, exon 20, exon 21, exon 22, exon 23, exon 24, exon 25, exon 26, and exon 27 of the CFTR gene;
b) wherein if the editing target sequence is in exon 11, then the editing target sequence does not comprise a CTT deletion at positions chr7:117559591-117559594 as compared to a wild type CFTR gene;
c) wherein the editing target sequence is between positions 117480095-117548823 and positions 117587739-117665564 of human chromosome 7: or
d) wherein the editing target sequence comprises a mutation associated with cystic fibrosis, and wherein the mutation is not the CTT deletion at positions chr7:117559591-117559594 as compared to the wild type CFTR gene.

2.-4. (canceled)

5. The PEgRNA of claim 1, wherein the PEgRNA comprises a primer binding site sequence (PBS) at least partially complementary to the spacer.

6. The PEgRNA of claim 1, wherein the gRNA core is between the spacer and the editing template.

7. The PEgRNA of claim 1, wherein the editing template comprises an intended nucleotide edit compared to the CFTR gene.

8. The PEgRNA of claim 7, wherein the intended nucleotide edit results in the CFTR gene encoding wild-type protein sequence.

9. (canceled)

10. The PEgRNA of claim 7, wherein the search target sequence is complementary to a protospacer sequence in the CFTR gene, and wherein the protospacer sequence is adjacent to a protospacer adjacent motif (PAM) in the second strand of the CFTR gene.

11.-12. (canceled)

13. The PEgRNA of claim 5, wherein the PBS is about 8 to 16 base pairs in length.

14. The PEgRNA of claim 1, wherein the editing template is about 4 to 30 base pairs in length.

15. The PEgRNA of claim 14, wherein the editing template is about 10 to 30 base pairs in length.

16. The PEgRNA of claim 10, wherein the intended nucleotide edit is configured for incorporation at a position about 0 to 27 base pairs downstream of the 5′ end of the PAM.

17. The PEgRNA of claim 7, wherein the intended nucleotide edit comprises a single nucleotide substitution, an insertion, or a deletion in the CFTR gene.

18.-33. (canceled)

34. The PEgRNA of claim 1, wherein the editing target sequence comprises a mutation that encodes an amino acid substitution selected from the group consisting of: G85E, R117H, R334W, R347P, R347H, A445E, G542*, S549N, G551D, R553*, K684fs, D1152H, R1158*, R1162*, K1177R, W1282*, and N1303K as compared to a wild type CFTR protein as set forth in SEQ ID NO: 19, wherein * refers to a nonsense mutation and fs refers to a frameshift mutation.

35. A PEgRNA system comprising:
(i) a PEgRNA comprising:
a spacer that is complementary to a search target sequence on a first strand of a CFTR gene,
an editing template that comprises a region of complementarity to an editing target sequence on a second strand of the CFTR gene, and
a gRNA core that associates with a prime editor comprising a DNA binding domain and a DNA polymerase domain,
wherein the first strand and the second strand are complementary to each other, and
a) wherein the editing target sequence is in an exon selected from the group consisting of: exon 1, exon 2, exon 3, exon 4, exon 5, exon 6, exon 7, exon 8, exon 9, exon 10, exon 12, exon 13, exon 14, exon 15, exon 16, exon 17, exon 18, exon 19, exon 20, exon 21, exon 22, exon 23, exon 24, exon 25, exon 26, and exon 27 of the CFTR gene;
b) wherein if the editing target sequence is in exon 11 then the editing target sequence does not comprise a CTT deletion at positions chr7:117559591-117559594 as compared to a wild type CFTR gene;
c) wherein the editing target sequence is between positions 117480095-117548823 and positions 117587739-117665564 of human chromosome 7; or
d) wherein the editing target sequence comprises a mutation associated with cystic fibrosis, and wherein the mutation is not a CTT deletion at positions chr7:117559591-117559594 as compared to a wild type CFTR gene; and
(ii) a nick guide RNA (ngRNA) comprising an ng spacer that is complementary to a second search target sequence in the CFTR gene.

36. The PEgRNA system of claim 35, wherein the second search target sequence is on the second strand of the CFTR gene.

37. A prime editing guide RNA (PEgRNA) comprising:
a spacer comprising a sequence selected from the group consisting of SEQ ID NOs: 678-682, 691-709, and 712-728,
an editing template that comprises a region of complementarity to an editing target sequence on an edit strand of a CFTR gene, and
a gRNA core that associates with a prime editor comprising a DNA binding domain and a DNA polymerase domain,
wherein a first strand of the CFTR gene and a second strand of the CFTR gene are complementary to each other, and wherein the editing target sequence comprises a CTT deletion at positions chr7:117559591-117559594 as compared to a wild type CFTR gene.

38. The PEgRNA of claim 37, wherein the PEgRNA comprises a primer binding site sequence (PBS) that is at least partially complementary to the spacer.

39. The PEgRNA of claim 38, wherein the PBS comprises a sequence selected from the group consisting of SEQ Identifiers: B1377-B1403, B1413-B1520, and B1530-B1565.

40. The PEgRNA of claim 38, wherein the PBS comprises a sequence selected from the group consisting of SEQ ID NOs: 2284-2304, 2312-2395, and 2403-2430.

41. The PEgRNA of claim 38, wherein the PBS comprises a sequence selected from the group consisting of sequences: ATAATCCA, ATAATCCAG, CATAATCC, CATAATCCA, TGGTGCCA, TGGTGCCAG, TATTTTCT, TATTTTCTT, ATATTTTC, ATATTTTCT, GATATTTT, GATATTTTC, ATGAATAT, ATGAATATA, GCGTCATC, GCGTCATCA, TAATCCAG, TAATCCAGG, GTGTTTCC, GTGTTTCCT, TGAATATA, TGAATATAG, GATGAATA, GATGAATAT, ATGGTGCC, ATGGTGCCA, TGTTTCCT, TGTTTCCTA, TCCAGGAA, TCCAGGAAA, ATGATATT, ATGATATTT, TGATATTT, TGATATTTT, TCAAAGCA, TCAAAGCAT, GATGATAT, and GATGATATT.

42. The PEgRNA of claim 37, wherein the editing template comprises a sequence selected from the group consisting of SEQ ID NOs: 8618-8990 and 9002-9440.

43.-82. (canceled)
